United States Patent Application Publication US 2005/0287570 A1 - sequence listing, part 7

SEQ ID NO: 94886 - DNA, 25 bp, Artificial
  Probe
tgcccaccatgattctcattattac

SEQ ID NO: 94887 - DNA, 25 bp, Artificial
  Probe
tttgcccaccatgattctcattatt

SEQ ID NO: 94888 - DNA, 25 bp, Artificial
  Probe
catgattctcattattaccgtagag

SEQ ID NO: 94889 - DNA, 25 bp, Artificial
  Probe
cccaccatgattctcattattaccg

SEQ ID NO: 94890 - DNA, 25 bp, Artificial
  Probe
ctttgcccaccatgattctcattat

SEQ ID NO: 94891 - DNA, 25 bp, Artificial
  Probe
gcccaccatgattctcattattacc

SEQ ID NO: 94892 - DNA, 25 bp, Artificial
  Probe
gaataacattatcttctgtctttgc

SEQ ID NO: 94893 - DNA, 25 bp, Artificial
  Probe
attattaccgtagagggctcagtgc

SEQ ID NO: 94894 - DNA, 25 bp, Artificial
  Probe
gtgtttaatttggaagcgtgtgtgc

SEQ ID NO: 94895 - DNA, 25 bp, Artificial
  Probe
tatcttctgtctttgcccaccatga

SEQ ID NO: 94896 - DNA, 25 bp, Artificial
  Probe
tctttgcccaccatgattctcatta

SEQ ID NO: 94897 - DNA, 25 bp, Artificial
  Probe
tattaccgtagagggctcagtgcta

SEQ ID NO: 94898 - DNA, 25 bp, Artificial
  Probe
tttaaagagattaatgctaacgtca

SEQ ID NO: 94899 - DNA, 25 bp, Artificial
  Probe
cttctgtctttgcccaccatgattc

SEQ ID NO: 94900 - DNA, 25 bp, Artificial
  Probe
ttaaagagattaatgctaacgtcat

SEQ ID NO: 94901 - DNA, 25 bp, Artificial
  Probe
atcttctgtctttgcccaccatgat

SEQ ID NO: 94902 - DNA, 25 bp, Artificial
  Probe
ttctgtctttgcccaccatgattct

SEQ ID NO: 94903 - DNA, 25 bp, Artificial
  Probe
tcttctgtctttgcccaccatgatt

SEQ ID NO: 94904 - DNA, 25 bp, Artificial
  Probe
ttattaccgtagagggctcagtgct

SEQ ID NO: 94905 - DNA, 25 bp, Artificial
  Probe
gtctttgcccaccatgattctcatt

SEQ ID NO: 94906 - DNA, 25 bp, Artificial
  Probe
tctgtctttgcccaccatgattctc

SEQ ID NO: 94907 - DNA, 25 bp, Artificial
  Probe
gcatcatctatctggacatcttcta

SEQ ID NO: 94908 - DNA, 25 bp, Artificial
  Probe
acactataaggacttaacagccatt

SEQ ID NO: 94909 - DNA, 25 bp, Artificial
  Probe
aacactataaggacttaacagccat

SEQ ID NO: 94910 - DNA, 25 bp, Artificial
  Probe
cagatatagaacggttaccactcaa

SEQ ID NO: 94911 - DNA, 25 bp, Artificial
  Probe
gtcagatatagaacggttaccactc

SEQ ID NO: 94912 - DNA, 25 bp, Artificial
  Probe
gacagtcagatatagaacggttacc

SEQ ID NO: 94913 - DNA, 25 bp, Artificial
  Probe
actataaggacttaacagccattct

SEQ ID NO: 94914 - DNA, 25 bp, Artificial
  Probe
cactataaggacttaacagccattc

SEQ ID NO: 94915 - DNA, 25 bp, Artificial
  Probe
ttaatgtgaagataccagagattgc

SEQ ID NO: 94916 - DNA, 25 bp, Artificial
  Probe
tcagatatagaacggttaccactca

SEQ ID NO: 94917 - DNA, 25 bp, Artificial
  Probe
cagtcagatatagaacggttaccac

SEQ ID NO: 94918 - DNA, 25 bp, Artificial
  Probe
acagtcagatatagaacggttacca

SEQ ID NO: 94919 - DNA, 25 bp, Artificial
  Probe
tctatctggacatcttctacatcat

SEQ ID NO: 94920 - DNA, 25 bp, Artificial
  Probe
atctatctggacatcttctacatca

SEQ ID NO: 94921 - DNA, 25 bp, Artificial
  Probe
tcatctatctggacatcttctacat

SEQ ID NO: 94922 - DNA, 25 bp, Artificial
  Probe
atcatctatctggacatcttctaca

SEQ ID NO: 94923 - DNA, 25 bp, Artificial
  Probe
ataaggacttaacagccattcttgc

SEQ ID NO: 94924 - DNA, 25 bp, Artificial
  Probe
agtcagatatagaacggttaccact

SEQ ID NO: 94925 - DNA, 25 bp, Artificial
  Probe
tataaggacttaacagccattcttg

SEQ ID NO: 94926 - DNA, 25 bp, Artificial
  Probe
ctatctggacatcttctacatcatc

SEQ ID NO: 94927 - DNA, 25 bp, Artificial
  Probe
catctatctggacatcttctacatc

SEQ ID NO: 94928 - DNA, 25 bp, Artificial
  Probe
catcatctatctggacatcttctac

SEQ ID NO: 94929 - DNA, 25 bp, Artificial
  Probe
cttctctcattcaattctgtggagg

SEQ ID NO: 94930 - DNA, 25 bp, Artificial
  Probe
ctataaggacttaacagccattctt

SEQ ID NO: 94931 - DNA, 25 bp, Artificial
  Probe
cagacacaagaagtaatggagtgaa

SEQ ID NO: 94932 - DNA, 25 bp, Artificial
  Probe
ttctctcattcaattctgtggaggt

SEQ ID NO: 94933 - DNA, 25 bp, Artificial
  Probe
gcttctctcattcaattctgtggag

SEQ ID NO: 94934 - DNA, 25 bp, Artificial
  Probe
cttggattacatggtcttcttcagc

SEQ ID NO: 94935 - DNA, 25 bp, Artificial
  Probe
gcttggattacatggtcttcttcag

SEQ ID NO: 94936 - DNA, 25 bp, Artificial
  Probe
tgacagtcagatatagaacggttac

SEQ ID NO: 94937 - DNA, 25 bp, Artificial
  Probe
gattacatggtcttcttcagcttca

SEQ ID NO: 94938 - DNA, 25 bp, Artificial
  Probe
tatctggacatcttctacatcatcc

SEQ ID NO: 94939 - DNA, 25 bp, Artificial
  Probe
attacatggtcttcttcagcttcat

SEQ ID NO: 94940 - DNA, 25 bp, Artificial
  Probe
ctctcattcaattctgtggaggtct

SEQ ID NO: 94941 - DNA, 25 bp, Artificial
  Probe
tctctcattcaattctgtggaggtc

SEQ ID NO: 94942 - DNA, 25 bp, Artificial
  Probe
ttacatggtcttcttcagcttcatc

SEQ ID NO: 94943 - DNA, 25 bp, Artificial
  Probe
attcaattctgtggaggtctgacat

SEQ ID NO: 94944 - DNA, 25 bp, Artificial
  Probe
taatgtgaagataccagagattgca

SEQ ID NO: 94945 - DNA, 25 bp, Artificial
  Probe
ctcattcaattctgtggaggtctga

SEQ ID NO: 94946 - DNA, 25 bp, Artificial
  Probe
tctcattcaattctgtggaggtctg

SEQ ID NO: 94947 - DNA, 25 bp, Artificial
  Probe
ggattacatggtcttcttcagcttc

SEQ ID NO: 94948 - DNA, 25 bp, Artificial
  Probe
ctgtttctggttctcttcttgtttg

SEQ ID NO: 94949 - DNA, 25 bp, Artificial
  Probe
gcatcggtaaacactataaggactt

SEQ ID NO: 94950 - DNA, 25 bp, Artificial
  Probe
actgagtagttaccatgacagataa

SEQ ID NO: 94951 - DNA, 25 bp, Artificial
  Probe
tctacatcatccgaaacaaactcag

SEQ ID NO: 94952 - DNA, 25 bp, Artificial
  Probe
aattactgaagaagcagaggcattt

SEQ ID NO: 94953 - DNA, 25 bp, Artificial
  Probe
aaattactgaagaagcagaggcatt

SEQ ID NO: 94954 - DNA, 25 bp, Artificial
  Probe
gaaattactgaagaagcagaggcat

SEQ ID NO: 94955 - DNA, 25 bp, Artificial
  Probe
tttgtcacaagataacacactgaaa

SEQ ID NO: 94956 - DNA, 25 bp, Artificial
  Probe
atccacactcgaaattactgaagaa

SEQ ID NO: 94957 - DNA, 25 bp, Artificial
  Probe
cctatccacactcgaaattactgaa

SEQ ID NO: 94958 - DNA, 25 bp, Artificial
  Probe
tatccacactcgaaattactgaaga

SEQ ID NO: 94959 - DNA, 25 bp, Artificial
  Probe
ctatccacactcgaaattactgaag

SEQ ID NO: 94960 - DNA, 25 bp, Artificial
  Probe
tccacactcgaaattactgaagaag

SEQ ID NO: 94961 - DNA, 25 bp, Artificial
  Probe
cacactcgaaattactgaagaagca

SEQ ID NO: 94962 - DNA, 25 bp, Artificial
  Probe
actcgaaattactgaagaagcagag

SEQ ID NO: 94963 - DNA, 25 bp, Artificial
  Probe
ccacactcgaaattactgaagaagc

SEQ ID NO: 94964 - DNA, 25 bp, Artificial
  Probe
cactcgaaattactgaagaagcaga

SEQ ID NO: 94965 - DNA, 25 bp, Artificial
  Probe
acactcgaaattactgaagaagcag

SEQ ID NO: 94966 - DNA, 25 bp, Artificial
  Probe
ctcgaaattactgaagaagcagagg

SEQ ID NO: 94967 - DNA, 25 bp, Artificial
  Probe
gcctatccacactcgaaattactga

SEQ ID NO: 94968 - DNA, 25 bp, Artificial
  Probe
gtaaaaggagggaagcagtttgttt

SEQ ID NO: 94969 - DNA, 25 bp, Artificial
  Probe
cgaaattactgaagaagcagaggca

SEQ ID NO: 94970 - DNA, 25 bp, Artificial
  Probe
attactgaagaagcagaggcatttt

SEQ ID NO: 94971 - DNA, 25 bp, Artificial
  Probe
gttttgtcacaagataacacactga

SEQ ID NO: 94972 - DNA, 25 bp, Artificial
  Probe
ttgtcacaagataacacactgaaaa

SEQ ID NO: 94973 - DNA, 25 bp, Artificial
  Probe
ttttgtcacaagataacacactgaa

SEQ ID NO: 94974 - DNA, 25 bp, Artificial
  Probe
taaaaggagggaagcagtttgtttt

SEQ ID NO: 94975 - DNA, 25 bp, Artificial
  Probe
gtaaaatggttcttacctctcaagc

SEQ ID NO: 94976 - DNA, 25 bp, Artificial
  Probe
cgtaaaatggttcttacctctcaag

SEQ ID NO: 94977 - DNA, 25 bp, Artificial
  Probe
caaccctctcactttggtatccatg

SEQ ID NO: 94978 - DNA, 25 bp, Artificial
  Probe
tcgaaattactgaagaagcagaggc

SEQ ID NO: 94979 - DNA, 25 bp, Artificial
  Probe
ggtaaaaggagggaagcagtttgtt

SEQ ID NO: 94980 - DNA, 25 bp, Artificial
  Probe
aaaaggagggaagcagtttgttttg

SEQ ID NO: 94981 - DNA, 25 bp, Artificial
  Probe
taaaatggttcttacctctcaagct

SEQ ID NO: 94982 - DNA, 25 bp, Artificial
  Probe
ggcctatccacactcgaaattactg

SEQ ID NO: 94983 - DNA, 25 bp, Artificial
  Probe
ttaagcaaatagaaacaataggaaa

SEQ ID NO: 94984 - DNA, 25 bp, Artificial
  Probe
cttttatgtctgccacattgttttg

SEQ ID NO: 94985 - DNA, 25 bp, Artificial
  Probe
ttttatgtctgccacattgttttgt

SEQ ID NO: 94986 - DNA, 25 bp, Artificial
  Probe
aaatggttcttacctctcaagcttt

SEQ ID NO: 94987 - DNA, 25 bp, Artificial
  Probe
tttatgtctgccacattgttttgtc

SEQ ID NO: 94988 - DNA, 25 bp, Artificial
  Probe
acgtaaaatggttcttacctctcaa

SEQ ID NO: 94989 - DNA, 25 bp, Artificial
  Probe
aacgtaaaatggttcttacctctca

SEQ ID NO: 94990 - DNA, 25 bp, Artificial
  Probe
gcttttatgtctgccacattgtttt

SEQ ID NO: 94991 - DNA, 25 bp, Artificial
  Probe
tcttaagcaaatagaaacaatagga

SEQ ID NO: 94992 - DNA, 25 bp, Artificial
  Probe
ttatgtctgccacattgttttgtca

SEQ ID NO: 94993 - DNA, 25 bp, Artificial
  Probe
tgttttgtcacaagataacacactg

SEQ ID NO: 94994 - DNA, 25 bp, Artificial
  Probe
ttgttttgtcacaagataacacact

SEQ ID NO: 94995 - DNA, 25 bp, Artificial
  Probe
ccacattgttttgtcacaagataac

SEQ ID NO: 94996 - DNA, 25 bp, Artificial
  Probe
gccacattgttttgtcacaagataa

SEQ ID NO: 94997 - DNA, 25 bp, Artificial
  Probe
taaacatcttcttcagggattcagg

SEQ ID NO: 94998 - DNA, 25 bp, Artificial
  Probe
ataaacatcttcttcagggattcag

SEQ ID NO: 94999 - DNA, 25 bp, Artificial
  Probe
ctcaataaacatcttcttcagggat

SEQ ID NO: 95000 - DNA, 25 bp, Artificial
  Probe
tgaccaagcaagtaccacatcatag

SEQ ID NO: 95001 - DNA, 25 bp, Artificial
  Probe
ctgaccaagcaagtaccacatcata

SEQ ID NO: 95002 - DNA, 25 bp, Artificial
  Probe
cagggagagtcagatacttcaagat

SEQ ID NO: 95003 - DNA, 25 bp, Artificial
  Probe
aataaacatcttcttcagggattca

SEQ ID NO: 95004 - DNA, 25 bp, Artificial
  Probe
tcaataaacatcttcttcagggatt

SEQ ID NO: 95005 - DNA, 25 bp, Artificial
  Probe
caataaacatcttcttcagggattc

SEQ ID NO: 95006 - DNA, 25 bp, Artificial
  Probe
agggagagtcagatacttcaagatc

SEQ ID NO: 95007 - DNA, 25 bp, Artificial
  Probe
cctcaataaacatcttcttcaggga

SEQ ID NO: 95008 - DNA, 25 bp, Artificial
  Probe
tgacttccacatcctgaaacaagat

SEQ ID NO: 95009 - DNA, 25 bp, Artificial
  Probe
acctcaataaacatcttcttcaggg

SEQ ID NO: 95010 - DNA, 25 bp, Artificial
  Probe
gagaagttcttcactcacctaaggt

SEQ ID NO: 95011 - DNA, 25 bp, Artificial
  Probe
actacctcaataaacatcttcttca

SEQ ID NO: 95012 - DNA, 25 bp, Artificial
  Probe
aagtaccacatcatagcttgaattc

SEQ ID NO: 95013 - DNA, 25 bp, Artificial
  Probe
cttagcaaattgttctgtgaggcaa

SEQ ID NO: 95014 - DNA, 25 bp, Artificial
  Probe
gaccaagcaagtaccacatcatagc

SEQ ID NO: 95015 - DNA, 25 bp, Artificial
  Probe
ttagcaaattgttctgtgaggcaac

SEQ ID NO: 95016 - DNA, 25 bp, Artificial
  Probe
tacctcaataaacatcttcttcagg

SEQ ID NO: 95017 - DNA, 25 bp, Artificial
  Probe
ctacctcaataaacatcttcttcag

SEQ ID NO: 95018 - DNA, 25 bp, Artificial
  Probe
gtatgagttggaaattgacacgctg

SEQ ID NO: 95019 - DNA, 25 bp, Artificial
  Probe
atctaggcttgactcagggaagtaa

SEQ ID NO: 95020 - DNA, 25 bp, Artificial
  Probe
aaacatcttcttcagggattcaggc

SEQ ID NO: 95021 - DNA, 25 bp, Artificial
  Probe
gacatagccaccactgaagtagagg

SEQ ID NO: 95022 - DNA, 25 bp, Artificial
  Probe
ggacatagccaccactgaagtagag

SEQ ID NO: 95023 - DNA, 25 bp, Artificial
  Probe
ccagggagagtcagatacttcaaga

SEQ ID NO: 95024 - DNA, 25 bp, Artificial
  Probe
caagtaccacatcatagcttgaatt

SEQ ID NO: 95025 - DNA, 25 bp, Artificial
  Probe
tgtatgagttggaaattgacacgct

SEQ ID NO: 95026 - DNA, 25 bp, Artificial
  Probe
aggacatagccaccactgaagtaga

SEQ ID NO: 95027 - DNA, 25 bp, Artificial
  Probe
gatctaggcttgactcagggaagta

SEQ ID NO: 95028 - DNA, 25 bp, Artificial
  Probe
gagtcagatacttcaagatctaggc

SEQ ID NO: 95029 - DNA, 25 bp, Artificial
  Probe
agtcagatacttcaagatctaggct

SEQ ID NO: 95030 - DNA, 25 bp, Artificial
  Probe
tctaggcttgactcagggaagtaag

SEQ ID NO: 95031 - DNA, 25 bp, Artificial
  Probe
gtcagatacttcaagatctaggctt

SEQ ID NO: 95032 - DNA, 25 bp, Artificial
  Probe
gatcttgaatcagattgacaaagtc

SEQ ID NO: 95033 - DNA, 25 bp, Artificial
  Probe
tatgagttggaaattgacacgctgg

SEQ ID NO: 95034 - DNA, 25 bp, Artificial
  Probe
actgaccaagcaagtaccacatcat

SEQ ID NO: 95035 - DNA, 25 bp, Artificial
  Probe
gcaagtaccacatcatagcttgaat

SEQ ID NO: 95036 - DNA, 25 bp, Artificial
  Probe
gtgacttccacatcctgaaacaaga

SEQ ID NO: 95037 - DNA, 25 bp, Artificial
  Probe
ggcagatcttgaatcagattgacaa

SEQ ID NO: 95038 - DNA, 25 bp, Artificial
  Probe
gaaacagagcatgtagctttgatag

SEQ ID NO: 95039 - DNA, 25 bp, Artificial
  Probe
agagtcagatacttcaagatctagg

SEQ ID NO: 95040 - DNA, 25 bp, Artificial
  Probe
ggagagtcagatacttcaagatcta

SEQ ID NO: 95041 - DNA, 25 bp, Artificial
  Probe
caggacatagccaccactgaagtag

SEQ ID NO: 95042 - DNA, 25 bp, Artificial
  Probe
gcacaagtcattctctacatagcat

SEQ ID NO: 95043 - DNA, 25 bp, Artificial
  Probe
ttatgtatgagagtagagcgattct

SEQ ID NO: 95044 - DNA, 25 bp, Artificial
  Probe
gaggcacaagtcattctctacatag

SEQ ID NO: 95045 - DNA, 25 bp, Artificial
  Probe
cacaagtcattctctacatagcatg

SEQ ID NO: 95046 - DNA, 25 bp, Artificial
  Probe
tgaggcacaagtcattctctacata

SEQ ID NO: 95047 - DNA, 25 bp, Artificial
  Probe
aggcacaagtcattctctacatagc

SEQ ID NO: 95048 - DNA, 25 bp, Artificial
  Probe
ttgaggcacaagtcattctctacat

SEQ ID NO: 95049 - DNA, 25 bp, Artificial
  Probe
ggcacaagtcattctctacatagca

SEQ ID NO: 95050 - DNA, 25 bp, Artificial
  Probe
atgtatgagagtagagcgattctaa

SEQ ID NO: 95051 - DNA, 25 bp, Artificial
  Probe
tgatgctaacagagaaataagaggg

SEQ ID NO: 95052 - DNA, 25 bp, Artificial
  Probe
gactatacaagggtgagaaaggatg

SEQ ID NO: 95053 - DNA, 25 bp, Artificial
  Probe
tgactatacaagggtgagaaaggat

SEQ ID NO: 95054 - DNA, 25 bp, Artificial
  Probe
atgactatacaagggtgagaaagga

SEQ ID NO: 95055 - DNA, 25 bp, Artificial
  Probe
tatacaagggtgagaaaggatgcta

SEQ ID NO: 95056 - DNA, 25 bp, Artificial
  Probe
tatgactatacaagggtgagaaagg

SEQ ID NO: 95057 - DNA, 25 bp, Artificial
  Probe
cacctttgatgctaacagagaaata

SEQ ID NO: 95058 - DNA, 25 bp, Artificial
  Probe
gaaggaactgtctgatgttaaatgg

SEQ ID NO: 95059 - DNA, 25 bp, Artificial
  Probe
ccacctttgatgctaacagagaaat

SEQ ID NO: 95060 - DNA, 25 bp, Artificial
  Probe
ttgatgctaacagagaaataagagg

SEQ ID NO: 95061 - DNA, 25 bp, Artificial
  Probe
tatgtatgagagtagagcgattcta

SEQ ID NO: 95062 - DNA, 25 bp, Artificial
  Probe
tgtcccattggcatcatctttattt

SEQ ID NO: 95063 - DNA, 25 bp, Artificial
  Probe
acctttgatgctaacagagaaataa

SEQ ID NO: 95064 - DNA, 25 bp, Artificial
  Probe
ctatacaagggtgagaaaggatgct

SEQ ID NO: 95065 - DNA, 25 bp, Artificial
  Probe
tctaaagagtcacatgagtacaacg

SEQ ID NO: 95066 - DNA, 25 bp, Artificial
  Probe
gcgattctaaagagtcacatgagta

SEQ ID NO: 95067 - DNA, 25 bp, Artificial
  Probe
tttatgtatgagagtagagcgattc

SEQ ID NO: 95068 - DNA, 25 bp, Artificial
  Probe
aaggaactgtctgatgttaaatggc

SEQ ID NO: 95069 - DNA, 25 bp, Artificial
  Probe
gtgtcccattggcatcatctttatt

SEQ ID NO: 95070 - DNA, 25 bp, Artificial
  Probe
aaaggatgctaggtttcatggataa

SEQ ID NO: 95071 - DNA, 25 bp, Artificial
  Probe
actatacaagggtgagaaaggatgc

SEQ ID NO: 95072 - DNA, 25 bp, Artificial
  Probe
aaggatgctaggtttcatggataag

SEQ ID NO: 95073 - DNA, 25 bp, Artificial
  Probe
cgattctaaagagtcacatgagtac

SEQ ID NO: 95074 - DNA, 25 bp, Artificial
  Probe
atacaagggtgagaaaggatgctag

SEQ ID NO: 95075 - DNA, 25 bp, Artificial
  Probe
cctttgatgctaacagagaaataag

SEQ ID NO: 95076 - DNA, 25 bp, Artificial
  Probe
gagcgattctaaagagtcacatgag

SEQ ID NO: 95077 - DNA, 25 bp, Artificial
  Probe
tggtatgactatacaagggtgagaa

SEQ ID NO: 95078 - DNA, 25 bp, Artificial
  Probe
ggtatgactatacaagggtgagaaa

SEQ ID NO: 95079 - DNA, 25 bp, Artificial
  Probe
ttctaaagagtcacatgagtacaac

SEQ ID NO: 95080 - DNA, 25 bp, Artificial
  Probe
cattctctacatagcatgtgtacct

SEQ ID NO: 95081 - DNA, 25 bp, Artificial
  Probe
tcattctctacatagcatgtgtacc

SEQ ID NO: 95082 - DNA, 25 bp, Artificial
  Probe
aagtcattctctacatagcatgtgt

SEQ ID NO: 95083 - DNA, 25 bp, Artificial
  Probe
acaagtcattctctacatagcatgt

SEQ ID NO: 95084 - DNA, 25 bp, Artificial
  Probe
attctctacatagcatgtgtacctc

SEQ ID NO: 95085 - DNA, 25 bp, Artificial
  Probe
caagtcattctctacatagcatgtg

SEQ ID NO: 95086 - DNA, 25 bp, Artificial
  Probe
gtagagcgattctaaagagtcacat

SEQ ID NO: 95087 - DNA, 25 bp, Artificial
  Probe
ctgtggataccaacctcattgaatt

SEQ ID NO: 95088 - DNA, 25 bp, Artificial
  Probe
aaagcaaggagtgaatgtagagaaa

SEQ ID NO: 95089 - DNA, 25 bp, Artificial
  Probe
gaaagcaaggagtgaatgtagagaa

SEQ ID NO: 95090 - DNA, 25 bp, Artificial
  Probe
ctgaaagcaaggagtgaatgtagag

SEQ ID NO: 95091 - DNA, 25 bp, Artificial
  Probe
tgaaagcaaggagtgaatgtagaga

SEQ ID NO: 95092 - DNA, 25 bp, Artificial
  Probe
tatcatcagaaaggtacagtttgct

SEQ ID NO: 95093 - DNA, 25 bp, Artificial
  Probe
aattcgataccaactatgccacaga

SEQ ID NO: 95094 - DNA, 25 bp, Artificial
  Probe
ttatcatcagaaaggtacagtttgc

SEQ ID NO: 95095 - DNA, 25 bp, Artificial
  Probe
atcatcagaaaggtacagtttgctc

SEQ ID NO: 95096 - DNA, 25 bp, Artificial
  Probe
ggcttatcatcagaaaggtacagtt

SEQ ID NO: 95097 - DNA, 25 bp, Artificial
  Probe
gcttatcatcagaaaggtacagttt

SEQ ID NO: 95098 - DNA, 25 bp, Artificial
  Probe
caagaccgtcaagaagatcagagtg

SEQ ID NO: 95099 - DNA, 25 bp, Artificial
  Probe
tgagcatagggaagaaataaacctt

SEQ ID NO: 95100 - DNA, 25 bp, Artificial
  Probe
acctcattgaattcgataccaacta

SEQ ID NO: 95101 - DNA, 25 bp, Artificial
  Probe
cctgtggataccaacctcattgaat

SEQ ID NO: 95102 - DNA, 25 bp, Artificial
  Probe
cattgaattcgataccaactatgcc

SEQ ID NO: 95103 - DNA, 25 bp, Artificial
  Probe
tcattgaattcgataccaactatgc

SEQ ID NO: 95104 - DNA, 25 bp, Artificial
  Probe
aacctcattgaattcgataccaact

SEQ ID NO: 95105 - DNA, 25 bp, Artificial
  Probe
caacctcattgaattcgataccaac

SEQ ID NO: 95106 - DNA, 25 bp, Artificial
  Probe
attgaattcgataccaactatgcca

SEQ ID NO: 95107 - DNA, 25 bp, Artificial
  Probe
taccaacctcattgaattcgatacc

SEQ ID NO: 95108 - DNA, 25 bp, Artificial
  Probe
attcgataccaactatgccacagac

SEQ ID NO: 95109 - DNA, 25 bp, Artificial
  Probe
aatcctagtatcctacagggtcaag

SEQ ID NO: 95110 - DNA, 25 bp, Artificial
  Probe
actgaaagcaaggagtgaatgtaga

SEQ ID NO: 95111 - DNA, 25 bp, Artificial
  Probe
gagcatagggaagaaataaaccttt

SEQ ID NO: 95112 - DNA, 25 bp, Artificial
  Probe
gaatcctagtatcctacagggtcaa

SEQ ID NO: 95113 - DNA, 25 bp, Artificial
  Probe
ggataccaacctcattgaattcgat

SEQ ID NO: 95114 - DNA, 25 bp, Artificial
  Probe
ataccaacctcattgaattcgatac

SEQ ID NO: 95115 - DNA, 25 bp, Artificial
  Probe
aagaccgtcaagaagatcagagtgt

SEQ ID NO: 95116 - DNA, 25 bp, Artificial
  Probe
cctcattgaattcgataccaactat

SEQ ID NO: 95117 - DNA, 25 bp, Artificial
  Probe
ccaacctcattgaattcgataccaa

SEQ ID NO: 95118 - DNA, 25 bp, Artificial
  Probe
gataccaacctcattgaattcgata

SEQ ID NO: 95119 - DNA, 25 bp, Artificial
  Probe
gaattcgataccaactatgccacag

SEQ ID NO: 95120 - DNA, 25 bp, Artificial
  Probe
ttgaattcgataccaactatgccac

SEQ ID NO: 95121 - DNA, 25 bp, Artificial
  Probe
cttatcatcagaaaggtacagtttg

SEQ ID NO: 95122 - DNA, 25 bp, Artificial
  Probe
ctcgttgaaagtgggcattaatctt

SEQ ID NO: 95123 - DNA, 25 bp, Artificial
  Probe
tagtatcctacagggtcaaggtgaa

SEQ ID NO: 95124 - DNA, 25 bp, Artificial
  Probe
cggcttatcatcagaaaggtacagt

SEQ ID NO: 95125 - DNA, 25 bp, Artificial
  Probe
ggatgaaggatgacgactgtgatga

SEQ ID NO: 95126 - DNA, 25 bp, Artificial
  Probe
tgaattcgataccaactatgccaca

SEQ ID NO: 95127 - DNA, 25 bp, Artificial
  Probe
cttgaacaagatgaccaggtgtctc

SEQ ID NO: 95128 - DNA, 25 bp, Artificial
  Probe
ctcattgaattcgataccaactatg

SEQ ID NO: 95129 - DNA, 25 bp, Artificial
  Probe
tcatcagaaaggtacagtttgctcc

SEQ ID NO: 95130 - DNA, 25 bp, Artificial
  Probe
atcctagtatcctacagggtcaagg

SEQ ID NO: 95131 - DNA, 25 bp, Artificial
  Probe
accaacctcattgaattcgatacca

SEQ ID NO: 95132 - DNA, 25 bp, Artificial
  Probe
gtgttcaatccagactcagtagtat

SEQ ID NO: 95133 - DNA, 25 bp, Artificial
  Probe
atggagtgagaacattcatcattga

SEQ ID NO: 95134 - DNA, 25 bp, Artificial
  Probe
agtgttcaatccagactcagtagta

SEQ ID NO: 95135 - DNA, 25 bp, Artificial
  Probe
tgttcaatccagactcagtagtata

SEQ ID NO: 95136 - DNA, 25 bp, Artificial
  Probe
tcagtgttcaatccagactcagtag

SEQ ID NO: 95137 - DNA, 25 bp, Artificial
  Probe
ctcagtgttcaatccagactcagta

SEQ ID NO: 95138 - DNA, 25 bp, Artificial
  Probe
gaagaatgagaagcagcatctgatt

SEQ ID NO: 95139 - DNA, 25 bp, Artificial
  Probe
cagtgttcaatccagactcagtagt

SEQ ID NO: 95140 - DNA, 25 bp, Artificial
  Probe
aatcctcagtgttcaatccagactc

SEQ ID NO: 95141 - DNA, 25 bp, Artificial
  Probe
tccagactcagtagtatattacagt

SEQ ID NO: 95142 - DNA, 25 bp, Artificial
  Probe
ggtgttgtgctatttagatgtttgt

SEQ ID NO: 95143 - DNA, 25 bp, Artificial
  Probe
tggtgttgtgctatttagatgtttg

SEQ ID NO: 95144 - DNA, 25 bp, Artificial
  Probe
ctggtgttgtgctatttagatgttt

SEQ ID NO: 95145 - DNA, 25 bp, Artificial
  Probe
aactatgctgttctgtcctagactg

SEQ ID NO: 95146 - DNA, 25 bp, Artificial
  Probe
gtattcctagcctgtcaacgtaata

SEQ ID NO: 95147 - DNA, 25 bp, Artificial
  Probe
gtgttgtgctatttagatgtttgtc

SEQ ID NO: 95148 - DNA, 25 bp, Artificial
  Probe
gttcaatccagactcagtagtatat

SEQ ID NO: 95149 - DNA, 25 bp, Artificial
  Probe
tattcctagcctgtcaacgtaataa

SEQ ID NO: 95150 - DNA, 25 bp, Artificial
  Probe
tgtgctatttagatgtttgtcttgc

SEQ ID NO: 95151 - DNA, 25 bp, Artificial
  Probe
agtattcctagcctgtcaacgtaat

SEQ ID NO: 95152 - DNA, 25 bp, Artificial
  Probe
cctggtgttgtgctatttagatgtt

SEQ ID NO: 95153 - DNA, 25 bp, Artificial
  Probe
tgaagaatgagaagcagcatctgat

SEQ ID NO: 95154 - DNA, 25 bp, Artificial
  Probe
ctatgctgttctgtcctagactgac

SEQ ID NO: 95155 - DNA, 25 bp, Artificial
  Probe
tgttgtgctatttagatgtttgtct

SEQ ID NO: 95156 - DNA, 25 bp, Artificial
  Probe
ccagactcagtagtatattacagtt

SEQ ID NO: 95157 - DNA, 25 bp, Artificial
  Probe
tatgctgttctgtcctagactgact

SEQ ID NO: 95158 - DNA, 25 bp, Artificial
  Probe
actatgctgttctgtcctagactga

SEQ ID NO: 95159 - DNA, 25 bp, Artificial
  Probe
tagggaagatggagtgagaacattc

SEQ ID NO: 95160 - DNA, 25 bp, Artificial
  Probe
gaaatcctcagtgttcaatccagac

SEQ ID NO: 95161 - DNA, 25 bp, Artificial
  Probe
ttatttatcccagtattcctagcct

SEQ ID NO: 95162 - DNA, 25 bp, Artificial
  Probe
cttggctacaaactgttacaatgtc

SEQ ID NO: 95163 - DNA, 25 bp, Artificial
  Probe
atcctcagtgttcaatccagactca

SEQ ID NO: 95164 - DNA, 25 bp, Artificial
  Probe
ctgaagaatgagaagcagcatctga

SEQ ID NO: 95165 - DNA, 25 bp, Artificial
  Probe
gaatgagaagcagcatctgatttac

SEQ ID NO: 95166 - DNA, 25 bp, Artificial
  Probe
agaatgagaagcagcatctgattta

SEQ ID NO: 95167 - DNA, 25 bp, Artificial
  Probe
cttatttatcccagtattcctagcc

SEQ ID NO: 95168 - DNA, 25 bp, Artificial
  Probe
ctagggaagatggagtgagaacatt

SEQ ID NO: 95169 - DNA, 25 bp, Artificial
  Probe
atgagaagcagcatctgatttacat

SEQ ID NO: 95170 - DNA, 25 bp, Artificial
  Probe
ttggctacaaactgttacaatgtca

SEQ ID NO: 95171 - DNA, 25 bp, Artificial
  Probe
gaacattcatcattgaagttgtcca

SEQ ID NO: 95172 - DNA, 25 bp, Artificial
  Probe
agaacattcatcattgaagttgtcc

SEQ ID NO: 95173 - DNA, 25 bp, Artificial
  Probe
ggagtgagaacattcatcattgaag

SEQ ID NO: 95174 - DNA, 25 bp, Artificial
  Probe
aatgagaagcagcatctgatttaca

SEQ ID NO: 95175 - DNA, 25 bp, Artificial
  Probe
ttgtgctatttagatgtttgtcttg

SEQ ID NO: 95176 - DNA, 25 bp, Artificial
  Probe
gttgtgctatttagatgtttgtctt

SEQ ID NO: 95177 - DNA, 25 bp, Artificial
  Probe
aatcatagtgagttgtccagacatg

SEQ ID NO: 95178 - DNA, 25 bp, Artificial
  Probe
gtccagacatggtcagtagattatt

SEQ ID NO: 95179 - DNA, 25 bp, Artificial
  Probe
ccagacatggtcagtagattattct

SEQ ID NO: 95180 - DNA, 25 bp, Artificial
  Probe
tccagacatggtcagtagattattc

SEQ ID NO: 95181 - DNA, 25 bp, Artificial
  Probe
tgtccagacatggtcagtagattat

SEQ ID NO: 95182 - DNA, 25 bp, Artificial
  Probe
cagacatggtcagtagattattctt

SEQ ID NO: 95183 - DNA, 25 bp, Artificial
  Probe
ttgtccagacatggtcagtagatta

SEQ ID NO: 95184 - DNA, 25 bp, Artificial
  Probe
tgtcaacactcaataaagagcacta

SEQ ID NO: 95185 - DNA, 25 bp, Artificial
  Probe
gtcaacactcaataaagagcactaa

SEQ ID NO: 95186 - DNA, 25 bp, Artificial
  Probe
ggtcagtagattattctttctggca

SEQ ID NO: 95187 - DNA, 25 bp, Artificial
  Probe
tggtcagtagattattctttctggc

SEQ ID NO: 95188 - DNA, 25 bp, Artificial
  Probe
tcaacactcaataaagagcactaaa

SEQ ID NO: 95189 - DNA, 25 bp, Artificial
  Probe
atcatagtgagttgtccagacatgg

SEQ ID NO: 95190 - DNA, 25 bp, Artificial
  Probe
gttgtccagacatggtcagtagatt

SEQ ID NO: 95191 - DNA, 25 bp, Artificial
  Probe
atggtcagtagattattctttctgg

SEQ ID NO: 95192 - DNA, 25 bp, Artificial
  Probe
catagtgagttgtccagacatggtc

SEQ ID NO: 95193 - DNA, 25 bp, Artificial
  Probe
agttgtccagacatggtcagtagat

SEQ ID NO: 95194 - DNA, 25 bp, Artificial
  Probe
acatggtcagtagattattctttct

SEQ ID NO: 95195 - DNA, 25 bp, Artificial
  Probe
gtgtcaacactcaataaagagcact

SEQ ID NO: 95196 - DNA, 25 bp, Artificial
  Probe
atagtgagttgtccagacatggtca

SEQ ID NO: 95197 - DNA, 25 bp, Artificial
  Probe
tcatagtgagttgtccagacatggt

SEQ ID NO: 95198 - DNA, 25 bp, Artificial
  Probe
agacatggtcagtagattattcttt

SEQ ID NO: 95199 - DNA, 25 bp, Artificial
  Probe
gagttgtccagacatggtcagtaga

SEQ ID NO: 95200 - DNA, 25 bp, Artificial
  Probe
catggtcagtagattattctttctg

SEQ ID NO: 95201 - DNA, 25 bp, Artificial
  Probe
gacatggtcagtagattattctttc

SEQ ID NO: 95202 - DNA, 25 bp, Artificial
  Probe
tgagttgtccagacatggtcagtag

SEQ ID NO: 95203 - DNA, 25 bp, Artificial
  Probe
tagtgagttgtccagacatggtcag

SEQ ID NO: 95204 - DNA, 25 bp, Artificial
  Probe
actcaataaagagcactaaaatcct

SEQ ID NO: 95205 - DNA, 25 bp, Artificial
  Probe
cactcaataaagagcactaaaatcc

SEQ ID NO: 95206 - DNA, 25 bp, Artificial
  Probe
gtgagttgtccagacatggtcagta

SEQ ID NO: 95207 - DNA, 25 bp, Artificial
  Probe
caacactcaataaagagcactaaaa

SEQ ID NO: 95208 - DNA, 25 bp, Artificial
  Probe
ttccaaaatatgtaaggctttcaat

SEQ ID NO: 95209 - DNA, 25 bp, Artificial
  Probe
attccaaaatatgtaaggctttcaa

SEQ ID NO: 95210 - DNA, 25 bp, Artificial
  Probe
tccaaaatatgtaaggctttcaatt

SEQ ID NO: 95211 - DNA, 25 bp, Artificial
  Probe
aattccaaaatatgtaaggctttca

SEQ ID NO: 95212 - DNA, 25 bp, Artificial
  Probe
acactcaataaagagcactaaaatc

SEQ ID NO: 95213 - DNA, 25 bp, Artificial
  Probe
tccatatacaaattttccatctcga

SEQ ID NO: 95214 - DNA, 25 bp, Artificial
  Probe
aacactcaataaagagcactaaaat

SEQ ID NO: 95215 - DNA, 25 bp, Artificial
  Probe
ttccatatacaaattttccatctcg

SEQ ID NO: 95216 - DNA, 25 bp, Artificial
  Probe
ccaaaatatgtaaggctttcaattt

SEQ ID NO: 95217 - DNA, 25 bp, Artificial
  Probe
atgctccagtgtcaacactcaataa

SEQ ID NO: 95218 - DNA, 25 bp, Artificial
  Probe
ttccatctcgagtggttactacaac

SEQ ID NO: 95219 - DNA, 25 bp, Artificial
  Probe
tccagtgtcaacactcaataaagag

SEQ ID NO: 95220 - DNA, 25 bp, Artificial
  Probe
ctccagtgtcaacactcaataaaga

SEQ ID NO: 95221 - DNA, 25 bp, Artificial
  Probe
catgctccagtgtcaacactcaata

SEQ ID NO: 95222 - DNA, 25 bp, Artificial
  Probe
catttggtcctgcttgaaataacaa

SEQ ID NO: 95223 - DNA, 25 bp, Artificial
  Probe
gacatttggtcctgcttgaaataac

SEQ ID NO: 95224 - DNA, 25 bp, Artificial
  Probe
acatttggtcctgcttgaaataaca

SEQ ID NO: 95225 - DNA, 25 bp, Artificial
  Probe
tgacatttggtcctgcttgaaataa

SEQ ID NO: 95226 - DNA, 25 bp, Artificial
  Probe
ctgacatttggtcctgcttgaaata

SEQ ID NO: 95227 - DNA, 25 bp, Artificial
  Probe
cttgggactgtgaaatattgcatga

SEQ ID NO: 95228 - DNA, 25 bp, Artificial
  Probe
ggactgtgaaatattgcatgacatt

SEQ ID NO: 95229 - DNA, 25 bp, Artificial
  Probe
ttgggactgtgaaatattgcatgac

SEQ ID NO: 95230 - DNA, 25 bp, Artificial
  Probe
atttggtcctgcttgaaataacaaa

SEQ ID NO: 95231 - DNA, 25 bp, Artificial
  Probe
ttggtcctgcttgaaataacaaaag

SEQ ID NO: 95232 - DNA, 25 bp, Artificial
  Probe
gggactgtgaaatattgcatgacat

SEQ ID NO: 95233 - DNA, 25 bp, Artificial
  Probe
gactgtgaaatattgcatgacatta

SEQ ID NO: 95234 - DNA, 25 bp, Artificial
  Probe
gcttgggactgtgaaatattgcatg

SEQ ID NO: 95235 - DNA, 25 bp, Artificial
  Probe
actgtgaaatattgcatgacattaa

SEQ ID NO: 95236 - DNA, 25 bp, Artificial
  Probe
tgggactgtgaaatattgcatgaca

SEQ ID NO: 95237 - DNA, 25 bp, Artificial
  Probe
cctgacatttggtcctgcttgaaat

SEQ ID NO: 95238 - DNA, 25 bp, Artificial
  Probe
gcagagttcaactacaagaaaataa

SEQ ID NO: 95239 - DNA, 25 bp, Artificial
  Probe
gtgggcttgggactgtgaaatattg

SEQ ID NO: 95240 - DNA, 25 bp, Artificial
  Probe
ctgtgaaatattgcatgacattaaa

SEQ ID NO: 95241 - DNA, 25 bp, Artificial
  Probe
ggcttgggactgtgaaatattgcat

SEQ ID NO: 95242 - DNA, 25 bp, Artificial
  Probe
tgcagagttcaactacaagaaaata

SEQ ID NO: 95243 - DNA, 25 bp, Artificial
  Probe
tttggtcctgcttgaaataacaaaa

SEQ ID NO: 95244 - DNA, 25 bp, Artificial
  Probe
tgagttttatcatctcgattgaatc

SEQ ID NO: 95245 - DNA, 25 bp, Artificial
  Probe
cagagttcaactacaagaaaataac

SEQ ID NO: 95246 - DNA, 25 bp, Artificial
  Probe
gagttttatcatctcgattgaatct

SEQ ID NO: 95247 - DNA, 25 bp, Artificial
  Probe
agttttatcatctcgattgaatctt

SEQ ID NO: 95248 - DNA, 25 bp, Artificial
  Probe
gttttatcatctcgattgaatcttt

SEQ ID NO: 95249 - DNA, 25 bp, Artificial
  Probe
tgtgaaatattgcatgacattaaaa

SEQ ID NO: 95250 - DNA, 25 bp, Artificial
  Probe
ttttatcatctcgattgaatctttc

SEQ ID NO: 95251 - DNA, 25 bp, Artificial
  Probe
atgagttttatcatctcgattgaat

SEQ ID NO: 95252 - DNA, 25 bp, Artificial
  Probe
gagtatgctgccaagattatcaaca

SEQ ID NO: 95253 - DNA, 25 bp, Artificial
  Probe
gtcatcctgtatatcttgctggttg

SEQ ID NO: 95254 - DNA, 25 bp, Artificial
  Probe
agtatgctgccaagattatcaacac

SEQ ID NO: 95255 - DNA, 25 bp, Artificial
  Probe
tgccaagattatcaacaccaagaag

SEQ ID NO: 95256 - DNA, 25 bp, Artificial
  Probe
ctgccaagattatcaacaccaagaa

SEQ ID NO: 95257 - DNA, 25 bp, Artificial
  Probe
ggagtatgctgccaagattatcaac

SEQ ID NO: 95258 - DNA, 25 bp, Artificial
  Probe
aggagtatgctgccaagattatcaa

SEQ ID NO: 95259 - DNA, 25 bp, Artificial
  Probe
tcatcctgtatatcttgctggttgg

SEQ ID NO: 95260 - DNA, 25 bp, Artificial
  Probe
gtatgctgccaagattatcaacacc

SEQ ID NO: 95261 - DNA, 25 bp, Artificial
  Probe
cgtcatcctgtatatcttgctggtt

SEQ ID NO: 95262 - DNA, 25 bp, Artificial
  Probe
tatgctgccaagattatcaacacca

SEQ ID NO: 95263 - DNA, 25 bp, Artificial
  Probe
gccaagattatcaacaccaagaagc

SEQ ID NO: 95264 - DNA, 25 bp, Artificial
  Probe
aagaagaatgatggcgtgaaggaat

SEQ ID NO: 95265 - DNA, 25 bp, Artificial
  Probe
ccaagattatcaacaccaagaagct

SEQ ID NO: 95266 - DNA, 25 bp, Artificial
  Probe
gagtggaggaaacaagaagaatgat

SEQ ID NO: 95267 - DNA, 25 bp, Artificial
  Probe
gaagagtggaggaaacaagaagaat

SEQ ID NO: 95268 - DNA, 25 bp, Artificial
  Probe
ctgtatatcttgctggttgggtatc

SEQ ID NO: 95269 - DNA, 25 bp, Artificial
  Probe
aagagtggaggaaacaagaagaatg

SEQ ID NO: 95270 - DNA, 25 bp, Artificial
  Probe
gagactttgaatcctacacgaagat

SEQ ID NO: 95271 - DNA, 25 bp, Artificial
  Probe
agtggaggaaacaagaagaatgatg

SEQ ID NO: 95272 - DNA, 25 bp, Artificial
  Probe
agactttgaatcctacacgaagatg

SEQ ID NO: 95273 - DNA, 25 bp, Artificial
  Probe
ctgtggcgtcatcctgtatatcttg

SEQ ID NO: 95274 - DNA, 25 bp, Artificial
  Probe
agaagaatgatggcgtgaaggaatc

SEQ ID NO: 95275 - DNA, 25 bp, Artificial
  Probe
caggagtatgctgccaagattatca

SEQ ID NO: 95276 - DNA, 25 bp, Artificial
  Probe
atgctgccaagattatcaacaccaa

SEQ ID NO: 95277 - DNA, 25 bp, Artificial
  Probe
ggaaattatcaaagtgacagagcag

SEQ ID NO: 95278 - DNA, 25 bp, Artificial
  Probe
caggaaattatcaaagtgacagagc

SEQ ID NO: 95279 - DNA, 25 bp, Artificial
  Probe
agagtggaggaaacaagaagaatga

SEQ ID NO: 95280 - DNA, 25 bp, Artificial
  Probe
aggaaattatcaaagtgacagagca

SEQ ID NO: 95281 - DNA, 25 bp, Artificial
  Probe
gcaaacaggaaattatcaaagtgac

SEQ ID NO: 95282 - DNA, 25 bp, Artificial
  Probe
cgcaaacaggaaattatcaaagtga

SEQ ID NO: 95283 - DNA, 25 bp, Artificial
  Probe
gaaattatcaaagtgacagagcagc

SEQ ID NO: 95284 - DNA, 25 bp, Artificial
  Probe
gtggaggaaacaagaagaatgatgg

SEQ ID NO: 95285 - DNA, 25 bp, Artificial
  Probe
acaggaaattatcaaagtgacagag

SEQ ID NO: 95286 - DNA, 25 bp, Artificial
  Probe
tgtatatcttgctggttgggtatcc

SEQ ID NO: 95287 - DNA, 25 bp, Artificial
  Probe
cctgtatatcttgctggttgggtat

SEQ ID NO: 95288 - DNA, 25 bp, Artificial
  Probe
gactttgaatcctacacgaagatgt

SEQ ID NO: 95289 - DNA, 25 bp, Artificial
  Probe
aacaggaaattatcaaagtgacaga

SEQ ID NO: 95290 - DNA, 25 bp, Artificial
  Probe
caagaagaatgatggcgtgaaggaa

SEQ ID NO: 95291 - DNA, 25 bp, Artificial
  Probe
gctgccaagattatcaacaccaaga

SEQ ID NO: 95292 - DNA, 25 bp, Artificial
  Probe
ctaccttatcttcgatctggtcact

SEQ ID NO: 95293 - DNA, 25 bp, Artificial
  Probe
aaacaagaagaatgatggcgtgaag

SEQ ID NO: 95294 - DNA, 25 bp, Artificial
  Probe
gaaacaagaagaatgatggcgtgaa

SEQ ID NO: 95295 - DNA, 25 bp, Artificial
  Probe
ggaagagtggaggaaacaagaagaa

SEQ ID NO: 95296 - DNA, 25 bp, Artificial
  Probe
caaacaggaaattatcaaagtgaca

SEQ ID NO: 95297 - DNA, 25 bp, Artificial
  Probe
ctgactctcttctcactggaactac

SEQ ID NO: 95298 - DNA, 25 bp, Artificial
  Probe
actgactctcttctcactggaacta

SEQ ID NO: 95299 - DNA, 25 bp, Artificial
  Probe
accagcttacgtgaatagttgttat

SEQ ID NO: 95300 - DNA, 25 bp, Artificial
  Probe
gaccagcttacgtgaatagttgtta

SEQ ID NO: 95301 - DNA, 25 bp, Artificial
  Probe
ccagcttacgtgaatagttgttatt

SEQ ID NO: 95302 - DNA, 25 bp, Artificial
  Probe
aggactgaataggtttaccatacac

SEQ ID NO: 95303 - DNA, 25 bp, Artificial
  Probe
ctgaaaggactgaataggtttacca

SEQ ID NO: 95304 - DNA, 25 bp, Artificial
  Probe
tgaaaggactgaataggtttaccat

SEQ ID NO: 95305 - DNA, 25 bp, Artificial
  Probe
aaggactgaataggtttaccataca

SEQ ID NO: 95306 - DNA, 25 bp, Artificial
  Probe
ttcactgactctcttctcactggaa

SEQ ID NO: 95307 - DNA, 25 bp, Artificial
  Probe
tgactctcttctcactggaactacc

SEQ ID NO: 95308 - DNA, 25 bp, Artificial
  Probe
aaaggactgaataggtttaccatac

SEQ ID NO: 95309 - DNA, 25 bp, Artificial
  Probe
ctctcttctcactggaactaccaac

SEQ ID NO: 95310 - DNA, 25 bp, Artificial
  Probe
agaccagcttacgtgaatagttgtt

SEQ ID NO: 95311 - DNA, 25 bp, Artificial
  Probe
actctcttctcactggaactaccaa

SEQ ID NO: 95312 - DNA, 25 bp, Artificial
  Probe
atctaagaatggattccctgaaagg

SEQ ID NO: 95313 - DNA, 25 bp, Artificial
  Probe
gaaaggactgaataggtttaccata

SEQ ID NO: 95314 - DNA, 25 bp, Artificial
  Probe
ccctgaaaggactgaataggtttac

SEQ ID NO: 95315 - DNA, 25 bp, Artificial
  Probe
ctaaaggtcaagatagacggtgaga

SEQ ID NO: 95316 - DNA, 25 bp, Artificial
  Probe
cctgaaaggactgaataggtttacc

SEQ ID NO: 95317 - DNA, 25 bp, Artificial
  Probe
cactgactctcttctcactggaact

SEQ ID NO: 95318 - DNA, 25 bp, Artificial
  Probe
tcactgactctcttctcactggaac

SEQ ID NO: 95319 - DNA, 25 bp, Artificial
  Probe
tccctgaaaggactgaataggttta

SEQ ID NO: 95320 - DNA, 25 bp, Artificial
  Probe
gagaccagcttacgtgaatagttgt

SEQ ID NO: 95321 - DNA, 25 bp, Artificial
  Probe
tgagaccagcttacgtgaatagttg

SEQ ID NO: 95322 - DNA, 25 bp, Artificial
  Probe
gtgagaccagcttacgtgaatagtt

SEQ ID NO: 95323 - DNA, 25 bp, Artificial
  Probe
ctaagaatggattccctgaaaggac

SEQ ID NO: 95324 - DNA, 25 bp, Artificial
  Probe
actgaataggtttaccatacaccag

SEQ ID NO: 95325 - DNA, 25 bp, Artificial
  Probe
gactgaataggtttaccatacacca

SEQ ID NO: 95326 - DNA, 25 bp, Artificial
  Probe
taaaggtcaagatagacggtgagac

SEQ ID NO: 95327 - DNA, 25 bp, Artificial
  Probe
tggaagggctaaaggtcaagataga

SEQ ID NO: 95328 - DNA, 25 bp, Artificial
  Probe
gtggaagggctaaaggtcaagatag

SEQ ID NO: 95329 - DNA, 25 bp, Artificial
  Probe
tctaagaatggattccctgaaagga

SEQ ID NO: 95330 - DNA, 25 bp, Artificial
  Probe
gtttgaaaggaggtcttccagtatc

SEQ ID NO: 95331 - DNA, 25 bp, Artificial
  Probe
ggactgaataggtttaccatacacc

SEQ ID NO: 95332 - DNA, 25 bp, Artificial
  Probe
taagaatggattccctgaaaggact

SEQ ID NO: 95333 - DNA, 25 bp, Artificial
  Probe
gactctcttctcactggaactacca

SEQ ID NO: 95334 - DNA, 25 bp, Artificial
  Probe
agtttgaaaggaggtcttccagtat

SEQ ID NO: 95335 - DNA, 25 bp, Artificial
  Probe
ttccctgaaaggactgaataggttt

SEQ ID NO: 95336 - DNA, 25 bp, Artificial
  Probe
cagcttacgtgaatagttgttatta

SEQ ID NO: 95337 - DNA, 25 bp, Artificial
  Probe
ctgaataggtttaccatacaccagc

SEQ ID NO: 95338 - DNA, 25 bp, Artificial
  Probe
atggattccctgaaaggactgaata

SEQ ID NO: 95339 - DNA, 25 bp, Artificial
  Probe
attccctgaaaggactgaataggtt

SEQ ID NO: 95340 - DNA, 25 bp, Artificial
  Probe
aatctaagaatggattccctgaaag

SEQ ID NO: 95341 - DNA, 25 bp, Artificial
  Probe
gagtttgaaaggaggtcttccagta

SEQ ID NO: 95342 - DNA, 25 bp, Artificial
  Probe
aacgataatgtcaagtggtatgtct

SEQ ID NO: 95343 - DNA, 25 bp, Artificial
  Probe
gaacgataatgtcaagtggtatgtc

SEQ ID NO: 95344 - DNA, 25 bp, Artificial
  Probe
aggaacgataatgtcaagtggtatg

SEQ ID NO: 95345 - DNA, 25 bp, Artificial
  Probe
taggaacgataatgtcaagtggtat

SEQ ID NO: 95346 - DNA, 25 bp, Artificial
  Probe
ataggaacgataatgtcaagtggta

SEQ ID NO: 95347 - DNA, 25 bp, Artificial
  Probe
ggaacgataatgtcaagtggtatgt

SEQ ID NO: 95348 - DNA, 25 bp, Artificial
  Probe
acgataatgtcaagtggtatgtctt

SEQ ID NO: 95349 - DNA, 25 bp, Artificial
  Probe
aagcataggaacgataatgtcaagt

SEQ ID NO: 95350 - DNA, 25 bp, Artificial
  Probe
cataggaacgataatgtcaagtggt

SEQ ID NO: 95351 - DNA, 25 bp, Artificial
  Probe
agcataggaacgataatgtcaagtg

SEQ ID NO: 95352 - DNA, 25 bp, Artificial
  Probe
gtcaagtggtatgtcttagaactga

SEQ ID NO: 95353 - DNA, 25 bp, Artificial
  Probe
tgtcaagtggtatgtcttagaactg

SEQ ID NO: 95354 - DNA, 25 bp, Artificial
  Probe
taagcataggaacgataatgtcaag

SEQ ID NO: 95355 - DNA, 25 bp, Artificial
  Probe
gttaagcataggaacgataatgtca

SEQ ID NO: 95356 - DNA, 25 bp, Artificial
  Probe
aatgtcaagtggtatgtcttagaac

SEQ ID NO: 95357 - DNA, 25 bp, Artificial
  Probe
atgtcaagtggtatgtcttagaact

SEQ ID NO: 95358 - DNA, 25 bp, Artificial
  Probe
tcaagtggtatgtcttagaactgat

SEQ ID NO: 95359 - DNA, 25 bp, Artificial
  Probe
cgataatgtcaagtggtatgtctta

SEQ ID NO: 95360 - DNA, 25 bp, Artificial
  Probe
tacgaagcagtgatgatcttatacc

SEQ ID NO: 95361 - DNA, 25 bp, Artificial
  Probe
tggtatgtcttagaactgatctgtg

SEQ ID NO: 95362 - DNA, 25 bp, Artificial
  Probe
gtggtatgtcttagaactgatctgt

SEQ ID NO: 95363 - DNA, 25 bp, Artificial
  Probe
ttaagcataggaacgataatgtcaa

SEQ ID NO: 95364 - DNA, 25 bp, Artificial
  Probe
gtatgtcttagaactgatctgtgga

SEQ ID NO: 95365 - DNA, 25 bp, Artificial
  Probe
ggtatgtcttagaactgatctgtgg

SEQ ID NO: 95366 - DNA, 25 bp, Artificial
  Probe
gcataggaacgataatgtcaagtgg

SEQ ID NO: 95367 - DNA, 25 bp, Artificial
  Probe
agtggtatgtcttagaactgatctg

SEQ ID NO: 95368 - DNA, 25 bp, Artificial
  Probe
tatgtcttagaactgatctgtggaa

SEQ ID NO: 95369 - DNA, 25 bp, Artificial
  Probe
ttacgaagcagtgatgatcttatac

SEQ ID NO: 95370 - DNA, 25 bp, Artificial
  Probe
caagtggtatgtcttagaactgatc

SEQ ID NO: 95371 - DNA, 25 bp, Artificial
  Probe
aagtggtatgtcttagaactgatct

SEQ ID NO: 95372 - DNA, 25 bp, Artificial
  Probe
aattacgaagcagtgatgatcttat

SEQ ID NO: 95373 - DNA, 25 bp, Artificial
  Probe
taatgtcaagtggtatgtcttagaa

SEQ ID NO: 95374 - DNA, 25 bp, Artificial
  Probe
attacgaagcagtgatgatcttata

SEQ ID NO: 95375 - DNA, 25 bp, Artificial
  Probe
tttgaaattacgaagcagtgatgat

SEQ ID NO: 95376 - DNA, 25 bp, Artificial
  Probe
atttgaaattacgaagcagtgatga

SEQ ID NO: 95377 - DNA, 25 bp, Artificial
  Probe
ataatgtcaagtggtatgtcttaga

SEQ ID NO: 95378 - DNA, 25 bp, Artificial
  Probe
ttaaatcaaatccgatgttccaggt

SEQ ID NO: 95379 - DNA, 25 bp, Artificial
  Probe
tttggtgccactatgaatttgaaat

SEQ ID NO: 95380 - DNA, 25 bp, Artificial
  Probe
atttggtgccactatgaatttgaaa

SEQ ID NO: 95381 - DNA, 25 bp, Artificial
  Probe
gatttggtgccactatgaatttgaa

SEQ ID NO: 95382 - DNA, 25 bp, Artificial
  Probe
aattagagagatttggtgccactat

SEQ ID NO: 95383 - DNA, 25 bp, Artificial
  Probe
gataatgtcaagtggtatgtcttag

SEQ ID NO: 95384 - DNA, 25 bp, Artificial
  Probe
attagagagatttggtgccactatg

SEQ ID NO: 95385 - DNA, 25 bp, Artificial
  Probe
taaatcaaatccgatgttccaggtc

SEQ ID NO: 95386 - DNA, 25 bp, Artificial
  Probe
gagatttggtgccactatgaatttg

SEQ ID NO: 95387 - DNA, 25 bp, Artificial
  Probe
aatactgagtggataaccaactacc

SEQ ID NO: 95388 - DNA, 25 bp, Artificial
  Probe
tactgagtggataaccaactaccat

SEQ ID NO: 95389 - DNA, 25 bp, Artificial
  Probe
atactgagtggataaccaactacca

SEQ ID NO: 95390 - DNA, 25 bp, Artificial
  Probe
tacatcaaagccaacatttcacaaa

SEQ ID NO: 95391 - DNA, 25 bp, Artificial
  Probe
ttacatcaaagccaacatttcacaa

SEQ ID NO: 95392 - DNA, 25 bp, Artificial
  Probe
tttacatcaaagccaacatttcaca

SEQ ID NO: 95393 - DNA, 25 bp, Artificial
  Probe
aaacaaacaaacaaaccataccagt

SEQ ID NO: 95394 - DNA, 25 bp, Artificial
  Probe
gcattcaaatcaaggctaaagacat

SEQ ID NO: 95395 - DNA, 25 bp, Artificial
  Probe
tgagtggataaccaactaccatcat

SEQ ID NO: 95396 - DNA, 25 bp, Artificial
  Probe
gtttacatcaaagccaacatttcac

SEQ ID NO: 95397 - DNA, 25 bp, Artificial
  Probe
aacaaacaaacaaaccataccagtt

SEQ ID NO: 95398 - DNA, 25 bp, Artificial
  Probe
aggtttacatcaaagccaacatttc

SEQ ID NO: 95399 - DNA, 25 bp, Artificial
  Probe
gaggtttacatcaaagccaacattt

SEQ ID NO: 95400 - DNA, 25 bp, Artificial
  Probe
ggtttacatcaaagccaacatttca

SEQ ID NO: 95401 - DNA, 25 bp, Artificial
  Probe
gagtggataaccaactaccatcatg

SEQ ID NO: 95402 - DNA, 25 bp, Artificial
  Probe
tttaagcagtaaatggtttcttggc

SEQ ID NO: 95403 - DNA, 25 bp, Artificial
  Probe
ctgagtggataaccaactaccatca

SEQ ID NO: 95404 - DNA, 25 bp, Artificial
  Probe
actgagtggataaccaactaccatc

SEQ ID NO: 95405 - DNA, 25 bp, Artificial
  Probe
ctatgaggtttacatcaaagccaac

SEQ ID NO: 95406 - DNA, 25 bp, Artificial
  Probe
actatgaggtttacatcaaagccaa

SEQ ID NO: 95407 - DNA, 25 bp, Artificial
  Probe
aactatgaggtttacatcaaagcca

SEQ ID NO: 95408 - DNA, 25 bp, Artificial
  Probe
tatgaggtttacatcaaagccaaca

SEQ ID NO: 95409 - DNA, 25 bp, Artificial
  Probe
aacacttcagttcttcctaacagct

SEQ ID NO: 95410 - DNA, 25 bp, Artificial
  Probe
ttaagcagtaaatggtttcttggca

SEQ ID NO: 95411 - DNA, 25 bp, Artificial
  Probe
caagtaatagttaagttagaggtgg

SEQ ID NO: 95412 - DNA, 25 bp, Artificial
  Probe
ccaagtaatagttaagttagaggtg

SEQ ID NO: 95413 - DNA, 25 bp, Artificial
  Probe
tttaacattgatctcacttcccaga

SEQ ID NO: 95414 - DNA, 25 bp, Artificial
  Probe
atgaggtttacatcaaagccaacat

SEQ ID NO: 95415 - DNA, 25 bp, Artificial
  Probe
acatcaaagccaacatttcacaaat

SEQ ID NO: 95416 - DNA, 25 bp, Artificial
  Probe
tgaggtttacatcaaagccaacatt

SEQ ID NO: 95417 - DNA, 25 bp, Artificial
  Probe
taagcagtaaatggtttcttggcac

SEQ ID NO: 95418 - DNA, 25 bp, Artificial
  Probe
cattcaaatcaaggctaaagacata

SEQ ID NO: 95419 - DNA, 25 bp, Artificial
  Probe
ggcacccataaccaagtaatagtta

SEQ ID NO: 95420 - DNA, 25 bp, Artificial
  Probe
aagtaatagttaagttagaggtggg

SEQ ID NO: 95421 - DNA, 25 bp, Artificial
  Probe
tcaaggctaaagacataaatgtgaa

SEQ ID NO: 95422 - DNA, 25 bp, Artificial
  Probe
cataccagtttgtaggcagacttct

SEQ ID NO: 95423 - DNA, 25 bp, Artificial
  Probe
gcacccataaccaagtaatagttaa

SEQ ID NO: 95424 - DNA, 25 bp, Artificial
  Probe
atcaaggctaaagacataaatgtga

SEQ ID NO: 95425 - DNA, 25 bp, Artificial
  Probe
aaactgtccctgaagtctttctctg

SEQ ID NO: 95426 - DNA, 25 bp, Artificial
  Probe
ttcaaatcaaggctaaagacataaa

SEQ ID NO: 95427 - DNA, 25 bp, Artificial
  Probe
caaatcaaggctaaagacataaatg

SEQ ID NO: 95428 - DNA, 25 bp, Artificial
  Probe
gttgggtttgtactgtttgcctatg

SEQ ID NO: 95429 - DNA, 25 bp, Artificial
  Probe
caaggctaaagacataaatgtgaaa

SEQ ID NO: 95430 - DNA, 25 bp, Artificial
  Probe
tcaaatcaaggctaaagacataaat

SEQ ID NO: 95431 - DNA, 25 bp, Artificial
  Probe
attcaaatcaaggctaaagacataa

SEQ ID NO: 95432 - DNA, 25 bp, Artificial
  Probe
gaatttgagaagacccagaaggaac

SEQ ID NO: 95433 - DNA, 25 bp, Artificial
  Probe
aatttgagaagacccagaaggaact

SEQ ID NO: 95434 - DNA, 25 bp, Artificial
  Probe
cacacagcaagtttgtcattcttag

SEQ ID NO: 95435 - DNA, 25 bp, Artificial
  Probe
acacagcaagtttgtcattcttagt

SEQ ID NO: 95436 - DNA, 25 bp, Artificial
  Probe
ctacagaagatggaggatgtgtacc

SEQ ID NO: 95437 - DNA, 25 bp, Artificial
  Probe
cacagcaagtttgtcattcttagtg

SEQ ID NO: 95438 - DNA, 25 bp, Artificial
  Probe
ggaatttgagaagacccagaaggaa

SEQ ID NO: 95439 - DNA, 25 bp, Artificial
  Probe
ttggatggaggactatgactacgtt

SEQ ID NO: 95440 - DNA, 25 bp, Artificial
  Probe
ggttggatggaggactatgactacg

SEQ ID NO: 95441 - DNA, 25 bp, Artificial
  Probe
tacagaagatggaggatgtgtacca

SEQ ID NO: 95442 - DNA, 25 bp, Artificial
  Probe
gaggaatttgagaagacccagaagg

SEQ ID NO: 95443 - DNA, 25 bp, Artificial
  Probe
ggaggaatttgagaagacccagaag

SEQ ID NO: 95444 - DNA, 25 bp, Artificial
  Probe
gaaggaggaatttgagaagacccag

SEQ ID NO: 95445 - DNA, 25 bp, Artificial
  Probe
tggatggaggactatgactacgttc

SEQ ID NO: 95446 - DNA, 25 bp, Artificial
  Probe
gcacacagcaagtttgtcattctta

SEQ ID NO: 95447 - DNA, 25 bp, Artificial
  Probe
aggaatttgagaagacccagaagga

SEQ ID NO: 95448 - DNA, 25 bp, Artificial
  Probe
aggaggaatttgagaagacccagaa

SEQ ID NO: 95449 - DNA, 25 bp, Artificial
  Probe
aaggaggaatttgagaagacccaga

SEQ ID NO: 95450 - DNA, 25 bp, Artificial
  Probe
atttgagaagacccagaaggaactg

SEQ ID NO: 95451 - DNA, 25 bp, Artificial
  Probe
atggaggactatgactacgttcatc

SEQ ID NO: 95452 - DNA, 25 bp, Artificial
  Probe
gatggaggactatgactacgttcat

SEQ ID NO: 95453 - DNA, 25 bp, Artificial
  Probe
gttggatggaggactatgactacgt

SEQ ID NO: 95454 - DNA, 25 bp, Artificial
  Probe
agaagatggaggatgtgtaccagac

SEQ ID NO: 95455 - DNA, 25 bp, Artificial
  Probe
cagaagatggaggatgtgtaccaga

SEQ ID NO: 95456 - DNA, 25 bp, Artificial
  Probe
ggatggaggactatgactacgttca

SEQ ID NO: 95457 - DNA, 25 bp, Artificial
  Probe
gcaccaagaaaacctaaagaactat

SEQ ID NO: 95458 - DNA, 25 bp, Artificial
  Probe
gaagatggaggatgtgtaccagaca

SEQ ID NO: 95459 - DNA, 25 bp, Artificial
  Probe
acagaagatggaggatgtgtaccag

SEQ ID NO: 95460 - DNA, 25 bp, Artificial
  Probe
ggaggactatgactacgttcatctg

SEQ ID NO: 95461 - DNA, 25 bp, Artificial
  Probe
gggttggatggaggactatgactac

SEQ ID NO: 95462 - DNA, 25 bp, Artificial
  Probe
ctcttctacttggagcagtgtgagg

SEQ ID NO: 95463 - DNA, 25 bp, Artificial
  Probe
acatatttatatcaaggcaggatgc

SEQ ID NO: 95464 - DNA, 25 bp, Artificial
  Probe
tggaggactatgactacgttcatct

SEQ ID NO: 95465 - DNA, 25 bp, Artificial
  Probe
tacatatttatatcaaggcaggatg

SEQ ID NO: 95466 - DNA, 25 bp, Artificial
  Probe
gaggactatgactacgttcatctgc

SEQ ID NO: 95467 - DNA, 25 bp, Artificial
  Probe
ggaaggaggaatttgagaagaccca

SEQ ID NO: 95468 - DNA, 25 bp, Artificial
  Probe
acagcaagtttgtcattcttagtgc

SEQ ID NO: 95469 - DNA, 25 bp, Artificial
  Probe
ctctaccctcacctccaaagttcac

SEQ ID NO: 95470 - DNA, 25 bp, Artificial
  Probe
caccaagaaaacctaaagaactatt

SEQ ID NO: 95471 - DNA, 25 bp, Artificial
  Probe
tatttatatcaaggcaggatgcaga

SEQ ID NO: 95472 - DNA, 25 bp, Artificial
  Probe
aggactatgactacgttcatctgca

SEQ ID NO: 95473 - DNA, 25 bp, Artificial
  Probe
catatttatatcaaggcaggatgca

SEQ ID NO: 95474 - DNA, 25 bp, Artificial
  Probe
tgcaccaagaaaacctaaagaacta

SEQ ID NO: 95475 - DNA, 25 bp, Artificial
  Probe
atatttatatcaaggcaggatgcag

SEQ ID NO: 95476 - DNA, 25 bp, Artificial
  Probe
accaagaaaacctaaagaactattt

SEQ ID NO: 95477 - DNA, 25 bp, Artificial
  Probe
cattgcttattgttgacttcctgtt

SEQ ID NO: 95478 - DNA, 25 bp, Artificial
  Probe
tgcttattgttgacttcctgttatg

SEQ ID NO: 95479 - DNA, 25 bp, Artificial
  Probe
gcttattgttgacttcctgttatga

SEQ ID NO: 95480 - DNA, 25 bp, Artificial
  Probe
ttgcttattgttgacttcctgttat

SEQ ID NO: 95481 - DNA, 25 bp, Artificial
  Probe
attgcttattgttgacttcctgtta

SEQ ID NO: 95482 - DNA, 25 bp, Artificial
  Probe
ttcattgcttattgttgacttcctg

SEQ ID NO: 95483 - DNA, 25 bp, Artificial
  Probe
cttcattgcttattgttgacttcct

SEQ ID NO: 95484 - DNA, 25 bp, Artificial
  Probe
tcttcattgcttattgttgacttcc

SEQ ID NO: 95485 - DNA, 25 bp, Artificial
  Probe
tcattgcttattgttgacttcctgt

SEQ ID NO: 95486 - DNA, 25 bp, Artificial
  Probe
attctaagtaccatgccgttctatc

SEQ ID NO: 95487 - DNA, 25 bp, Artificial
  Probe
aattctaagtaccatgccgttctat

SEQ ID NO: 95488 - DNA, 25 bp, Artificial
  Probe
ctaagtaccatgccgttctatctaa

SEQ ID NO: 95489 - DNA, 25 bp, Artificial
  Probe
tctaagtaccatgccgttctatcta

SEQ ID NO: 95490 - DNA, 25 bp, Artificial
  Probe
ccatgccgttctatctaatgtctaa

SEQ ID NO: 95491 - DNA, 25 bp, Artificial
  Probe
taagtaccatgccgttctatctaat

SEQ ID NO: 95492 - DNA, 25 bp, Artificial
  Probe
aagtaccatgccgttctatctaatg

SEQ ID NO: 95493 - DNA, 25 bp, Artificial
  Probe
ttctaagtaccatgccgttctatct

SEQ ID NO: 95494 - DNA, 25 bp, Artificial
  Probe
gtcttcattgcttattgttgacttc

SEQ ID NO: 95495 - DNA, 25 bp, Artificial
  Probe
accatgccgttctatctaatgtcta

SEQ ID NO: 95496 - DNA, 25 bp, Artificial
  Probe
taccatgccgttctatctaatgtct

SEQ ID NO: 95497 - DNA, 25 bp, Artificial
  Probe
gtaccatgccgttctatctaatgtc

SEQ ID NO: 95498 - DNA, 25 bp, Artificial
  Probe
agtaccatgccgttctatctaatgt

SEQ ID NO: 95499 - DNA, 25 bp, Artificial
  Probe
catgccgttctatctaatgtctaat

SEQ ID NO: 95500 - DNA, 25 bp, Artificial
  Probe
agttctgtctatagtcttcattgct

SEQ ID NO: 95501 - DNA, 25 bp, Artificial
  Probe
atgccgttctatctaatgtctaata

SEQ ID NO: 95502 - DNA, 25 bp, Artificial
  Probe
attccaaacagagtaatcagaccaa

SEQ ID NO: 95503 - DNA, 25 bp, Artificial
  Probe
caaacagagtaatcagaccaaacaa

SEQ ID NO: 95504 - DNA, 25 bp, Artificial
  Probe
ttccaaacagagtaatcagaccaaa

SEQ ID NO: 95505 - DNA, 25 bp, Artificial
  Probe
gctattccaaacagagtaatcagac

SEQ ID NO: 95506 - DNA, 25 bp, Artificial
  Probe
cttattgttgacttcctgttatgaa

SEQ ID NO: 95507 - DNA, 25 bp, Artificial
  Probe
agagtaatcagaccaaacaaagcat

SEQ ID NO: 95508 - DNA, 25 bp, Artificial
  Probe
aacagagtaatcagaccaaacaaag

SEQ ID NO: 95509 - DNA, 25 bp, Artificial
  Probe
tattccaaacagagtaatcagacca

SEQ ID NO: 95510 - DNA, 25 bp, Artificial
  Probe
ctctctcataaatgtggacctgttt

SEQ ID NO: 95511 - DNA, 25 bp, Artificial
  Probe
gccgttctatctaatgtctaatagt

SEQ ID NO: 95512 - DNA, 25 bp, Artificial
  Probe
tgccgttctatctaatgtctaatag

SEQ ID NO: 95513 - DNA, 25 bp, Artificial
  Probe
atgtggatgtctgatttaacctttg

SEQ ID NO: 95514 - DNA, 25 bp, Artificial
  Probe
tgtggatgtctgatttaacctttgt

SEQ ID NO: 95515 - DNA, 25 bp, Artificial
  Probe
tccaaacagagtaatcagaccaaac

SEQ ID NO: 95516 - DNA, 25 bp, Artificial
  Probe
aaacagagtaatcagaccaaacaaa

SEQ ID NO: 95517 - DNA, 25 bp, Artificial
  Probe
ctattccaaacagagtaatcagacc

SEQ ID NO: 95518 - DNA, 25 bp, Artificial
  Probe
gttctgtctatagtcttcattgctt

SEQ ID NO: 95519 - DNA, 25 bp, Artificial
  Probe
gtggatgtctgatttaacctttgta

SEQ ID NO: 95520 - DNA, 25 bp, Artificial
  Probe
tatgccttcatgtggatgtctgatt

SEQ ID NO: 95521 - DNA, 25 bp, Artificial
  Probe
ccaaacagagtaatcagaccaaaca

SEQ ID NO: 95522 - DNA, 25 bp, Artificial
  Probe
catcgcctaaggagtgatacatcat

SEQ ID NO: 95523 - DNA, 25 bp, Artificial
  Probe
atcgcctaaggagtgatacatcatg

SEQ ID NO: 95524 - DNA, 25 bp, Artificial
  Probe
ccatcgcctaaggagtgatacatca

SEQ ID NO: 95525 - DNA, 25 bp, Artificial
  Probe
aacgtggtccaatataccgagaatc

SEQ ID NO: 95526 - DNA, 25 bp, Artificial
  Probe
tcgcctaaggagtgatacatcatgg

SEQ ID NO: 95527 - DNA, 25 bp, Artificial
  Probe
gccctggagaaagttgttcagaaat

SEQ ID NO: 95528 - DNA, 25 bp, Artificial
  Probe
caagaggagcgaatgaaccagaaac

SEQ ID NO: 95529 - DNA, 25 bp, Artificial
  Probe
gaactggtcctacgatgagaatgcc

SEQ ID NO: 95530 - DNA, 25 bp, Artificial
  Probe
aagaggagcgaatgaaccagaaact

SEQ ID NO: 95531 - DNA, 25 bp, Artificial
  Probe
caatataccgagaatccctgcatgg

SEQ ID NO: 95532 - DNA, 25 bp, Artificial
  Probe
ccaatataccgagaatccctgcatg

SEQ ID NO: 95533 - DNA, 25 bp, Artificial
  Probe
tccaatataccgagaatccctgcat

SEQ ID NO: 95534 - DNA, 25 bp, Artificial
  Probe
aaacgtggtccaatataccgagaat

SEQ ID NO: 95535 - DNA, 25 bp, Artificial
  Probe
tggtccaatataccgagaatccctg

SEQ ID NO: 95536 - DNA, 25 bp, Artificial
  Probe
gtggtccaatataccgagaatccct

SEQ ID NO: 95537 - DNA, 25 bp, Artificial
  Probe
gaaacgtggtccaatataccgagaa

SEQ ID NO: 95538 - DNA, 25 bp, Artificial
  Probe
cccatcgcctaaggagtgatacatc

SEQ ID NO: 95539 - DNA, 25 bp, Artificial
  Probe
acgtggtccaatataccgagaatcc

SEQ ID NO: 95540 - DNA, 25 bp, Artificial
  Probe
atataccgagaatccctgcatggaa

SEQ ID NO: 95541 - DNA, 25 bp, Artificial
  Probe
aatataccgagaatccctgcatgga

SEQ ID NO: 95542 - DNA, 25 bp, Artificial
  Probe
ggaactggtcctacgatgagaatgc

SEQ ID NO: 95543 - DNA, 25 bp, Artificial
  Probe
gtccaatataccgagaatccctgca

SEQ ID NO: 95544 - DNA, 25 bp, Artificial
  Probe
agaggagcgaatgaaccagaaactc

SEQ ID NO: 95545 - DNA, 25 bp, Artificial
  Probe
tataccgagaatccctgcatggaaa

SEQ ID NO: 95546 - DNA, 25 bp, Artificial
  Probe
ccaagaggagcgaatgaaccagaaa

SEQ ID NO: 95547 - DNA, 25 bp, Artificial
  Probe
acccatcgcctaaggagtgatacat

SEQ ID NO: 95548 - DNA, 25 bp, Artificial
  Probe
gaggaactggtcctacgatgagaat

SEQ ID NO: 95549 - DNA, 25 bp, Artificial
  Probe
aggaactggtcctacgatgagaatg

SEQ ID NO: 95550 - DNA, 25 bp, Artificial
  Probe
ggtccaatataccgagaatccctgc

SEQ ID NO: 95551 - DNA, 25 bp, Artificial
  Probe
cgtggtccaatataccgagaatccc

SEQ ID NO: 95552 - DNA, 25 bp, Artificial
  Probe
ggaaacgtggtccaatataccgaga

SEQ ID NO: 95553 - DNA, 25 bp, Artificial
  Probe
attgagcgtggaaagaacatgtgtg

SEQ ID NO: 95554 - DNA, 25 bp, Artificial
  Probe
cctaaggagtgatacatcatggcgc

SEQ ID NO: 95555 - DNA, 25 bp, Artificial
  Probe
gcctaaggagtgatacatcatggcg

SEQ ID NO: 95556 - DNA, 25 bp, Artificial
  Probe
cgcctaaggagtgatacatcatggc

SEQ ID NO: 95557 - DNA, 25 bp, Artificial
  Probe
ggatggaaacgtggtccaatatacc

SEQ ID NO: 95558 - DNA, 25 bp, Artificial
  Probe
ggaggaactggtcctacgatgagaa

SEQ ID NO: 95559 - DNA, 25 bp, Artificial
  Probe
ataccgagaatccctgcatggaaaa

SEQ ID NO: 95560 - DNA, 25 bp, Artificial
  Probe
gatggaaacgtggtccaatataccg

SEQ ID NO: 95561 - DNA, 25 bp, Artificial
  Probe
cggatggaaacgtggtccaatatac

SEQ ID NO: 95562 - DNA, 25 bp, Artificial
  Probe
atggaaacgtggtccaatataccga

SEQ ID NO: 95563 - DNA, 25 bp, Artificial
  Probe
tggaaacgtggtccaatataccgag

SEQ ID NO: 95564 - DNA, 25 bp, Artificial
  Probe
gcggatggaaacgtggtccaatata

SEQ ID NO: 95565 - DNA, 25 bp, Artificial
  Probe
tcaccatcttcatcagagtatccac

SEQ ID NO: 95566 - DNA, 25 bp, Artificial
  Probe
gtcaccatcttcatcagagtatcca

SEQ ID NO: 95567 - DNA, 25 bp, Artificial
  Probe
ttgtgtgacagaaggtgtatgttac

SEQ ID NO: 95568 - DNA, 25 bp, Artificial
  Probe
gttgtgtgacagaaggtgtatgtta

SEQ ID NO: 95569 - DNA, 25 bp, Artificial
  Probe
gaaggtgtatgttaccaggtgatta

SEQ ID NO: 95570 - DNA, 25 bp, Artificial
  Probe
atcttcatcagagtatccacctcct

SEQ ID NO: 95571 - DNA, 25 bp, Artificial
  Probe
catcttcatcagagtatccacctcc

SEQ ID NO: 95572 - DNA, 25 bp, Artificial
  Probe
ccatcttcatcagagtatccacctc

SEQ ID NO: 95573 - DNA, 25 bp, Artificial
  Probe
caccatcttcatcagagtatccacc

SEQ ID NO: 95574 - DNA, 25 bp, Artificial
  Probe
aaggtgtatgttaccaggtgattat

SEQ ID NO: 95575 - DNA, 25 bp, Artificial
  Probe
ggtcaccatcttcatcagagtatcc

SEQ ID NO: 95576 - DNA, 25 bp, Artificial
  Probe
accatcttcatcagagtatccacct

SEQ ID NO: 95577 - DNA, 25 bp, Artificial
  Probe
aggtgtatgttaccaggtgattata

SEQ ID NO: 95578 - DNA, 25 bp, Artificial
  Probe
agaaggtgtatgttaccaggtgatt

SEQ ID NO: 95579 - DNA, 25 bp, Artificial
  Probe
agttgtgtgacagaaggtgtatgtt

SEQ ID NO: 95580 - DNA, 25 bp, Artificial
  Probe
aacttagcctgtacctgtgaaatat

SEQ ID NO: 95581 - DNA, 25 bp, Artificial
  Probe
gaacttagcctgtacctgtgaaata

SEQ ID NO: 95582 - DNA, 25 bp, Artificial
  Probe
cagaaggtgtatgttaccaggtgat

SEQ ID NO: 95583 - DNA, 25 bp, Artificial
  Probe
tgtgacagaaggtgtatgttaccag

SEQ ID NO: 95584 - DNA, 25 bp, Artificial
  Probe
cagttgtgtgacagaaggtgtatgt

SEQ ID NO: 95585 - DNA, 25 bp, Artificial
  Probe
acagttgtgtgacagaaggtgtatg

SEQ ID NO: 95586 - DNA, 25 bp, Artificial
  Probe
tcttcatcagagtatccacctcctg

SEQ ID NO: 95587 - DNA, 25 bp, Artificial
  Probe
gtgtgacagaaggtgtatgttacca

SEQ ID NO: 95588 - DNA, 25 bp, Artificial
  Probe
tgtgtgacagaaggtgtatgttacc

SEQ ID NO: 95589 - DNA, 25 bp, Artificial
  Probe
acttagcctgtacctgtgaaatatt

SEQ ID NO: 95590 - DNA, 25 bp, Artificial
  Probe
agaacttagcctgtacctgtgaaat

SEQ ID NO: 95591 - DNA, 25 bp, Artificial
  Probe
tgtatgttaccaggtgattataacc

SEQ ID NO: 95592 - DNA, 25 bp, Artificial
  Probe
ggtgtatgttaccaggtgattataa

SEQ ID NO: 95593 - DNA, 25 bp, Artificial
  Probe
ttcatcagagtatccacctcctgtc

SEQ ID NO: 95594 - DNA, 25 bp, Artificial
  Probe
cttcatcagagtatccacctcctgt

SEQ ID NO: 95595 - DNA, 25 bp, Artificial
  Probe
tggtcaccatcttcatcagagtatc

SEQ ID NO: 95596 - DNA, 25 bp, Artificial
  Probe
ctggtcaccatcttcatcagagtat

SEQ ID NO: 95597 - DNA, 25 bp, Artificial
  Probe
aacatttaacatgctctgtcttcac

SEQ ID NO: 95598 - DNA, 25 bp, Artificial
  Probe
caacatttaacatgctctgtcttca

SEQ ID NO: 95599 - DNA, 25 bp, Artificial
  Probe
catttaacatgctctgtcttcactg

SEQ ID NO: 95600 - DNA, 25 bp, Artificial
  Probe
taccaacatttaacatgctctgtct

SEQ ID NO: 95601 - DNA, 25 bp, Artificial
  Probe
ataccaacatttaacatgctctgtc

SEQ ID NO: 95602 - DNA, 25 bp, Artificial
  Probe
atttaacatgctctgtcttcactgt

SEQ ID NO: 95603 - DNA, 25 bp, Artificial
  Probe
acatttaacatgctctgtcttcact

SEQ ID NO: 95604 - DNA, 25 bp, Artificial
  Probe
ccaacatttaacatgctctgtcttc

SEQ ID NO: 95605 - DNA, 25 bp, Artificial
  Probe
gtacctgtgaaatattatcatgccc

SEQ ID NO: 95606 - DNA, 25 bp, Artificial
  Probe
agcctgtacctgtgaaatattatca

SEQ ID NO: 95607 - DNA, 25 bp, Artificial
  Probe
gacagaaggtgtatgttaccaggtg

SEQ ID NO: 95608 - DNA, 25 bp, Artificial
  Probe
gtgacagaaggtgtatgttaccagg

SEQ ID NO: 95609 - DNA, 25 bp, Artificial
  Probe
accaacatttaacatgctctgtctt

SEQ ID NO: 95610 - DNA, 25 bp, Artificial
  Probe
tttacagagaaggtttcagaagact

SEQ ID NO: 95611 - DNA, 25 bp, Artificial
  Probe
taaaccaaagaaagttcgtaaaccc

SEQ ID NO: 95612 - DNA, 25 bp, Artificial
  Probe
gctttattagatgggctactctctc

SEQ ID NO: 95613 - DNA, 25 bp, Artificial
  Probe
ctttacagagaaggtttcagaagac

SEQ ID NO: 95614 - DNA, 25 bp, Artificial
  Probe
gctttacagagaaggtttcagaaga

SEQ ID NO: 95615 - DNA, 25 bp, Artificial
  Probe
ttattagatgggctactctctcttg

SEQ ID NO: 95616 - DNA, 25 bp, Artificial
  Probe
gtaaaccaaagaaagttcgtaaacc

SEQ ID NO: 95617 - DNA, 25 bp, Artificial
  Probe
aagttcgtaaacccaggactattta

SEQ ID NO: 95618 - DNA, 25 bp, Artificial
  Probe
aaagttcgtaaacccaggactattt

SEQ ID NO: 95619 - DNA, 25 bp, Artificial
  Probe
ctttattagatgggctactctctct

SEQ ID NO: 95620 - DNA, 25 bp, Artificial
  Probe
agttcgtaaacccaggactatttat

SEQ ID NO: 95621 - DNA, 25 bp, Artificial
  Probe
tattagatgggctactctctcttgc

SEQ ID NO: 95622 - DNA, 25 bp, Artificial
  Probe
ccgtgtaaataagtgtagatagagg

SEQ ID NO: 95623 - DNA, 25 bp, Artificial
  Probe
ttacagagaaggtttcagaagactc

SEQ ID NO: 95624 - DNA, 25 bp, Artificial
  Probe
gaaagttcgtaaacccaggactatt

SEQ ID NO: 95625 - DNA, 25 bp, Artificial
  Probe
gttcgtaaacccaggactatttatt

SEQ ID NO: 95626 - DNA, 25 bp, Artificial
  Probe
agagaaggtttcagaagactcagta

SEQ ID NO: 95627 - DNA, 25 bp, Artificial
  Probe
ggtaaaccaaagaaagttcgtaaac

SEQ ID NO: 95628 - DNA, 25 bp, Artificial
  Probe
tacagagaaggtttcagaagactca

SEQ ID NO: 95629 - DNA, 25 bp, Artificial
  Probe
tttattagatgggctactctctctt

SEQ ID NO: 95630 - DNA, 25 bp, Artificial
  Probe
aaaccaaagaaagttcgtaaaccca

SEQ ID NO: 95631 - DNA, 25 bp, Artificial
  Probe
ttcgtaaacccaggactatttattc

SEQ ID NO: 95632 - DNA, 25 bp, Artificial
  Probe
cgctttattagatgggctactctct

SEQ ID NO: 95633 - DNA, 25 bp, Artificial
  Probe
agaaagttcgtaaacccaggactat

SEQ ID NO: 95634 - DNA, 25 bp, Artificial
  Probe
cgctttacagagaaggtttcagaag

SEQ ID NO: 95635 - DNA, 25 bp, Artificial
  Probe
ctatgacaggagtgtttgacagaag

SEQ ID NO: 95636 - DNA, 25 bp, Artificial
  Probe
aagaaagttcgtaaacccaggacta

SEQ ID NO: 95637 - DNA, 25 bp, Artificial
  Probe
aaccaaagaaagttcgtaaacccag

SEQ ID NO: 95638 - DNA, 25 bp, Artificial
  Probe
gagaaggtttcagaagactcagtac

SEQ ID NO: 95639 - DNA, 25 bp, Artificial
  Probe
tatgacaggagtgtttgacagaaga

SEQ ID NO: 95640 - DNA, 25 bp, Artificial
  Probe
accgtgtaaataagtgtagatagag

SEQ ID NO: 95641 - DNA, 25 bp, Artificial
  Probe
acgctttattagatgggctactctc

SEQ ID NO: 95642 - DNA, 25 bp, Artificial
  Probe
gacgctttattagatgggctactct

SEQ ID NO: 95643 - DNA, 25 bp, Artificial
  Probe
tcgtaaacccaggactatttattcc

SEQ ID NO: 95644 - DNA, 25 bp, Artificial
  Probe
cagaggtgaggatggtgaatggtaa

SEQ ID NO: 95645 - DNA, 25 bp, Artificial
  Probe
taaacccaggactatttattccagc

SEQ ID NO: 95646 - DNA, 25 bp, Artificial
  Probe
cgtaaacccaggactatttattcca

SEQ ID NO: 95647 - DNA, 25 bp, Artificial
  Probe
caaagaaagttcgtaaacccaggac

SEQ ID NO: 95648 - DNA, 25 bp, Artificial
  Probe
acaatggaaacaaagattcatgtgt

SEQ ID NO: 95649 - DNA, 25 bp, Artificial
  Probe
cgtgtaaataagtgtagatagagga

SEQ ID NO: 95650 - DNA, 25 bp, Artificial
  Probe
cagagaaggtttcagaagactcagt

SEQ ID NO: 95651 - DNA, 25 bp, Artificial
  Probe
acagagaaggtttcagaagactcag

SEQ ID NO: 95652 - DNA, 25 bp, Artificial
  Probe
ggaaacaaagattcatgtgtaaagc

SEQ ID NO: 95653 - DNA, 25 bp, Artificial
  Probe
gtaaacccaggactatttattccag

SEQ ID NO: 95654 - DNA, 25 bp, Artificial
  Probe
aacaatggaaacaaagattcatgtg

SEQ ID NO: 95655 - DNA, 25 bp, Artificial
  Probe
catcatctacaccatcttcaatgcc

SEQ ID NO: 95656 - DNA, 25 bp, Artificial
  Probe
ccatcatctacaccatcttcaatgc

SEQ ID NO: 95657 - DNA, 25 bp, Artificial
  Probe
ctttcctaaccatttatcaacgctg

SEQ ID NO: 95658 - DNA, 25 bp, Artificial
  Probe
tctttcctaaccatttatcaacgct

SEQ ID NO: 95659 - DNA, 25 bp, Artificial
  Probe
gtctttcctaaccatttatcaacgc

SEQ ID NO: 95660 - DNA, 25 bp, Artificial
  Probe
agtctttcctaaccatttatcaacg

SEQ ID NO: 95661 - DNA, 25 bp, Artificial
  Probe
cgttcgtctgattaaatgaagtctt

SEQ ID NO: 95662 - DNA, 25 bp, Artificial
  Probe
tcgttcgtctgattaaatgaagtct

SEQ ID NO: 95663 - DNA, 25 bp, Artificial
  Probe
ttcgttcgtctgattaaatgaagtc

SEQ ID NO: 95664 - DNA, 25 bp, Artificial
  Probe
gctttcgttcgtctgattaaatgaa

SEQ ID NO: 95665 - DNA, 25 bp, Artificial
  Probe
tttcgttcgtctgattaaatgaagt

SEQ ID NO: 95666 - DNA, 25 bp, Artificial
  Probe
atcatctacaccatcttcaatgccg

SEQ ID NO: 95667 - DNA, 25 bp, Artificial
  Probe
cgtctgattaaatgaagtctttcct

SEQ ID NO: 95668 - DNA, 25 bp, Artificial
  Probe
tcgtctgattaaatgaagtctttcc

SEQ ID NO: 95669 - DNA, 25 bp, Artificial
  Probe
ctttcgttcgtctgattaaatgaag

SEQ ID NO: 95670 - DNA, 25 bp, Artificial
  Probe
cccatcatctacaccatcttcaatg

SEQ ID NO: 95671 - DNA, 25 bp, Artificial
  Probe
ggctttcgttcgtctgattaaatga

SEQ ID NO: 95672 - DNA, 25 bp, Artificial
  Probe
catctacaccatcttcaatgccgag

SEQ ID NO: 95673 - DNA, 25 bp, Artificial
  Probe
gttcgtctgattaaatgaagtcttt

SEQ ID NO: 95674 - DNA, 25 bp, Artificial
  Probe
ttcgtctgattaaatgaagtctttc

SEQ ID NO: 95675 - DNA, 25 bp, Artificial
  Probe
tgaagtctttcctaaccatttatca

SEQ ID NO: 95676 - DNA, 25 bp, Artificial
  Probe
aagtctttcctaaccatttatcaac

SEQ ID NO: 95677 - DNA, 25 bp, Artificial
  Probe
atctacaccatcttcaatgccgagt

SEQ ID NO: 95678 - DNA, 25 bp, Artificial
  Probe
tcatctacaccatcttcaatgccga

SEQ ID NO: 95679 - DNA, 25 bp, Artificial
  Probe
tctacaccatcttcaatgccgagtt

SEQ ID NO: 95680 - DNA, 25 bp, Artificial
  Probe
tttcctaaccatttatcaacgctgg

SEQ ID NO: 95681 - DNA, 25 bp, Artificial
  Probe
cggctttcgttcgtctgattaaatg

SEQ ID NO: 95682 - DNA, 25 bp, Artificial
  Probe
gaagtctttcctaaccatttatcaa

SEQ ID NO: 95683 - DNA, 25 bp, Artificial
  Probe
gattaaatgaagtctttcctaacca

SEQ ID NO: 95684 - DNA, 25 bp, Artificial
  Probe
tgattaaatgaagtctttcctaacc

SEQ ID NO: 95685 - DNA, 25 bp, Artificial
  Probe
atgaagtctttcctaaccatttatc

SEQ ID NO: 95686 - DNA, 25 bp, Artificial
  Probe
tacaccatcttcaatgccgagtttc

SEQ ID NO: 95687 - DNA, 25 bp, Artificial
  Probe
ctacaccatcttcaatgccgagttt

SEQ ID NO: 95688 - DNA, 25 bp, Artificial
  Probe
gtctgattaaatgaagtctttccta

SEQ ID NO: 95689 - DNA, 25 bp, Artificial
  Probe
attaaatgaagtctttcctaaccat

SEQ ID NO: 95690 - DNA, 25 bp, Artificial
  Probe
ccccatcatctacaccatcttcaat

SEQ ID NO: 95691 - DNA, 25 bp, Artificial
  Probe
ttcctaaccatttatcaacgctggg

SEQ ID NO: 95692 - DNA, 25 bp, Artificial
  Probe
ctgattaaatgaagtctttcctaac

SEQ ID NO: 95693 - DNA, 25 bp, Artificial
  Probe
tctgattaaatgaagtctttcctaa

SEQ ID NO: 95694 - DNA, 25 bp, Artificial
  Probe
caaccccatcatctacaccatcttc

SEQ ID NO: 95695 - DNA, 25 bp, Artificial
  Probe
gcggctttcgttcgtctgattaaat

SEQ ID NO: 95696 - DNA, 25 bp, Artificial
  Probe
ttaaatgaagtctttcctaaccatt

SEQ ID NO: 95697 - DNA, 25 bp, Artificial
  Probe
accccatcatctacaccatcttcaa

SEQ ID NO: 95698 - DNA, 25 bp, Artificial
  Probe
aaccccatcatctacaccatcttca

SEQ ID NO: 95699 - DNA, 25 bp, Artificial
  Probe
tcaaccccatcatctacaccatctt

SEQ ID NO: 95700 - DNA, 25 bp, Artificial
  Probe
tactgtcatctgtctgtcttcttgt

SEQ ID NO: 95701 - DNA, 25 bp, Artificial
  Probe
gtcatctgtctgtcttcttgtcatc

SEQ ID NO: 95702 - DNA, 25 bp, Artificial
  Probe
tgtcatctgtctgtcttcttgtcat

SEQ ID NO: 95703 - DNA, 25 bp, Artificial
  Probe
gtactgtcatctgtctgtcttcttg

SEQ ID NO: 95704 - DNA, 25 bp, Artificial
  Probe
ctgtcatctgtctgtcttcttgtca

SEQ ID NO: 95705 - DNA, 25 bp, Artificial
  Probe
actgtcatctgtctgtcttcttgtc

SEQ ID NO: 95706 - DNA, 25 bp, Artificial
  Probe
tcatctgtctgtcttcttgtcatcg

SEQ ID NO: 95707 - DNA, 25 bp, Artificial
  Probe
ttatggactggaagagatcaacaga

SEQ ID NO: 95708 - DNA, 25 bp, Artificial
  Probe
atctgtctgtcttcttgtcatcgtg

SEQ ID NO: 95709 - DNA, 25 bp, Artificial
  Probe
catctgtctgtcttcttgtcatcgt

SEQ ID NO: 95710 - DNA, 25 bp, Artificial
  Probe
tatggactggaagagatcaacagag

SEQ ID NO: 95711 - DNA, 25 bp, Artificial
  Probe
atagatattggtgtttcctcgtgtc

SEQ ID NO: 95712 - DNA, 25 bp, Artificial
  Probe
aatagatattggtgtttcctcgtgt

SEQ ID NO: 95713 - DNA, 25 bp, Artificial
  Probe
gctctgtaacccatctgtagtaatt

SEQ ID NO: 95714 - DNA, 25 bp, Artificial
  Probe
tgctctgtaacccatctgtagtaat

SEQ ID NO: 95715 - DNA, 25 bp, Artificial
  Probe
cttcttcattcattcccagttgcta

SEQ ID NO: 95716 - DNA, 25 bp, Artificial
  Probe
gtgctgatgtcaaagtgtaatagat

SEQ ID NO: 95717 - DNA, 25 bp, Artificial
  Probe
ctgtagtactgtcatctgtctgtct

SEQ ID NO: 95718 - DNA, 25 bp, Artificial
  Probe
ttcttcattcattcccagttgctac

SEQ ID NO: 95719 - DNA, 25 bp, Artificial
  Probe
gcggttccttacaagttctacagag

SEQ ID NO: 95720 - DNA, 25 bp, Artificial
  Probe
ctgctctgtaacccatctgtagtaa

SEQ ID NO: 95721 - DNA, 25 bp, Artificial
  Probe
taatagatattggtgtttcctcgtg

SEQ ID NO: 95722 - DNA, 25 bp, Artificial
  Probe
gtaatagatattggtgtttcctcgt

SEQ ID NO: 95723 - DNA, 25 bp, Artificial
  Probe
tgtaatagatattggtgtttcctcg

SEQ ID NO: 95724 - DNA, 25 bp, Artificial
  Probe
gaaagtgaggagaaagtgaagttgg

SEQ ID NO: 95725 - DNA, 25 bp, Artificial
  Probe
ggaaagtgaggagaaagtgaagttg

SEQ ID NO: 95726 - DNA, 25 bp, Artificial
  Probe
cttggaaagtgaggagaaagtgaag

SEQ ID NO: 95727 - DNA, 25 bp, Artificial
  Probe
agacttcttcattcattcccagttg

SEQ ID NO: 95728 - DNA, 25 bp, Artificial
  Probe
tatttcaagtgcctagactgttact

SEQ ID NO: 95729 - DNA, 25 bp, Artificial
  Probe
gtttatggactggaagagatcaaca

SEQ ID NO: 95730 - DNA, 25 bp, Artificial
  Probe
aagacttcttcattcattcccagtt

SEQ ID NO: 95731 - DNA, 25 bp, Artificial
  Probe
cggttccttacaagttctacagagg

SEQ ID NO: 95732 - DNA, 25 bp, Artificial
  Probe
gatggcggttccttacaagttctac

SEQ ID NO: 95733 - DNA, 25 bp, Artificial
  Probe
acagagttgagaagctaagtgttca

SEQ ID NO: 95734 - DNA, 25 bp, Artificial
  Probe
tggaaagtgaggagaaagtgaagtt

SEQ ID NO: 95735 - DNA, 25 bp, Artificial
  Probe
ttggaaagtgaggagaaagtgaagt

SEQ ID NO: 95736 - DNA, 25 bp, Artificial
  Probe
ctaactgtgaaatatctcaagcccg

SEQ ID NO: 95737 - DNA, 25 bp, Artificial
  Probe
tagatattggtgtttcctcgtgtcc

SEQ ID NO: 95738 - DNA, 25 bp, Artificial
  Probe
ctctgtaacccatctgtagtaattt

SEQ ID NO: 95739 - DNA, 25 bp, Artificial
  Probe
ggtttatggactggaagagatcaac

SEQ ID NO: 95740 - DNA, 25 bp, Artificial
  Probe
tctgctctgtaacccatctgtagta

SEQ ID NO: 95741 - DNA, 25 bp, Artificial
  Probe
agatggcggttccttacaagttcta

SEQ ID NO: 95742 - DNA, 25 bp, Artificial
  Probe
tagtactgtcatctgtctgtcttct

SEQ ID NO: 95743 - DNA, 25 bp, Artificial
  Probe
gtagtactgtcatctgtctgtcttc

SEQ ID NO: 95744 - DNA, 25 bp, Artificial
  Probe
tgctgatgtcaaagtgtaatagata

SEQ ID NO: 95745 - DNA, 25 bp, Artificial
  Probe
cagagcaaggactataatgatgact

SEQ ID NO: 95746 - DNA, 25 bp, Artificial
  Probe
taccagagcaaggactataatgatg

SEQ ID NO: 95747 - DNA, 25 bp, Artificial
  Probe
acttgtagatgctgatgataccttc

SEQ ID NO: 95748 - DNA, 25 bp, Artificial
  Probe
cacttgtagatgctgatgatacctt

SEQ ID NO: 95749 - DNA, 25 bp, Artificial
  Probe
ccagagcaaggactataatgatgac

SEQ ID NO: 95750 - DNA, 25 bp, Artificial
  Probe
cttgtagatgctgatgataccttcc

SEQ ID NO: 95751 - DNA, 25 bp, Artificial
  Probe
taatgatgactactatgaggagagc

SEQ ID NO: 95752 - DNA, 25 bp, Artificial
  Probe
accagagcaaggactataatgatga

SEQ ID NO: 95753 - DNA, 25 bp, Artificial
  Probe
ttaccagagcaaggactataatgat

SEQ ID NO: 95754 - DNA, 25 bp, Artificial
  Probe
agcaaggactataatgatgactact

SEQ ID NO: 95755 - DNA, 25 bp, Artificial
  Probe
ttgtagatgctgatgataccttcca

SEQ ID NO: 95756 - DNA, 25 bp, Artificial
  Probe
gagcaaggactataatgatgactac

SEQ ID NO: 95757 - DNA, 25 bp, Artificial
  Probe
agagcaaggactataatgatgacta

SEQ ID NO: 95758 - DNA, 25 bp, Artificial
  Probe
tgtagatgctgatgataccttccat

SEQ ID NO: 95759 - DNA, 25 bp, Artificial
  Probe
ctcacttgtagatgctgatgatacc

SEQ ID NO: 95760 - DNA, 25 bp, Artificial
  Probe
cctcacttgtagatgctgatgatac

SEQ ID NO: 95761 - DNA, 25 bp, Artificial
  Probe
tcacttgtagatgctgatgatacct

SEQ ID NO: 95762 - DNA, 25 bp, Artificial
  Probe
acctcacttgtagatgctgatgata

SEQ ID NO: 95763 - DNA, 25 bp, Artificial
  Probe
cttctgtgtcctcctcttcatcttc

SEQ ID NO: 95764 - DNA, 25 bp, Artificial
  Probe
aatgatgactactatgaggagagct

SEQ ID NO: 95765 - DNA, 25 bp, Artificial
  Probe
tgatgactactatgaggagagctat

SEQ ID NO: 95766 - DNA, 25 bp, Artificial
  Probe
atgatgactactatgaggagagcta

SEQ ID NO: 95767 - DNA, 25 bp, Artificial
  Probe
gcaaggactataatgatgactacta

SEQ ID NO: 95768 - DNA, 25 bp, Artificial
  Probe
gacctcacttgtagatgctgatgat

SEQ ID NO: 95769 - DNA, 25 bp, Artificial
  Probe
ttctgtgtcctcctcttcatcttct

SEQ ID NO: 95770 - DNA, 25 bp, Artificial
  Probe
gatgactactatgaggagagctatt

SEQ ID NO: 95771 - DNA, 25 bp, Artificial
  Probe
tttaccagagcaaggactataatga

SEQ ID NO: 95772 - DNA, 25 bp, Artificial
  Probe
cttactttaccagagcaaggactat

SEQ ID NO: 95773 - DNA, 25 bp, Artificial
  Probe
gctttcgtggacacaataataaaca

SEQ ID NO: 95774 - DNA, 25 bp, Artificial
  Probe
tgctttcgtggacacaataataaac

SEQ ID NO: 95775 - DNA, 25 bp, Artificial
  Probe
tctgtgtcctcctcttcatcttctc

SEQ ID NO: 95776 - DNA, 25 bp, Artificial
  Probe
actttaccagagcaaggactataat

SEQ ID NO: 95777 - DNA, 25 bp, Artificial
  Probe
ctttaccagagcaaggactataatg

SEQ ID NO: 95778 - DNA, 25 bp, Artificial
  Probe
tttctgctctttgtttactattcca

SEQ ID NO: 95779 - DNA, 25 bp, Artificial
  Probe
ctttgctttcgtggacacaataata

SEQ ID NO: 95780 - DNA, 25 bp, Artificial
  Probe
ttgctttcgtggacacaataataaa

SEQ ID NO: 95781 - DNA, 25 bp, Artificial
  Probe
tttgctttcgtggacacaataataa

SEQ ID NO: 95782 - DNA, 25 bp, Artificial
  Probe
ttctgctctttgtttactattccat

SEQ ID NO: 95783 - DNA, 25 bp, Artificial
  Probe
tccctgggcttatcatattatccta

SEQ ID NO: 95784 - DNA, 25 bp, Artificial
  Probe
tactttaccagagcaaggactataa

SEQ ID NO: 95785 - DNA, 25 bp, Artificial
  Probe
ttactttaccagagcaaggactata

SEQ ID NO: 95786 - DNA, 25 bp, Artificial
  Probe
ccctgggcttatcatattatcctag

SEQ ID NO: 95787 - DNA, 25 bp, Artificial
  Probe
ataatgatgactactatgaggagag

SEQ ID NO: 95788 - DNA, 25 bp, Artificial
  Probe
ctttctgctctttgtttactattcc

SEQ ID NO: 95789 - DNA, 25 bp, Artificial
  Probe
cctttctgctctttgtttactattc

SEQ ID NO: 95790 - DNA, 25 bp, Artificial
  Probe
acaagtccttcatcaagaactatcc

SEQ ID NO: 95791 - DNA, 25 bp, Artificial
  Probe
tacaagtccttcatcaagaactatc

SEQ ID NO: 95792 - DNA, 25 bp, Artificial
  Probe
gtacaagtccttcatcaagaactat

SEQ ID NO: 95793 - DNA, 25 bp, Artificial
  Probe
attctatcgcaatgggaagtatgat

SEQ ID NO: 95794 - DNA, 25 bp, Artificial
  Probe
aattctatcgcaatgggaagtatga

SEQ ID NO: 95795 - DNA, 25 bp, Artificial
  Probe
tacgagatggagacaaatcacgata

SEQ ID NO: 95796 - DNA, 25 bp, Artificial
  Probe
gaactactaaagacagccattcagg

SEQ ID NO: 95797 - DNA, 25 bp, Artificial
  Probe
ggaactactaaagacagccattcag

SEQ ID NO: 95798 - DNA, 25 bp, Artificial
  Probe
caagtccttcatcaagaactatccc

SEQ ID NO: 95799 - DNA, 25 bp, Artificial
  Probe
ttctatcgcaatgggaagtatgatc

SEQ ID NO: 95800 - DNA, 25 bp, Artificial
  Probe
agaaactaagtgttgtggatcaaga

SEQ ID NO: 95801 - DNA, 25 bp, Artificial
  Probe
ctatcgcaatgggaagtatgatctg

SEQ ID NO: 95802 - DNA, 25 bp, Artificial
  Probe
gagatggagacaaatcacgatacct

SEQ ID NO: 95803 - DNA, 25 bp, Artificial
  Probe
gaaactaagtgttgtggatcaagaa

SEQ ID NO: 95804 - DNA, 25 bp, Artificial
  Probe
tctatcgcaatgggaagtatgatct

SEQ ID NO: 95805 - DNA, 25 bp, Artificial
  Probe
aagaaactaagtgttgtggatcaag

SEQ ID NO: 95806 - DNA, 25 bp, Artificial
  Probe
agatggagacaaatcacgatacctg

SEQ ID NO: 95807 - DNA, 25 bp, Artificial
  Probe
aaactaagtgttgtggatcaagaaa

SEQ ID NO: 95808 - DNA, 25 bp, Artificial
  Probe
aaagaaactaagtgttgtggatcaa

SEQ ID NO: 95809 - DNA, 25 bp, Artificial
  Probe
ctacgagatggagacaaatcacgat

SEQ ID NO: 95810 - DNA, 25 bp, Artificial
  Probe
aagtccttcatcaagaactatcccg

SEQ ID NO: 95811 - DNA, 25 bp, Artificial
  Probe
acgagatggagacaaatcacgatac

SEQ ID NO: 95812 - DNA, 25 bp, Artificial
  Probe
tatcgcaatgggaagtatgatctgg

SEQ ID NO: 95813 - DNA, 25 bp, Artificial
  Probe
ctggaactactaaagacagccattc

SEQ ID NO: 95814 - DNA, 25 bp, Artificial
  Probe
aaatttatgattgagctggacggaa

SEQ ID NO: 95815 - DNA, 25 bp, Artificial
  Probe
aatttatgattgagctggacggaac

SEQ ID NO: 95816 - DNA, 25 bp, Artificial
  Probe
tgacaaatttatgattgagctggac

SEQ ID NO: 95817 - DNA, 25 bp, Artificial
  Probe
ggaaccgagaataagtccaagtttg

SEQ ID NO: 95818 - DNA, 25 bp, Artificial
  Probe
gacaaatttatgattgagctggacg

SEQ ID NO: 95819 - DNA, 25 bp, Artificial
  Probe
ttgacaaatttatgattgagctgga

SEQ ID NO: 95820 - DNA, 25 bp, Artificial
  Probe
gttgacaaatttatgattgagctgg

SEQ ID NO: 95821 - DNA, 25 bp, Artificial
  Probe
cttcatcaagaactatcccgtggtc

SEQ ID NO: 95822 - DNA, 25 bp, Artificial
  Probe
gtccttcatcaagaactatcccgtg

SEQ ID NO: 95823 - DNA, 25 bp, Artificial
  Probe
gatggagacaaatcacgatacctgg

SEQ ID NO: 95824 - DNA, 25 bp, Artificial
  Probe
cgagatggagacaaatcacgatacc

SEQ ID NO: 95825 - DNA, 25 bp, Artificial
  Probe
tggaactactaaagacagccattca

SEQ ID NO: 95826 - DNA, 25 bp, Artificial
  Probe
caaatttatgattgagctggacgga

SEQ ID NO: 95827 - DNA, 25 bp, Artificial
  Probe
agttgacaaatttatgattgagctg

SEQ ID NO: 95828 - DNA, 25 bp, Artificial
  Probe
agtccttcatcaagaactatcccgt

SEQ ID NO: 95829 - DNA, 25 bp, Artificial
  Probe
ggtatctatgaagcactggagctac

SEQ ID NO: 95830 - DNA, 25 bp, Artificial
  Probe
ttcatcaagaactatcccgtggtct

SEQ ID NO: 95831 - DNA, 25 bp, Artificial
  Probe
cctggaactactaaagacagccatt

SEQ ID NO: 95832 - DNA, 25 bp, Artificial
  Probe
acaaatttatgattgagctggacgg

SEQ ID NO: 95833 - DNA, 25 bp, Artificial
  Probe
gaattctatcgcaatgggaagtatg

SEQ ID NO: 95834 - DNA, 25 bp, Artificial
  Probe
tgaattctatcgcaatgggaagtat

SEQ ID NO: 95835 - DNA, 25 bp, Artificial
  Probe
aagccattaacagcaactattactt

SEQ ID NO: 95836 - DNA, 25 bp, Artificial
  Probe
ttaacagcaactattacttagccat

SEQ ID NO: 95837 - DNA, 25 bp, Artificial
  Probe
attaacagcaactattacttagcca

SEQ ID NO: 95838 - DNA, 25 bp, Artificial
  Probe
agccattaacagcaactattactta

SEQ ID NO: 95839 - DNA, 25 bp, Artificial
  Probe
agcaactattacttagccatgaaca

SEQ ID NO: 95840 - DNA, 25 bp, Artificial
  Probe
cagcaactattacttagccatgaac

SEQ ID NO: 95841 - DNA, 25 bp, Artificial
  Probe
acagcaactattacttagccatgaa

SEQ ID NO: 95842 - DNA, 25 bp, Artificial
  Probe
aacagcaactattacttagccatga

SEQ ID NO: 95843 - DNA, 25 bp, Artificial
  Probe
gcaactattacttagccatgaacaa

SEQ ID NO: 95844 - DNA, 25 bp, Artificial
  Probe
cattaacagcaactattacttagcc

SEQ ID NO: 95845 - DNA, 25 bp, Artificial
  Probe
ccattaacagcaactattacttagc

SEQ ID NO: 95846 - DNA, 25 bp, Artificial
  Probe
gccattaacagcaactattacttag

SEQ ID NO: 95847 - DNA, 25 bp, Artificial
  Probe
taacagcaactattacttagccatg

SEQ ID NO: 95848 - DNA, 25 bp, Artificial
  Probe
tccgtacagtatcctagagataaca

SEQ ID NO: 95849 - DNA, 25 bp, Artificial
  Probe
tgtccgtacagtatcctagagataa

SEQ ID NO: 95850 - DNA, 25 bp, Artificial
  Probe
gtccgtacagtatcctagagataac

SEQ ID NO: 95851 - DNA, 25 bp, Artificial
  Probe
tattacttagccatgaacaagaagg

SEQ ID NO: 95852 - DNA, 25 bp, Artificial
  Probe
agtatcctagagataacatcagtgg

SEQ ID NO: 95853 - DNA, 25 bp, Artificial
  Probe
ccgtacagtatcctagagataacat

SEQ ID NO: 95854 - DNA, 25 bp, Artificial
  Probe
ttcttgttgctcttcttggtgtctt

SEQ ID NO: 95855 - DNA, 25 bp, Artificial
  Probe
gtatcctagagataacatcagtgga

SEQ ID NO: 95856 - DNA, 25 bp, Artificial
  Probe
aatgactgtaaactgaaagagagga

SEQ ID NO: 95857 - DNA, 25 bp, Artificial
  Probe
caatgactgtaaactgaaagagagg

SEQ ID NO: 95858 - DNA, 25 bp, Artificial
  Probe
actattacttagccatgaacaagaa

SEQ ID NO: 95859 - DNA, 25 bp, Artificial
  Probe
aactattacttagccatgaacaaga

SEQ ID NO: 95860 - DNA, 25 bp, Artificial
  Probe
caactattacttagccatgaacaag

SEQ ID NO: 95861 - DNA, 25 bp, Artificial
  Probe
atgactgtaaactgaaagagaggat

SEQ ID NO: 95862 - DNA, 25 bp, Artificial
  Probe
tagagataacatcagtggaaatcgg

SEQ ID NO: 95863 - DNA, 25 bp, Artificial
  Probe
gtcaaagccattaacagcaactatt

SEQ ID NO: 95864 - DNA, 25 bp, Artificial
  Probe
tgtaaactgaaagagaggatagagg

SEQ ID NO: 95865 - DNA, 25 bp, Artificial
  Probe
acagtatcctagagataacatcagt

SEQ ID NO: 95866 - DNA, 25 bp, Artificial
  Probe
aaactgaaagagaggatagaggaaa

SEQ ID NO: 95867 - DNA, 25 bp, Artificial
  Probe
gtaaactgaaagagaggatagagga

SEQ ID NO: 95868 - DNA, 25 bp, Artificial
  Probe
tgactgtaaactgaaagagaggata

SEQ ID NO: 95869 - DNA, 25 bp, Artificial
  Probe
aaagccattaacagcaactattact

SEQ ID NO: 95870 - DNA, 25 bp, Artificial
  Probe
caaagccattaacagcaactattac

SEQ ID NO: 95871 - DNA, 25 bp, Artificial
  Probe
tcaaagccattaacagcaactatta

SEQ ID NO: 95872 - DNA, 25 bp, Artificial
  Probe
gagataacatcagtggaaatcggag

SEQ ID NO: 95873 - DNA, 25 bp, Artificial
  Probe
cagtatcctagagataacatcagtg

SEQ ID NO: 95874 - DNA, 25 bp, Artificial
  Probe
tcttgttgctcttcttggtgtcttc

SEQ ID NO: 95875 - DNA, 25 bp, Artificial
  Probe
cttcttgttgctcttcttggtgtct

SEQ ID NO: 95876 - DNA, 25 bp, Artificial
  Probe
actgtaaactgaaagagaggataga

SEQ ID NO: 95877 - DNA, 25 bp, Artificial
  Probe
agagataacatcagtggaaatcgga

SEQ ID NO: 95878 - DNA, 25 bp, Artificial
  Probe
gataacatcagtggaaatcggagtt

SEQ ID NO: 95879 - DNA, 25 bp, Artificial
  Probe
ctattacttagccatgaacaagaag

SEQ ID NO: 95880 - DNA, 25 bp, Artificial
  Probe
cattgttggcagtcattcttagttg

SEQ ID NO: 95881 - DNA, 25 bp, Artificial
  Probe
acattgttggcagtcattcttagtt

SEQ ID NO: 95882 - DNA, 25 bp, Artificial
  Probe
tagacattgttggcagtcattctta

SEQ ID NO: 95883 - DNA, 25 bp, Artificial
  Probe
ttagacattgttggcagtcattctt

SEQ ID NO: 95884 - DNA, 25 bp, Artificial
  Probe
tacactaagttcagtctcatggttc

SEQ ID NO: 95885 - DNA, 25 bp, Artificial
  Probe
gtacactaagttcagtctcatggtt

SEQ ID NO: 95886 - DNA, 25 bp, Artificial
  Probe
agacattgttggcagtcattcttag

SEQ ID NO: 95887 - DNA, 25 bp, Artificial
  Probe
gacattgttggcagtcattcttagt

SEQ ID NO: 95888 - DNA, 25 bp, Artificial
  Probe
gttagacattgttggcagtcattct

SEQ ID NO: 95889 - DNA, 25 bp, Artificial
  Probe
tgttagacattgttggcagtcattc

SEQ ID NO: 95890 - DNA, 25 bp, Artificial
  Probe
tttacaaacacaaagagaggtaggt

SEQ ID NO: 95891 - DNA, 25 bp, Artificial
  Probe
gtgttagacattgttggcagtcatt

SEQ ID NO: 95892 - DNA, 25 bp, Artificial
  Probe
atgtcgtttattggctttactatgt

SEQ ID NO: 95893 - DNA, 25 bp, Artificial
  Probe
ctaagttcagtctcatggttcggtt

SEQ ID NO: 95894 - DNA, 25 bp, Artificial
  Probe
gtttacaaacacaaagagaggtagg

SEQ ID NO: 95895 - DNA, 25 bp, Artificial
  Probe
tgtcgtttattggctttactatgta

SEQ ID NO: 95896 - DNA, 25 bp, Artificial
  Probe
atctcatgctgccaaacaattaaat

SEQ ID NO: 95897 - DNA, 25 bp, Artificial
  Probe
tcatgctgccaaacaattaaataga

SEQ ID NO: 95898 - DNA, 25 bp, Artificial
  Probe
tctcatgctgccaaacaattaaata

SEQ ID NO: 95899 - DNA, 25 bp, Artificial
  Probe
acactaagttcagtctcatggttcg

SEQ ID NO: 95900 - DNA, 25 bp, Artificial
  Probe
tctgtaagagttccatcaattactt

SEQ ID NO: 95901 - DNA, 25 bp, Artificial
  Probe
ctcatgctgccaaacaattaaatag

SEQ ID NO: 95902 - DNA, 25 bp, Artificial
  Probe
atgctgccaaacaattaaatagaaa

SEQ ID NO: 95903 - DNA, 25 bp, Artificial
  Probe
cattcttagttgccctggatcttac

SEQ ID NO: 95904 - DNA, 25 bp, Artificial
  Probe
tcattcttagttgccctggatctta

SEQ ID NO: 95905 - DNA, 25 bp, Artificial
  Probe
aatgtcgtttattggctttactatg

SEQ ID NO: 95906 - DNA, 25 bp, Artificial
  Probe
catgctgccaaacaattaaatagaa

SEQ ID NO: 95907 - DNA, 25 bp, Artificial
  Probe
catctcatgctgccaaacaattaaa

SEQ ID NO: 95908 - DNA, 25 bp, Artificial
  Probe
cactgtgttctgggtaaactgtaac

SEQ ID NO: 95909 - DNA, 25 bp, Artificial
  Probe
tgccctggatcttactggattattt

SEQ ID NO: 95910 - DNA, 25 bp, Artificial
  Probe
ttgccctggatcttactggattatt

SEQ ID NO: 95911 - DNA, 25 bp, Artificial
  Probe
ttacaaacacaaagagaggtaggtg

SEQ ID NO: 95912 - DNA, 25 bp, Artificial
  Probe
ttcctgtctattgtggtccaaggta

SEQ ID NO: 95913 - DNA, 25 bp, Artificial
  Probe
attcttagttgccctggatcttact

SEQ ID NO: 95914 - DNA, 25 bp, Artificial
  Probe
gtcgtttattggctttactatgtac

SEQ ID NO: 95915 - DNA, 25 bp, Artificial
  Probe
tttaatgtcgtttattggctttact

SEQ ID NO: 95916 - DNA, 25 bp, Artificial
  Probe
cactaagttcagtctcatggttcgg

SEQ ID NO: 95917 - DNA, 25 bp, Artificial
  Probe
gttgccctggatcttactggattat

SEQ ID NO: 95918 - DNA, 25 bp, Artificial
  Probe
gctctgtaagagttccatcaattac

SEQ ID NO: 95919 - DNA, 25 bp, Artificial
  Probe
aagttcagtctcatggttcggttta

SEQ ID NO: 95920 - DNA, 25 bp, Artificial
  Probe
taagttcagtctcatggttcggttt

SEQ ID NO: 95921 - DNA, 25 bp, Artificial
  Probe
tctgggtaaactgtaaccatctcat

SEQ ID NO: 95922 - DNA, 25 bp, Artificial
  Probe
gttctgggtaaactgtaaccatctc

SEQ ID NO: 95923 - DNA, 25 bp, Artificial
  Probe
gactgacgtgaactccatagacaag

SEQ ID NO: 95924 - DNA, 25 bp, Artificial
  Probe
cttgactgacgtgaactccatagac

SEQ ID NO: 95925 - DNA, 25 bp, Artificial
  Probe
ttccttcttcaacatcgtctattgg

SEQ ID NO: 95926 - DNA, 25 bp, Artificial
  Probe
cttcttcaacatcgtctattggctt

SEQ ID NO: 95927 - DNA, 25 bp, Artificial
  Probe
gaggtctaagccagatgatgatgat

SEQ ID NO: 95928 - DNA, 25 bp, Artificial
  Probe
aggtctaagccagatgatgatgatg

SEQ ID NO: 95929 - DNA, 25 bp, Artificial
  Probe
aagtaatgactacactaaggtcctc

SEQ ID NO: 95930 - DNA, 25 bp, Artificial
  Probe
agtaatgactacactaaggtcctcg

SEQ ID NO: 95931 - DNA, 25 bp, Artificial
  Probe
ttgaggtctaagccagatgatgatg

SEQ ID NO: 95932 - DNA, 25 bp, Artificial
  Probe
gtaatgactacactaaggtcctcgt

SEQ ID NO: 95933 - DNA, 25 bp, Artificial
  Probe
taatgactacactaaggtcctcgtg

SEQ ID NO: 95934 - DNA, 25 bp, Artificial
  Probe
tgcttctactaagtaatgactacac

SEQ ID NO: 95935 - DNA, 25 bp, Artificial
  Probe
ggttgcttctactaagtaatgacta

SEQ ID NO: 95936 - DNA, 25 bp, Artificial
  Probe
cgtctattggctttactatgtgaac

SEQ ID NO: 95937 - DNA, 25 bp, Artificial
  Probe
tcgtctattggctttactatgtgaa

SEQ ID NO: 95938 - DNA, 25 bp, Artificial
  Probe
ttactatgtgaactaaactccagcc

SEQ ID NO: 95939 - DNA, 25 bp, Artificial
  Probe
taagtaatgactacactaaggtcct

SEQ ID NO: 95940 - DNA, 25 bp, Artificial
  Probe
atcgtctattggctttactatgtga

SEQ ID NO: 95941 - DNA, 25 bp, Artificial
  Probe
ctaagtaatgactacactaaggtcc

SEQ ID NO: 95942 - DNA, 25 bp, Artificial
  Probe
tactatgtgaactaaactccagcct

SEQ ID NO: 95943 - DNA, 25 bp, Artificial
  Probe
aatgctctccatcgttgttcctaag

SEQ ID NO: 95944 - DNA, 25 bp, Artificial
  Probe
catcgtctattggctttactatgtg

SEQ ID NO: 95945 - DNA, 25 bp, Artificial
  Probe
gcttctactaagtaatgactacact

SEQ ID NO: 95946 - DNA, 25 bp, Artificial
  Probe
tgaggtctaagccagatgatgatga

SEQ ID NO: 95947 - DNA, 25 bp, Artificial
  Probe
ttcataacatttgggttgcttctac

SEQ ID NO: 95948 - DNA, 25 bp, Artificial
  Probe
catttcataacatttgggttgcttc

SEQ ID NO: 95949 - DNA, 25 bp, Artificial
  Probe
tcataacatttgggttgcttctact

SEQ ID NO: 95950 - DNA, 25 bp, Artificial
  Probe
atttcataacatttgggttgcttct

SEQ ID NO: 95951 - DNA, 25 bp, Artificial
  Probe
tcaacatcgtctattggctttacta

SEQ ID NO: 95952 - DNA, 25 bp, Artificial
  Probe
ccttcttcaacatcgtctattggct

SEQ ID NO: 95953 - DNA, 25 bp, Artificial
  Probe
tccttcttcaacatcgtctattggc

SEQ ID NO: 95954 - DNA, 25 bp, Artificial
  Probe
aacatttgggttgcttctactaagt

SEQ ID NO: 95955 - DNA, 25 bp, Artificial
  Probe
cttcaacatcgtctattggctttac

SEQ ID NO: 95956 - DNA, 25 bp, Artificial
  Probe
tcttcaacatcgtctattggcttta

SEQ ID NO: 95957 - DNA, 25 bp, Artificial
  Probe
aacatcgtctattggctttactatg

SEQ ID NO: 95958 - DNA, 25 bp, Artificial
  Probe
gtctattggctttactatgtgaact

SEQ ID NO: 95959 - DNA, 25 bp, Artificial
  Probe
ttcaacatcgtctattggctttact

SEQ ID NO: 95960 - DNA, 25 bp, Artificial
  Probe
acatttgggttgcttctactaagta

SEQ ID NO: 95961 - DNA, 25 bp, Artificial
  Probe
cataacatttgggttgcttctacta

SEQ ID NO: 95962 - DNA, 25 bp, Artificial
  Probe
tttcataacatttgggttgcttcta

SEQ ID NO: 95963 - DNA, 25 bp, Artificial
  Probe
ggctttactatgtgaactaaactcc

SEQ ID NO: 95964 - DNA, 25 bp, Artificial
  Probe
tttccttcttcaacatcgtctattg

SEQ ID NO: 95965 - DNA, 25 bp, Artificial
  Probe
tgggttgcttctactaagtaatgac

SEQ ID NO: 95966 - DNA, 25 bp, Artificial
  Probe
ttgggttgcttctactaagtaatga

SEQ ID NO: 95967 - DNA, 25 bp, Artificial
  Probe
taacatttgggttgcttctactaag

SEQ ID NO: 95968 - DNA, 25 bp, Artificial
  Probe
cctatcctgtggtccatttcataac

SEQ ID NO: 95969 - DNA, 25 bp, Artificial
  Probe
caacatcgtctattggctttactat

SEQ ID NO: 95970 - DNA, 25 bp, Artificial
  Probe
tataacaacttccaggagtatgagc

SEQ ID NO: 95971 - DNA, 25 bp, Artificial
  Probe
ataacaacttccaggagtatgagct

SEQ ID NO: 95972 - DNA, 25 bp, Artificial
  Probe
ttataacaacttccaggagtatgag

SEQ ID NO: 95973 - DNA, 25 bp, Artificial
  Probe
agcctcataaccaatcctttcagat

SEQ ID NO: 95974 - DNA, 25 bp, Artificial
  Probe
cctagaaactgcccaatgagtattt

SEQ ID NO: 95975 - DNA, 25 bp, Artificial
  Probe
ttctgatatccagtaagcatctctg

SEQ ID NO: 95976 - DNA, 25 bp, Artificial
  Probe
acattctgatatccagtaagcatct

SEQ ID NO: 95977 - DNA, 25 bp, Artificial
  Probe
cattctgatatccagtaagcatctc

SEQ ID NO: 95978 - DNA, 25 bp, Artificial
  Probe
tcctagaaactgcccaatgagtatt

SEQ ID NO: 95979 - DNA, 25 bp, Artificial
  Probe
attctgatatccagtaagcatctct

SEQ ID NO: 95980 - DNA, 25 bp, Artificial
  Probe
aacattctgatatccagtaagcatc

SEQ ID NO: 95981 - DNA, 25 bp, Artificial
  Probe
gagcctcataaccaatcctttcaga

SEQ ID NO: 95982 - DNA, 25 bp, Artificial
  Probe
ctcctagaaactgcccaatgagtat

SEQ ID NO: 95983 - DNA, 25 bp, Artificial
  Probe
catttgggaactcagcattcatcac

SEQ ID NO: 95984 - DNA, 25 bp, Artificial
  Probe
gcctcataaccaatcctttcagatt

SEQ ID NO: 95985 - DNA, 25 bp, Artificial
  Probe
caaagtttctgtgggagcctcataa

SEQ ID NO: 95986 - DNA, 25 bp, Artificial
  Probe
atttgggaactcagcattcatcaca

SEQ ID NO: 95987 - DNA, 25 bp, Artificial
  Probe
tcataaccaatcctttcagattagg

SEQ ID NO: 95988 - DNA, 25 bp, Artificial
  Probe
cctcataaccaatcctttcagatta

SEQ ID NO: 95989 - DNA, 25 bp, Artificial
  Probe
aaagtttctgtgggagcctcataac

SEQ ID NO: 95990 - DNA, 25 bp, Artificial
  Probe
cccatcctttacgttataataagca

SEQ ID NO: 95991 - DNA, 25 bp, Artificial
  Probe
tctcctagaaactgcccaatgagta

SEQ ID NO: 95992 - DNA, 25 bp, Artificial
  Probe
cattcatcacaacagctctttccag

SEQ ID NO: 95993 - DNA, 25 bp, Artificial
  Probe
tttgggaactcagcattcatcacaa

SEQ ID NO: 95994 - DNA, 25 bp, Artificial
  Probe
ttcaagacgaagaagcaaaacattc

SEQ ID NO: 95995 - DNA, 25 bp, Artificial
  Probe
attcatcacaacagctctttccaga

SEQ ID NO: 95996 - DNA, 25 bp, Artificial
  Probe
caagaagtttcaagctcgattcagg

SEQ ID NO: 95997 - DNA, 25 bp, Artificial
  Probe
taagcatctctggatgatcctgtct

SEQ ID NO: 95998 - DNA, 25 bp, Artificial
  Probe
gtaagcatctctggatgatcctgtc

SEQ ID NO: 95999 - DNA, 25 bp, Artificial
  Probe
cagtaagcatctctggatgatcctg

SEQ ID NO: 96000 - DNA, 25 bp, Artificial
  Probe
ggaactcagcattcatcacaacagc

SEQ ID NO: 96001 - DNA, 25 bp, Artificial
  Probe
tagaaactgcccaatgagtattttg

SEQ ID NO: 96002 - DNA, 25 bp, Artificial
  Probe
ttcatcacaacagctctttccagaa

SEQ ID NO: 96003 - DNA, 25 bp, Artificial
  Probe
taataagcaagaagtttcaagctcg

SEQ ID NO: 96004 - DNA, 25 bp, Artificial
  Probe
ctcataaccaatcctttcagattag

SEQ ID NO: 96005 - DNA, 25 bp, Artificial
  Probe
ttgctctggtacagtgagtgaacaa

SEQ ID NO: 96006 - DNA, 25 bp, Artificial
  Probe
gaaactgcccaatgagtattttgtg

SEQ ID NO: 96007 - DNA, 25 bp, Artificial
  Probe
agaaactgcccaatgagtattttgt

SEQ ID NO: 96008 - DNA, 25 bp, Artificial
  Probe
agtaagcatctctggatgatcctgt

SEQ ID NO: 96009 - DNA, 25 bp, Artificial
  Probe
ctagaaactgcccaatgagtatttt

SEQ ID NO: 96010 - DNA, 25 bp, Artificial
  Probe
aaacattctgatatccagtaagcat

SEQ ID NO: 96011 - DNA, 25 bp, Artificial
  Probe
ataagcaagaagtttcaagctcgat

SEQ ID NO: 96012 - DNA, 25 bp, Artificial
  Probe
agcatttgggaactcagcattcatc

SEQ ID NO: 96013 - DNA, 25 bp, Artificial
  Probe
gcaagaagtttcaagctcgattcag

SEQ ID NO: 96014 - DNA, 25 bp, Artificial
  Probe
ttgggaactcagcattcatcacaac

SEQ ID NO: 96015 - DNA, 25 bp, Artificial
  Probe
taactgaataccactctgtaattgc

SEQ ID NO: 96016 - DNA, 25 bp, Artificial
  Probe
acgaaggtaattgttgttctgttaa

SEQ ID NO: 96017 - DNA, 25 bp, Artificial
  Probe
atacgaaggtaattgttgttctgtt

SEQ ID NO: 96018 - DNA, 25 bp, Artificial
  Probe
tacgaaggtaattgttgttctgtta

SEQ ID NO: 96019 - DNA, 25 bp, Artificial
  Probe
tatacgaaggtaattgttgttctgt

SEQ ID NO: 96020 - DNA, 25 bp, Artificial
  Probe
aactgaataccactctgtaattgca

SEQ ID NO: 96021 - DNA, 25 bp, Artificial
  Probe
ttatacgaaggtaattgttgttctg

SEQ ID NO: 96022 - DNA, 25 bp, Artificial
  Probe
gaaattaaagcaggttcttgttggt

SEQ ID NO: 96023 - DNA, 25 bp, Artificial
  Probe
tggaaattaaagcaggttcttgttg

SEQ ID NO: 96024 - DNA, 25 bp, Artificial
  Probe
atggaaattaaagcaggttcttgtt

SEQ ID NO: 96025 - DNA, 25 bp, Artificial
  Probe
aaccaacttcttgttcttcctcctg

SEQ ID NO: 96026 - DNA, 25 bp, Artificial
  Probe
attgaaaccaacttcttgttcttcc

SEQ ID NO: 96027 - DNA, 25 bp, Artificial
  Probe
ctgattgaaaccaacttcttgttct

SEQ ID NO: 96028 - DNA, 25 bp, Artificial
  Probe
caaacgattgacacctctgatattc

SEQ ID NO: 96029 - DNA, 25 bp, Artificial
  Probe
aaattaaagcaggttcttgttggtg

SEQ ID NO: 96030 - DNA, 25 bp, Artificial
  Probe
tgattgaaaccaacttcttgttctt

SEQ ID NO: 96031 - DNA, 25 bp, Artificial
  Probe
aattgctgattgaaaccaacttctt

SEQ ID NO: 96032 - DNA, 25 bp, Artificial
  Probe
attgctgattgaaaccaacttcttg

SEQ ID NO: 96033 - DNA, 25 bp, Artificial
  Probe
aaacgattgacacctctgatattca

SEQ ID NO: 96034 - DNA, 25 bp, Artificial
  Probe
ggaaattaaagcaggttcttgttgg

SEQ ID NO: 96035 - DNA, 25 bp, Artificial
  Probe
taattgctgattgaaaccaacttct

SEQ ID NO: 96036 - DNA, 25 bp, Artificial
  Probe
ttgaaaccaacttcttgttcttcct

SEQ ID NO: 96037 - DNA, 25 bp, Artificial
  Probe
gattgaaaccaacttcttgttcttc

SEQ ID NO: 96038 - DNA, 25 bp, Artificial
  Probe
ttaactgaataccactctgtaattg

SEQ ID NO: 96039 - DNA, 25 bp, Artificial
  Probe
tgaaaccaacttcttgttcttcctc

SEQ ID NO: 96040 - DNA, 25 bp, Artificial
  Probe
gctgattgaaaccaacttcttgttc

SEQ ID NO: 96041 - DNA, 25 bp, Artificial
  Probe
ataattgctgattgaaaccaacttc

SEQ ID NO: 96042 - DNA, 25 bp, Artificial
  Probe
catggaaattaaagcaggttcttgt

SEQ ID NO: 96043 - DNA, 25 bp, Artificial
  Probe
ttctgttaactgaataccactctgt

SEQ ID NO: 96044 - DNA, 25 bp, Artificial
  Probe
tgctgattgaaaccaacttcttgtt

SEQ ID NO: 96045 - DNA, 25 bp, Artificial
  Probe
ttgctgattgaaaccaacttcttgt

SEQ ID NO: 96046 - DNA, 25 bp, Artificial
  Probe
tgttctgttaactgaataccactct

SEQ ID NO: 96047 - DNA, 25 bp, Artificial
  Probe
tgttgttctgttaactgaataccac

SEQ ID NO: 96048 - DNA, 25 bp, Artificial
  Probe
tctgttaactgaataccactctgta

SEQ ID NO: 96049 - DNA, 25 bp, Artificial
  Probe
gttctgttaactgaataccactctg

SEQ ID NO: 96050 - DNA, 25 bp, Artificial
  Probe
gaaaccaacttcttgttcttcctcc

SEQ ID NO: 96051 - DNA, 25 bp, Artificial
  Probe
aataattgctgattgaaaccaactt

SEQ ID NO: 96052 - DNA, 25 bp, Artificial
  Probe
aaataattgctgattgaaaccaact

SEQ ID NO: 96053 - DNA, 25 bp, Artificial
  Probe
gttgttctgttaactgaataccact

SEQ ID NO: 96054 - DNA, 25 bp, Artificial
  Probe
ttgttctgttaactgaataccactc

SEQ ID NO: 96055 - DNA, 25 bp, Artificial
  Probe
cgaaggtaattgttgttctgttaac

SEQ ID NO: 96056 - DNA, 25 bp, Artificial
  Probe
gcatggaaattaaagcaggttcttg

SEQ ID NO: 96057 - DNA, 25 bp, Artificial
  Probe
gttgacattctgaatgcttctaagt

SEQ ID NO: 96058 - DNA, 25 bp, Artificial
  Probe
tgttgacattctgaatgcttctaag

SEQ ID NO: 96059 - DNA, 25 bp, Artificial
  Probe
gggttgtaaattggcatggaaatta

SEQ ID NO: 96060 - DNA, 25 bp, Artificial
  Probe
ggatatacaagttacagaaggctca

SEQ ID NO: 96061 - DNA, 25 bp, Artificial
  Probe
tcaggatatacaagttacagaaggc

SEQ ID NO: 96062 - DNA, 25 bp, Artificial
  Probe
atatacaagttacagaaggctcagg

SEQ ID NO: 96063 - DNA, 25 bp, Artificial
  Probe
caggatatacaagttacagaaggct

SEQ ID NO: 96064 - DNA, 25 bp, Artificial
  Probe
aggatatacaagttacagaaggctc

SEQ ID NO: 96065 - DNA, 25 bp, Artificial
  Probe
tatacaagttacagaaggctcagga

SEQ ID NO: 96066 - DNA, 25 bp, Artificial
  Probe
gatatacaagttacagaaggctcag

SEQ ID NO: 96067 - DNA, 25 bp, Artificial
  Probe
ccagaggaagatcaggatatacaag

SEQ ID NO: 96068 - DNA, 25 bp, Artificial
  Probe
ggtcataattgttggtgtgttggta

SEQ ID NO: 96069 - DNA, 25 bp, Artificial
  Probe
taattgttggtgtgttggtactgat

SEQ ID NO: 96070 - DNA, 25 bp, Artificial
  Probe
ataattgttggtgtgttggtactga

SEQ ID NO: 96071 - DNA, 25 bp, Artificial
  Probe
cataattgttggtgtgttggtactg

SEQ ID NO: 96072 - DNA, 25 bp, Artificial
  Probe
tcataattgttggtgtgttggtact

SEQ ID NO: 96073 - DNA, 25 bp, Artificial
  Probe
gtcataattgttggtgtgttggtac

SEQ ID NO: 96074 - DNA, 25 bp, Artificial
  Probe
cagaggaagatcaggatatacaagt

SEQ ID NO: 96075 - DNA, 25 bp, Artificial
  Probe
atacaagttacagaaggctcaggag

SEQ ID NO: 96076 - DNA, 25 bp, Artificial
  Probe
gccagaggaagatcaggatatacaa

SEQ ID NO: 96077 - DNA, 25 bp, Artificial
  Probe
agaggaagatcaggatatacaagtt

SEQ ID NO: 96078 - DNA, 25 bp, Artificial
  Probe
aattgttggtgtgttggtactgatc

SEQ ID NO: 96079 - DNA, 25 bp, Artificial
  Probe
atcaggatatacaagttacagaagg

SEQ ID NO: 96080 - DNA, 25 bp, Artificial
  Probe
ccacctacatacattcctacctttg

SEQ ID NO: 96081 - DNA, 25 bp, Artificial
  Probe
ggaagatcaggatatacaagttaca

SEQ ID NO: 96082 - DNA, 25 bp, Artificial
  Probe
aggaagatcaggatatacaagttac

SEQ ID NO: 96083 - DNA, 25 bp, Artificial
  Probe
agaatacctgggtcataattgttgg

SEQ ID NO: 96084 - DNA, 25 bp, Artificial
  Probe
cccacctacatacattcctaccttt

SEQ ID NO: 96085 - DNA, 25 bp, Artificial
  Probe
ataaatactatgtggacgagcagtg

SEQ ID NO: 96086 - DNA, 25 bp, Artificial
  Probe
tataaatactatgtggacgagcagt

SEQ ID NO: 96087 - DNA, 25 bp, Artificial
  Probe
gaggaagatcaggatatacaagtta

SEQ ID NO: 96088 - DNA, 25 bp, Artificial
  Probe
gctgatttctttcacgagtcatata

SEQ ID NO: 96089 - DNA, 25 bp, Artificial
  Probe
atacattcctacctttgttcccaat

SEQ ID NO: 96090 - DNA, 25 bp, Artificial
  Probe
tacatacattcctacctttgttccc

SEQ ID NO: 96091 - DNA, 25 bp, Artificial
  Probe
cacctacatacattcctacctttgt

SEQ ID NO: 96092 - DNA, 25 bp, Artificial
  Probe
atataaatactatgtggacgagcag

SEQ ID NO: 96093 - DNA, 25 bp, Artificial
  Probe
acctacatacattcctacctttgtt

SEQ ID NO: 96094 - DNA, 25 bp, Artificial
  Probe
catacattcctacctttgttcccaa

SEQ ID NO: 96095 - DNA, 25 bp, Artificial
  Probe
cagaagcctttcctttgaatcaata

SEQ ID NO: 96096 - DNA, 25 bp, Artificial
  Probe
tacaagttacagaaggctcaggagg

SEQ ID NO: 96097 - DNA, 25 bp, Artificial
  Probe
aatgtcaaccaccatgcctaaatat

SEQ ID NO: 96098 - DNA, 25 bp, Artificial
  Probe
ctacatacattcctacctttgttcc

SEQ ID NO: 96099 - DNA, 25 bp, Artificial
  Probe
cctacatacattcctacctttgttc

SEQ ID NO: 96100 - DNA, 25 bp, Artificial
  Probe
cagaatacctgggtcataattgttg

SEQ ID NO: 96101 - DNA, 25 bp, Artificial
  Probe
tcagaatacctgggtcataattgtt

SEQ ID NO: 96102 - DNA, 25 bp, Artificial
  Probe
cgccagaggaagatcaggatataca

SEQ ID NO: 96103 - DNA, 25 bp, Artificial
  Probe
atcagaatacctgggtcataattgt

SEQ ID NO: 96104 - DNA, 25 bp, Artificial
  Probe
agaagcctttcctttgaatcaataa

SEQ ID NO: 96105 - DNA, 25 bp, Artificial
  Probe
ttggagaatgagttcggatacaagc

SEQ ID NO: 96106 - DNA, 25 bp, Artificial
  Probe
tttggagaatgagttcggatacaag

SEQ ID NO: 96107 - DNA, 25 bp, Artificial
  Probe
tttggaacggatgaaacaattcttg

SEQ ID NO: 96108 - DNA, 25 bp, Artificial
  Probe
ttggaacggatgaaacaattcttga

SEQ ID NO: 96109 - DNA, 25 bp, Artificial
  Probe
tggaacggatgaaacaattcttgac

SEQ ID NO: 96110 - DNA, 25 bp, Artificial
  Probe
cggatgaaacaattcttgacggaaa

SEQ ID NO: 96111 - DNA, 25 bp, Artificial
  Probe
tgtgaaggacttgaaggtgaaagag

SEQ ID NO: 96112 - DNA, 25 bp, Artificial
  Probe
ctgtgaaggacttgaaggtgaaaga

SEQ ID NO: 96113 - DNA, 25 bp, Artificial
  Probe
gagaatgagttcggatacaagctgt

SEQ ID NO: 96114 - DNA, 25 bp, Artificial
  Probe
aaatgcagaagaagaagagtttgtg

SEQ ID NO: 96115 - DNA, 25 bp, Artificial
  Probe
gaaatgcagaagaagaagagtttgt

SEQ ID NO: 96116 - DNA, 25 bp, Artificial
  Probe
agaaatgcagaagaagaagagtttg

SEQ ID NO: 96117 - DNA, 25 bp, Artificial
  Probe
caagaaatgcagaagaagaagagtt

SEQ ID NO: 96118 - DNA, 25 bp, Artificial
  Probe
aagaaatgcagaagaagaagagttt

SEQ ID NO: 96119 - DNA, 25 bp, Artificial
  Probe
agaatgagttcggatacaagctgtg

SEQ ID NO: 96120 - DNA, 25 bp, Artificial
  Probe
ggagaatgagttcggatacaagctg

SEQ ID NO: 96121 - DNA, 25 bp, Artificial
  Probe
gtgctcaccgtcattaaatggaaag

SEQ ID NO: 96122 - DNA, 25 bp, Artificial
  Probe
gaacggatgaaacaattcttgacgg

SEQ ID NO: 96123 - DNA, 25 bp, Artificial
  Probe
ggaacggatgaaacaattcttgacg

SEQ ID NO: 96124 - DNA, 25 bp, Artificial
  Probe
tggagaatgagttcggatacaagct

SEQ ID NO: 96125 - DNA, 25 bp, Artificial
  Probe
gaagaagaagagtttgtgctgctga

SEQ ID NO: 96126 - DNA, 25 bp, Artificial
  Probe
agaagaagaagagtttgtgctgctg

SEQ ID NO: 96127 - DNA, 25 bp, Artificial
  Probe
gaattgtcacagatgagaccctgag

SEQ ID NO: 96128 - DNA, 25 bp, Artificial
  Probe
gagttttggagaatgagttcggata

SEQ ID NO: 96129 - DNA, 25 bp, Artificial
  Probe
acggatgaaacaattcttgacggaa

SEQ ID NO: 96130 - DNA, 25 bp, Artificial
  Probe
aacggatgaaacaattcttgacgga

SEQ ID NO: 96131 - DNA, 25 bp, Artificial
  Probe
agttttggagaatgagttcggatac

SEQ ID NO: 96132 - DNA, 25 bp, Artificial
  Probe
gtacaaagctgtgaaggacttgaag

SEQ ID NO: 96133 - DNA, 25 bp, Artificial
  Probe
ttttggagaatgagttcggatacaa

SEQ ID NO: 96134 - DNA, 25 bp, Artificial
  Probe
aagaagaagagtttgtgctgctgac

SEQ ID NO: 96135 - DNA, 25 bp, Artificial
  Probe
gttttggagaatgagttcggataca

SEQ ID NO: 96136 - DNA, 25 bp, Artificial
  Probe
ttttggaacggatgaaacaattctt

SEQ ID NO: 96137 - DNA, 25 bp, Artificial
  Probe
attttggaacggatgaaacaattct

SEQ ID NO: 96138 - DNA, 25 bp, Artificial
  Probe
cattttggaacggatgaaacaattc

SEQ ID NO: 96139 - DNA, 25 bp, Artificial
  Probe
gatgaaacaattcttgacggaaaag

SEQ ID NO: 96140 - DNA, 25 bp, Artificial
  Probe
ggatgaaacaattcttgacggaaaa

SEQ ID NO: 96141 - DNA, 25 bp, Artificial
  Probe
tttagtgcagtacaaagctgtgaag

SEQ ID NO: 96142 - DNA, 25 bp, Artificial
  Probe
agtacaaagctgtgaaggacttgaa

SEQ ID NO: 96143 - DNA, 25 bp, Artificial
  Probe
gtcattaaatggaaaggggagaaat

SEQ ID NO: 96144 - DNA, 25 bp, Artificial
  Probe
tcattaaatggaaaggggagaaatc

SEQ ID NO: 96145 - DNA, 25 bp, Artificial
  Probe
gtgaaggacttgaaggtgaaagagc

SEQ ID NO: 96146 - DNA, 25 bp, Artificial
  Probe
tgctcaccgtcattaaatggaaagg

SEQ ID NO: 96147 - DNA, 25 bp, Artificial
  Probe
cgtcattaaatggaaaggggagaaa

SEQ ID NO: 96148 - DNA, 25 bp, Artificial
  Probe
agaaatccaagtatcctcagggcag

SEQ ID NO: 96149 - DNA, 25 bp, Artificial
  Probe
cagaagaagaagagtttgtgctgct

SEQ ID NO: 96150 - DNA, 25 bp, Artificial
  Probe
ttgctgatgctgtctcttgtaatat

SEQ ID NO: 96151 - DNA, 25 bp, Artificial
  Probe
tgctgatgctgtctcttgtaatata

SEQ ID NO: 96152 - DNA, 25 bp, Artificial
  Probe
cttgctgatgctgtctcttgtaata

SEQ ID NO: 96153 - DNA, 25 bp, Artificial
  Probe
tgaatcatagtgccatagaaggttc

SEQ ID NO: 96154 - DNA, 25 bp, Artificial
  Probe
gctgatgctgtctcttgtaatataa

SEQ ID NO: 96155 - DNA, 25 bp, Artificial
  Probe
atgtggaactgaggtattcaatgtt

SEQ ID NO: 96156 - DNA, 25 bp, Artificial
  Probe
aatgtggaactgaggtattcaatgt

SEQ ID NO: 96157 - DNA, 25 bp, Artificial
  Probe
gaaggttctggactgtatagttgta

SEQ ID NO: 96158 - DNA, 25 bp, Artificial
  Probe
tcttggaatgtggaactgaggtatt

SEQ ID NO: 96159 - DNA, 25 bp, Artificial
  Probe
gaatcatagtgccatagaaggttct

SEQ ID NO: 96160 - DNA, 25 bp, Artificial
  Probe
atgaatcatagtgccatagaaggtt

SEQ ID NO: 96161 - DNA, 25 bp, Artificial
  Probe
aatcatagtgccatagaaggttctg

SEQ ID NO: 96162 - DNA, 25 bp, Artificial
  Probe
aaccgaaggaggatgtattctactg

SEQ ID NO: 96163 - DNA, 25 bp, Artificial
  Probe
tacttgctgatgctgtctcttgtaa

SEQ ID NO: 96164 - DNA, 25 bp, Artificial
  Probe
ggactgtatagttgtacttgctgat

SEQ ID NO: 96165 - DNA, 25 bp, Artificial
  Probe
tagaaggttctggactgtatagttg

SEQ ID NO: 96166 - DNA, 25 bp, Artificial
  Probe
ttctggactgtatagttgtacttgc

SEQ ID NO: 96167 - DNA, 25 bp, Artificial
  Probe
ggttctggactgtatagttgtactt

SEQ ID NO: 96168 - DNA, 25 bp, Artificial
  Probe
aaggttctggactgtatagttgtac

SEQ ID NO: 96169 - DNA, 25 bp, Artificial
  Probe
agaaggttctggactgtatagttgt

SEQ ID NO: 96170 - DNA, 25 bp, Artificial
  Probe
aggttctggactgtatagttgtact

SEQ ID NO: 96171 - DNA, 25 bp, Artificial
  Probe
catagaaggttctggactgtatagt

SEQ ID NO: 96172 - DNA, 25 bp, Artificial
  Probe
tatagttgtacttgctgatgctgtc

SEQ ID NO: 96173 - DNA, 25 bp, Artificial
  Probe
ctgtatagttgtacttgctgatgct

SEQ ID NO: 96174 - DNA, 25 bp, Artificial
  Probe
gactgtatagttgtacttgctgatg

SEQ ID NO: 96175 - DNA, 25 bp, Artificial
  Probe
gtatagttgtacttgctgatgctgt

SEQ ID NO: 96176 - DNA, 25 bp, Artificial
  Probe
tgtatagttgtacttgctgatgctg

SEQ ID NO: 96177 - DNA, 25 bp, Artificial
  Probe
actgtatagttgtacttgctgatgc

SEQ ID NO: 96178 - DNA, 25 bp, Artificial
  Probe
ctggactgtatagttgtacttgctg

SEQ ID NO: 96179 - DNA, 25 bp, Artificial
  Probe
tctggactgtatagttgtacttgct

SEQ ID NO: 96180 - DNA, 25 bp, Artificial
  Probe
gttctggactgtatagttgtacttg

SEQ ID NO: 96181 - DNA, 25 bp, Artificial
  Probe
tggactgtatagttgtacttgctga

SEQ ID NO: 96182 - DNA, 25 bp, Artificial
  Probe
acttgctgatgctgtctcttgtaat

SEQ ID NO: 96183 - DNA, 25 bp, Artificial
  Probe
atagaaggttctggactgtatagtt

SEQ ID NO: 96184 - DNA, 25 bp, Artificial
  Probe
gaatgtggaactgaggtattcaatg

SEQ ID NO: 96185 - DNA, 25 bp, Artificial
  Probe
ctcttggaatgtggaactgaggtat

SEQ ID NO: 96186 - DNA, 25 bp, Artificial
  Probe
ggaatgtggaactgaggtattcaat

SEQ ID NO: 96187 - DNA, 25 bp, Artificial
  Probe
ccatagaaggttctggactgtatag

SEQ ID NO: 96188 - DNA, 25 bp, Artificial
  Probe
cgttgggtggagagagtattaaata

SEQ ID NO: 96189 - DNA, 25 bp, Artificial
  Probe
cagaatgaaagacctaaatgacctc

SEQ ID NO: 96190 - DNA, 25 bp, Artificial
  Probe
atagttgtacttgctgatgctgtct

SEQ ID NO: 96191 - DNA, 25 bp, Artificial
  Probe
cttggaatgtggaactgaggtattc

SEQ ID NO: 96192 - DNA, 25 bp, Artificial
  Probe
cacgccgctgtaaattatttcatat

SEQ ID NO: 96193 - DNA, 25 bp, Artificial
  Probe
tatgaatcatagtgccatagaaggt

SEQ ID NO: 96194 - DNA, 25 bp, Artificial
  Probe
gcagaatgaaagacctaaatgacct

SEQ ID NO: 96195 - DNA, 25 bp, Artificial
  Probe
tggtttcttcgtctcatttattgtt

SEQ ID NO: 96196 - DNA, 25 bp, Artificial
  Probe
catactgtgaatgtttactaacgca

SEQ ID NO: 96197 - DNA, 25 bp, Artificial
  Probe
ggtttcttcgtctcatttattgttc

SEQ ID NO: 96198 - DNA, 25 bp, Artificial
  Probe
gttctggaggaaatgtaacaagttt

SEQ ID NO: 96199 - DNA, 25 bp, Artificial
  Probe
atggtttcttcgtctcatttattgt

SEQ ID NO: 96200 - DNA, 25 bp, Artificial
  Probe
tcatactgtgaatgtttactaacgc

SEQ ID NO: 96201 - DNA, 25 bp, Artificial
  Probe
gggagatatactagcaaatgcctaa

SEQ ID NO: 96202 - DNA, 25 bp, Artificial
  Probe
tgggagatatactagcaaatgccta

SEQ ID NO: 96203 - DNA, 25 bp, Artificial
  Probe
atactagcaaatgcctaatgttctg

SEQ ID NO: 96204 - DNA, 25 bp, Artificial
  Probe
tactagcaaatgcctaatgttctgg

SEQ ID NO: 96205 - DNA, 25 bp, Artificial
  Probe
gtttcttcgtctcatttattgttct

SEQ ID NO: 96206 - DNA, 25 bp, Artificial
  Probe
gagagagacttcatactgtgaatgt

SEQ ID NO: 96207 - DNA, 25 bp, Artificial
  Probe
atactgtgaatgtttactaacgcac

SEQ ID NO: 96208 - DNA, 25 bp, Artificial
  Probe
agagagacttcatactgtgaatgtt

SEQ ID NO: 96209 - DNA, 25 bp, Artificial
  Probe
cgagagagacttcatactgtgaatg

SEQ ID NO: 96210 - DNA, 25 bp, Artificial
  Probe
cctaatgttctggaggaaatgtaac

SEQ ID NO: 96211 - DNA, 25 bp, Artificial
  Probe
ctagcaaatgcctaatgttctggag

SEQ ID NO: 96212 - DNA, 25 bp, Artificial
  Probe
aaatgcctaatgttctggaggaaat

SEQ ID NO: 96213 - DNA, 25 bp, Artificial
  Probe
gcctaatgttctggaggaaatgtaa

SEQ ID NO: 96214 - DNA, 25 bp, Artificial
  Probe
ttgggagatatactagcaaatgcct

SEQ ID NO: 96215 - DNA, 25 bp, Artificial
  Probe
ggagatatactagcaaatgcctaat

SEQ ID NO: 96216 - DNA, 25 bp, Artificial
  Probe
aatgcctaatgttctggaggaaatg

SEQ ID NO: 96217 - DNA, 25 bp, Artificial
  Probe
caaatgcctaatgttctggaggaaa

SEQ ID NO: 96218 - DNA, 25 bp, Artificial
  Probe
ccgagagagacttcatactgtgaat

SEQ ID NO: 96219 - DNA, 25 bp, Artificial
  Probe
actagcaaatgcctaatgttctgga

SEQ ID NO: 96220 - DNA, 25 bp, Artificial
  Probe
tatactagcaaatgcctaatgttct

SEQ ID NO: 96221 - DNA, 25 bp, Artificial
  Probe
ttcttcgtctcatttattgttcttt

SEQ ID NO: 96222 - DNA, 25 bp, Artificial
  Probe
tttcttcgtctcatttattgttctt

SEQ ID NO: 96223 - DNA, 25 bp, Artificial
  Probe
tgcctaatgttctggaggaaatgta

SEQ ID NO: 96224 - DNA, 25 bp, Artificial
  Probe
agatatactagcaaatgcctaatgt

SEQ ID NO: 96225 - DNA, 25 bp, Artificial
  Probe
tgacaatcattggaagaatggtttc

SEQ ID NO: 96226 - DNA, 25 bp, Artificial
  Probe
atgcctaatgttctggaggaaatgt

SEQ ID NO: 96227 - DNA, 25 bp, Artificial
  Probe
gacaatcattggaagaatggtttct

SEQ ID NO: 96228 - DNA, 25 bp, Artificial
  Probe
atcttaagccataattgctgtagct

SEQ ID NO: 96229 - DNA, 25 bp, Artificial
  Probe
gatcttaagccataattgctgtagc

SEQ ID NO: 96230 - DNA, 25 bp, Artificial
  Probe
gagatatactagcaaatgcctaatg

SEQ ID NO: 96231 - DNA, 25 bp, Artificial
  Probe
atatactagcaaatgcctaatgttc

SEQ ID NO: 96232 - DNA, 25 bp, Artificial
  Probe
gatatactagcaaatgcctaatgtt

SEQ ID NO: 96233 - DNA, 25 bp, Artificial
  Probe
tcttaagccataattgctgtagctg

SEQ ID NO: 96234 - DNA, 25 bp, Artificial
  Probe
tttgggagatatactagcaaatgcc

SEQ ID NO: 96235 - DNA, 25 bp, Artificial
  Probe
aatggtttcttcgtctcatttattg

SEQ ID NO: 96236 - DNA, 25 bp, Artificial
  Probe
agaatggtttcttcgtctcatttat

SEQ ID NO: 96237 - DNA, 25 bp, Artificial
  Probe
tctggaggaaatgtaacaagttttg

SEQ ID NO: 96238 - DNA, 25 bp, Artificial
  Probe
gaatggtttcttcgtctcatttatt

SEQ ID NO: 96239 - DNA, 25 bp, Artificial
  Probe
ttctggaggaaatgtaacaagtttt

SEQ ID NO: 96240 - DNA, 25 bp, Artificial
  Probe
atgtactattggtgcttctggtcta

SEQ ID NO: 96241 - DNA, 25 bp, Artificial
  Probe
ttaacaagtatgacattccatgacg

SEQ ID NO: 96242 - DNA, 25 bp, Artificial
  Probe
tgtactattggtgcttctggtctag

SEQ ID NO: 96243 - DNA, 25 bp, Artificial
  Probe
taacaagtatgacattccatgacgc

SEQ ID NO: 96244 - DNA, 25 bp, Artificial
  Probe
tactattggtgcttctggtctagga

SEQ ID NO: 96245 - DNA, 25 bp, Artificial
  Probe
gtactattggtgcttctggtctagg

SEQ ID NO: 96246 - DNA, 25 bp, Artificial
  Probe
gatgtactattggtgcttctggtct

SEQ ID NO: 96247 - DNA, 25 bp, Artificial
  Probe
atgttggaagaaggatttggagaat

SEQ ID NO: 96248 - DNA, 25 bp, Artificial
  Probe
taaggatgttggaagaaggatttgg

SEQ ID NO: 96249 - DNA, 25 bp, Artificial
  Probe
cagcagagggataatcaaacaaatt

SEQ ID NO: 96250 - DNA, 25 bp, Artificial
  Probe
gatgttggaagaaggatttggagaa

SEQ ID NO: 96251 - DNA, 25 bp, Artificial
  Probe
tgttggaagaaggatttggagaatt

SEQ ID NO: 96252 - DNA, 25 bp, Artificial
  Probe
ttaaggatgttggaagaaggatttg

SEQ ID NO: 96253 - DNA, 25 bp, Artificial
  Probe
attacttctatcatcgggagacaga

SEQ ID NO: 96254 - DNA, 25 bp, Artificial
  Probe
ccagcagagggataatcaaacaaat

SEQ ID NO: 96255 - DNA, 25 bp, Artificial
  Probe
aattacttctatcatcgggagacag

SEQ ID NO: 96256 - DNA, 25 bp, Artificial
  Probe
tttaaggatgttggaagaaggattt

SEQ ID NO: 96257 - DNA, 25 bp, Artificial
  Probe
ttattctgggatgtactattggtgc

SEQ ID NO: 96258 - DNA, 25 bp, Artificial
  Probe
ttacttctatcatcgggagacagac

SEQ ID NO: 96259 - DNA, 25 bp, Artificial
  Probe
atttctctagtatcccagatgcctt

SEQ ID NO: 96260 - DNA, 25 bp, Artificial
  Probe
ggatgtactattggtgcttctggtc

SEQ ID NO: 96261 - DNA, 25 bp, Artificial
  Probe
tagatcccaagagaatccatagcat

SEQ ID NO: 96262 - DNA, 25 bp, Artificial
  Probe
tcccatttctctagtatcccagatg

SEQ ID NO: 96263 - DNA, 25 bp, Artificial
  Probe
gtcccatttctctagtatcccagat

SEQ ID NO: 96264 - DNA, 25 bp, Artificial
  Probe
cttagatcccaagagaatccatagc

SEQ ID NO: 96265 - DNA, 25 bp, Artificial
  Probe
gcttagatcccaagagaatccatag

SEQ ID NO: 96266 - DNA, 25 bp, Artificial
  Probe
ttagatcccaagagaatccatagca

SEQ ID NO: 96267 - DNA, 25 bp, Artificial
  Probe
tattctgggatgtactattggtgct

SEQ ID NO: 96268 - DNA, 25 bp, Artificial
  Probe
ccgtgaaacagatttgtaaagagag

SEQ ID NO: 96269 - DNA, 25 bp, Artificial
  Probe
ctattggtgcttctggtctaggaga

SEQ ID NO: 96270 - DNA, 25 bp, Artificial
  Probe
cgtgaaacagatttgtaaagagaga

SEQ ID NO: 96271 - DNA, 25 bp, Artificial
  Probe
tagccgtgaaacagatttgtaaaga

SEQ ID NO: 96272 - DNA, 25 bp, Artificial
  Probe
cgtcatcgtctccaactttaattac

SEQ ID NO: 96273 - DNA, 25 bp, Artificial
  Probe
gatttgtaaagagagatccaggcag

SEQ ID NO: 96274 - DNA, 25 bp, Artificial
  Probe
cagatttgtaaagagagatccaggc

SEQ ID NO: 96275 - DNA, 25 bp, Artificial
  Probe
tttctctagtatcccagatgccttc

SEQ ID NO: 96276 - DNA, 25 bp, Artificial
  Probe
aaggatgttggaagaaggatttgga

SEQ ID NO: 96277 - DNA, 25 bp, Artificial
  Probe
agatcccaagagaatccatagcatt

SEQ ID NO: 96278 - DNA, 25 bp, Artificial
  Probe
atttgtaaagagagatccaggcaga

SEQ ID NO: 96279 - DNA, 25 bp, Artificial
  Probe
ctagccgtgaaacagatttgtaaag

SEQ ID NO: 96280 - DNA, 25 bp, Artificial
  Probe
catttctctagtatcccagatgcct

SEQ ID NO: 96281 - DNA, 25 bp, Artificial
  Probe
actattggtgcttctggtctaggag

SEQ ID NO: 96282 - DNA, 25 bp, Artificial
  Probe
agatttgtaaagagagatccaggca

SEQ ID NO: 96283 - DNA, 25 bp, Artificial
  Probe
ccgtcatcgtctccaactttaatta

SEQ ID NO: 96284 - DNA, 25 bp, Artificial
  Probe
actagccgtgaaacagatttgtaaa

SEQ ID NO: 96285 - DNA, 25 bp, Artificial
  Probe
caagtgataagtgggtctttctagt

SEQ ID NO: 96286 - DNA, 25 bp, Artificial
  Probe
acaagtgataagtgggtctttctag

SEQ ID NO: 96287 - DNA, 25 bp, Artificial
  Probe
aagtgataagtgggtctttctagtc

SEQ ID NO: 96288 - DNA, 25 bp, Artificial
  Probe
taagtgggtctttctagtcaaatgc

SEQ ID NO: 96289 - DNA, 25 bp, Artificial
  Probe
gtgataagtgggtctttctagtcaa

SEQ ID NO: 96290 - DNA, 25 bp, Artificial
  Probe
aaatgcctgccagtctttattgtag

SEQ ID NO: 96291 - DNA, 25 bp, Artificial
  Probe
agtgataagtgggtctttctagtca

SEQ ID NO: 96292 - DNA, 25 bp, Artificial
  Probe
tgataagtgggtctttctagtcaaa

SEQ ID NO: 96293 - DNA, 25 bp, Artificial
  Probe
ctgccagtctttattgtagaggtac

SEQ ID NO: 96294 - DNA, 25 bp, Artificial
  Probe
gacaagtgataagtgggtctttcta

SEQ ID NO: 96295 - DNA, 25 bp, Artificial
  Probe
ataagtgggtctttctagtcaaatg

SEQ ID NO: 96296 - DNA, 25 bp, Artificial
  Probe
ctgagttacatccgatccaagaagc

SEQ ID NO: 96297 - DNA, 25 bp, Artificial
  Probe
gctgagttacatccgatccaagaag

SEQ ID NO: 96298 - DNA, 25 bp, Artificial
  Probe
gataagtgggtctttctagtcaaat

SEQ ID NO: 96299 - DNA, 25 bp, Artificial
  Probe
caaatgcctgccagtctttattgta

SEQ ID NO: 96300 - DNA, 25 bp, Artificial
  Probe
tagtcaaatgcctgccagtctttat

SEQ ID NO: 96301 - DNA, 25 bp, Artificial
  Probe
aatgcctgccagtctttattgtaga

SEQ ID NO: 96302 - DNA, 25 bp, Artificial
  Probe
cctgccagtctttattgtagaggta

SEQ ID NO: 96303 - DNA, 25 bp, Artificial
  Probe
atgctgagttacatccgatccaaga

SEQ ID NO: 96304 - DNA, 25 bp, Artificial
  Probe
ttaatagacaagtgataagtgggtc

SEQ ID NO: 96305 - DNA, 25 bp, Artificial
  Probe
gagttacatccgatccaagaagctg

SEQ ID NO: 96306 - DNA, 25 bp, Artificial
  Probe
catcatgctgagttacatccgatcc

SEQ ID NO: 96307 - DNA, 25 bp, Artificial
  Probe
tgctgagttacatccgatccaagaa

SEQ ID NO: 96308 - DNA, 25 bp, Artificial
  Probe
catgctgagttacatccgatccaag

SEQ ID NO: 96309 - DNA, 25 bp, Artificial
  Probe
atgcctgccagtctttattgtagag

SEQ ID NO: 96310 - DNA, 25 bp, Artificial
  Probe
agtcaaatgcctgccagtctttatt

SEQ ID NO: 96311 - DNA, 25 bp, Artificial
  Probe
ctagtcaaatgcctgccagtcttta

SEQ ID NO: 96312 - DNA, 25 bp, Artificial
  Probe
cttcagagcttgctatgtcattgaa

SEQ ID NO: 96313 - DNA, 25 bp, Artificial
  Probe
tgagttacatccgatccaagaagct

SEQ ID NO: 96314 - DNA, 25 bp, Artificial
  Probe
atcatgctgagttacatccgatcca

SEQ ID NO: 96315 - DNA, 25 bp, Artificial
  Probe
gtcaaatgcctgccagtctttattg

SEQ ID NO: 96316 - DNA, 25 bp, Artificial
  Probe
aagtgggtctttctagtcaaatgcc

SEQ ID NO: 96317 - DNA, 25 bp, Artificial
  Probe
ctatatcctcatggtgctgggtttc

SEQ ID NO: 96318 - DNA, 25 bp, Artificial
  Probe
cctgtccaattccacaactgttctg

SEQ ID NO: 96319 - DNA, 25 bp, Artificial
  Probe
attaatagacaagtgataagtgggt

SEQ ID NO: 96320 - DNA, 25 bp, Artificial
  Probe
gctctctatatcctcatggtgctgg

SEQ ID NO: 96321 - DNA, 25 bp, Artificial
  Probe
ggctctctatatcctcatggtgctg

SEQ ID NO: 96322 - DNA, 25 bp, Artificial
  Probe
tcaaatgcctgccagtctttattgt

SEQ ID NO: 96323 - DNA, 25 bp, Artificial
  Probe
tcatgctgagttacatccgatccaa

SEQ ID NO: 96324 - DNA, 25 bp, Artificial
  Probe
tatatcctcatggtgctgggtttct

SEQ ID NO: 96325 - DNA, 25 bp, Artificial
  Probe
tctatatcctcatggtgctgggttt

SEQ ID NO: 96326 - DNA, 25 bp, Artificial
  Probe
gtgggtctttctagtcaaatgcctg

SEQ ID NO: 96327 - DNA, 25 bp, Artificial
  Probe
agtgggtctttctagtcaaatgcct

SEQ ID NO: 96328 - DNA, 25 bp, Artificial
  Probe
ctctatatcctcatggtgctgggtt

SEQ ID NO: 96329 - DNA, 25 bp, Artificial
  Probe
ctgtccaattccacaactgttctgc

SEQ ID NO: 96330 - DNA, 25 bp, Artificial
  Probe
cgagaacttatccagaatgtgaagg

SEQ ID NO: 96331 - DNA, 25 bp, Artificial
  Probe
aacttatccagaatgtgaaggactt

SEQ ID NO: 96332 - DNA, 25 bp, Artificial
  Probe
gagaacttatccagaatgtgaagga

SEQ ID NO: 96333 - DNA, 25 bp, Artificial
  Probe
gaacttatccagaatgtgaaggact

SEQ ID NO: 96334 - DNA, 25 bp, Artificial
  Probe
agaacttatccagaatgtgaaggac

SEQ ID NO: 96335 - DNA, 25 bp, Artificial
  Probe
ttcgagaacttatccagaatgtgaa

SEQ ID NO: 96336 - DNA, 25 bp, Artificial
  Probe
tcgagaacttatccagaatgtgaag

SEQ ID NO: 96337 - DNA, 25 bp, Artificial
  Probe
cttcgagaacttatccagaatgtga

SEQ ID NO: 96338 - DNA, 25 bp, Artificial
  Probe
acttatccagaatgtgaaggacttc

SEQ ID NO: 96339 - DNA, 25 bp, Artificial
  Probe
caatcaggagcttcgagaacttatc

SEQ ID NO: 96340 - DNA, 25 bp, Artificial
  Probe
cttatccagaatgtgaaggacttcc

SEQ ID NO: 96341 - DNA, 25 bp, Artificial
  Probe
gagcttcgagaacttatccagaatg

SEQ ID NO: 96342 - DNA, 25 bp, Artificial
  Probe
gacagtattgaaatggtagcaacac

SEQ ID NO: 96343 - DNA, 25 bp, Artificial
  Probe
gcttcgagaacttatccagaatgtg

SEQ ID NO: 96344 - DNA, 25 bp, Artificial
  Probe
agcttcgagaacttatccagaatgt

SEQ ID NO: 96345 - DNA, 25 bp, Artificial
  Probe
ttatccagaatgtgaaggacttcct

SEQ ID NO: 96346 - DNA, 25 bp, Artificial
  Probe
tatccagaatgtgaaggacttcctc

SEQ ID NO: 96347 - DNA, 25 bp, Artificial
  Probe
gatcccgacagtattgaaatggtag

SEQ ID NO: 96348 - DNA, 25 bp, Artificial
  Probe
ccaatcaggagcttcgagaacttat

SEQ ID NO: 96349 - DNA, 25 bp, Artificial
  Probe
cgacagtattgaaatggtagcaaca

SEQ ID NO: 96350 - DNA, 25 bp, Artificial
  Probe
tgatcccgacagtattgaaatggta

SEQ ID NO: 96351 - DNA, 25 bp, Artificial
  Probe
acagtattgaaatggtagcaacacg

SEQ ID NO: 96352 - DNA, 25 bp, Artificial
  Probe
ccgacagtattgaaatggtagcaac

SEQ ID NO: 96353 - DNA, 25 bp, Artificial
  Probe
atcccgacagtattgaaatggtagc

SEQ ID NO: 96354 - DNA, 25 bp, Artificial
  Probe
cagtattgaaatggtagcaacacgg

SEQ ID NO: 96355 - DNA, 25 bp, Artificial
  Probe
ggagcttcgagaacttatccagaat

SEQ ID NO: 96356 - DNA, 25 bp, Artificial
  Probe
aatcaggagcttcgagaacttatcc

SEQ ID NO: 96357 - DNA, 25 bp, Artificial
  Probe
atccagaatgtgaaggacttcctca

SEQ ID NO: 96358 - DNA, 25 bp, Artificial
  Probe
cccgacagtattgaaatggtagcaa

SEQ ID NO: 96359 - DNA, 25 bp, Artificial
  Probe
aggagcttcgagaacttatccagaa

SEQ ID NO: 96360 - DNA, 25 bp, Artificial
  Probe
atcaggagcttcgagaacttatcca

SEQ ID NO: 96361 - DNA, 25 bp, Artificial
  Probe
atatgaagagaatgaacgcgaactg

SEQ ID NO: 96362 - DNA, 25 bp, Artificial
  Probe
agtattgaaatggtagcaacacggg

SEQ ID NO: 96363 - DNA, 25 bp, Artificial
  Probe
ctgatcccgacagtattgaaatggt

SEQ ID NO: 96364 - DNA, 25 bp, Artificial
  Probe
gagggcacatatgaagagaatgaac

SEQ ID NO: 96365 - DNA, 25 bp, Artificial
  Probe
catatgaagagaatgaacgcgaact

SEQ ID NO: 96366 - DNA, 25 bp, Artificial
  Probe
gaacaagtaggtgaccagtaccaaa

SEQ ID NO: 96367 - DNA, 25 bp, Artificial
  Probe
tcccgacagtattgaaatggtagca

SEQ ID NO: 96368 - DNA, 25 bp, Artificial
  Probe
acatatgaagagaatgaacgcgaac

SEQ ID NO: 96369 - DNA, 25 bp, Artificial
  Probe
gtattgaaatggtagcaacacgggt

SEQ ID NO: 96370 - DNA, 25 bp, Artificial
  Probe
cacatatgaagagaatgaacgcgaa

SEQ ID NO: 96371 - DNA, 25 bp, Artificial
  Probe
ggaacaagtaggtgaccagtaccaa

SEQ ID NO: 96372 - DNA, 25 bp, Artificial
  Probe
tattgaaatggtagcaacacgggtg

SEQ ID NO: 96373 - DNA, 25 bp, Artificial
  Probe
aacaagtaggtgaccagtaccaaac

SEQ ID NO: 96374 - DNA, 25 bp, Artificial
  Probe
tccagaatgtgaaggacttcctcag

SEQ ID NO: 96375 - DNA, 25 bp, Artificial
  Probe
ctaccagtaatccacagtcaacttg

SEQ ID NO: 96376 - DNA, 25 bp, Artificial
  Probe
tggagagatactggactgattatat

SEQ ID NO: 96377 - DNA, 25 bp, Artificial
  Probe
aatatgtcagctaccagtaatccac

SEQ ID NO: 96378 - DNA, 25 bp, Artificial
  Probe
caatatgtcagctaccagtaatcca

SEQ ID NO: 96379 - DNA, 25 bp, Artificial
  Probe
taccagtaatccacagtcaacttga

SEQ ID NO: 96380 - DNA, 25 bp, Artificial
  Probe
attcaggaaccacagtgtcttcatt

SEQ ID NO: 96381 - DNA, 25 bp, Artificial
  Probe
aattcaggaaccacagtgtcttcat

SEQ ID NO: 96382 - DNA, 25 bp, Artificial
  Probe
gctaccagtaatccacagtcaactt

SEQ ID NO: 96383 - DNA, 25 bp, Artificial
  Probe
acaatatgtcagctaccagtaatcc

SEQ ID NO: 96384 - DNA, 25 bp, Artificial
  Probe
gtcttcattctgtttctgtaacgag

SEQ ID NO: 96385 - DNA, 25 bp, Artificial
  Probe
tgtcttcattctgtttctgtaacga

SEQ ID NO: 96386 - DNA, 25 bp, Artificial
  Probe
gtgtcttcattctgtttctgtaacg

SEQ ID NO: 96387 - DNA, 25 bp, Artificial
  Probe
atatgtcagctaccagtaatccaca

SEQ ID NO: 96388 - DNA, 25 bp, Artificial
  Probe
ggagagatactggactgattatatt

SEQ ID NO: 96389 - DNA, 25 bp, Artificial
  Probe
tcttcattctgtttctgtaacgagg

SEQ ID NO: 96390 - DNA, 25 bp, Artificial
  Probe
agtgtcttcattctgtttctgtaac

SEQ ID NO: 96391 - DNA, 25 bp, Artificial
  Probe
ttcattctgtttctgtaacgaggtc

SEQ ID NO: 96392 - DNA, 25 bp, Artificial
  Probe
cttcattctgtttctgtaacgaggt

SEQ ID NO: 96393 - DNA, 25 bp, Artificial
  Probe
ttcaggaaccacagtgtcttcattc

SEQ ID NO: 96394 - DNA, 25 bp, Artificial
  Probe
tatgtcagctaccagtaatccacag

SEQ ID NO: 96395 - DNA, 25 bp, Artificial
  Probe
cagtgtcttcattctgtttctgtaa

SEQ ID NO: 96396 - DNA, 25 bp, Artificial
  Probe
tcaggaaccacagtgtcttcattct

SEQ ID NO: 96397 - DNA, 25 bp, Artificial
  Probe
tcattctgtttctgtaacgaggtcc

SEQ ID NO: 96398 - DNA, 25 bp, Artificial
  Probe
cagctaccagtaatccacagtcaac

SEQ ID NO: 96399 - DNA, 25 bp, Artificial
  Probe
tcagctaccagtaatccacagtcaa

SEQ ID NO: 96400 - DNA, 25 bp, Artificial
  Probe
agagatactggactgattatattca

SEQ ID NO: 96401 - DNA, 25 bp, Artificial
  Probe
caggaaccacagtgtcttcattctg

SEQ ID NO: 96402 - DNA, 25 bp, Artificial
  Probe
gagagatactggactgattatattc

SEQ ID NO: 96403 - DNA, 25 bp, Artificial
  Probe
agctaccagtaatccacagtcaact

SEQ ID NO: 96404 - DNA, 25 bp, Artificial
  Probe
atgtcagctaccagtaatccacagt

SEQ ID NO: 96405 - DNA, 25 bp, Artificial
  Probe
gtcagctaccagtaatccacagtca

SEQ ID NO: 96406 - DNA, 25 bp, Artificial
  Probe
cattctgtttctgtaacgaggtccc

SEQ ID NO: 96407 - DNA, 25 bp, Artificial
  Probe
gaattcaggaaccacagtgtcttca

SEQ ID NO: 96408 - DNA, 25 bp, Artificial
  Probe
attctgtttctgtaacgaggtccct

SEQ ID NO: 96409 - DNA, 25 bp, Artificial
  Probe
tgtcagctaccagtaatccacagtc

SEQ ID NO: 96410 - DNA, 25 bp, Artificial
  Probe
gacaatatgtcagctaccagtaatc

SEQ ID NO: 96411 - DNA, 25 bp, Artificial
  Probe
aacaactgtctcagagaaggcaaag

SEQ ID NO: 96412 - DNA, 25 bp, Artificial
  Probe
ggaattcaggaaccacagtgtcttc

SEQ ID NO: 96413 - DNA, 25 bp, Artificial
  Probe
ggcaaaggctttgacattacttaaa

SEQ ID NO: 96414 - DNA, 25 bp, Artificial
  Probe
caacaactgtctcagagaaggcaaa

SEQ ID NO: 96415 - DNA, 25 bp, Artificial
  Probe
aggcaaaggctttgacattacttaa

SEQ ID NO: 96416 - DNA, 25 bp, Artificial
  Probe
aaggcaaaggctttgacattactta

SEQ ID NO: 96417 - DNA, 25 bp, Artificial
  Probe
aggaattcaggaaccacagtgtctt

SEQ ID NO: 96418 - DNA, 25 bp, Artificial
  Probe
gaaggcaaaggctttgacattactt

SEQ ID NO: 96419 - DNA, 25 bp, Artificial
  Probe
acagtgtcttcattctgtttctgta

SEQ ID NO: 96420 - DNA, 25 bp, Artificial
  Probe
aaagttccctaatgatttccctctc

SEQ ID NO: 96421 - DNA, 25 bp, Artificial
  Probe
taatgatttccctctctgtccctta

SEQ ID NO: 96422 - DNA, 25 bp, Artificial
  Probe
caaagttccctaatgatttccctct

SEQ ID NO: 96423 - DNA, 25 bp, Artificial
  Probe
tacaaagttccctaatgatttccct

SEQ ID NO: 96424 - DNA, 25 bp, Artificial
  Probe
acaaagttccctaatgatttccctc

SEQ ID NO: 96425 - DNA, 25 bp, Artificial
  Probe
aagttccctaatgatttccctctct

SEQ ID NO: 96426 - DNA, 25 bp, Artificial
  Probe
accatctatcctaaagaagaccaga

SEQ ID NO: 96427 - DNA, 25 bp, Artificial
  Probe
atacaaagttccctaatgatttccc

SEQ ID NO: 96428 - DNA, 25 bp, Artificial
  Probe
aatgatttccctctctgtcccttag

SEQ ID NO: 96429 - DNA, 25 bp, Artificial
  Probe
ctaatgatttccctctctgtccctt

SEQ ID NO: 96430 - DNA, 25 bp, Artificial
  Probe
ttccctaatgatttccctctctgtc

SEQ ID NO: 96431 - DNA, 25 bp, Artificial
  Probe
agttccctaatgatttccctctctg

SEQ ID NO: 96432 - DNA, 25 bp, Artificial
  Probe
taccatctatcctaaagaagaccag

SEQ ID NO: 96433 - DNA, 25 bp, Artificial
  Probe
gttccctaatgatttccctctctgt

SEQ ID NO: 96434 - DNA, 25 bp, Artificial
  Probe
gtaccatctatcctaaagaagacca

SEQ ID NO: 96435 - DNA, 25 bp, Artificial
  Probe
tgtaccatctatcctaaagaagacc

SEQ ID NO: 96436 - DNA, 25 bp, Artificial
  Probe
ggcatgtaccatctatcctaaagaa

SEQ ID NO: 96437 - DNA, 25 bp, Artificial
  Probe
gcatgtaccatctatcctaaagaag

SEQ ID NO: 96438 - DNA, 25 bp, Artificial
  Probe
aatacaaagttccctaatgatttcc

SEQ ID NO: 96439 - DNA, 25 bp, Artificial
  Probe
cctaatgatttccctctctgtccct

SEQ ID NO: 96440 - DNA, 25 bp, Artificial
  Probe
tccctaatgatttccctctctgtcc

SEQ ID NO: 96441 - DNA, 25 bp, Artificial
  Probe
tggcatgtaccatctatcctaaaga

SEQ ID NO: 96442 - DNA, 25 bp, Artificial
  Probe
ccatctatcctaaagaagaccagat

SEQ ID NO: 96443 - DNA, 25 bp, Artificial
  Probe
atgtaccatctatcctaaagaagac

SEQ ID NO: 96444 - DNA, 25 bp, Artificial
  Probe
catgtaccatctatcctaaagaaga

SEQ ID NO: 96445 - DNA, 25 bp, Artificial
  Probe
tcagaggggagaaaatacaaagttc

SEQ ID NO: 96446 - DNA, 25 bp, Artificial
  Probe
gatatggcatgtaccatctatccta

SEQ ID NO: 96447 - DNA, 25 bp, Artificial
  Probe
atgatttccctctctgtcccttagg

SEQ ID NO: 96448 - DNA, 25 bp, Artificial
  Probe
atatggcatgtaccatctatcctaa

SEQ ID NO: 96449 - DNA, 25 bp, Artificial
  Probe
ccctaatgatttccctctctgtccc

SEQ ID NO: 96450 - DNA, 25 bp, Artificial
  Probe
cagaggggagaaaatacaaagttcc

SEQ ID NO: 96451 - DNA, 25 bp, Artificial
  Probe
atggcatgtaccatctatcctaaag

SEQ ID NO: 96452 - DNA, 25 bp, Artificial
  Probe
gagaaaatacaaagttccctaatga

SEQ ID NO: 96453 - DNA, 25 bp, Artificial
  Probe
cttcagtctgcccttccctatcaac

SEQ ID NO: 96454 - DNA, 25 bp, Artificial
  Probe
tgatttccctctctgtcccttagga

SEQ ID NO: 96455 - DNA, 25 bp, Artificial
  Probe
aaatacaaagttccctaatgatttc

SEQ ID NO: 96456 - DNA, 25 bp, Artificial
  Probe
ggagaaaatacaaagttccctaatg

SEQ ID NO: 96457 - DNA, 25 bp, Artificial
  Probe
tatggcatgtaccatctatcctaaa

SEQ ID NO: 96458 - DNA, 25 bp, Artificial
  Probe
tgggatatggcatgtaccatctatc

SEQ ID NO: 96459 - DNA, 25 bp, Artificial
  Probe
gtgggatatggcatgtaccatctat

SEQ ID NO: 96460 - DNA, 25 bp, Artificial
  Probe
ggatatggcatgtaccatctatcct

SEQ ID NO: 96461 - DNA, 25 bp, Artificial
  Probe
agaaaatacaaagttccctaatgat

SEQ ID NO: 96462 - DNA, 25 bp, Artificial
  Probe
ttcagtctgcccttccctatcaact

SEQ ID NO: 96463 - DNA, 25 bp, Artificial
  Probe
gatggatgtttgtggaaagcattcc

SEQ ID NO: 96464 - DNA, 25 bp, Artificial
  Probe
gaaaatacaaagttccctaatgatt

SEQ ID NO: 96465 - DNA, 25 bp, Artificial
  Probe
tatcctccagcaacttcagaatcat

SEQ ID NO: 96466 - DNA, 25 bp, Artificial
  Probe
ttatcctccagcaacttcagaatca

SEQ ID NO: 96467 - DNA, 25 bp, Artificial
  Probe
tgtctacaatcgtctcaacttggta

SEQ ID NO: 96468 - DNA, 25 bp, Artificial
  Probe
ctacaatcgtctcaacttggtactc

SEQ ID NO: 96469 - DNA, 25 bp, Artificial
  Probe
tacaatcgtctcaacttggtactct

SEQ ID NO: 96470 - DNA, 25 bp, Artificial
  Probe
tctacaatcgtctcaacttggtact

SEQ ID NO: 96471 - DNA, 25 bp, Artificial
  Probe
gtctacaatcgtctcaacttggtac

SEQ ID NO: 96472 - DNA, 25 bp, Artificial
  Probe
atcctccagcaacttcagaatcatc

SEQ ID NO: 96473 - DNA, 25 bp, Artificial
  Probe
acaatcgtctcaacttggtactctt

SEQ ID NO: 96474 - DNA, 25 bp, Artificial
  Probe
catttgtagccataaacctgaagtc

SEQ ID NO: 96475 - DNA, 25 bp, Artificial
  Probe
tactcactaaaggaccaagacattt

SEQ ID NO: 96476 - DNA, 25 bp, Artificial
  Probe
ttactcactaaaggaccaagacatt

SEQ ID NO: 96477 - DNA, 25 bp, Artificial
  Probe
ctcactaaaggaccaagacatttca

SEQ ID NO: 96478 - DNA, 25 bp, Artificial
  Probe
actcactaaaggaccaagacatttc

SEQ ID NO: 96479 - DNA, 25 bp, Artificial
  Probe
cctccagcaacttcagaatcatctt

SEQ ID NO: 96480 - DNA, 25 bp, Artificial
  Probe
tttatcctccagcaacttcagaatc

SEQ ID NO: 96481 - DNA, 25 bp, Artificial
  Probe
actaaaggaccaagacatttcacag

SEQ ID NO: 96482 - DNA, 25 bp, Artificial
  Probe
tcactaaaggaccaagacatttcac

SEQ ID NO: 96483 - DNA, 25 bp, Artificial
  Probe
atttgtagccataaacctgaagtcc

SEQ ID NO: 96484 - DNA, 25 bp, Artificial
  Probe
ccagcaacttcagaatcatctttac

SEQ ID NO: 96485 - DNA, 25 bp, Artificial
  Probe
tccagcaacttcagaatcatcttta

SEQ ID NO: 96486 - DNA, 25 bp, Artificial
  Probe
tcagaatcatctttacgactttcct

SEQ ID NO: 96487 - DNA, 25 bp, Artificial
  Probe
gcaacttcagaatcatctttacgac

SEQ ID NO: 96488 - DNA, 25 bp, Artificial
  Probe
agcaacttcagaatcatctttacga

SEQ ID NO: 96489 - DNA, 25 bp, Artificial
  Probe
cagcaacttcagaatcatctttacg

SEQ ID NO: 96490 - DNA, 25 bp, Artificial
  Probe
cactaaaggaccaagacatttcaca

SEQ ID NO: 96491 - DNA, 25 bp, Artificial
  Probe
gtgtctacaatcgtctcaacttggt

SEQ ID NO: 96492 - DNA, 25 bp, Artificial
  Probe
tttactcactaaaggaccaagacat

SEQ ID NO: 96493 - DNA, 25 bp, Artificial
  Probe
cagaatcatctttacgactttcctt

SEQ ID NO: 96494 - DNA, 25 bp, Artificial
  Probe
ttcagaatcatctttacgactttcc

SEQ ID NO: 96495 - DNA, 25 bp, Artificial
  Probe
caacttcagaatcatctttacgact

SEQ ID NO: 96496 - DNA, 25 bp, Artificial
  Probe
tcatttgtagccataaacctgaagt

SEQ ID NO: 96497 - DNA, 25 bp, Artificial
  Probe
tcagatcatttgtagccataaacct

SEQ ID NO: 96498 - DNA, 25 bp, Artificial
  Probe
tgtcatcagatcatttgtagccata

SEQ ID NO: 96499 - DNA, 25 bp, Artificial
  Probe
tctcaacttggtactctttcacttt

SEQ ID NO: 96500 - DNA, 25 bp, Artificial
  Probe
atcatttgtagccataaacctgaag

SEQ ID NO: 96501 - DNA, 25 bp, Artificial
  Probe
ttggtactctttcactttactcact

SEQ ID NO: 96502 - DNA, 25 bp, Artificial
  Probe
acttggtactctttcactttactca

SEQ ID NO: 96503 - DNA, 25 bp, Artificial
  Probe
gtctcaacttggtactctttcactt

SEQ ID NO: 96504 - DNA, 25 bp, Artificial
  Probe
ctccagcaacttcagaatcatcttt

SEQ ID NO: 96505 - DNA, 25 bp, Artificial
  Probe
cttggtactctttcactttactcac

SEQ ID NO: 96506 - DNA, 25 bp, Artificial
  Probe
aatcgtctcaacttggtactctttc

SEQ ID NO: 96507 - DNA, 25 bp, Artificial
  Probe
atcagatcatttgtagccataaacc

SEQ ID NO: 96508 - DNA, 25 bp, Artificial
  Probe
tttgtagccataaacctgaagtcct

SEQ ID NO: 96509 - DNA, 25 bp, Artificial
  Probe
ttgtagccataaacctgaagtcctt

SEQ ID NO: 96510 - DNA, 25 bp, Artificial
  Probe
gaagaagatgctgatgaggaaggag

SEQ ID NO: 96511 - DNA, 25 bp, Artificial
  Probe
gaggaagaagatgctgatgaggaag

SEQ ID NO: 96512 - DNA, 25 bp, Artificial
  Probe
agaggaagaagatgctgatgaggaa

SEQ ID NO: 96513 - DNA, 25 bp, Artificial
  Probe
gagaggaagaagatgctgatgagga

SEQ ID NO: 96514 - DNA, 25 bp, Artificial
  Probe
aatggagaatggactagaacaggct

SEQ ID NO: 96515 - DNA, 25 bp, Artificial
  Probe
caagtgactgaccatttagatgctc

SEQ ID NO: 96516 - DNA, 25 bp, Artificial
  Probe
agcatttatctgacccttcatctca

SEQ ID NO: 96517 - DNA, 25 bp, Artificial
  Probe
cagcatttatctgacccttcatctc

SEQ ID NO: 96518 - DNA, 25 bp, Artificial
  Probe
cttagctttgataacttgacccatg

SEQ ID NO: 96519 - DNA, 25 bp, Artificial
  Probe
tcttagctttgataacttgacccat

SEQ ID NO: 96520 - DNA, 25 bp, Artificial
  Probe
tcaagtgactgaccatttagatgct

SEQ ID NO: 96521 - DNA, 25 bp, Artificial
  Probe
ctatcatctgaggagtttgaggacc

SEQ ID NO: 96522 - DNA, 25 bp, Artificial
  Probe
cactcttagctttgataacttgacc

SEQ ID NO: 96523 - DNA, 25 bp, Artificial
  Probe
ccactcttagctttgataacttgac

SEQ ID NO: 96524 - DNA, 25 bp, Artificial
  Probe
ctctgacctatcatctgaggagttt

SEQ ID NO: 96525 - DNA, 25 bp, Artificial
  Probe
ctcttagctttgataacttgaccca

SEQ ID NO: 96526 - DNA, 25 bp, Artificial
  Probe
actcttagctttgataacttgaccc

SEQ ID NO: 96527 - DNA, 25 bp, Artificial
  Probe
atcaagaactcctattacagggaca

SEQ ID NO: 96528 - DNA, 25 bp, Artificial
  Probe
taatgttcctgccctagagatggta

SEQ ID NO: 96529 - DNA, 25 bp, Artificial
  Probe
ggaagaagatgctgatgaggaagga

SEQ ID NO: 96530 - DNA, 25 bp, Artificial
  Probe
aggaagaagatgctgatgaggaagg

SEQ ID NO: 96531 - DNA, 25 bp, Artificial
  Probe
tgacctatcatctgaggagtttgag

SEQ ID NO: 96532 - DNA, 25 bp, Artificial
  Probe
ctgacctatcatctgaggagtttga

SEQ ID NO: 96533 - DNA, 25 bp, Artificial
  Probe
tctgacctatcatctgaggagtttg

SEQ ID NO: 96534 - DNA, 25 bp, Artificial
  Probe
gctctgacctatcatctgaggagtt

SEQ ID NO: 96535 - DNA, 25 bp, Artificial
  Probe
gatcaagaactcctattacagggac

SEQ ID NO: 96536 - DNA, 25 bp, Artificial
  Probe
aagtgactgaccatttagatgctcc

SEQ ID NO: 96537 - DNA, 25 bp, Artificial
  Probe
aaatggagaatggactagaacaggc

SEQ ID NO: 96538 - DNA, 25 bp, Artificial
  Probe
cttcctccctgaataaagccgtatc

SEQ ID NO: 96539 - DNA, 25 bp, Artificial
  Probe
ggatcaagaactcctattacaggga

SEQ ID NO: 96540 - DNA, 25 bp, Artificial
  Probe
atggagaatggactagaacaggctg

SEQ ID NO: 96541 - DNA, 25 bp, Artificial
  Probe
cctatcatctgaggagtttgaggac

SEQ ID NO: 96542 - DNA, 25 bp, Artificial
  Probe
gacctatcatctgaggagtttgagg

SEQ ID NO: 96543 - DNA, 25 bp, Artificial
  Probe
aatgttcctgccctagagatggtat

SEQ ID NO: 96544 - DNA, 25 bp, Artificial
  Probe
ggagaggaagaagatgctgatgagg

SEQ ID NO: 96545 - DNA, 25 bp, Artificial
  Probe
atcatctgaggagtttgaggaccta

SEQ ID NO: 96546 - DNA, 25 bp, Artificial
  Probe
tatcatctgaggagtttgaggacct

SEQ ID NO: 96547 - DNA, 25 bp, Artificial
  Probe
acctatcatctgaggagtttgagga

SEQ ID NO: 96548 - DNA, 25 bp, Artificial
  Probe
tcttcctccctgaataaagccgtat

SEQ ID NO: 96549 - DNA, 25 bp, Artificial
  Probe
atgggtttgctgatgaggaagaaag

SEQ ID NO: 96550 - DNA, 25 bp, Artificial
  Probe
gatgggtttgctgatgaggaagaaa

SEQ ID NO: 96551 - DNA, 25 bp, Artificial
  Probe
gagaatggactagaacaggctgagg

SEQ ID NO: 96552 - DNA, 25 bp, Artificial
  Probe
ggagaatggactagaacaggctgag

SEQ ID NO: 96553 - DNA, 25 bp, Artificial
  Probe
ggactcagaacaagtgaatgggaaa

SEQ ID NO: 96554 - DNA, 25 bp, Artificial
  Probe
gaatgggaaaatggagaatggacta

SEQ ID NO: 96555 - DNA, 25 bp, Artificial
  Probe
ttaaggaagaaggtcacatctgttg

SEQ ID NO: 96556 - DNA, 25 bp, Artificial
  Probe
ttaaggtcttgagtccatgctaatc

SEQ ID NO: 96557 - DNA, 25 bp, Artificial
  Probe
atgagactgaagcctgaggaattac

SEQ ID NO: 96558 - DNA, 25 bp, Artificial
  Probe
tgaggaattacaggtcataggacag

SEQ ID NO: 96559 - DNA, 25 bp, Artificial
  Probe
ctgaggaattacaggtcataggaca

SEQ ID NO: 96560 - DNA, 25 bp, Artificial
  Probe
taaggtcttgagtccatgctaatca

SEQ ID NO: 96561 - DNA, 25 bp, Artificial
  Probe
catgagactgaagcctgaggaatta

SEQ ID NO: 96562 - DNA, 25 bp, Artificial
  Probe
cagcatagttgtaaatcaccatagc

SEQ ID NO: 96563 - DNA, 25 bp, Artificial
  Probe
tctcagcatagttgtaaatcaccat

SEQ ID NO: 96564 - DNA, 25 bp, Artificial
  Probe
gaggaattacaggtcataggacagg

SEQ ID NO: 96565 - DNA, 25 bp, Artificial
  Probe
tctctcagcatagttgtaaatcacc

SEQ ID NO: 96566 - DNA, 25 bp, Artificial
  Probe
ctctcagcatagttgtaaatcacca

SEQ ID NO: 96567 - DNA, 25 bp, Artificial
  Probe
taaggaagaaggtcacatctgttgc

SEQ ID NO: 96568 - DNA, 25 bp, Artificial
  Probe
aactagacagaggatgtatctaaca

SEQ ID NO: 96569 - DNA, 25 bp, Artificial
  Probe
tcagcatagttgtaaatcaccatag

SEQ ID NO: 96570 - DNA, 25 bp, Artificial
  Probe
ctcagcatagttgtaaatcaccata

SEQ ID NO: 96571 - DNA, 25 bp, Artificial
  Probe
atctctcagcatagttgtaaatcac

SEQ ID NO: 96572 - DNA, 25 bp, Artificial
  Probe
catctctcagcatagttgtaaatca

SEQ ID NO: 96573 - DNA, 25 bp, Artificial
  Probe
cttcatctctcagcatagttgtaaa

SEQ ID NO: 96574 - DNA, 25 bp, Artificial
  Probe
tcatctctcagcatagttgtaaatc

SEQ ID NO: 96575 - DNA, 25 bp, Artificial
  Probe
gcttcatctctcagcatagttgtaa

SEQ ID NO: 96576 - DNA, 25 bp, Artificial
  Probe
tgagactgaagcctgaggaattaca

SEQ ID NO: 96577 - DNA, 25 bp, Artificial
  Probe
gagactgaagcctgaggaattacag

SEQ ID NO: 96578 - DNA, 25 bp, Artificial
  Probe
tttaaggtcttgagtccatgctaat

SEQ ID NO: 96579 - DNA, 25 bp, Artificial
  Probe
acacaaagaattaactagacagagg

SEQ ID NO: 96580 - DNA, 25 bp, Artificial
  Probe
ctgactacaactaccacagtgacac

SEQ ID NO: 96581 - DNA, 25 bp, Artificial
  Probe
ttcatctctcagcatagttgtaaat

SEQ ID NO: 96582 - DNA, 25 bp, Artificial
  Probe
cacaaagaattaactagacagagga

SEQ ID NO: 96583 - DNA, 25 bp, Artificial
  Probe
ctaccacagtgacacaccttacttc

SEQ ID NO: 96584 - DNA, 25 bp, Artificial
  Probe
atcaccatagctctcagagtctcat

SEQ ID NO: 96585 - DNA, 25 bp, Artificial
  Probe
ttgagtccatgctaatcaatagtcc

SEQ ID NO: 96586 - DNA, 25 bp, Artificial
  Probe
ggtcttgagtccatgctaatcaata

SEQ ID NO: 96587 - DNA, 25 bp, Artificial
  Probe
tcttgagtccatgctaatcaatagt

SEQ ID NO: 96588 - DNA, 25 bp, Artificial
  Probe
tagacagaggatgtatctaacatgc

SEQ ID NO: 96589 - DNA, 25 bp, Artificial
  Probe
gcatagttgtaaatcaccatagctc

SEQ ID NO: 96590 - DNA, 25 bp, Artificial
  Probe
tgactacaactaccacagtgacaca

SEQ ID NO: 96591 - DNA, 25 bp, Artificial
  Probe
gttgtaaatcaccatagctctcaga

SEQ ID NO: 96592 - DNA, 25 bp, Artificial
  Probe
agttgtaaatcaccatagctctcag

SEQ ID NO: 96593 - DNA, 25 bp, Artificial
  Probe
cttgagtccatgctaatcaatagtc

SEQ ID NO: 96594 - DNA, 25 bp, Artificial
  Probe
gtcttgagtccatgctaatcaatag

SEQ ID NO: 96595 - DNA, 25 bp, Artificial
  Probe
catctgttgcctggaatgtgtctac

SEQ ID NO: 96596 - DNA, 25 bp, Artificial
  Probe
gactacaactaccacagtgacacac

SEQ ID NO: 96597 - DNA, 25 bp, Artificial
  Probe
cacatttcagctcacatctatcatg

SEQ ID NO: 96598 - DNA, 25 bp, Artificial
  Probe
aatcaccatagctctcagagtctca

SEQ ID NO: 96599 - DNA, 25 bp, Artificial
  Probe
tagttgtaaatcaccatagctctca

SEQ ID NO: 96600 - DNA, 25 bp, Artificial
  Probe
actactacaagcagaagaagttcaa

SEQ ID NO: 96601 - DNA, 25 bp, Artificial
  Probe
cactactacaagcagaagaagttca

SEQ ID NO: 96602 - DNA, 25 bp, Artificial
  Probe
taagaggcactactacaagcagaag

SEQ ID NO: 96603 - DNA, 25 bp, Artificial
  Probe
ctaagaggcactactacaagcagaa

SEQ ID NO: 96604 - DNA, 25 bp, Artificial
  Probe
gcactactacaagcagaagaagttc

SEQ ID NO: 96605 - DNA, 25 bp, Artificial
  Probe
tgatctcttattgctccacatcctg

SEQ ID NO: 96606 - DNA, 25 bp, Artificial
  Probe
gaggcactactacaagcagaagaag

SEQ ID NO: 96607 - DNA, 25 bp, Artificial
  Probe
ggcactactacaagcagaagaagtt

SEQ ID NO: 96608 - DNA, 25 bp, Artificial
  Probe
agaggcactactacaagcagaagaa

SEQ ID NO: 96609 - DNA, 25 bp, Artificial
  Probe
aagaggcactactacaagcagaaga

SEQ ID NO: 96610 - DNA, 25 bp, Artificial
  Probe
gtgatctcttattgctccacatcct

SEQ ID NO: 96611 - DNA, 25 bp, Artificial
  Probe
ctactacaagcagaagaagttcaaa

SEQ ID NO: 96612 - DNA, 25 bp, Artificial
  Probe
gacctcctgaccttagtcttgagat

SEQ ID NO: 96613 - DNA, 25 bp, Artificial
  Probe
ccagatgtgtcagtttgaactttaa

SEQ ID NO: 96614 - DNA, 25 bp, Artificial
  Probe
ttattgctccacatcctgcctaaga

SEQ ID NO: 96615 - DNA, 25 bp, Artificial
  Probe
tcttattgctccacatcctgcctaa

SEQ ID NO: 96616 - DNA, 25 bp, Artificial
  Probe
agtgctttgtgatctcttattgctc

SEQ ID NO: 96617 - DNA, 25 bp, Artificial
  Probe
actacaagcagaagaagttcaaata

SEQ ID NO: 96618 - DNA, 25 bp, Artificial
  Probe
tactacaagcagaagaagttcaaat

SEQ ID NO: 96619 - DNA, 25 bp, Artificial
  Probe
gaagaagttcaaatatgccgaggac

SEQ ID NO: 96620 - DNA, 25 bp, Artificial
  Probe
agaagaagttcaaatatgccgagga

SEQ ID NO: 96621 - DNA, 25 bp, Artificial
  Probe
cagaagaagttcaaatatgccgagg

SEQ ID NO: 96622 - DNA, 25 bp, Artificial
  Probe
cagtgctttgtgatctcttattgct

SEQ ID NO: 96623 - DNA, 25 bp, Artificial
  Probe
gatctcttattgctccacatcctgc

SEQ ID NO: 96624 - DNA, 25 bp, Artificial
  Probe
acctcctgaccttagtcttgagatc

SEQ ID NO: 96625 - DNA, 25 bp, Artificial
  Probe
aggcactactacaagcagaagaagt

SEQ ID NO: 96626 - DNA, 25 bp, Artificial
  Probe
agaagttcaaatatgccgaggacat

SEQ ID NO: 96627 - DNA, 25 bp, Artificial
  Probe
cctcacacatctatactctagcttt

SEQ ID NO: 96628 - DNA, 25 bp, Artificial
  Probe
aagaagttcaaatatgccgaggaca

SEQ ID NO: 96629 - DNA, 25 bp, Artificial
  Probe
tacaagcagaagaagttcaaatatg

SEQ ID NO: 96630 - DNA, 25 bp, Artificial
  Probe
cttattgctccacatcctgcctaag

SEQ ID NO: 96631 - DNA, 25 bp, Artificial
  Probe
ctcttattgctccacatcctgccta

SEQ ID NO: 96632 - DNA, 25 bp, Artificial
  Probe
ccctcacacatctatactctagctt

SEQ ID NO: 96633 - DNA, 25 bp, Artificial
  Probe
gaagacaggcaagactttggatttc

SEQ ID NO: 96634 - DNA, 25 bp, Artificial
  Probe
gccagatgtgtcagtttgaacttta

SEQ ID NO: 96635 - DNA, 25 bp, Artificial
  Probe
gtgctttgtgatctcttattgctcc

SEQ ID NO: 96636 - DNA, 25 bp, Artificial
  Probe
ctacaagcagaagaagttcaaatat

SEQ ID NO: 96637 - DNA, 25 bp, Artificial
  Probe
ctcacacatctatactctagctttg

SEQ ID NO: 96638 - DNA, 25 bp, Artificial
  Probe
cctaagaggcactactacaagcaga

SEQ ID NO: 96639 - DNA, 25 bp, Artificial
  Probe
cagatgtgtcagtttgaactttaat

SEQ ID NO: 96640 - DNA, 25 bp, Artificial
  Probe
atgaagacaggcaagactttggatt

SEQ ID NO: 96641 - DNA, 25 bp, Artificial
  Probe
acagtgctttgtgatctcttattgc

SEQ ID NO: 96642 - DNA, 25 bp, Artificial
  Probe
tgctttgtgatctcttattgctcca

SEQ ID NO: 96643 - DNA, 25 bp, Artificial
  Probe
cctcctgaccttagtcttgagatcc

SEQ ID NO: 96644 - DNA, 25 bp, Artificial
  Probe
gaagttcaaatatgccgaggacatg

SEQ ID NO: 96645 - DNA, 25 bp, Artificial
  Probe
cctgctctcctctctgaatataatg

SEQ ID NO: 96646 - DNA, 25 bp, Artificial
  Probe
tcctgctctcctctctgaatataat

SEQ ID NO: 96647 - DNA, 25 bp, Artificial
  Probe
gctctcctctctgaatataatgtgt

SEQ ID NO: 96648 - DNA, 25 bp, Artificial
  Probe
tgctctcctctctgaatataatgtg

SEQ ID NO: 96649 - DNA, 25 bp, Artificial
  Probe
ctgctctcctctctgaatataatgt

SEQ ID NO: 96650 - DNA, 25 bp, Artificial
  Probe
gtcctgctctcctctctgaatataa

SEQ ID NO: 96651 - DNA, 25 bp, Artificial
  Probe
taggaacagagtgaattatgagact

SEQ ID NO: 96652 - DNA, 25 bp, Artificial
  Probe
ataggaacagagtgaattatgagac

SEQ ID NO: 96653 - DNA, 25 bp, Artificial
  Probe
ctctcctctctgaatataatgtgtt

SEQ ID NO: 96654 - DNA, 25 bp, Artificial
  Probe
ggtcctgctctcctctctgaatata

SEQ ID NO: 96655 - DNA, 25 bp, Artificial
  Probe
catgctgtcctcacctataatgaag

SEQ ID NO: 96656 - DNA, 25 bp, Artificial
  Probe
ctactcatcctctcctcagcattct

SEQ ID NO: 96657 - DNA, 25 bp, Artificial
  Probe
tactcatcctctcctcagcattctc

SEQ ID NO: 96658 - DNA, 25 bp, Artificial
  Probe
tctactcatcctctcctcagcattc

SEQ ID NO: 96659 - DNA, 25 bp, Artificial
  Probe
gggatggtttgatgagactgtaaat

SEQ ID NO: 96660 - DNA, 25 bp, Artificial
  Probe
aataggaacagagtgaattatgaga

SEQ ID NO: 96661 - DNA, 25 bp, Artificial
  Probe
atgctgtcctcacctataatgaagg

SEQ ID NO: 96662 - DNA, 25 bp, Artificial
  Probe
ttaaggataaggctaaatcggcaaa

SEQ ID NO: 96663 - DNA, 25 bp, Artificial
  Probe
cagtatagtacaagcctacgttgat

SEQ ID NO: 96664 - DNA, 25 bp, Artificial
  Probe
atagtacaagcctacgttgatagag

SEQ ID NO: 96665 - DNA, 25 bp, Artificial
  Probe
ccatgctgtcctcacctataatgaa

SEQ ID NO: 96666 - DNA, 25 bp, Artificial
  Probe
gtctactcatcctctcctcagcatt

SEQ ID NO: 96667 - DNA, 25 bp, Artificial
  Probe
ggatggtttgatgagactgtaaata

SEQ ID NO: 96668 - DNA, 25 bp, Artificial
  Probe
agggatggtttgatgagactgtaaa

SEQ ID NO: 96669 - DNA, 25 bp, Artificial
  Probe
gatagaacctatgtctacacagctc

SEQ ID NO: 96670 - DNA, 25 bp, Artificial
  Probe
agtatagtacaagcctacgttgata

SEQ ID NO: 96671 - DNA, 25 bp, Artificial
  Probe
cgtgggaataacatttgccttaaat

SEQ ID NO: 96672 - DNA, 25 bp, Artificial
  Probe
tatagtacaagcctacgttgataga

SEQ ID NO: 96673 - DNA, 25 bp, Artificial
  Probe
gtatagtacaagcctacgttgatag

SEQ ID NO: 96674 - DNA, 25 bp, Artificial
  Probe
ccagtatagtacaagcctacgttga

SEQ ID NO: 96675 - DNA, 25 bp, Artificial
  Probe
gtaggtctactcatcctctcctcag

SEQ ID NO: 96676 - DNA, 25 bp, Artificial
  Probe
atagaacctatgtctacacagctcc

SEQ ID NO: 96677 - DNA, 25 bp, Artificial
  Probe
ggatagaacctatgtctacacagct

SEQ ID NO: 96678 - DNA, 25 bp, Artificial
  Probe
gaaatcagtgaagcaaatctaatgt

SEQ ID NO: 96679 - DNA, 25 bp, Artificial
  Probe
tagtacaagcctacgttgatagagc

SEQ ID NO: 96680 - DNA, 25 bp, Artificial
  Probe
gagggatggtttgatgagactgtaa

SEQ ID NO: 96681 - DNA, 25 bp, Artificial
  Probe
ctgaagtaggtctactcatcctctc

SEQ ID NO: 96682 - DNA, 25 bp, Artificial
  Probe
tttactgaaacttcaagaccaaagc

SEQ ID NO: 96683 - DNA, 25 bp, Artificial
  Probe
gactgaagtaggtctactcatcctc

SEQ ID NO: 96684 - DNA, 25 bp, Artificial
  Probe
cgaaataggaacagagtgaattatg

SEQ ID NO: 96685 - DNA, 25 bp, Artificial
  Probe
ttactgaaacttcaagaccaaagca

SEQ ID NO: 96686 - DNA, 25 bp, Artificial
  Probe
actgaagtaggtctactcatcctct

SEQ ID NO: 96687 - DNA, 25 bp, Artificial
  Probe
aaatcagtgaagcaaatctaatgtt

SEQ ID NO: 96688 - DNA, 25 bp, Artificial
  Probe
tccacaacttcaaataagaaatcag

SEQ ID NO: 96689 - DNA, 25 bp, Artificial
  Probe
gtgggaataacatttgccttaaatt

SEQ ID NO: 96690 - DNA, 25 bp, Artificial
  Probe
agagtgtgtcttcgatataatccaa

SEQ ID NO: 96691 - DNA, 25 bp, Artificial
  Probe
aaggtagagtgtgtcttcgatataa

SEQ ID NO: 96692 - DNA, 25 bp, Artificial
  Probe
gagtgtgtcttcgatataatccaat

SEQ ID NO: 96693 - DNA, 25 bp, Artificial
  Probe
cgaatacttctacccatctgttcat

SEQ ID NO: 96694 - DNA, 25 bp, Artificial
  Probe
tagagtgtgtcttcgatataatcca

SEQ ID NO: 96695 - DNA, 25 bp, Artificial
  Probe
aggtagagtgtgtcttcgatataat

SEQ ID NO: 96696 - DNA, 25 bp, Artificial
  Probe
gatgttccaagtttgtatcattcct

SEQ ID NO: 96697 - DNA, 25 bp, Artificial
  Probe
aacatggaacaacatacactagata

SEQ ID NO: 96698 - DNA, 25 bp, Artificial
  Probe
ttccaagtttgtatcattcctttgc

SEQ ID NO: 96699 - DNA, 25 bp, Artificial
  Probe
tgttccaagtttgtatcattccttt

SEQ ID NO: 96700 - DNA, 25 bp, Artificial
  Probe
gtagagtgtgtcttcgatataatcc

SEQ ID NO: 96701 - DNA, 25 bp, Artificial
  Probe
ggtagagtgtgtcttcgatataatc

SEQ ID NO: 96702 - DNA, 25 bp, Artificial
  Probe
atgttccaagtttgtatcattcctt

SEQ ID NO: 96703 - DNA, 25 bp, Artificial
  Probe
agtgtgtcttcgatataatccaatt

SEQ ID NO: 96704 - DNA, 25 bp, Artificial
  Probe
gccagcagaagttaattgttcttag

SEQ ID NO: 96705 - DNA, 25 bp, Artificial
  Probe
acatggaacaacatacactagatat

SEQ ID NO: 96706 - DNA, 25 bp, Artificial
  Probe
acttctacccatctgttcatagttt

SEQ ID NO: 96707 - DNA, 25 bp, Artificial
  Probe
gtcttccctagaaatcctcagaatg

SEQ ID NO: 96708 - DNA, 25 bp, Artificial
  Probe
tgtcttccctagaaatcctcagaat

SEQ ID NO: 96709 - DNA, 25 bp, Artificial
  Probe
gttccaagtttgtatcattcctttg

SEQ ID NO: 96710 - DNA, 25 bp, Artificial
  Probe
ccagcagaagttaattgttcttaga

SEQ ID NO: 96711 - DNA, 25 bp, Artificial
  Probe
ttgtcttccctagaaatcctcagaa

SEQ ID NO: 96712 - DNA, 25 bp, Artificial
  Probe
tttgtcttccctagaaatcctcaga

SEQ ID NO: 96713 - DNA, 25 bp, Artificial
  Probe
cagtccaatcatcttgtgcatctag

SEQ ID NO: 96714 - DNA, 25 bp, Artificial
  Probe
cttccctagaaatcctcagaatgat

SEQ ID NO: 96715 - DNA, 25 bp, Artificial
  Probe
tcttccctagaaatcctcagaatga

SEQ ID NO: 96716 - DNA, 25 bp, Artificial
  Probe
tacttctacccatctgttcatagtt

SEQ ID NO: 96717 - DNA, 25 bp, Artificial
  Probe
atttgtcttccctagaaatcctcag

SEQ ID NO: 96718 - DNA, 25 bp, Artificial
  Probe
atacttctacccatctgttcatagt

SEQ ID NO: 96719 - DNA, 25 bp, Artificial
  Probe
cttctacccatctgttcatagttta

SEQ ID NO: 96720 - DNA, 25 bp, Artificial
  Probe
tcttgtgcatctagaattcattcct

SEQ ID NO: 96721 - DNA, 25 bp, Artificial
  Probe
atgaattcgaggagaagttgatagc

SEQ ID NO: 96722 - DNA, 25 bp, Artificial
  Probe
agatatgaattcgaggagaagttga

SEQ ID NO: 96723 - DNA, 25 bp, Artificial
  Probe
tccaatcatcttgtgcatctagaat

SEQ ID NO: 96724 - DNA, 25 bp, Artificial
  Probe
atcttgtgcatctagaattcattcc

SEQ ID NO: 96725 - DNA, 25 bp, Artificial
  Probe
tatttgtcttccctagaaatcctca

SEQ ID NO: 96726 - DNA, 25 bp, Artificial
  Probe
agtatttgtcttccctagaaatcct

SEQ ID NO: 96727 - DNA, 25 bp, Artificial
  Probe
ccaatcatcttgtgcatctagaatt

SEQ ID NO: 96728 - DNA, 25 bp, Artificial
  Probe
gaattcgaggagaagttgatagcta

SEQ ID NO: 96729 - DNA, 25 bp, Artificial
  Probe
aatacttctacccatctgttcatag

SEQ ID NO: 96730 - DNA, 25 bp, Artificial
  Probe
aattcgaggagaagttgatagctaa

SEQ ID NO: 96731 - DNA, 25 bp, Artificial
  Probe
gtccaatcatcttgtgcatctagaa

SEQ ID NO: 96732 - DNA, 25 bp, Artificial
  Probe
gtatttgtcttccctagaaatcctc

SEQ ID NO: 96733 - DNA, 25 bp, Artificial
  Probe
cttgtgcatctagaattcattccta

SEQ ID NO: 96734 - DNA, 25 bp, Artificial
  Probe
aagatatgaattcgaggagaagttg

SEQ ID NO: 96735 - DNA, 25 bp, Artificial
  Probe
tataatggcattgaagtggtgagta

SEQ ID NO: 96736 - DNA, 25 bp, Artificial
  Probe
ataatggcattgaagtggtgagtat

SEQ ID NO: 96737 - DNA, 25 bp, Artificial
  Probe
taatggcattgaagtggtgagtatt

SEQ ID NO: 96738 - DNA, 25 bp, Artificial
  Probe
ttataatggcattgaagtggtgagt

SEQ ID NO: 96739 - DNA, 25 bp, Artificial
  Probe
gatataatcaccacactgaggatgg

SEQ ID NO: 96740 - DNA, 25 bp, Artificial
  Probe
atataatcaccacactgaggatgga

SEQ ID NO: 96741 - DNA, 25 bp, Artificial
  Probe
cttccttctcagccactttatgtta

SEQ ID NO: 96742 - DNA, 25 bp, Artificial
  Probe
gccactttatgttacctctccttaa

SEQ ID NO: 96743 - DNA, 25 bp, Artificial
  Probe
ttccttctcagccactttatgttac

SEQ ID NO: 96744 - DNA, 25 bp, Artificial
  Probe
tgaatccaatttaagcaatcctgtc

SEQ ID NO: 96745 - DNA, 25 bp, Artificial
  Probe
tataatcaccacactgaggatggag

SEQ ID NO: 96746 - DNA, 25 bp, Artificial
  Probe
agccactttatgttacctctcctta

SEQ ID NO: 96747 - DNA, 25 bp, Artificial
  Probe
gaatccaatttaagcaatcctgtct

SEQ ID NO: 96748 - DNA, 25 bp, Artificial
  Probe
attgaagtggtgagtatttcctgtt

SEQ ID NO: 96749 - DNA, 25 bp, Artificial
  Probe
ttgaagtggtgagtatttcctgttt

SEQ ID NO: 96750 - DNA, 25 bp, Artificial
  Probe
cttctcagccactttatgttacctc

SEQ ID NO: 96751 - DNA, 25 bp, Artificial
  Probe
atgaatccaatttaagcaatcctgt

SEQ ID NO: 96752 - DNA, 25 bp, Artificial
  Probe
cattgaagtggtgagtatttcctgt

SEQ ID NO: 96753 - DNA, 25 bp, Artificial
  Probe
ttctcagccactttatgttacctct

SEQ ID NO: 96754 - DNA, 25 bp, Artificial
  Probe
atccaatttaagcaatcctgtctag

SEQ ID NO: 96755 - DNA, 25 bp, Artificial
  Probe
aatccaatttaagcaatcctgtcta

SEQ ID NO: 96756 - DNA, 25 bp, Artificial
  Probe
aatggcattgaagtggtgagtattt

SEQ ID NO: 96757 - DNA, 25 bp, Artificial
  Probe
tctcagccactttatgttacctctc

SEQ ID NO: 96758 - DNA, 25 bp, Artificial
  Probe
atggcattgaagtggtgagtatttc

SEQ ID NO: 96759 - DNA, 25 bp, Artificial
  Probe
tgatataatcaccacactgaggatg

SEQ ID NO: 96760 - DNA, 25 bp, Artificial
  Probe
tgatgatataatcaccacactgagg

SEQ ID NO: 96761 - DNA, 25 bp, Artificial
  Probe
gatgatataatcaccacactgagga

SEQ ID NO: 96762 - DNA, 25 bp, Artificial
  Probe
tcttccttctcagccactttatgtt

SEQ ID NO: 96763 - DNA, 25 bp, Artificial
  Probe
atgatataatcaccacactgaggat

SEQ ID NO: 96764 - DNA, 25 bp, Artificial
  Probe
gcatgatgatataatcaccacactg

SEQ ID NO: 96765 - DNA, 25 bp, Artificial
  Probe
agcatgatgatataatcaccacact

SEQ ID NO: 96766 - DNA, 25 bp, Artificial
  Probe
cagcatgatgatataatcaccacac

SEQ ID NO: 96767 - DNA, 25 bp, Artificial
  Probe
tcagcatgatgatataatcaccaca

SEQ ID NO: 96768 - DNA, 25 bp, Artificial
  Probe
taatcaccacactgaggatggagta

SEQ ID NO: 96769 - DNA, 25 bp, Artificial
  Probe
attataatggcattgaagtggtgag

SEQ ID NO: 96770 - DNA, 25 bp, Artificial
  Probe
cagccactttatgttacctctcctt

SEQ ID NO: 96771 - DNA, 25 bp, Artificial
  Probe
ccttctcagccactttatgttacct

SEQ ID NO: 96772 - DNA, 25 bp, Artificial
  Probe
tccttctcagccactttatgttacc

SEQ ID NO: 96773 - DNA, 25 bp, Artificial
  Probe
ctcttccttctcagccactttatgt

SEQ ID NO: 96774 - DNA, 25 bp, Artificial
  Probe
ccactttatgttacctctccttaaa

SEQ ID NO: 96775 - DNA, 25 bp, Artificial
  Probe
gcattgaagtggtgagtatttcctg

SEQ ID NO: 96776 - DNA, 25 bp, Artificial
  Probe
aattataatggcattgaagtggtga

SEQ ID NO: 96777 - DNA, 25 bp, Artificial
  Probe
ttcagcatgatgatataatcaccac

SEQ ID NO: 96778 - DNA, 25 bp, Artificial
  Probe
tatgaatccaatttaagcaatcctg

SEQ ID NO: 96779 - DNA, 25 bp, Artificial
  Probe
atgatgatataatcaccacactgag

SEQ ID NO: 96780 - DNA, 25 bp, Artificial
  Probe
tggctcctagtaggtatgtatagac

SEQ ID NO: 96781 - DNA, 25 bp, Artificial
  Probe
actggctcctagtaggtatgtatag

SEQ ID NO: 96782 - DNA, 25 bp, Artificial
  Probe
cactggctcctagtaggtatgtata

SEQ ID NO: 96783 - DNA, 25 bp, Artificial
  Probe
ctggctcctagtaggtatgtataga

SEQ ID NO: 96784 - DNA, 25 bp, Artificial
  Probe
gctcctagtaggtatgtatagacca

SEQ ID NO: 96785 - DNA, 25 bp, Artificial
  Probe
ggctcctagtaggtatgtatagacc

SEQ ID NO: 96786 - DNA, 25 bp, Artificial
  Probe
ctttgacattaacacttaggacacg

SEQ ID NO: 96787 - DNA, 25 bp, Artificial
  Probe
gtgaacaaccgctacaaatatgaag

SEQ ID NO: 96788 - DNA, 25 bp, Artificial
  Probe
ttgacattaacacttaggacacgtt

SEQ ID NO: 96789 - DNA, 25 bp, Artificial
  Probe
tgccttcagaaataatcttcagtca

SEQ ID NO: 96790 - DNA, 25 bp, Artificial
  Probe
cctagtaggtatgtatagaccatgc

SEQ ID NO: 96791 - DNA, 25 bp, Artificial
  Probe
tctttgacattaacacttaggacac

SEQ ID NO: 96792 - DNA, 25 bp, Artificial
  Probe
gccttcagaaataatcttcagtcag

SEQ ID NO: 96793 - DNA, 25 bp, Artificial
  Probe
ctaaacttgctgacccaaataatcc

SEQ ID NO: 96794 - DNA, 25 bp, Artificial
  Probe
ttgccttcagaaataatcttcagtc

SEQ ID NO: 96795 - DNA, 25 bp, Artificial
  Probe
taaacttgctgacccaaataatcct

SEQ ID NO: 96796 - DNA, 25 bp, Artificial
  Probe
tttgtttggtagtgagttcaatcct

SEQ ID NO: 96797 - DNA, 25 bp, Artificial
  Probe
gctaaacttgctgacccaaataatc

SEQ ID NO: 96798 - DNA, 25 bp, Artificial
  Probe
aagtctcattgtagaaactcactga

SEQ ID NO: 96799 - DNA, 25 bp, Artificial
  Probe
tgaagtctcattgtagaaactcact

SEQ ID NO: 96800 - DNA, 25 bp, Artificial
  Probe
gaagtctcattgtagaaactcactg

SEQ ID NO: 96801 - DNA, 25 bp, Artificial
  Probe
tgaacaaccgctacaaatatgaagg

SEQ ID NO: 96802 - DNA, 25 bp, Artificial
  Probe
aaacttgctgacccaaataatcctt

SEQ ID NO: 96803 - DNA, 25 bp, Artificial
  Probe
attgccttcagaaataatcttcagt

SEQ ID NO: 96804 - DNA, 25 bp, Artificial
  Probe
ttgaagtctcattgtagaaactcac

SEQ ID NO: 96805 - DNA, 25 bp, Artificial
  Probe
ctagtaggtatgtatagaccatgct

SEQ ID NO: 96806 - DNA, 25 bp, Artificial
  Probe
ttgtttggtagtgagttcaatcctg

SEQ ID NO: 96807 - DNA, 25 bp, Artificial
  Probe
tagtgagttcaatcctgagcacaag

SEQ ID NO: 96808 - DNA, 25 bp, Artificial
  Probe
gaggttccttaacaaagtgtcaatt

SEQ ID NO: 96809 - DNA, 25 bp, Artificial
  Probe
gtttggtagtgagttcaatcctgag

SEQ ID NO: 96810 - DNA, 25 bp, Artificial
  Probe
aacttgctgacccaaataatccttc

SEQ ID NO: 96811 - DNA, 25 bp, Artificial
  Probe
atctttgacattaacacttaggaca

SEQ ID NO: 96812 - DNA, 25 bp, Artificial
  Probe
tgaggttccttaacaaagtgtcaat

SEQ ID NO: 96813 - DNA, 25 bp, Artificial
  Probe
ccttcagaaataatcttcagtcaga

SEQ ID NO: 96814 - DNA, 25 bp, Artificial
  Probe
aggttccttaacaaagtgtcaattt

SEQ ID NO: 96815 - DNA, 25 bp, Artificial
  Probe
cttacttgctgttatgtttccagtg

SEQ ID NO: 96816 - DNA, 25 bp, Artificial
  Probe
gtagtgagttcaatcctgagcacaa

SEQ ID NO: 96817 - DNA, 25 bp, Artificial
  Probe
ttacttgctgttatgtttccagtga

SEQ ID NO: 96818 - DNA, 25 bp, Artificial
  Probe
aatttgtaggagcatttaggcatga

SEQ ID NO: 96819 - DNA, 25 bp, Artificial
  Probe
caatttgtaggagcatttaggcatg

SEQ ID NO: 96820 - DNA, 25 bp, Artificial
  Probe
agtaggtatgtatagaccatgctaa

SEQ ID NO: 96821 - DNA, 25 bp, Artificial
  Probe
tttgaagtctcattgtagaaactca

SEQ ID NO: 96822 - DNA, 25 bp, Artificial
  Probe
ctgaggttccttaacaaagtgtcaa

SEQ ID NO: 96823 - DNA, 25 bp, Artificial
  Probe
gaacaaccgctacaaatatgaaggg

SEQ ID NO: 96824 - DNA, 25 bp, Artificial
  Probe
tcctagtaggtatgtatagaccatg

SEQ ID NO: 96825 - DNA, 25 bp, Artificial
  Probe
tttgtggcgaacctaattaaatgac

SEQ ID NO: 96826 - DNA, 25 bp, Artificial
  Probe
gtggcgaacctaattaaatgacaag

SEQ ID NO: 96827 - DNA, 25 bp, Artificial
  Probe
tgtggcgaacctaattaaatgacaa

SEQ ID NO: 96828 - DNA, 25 bp, Artificial
  Probe
ttgtggcgaacctaattaaatgaca

SEQ ID NO: 96829 - DNA, 25 bp, Artificial
  Probe
tggcgaacctaattaaatgacaagg

SEQ ID NO: 96830 - DNA, 25 bp, Artificial
  Probe
cttagagaaaacacttgtcagccta

SEQ ID NO: 96831 - DNA, 25 bp, Artificial
  Probe
ttagagaaaacacttgtcagcctag

SEQ ID NO: 96832 - DNA, 25 bp, Artificial
  Probe
gtaagagccggaatcagatggaatc

SEQ ID NO: 96833 - DNA, 25 bp, Artificial
  Probe
gctacacttagagaaaacacttgtc

SEQ ID NO: 96834 - DNA, 25 bp, Artificial
  Probe
ttttgtggcgaacctaattaaatga

SEQ ID NO: 96835 - DNA, 25 bp, Artificial
  Probe
acttagagaaaacacttgtcagcct

SEQ ID NO: 96836 - DNA, 25 bp, Artificial
  Probe
cacttagagaaaacacttgtcagcc

SEQ ID NO: 96837 - DNA, 25 bp, Artificial
  Probe
tacacttagagaaaacacttgtcag

SEQ ID NO: 96838 - DNA, 25 bp, Artificial
  Probe
ctacacttagagaaaacacttgtca

SEQ ID NO: 96839 - DNA, 25 bp, Artificial
  Probe
acacttagagaaaacacttgtcagc

SEQ ID NO: 96840 - DNA, 25 bp, Artificial
  Probe
tgtaagagccggaatcagatggaat

SEQ ID NO: 96841 - DNA, 25 bp, Artificial
  Probe
tagagaaaacacttgtcagcctagc

SEQ ID NO: 96842 - DNA, 25 bp, Artificial
  Probe
ctgtaagagccggaatcagatggaa

SEQ ID NO: 96843 - DNA, 25 bp, Artificial
  Probe
cctaattaaatgacaaggtttcatc

SEQ ID NO: 96844 - DNA, 25 bp, Artificial
  Probe
ggcgaacctaattaaatgacaaggt

SEQ ID NO: 96845 - DNA, 25 bp, Artificial
  Probe
agagaaaacacttgtcagcctagcc

SEQ ID NO: 96846 - DNA, 25 bp, Artificial
  Probe
acctaattaaatgacaaggtttcat

SEQ ID NO: 96847 - DNA, 25 bp, Artificial
  Probe
agaaaacacttgtcagcctagccag

SEQ ID NO: 96848 - DNA, 25 bp, Artificial
  Probe
gagaaaacacttgtcagcctagcca

SEQ ID NO: 96849 - DNA, 25 bp, Artificial
  Probe
atagaaggaagactacagaacaacg

SEQ ID NO: 96850 - DNA, 25 bp, Artificial
  Probe
ccagatagaaggaagactacagaac

SEQ ID NO: 96851 - DNA, 25 bp, Artificial
  Probe
ttcctgtattccattctgttcttgt

SEQ ID NO: 96852 - DNA, 25 bp, Artificial
  Probe
cctgtattccattctgttcttgtct

SEQ ID NO: 96853 - DNA, 25 bp, Artificial
  Probe
tcctgtattccattctgttcttgtc

SEQ ID NO: 96854 - DNA, 25 bp, Artificial
  Probe
cagatagaaggaagactacagaaca

SEQ ID NO: 96855 - DNA, 25 bp, Artificial
  Probe
attcctgtattccattctgttcttg

SEQ ID NO: 96856 - DNA, 25 bp, Artificial
  Probe
agcacctaagttatccagatagaag

SEQ ID NO: 96857 - DNA, 25 bp, Artificial
  Probe
gagcacctaagttatccagatagaa

SEQ ID NO: 96858 - DNA, 25 bp, Artificial
  Probe
gatagaaggaagactacagaacaac

SEQ ID NO: 96859 - DNA, 25 bp, Artificial
  Probe
agatagaaggaagactacagaacaa

SEQ ID NO: 96860 - DNA, 25 bp, Artificial
  Probe
actctcctgcctagaatcctaataa

SEQ ID NO: 96861 - DNA, 25 bp, Artificial
  Probe
aactctcctgcctagaatcctaata

SEQ ID NO: 96862 - DNA, 25 bp, Artificial
  Probe
ctgtattccattctgttcttgtcta

SEQ ID NO: 96863 - DNA, 25 bp, Artificial
  Probe
ctctcctgcctagaatcctaataat

SEQ ID NO: 96864 - DNA, 25 bp, Artificial
  Probe
tgtattccattctgttcttgtctaa

SEQ ID NO: 96865 - DNA, 25 bp, Artificial
  Probe
agatgctgtgaattattcctgtatt

SEQ ID NO: 96866 - DNA, 25 bp, Artificial
  Probe
gcacctaagttatccagatagaagg

SEQ ID NO: 96867 - DNA, 25 bp, Artificial
  Probe
tattcctgtattccattctgttctt

SEQ ID NO: 96868 - DNA, 25 bp, Artificial
  Probe
ttattcctgtattccattctgttct

SEQ ID NO: 96869 - DNA, 25 bp, Artificial
  Probe
tccagatagaaggaagactacagaa

SEQ ID NO: 96870 - DNA, 25 bp, Artificial
  Probe
atccagatagaaggaagactacaga

SEQ ID NO: 96871 - DNA, 25 bp, Artificial
  Probe
tgctgtgaattattcctgtattcca

SEQ ID NO: 96872 - DNA, 25 bp, Artificial
  Probe
ttagatgctgtgaattattcctgta

SEQ ID NO: 96873 - DNA, 25 bp, Artificial
  Probe
cacctaagttatccagatagaagga

SEQ ID NO: 96874 - DNA, 25 bp, Artificial
  Probe
tctcctgcctagaatcctaataata

SEQ ID NO: 96875 - DNA, 25 bp, Artificial
  Probe
gctgtgaattattcctgtattccat

SEQ ID NO: 96876 - DNA, 25 bp, Artificial
  Probe
atgctgtgaattattcctgtattcc

SEQ ID NO: 96877 - DNA, 25 bp, Artificial
  Probe
tagatgctgtgaattattcctgtat

SEQ ID NO: 96878 - DNA, 25 bp, Artificial
  Probe
aatgagaatgtgtcctttagatgct

SEQ ID NO: 96879 - DNA, 25 bp, Artificial
  Probe
gaatgagaatgtgtcctttagatgc

SEQ ID NO: 96880 - DNA, 25 bp, Artificial
  Probe
aatgtgtcctttagatgctgtgaat

SEQ ID NO: 96881 - DNA, 25 bp, Artificial
  Probe
gccagtcaatcaaatcagataatca

SEQ ID NO: 96882 - DNA, 25 bp, Artificial
  Probe
tatccagatagaaggaagactacag

SEQ ID NO: 96883 - DNA, 25 bp, Artificial
  Probe
aagttatccagatagaaggaagact

SEQ ID NO: 96884 - DNA, 25 bp, Artificial
  Probe
tgtgtcctttagatgctgtgaatta

SEQ ID NO: 96885 - DNA, 25 bp, Artificial
  Probe
atgagaatgtgtcctttagatgctg

SEQ ID NO: 96886 - DNA, 25 bp, Artificial
  Probe
tagaaggaagactacagaacaacgt

SEQ ID NO: 96887 - DNA, 25 bp, Artificial
  Probe
atgtgtcctttagatgctgtgaatt

SEQ ID NO: 96888 - DNA, 25 bp, Artificial
  Probe
ggatattaatgagtagtgccagtta

SEQ ID NO: 96889 - DNA, 25 bp, Artificial
  Probe
tgaatgagaatgtgtcctttagatg

SEQ ID NO: 96890 - DNA, 25 bp, Artificial
  Probe
gtgtcctttagatgctgtgaattat

SEQ ID NO: 96891 - DNA, 25 bp, Artificial
  Probe
tctgaatgagaatgtgtcctttaga

SEQ ID NO: 96892 - DNA, 25 bp, Artificial
  Probe
acctaagttatccagatagaaggaa

SEQ ID NO: 96893 - DNA, 25 bp, Artificial
  Probe
gaatgtgtcctttagatgctgtgaa

SEQ ID NO: 96894 - DNA, 25 bp, Artificial
  Probe
ctatgctgatgtgaccttccttgat

SEQ ID NO: 96895 - DNA, 25 bp, Artificial
  Probe
tatgctgatgtgaccttccttgatg

SEQ ID NO: 96896 - DNA, 25 bp, Artificial
  Probe
agattatcttccgatactgtgctgg

SEQ ID NO: 96897 - DNA, 25 bp, Artificial
  Probe
tatgcctcagaggagaagattatct

SEQ ID NO: 96898 - DNA, 25 bp, Artificial
  Probe
ctatgcctcagaggagaagattatc

SEQ ID NO: 96899 - DNA, 25 bp, Artificial
  Probe
gctatgcctcagaggagaagattat

SEQ ID NO: 96900 - DNA, 25 bp, Artificial
  Probe
aagattatcttccgatactgtgctg

SEQ ID NO: 96901 - DNA, 25 bp, Artificial
  Probe
atgcctcagaggagaagattatctt

SEQ ID NO: 96902 - DNA, 25 bp, Artificial
  Probe
gattatcttccgatactgtgctggc

SEQ ID NO: 96903 - DNA, 25 bp, Artificial
  Probe
atgctgatgtgaccttccttgatga

SEQ ID NO: 96904 - DNA, 25 bp, Artificial
  Probe
ctgatgtgaccttccttgatgacca

SEQ ID NO: 96905 - DNA, 25 bp, Artificial
  Probe
attatcttccgatactgtgctggca

SEQ ID NO: 96906 - DNA, 25 bp, Artificial
  Probe
gctatgctgatgtgaccttccttga

SEQ ID NO: 96907 - DNA, 25 bp, Artificial
  Probe
tgctgatgtgaccttccttgatgac

SEQ ID NO: 96908 - DNA, 25 bp, Artificial
  Probe
gtaacaacaatgtccgccttccaag

SEQ ID NO: 96909 - DNA, 25 bp, Artificial
  Probe
tgatgtgaccttccttgatgaccac

SEQ ID NO: 96910 - DNA, 25 bp, Artificial
  Probe
taacaacaatgtccgccttccaaga

SEQ ID NO: 96911 - DNA, 25 bp, Artificial
  Probe
aggaagacttcggatcttgtttctg

SEQ ID NO: 96912 - DNA, 25 bp, Artificial
  Probe
caggaagacttcggatcttgtttct

SEQ ID NO: 96913 - DNA, 25 bp, Artificial
  Probe
ttatcttccgatactgtgctggcag

SEQ ID NO: 96914 - DNA, 25 bp, Artificial
  Probe
gaagacttcggatcttgtttctgct

SEQ ID NO: 96915 - DNA, 25 bp, Artificial
  Probe
aagacttcggatcttgtttctgctg

SEQ ID NO: 96916 - DNA, 25 bp, Artificial
  Probe
gatgtgaccttccttgatgaccacc

SEQ ID NO: 96917 - DNA, 25 bp, Artificial
  Probe
ggctatgcctcagaggagaagatta

SEQ ID NO: 96918 - DNA, 25 bp, Artificial
  Probe
ggaagacttcggatcttgtttctgc

SEQ ID NO: 96919 - DNA, 25 bp, Artificial
  Probe
gcaggaagacttcggatcttgtttc

SEQ ID NO: 96920 - DNA, 25 bp, Artificial
  Probe
agctatgctgatgtgaccttccttg

SEQ ID NO: 96921 - DNA, 25 bp, Artificial
  Probe
cttccaagagccttacctggtttgt

SEQ ID NO: 96922 - DNA, 25 bp, Artificial
  Probe
ttccaagagccttacctggtttgtg

SEQ ID NO: 96923 - DNA, 25 bp, Artificial
  Probe
tgcaggaagacttcggatcttgttt

SEQ ID NO: 96924 - DNA, 25 bp, Artificial
  Probe
ctctcatctgggaaaatggcagaga

SEQ ID NO: 96925 - DNA, 25 bp, Artificial
  Probe
ctcatctgggaaaatggcagagact

SEQ ID NO: 96926 - DNA, 25 bp, Artificial
  Probe
tctcatctgggaaaatggcagagac

SEQ ID NO: 96927 - DNA, 25 bp, Artificial
  Probe
gaagccccatcagggtaacaacaat

SEQ ID NO: 96928 - DNA, 25 bp, Artificial
  Probe
tcatctgggaaaatggcagagactg

SEQ ID NO: 96929 - DNA, 25 bp, Artificial
  Probe
atgagctctcatctgggaaaatggc

SEQ ID NO: 96930 - DNA, 25 bp, Artificial
  Probe
tgtagaccagatgagaaggagaaag

SEQ ID NO: 96931 - DNA, 25 bp, Artificial
  Probe
gtagaccagatgagaaggagaaagg

SEQ ID NO: 96932 - DNA, 25 bp, Artificial
  Probe
tgatacttcccataaaggcatccag

SEQ ID NO: 96933 - DNA, 25 bp, Artificial
  Probe
ctgatacttcccataaaggcatcca

SEQ ID NO: 96934 - DNA, 25 bp, Artificial
  Probe
ctgtagaccagatgagaaggagaaa

SEQ ID NO: 96935 - DNA, 25 bp, Artificial
  Probe
gctgtcttctaattccaaagggttg

SEQ ID NO: 96936 - DNA, 25 bp, Artificial
  Probe
atggtcttgggctgtcttctaattc

SEQ ID NO: 96937 - DNA, 25 bp, Artificial
  Probe
gatacttcccataaaggcatccagg

SEQ ID NO: 96938 - DNA, 25 bp, Artificial
  Probe
acctgatacttcccataaaggcatc

SEQ ID NO: 96939 - DNA, 25 bp, Artificial
  Probe
gacctgatacttcccataaaggcat

SEQ ID NO: 96940 - DNA, 25 bp, Artificial
  Probe
tggtgacctgatacttcccataaag

SEQ ID NO: 96941 - DNA, 25 bp, Artificial
  Probe
ctggtgacctgatacttcccataaa

SEQ ID NO: 96942 - DNA, 25 bp, Artificial
  Probe
ggctgtcttctaattccaaagggtt

SEQ ID NO: 96943 - DNA, 25 bp, Artificial
  Probe
catggtcttgggctgtcttctaatt

SEQ ID NO: 96944 - DNA, 25 bp, Artificial
  Probe
ggtgacctgatacttcccataaagg

SEQ ID NO: 96945 - DNA, 25 bp, Artificial
  Probe
tagaccagatgagaaggagaaaggc

SEQ ID NO: 96946 - DNA, 25 bp, Artificial
  Probe
cctgatacttcccataaaggcatcc

SEQ ID NO: 96947 - DNA, 25 bp, Artificial
  Probe
tatagggctggtgacctgatacttc

SEQ ID NO: 96948 - DNA, 25 bp, Artificial
  Probe
gtgacctgatacttcccataaaggc

SEQ ID NO: 96949 - DNA, 25 bp, Artificial
  Probe
tctgtagaccagatgagaaggagaa

SEQ ID NO: 96950 - DNA, 25 bp, Artificial
  Probe
atacttcccataaaggcatccagga

SEQ ID NO: 96951 - DNA, 25 bp, Artificial
  Probe
tgacctgatacttcccataaaggca

SEQ ID NO: 96952 - DNA, 25 bp, Artificial
  Probe
ttcccataaaggcatccaggagtta

SEQ ID NO: 96953 - DNA, 25 bp, Artificial
  Probe
ctagcaaaccgtaacttgtctttgg

SEQ ID NO: 96954 - DNA, 25 bp, Artificial
  Probe
cctagcaaaccgtaacttgtctttg

SEQ ID NO: 96955 - DNA, 25 bp, Artificial
  Probe
gcctagcaaaccgtaacttgtcttt

SEQ ID NO: 96956 - DNA, 25 bp, Artificial
  Probe
tcccataaaggcatccaggagttag

SEQ ID NO: 96957 - DNA, 25 bp, Artificial
  Probe
tacttcccataaaggcatccaggag

SEQ ID NO: 96958 - DNA, 25 bp, Artificial
  Probe
tggtcttgggctgtcttctaattcc

SEQ ID NO: 96959 - DNA, 25 bp, Artificial
  Probe
ctatagggctggtgacctgatactt

SEQ ID NO: 96960 - DNA, 25 bp, Artificial
  Probe
ataaaggcatccaggagttagctga

SEQ ID NO: 96961 - DNA, 25 bp, Artificial
  Probe
cataaaggcatccaggagttagctg

SEQ ID NO: 96962 - DNA, 25 bp, Artificial
  Probe
atccaggagttagctgacccaatag

SEQ ID NO: 96963 - DNA, 25 bp, Artificial
  Probe
gactcatctctatagggctggtgac

SEQ ID NO: 96964 - DNA, 25 bp, Artificial
  Probe
gggctgtcttctaattccaaagggt

SEQ ID NO: 96965 - DNA, 25 bp, Artificial
  Probe
caatagtcagagttgacctcactgg

SEQ ID NO: 96966 - DNA, 25 bp, Artificial
  Probe
ccaatagtcagagttgacctcactg

SEQ ID NO: 96967 - DNA, 25 bp, Artificial
  Probe
gctggtgacctgatacttcccataa

SEQ ID NO: 96968 - DNA, 25 bp, Artificial
  Probe
ctctatagggctggtgacctgatac

SEQ ID NO: 96969 - DNA, 25 bp, Artificial
  Probe
catccaggagttagctgacccaata

SEQ ID NO: 96970 - DNA, 25 bp, Artificial
  Probe
taattccaaagggttggtaggtaaa

SEQ ID NO: 96971 - DNA, 25 bp, Artificial
  Probe
ctaattccaaagggttggtaggtaa

SEQ ID NO: 96972 - DNA, 25 bp, Artificial
  Probe
tcttctaattccaaagggttggtag

SEQ ID NO: 96973 - DNA, 25 bp, Artificial
  Probe
gtcttctaattccaaagggttggta

SEQ ID NO: 96974 - DNA, 25 bp, Artificial
  Probe
tctctatagggctggtgacctgata

SEQ ID NO: 96975 - DNA, 25 bp, Artificial
  Probe
tgtatgacatcaccaatgaggagtc

SEQ ID NO: 96976 - DNA, 25 bp, Artificial
  Probe
gtatgacatcaccaatgaggagtcc

SEQ ID NO: 96977 - DNA, 25 bp, Artificial
  Probe
taatgtatgacatcaccaatgagga

SEQ ID NO: 96978 - DNA, 25 bp, Artificial
  Probe
aatgtatgacatcaccaatgaggag

SEQ ID NO: 96979 - DNA, 25 bp, Artificial
  Probe
ctaatgtatgacatcaccaatgagg

SEQ ID NO: 96980 - DNA, 25 bp, Artificial
  Probe
ggcttcattctaatgtatgacatca

SEQ ID NO: 96981 - DNA, 25 bp, Artificial
  Probe
catctaccgcaatgacaagaggatc

SEQ ID NO: 96982 - DNA, 25 bp, Artificial
  Probe
gagaagatgtcggagtccctagata

SEQ ID NO: 96983 - DNA, 25 bp, Artificial
  Probe
atcaccaatgaggagtccttcaatg

SEQ ID NO: 96984 - DNA, 25 bp, Artificial
  Probe
catcaccaatgaggagtccttcaat

SEQ ID NO: 96985 - DNA, 25 bp, Artificial
  Probe
atgtatgacatcaccaatgaggagt

SEQ ID NO: 96986 - DNA, 25 bp, Artificial
  Probe
agaagatgtcggagtccctagatac

SEQ ID NO: 96987 - DNA, 25 bp, Artificial
  Probe
tctaatgtatgacatcaccaatgag

SEQ ID NO: 96988 - DNA, 25 bp, Artificial
  Probe
tatgacatcaccaatgaggagtcct

SEQ ID NO: 96989 - DNA, 25 bp, Artificial
  Probe
gcttcattctaatgtatgacatcac

SEQ ID NO: 96990 - DNA, 25 bp, Artificial
  Probe
ctaccgcaatgacaagaggatcaag

SEQ ID NO: 96991 - DNA, 25 bp, Artificial
  Probe
ttctaatgtatgacatcaccaatga

SEQ ID NO: 96992 - DNA, 25 bp, Artificial
  Probe
tcattctaatgtatgacatcaccaa

SEQ ID NO: 96993 - DNA, 25 bp, Artificial
  Probe
ttcattctaatgtatgacatcacca

SEQ ID NO: 96994 - DNA, 25 bp, Artificial
  Probe
atctaccgcaatgacaagaggatca

SEQ ID NO: 96995 - DNA, 25 bp, Artificial
  Probe
gaagatgtcggagtccctagatact

SEQ ID NO: 96996 - DNA, 25 bp, Artificial
  Probe
ttcaagatcctgatcattggtaaca

SEQ ID NO: 96997 - DNA, 25 bp, Artificial
  Probe
tgttcaagatcctgatcattggtaa

SEQ ID NO: 96998 - DNA, 25 bp, Artificial
  Probe
gttcaagatcctgatcattggtaac

SEQ ID NO: 96999 - DNA, 25 bp, Artificial
  Probe
atgttcaagatcctgatcattggta

SEQ ID NO: 97000 - DNA, 25 bp, Artificial
  Probe
aagatgtcggagtccctagatactg

SEQ ID NO: 97001 - DNA, 25 bp, Artificial
  Probe
tctaccgcaatgacaagaggatcaa

SEQ ID NO: 97002 - DNA, 25 bp, Artificial
  Probe
cttcattctaatgtatgacatcacc

SEQ ID NO: 97003 - DNA, 25 bp, Artificial
  Probe
tcaagatcctgatcattggtaacag

SEQ ID NO: 97004 - DNA, 25 bp, Artificial
  Probe
atgggcttcattctaatgtatgaca

SEQ ID NO: 97005 - DNA, 25 bp, Artificial
  Probe
atgacatcaccaatgaggagtcctt

SEQ ID NO: 97006 - DNA, 25 bp, Artificial
  Probe
aaaccatctaccgcaatgacaagag

SEQ ID NO: 97007 - DNA, 25 bp, Artificial
  Probe
catgggcttcattctaatgtatgac

SEQ ID NO: 97008 - DNA, 25 bp, Artificial
  Probe
attctaatgtatgacatcaccaatg

SEQ ID NO: 97009 - DNA, 25 bp, Artificial
  Probe
cattctaatgtatgacatcaccaat

SEQ ID NO: 97010 - DNA, 25 bp, Artificial
  Probe
tgggcttcattctaatgtatgacat

SEQ ID NO: 97011 - DNA, 25 bp, Artificial
  Probe
gggcttcattctaatgtatgacatc

SEQ ID NO: 97012 - DNA, 25 bp, Artificial
  Probe
ccatctaccgcaatgacaagaggat

SEQ ID NO: 97013 - DNA, 25 bp, Artificial
  Probe
acatcaccaatgaggagtccttcaa

SEQ ID NO: 97014 - DNA, 25 bp, Artificial
  Probe
tccactcagatcaaaacttactcat

SEQ ID NO: 97015 - DNA, 25 bp, Artificial
  Probe
gtccactcagatcaaaacttactca

SEQ ID NO: 97016 - DNA, 25 bp, Artificial
  Probe
caagatcctgatcattggtaacagc

SEQ ID NO: 97017 - DNA, 25 bp, Artificial
  Probe
agatcaaaacttactcatgggacaa

SEQ ID NO: 97018 - DNA, 25 bp, Artificial
  Probe
ctcagatcaaaacttactcatggga

SEQ ID NO: 97019 - DNA, 25 bp, Artificial
  Probe
cactcagatcaaaacttactcatgg

SEQ ID NO: 97020 - DNA, 25 bp, Artificial
  Probe
aactaactcagaggacagacagtac

SEQ ID NO: 97021 - DNA, 25 bp, Artificial
  Probe
cttgctccatcagttcattgagaag

SEQ ID NO: 97022 - DNA, 25 bp, Artificial
  Probe
ttactaccatctactactctgcaca

SEQ ID NO: 97023 - DNA, 25 bp, Artificial
  Probe
tgctccatcagttcattgagaagaa

SEQ ID NO: 97024 - DNA, 25 bp, Artificial
  Probe
ttgctccatcagttcattgagaaga

SEQ ID NO: 97025 - DNA, 25 bp, Artificial
  Probe
cttgtttaagttcttggtcattgga

SEQ ID NO: 97026 - DNA, 25 bp, Artificial
  Probe
tcttgtttaagttcttggtcattgg

SEQ ID NO: 97027 - DNA, 25 bp, Artificial
  Probe
tccgagacttacgatttcttgttta

SEQ ID NO: 97028 - DNA, 25 bp, Artificial
  Probe
atgttggtggtaaatatgtgaagtt

SEQ ID NO: 97029 - DNA, 25 bp, Artificial
  Probe
aatgttggtggtaaatatgtgaagt

SEQ ID NO: 97030 - DNA, 25 bp, Artificial
  Probe
acgatttcttgtttaagttcttggt

SEQ ID NO: 97031 - DNA, 25 bp, Artificial
  Probe
tgtttaagttcttggtcattggaaa

SEQ ID NO: 97032 - DNA, 25 bp, Artificial
  Probe
ttgtttaagttcttggtcattggaa

SEQ ID NO: 97033 - DNA, 25 bp, Artificial
  Probe
ccgagacttacgatttcttgtttaa

SEQ ID NO: 97034 - DNA, 25 bp, Artificial
  Probe
cgatttcttgtttaagttcttggtc

SEQ ID NO: 97035 - DNA, 25 bp, Artificial
  Probe
aaactaactcagaggacagacagta

SEQ ID NO: 97036 - DNA, 25 bp, Artificial
  Probe
tgttggtggtaaatatgtgaagtta

SEQ ID NO: 97037 - DNA, 25 bp, Artificial
  Probe
taactcagaggacagacagtacctt

SEQ ID NO: 97038 - DNA, 25 bp, Artificial
  Probe
ctggaaataaagtggaaccgagttt

SEQ ID NO: 97039 - DNA, 25 bp, Artificial
  Probe
ctccatcagttcattgagaagaaat

SEQ ID NO: 97040 - DNA, 25 bp, Artificial
  Probe
actaactcagaggacagacagtacc

SEQ ID NO: 97041 - DNA, 25 bp, Artificial
  Probe
gcttactaattggttaacagatgcc

SEQ ID NO: 97042 - DNA, 25 bp, Artificial
  Probe
aaatgttggtggtaaatatgtgaag

SEQ ID NO: 97043 - DNA, 25 bp, Artificial
  Probe
tccatcagttcattgagaagaaatt

SEQ ID NO: 97044 - DNA, 25 bp, Artificial
  Probe
cgcttactaattggttaacagatgc

SEQ ID NO: 97045 - DNA, 25 bp, Artificial
  Probe
gtttaagttcttggtcattggaaat

SEQ ID NO: 97046 - DNA, 25 bp, Artificial
  Probe
ttcttgtttaagttcttggtcattg

SEQ ID NO: 97047 - DNA, 25 bp, Artificial
  Probe
tatgtgaagttacagatatgggaca

SEQ ID NO: 97048 - DNA, 25 bp, Artificial
  Probe
gctccatcagttcattgagaagaaa

SEQ ID NO: 97049 - DNA, 25 bp, Artificial
  Probe
ccatcagttcattgagaagaaattc

SEQ ID NO: 97050 - DNA, 25 bp, Artificial
  Probe
ctaactcagaggacagacagtacct

SEQ ID NO: 97051 - DNA, 25 bp, Artificial
  Probe
atgtgaagttacagatatgggacac

SEQ ID NO: 97052 - DNA, 25 bp, Artificial
  Probe
gatttcttgtttaagttcttggtca

SEQ ID NO: 97053 - DNA, 25 bp, Artificial
  Probe
tacgatttcttgtttaagttcttgg

SEQ ID NO: 97054 - DNA, 25 bp, Artificial
  Probe
gtccgagacttacgatttcttgttt

SEQ ID NO: 97055 - DNA, 25 bp, Artificial
  Probe
gtacccttcatgttccgttaaatcc

SEQ ID NO: 97056 - DNA, 25 bp, Artificial
  Probe
caaactaactcagaggacagacagt

SEQ ID NO: 97057 - DNA, 25 bp, Artificial
  Probe
cgagacttacgatttcttgtttaag

SEQ ID NO: 97058 - DNA, 25 bp, Artificial
  Probe
ctcaaatcataccataggagtggaa

SEQ ID NO: 97059 - DNA, 25 bp, Artificial
  Probe
tacccttcatgttccgttaaatcca

SEQ ID NO: 97060 - DNA, 25 bp, Artificial
  Probe
gcttgctccatcagttcattgagaa

SEQ ID NO: 97061 - DNA, 25 bp, Artificial
  Probe
cgtacccttcatgttccgttaaatc

SEQ ID NO: 97062 - DNA, 25 bp, Artificial
  Probe
tggtggtaaatatgtgaagttacag

SEQ ID NO: 97063 - DNA, 25 bp, Artificial
  Probe
catcagttcattgagaagaaattca

SEQ ID NO: 97064 - DNA, 25 bp, Artificial
  Probe
tttcttgtttaagttcttggtcatt

SEQ ID NO: 97065 - DNA, 25 bp, Artificial
  Probe
gagaagttaccagatgtgtgctatt

SEQ ID NO: 97066 - DNA, 25 bp, Artificial
  Probe
agaagttaccagatgtgtgctattc

SEQ ID NO: 97067 - DNA, 25 bp, Artificial
  Probe
attctcactctgtatgatagcatcc

SEQ ID NO: 97068 - DNA, 25 bp, Artificial
  Probe
tctcactctgtatgatagcatccat

SEQ ID NO: 97069 - DNA, 25 bp, Artificial
  Probe
gaagttaccagatgtgtgctattcc

SEQ ID NO: 97070 - DNA, 25 bp, Artificial
  Probe
aagttaccagatgtgtgctattcct

SEQ ID NO: 97071 - DNA, 25 bp, Artificial
  Probe
ttctcactctgtatgatagcatcca

SEQ ID NO: 97072 - DNA, 25 bp, Artificial
  Probe
agattctcactctgtatgatagcat

SEQ ID NO: 97073 - DNA, 25 bp, Artificial
  Probe
tagcctatgttcagagtctacagaa

SEQ ID NO: 97074 - DNA, 25 bp, Artificial
  Probe
gattctcactctgtatgatagcatc

SEQ ID NO: 97075 - DNA, 25 bp, Artificial
  Probe
cactctgtatgatagcatccatgta

SEQ ID NO: 97076 - DNA, 25 bp, Artificial
  Probe
agtggtagcctatgttcagagtcta

SEQ ID NO: 97077 - DNA, 25 bp, Artificial
  Probe
actctgtatgatagcatccatgtaa

SEQ ID NO: 97078 - DNA, 25 bp, Artificial
  Probe
ctcactctgtatgatagcatccatg

SEQ ID NO: 97079 - DNA, 25 bp, Artificial
  Probe
cgagaagttaccagatgtgtgctat

SEQ ID NO: 97080 - DNA, 25 bp, Artificial
  Probe
tcactctgtatgatagcatccatgt

SEQ ID NO: 97081 - DNA, 25 bp, Artificial
  Probe
catgtccgaatacttgagaatgagc

SEQ ID NO: 97082 - DNA, 25 bp, Artificial
  Probe
gcatgtccgaatacttgagaatgag

SEQ ID NO: 97083 - DNA, 25 bp, Artificial
  Probe
aagtggtagcctatgttcagagtct

SEQ ID NO: 97084 - DNA, 25 bp, Artificial
  Probe
atagcatccatgtaatcaacgtaga

SEQ ID NO: 97085 - DNA, 25 bp, Artificial
  Probe
tctgtatgatagcatccatgtaatc

SEQ ID NO: 97086 - DNA, 25 bp, Artificial
  Probe
ctctgtatgatagcatccatgtaat

SEQ ID NO: 97087 - DNA, 25 bp, Artificial
  Probe
tgtatgaactttgatggtggatttg

SEQ ID NO: 97088 - DNA, 25 bp, Artificial
  Probe
tagcatccatgtaatcaacgtagac

SEQ ID NO: 97089 - DNA, 25 bp, Artificial
  Probe
cggatgaataaagaggagatactgg

SEQ ID NO: 97090 - DNA, 25 bp, Artificial
  Probe
gtatgaactttgatggtggatttgg

SEQ ID NO: 97091 - DNA, 25 bp, Artificial
  Probe
ctgtatgaactttgatggtggattt

SEQ ID NO: 97092 - DNA, 25 bp, Artificial
  Probe
gatagcatccatgtaatcaacgtag

SEQ ID NO: 97093 - DNA, 25 bp, Artificial
  Probe
tcggatgaataaagaggagatactg

SEQ ID NO: 97094 - DNA, 25 bp, Artificial
  Probe
tttgtcctgtatgaactttgatggt

SEQ ID NO: 97095 - DNA, 25 bp, Artificial
  Probe
gatgattatgaatactgcatgtccg

SEQ ID NO: 97096 - DNA, 25 bp, Artificial
  Probe
ggatgaataaagaggagatactggt

SEQ ID NO: 97097 - DNA, 25 bp, Artificial
  Probe
atgattatgaatactgcatgtccga

SEQ ID NO: 97098 - DNA, 25 bp, Artificial
  Probe
tatgaatactgcatgtccgaatact

SEQ ID NO: 97099 - DNA, 25 bp, Artificial
  Probe
atgaatactgcatgtccgaatactt

SEQ ID NO: 97100 - DNA, 25 bp, Artificial
  Probe
tgattatgaatactgcatgtccgaa

SEQ ID NO: 97101 - DNA, 25 bp, Artificial
  Probe
ctgtaacaatgacgggaaatgattt

SEQ ID NO: 97102 - DNA, 25 bp, Artificial
  Probe
aatactgcatgtccgaatacttgag

SEQ ID NO: 97103 - DNA, 25 bp, Artificial
  Probe
gaatactgcatgtccgaatacttga

SEQ ID NO: 97104 - DNA, 25 bp, Artificial
  Probe
tgaataaagaggagatactggtgtt

SEQ ID NO: 97105 - DNA, 25 bp, Artificial
  Probe
gattatgaatactgcatgtccgaat

SEQ ID NO: 97106 - DNA, 25 bp, Artificial
  Probe
cctgtatgaactttgatggtggatt

SEQ ID NO: 97107 - DNA, 25 bp, Artificial
  Probe
atgaataaagaggagatactggtgt

SEQ ID NO: 97108 - DNA, 25 bp, Artificial
  Probe
atgtccgaatacttgagaatgagcg

SEQ ID NO: 97109 - DNA, 25 bp, Artificial
  Probe
tgaatactgcatgtccgaatacttg

SEQ ID NO: 97110 - DNA, 25 bp, Artificial
  Probe
ttactgagacacatacatacaccac

SEQ ID NO: 97111 - DNA, 25 bp, Artificial
  Probe
tcaccagcatattagtcagaagaat

SEQ ID NO: 97112 - DNA, 25 bp, Artificial
  Probe
tactgagacacatacatacaccaca

SEQ ID NO: 97113 - DNA, 25 bp, Artificial
  Probe
ttcaccagcatattagtcagaagaa

SEQ ID NO: 97114 - DNA, 25 bp, Artificial
  Probe
caccagcatattagtcagaagaatt

SEQ ID NO: 97115 - DNA, 25 bp, Artificial
  Probe
actgagacacatacatacaccacat

SEQ ID NO: 97116 - DNA, 25 bp, Artificial
  Probe
taagaagtgaccatgatgttgtgtt

SEQ ID NO: 97117 - DNA, 25 bp, Artificial
  Probe
ttaagaagtgaccatgatgttgtgt

SEQ ID NO: 97118 - DNA, 25 bp, Artificial
  Probe
gatgttgtgttcatgtatggtatgt

SEQ ID NO: 97119 - DNA, 25 bp, Artificial
  Probe
tgatgttgtgttcatgtatggtatg

SEQ ID NO: 97120 - DNA, 25 bp, Artificial
  Probe
ctgagacacatacatacaccacatg

SEQ ID NO: 97121 - DNA, 25 bp, Artificial
  Probe
tgttgtgttcatgtatggtatgtat

SEQ ID NO: 97122 - DNA, 25 bp, Artificial
  Probe
atgttgtgttcatgtatggtatgta

SEQ ID NO: 97123 - DNA, 25 bp, Artificial
  Probe
aagaagtgaccatgatgttgtgttc

SEQ ID NO: 97124 - DNA, 25 bp, Artificial
  Probe
tttactgagacacatacatacacca

SEQ ID NO: 97125 - DNA, 25 bp, Artificial
  Probe
acatacacacattcacataaacaca

SEQ ID NO: 97126 - DNA, 25 bp, Artificial
  Probe
acacatacacacattcacataaaca

SEQ ID NO: 97127 - DNA, 25 bp, Artificial
  Probe
ctatgaaagcagttattgaaggtga

SEQ ID NO: 97128 - DNA, 25 bp, Artificial
  Probe
tctatgaaagcagttattgaaggtg

SEQ ID NO: 97129 - DNA, 25 bp, Artificial
  Probe
tttcaccagcatattagtcagaaga

SEQ ID NO: 97130 - DNA, 25 bp, Artificial
  Probe
gtttcaccagcatattagtcagaag

SEQ ID NO: 97131 - DNA, 25 bp, Artificial
  Probe
cttccatccacaagactgaaatatg

SEQ ID NO: 97132 - DNA, 25 bp, Artificial
  Probe
cacatacacacattcacataaacac

SEQ ID NO: 97133 - DNA, 25 bp, Artificial
  Probe
gccttctatgaaagcagttattgaa

SEQ ID NO: 97134 - DNA, 25 bp, Artificial
  Probe
ctacattgcacaggattgagaagag

SEQ ID NO: 97135 - DNA, 25 bp, Artificial
  Probe
gcatattagtcagaagaatttggga

SEQ ID NO: 97136 - DNA, 25 bp, Artificial
  Probe
agcatattagtcagaagaatttggg

SEQ ID NO: 97137 - DNA, 25 bp, Artificial
  Probe
attctcccagacttgcttcataaag

SEQ ID NO: 97138 - DNA, 25 bp, Artificial
  Probe
aattctcccagacttgcttcataaa

SEQ ID NO: 97139 - DNA, 25 bp, Artificial
  Probe
ttgaacagttgaacaaacaatggtt

SEQ ID NO: 97140 - DNA, 25 bp, Artificial
  Probe
tatgaaagcagttattgaaggtgat

SEQ ID NO: 97141 - DNA, 25 bp, Artificial
  Probe
atattcttccatccacaagactgaa

SEQ ID NO: 97142 - DNA, 25 bp, Artificial
  Probe
catattcttccatccacaagactga

SEQ ID NO: 97143 - DNA, 25 bp, Artificial
  Probe
tcatattcttccatccacaagactg

SEQ ID NO: 97144 - DNA, 25 bp, Artificial
  Probe
atcatattcttccatccacaagact

SEQ ID NO: 97145 - DNA, 25 bp, Artificial
  Probe
ttagtcagaagaatttgggagtgaa

SEQ ID NO: 97146 - DNA, 25 bp, Artificial
  Probe
tagtcagaagaatttgggagtgaat

SEQ ID NO: 97147 - DNA, 25 bp, Artificial
  Probe
attagtcagaagaatttgggagtga

SEQ ID NO: 97148 - DNA, 25 bp, Artificial
  Probe
atgaaagcagttattgaaggtgatc

SEQ ID NO: 97149 - DNA, 25 bp, Artificial
  Probe
agtcagaagaatttgggagtgaatc

SEQ ID NO: 97150 - DNA, 25 bp, Artificial
  Probe
tgaacagttgaacaaacaatggttg

SEQ ID NO: 97151 - DNA, 25 bp, Artificial
  Probe
caattctcccagacttgcttcataa

SEQ ID NO: 97152 - DNA, 25 bp, Artificial
  Probe
gatcatattcttccatccacaagac

SEQ ID NO: 97153 - DNA, 25 bp, Artificial
  Probe
tacattgcacaggattgagaagagt

SEQ ID NO: 97154 - DNA, 25 bp, Artificial
  Probe
actacattgcacaggattgagaaga

SEQ ID NO: 97155 - DNA, 25 bp, Artificial
  Probe
tgtgagaacttcctcctagattagt

SEQ ID NO: 97156 - DNA, 25 bp, Artificial
  Probe
gtgtgagaacttcctcctagattag

SEQ ID NO: 97157 - DNA, 25 bp, Artificial
  Probe
gtgagaacttcctcctagattagtc

SEQ ID NO: 97158 - DNA, 25 bp, Artificial
  Probe
tgagaacttcctcctagattagtct

SEQ ID NO: 97159 - DNA, 25 bp, Artificial
  Probe
tgtgtgagaacttcctcctagatta

SEQ ID NO: 97160 - DNA, 25 bp, Artificial
  Probe
attccttctcctctgacttctgcta

SEQ ID NO: 97161 - DNA, 25 bp, Artificial
  Probe
ctgtgtgagaacttcctcctagatt

SEQ ID NO: 97162 - DNA, 25 bp, Artificial
  Probe
tagcacttacccatagagaccatta

SEQ ID NO: 97163 - DNA, 25 bp, Artificial
  Probe
atagcacttacccatagagaccatt

SEQ ID NO: 97164 - DNA, 25 bp, Artificial
  Probe
aaatgtttcccaaagagtgagagtc

SEQ ID NO: 97165 - DNA, 25 bp, Artificial
  Probe
agcacttacccatagagaccattag

SEQ ID NO: 97166 - DNA, 25 bp, Artificial
  Probe
catagcacttacccatagagaccat

SEQ ID NO: 97167 - DNA, 25 bp, Artificial
  Probe
gagaacttcctcctagattagtcta

SEQ ID NO: 97168 - DNA, 25 bp, Artificial
  Probe
aattccttctcctctgacttctgct

SEQ ID NO: 97169 - DNA, 25 bp, Artificial
  Probe
ttccttctcctctgacttctgctag

SEQ ID NO: 97170 - DNA, 25 bp, Artificial
  Probe
gaagaagaaggacgaaggcagttac

SEQ ID NO: 97171 - DNA, 25 bp, Artificial
  Probe
agaaatgtttcccaaagagtgagag

SEQ ID NO: 97172 - DNA, 25 bp, Artificial
  Probe
ctcctggaagttgacaagacacatc

SEQ ID NO: 97173 - DNA, 25 bp, Artificial
  Probe
gaaatgtttcccaaagagtgagagt

SEQ ID NO: 97174 - DNA, 25 bp, Artificial
  Probe
cagaaatgtttcccaaagagtgaga

SEQ ID NO: 97175 - DNA, 25 bp, Artificial
  Probe
gagtcagaaatgtttcccaaagagt

SEQ ID NO: 97176 - DNA, 25 bp, Artificial
  Probe
aatgtttcccaaagagtgagagtct

SEQ ID NO: 97177 - DNA, 25 bp, Artificial
  Probe
agtcagaaatgtttcccaaagagtg

SEQ ID NO: 97178 - DNA, 25 bp, Artificial
  Probe
tcagaaatgtttcccaaagagtgag

SEQ ID NO: 97179 - DNA, 25 bp, Artificial
  Probe
gcacttacccatagagaccattagg

SEQ ID NO: 97180 - DNA, 25 bp, Artificial
  Probe
aaacgctacttaatccaatgggttc

SEQ ID NO: 97181 - DNA, 25 bp, Artificial
  Probe
cctgtgtgagaacttcctcctagat

SEQ ID NO: 97182 - DNA, 25 bp, Artificial
  Probe
tgaagaagaaggacgaaggcagtta

SEQ ID NO: 97183 - DNA, 25 bp, Artificial
  Probe
gtcagaaatgtttcccaaagagtga

SEQ ID NO: 97184 - DNA, 25 bp, Artificial
  Probe
ctccttggaattcacttctcattgt

SEQ ID NO: 97185 - DNA, 25 bp, Artificial
  Probe
aagaagaaggacgaaggcagttact

SEQ ID NO: 97186 - DNA, 25 bp, Artificial
  Probe
catgctataccggatgaagaagaag

SEQ ID NO: 97187 - DNA, 25 bp, Artificial
  Probe
tcctggaagttgacaagacacatct

SEQ ID NO: 97188 - DNA, 25 bp, Artificial
  Probe
tctcctggaagttgacaagacacat

SEQ ID NO: 97189 - DNA, 25 bp, Artificial
  Probe
aacgctacttaatccaatgggttct

SEQ ID NO: 97190 - DNA, 25 bp, Artificial
  Probe
tccttctcctctgacttctgctaga

SEQ ID NO: 97191 - DNA, 25 bp, Artificial
  Probe
ttctcctggaagttgacaagacaca

SEQ ID NO: 97192 - DNA, 25 bp, Artificial
  Probe
atgctataccggatgaagaagaagg

SEQ ID NO: 97193 - DNA, 25 bp, Artificial
  Probe
agaagaaggacgaaggcagttactc

SEQ ID NO: 97194 - DNA, 25 bp, Artificial
  Probe
ctttctcctggaagttgacaagaca

SEQ ID NO: 97195 - DNA, 25 bp, Artificial
  Probe
gctccttggaattcacttctcattg

SEQ ID NO: 97196 - DNA, 25 bp, Artificial
  Probe
atgaagaagaaggacgaaggcagtt

SEQ ID NO: 97197 - DNA, 25 bp, Artificial
  Probe
acgctacttaatccaatgggttctg

SEQ ID NO: 97198 - DNA, 25 bp, Artificial
  Probe
tccttggaattcacttctcattgtg

SEQ ID NO: 97199 - DNA, 25 bp, Artificial
  Probe
ggagtcagaaatgtttcccaaagag

SEQ ID NO: 97200 - DNA, 25 bp, Artificial
  Probe
agtcaaggttaagtatgatgtggtt

SEQ ID NO: 97201 - DNA, 25 bp, Artificial
  Probe
cagtcaaggttaagtatgatgtggt

SEQ ID NO: 97202 - DNA, 25 bp, Artificial
  Probe
acagtcaaggttaagtatgatgtgg

SEQ ID NO: 97203 - DNA, 25 bp, Artificial
  Probe
tagcacagtaatgttcaaggtaatg

SEQ ID NO: 97204 - DNA, 25 bp, Artificial
  Probe
tctagcacagtaatgttcaaggtaa

SEQ ID NO: 97205 - DNA, 25 bp, Artificial
  Probe
gtctagcacagtaatgttcaaggta

SEQ ID NO: 97206 - DNA, 25 bp, Artificial
  Probe
aacagtcaaggttaagtatgatgtg

SEQ ID NO: 97207 - DNA, 25 bp, Artificial
  Probe
ctagcacagtaatgttcaaggtaat

SEQ ID NO: 97208 - DNA, 25 bp, Artificial
  Probe
aattgtgttaatctgatctgtgtca

SEQ ID NO: 97209 - DNA, 25 bp, Artificial
  Probe
attgtgttaatctgatctgtgtcac

SEQ ID NO: 97210 - DNA, 25 bp, Artificial
  Probe
tgtctagcacagtaatgttcaaggt

SEQ ID NO: 97211 - DNA, 25 bp, Artificial
  Probe
gtgtctagcacagtaatgttcaagg

SEQ ID NO: 97212 - DNA, 25 bp, Artificial
  Probe
ttgtgttaatctgatctgtgtcacg

SEQ ID NO: 97213 - DNA, 25 bp, Artificial
  Probe
aaatcaaactatcacatctcccacc

SEQ ID NO: 97214 - DNA, 25 bp, Artificial
  Probe
cgtgtctagcacagtaatgttcaag

SEQ ID NO: 97215 - DNA, 25 bp, Artificial
  Probe
aatcaaactatcacatctcccacct

SEQ ID NO: 97216 - DNA, 25 bp, Artificial
  Probe
gtcaaggttaagtatgatgtggttt

SEQ ID NO: 97217 - DNA, 25 bp, Artificial
  Probe
tgttaatctgatctgtgtcacgttg

SEQ ID NO: 97218 - DNA, 25 bp, Artificial
  Probe
atcaaactatcacatctcccacctg

SEQ ID NO: 97219 - DNA, 25 bp, Artificial
  Probe
ctggaatacaaacacagtatgggat

SEQ ID NO: 97220 - DNA, 25 bp, Artificial
  Probe
gtgttaatctgatctgtgtcacgtt

SEQ ID NO: 97221 - DNA, 25 bp, Artificial
  Probe
aaacagtcaaggttaagtatgatgt

SEQ ID NO: 97222 - DNA, 25 bp, Artificial
  Probe
aacaaggctatcaagctgctataat

SEQ ID NO: 97223 - DNA, 25 bp, Artificial
  Probe
ggaatacaaacacagtatgggatct

SEQ ID NO: 97224 - DNA, 25 bp, Artificial
  Probe
tcaaggttaagtatgatgtggttta

SEQ ID NO: 97225 - DNA, 25 bp, Artificial
  Probe
gaatacaaacacagtatgggatctg

SEQ ID NO: 97226 - DNA, 25 bp, Artificial
  Probe
tggaatacaaacacagtatgggatc

SEQ ID NO: 97227 - DNA, 25 bp, Artificial
  Probe
ccgtgtctagcacagtaatgttcaa

SEQ ID NO: 97228 - DNA, 25 bp, Artificial
  Probe
ggctatcaagctgctataatgtgaa

SEQ ID NO: 97229 - DNA, 25 bp, Artificial
  Probe
aaggctatcaagctgctataatgtg

SEQ ID NO: 97230 - DNA, 25 bp, Artificial
  Probe
caaggctatcaagctgctataatgt

SEQ ID NO: 97231 - DNA, 25 bp, Artificial
  Probe
acaaggctatcaagctgctataatg

SEQ ID NO: 97232 - DNA, 25 bp, Artificial
  Probe
gttaatctgatctgtgtcacgttgc

SEQ ID NO: 97233 - DNA, 25 bp, Artificial
  Probe
caattgtgttaatctgatctgtgtc

SEQ ID NO: 97234 - DNA, 25 bp, Artificial
  Probe
tgtgttaatctgatctgtgtcacgt

SEQ ID NO: 97235 - DNA, 25 bp, Artificial
  Probe
aggctatcaagctgctataatgtga

SEQ ID NO: 97236 - DNA, 25 bp, Artificial
  Probe
caaggttaagtatgatgtggtttat

SEQ ID NO: 97237 - DNA, 25 bp, Artificial
  Probe
ttaatctgatctgtgtcacgttgca

SEQ ID NO: 97238 - DNA, 25 bp, Artificial
  Probe
tagaaatgagtttcacgcaaagatg

SEQ ID NO: 97239 - DNA, 25 bp, Artificial
  Probe
tcaattgtgttaatctgatctgtgt

SEQ ID NO: 97240 - DNA, 25 bp, Artificial
  Probe
tgtcaattgtgttaatctgatctgt

SEQ ID NO: 97241 - DNA, 25 bp, Artificial
  Probe
tgcactttaaacagtcaaggttaag

SEQ ID NO: 97242 - DNA, 25 bp, Artificial
  Probe
gttatgcactttaaacagtcaaggt

SEQ ID NO: 97243 - DNA, 25 bp, Artificial
  Probe
acgttatgcactttaaacagtcaag

SEQ ID NO: 97244 - DNA, 25 bp, Artificial
  Probe
gtcaattgtgttaatctgatctgtg

SEQ ID NO: 97245 - DNA, 25 bp, Artificial
  Probe
tgtgattatagacttgcttgaggaa

SEQ ID NO: 97246 - DNA, 25 bp, Artificial
  Probe
gtgtgattatagacttgcttgagga

SEQ ID NO: 97247 - DNA, 25 bp, Artificial
  Probe
agtgtgattatagacttgcttgagg

SEQ ID NO: 97248 - DNA, 25 bp, Artificial
  Probe
atgattaccctgctgtgaatttatg

SEQ ID NO: 97249 - DNA, 25 bp, Artificial
  Probe
gtgattatagacttgcttgaggaaa

SEQ ID NO: 97250 - DNA, 25 bp, Artificial
  Probe
gtccagcgtgtaactattgtttata

SEQ ID NO: 97251 - DNA, 25 bp, Artificial
  Probe
aatgattaccctgctgtgaatttat

SEQ ID NO: 97252 - DNA, 25 bp, Artificial
  Probe
tgattaccctgctgtgaatttatgc

SEQ ID NO: 97253 - DNA, 25 bp, Artificial
  Probe
cgtccagcgtgtaactattgtttat

SEQ ID NO: 97254 - DNA, 25 bp, Artificial
  Probe
ctgtgaatttatgcctgtgaaacca

SEQ ID NO: 97255 - DNA, 25 bp, Artificial
  Probe
aaatgattaccctgctgtgaattta

SEQ ID NO: 97256 - DNA, 25 bp, Artificial
  Probe
gattaccctgctgtgaatttatgcc

SEQ ID NO: 97257 - DNA, 25 bp, Artificial
  Probe
aagtgtgattatagacttgcttgag

SEQ ID NO: 97258 - DNA, 25 bp, Artificial
  Probe
ctgctgtgaatttatgcctgtgaaa

SEQ ID NO: 97259 - DNA, 25 bp, Artificial
  Probe
tgctgtgaatttatgcctgtgaaac

SEQ ID NO: 97260 - DNA, 25 bp, Artificial
  Probe
attaccctgctgtgaatttatgcct

SEQ ID NO: 97261 - DNA, 25 bp, Artificial
  Probe
ctctggagttgttatttcccactag

SEQ ID NO: 97262 - DNA, 25 bp, Artificial
  Probe
ctggagttgttatttcccactagac

SEQ ID NO: 97263 - DNA, 25 bp, Artificial
  Probe
tctggagttgttatttcccactaga

SEQ ID NO: 97264 - DNA, 25 bp, Artificial
  Probe
tccagcgtgtaactattgtttataa

SEQ ID NO: 97265 - DNA, 25 bp, Artificial
  Probe
accaattcctcctcctcctcctatt

SEQ ID NO: 97266 - DNA, 25 bp, Artificial
  Probe
gaatttatgcctgtgaaaccagtgt

SEQ ID NO: 97267 - DNA, 25 bp, Artificial
  Probe
tgaatttatgcctgtgaaaccagtg

SEQ ID NO: 97268 - DNA, 25 bp, Artificial
  Probe
gtgaatttatgcctgtgaaaccagt

SEQ ID NO: 97269 - DNA, 25 bp, Artificial
  Probe
tgtgaatttatgcctgtgaaaccag

SEQ ID NO: 97270 - DNA, 25 bp, Artificial
  Probe
ccatcatcgcatccctttagagttt

SEQ ID NO: 97271 - DNA, 25 bp, Artificial
  Probe
aatttatgcctgtgaaaccagtgtg

SEQ ID NO: 97272 - DNA, 25 bp, Artificial
  Probe
taagtgtgattatagacttgcttga

SEQ ID NO: 97273 - DNA, 25 bp, Artificial
  Probe
ccaattcctcctcctcctcctattt

SEQ ID NO: 97274 - DNA, 25 bp, Artificial
  Probe
gctgtgaatttatgcctgtgaaacc

SEQ ID NO: 97275 - DNA, 25 bp, Artificial
  Probe
actctggagttgttatttcccacta

SEQ ID NO: 97276 - DNA, 25 bp, Artificial
  Probe
aaagaaatctcccatcatcgcatcc

SEQ ID NO: 97277 - DNA, 25 bp, Artificial
  Probe
tggagttgttatttcccactagacc

SEQ ID NO: 97278 - DNA, 25 bp, Artificial
  Probe
gacttgcttgaggaaaatgattacc

SEQ ID NO: 97279 - DNA, 25 bp, Artificial
  Probe
agacttgcttgaggaaaatgattac

SEQ ID NO: 97280 - DNA, 25 bp, Artificial
  Probe
ccagcgtgtaactattgtttataat

SEQ ID NO: 97281 - DNA, 25 bp, Artificial
  Probe
taaaagaaatctcccatcatcgcat

SEQ ID NO: 97282 - DNA, 25 bp, Artificial
  Probe
ttaccctgctgtgaatttatgcctg

SEQ ID NO: 97283 - DNA, 25 bp, Artificial
  Probe
gaaaatgattaccctgctgtgaatt

SEQ ID NO: 97284 - DNA, 25 bp, Artificial
  Probe
aattgtggtctggttcctgacattt

SEQ ID NO: 97285 - DNA, 25 bp, Artificial
  Probe
aaattgtggtctggttcctgacatt

SEQ ID NO: 97286 - DNA, 25 bp, Artificial
  Probe
agtgacgttgactcagatgtagaaa

SEQ ID NO: 97287 - DNA, 25 bp, Artificial
  Probe
ggagttgttatttcccactagaccc

SEQ ID NO: 97288 - DNA, 25 bp, Artificial
  Probe
ctaaaagaaatctcccatcatcgca

SEQ ID NO: 97289 - DNA, 25 bp, Artificial
  Probe
atagacttgcttgaggaaaatgatt

SEQ ID NO: 97290 - DNA, 25 bp, Artificial
  Probe
ctcttatgatactaaccactgcctc

SEQ ID NO: 97291 - DNA, 25 bp, Artificial
  Probe
ctctcttatgatactaaccactgcc

SEQ ID NO: 97292 - DNA, 25 bp, Artificial
  Probe
actctcttatgatactaaccactgc

SEQ ID NO: 97293 - DNA, 25 bp, Artificial
  Probe
tctcttatgatactaaccactgcct

SEQ ID NO: 97294 - DNA, 25 bp, Artificial
  Probe
tatgatactaaccactgcctcaatg

SEQ ID NO: 97295 - DNA, 25 bp, Artificial
  Probe
cttatgatactaaccactgcctcaa

SEQ ID NO: 97296 - DNA, 25 bp, Artificial
  Probe
ttatgatactaaccactgcctcaat

SEQ ID NO: 97297 - DNA, 25 bp, Artificial
  Probe
acactctcttatgatactaaccact

SEQ ID NO: 97298 - DNA, 25 bp, Artificial
  Probe
tcttatgatactaaccactgcctca

SEQ ID NO: 97299 - DNA, 25 bp, Artificial
  Probe
cactctcttatgatactaaccactg

SEQ ID NO: 97300 - DNA, 25 bp, Artificial
  Probe
tcaatgtatctgtactgcttcatca

SEQ ID NO: 97301 - DNA, 25 bp, Artificial
  Probe
aatgtatctgtactgcttcatcaac

SEQ ID NO: 97302 - DNA, 25 bp, Artificial
  Probe
caatgtatctgtactgcttcatcaa

SEQ ID NO: 97303 - DNA, 25 bp, Artificial
  Probe
gaaggactctctgtcattgtatctt

SEQ ID NO: 97304 - DNA, 25 bp, Artificial
  Probe
agaaggactctctgtcattgtatct

SEQ ID NO: 97305 - DNA, 25 bp, Artificial
  Probe
atcaatgtatctgtactgcttcatc

SEQ ID NO: 97306 - DNA, 25 bp, Artificial
  Probe
gtcgtgtctgttgttgttgaatgat

SEQ ID NO: 97307 - DNA, 25 bp, Artificial
  Probe
aacactctcttatgatactaaccac

SEQ ID NO: 97308 - DNA, 25 bp, Artificial
  Probe
aacaacttacacattaggtggatga

SEQ ID NO: 97309 - DNA, 25 bp, Artificial
  Probe
tagaaggactctctgtcattgtatc

SEQ ID NO: 97310 - DNA, 25 bp, Artificial
  Probe
atgtatctgtactgcttcatcaaca

SEQ ID NO: 97311 - DNA, 25 bp, Artificial
  Probe
acaacttacacattaggtggatgac

SEQ ID NO: 97312 - DNA, 25 bp, Artificial
  Probe
aagtcgtgtctgttgttgttgaatg

SEQ ID NO: 97313 - DNA, 25 bp, Artificial
  Probe
ctagaaggactctctgtcattgtat

SEQ ID NO: 97314 - DNA, 25 bp, Artificial
  Probe
gtatctgtactgcttcatcaacaca

SEQ ID NO: 97315 - DNA, 25 bp, Artificial
  Probe
tgtatctgtactgcttcatcaacac

SEQ ID NO: 97316 - DNA, 25 bp, Artificial
  Probe
aatcaatgtatctgtactgcttcat

SEQ ID NO: 97317 - DNA, 25 bp, Artificial
  Probe
ttctcagaggactgtgtgttatagc

SEQ ID NO: 97318 - DNA, 25 bp, Artificial
  Probe
cttcacgttctctctactcttcttc

SEQ ID NO: 97319 - DNA, 25 bp, Artificial
  Probe
tctgtttgtcttctttggtttgttt

SEQ ID NO: 97320 - DNA, 25 bp, Artificial
  Probe
ttctgtttgtcttctttggtttgtt

SEQ ID NO: 97321 - DNA, 25 bp, Artificial
  Probe
ttgtatctttcctctctctgtttcc

SEQ ID NO: 97322 - DNA, 25 bp, Artificial
  Probe
gtcattgtatctttcctctctctgt

SEQ ID NO: 97323 - DNA, 25 bp, Artificial
  Probe
tgtcattgtatctttcctctctctg

SEQ ID NO: 97324 - DNA, 25 bp, Artificial
  Probe
actctctgtcattgtatctttcctc

SEQ ID NO: 97325 - DNA, 25 bp, Artificial
  Probe
tctactcttcttcccttatctctgg

SEQ ID NO: 97326 - DNA, 25 bp, Artificial
  Probe
ctgtcattgtatctttcctctctct

SEQ ID NO: 97327 - DNA, 25 bp, Artificial
  Probe
tctgtcattgtatctttcctctctc

SEQ ID NO: 97328 - DNA, 25 bp, Artificial
  Probe
ctctgtcattgtatctttcctctct

SEQ ID NO: 97329 - DNA, 25 bp, Artificial
  Probe
tctctgtcattgtatctttcctctc

SEQ ID NO: 97330 - DNA, 25 bp, Artificial
  Probe
ctctctgtcattgtatctttcctct

SEQ ID NO: 97331 - DNA, 25 bp, Artificial
  Probe
gttctgtttgtcttctttggtttgt

SEQ ID NO: 97332 - DNA, 25 bp, Artificial
  Probe
ctctactcttcttcccttatctctg

SEQ ID NO: 97333 - DNA, 25 bp, Artificial
  Probe
cgttctctctactcttcttccctta

SEQ ID NO: 97334 - DNA, 25 bp, Artificial
  Probe
tcattgtatctttcctctctctgtt

SEQ ID NO: 97335 - DNA, 25 bp, Artificial
  Probe
ttagagaggaagtggaggttctgaa

SEQ ID NO: 97336 - DNA, 25 bp, Artificial
  Probe
ttgatgtatgcagttagagaggaag

SEQ ID NO: 97337 - DNA, 25 bp, Artificial
  Probe
gatgtatgcagttagagaggaagtg

SEQ ID NO: 97338 - DNA, 25 bp, Artificial
  Probe
taaaggttaaacagagagtgagcat

SEQ ID NO: 97339 - DNA, 25 bp, Artificial
  Probe
ttaagaatttggcacagttagtcac

SEQ ID NO: 97340 - DNA, 25 bp, Artificial
  Probe
tagagaggaagtggaggttctgaag

SEQ ID NO: 97341 - DNA, 25 bp, Artificial
  Probe
tgatgtatgcagttagagaggaagt

SEQ ID NO: 97342 - DNA, 25 bp, Artificial
  Probe
gatgtctgaggaatggtttgattga

SEQ ID NO: 97343 - DNA, 25 bp, Artificial
  Probe
aacccactgtatttacctgttctac

SEQ ID NO: 97344 - DNA, 25 bp, Artificial
  Probe
agatgtctgaggaatggtttgattg

SEQ ID NO: 97345 - DNA, 25 bp, Artificial
  Probe
tttaagaatttggcacagttagtca

SEQ ID NO: 97346 - DNA, 25 bp, Artificial
  Probe
ttaaaggttaaacagagagtgagca

SEQ ID NO: 97347 - DNA, 25 bp, Artificial
  Probe
gttagagaggaagtggaggttctga

SEQ ID NO: 97348 - DNA, 25 bp, Artificial
  Probe
agttagagaggaagtggaggttctg

SEQ ID NO: 97349 - DNA, 25 bp, Artificial
  Probe
cagttagagaggaagtggaggttct

SEQ ID NO: 97350 - DNA, 25 bp, Artificial
  Probe
tagtgaatgaatagatggagaaacg

SEQ ID NO: 97351 - DNA, 25 bp, Artificial
  Probe
taagaatttggcacagttagtcact

SEQ ID NO: 97352 - DNA, 25 bp, Artificial
  Probe
attaaaggttaaacagagagtgagc

SEQ ID NO: 97353 - DNA, 25 bp, Artificial
  Probe
atgtatgcagttagagaggaagtgg

SEQ ID NO: 97354 - DNA, 25 bp, Artificial
  Probe
tgtggattgtccttcctagagagat

SEQ ID NO: 97355 - DNA, 25 bp, Artificial
  Probe
aggagcagatcaaagaactaataga

SEQ ID NO: 97356 - DNA, 25 bp, Artificial
  Probe
gaatttggcacagttagtcactttg

SEQ ID NO: 97357 - DNA, 25 bp, Artificial
  Probe
agaatttggcacagttagtcacttt

SEQ ID NO: 97358 - DNA, 25 bp, Artificial
  Probe
aagaatttggcacagttagtcactt

SEQ ID NO: 97359 - DNA, 25 bp, Artificial
  Probe
ggagcagatcaaagaactaatagag

SEQ ID NO: 97360 - DNA, 25 bp, Artificial
  Probe
gtatgcagttagagaggaagtggag

SEQ ID NO: 97361 - DNA, 25 bp, Artificial
  Probe
tgaaggagcagatcaaagaactaat

SEQ ID NO: 97362 - DNA, 25 bp, Artificial
  Probe
aaaggttaaacagagagtgagcatg

SEQ ID NO: 97363 - DNA, 25 bp, Artificial
  Probe
aaggagcagatcaaagaactaatag

SEQ ID NO: 97364 - DNA, 25 bp, Artificial
  Probe
gaaggagcagatcaaagaactaata

SEQ ID NO: 97365 - DNA, 25 bp, Artificial
  Probe
aatttggcacagttagtcactttgt

SEQ ID NO: 97366 - DNA, 25 bp, Artificial
  Probe
atgtctgaggaatggtttgattgac

SEQ ID NO: 97367 - DNA, 25 bp, Artificial
  Probe
ctgaactgaacagaccgaagagatg

SEQ ID NO: 97368 - DNA, 25 bp, Artificial
  Probe
ctgaaggagcagatcaaagaactaa

SEQ ID NO: 97369 - DNA, 25 bp, Artificial
  Probe
gttaaacagagagtgagcatggatg

SEQ ID NO: 97370 - DNA, 25 bp, Artificial
  Probe
gaactgaacagaccgaagagatgtg

SEQ ID NO: 97371 - DNA, 25 bp, Artificial
  Probe
gagcagatcaaagaactaatagaga

SEQ ID NO: 97372 - DNA, 25 bp, Artificial
  Probe
tgtatgcagttagagaggaagtgga

SEQ ID NO: 97373 - DNA, 25 bp, Artificial
  Probe
gtgaatgaatagatggagaaacgtc

SEQ ID NO: 97374 - DNA, 25 bp, Artificial
  Probe
agtgaatgaatagatggagaaacgt

SEQ ID NO: 97375 - DNA, 25 bp, Artificial
  Probe
taaacagagagtgagcatggatgta

SEQ ID NO: 97376 - DNA, 25 bp, Artificial
  Probe
tttgatgtatgcagttagagaggaa

SEQ ID NO: 97377 - DNA, 25 bp, Artificial
  Probe
atttgatgtatgcagttagagagga

SEQ ID NO: 97378 - DNA, 25 bp, Artificial
  Probe
cagatgtctgaggaatggtttgatt

SEQ ID NO: 97379 - DNA, 25 bp, Artificial
  Probe
accgaagagatgtgctagtgagaag

SEQ ID NO: 97380 - DNA, 25 bp, Artificial
  Probe
ttcctcacctagttgaattagagtt

SEQ ID NO: 97381 - DNA, 25 bp, Artificial
  Probe
gaagctgaagtcattatgtctacaa

SEQ ID NO: 97382 - DNA, 25 bp, Artificial
  Probe
agaagctgaagtcattatgtctaca

SEQ ID NO: 97383 - DNA, 25 bp, Artificial
  Probe
gtctctcatacacacacacacacac

SEQ ID NO: 97384 - DNA, 25 bp, Artificial
  Probe
aagaagctgaagtcattatgtctac

SEQ ID NO: 97385 - DNA, 25 bp, Artificial
  Probe
ctctcatacacacacacacacacac

SEQ ID NO: 97386 - DNA, 25 bp, Artificial
  Probe
ttggtgagccatcataattaaggaa

SEQ ID NO: 97387 - DNA, 25 bp, Artificial
  Probe
tctctcatacacacacacacacaca

SEQ ID NO: 97388 - DNA, 25 bp, Artificial
  Probe
cttggtgagccatcataattaagga

SEQ ID NO: 97389 - DNA, 25 bp, Artificial
  Probe
gataggaaagcacaatcaaagttgg

SEQ ID NO: 97390 - DNA, 25 bp, Artificial
  Probe
gaaaggaaagaagggaggaaagaga

SEQ ID NO: 97391 - DNA, 25 bp, Artificial
  Probe
aaaggaaagaagggaggaaagagac

SEQ ID NO: 97392 - DNA, 25 bp, Artificial
  Probe
tcctcacctagttgaattagagttt

SEQ ID NO: 97393 - DNA, 25 bp, Artificial
  Probe
tttcctcacctagttgaattagagt

SEQ ID NO: 97394 - DNA, 25 bp, Artificial
  Probe
gtttcctcacctagttgaattagag

SEQ ID NO: 97395 - DNA, 25 bp, Artificial
  Probe
ctcatacacacacacacacacacac

SEQ ID NO: 97396 - DNA, 25 bp, Artificial
  Probe
aaggaaaggaaagaagggaggaaag

SEQ ID NO: 97397 - DNA, 25 bp, Artificial
  Probe
gaaggaaaggaaagaagggaggaaa

SEQ ID NO: 97398 - DNA, 25 bp, Artificial
  Probe
tgtctctcatacacacacacacaca

SEQ ID NO: 97399 - DNA, 25 bp, Artificial
  Probe
gccttggtgagccatcataattaag

SEQ ID NO: 97400 - DNA, 25 bp, Artificial
  Probe
aatgtttatctgtgataggaaagca

SEQ ID NO: 97401 - DNA, 25 bp, Artificial
  Probe
atgtttatctgtgataggaaagcac

SEQ ID NO: 97402 - DNA, 25 bp, Artificial
  Probe
tctcatacacacacacacacacaca

SEQ ID NO: 97403 - DNA, 25 bp, Artificial
  Probe
gaaagaagggaggaaagagactgac

SEQ ID NO: 97404 - DNA, 25 bp, Artificial
  Probe
cctagttgaattagagtttagacca

SEQ ID NO: 97405 - DNA, 25 bp, Artificial
  Probe
acctagttgaattagagtttagacc

SEQ ID NO: 97406 - DNA, 25 bp, Artificial
  Probe
taagagagggaggaagaaagggaag

SEQ ID NO: 97407 - DNA, 25 bp, Artificial
  Probe
ctaagagagggaggaagaaagggaa

SEQ ID NO: 97408 - DNA, 25 bp, Artificial
  Probe
ataggaaagcacaatcaaagttggc

SEQ ID NO: 97409 - DNA, 25 bp, Artificial
  Probe
ggtttcctcacctagttgaattaga

SEQ ID NO: 97410 - DNA, 25 bp, Artificial
  Probe
atcatggacttcaaacagctaagag

SEQ ID NO: 97411 - DNA, 25 bp, Artificial
  Probe
aaggaaagaagggaggaaagagact

SEQ ID NO: 97412 - DNA, 25 bp, Artificial
  Probe
ggaaaggaaagaagggaggaaagag

SEQ ID NO: 97413 - DNA, 25 bp, Artificial
  Probe
catcatggacttcaaacagctaaga

SEQ ID NO: 97414 - DNA, 25 bp, Artificial
  Probe
aaagaagggaggaaagagactgact

SEQ ID NO: 97415 - DNA, 25 bp, Artificial
  Probe
aagctgaagtcattatgtctacaaa

SEQ ID NO: 97416 - DNA, 25 bp, Artificial
  Probe
cggtttcctcacctagttgaattag

SEQ ID NO: 97417 - DNA, 25 bp, Artificial
  Probe
catggacttcaaacagctaagagag

SEQ ID NO: 97418 - DNA, 25 bp, Artificial
  Probe
cctcacctagttgaattagagttta

SEQ ID NO: 97419 - DNA, 25 bp, Artificial
  Probe
tcggtttcctcacctagttgaatta

SEQ ID NO: 97420 - DNA, 25 bp, Artificial
  Probe
gacagctacaagtccttgatggatt

SEQ ID NO: 97421 - DNA, 25 bp, Artificial
  Probe
aggaaaggaaagaagggaggaaaga

SEQ ID NO: 97422 - DNA, 25 bp, Artificial
  Probe
agaatttctaatgctcctttaggtt

SEQ ID NO: 97423 - DNA, 25 bp, Artificial
  Probe
aagaatttctaatgctcctttaggt

SEQ ID NO: 97424 - DNA, 25 bp, Artificial
  Probe
tcatggacttcaaacagctaagaga

SEQ ID NO: 97425 - DNA, 25 bp, Artificial
  Probe
ggtattagagtcctatccttgttcc

SEQ ID NO: 97426 - DNA, 25 bp, Artificial
  Probe
gtattagagtcctatccttgttcca

SEQ ID NO: 97427 - DNA, 25 bp, Artificial
  Probe
tattagagtcctatccttgttccaa

SEQ ID NO: 97428 - DNA, 25 bp, Artificial
  Probe
gggtattagagtcctatccttgttc

SEQ ID NO: 97429 - DNA, 25 bp, Artificial
  Probe
atttgaagattctgtgacttgggta

SEQ ID NO: 97430 - DNA, 25 bp, Artificial
  Probe
tttgaagattctgtgacttgggtag

SEQ ID NO: 97431 - DNA, 25 bp, Artificial
  Probe
tagagtcctatccttgttccaaaga

SEQ ID NO: 97432 - DNA, 25 bp, Artificial
  Probe
ttagagtcctatccttgttccaaag

SEQ ID NO: 97433 - DNA, 25 bp, Artificial
  Probe
tgagggtttgggattggtatcttaa

SEQ ID NO: 97434 - DNA, 25 bp, Artificial
  Probe
gatttgaagattctgtgacttgggt

SEQ ID NO: 97435 - DNA, 25 bp, Artificial
  Probe
gagtcctatccttgttccaaagatg

SEQ ID NO: 97436 - DNA, 25 bp, Artificial
  Probe
agagtcctatccttgttccaaagat

SEQ ID NO: 97437 - DNA, 25 bp, Artificial
  Probe
attagagtcctatccttgttccaaa

SEQ ID NO: 97438 - DNA, 25 bp, Artificial
  Probe
ctgagggtttgggattggtatctta

SEQ ID NO: 97439 - DNA, 25 bp, Artificial
  Probe
ggatttgaagattctgtgacttggg

SEQ ID NO: 97440 - DNA, 25 bp, Artificial
  Probe
gggatttgaagattctgtgacttgg

SEQ ID NO: 97441 - DNA, 25 bp, Artificial
  Probe
agggtattagagtcctatccttgtt

SEQ ID NO: 97442 - DNA, 25 bp, Artificial
  Probe
attgaagtagggactccatgatttg

SEQ ID NO: 97443 - DNA, 25 bp, Artificial
  Probe
ttgaagattctgtgacttgggtagg

SEQ ID NO: 97444 - DNA, 25 bp, Artificial
  Probe
actaagggtattagagtcctatcct

SEQ ID NO: 97445 - DNA, 25 bp, Artificial
  Probe
tattctctctggaatttgaactccc

SEQ ID NO: 97446 - DNA, 25 bp, Artificial
  Probe
tatccttgttccaaagatgggactt

SEQ ID NO: 97447 - DNA, 25 bp, Artificial
  Probe
atattctctctggaatttgaactcc

SEQ ID NO: 97448 - DNA, 25 bp, Artificial
  Probe
gaagtcctgggaattagaaatttgg

SEQ ID NO: 97449 - DNA, 25 bp, Artificial
  Probe
ggaagtcctgggaattagaaatttg

SEQ ID NO: 97450 - DNA, 25 bp, Artificial
  Probe
gggaagtcctgggaattagaaattt

SEQ ID NO: 97451 - DNA, 25 bp, Artificial
  Probe
aagtcctgggaattagaaatttggg

SEQ ID NO: 97452 - DNA, 25 bp, Artificial
  Probe
ttgggattggtatcttaagtttggg

SEQ ID NO: 97453 - DNA, 25 bp, Artificial
  Probe
gggtttgggattggtatcttaagtt

SEQ ID NO: 97454 - DNA, 25 bp, Artificial
  Probe
ctatccttgttccaaagatgggact

SEQ ID NO: 97455 - DNA, 25 bp, Artificial
  Probe
agtcctatccttgttccaaagatgg

SEQ ID NO: 97456 - DNA, 25 bp, Artificial
  Probe
tttgggattggtatcttaagtttgg

SEQ ID NO: 97457 - DNA, 25 bp, Artificial
  Probe
ggtttgggattggtatcttaagttt

SEQ ID NO: 97458 - DNA, 25 bp, Artificial
  Probe
gagggtttgggattggtatcttaag

SEQ ID NO: 97459 - DNA, 25 bp, Artificial
  Probe
gttccaaagatgggactttctgttt

SEQ ID NO: 97460 - DNA, 25 bp, Artificial
  Probe
agggtttgggattggtatcttaagt

SEQ ID NO: 97461 - DNA, 25 bp, Artificial
  Probe
gtttgggattggtatcttaagtttg

SEQ ID NO: 97462 - DNA, 25 bp, Artificial
  Probe
cttgttccaaagatgggactttctg

SEQ ID NO: 97463 - DNA, 25 bp, Artificial
  Probe
ttgaagtagggactccatgatttgg

SEQ ID NO: 97464 - DNA, 25 bp, Artificial
  Probe
ttccaaagatgggactttctgtttg

SEQ ID NO: 97465 - DNA, 25 bp, Artificial
  Probe
atccttgttccaaagatgggacttt

SEQ ID NO: 97466 - DNA, 25 bp, Artificial
  Probe
gcatggggaattggggattatatat

SEQ ID NO: 97467 - DNA, 25 bp, Artificial
  Probe
tgaagattctgtgacttgggtaggg

SEQ ID NO: 97468 - DNA, 25 bp, Artificial
  Probe
cctatccttgttccaaagatgggac

SEQ ID NO: 97469 - DNA, 25 bp, Artificial
  Probe
gtcctatccttgttccaaagatggg

SEQ ID NO: 97470 - DNA, 25 bp, Artificial
  Probe
cttctacaatgaggctgtcaattac

SEQ ID NO: 97471 - DNA, 25 bp, Artificial
  Probe
ttctacaatgaggctgtcaattacg

SEQ ID NO: 97472 - DNA, 25 bp, Artificial
  Probe
gcttctacaatgaggctgtcaatta

SEQ ID NO: 97473 - DNA, 25 bp, Artificial
  Probe
tctacaatgaggctgtcaattacga

SEQ ID NO: 97474 - DNA, 25 bp, Artificial
  Probe
ctacaatgaggctgtcaattacgac

SEQ ID NO: 97475 - DNA, 25 bp, Artificial
  Probe
tcaactgtgttaaagatacctaccc

SEQ ID NO: 97476 - DNA, 25 bp, Artificial
  Probe
gctcaactgtgttaaagatacctac

SEQ ID NO: 97477 - DNA, 25 bp, Artificial
  Probe
ctcaactgtgttaaagatacctacc

SEQ ID NO: 97478 - DNA, 25 bp, Artificial
  Probe
gaagtggaagtgaactcaagcagaa

SEQ ID NO: 97479 - DNA, 25 bp, Artificial
  Probe
cacacactttactctagccaagatc

SEQ ID NO: 97480 - DNA, 25 bp, Artificial
  Probe
acacacactttactctagccaagat

SEQ ID NO: 97481 - DNA, 25 bp, Artificial
  Probe
aagtggaagtgaactcaagcagaac

SEQ ID NO: 97482 - DNA, 25 bp, Artificial
  Probe
ggcttctacaatgaggctgtcaatt

SEQ ID NO: 97483 - DNA, 25 bp, Artificial
  Probe
aagctcaactgtgttaaagatacct

SEQ ID NO: 97484 - DNA, 25 bp, Artificial
  Probe
gaagctcaactgtgttaaagatacc

SEQ ID NO: 97485 - DNA, 25 bp, Artificial
  Probe
agctcaactgtgttaaagataccta

SEQ ID NO: 97486 - DNA, 25 bp, Artificial
  Probe
gacacacactttactctagccaaga

SEQ ID NO: 97487 - DNA, 25 bp, Artificial
  Probe
tactctagccaagatctgagcaata

SEQ ID NO: 97488 - DNA, 25 bp, Artificial
  Probe
agtgaagctcaactgtgttaaagat

SEQ ID NO: 97489 - DNA, 25 bp, Artificial
  Probe
tgaagctcaactgtgttaaagatac

SEQ ID NO: 97490 - DNA, 25 bp, Artificial
  Probe
gtgaagctcaactgtgttaaagata

SEQ ID NO: 97491 - DNA, 25 bp, Artificial
  Probe
acttggagttacagtgaagctcaac

SEQ ID NO: 97492 - DNA, 25 bp, Artificial
  Probe
ttactctagccaagatctgagcaat

SEQ ID NO: 97493 - DNA, 25 bp, Artificial
  Probe
cagaccgacacacactttactctag

SEQ ID NO: 97494 - DNA, 25 bp, Artificial
  Probe
gtggaagtgaactcaagcagaactg

SEQ ID NO: 97495 - DNA, 25 bp, Artificial
  Probe
agtggaagtgaactcaagcagaact

SEQ ID NO: 97496 - DNA, 25 bp, Artificial
  Probe
actctagccaagatctgagcaatac

SEQ ID NO: 97497 - DNA, 25 bp, Artificial
  Probe
caactgtgttaaagatacctacccc

SEQ ID NO: 97498 - DNA, 25 bp, Artificial
  Probe
tggaccaattgtaccttatctggaa

SEQ ID NO: 97499 - DNA, 25 bp, Artificial
  Probe
cgacacacactttactctagccaag

SEQ ID NO: 97500 - DNA, 25 bp, Artificial
  Probe
tggcttctacaatgaggctgtcaat

SEQ ID NO: 97501 - DNA, 25 bp, Artificial
  Probe
aactgtgttaaagatacctacccca

SEQ ID NO: 97502 - DNA, 25 bp, Artificial
  Probe
ctctagccaagatctgagcaatacc

SEQ ID NO: 97503 - DNA, 25 bp, Artificial
  Probe
ctagccaagatctgagcaataccac

SEQ ID NO: 97504 - DNA, 25 bp, Artificial
  Probe
ctggaccaattgtaccttatctgga

SEQ ID NO: 97505 - DNA, 25 bp, Artificial
  Probe
cacacctactgaggatactgtctgc

SEQ ID NO: 97506 - DNA, 25 bp, Artificial
  Probe
gcacacctactgaggatactgtctg

SEQ ID NO: 97507 - DNA, 25 bp, Artificial
  Probe
tgtgttaaagatacctaccccagtg

SEQ ID NO: 97508 - DNA, 25 bp, Artificial
  Probe
cctggtggcactcctaataaacatg

SEQ ID NO: 97509 - DNA, 25 bp, Artificial
  Probe
gacaaggatgtatgtgtgggttcag

SEQ ID NO: 97510 - DNA, 25 bp, Artificial
  Probe
cagacaaggatgtatgtgtgggttc

SEQ ID NO: 97511 - DNA, 25 bp, Artificial
  Probe
acactttactctagccaagatctga

SEQ ID NO: 97512 - DNA, 25 bp, Artificial
  Probe
cacactttactctagccaagatctg

SEQ ID NO: 97513 - DNA, 25 bp, Artificial
  Probe
tctagccaagatctgagcaatacca

SEQ ID NO: 97514 - DNA, 25 bp, Artificial
  Probe
cactttactctagccaagatctgag

SEQ ID NO: 97515 - DNA, 25 bp, Artificial
  Probe
ggttgtcttcctcagatgtaatgat

SEQ ID NO: 97516 - DNA, 25 bp, Artificial
  Probe
tgtaatgataactggttaggtgtca

SEQ ID NO: 97517 - DNA, 25 bp, Artificial
  Probe
gataactggttaggtgtcatgtgta

SEQ ID NO: 97518 - DNA, 25 bp, Artificial
  Probe
actggttaggtgtcatgtgtaataa

SEQ ID NO: 97519 - DNA, 25 bp, Artificial
  Probe
aactggttaggtgtcatgtgtaata

SEQ ID NO: 97520 - DNA, 25 bp, Artificial
  Probe
taactggttaggtgtcatgtgtaat

SEQ ID NO: 97521 - DNA, 25 bp, Artificial
  Probe
ataactggttaggtgtcatgtgtaa

SEQ ID NO: 97522 - DNA, 25 bp, Artificial
  Probe
atgtaatgataactggttaggtgtc

SEQ ID NO: 97523 - DNA, 25 bp, Artificial
  Probe
gatgtaatgataactggttaggtgt

SEQ ID NO: 97524 - DNA, 25 bp, Artificial
  Probe
ttagtaggaatccagaagtgttaga

SEQ ID NO: 97525 - DNA, 25 bp, Artificial
  Probe
tagtaggaatccagaagtgttagat

SEQ ID NO: 97526 - DNA, 25 bp, Artificial
  Probe
agatgtaatgataactggttaggtg

SEQ ID NO: 97527 - DNA, 25 bp, Artificial
  Probe
tcctcagatgtaatgataactggtt

SEQ ID NO: 97528 - DNA, 25 bp, Artificial
  Probe
ttcctcagatgtaatgataactggt

SEQ ID NO: 97529 - DNA, 25 bp, Artificial
  Probe
ttagagagttggaccactatattgt

SEQ ID NO: 97530 - DNA, 25 bp, Artificial
  Probe
cttcctcagatgtaatgataactgg

SEQ ID NO: 97531 - DNA, 25 bp, Artificial
  Probe
tgtcttcctcagatgtaatgataac

SEQ ID NO: 97532 - DNA, 25 bp, Artificial
  Probe
gttgtcttcctcagatgtaatgata

SEQ ID NO: 97533 - DNA, 25 bp, Artificial
  Probe
gagttggaccactatattgtgtgtt

SEQ ID NO: 97534 - DNA, 25 bp, Artificial
  Probe
tagagagttggaccactatattgtg

SEQ ID NO: 97535 - DNA, 25 bp, Artificial
  Probe
gagagttggaccactatattgtgtg

SEQ ID NO: 97536 - DNA, 25 bp, Artificial
  Probe
agagagttggaccactatattgtgt

SEQ ID NO: 97537 - DNA, 25 bp, Artificial
  Probe
gtcttcctcagatgtaatgataact

SEQ ID NO: 97538 - DNA, 25 bp, Artificial
  Probe
aggaatccagaagtgttagattgaa

SEQ ID NO: 97539 - DNA, 25 bp, Artificial
  Probe
agagttggaccactatattgtgtgt

SEQ ID NO: 97540 - DNA, 25 bp, Artificial
  Probe
tgataactggttaggtgtcatgtgt

SEQ ID NO: 97541 - DNA, 25 bp, Artificial
  Probe
aatccagaagtgttagattgaatgg

SEQ ID NO: 97542 - DNA, 25 bp, Artificial
  Probe
cagtttgtccagtgattgttcttta

SEQ ID NO: 97543 - DNA, 25 bp, Artificial
  Probe
gaagtgttagattgaatgggaaagc

SEQ ID NO: 97544 - DNA, 25 bp, Artificial
  Probe
taggaatccagaagtgttagattga

SEQ ID NO: 97545 - DNA, 25 bp, Artificial
  Probe
gtaggaatccagaagtgttagattg

SEQ ID NO: 97546 - DNA, 25 bp, Artificial
  Probe
agtaggaatccagaagtgttagatt

SEQ ID NO: 97547 - DNA, 25 bp, Artificial
  Probe
cagatgtaatgataactggttaggt

SEQ ID NO: 97548 - DNA, 25 bp, Artificial
  Probe
agtttgtccagtgattgttctttag

SEQ ID NO: 97549 - DNA, 25 bp, Artificial
  Probe
ggaatccagaagtgttagattgaat

SEQ ID NO: 97550 - DNA, 25 bp, Artificial
  Probe
gtgtgtttgctaatcattgactgta

SEQ ID NO: 97551 - DNA, 25 bp, Artificial
  Probe
gtttgtccagtgattgttctttaga

SEQ ID NO: 97552 - DNA, 25 bp, Artificial
  Probe
attgtgtgtttgctaatcattgact

SEQ ID NO: 97553 - DNA, 25 bp, Artificial
  Probe
ttgtcttcctcagatgtaatgataa

SEQ ID NO: 97554 - DNA, 25 bp, Artificial
  Probe
gtgtttgctaatcattgactgtagt

SEQ ID NO: 97555 - DNA, 25 bp, Artificial
  Probe
tgtgtttgctaatcattgactgtag

SEQ ID NO: 97556 - DNA, 25 bp, Artificial
  Probe
cagaagtgttagattgaatgggaaa

SEQ ID NO: 97557 - DNA, 25 bp, Artificial
  Probe
ttgtgtgtttgctaatcattgactg

SEQ ID NO: 97558 - DNA, 25 bp, Artificial
  Probe
tcttcctcagatgtaatgataactg

SEQ ID NO: 97559 - DNA, 25 bp, Artificial
  Probe
tttgtccagtgattgttctttagag

SEQ ID NO: 97560 - DNA, 25 bp, Artificial
  Probe
gtgaatgagtggagtggtaatacat

SEQ ID NO: 97561 - DNA, 25 bp, Artificial
  Probe
ttggtgaatgagtggagtggtaata

SEQ ID NO: 97562 - DNA, 25 bp, Artificial
  Probe
ggtgaatgagtggagtggtaataca

SEQ ID NO: 97563 - DNA, 25 bp, Artificial
  Probe
tggtgaatgagtggagtggtaatac

SEQ ID NO: 97564 - DNA, 25 bp, Artificial
  Probe
tgaatgagtggagtggtaatacatg

SEQ ID NO: 97565 - DNA, 25 bp, Artificial
  Probe
gagtggagtggtaatacatggatta

SEQ ID NO: 97566 - DNA, 25 bp, Artificial
  Probe
tgagtggagtggtaatacatggatt

SEQ ID NO: 97567 - DNA, 25 bp, Artificial
  Probe
gaatgagtggagtggtaatacatgg

SEQ ID NO: 97568 - DNA, 25 bp, Artificial
  Probe
tggagtggtaatacatggattaagt

SEQ ID NO: 97569 - DNA, 25 bp, Artificial
  Probe
agtggagtggtaatacatggattaa

SEQ ID NO: 97570 - DNA, 25 bp, Artificial
  Probe
atgagtggagtggtaatacatggat

SEQ ID NO: 97571 - DNA, 25 bp, Artificial
  Probe
gtggagtggtaatacatggattaag

SEQ ID NO: 97572 - DNA, 25 bp, Artificial
  Probe
aatgagtggagtggtaatacatgga

SEQ ID NO: 97573 - DNA, 25 bp, Artificial
  Probe
ggagtggtaatacatggattaagtc

SEQ ID NO: 97574 - DNA, 25 bp, Artificial
  Probe
cttggtgaatgagtggagtggtaat

SEQ ID NO: 97575 - DNA, 25 bp, Artificial
  Probe
gaggcaagttagaagattaatagca

SEQ ID NO: 97576 - DNA, 25 bp, Artificial
  Probe
tagaagattaatagcatgtgatggc

SEQ ID NO: 97577 - DNA, 25 bp, Artificial
  Probe
tggtaatacatggattaagtcttgg

SEQ ID NO: 97578 - DNA, 25 bp, Artificial
  Probe
agaggcaagttagaagattaatagc

SEQ ID NO: 97579 - DNA, 25 bp, Artificial
  Probe
tgaacaaccctgaaatataaccact

SEQ ID NO: 97580 - DNA, 25 bp, Artificial
  Probe
ggtaatacatggattaagtcttgga

SEQ ID NO: 97581 - DNA, 25 bp, Artificial
  Probe
gaacaaccctgaaatataaccactc

SEQ ID NO: 97582 - DNA, 25 bp, Artificial
  Probe
caaccctgaaatataaccactccat

SEQ ID NO: 97583 - DNA, 25 bp, Artificial
  Probe
ggcaagttagaagattaatagcatg

SEQ ID NO: 97584 - DNA, 25 bp, Artificial
  Probe
aggcaagttagaagattaatagcat

SEQ ID NO: 97585 - DNA, 25 bp, Artificial
  Probe
ccagaggcaagttagaagattaata

SEQ ID NO: 97586 - DNA, 25 bp, Artificial
  Probe
aacaaccctgaaatataaccactcc

SEQ ID NO: 97587 - DNA, 25 bp, Artificial
  Probe
ctgtgaacaaccctgaaatataacc

SEQ ID NO: 97588 - DNA, 25 bp, Artificial
  Probe
cctgtgaacaaccctgaaatataac

SEQ ID NO: 97589 - DNA, 25 bp, Artificial
  Probe
tgtgaacaaccctgaaatataacca

SEQ ID NO: 97590 - DNA, 25 bp, Artificial
  Probe
gagtggtaatacatggattaagtct

SEQ ID NO: 97591 - DNA, 25 bp, Artificial
  Probe
aatgatttcaggacaagaacacaag

SEQ ID NO: 97592 - DNA, 25 bp, Artificial
  Probe
ccctgtgaacaaccctgaaatataa

SEQ ID NO: 97593 - DNA, 25 bp, Artificial
  Probe
aaatgatttcaggacaagaacacaa

SEQ ID NO: 97594 - DNA, 25 bp, Artificial
  Probe
taaatgatttcaggacaagaacaca

SEQ ID NO: 97595 - DNA, 25 bp, Artificial
  Probe
acaaccctgaaatataaccactcca

SEQ ID NO: 97596 - DNA, 25 bp, Artificial
  Probe
gtggtaatacatggattaagtcttg

SEQ ID NO: 97597 - DNA, 25 bp, Artificial
  Probe
atgatttcaggacaagaacacaagg

SEQ ID NO: 97598 - DNA, 25 bp, Artificial
  Probe
tcttggtgaatgagtggagtggtaa

SEQ ID NO: 97599 - DNA, 25 bp, Artificial
  Probe
gcaagttagaagattaatagcatgt

SEQ ID NO: 97600 - DNA, 25 bp, Artificial
  Probe
agtggtaatacatggattaagtctt

SEQ ID NO: 97601 - DNA, 25 bp, Artificial
  Probe
aaccctgaaatataaccactccatg

SEQ ID NO: 97602 - DNA, 25 bp, Artificial
  Probe
ctaaatgatttcaggacaagaacac

SEQ ID NO: 97603 - DNA, 25 bp, Artificial
  Probe
ttcttggtgaatgagtggagtggta

SEQ ID NO: 97604 - DNA, 25 bp, Artificial
  Probe
tctaaatgatttcaggacaagaaca

SEQ ID NO: 97605 - DNA, 25 bp, Artificial
  Probe
gattatgctcacaacaactaccagg

SEQ ID NO: 97606 - DNA, 25 bp, Artificial
  Probe
ggattatgctcacaacaactaccag

SEQ ID NO: 97607 - DNA, 25 bp, Artificial
  Probe
gtggattatgctcacaacaactacc

SEQ ID NO: 97608 - DNA, 25 bp, Artificial
  Probe
ggtggattatgctcacaacaactac

SEQ ID NO: 97609 - DNA, 25 bp, Artificial
  Probe
tggtggattatgctcacaacaacta

SEQ ID NO: 97610 - DNA, 25 bp, Artificial
  Probe
attatgctcacaacaactaccaggc

SEQ ID NO: 97611 - DNA, 25 bp, Artificial
  Probe
tggattatgctcacaacaactacca

SEQ ID NO: 97612 - DNA, 25 bp, Artificial
  Probe
atggtggattatgctcacaacaact

SEQ ID NO: 97613 - DNA, 25 bp, Artificial
  Probe
catgcagtatgagttgaatcggaac

SEQ ID NO: 97614 - DNA, 25 bp, Artificial
  Probe
catggtggattatgctcacaacaac

SEQ ID NO: 97615 - DNA, 25 bp, Artificial
  Probe
acatgcagtatgagttgaatcggaa

SEQ ID NO: 97616 - DNA, 25 bp, Artificial
  Probe
atgcagtatgagttgaatcggaaca

SEQ ID NO: 97617 - DNA, 25 bp, Artificial
  Probe
tgcagtatgagttgaatcggaacaa

SEQ ID NO: 97618 - DNA, 25 bp, Artificial
  Probe
gacatgcagtatgagttgaatcgga

SEQ ID NO: 97619 - DNA, 25 bp, Artificial
  Probe
ggacatgcagtatgagttgaatcgg

SEQ ID NO: 97620 - DNA, 25 bp, Artificial
  Probe
tatgagttgaatcggaacaacctga

SEQ ID NO: 97621 - DNA, 25 bp, Artificial
  Probe
gtatgagttgaatcggaacaacctg

SEQ ID NO: 97622 - DNA, 25 bp, Artificial
  Probe
agtatgagttgaatcggaacaacct

SEQ ID NO: 97623 - DNA, 25 bp, Artificial
  Probe
cagtatgagttgaatcggaacaacc

SEQ ID NO: 97624 - DNA, 25 bp, Artificial
  Probe
gcagtatgagttgaatcggaacaac

SEQ ID NO: 97625 - DNA, 25 bp, Artificial
  Probe
ttgaatcggaacaacctgactgacc

SEQ ID NO: 97626 - DNA, 25 bp, Artificial
  Probe
atgagttgaatcggaacaacctgac

SEQ ID NO: 97627 - DNA, 25 bp, Artificial
  Probe
gggacatgcagtatgagttgaatcg

SEQ ID NO: 97628 - DNA, 25 bp, Artificial
  Probe
catgacttcccagaaagacacgttg

SEQ ID NO: 97629 - DNA, 25 bp, Artificial
  Probe
gagttgaatcggaacaacctgactg

SEQ ID NO: 97630 - DNA, 25 bp, Artificial
  Probe
atgacttcccagaaagacacgttga

SEQ ID NO: 97631 - DNA, 25 bp, Artificial
  Probe
gttgaatcggaacaacctgactgac

SEQ ID NO: 97632 - DNA, 25 bp, Artificial
  Probe
agttgaatcggaacaacctgactga

SEQ ID NO: 97633 - DNA, 25 bp, Artificial
  Probe
tgagttgaatcggaacaacctgact

SEQ ID NO: 97634 - DNA, 25 bp, Artificial
  Probe
ttatgctcacaacaactaccaggcc

SEQ ID NO: 97635 - DNA, 25 bp, Artificial
  Probe
gacttcccagaaagacacgttgact

SEQ ID NO: 97636 - DNA, 25 bp, Artificial
  Probe
ggggacatgcagtatgagttgaatc

SEQ ID NO: 97637 - DNA, 25 bp, Artificial
  Probe
tgacttcccagaaagacacgttgac

SEQ ID NO: 97638 - DNA, 25 bp, Artificial
  Probe
gactcccctgtttggaatagcaaaa

SEQ ID NO: 97639 - DNA, 25 bp, Artificial
  Probe
ccatgacttcccagaaagacacgtt

SEQ ID NO: 97640 - DNA, 25 bp, Artificial
  Probe
ccatggtggattatgctcacaacaa

SEQ ID NO: 97641 - DNA, 25 bp, Artificial
  Probe
gttactgctgatcactcccacgttt

SEQ ID NO: 97642 - DNA, 25 bp, Artificial
  Probe
cggggacatgcagtatgagttgaat

SEQ ID NO: 97643 - DNA, 25 bp, Artificial
  Probe
ttactgctgatcactcccacgtttt

SEQ ID NO: 97644 - DNA, 25 bp, Artificial
  Probe
cgactcccctgtttggaatagcaaa

SEQ ID NO: 97645 - DNA, 25 bp, Artificial
  Probe
gagaacgtctccatggtggattatg

SEQ ID NO: 97646 - DNA, 25 bp, Artificial
  Probe
tactgctgatcactcccacgttttc

SEQ ID NO: 97647 - DNA, 25 bp, Artificial
  Probe
ctccatggtggattatgctcacaac

SEQ ID NO: 97648 - DNA, 25 bp, Artificial
  Probe
tctccatggtggattatgctcacaa

SEQ ID NO: 97649 - DNA, 25 bp, Artificial
  Probe
tccatggtggattatgctcacaaca

SEQ ID NO: 97650 - DNA, 25 bp, Artificial
  Probe
ctttatttcagacaaccagtgcttt

SEQ ID NO: 97651 - DNA, 25 bp, Artificial
  Probe
gatgagtctgctctacaacatgaac

SEQ ID NO: 97652 - DNA, 25 bp, Artificial
  Probe
tactctgtggctaaataaatggcat

SEQ ID NO: 97653 - DNA, 25 bp, Artificial
  Probe
gtgaaaccttgtggactctttaatt

SEQ ID NO: 97654 - DNA, 25 bp, Artificial
  Probe
tctacaacatgaacgactgctactc

SEQ ID NO: 97655 - DNA, 25 bp, Artificial
  Probe
ctctacaacatgaacgactgctact

SEQ ID NO: 97656 - DNA, 25 bp, Artificial
  Probe
tctgctttgttatcaaccatttcac

SEQ ID NO: 97657 - DNA, 25 bp, Artificial
  Probe
tttatttcagacaaccagtgctttg

SEQ ID NO: 97658 - DNA, 25 bp, Artificial
  Probe
ttctgctttgttatcaaccatttca

SEQ ID NO: 97659 - DNA, 25 bp, Artificial
  Probe
ctttgttatcaaccatttcaccagg

SEQ ID NO: 97660 - DNA, 25 bp, Artificial
  Probe
gttctgctttgttatcaaccatttc

SEQ ID NO: 97661 - DNA, 25 bp, Artificial
  Probe
aaatgaagtctttggtcagaaatgg

SEQ ID NO: 97662 - DNA, 25 bp, Artificial
  Probe
agtgaaaccttgtggactctttaat

SEQ ID NO: 97663 - DNA, 25 bp, Artificial
  Probe
tatattgagtgaaaccttgtggact

SEQ ID NO: 97664 - DNA, 25 bp, Artificial
  Probe
tttgttatcaaccatttcaccagga

SEQ ID NO: 97665 - DNA, 25 bp, Artificial
  Probe
actctgtggctaaataaatggcatt

SEQ ID NO: 97666 - DNA, 25 bp, Artificial
  Probe
gctttgttatcaaccatttcaccag

SEQ ID NO: 97667 - DNA, 25 bp, Artificial
  Probe
ctgctttgttatcaaccatttcacc

SEQ ID NO: 97668 - DNA, 25 bp, Artificial
  Probe
tatttcagacaaccagtgctttgat

SEQ ID NO: 97669 - DNA, 25 bp, Artificial
  Probe
gattgctcgctttatttcagacaac

SEQ ID NO: 97670 - DNA, 25 bp, Artificial
  Probe
ttatttcagacaaccagtgctttga

SEQ ID NO: 97671 - DNA, 25 bp, Artificial
  Probe
gtactctgtggctaaataaatggca

SEQ ID NO: 97672 - DNA, 25 bp, Artificial
  Probe
atatattgagtgaaaccttgtggac

SEQ ID NO: 97673 - DNA, 25 bp, Artificial
  Probe
tgctttgttatcaaccatttcacca

SEQ ID NO: 97674 - DNA, 25 bp, Artificial
  Probe
cgatgagtctgctctacaacatgaa

SEQ ID NO: 97675 - DNA, 25 bp, Artificial
  Probe
atttcagacaaccagtgctttgatt

SEQ ID NO: 97676 - DNA, 25 bp, Artificial
  Probe
gctttatttcagacaaccagtgctt

SEQ ID NO: 97677 - DNA, 25 bp, Artificial
  Probe
tttcagacaaccagtgctttgattt

SEQ ID NO: 97678 - DNA, 25 bp, Artificial
  Probe
ctcgctttatttcagacaaccagtg

SEQ ID NO: 97679 - DNA, 25 bp, Artificial
  Probe
ctacaacatgaacgactgctactcc

SEQ ID NO: 97680 - DNA, 25 bp, Artificial
  Probe
aatgaagtctttggtcagaaatggc

SEQ ID NO: 97681 - DNA, 25 bp, Artificial
  Probe
atgagtctgctctacaacatgaacg

SEQ ID NO: 97682 - DNA, 25 bp, Artificial
  Probe
acccagtattcggttacttaaatga

SEQ ID NO: 97683 - DNA, 25 bp, Artificial
  Probe
ggacccagtattcggttacttaaat

SEQ ID NO: 97684 - DNA, 25 bp, Artificial
  Probe
attgctcgctttatttcagacaacc

SEQ ID NO: 97685 - DNA, 25 bp, Artificial
  Probe
tgaaaccttgtggactctttaatta

SEQ ID NO: 97686 - DNA, 25 bp, Artificial
  Probe
taaatgaagtctttggtcagaaatg

SEQ ID NO: 97687 - DNA, 25 bp, Artificial
  Probe
gacccagtattcggttacttaaatg

SEQ ID NO: 97688 - DNA, 25 bp, Artificial
  Probe
cttaaatgaagtctttggtcagaaa

SEQ ID NO: 97689 - DNA, 25 bp, Artificial
  Probe
ctctgtggctaaataaatggcattt

SEQ ID NO: 97690 - DNA, 25 bp, Artificial
  Probe
acccaaataaataccagttcaaatt

SEQ ID NO: 97691 - DNA, 25 bp, Artificial
  Probe
aggacccagtattcggttacttaaa

SEQ ID NO: 97692 - DNA, 25 bp, Artificial
  Probe
aaggacccagtattcggttacttaa

SEQ ID NO: 97693 - DNA, 25 bp, Artificial
  Probe
tctgtggctaaataaatggcatttg

SEQ ID NO: 97694 - DNA, 25 bp, Artificial
  Probe
cccagtattcggttacttaaatgaa

SEQ ID NO: 97695 - DNA, 25 bp, Artificial
  Probe
aatgtgagatgtggactggtaagaa

SEQ ID NO: 97696 - DNA, 25 bp, Artificial
  Probe
ggtctgataacatctactgtatcgt

SEQ ID NO: 97697 - DNA, 25 bp, Artificial
  Probe
aggtctgataacatctactgtatcg

SEQ ID NO: 97698 - DNA, 25 bp, Artificial
  Probe
ccaaggtctgataacatctactgta

SEQ ID NO: 97699 - DNA, 25 bp, Artificial
  Probe
atgtgagatgtggactggtaagaag

SEQ ID NO: 97700 - DNA, 25 bp, Artificial
  Probe
gctgtgccttaactcagaatactaa

SEQ ID NO: 97701 - DNA, 25 bp, Artificial
  Probe
gagatgtggactggtaagaaggaag

SEQ ID NO: 97702 - DNA, 25 bp, Artificial
  Probe
gtctgataacatctactgtatcgtt

SEQ ID NO: 97703 - DNA, 25 bp, Artificial
  Probe
tgagatgtggactggtaagaaggaa

SEQ ID NO: 97704 - DNA, 25 bp, Artificial
  Probe
taaatgtgagatgtggactggtaag

SEQ ID NO: 97705 - DNA, 25 bp, Artificial
  Probe
ttaaatgtgagatgtggactggtaa

SEQ ID NO: 97706 - DNA, 25 bp, Artificial
  Probe
ctatgagccaagtgttaaatgtgag

SEQ ID NO: 97707 - DNA, 25 bp, Artificial
  Probe
tatgagccaagtgttaaatgtgaga

SEQ ID NO: 97708 - DNA, 25 bp, Artificial
  Probe
caagtgttaaatgtgagatgtggac

SEQ ID NO: 97709 - DNA, 25 bp, Artificial
  Probe
gttaaatgtgagatgtggactggta

SEQ ID NO: 97710 - DNA, 25 bp, Artificial
  Probe
gctgtttcctaccctaatcaaattc

SEQ ID NO: 97711 - DNA, 25 bp, Artificial
  Probe
tgctgtttcctaccctaatcaaatt

SEQ ID NO: 97712 - DNA, 25 bp, Artificial
  Probe
atgagccaagtgttaaatgtgagat

SEQ ID NO: 97713 - DNA, 25 bp, Artificial
  Probe
caaggtctgataacatctactgtat

SEQ ID NO: 97714 - DNA, 25 bp, Artificial
  Probe
gtgctgtttcctaccctaatcaaat

SEQ ID NO: 97715 - DNA, 25 bp, Artificial
  Probe
tttcctaccctaatcaaattccgtc

SEQ ID NO: 97716 - DNA, 25 bp, Artificial
  Probe
ctgtttcctaccctaatcaaattcc

SEQ ID NO: 97717 - DNA, 25 bp, Artificial
  Probe
gtttcctaccctaatcaaattccgt

SEQ ID NO: 97718 - DNA, 25 bp, Artificial
  Probe
tgtttcctaccctaatcaaattccg

SEQ ID NO: 97719 - DNA, 25 bp, Artificial
  Probe
aagtgttaaatgtgagatgtggact

SEQ ID NO: 97720 - DNA, 25 bp, Artificial
  Probe
aaggtctgataacatctactgtatc

SEQ ID NO: 97721 - DNA, 25 bp, Artificial
  Probe
aaatgtgagatgtggactggtaaga

SEQ ID NO: 97722 - DNA, 25 bp, Artificial
  Probe
gagccaagtgttaaatgtgagatgt

SEQ ID NO: 97723 - DNA, 25 bp, Artificial
  Probe
tgagccaagtgttaaatgtgagatg

SEQ ID NO: 97724 - DNA, 25 bp, Artificial
  Probe
agtgttaaatgtgagatgtggactg

SEQ ID NO: 97725 - DNA, 25 bp, Artificial
  Probe
agccaagtgttaaatgtgagatgtg

SEQ ID NO: 97726 - DNA, 25 bp, Artificial
  Probe
gtgttaaatgtgagatgtggactgg

SEQ ID NO: 97727 - DNA, 25 bp, Artificial
  Probe
ctctatcctccaagaagtacccata

SEQ ID NO: 97728 - DNA, 25 bp, Artificial
  Probe
atgtggactggtaagaaggaaggag

SEQ ID NO: 97729 - DNA, 25 bp, Artificial
  Probe
gatgtggactggtaagaaggaagga

SEQ ID NO: 97730 - DNA, 25 bp, Artificial
  Probe
agatgtggactggtaagaaggaagg

SEQ ID NO: 97731 - DNA, 25 bp, Artificial
  Probe
gtgagatgtggactggtaagaagga

SEQ ID NO: 97732 - DNA, 25 bp, Artificial
  Probe
tctatcctccaagaagtacccatac

SEQ ID NO: 97733 - DNA, 25 bp, Artificial
  Probe
ttgtcatgctgaagaactgtgagaa

SEQ ID NO: 97734 - DNA, 25 bp, Artificial
  Probe
tgtgctgtttcctaccctaatcaaa

SEQ ID NO: 97735 - DNA, 25 bp, Artificial
  Probe
ctatcctccaagaagtacccatacc

SEQ ID NO: 97736 - DNA, 25 bp, Artificial
  Probe
ttcctaccctaatcaaattccgtcc

SEQ ID NO: 97737 - DNA, 25 bp, Artificial
  Probe
tgttaaatgtgagatgtggactggt

SEQ ID NO: 97738 - DNA, 25 bp, Artificial
  Probe
tgtgagatgtggactggtaagaagg

SEQ ID NO: 97739 - DNA, 25 bp, Artificial
  Probe
ctgtgccttaactcagaatactaaa

SEQ ID NO: 97740 - DNA, 25 bp, Artificial
  Probe
caatgtgtccctgtgaactaatttg

SEQ ID NO: 97741 - DNA, 25 bp, Artificial
  Probe
ccaatgtgtccctgtgaactaattt

SEQ ID NO: 97742 - DNA, 25 bp, Artificial
  Probe
aatgtgtccctgtgaactaatttgc

SEQ ID NO: 97743 - DNA, 25 bp, Artificial
  Probe
accaatgtgtccctgtgaactaatt

SEQ ID NO: 97744 - DNA, 25 bp, Artificial
  Probe
caccaatgtgtccctgtgaactaat

SEQ ID NO: 97745 - DNA, 25 bp, Artificial
  Probe
ctcaagagagcagagagcgttgtaa

SEQ ID NO: 97746 - DNA, 25 bp, Artificial
  Probe
atgtgtccctgtgaactaatttgcg

SEQ ID NO: 97747 - DNA, 25 bp, Artificial
  Probe
gcaactgtaattaaaagcctggtac

SEQ ID NO: 97748 - DNA, 25 bp, Artificial
  Probe
aactaatttgcgttcagcccttctc

SEQ ID NO: 97749 - DNA, 25 bp, Artificial
  Probe
caagagagcagagagcgttgtaaac

SEQ ID NO: 97750 - DNA, 25 bp, Artificial
  Probe
gtgtccctgtgaactaatttgcgtt

SEQ ID NO: 97751 - DNA, 25 bp, Artificial
  Probe
tcaagagagcagagagcgttgtaaa

SEQ ID NO: 97752 - DNA, 25 bp, Artificial
  Probe
ctaatttgcgttcagcccttctcag

SEQ ID NO: 97753 - DNA, 25 bp, Artificial
  Probe
gtggttactgtccctgtctcgtatg

SEQ ID NO: 97754 - DNA, 25 bp, Artificial
  Probe
acagtgtcacttcaccctatcagag

SEQ ID NO: 97755 - DNA, 25 bp, Artificial
  Probe
agagagcgttgtaaaccgtctagtg

SEQ ID NO: 97756 - DNA, 25 bp, Artificial
  Probe
cagagagcgttgtaaaccgtctagt

SEQ ID NO: 97757 - DNA, 25 bp, Artificial
  Probe
taatttgcgttcagcccttctcagt

SEQ ID NO: 97758 - DNA, 25 bp, Artificial
  Probe
actaatttgcgttcagcccttctca

SEQ ID NO: 97759 - DNA, 25 bp, Artificial
  Probe
tgtcacttcaccctatcagagcttg

SEQ ID NO: 97760 - DNA, 25 bp, Artificial
  Probe
aagagagcagagagcgttgtaaacc

SEQ ID NO: 97761 - DNA, 25 bp, Artificial
  Probe
tgtgtccctgtgaactaatttgcgt

SEQ ID NO: 97762 - DNA, 25 bp, Artificial
  Probe
gtgtcacttcaccctatcagagctt

SEQ ID NO: 97763 - DNA, 25 bp, Artificial
  Probe
gtcacttcaccctatcagagcttgg

SEQ ID NO: 97764 - DNA, 25 bp, Artificial
  Probe
atccctcaactccagtcctagcttt

SEQ ID NO: 97765 - DNA, 25 bp, Artificial
  Probe
cctcaactccagtcctagctttctg

SEQ ID NO: 97766 - DNA, 25 bp, Artificial
  Probe
cagtgtcacttcaccctatcagagc

SEQ ID NO: 97767 - DNA, 25 bp, Artificial
  Probe
gaactaatttgcgttcagcccttct

SEQ ID NO: 97768 - DNA, 25 bp, Artificial
  Probe
tgtccctgtgaactaatttgcgttc

SEQ ID NO: 97769 - DNA, 25 bp, Artificial
  Probe
gatccctcaactccagtcctagctt

SEQ ID NO: 97770 - DNA, 25 bp, Artificial
  Probe
agtgtcacttcaccctatcagagct

SEQ ID NO: 97771 - DNA, 25 bp, Artificial
  Probe
ttgcatcccctaagctgagttgata

SEQ ID NO: 97772 - DNA, 25 bp, Artificial
  Probe
ttggcattgtggagtgcttaaacac

SEQ ID NO: 97773 - DNA, 25 bp, Artificial
  Probe
gttggcattgtggagtgcttaaaca

SEQ ID NO: 97774 - DNA, 25 bp, Artificial
  Probe
ctcaactccagtcctagctttctgc

SEQ ID NO: 97775 - DNA, 25 bp, Artificial
  Probe
ggcaactgtaattaaaagcctggta

SEQ ID NO: 97776 - DNA, 25 bp, Artificial
  Probe
tgcatcccctaagctgagttgatag

SEQ ID NO: 97777 - DNA, 25 bp, Artificial
  Probe
gtaattaaaagcctggtaccgaaaa

SEQ ID NO: 97778 - DNA, 25 bp, Artificial
  Probe
caactgtaattaaaagcctggtacc

SEQ ID NO: 97779 - DNA, 25 bp, Artificial
  Probe
tgtaattaaaagcctggtaccgaaa

SEQ ID NO: 97780 - DNA, 25 bp, Artificial
  Probe
ttcaccctatcagagcttggctttc

SEQ ID NO: 97781 - DNA, 25 bp, Artificial
  Probe
cttcaccctatcagagcttggcttt

SEQ ID NO: 97782 - DNA, 25 bp, Artificial
  Probe
ctgtaattaaaagcctggtaccgaa

SEQ ID NO: 97783 - DNA, 25 bp, Artificial
  Probe
aactgtaattaaaagcctggtaccg

SEQ ID NO: 97784 - DNA, 25 bp, Artificial
  Probe
caccctatcagagcttggctttctc

SEQ ID NO: 97785 - DNA, 25 bp, Artificial
  Probe
taatgaacagagaaggatttgaggt

SEQ ID NO: 97786 - DNA, 25 bp, Artificial
  Probe
aatgaacagagaaggatttgaggtg

SEQ ID NO: 97787 - DNA, 25 bp, Artificial
  Probe
attgtttccttcttccctttctatg

SEQ ID NO: 97788 - DNA, 25 bp, Artificial
  Probe
aatcaaacaccgactatccaaagag

SEQ ID NO: 97789 - DNA, 25 bp, Artificial
  Probe
gaatcaaacaccgactatccaaaga

SEQ ID NO: 97790 - DNA, 25 bp, Artificial
  Probe
ttgtttccttcttccctttctatgc

SEQ ID NO: 97791 - DNA, 25 bp, Artificial
  Probe
caaacaccgactatccaaagagaaa

SEQ ID NO: 97792 - DNA, 25 bp, Artificial
  Probe
ttaatgaacagagaaggatttgagg

SEQ ID NO: 97793 - DNA, 25 bp, Artificial
  Probe
caggcaatttgaagcatttatccag

SEQ ID NO: 97794 - DNA, 25 bp, Artificial
  Probe
cacaggcaatttgaagcatttatcc

SEQ ID NO: 97795 - DNA, 25 bp, Artificial
  Probe
ccacaggcaatttgaagcatttatc

SEQ ID NO: 97796 - DNA, 25 bp, Artificial
  Probe
aatttgaagcatttatccagccaac

SEQ ID NO: 97797 - DNA, 25 bp, Artificial
  Probe
caatttgaagcatttatccagccaa

SEQ ID NO: 97798 - DNA, 25 bp, Artificial
  Probe
attattgtttccttcttccctttct

SEQ ID NO: 97799 - DNA, 25 bp, Artificial
  Probe
atcaaacaccgactatccaaagaga

SEQ ID NO: 97800 - DNA, 25 bp, Artificial
  Probe
tgcagattctggaagatcacaataa

SEQ ID NO: 97801 - DNA, 25 bp, Artificial
  Probe
atgcagattctggaagatcacaata

SEQ ID NO: 97802 - DNA, 25 bp, Artificial
  Probe
tcaaacaccgactatccaaagagaa

SEQ ID NO: 97803 - DNA, 25 bp, Artificial
  Probe
acaggcaatttgaagcatttatcca

SEQ ID NO: 97804 - DNA, 25 bp, Artificial
  Probe
gatgcagattctggaagatcacaat

SEQ ID NO: 97805 - DNA, 25 bp, Artificial
  Probe
ttattgtttccttcttccctttcta

SEQ ID NO: 97806 - DNA, 25 bp, Artificial
  Probe
tattgtttccttcttccctttctat

SEQ ID NO: 97807 - DNA, 25 bp, Artificial
  Probe
cgtatattattgtttccttcttccc

SEQ ID NO: 97808 - DNA, 25 bp, Artificial
  Probe
attctggaagatcacaataaacagc

SEQ ID NO: 97809 - DNA, 25 bp, Artificial
  Probe
atgaacagagaaggatttgaggtgt

SEQ ID NO: 97810 - DNA, 25 bp, Artificial
  Probe
agattctggaagatcacaataaaca

SEQ ID NO: 97811 - DNA, 25 bp, Artificial
  Probe
atttgaagcatttatccagccaacc

SEQ ID NO: 97812 - DNA, 25 bp, Artificial
  Probe
aggtgttctactgagggaatcaaac

SEQ ID NO: 97813 - DNA, 25 bp, Artificial
  Probe
aggcaatttgaagcatttatccagc

SEQ ID NO: 97814 - DNA, 25 bp, Artificial
  Probe
gcagattctggaagatcacaataaa

SEQ ID NO: 97815 - DNA, 25 bp, Artificial
  Probe
tcttccctttctatgcaactgtaaa

SEQ ID NO: 97816 - DNA, 25 bp, Artificial
  Probe
ttcttccctttctatgcaactgtaa

SEQ ID NO: 97817 - DNA, 25 bp, Artificial
  Probe
cttcttccctttctatgcaactgta

SEQ ID NO: 97818 - DNA, 25 bp, Artificial
  Probe
cttccctttctatgcaactgtaaat

SEQ ID NO: 97819 - DNA, 25 bp, Artificial
  Probe
gcaatttgaagcatttatccagcca

SEQ ID NO: 97820 - DNA, 25 bp, Artificial
  Probe
ttccctttctatgcaactgtaaatt

SEQ ID NO: 97821 - DNA, 25 bp, Artificial
  Probe
tttccttcttccctttctatgcaac

SEQ ID NO: 97822 - DNA, 25 bp, Artificial
  Probe
gtttccttcttccctttctatgcaa

SEQ ID NO: 97823 - DNA, 25 bp, Artificial
  Probe
tattattgtttccttcttccctttc

SEQ ID NO: 97824 - DNA, 25 bp, Artificial
  Probe
caggtgttctactgagggaatcaaa

SEQ ID NO: 97825 - DNA, 25 bp, Artificial
  Probe
ttctggaagatcacaataaacagct

SEQ ID NO: 97826 - DNA, 25 bp, Artificial
  Probe
ggaatcaaacaccgactatccaaag

SEQ ID NO: 97827 - DNA, 25 bp, Artificial
  Probe
gattctggaagatcacaataaacag

SEQ ID NO: 97828 - DNA, 25 bp, Artificial
  Probe
ctgagggaatcaaacaccgactatc

SEQ ID NO: 97829 - DNA, 25 bp, Artificial
  Probe
tactgagggaatcaaacaccgacta

SEQ ID NO: 97830 - DNA, 25 bp, Artificial
  Probe
ttatgcttgattgtactgtgtcttc

SEQ ID NO: 97831 - DNA, 25 bp, Artificial
  Probe
tatgcttgattgtactgtgtcttca

SEQ ID NO: 97832 - DNA, 25 bp, Artificial
  Probe
atgcttgattgtactgtgtcttcat

SEQ ID NO: 97833 - DNA, 25 bp, Artificial
  Probe
ataatcgcatccatgttgtcttgtt

SEQ ID NO: 97834 - DNA, 25 bp, Artificial
  Probe
aataatcgcatccatgttgtcttgt

SEQ ID NO: 97835 - DNA, 25 bp, Artificial
  Probe
atgttgtcttgttgtaccatgtgaa

SEQ ID NO: 97836 - DNA, 25 bp, Artificial
  Probe
catccatgttgtcttgttgtaccat

SEQ ID NO: 97837 - DNA, 25 bp, Artificial
  Probe
tgcttgattgtactgtgtcttcatg

SEQ ID NO: 97838 - DNA, 25 bp, Artificial
  Probe
gtatccatgtatgtatgtatcagca

SEQ ID NO: 97839 - DNA, 25 bp, Artificial
  Probe
tgtatccatgtatgtatgtatcagc

SEQ ID NO: 97840 - DNA, 25 bp, Artificial
  Probe
taatcgcatccatgttgtcttgttg

SEQ ID NO: 97841 - DNA, 25 bp, Artificial
  Probe
ttatatgtctcccaatgtgaaggtt

SEQ ID NO: 97842 - DNA, 25 bp, Artificial
  Probe
atcactgttagttctcgaagttcaa

SEQ ID NO: 97843 - DNA, 25 bp, Artificial
  Probe
aatcactgttagttctcgaagttca

SEQ ID NO: 97844 - DNA, 25 bp, Artificial
  Probe
attatatgtctcccaatgtgaaggt

SEQ ID NO: 97845 - DNA, 25 bp, Artificial
  Probe
tgtgattatatgtctcccaatgtga

SEQ ID NO: 97846 - DNA, 25 bp, Artificial
  Probe
tatgtctcccaatgtgaaggttaaa

SEQ ID NO: 97847 - DNA, 25 bp, Artificial
  Probe
atatgtctcccaatgtgaaggttaa

SEQ ID NO: 97848 - DNA, 25 bp, Artificial
  Probe
atgtctcccaatgtgaaggttaaat

SEQ ID NO: 97849 - DNA, 25 bp, Artificial
  Probe
tgtctcccaatgtgaaggttaaatt

SEQ ID NO: 97850 - DNA, 25 bp, Artificial
  Probe
gattatatgtctcccaatgtgaagg

SEQ ID NO: 97851 - DNA, 25 bp, Artificial
  Probe
tatatgtctcccaatgtgaaggtta

SEQ ID NO: 97852 - DNA, 25 bp, Artificial
  Probe
gtctcccaatgtgaaggttaaatta

SEQ ID NO: 97853 - DNA, 25 bp, Artificial
  Probe
atgtgattatatgtctcccaatgtg

SEQ ID NO: 97854 - DNA, 25 bp, Artificial
  Probe
gtgattatatgtctcccaatgtgaa

SEQ ID NO: 97855 - DNA, 25 bp, Artificial
  Probe
caaatagtttccacattgcttgagg

SEQ ID NO: 97856 - DNA, 25 bp, Artificial
  Probe
tcccaatgtgaaggttaaattatgt

SEQ ID NO: 97857 - DNA, 25 bp, Artificial
  Probe
tgattatatgtctcccaatgtgaag

SEQ ID NO: 97858 - DNA, 25 bp, Artificial
  Probe
tttcaaatagtttccacattgcttg

SEQ ID NO: 97859 - DNA, 25 bp, Artificial
  Probe
ctttatgcttgattgtactgtgtct

SEQ ID NO: 97860 - DNA, 25 bp, Artificial
  Probe
tctttatgcttgattgtactgtgtc

SEQ ID NO: 97861 - DNA, 25 bp, Artificial
  Probe
aaataatcgcatccatgttgtcttg

SEQ ID NO: 97862 - DNA, 25 bp, Artificial
  Probe
tcatttaacatcctctccatcattt

SEQ ID NO: 97863 - DNA, 25 bp, Artificial
  Probe
ttcatttaacatcctctccatcatt

SEQ ID NO: 97864 - DNA, 25 bp, Artificial
  Probe
tttatgcttgattgtactgtgtctt

SEQ ID NO: 97865 - DNA, 25 bp, Artificial
  Probe
ctcccaatgtgaaggttaaattatg

SEQ ID NO: 97866 - DNA, 25 bp, Artificial
  Probe
aatgtgattatatgtctcccaatgt

SEQ ID NO: 97867 - DNA, 25 bp, Artificial
  Probe
tatccatgtatgtatgtatcagcat

SEQ ID NO: 97868 - DNA, 25 bp, Artificial
  Probe
atctttatgcttgattgtactgtgt

SEQ ID NO: 97869 - DNA, 25 bp, Artificial
  Probe
tctcccaatgtgaaggttaaattat

SEQ ID NO: 97870 - DNA, 25 bp, Artificial
  Probe
attcatttaacatcctctccatcat

SEQ ID NO: 97871 - DNA, 25 bp, Artificial
  Probe
atcgcatccatgttgtcttgttgta

SEQ ID NO: 97872 - DNA, 25 bp, Artificial
  Probe
tgccagttgttcaatagttatttac

SEQ ID NO: 97873 - DNA, 25 bp, Artificial
  Probe
tgttgtcttgttgtaccatgtgaaa

SEQ ID NO: 97874 - DNA, 25 bp, Artificial
  Probe
aaatagtttccacattgcttgaggc

SEQ ID NO: 97875 - DNA, 25 bp, Artificial
  Probe
gacacgcagtcctatgttcttaatt

SEQ ID NO: 97876 - DNA, 25 bp, Artificial
  Probe
tgacacgcagtcctatgttcttaat

SEQ ID NO: 97877 - DNA, 25 bp, Artificial
  Probe
atgacacgcagtcctatgttcttaa

SEQ ID NO: 97878 - DNA, 25 bp, Artificial
  Probe
cacgcagtcctatgttcttaatttc

SEQ ID NO: 97879 - DNA, 25 bp, Artificial
  Probe
cgcagtcctatgttcttaatttcca

SEQ ID NO: 97880 - DNA, 25 bp, Artificial
  Probe
acgcagtcctatgttcttaatttcc

SEQ ID NO: 97881 - DNA, 25 bp, Artificial
  Probe
gatgacacgcagtcctatgttctta

SEQ ID NO: 97882 - DNA, 25 bp, Artificial
  Probe
gcagtcctatgttcttaatttccat

SEQ ID NO: 97883 - DNA, 25 bp, Artificial
  Probe
ctaagttcaccgtttatgacaatgg

SEQ ID NO: 97884 - DNA, 25 bp, Artificial
  Probe
actaagttcaccgtttatgacaatg

SEQ ID NO: 97885 - DNA, 25 bp, Artificial
  Probe
cactaagttcaccgtttatgacaat

SEQ ID NO: 97886 - DNA, 25 bp, Artificial
  Probe
ttccgtgaagaacttccagatcatc

SEQ ID NO: 97887 - DNA, 25 bp, Artificial
  Probe
acacgcagtcctatgttcttaattt

SEQ ID NO: 97888 - DNA, 25 bp, Artificial
  Probe
gaacaagaacacggagagcatcatt

SEQ ID NO: 97889 - DNA, 25 bp, Artificial
  Probe
aaggcatcatcttctacactggaaa

SEQ ID NO: 97890 - DNA, 25 bp, Artificial
  Probe
taagttcaccgtttatgacaatggc

SEQ ID NO: 97891 - DNA, 25 bp, Artificial
  Probe
gcactaagttcaccgtttatgacaa

SEQ ID NO: 97892 - DNA, 25 bp, Artificial
  Probe
aatgatgacacgcagtcctatgttc

SEQ ID NO: 97893 - DNA, 25 bp, Artificial
  Probe
gaatgatgacacgcagtcctatgtt

SEQ ID NO: 97894 - DNA, 25 bp, Artificial
  Probe
aggcatcatcttctacactggaaag

SEQ ID NO: 97895 - DNA, 25 bp, Artificial
  Probe
aacaagaacacggagagcatcattg

SEQ ID NO: 97896 - DNA, 25 bp, Artificial
  Probe
ggcatcatcttctacactggaaagt

SEQ ID NO: 97897 - DNA, 25 bp, Artificial
  Probe
gtgtgctatgagacaaatgtcctag

SEQ ID NO: 97898 - DNA, 25 bp, Artificial
  Probe
caagaacacggagagcatcattgag

SEQ ID NO: 97899 - DNA, 25 bp, Artificial
  Probe
cagtcctatgttcttaatttccatg

SEQ ID NO: 97900 - DNA, 25 bp, Artificial
  Probe
agaacaagaacacggagagcatcat

SEQ ID NO: 97901 - DNA, 25 bp, Artificial
  Probe
gatgggcactaagttcaccgtttat

SEQ ID NO: 97902 - DNA, 25 bp, Artificial
  Probe
atggttcatgagagagtctgtatcc

SEQ ID NO: 97903 - DNA, 25 bp, Artificial
  Probe
gtgaagaacttccagatcatccacg

SEQ ID NO: 97904 - DNA, 25 bp, Artificial
  Probe
cgtgaagaacttccagatcatccac

SEQ ID NO: 97905 - DNA, 25 bp, Artificial
  Probe
atgatgacacgcagtcctatgttct

SEQ ID NO: 97906 - DNA, 25 bp, Artificial
  Probe
atgggcactaagttcaccgtttatg

SEQ ID NO: 97907 - DNA, 25 bp, Artificial
  Probe
gaaggcatcatcttctacactggaa

SEQ ID NO: 97908 - DNA, 25 bp, Artificial
  Probe
cttccgtgaagaacttccagatcat

SEQ ID NO: 97909 - DNA, 25 bp, Artificial
  Probe
tgatgacacgcagtcctatgttctt

SEQ ID NO: 97910 - DNA, 25 bp, Artificial
  Probe
ggcactaagttcaccgtttatgaca

SEQ ID NO: 97911 - DNA, 25 bp, Artificial
  Probe
tccgtgaagaacttccagatcatcc

SEQ ID NO: 97912 - DNA, 25 bp, Artificial
  Probe
acaagaacacggagagcatcattga

SEQ ID NO: 97913 - DNA, 25 bp, Artificial
  Probe
ggtagcagaagatgtgttcaccatg

SEQ ID NO: 97914 - DNA, 25 bp, Artificial
  Probe
cgtgtgctatgagacaaatgtccta

SEQ ID NO: 97915 - DNA, 25 bp, Artificial
  Probe
tgaagaacttccagatcatccacgg

SEQ ID NO: 97916 - DNA, 25 bp, Artificial
  Probe
ccgtgaagaacttccagatcatcca

SEQ ID NO: 97917 - DNA, 25 bp, Artificial
  Probe
cagaacaagaacacggagagcatca

SEQ ID NO: 97918 - DNA, 25 bp, Artificial
  Probe
gggcactaagttcaccgtttatgac

SEQ ID NO: 97919 - DNA, 25 bp, Artificial
  Probe
ctggaatgatgacacgcagtcctat

SEQ ID NO: 97920 - DNA, 25 bp, Artificial
  Probe
aggatgattatgtgctggaagtaag

SEQ ID NO: 97921 - DNA, 25 bp, Artificial
  Probe
gcttactctctggtcttaacttact

SEQ ID NO: 97922 - DNA, 25 bp, Artificial
  Probe
ggatgattatgtgctggaagtaagg

SEQ ID NO: 97923 - DNA, 25 bp, Artificial
  Probe
gatgattatgtgctggaagtaaggc

SEQ ID NO: 97924 - DNA, 25 bp, Artificial
  Probe
actctctggtcttaacttactctaa

SEQ ID NO: 97925 - DNA, 25 bp, Artificial
  Probe
ttactctctggtcttaacttactct

SEQ ID NO: 97926 - DNA, 25 bp, Artificial
  Probe
caggatgattatgtgctggaagtaa

SEQ ID NO: 97927 - DNA, 25 bp, Artificial
  Probe
cttactctctggtcttaacttactc

SEQ ID NO: 97928 - DNA, 25 bp, Artificial
  Probe
agcttactctctggtcttaacttac

SEQ ID NO: 97929 - DNA, 25 bp, Artificial
  Probe
acaggatgattatgtgctggaagta

SEQ ID NO: 97930 - DNA, 25 bp, Artificial
  Probe
ttagcttactctctggtcttaactt

SEQ ID NO: 97931 - DNA, 25 bp, Artificial
  Probe
tactctctggtcttaacttactcta

SEQ ID NO: 97932 - DNA, 25 bp, Artificial
  Probe
attagcttactctctggtcttaact

SEQ ID NO: 97933 - DNA, 25 bp, Artificial
  Probe
atgtttaccaagtagccaagatgat

SEQ ID NO: 97934 - DNA, 25 bp, Artificial
  Probe
ccaaatccagatagtcccattagta

SEQ ID NO: 97935 - DNA, 25 bp, Artificial
  Probe
gatgtttaccaagtagccaagatga

SEQ ID NO: 97936 - DNA, 25 bp, Artificial
  Probe
cttggaagcgacacaggatgattat

SEQ ID NO: 97937 - DNA, 25 bp, Artificial
  Probe
gccaaataaagatgagcccataaat

SEQ ID NO: 97938 - DNA, 25 bp, Artificial
  Probe
atggcagaggatgaatttgtttact

SEQ ID NO: 97939 - DNA, 25 bp, Artificial
  Probe
tagcttactctctggtcttaactta

SEQ ID NO: 97940 - DNA, 25 bp, Artificial
  Probe
aacaccttaccaaacattccttaaa

SEQ ID NO: 97941 - DNA, 25 bp, Artificial
  Probe
aataacaccttaccaaacattcctt

SEQ ID NO: 97942 - DNA, 25 bp, Artificial
  Probe
aagtcacgcttatgtctgaagaaca

SEQ ID NO: 97943 - DNA, 25 bp, Artificial
  Probe
aataaagatgagcccataaattgcg

SEQ ID NO: 97944 - DNA, 25 bp, Artificial
  Probe
aattagcttactctctggtcttaac

SEQ ID NO: 97945 - DNA, 25 bp, Artificial
  Probe
acaccttaccaaacattccttaaat

SEQ ID NO: 97946 - DNA, 25 bp, Artificial
  Probe
ttggaagcgacacaggatgattatg

SEQ ID NO: 97947 - DNA, 25 bp, Artificial
  Probe
atccaagcagtgtctctttctaaac

SEQ ID NO: 97948 - DNA, 25 bp, Artificial
  Probe
catccaagcagtgtctctttctaaa

SEQ ID NO: 97949 - DNA, 25 bp, Artificial
  Probe
tgagaataacaccttaccaaacatt

SEQ ID NO: 97950 - DNA, 25 bp, Artificial
  Probe
ataaagatgagcccataaattgcga

SEQ ID NO: 97951 - DNA, 25 bp, Artificial
  Probe
ggatgtttaccaagtagccaagatg

SEQ ID NO: 97952 - DNA, 25 bp, Artificial
  Probe
tgtttctaagaattgaattgtggca

SEQ ID NO: 97953 - DNA, 25 bp, Artificial
  Probe
tcacgcttatgtctgaagaacacaa

SEQ ID NO: 97954 - DNA, 25 bp, Artificial
  Probe
taacaccttaccaaacattccttaa

SEQ ID NO: 97955 - DNA, 25 bp, Artificial
  Probe
caagcagtgtctctttctaaactta

SEQ ID NO: 97956 - DNA, 25 bp, Artificial
  Probe
tgtttaccaagtagccaagatgatc

SEQ ID NO: 97957 - DNA, 25 bp, Artificial
  Probe
caaccttgggagatatttgttctta

SEQ ID NO: 97958 - DNA, 25 bp, Artificial
  Probe
atgagaataacaccttaccaaacat

SEQ ID NO: 97959 - DNA, 25 bp, Artificial
  Probe
tcatccaagcagtgtctctttctaa

SEQ ID NO: 97960 - DNA, 25 bp, Artificial
  Probe
gcttatgtctgaagaacacaaatgt

SEQ ID NO: 97961 - DNA, 25 bp, Artificial
  Probe
actgtactgtgttatccaagaaact

SEQ ID NO: 97962 - DNA, 25 bp, Artificial
  Probe
ataacaccttaccaaacattcctta

SEQ ID NO: 97963 - DNA, 25 bp, Artificial
  Probe
agtttctctacaaagtggtcctcag

SEQ ID NO: 97964 - DNA, 25 bp, Artificial
  Probe
taaagatgagcccataaattgcgag

SEQ ID NO: 97965 - DNA, 25 bp, Artificial
  Probe
ctatgtgggtttgatttccgagtat

SEQ ID NO: 97966 - DNA, 25 bp, Artificial
  Probe
tatgtgggtttgatttccgagtatc

SEQ ID NO: 97967 - DNA, 25 bp, Artificial
  Probe
ttgctatgactgactgtctgttctc

SEQ ID NO: 97968 - DNA, 25 bp, Artificial
  Probe
ttacaagatttacctctggattggc

SEQ ID NO: 97969 - DNA, 25 bp, Artificial
  Probe
ctgtctgttctcagtgactatgtgg

SEQ ID NO: 97970 - DNA, 25 bp, Artificial
  Probe
tcagtgactatgtgggtttgatttc

SEQ ID NO: 97971 - DNA, 25 bp, Artificial
  Probe
ctcagtgactatgtgggtttgattt

SEQ ID NO: 97972 - DNA, 25 bp, Artificial
  Probe
cagtgactatgtgggtttgatttcc

SEQ ID NO: 97973 - DNA, 25 bp, Artificial
  Probe
attacaagatttacctctggattgg

SEQ ID NO: 97974 - DNA, 25 bp, Artificial
  Probe
tctcagtgactatgtgggtttgatt

SEQ ID NO: 97975 - DNA, 25 bp, Artificial
  Probe
ttctcagtgactatgtgggtttgat

SEQ ID NO: 97976 - DNA, 25 bp, Artificial
  Probe
actatgtgggtttgatttccgagta

SEQ ID NO: 97977 - DNA, 25 bp, Artificial
  Probe
ccctcagttaggctgtttattacaa

SEQ ID NO: 97978 - DNA, 25 bp, Artificial
  Probe
cctcagttaggctgtttattacaag

SEQ ID NO: 97979 - DNA, 25 bp, Artificial
  Probe
ctcagttaggctgtttattacaaga

SEQ ID NO: 97980 - DNA, 25 bp, Artificial
  Probe
tgctatgactgactgtctgttctca

SEQ ID NO: 97981 - DNA, 25 bp, Artificial
  Probe
ctttgctatgactgactgtctgttc

SEQ ID NO: 97982 - DNA, 25 bp, Artificial
  Probe
tgttctcagtgactatgtgggtttg

SEQ ID NO: 97983 - DNA, 25 bp, Artificial
  Probe
gccctatagaattgcttaactgtca

SEQ ID NO: 97984 - DNA, 25 bp, Artificial
  Probe
ggctgtttattacaagatttacctc

SEQ ID NO: 97985 - DNA, 25 bp, Artificial
  Probe
aactgtgtagtgtagctattgacaa

SEQ ID NO: 97986 - DNA, 25 bp, Artificial
  Probe
tttgctatgactgactgtctgttct

SEQ ID NO: 97987 - DNA, 25 bp, Artificial
  Probe
actgtgtagtgtagctattgacaat

SEQ ID NO: 97988 - DNA, 25 bp, Artificial
  Probe
tgactatgtgggtttgatttccgag

SEQ ID NO: 97989 - DNA, 25 bp, Artificial
  Probe
gttctcagtgactatgtgggtttga

SEQ ID NO: 97990 - DNA, 25 bp, Artificial
  Probe
tcagttaggctgtttattacaagat

SEQ ID NO: 97991 - DNA, 25 bp, Artificial
  Probe
atgtgggtttgatttccgagtatcc

SEQ ID NO: 97992 - DNA, 25 bp, Artificial
  Probe
aggctgtttattacaagatttacct

SEQ ID NO: 97993 - DNA, 25 bp, Artificial
  Probe
gtgactatgtgggtttgatttccga

SEQ ID NO: 97994 - DNA, 25 bp, Artificial
  Probe
agtgactatgtgggtttgatttccg

SEQ ID NO: 97995 - DNA, 25 bp, Artificial
  Probe
ctgttctcagtgactatgtgggttt

SEQ ID NO: 97996 - DNA, 25 bp, Artificial
  Probe
gactatgtgggtttgatttccgagt

SEQ ID NO: 97997 - DNA, 25 bp, Artificial
  Probe
ccctatagaattgcttaactgtcaa

SEQ ID NO: 97998 - DNA, 25 bp, Artificial
  Probe
cagttaggctgtttattacaagatt

SEQ ID NO: 97999 - DNA, 25 bp, Artificial
  Probe
ctgtgtagtgtagctattgacaata

SEQ ID NO: 98000 - DNA, 25 bp, Artificial
  Probe
cctttgctatgactgactgtctgtt

SEQ ID NO: 98001 - DNA, 25 bp, Artificial
  Probe
gctgtttattacaagatttacctct

SEQ ID NO: 98002 - DNA, 25 bp, Artificial
  Probe
atattgagacagatgccttcttttg

SEQ ID NO: 98003 - DNA, 25 bp, Artificial
  Probe
gtttattacaagatttacctctgga

SEQ ID NO: 98004 - DNA, 25 bp, Artificial
  Probe
taggctgtttattacaagatttacc

SEQ ID NO: 98005 - DNA, 25 bp, Artificial
  Probe
tgtgtagtgtagctattgacaatat

SEQ ID NO: 98006 - DNA, 25 bp, Artificial
  Probe
tgtttattacaagatttacctctgg

SEQ ID NO: 98007 - DNA, 25 bp, Artificial
  Probe
tctgttctcagtgactatgtgggtt

SEQ ID NO: 98008 - DNA, 25 bp, Artificial
  Probe
cttccctttgctatgactgactgtc

SEQ ID NO: 98009 - DNA, 25 bp, Artificial
  Probe
agacataaattgtaatttgggaaca

SEQ ID NO: 98010 - DNA, 25 bp, Artificial
  Probe
ctggtgtattcctgtatctaactgc

SEQ ID NO: 98011 - DNA, 25 bp, Artificial
  Probe
gctggtgtattcctgtatctaactg

SEQ ID NO: 98012 - DNA, 25 bp, Artificial
  Probe
aattagcctagttcatccaatcctc

SEQ ID NO: 98013 - DNA, 25 bp, Artificial
  Probe
atcctgactcaagatgaatagatgg

SEQ ID NO: 98014 - DNA, 25 bp, Artificial
  Probe
attagcctagttcatccaatcctca

SEQ ID NO: 98015 - DNA, 25 bp, Artificial
  Probe
tcaatcctgactcaagatgaataga

SEQ ID NO: 98016 - DNA, 25 bp, Artificial
  Probe
ttagcctagttcatccaatcctcac

SEQ ID NO: 98017 - DNA, 25 bp, Artificial
  Probe
taattagcctagttcatccaatcct

SEQ ID NO: 98018 - DNA, 25 bp, Artificial
  Probe
aatcctgactcaagatgaatagatg

SEQ ID NO: 98019 - DNA, 25 bp, Artificial
  Probe
caatcctgactcaagatgaatagat

SEQ ID NO: 98020 - DNA, 25 bp, Artificial
  Probe
atcaatcctgactcaagatgaatag

SEQ ID NO: 98021 - DNA, 25 bp, Artificial
  Probe
aagctggtgtattcctgtatctaac

SEQ ID NO: 98022 - DNA, 25 bp, Artificial
  Probe
agctggtgtattcctgtatctaact

SEQ ID NO: 98023 - DNA, 25 bp, Artificial
  Probe
gtctcatacttcctgaactggattc

SEQ ID NO: 98024 - DNA, 25 bp, Artificial
  Probe
cttgtccaatatgagcacagtagtg

SEQ ID NO: 98025 - DNA, 25 bp, Artificial
  Probe
aatcaatcctgactcaagatgaata

SEQ ID NO: 98026 - DNA, 25 bp, Artificial
  Probe
ggtgtattcctgtatctaactgcaa

SEQ ID NO: 98027 - DNA, 25 bp, Artificial
  Probe
gtctgctgttgggaaataaatgatt

SEQ ID NO: 98028 - DNA, 25 bp, Artificial
  Probe
gtgtattcctgtatctaactgcaag

SEQ ID NO: 98029 - DNA, 25 bp, Artificial
  Probe
ccaatagtattaccctcagacacag

SEQ ID NO: 98030 - DNA, 25 bp, Artificial
  Probe
ttgtccaatatgagcacagtagtgt

SEQ ID NO: 98031 - DNA, 25 bp, Artificial
  Probe
ggtctcatacttcctgaactggatt

SEQ ID NO: 98032 - DNA, 25 bp, Artificial
  Probe
tggtgtattcctgtatctaactgca

SEQ ID NO: 98033 - DNA, 25 bp, Artificial
  Probe
ttcctgtatctaactgcaagtctag

SEQ ID NO: 98034 - DNA, 25 bp, Artificial
  Probe
attcaggaggacctcttatctgtaa

SEQ ID NO: 98035 - DNA, 25 bp, Artificial
  Probe
aggttgtgagtataaatctgagcaa

SEQ ID NO: 98036 - DNA, 25 bp, Artificial
  Probe
tagcctagttcatccaatcctcact

SEQ ID NO: 98037 - DNA, 25 bp, Artificial
  Probe
tgtattcctgtatctaactgcaagt

SEQ ID NO: 98038 - DNA, 25 bp, Artificial
  Probe
ttgtgagtataaatctgagcaaagc

SEQ ID NO: 98039 - DNA, 25 bp, Artificial
  Probe
cccaatagtattaccctcagacaca

SEQ ID NO: 98040 - DNA, 25 bp, Artificial
  Probe
gattcaggaggacctcttatctgta

SEQ ID NO: 98041 - DNA, 25 bp, Artificial
  Probe
gaggacctcttatctgtaacatcga

SEQ ID NO: 98042 - DNA, 25 bp, Artificial
  Probe
ggttgtgagtataaatctgagcaaa

SEQ ID NO: 98043 - DNA, 25 bp, Artificial
  Probe
ggtctgctgttgggaaataaatgat

SEQ ID NO: 98044 - DNA, 25 bp, Artificial
  Probe
aggaggacctcttatctgtaacatc

SEQ ID NO: 98045 - DNA, 25 bp, Artificial
  Probe
ctgtatctaactgcaagtctaggta

SEQ ID NO: 98046 - DNA, 25 bp, Artificial
  Probe
attcctgtatctaactgcaagtcta

SEQ ID NO: 98047 - DNA, 25 bp, Artificial
  Probe
tattcctgtatctaactgcaagtct

SEQ ID NO: 98048 - DNA, 25 bp, Artificial
  Probe
gtattcctgtatctaactgcaagtc

SEQ ID NO: 98049 - DNA, 25 bp, Artificial
  Probe
caggaggacctcttatctgtaacat

SEQ ID NO: 98050 - DNA, 25 bp, Artificial
  Probe
ttcaggaggacctcttatctgtaac

SEQ ID NO: 98051 - DNA, 25 bp, Artificial
  Probe
gaaatcaatcctgactcaagatgaa

SEQ ID NO: 98052 - DNA, 25 bp, Artificial
  Probe
tattctgagggtgcttgtccaatat

SEQ ID NO: 98053 - DNA, 25 bp, Artificial
  Probe
tgtatctaactgcaagtctaggtat

SEQ ID NO: 98054 - DNA, 25 bp, Artificial
  Probe
tctgctgttgggaaataaatgattt

SEQ ID NO: 98055 - DNA, 25 bp, Artificial
  Probe
aagagtatgtgaagtgtctggagag

SEQ ID NO: 98056 - DNA, 25 bp, Artificial
  Probe
acctggttgactgtgaactctaatc

SEQ ID NO: 98057 - DNA, 25 bp, Artificial
  Probe
gacctggttgactgtgaactctaat

SEQ ID NO: 98058 - DNA, 25 bp, Artificial
  Probe
cgaaagaaagagtatgtgaagtgtc

SEQ ID NO: 98059 - DNA, 25 bp, Artificial
  Probe
aagaaagagtatgtgaagtgtctgg

SEQ ID NO: 98060 - DNA, 25 bp, Artificial
  Probe
gaaagagtatgtgaagtgtctggag

SEQ ID NO: 98061 - DNA, 25 bp, Artificial
  Probe
aaagaaagagtatgtgaagtgtctg

SEQ ID NO: 98062 - DNA, 25 bp, Artificial
  Probe
aaagagtatgtgaagtgtctggaga

SEQ ID NO: 98063 - DNA, 25 bp, Artificial
  Probe
agaaagagtatgtgaagtgtctgga

SEQ ID NO: 98064 - DNA, 25 bp, Artificial
  Probe
gaaagaaagagtatgtgaagtgtct

SEQ ID NO: 98065 - DNA, 25 bp, Artificial
  Probe
ctggttgactgtgaactctaatcgg

SEQ ID NO: 98066 - DNA, 25 bp, Artificial
  Probe
cctggttgactgtgaactctaatcg

SEQ ID NO: 98067 - DNA, 25 bp, Artificial
  Probe
tatggacttgtagatgggtctctta

SEQ ID NO: 98068 - DNA, 25 bp, Artificial
  Probe
taaagcagagtaactgtgtttgact

SEQ ID NO: 98069 - DNA, 25 bp, Artificial
  Probe
ccataaagcagagtaactgtgtttg

SEQ ID NO: 98070 - DNA, 25 bp, Artificial
  Probe
atatggacttgtagatgggtctctt

SEQ ID NO: 98071 - DNA, 25 bp, Artificial
  Probe
ataaagcagagtaactgtgtttgac

SEQ ID NO: 98072 - DNA, 25 bp, Artificial
  Probe
cataaagcagagtaactgtgtttga

SEQ ID NO: 98073 - DNA, 25 bp, Artificial
  Probe
atggacttgtagatgggtctcttaa

SEQ ID NO: 98074 - DNA, 25 bp, Artificial
  Probe
aaagcagagtaactgtgtttgactt

SEQ ID NO: 98075 - DNA, 25 bp, Artificial
  Probe
agagtatgtgaagtgtctggagagc

SEQ ID NO: 98076 - DNA, 25 bp, Artificial
  Probe
gtcgaaagaaagagtatgtgaagtg

SEQ ID NO: 98077 - DNA, 25 bp, Artificial
  Probe
tcgaaagaaagagtatgtgaagtgt

SEQ ID NO: 98078 - DNA, 25 bp, Artificial
  Probe
tggacttgtagatgggtctcttaac

SEQ ID NO: 98079 - DNA, 25 bp, Artificial
  Probe
cagagtaactgtgtttgacttggac

SEQ ID NO: 98080 - DNA, 25 bp, Artificial
  Probe
aagcagagtaactgtgtttgacttg

SEQ ID NO: 98081 - DNA, 25 bp, Artificial
  Probe
cgtcgaaagaaagagtatgtgaagt

SEQ ID NO: 98082 - DNA, 25 bp, Artificial
  Probe
gccataaagcagagtaactgtgttt

SEQ ID NO: 98083 - DNA, 25 bp, Artificial
  Probe
ccttgcttaagaatacagtctgctg

SEQ ID NO: 98084 - DNA, 25 bp, Artificial
  Probe
acgtcgaaagaaagagtatgtgaag

SEQ ID NO: 98085 - DNA, 25 bp, Artificial
  Probe
ttgtttgcccttctgcttctacttt

SEQ ID NO: 98086 - DNA, 25 bp, Artificial
  Probe
tttgtttgcccttctgcttctactt

SEQ ID NO: 98087 - DNA, 25 bp, Artificial
  Probe
ggacctggttgactgtgaactctaa

SEQ ID NO: 98088 - DNA, 25 bp, Artificial
  Probe
gagtaactgtgtttgacttggacct

SEQ ID NO: 98089 - DNA, 25 bp, Artificial
  Probe
agagtaactgtgtttgacttggacc

SEQ ID NO: 98090 - DNA, 25 bp, Artificial
  Probe
agtaactgtgtttgacttggacctg

SEQ ID NO: 98091 - DNA, 25 bp, Artificial
  Probe
gagtatgtgaagtgtctggagagcc

SEQ ID NO: 98092 - DNA, 25 bp, Artificial
  Probe
ggacttgtagatgggtctcttaacc

SEQ ID NO: 98093 - DNA, 25 bp, Artificial
  Probe
taacccttgcttaagaatacagtct

SEQ ID NO: 98094 - DNA, 25 bp, Artificial
  Probe
aacccttgcttaagaatacagtctg

SEQ ID NO: 98095 - DNA, 25 bp, Artificial
  Probe
tattgccataaagcagagtaactgt

SEQ ID NO: 98096 - DNA, 25 bp, Artificial
  Probe
ttaacccttgcttaagaatacagtc

SEQ ID NO: 98097 - DNA, 25 bp, Artificial
  Probe
ttattgccataaagcagagtaactg

SEQ ID NO: 98098 - DNA, 25 bp, Artificial
  Probe
gcagagtaactgtgtttgacttgga

SEQ ID NO: 98099 - DNA, 25 bp, Artificial
  Probe
agcagagtaactgtgtttgacttgg

SEQ ID NO: 98100 - DNA, 25 bp, Artificial
  Probe
aatacctgctcttcgtcttcaattt

SEQ ID NO: 98101 - DNA, 25 bp, Artificial
  Probe
aaatacctgctcttcgtcttcaatt

SEQ ID NO: 98102 - DNA, 25 bp, Artificial
  Probe
ctcttcgtcttcaatttcgtcttct

SEQ ID NO: 98103 - DNA, 25 bp, Artificial
  Probe
atacctgctcttcgtcttcaatttc

SEQ ID NO: 98104 - DNA, 25 bp, Artificial
  Probe
caaatacctgctcttcgtcttcaat

SEQ ID NO: 98105 - DNA, 25 bp, Artificial
  Probe
catcaaatacctgctcttcgtcttc

SEQ ID NO: 98106 - DNA, 25 bp, Artificial
  Probe
atcaaatacctgctcttcgtcttca

SEQ ID NO: 98107 - DNA, 25 bp, Artificial
  Probe
tcaaatacctgctcttcgtcttcaa

SEQ ID NO: 98108 - DNA, 25 bp, Artificial
  Probe
caaggatgtgaagcagttctacgac

SEQ ID NO: 98109 - DNA, 25 bp, Artificial
  Probe
gctcttcgtcttcaatttcgtcttc

SEQ ID NO: 98110 - DNA, 25 bp, Artificial
  Probe
ctcaagcagcaactcattcactcag

SEQ ID NO: 98111 - DNA, 25 bp, Artificial
  Probe
atctacattctcattgctgtgggag

SEQ ID NO: 98112 - DNA, 25 bp, Artificial
  Probe
tgctcttcgtcttcaatttcgtctt

SEQ ID NO: 98113 - DNA, 25 bp, Artificial
  Probe
catctacattctcattgctgtggga

SEQ ID NO: 98114 - DNA, 25 bp, Artificial
  Probe
tacctgctcttcgtcttcaatttcg

SEQ ID NO: 98115 - DNA, 25 bp, Artificial
  Probe
ctgctcttcgtcttcaatttcgtct

SEQ ID NO: 98116 - DNA, 25 bp, Artificial
  Probe
ctatgtgggcatctacattctcatt

SEQ ID NO: 98117 - DNA, 25 bp, Artificial
  Probe
ctgtgatgatgtttgtaggcttcct

SEQ ID NO: 98118 - DNA, 25 bp, Artificial
  Probe
tatgtgggcatctacattctcattg

SEQ ID NO: 98119 - DNA, 25 bp, Artificial
  Probe
cttctatgtgggcatctacattctc

SEQ ID NO: 98120 - DNA, 25 bp, Artificial
  Probe
aaggatgtgaagcagttctacgacc

SEQ ID NO: 98121 - DNA, 25 bp, Artificial
  Probe
ccaaggatgtgaagcagttctacga

SEQ ID NO: 98122 - DNA, 25 bp, Artificial
  Probe
tctatgtgggcatctacattctcat

SEQ ID NO: 98123 - DNA, 25 bp, Artificial
  Probe
tgtgatgatgtttgtaggcttcctg

SEQ ID NO: 98124 - DNA, 25 bp, Artificial
  Probe
ttgtaaacaaagaccagatcgccaa

SEQ ID NO: 98125 - DNA, 25 bp, Artificial
  Probe
ttctatgtgggcatctacattctca

SEQ ID NO: 98126 - DNA, 25 bp, Artificial
  Probe
tgtaaacaaagaccagatcgccaag

SEQ ID NO: 98127 - DNA, 25 bp, Artificial
  Probe
caactcattcactcagcttctgaag

SEQ ID NO: 98128 - DNA, 25 bp, Artificial
  Probe
ccttctatgtgggcatctacattct

SEQ ID NO: 98129 - DNA, 25 bp, Artificial
  Probe
gctgtgatgatgtttgtaggcttcc

SEQ ID NO: 98130 - DNA, 25 bp, Artificial
  Probe
accttctatgtgggcatctacattc

SEQ ID NO: 98131 - DNA, 25 bp, Artificial
  Probe
ctagcaccttctatgtgggcatcta

SEQ ID NO: 98132 - DNA, 25 bp, Artificial
  Probe
cctgctcttcgtcttcaatttcgtc

SEQ ID NO: 98133 - DNA, 25 bp, Artificial
  Probe
caccttctatgtgggcatctacatt

SEQ ID NO: 98134 - DNA, 25 bp, Artificial
  Probe
gtgatgatgtttgtaggcttcctgg

SEQ ID NO: 98135 - DNA, 25 bp, Artificial
  Probe
tagcaccttctatgtgggcatctac

SEQ ID NO: 98136 - DNA, 25 bp, Artificial
  Probe
gtaaacaaagaccagatcgccaagg

SEQ ID NO: 98137 - DNA, 25 bp, Artificial
  Probe
gtgggagctgtgatgatgtttgtag

SEQ ID NO: 98138 - DNA, 25 bp, Artificial
  Probe
attcactcagcttctgaaggaagac

SEQ ID NO: 98139 - DNA, 25 bp, Artificial
  Probe
cattcactcagcttctgaaggaaga

SEQ ID NO: 98140 - DNA, 25 bp, Artificial
  Probe
tcattcactcagcttctgaaggaag

SEQ ID NO: 98141 - DNA, 25 bp, Artificial
  Probe
ctcattcactcagcttctgaaggaa

SEQ ID NO: 98142 - DNA, 25 bp, Artificial
  Probe
taaacaaagaccagatcgccaagga

SEQ ID NO: 98143 - DNA, 25 bp, Artificial
  Probe
ggcatctacattctcattgctgtgg

SEQ ID NO: 98144 - DNA, 25 bp, Artificial
  Probe
aactcattcactcagcttctgaagg

SEQ ID NO: 98145 - DNA, 25 bp, Artificial
  Probe
tgcttaattggatttctcacttctt

SEQ ID NO: 98146 - DNA, 25 bp, Artificial
  Probe
ttgcttaattggatttctcacttct

SEQ ID NO: 98147 - DNA, 25 bp, Artificial
  Probe
gcttaattggatttctcacttcttt

SEQ ID NO: 98148 - DNA, 25 bp, Artificial
  Probe
attgcttaattggatttctcacttc

SEQ ID NO: 98149 - DNA, 25 bp, Artificial
  Probe
agacccacatcatttctaaggcatc

SEQ ID NO: 98150 - DNA, 25 bp, Artificial
  Probe
gagacccacatcatttctaaggcat

SEQ ID NO: 98151 - DNA, 25 bp, Artificial
  Probe
aattgcttaattggatttctcactt

SEQ ID NO: 98152 - DNA, 25 bp, Artificial
  Probe
ttggatttctcacttctttaacaaa

SEQ ID NO: 98153 - DNA, 25 bp, Artificial
  Probe
aattggatttctcacttctttaaca

SEQ ID NO: 98154 - DNA, 25 bp, Artificial
  Probe
attggatttctcacttctttaacaa

SEQ ID NO: 98155 - DNA, 25 bp, Artificial
  Probe
gacccacatcatttctaaggcatcc

SEQ ID NO: 98156 - DNA, 25 bp, Artificial
  Probe
tctcacttctttaacaaaacttggc

SEQ ID NO: 98157 - DNA, 25 bp, Artificial
  Probe
tgactgttttctctttcttttctct

SEQ ID NO: 98158 - DNA, 25 bp, Artificial
  Probe
gttgactgttttctctttcttttct

SEQ ID NO: 98159 - DNA, 25 bp, Artificial
  Probe
agttgactgttttctctttcttttc

SEQ ID NO: 98160 - DNA, 25 bp, Artificial
  Probe
ctgttttctctttcttttctcttgt

SEQ ID NO: 98161 - DNA, 25 bp, Artificial
  Probe
actgttttctctttcttttctcttg

SEQ ID NO: 98162 - DNA, 25 bp, Artificial
  Probe
ttgactgttttctctttcttttctc

SEQ ID NO: 98163 - DNA, 25 bp, Artificial
  Probe
gactgttttctctttcttttctctt

SEQ ID NO: 98164 - DNA, 25 bp, Artificial
  Probe
ttctcacttctttaacaaaacttgg

SEQ ID NO: 98165 - DNA, 25 bp, Artificial
  Probe
tgttttctctttcttttctcttgtt

SEQ ID NO: 98166 - DNA, 25 bp, Artificial
  Probe
aaagtagtgcgtcagttgactgttt

SEQ ID NO: 98167 - DNA, 25 bp, Artificial
  Probe
cccaaggaaacagaaaccacacttc

SEQ ID NO: 98168 - DNA, 25 bp, Artificial
  Probe
tggatttctcacttctttaacaaaa

SEQ ID NO: 98169 - DNA, 25 bp, Artificial
  Probe
acccacatcatttctaaggcatcct

SEQ ID NO: 98170 - DNA, 25 bp, Artificial
  Probe
gtcagttgactgttttctctttctt

SEQ ID NO: 98171 - DNA, 25 bp, Artificial
  Probe
tcagttgactgttttctctttcttt

SEQ ID NO: 98172 - DNA, 25 bp, Artificial
  Probe
aaaatgtagatcccttctctgtcga

SEQ ID NO: 98173 - DNA, 25 bp, Artificial
  Probe
ggatttctcacttctttaacaaaac

SEQ ID NO: 98174 - DNA, 25 bp, Artificial
  Probe
taattggatttctcacttctttaac

SEQ ID NO: 98175 - DNA, 25 bp, Artificial
  Probe
cgtcagttgactgttttctctttct

SEQ ID NO: 98176 - DNA, 25 bp, Artificial
  Probe
cagttgactgttttctctttctttt

SEQ ID NO: 98177 - DNA, 25 bp, Artificial
  Probe
cgagacccacatcatttctaaggca

SEQ ID NO: 98178 - DNA, 25 bp, Artificial
  Probe
gttttctctttcttttctcttgttt

SEQ ID NO: 98179 - DNA, 25 bp, Artificial
  Probe
gatctggatgacaaaaccgagacat

SEQ ID NO: 98180 - DNA, 25 bp, Artificial
  Probe
cttaattggatttctcacttcttta

SEQ ID NO: 98181 - DNA, 25 bp, Artificial
  Probe
tttctcacttctttaacaaaacttg

SEQ ID NO: 98182 - DNA, 25 bp, Artificial
  Probe
cacatcatttctaaggcatccttgg

SEQ ID NO: 98183 - DNA, 25 bp, Artificial
  Probe
ccacatcatttctaaggcatccttg

SEQ ID NO: 98184 - DNA, 25 bp, Artificial
  Probe
gatttctcacttctttaacaaaact

SEQ ID NO: 98185 - DNA, 25 bp, Artificial
  Probe
ctttaacaaaacttggcctgactag

SEQ ID NO: 98186 - DNA, 25 bp, Artificial
  Probe
tctttaacaaaacttggcctgacta

SEQ ID NO: 98187 - DNA, 25 bp, Artificial
  Probe
tcgagacccacatcatttctaaggc

SEQ ID NO: 98188 - DNA, 25 bp, Artificial
  Probe
cttctttaacaaaacttggcctgac

SEQ ID NO: 98189 - DNA, 25 bp, Artificial
  Probe
ctcacttctttaacaaaacttggcc

SEQ ID NO: 98190 - DNA, 25 bp, Artificial
  Probe
ttagagacactgggagtaaagggat

SEQ ID NO: 98191 - DNA, 25 bp, Artificial
  Probe
gatcttcaacaaccaggaatttgct

SEQ ID NO: 98192 - DNA, 25 bp, Artificial
  Probe
atcttcaacaaccaggaatttgctg

SEQ ID NO: 98193 - DNA, 25 bp, Artificial
  Probe
cttagagacactgggagtaaaggga

SEQ ID NO: 98194 - DNA, 25 bp, Artificial
  Probe
tcttagagacactgggagtaaaggg

SEQ ID NO: 98195 - DNA, 25 bp, Artificial
  Probe
tagagacactgggagtaaagggatc

SEQ ID NO: 98196 - DNA, 25 bp, Artificial
  Probe
catctcctactacgagctgaaccag

SEQ ID NO: 98197 - DNA, 25 bp, Artificial
  Probe
agatcttcaacaaccaggaatttgc

SEQ ID NO: 98198 - DNA, 25 bp, Artificial
  Probe
atgacagtagatggcttcactgatc

SEQ ID NO: 98199 - DNA, 25 bp, Artificial
  Probe
agtacaggagacagacagtgaccag

SEQ ID NO: 98200 - DNA, 25 bp, Artificial
  Probe
gagtacaggagacagacagtgacca

SEQ ID NO: 98201 - DNA, 25 bp, Artificial
  Probe
ctactacattggaggggaggtcttt

SEQ ID NO: 98202 - DNA, 25 bp, Artificial
  Probe
catgacagtagatggcttcactgat

SEQ ID NO: 98203 - DNA, 25 bp, Artificial
  Probe
tttgaggctgtctaccagttgactc

SEQ ID NO: 98204 - DNA, 25 bp, Artificial
  Probe
ctttgaggctgtctaccagttgact

SEQ ID NO: 98205 - DNA, 25 bp, Artificial
  Probe
tactacattggaggggaggtctttg

SEQ ID NO: 98206 - DNA, 25 bp, Artificial
  Probe
gtcttagagacactgggagtaaagg

SEQ ID NO: 98207 - DNA, 25 bp, Artificial
  Probe
tcttcaacaaccaggaatttgctgc

SEQ ID NO: 98208 - DNA, 25 bp, Artificial
  Probe
tctactacattggaggggaggtctt

SEQ ID NO: 98209 - DNA, 25 bp, Artificial
  Probe
gagtgcctcagtgacagtgctattt

SEQ ID NO: 98210 - DNA, 25 bp, Artificial
  Probe
cttcactgatccctccaattcagag

SEQ ID NO: 98211 - DNA, 25 bp, Artificial
  Probe
gacagtgctattttcgtccagtctc

SEQ ID NO: 98212 - DNA, 25 bp, Artificial
  Probe
gtgcctcagtgacagtgctattttc

SEQ ID NO: 98213 - DNA, 25 bp, Artificial
  Probe
ctgtccaatgttaaccggaatgcag

SEQ ID NO: 98214 - DNA, 25 bp, Artificial
  Probe
ctgctgtccaatgttaaccggaatg

SEQ ID NO: 98215 - DNA, 25 bp, Artificial
  Probe
ctcagtgacagtgctattttcgtcc

SEQ ID NO: 98216 - DNA, 25 bp, Artificial
  Probe
cctcagtgacagtgctattttcgtc

SEQ ID NO: 98217 - DNA, 25 bp, Artificial
  Probe
atggcttcactgatccctccaattc

SEQ ID NO: 98218 - DNA, 25 bp, Artificial
  Probe
gatggcttcactgatccctccaatt

SEQ ID NO: 98219 - DNA, 25 bp, Artificial
  Probe
gtccatgacagtagatggcttcact

SEQ ID NO: 98220 - DNA, 25 bp, Artificial
  Probe
tgacagtagatggcttcactgatcc

SEQ ID NO: 98221 - DNA, 25 bp, Artificial
  Probe
agagacactgggagtaaagggatcg

SEQ ID NO: 98222 - DNA, 25 bp, Artificial
  Probe
agtagatggcttcactgatccctcc

SEQ ID NO: 98223 - DNA, 25 bp, Artificial
  Probe
gtgacagtgctattttcgtccagtc

SEQ ID NO: 98224 - DNA, 25 bp, Artificial
  Probe
cagtgacagtgctattttcgtccag

SEQ ID NO: 98225 - DNA, 25 bp, Artificial
  Probe
ctctactacattggaggggaggtct

SEQ ID NO: 98226 - DNA, 25 bp, Artificial
  Probe
ccatgacagtagatggcttcactga

SEQ ID NO: 98227 - DNA, 25 bp, Artificial
  Probe
tccatgacagtagatggcttcactg

SEQ ID NO: 98228 - DNA, 25 bp, Artificial
  Probe
tagatggcttcactgatccctccaa

SEQ ID NO: 98229 - DNA, 25 bp, Artificial
  Probe
tgacagtgctattttcgtccagtct

SEQ ID NO: 98230 - DNA, 25 bp, Artificial
  Probe
agtgcctcagtgacagtgctatttt

SEQ ID NO: 98231 - DNA, 25 bp, Artificial
  Probe
acagtgctattttcgtccagtctcc

SEQ ID NO: 98232 - DNA, 25 bp, Artificial
  Probe
agtgacagtgctattttcgtccagt

SEQ ID NO: 98233 - DNA, 25 bp, Artificial
  Probe
tcagtgacagtgctattttcgtcca

SEQ ID NO: 98234 - DNA, 25 bp, Artificial
  Probe
tgctattttcgtccagtctcccaac

SEQ ID NO: 98235 - DNA, 25 bp, Artificial
  Probe
aagtagagcaaagttctggattcac

SEQ ID NO: 98236 - DNA, 25 bp, Artificial
  Probe
caagtagagcaaagttctggattca

SEQ ID NO: 98237 - DNA, 25 bp, Artificial
  Probe
atgctgcaaccttagttctaagatt

SEQ ID NO: 98238 - DNA, 25 bp, Artificial
  Probe
aatgctgcaaccttagttctaagat

SEQ ID NO: 98239 - DNA, 25 bp, Artificial
  Probe
cacaatgctgcaaccttagttctaa

SEQ ID NO: 98240 - DNA, 25 bp, Artificial
  Probe
tgctgcaaccttagttctaagattg

SEQ ID NO: 98241 - DNA, 25 bp, Artificial
  Probe
caatgctgcaaccttagttctaaga

SEQ ID NO: 98242 - DNA, 25 bp, Artificial
  Probe
acaatgctgcaaccttagttctaag

SEQ ID NO: 98243 - DNA, 25 bp, Artificial
  Probe
gcaagtagagcaaagttctggattc

SEQ ID NO: 98244 - DNA, 25 bp, Artificial
  Probe
gctgcaaccttagttctaagattgg

SEQ ID NO: 98245 - DNA, 25 bp, Artificial
  Probe
gttcaagggcatagagtctcaaact

SEQ ID NO: 98246 - DNA, 25 bp, Artificial
  Probe
agtagagcaaagttctggattcacg

SEQ ID NO: 98247 - DNA, 25 bp, Artificial
  Probe
ggttcaagggcatagagtctcaaac

SEQ ID NO: 98248 - DNA, 25 bp, Artificial
  Probe
ctgcaaccttagttctaagattggg

SEQ ID NO: 98249 - DNA, 25 bp, Artificial
  Probe
aactgttctgttcattttggtctct

SEQ ID NO: 98250 - DNA, 25 bp, Artificial
  Probe
actgttctgttcattttggtctctg

SEQ ID NO: 98251 - DNA, 25 bp, Artificial
  Probe
caactgttctgttcattttggtctc

SEQ ID NO: 98252 - DNA, 25 bp, Artificial
  Probe
cgcaagtagagcaaagttctggatt

SEQ ID NO: 98253 - DNA, 25 bp, Artificial
  Probe
ctgttctgttcattttggtctctga

SEQ ID NO: 98254 - DNA, 25 bp, Artificial
  Probe
tagagcaaagttctggattcacgtc

SEQ ID NO: 98255 - DNA, 25 bp, Artificial
  Probe
gtagactcttgcaactgttctgttc

SEQ ID NO: 98256 - DNA, 25 bp, Artificial
  Probe
gtagagcaaagttctggattcacgt

SEQ ID NO: 98257 - DNA, 25 bp, Artificial
  Probe
gactcttgcaactgttctgttcatt

SEQ ID NO: 98258 - DNA, 25 bp, Artificial
  Probe
gggttcaagggcatagagtctcaaa

SEQ ID NO: 98259 - DNA, 25 bp, Artificial
  Probe
gcaactgttctgttcattttggtct

SEQ ID NO: 98260 - DNA, 25 bp, Artificial
  Probe
gatctccgcaagtagagcaaagttc

SEQ ID NO: 98261 - DNA, 25 bp, Artificial
  Probe
tagactcttgcaactgttctgttca

SEQ ID NO: 98262 - DNA, 25 bp, Artificial
  Probe
atctccgcaagtagagcaaagttct

SEQ ID NO: 98263 - DNA, 25 bp, Artificial
  Probe
caaccttagttctaagattggggat

SEQ ID NO: 98264 - DNA, 25 bp, Artificial
  Probe
aaccttagttctaagattggggatc

SEQ ID NO: 98265 - DNA, 25 bp, Artificial
  Probe
agtagactcttgcaactgttctgtt

SEQ ID NO: 98266 - DNA, 25 bp, Artificial
  Probe
agactcttgcaactgttctgttcat

SEQ ID NO: 98267 - DNA, 25 bp, Artificial
  Probe
ttagttctaagattggggatctccg

SEQ ID NO: 98268 - DNA, 25 bp, Artificial
  Probe
cttagttctaagattggggatctcc

SEQ ID NO: 98269 - DNA, 25 bp, Artificial
  Probe
ccttagttctaagattggggatctc

SEQ ID NO: 98270 - DNA, 25 bp, Artificial
  Probe
accttagttctaagattggggatct

SEQ ID NO: 98271 - DNA, 25 bp, Artificial
  Probe
ttcaagggcatagagtctcaaactc

SEQ ID NO: 98272 - DNA, 25 bp, Artificial
  Probe
gcacaatgctgcaaccttagttcta

SEQ ID NO: 98273 - DNA, 25 bp, Artificial
  Probe
gcaaccttagttctaagattgggga

SEQ ID NO: 98274 - DNA, 25 bp, Artificial
  Probe
actcttgcaactgttctgttcattt

SEQ ID NO: 98275 - DNA, 25 bp, Artificial
  Probe
agggttcaagggcatagagtctcaa

SEQ ID NO: 98276 - DNA, 25 bp, Artificial
  Probe
tctccgcaagtagagcaaagttctg

SEQ ID NO: 98277 - DNA, 25 bp, Artificial
  Probe
tagagtctcaaactcagtgtgccta

SEQ ID NO: 98278 - DNA, 25 bp, Artificial
  Probe
ccgcaagtagagcaaagttctggat

SEQ ID NO: 98279 - DNA, 25 bp, Artificial
  Probe
caagggcatagagtctcaaactcag

SEQ ID NO: 98280 - DNA, 25 bp, Artificial
  Probe
ctcaggagacaattctgccatcatc

SEQ ID NO: 98281 - DNA, 25 bp, Artificial
  Probe
tcaggagacaattctgccatcatct

SEQ ID NO: 98282 - DNA, 25 bp, Artificial
  Probe
cctcaggagacaattctgccatcat

SEQ ID NO: 98283 - DNA, 25 bp, Artificial
  Probe
aggagacaattctgccatcatctct

SEQ ID NO: 98284 - DNA, 25 bp, Artificial
  Probe
caggagacaattctgccatcatctc

SEQ ID NO: 98285 - DNA, 25 bp, Artificial
  Probe
gacctcaggagacaattctgccatc

SEQ ID NO: 98286 - DNA, 25 bp, Artificial
  Probe
aaaagaaaacagaaaagtggggttt

SEQ ID NO: 98287 - DNA, 25 bp, Artificial
  Probe
ctctgggacctcaggagacaattct

SEQ ID NO: 98288 - DNA, 25 bp, Artificial
  Probe
aaagaaaacagaaaagtggggtttt

SEQ ID NO: 98289 - DNA, 25 bp, Artificial
  Probe
cgtctaagagtataacaactgtgca

SEQ ID NO: 98290 - DNA, 25 bp, Artificial
  Probe
acgtctaagagtataacaactgtgc

SEQ ID NO: 98291 - DNA, 25 bp, Artificial
  Probe
ctttcgcagttgggtataagaagag

SEQ ID NO: 98292 - DNA, 25 bp, Artificial
  Probe
tctaagagtataacaactgtgcatg

SEQ ID NO: 98293 - DNA, 25 bp, Artificial
  Probe
gtctaagagtataacaactgtgcat

SEQ ID NO: 98294 - DNA, 25 bp, Artificial
  Probe
tgagcatttcagatcagtagtttga

SEQ ID NO: 98295 - DNA, 25 bp, Artificial
  Probe
ttgagcatttcagatcagtagtttg

SEQ ID NO: 98296 - DNA, 25 bp, Artificial
  Probe
tgcttgctgtcattgtcactgtatc

SEQ ID NO: 98297 - DNA, 25 bp, Artificial
  Probe
ctgcttgctgtcattgtcactgtat

SEQ ID NO: 98298 - DNA, 25 bp, Artificial
  Probe
tttgagcatttcagatcagtagttt

SEQ ID NO: 98299 - DNA, 25 bp, Artificial
  Probe
atgcctttcctttgtaaatgtgctg

SEQ ID NO: 98300 - DNA, 25 bp, Artificial
  Probe
tttcgcagttgggtataagaagagg

SEQ ID NO: 98301 - DNA, 25 bp, Artificial
  Probe
cctttcgcagttgggtataagaaga

SEQ ID NO: 98302 - DNA, 25 bp, Artificial
  Probe
acctatagtgagtcgtattacaatt

SEQ ID NO: 98303 - DNA, 25 bp, Artificial
  Probe
cttgctgtcattgtcactgtatcga

SEQ ID NO: 98304 - DNA, 25 bp, Artificial
  Probe
cgttaccaacttaatcgcctgtgag

SEQ ID NO: 98305 - DNA, 25 bp, Artificial
  Probe
gacctatagtgagtcgtattacaat

SEQ ID NO: 98306 - DNA, 25 bp, Artificial
  Probe
gtacccaattcgacctatagtgagt

SEQ ID NO: 98307 - DNA, 25 bp, Artificial
  Probe
attgtcactgtatcgatggtaactg

SEQ ID NO: 98308 - DNA, 25 bp, Artificial
  Probe
cattgtcactgtatcgatggtaact

SEQ ID NO: 98309 - DNA, 25 bp, Artificial
  Probe
tcattgtcactgtatcgatggtaac

SEQ ID NO: 98310 - DNA, 25 bp, Artificial
  Probe
gtcattgtcactgtatcgatggtaa

SEQ ID NO: 98311 - DNA, 25 bp, Artificial
  Probe
gttaccaacttaatcgcctgtgagc

SEQ ID NO: 98312 - DNA, 25 bp, Artificial
  Probe
tgagtcgtattacaattcactgggc

SEQ ID NO: 98313 - DNA, 25 bp, Artificial
  Probe
catgcctttcctttgtaaatgtgct

SEQ ID NO: 98314 - DNA, 25 bp, Artificial
  Probe
cactgtatcgatggtaactgcatag

SEQ ID NO: 98315 - DNA, 25 bp, Artificial
  Probe
tcactgtatcgatggtaactgcata

SEQ ID NO: 98316 - DNA, 25 bp, Artificial
  Probe
gcttgctgtcattgtcactgtatcg

SEQ ID NO: 98317 - DNA, 25 bp, Artificial
  Probe
tacccaattcgacctatagtgagtc

SEQ ID NO: 98318 - DNA, 25 bp, Artificial
  Probe
tgtcattgtcactgtatcgatggta

SEQ ID NO: 98319 - DNA, 25 bp, Artificial
  Probe
caacttaatcgcctgtgagcaatcc

SEQ ID NO: 98320 - DNA, 25 bp, Artificial
  Probe
ccaacttaatcgcctgtgagcaatc

SEQ ID NO: 98321 - DNA, 25 bp, Artificial
  Probe
taccaacttaatcgcctgtgagcaa

SEQ ID NO: 98322 - DNA, 25 bp, Artificial
  Probe
ttaccaacttaatcgcctgtgagca

SEQ ID NO: 98323 - DNA, 25 bp, Artificial
  Probe
gagcatttcagatcagtagtttgat

SEQ ID NO: 98324 - DNA, 25 bp, Artificial
  Probe
tttctaagacttgcattctgggact

SEQ ID NO: 98325 - DNA, 25 bp, Artificial
  Probe
ttctaagacttgcattctgggactc

SEQ ID NO: 98326 - DNA, 25 bp, Artificial
  Probe
ttgctgtcattgtcactgtatcgat

SEQ ID NO: 98327 - DNA, 25 bp, Artificial
  Probe
gcattttgagcatttcagatcagta

SEQ ID NO: 98328 - DNA, 25 bp, Artificial
  Probe
actgtatcgatggtaactgcatagc

SEQ ID NO: 98329 - DNA, 25 bp, Artificial
  Probe
gtcgtattacaattcactgggcgtc

SEQ ID NO: 98330 - DNA, 25 bp, Artificial
  Probe
gagtcgtattacaattcactgggcg

SEQ ID NO: 98331 - DNA, 25 bp, Artificial
  Probe
tttgggtttaataaaatggtgttga

SEQ ID NO: 98332 - DNA, 25 bp, Artificial
  Probe
actttgggtttaataaaatggtgtt

SEQ ID NO: 98333 - DNA, 25 bp, Artificial
  Probe
ctaagacttgcattctgggactctg

SEQ ID NO: 98334 - DNA, 25 bp, Artificial
  Probe
catcttggaccatctctcacaatag

SEQ ID NO: 98335 - DNA, 25 bp, Artificial
  Probe
tcatcttggaccatctctcacaata

SEQ ID NO: 98336 - DNA, 25 bp, Artificial
  Probe
atctacctcactcttaggacttcaa

SEQ ID NO: 98337 - DNA, 25 bp, Artificial
  Probe
aatctacctcactcttaggacttca

SEQ ID NO: 98338 - DNA, 25 bp, Artificial
  Probe
atcatcttggaccatctctcacaat

SEQ ID NO: 98339 - DNA, 25 bp, Artificial
  Probe
gctctaatctacctcactcttagga

SEQ ID NO: 98340 - DNA, 25 bp, Artificial
  Probe
atcttggaccatctctcacaatagg

SEQ ID NO: 98341 - DNA, 25 bp, Artificial
  Probe
tctacctcactcttaggacttcaag

SEQ ID NO: 98342 - DNA, 25 bp, Artificial
  Probe
tctaatctacctcactcttaggact

SEQ ID NO: 98343 - DNA, 25 bp, Artificial
  Probe
acagctctaatctacctcactctta

SEQ ID NO: 98344 - DNA, 25 bp, Artificial
  Probe
ctctaatctacctcactcttaggac

SEQ ID NO: 98345 - DNA, 25 bp, Artificial
  Probe
aacagctctaatctacctcactctt

SEQ ID NO: 98346 - DNA, 25 bp, Artificial
  Probe
aacatcatcttggaccatctctcac

SEQ ID NO: 98347 - DNA, 25 bp, Artificial
  Probe
ctacctcactcttaggacttcaagg

SEQ ID NO: 98348 - DNA, 25 bp, Artificial
  Probe
taatctacctcactcttaggacttc

SEQ ID NO: 98349 - DNA, 25 bp, Artificial
  Probe
ctaatctacctcactcttaggactt

SEQ ID NO: 98350 - DNA, 25 bp, Artificial
  Probe
tctctgtgtctctggttagttggaa

SEQ ID NO: 98351 - DNA, 25 bp, Artificial
  Probe
cttattatgtttgtgctggatgctt

SEQ ID NO: 98352 - DNA, 25 bp, Artificial
  Probe
catcatcttggaccatctctcacaa

SEQ ID NO: 98353 - DNA, 25 bp, Artificial
  Probe
tattatgtttgtgctggatgcttag

SEQ ID NO: 98354 - DNA, 25 bp, Artificial
  Probe
ctgcttattatgtttgtgctggatg

SEQ ID NO: 98355 - DNA, 25 bp, Artificial
  Probe
ttattatgtttgtgctggatgctta

SEQ ID NO: 98356 - DNA, 25 bp, Artificial
  Probe
tttaccatcttctctctctttctga

SEQ ID NO: 98357 - DNA, 25 bp, Artificial
  Probe
taaacatcatcttggaccatctctc

SEQ ID NO: 98358 - DNA, 25 bp, Artificial
  Probe
ctaaacatcatcttggaccatctct

SEQ ID NO: 98359 - DNA, 25 bp, Artificial
  Probe
tctaaacatcatcttggaccatctc

SEQ ID NO: 98360 - DNA, 25 bp, Artificial
  Probe
ctctaaacatcatcttggaccatct

SEQ ID NO: 98361 - DNA, 25 bp, Artificial
  Probe
tctctaaacatcatcttggaccatc

SEQ ID NO: 98362 - DNA, 25 bp, Artificial
  Probe
ctctctaaacatcatcttggaccat

SEQ ID NO: 98363 - DNA, 25 bp, Artificial
  Probe
cagctctaatctacctcactcttag

SEQ ID NO: 98364 - DNA, 25 bp, Artificial
  Probe
agctctaatctacctcactcttagg

SEQ ID NO: 98365 - DNA, 25 bp, Artificial
  Probe
attatgtttgtgctggatgcttagg

SEQ ID NO: 98366 - DNA, 25 bp, Artificial
  Probe
cctgcttattatgtttgtgctggat

SEQ ID NO: 98367 - DNA, 25 bp, Artificial
  Probe
cagtctctgtgtctctggttagttg

SEQ ID NO: 98368 - DNA, 25 bp, Artificial
  Probe
ctcactcttaggacttcaaggtttg

SEQ ID NO: 98369 - DNA, 25 bp, Artificial
  Probe
gatccaccttgaacttcgctactac

SEQ ID NO: 98370 - DNA, 25 bp, Artificial
  Probe
ttaccatcttctctctctttctgag

SEQ ID NO: 98371 - DNA, 25 bp, Artificial
  Probe
acatcatcttggaccatctctcaca

SEQ ID NO: 98372 - DNA, 25 bp, Artificial
  Probe
gtctctgtgtctctggttagttgga

SEQ ID NO: 98373 - DNA, 25 bp, Artificial
  Probe
agtctctgtgtctctggttagttgg

SEQ ID NO: 98374 - DNA, 25 bp, Artificial
  Probe
taggacttcaaggtttgggagaaat

SEQ ID NO: 98375 - DNA, 25 bp, Artificial
  Probe
aaacatcatcttggaccatctctca

SEQ ID NO: 98376 - DNA, 25 bp, Artificial
  Probe
tctgtgtctctggttagttggaaag

SEQ ID NO: 98377 - DNA, 25 bp, Artificial
  Probe
ctctgtgtctctggttagttggaaa

SEQ ID NO: 98378 - DNA, 25 bp, Artificial
  Probe
gcttattatgtttgtgctggatgct

SEQ ID NO: 98379 - DNA, 25 bp, Artificial
  Probe
gactgtctggactataaggaccaag

SEQ ID NO: 98380 - DNA, 25 bp, Artificial
  Probe
gagggaaaggaagtggagaagaaac

SEQ ID NO: 98381 - DNA, 25 bp, Artificial
  Probe
ctggactataaggaccaagcctcat

SEQ ID NO: 98382 - DNA, 25 bp, Artificial
  Probe
cgactgtctggactataaggaccaa

SEQ ID NO: 98383 - DNA, 25 bp, Artificial
  Probe
ctcttcttactttggcggtgtagac

SEQ ID NO: 98384 - DNA, 25 bp, Artificial
  Probe
actgtctggactataaggaccaagc

SEQ ID NO: 98385 - DNA, 25 bp, Artificial
  Probe
cttcttactttggcggtgtagactg

SEQ ID NO: 98386 - DNA, 25 bp, Artificial
  Probe
tcttcttactttggcggtgtagact

SEQ ID NO: 98387 - DNA, 25 bp, Artificial
  Probe
gaaaggaagtggagaagaaacgcaa

SEQ ID NO: 98388 - DNA, 25 bp, Artificial
  Probe
gaaactcaacttcaactctcccgac

SEQ ID NO: 98389 - DNA, 25 bp, Artificial
  Probe
ttcctcttcttactttggcggtgta

SEQ ID NO: 98390 - DNA, 25 bp, Artificial
  Probe
tggactataaggaccaagcctcatg

SEQ ID NO: 98391 - DNA, 25 bp, Artificial
  Probe
gtctggactataaggaccaagcctc

SEQ ID NO: 98392 - DNA, 25 bp, Artificial
  Probe
ggagggaaaggaagtggagaagaaa

SEQ ID NO: 98393 - DNA, 25 bp, Artificial
  Probe
aaactcaacttcaactctcccgact

SEQ ID NO: 98394 - DNA, 25 bp, Artificial
  Probe
gcctggaaactcaacttcaactctc

SEQ ID NO: 98395 - DNA, 25 bp, Artificial
  Probe
aaaggaagtggagaagaaacgcaac

SEQ ID NO: 98396 - DNA, 25 bp, Artificial
  Probe
ctgtctggactataaggaccaagcc

SEQ ID NO: 98397 - DNA, 25 bp, Artificial
  Probe
ctgcctggaaactcaacttcaactc

SEQ ID NO: 98398 - DNA, 25 bp, Artificial
  Probe
ctctgcctggaaactcaacttcaac

SEQ ID NO: 98399 - DNA, 25 bp, Artificial
  Probe
ctctcccgactgtctggactataag

SEQ ID NO: 98400 - DNA, 25 bp, Artificial
  Probe
ctggaaactcaacttcaactctccc

SEQ ID NO: 98401 - DNA, 25 bp, Artificial
  Probe
cctggaaactcaacttcaactctcc

SEQ ID NO: 98402 - DNA, 25 bp, Artificial
  Probe
tcctcttcttactttggcggtgtag

SEQ ID NO: 98403 - DNA, 25 bp, Artificial
  Probe
tctggactataaggaccaagcctca

SEQ ID NO: 98404 - DNA, 25 bp, Artificial
  Probe
gaagtggagaagaaacgcaactacc

SEQ ID NO: 98405 - DNA, 25 bp, Artificial
  Probe
ggaagtggagaagaaacgcaactac

SEQ ID NO: 98406 - DNA, 25 bp, Artificial
  Probe
aggaagtggagaagaaacgcaacta

SEQ ID NO: 98407 - DNA, 25 bp, Artificial
  Probe
cctcttcttactttggcggtgtaga

SEQ ID NO: 98408 - DNA, 25 bp, Artificial
  Probe
ggactataaggaccaagcctcatgg

SEQ ID NO: 98409 - DNA, 25 bp, Artificial
  Probe
tgtctggactataaggaccaagcct

SEQ ID NO: 98410 - DNA, 25 bp, Artificial
  Probe
tgcctggaaactcaacttcaactct

SEQ ID NO: 98411 - DNA, 25 bp, Artificial
  Probe
tctgcctggaaactcaacttcaact

SEQ ID NO: 98412 - DNA, 25 bp, Artificial
  Probe
agtggagaagaaacgcaactacctt

SEQ ID NO: 98413 - DNA, 25 bp, Artificial
  Probe
aagtggagaagaaacgcaactacct

SEQ ID NO: 98414 - DNA, 25 bp, Artificial
  Probe
agggaaaggaagtggagaagaaacg

SEQ ID NO: 98415 - DNA, 25 bp, Artificial
  Probe
aactcaacttcaactctcccgactg

SEQ ID NO: 98416 - DNA, 25 bp, Artificial
  Probe
actctcccgactgtctggactataa

SEQ ID NO: 98417 - DNA, 25 bp, Artificial
  Probe
aactctcccgactgtctggactata

SEQ ID NO: 98418 - DNA, 25 bp, Artificial
  Probe
aggagggaaaggaagtggagaagaa

SEQ ID NO: 98419 - DNA, 25 bp, Artificial
  Probe
ccgactgtctggactataaggacca

SEQ ID NO: 98420 - DNA, 25 bp, Artificial
  Probe
cttcctcttcttactttggcggtgt

SEQ ID NO: 98421 - DNA, 25 bp, Artificial
  Probe
aaggaagtggagaagaaacgcaact

SEQ ID NO: 98422 - DNA, 25 bp, Artificial
  Probe
ctcaacttcaactctcccgactgtc

SEQ ID NO: 98423 - DNA, 25 bp, Artificial
  Probe
cctctgcctggaaactcaacttcaa

SEQ ID NO: 98424 - DNA, 25 bp, Artificial
  Probe
ctactgaacacggagccattattaa

SEQ ID NO: 98425 - DNA, 25 bp, Artificial
  Probe
cattgaactggaagaatatggtgtg

SEQ ID NO: 98426 - DNA, 25 bp, Artificial
  Probe
attaaggtattactgcttgttgtgc

SEQ ID NO: 98427 - DNA, 25 bp, Artificial
  Probe
attgaactggaagaatatggtgtgg

SEQ ID NO: 98428 - DNA, 25 bp, Artificial
  Probe
tctactgaacacggagccattatta

SEQ ID NO: 98429 - DNA, 25 bp, Artificial
  Probe
ttaaggtattactgcttgttgtgcc

SEQ ID NO: 98430 - DNA, 25 bp, Artificial
  Probe
ttctactgaacacggagccattatt

SEQ ID NO: 98431 - DNA, 25 bp, Artificial
  Probe
cttctactgaacacggagccattat

SEQ ID NO: 98432 - DNA, 25 bp, Artificial
  Probe
tgatactaatgagggctggtttatt

SEQ ID NO: 98433 - DNA, 25 bp, Artificial
  Probe
ggaagcaagatttaggaagagacat

SEQ ID NO: 98434 - DNA, 25 bp, Artificial
  Probe
aagcaagatttaggaagagacatca

SEQ ID NO: 98435 - DNA, 25 bp, Artificial
  Probe
tactgaacacggagccattattaaa

SEQ ID NO: 98436 - DNA, 25 bp, Artificial
  Probe
agcaagatttaggaagagacatcat

SEQ ID NO: 98437 - DNA, 25 bp, Artificial
  Probe
gtccgatactaactgtaaatcaagc

SEQ ID NO: 98438 - DNA, 25 bp, Artificial
  Probe
atgatactaatgagggctggtttat

SEQ ID NO: 98439 - DNA, 25 bp, Artificial
  Probe
gaagcaagatttaggaagagacatc

SEQ ID NO: 98440 - DNA, 25 bp, Artificial
  Probe
atgctaataaatcctgtctggcttc

SEQ ID NO: 98441 - DNA, 25 bp, Artificial
  Probe
acaatgacattagattaagtccgat

SEQ ID NO: 98442 - DNA, 25 bp, Artificial
  Probe
gatgctaataaatcctgtctggctt

SEQ ID NO: 98443 - DNA, 25 bp, Artificial
  Probe
caggaagcaagatttaggaagagac

SEQ ID NO: 98444 - DNA, 25 bp, Artificial
  Probe
tcaggaagcaagatttaggaagaga

SEQ ID NO: 98445 - DNA, 25 bp, Artificial
  Probe
gtcaggaagcaagatttaggaagag

SEQ ID NO: 98446 - DNA, 25 bp, Artificial
  Probe
taagaaatgtgaaacttgtgtctcc

SEQ ID NO: 98447 - DNA, 25 bp, Artificial
  Probe
tattaaggtattactgcttgttgtg

SEQ ID NO: 98448 - DNA, 25 bp, Artificial
  Probe
gtattaaggtattactgcttgttgt

SEQ ID NO: 98449 - DNA, 25 bp, Artificial
  Probe
tgtattaaggtattactgcttgttg

SEQ ID NO: 98450 - DNA, 25 bp, Artificial
  Probe
aggaagcaagatttaggaagagaca

SEQ ID NO: 98451 - DNA, 25 bp, Artificial
  Probe
ttattgacacagtggtacaggtgaa

SEQ ID NO: 98452 - DNA, 25 bp, Artificial
  Probe
taaggtattactgcttgttgtgcct

SEQ ID NO: 98453 - DNA, 25 bp, Artificial
  Probe
tttattgacaagtgttacctttgcg

SEQ ID NO: 98454 - DNA, 25 bp, Artificial
  Probe
ttgaactggaagaatatggtgtggc

SEQ ID NO: 98455 - DNA, 25 bp, Artificial
  Probe
cttgtattaaggtattactgcttgt

SEQ ID NO: 98456 - DNA, 25 bp, Artificial
  Probe
tacaatgacattagattaagtccga

SEQ ID NO: 98457 - DNA, 25 bp, Artificial
  Probe
agatgctaataaatcctgtctggct

SEQ ID NO: 98458 - DNA, 25 bp, Artificial
  Probe
caagatttaggaagagacatcatgc

SEQ ID NO: 98459 - DNA, 25 bp, Artificial
  Probe
gcaagatttaggaagagacatcatg

SEQ ID NO: 98460 - DNA, 25 bp, Artificial
  Probe
aagaaatgtgaaacttgtgtctccc

SEQ ID NO: 98461 - DNA, 25 bp, Artificial
  Probe
catgatactaatgagggctggttta

SEQ ID NO: 98462 - DNA, 25 bp, Artificial
  Probe
tattgacaagtgttacctttgcgtt

SEQ ID NO: 98463 - DNA, 25 bp, Artificial
  Probe
ttattgacaagtgttacctttgcgt

SEQ ID NO: 98464 - DNA, 25 bp, Artificial
  Probe
tcttgtattaaggtattactgcttg

SEQ ID NO: 98465 - DNA, 25 bp, Artificial
  Probe
atttattgacaagtgttacctttgc

SEQ ID NO: 98466 - DNA, 25 bp, Artificial
  Probe
agattaagtccgatactaactgtaa

SEQ ID NO: 98467 - DNA, 25 bp, Artificial
  Probe
acttctactgaacacggagccatta

SEQ ID NO: 98468 - DNA, 25 bp, Artificial
  Probe
tacttctactgaacacggagccatt

SEQ ID NO: 98469 - DNA, 25 bp, Artificial
  Probe
aatatatgttgtatgtcgcctgtcc

SEQ ID NO: 98470 - DNA, 25 bp, Artificial
  Probe
atatatgttgtatgtcgcctgtcca

SEQ ID NO: 98471 - DNA, 25 bp, Artificial
  Probe
tatatgttgtatgtcgcctgtccac

SEQ ID NO: 98472 - DNA, 25 bp, Artificial
  Probe
cttgatgttactttgctgttactga

SEQ ID NO: 98473 - DNA, 25 bp, Artificial
  Probe
ttgttcagtgaggtctgtgtatctc

SEQ ID NO: 98474 - DNA, 25 bp, Artificial
  Probe
ttgatgttactttgctgttactgaa

SEQ ID NO: 98475 - DNA, 25 bp, Artificial
  Probe
gcttgatgttactttgctgttactg

SEQ ID NO: 98476 - DNA, 25 bp, Artificial
  Probe
cggttctttgtggtaaataattgga

SEQ ID NO: 98477 - DNA, 25 bp, Artificial
  Probe
ctgcggttctttgtggtaaataatt

SEQ ID NO: 98478 - DNA, 25 bp, Artificial
  Probe
tgatgttactttgctgttactgaaa

SEQ ID NO: 98479 - DNA, 25 bp, Artificial
  Probe
cttcgtgtttcttatctctgaggtt

SEQ ID NO: 98480 - DNA, 25 bp, Artificial
  Probe
tgcggttctttgtggtaaataattg

SEQ ID NO: 98481 - DNA, 25 bp, Artificial
  Probe
gtgtttcttatctctgaggttgttt

SEQ ID NO: 98482 - DNA, 25 bp, Artificial
  Probe
ttcgtgtttcttatctctgaggttg

SEQ ID NO: 98483 - DNA, 25 bp, Artificial
  Probe
taagaaagcgtctcagaaagaaaga

SEQ ID NO: 98484 - DNA, 25 bp, Artificial
  Probe
ctaagaaagcgtctcagaaagaaag

SEQ ID NO: 98485 - DNA, 25 bp, Artificial
  Probe
gtcttcgtgtttcttatctctgagg

SEQ ID NO: 98486 - DNA, 25 bp, Artificial
  Probe
ggtcttcgtgtttcttatctctgag

SEQ ID NO: 98487 - DNA, 25 bp, Artificial
  Probe
cgtgtttcttatctctgaggttgtt

SEQ ID NO: 98488 - DNA, 25 bp, Artificial
  Probe
aagaaagcgtctcagaaagaaagat

SEQ ID NO: 98489 - DNA, 25 bp, Artificial
  Probe
gattgaagaatggcgatgttggttg

SEQ ID NO: 98490 - DNA, 25 bp, Artificial
  Probe
tcttcgtgtttcttatctctgaggt

SEQ ID NO: 98491 - DNA, 25 bp, Artificial
  Probe
gcggttctttgtggtaaataattgg

SEQ ID NO: 98492 - DNA, 25 bp, Artificial
  Probe
atctctgggtcttcgtgtttcttat

SEQ ID NO: 98493 - DNA, 25 bp, Artificial
  Probe
ggttctttgtggtaaataattggac

SEQ ID NO: 98494 - DNA, 25 bp, Artificial
  Probe
cgtctcagaaagaaagatgatggaa

SEQ ID NO: 98495 - DNA, 25 bp, Artificial
  Probe
aaagcgtctcagaaagaaagatgat

SEQ ID NO: 98496 - DNA, 25 bp, Artificial
  Probe
tatctcactttgtcctaccaccaat

SEQ ID NO: 98497 - DNA, 25 bp, Artificial
  Probe
ttcttatctctgaggttgtttacac

SEQ ID NO: 98498 - DNA, 25 bp, Artificial
  Probe
agaaagcgtctcagaaagaaagatg

SEQ ID NO: 98499 - DNA, 25 bp, Artificial
  Probe
gtctcagaaagaaagatgatggaaa

SEQ ID NO: 98500 - DNA, 25 bp, Artificial
  Probe
aaatatatgttgtatgtcgcctgtc

SEQ ID NO: 98501 - DNA, 25 bp, Artificial
  Probe
ggcttgatgttactttgctgttact

SEQ ID NO: 98502 - DNA, 25 bp, Artificial
  Probe
tcgtgtttcttatctctgaggttgt

SEQ ID NO: 98503 - DNA, 25 bp, Artificial
  Probe
ttgtggtaaataattggacaggaac

SEQ ID NO: 98504 - DNA, 25 bp, Artificial
  Probe
taggaacatatggagtcttcacgaa

SEQ ID NO: 98505 - DNA, 25 bp, Artificial
  Probe
gaaagcgtctcagaaagaaagatga

SEQ ID NO: 98506 - DNA, 25 bp, Artificial
  Probe
gggtcttcgtgtttcttatctctga

SEQ ID NO: 98507 - DNA, 25 bp, Artificial
  Probe
ctgggtcttcgtgtttcttatctct

SEQ ID NO: 98508 - DNA, 25 bp, Artificial
  Probe
tctgggtcttcgtgtttcttatctc

SEQ ID NO: 98509 - DNA, 25 bp, Artificial
  Probe
ctctgggtcttcgtgtttcttatct

SEQ ID NO: 98510 - DNA, 25 bp, Artificial
  Probe
tctctgggtcttcgtgtttcttatc

SEQ ID NO: 98511 - DNA, 25 bp, Artificial
  Probe
tggcttgatgttactttgctgttac

SEQ ID NO: 98512 - DNA, 25 bp, Artificial
  Probe
gtggcttgatgttactttgctgtta

SEQ ID NO: 98513 - DNA, 25 bp, Artificial
  Probe
ctttgtggtaaataattggacagga

SEQ ID NO: 98514 - DNA, 25 bp, Artificial
  Probe
gtggaggtaggttggagtatagtac

SEQ ID NO: 98515 - DNA, 25 bp, Artificial
  Probe
ggtggaggtaggttggagtatagta

SEQ ID NO: 98516 - DNA, 25 bp, Artificial
  Probe
ttgggtggagaagaaaggatagaaa

SEQ ID NO: 98517 - DNA, 25 bp, Artificial
  Probe
tttgggtggagaagaaaggatagaa

SEQ ID NO: 98518 - DNA, 25 bp, Artificial
  Probe
attcattcagccttggaaagtcaat

SEQ ID NO: 98519 - DNA, 25 bp, Artificial
  Probe
cttctctttggctaagttggtgttt

SEQ ID NO: 98520 - DNA, 25 bp, Artificial
  Probe
cattcagccttggaaagtcaatttg

SEQ ID NO: 98521 - DNA, 25 bp, Artificial
  Probe
tcattcagccttggaaagtcaattt

SEQ ID NO: 98522 - DNA, 25 bp, Artificial
  Probe
ttcattcagccttggaaagtcaatt

SEQ ID NO: 98523 - DNA, 25 bp, Artificial
  Probe
aattcattcagccttggaaagtcaa

SEQ ID NO: 98524 - DNA, 25 bp, Artificial
  Probe
gggaagttagagtagagaaatcaaa

SEQ ID NO: 98525 - DNA, 25 bp, Artificial
  Probe
ttctatggcaggataaattctgtgt

SEQ ID NO: 98526 - DNA, 25 bp, Artificial
  Probe
ttctctttggctaagttggtgtttg

SEQ ID NO: 98527 - DNA, 25 bp, Artificial
  Probe
cttctatggcaggataaattctgtg

SEQ ID NO: 98528 - DNA, 25 bp, Artificial
  Probe
tctatggcaggataaattctgtgtg

SEQ ID NO: 98529 - DNA, 25 bp, Artificial
  Probe
gcttctatggcaggataaattctgt

SEQ ID NO: 98530 - DNA, 25 bp, Artificial
  Probe
ctatggcaggataaattctgtgtgg

SEQ ID NO: 98531 - DNA, 25 bp, Artificial
  Probe
atatttcagtcatgtgacctgtgat

SEQ ID NO: 98532 - DNA, 25 bp, Artificial
  Probe
tatttcagtcatgtgacctgtgatg

SEQ ID NO: 98533 - DNA, 25 bp, Artificial
  Probe
catatttcagtcatgtgacctgtga

SEQ ID NO: 98534 - DNA, 25 bp, Artificial
  Probe
caggataaattctgtgtggcttgac

SEQ ID NO: 98535 - DNA, 25 bp, Artificial
  Probe
gagactctgcaatgaatgaaagaag

SEQ ID NO: 98536 - DNA, 25 bp, Artificial
  Probe
attcagccttggaaagtcaatttgc

SEQ ID NO: 98537 - DNA, 25 bp, Artificial
  Probe
aggataaattctgtgtggcttgacc

SEQ ID NO: 98538 - DNA, 25 bp, Artificial
  Probe
agcttctatggcaggataaattctg

SEQ ID NO: 98539 - DNA, 25 bp, Artificial
  Probe
ccttctctttggctaagttggtgtt

SEQ ID NO: 98540 - DNA, 25 bp, Artificial
  Probe
ggaggtaggttggagtatagtactt

SEQ ID NO: 98541 - DNA, 25 bp, Artificial
  Probe
gataggaaaggacagcctcatcttc

SEQ ID NO: 98542 - DNA, 25 bp, Artificial
  Probe
tggggaagttagagtagagaaatca

SEQ ID NO: 98543 - DNA, 25 bp, Artificial
  Probe
ctggggaagttagagtagagaaatc

SEQ ID NO: 98544 - DNA, 25 bp, Artificial
  Probe
cgagactctgcaatgaatgaaagaa

SEQ ID NO: 98545 - DNA, 25 bp, Artificial
  Probe
ggggaagttagagtagagaaatcaa

SEQ ID NO: 98546 - DNA, 25 bp, Artificial
  Probe
tggaggtaggttggagtatagtact

SEQ ID NO: 98547 - DNA, 25 bp, Artificial
  Probe
tctctttggctaagttggtgtttgg

SEQ ID NO: 98548 - DNA, 25 bp, Artificial
  Probe
gactctgcaatgaatgaaagaagct

SEQ ID NO: 98549 - DNA, 25 bp, Artificial
  Probe
agactctgcaatgaatgaaagaagc

SEQ ID NO: 98550 - DNA, 25 bp, Artificial
  Probe
aaagaattcattcagccttggaaag

SEQ ID NO: 98551 - DNA, 25 bp, Artificial
  Probe
gaaagaattcattcagccttggaaa

SEQ ID NO: 98552 - DNA, 25 bp, Artificial
  Probe
gcatatttcagtcatgtgacctgtg

SEQ ID NO: 98553 - DNA, 25 bp, Artificial
  Probe
atcactgctctggataggaaaggac

SEQ ID NO: 98554 - DNA, 25 bp, Artificial
  Probe
catcactgctctggataggaaagga

SEQ ID NO: 98555 - DNA, 25 bp, Artificial
  Probe
tgggtggagaagaaaggatagaaaa

SEQ ID NO: 98556 - DNA, 25 bp, Artificial
  Probe
ttttgggtggagaagaaaggataga

SEQ ID NO: 98557 - DNA, 25 bp, Artificial
  Probe
gttttgggtggagaagaaaggatag

SEQ ID NO: 98558 - DNA, 25 bp, Artificial
  Probe
ccctttcttatttaccggcatattt

SEQ ID NO: 98559 - DNA, 25 bp, Artificial
  Probe
gaacccctgtgtctcttttacttaa

SEQ ID NO: 98560 - DNA, 25 bp, Artificial
  Probe
tgaacccctgtgtctcttttactta

SEQ ID NO: 98561 - DNA, 25 bp, Artificial
  Probe
ttttgaacccctgtgtctcttttac

SEQ ID NO: 98562 - DNA, 25 bp, Artificial
  Probe
aacagtgcaagatgtctctgaatgg

SEQ ID NO: 98563 - DNA, 25 bp, Artificial
  Probe
gtacaacctcaaacagtgcaagatg

SEQ ID NO: 98564 - DNA, 25 bp, Artificial
  Probe
aaacagtgcaagatgtctctgaatg

SEQ ID NO: 98565 - DNA, 25 bp, Artificial
  Probe
caaacagtgcaagatgtctctgaat

SEQ ID NO: 98566 - DNA, 25 bp, Artificial
  Probe
ttgaacccctgtgtctcttttactt

SEQ ID NO: 98567 - DNA, 25 bp, Artificial
  Probe
tttgaacccctgtgtctcttttact

SEQ ID NO: 98568 - DNA, 25 bp, Artificial
  Probe
cagtgcaagatgtctctgaatggac

SEQ ID NO: 98569 - DNA, 25 bp, Artificial
  Probe
tcaaacagtgcaagatgtctctgaa

SEQ ID NO: 98570 - DNA, 25 bp, Artificial
  Probe
tacaacctcaaacagtgcaagatgt

SEQ ID NO: 98571 - DNA, 25 bp, Artificial
  Probe
acagtgcaagatgtctctgaatgga

SEQ ID NO: 98572 - DNA, 25 bp, Artificial
  Probe
gaggatttcccagttttgacacatg

SEQ ID NO: 98573 - DNA, 25 bp, Artificial
  Probe
ctcaaacagtgcaagatgtctctga

SEQ ID NO: 98574 - DNA, 25 bp, Artificial
  Probe
aacccctgtgtctcttttacttaag

SEQ ID NO: 98575 - DNA, 25 bp, Artificial
  Probe
aacctcaaacagtgcaagatgtctc

SEQ ID NO: 98576 - DNA, 25 bp, Artificial
  Probe
caacctcaaacagtgcaagatgtct

SEQ ID NO: 98577 - DNA, 25 bp, Artificial
  Probe
cctcaaacagtgcaagatgtctctg

SEQ ID NO: 98578 - DNA, 25 bp, Artificial
  Probe
acaacctcaaacagtgcaagatgtc

SEQ ID NO: 98579 - DNA, 25 bp, Artificial
  Probe
tgtacaacctcaaacagtgcaagat

SEQ ID NO: 98580 - DNA, 25 bp, Artificial
  Probe
acctcaaacagtgcaagatgtctct

SEQ ID NO: 98581 - DNA, 25 bp, Artificial
  Probe
gatttcccagttttgacacatgtat

SEQ ID NO: 98582 - DNA, 25 bp, Artificial
  Probe
tttcccagttttgacacatgtattt

SEQ ID NO: 98583 - DNA, 25 bp, Artificial
  Probe
atttcccagttttgacacatgtatt

SEQ ID NO: 98584 - DNA, 25 bp, Artificial
  Probe
cccctgtgtctcttttacttaagat

SEQ ID NO: 98585 - DNA, 25 bp, Artificial
  Probe
ttcccagttttgacacatgtattta

SEQ ID NO: 98586 - DNA, 25 bp, Artificial
  Probe
acccctgtgtctcttttacttaaga

SEQ ID NO: 98587 - DNA, 25 bp, Artificial
  Probe
gtgcaagatgtctctgaatggacag

SEQ ID NO: 98588 - DNA, 25 bp, Artificial
  Probe
tcccagttttgacacatgtatttat

SEQ ID NO: 98589 - DNA, 25 bp, Artificial
  Probe
ggatttcccagttttgacacatgta

SEQ ID NO: 98590 - DNA, 25 bp, Artificial
  Probe
catatccccaactgtgacaagcatg

SEQ ID NO: 98591 - DNA, 25 bp, Artificial
  Probe
ccctgtgtctcttttacttaagatt

SEQ ID NO: 98592 - DNA, 25 bp, Artificial
  Probe
agtgcaagatgtctctgaatggaca

SEQ ID NO: 98593 - DNA, 25 bp, Artificial
  Probe
cccagttttgacacatgtatttata

SEQ ID NO: 98594 - DNA, 25 bp, Artificial
  Probe
aggatttcccagttttgacacatgt

SEQ ID NO: 98595 - DNA, 25 bp, Artificial
  Probe
tgcaagatgtctctgaatggacagc

SEQ ID NO: 98596 - DNA, 25 bp, Artificial
  Probe
cctgtgtctcttttacttaagatta

SEQ ID NO: 98597 - DNA, 25 bp, Artificial
  Probe
atatccccaactgtgacaagcatgg

SEQ ID NO: 98598 - DNA, 25 bp, Artificial
  Probe
ctgtacaacctcaaacagtgcaaga

SEQ ID NO: 98599 - DNA, 25 bp, Artificial
  Probe
ccagttttgacacatgtatttatat

SEQ ID NO: 98600 - DNA, 25 bp, Artificial
  Probe
cctgtacaacctcaaacagtgcaag

SEQ ID NO: 98601 - DNA, 25 bp, Artificial
  Probe
tctaagatggagagatgaaggttgg

SEQ ID NO: 98602 - DNA, 25 bp, Artificial
  Probe
ctaagatggagagatgaaggttggc

SEQ ID NO: 98603 - DNA, 25 bp, Artificial
  Probe
aatcctagccgaagactatcagttg

SEQ ID NO: 98604 - DNA, 25 bp, Artificial
  Probe
taagatggagagatgaaggttggct

SEQ ID NO: 98605 - DNA, 25 bp, Artificial
  Probe
ctagccgaagactatcagttgtgag

SEQ ID NO: 98606 - DNA, 25 bp, Artificial
  Probe
atcctagccgaagactatcagttgt

SEQ ID NO: 98607 - DNA, 25 bp, Artificial
  Probe
tatcagttgtgagtttgccaatcaa

SEQ ID NO: 98608 - DNA, 25 bp, Artificial
  Probe
tagccgaagactatcagttgtgagt

SEQ ID NO: 98609 - DNA, 25 bp, Artificial
  Probe
cagttgtgagtttgccaatcaattt

SEQ ID NO: 98610 - DNA, 25 bp, Artificial
  Probe
ctatcagttgtgagtttgccaatca

SEQ ID NO: 98611 - DNA, 25 bp, Artificial
  Probe
actatcagttgtgagtttgccaatc

SEQ ID NO: 98612 - DNA, 25 bp, Artificial
  Probe
gactatcagttgtgagtttgccaat

SEQ ID NO: 98613 - DNA, 25 bp, Artificial
  Probe
atcagttgtgagtttgccaatcaat

SEQ ID NO: 98614 - DNA, 25 bp, Artificial
  Probe
ccgaagactatcagttgtgagtttg

SEQ ID NO: 98615 - DNA, 25 bp, Artificial
  Probe
gaagactatcagttgtgagtttgcc

SEQ ID NO: 98616 - DNA, 25 bp, Artificial
  Probe
tcagttgtgagtttgccaatcaatt

SEQ ID NO: 98617 - DNA, 25 bp, Artificial
  Probe
cgaagactatcagttgtgagtttgc

SEQ ID NO: 98618 - DNA, 25 bp, Artificial
  Probe
ctctaagatggagagatgaaggttg

SEQ ID NO: 98619 - DNA, 25 bp, Artificial
  Probe
agactatcagttgtgagtttgccaa

SEQ ID NO: 98620 - DNA, 25 bp, Artificial
  Probe
aagactatcagttgtgagtttgcca

SEQ ID NO: 98621 - DNA, 25 bp, Artificial
  Probe
actctaagatggagagatgaaggtt

SEQ ID NO: 98622 - DNA, 25 bp, Artificial
  Probe
ttgactctaagatggagagatgaag

SEQ ID NO: 98623 - DNA, 25 bp, Artificial
  Probe
agccgaagactatcagttgtgagtt

SEQ ID NO: 98624 - DNA, 25 bp, Artificial
  Probe
gactctaagatggagagatgaaggt

SEQ ID NO: 98625 - DNA, 25 bp, Artificial
  Probe
tgactctaagatggagagatgaagg

SEQ ID NO: 98626 - DNA, 25 bp, Artificial
  Probe
cctagccgaagactatcagttgtga

SEQ ID NO: 98627 - DNA, 25 bp, Artificial
  Probe
tcctagccgaagactatcagttgtg

SEQ ID NO: 98628 - DNA, 25 bp, Artificial
  Probe
aagatggagagatgaaggttggctg

SEQ ID NO: 98629 - DNA, 25 bp, Artificial
  Probe
gccgaagactatcagttgtgagttt

SEQ ID NO: 98630 - DNA, 25 bp, Artificial
  Probe
ttgatgctacattctgtgacacacc

SEQ ID NO: 98631 - DNA, 25 bp, Artificial
  Probe
tttgatgctacattctgtgacacac

SEQ ID NO: 98632 - DNA, 25 bp, Artificial
  Probe
gttgtgagtttgccaatcaattttg

SEQ ID NO: 98633 - DNA, 25 bp, Artificial
  Probe
agttgtgagtttgccaatcaatttt

SEQ ID NO: 98634 - DNA, 25 bp, Artificial
  Probe
ctttgagctttgctaagtgatagac

SEQ ID NO: 98635 - DNA, 25 bp, Artificial
  Probe
tgagctttgctaagtgatagacaat

SEQ ID NO: 98636 - DNA, 25 bp, Artificial
  Probe
ttgagctttgctaagtgatagacaa

SEQ ID NO: 98637 - DNA, 25 bp, Artificial
  Probe
tttgagctttgctaagtgatagaca

SEQ ID NO: 98638 - DNA, 25 bp, Artificial
  Probe
gagctttgctaagtgatagacaatt

SEQ ID NO: 98639 - DNA, 25 bp, Artificial
  Probe
gatgctacattctgtgacacacctg

SEQ ID NO: 98640 - DNA, 25 bp, Artificial
  Probe
aattttgatgctacattctgtgaca

SEQ ID NO: 98641 - DNA, 25 bp, Artificial
  Probe
attttgatgctacattctgtgacac

SEQ ID NO: 98642 - DNA, 25 bp, Artificial
  Probe
agctttgctaagtgatagacaattt

SEQ ID NO: 98643 - DNA, 25 bp, Artificial
  Probe
ctgtgctcgttttgactctaagatg

SEQ ID NO: 98644 - DNA, 25 bp, Artificial
  Probe
caattttgatgctacattctgtgac

SEQ ID NO: 98645 - DNA, 25 bp, Artificial
  Probe
gctttgctaagtgatagacaatttt

SEQ ID NO: 98646 - DNA, 25 bp, Artificial
  Probe
atcaagaagacggagacagatatga

SEQ ID NO: 98647 - DNA, 25 bp, Artificial
  Probe
gatcaagaagacggagacagatatg

SEQ ID NO: 98648 - DNA, 25 bp, Artificial
  Probe
tcaagaagacggagacagatatgag

SEQ ID NO: 98649 - DNA, 25 bp, Artificial
  Probe
ctggaattagatgacagtgacttgg

SEQ ID NO: 98650 - DNA, 25 bp, Artificial
  Probe
caagaagacggagacagatatgagc

SEQ ID NO: 98651 - DNA, 25 bp, Artificial
  Probe
ctaagtttgagtttgctgtgaagtt

SEQ ID NO: 98652 - DNA, 25 bp, Artificial
  Probe
taagtttgagtttgctgtgaagttc

SEQ ID NO: 98653 - DNA, 25 bp, Artificial
  Probe
tttatggagcctaagtttgagtttg

SEQ ID NO: 98654 - DNA, 25 bp, Artificial
  Probe
tggaattagatgacagtgacttggc

SEQ ID NO: 98655 - DNA, 25 bp, Artificial
  Probe
atagctgtcattattctcagtggag

SEQ ID NO: 98656 - DNA, 25 bp, Artificial
  Probe
ctttatggagcctaagtttgagttt

SEQ ID NO: 98657 - DNA, 25 bp, Artificial
  Probe
aagttcaatgcactggaattagatg

SEQ ID NO: 98658 - DNA, 25 bp, Artificial
  Probe
gaagttcaatgcactggaattagat

SEQ ID NO: 98659 - DNA, 25 bp, Artificial
  Probe
gttcaatgcactggaattagatgac

SEQ ID NO: 98660 - DNA, 25 bp, Artificial
  Probe
agttcaatgcactggaattagatga

SEQ ID NO: 98661 - DNA, 25 bp, Artificial
  Probe
ttcaatgcactggaattagatgaca

SEQ ID NO: 98662 - DNA, 25 bp, Artificial
  Probe
tgaagttcaatgcactggaattaga

SEQ ID NO: 98663 - DNA, 25 bp, Artificial
  Probe
ttatggagcctaagtttgagtttgc

SEQ ID NO: 98664 - DNA, 25 bp, Artificial
  Probe
cctaagtttgagtttgctgtgaagt

SEQ ID NO: 98665 - DNA, 25 bp, Artificial
  Probe
ctttggtgactttatggagcctaag

SEQ ID NO: 98666 - DNA, 25 bp, Artificial
  Probe
tatagctgtcattattctcagtgga

SEQ ID NO: 98667 - DNA, 25 bp, Artificial
  Probe
gtgaagttcaatgcactggaattag

SEQ ID NO: 98668 - DNA, 25 bp, Artificial
  Probe
tcaatgcactggaattagatgacag

SEQ ID NO: 98669 - DNA, 25 bp, Artificial
  Probe
ttatagctgtcattattctcagtgg

SEQ ID NO: 98670 - DNA, 25 bp, Artificial
  Probe
tgtgaagttcaatgcactggaatta

SEQ ID NO: 98671 - DNA, 25 bp, Artificial
  Probe
aagaagacggagacagatatgagcc

SEQ ID NO: 98672 - DNA, 25 bp, Artificial
  Probe
cctttggtgactttatggagcctaa

SEQ ID NO: 98673 - DNA, 25 bp, Artificial
  Probe
aagacggagacagatatgagccttc

SEQ ID NO: 98674 - DNA, 25 bp, Artificial
  Probe
gaagacggagacagatatgagcctt

SEQ ID NO: 98675 - DNA, 25 bp, Artificial
  Probe
aagtttgagtttgctgtgaagttca

SEQ ID NO: 98676 - DNA, 25 bp, Artificial
  Probe
gcctaagtttgagtttgctgtgaag

SEQ ID NO: 98677 - DNA, 25 bp, Artificial
  Probe
tgatcaagaagacggagacagatat

SEQ ID NO: 98678 - DNA, 25 bp, Artificial
  Probe
ctgtgaagttcaatgcactggaatt

SEQ ID NO: 98679 - DNA, 25 bp, Artificial
  Probe
tgttccttctatcgattgcactatt

SEQ ID NO: 98680 - DNA, 25 bp, Artificial
  Probe
gtgatcaagaagacggagacagata

SEQ ID NO: 98681 - DNA, 25 bp, Artificial
  Probe
agaagacggagacagatatgagcct

SEQ ID NO: 98682 - DNA, 25 bp, Artificial
  Probe
gttccttctatcgattgcactatta

SEQ ID NO: 98683 - DNA, 25 bp, Artificial
  Probe
tcgctgacaaagtgttccttctatc

SEQ ID NO: 98684 - DNA, 25 bp, Artificial
  Probe
ttgtattagcagaaaagtcccagtc

SEQ ID NO: 98685 - DNA, 25 bp, Artificial
  Probe
tagctgtcattattctcagtggaga

SEQ ID NO: 98686 - DNA, 25 bp, Artificial
  Probe
cttgtattagcagaaaagtcccagt

SEQ ID NO: 98687 - DNA, 25 bp, Artificial
  Probe
actttatggagcctaagtttgagtt

SEQ ID NO: 98688 - DNA, 25 bp, Artificial
  Probe
gactttatggagcctaagtttgagt

SEQ ID NO: 98689 - DNA, 25 bp, Artificial
  Probe
tgactttatggagcctaagtttgag

SEQ ID NO: 98690 - DNA, 25 bp, Artificial
  Probe
gtgactttatggagcctaagtttga

SEQ ID NO: 98691 - DNA, 25 bp, Artificial
  Probe
ttaagaacacagaagtccatgtcag

SEQ ID NO: 98692 - DNA, 25 bp, Artificial
  Probe
gtgaaccactgtcaactgagtattc

SEQ ID NO: 98693 - DNA, 25 bp, Artificial
  Probe
tgaaccactgtcaactgagtattcc

SEQ ID NO: 98694 - DNA, 25 bp, Artificial
  Probe
taagcatttacctgggcattaagta

SEQ ID NO: 98695 - DNA, 25 bp, Artificial
  Probe
cactgtcaactgagtattccgagag

SEQ ID NO: 98696 - DNA, 25 bp, Artificial
  Probe
atcccagagttcatctacaaacaaa

SEQ ID NO: 98697 - DNA, 25 bp, Artificial
  Probe
aatcccagagttcatctacaaacaa

SEQ ID NO: 98698 - DNA, 25 bp, Artificial
  Probe
ggcatctgaatccactttgacatat

SEQ ID NO: 98699 - DNA, 25 bp, Artificial
  Probe
agttcatctacaaacaaagaggagg

SEQ ID NO: 98700 - DNA, 25 bp, Artificial
  Probe
agagttcatctacaaacaaagagga

SEQ ID NO: 98701 - DNA, 25 bp, Artificial
  Probe
cagagttcatctacaaacaaagagg

SEQ ID NO: 98702 - DNA, 25 bp, Artificial
  Probe
ccagagttcatctacaaacaaagag

SEQ ID NO: 98703 - DNA, 25 bp, Artificial
  Probe
gaatcccagagttcatctacaaaca

SEQ ID NO: 98704 - DNA, 25 bp, Artificial
  Probe
gagttcatctacaaacaaagaggag

SEQ ID NO: 98705 - DNA, 25 bp, Artificial
  Probe
cccagagttcatctacaaacaaaga

SEQ ID NO: 98706 - DNA, 25 bp, Artificial
  Probe
tcccagagttcatctacaaacaaag

SEQ ID NO: 98707 - DNA, 25 bp, Artificial
  Probe
aatgaactgctttctcctggaatta

SEQ ID NO: 98708 - DNA, 25 bp, Artificial
  Probe
ttaagcatttacctgggcattaagt

SEQ ID NO: 98709 - DNA, 25 bp, Artificial
  Probe
atgaactgctttctcctggaattac

SEQ ID NO: 98710 - DNA, 25 bp, Artificial
  Probe
ggaatcccagagttcatctacaaac

SEQ ID NO: 98711 - DNA, 25 bp, Artificial
  Probe
gaaattgatccaagcattaacacct

SEQ ID NO: 98712 - DNA, 25 bp, Artificial
  Probe
agaaattgatccaagcattaacacc

SEQ ID NO: 98713 - DNA, 25 bp, Artificial
  Probe
aaattgatccaagcattaacacctg

SEQ ID NO: 98714 - DNA, 25 bp, Artificial
  Probe
gactgagaaattgatccaagcatta

SEQ ID NO: 98715 - DNA, 25 bp, Artificial
  Probe
gaaccttgtcagtgtttctgttatt

SEQ ID NO: 98716 - DNA, 25 bp, Artificial
  Probe
gttcatctacaaacaaagaggaggc

SEQ ID NO: 98717 - DNA, 25 bp, Artificial
  Probe
tgagaaattgatccaagcattaaca

SEQ ID NO: 98718 - DNA, 25 bp, Artificial
  Probe
acagaagtccatgtcagcagataac

SEQ ID NO: 98719 - DNA, 25 bp, Artificial
  Probe
cacagaagtccatgtcagcagataa

SEQ ID NO: 98720 - DNA, 25 bp, Artificial
  Probe
tgactgagaaattgatccaagcatt

SEQ ID NO: 98721 - DNA, 25 bp, Artificial
  Probe
gtccttaagaacacagaagtccatg

SEQ ID NO: 98722 - DNA, 25 bp, Artificial
  Probe
caatgaactgctttctcctggaatt

SEQ ID NO: 98723 - DNA, 25 bp, Artificial
  Probe
gagaaattgatccaagcattaacac

SEQ ID NO: 98724 - DNA, 25 bp, Artificial
  Probe
actgagaaattgatccaagcattaa

SEQ ID NO: 98725 - DNA, 25 bp, Artificial
  Probe
gaagtccatgtcagcagataaccag

SEQ ID NO: 98726 - DNA, 25 bp, Artificial
  Probe
cagaagtccatgtcagcagataacc

SEQ ID NO: 98727 - DNA, 25 bp, Artificial
  Probe
ctgagaaattgatccaagcattaac

SEQ ID NO: 98728 - DNA, 25 bp, Artificial
  Probe
gaaccactgtcaactgagtattccg

SEQ ID NO: 98729 - DNA, 25 bp, Artificial
  Probe
cttaagaacacagaagtccatgtca

SEQ ID NO: 98730 - DNA, 25 bp, Artificial
  Probe
ctgactgagaaattgatccaagcat

SEQ ID NO: 98731 - DNA, 25 bp, Artificial
  Probe
taagaacacagaagtccatgtcagc

SEQ ID NO: 98732 - DNA, 25 bp, Artificial
  Probe
accttgtcagtgtttctgttattaa

SEQ ID NO: 98733 - DNA, 25 bp, Artificial
  Probe
aaccttgtcagtgtttctgttatta

SEQ ID NO: 98734 - DNA, 25 bp, Artificial
  Probe
agcatttacctgggcattaagtaat

SEQ ID NO: 98735 - DNA, 25 bp, Artificial
  Probe
tgaactgctttctcctggaattaca

SEQ ID NO: 98736 - DNA, 25 bp, Artificial
  Probe
cgcttagtttacattgtgacattct

SEQ ID NO: 98737 - DNA, 25 bp, Artificial
  Probe
ccgcttagtttacattgtgacattc

SEQ ID NO: 98738 - DNA, 25 bp, Artificial
  Probe
tatcaagaacccgcttagtttacat

SEQ ID NO: 98739 - DNA, 25 bp, Artificial
  Probe
atatcaagaacccgcttagtttaca

SEQ ID NO: 98740 - DNA, 25 bp, Artificial
  Probe
atcaagaacccgcttagtttacatt

SEQ ID NO: 98741 - DNA, 25 bp, Artificial
  Probe
gcttagtttacattgtgacattctg

SEQ ID NO: 98742 - DNA, 25 bp, Artificial
  Probe
agcaggactttgtgaatagttagaa

SEQ ID NO: 98743 - DNA, 25 bp, Artificial
  Probe
gcaggactttgtgaatagttagaaa

SEQ ID NO: 98744 - DNA, 25 bp, Artificial
  Probe
tagcaggactttgtgaatagttaga

SEQ ID NO: 98745 - DNA, 25 bp, Artificial
  Probe
gtgatacttgacctctgtgaccaac

SEQ ID NO: 98746 - DNA, 25 bp, Artificial
  Probe
agtttacattgtgacattctgttgt

SEQ ID NO: 98747 - DNA, 25 bp, Artificial
  Probe
cccgcttagtttacattgtgacatt

SEQ ID NO: 98748 - DNA, 25 bp, Artificial
  Probe
tcaagaacccgcttagtttacattg

SEQ ID NO: 98749 - DNA, 25 bp, Artificial
  Probe
ttagcaggactttgtgaatagttag

SEQ ID NO: 98750 - DNA, 25 bp, Artificial
  Probe
aagaacccgcttagtttacattgtg

SEQ ID NO: 98751 - DNA, 25 bp, Artificial
  Probe
caagaacccgcttagtttacattgt

SEQ ID NO: 98752 - DNA, 25 bp, Artificial
  Probe
tttagcaggactttgtgaatagtta

SEQ ID NO: 98753 - DNA, 25 bp, Artificial
  Probe
gaacccgcttagtttacattgtgac

SEQ ID NO: 98754 - DNA, 25 bp, Artificial
  Probe
agaacccgcttagtttacattgtga

SEQ ID NO: 98755 - DNA, 25 bp, Artificial
  Probe
acccgcttagtttacattgtgacat

SEQ ID NO: 98756 - DNA, 25 bp, Artificial
  Probe
tagtttacattgtgacattctgttg

SEQ ID NO: 98757 - DNA, 25 bp, Artificial
  Probe
tgatacttgacctctgtgaccaacc

SEQ ID NO: 98758 - DNA, 25 bp, Artificial
  Probe
cttagtttacattgtgacattctgt

SEQ ID NO: 98759 - DNA, 25 bp, Artificial
  Probe
gatatcaagaacccgcttagtttac

SEQ ID NO: 98760 - DNA, 25 bp, Artificial
  Probe
aacccgcttagtttacattgtgaca

SEQ ID NO: 98761 - DNA, 25 bp, Artificial
  Probe
ctgtaaaggagccgtgatacttgac

SEQ ID NO: 98762 - DNA, 25 bp, Artificial
  Probe
ttagtttacattgtgacattctgtt

SEQ ID NO: 98763 - DNA, 25 bp, Artificial
  Probe
acttttagcaggactttgtgaatag

SEQ ID NO: 98764 - DNA, 25 bp, Artificial
  Probe
gacttttagcaggactttgtgaata

SEQ ID NO: 98765 - DNA, 25 bp, Artificial
  Probe
cgtgatacttgacctctgtgaccaa

SEQ ID NO: 98766 - DNA, 25 bp, Artificial
  Probe
ccaggggcaaattatctattaggaa

SEQ ID NO: 98767 - DNA, 25 bp, Artificial
  Probe
tgacttttagcaggactttgtgaat

SEQ ID NO: 98768 - DNA, 25 bp, Artificial
  Probe
aaccctatttcgtcggtgtcttaaa

SEQ ID NO: 98769 - DNA, 25 bp, Artificial
  Probe
aatcttcaacaaccaagagttcgct

SEQ ID NO: 98770 - DNA, 25 bp, Artificial
  Probe
tgtgaatagttagaaaagagatggc

SEQ ID NO: 98771 - DNA, 25 bp, Artificial
  Probe
gtttacattgtgacattctgttgta

SEQ ID NO: 98772 - DNA, 25 bp, Artificial
  Probe
cttcaacaaccaagagttcgctcag

SEQ ID NO: 98773 - DNA, 25 bp, Artificial
  Probe
caggggcaaattatctattaggaaa

SEQ ID NO: 98774 - DNA, 25 bp, Artificial
  Probe
accctatttcgtcggtgtcttaaag

SEQ ID NO: 98775 - DNA, 25 bp, Artificial
  Probe
cttttagcaggactttgtgaatagt

SEQ ID NO: 98776 - DNA, 25 bp, Artificial
  Probe
ttttagcaggactttgtgaatagtt

SEQ ID NO: 98777 - DNA, 25 bp, Artificial
  Probe
atcttcaacaaccaagagttcgctc

SEQ ID NO: 98778 - DNA, 25 bp, Artificial
  Probe
ccctatttcgtcggtgtcttaaagg

SEQ ID NO: 98779 - DNA, 25 bp, Artificial
  Probe
caaccctatttcgtcggtgtcttaa

SEQ ID NO: 98780 - DNA, 25 bp, Artificial
  Probe
aggggcaaattatctattaggaaaa

SEQ ID NO: 98781 - DNA, 25 bp, Artificial
  Probe
ttaatctgtccaatactgatgcgat

SEQ ID NO: 98782 - DNA, 25 bp, Artificial
  Probe
attgaggtggagaaggtctacatta

SEQ ID NO: 98783 - DNA, 25 bp, Artificial
  Probe
ggtggagaaggtctacattagtctt

SEQ ID NO: 98784 - DNA, 25 bp, Artificial
  Probe
ttgaggtggagaaggtctacattag

SEQ ID NO: 98785 - DNA, 25 bp, Artificial
  Probe
gaggtggagaaggtctacattagtc

SEQ ID NO: 98786 - DNA, 25 bp, Artificial
  Probe
gattgaggtggagaaggtctacatt

SEQ ID NO: 98787 - DNA, 25 bp, Artificial
  Probe
aggtggagaaggtctacattagtct

SEQ ID NO: 98788 - DNA, 25 bp, Artificial
  Probe
attaatctgtccaatactgatgcga

SEQ ID NO: 98789 - DNA, 25 bp, Artificial
  Probe
cattaatctgtccaatactgatgcg

SEQ ID NO: 98790 - DNA, 25 bp, Artificial
  Probe
tgaggtggagaaggtctacattagt

SEQ ID NO: 98791 - DNA, 25 bp, Artificial
  Probe
caacttacacgcacagcaatatgaa

SEQ ID NO: 98792 - DNA, 25 bp, Artificial
  Probe
aacactacgaatcatgtaagcaaga

SEQ ID NO: 98793 - DNA, 25 bp, Artificial
  Probe
taatctgtccaatactgatgcgatt

SEQ ID NO: 98794 - DNA, 25 bp, Artificial
  Probe
ctacgaatcatgtaagcaagacagt

SEQ ID NO: 98795 - DNA, 25 bp, Artificial
  Probe
actacgaatcatgtaagcaagacag

SEQ ID NO: 98796 - DNA, 25 bp, Artificial
  Probe
tcattaatctgtccaatactgatgc

SEQ ID NO: 98797 - DNA, 25 bp, Artificial
  Probe
tacgaatcatgtaagcaagacagtg

SEQ ID NO: 98798 - DNA, 25 bp, Artificial
  Probe
cactacgaatcatgtaagcaagaca

SEQ ID NO: 98799 - DNA, 25 bp, Artificial
  Probe
acactacgaatcatgtaagcaagac

SEQ ID NO: 98800 - DNA, 25 bp, Artificial
  Probe
ctgtccaatactgatgcgatttatg

SEQ ID NO: 98801 - DNA, 25 bp, Artificial
  Probe
tctgtccaatactgatgcgatttat

SEQ ID NO: 98802 - DNA, 25 bp, Artificial
  Probe
aactaaacagcaaagccatattctc

SEQ ID NO: 98803 - DNA, 25 bp, Artificial
  Probe
caatactgatgcgatttatggcttt

SEQ ID NO: 98804 - DNA, 25 bp, Artificial
  Probe
actaaacagcaaagccatattctct

SEQ ID NO: 98805 - DNA, 25 bp, Artificial
  Probe
atctgtccaatactgatgcgattta

SEQ ID NO: 98806 - DNA, 25 bp, Artificial
  Probe
aaacagcaaagccatattctctaaa

SEQ ID NO: 98807 - DNA, 25 bp, Artificial
  Probe
aacagcaaagccatattctctaaat

SEQ ID NO: 98808 - DNA, 25 bp, Artificial
  Probe
ctaaacagcaaagccatattctcta

SEQ ID NO: 98809 - DNA, 25 bp, Artificial
  Probe
gtggagaaggtctacattagtcttt

SEQ ID NO: 98810 - DNA, 25 bp, Artificial
  Probe
gtcaacttacacgcacagcaatatg

SEQ ID NO: 98811 - DNA, 25 bp, Artificial
  Probe
agtcaacttacacgcacagcaatat

SEQ ID NO: 98812 - DNA, 25 bp, Artificial
  Probe
acagcaaagccatattctctaaatt

SEQ ID NO: 98813 - DNA, 25 bp, Artificial
  Probe
ggaacttcggtattgattgcactaa

SEQ ID NO: 98814 - DNA, 25 bp, Artificial
  Probe
taactaaacagcaaagccatattct

SEQ ID NO: 98815 - DNA, 25 bp, Artificial
  Probe
gcaaagccatattctctaaattcac

SEQ ID NO: 98816 - DNA, 25 bp, Artificial
  Probe
agcaaagccatattctctaaattca

SEQ ID NO: 98817 - DNA, 25 bp, Artificial
  Probe
taaacagcaaagccatattctctaa

SEQ ID NO: 98818 - DNA, 25 bp, Artificial
  Probe
cagcaaagccatattctctaaattc

SEQ ID NO: 98819 - DNA, 25 bp, Artificial
  Probe
aacttacacgcacagcaatatgaaa

SEQ ID NO: 98820 - DNA, 25 bp, Artificial
  Probe
tcaacttacacgcacagcaatatga

SEQ ID NO: 98821 - DNA, 25 bp, Artificial
  Probe
gccatattctctaaattcactgttg

SEQ ID NO: 98822 - DNA, 25 bp, Artificial
  Probe
ggattgaggtggagaaggtctacat

SEQ ID NO: 98823 - DNA, 25 bp, Artificial
  Probe
agccatattctctaaattcactgtt

SEQ ID NO: 98824 - DNA, 25 bp, Artificial
  Probe
aagccatattctctaaattcactgt

SEQ ID NO: 98825 - DNA, 25 bp, Artificial
  Probe
ttaactaaacagcaaagccatattc

SEQ ID NO: 98826 - DNA, 25 bp, Artificial
  Probe
aattgtgaactcttggaagtgctgt

SEQ ID NO: 98827 - DNA, 25 bp, Artificial
  Probe
attgtgaactcttggaagtgctgtc

SEQ ID NO: 98828 - DNA, 25 bp, Artificial
  Probe
gaaattgtgaactcttggaagtgct

SEQ ID NO: 98829 - DNA, 25 bp, Artificial
  Probe
gacaaataaacattctcgatcctcc

SEQ ID NO: 98830 - DNA, 25 bp, Artificial
  Probe
aaattgtgaactcttggaagtgctg

SEQ ID NO: 98831 - DNA, 25 bp, Artificial
  Probe
tgaaattgtgaactcttggaagtgc

SEQ ID NO: 98832 - DNA, 25 bp, Artificial
  Probe
acaaataaacattctcgatcctccg

SEQ ID NO: 98833 - DNA, 25 bp, Artificial
  Probe
cagggaccagttcgactataatgac

SEQ ID NO: 98834 - DNA, 25 bp, Artificial
  Probe
cgacaaataaacattctcgatcctc

SEQ ID NO: 98835 - DNA, 25 bp, Artificial
  Probe
aataaacattctcgatcctccgaaa

SEQ ID NO: 98836 - DNA, 25 bp, Artificial
  Probe
aaataaacattctcgatcctccgaa

SEQ ID NO: 98837 - DNA, 25 bp, Artificial
  Probe
taatgaccaaagctgtctcgaatga

SEQ ID NO: 98838 - DNA, 25 bp, Artificial
  Probe
tgtgaactcttggaagtgctgtcaa

SEQ ID NO: 98839 - DNA, 25 bp, Artificial
  Probe
ttgtgaactcttggaagtgctgtca

SEQ ID NO: 98840 - DNA, 25 bp, Artificial
  Probe
caaataaacattctcgatcctccga

SEQ ID NO: 98841 - DNA, 25 bp, Artificial
  Probe
ccgacaaataaacattctcgatcct

SEQ ID NO: 98842 - DNA, 25 bp, Artificial
  Probe
acgttgccgacaaataaacattctc

SEQ ID NO: 98843 - DNA, 25 bp, Artificial
  Probe
gactataatgacgcgatgacagaca

SEQ ID NO: 98844 - DNA, 25 bp, Artificial
  Probe
ttgccgacaaataaacattctcgat

SEQ ID NO: 98845 - DNA, 25 bp, Artificial
  Probe
tataatgacgcgatgacagacacag

SEQ ID NO: 98846 - DNA, 25 bp, Artificial
  Probe
ctataatgacgcgatgacagacaca

SEQ ID NO: 98847 - DNA, 25 bp, Artificial
  Probe
actataatgacgcgatgacagacac

SEQ ID NO: 98848 - DNA, 25 bp, Artificial
  Probe
atgaccaaagctgtctcgaatgaaa

SEQ ID NO: 98849 - DNA, 25 bp, Artificial
  Probe
aatgaccaaagctgtctcgaatgaa

SEQ ID NO: 98850 - DNA, 25 bp, Artificial
  Probe
tgccgacaaataaacattctcgatc

SEQ ID NO: 98851 - DNA, 25 bp, Artificial
  Probe
ccagggaccagttcgactataatga

SEQ ID NO: 98852 - DNA, 25 bp, Artificial
  Probe
gttgccgacaaataaacattctcga

SEQ ID NO: 98853 - DNA, 25 bp, Artificial
  Probe
gccgacaaataaacattctcgatcc

SEQ ID NO: 98854 - DNA, 25 bp, Artificial
  Probe
agggaccagttcgactataatgacg

SEQ ID NO: 98855 - DNA, 25 bp, Artificial
  Probe
cgactataatgacgcgatgacagac

SEQ ID NO: 98856 - DNA, 25 bp, Artificial
  Probe
tgaccaaagctgtctcgaatgaaag

SEQ ID NO: 98857 - DNA, 25 bp, Artificial
  Probe
cgttgccgacaaataaacattctcg

SEQ ID NO: 98858 - DNA, 25 bp, Artificial
  Probe
atatcagaaacgttgccgacaaata

SEQ ID NO: 98859 - DNA, 25 bp, Artificial
  Probe
tatcagaaacgttgccgacaaataa

SEQ ID NO: 98860 - DNA, 25 bp, Artificial
  Probe
taatatcagaaacgttgccgacaaa

SEQ ID NO: 98861 - DNA, 25 bp, Artificial
  Probe
aaacgttgccgacaaataaacattc

SEQ ID NO: 98862 - DNA, 25 bp, Artificial
  Probe
gaaacgttgccgacaaataaacatt

SEQ ID NO: 98863 - DNA, 25 bp, Artificial
  Probe
ataaacattctcgatcctccgaaaa

SEQ ID NO: 98864 - DNA, 25 bp, Artificial
  Probe
aatatcagaaacgttgccgacaaat

SEQ ID NO: 98865 - DNA, 25 bp, Artificial
  Probe
gtaatatcagaaacgttgccgacaa

SEQ ID NO: 98866 - DNA, 25 bp, Artificial
  Probe
ttcgactataatgacgcgatgacag

SEQ ID NO: 98867 - DNA, 25 bp, Artificial
  Probe
agttcgactataatgacgcgatgac

SEQ ID NO: 98868 - DNA, 25 bp, Artificial
  Probe
cagttcgactataatgacgcgatga

SEQ ID NO: 98869 - DNA, 25 bp, Artificial
  Probe
atcagaaacgttgccgacaaataaa

SEQ ID NO: 98870 - DNA, 25 bp, Artificial
  Probe
taaacattctcgatcctccgaaaac

SEQ ID NO: 98871 - DNA, 25 bp, Artificial
  Probe
gttacaatatccatctagcctccag

SEQ ID NO: 98872 - DNA, 25 bp, Artificial
  Probe
gtgttacaatatccatctagcctcc

SEQ ID NO: 98873 - DNA, 25 bp, Artificial
  Probe
ggtgttacaatatccatctagcctc

SEQ ID NO: 98874 - DNA, 25 bp, Artificial
  Probe
tgttacaatatccatctagcctcca

SEQ ID NO: 98875 - DNA, 25 bp, Artificial
  Probe
ttacaatatccatctagcctccagg

SEQ ID NO: 98876 - DNA, 25 bp, Artificial
  Probe
agagtagaaatggacacgaataagc

SEQ ID NO: 98877 - DNA, 25 bp, Artificial
  Probe
cagagtagaaatggacacgaataag

SEQ ID NO: 98878 - DNA, 25 bp, Artificial
  Probe
tccagggtgttacaatatccatcta

SEQ ID NO: 98879 - DNA, 25 bp, Artificial
  Probe
ccagggtgttacaatatccatctag

SEQ ID NO: 98880 - DNA, 25 bp, Artificial
  Probe
atccagggtgttacaatatccatct

SEQ ID NO: 98881 - DNA, 25 bp, Artificial
  Probe
catccagggtgttacaatatccatc

SEQ ID NO: 98882 - DNA, 25 bp, Artificial
  Probe
cagggtgttacaatatccatctagc

SEQ ID NO: 98883 - DNA, 25 bp, Artificial
  Probe
atacatccagggtgttacaatatcc

SEQ ID NO: 98884 - DNA, 25 bp, Artificial
  Probe
gggtgttacaatatccatctagcct

SEQ ID NO: 98885 - DNA, 25 bp, Artificial
  Probe
agggtgttacaatatccatctagcc

SEQ ID NO: 98886 - DNA, 25 bp, Artificial
  Probe
tacatccagggtgttacaatatcca

SEQ ID NO: 98887 - DNA, 25 bp, Artificial
  Probe
cgtctcttaaaccagcctagtaact

SEQ ID NO: 98888 - DNA, 25 bp, Artificial
  Probe
gatacatccagggtgttacaatatc

SEQ ID NO: 98889 - DNA, 25 bp, Artificial
  Probe
gtctcttaaaccagcctagtaactg

SEQ ID NO: 98890 - DNA, 25 bp, Artificial
  Probe
acatccagggtgttacaatatccat

SEQ ID NO: 98891 - DNA, 25 bp, Artificial
  Probe
gagtagaaatggacacgaataagct

SEQ ID NO: 98892 - DNA, 25 bp, Artificial
  Probe
acaatacttcccagagtagaaatgg

SEQ ID NO: 98893 - DNA, 25 bp, Artificial
  Probe
aatacttcccagagtagaaatggac

SEQ ID NO: 98894 - DNA, 25 bp, Artificial
  Probe
caatacttcccagagtagaaatgga

SEQ ID NO: 98895 - DNA, 25 bp, Artificial
  Probe
ggacaatacttcccagagtagaaat

SEQ ID NO: 98896 - DNA, 25 bp, Artificial
  Probe
ccagagtagaaatggacacgaataa

SEQ ID NO: 98897 - DNA, 25 bp, Artificial
  Probe
atacttcccagagtagaaatggaca

SEQ ID NO: 98898 - DNA, 25 bp, Artificial
  Probe
atggacaatacttcccagagtagaa

SEQ ID NO: 98899 - DNA, 25 bp, Artificial
  Probe
tggacaatacttcccagagtagaaa

SEQ ID NO: 98900 - DNA, 25 bp, Artificial
  Probe
ttacaaacgccatgtctgtctttaa

SEQ ID NO: 98901 - DNA, 25 bp, Artificial
  Probe
gatggacaatacttcccagagtaga

SEQ ID NO: 98902 - DNA, 25 bp, Artificial
  Probe
atacgtctcttaaaccagcctagta

SEQ ID NO: 98903 - DNA, 25 bp, Artificial
  Probe
gacaatacttcccagagtagaaatg

SEQ ID NO: 98904 - DNA, 25 bp, Artificial
  Probe
ggatacatccagggtgttacaatat

SEQ ID NO: 98905 - DNA, 25 bp, Artificial
  Probe
tacgtctcttaaaccagcctagtaa

SEQ ID NO: 98906 - DNA, 25 bp, Artificial
  Probe
cttacaaacgccatgtctgtcttta

SEQ ID NO: 98907 - DNA, 25 bp, Artificial
  Probe
tacaatatccatctagcctccaggg

SEQ ID NO: 98908 - DNA, 25 bp, Artificial
  Probe
tgatggacaatacttcccagagtag

SEQ ID NO: 98909 - DNA, 25 bp, Artificial
  Probe
tctcttaaaccagcctagtaactgc

SEQ ID NO: 98910 - DNA, 25 bp, Artificial
  Probe
tacttcccagagtagaaatggacac

SEQ ID NO: 98911 - DNA, 25 bp, Artificial
  Probe
gtgatggacaatacttcccagagta

SEQ ID NO: 98912 - DNA, 25 bp, Artificial
  Probe
tacaaacgccatgtctgtctttaaa

SEQ ID NO: 98913 - DNA, 25 bp, Artificial
  Probe
cccagagtagaaatggacacgaata

SEQ ID NO: 98914 - DNA, 25 bp, Artificial
  Probe
taaaccagcctagtaactgcttaaa

SEQ ID NO: 98915 - DNA, 25 bp, Artificial
  Probe
ttaaaccagcctagtaactgcttaa

SEQ ID NO: 98916 - DNA, 25 bp, Artificial
  Probe
tgttgtatgtaaagtttccagttgc

SEQ ID NO: 98917 - DNA, 25 bp, Artificial
  Probe
gttgtatgtaaagtttccagttgcg

SEQ ID NO: 98918 - DNA, 25 bp, Artificial
  Probe
tagtaaaccgcattgagtgttgatg

SEQ ID NO: 98919 - DNA, 25 bp, Artificial
  Probe
gtagtaaaccgcattgagtgttgat

SEQ ID NO: 98920 - DNA, 25 bp, Artificial
  Probe
gctgttgtatgtaaagtttccagtt

SEQ ID NO: 98921 - DNA, 25 bp, Artificial
  Probe
ctgttgtatgtaaagtttccagttg

SEQ ID NO: 98922 - DNA, 25 bp, Artificial
  Probe
atcagtgtcatcgtgctaagtccat

SEQ ID NO: 98923 - DNA, 25 bp, Artificial
  Probe
attgagtgttgatgctggtgacttg

SEQ ID NO: 98924 - DNA, 25 bp, Artificial
  Probe
cattgagtgttgatgctggtgactt

SEQ ID NO: 98925 - DNA, 25 bp, Artificial
  Probe
cttgtcgtgggaagtggtagtaaac

SEQ ID NO: 98926 - DNA, 25 bp, Artificial
  Probe
gatcagtgtcatcgtgctaagtcca

SEQ ID NO: 98927 - DNA, 25 bp, Artificial
  Probe
gtgttgatgctggtgacttgtgatc

SEQ ID NO: 98928 - DNA, 25 bp, Artificial
  Probe
tcagccagtaccattttatttacct

SEQ ID NO: 98929 - DNA, 25 bp, Artificial
  Probe
agtgtcatcgtgctaagtccatgtt

SEQ ID NO: 98930 - DNA, 25 bp, Artificial
  Probe
ttcagccagtaccattttatttacc

SEQ ID NO: 98931 - DNA, 25 bp, Artificial
  Probe
tttatttacctgagcttgtcgtggg

SEQ ID NO: 98932 - DNA, 25 bp, Artificial
  Probe
gacttttcagccagtaccattttat

SEQ ID NO: 98933 - DNA, 25 bp, Artificial
  Probe
agtgttgatgctggtgacttgtgat

SEQ ID NO: 98934 - DNA, 25 bp, Artificial
  Probe
tgacttttcagccagtaccatttta

SEQ ID NO: 98935 - DNA, 25 bp, Artificial
  Probe
gaagtggtagtaaaccgcattgagt

SEQ ID NO: 98936 - DNA, 25 bp, Artificial
  Probe
acttttcagccagtaccattttatt

SEQ ID NO: 98937 - DNA, 25 bp, Artificial
  Probe
gtgtcatcgtgctaagtccatgttt

SEQ ID NO: 98938 - DNA, 25 bp, Artificial
  Probe
cttttcagccagtaccattttattt

SEQ ID NO: 98939 - DNA, 25 bp, Artificial
  Probe
tcagtgtcatcgtgctaagtccatg

SEQ ID NO: 98940 - DNA, 25 bp, Artificial
  Probe
attttatttacctgagcttgtcgtg

SEQ ID NO: 98941 - DNA, 25 bp, Artificial
  Probe
cattttatttacctgagcttgtcgt

SEQ ID NO: 98942 - DNA, 25 bp, Artificial
  Probe
agccagtaccattttatttacctga

SEQ ID NO: 98943 - DNA, 25 bp, Artificial
  Probe
cagccagtaccattttatttacctg

SEQ ID NO: 98944 - DNA, 25 bp, Artificial
  Probe
atcgtgctaagtccatgttttgtac

SEQ ID NO: 98945 - DNA, 25 bp, Artificial
  Probe
ccagtaccattttatttacctgagc

SEQ ID NO: 98946 - DNA, 25 bp, Artificial
  Probe
gccagtaccattttatttacctgag

SEQ ID NO: 98947 - DNA, 25 bp, Artificial
  Probe
ggtagtaaaccgcattgagtgttga

SEQ ID NO: 98948 - DNA, 25 bp, Artificial
  Probe
aagtggtagtaaaccgcattgagtg

SEQ ID NO: 98949 - DNA, 25 bp, Artificial
  Probe
ccattttatttacctgagcttgtcg

SEQ ID NO: 98950 - DNA, 25 bp, Artificial
  Probe
accattttatttacctgagcttgtc

SEQ ID NO: 98951 - DNA, 25 bp, Artificial
  Probe
ttgagtgttgatgctggtgacttgt

SEQ ID NO: 98952 - DNA, 25 bp, Artificial
  Probe
catcgtgctaagtccatgttttgta

SEQ ID NO: 98953 - DNA, 25 bp, Artificial
  Probe
tttcagccagtaccattttatttac

SEQ ID NO: 98954 - DNA, 25 bp, Artificial
  Probe
gtgacttttcagccagtaccatttt

SEQ ID NO: 98955 - DNA, 25 bp, Artificial
  Probe
ttgtgatcagtgtcatcgtgctaag

SEQ ID NO: 98956 - DNA, 25 bp, Artificial
  Probe
cttgtgatcagtgtcatcgtgctaa

SEQ ID NO: 98957 - DNA, 25 bp, Artificial
  Probe
tggtagtaaaccgcattgagtgttg

SEQ ID NO: 98958 - DNA, 25 bp, Artificial
  Probe
gtggtagtaaaccgcattgagtgtt

SEQ ID NO: 98959 - DNA, 25 bp, Artificial
  Probe
ttttatttacctgagcttgtcgtgg

SEQ ID NO: 98960 - DNA, 25 bp, Artificial
  Probe
cagtgtcatcgtgctaagtccatgt

SEQ ID NO: 98961 - DNA, 25 bp, Artificial
  Probe
aataacaccatgagaacacgagttg

SEQ ID NO: 98962 - DNA, 25 bp, Artificial
  Probe
tcatctcagattctccatctcctat

SEQ ID NO: 98963 - DNA, 25 bp, Artificial
  Probe
atcatctcagattctccatctccta

SEQ ID NO: 98964 - DNA, 25 bp, Artificial
  Probe
tatcatctcagattctccatctcct

SEQ ID NO: 98965 - DNA, 25 bp, Artificial
  Probe
atctcagattctccatctcctattg

SEQ ID NO: 98966 - DNA, 25 bp, Artificial
  Probe
catctcagattctccatctcctatt

SEQ ID NO: 98967 - DNA, 25 bp, Artificial
  Probe
atatcatctcagattctccatctcc

SEQ ID NO: 98968 - DNA, 25 bp, Artificial
  Probe
tagaactgacctgtctcgtgactta

SEQ ID NO: 98969 - DNA, 25 bp, Artificial
  Probe
tattgctgcaagaacactgacatta

SEQ ID NO: 98970 - DNA, 25 bp, Artificial
  Probe
ttagatgaacttgggaatgtacctg

SEQ ID NO: 98971 - DNA, 25 bp, Artificial
  Probe
tttagatgaacttgggaatgtacct

SEQ ID NO: 98972 - DNA, 25 bp, Artificial
  Probe
ctcagattctccatctcctattgct

SEQ ID NO: 98973 - DNA, 25 bp, Artificial
  Probe
tctcagattctccatctcctattgc

SEQ ID NO: 98974 - DNA, 25 bp, Artificial
  Probe
tagatgaacttgggaatgtacctga

SEQ ID NO: 98975 - DNA, 25 bp, Artificial
  Probe
tcagattctccatctcctattgctg

SEQ ID NO: 98976 - DNA, 25 bp, Artificial
  Probe
cctgaatccacggatgtttaatatc

SEQ ID NO: 98977 - DNA, 25 bp, Artificial
  Probe
gcagaatttagcaaatcttgtggaa

SEQ ID NO: 98978 - DNA, 25 bp, Artificial
  Probe
ataacaccatgagaacacgagttgt

SEQ ID NO: 98979 - DNA, 25 bp, Artificial
  Probe
actgacattagtggctaaatctgtg

SEQ ID NO: 98980 - DNA, 25 bp, Artificial
  Probe
attgctgcaagaacactgacattag

SEQ ID NO: 98981 - DNA, 25 bp, Artificial
  Probe
ctattgctgcaagaacactgacatt

SEQ ID NO: 98982 - DNA, 25 bp, Artificial
  Probe
aaataacaccatgagaacacgagtt

SEQ ID NO: 98983 - DNA, 25 bp, Artificial
  Probe
caaataacaccatgagaacacgagt

SEQ ID NO: 98984 - DNA, 25 bp, Artificial
  Probe
ctgaatccacggatgtttaatatca

SEQ ID NO: 98985 - DNA, 25 bp, Artificial
  Probe
gtaattcacatcaccatgtctcctt

SEQ ID NO: 98986 - DNA, 25 bp, Artificial
  Probe
cagaatttagcaaatcttgtggaat

SEQ ID NO: 98987 - DNA, 25 bp, Artificial
  Probe
agatgaacttgggaatgtacctgag

SEQ ID NO: 98988 - DNA, 25 bp, Artificial
  Probe
aatatcatctcagattctccatctc

SEQ ID NO: 98989 - DNA, 25 bp, Artificial
  Probe
tgaatccacggatgtttaatatcat

SEQ ID NO: 98990 - DNA, 25 bp, Artificial
  Probe
attctccatctcctattgctgcaag

SEQ ID NO: 98991 - DNA, 25 bp, Artificial
  Probe
gattctccatctcctattgctgcaa

SEQ ID NO: 98992 - DNA, 25 bp, Artificial
  Probe
aatcttgtggaatttggagctaagg

SEQ ID NO: 98993 - DNA, 25 bp, Artificial
  Probe
ggaaggtgtcaatccattcatcaaa

SEQ ID NO: 98994 - DNA, 25 bp, Artificial
  Probe
tcctgaatccacggatgtttaatat

SEQ ID NO: 98995 - DNA, 25 bp, Artificial
  Probe
gagatttgtgtagctcattcagatg

SEQ ID NO: 98996 - DNA, 25 bp, Artificial
  Probe
ctgacattagtggctaaatctgtgc

SEQ ID NO: 98997 - DNA, 25 bp, Artificial
  Probe
ttgtgtagctcattcagatgaactg

SEQ ID NO: 98998 - DNA, 25 bp, Artificial
  Probe
agaactgacctgtctcgtgacttag

SEQ ID NO: 98999 - DNA, 25 bp, Artificial
  Probe
aaatcttgtggaatttggagctaag

SEQ ID NO: 99000 - DNA, 25 bp, Artificial
  Probe
agaatttagcaaatcttgtggaatt

SEQ ID NO: 99001 - DNA, 25 bp, Artificial
  Probe
cagattctccatctcctattgctgc

SEQ ID NO: 99002 - DNA, 25 bp, Artificial
  Probe
atcttgtggaatttggagctaagga

SEQ ID NO: 99003 - DNA, 25 bp, Artificial
  Probe
ggcaataacagaactgcttcaacaa

SEQ ID NO: 99004 - DNA, 25 bp, Artificial
  Probe
ggagctaaggagccttatatggaag

SEQ ID NO: 99005 - DNA, 25 bp, Artificial
  Probe
atctcctattgctgcaagaacactg

SEQ ID NO: 99006 - DNA, 25 bp, Artificial
  Probe
tcacactcttggaataatcagctat

SEQ ID NO: 99007 - DNA, 25 bp, Artificial
  Probe
ttcacactcttggaataatcagcta

SEQ ID NO: 99008 - DNA, 25 bp, Artificial
  Probe
aattcacactcttggaataatcagc

SEQ ID NO: 99009 - DNA, 25 bp, Artificial
  Probe
cacactcttggaataatcagctatt

SEQ ID NO: 99010 - DNA, 25 bp, Artificial
  Probe
tctacagagtctatttctaccgagt

SEQ ID NO: 99011 - DNA, 25 bp, Artificial
  Probe
gtctacagagtctatttctaccgag

SEQ ID NO: 99012 - DNA, 25 bp, Artificial
  Probe
cggcaaggatataaattcacactct

SEQ ID NO: 99013 - DNA, 25 bp, Artificial
  Probe
tacagagtctatttctaccgagttc

SEQ ID NO: 99014 - DNA, 25 bp, Artificial
  Probe
ctacagagtctatttctaccgagtt

SEQ ID NO: 99015 - DNA, 25 bp, Artificial
  Probe
cgtctacagagtctatttctaccga

SEQ ID NO: 99016 - DNA, 25 bp, Artificial
  Probe
ggcaaggatataaattcacactctt

SEQ ID NO: 99017 - DNA, 25 bp, Artificial
  Probe
agtctatttctaccgagttccacag

SEQ ID NO: 99018 - DNA, 25 bp, Artificial
  Probe
gagtctatttctaccgagttccaca

SEQ ID NO: 99019 - DNA, 25 bp, Artificial
  Probe
agagtctatttctaccgagttccac

SEQ ID NO: 99020 - DNA, 25 bp, Artificial
  Probe
cagagtctatttctaccgagttcca

SEQ ID NO: 99021 - DNA, 25 bp, Artificial
  Probe
acagagtctatttctaccgagttcc

SEQ ID NO: 99022 - DNA, 25 bp, Artificial
  Probe
attcacactcttggaataatcagct

SEQ ID NO: 99023 - DNA, 25 bp, Artificial
  Probe
tatgacagaaatgcttaactgggat

SEQ ID NO: 99024 - DNA, 25 bp, Artificial
  Probe
ttatgacagaaatgcttaactggga

SEQ ID NO: 99025 - DNA, 25 bp, Artificial
  Probe
cttatgacagaaatgcttaactggg

SEQ ID NO: 99026 - DNA, 25 bp, Artificial
  Probe
gcttatgacagaaatgcttaactgg

SEQ ID NO: 99027 - DNA, 25 bp, Artificial
  Probe
gtctatttctaccgagttccacagg

SEQ ID NO: 99028 - DNA, 25 bp, Artificial
  Probe
gcggcaaggatataaattcacactc

SEQ ID NO: 99029 - DNA, 25 bp, Artificial
  Probe
aggatataaattcacactcttggaa

SEQ ID NO: 99030 - DNA, 25 bp, Artificial
  Probe
aaggatataaattcacactcttgga

SEQ ID NO: 99031 - DNA, 25 bp, Artificial
  Probe
gtagtgaggctattcagcttatgac

SEQ ID NO: 99032 - DNA, 25 bp, Artificial
  Probe
agtagtgaggctattcagcttatga

SEQ ID NO: 99033 - DNA, 25 bp, Artificial
  Probe
cagtagtgaggctattcagcttatg

SEQ ID NO: 99034 - DNA, 25 bp, Artificial
  Probe
atgacagaaatgcttaactgggatc

SEQ ID NO: 99035 - DNA, 25 bp, Artificial
  Probe
tagtgaggctattcagcttatgaca

SEQ ID NO: 99036 - DNA, 25 bp, Artificial
  Probe
tgaggctattcagcttatgacagaa

SEQ ID NO: 99037 - DNA, 25 bp, Artificial
  Probe
ccagtagtgaggctattcagcttat

SEQ ID NO: 99038 - DNA, 25 bp, Artificial
  Probe
aaaccataccaacgaatccagtcag

SEQ ID NO: 99039 - DNA, 25 bp, Artificial
  Probe
aatcagctatttcctaagtctctgg

SEQ ID NO: 99040 - DNA, 25 bp, Artificial
  Probe
acgtctacagagtctatttctaccg

SEQ ID NO: 99041 - DNA, 25 bp, Artificial
  Probe
acactcttggaataatcagctattt

SEQ ID NO: 99042 - DNA, 25 bp, Artificial
  Probe
gtgaggctattcagcttatgacaga

SEQ ID NO: 99043 - DNA, 25 bp, Artificial
  Probe
agtgaggctattcagcttatgacag

SEQ ID NO: 99044 - DNA, 25 bp, Artificial
  Probe
atcagctatttcctaagtctctggg

SEQ ID NO: 99045 - DNA, 25 bp, Artificial
  Probe
gcatccttaaaatctgacacaaact

SEQ ID NO: 99046 - DNA, 25 bp, Artificial
  Probe
ccatattttcaagtcggtcaggtat

SEQ ID NO: 99047 - DNA, 25 bp, Artificial
  Probe
ctatttctaccgagttccacaggac

SEQ ID NO: 99048 - DNA, 25 bp, Artificial
  Probe
tctatttctaccgagttccacagga

SEQ ID NO: 99049 - DNA, 25 bp, Artificial
  Probe
cactcttggaataatcagctatttc

SEQ ID NO: 99050 - DNA, 25 bp, Artificial
  Probe
catattttcaagtcggtcaggtatt

SEQ ID NO: 99051 - DNA, 25 bp, Artificial
  Probe
tcctgttcttcttcattgtcatcat

SEQ ID NO: 99052 - DNA, 25 bp, Artificial
  Probe
cctgttcttcttcattgtcatcatt

SEQ ID NO: 99053 - DNA, 25 bp, Artificial
  Probe
ctcctgttcttcttcattgtcatca

SEQ ID NO: 99054 - DNA, 25 bp, Artificial
  Probe
cctcctgttcttcttcattgtcatc

SEQ ID NO: 99055 - DNA, 25 bp, Artificial
  Probe
ttgtcatcattattgtcctgaacct

SEQ ID NO: 99056 - DNA, 25 bp, Artificial
  Probe
tcattattgtcctgaacctcatctt

SEQ ID NO: 99057 - DNA, 25 bp, Artificial
  Probe
tcatcattattgtcctgaacctcat

SEQ ID NO: 99058 - DNA, 25 bp, Artificial
  Probe
atcattattgtcctgaacctcatct

SEQ ID NO: 99059 - DNA, 25 bp, Artificial
  Probe
catcattattgtcctgaacctcatc

SEQ ID NO: 99060 - DNA, 25 bp, Artificial
  Probe
gtcatcattattgtcctgaacctca

SEQ ID NO: 99061 - DNA, 25 bp, Artificial
  Probe
tgtcatcattattgtcctgaacctc

SEQ ID NO: 99062 - DNA, 25 bp, Artificial
  Probe
attgtcatcattattgtcctgaacc

SEQ ID NO: 99063 - DNA, 25 bp, Artificial
  Probe
cttcattgtcatcattattgtcctg

SEQ ID NO: 99064 - DNA, 25 bp, Artificial
  Probe
tcttcattgtcatcattattgtcct

SEQ ID NO: 99065 - DNA, 25 bp, Artificial
  Probe
acctcctgttcttcttcattgtcat

SEQ ID NO: 99066 - DNA, 25 bp, Artificial
  Probe
atgtggaactacctgtacttcattg

SEQ ID NO: 99067 - DNA, 25 bp, Artificial
  Probe
catgtggaactacctgtacttcatt

SEQ ID NO: 99068 - DNA, 25 bp, Artificial
  Probe
cattgtcatcattattgtcctgaac

SEQ ID NO: 99069 - DNA, 25 bp, Artificial
  Probe
tcattgtcatcattattgtcctgaa

SEQ ID NO: 99070 - DNA, 25 bp, Artificial
  Probe
ttcattgtcatcattattgtcctga

SEQ ID NO: 99071 - DNA, 25 bp, Artificial
  Probe
gcctgtgatactctgcttatgtgta

SEQ ID NO: 99072 - DNA, 25 bp, Artificial
  Probe
gtggaactacctgtacttcattgtg

SEQ ID NO: 99073 - DNA, 25 bp, Artificial
  Probe
cctgtgatactctgcttatgtgtat

SEQ ID NO: 99074 - DNA, 25 bp, Artificial
  Probe
tactctgcttatgtgtattgtcacc

SEQ ID NO: 99075 - DNA, 25 bp, Artificial
  Probe
tacgacctcctgttcttcttcattg

SEQ ID NO: 99076 - DNA, 25 bp, Artificial
  Probe
gaactacctgtacttcattgtgctg

SEQ ID NO: 99077 - DNA, 25 bp, Artificial
  Probe
tgtggaactacctgtacttcattgt

SEQ ID NO: 99078 - DNA, 25 bp, Artificial
  Probe
ttcttcattgtcatcattattgtcc

SEQ ID NO: 99079 - DNA, 25 bp, Artificial
  Probe
atactctgcttatgtgtattgtcac

SEQ ID NO: 99080 - DNA, 25 bp, Artificial
  Probe
gtgatactctgcttatgtgtattgt

SEQ ID NO: 99081 - DNA, 25 bp, Artificial
  Probe
tgtgatactctgcttatgtgtattg

SEQ ID NO: 99082 - DNA, 25 bp, Artificial
  Probe
ctgttcttcttcattgtcatcatta

SEQ ID NO: 99083 - DNA, 25 bp, Artificial
  Probe
gatactctgcttatgtgtattgtca

SEQ ID NO: 99084 - DNA, 25 bp, Artificial
  Probe
tgatactctgcttatgtgtattgtc

SEQ ID NO: 99085 - DNA, 25 bp, Artificial
  Probe
ctgtgatactctgcttatgtgtatt

SEQ ID NO: 99086 - DNA, 25 bp, Artificial
  Probe
gtacgacctcctgttcttcttcatt

SEQ ID NO: 99087 - DNA, 25 bp, Artificial
  Probe
ggaactacctgtacttcattgtgct

SEQ ID NO: 99088 - DNA, 25 bp, Artificial
  Probe
aactacctgtacttcattgtgctgg

SEQ ID NO: 99089 - DNA, 25 bp, Artificial
  Probe
gacctcctgttcttcttcattgtca

SEQ ID NO: 99090 - DNA, 25 bp, Artificial
  Probe
tcttcttcattgtcatcattattgt

SEQ ID NO: 99091 - DNA, 25 bp, Artificial
  Probe
tgttcttcttcattgtcatcattat

SEQ ID NO: 99092 - DNA, 25 bp, Artificial
  Probe
tggaactacctgtacttcattgtgc

SEQ ID NO: 99093 - DNA, 25 bp, Artificial
  Probe
ttattgtcctgaacctcatctttgg

SEQ ID NO: 99094 - DNA, 25 bp, Artificial
  Probe
cgagaagcagaagaaagaggaaatc

SEQ ID NO: 99095 - DNA, 25 bp, Artificial
  Probe
gagaagcagaagaaagaggaaatcc

SEQ ID NO: 99096 - DNA, 25 bp, Artificial
  Probe
atgagccatccaaagaaacactatg

SEQ ID NO: 99097 - DNA, 25 bp, Artificial
  Probe
actatgttctctctgagtccgactt

SEQ ID NO: 99098 - DNA, 25 bp, Artificial
  Probe
catgagccatccaaagaaacactat

SEQ ID NO: 99099 - DNA, 25 bp, Artificial
  Probe
acactatgttctctctgagtccgac

SEQ ID NO: 99100 - DNA, 25 bp, Artificial
  Probe
cactatgttctctctgagtccgact

SEQ ID NO: 99101 - DNA, 25 bp, Artificial
  Probe
tatgttctctctgagtccgactttc

SEQ ID NO: 99102 - DNA, 25 bp, Artificial
  Probe
ctatgttctctctgagtccgacttt

SEQ ID NO: 99103 - DNA, 25 bp, Artificial
  Probe
tgagccatccaaagaaacactatgt

SEQ ID NO: 99104 - DNA, 25 bp, Artificial
  Probe
acatgagccatccaaagaaacacta

SEQ ID NO: 99105 - DNA, 25 bp, Artificial
  Probe
actctgacactctcctttcttcctg

SEQ ID NO: 99106 - DNA, 25 bp, Artificial
  Probe
cactctgacactctcctttcttcct

SEQ ID NO: 99107 - DNA, 25 bp, Artificial
  Probe
aacactatgttctctctgagtccga

SEQ ID NO: 99108 - DNA, 25 bp, Artificial
  Probe
ctcctttcttcctgcctgtgttcta

SEQ ID NO: 99109 - DNA, 25 bp, Artificial
  Probe
agaaacactatgttctctctgagtc

SEQ ID NO: 99110 - DNA, 25 bp, Artificial
  Probe
ccatccaaagaaacactatgttctc

SEQ ID NO: 99111 - DNA, 25 bp, Artificial
  Probe
ccaaagaaacactatgttctctctg

SEQ ID NO: 99112 - DNA, 25 bp, Artificial
  Probe
tccaaagaaacactatgttctctct

SEQ ID NO: 99113 - DNA, 25 bp, Artificial
  Probe
gacatgagccatccaaagaaacact

SEQ ID NO: 99114 - DNA, 25 bp, Artificial
  Probe
gaaacactatgttctctctgagtcc

SEQ ID NO: 99115 - DNA, 25 bp, Artificial
  Probe
aagaaacactatgttctctctgagt

SEQ ID NO: 99116 - DNA, 25 bp, Artificial
  Probe
catccaaagaaacactatgttctct

SEQ ID NO: 99117 - DNA, 25 bp, Artificial
  Probe
caaagaaacactatgttctctctga

SEQ ID NO: 99118 - DNA, 25 bp, Artificial
  Probe
atccaaagaaacactatgttctctc

SEQ ID NO: 99119 - DNA, 25 bp, Artificial
  Probe
aaagaaacactatgttctctctgag

SEQ ID NO: 99120 - DNA, 25 bp, Artificial
  Probe
gccatccaaagaaacactatgttct

SEQ ID NO: 99121 - DNA, 25 bp, Artificial
  Probe
agccatccaaagaaacactatgttc

SEQ ID NO: 99122 - DNA, 25 bp, Artificial
  Probe
gagccatccaaagaaacactatgtt

SEQ ID NO: 99123 - DNA, 25 bp, Artificial
  Probe
ctgagtccgactttccaagaaactt

SEQ ID NO: 99124 - DNA, 25 bp, Artificial
  Probe
aaacactatgttctctctgagtccg

SEQ ID NO: 99125 - DNA, 25 bp, Artificial
  Probe
ctctctgagtccgactttccaagaa

SEQ ID NO: 99126 - DNA, 25 bp, Artificial
  Probe
ttctctctgagtccgactttccaag

SEQ ID NO: 99127 - DNA, 25 bp, Artificial
  Probe
atgttctctctgagtccgactttcc

SEQ ID NO: 99128 - DNA, 25 bp, Artificial
  Probe
aaggacatgagccatccaaagaaac

SEQ ID NO: 99129 - DNA, 25 bp, Artificial
  Probe
caaggacatgagccatccaaagaaa

SEQ ID NO: 99130 - DNA, 25 bp, Artificial
  Probe
ctctgacactctcctttcttcctgc

SEQ ID NO: 99131 - DNA, 25 bp, Artificial
  Probe
ctcttcaaggacatgagccatccaa

SEQ ID NO: 99132 - DNA, 25 bp, Artificial
  Probe
gttctctctgagtccgactttccaa

SEQ ID NO: 99133 - DNA, 25 bp, Artificial
  Probe
ctctgagtccgactttccaagaaac

SEQ ID NO: 99134 - DNA, 25 bp, Artificial
  Probe
tctctgagtccgactttccaagaaa

SEQ ID NO: 99135 - DNA, 25 bp, Artificial
  Probe
cttcaaggacatgagccatccaaag

SEQ ID NO: 99136 - DNA, 25 bp, Artificial
  Probe
tctgagtccgactttccaagaaact

SEQ ID NO: 99137 - DNA, 25 bp, Artificial
  Probe
ctctcctttcttcctgcctgtgttc

SEQ ID NO: 99138 - DNA, 25 bp, Artificial
  Probe
tcaaggacatgagccatccaaagaa

SEQ ID NO: 99139 - DNA, 25 bp, Artificial
  Probe
ttcaaggacatgagccatccaaaga

SEQ ID NO: 99140 - DNA, 25 bp, Artificial
  Probe
tcttcaaggacatgagccatccaaa

SEQ ID NO: 99141 - DNA, 25 bp, Artificial
  Probe
gttccgatgttggttgtgtaatcaa

SEQ ID NO: 99142 - DNA, 25 bp, Artificial
  Probe
aaggttccgatgttggttgtgtaat

SEQ ID NO: 99143 - DNA, 25 bp, Artificial
  Probe
ccaacgggaactctataaagtgtta

SEQ ID NO: 99144 - DNA, 25 bp, Artificial
  Probe
aggttccgatgttggttgtgtaatc

SEQ ID NO: 99145 - DNA, 25 bp, Artificial
  Probe
caacgggaactctataaagtgttag

SEQ ID NO: 99146 - DNA, 25 bp, Artificial
  Probe
ttccgatgttggttgtgtaatcaaa

SEQ ID NO: 99147 - DNA, 25 bp, Artificial
  Probe
gaaggttccgatgttggttgtgtaa

SEQ ID NO: 99148 - DNA, 25 bp, Artificial
  Probe
gatcactgacctcaagaaatggaag

SEQ ID NO: 99149 - DNA, 25 bp, Artificial
  Probe
ggttccgatgttggttgtgtaatca

SEQ ID NO: 99150 - DNA, 25 bp, Artificial
  Probe
tccgatgttggttgtgtaatcaaag

SEQ ID NO: 99151 - DNA, 25 bp, Artificial
  Probe
agatcactgacctcaagaaatggaa

SEQ ID NO: 99152 - DNA, 25 bp, Artificial
  Probe
tttatactccacatgctgcttgatg

SEQ ID NO: 99153 - DNA, 25 bp, Artificial
  Probe
aacgggaactctataaagtgttaga

SEQ ID NO: 99154 - DNA, 25 bp, Artificial
  Probe
gatgttggttgtgtaatcaaagcta

SEQ ID NO: 99155 - DNA, 25 bp, Artificial
  Probe
tgttggttgtgtaatcaaagctaaa

SEQ ID NO: 99156 - DNA, 25 bp, Artificial
  Probe
ttggttgtgtaatcaaagctaaacg

SEQ ID NO: 99157 - DNA, 25 bp, Artificial
  Probe
tgtaatcaaagctaaacgtggaaag

SEQ ID NO: 99158 - DNA, 25 bp, Artificial
  Probe
gttggttgtgtaatcaaagctaaac

SEQ ID NO: 99159 - DNA, 25 bp, Artificial
  Probe
atgttggttgtgtaatcaaagctaa

SEQ ID NO: 99160 - DNA, 25 bp, Artificial
  Probe
aaagttgtttcctccctccttcttc

SEQ ID NO: 99161 - DNA, 25 bp, Artificial
  Probe
gtgtaatcaaagctaaacgtggaaa

SEQ ID NO: 99162 - DNA, 25 bp, Artificial
  Probe
tatactccacatgctgcttgatgta

SEQ ID NO: 99163 - DNA, 25 bp, Artificial
  Probe
gagatcactgacctcaagaaatgga

SEQ ID NO: 99164 - DNA, 25 bp, Artificial
  Probe
tgtgtaatcaaagctaaacgtggaa

SEQ ID NO: 99165 - DNA, 25 bp, Artificial
  Probe
tcaacagaaagcaggagatgagatc

SEQ ID NO: 99166 - DNA, 25 bp, Artificial
  Probe
ctgttaaacacacgtctggaataaa

SEQ ID NO: 99167 - DNA, 25 bp, Artificial
  Probe
ttgtgtaatcaaagctaaacgtgga

SEQ ID NO: 99168 - DNA, 25 bp, Artificial
  Probe
gttgtgtaatcaaagctaaacgtgg

SEQ ID NO: 99169 - DNA, 25 bp, Artificial
  Probe
ggttgtgtaatcaaagctaaacgtg

SEQ ID NO: 99170 - DNA, 25 bp, Artificial
  Probe
actgttaaacacacgtctggaataa

SEQ ID NO: 99171 - DNA, 25 bp, Artificial
  Probe
atcactgacctcaagaaatggaagg

SEQ ID NO: 99172 - DNA, 25 bp, Artificial
  Probe
tggttgtgtaatcaaagctaaacgt

SEQ ID NO: 99173 - DNA, 25 bp, Artificial
  Probe
ttatactccacatgctgcttgatgt

SEQ ID NO: 99174 - DNA, 25 bp, Artificial
  Probe
gccaacgggaactctataaagtgtt

SEQ ID NO: 99175 - DNA, 25 bp, Artificial
  Probe
ccgatgttggttgtgtaatcaaagc

SEQ ID NO: 99176 - DNA, 25 bp, Artificial
  Probe
ctccctccttcttcacacaaaatat

SEQ ID NO: 99177 - DNA, 25 bp, Artificial
  Probe
aatggattttatcacagcaaacagt

SEQ ID NO: 99178 - DNA, 25 bp, Artificial
  Probe
agaatggattttatcacagcaaaca

SEQ ID NO: 99179 - DNA, 25 bp, Artificial
  Probe
gaatggattttatcacagcaaacag

SEQ ID NO: 99180 - DNA, 25 bp, Artificial
  Probe
cactgttaaacacacgtctggaata

SEQ ID NO: 99181 - DNA, 25 bp, Artificial
  Probe
cgatgttggttgtgtaatcaaagct

SEQ ID NO: 99182 - DNA, 25 bp, Artificial
  Probe
ggagatcactgacctcaagaaatgg

SEQ ID NO: 99183 - DNA, 25 bp, Artificial
  Probe
gggagatcactgacctcaagaaatg

SEQ ID NO: 99184 - DNA, 25 bp, Artificial
  Probe
aagttgtttcctccctccttcttca

SEQ ID NO: 99185 - DNA, 25 bp, Artificial
  Probe
aagaatggattttatcacagcaaac

SEQ ID NO: 99186 - DNA, 25 bp, Artificial
  Probe
cccttaccctgattctatgtttact

SEQ ID NO: 99187 - DNA, 25 bp, Artificial
  Probe
gtgccgattctactttacatttgtt

SEQ ID NO: 99188 - DNA, 25 bp, Artificial
  Probe
tgccgattctactttacatttgttt

SEQ ID NO: 99189 - DNA, 25 bp, Artificial
  Probe
ccttaccctgattctatgtttactt

SEQ ID NO: 99190 - DNA, 25 bp, Artificial
  Probe
cgtgccgattctactttacatttgt

SEQ ID NO: 99191 - DNA, 25 bp, Artificial
  Probe
atttatttacagagtgcatgacgtg

SEQ ID NO: 99192 - DNA, 25 bp, Artificial
  Probe
gatttatttacagagtgcatgacgt

SEQ ID NO: 99193 - DNA, 25 bp, Artificial
  Probe
ggatttatttacagagtgcatgacg

SEQ ID NO: 99194 - DNA, 25 bp, Artificial
  Probe
tttaatagaaggacctttcgagaag

SEQ ID NO: 99195 - DNA, 25 bp, Artificial
  Probe
ctttaatagaaggacctttcgagaa

SEQ ID NO: 99196 - DNA, 25 bp, Artificial
  Probe
gacgtgccgattctactttacattt

SEQ ID NO: 99197 - DNA, 25 bp, Artificial
  Probe
ccccttaccctgattctatgtttac

SEQ ID NO: 99198 - DNA, 25 bp, Artificial
  Probe
acgtgccgattctactttacatttg

SEQ ID NO: 99199 - DNA, 25 bp, Artificial
  Probe
gccgattctactttacatttgtttt

SEQ ID NO: 99200 - DNA, 25 bp, Artificial
  Probe
atgacgtgccgattctactttacat

SEQ ID NO: 99201 - DNA, 25 bp, Artificial
  Probe
tgacgtgccgattctactttacatt

SEQ ID NO: 99202 - DNA, 25 bp, Artificial
  Probe
accctgattctatgtttacttatac

SEQ ID NO: 99203 - DNA, 25 bp, Artificial
  Probe
catgacgtgccgattctactttaca

SEQ ID NO: 99204 - DNA, 25 bp, Artificial
  Probe
cttaccctgattctatgtttactta

SEQ ID NO: 99205 - DNA, 25 bp, Artificial
  Probe
ccctgattctatgtttacttatact

SEQ ID NO: 99206 - DNA, 25 bp, Artificial
  Probe
gcacagactattttagtaccatgat

SEQ ID NO: 99207 - DNA, 25 bp, Artificial
  Probe
tttatttacagagtgcatgacgtgc

SEQ ID NO: 99208 - DNA, 25 bp, Artificial
  Probe
ttaatagaaggacctttcgagaagg

SEQ ID NO: 99209 - DNA, 25 bp, Artificial
  Probe
ttaccctgattctatgtttacttat

SEQ ID NO: 99210 - DNA, 25 bp, Artificial
  Probe
tgcacagactattttagtaccatga

SEQ ID NO: 99211 - DNA, 25 bp, Artificial
  Probe
tgtataaacgttgcacagactattt

SEQ ID NO: 99212 - DNA, 25 bp, Artificial
  Probe
ttgtataaacgttgcacagactatt

SEQ ID NO: 99213 - DNA, 25 bp, Artificial
  Probe
tttgtataaacgttgcacagactat

SEQ ID NO: 99214 - DNA, 25 bp, Artificial
  Probe
atttgtataaacgttgcacagacta

SEQ ID NO: 99215 - DNA, 25 bp, Artificial
  Probe
tatttgtataaacgttgcacagact

SEQ ID NO: 99216 - DNA, 25 bp, Artificial
  Probe
ttgcacagactattttagtaccatg

SEQ ID NO: 99217 - DNA, 25 bp, Artificial
  Probe
gttgcacagactattttagtaccat

SEQ ID NO: 99218 - DNA, 25 bp, Artificial
  Probe
cgttgcacagactattttagtacca

SEQ ID NO: 99219 - DNA, 25 bp, Artificial
  Probe
acgttgcacagactattttagtacc

SEQ ID NO: 99220 - DNA, 25 bp, Artificial
  Probe
tgttatttgtataaacgttgcacag

SEQ ID NO: 99221 - DNA, 25 bp, Artificial
  Probe
taatagaaggacctttcgagaaggc

SEQ ID NO: 99222 - DNA, 25 bp, Artificial
  Probe
ttatttgtataaacgttgcacagac

SEQ ID NO: 99223 - DNA, 25 bp, Artificial
  Probe
gttatttgtataaacgttgcacaga

SEQ ID NO: 99224 - DNA, 25 bp, Artificial
  Probe
atgttatttgtataaacgttgcaca

SEQ ID NO: 99225 - DNA, 25 bp, Artificial
  Probe
ccgattctactttacatttgtttta

SEQ ID NO: 99226 - DNA, 25 bp, Artificial
  Probe
aatgttatttgtataaacgttgcac

SEQ ID NO: 99227 - DNA, 25 bp, Artificial
  Probe
ttatttacagagtgcatgacgtgcc

SEQ ID NO: 99228 - DNA, 25 bp, Artificial
  Probe
cacagactattttagtaccatgatt

SEQ ID NO: 99229 - DNA, 25 bp, Artificial
  Probe
gcatgacgtgccgattctactttac

SEQ ID NO: 99230 - DNA, 25 bp, Artificial
  Probe
gtataaacgttgcacagactatttt

SEQ ID NO: 99231 - DNA, 25 bp, Artificial
  Probe
actcatacactcttctcacttcttg

SEQ ID NO: 99232 - DNA, 25 bp, Artificial
  Probe
gactcatacactcttctcacttctt

SEQ ID NO: 99233 - DNA, 25 bp, Artificial
  Probe
ctcatacactcttctcacttcttgg

SEQ ID NO: 99234 - DNA, 25 bp, Artificial
  Probe
agactcatacactcttctcacttct

SEQ ID NO: 99235 - DNA, 25 bp, Artificial
  Probe
tcatacactcttctcacttcttggc

SEQ ID NO: 99236 - DNA, 25 bp, Artificial
  Probe
agagagtgggcttgtatatgaaatg

SEQ ID NO: 99237 - DNA, 25 bp, Artificial
  Probe
cagagagtgggcttgtatatgaaat

SEQ ID NO: 99238 - DNA, 25 bp, Artificial
  Probe
gagagtgggcttgtatatgaaatgg

SEQ ID NO: 99239 - DNA, 25 bp, Artificial
  Probe
caagactcatacactcttctcactt

SEQ ID NO: 99240 - DNA, 25 bp, Artificial
  Probe
aagactcatacactcttctcacttc

SEQ ID NO: 99241 - DNA, 25 bp, Artificial
  Probe
acaagactcatacactcttctcact

SEQ ID NO: 99242 - DNA, 25 bp, Artificial
  Probe
cacaagactcatacactcttctcac

SEQ ID NO: 99243 - DNA, 25 bp, Artificial
  Probe
tcagagagtgggcttgtatatgaaa

SEQ ID NO: 99244 - DNA, 25 bp, Artificial
  Probe
atgtcagagagtgggcttgtatatg

SEQ ID NO: 99245 - DNA, 25 bp, Artificial
  Probe
agagtgggcttgtatatgaaatggg

SEQ ID NO: 99246 - DNA, 25 bp, Artificial
  Probe
gtcagagagtgggcttgtatatgaa

SEQ ID NO: 99247 - DNA, 25 bp, Artificial
  Probe
ctgaaagagaagtcatggttcctac

SEQ ID NO: 99248 - DNA, 25 bp, Artificial
  Probe
tatatgaaatgggtgccctgaagtt

SEQ ID NO: 99249 - DNA, 25 bp, Artificial
  Probe
gaatacaacttcaattcggaagacc

SEQ ID NO: 99250 - DNA, 25 bp, Artificial
  Probe
ggaatacaacttcaattcggaagac

SEQ ID NO: 99251 - DNA, 25 bp, Artificial
  Probe
gacctccatttcatcgttgttccta

SEQ ID NO: 99252 - DNA, 25 bp, Artificial
  Probe
gagtgggcttgtatatgaaatgggt

SEQ ID NO: 99253 - DNA, 25 bp, Artificial
  Probe
catgtcagagagtgggcttgtatat

SEQ ID NO: 99254 - DNA, 25 bp, Artificial
  Probe
ttgtatatgaaatgggtgccctgaa

SEQ ID NO: 99255 - DNA, 25 bp, Artificial
  Probe
gcacaagactcatacactcttctca

SEQ ID NO: 99256 - DNA, 25 bp, Artificial
  Probe
acctccatttcatcgttgttcctac

SEQ ID NO: 99257 - DNA, 25 bp, Artificial
  Probe
agtgggcttgtatatgaaatgggtg

SEQ ID NO: 99258 - DNA, 25 bp, Artificial
  Probe
cctgaaagagaagtcatggttccta

SEQ ID NO: 99259 - DNA, 25 bp, Artificial
  Probe
cggaatacaacttcaattcggaaga

SEQ ID NO: 99260 - DNA, 25 bp, Artificial
  Probe
cactgatgaggaagatgaggacgag

SEQ ID NO: 99261 - DNA, 25 bp, Artificial
  Probe
gtatatgaaatgggtgccctgaagt

SEQ ID NO: 99262 - DNA, 25 bp, Artificial
  Probe
tgtatatgaaatgggtgccctgaag

SEQ ID NO: 99263 - DNA, 25 bp, Artificial
  Probe
cttgtatatgaaatgggtgccctga

SEQ ID NO: 99264 - DNA, 25 bp, Artificial
  Probe
tgtcagagagtgggcttgtatatga

SEQ ID NO: 99265 - DNA, 25 bp, Artificial
  Probe
actctgcacaagactcatacactct

SEQ ID NO: 99266 - DNA, 25 bp, Artificial
  Probe
ctccatttcatcgttgttcctaccc

SEQ ID NO: 99267 - DNA, 25 bp, Artificial
  Probe
cctccatttcatcgttgttcctacc

SEQ ID NO: 99268 - DNA, 25 bp, Artificial
  Probe
ttggcactagaagagctacagaaag

SEQ ID NO: 99269 - DNA, 25 bp, Artificial
  Probe
cttggcactagaagagctacagaaa

SEQ ID NO: 99270 - DNA, 25 bp, Artificial
  Probe
tgaaagagaagtcatggttcctacc

SEQ ID NO: 99271 - DNA, 25 bp, Artificial
  Probe
tgcacaagactcatacactcttctc

SEQ ID NO: 99272 - DNA, 25 bp, Artificial
  Probe
ctgcacaagactcatacactcttct

SEQ ID NO: 99273 - DNA, 25 bp, Artificial
  Probe
tctgcacaagactcatacactcttc

SEQ ID NO: 99274 - DNA, 25 bp, Artificial
  Probe
ctctgcacaagactcatacactctt

SEQ ID NO: 99275 - DNA, 25 bp, Artificial
  Probe
atatgaaatgggtgccctgaagttg

SEQ ID NO: 99276 - DNA, 25 bp, Artificial
  Probe
aggaggaaggaagagagacaataag

SEQ ID NO: 99277 - DNA, 25 bp, Artificial
  Probe
caggaggaaggaagagagacaataa

SEQ ID NO: 99278 - DNA, 25 bp, Artificial
  Probe
ggaggaaggaagagagacaataagg

SEQ ID NO: 99279 - DNA, 25 bp, Artificial
  Probe
acaggaggaaggaagagagacaata

SEQ ID NO: 99280 - DNA, 25 bp, Artificial
  Probe
gacttaggcaggtagaacaggaatt

SEQ ID NO: 99281 - DNA, 25 bp, Artificial
  Probe
gaggaaggaagagagacaataaggc

SEQ ID NO: 99282 - DNA, 25 bp, Artificial
  Probe
agacttaggcaggtagaacaggaat

SEQ ID NO: 99283 - DNA, 25 bp, Artificial
  Probe
gaaggaagagagacaataaggcagg

SEQ ID NO: 99284 - DNA, 25 bp, Artificial
  Probe
ggaaggaagagagacaataaggcag

SEQ ID NO: 99285 - DNA, 25 bp, Artificial
  Probe
cctgtctttaccatttgttcattgt

SEQ ID NO: 99286 - DNA, 25 bp, Artificial
  Probe
aacaggaggaaggaagagagacaat

SEQ ID NO: 99287 - DNA, 25 bp, Artificial
  Probe
tcctgtctttaccatttgttcattg

SEQ ID NO: 99288 - DNA, 25 bp, Artificial
  Probe
gtgattcctgtctttaccatttgtt

SEQ ID NO: 99289 - DNA, 25 bp, Artificial
  Probe
agtgattcctgtctttaccatttgt

SEQ ID NO: 99290 - DNA, 25 bp, Artificial
  Probe
tcctgggctacatagtaagttcata

SEQ ID NO: 99291 - DNA, 25 bp, Artificial
  Probe
gattcctgtctttaccatttgttca

SEQ ID NO: 99292 - DNA, 25 bp, Artificial
  Probe
tgattcctgtctttaccatttgttc

SEQ ID NO: 99293 - DNA, 25 bp, Artificial
  Probe
cctgggctacatagtaagttcataa

SEQ ID NO: 99294 - DNA, 25 bp, Artificial
  Probe
aacttccataacagcctcacttcac

SEQ ID NO: 99295 - DNA, 25 bp, Artificial
  Probe
aggaaggaagagagacaataaggca

SEQ ID NO: 99296 - DNA, 25 bp, Artificial
  Probe
ctgtctttaccatttgttcattgtg

SEQ ID NO: 99297 - DNA, 25 bp, Artificial
  Probe
ttcctgtctttaccatttgttcatt

SEQ ID NO: 99298 - DNA, 25 bp, Artificial
  Probe
atcctgggctacatagtaagttcat

SEQ ID NO: 99299 - DNA, 25 bp, Artificial
  Probe
attcctgtctttaccatttgttcat

SEQ ID NO: 99300 - DNA, 25 bp, Artificial
  Probe
ttctgggtccttctgaatatctgat

SEQ ID NO: 99301 - DNA, 25 bp, Artificial
  Probe
aacatatcaaagcaccatcccattt

SEQ ID NO: 99302 - DNA, 25 bp, Artificial
  Probe
aaacatatcaaagcaccatcccatt

SEQ ID NO: 99303 - DNA, 25 bp, Artificial
  Probe
cataacagcctcacttcacagttct

SEQ ID NO: 99304 - DNA, 25 bp, Artificial
  Probe
cttaggcaggtagaacaggaatttg

SEQ ID NO: 99305 - DNA, 25 bp, Artificial
  Probe
gagacttaggcaggtagaacaggaa

SEQ ID NO: 99306 - DNA, 25 bp, Artificial
  Probe
tgtctttaccatttgttcattgtga

SEQ ID NO: 99307 - DNA, 25 bp, Artificial
  Probe
catcctgggctacatagtaagttca

SEQ ID NO: 99308 - DNA, 25 bp, Artificial
  Probe
cttccataacagcctcacttcacag

SEQ ID NO: 99309 - DNA, 25 bp, Artificial
  Probe
acttaggcaggtagaacaggaattt

SEQ ID NO: 99310 - DNA, 25 bp, Artificial
  Probe
aaggagacttaggcaggtagaacag

SEQ ID NO: 99311 - DNA, 25 bp, Artificial
  Probe
caaacatatcaaagcaccatcccat

SEQ ID NO: 99312 - DNA, 25 bp, Artificial
  Probe
catcccatttgtgataacagtgatt

SEQ ID NO: 99313 - DNA, 25 bp, Artificial
  Probe
tctgggtccttctgaatatctgatc

SEQ ID NO: 99314 - DNA, 25 bp, Artificial
  Probe
ataacagcctcacttcacagttctg

SEQ ID NO: 99315 - DNA, 25 bp, Artificial
  Probe
ctgggctacatagtaagttcataaa

SEQ ID NO: 99316 - DNA, 25 bp, Artificial
  Probe
gaacaggaggaaggaagagagacaa

SEQ ID NO: 99317 - DNA, 25 bp, Artificial
  Probe
atcccatttgtgataacagtgattc

SEQ ID NO: 99318 - DNA, 25 bp, Artificial
  Probe
ccataagggcaaacttccataacag

SEQ ID NO: 99319 - DNA, 25 bp, Artificial
  Probe
cagtgattcctgtctttaccatttg

SEQ ID NO: 99320 - DNA, 25 bp, Artificial
  Probe
ccatttgtgataacagtgattcctg

SEQ ID NO: 99321 - DNA, 25 bp, Artificial
  Probe
agtgtaaggtgttatcagtgtgtag

SEQ ID NO: 99322 - DNA, 25 bp, Artificial
  Probe
tagtccaagtgtaaggtgttatcag

SEQ ID NO: 99323 - DNA, 25 bp, Artificial
  Probe
aagtgtaaggtgttatcagtgtgta

SEQ ID NO: 99324 - DNA, 25 bp, Artificial
  Probe
ggacaaggaacgatggtatctatat

SEQ ID NO: 99325 - DNA, 25 bp, Artificial
  Probe
caagtgtaaggtgttatcagtgtgt

SEQ ID NO: 99326 - DNA, 25 bp, Artificial
  Probe
tgtccacctattagaaccttattga

SEQ ID NO: 99327 - DNA, 25 bp, Artificial
  Probe
gtaaggtgttatcagtgtgtagcag

SEQ ID NO: 99328 - DNA, 25 bp, Artificial
  Probe
gtccaagtgtaaggtgttatcagtg

SEQ ID NO: 99329 - DNA, 25 bp, Artificial
  Probe
agtccaagtgtaaggtgttatcagt

SEQ ID NO: 99330 - DNA, 25 bp, Artificial
  Probe
ctagtccaagtgtaaggtgttatca

SEQ ID NO: 99331 - DNA, 25 bp, Artificial
  Probe
tctctagtccaagtgtaaggtgtta

SEQ ID NO: 99332 - DNA, 25 bp, Artificial
  Probe
tctagtccaagtgtaaggtgttatc

SEQ ID NO: 99333 - DNA, 25 bp, Artificial
  Probe
ctctagtccaagtgtaaggtgttat

SEQ ID NO: 99334 - DNA, 25 bp, Artificial
  Probe
gtgtaaggtgttatcagtgtgtagc

SEQ ID NO: 99335 - DNA, 25 bp, Artificial
  Probe
atcagtgtctctagtccaagtgtaa

SEQ ID NO: 99336 - DNA, 25 bp, Artificial
  Probe
ccaagtgtaaggtgttatcagtgtg

SEQ ID NO: 99337 - DNA, 25 bp, Artificial
  Probe
tccaagtgtaaggtgttatcagtgt

SEQ ID NO: 99338 - DNA, 25 bp, Artificial
  Probe
gtccacctattagaaccttattgag

SEQ ID NO: 99339 - DNA, 25 bp, Artificial
  Probe
tgtaaggtgttatcagtgtgtagca

SEQ ID NO: 99340 - DNA, 25 bp, Artificial
  Probe
tcagtgtctctagtccaagtgtaag

SEQ ID NO: 99341 - DNA, 25 bp, Artificial
  Probe
catcagtgtctctagtccaagtgta

SEQ ID NO: 99342 - DNA, 25 bp, Artificial
  Probe
ccatgtccacctattagaaccttat

SEQ ID NO: 99343 - DNA, 25 bp, Artificial
  Probe
atgtccacctattagaaccttattg

SEQ ID NO: 99344 - DNA, 25 bp, Artificial
  Probe
accatgtccacctattagaacctta

SEQ ID NO: 99345 - DNA, 25 bp, Artificial
  Probe
taaggtgttatcagtgtgtagcagg

SEQ ID NO: 99346 - DNA, 25 bp, Artificial
  Probe
gacaaggaacgatggtatctatatt

SEQ ID NO: 99347 - DNA, 25 bp, Artificial
  Probe
gtctctagtccaagtgtaaggtgtt

SEQ ID NO: 99348 - DNA, 25 bp, Artificial
  Probe
gtgactcatattacaacactcaagc

SEQ ID NO: 99349 - DNA, 25 bp, Artificial
  Probe
tcaggtgactcatattacaacactc

SEQ ID NO: 99350 - DNA, 25 bp, Artificial
  Probe
aggtgactcatattacaacactcaa

SEQ ID NO: 99351 - DNA, 25 bp, Artificial
  Probe
caggtgactcatattacaacactca

SEQ ID NO: 99352 - DNA, 25 bp, Artificial
  Probe
ggtgactcatattacaacactcaag

SEQ ID NO: 99353 - DNA, 25 bp, Artificial
  Probe
tccacctattagaaccttattgagg

SEQ ID NO: 99354 - DNA, 25 bp, Artificial
  Probe
cagtgtctctagtccaagtgtaagg

SEQ ID NO: 99355 - DNA, 25 bp, Artificial
  Probe
gactcatattacaacactcaagctg

SEQ ID NO: 99356 - DNA, 25 bp, Artificial
  Probe
gtgtctctagtccaagtgtaaggtg

SEQ ID NO: 99357 - DNA, 25 bp, Artificial
  Probe
agtgtctctagtccaagtgtaaggt

SEQ ID NO: 99358 - DNA, 25 bp, Artificial
  Probe
gtcatcagtgtctctagtccaagtg

SEQ ID NO: 99359 - DNA, 25 bp, Artificial
  Probe
catgtccacctattagaaccttatt

SEQ ID NO: 99360 - DNA, 25 bp, Artificial
  Probe
gagttgaggtcatcagtgtctctag

SEQ ID NO: 99361 - DNA, 25 bp, Artificial
  Probe
caccatgtccacctattagaacctt

SEQ ID NO: 99362 - DNA, 25 bp, Artificial
  Probe
tgactcatattacaacactcaagct

SEQ ID NO: 99363 - DNA, 25 bp, Artificial
  Probe
actcatattacaacactcaagctgc

SEQ ID NO: 99364 - DNA, 25 bp, Artificial
  Probe
tgtctctagtccaagtgtaaggtgt

SEQ ID NO: 99365 - DNA, 25 bp, Artificial
  Probe
gttgaggtcatcagtgtctctagtc

SEQ ID NO: 99366 - DNA, 25 bp, Artificial
  Probe
gatccaagacaacatgaagcaatga

SEQ ID NO: 99367 - DNA, 25 bp, Artificial
  Probe
actagaactctgtattatgctgtac

SEQ ID NO: 99368 - DNA, 25 bp, Artificial
  Probe
cagggatatacacaaaggtcactaa

SEQ ID NO: 99369 - DNA, 25 bp, Artificial
  Probe
atccaagacaacatgaagcaatgac

SEQ ID NO: 99370 - DNA, 25 bp, Artificial
  Probe
gaatttgatgacgacacttatgaca

SEQ ID NO: 99371 - DNA, 25 bp, Artificial
  Probe
ggaatttgatgacgacacttatgac

SEQ ID NO: 99372 - DNA, 25 bp, Artificial
  Probe
aggaatttgatgacgacacttatga

SEQ ID NO: 99373 - DNA, 25 bp, Artificial
  Probe
ctagaactctgtattatgctgtact

SEQ ID NO: 99374 - DNA, 25 bp, Artificial
  Probe
agggatatacacaaaggtcactaat

SEQ ID NO: 99375 - DNA, 25 bp, Artificial
  Probe
tttaagggtgaaggtctgactttag

SEQ ID NO: 99376 - DNA, 25 bp, Artificial
  Probe
aaggaatttgatgacgacacttatg

SEQ ID NO: 99377 - DNA, 25 bp, Artificial
  Probe
cataaggaatttgatgacgacactt

SEQ ID NO: 99378 - DNA, 25 bp, Artificial
  Probe
ccagggatatacacaaaggtcacta

SEQ ID NO: 99379 - DNA, 25 bp, Artificial
  Probe
ccaagacaacatgaagcaatgacaa

SEQ ID NO: 99380 - DNA, 25 bp, Artificial
  Probe
ggtcactaattacctgaactggatc

SEQ ID NO: 99381 - DNA, 25 bp, Artificial
  Probe
taagggtgaaggtctgactttagaa

SEQ ID NO: 99382 - DNA, 25 bp, Artificial
  Probe
ttaagggtgaaggtctgactttaga

SEQ ID NO: 99383 - DNA, 25 bp, Artificial
  Probe
atttgatgacgacacttatgacaat

SEQ ID NO: 99384 - DNA, 25 bp, Artificial
  Probe
aatttgatgacgacacttatgacaa

SEQ ID NO: 99385 - DNA, 25 bp, Artificial
  Probe
ccataaggaatttgatgacgacact

SEQ ID NO: 99386 - DNA, 25 bp, Artificial
  Probe
aagggtgaaggtctgactttagaat

SEQ ID NO: 99387 - DNA, 25 bp, Artificial
  Probe
gggatatacacaaaggtcactaatt

SEQ ID NO: 99388 - DNA, 25 bp, Artificial
  Probe
caacatgaagcaatgacaaagaaag

SEQ ID NO: 99389 - DNA, 25 bp, Artificial
  Probe
cttcctttcatttagtcagcatgtg

SEQ ID NO: 99390 - DNA, 25 bp, Artificial
  Probe
acaacatgaagcaatgacaaagaaa

SEQ ID NO: 99391 - DNA, 25 bp, Artificial
  Probe
aagacaacatgaagcaatgacaaag

SEQ ID NO: 99392 - DNA, 25 bp, Artificial
  Probe
agggtgaaggtctgactttagaatc

SEQ ID NO: 99393 - DNA, 25 bp, Artificial
  Probe
gacaacatgaagcaatgacaaagaa

SEQ ID NO: 99394 - DNA, 25 bp, Artificial
  Probe
caagacaacatgaagcaatgacaaa

SEQ ID NO: 99395 - DNA, 25 bp, Artificial
  Probe
acttcctttcatttagtcagcatgt

SEQ ID NO: 99396 - DNA, 25 bp, Artificial
  Probe
aacatgaagcaatgacaaagaaagc

SEQ ID NO: 99397 - DNA, 25 bp, Artificial
  Probe
tccaagacaacatgaagcaatgaca

SEQ ID NO: 99398 - DNA, 25 bp, Artificial
  Probe
agacaacatgaagcaatgacaaaga

SEQ ID NO: 99399 - DNA, 25 bp, Artificial
  Probe
catttagtcagcatgtggaaattct

SEQ ID NO: 99400 - DNA, 25 bp, Artificial
  Probe
tcatttagtcagcatgtggaaattc

SEQ ID NO: 99401 - DNA, 25 bp, Artificial
  Probe
tagtccataaggaatttgatgacga

SEQ ID NO: 99402 - DNA, 25 bp, Artificial
  Probe
gggtgaaggtctgactttagaatca

SEQ ID NO: 99403 - DNA, 25 bp, Artificial
  Probe
cctttcatttagtcagcatgtggaa

SEQ ID NO: 99404 - DNA, 25 bp, Artificial
  Probe
ttcctttcatttagtcagcatgtgg

SEQ ID NO: 99405 - DNA, 25 bp, Artificial
  Probe
ttcatttagtcagcatgtggaaatt

SEQ ID NO: 99406 - DNA, 25 bp, Artificial
  Probe
agtccataaggaatttgatgacgac

SEQ ID NO: 99407 - DNA, 25 bp, Artificial
  Probe
atttagtcagcatgtggaaattctg

SEQ ID NO: 99408 - DNA, 25 bp, Artificial
  Probe
taaggaatttgatgacgacacttat

SEQ ID NO: 99409 - DNA, 25 bp, Artificial
  Probe
ataaggaatttgatgacgacactta

SEQ ID NO: 99410 - DNA, 25 bp, Artificial
  Probe
tccataaggaatttgatgacgacac

SEQ ID NO: 99411 - DNA, 25 bp, Artificial
  Probe
ttgtagataagaggaagagactgcg

SEQ ID NO: 99412 - DNA, 25 bp, Artificial
  Probe
attgcagctaaggtacattgtagaa

SEQ ID NO: 99413 - DNA, 25 bp, Artificial
  Probe
tttgtagataagaggaagagactgc

SEQ ID NO: 99414 - DNA, 25 bp, Artificial
  Probe
cattgcagctaaggtacattgtaga

SEQ ID NO: 99415 - DNA, 25 bp, Artificial
  Probe
ccattgcagctaaggtacattgtag

SEQ ID NO: 99416 - DNA, 25 bp, Artificial
  Probe
ttgcagctaaggtacattgtagaaa

SEQ ID NO: 99417 - DNA, 25 bp, Artificial
  Probe
cttagagactccgaacgaccgatac

SEQ ID NO: 99418 - DNA, 25 bp, Artificial
  Probe
accattgcagctaaggtacattgta

SEQ ID NO: 99419 - DNA, 25 bp, Artificial
  Probe
tattaccattgcagctaaggtacat

SEQ ID NO: 99420 - DNA, 25 bp, Artificial
  Probe
attaccattgcagctaaggtacatt

SEQ ID NO: 99421 - DNA, 25 bp, Artificial
  Probe
ttaccattgcagctaaggtacattg

SEQ ID NO: 99422 - DNA, 25 bp, Artificial
  Probe
cgacagacttttgtagataagagga

SEQ ID NO: 99423 - DNA, 25 bp, Artificial
  Probe
tccgacagacttttgtagataagag

SEQ ID NO: 99424 - DNA, 25 bp, Artificial
  Probe
ttccgacagacttttgtagataaga

SEQ ID NO: 99425 - DNA, 25 bp, Artificial
  Probe
acttttccgacagacttttgtagat

SEQ ID NO: 99426 - DNA, 25 bp, Artificial
  Probe
aagacttttccgacagacttttgta

SEQ ID NO: 99427 - DNA, 25 bp, Artificial
  Probe
ccgacagacttttgtagataagagg

SEQ ID NO: 99428 - DNA, 25 bp, Artificial
  Probe
gacttttccgacagacttttgtaga

SEQ ID NO: 99429 - DNA, 25 bp, Artificial
  Probe
agacttttccgacagacttttgtag

SEQ ID NO: 99430 - DNA, 25 bp, Artificial
  Probe
tttgttacctgctggtagaaatgat

SEQ ID NO: 99431 - DNA, 25 bp, Artificial
  Probe
gctaaggtacattgtagaaaagact

SEQ ID NO: 99432 - DNA, 25 bp, Artificial
  Probe
ttttgtagataagaggaagagactg

SEQ ID NO: 99433 - DNA, 25 bp, Artificial
  Probe
tttccgacagacttttgtagataag

SEQ ID NO: 99434 - DNA, 25 bp, Artificial
  Probe
cttttccgacagacttttgtagata

SEQ ID NO: 99435 - DNA, 25 bp, Artificial
  Probe
ttgttacctgctggtagaaatgatc

SEQ ID NO: 99436 - DNA, 25 bp, Artificial
  Probe
gatcctgagcatcttttgttacctg

SEQ ID NO: 99437 - DNA, 25 bp, Artificial
  Probe
acttttgtagataagaggaagagac

SEQ ID NO: 99438 - DNA, 25 bp, Artificial
  Probe
cagacttttgtagataagaggaaga

SEQ ID NO: 99439 - DNA, 25 bp, Artificial
  Probe
taccattgcagctaaggtacattgt

SEQ ID NO: 99440 - DNA, 25 bp, Artificial
  Probe
ccttagagactccgaacgaccgata

SEQ ID NO: 99441 - DNA, 25 bp, Artificial
  Probe
gcagctaaggtacattgtagaaaag

SEQ ID NO: 99442 - DNA, 25 bp, Artificial
  Probe
ttttccgacagacttttgtagataa

SEQ ID NO: 99443 - DNA, 25 bp, Artificial
  Probe
tgatcctgagcatcttttgttacct

SEQ ID NO: 99444 - DNA, 25 bp, Artificial
  Probe
gtgatcctgagcatcttttgttacc

SEQ ID NO: 99445 - DNA, 25 bp, Artificial
  Probe
ggtgatcctgagcatcttttgttac

SEQ ID NO: 99446 - DNA, 25 bp, Artificial
  Probe
cttttgtagataagaggaagagact

SEQ ID NO: 99447 - DNA, 25 bp, Artificial
  Probe
gacttttgtagataagaggaagaga

SEQ ID NO: 99448 - DNA, 25 bp, Artificial
  Probe
agacttttgtagataagaggaagag

SEQ ID NO: 99449 - DNA, 25 bp, Artificial
  Probe
acagacttttgtagataagaggaag

SEQ ID NO: 99450 - DNA, 25 bp, Artificial
  Probe
gacagacttttgtagataagaggaa

SEQ ID NO: 99451 - DNA, 25 bp, Artificial
  Probe
tgcagctaaggtacattgtagaaaa

SEQ ID NO: 99452 - DNA, 25 bp, Artificial
  Probe
agctaaggtacattgtagaaaagac

SEQ ID NO: 99453 - DNA, 25 bp, Artificial
  Probe
cagctaaggtacattgtagaaaaga

SEQ ID NO: 99454 - DNA, 25 bp, Artificial
  Probe
gttacctgctggtagaaatgatcct

SEQ ID NO: 99455 - DNA, 25 bp, Artificial
  Probe
cagtatttgtaagaataaagaagca

SEQ ID NO: 99456 - DNA, 25 bp, Artificial
  Probe
aatgaaccttgtgctatagtgactc

SEQ ID NO: 99457 - DNA, 25 bp, Artificial
  Probe
ccatattccagcaatgaaccttgtg

SEQ ID NO: 99458 - DNA, 25 bp, Artificial
  Probe
atgaatgaaacctttgacctctgta

SEQ ID NO: 99459 - DNA, 25 bp, Artificial
  Probe
agtatctgtaacccttgaatcccta

SEQ ID NO: 99460 - DNA, 25 bp, Artificial
  Probe
gaatgaaacctttgacctctgtaga

SEQ ID NO: 99461 - DNA, 25 bp, Artificial
  Probe
tgaatgaaacctttgacctctgtag

SEQ ID NO: 99462 - DNA, 25 bp, Artificial
  Probe
gggttactaagatgaaattgccaaa

SEQ ID NO: 99463 - DNA, 25 bp, Artificial
  Probe
aaacgggttactaagatgaaattgc

SEQ ID NO: 99464 - DNA, 25 bp, Artificial
  Probe
tagaaagccatattccagcaatgaa

SEQ ID NO: 99465 - DNA, 25 bp, Artificial
  Probe
caatgaaccttgtgctatagtgact

SEQ ID NO: 99466 - DNA, 25 bp, Artificial
  Probe
gatgaatgaaacctttgacctctgt

SEQ ID NO: 99467 - DNA, 25 bp, Artificial
  Probe
taacccttgaatccctagacagtat

SEQ ID NO: 99468 - DNA, 25 bp, Artificial
  Probe
gtatctgtaacccttgaatccctag

SEQ ID NO: 99469 - DNA, 25 bp, Artificial
  Probe
aagtatctgtaacccttgaatccct

SEQ ID NO: 99470 - DNA, 25 bp, Artificial
  Probe
aagccatattccagcaatgaacctt

SEQ ID NO: 99471 - DNA, 25 bp, Artificial
  Probe
aacccttgaatccctagacagtatt

SEQ ID NO: 99472 - DNA, 25 bp, Artificial
  Probe
gtaacccttgaatccctagacagta

SEQ ID NO: 99473 - DNA, 25 bp, Artificial
  Probe
tatctgtaacccttgaatccctaga

SEQ ID NO: 99474 - DNA, 25 bp, Artificial
  Probe
tttgtacggatgaatgaaacctttg

SEQ ID NO: 99475 - DNA, 25 bp, Artificial
  Probe
ggatgtggttaccaagtatctgtaa

SEQ ID NO: 99476 - DNA, 25 bp, Artificial
  Probe
ggatgaatgaaacctttgacctctg

SEQ ID NO: 99477 - DNA, 25 bp, Artificial
  Probe
ttgtacggatgaatgaaacctttga

SEQ ID NO: 99478 - DNA, 25 bp, Artificial
  Probe
cgggttactaagatgaaattgccaa

SEQ ID NO: 99479 - DNA, 25 bp, Artificial
  Probe
aacgggttactaagatgaaattgcc

SEQ ID NO: 99480 - DNA, 25 bp, Artificial
  Probe
gttgggacaatggcaataggataaa

SEQ ID NO: 99481 - DNA, 25 bp, Artificial
  Probe
atgaaccttgtgctatagtgactcc

SEQ ID NO: 99482 - DNA, 25 bp, Artificial
  Probe
ttgaatccctagacagtattgccat

SEQ ID NO: 99483 - DNA, 25 bp, Artificial
  Probe
acccttgaatccctagacagtattg

SEQ ID NO: 99484 - DNA, 25 bp, Artificial
  Probe
tggatgtggttaccaagtatctgta

SEQ ID NO: 99485 - DNA, 25 bp, Artificial
  Probe
agaaagccatattccagcaatgaac

SEQ ID NO: 99486 - DNA, 25 bp, Artificial
  Probe
atctgtaacccttgaatccctagac

SEQ ID NO: 99487 - DNA, 25 bp, Artificial
  Probe
tgtacggatgaatgaaacctttgac

SEQ ID NO: 99488 - DNA, 25 bp, Artificial
  Probe
tacggatgaatgaaacctttgacct

SEQ ID NO: 99489 - DNA, 25 bp, Artificial
  Probe
aatccctagacagtattgccatctc

SEQ ID NO: 99490 - DNA, 25 bp, Artificial
  Probe
gaatccctagacagtattgccatct

SEQ ID NO: 99491 - DNA, 25 bp, Artificial
  Probe
tgaatccctagacagtattgccatc

SEQ ID NO: 99492 - DNA, 25 bp, Artificial
  Probe
aatgaaacctttgacctctgtagag

SEQ ID NO: 99493 - DNA, 25 bp, Artificial
  Probe
cttgaatccctagacagtattgcca

SEQ ID NO: 99494 - DNA, 25 bp, Artificial
  Probe
agccatattccagcaatgaaccttg

SEQ ID NO: 99495 - DNA, 25 bp, Artificial
  Probe
gtacggatgaatgaaacctttgacc

SEQ ID NO: 99496 - DNA, 25 bp, Artificial
  Probe
acgggttactaagatgaaattgcca

SEQ ID NO: 99497 - DNA, 25 bp, Artificial
  Probe
atccctagacagtattgccatctct

SEQ ID NO: 99498 - DNA, 25 bp, Artificial
  Probe
gaaagccatattccagcaatgaacc

SEQ ID NO: 99499 - DNA, 25 bp, Artificial
  Probe
gccatattccagcaatgaaccttgt

SEQ ID NO: 99500 - DNA, 25 bp, Artificial
  Probe
ccttgaatccctagacagtattgcc

SEQ ID NO: 99501 - DNA, 25 bp, Artificial
  Probe
cttcctcttctcttcctccttactc

SEQ ID NO: 99502 - DNA, 25 bp, Artificial
  Probe
ctcttcctcttctcttcctccttac

SEQ ID NO: 99503 - DNA, 25 bp, Artificial
  Probe
tcttcctcttctcttcctccttact

SEQ ID NO: 99504 - DNA, 25 bp, Artificial
  Probe
cttccttcctcttcctcttctcttc

SEQ ID NO: 99505 - DNA, 25 bp, Artificial
  Probe
ccattgaagaataggatctgaccat

SEQ ID NO: 99506 - DNA, 25 bp, Artificial
  Probe
tcttccttcctcttcctcttctctt

SEQ ID NO: 99507 - DNA, 25 bp, Artificial
  Probe
cctcttcctcttctcttcctcctta

SEQ ID NO: 99508 - DNA, 25 bp, Artificial
  Probe
cattgaagaataggatctgaccatt

SEQ ID NO: 99509 - DNA, 25 bp, Artificial
  Probe
ttcctcttctcttcctccttactcc

SEQ ID NO: 99510 - DNA, 25 bp, Artificial
  Probe
ctcttccttcctcttcctcttctct

SEQ ID NO: 99511 - DNA, 25 bp, Artificial
  Probe
ttccattgaagaataggatctgacc

SEQ ID NO: 99512 - DNA, 25 bp, Artificial
  Probe
ctcttctcttcctccttactcctcc

SEQ ID NO: 99513 - DNA, 25 bp, Artificial
  Probe
cctcttctcttcctccttactcctc

SEQ ID NO: 99514 - DNA, 25 bp, Artificial
  Probe
aaatagcaacttcatcactaaaccg

SEQ ID NO: 99515 - DNA, 25 bp, Artificial
  Probe
ctaatgtaaatactccctcctgctc

SEQ ID NO: 99516 - DNA, 25 bp, Artificial
  Probe
tccattgaagaataggatctgacca

SEQ ID NO: 99517 - DNA, 25 bp, Artificial
  Probe
taatgtaaatactccctcctgctct

SEQ ID NO: 99518 - DNA, 25 bp, Artificial
  Probe
aatagcaacttcatcactaaaccga

SEQ ID NO: 99519 - DNA, 25 bp, Artificial
  Probe
cctaactggttctttggatttcatc

SEQ ID NO: 99520 - DNA, 25 bp, Artificial
  Probe
actaatgtaaatactccctcctgct

SEQ ID NO: 99521 - DNA, 25 bp, Artificial
  Probe
cactaatgtaaatactccctcctgc

SEQ ID NO: 99522 - DNA, 25 bp, Artificial
  Probe
gcactaatgtaaatactccctcctg

SEQ ID NO: 99523 - DNA, 25 bp, Artificial
  Probe
agcactaatgtaaatactccctcct

SEQ ID NO: 99524 - DNA, 25 bp, Artificial
  Probe
cagcactaatgtaaatactccctcc

SEQ ID NO: 99525 - DNA, 25 bp, Artificial
  Probe
ccagcactaatgtaaatactccctc

SEQ ID NO: 99526 - DNA, 25 bp, Artificial
  Probe
tggttctttggatttcatcacttac

SEQ ID NO: 99527 - DNA, 25 bp, Artificial
  Probe
ttctgttctcacaaggtcatcctag

SEQ ID NO: 99528 - DNA, 25 bp, Artificial
  Probe
ttccttcctcttcctcttctcttcc

SEQ ID NO: 99529 - DNA, 25 bp, Artificial
  Probe
taactggttctttggatttcatcac

SEQ ID NO: 99530 - DNA, 25 bp, Artificial
  Probe
catcactaaaccgaactttccattg

SEQ ID NO: 99531 - DNA, 25 bp, Artificial
  Probe
tcatcactaaaccgaactttccatt

SEQ ID NO: 99532 - DNA, 25 bp, Artificial
  Probe
caacttcatcactaaaccgaacttt

SEQ ID NO: 99533 - DNA, 25 bp, Artificial
  Probe
ggttctttggatttcatcacttact

SEQ ID NO: 99534 - DNA, 25 bp, Artificial
  Probe
ctggttctttggatttcatcactta

SEQ ID NO: 99535 - DNA, 25 bp, Artificial
  Probe
actggttctttggatttcatcactt

SEQ ID NO: 99536 - DNA, 25 bp, Artificial
  Probe
ctaaaccgaactttccattgaagaa

SEQ ID NO: 99537 - DNA, 25 bp, Artificial
  Probe
aacttcatcactaaaccgaactttc

SEQ ID NO: 99538 - DNA, 25 bp, Artificial
  Probe
aaccgaactttccattgaagaatag

SEQ ID NO: 99539 - DNA, 25 bp, Artificial
  Probe
atagcaacttcatcactaaaccgaa

SEQ ID NO: 99540 - DNA, 25 bp, Artificial
  Probe
aactggttctttggatttcatcact

SEQ ID NO: 99541 - DNA, 25 bp, Artificial
  Probe
ctaactggttctttggatttcatca

SEQ ID NO: 99542 - DNA, 25 bp, Artificial
  Probe
actaaaccgaactttccattgaaga

SEQ ID NO: 99543 - DNA, 25 bp, Artificial
  Probe
cactaaaccgaactttccattgaag

SEQ ID NO: 99544 - DNA, 25 bp, Artificial
  Probe
ttcatcactaaaccgaactttccat

SEQ ID NO: 99545 - DNA, 25 bp, Artificial
  Probe
gggaaatagcaacttcatcactaaa

SEQ ID NO: 99546 - DNA, 25 bp, Artificial
  Probe
cttcattattgccttcctcatccag

SEQ ID NO: 99547 - DNA, 25 bp, Artificial
  Probe
acctaaccatactccagtgatgtag

SEQ ID NO: 99548 - DNA, 25 bp, Artificial
  Probe
gacttcattattgccttcctcatcc

SEQ ID NO: 99549 - DNA, 25 bp, Artificial
  Probe
gacctaaccatactccagtgatgta

SEQ ID NO: 99550 - DNA, 25 bp, Artificial
  Probe
ttgacttcattattgccttcctcat

SEQ ID NO: 99551 - DNA, 25 bp, Artificial
  Probe
tgacttcattattgccttcctcatc

SEQ ID NO: 99552 - DNA, 25 bp, Artificial
  Probe
cctaaccatactccagtgatgtagt

SEQ ID NO: 99553 - DNA, 25 bp, Artificial
  Probe
acttcattattgccttcctcatcca

SEQ ID NO: 99554 - DNA, 25 bp, Artificial
  Probe
taaccatactccagtgatgtagtag

SEQ ID NO: 99555 - DNA, 25 bp, Artificial
  Probe
ctaaccatactccagtgatgtagta

SEQ ID NO: 99556 - DNA, 25 bp, Artificial
  Probe
ttgtcatcttggacctaaccatact

SEQ ID NO: 99557 - DNA, 25 bp, Artificial
  Probe
gttgtcatcttggacctaaccatac

SEQ ID NO: 99558 - DNA, 25 bp, Artificial
  Probe
gtttgacttcattattgccttcctc

SEQ ID NO: 99559 - DNA, 25 bp, Artificial
  Probe
ctgttcccgtttgacttcattattg

SEQ ID NO: 99560 - DNA, 25 bp, Artificial
  Probe
tgtcatcttggacctaaccatactc

SEQ ID NO: 99561 - DNA, 25 bp, Artificial
  Probe
aaccatactccagtgatgtagtagc

SEQ ID NO: 99562 - DNA, 25 bp, Artificial
  Probe
ttcattattgccttcctcatccagc

SEQ ID NO: 99563 - DNA, 25 bp, Artificial
  Probe
ctcatccagcactgaaattatcaac

SEQ ID NO: 99564 - DNA, 25 bp, Artificial
  Probe
tttgacttcattattgccttcctca

SEQ ID NO: 99565 - DNA, 25 bp, Artificial
  Probe
ttcctcatccagcactgaaattatc

SEQ ID NO: 99566 - DNA, 25 bp, Artificial
  Probe
cttcctcatccagcactgaaattat

SEQ ID NO: 99567 - DNA, 25 bp, Artificial
  Probe
gtcatcttggacctaaccatactcc

SEQ ID NO: 99568 - DNA, 25 bp, Artificial
  Probe
tagtgcagaagtgacttaggacatt

SEQ ID NO: 99569 - DNA, 25 bp, Artificial
  Probe
cgtttgacttcattattgccttcct

SEQ ID NO: 99570 - DNA, 25 bp, Artificial
  Probe
ctcttggttgtcatcttggacctaa

SEQ ID NO: 99571 - DNA, 25 bp, Artificial
  Probe
cctcatccagcactgaaattatcaa

SEQ ID NO: 99572 - DNA, 25 bp, Artificial
  Probe
atagcctagtgcagaagtgacttag

SEQ ID NO: 99573 - DNA, 25 bp, Artificial
  Probe
tcatccagcactgaaattatcaacc

SEQ ID NO: 99574 - DNA, 25 bp, Artificial
  Probe
gctgttcccgtttgacttcattatt

SEQ ID NO: 99575 - DNA, 25 bp, Artificial
  Probe
tcttggttgtcatcttggacctaac

SEQ ID NO: 99576 - DNA, 25 bp, Artificial
  Probe
ctagtgcagaagtgacttaggacat

SEQ ID NO: 99577 - DNA, 25 bp, Artificial
  Probe
catagcctagtgcagaagtgactta

SEQ ID NO: 99578 - DNA, 25 bp, Artificial
  Probe
atccagcactgaaattatcaaccac

SEQ ID NO: 99579 - DNA, 25 bp, Artificial
  Probe
catccagcactgaaattatcaacca

SEQ ID NO: 99580 - DNA, 25 bp, Artificial
  Probe
gccattgttaaagtacgacactaat

SEQ ID NO: 99581 - DNA, 25 bp, Artificial
  Probe
ctcgtttggtgccattgttaaagta

SEQ ID NO: 99582 - DNA, 25 bp, Artificial
  Probe
tcctcatccagcactgaaattatca

SEQ ID NO: 99583 - DNA, 25 bp, Artificial
  Probe
tgttcccgtttgacttcattattgc

SEQ ID NO: 99584 - DNA, 25 bp, Artificial
  Probe
tgccattgttaaagtacgacactaa

SEQ ID NO: 99585 - DNA, 25 bp, Artificial
  Probe
tctcttggttgtcatcttggaccta

SEQ ID NO: 99586 - DNA, 25 bp, Artificial
  Probe
tattctgtagtgcccatagcctagt

SEQ ID NO: 99587 - DNA, 25 bp, Artificial
  Probe
aaattatcaaccacacgcctttcac

SEQ ID NO: 99588 - DNA, 25 bp, Artificial
  Probe
gtatgaagatagggatgagcgtacc

SEQ ID NO: 99589 - DNA, 25 bp, Artificial
  Probe
ggtatgaagatagggatgagcgtac

SEQ ID NO: 99590 - DNA, 25 bp, Artificial
  Probe
ccgtttgacttcattattgccttcc

SEQ ID NO: 99591 - DNA, 25 bp, Artificial
  Probe
cctgactgctcttatggaatcttat

SEQ ID NO: 99592 - DNA, 25 bp, Artificial
  Probe
cttccatcaggcaatacatactctt

SEQ ID NO: 99593 - DNA, 25 bp, Artificial
  Probe
tgactgctcttatggaatcttatgt

SEQ ID NO: 99594 - DNA, 25 bp, Artificial
  Probe
ttccatcaggcaatacatactctta

SEQ ID NO: 99595 - DNA, 25 bp, Artificial
  Probe
tccatcaggcaatacatactcttat

SEQ ID NO: 99596 - DNA, 25 bp, Artificial
  Probe
ctgactgctcttatggaatcttatg

SEQ ID NO: 99597 - DNA, 25 bp, Artificial
  Probe
gacttccatcaggcaatacatactc

SEQ ID NO: 99598 - DNA, 25 bp, Artificial
  Probe
acctgactgctcttatggaatctta

SEQ ID NO: 99599 - DNA, 25 bp, Artificial
  Probe
acttccatcaggcaatacatactct

SEQ ID NO: 99600 - DNA, 25 bp, Artificial
  Probe
aaccttcctgatactaagtaacctt

SEQ ID NO: 99601 - DNA, 25 bp, Artificial
  Probe
gactgctcttatggaatcttatgta

SEQ ID NO: 99602 - DNA, 25 bp, Artificial
  Probe
gacctgactgctcttatggaatctt

SEQ ID NO: 99603 - DNA, 25 bp, Artificial
  Probe
tgacttccatcaggcaatacatact

SEQ ID NO: 99604 - DNA, 25 bp, Artificial
  Probe
gtgacttccatcaggcaatacatac

SEQ ID NO: 99605 - DNA, 25 bp, Artificial
  Probe
aatatcaaccttgactcagtggatg

SEQ ID NO: 99606 - DNA, 25 bp, Artificial
  Probe
ccatcaggcaatacatactcttatg

SEQ ID NO: 99607 - DNA, 25 bp, Artificial
  Probe
atatacatggttattctggctatgc

SEQ ID NO: 99608 - DNA, 25 bp, Artificial
  Probe
actgctcttatggaatcttatgtaa

SEQ ID NO: 99609 - DNA, 25 bp, Artificial
  Probe
caatacatactcttatgctccaagt

SEQ ID NO: 99610 - DNA, 25 bp, Artificial
  Probe
ggtgacttccatcaggcaatacata

SEQ ID NO: 99611 - DNA, 25 bp, Artificial
  Probe
ttaaccaagctcttagaagaccaga

SEQ ID NO: 99612 - DNA, 25 bp, Artificial
  Probe
ctagaggagttaatggtgcttctgg

SEQ ID NO: 99613 - DNA, 25 bp, Artificial
  Probe
atatcaaccttgactcagtggatgg

SEQ ID NO: 99614 - DNA, 25 bp, Artificial
  Probe
atacatggttattctggctatgcaa

SEQ ID NO: 99615 - DNA, 25 bp, Artificial
  Probe
tatacatggttattctggctatgca

SEQ ID NO: 99616 - DNA, 25 bp, Artificial
  Probe
agacctgactgctcttatggaatct

SEQ ID NO: 99617 - DNA, 25 bp, Artificial
  Probe
ttgggtggtataataaatggatggc

SEQ ID NO: 99618 - DNA, 25 bp, Artificial
  Probe
tagaggagttaatggtgcttctgga

SEQ ID NO: 99619 - DNA, 25 bp, Artificial
  Probe
ttcgtgtcatttcttctcatcagat

SEQ ID NO: 99620 - DNA, 25 bp, Artificial
  Probe
attgggtggtataataaatggatgg

SEQ ID NO: 99621 - DNA, 25 bp, Artificial
  Probe
cttcgtgtcatttcttctcatcaga

SEQ ID NO: 99622 - DNA, 25 bp, Artificial
  Probe
aatacatactcttatgctccaagtt

SEQ ID NO: 99623 - DNA, 25 bp, Artificial
  Probe
atattgatagttccctggagcctag

SEQ ID NO: 99624 - DNA, 25 bp, Artificial
  Probe
ccttcgtgtcatttcttctcatcag

SEQ ID NO: 99625 - DNA, 25 bp, Artificial
  Probe
gcagaagagaaattgtaactcgttt

SEQ ID NO: 99626 - DNA, 25 bp, Artificial
  Probe
atactcttatgctccaagtttctgc

SEQ ID NO: 99627 - DNA, 25 bp, Artificial
  Probe
gctagaggagttaatggtgcttctg

SEQ ID NO: 99628 - DNA, 25 bp, Artificial
  Probe
taacagtcttacaggcagaagagaa

SEQ ID NO: 99629 - DNA, 25 bp, Artificial
  Probe
ttaacagtcttacaggcagaagaga

SEQ ID NO: 99630 - DNA, 25 bp, Artificial
  Probe
tagaagaccagagagtacatttcac

SEQ ID NO: 99631 - DNA, 25 bp, Artificial
  Probe
accttcctgatactaagtaaccttt

SEQ ID NO: 99632 - DNA, 25 bp, Artificial
  Probe
cagacctgactgctcttatggaatc

SEQ ID NO: 99633 - DNA, 25 bp, Artificial
  Probe
tcatttcttctcatcagatgggaat

SEQ ID NO: 99634 - DNA, 25 bp, Artificial
  Probe
catttcttctcatcagatgggaatc

SEQ ID NO: 99635 - DNA, 25 bp, Artificial
  Probe
ctagcaaggaagattcgttcagacc

SEQ ID NO: 99636 - DNA, 25 bp, Artificial
  Probe
tactgagggttaattttaccttggc

SEQ ID NO: 99637 - DNA, 25 bp, Artificial
  Probe
ttactgagggttaattttaccttgg

SEQ ID NO: 99638 - DNA, 25 bp, Artificial
  Probe
cctttactgagggttaattttacct

SEQ ID NO: 99639 - DNA, 25 bp, Artificial
  Probe
gagggttaattttaccttggcactg

SEQ ID NO: 99640 - DNA, 25 bp, Artificial
  Probe
ctgagggttaattttaccttggcac

SEQ ID NO: 99641 - DNA, 25 bp, Artificial
  Probe
tgagggttaattttaccttggcact

SEQ ID NO: 99642 - DNA, 25 bp, Artificial
  Probe
actgagggttaattttaccttggca

SEQ ID NO: 99643 - DNA, 25 bp, Artificial
  Probe
tttactgagggttaattttaccttg

SEQ ID NO: 99644 - DNA, 25 bp, Artificial
  Probe
agggttaattttaccttggcactgg

SEQ ID NO: 99645 - DNA, 25 bp, Artificial
  Probe
ctttactgagggttaattttacctt

SEQ ID NO: 99646 - DNA, 25 bp, Artificial
  Probe
ccgcaagcttattccctttactgag

SEQ ID NO: 99647 - DNA, 25 bp, Artificial
  Probe
cgcaagcttattccctttactgagg

SEQ ID NO: 99648 - DNA, 25 bp, Artificial
  Probe
ggttaattttaccttggcactggcc

SEQ ID NO: 99649 - DNA, 25 bp, Artificial
  Probe
gttaattttaccttggcactggccg

SEQ ID NO: 99650 - DNA, 25 bp, Artificial
  Probe
cttctgcgacctgaaatagttgttc

SEQ ID NO: 99651 - DNA, 25 bp, Artificial
  Probe
gttcttctgcgacctgaaatagttg

SEQ ID NO: 99652 - DNA, 25 bp, Artificial
  Probe
ctgaaatagttgttccctctgctct

SEQ ID NO: 99653 - DNA, 25 bp, Artificial
  Probe
agtatgttcgtttacagtgatagac

SEQ ID NO: 99654 - DNA, 25 bp, Artificial
  Probe
tcttctgcgacctgaaatagttgtt

SEQ ID NO: 99655 - DNA, 25 bp, Artificial
  Probe
ttcttctgcgacctgaaatagttgt

SEQ ID NO: 99656 - DNA, 25 bp, Artificial
  Probe
tgaaatagttgttccctctgctctg

SEQ ID NO: 99657 - DNA, 25 bp, Artificial
  Probe
ttctcacttggtcctcgttcttctg

SEQ ID NO: 99658 - DNA, 25 bp, Artificial
  Probe
gttctcacttggtcctcgttcttct

SEQ ID NO: 99659 - DNA, 25 bp, Artificial
  Probe
gaaatagttgttccctctgctctgg

SEQ ID NO: 99660 - DNA, 25 bp, Artificial
  Probe
cctgaaatagttgttccctctgctc

SEQ ID NO: 99661 - DNA, 25 bp, Artificial
  Probe
cgacctgaaatagttgttccctctg

SEQ ID NO: 99662 - DNA, 25 bp, Artificial
  Probe
catcttgtacgttctcacttggtcc

SEQ ID NO: 99663 - DNA, 25 bp, Artificial
  Probe
ttctgcgacctgaaatagttgttcc

SEQ ID NO: 99664 - DNA, 25 bp, Artificial
  Probe
atcttgtacgttctcacttggtcct

SEQ ID NO: 99665 - DNA, 25 bp, Artificial
  Probe
gacctgaaatagttgttccctctgc

SEQ ID NO: 99666 - DNA, 25 bp, Artificial
  Probe
cgttcttctgcgacctgaaatagtt

SEQ ID NO: 99667 - DNA, 25 bp, Artificial
  Probe
gtatgttcgtttacagtgatagacg

SEQ ID NO: 99668 - DNA, 25 bp, Artificial
  Probe
cagtgtcaaagattaaaagtgtcgc

SEQ ID NO: 99669 - DNA, 25 bp, Artificial
  Probe
tatgttcgtttacagtgatagacgg

SEQ ID NO: 99670 - DNA, 25 bp, Artificial
  Probe
acctgaaatagttgttccctctgct

SEQ ID NO: 99671 - DNA, 25 bp, Artificial
  Probe
agcttgtgaacttgctgtaattaaa

SEQ ID NO: 99672 - DNA, 25 bp, Artificial
  Probe
acagtgtcaaagattaaaagtgtcg

SEQ ID NO: 99673 - DNA, 25 bp, Artificial
  Probe
tcaaagattaaaagtgtcgcctgtc

SEQ ID NO: 99674 - DNA, 25 bp, Artificial
  Probe
tcttgtacgttctcacttggtcctc

SEQ ID NO: 99675 - DNA, 25 bp, Artificial
  Probe
gagccatcttgtacgttctcacttg

SEQ ID NO: 99676 - DNA, 25 bp, Artificial
  Probe
gtacgtaacctgtaagcatttcaac

SEQ ID NO: 99677 - DNA, 25 bp, Artificial
  Probe
tgtacgtaacctgtaagcatttcaa

SEQ ID NO: 99678 - DNA, 25 bp, Artificial
  Probe
gtcaaagattaaaagtgtcgcctgt

SEQ ID NO: 99679 - DNA, 25 bp, Artificial
  Probe
tgtcaaagattaaaagtgtcgcctg

SEQ ID NO: 99680 - DNA, 25 bp, Artificial
  Probe
gtgtcaaagattaaaagtgtcgcct

SEQ ID NO: 99681 - DNA, 25 bp, Artificial
  Probe
agtgtcaaagattaaaagtgtcgcc

SEQ ID NO: 99682 - DNA, 25 bp, Artificial
  Probe
gttcgtttacagtgatagacggttc

SEQ ID NO: 99683 - DNA, 25 bp, Artificial
  Probe
tctgtacgtaacctgtaagcatttc

SEQ ID NO: 99684 - DNA, 25 bp, Artificial
  Probe
ctctgtacgtaacctgtaagcattt

SEQ ID NO: 99685 - DNA, 25 bp, Artificial
  Probe
gcttgtgaacttgctgtaattaaaa

SEQ ID NO: 99686 - DNA, 25 bp, Artificial
  Probe
ctgtacgtaacctgtaagcatttca

SEQ ID NO: 99687 - DNA, 25 bp, Artificial
  Probe
ccatcttgtacgttctcacttggtc

SEQ ID NO: 99688 - DNA, 25 bp, Artificial
  Probe
tacgtaacctgtaagcatttcaacc

SEQ ID NO: 99689 - DNA, 25 bp, Artificial
  Probe
atgttcgtttacagtgatagacggt

SEQ ID NO: 99690 - DNA, 25 bp, Artificial
  Probe
tgttcgtttacagtgatagacggtt

SEQ ID NO: 99691 - DNA, 25 bp, Artificial
  Probe
acagtatttacagtgtcaaagatta

SEQ ID NO: 99692 - DNA, 25 bp, Artificial
  Probe
tacagtatttacagtgtcaaagatt

SEQ ID NO: 99693 - DNA, 25 bp, Artificial
  Probe
cagtgctctgtacgtaacctgtaag

SEQ ID NO: 99694 - DNA, 25 bp, Artificial
  Probe
ttcgtttacagtgatagacggttcc

SEQ ID NO: 99695 - DNA, 25 bp, Artificial
  Probe
tttcttcagtttaccaagccaaagt

SEQ ID NO: 99696 - DNA, 25 bp, Artificial
  Probe
ctagggaatcgggatgttgttaaag

SEQ ID NO: 99697 - DNA, 25 bp, Artificial
  Probe
ttcttcagtttaccaagccaaagtc

SEQ ID NO: 99698 - DNA, 25 bp, Artificial
  Probe
tctagggaatcgggatgttgttaaa

SEQ ID NO: 99699 - DNA, 25 bp, Artificial
  Probe
ggtcagaattggttctctcatgtat

SEQ ID NO: 99700 - DNA, 25 bp, Artificial
  Probe
cagaattggttctctcatgtattcc

SEQ ID NO: 99701 - DNA, 25 bp, Artificial
  Probe
aggtcagaattggttctctcatgta

SEQ ID NO: 99702 - DNA, 25 bp, Artificial
  Probe
ctctagggaatcgggatgttgttaa

SEQ ID NO: 99703 - DNA, 25 bp, Artificial
  Probe
gtcagaattggttctctcatgtatt

SEQ ID NO: 99704 - DNA, 25 bp, Artificial
  Probe
tcagaattggttctctcatgtattc

SEQ ID NO: 99705 - DNA, 25 bp, Artificial
  Probe
tagggaatcgggatgttgttaaagg

SEQ ID NO: 99706 - DNA, 25 bp, Artificial
  Probe
atgcacagactgaagtatacagaca

SEQ ID NO: 99707 - DNA, 25 bp, Artificial
  Probe
tgcacagactgaagtatacagacaa

SEQ ID NO: 99708 - DNA, 25 bp, Artificial
  Probe
gaggtcagaattggttctctcatgt

SEQ ID NO: 99709 - DNA, 25 bp, Artificial
  Probe
gaattggttctctcatgtattccct

SEQ ID NO: 99710 - DNA, 25 bp, Artificial
  Probe
atcagcatcatgagtcattacagat

SEQ ID NO: 99711 - DNA, 25 bp, Artificial
  Probe
gatcagcatcatgagtcattacaga

SEQ ID NO: 99712 - DNA, 25 bp, Artificial
  Probe
cagcatcatgagtcattacagataa

SEQ ID NO: 99713 - DNA, 25 bp, Artificial
  Probe
tcagcatcatgagtcattacagata

SEQ ID NO: 99714 - DNA, 25 bp, Artificial
  Probe
tcttcagtttaccaagccaaagtcc

SEQ ID NO: 99715 - DNA, 25 bp, Artificial
  Probe
agaattggttctctcatgtattccc

SEQ ID NO: 99716 - DNA, 25 bp, Artificial
  Probe
cagaggtcagaattggttctctcat

SEQ ID NO: 99717 - DNA, 25 bp, Artificial
  Probe
ctcgatcagcatcatgagtcattac

SEQ ID NO: 99718 - DNA, 25 bp, Artificial
  Probe
agaggtcagaattggttctctcatg

SEQ ID NO: 99719 - DNA, 25 bp, Artificial
  Probe
cgatcagcatcatgagtcattacag

SEQ ID NO: 99720 - DNA, 25 bp, Artificial
  Probe
ttttcttcagtttaccaagccaaag

SEQ ID NO: 99721 - DNA, 25 bp, Artificial
  Probe
gcacagactgaagtatacagacaaa

SEQ ID NO: 99722 - DNA, 25 bp, Artificial
  Probe
agcatcatgagtcattacagataat

SEQ ID NO: 99723 - DNA, 25 bp, Artificial
  Probe
tcgatcagcatcatgagtcattaca

SEQ ID NO: 99724 - DNA, 25 bp, Artificial
  Probe
cacagactgaagtatacagacaaat

SEQ ID NO: 99725 - DNA, 25 bp, Artificial
  Probe
cctcgatcagcatcatgagtcatta

SEQ ID NO: 99726 - DNA, 25 bp, Artificial
  Probe
ggaatcgggatgttgttaaaggcaa

SEQ ID NO: 99727 - DNA, 25 bp, Artificial
  Probe
cttcagtttaccaagccaaagtccc

SEQ ID NO: 99728 - DNA, 25 bp, Artificial
  Probe
gctctagggaatcgggatgttgtta

SEQ ID NO: 99729 - DNA, 25 bp, Artificial
  Probe
gactcaaaggcagaggtcagaattg

SEQ ID NO: 99730 - DNA, 25 bp, Artificial
  Probe
caaaggcagaggtcagaattggttc

SEQ ID NO: 99731 - DNA, 25 bp, Artificial
  Probe
acagactgaagtatacagacaaata

SEQ ID NO: 99732 - DNA, 25 bp, Artificial
  Probe
agactgaagtatacagacaaataca

SEQ ID NO: 99733 - DNA, 25 bp, Artificial
  Probe
tcaaaggcagaggtcagaattggtt

SEQ ID NO: 99734 - DNA, 25 bp, Artificial
  Probe
cagactgaagtatacagacaaatac

SEQ ID NO: 99735 - DNA, 25 bp, Artificial
  Probe
aaggcagaggtcagaattggttctc

SEQ ID NO: 99736 - DNA, 25 bp, Artificial
  Probe
ggactcaaaggcagaggtcagaatt

SEQ ID NO: 99737 - DNA, 25 bp, Artificial
  Probe
gactgaagtatacagacaaatacaa

SEQ ID NO: 99738 - DNA, 25 bp, Artificial
  Probe
gtatttccccttggacatttggcta

SEQ ID NO: 99739 - DNA, 25 bp, Artificial
  Probe
ctcaaaggcagaggtcagaattggt

SEQ ID NO: 99740 - DNA, 25 bp, Artificial
  Probe
cagagtcatcagtaggctagataga

SEQ ID NO: 99741 - DNA, 25 bp, Artificial
  Probe
agtcatcagtaggctagatagaagg

SEQ ID NO: 99742 - DNA, 25 bp, Artificial
  Probe
agagtcatcagtaggctagatagaa

SEQ ID NO: 99743 - DNA, 25 bp, Artificial
  Probe
tcatcagtaggctagatagaaggtg

SEQ ID NO: 99744 - DNA, 25 bp, Artificial
  Probe
gtcatcagtaggctagatagaaggt

SEQ ID NO: 99745 - DNA, 25 bp, Artificial
  Probe
gagtcatcagtaggctagatagaag

SEQ ID NO: 99746 - DNA, 25 bp, Artificial
  Probe
ccagagtcatcagtaggctagatag

SEQ ID NO: 99747 - DNA, 25 bp, Artificial
  Probe
tccagagtcatcagtaggctagata

SEQ ID NO: 99748 - DNA, 25 bp, Artificial
  Probe
atcagtaggctagatagaaggtgac

SEQ ID NO: 99749 - DNA, 25 bp, Artificial
  Probe
catcagtaggctagatagaaggtga

SEQ ID NO: 99750 - DNA, 25 bp, Artificial
  Probe
ttccagagtcatcagtaggctagat

SEQ ID NO: 99751 - DNA, 25 bp, Artificial
  Probe
tcagtaggctagatagaaggtgacc

SEQ ID NO: 99752 - DNA, 25 bp, Artificial
  Probe
cagttccagagtcatcagtaggcta

SEQ ID NO: 99753 - DNA, 25 bp, Artificial
  Probe
gatagaaggtgacctctcctcataa

SEQ ID NO: 99754 - DNA, 25 bp, Artificial
  Probe
gttccagagtcatcagtaggctaga

SEQ ID NO: 99755 - DNA, 25 bp, Artificial
  Probe
agttccagagtcatcagtaggctag

SEQ ID NO: 99756 - DNA, 25 bp, Artificial
  Probe
agatagaaggtgacctctcctcata

SEQ ID NO: 99757 - DNA, 25 bp, Artificial
  Probe
tagatagaaggtgacctctcctcat

SEQ ID NO: 99758 - DNA, 25 bp, Artificial
  Probe
agattatctgaagacacaaacctgg

SEQ ID NO: 99759 - DNA, 25 bp, Artificial
  Probe
gtgacctctcctcataaagatttgg

SEQ ID NO: 99760 - DNA, 25 bp, Artificial
  Probe
cctcataaagatttggagaactcag

SEQ ID NO: 99761 - DNA, 25 bp, Artificial
  Probe
gattatctgaagacacaaacctggc

SEQ ID NO: 99762 - DNA, 25 bp, Artificial
  Probe
ggtgacctctcctcataaagatttg

SEQ ID NO: 99763 - DNA, 25 bp, Artificial
  Probe
ctagatagaaggtgacctctcctca

SEQ ID NO: 99764 - DNA, 25 bp, Artificial
  Probe
taggctagatagaaggtgacctctc

SEQ ID NO: 99765 - DNA, 25 bp, Artificial
  Probe
cctatgggtcatctgtaaacatcag

SEQ ID NO: 99766 - DNA, 25 bp, Artificial
  Probe
ctatgggtcatctgtaaacatcagc

SEQ ID NO: 99767 - DNA, 25 bp, Artificial
  Probe
ctcataaagatttggagaactcaga

SEQ ID NO: 99768 - DNA, 25 bp, Artificial
  Probe
gtaggctagatagaaggtgacctct

SEQ ID NO: 99769 - DNA, 25 bp, Artificial
  Probe
agtaggctagatagaaggtgacctc

SEQ ID NO: 99770 - DNA, 25 bp, Artificial
  Probe
tcataaagatttggagaactcagat

SEQ ID NO: 99771 - DNA, 25 bp, Artificial
  Probe
attatctgaagacacaaacctggca

SEQ ID NO: 99772 - DNA, 25 bp, Artificial
  Probe
tcctcataaagatttggagaactca

SEQ ID NO: 99773 - DNA, 25 bp, Artificial
  Probe
cagtaggctagatagaaggtgacct

SEQ ID NO: 99774 - DNA, 25 bp, Artificial
  Probe
tgacctctcctcataaagatttgga

SEQ ID NO: 99775 - DNA, 25 bp, Artificial
  Probe
catcagaagtgaggataggaagctg

SEQ ID NO: 99776 - DNA, 25 bp, Artificial
  Probe
gtcatctgtaaacatcagccagttc

SEQ ID NO: 99777 - DNA, 25 bp, Artificial
  Probe
caactggtcaacacttccatcagaa

SEQ ID NO: 99778 - DNA, 25 bp, Artificial
  Probe
tccatcagaagtgaggataggaagc

SEQ ID NO: 99779 - DNA, 25 bp, Artificial
  Probe
cataaagatttggagaactcagatt

SEQ ID NO: 99780 - DNA, 25 bp, Artificial
  Probe
atagaaggtgacctctcctcataaa

SEQ ID NO: 99781 - DNA, 25 bp, Artificial
  Probe
tagaaggtgacctctcctcataaag

SEQ ID NO: 99782 - DNA, 25 bp, Artificial
  Probe
tatgggtcatctgtaaacatcagcc

SEQ ID NO: 99783 - DNA, 25 bp, Artificial
  Probe
gctagatagaaggtgacctctcctc

SEQ ID NO: 99784 - DNA, 25 bp, Artificial
  Probe
aggtgacctctcctcataaagattt

SEQ ID NO: 99785 - DNA, 25 bp, Artificial
  Probe
agaggctgtaagagaagaataacta

SEQ ID NO: 99786 - DNA, 25 bp, Artificial
  Probe
tagaggctgtaagagaagaataact

SEQ ID NO: 99787 - DNA, 25 bp, Artificial
  Probe
tcatattagaggctgtaagagaaga

SEQ ID NO: 99788 - DNA, 25 bp, Artificial
  Probe
gaggctgtaagagaagaataactag

SEQ ID NO: 99789 - DNA, 25 bp, Artificial
  Probe
ttagaggctgtaagagaagaataac

SEQ ID NO: 99790 - DNA, 25 bp, Artificial
  Probe
catattagaggctgtaagagaagaa

SEQ ID NO: 99791 - DNA, 25 bp, Artificial
  Probe
cagagtcctcttcagtgattgattg

SEQ ID NO: 99792 - DNA, 25 bp, Artificial
  Probe
tcagagtcctcttcagtgattgatt

SEQ ID NO: 99793 - DNA, 25 bp, Artificial
  Probe
ttcagagtcctcttcagtgattgat

SEQ ID NO: 99794 - DNA, 25 bp, Artificial
  Probe
ctcatattagaggctgtaagagaag

SEQ ID NO: 99795 - DNA, 25 bp, Artificial
  Probe
attcaccaggtcaccaagtaatcac

SEQ ID NO: 99796 - DNA, 25 bp, Artificial
  Probe
cattcaccaggtcaccaagtaatca

SEQ ID NO: 99797 - DNA, 25 bp, Artificial
  Probe
agagtcctcttcagtgattgattgg

SEQ ID NO: 99798 - DNA, 25 bp, Artificial
  Probe
attagaggctgtaagagaagaataa

SEQ ID NO: 99799 - DNA, 25 bp, Artificial
  Probe
atatctggaacttcgtcggctctaa

SEQ ID NO: 99800 - DNA, 25 bp, Artificial
  Probe
atattagaggctgtaagagaagaat

SEQ ID NO: 99801 - DNA, 25 bp, Artificial
  Probe
ccattcaccaggtcaccaagtaatc

SEQ ID NO: 99802 - DNA, 25 bp, Artificial
  Probe
gatttcagagtcctcttcagtgatt

SEQ ID NO: 99803 - DNA, 25 bp, Artificial
  Probe
atttcagagtcctcttcagtgattg

SEQ ID NO: 99804 - DNA, 25 bp, Artificial
  Probe
gtcctcttcagtgattgattggctc

SEQ ID NO: 99805 - DNA, 25 bp, Artificial
  Probe
gagtcctcttcagtgattgattggc

SEQ ID NO: 99806 - DNA, 25 bp, Artificial
  Probe
cttgatttcagagtcctcttcagtg

SEQ ID NO: 99807 - DNA, 25 bp, Artificial
  Probe
tgatttcagagtcctcttcagtgat

SEQ ID NO: 99808 - DNA, 25 bp, Artificial
  Probe
tttcagagtcctcttcagtgattga

SEQ ID NO: 99809 - DNA, 25 bp, Artificial
  Probe
ttgatttcagagtcctcttcagtga

SEQ ID NO: 99810 - DNA, 25 bp, Artificial
  Probe
aggctgtaagagaagaataactagt

SEQ ID NO: 99811 - DNA, 25 bp, Artificial
  Probe
tattagaggctgtaagagaagaata

SEQ ID NO: 99812 - DNA, 25 bp, Artificial
  Probe
agtcctcttcagtgattgattggct

SEQ ID NO: 99813 - DNA, 25 bp, Artificial
  Probe
ccttgatttcagagtcctcttcagt

SEQ ID NO: 99814 - DNA, 25 bp, Artificial
  Probe
ctctcatattagaggctgtaagaga

SEQ ID NO: 99815 - DNA, 25 bp, Artificial
  Probe
cccttgatttcagagtcctcttcag

SEQ ID NO: 99816 - DNA, 25 bp, Artificial
  Probe
tatctggaacttcgtcggctctaaa

SEQ ID NO: 99817 - DNA, 25 bp, Artificial
  Probe
tctcatattagaggctgtaagagaa

SEQ ID NO: 99818 - DNA, 25 bp, Artificial
  Probe
gatatctggaacttcgtcggctcta

SEQ ID NO: 99819 - DNA, 25 bp, Artificial
  Probe
gtgcataactcctgtcgattgaacg

SEQ ID NO: 99820 - DNA, 25 bp, Artificial
  Probe
gccattcaccaggtcaccaagtaat

SEQ ID NO: 99821 - DNA, 25 bp, Artificial
  Probe
ttcaccaggtcaccaagtaatcacc

SEQ ID NO: 99822 - DNA, 25 bp, Artificial
  Probe
gaacttcgtcggctctaaaccaaac

SEQ ID NO: 99823 - DNA, 25 bp, Artificial
  Probe
atctggaacttcgtcggctctaaac

SEQ ID NO: 99824 - DNA, 25 bp, Artificial
  Probe
aacttcgtcggctctaaaccaaact

SEQ ID NO: 99825 - DNA, 25 bp, Artificial
  Probe
gaaggagctattctggggtttgtat

SEQ ID NO: 99826 - DNA, 25 bp, Artificial
  Probe
tgcccttgatttcagagtcctcttc

SEQ ID NO: 99827 - DNA, 25 bp, Artificial
  Probe
ctattctggggtttgtatgctacca

SEQ ID NO: 99828 - DNA, 25 bp, Artificial
  Probe
aaggagctattctggggtttgtatg

SEQ ID NO: 99829 - DNA, 25 bp, Artificial
  Probe
gcccttgatttcagagtcctcttca

SEQ ID NO: 99830 - DNA, 25 bp, Artificial
  Probe
tatcatcaccatcgagtctcaggat

SEQ ID NO: 99831 - DNA, 25 bp, Artificial
  Probe
cactcatatggaccaacagttcttc

SEQ ID NO: 99832 - DNA, 25 bp, Artificial
  Probe
cttccttatagatggactaaccctg

SEQ ID NO: 99833 - DNA, 25 bp, Artificial
  Probe
ccttccttatagatggactaaccct

SEQ ID NO: 99834 - DNA, 25 bp, Artificial
  Probe
ttccttatagatggactaaccctgg

SEQ ID NO: 99835 - DNA, 25 bp, Artificial
  Probe
gagcccttccttatagatggactaa

SEQ ID NO: 99836 - DNA, 25 bp, Artificial
  Probe
agcccttccttatagatggactaac

SEQ ID NO: 99837 - DNA, 25 bp, Artificial
  Probe
cccttccttatagatggactaaccc

SEQ ID NO: 99838 - DNA, 25 bp, Artificial
  Probe
gtatcatcaccatcgagtctcagga

SEQ ID NO: 99839 - DNA, 25 bp, Artificial
  Probe
caacagttcttccaaacctgaatcc

SEQ ID NO: 99840 - DNA, 25 bp, Artificial
  Probe
ccaacagttcttccaaacctgaatc

SEQ ID NO: 99841 - DNA, 25 bp, Artificial
  Probe
gcccttccttatagatggactaacc

SEQ ID NO: 99842 - DNA, 25 bp, Artificial
  Probe
cagcctttgttctgcacttaataaa

SEQ ID NO: 99843 - DNA, 25 bp, Artificial
  Probe
accaacagttcttccaaacctgaat

SEQ ID NO: 99844 - DNA, 25 bp, Artificial
  Probe
actcatatggaccaacagttcttcc

SEQ ID NO: 99845 - DNA, 25 bp, Artificial
  Probe
tccttatagatggactaaccctggg

SEQ ID NO: 99846 - DNA, 25 bp, Artificial
  Probe
gcactcatatggaccaacagttctt

SEQ ID NO: 99847 - DNA, 25 bp, Artificial
  Probe
cgagcccttccttatagatggacta

SEQ ID NO: 99848 - DNA, 25 bp, Artificial
  Probe
ccagcctttgttctgcacttaataa

SEQ ID NO: 99849 - DNA, 25 bp, Artificial
  Probe
aacagttcttccaaacctgaatccc

SEQ ID NO: 99850 - DNA, 25 bp, Artificial
  Probe
gaccaacagttcttccaaacctgaa

SEQ ID NO: 99851 - DNA, 25 bp, Artificial
  Probe
ctctctcagcactcatatggaccaa

SEQ ID NO: 99852 - DNA, 25 bp, Artificial
  Probe
tctctcagcactcatatggaccaac

SEQ ID NO: 99853 - DNA, 25 bp, Artificial
  Probe
cagcactcatatggaccaacagttc

SEQ ID NO: 99854 - DNA, 25 bp, Artificial
  Probe
agcactcatatggaccaacagttct

SEQ ID NO: 99855 - DNA, 25 bp, Artificial
  Probe
tctcagcactcatatggaccaacag

SEQ ID NO: 99856 - DNA, 25 bp, Artificial
  Probe
ctctcagcactcatatggaccaaca

SEQ ID NO: 99857 - DNA, 25 bp, Artificial
  Probe
agcctttgttctgcacttaataaaa

SEQ ID NO: 99858 - DNA, 25 bp, Artificial
  Probe
cttatagatggactaaccctgggga

SEQ ID NO: 99859 - DNA, 25 bp, Artificial
  Probe
tcagcactcatatggaccaacagtt

SEQ ID NO: 99860 - DNA, 25 bp, Artificial
  Probe
ttatagatggactaaccctggggac

SEQ ID NO: 99861 - DNA, 25 bp, Artificial
  Probe
ggtatcatcaccatcgagtctcagg

SEQ ID NO: 99862 - DNA, 25 bp, Artificial
  Probe
atgaagtgggtagaggtgacacaag

SEQ ID NO: 99863 - DNA, 25 bp, Artificial
  Probe
cccagcctttgttctgcacttaata

SEQ ID NO: 99864 - DNA, 25 bp, Artificial
  Probe
ctcagcactcatatggaccaacagt

SEQ ID NO: 99865 - DNA, 25 bp, Artificial
  Probe
ccttatagatggactaaccctgggg

SEQ ID NO: 99866 - DNA, 25 bp, Artificial
  Probe
atcatcaccatcgagtctcaggatg

SEQ ID NO: 99867 - DNA, 25 bp, Artificial
  Probe
catgaagtgggtagaggtgacacaa

SEQ ID NO: 99868 - DNA, 25 bp, Artificial
  Probe
gaagtgggtagaggtgacacaagac

SEQ ID NO: 99869 - DNA, 25 bp, Artificial
  Probe
gagggtatcatcaccatcgagtctc

SEQ ID NO: 99870 - DNA, 25 bp, Artificial
  Probe
tcatatggaccaacagttcttccaa

SEQ ID NO: 99871 - DNA, 25 bp, Artificial
  Probe
gcctttgttctgcacttaataaaag

SEQ ID NO: 99872 - DNA, 25 bp, Artificial
  Probe
tgttctgcacttaataaaagacttt

SEQ ID NO: 99873 - DNA, 25 bp, Artificial
  Probe
ttgttctgcacttaataaaagactt

SEQ ID NO: 99874 - DNA, 25 bp, Artificial
  Probe
tttgttctgcacttaataaaagact

SEQ ID NO: 99875 - DNA, 25 bp, Artificial
  Probe
ccttcttccttcaccttatcctaat

SEQ ID NO: 99876 - DNA, 25 bp, Artificial
  Probe
tcatctctcagtcaattaggttcag

SEQ ID NO: 99877 - DNA, 25 bp, Artificial
  Probe
ctcatctctcagtcaattaggttca

SEQ ID NO: 99878 - DNA, 25 bp, Artificial
  Probe
tctcatctctcagtcaattaggttc

SEQ ID NO: 99879 - DNA, 25 bp, Artificial
  Probe
ctctcatctctcagtcaattaggtt

SEQ ID NO: 99880 - DNA, 25 bp, Artificial
  Probe
cttcttccttcaccttatcctaatg

SEQ ID NO: 99881 - DNA, 25 bp, Artificial
  Probe
catctctcagtcaattaggttcagc

SEQ ID NO: 99882 - DNA, 25 bp, Artificial
  Probe
tgcctctcatctctcagtcaattag

SEQ ID NO: 99883 - DNA, 25 bp, Artificial
  Probe
ttcttccttcaccttatcctaatga

SEQ ID NO: 99884 - DNA, 25 bp, Artificial
  Probe
tcttccttcaccttatcctaatgat

SEQ ID NO: 99885 - DNA, 25 bp, Artificial
  Probe
gtgcctctcatctctcagtcaatta

SEQ ID NO: 99886 - DNA, 25 bp, Artificial
  Probe
cttcaccttatcctaatgatctcgt

SEQ ID NO: 99887 - DNA, 25 bp, Artificial
  Probe
ccttcaccttatcctaatgatctcg

SEQ ID NO: 99888 - DNA, 25 bp, Artificial
  Probe
ttaaggagatcatctgttgtcatgg

SEQ ID NO: 99889 - DNA, 25 bp, Artificial
  Probe
tccttcaccttatcctaatgatctc

SEQ ID NO: 99890 - DNA, 25 bp, Artificial
  Probe
atctctcagtcaattaggttcagcc

SEQ ID NO: 99891 - DNA, 25 bp, Artificial
  Probe
ttccttcaccttatcctaatgatct

SEQ ID NO: 99892 - DNA, 25 bp, Artificial
  Probe
cctctcatctctcagtcaattaggt

SEQ ID NO: 99893 - DNA, 25 bp, Artificial
  Probe
ttcaccttatcctaatgatctcgtg

SEQ ID NO: 99894 - DNA, 25 bp, Artificial
  Probe
cttccttcaccttatcctaatgatc

SEQ ID NO: 99895 - DNA, 25 bp, Artificial
  Probe
ctctcagtcaattaggttcagccag

SEQ ID NO: 99896 - DNA, 25 bp, Artificial
  Probe
cgcttgctttatgtcttactttaac

SEQ ID NO: 99897 - DNA, 25 bp, Artificial
  Probe
cccttcttccttcaccttatcctaa

SEQ ID NO: 99898 - DNA, 25 bp, Artificial
  Probe
gcctctcatctctcagtcaattagg

SEQ ID NO: 99899 - DNA, 25 bp, Artificial
  Probe
tctctcagtcaattaggttcagcca

SEQ ID NO: 99900 - DNA, 25 bp, Artificial
  Probe
tcaccttatcctaatgatctcgtgc

SEQ ID NO: 99901 - DNA, 25 bp, Artificial
  Probe
ctgggtgagttgtcattgaaagaaa

SEQ ID NO: 99902 - DNA, 25 bp, Artificial
  Probe
ctttaaggagatcatctgttgtcat

SEQ ID NO: 99903 - DNA, 25 bp, Artificial
  Probe
tttaaggagatcatctgttgtcatg

SEQ ID NO: 99904 - DNA, 25 bp, Artificial
  Probe
tgggtgagttgtcattgaaagaaac

SEQ ID NO: 99905 - DNA, 25 bp, Artificial
  Probe
ctcagatggactcctcctccttatc

SEQ ID NO: 99906 - DNA, 25 bp, Artificial
  Probe
caccttatcctaatgatctcgtgcc

SEQ ID NO: 99907 - DNA, 25 bp, Artificial
  Probe
gcttgctttatgtcttactttaaca

SEQ ID NO: 99908 - DNA, 25 bp, Artificial
  Probe
taaggagatcatctgttgtcatggg

SEQ ID NO: 99909 - DNA, 25 bp, Artificial
  Probe
cttatactgatcatgtgcaattccg

SEQ ID NO: 99910 - DNA, 25 bp, Artificial
  Probe
ccttatactgatcatgtgcaattcc

SEQ ID NO: 99911 - DNA, 25 bp, Artificial
  Probe
tgtaccttatactgatcatgtgcaa

SEQ ID NO: 99912 - DNA, 25 bp, Artificial
  Probe
ttatactgatcatgtgcaattccgt

SEQ ID NO: 99913 - DNA, 25 bp, Artificial
  Probe
cctttaaggagatcatctgttgtca

SEQ ID NO: 99914 - DNA, 25 bp, Artificial
  Probe
acctttaaggagatcatctgttgtc

SEQ ID NO: 99915 - DNA, 25 bp, Artificial
  Probe
gacctttaaggagatcatctgttgt

SEQ ID NO: 99916 - DNA, 25 bp, Artificial
  Probe
cttatcctaatgatctcgtgccctc

SEQ ID NO: 99917 - DNA, 25 bp, Artificial
  Probe
accttatactgatcatgtgcaattc

SEQ ID NO: 99918 - DNA, 25 bp, Artificial
  Probe
atgtaccttatactgatcatgtgca

SEQ ID NO: 99919 - DNA, 25 bp, Artificial
  Probe
ggacctttaaggagatcatctgttg

SEQ ID NO: 99920 - DNA, 25 bp, Artificial
  Probe
ttagtgtttctcatttgcctggaat

SEQ ID NO: 99921 - DNA, 25 bp, Artificial
  Probe
cctccaagttagtgtttctcatttg

SEQ ID NO: 99922 - DNA, 25 bp, Artificial
  Probe
gcctccaagttagtgtttctcattt

SEQ ID NO: 99923 - DNA, 25 bp, Artificial
  Probe
ctccaagttagtgtttctcatttgc

SEQ ID NO: 99924 - DNA, 25 bp, Artificial
  Probe
caagttagtgtttctcatttgcctg

SEQ ID NO: 99925 - DNA, 25 bp, Artificial
  Probe
aagttagtgtttctcatttgcctgg

SEQ ID NO: 99926 - DNA, 25 bp, Artificial
  Probe
gttagtgtttctcatttgcctggaa

SEQ ID NO: 99927 - DNA, 25 bp, Artificial
  Probe
ccaagttagtgtttctcatttgcct

SEQ ID NO: 99928 - DNA, 25 bp, Artificial
  Probe
tccaagttagtgtttctcatttgcc

SEQ ID NO: 99929 - DNA, 25 bp, Artificial
  Probe
agttagtgtttctcatttgcctgga

SEQ ID NO: 99930 - DNA, 25 bp, Artificial
  Probe
ctgtgatttaagtgggaagctgtta

SEQ ID NO: 99931 - DNA, 25 bp, Artificial
  Probe
tgtgatttaagtgggaagctgttaa

SEQ ID NO: 99932 - DNA, 25 bp, Artificial
  Probe
tctatagctgtgatttaagtgggaa

SEQ ID NO: 99933 - DNA, 25 bp, Artificial
  Probe
ctatagctgtgatttaagtgggaag

SEQ ID NO: 99934 - DNA, 25 bp, Artificial
  Probe
atctatagctgtgatttaagtggga

SEQ ID NO: 99935 - DNA, 25 bp, Artificial
  Probe
ctttggtatcctgctgatggaaatc

SEQ ID NO: 99936 - DNA, 25 bp, Artificial
  Probe
tagtgtttctcatttgcctggaatg

SEQ ID NO: 99937 - DNA, 25 bp, Artificial
  Probe
agatgtctggtcctttggtatcctg

SEQ ID NO: 99938 - DNA, 25 bp, Artificial
  Probe
cctttggtatcctgctgatggaaat

SEQ ID NO: 99939 - DNA, 25 bp, Artificial
  Probe
gtcagatgtctggtcctttggtatc

SEQ ID NO: 99940 - DNA, 25 bp, Artificial
  Probe
gatcccttacccaggtatgtcaaac

SEQ ID NO: 99941 - DNA, 25 bp, Artificial
  Probe
tatagctgtgatttaagtgggaagc

SEQ ID NO: 99942 - DNA, 25 bp, Artificial
  Probe
gtgatttaagtgggaagctgttaaa

SEQ ID NO: 99943 - DNA, 25 bp, Artificial
  Probe
aatctatagctgtgatttaagtggg

SEQ ID NO: 99944 - DNA, 25 bp, Artificial
  Probe
tttggtatcctgctgatggaaatcg

SEQ ID NO: 99945 - DNA, 25 bp, Artificial
  Probe
ggtatgtcaaacccagaggtgattc

SEQ ID NO: 99946 - DNA, 25 bp, Artificial
  Probe
ctagtcatctgcaatctgccattct

SEQ ID NO: 99947 - DNA, 25 bp, Artificial
  Probe
ctctagtcatctgcaatctgccatt

SEQ ID NO: 99948 - DNA, 25 bp, Artificial
  Probe
tagtcatctgcaatctgccattctc

SEQ ID NO: 99949 - DNA, 25 bp, Artificial
  Probe
tctagtcatctgcaatctgccattc

SEQ ID NO: 99950 - DNA, 25 bp, Artificial
  Probe
aggtatgtcaaacccagaggtgatt

SEQ ID NO: 99951 - DNA, 25 bp, Artificial
  Probe
gtatcctgctgatggaaatcgtcac

SEQ ID NO: 99952 - DNA, 25 bp, Artificial
  Probe
caatctatagctgtgatttaagtgg

SEQ ID NO: 99953 - DNA, 25 bp, Artificial
  Probe
gtatgtcaaacccagaggtgattcg

SEQ ID NO: 99954 - DNA, 25 bp, Artificial
  Probe
gtaccgtatgcctcgaccagataac

SEQ ID NO: 99955 - DNA, 25 bp, Artificial
  Probe
tcctttggtatcctgctgatggaaa

SEQ ID NO: 99956 - DNA, 25 bp, Artificial
  Probe
cagatgtctggtcctttggtatcct

SEQ ID NO: 99957 - DNA, 25 bp, Artificial
  Probe
tcagatgtctggtcctttggtatcc

SEQ ID NO: 99958 - DNA, 25 bp, Artificial
  Probe
taccgtatgcctcgaccagataact

SEQ ID NO: 99959 - DNA, 25 bp, Artificial
  Probe
agtgggaagctgttaaaatagtatt

SEQ ID NO: 99960 - DNA, 25 bp, Artificial
  Probe
aagtgggaagctgttaaaatagtat

SEQ ID NO: 99961 - DNA, 25 bp, Artificial
  Probe
catttgcctggaatgaactgaattc

SEQ ID NO: 99962 - DNA, 25 bp, Artificial
  Probe
ttaagtgggaagctgttaaaatagt

SEQ ID NO: 99963 - DNA, 25 bp, Artificial
  Probe
ggcctccaagttagtgtttctcatt

SEQ ID NO: 99964 - DNA, 25 bp, Artificial
  Probe
ttggtatcctgctgatggaaatcgt

SEQ ID NO: 99965 - DNA, 25 bp, Artificial
  Probe
tatttaaggagactgtgtgtgactg

SEQ ID NO: 99966 - DNA, 25 bp, Artificial
  Probe
ttatttaaggagactgtgtgtgact

SEQ ID NO: 99967 - DNA, 25 bp, Artificial
  Probe
agtggctcaaatgattcagtattct

SEQ ID NO: 99968 - DNA, 25 bp, Artificial
  Probe
aagtggctcaaatgattcagtattc

SEQ ID NO: 99969 - DNA, 25 bp, Artificial
  Probe
attatttaaggagactgtgtgtgac

SEQ ID NO: 99970 - DNA, 25 bp, Artificial
  Probe
atttagactcaattctttctgccca

SEQ ID NO: 99971 - DNA, 25 bp, Artificial
  Probe
gattatttaaggagactgtgtgtga

SEQ ID NO: 99972 - DNA, 25 bp, Artificial
  Probe
agattatttaaggagactgtgtgtg

SEQ ID NO: 99973 - DNA, 25 bp, Artificial
  Probe
atttaaggagactgtgtgtgactga

SEQ ID NO: 99974 - DNA, 25 bp, Artificial
  Probe
tttagactcaattctttctgcccac

SEQ ID NO: 99975 - DNA, 25 bp, Artificial
  Probe
ttaaggagactgtgtgtgactgaaa

SEQ ID NO: 99976 - DNA, 25 bp, Artificial
  Probe
tttaaggagactgtgtgtgactgaa

SEQ ID NO: 99977 - DNA, 25 bp, Artificial
  Probe
aatttagactcaattctttctgccc

SEQ ID NO: 99978 - DNA, 25 bp, Artificial
  Probe
caaatgattcagtattctgtggtcc

SEQ ID NO: 99979 - DNA, 25 bp, Artificial
  Probe
gctcaaatgattcagtattctgtgg

SEQ ID NO: 99980 - DNA, 25 bp, Artificial
  Probe
ggctcaaatgattcagtattctgtg

SEQ ID NO: 99981 - DNA, 25 bp, Artificial
  Probe
gtggctcaaatgattcagtattctg

SEQ ID NO: 99982 - DNA, 25 bp, Artificial
  Probe
tggctcaaatgattcagtattctgt

SEQ ID NO: 99983 - DNA, 25 bp, Artificial
  Probe
acacctactctgagaggaagttctt

SEQ ID NO: 99984 - DNA, 25 bp, Artificial
  Probe
tcaaatgattcagtattctgtggtc

SEQ ID NO: 99985 - DNA, 25 bp, Artificial
  Probe
ctcaaatgattcagtattctgtggt

SEQ ID NO: 99986 - DNA, 25 bp, Artificial
  Probe
caatttagactcaattctttctgcc

SEQ ID NO: 99987 - DNA, 25 bp, Artificial
  Probe
aacacacctactctgagaggaagtt

SEQ ID NO: 99988 - DNA, 25 bp, Artificial
  Probe
acaatttagactcaattctttctgc

SEQ ID NO: 99989 - DNA, 25 bp, Artificial
  Probe
cacacctactctgagaggaagttct

SEQ ID NO: 99990 - DNA, 25 bp, Artificial
  Probe
tagattatttaaggagactgtgtgt

SEQ ID NO: 99991 - DNA, 25 bp, Artificial
  Probe
gcaaacgagatagattatttaagga

SEQ ID NO: 99992 - DNA, 25 bp, Artificial
  Probe
cacctactctgagaggaagttcttt

SEQ ID NO: 99993 - DNA, 25 bp, Artificial
  Probe
ttagactcaattctttctgcccacc

SEQ ID NO: 99994 - DNA, 25 bp, Artificial
  Probe
acacacctactctgagaggaagttc

SEQ ID NO: 99995 - DNA, 25 bp, Artificial
  Probe
tgtttcctgtggtattcgagctaaa

SEQ ID NO: 99996 - DNA, 25 bp, Artificial
  Probe
ttgtttcctgtggtattcgagctaa

SEQ ID NO: 99997 - DNA, 25 bp, Artificial
  Probe
tttgtttcctgtggtattcgagcta

SEQ ID NO: 99998 - DNA, 25 bp, Artificial
  Probe
acgagatagattatttaaggagact

SEQ ID NO: 99999 - DNA, 25 bp, Artificial
  Probe
gaaacacacctactctgagaggaag

SEQ ID NO: 100000 - DNA, 25 bp, Artificial
  Probe
gtcaaatatgcaaacgagatagatt

SEQ ID NO: 100001 - DNA, 25 bp, Artificial
  Probe
cgagatagattatttaaggagactg

SEQ ID NO: 100002 - DNA, 25 bp, Artificial
  Probe
ttgtttgttcgtttgtttgattttc

SEQ ID NO: 100003 - DNA, 25 bp, Artificial
  Probe
tagactcaattctttctgcccacct

SEQ ID NO: 100004 - DNA, 25 bp, Artificial
  Probe
tgtttgttcgtttgtttgattttca

SEQ ID NO: 100005 - DNA, 25 bp, Artificial
  Probe
taaggagactgtgtgtgactgaaaa

SEQ ID NO: 100006 - DNA, 25 bp, Artificial
  Probe
tgtgtgactgaaaagcaacattaaa

SEQ ID NO: 100007 - DNA, 25 bp, Artificial
  Probe
tttgtttgttcgtttgtttgatttt

SEQ ID NO: 100008 - DNA, 25 bp, Artificial
  Probe
ttttgtttgttcgtttgtttgattt

SEQ ID NO: 100009 - DNA, 25 bp, Artificial
  Probe
tgcaaacgagatagattatttaagg

SEQ ID NO: 100010 - DNA, 25 bp, Artificial
  Probe
ctaagttattctgtcctgctcctca

SEQ ID NO: 100011 - DNA, 25 bp, Artificial
  Probe
cttctcagtggtattgtgactaagt

SEQ ID NO: 100012 - DNA, 25 bp, Artificial
  Probe
tcttctcagtggtattgtgactaag

SEQ ID NO: 100013 - DNA, 25 bp, Artificial
  Probe
ttctcagtggtattgtgactaagtt

SEQ ID NO: 100014 - DNA, 25 bp, Artificial
  Probe
ttcttctcagtggtattgtgactaa

SEQ ID NO: 100015 - DNA, 25 bp, Artificial
  Probe
actaagttattctgtcctgctcctc

SEQ ID NO: 100016 - DNA, 25 bp, Artificial
  Probe
taagttattctgtcctgctcctcac

SEQ ID NO: 100017 - DNA, 25 bp, Artificial
  Probe
tctcagtggtattgtgactaagtta

SEQ ID NO: 100018 - DNA, 25 bp, Artificial
  Probe
ttgtgactaagttattctgtcctgc

SEQ ID NO: 100019 - DNA, 25 bp, Artificial
  Probe
gtgactaagttattctgtcctgctc

SEQ ID NO: 100020 - DNA, 25 bp, Artificial
  Probe
tggtattgtgactaagttattctgt

SEQ ID NO: 100021 - DNA, 25 bp, Artificial
  Probe
ctcagtggtattgtgactaagttat

SEQ ID NO: 100022 - DNA, 25 bp, Artificial
  Probe
tgtgactaagttattctgtcctgct

SEQ ID NO: 100023 - DNA, 25 bp, Artificial
  Probe
attgtgactaagttattctgtcctg

SEQ ID NO: 100024 - DNA, 25 bp, Artificial
  Probe
gactaagttattctgtcctgctcct

SEQ ID NO: 100025 - DNA, 25 bp, Artificial
  Probe
gtggtattgtgactaagttattctg

SEQ ID NO: 100026 - DNA, 25 bp, Artificial
  Probe
tgactaagttattctgtcctgctcc

SEQ ID NO: 100027 - DNA, 25 bp, Artificial
  Probe
tcagtggtattgtgactaagttatt

SEQ ID NO: 100028 - DNA, 25 bp, Artificial
  Probe
cagtggtattgtgactaagttattc

SEQ ID NO: 100029 - DNA, 25 bp, Artificial
  Probe
tatactacccagcctgaaagataca

SEQ ID NO: 100030 - DNA, 25 bp, Artificial
  Probe
agtggtattgtgactaagttattct

SEQ ID NO: 100031 - DNA, 25 bp, Artificial
  Probe
atctgactgccaaataaatcatcct

SEQ ID NO: 100032 - DNA, 25 bp, Artificial
  Probe
tgactgccaaataaatcatcctcat

SEQ ID NO: 100033 - DNA, 25 bp, Artificial
  Probe
ttggtagtctctgtgtggttggtaa

SEQ ID NO: 100034 - DNA, 25 bp, Artificial
  Probe
tttcttctcagtggtattgtgacta

SEQ ID NO: 100035 - DNA, 25 bp, Artificial
  Probe
tctgactgccaaataaatcatcctc

SEQ ID NO: 100036 - DNA, 25 bp, Artificial
  Probe
tttatggcaaggaaggctcattatg

SEQ ID NO: 100037 - DNA, 25 bp, Artificial
  Probe
ctgactgccaaataaatcatcctca

SEQ ID NO: 100038 - DNA, 25 bp, Artificial
  Probe
gtattgtgactaagttattctgtcc

SEQ ID NO: 100039 - DNA, 25 bp, Artificial
  Probe
ggtattgtgactaagttattctgtc

SEQ ID NO: 100040 - DNA, 25 bp, Artificial
  Probe
ctgccaaataaatcatcctcatgtc

SEQ ID NO: 100041 - DNA, 25 bp, Artificial
  Probe
gactgccaaataaatcatcctcatg

SEQ ID NO: 100042 - DNA, 25 bp, Artificial
  Probe
tattgtgactaagttattctgtcct

SEQ ID NO: 100043 - DNA, 25 bp, Artificial
  Probe
aaactgtactgtgtctcgcattaag

SEQ ID NO: 100044 - DNA, 25 bp, Artificial
  Probe
gatctgactgccaaataaatcatcc

SEQ ID NO: 100045 - DNA, 25 bp, Artificial
  Probe
actgccaaataaatcatcctcatgt

SEQ ID NO: 100046 - DNA, 25 bp, Artificial
  Probe
cttggtagtctctgtgtggttggta

SEQ ID NO: 100047 - DNA, 25 bp, Artificial
  Probe
aactgtactgtgtctcgcattaagc

SEQ ID NO: 100048 - DNA, 25 bp, Artificial
  Probe
atactacccagcctgaaagatacag

SEQ ID NO: 100049 - DNA, 25 bp, Artificial
  Probe
ttattctgtcctgctcctcaccttg

SEQ ID NO: 100050 - DNA, 25 bp, Artificial
  Probe
gttattctgtcctgctcctcacctt

SEQ ID NO: 100051 - DNA, 25 bp, Artificial
  Probe
aagttattctgtcctgctcctcacc

SEQ ID NO: 100052 - DNA, 25 bp, Artificial
  Probe
aaaggaatggagacatgggtaagtg

SEQ ID NO: 100053 - DNA, 25 bp, Artificial
  Probe
caaaggaatggagacatgggtaagt

SEQ ID NO: 100054 - DNA, 25 bp, Artificial
  Probe
tggtagtctctgtgtggttggtaaa

SEQ ID NO: 100055 - DNA, 25 bp, Artificial
  Probe
aggtacttaaccatagacactgatg

SEQ ID NO: 100056 - DNA, 25 bp, Artificial
  Probe
caggtacttaaccatagacactgat

SEQ ID NO: 100057 - DNA, 25 bp, Artificial
  Probe
ttccgttctgatatctgagtcttct

SEQ ID NO: 100058 - DNA, 25 bp, Artificial
  Probe
ccgttctgatatctgagtcttctga

SEQ ID NO: 100059 - DNA, 25 bp, Artificial
  Probe
tccgttctgatatctgagtcttctg

SEQ ID NO: 100060 - DNA, 25 bp, Artificial
  Probe
gctacttgatccactttattgtcca

SEQ ID NO: 100061 - DNA, 25 bp, Artificial
  Probe
ccactttattgtccaatccaaatca

SEQ ID NO: 100062 - DNA, 25 bp, Artificial
  Probe
gcaggtacttaaccatagacactga

SEQ ID NO: 100063 - DNA, 25 bp, Artificial
  Probe
tccactttattgtccaatccaaatc

SEQ ID NO: 100064 - DNA, 25 bp, Artificial
  Probe
cttgatccactttattgtccaatcc

SEQ ID NO: 100065 - DNA, 25 bp, Artificial
  Probe
tgatccactttattgtccaatccaa

SEQ ID NO: 100066 - DNA, 25 bp, Artificial
  Probe
ttgatccactttattgtccaatcca

SEQ ID NO: 100067 - DNA, 25 bp, Artificial
  Probe
gatccactttattgtccaatccaaa

SEQ ID NO: 100068 - DNA, 25 bp, Artificial
  Probe
cgttctgatatctgagtcttctgac

SEQ ID NO: 100069 - DNA, 25 bp, Artificial
  Probe
tattgtccaatccaaatcactcaaa

SEQ ID NO: 100070 - DNA, 25 bp, Artificial
  Probe
ttattgtccaatccaaatcactcaa

SEQ ID NO: 100071 - DNA, 25 bp, Artificial
  Probe
tttattgtccaatccaaatcactca

SEQ ID NO: 100072 - DNA, 25 bp, Artificial
  Probe
actttattgtccaatccaaatcact

SEQ ID NO: 100073 - DNA, 25 bp, Artificial
  Probe
cactttattgtccaatccaaatcac

SEQ ID NO: 100074 - DNA, 25 bp, Artificial
  Probe
atccactttattgtccaatccaaat

SEQ ID NO: 100075 - DNA, 25 bp, Artificial
  Probe
acttgatccactttattgtccaatc

SEQ ID NO: 100076 - DNA, 25 bp, Artificial
  Probe
agggatttggttaaggtacaaggta

SEQ ID NO: 100077 - DNA, 25 bp, Artificial
  Probe
ctacttgatccactttattgtccaa

SEQ ID NO: 100078 - DNA, 25 bp, Artificial
  Probe
gacagggatttggttaaggtacaag

SEQ ID NO: 100079 - DNA, 25 bp, Artificial
  Probe
ctttattgtccaatccaaatcactc

SEQ ID NO: 100080 - DNA, 25 bp, Artificial
  Probe
tacagtaggcatttccgttctgata

SEQ ID NO: 100081 - DNA, 25 bp, Artificial
  Probe
agacagggatttggttaaggtacaa

SEQ ID NO: 100082 - DNA, 25 bp, Artificial
  Probe
agctacttgatccactttattgtcc

SEQ ID NO: 100083 - DNA, 25 bp, Artificial
  Probe
catatcattcctgtagctttagacg

SEQ ID NO: 100084 - DNA, 25 bp, Artificial
  Probe
ggcaggtacttaaccatagacactg

SEQ ID NO: 100085 - DNA, 25 bp, Artificial
  Probe
tacttgatccactttattgtccaat

SEQ ID NO: 100086 - DNA, 25 bp, Artificial
  Probe
cagacagggatttggttaaggtaca

SEQ ID NO: 100087 - DNA, 25 bp, Artificial
  Probe
acagtaggcatttccgttctgatat

SEQ ID NO: 100088 - DNA, 25 bp, Artificial
  Probe
atcattcctgtagctttagacgtac

SEQ ID NO: 100089 - DNA, 25 bp, Artificial
  Probe
atatcattcctgtagctttagacgt

SEQ ID NO: 100090 - DNA, 25 bp, Artificial
  Probe
ggaaggatagaccactgtacataga

SEQ ID NO: 100091 - DNA, 25 bp, Artificial
  Probe
tttccgttctgatatctgagtcttc

SEQ ID NO: 100092 - DNA, 25 bp, Artificial
  Probe
catttccgttctgatatctgagtct

SEQ ID NO: 100093 - DNA, 25 bp, Artificial
  Probe
gatagaccactgtacatagatctgc

SEQ ID NO: 100094 - DNA, 25 bp, Artificial
  Probe
atttccgttctgatatctgagtctt

SEQ ID NO: 100095 - DNA, 25 bp, Artificial
  Probe
tatcattcctgtagctttagacgta

SEQ ID NO: 100096 - DNA, 25 bp, Artificial
  Probe
ggatagaccactgtacatagatctg

SEQ ID NO: 100097 - DNA, 25 bp, Artificial
  Probe
aggatagaccactgtacatagatct

SEQ ID NO: 100098 - DNA, 25 bp, Artificial
  Probe
gaaggatagaccactgtacatagat

SEQ ID NO: 100099 - DNA, 25 bp, Artificial
  Probe
aaggatagaccactgtacatagatc

SEQ ID NO: 100100 - DNA, 25 bp, Artificial
  Probe
gagtagggacttctgctacccaaga

SEQ ID NO: 100101 - DNA, 25 bp, Artificial
  Probe
agtagggacttctgctacccaagac

SEQ ID NO: 100102 - DNA, 25 bp, Artificial
  Probe
tcagctccctgaagaacaaactgag

SEQ ID NO: 100103 - DNA, 25 bp, Artificial
  Probe
gtcagctccctgaagaacaaactga

SEQ ID NO: 100104 - DNA, 25 bp, Artificial
  Probe
ttggaagatgctggtatatgtagag

SEQ ID NO: 100105 - DNA, 25 bp, Artificial
  Probe
cttggaagatgctggtatatgtaga

SEQ ID NO: 100106 - DNA, 25 bp, Artificial
  Probe
tggaagatgctggtatatgtagagg

SEQ ID NO: 100107 - DNA, 25 bp, Artificial
  Probe
tcttggaagatgctggtatatgtag

SEQ ID NO: 100108 - DNA, 25 bp, Artificial
  Probe
gttcttggaagatgctggtatatgt

SEQ ID NO: 100109 - DNA, 25 bp, Artificial
  Probe
tgttcttggaagatgctggtatatg

SEQ ID NO: 100110 - DNA, 25 bp, Artificial
  Probe
gtgttcttggaagatgctggtatat

SEQ ID NO: 100111 - DNA, 25 bp, Artificial
  Probe
ttcttggaagatgctggtatatgta

SEQ ID NO: 100112 - DNA, 25 bp, Artificial
  Probe
aacgaagagatcctgataagactgg

SEQ ID NO: 100113 - DNA, 25 bp, Artificial
  Probe
tgtgttcttggaagatgctggtata

SEQ ID NO: 100114 - DNA, 25 bp, Artificial
  Probe
tatgtgttcttggaagatgctggta

SEQ ID NO: 100115 - DNA, 25 bp, Artificial
  Probe
atgtgttcttggaagatgctggtat

SEQ ID NO: 100116 - DNA, 25 bp, Artificial
  Probe
gcttctttggatttattcacctgtc

SEQ ID NO: 100117 - DNA, 25 bp, Artificial
  Probe
ataaatccaccacctgagaaatctt

SEQ ID NO: 100118 - DNA, 25 bp, Artificial
  Probe
aaatccaccacctgagaaatcttag

SEQ ID NO: 100119 - DNA, 25 bp, Artificial
  Probe
cataaatccaccacctgagaaatct

SEQ ID NO: 100120 - DNA, 25 bp, Artificial
  Probe
cttctttggatttattcacctgtca

SEQ ID NO: 100121 - DNA, 25 bp, Artificial
  Probe
taaatccaccacctgagaaatctta

SEQ ID NO: 100122 - DNA, 25 bp, Artificial
  Probe
tctttggatttattcacctgtcagt

SEQ ID NO: 100123 - DNA, 25 bp, Artificial
  Probe
ttatgtgttcttggaagatgctggt

SEQ ID NO: 100124 - DNA, 25 bp, Artificial
  Probe
gatttattcacctgtcagtaagcct

SEQ ID NO: 100125 - DNA, 25 bp, Artificial
  Probe
tggatttattcacctgtcagtaagc

SEQ ID NO: 100126 - DNA, 25 bp, Artificial
  Probe
ttctttggatttattcacctgtcag

SEQ ID NO: 100127 - DNA, 25 bp, Artificial
  Probe
tttgatgtcgtatctgggagaagta

SEQ ID NO: 100128 - DNA, 25 bp, Artificial
  Probe
atcataaatccaccacctgagaaat

SEQ ID NO: 100129 - DNA, 25 bp, Artificial
  Probe
ttggatttattcacctgtcagtaag

SEQ ID NO: 100130 - DNA, 25 bp, Artificial
  Probe
ctttggatttattcacctgtcagta

SEQ ID NO: 100131 - DNA, 25 bp, Artificial
  Probe
tcataaatccaccacctgagaaatc

SEQ ID NO: 100132 - DNA, 25 bp, Artificial
  Probe
aaacgaagagatcctgataagactg

SEQ ID NO: 100133 - DNA, 25 bp, Artificial
  Probe
caaacgaagagatcctgataagact

SEQ ID NO: 100134 - DNA, 25 bp, Artificial
  Probe
ggatttattcacctgtcagtaagcc

SEQ ID NO: 100135 - DNA, 25 bp, Artificial
  Probe
tttggatttattcacctgtcagtaa

SEQ ID NO: 100136 - DNA, 25 bp, Artificial
  Probe
ggaagatgctggtatatgtagaggg

SEQ ID NO: 100137 - DNA, 25 bp, Artificial
  Probe
ccaaacgaagagatcctgataagac

SEQ ID NO: 100138 - DNA, 25 bp, Artificial
  Probe
tacttgtgcctttgatgtcgtatct

SEQ ID NO: 100139 - DNA, 25 bp, Artificial
  Probe
gatcataaatccaccacctgagaaa

SEQ ID NO: 100140 - DNA, 25 bp, Artificial
  Probe
atttattcacctgtcagtaagcctg

SEQ ID NO: 100141 - DNA, 25 bp, Artificial
  Probe
gaattgaagtgagggctccatctat

SEQ ID NO: 100142 - DNA, 25 bp, Artificial
  Probe
tttatgtgttcttggaagatgctgg

SEQ ID NO: 100143 - DNA, 25 bp, Artificial
  Probe
ctttgatgtcgtatctgggagaagt

SEQ ID NO: 100144 - DNA, 25 bp, Artificial
  Probe
aattgaagtgagggctccatctatg

SEQ ID NO: 100145 - DNA, 25 bp, Artificial
  Probe
ttgatgtcgtatctgggagaagtac

SEQ ID NO: 100146 - DNA, 25 bp, Artificial
  Probe
gaagagatcctgataagactgggtg

SEQ ID NO: 100147 - DNA, 25 bp, Artificial
  Probe
agcttctttggatttattcacctgt

SEQ ID NO: 100148 - DNA, 25 bp, Artificial
  Probe
aatccaccacctgagaaatcttagc

SEQ ID NO: 100149 - DNA, 25 bp, Artificial
  Probe
ttctgaatgagcacttctaagactt

SEQ ID NO: 100150 - DNA, 25 bp, Artificial
  Probe
tctgaatgagcacttctaagacttc

SEQ ID NO: 100151 - DNA, 25 bp, Artificial
  Probe
ggctagtaggattcagacaattaca

SEQ ID NO: 100152 - DNA, 25 bp, Artificial
  Probe
acttctaagacttcctgctactgaa

SEQ ID NO: 100153 - DNA, 25 bp, Artificial
  Probe
aggctagtaggattcagacaattac

SEQ ID NO: 100154 - DNA, 25 bp, Artificial
  Probe
gaggctagtaggattcagacaatta

SEQ ID NO: 100155 - DNA, 25 bp, Artificial
  Probe
agaggctagtaggattcagacaatt

SEQ ID NO: 100156 - DNA, 25 bp, Artificial
  Probe
aacataggatacattgagaagttgc

SEQ ID NO: 100157 - DNA, 25 bp, Artificial
  Probe
gaatgagcacttctaagacttcctg

SEQ ID NO: 100158 - DNA, 25 bp, Artificial
  Probe
ctgaatgagcacttctaagacttcc

SEQ ID NO: 100159 - DNA, 25 bp, Artificial
  Probe
cacttctaagacttcctgctactga

SEQ ID NO: 100160 - DNA, 25 bp, Artificial
  Probe
tgaatgagcacttctaagacttcct

SEQ ID NO: 100161 - DNA, 25 bp, Artificial
  Probe
gctagtaggattcagacaattacag

SEQ ID NO: 100162 - DNA, 25 bp, Artificial
  Probe
cagaggctagtaggattcagacaat

SEQ ID NO: 100163 - DNA, 25 bp, Artificial
  Probe
gatcagaggctagtaggattcagac

SEQ ID NO: 100164 - DNA, 25 bp, Artificial
  Probe
atcagaggctagtaggattcagaca

SEQ ID NO: 100165 - DNA, 25 bp, Artificial
  Probe
tcagaggctagtaggattcagacaa

SEQ ID NO: 100166 - DNA, 25 bp, Artificial
  Probe
acataggatacattgagaagttgca

SEQ ID NO: 100167 - DNA, 25 bp, Artificial
  Probe
ataggatacattgagaagttgcagg

SEQ ID NO: 100168 - DNA, 25 bp, Artificial
  Probe
cataggatacattgagaagttgcag

SEQ ID NO: 100169 - DNA, 25 bp, Artificial
  Probe
atccttactttctgaatgagcactt

SEQ ID NO: 100170 - DNA, 25 bp, Artificial
  Probe
tctaagacttcctgctactgaaatg

SEQ ID NO: 100171 - DNA, 25 bp, Artificial
  Probe
cttctaagacttcctgctactgaaa

SEQ ID NO: 100172 - DNA, 25 bp, Artificial
  Probe
taggatacattgagaagttgcagga

SEQ ID NO: 100173 - DNA, 25 bp, Artificial
  Probe
tttctgaatgagcacttctaagact

SEQ ID NO: 100174 - DNA, 25 bp, Artificial
  Probe
actttctgaatgagcacttctaaga

SEQ ID NO: 100175 - DNA, 25 bp, Artificial
  Probe
ttctaagacttcctgctactgaaat

SEQ ID NO: 100176 - DNA, 25 bp, Artificial
  Probe
ctttctgaatgagcacttctaagac

SEQ ID NO: 100177 - DNA, 25 bp, Artificial
  Probe
ccttactttctgaatgagcacttct

SEQ ID NO: 100178 - DNA, 25 bp, Artificial
  Probe
tccttactttctgaatgagcacttc

SEQ ID NO: 100179 - DNA, 25 bp, Artificial
  Probe
catccttactttctgaatgagcact

SEQ ID NO: 100180 - DNA, 25 bp, Artificial
  Probe
ctaagacttcctgctactgaaatgg

SEQ ID NO: 100181 - DNA, 25 bp, Artificial
  Probe
acatccttactttctgaatgagcac

SEQ ID NO: 100182 - DNA, 25 bp, Artificial
  Probe
cacatccttactttctgaatgagca

SEQ ID NO: 100183 - DNA, 25 bp, Artificial
  Probe
cccacatccttactttctgaatgag

SEQ ID NO: 100184 - DNA, 25 bp, Artificial
  Probe
ctcccacatccttactttctgaatg

SEQ ID NO: 100185 - DNA, 25 bp, Artificial
  Probe
taagacttcctgctactgaaatggt

SEQ ID NO: 100186 - DNA, 25 bp, Artificial
  Probe
tactttctgaatgagcacttctaag

SEQ ID NO: 100187 - DNA, 25 bp, Artificial
  Probe
cttactttctgaatgagcacttcta

SEQ ID NO: 100188 - DNA, 25 bp, Artificial
  Probe
tcccacatccttactttctgaatga

SEQ ID NO: 100189 - DNA, 25 bp, Artificial
  Probe
ccacatccttactttctgaatgagc

SEQ ID NO: 100190 - DNA, 25 bp, Artificial
  Probe
ttactttctgaatgagcacttctaa

SEQ ID NO: 100191 - DNA, 25 bp, Artificial
  Probe
cctcccacatccttactttctgaat

SEQ ID NO: 100192 - DNA, 25 bp, Artificial
  Probe
aggatacattgagaagttgcaggag

SEQ ID NO: 100193 - DNA, 25 bp, Artificial
  Probe
taatcattgcacagtactctacgtt

SEQ ID NO: 100194 - DNA, 25 bp, Artificial
  Probe
agatgatggaaaactttgtggagaa

SEQ ID NO: 100195 - DNA, 25 bp, Artificial
  Probe
gatgatggaaaactttgtggagaag

SEQ ID NO: 100196 - DNA, 25 bp, Artificial
  Probe
cagatgatggaaaactttgtggaga

SEQ ID NO: 100197 - DNA, 25 bp, Artificial
  Probe
tcagatgatggaaaactttgtggag

SEQ ID NO: 100198 - DNA, 25 bp, Artificial
  Probe
ctcagatgatggaaaactttgtgga

SEQ ID NO: 100199 - DNA, 25 bp, Artificial
  Probe
tgcttctagctgacttgattctaaa

SEQ ID NO: 100200 - DNA, 25 bp, Artificial
  Probe
cctcagatgatggaaaactttgtgg

SEQ ID NO: 100201 - DNA, 25 bp, Artificial
  Probe
ccctcagatgatggaaaactttgtg

SEQ ID NO: 100202 - DNA, 25 bp, Artificial
  Probe
catctatgtgcaggccatcaactac

SEQ ID NO: 100203 - DNA, 25 bp, Artificial
  Probe
agccctcagatgatggaaaactttg

SEQ ID NO: 100204 - DNA, 25 bp, Artificial
  Probe
cagccctcagatgatggaaaacttt

SEQ ID NO: 100205 - DNA, 25 bp, Artificial
  Probe
gccctcagatgatggaaaactttgt

SEQ ID NO: 100206 - DNA, 25 bp, Artificial
  Probe
atgatggaaaactttgtggagaagt

SEQ ID NO: 100207 - DNA, 25 bp, Artificial
  Probe
tcaaacatatgcgccagctactaat

SEQ ID NO: 100208 - DNA, 25 bp, Artificial
  Probe
atctatgtgcaggccatcaactacc

SEQ ID NO: 100209 - DNA, 25 bp, Artificial
  Probe
caaacatatgcgccagctactaatg

SEQ ID NO: 100210 - DNA, 25 bp, Artificial
  Probe
gcttctagctgacttgattctaaaa

SEQ ID NO: 100211 - DNA, 25 bp, Artificial
  Probe
acagccctcagatgatggaaaactt

SEQ ID NO: 100212 - DNA, 25 bp, Artificial
  Probe
gtcaaacatatgcgccagctactaa

SEQ ID NO: 100213 - DNA, 25 bp, Artificial
  Probe
aacatatgcgccagctactaatgga

SEQ ID NO: 100214 - DNA, 25 bp, Artificial
  Probe
cacagccctcagatgatggaaaact

SEQ ID NO: 100215 - DNA, 25 bp, Artificial
  Probe
aaacatatgcgccagctactaatgg

SEQ ID NO: 100216 - DNA, 25 bp, Artificial
  Probe
atatgcgccagctactaatggacag

SEQ ID NO: 100217 - DNA, 25 bp, Artificial
  Probe
catatgcgccagctactaatggaca

SEQ ID NO: 100218 - DNA, 25 bp, Artificial
  Probe
acatatgcgccagctactaatggac

SEQ ID NO: 100219 - DNA, 25 bp, Artificial
  Probe
gcatctatgtgcaggccatcaacta

SEQ ID NO: 100220 - DNA, 25 bp, Artificial
  Probe
gcactcaacagcaagatctgtgatc

SEQ ID NO: 100221 - DNA, 25 bp, Artificial
  Probe
gatggaaaactttgtggagaagttg

SEQ ID NO: 100222 - DNA, 25 bp, Artificial
  Probe
tgatggaaaactttgtggagaagtt

SEQ ID NO: 100223 - DNA, 25 bp, Artificial
  Probe
cagctactaatggacaggggctttc

SEQ ID NO: 100224 - DNA, 25 bp, Artificial
  Probe
atggaaaactttgtggagaagttgc

SEQ ID NO: 100225 - DNA, 25 bp, Artificial
  Probe
aaactttgtggagaagttgctgctg

SEQ ID NO: 100226 - DNA, 25 bp, Artificial
  Probe
ggaaaactttgtggagaagttgctg

SEQ ID NO: 100227 - DNA, 25 bp, Artificial
  Probe
tggaaaactttgtggagaagttgct

SEQ ID NO: 100228 - DNA, 25 bp, Artificial
  Probe
gaaaactttgtggagaagttgctgc

SEQ ID NO: 100229 - DNA, 25 bp, Artificial
  Probe
aaaactttgtggagaagttgctgct

SEQ ID NO: 100230 - DNA, 25 bp, Artificial
  Probe
ctactaatggacaggggctttcctg

SEQ ID NO: 100231 - DNA, 25 bp, Artificial
  Probe
aggaagatgaagaagacgactagat

SEQ ID NO: 100232 - DNA, 25 bp, Artificial
  Probe
gtgataaggtcaatgaggagatgta

SEQ ID NO: 100233 - DNA, 25 bp, Artificial
  Probe
gaggaagatgaagaagacgactaga

SEQ ID NO: 100234 - DNA, 25 bp, Artificial
  Probe
ggaagatgaagaagacgactagatc

SEQ ID NO: 100235 - DNA, 25 bp, Artificial
  Probe
tgataaggtcaatgaggagatgtat

SEQ ID NO: 100236 - DNA, 25 bp, Artificial
  Probe
ttcgtgataaggtcaatgaggagat

SEQ ID NO: 100237 - DNA, 25 bp, Artificial
  Probe
gaagatgaagaagacgactagatca

SEQ ID NO: 100238 - DNA, 25 bp, Artificial
  Probe
cttcgtgataaggtcaatgaggaga

SEQ ID NO: 100239 - DNA, 25 bp, Artificial
  Probe
tcgtgataaggtcaatgaggagatg

SEQ ID NO: 100240 - DNA, 25 bp, Artificial
  Probe
cgtgataaggtcaatgaggagatgt

SEQ ID NO: 100241 - DNA, 25 bp, Artificial
  Probe
cgaggaagatgaagaagacgactag

SEQ ID NO: 100242 - DNA, 25 bp, Artificial
  Probe
aacagcaagacctatgagaccattc

SEQ ID NO: 100243 - DNA, 25 bp, Artificial
  Probe
aggtcaatgaggagatgtatataga

SEQ ID NO: 100244 - DNA, 25 bp, Artificial
  Probe
atatctcctccagtagactgtaacc

SEQ ID NO: 100245 - DNA, 25 bp, Artificial
  Probe
acgaggaagatgaagaagacgacta

SEQ ID NO: 100246 - DNA, 25 bp, Artificial
  Probe
gataaggtcaatgaggagatgtata

SEQ ID NO: 100247 - DNA, 25 bp, Artificial
  Probe
cagtgacgaggaagatgaagaagac

SEQ ID NO: 100248 - DNA, 25 bp, Artificial
  Probe
gacagtgacgaggaagatgaagaag

SEQ ID NO: 100249 - DNA, 25 bp, Artificial
  Probe
tatctcctccagtagactgtaacca

SEQ ID NO: 100250 - DNA, 25 bp, Artificial
  Probe
cctccagtagactgtaaccatgatt

SEQ ID NO: 100251 - DNA, 25 bp, Artificial
  Probe
cttaaacagcaagacctatgagacc

SEQ ID NO: 100252 - DNA, 25 bp, Artificial
  Probe
ccttaaacagcaagacctatgagac

SEQ ID NO: 100253 - DNA, 25 bp, Artificial
  Probe
ggtcaatgaggagatgtatatagaa

SEQ ID NO: 100254 - DNA, 25 bp, Artificial
  Probe
aaggtcaatgaggagatgtatatag

SEQ ID NO: 100255 - DNA, 25 bp, Artificial
  Probe
acagtgacgaggaagatgaagaaga

SEQ ID NO: 100256 - DNA, 25 bp, Artificial
  Probe
ttatatctgtcacgtacattgcact

SEQ ID NO: 100257 - DNA, 25 bp, Artificial
  Probe
tatatctgtcacgtacattgcactc

SEQ ID NO: 100258 - DNA, 25 bp, Artificial
  Probe
aagaagacgactagatcattctctg

SEQ ID NO: 100259 - DNA, 25 bp, Artificial
  Probe
tgaagaagacgactagatcattctc

SEQ ID NO: 100260 - DNA, 25 bp, Artificial
  Probe
taaacagcaagacctatgagaccat

SEQ ID NO: 100261 - DNA, 25 bp, Artificial
  Probe
ttaaacagcaagacctatgagacca

SEQ ID NO: 100262 - DNA, 25 bp, Artificial
  Probe
gaagaagacgactagatcattctct

SEQ ID NO: 100263 - DNA, 25 bp, Artificial
  Probe
accttaaacagcaagacctatgaga

SEQ ID NO: 100264 - DNA, 25 bp, Artificial
  Probe
caccttaaacagcaagacctatgag

SEQ ID NO: 100265 - DNA, 25 bp, Artificial
  Probe
agatgtttaccaatacagacaccat

SEQ ID NO: 100266 - DNA, 25 bp, Artificial
  Probe
atctcctccagtagactgtaaccat

SEQ ID NO: 100267 - DNA, 25 bp, Artificial
  Probe
gagatgtttaccaatacagacacca

SEQ ID NO: 100268 - DNA, 25 bp, Artificial
  Probe
tgagatgtttaccaatacagacacc

SEQ ID NO: 100269 - DNA, 25 bp, Artificial
  Probe
cattgcactctgatctgtaactgag

SEQ ID NO: 100270 - DNA, 25 bp, Artificial
  Probe
gatgtttaccaatacagacaccatt

SEQ ID NO: 100271 - DNA, 25 bp, Artificial
  Probe
cgaaatgacaaccctagactataaa

SEQ ID NO: 100272 - DNA, 25 bp, Artificial
  Probe
agaagacgactagatcattctctgg

SEQ ID NO: 100273 - DNA, 25 bp, Artificial
  Probe
ttccaccttaaacagcaagacctat

SEQ ID NO: 100274 - DNA, 25 bp, Artificial
  Probe
attccaccttaaacagcaagaccta

SEQ ID NO: 100275 - DNA, 25 bp, Artificial
  Probe
agtagactgtaaccatgatttccat

SEQ ID NO: 100276 - DNA, 25 bp, Artificial
  Probe
cctccatcacgagacatattcttaa

SEQ ID NO: 100277 - DNA, 25 bp, Artificial
  Probe
cacgatgaatcaatctatggatctt

SEQ ID NO: 100278 - DNA, 25 bp, Artificial
  Probe
tcacgatgaatcaatctatggatct

SEQ ID NO: 100279 - DNA, 25 bp, Artificial
  Probe
ctccatcacgagacatattcttaat

SEQ ID NO: 100280 - DNA, 25 bp, Artificial
  Probe
atattactaagctcttgtctcgtgc

SEQ ID NO: 100281 - DNA, 25 bp, Artificial
  Probe
gcctccatcacgagacatattctta

SEQ ID NO: 100282 - DNA, 25 bp, Artificial
  Probe
ctacaagatcctctatcggcagaac

SEQ ID NO: 100283 - DNA, 25 bp, Artificial
  Probe
cacgagacatattcttaatacagac

SEQ ID NO: 100284 - DNA, 25 bp, Artificial
  Probe
ccatcacgagacatattcttaatac

SEQ ID NO: 100285 - DNA, 25 bp, Artificial
  Probe
tccatcacgagacatattcttaata

SEQ ID NO: 100286 - DNA, 25 bp, Artificial
  Probe
acgagacatattcttaatacagact

SEQ ID NO: 100287 - DNA, 25 bp, Artificial
  Probe
tcacgagacatattcttaatacaga

SEQ ID NO: 100288 - DNA, 25 bp, Artificial
  Probe
tttgttattcagccactttcacgat

SEQ ID NO: 100289 - DNA, 25 bp, Artificial
  Probe
actggttccatttgaagaagactat

SEQ ID NO: 100290 - DNA, 25 bp, Artificial
  Probe
ctactggttccatttgaagaagact

SEQ ID NO: 100291 - DNA, 25 bp, Artificial
  Probe
aagcagtagtgaggaaatcagaatt

SEQ ID NO: 100292 - DNA, 25 bp, Artificial
  Probe
tactggttccatttgaagaagacta

SEQ ID NO: 100293 - DNA, 25 bp, Artificial
  Probe
gaagcagtagtgaggaaatcagaat

SEQ ID NO: 100294 - DNA, 25 bp, Artificial
  Probe
ctcaagtccaccagttaatgtcacc

SEQ ID NO: 100295 - DNA, 25 bp, Artificial
  Probe
cctcaagtccaccagttaatgtcac

SEQ ID NO: 100296 - DNA, 25 bp, Artificial
  Probe
tattactaagctcttgtctcgtgcc

SEQ ID NO: 100297 - DNA, 25 bp, Artificial
  Probe
tatattactaagctcttgtctcgtg

SEQ ID NO: 100298 - DNA, 25 bp, Artificial
  Probe
gtatattactaagctcttgtctcgt

SEQ ID NO: 100299 - DNA, 25 bp, Artificial
  Probe
tgtatattactaagctcttgtctcg

SEQ ID NO: 100300 - DNA, 25 bp, Artificial
  Probe
ctggttccatttgaagaagactatt

SEQ ID NO: 100301 - DNA, 25 bp, Artificial
  Probe
ggttccatttgaagaagactatttg

SEQ ID NO: 100302 - DNA, 25 bp, Artificial
  Probe
ctgtcaaattccaaattatgcctga

SEQ ID NO: 100303 - DNA, 25 bp, Artificial
  Probe
tgtcaaattccaaattatgcctgaa

SEQ ID NO: 100304 - DNA, 25 bp, Artificial
  Probe
gagagcaaatcattctgtaaatacg

SEQ ID NO: 100305 - DNA, 25 bp, Artificial
  Probe
caaattccaaattatgcctgaactg

SEQ ID NO: 100306 - DNA, 25 bp, Artificial
  Probe
tcaaattccaaattatgcctgaact

SEQ ID NO: 100307 - DNA, 25 bp, Artificial
  Probe
gtcaaattccaaattatgcctgaac

SEQ ID NO: 100308 - DNA, 25 bp, Artificial
  Probe
ttctgagagcaaatcattctgtaaa

SEQ ID NO: 100309 - DNA, 25 bp, Artificial
  Probe
tttctgagagcaaatcattctgtaa

SEQ ID NO: 100310 - DNA, 25 bp, Artificial
  Probe
tggttccatttgaagaagactattt

SEQ ID NO: 100311 - DNA, 25 bp, Artificial
  Probe
tgaatcaatctatggatctttggga

SEQ ID NO: 100312 - DNA, 25 bp, Artificial
  Probe
ttgttattcagccactttcacgatg

SEQ ID NO: 100313 - DNA, 25 bp, Artificial
  Probe
tctgagagcaaatcattctgtaaat

SEQ ID NO: 100314 - DNA, 25 bp, Artificial
  Probe
catcacgagacatattcttaataca

SEQ ID NO: 100315 - DNA, 25 bp, Artificial
  Probe
gctactggttccatttgaagaagac

SEQ ID NO: 100316 - DNA, 25 bp, Artificial
  Probe
ccatttgaagaagactatttgatcg

SEQ ID NO: 100317 - DNA, 25 bp, Artificial
  Probe
gctgtcaaattccaaattatgcctg

SEQ ID NO: 100318 - DNA, 25 bp, Artificial
  Probe
agcctccatcacgagacatattctt

SEQ ID NO: 100319 - DNA, 25 bp, Artificial
  Probe
gaatcaatctatggatctttgggaa

SEQ ID NO: 100320 - DNA, 25 bp, Artificial
  Probe
atgaatcaatctatggatctttggg

SEQ ID NO: 100321 - DNA, 25 bp, Artificial
  Probe
aaataaagtccagatgaggaacggt

SEQ ID NO: 100322 - DNA, 25 bp, Artificial
  Probe
ggcagtaaggtggtgaatagactcc

SEQ ID NO: 100323 - DNA, 25 bp, Artificial
  Probe
tgctccaaaataaagtccagatgag

SEQ ID NO: 100324 - DNA, 25 bp, Artificial
  Probe
gcagtaaggtggtgaatagactccg

SEQ ID NO: 100325 - DNA, 25 bp, Artificial
  Probe
ctctgagtctgacaaagccttcatg

SEQ ID NO: 100326 - DNA, 25 bp, Artificial
  Probe
ctgctccaaaataaagtccagatga

SEQ ID NO: 100327 - DNA, 25 bp, Artificial
  Probe
gctccaaaataaagtccagatgagg

SEQ ID NO: 100328 - DNA, 25 bp, Artificial
  Probe
caaaataaagtccagatgaggaacg

SEQ ID NO: 100329 - DNA, 25 bp, Artificial
  Probe
ccaaaataaagtccagatgaggaac

SEQ ID NO: 100330 - DNA, 25 bp, Artificial
  Probe
tccaaaataaagtccagatgaggaa

SEQ ID NO: 100331 - DNA, 25 bp, Artificial
  Probe
ctccaaaataaagtccagatgagga

SEQ ID NO: 100332 - DNA, 25 bp, Artificial
  Probe
aaaataaagtccagatgaggaacgg

SEQ ID NO: 100333 - DNA, 25 bp, Artificial
  Probe
actctgagtctgacaaagccttcat

SEQ ID NO: 100334 - DNA, 25 bp, Artificial
  Probe
gagggcagtaaggtggtgaatagac

SEQ ID NO: 100335 - DNA, 25 bp, Artificial
  Probe
ctacctcaacaatggacttggagcc

SEQ ID NO: 100336 - DNA, 25 bp, Artificial
  Probe
tctgagtctgacaaagccttcatgt

SEQ ID NO: 100337 - DNA, 25 bp, Artificial
  Probe
gggcagtaaggtggtgaatagactc

SEQ ID NO: 100338 - DNA, 25 bp, Artificial
  Probe
gctgctccaaaataaagtccagatg

SEQ ID NO: 100339 - DNA, 25 bp, Artificial
  Probe
cagtaaggtggtgaatagactccgg

SEQ ID NO: 100340 - DNA, 25 bp, Artificial
  Probe
ctctctctgcctcgaaagtatggac

SEQ ID NO: 100341 - DNA, 25 bp, Artificial
  Probe
agggcagtaaggtggtgaatagact

SEQ ID NO: 100342 - DNA, 25 bp, Artificial
  Probe
agctgctccaaaataaagtccagat

SEQ ID NO: 100343 - DNA, 25 bp, Artificial
  Probe
ttccctctctctgcctcgaaagtat

SEQ ID NO: 100344 - DNA, 25 bp, Artificial
  Probe
ctgagtctgacaaagccttcatgtc

SEQ ID NO: 100345 - DNA, 25 bp, Artificial
  Probe
gtctgacaaagccttcatgtccaag

SEQ ID NO: 100346 - DNA, 25 bp, Artificial
  Probe
agtctgacaaagccttcatgtccaa

SEQ ID NO: 100347 - DNA, 25 bp, Artificial
  Probe
gactctgagtctgacaaagccttca

SEQ ID NO: 100348 - DNA, 25 bp, Artificial
  Probe
gagtctgacaaagccttcatgtcca

SEQ ID NO: 100349 - DNA, 25 bp, Artificial
  Probe
tgagtctgacaaagccttcatgtcc

SEQ ID NO: 100350 - DNA, 25 bp, Artificial
  Probe
cgactctgagtctgacaaagccttc

SEQ ID NO: 100351 - DNA, 25 bp, Artificial
  Probe
ttctgacatccaagaagcactctta

SEQ ID NO: 100352 - DNA, 25 bp, Artificial
  Probe
aggtcagtactaggtctcaatacaa

SEQ ID NO: 100353 - DNA, 25 bp, Artificial
  Probe
caggtcagtactaggtctcaataca

SEQ ID NO: 100354 - DNA, 25 bp, Artificial
  Probe
ccaggtcagtactaggtctcaatac

SEQ ID NO: 100355 - DNA, 25 bp, Artificial
  Probe
tctgacatccaagaagcactcttac

SEQ ID NO: 100356 - DNA, 25 bp, Artificial
  Probe
agaagcactcttaccaggtcagtac

SEQ ID NO: 100357 - DNA, 25 bp, Artificial
  Probe
tttatatggatcacccaacagcaaa

SEQ ID NO: 100358 - DNA, 25 bp, Artificial
  Probe
tttgcagttcatataaatggctcat

SEQ ID NO: 100359 - DNA, 25 bp, Artificial
  Probe
ttatatggatcacccaacagcaaag

SEQ ID NO: 100360 - DNA, 25 bp, Artificial
  Probe
aagaagcactcttaccaggtcagta

SEQ ID NO: 100361 - DNA, 25 bp, Artificial
  Probe
gacatccaagaagcactcttaccag

SEQ ID NO: 100362 - DNA, 25 bp, Artificial
  Probe
ctgacatccaagaagcactcttacc

SEQ ID NO: 100363 - DNA, 25 bp, Artificial
  Probe
tatatggatcacccaacagcaaagt

SEQ ID NO: 100364 - DNA, 25 bp, Artificial
  Probe
aagcactcttaccaggtcagtacta

SEQ ID NO: 100365 - DNA, 25 bp, Artificial
  Probe
accaggtcagtactaggtctcaata

SEQ ID NO: 100366 - DNA, 25 bp, Artificial
  Probe
taccaggtcagtactaggtctcaat

SEQ ID NO: 100367 - DNA, 25 bp, Artificial
  Probe
acaggagtgaaacacatggaatcat

SEQ ID NO: 100368 - DNA, 25 bp, Artificial
  Probe
ggtcagtactaggtctcaatacaaa

SEQ ID NO: 100369 - DNA, 25 bp, Artificial
  Probe
ttaccaggtcagtactaggtctcaa

SEQ ID NO: 100370 - DNA, 25 bp, Artificial
  Probe
agcactcttaccaggtcagtactag

SEQ ID NO: 100371 - DNA, 25 bp, Artificial
  Probe
catttctgacatccaagaagcactc

SEQ ID NO: 100372 - DNA, 25 bp, Artificial
  Probe
tcttaccaggtcagtactaggtctc

SEQ ID NO: 100373 - DNA, 25 bp, Artificial
  Probe
ctcttaccaggtcagtactaggtct

SEQ ID NO: 100374 - DNA, 25 bp, Artificial
  Probe
atggctcattttatatggatcaccc

SEQ ID NO: 100375 - DNA, 25 bp, Artificial
  Probe
atttctgacatccaagaagcactct

SEQ ID NO: 100376 - DNA, 25 bp, Artificial
  Probe
tgacatccaagaagcactcttacca

SEQ ID NO: 100377 - DNA, 25 bp, Artificial
  Probe
ttgcagttcatataaatggctcatt

SEQ ID NO: 100378 - DNA, 25 bp, Artificial
  Probe
cttaccaggtcagtactaggtctca

SEQ ID NO: 100379 - DNA, 25 bp, Artificial
  Probe
actcttaccaggtcagtactaggtc

SEQ ID NO: 100380 - DNA, 25 bp, Artificial
  Probe
atatggatcacccaacagcaaagtt

SEQ ID NO: 100381 - DNA, 25 bp, Artificial
  Probe
tttctgacatccaagaagcactctt

SEQ ID NO: 100382 - DNA, 25 bp, Artificial
  Probe
aggtctcaatacaaaagatatgctt

SEQ ID NO: 100383 - DNA, 25 bp, Artificial
  Probe
tatggatcacccaacagcaaagttt

SEQ ID NO: 100384 - DNA, 25 bp, Artificial
  Probe
cactcttaccaggtcagtactaggt

SEQ ID NO: 100385 - DNA, 25 bp, Artificial
  Probe
cacaggagtgaaacacatggaatca

SEQ ID NO: 100386 - DNA, 25 bp, Artificial
  Probe
acacaggagtgaaacacatggaatc

SEQ ID NO: 100387 - DNA, 25 bp, Artificial
  Probe
gacacaggagtgaaacacatggaat

SEQ ID NO: 100388 - DNA, 25 bp, Artificial
  Probe
gaaacagagctgaagtaactccgag

SEQ ID NO: 100389 - DNA, 25 bp, Artificial
  Probe
atccaagaagcactcttaccaggtc

SEQ ID NO: 100390 - DNA, 25 bp, Artificial
  Probe
gaagcactcttaccaggtcagtact

SEQ ID NO: 100391 - DNA, 25 bp, Artificial
  Probe
taggtctcaatacaaaagatatgct

SEQ ID NO: 100392 - DNA, 25 bp, Artificial
  Probe
gctcattttatatggatcacccaac

SEQ ID NO: 100393 - DNA, 25 bp, Artificial
  Probe
cattttatatggatcacccaacagc

SEQ ID NO: 100394 - DNA, 25 bp, Artificial
  Probe
caagaagcactcttaccaggtcagt

SEQ ID NO: 100395 - DNA, 25 bp, Artificial
  Probe
attttatatggatcacccaacagca

SEQ ID NO: 100396 - DNA, 25 bp, Artificial
  Probe
actgtttaagaatctcgtatgccat

SEQ ID NO: 100397 - DNA, 25 bp, Artificial
  Probe
ctgtttaagaatctcgtatgccatt

SEQ ID NO: 100398 - DNA, 25 bp, Artificial
  Probe
tgtttaagaatctcgtatgccattt

SEQ ID NO: 100399 - DNA, 25 bp, Artificial
  Probe
cactgtttaagaatctcgtatgcca

SEQ ID NO: 100400 - DNA, 25 bp, Artificial
  Probe
gtgctggtgttggaatgaatgaatg

SEQ ID NO: 100401 - DNA, 25 bp, Artificial
  Probe
ctggtgttggaatgaatgaatgcaa

SEQ ID NO: 100402 - DNA, 25 bp, Artificial
  Probe
ctgcactgtttaagaatctcgtatg

SEQ ID NO: 100403 - DNA, 25 bp, Artificial
  Probe
tggaatgaatgaatgcaaagtacaa

SEQ ID NO: 100404 - DNA, 25 bp, Artificial
  Probe
aagcagttactgtgaagtttaggaa

SEQ ID NO: 100405 - DNA, 25 bp, Artificial
  Probe
ggtgctggtgttggaatgaatgaat

SEQ ID NO: 100406 - DNA, 25 bp, Artificial
  Probe
cctgcactgtttaagaatctcgtat

SEQ ID NO: 100407 - DNA, 25 bp, Artificial
  Probe
tttcttgtttattgagtttgtaggt

SEQ ID NO: 100408 - DNA, 25 bp, Artificial
  Probe
agcagttactgtgaagtttaggaac

SEQ ID NO: 100409 - DNA, 25 bp, Artificial
  Probe
caagcagttactgtgaagtttagga

SEQ ID NO: 100410 - DNA, 25 bp, Artificial
  Probe
atgaatgaatgcaaagtacaatgtg

SEQ ID NO: 100411 - DNA, 25 bp, Artificial
  Probe
ttggaatgaatgaatgcaaagtaca

SEQ ID NO: 100412 - DNA, 25 bp, Artificial
  Probe
tgttggaatgaatgaatgcaaagta

SEQ ID NO: 100413 - DNA, 25 bp, Artificial
  Probe
cagttactgtgaagtttaggaaccc

SEQ ID NO: 100414 - DNA, 25 bp, Artificial
  Probe
gttggaatgaatgaatgcaaagtac

SEQ ID NO: 100415 - DNA, 25 bp, Artificial
  Probe
ggaatgaatgaatgcaaagtacaat

SEQ ID NO: 100416 - DNA, 25 bp, Artificial
  Probe
gtttcttgtttattgagtttgtagg

SEQ ID NO: 100417 - DNA, 25 bp, Artificial
  Probe
gtgttggaatgaatgaatgcaaagt

SEQ ID NO: 100418 - DNA, 25 bp, Artificial
  Probe
tgaatgaatgcaaagtacaatgtgt

SEQ ID NO: 100419 - DNA, 25 bp, Artificial
  Probe
tcctgcactgtttaagaatctcgta

SEQ ID NO: 100420 - DNA, 25 bp, Artificial
  Probe
aatgaatgaatgcaaagtacaatgt

SEQ ID NO: 100421 - DNA, 25 bp, Artificial
  Probe
gcagttactgtgaagtttaggaacc

SEQ ID NO: 100422 - DNA, 25 bp, Artificial
  Probe
tgccattttccactcacttatctta

SEQ ID NO: 100423 - DNA, 25 bp, Artificial
  Probe
tatgccattttccactcacttatct

SEQ ID NO: 100424 - DNA, 25 bp, Artificial
  Probe
gtatgccattttccactcacttatc

SEQ ID NO: 100425 - DNA, 25 bp, Artificial
  Probe
gaatgaatgcaaagtacaatgtgtt

SEQ ID NO: 100426 - DNA, 25 bp, Artificial
  Probe
ggtgttggaatgaatgaatgcaaag

SEQ ID NO: 100427 - DNA, 25 bp, Artificial
  Probe
atgccattttccactcacttatctt

SEQ ID NO: 100428 - DNA, 25 bp, Artificial
  Probe
gccattttccactcacttatcttaa

SEQ ID NO: 100429 - DNA, 25 bp, Artificial
  Probe
taagaatctcgtatgccattttcca

SEQ ID NO: 100430 - DNA, 25 bp, Artificial
  Probe
aatgaatgcaaagtacaatgtgttt

SEQ ID NO: 100431 - DNA, 25 bp, Artificial
  Probe
gaatgaatgaatgcaaagtacaatg

SEQ ID NO: 100432 - DNA, 25 bp, Artificial
  Probe
tttgtttcttgtttattgagtttgt

SEQ ID NO: 100433 - DNA, 25 bp, Artificial
  Probe
ttaagaatctcgtatgccattttcc

SEQ ID NO: 100434 - DNA, 25 bp, Artificial
  Probe
atgcaagcagttactgtgaagttta

SEQ ID NO: 100435 - DNA, 25 bp, Artificial
  Probe
tgctggtgttggaatgaatgaatgc

SEQ ID NO: 100436 - DNA, 25 bp, Artificial
  Probe
tgatgcaagcagttactgtgaagtt

SEQ ID NO: 100437 - DNA, 25 bp, Artificial
  Probe
ttgatgcaagcagttactgtgaagt

SEQ ID NO: 100438 - DNA, 25 bp, Artificial
  Probe
gcaagcagttactgtgaagtttagg

SEQ ID NO: 100439 - DNA, 25 bp, Artificial
  Probe
cgtatgccattttccactcacttat

SEQ ID NO: 100440 - DNA, 25 bp, Artificial
  Probe
gtgagtatgcactaaatatgaacct

SEQ ID NO: 100441 - DNA, 25 bp, Artificial
  Probe
gaagaagagcaagaagaagagtgac

SEQ ID NO: 100442 - DNA, 25 bp, Artificial
  Probe
ctgaagaagagcaagaagaagagtg

SEQ ID NO: 100443 - DNA, 25 bp, Artificial
  Probe
ccatccaagaagaagaagaagttcc

SEQ ID NO: 100444 - DNA, 25 bp, Artificial
  Probe
tgaagaagagcaagaagaagagtga

SEQ ID NO: 100445 - DNA, 25 bp, Artificial
  Probe
aagaagagcaagaagaagagtgact

SEQ ID NO: 100446 - DNA, 25 bp, Artificial
  Probe
ttcctgaagaagagcaagaagaaga

SEQ ID NO: 100447 - DNA, 25 bp, Artificial
  Probe
catccaagaagaagaagaagttccg

SEQ ID NO: 100448 - DNA, 25 bp, Artificial
  Probe
tcctgaagaagagcaagaagaagag

SEQ ID NO: 100449 - DNA, 25 bp, Artificial
  Probe
cctgaagaagagcaagaagaagagt

SEQ ID NO: 100450 - DNA, 25 bp, Artificial
  Probe
cttgtgttctgtcctctcgtgtaat

SEQ ID NO: 100451 - DNA, 25 bp, Artificial
  Probe
ttgtgttctgtcctctcgtgtaatg

SEQ ID NO: 100452 - DNA, 25 bp, Artificial
  Probe
atccaagaagaagaagaagttccgc

SEQ ID NO: 100453 - DNA, 25 bp, Artificial
  Probe
agaagagcaagaagaagagtgactc

SEQ ID NO: 100454 - DNA, 25 bp, Artificial
  Probe
cccatccaagaagaagaagaagttc

SEQ ID NO: 100455 - DNA, 25 bp, Artificial
  Probe
agacaagagagcagaaagagaagag

SEQ ID NO: 100456 - DNA, 25 bp, Artificial
  Probe
gagacaagagagcagaaagagaaga

SEQ ID NO: 100457 - DNA, 25 bp, Artificial
  Probe
tcttgtgttctgtcctctcgtgtaa

SEQ ID NO: 100458 - DNA, 25 bp, Artificial
  Probe
ttctgtcctctcgtgtaatggaatg

SEQ ID NO: 100459 - DNA, 25 bp, Artificial
  Probe
gttctgtcctctcgtgtaatggaat

SEQ ID NO: 100460 - DNA, 25 bp, Artificial
  Probe
acaagagagcagaaagagaagagtc

SEQ ID NO: 100461 - DNA, 25 bp, Artificial
  Probe
gacaagagagcagaaagagaagagt

SEQ ID NO: 100462 - DNA, 25 bp, Artificial
  Probe
caagaagaagagtgactcctgaagg

SEQ ID NO: 100463 - DNA, 25 bp, Artificial
  Probe
gaagagcaagaagaagagtgactcc

SEQ ID NO: 100464 - DNA, 25 bp, Artificial
  Probe
aagagagcagaaagagaagagtcct

SEQ ID NO: 100465 - DNA, 25 bp, Artificial
  Probe
caagagagcagaaagagaagagtcc

SEQ ID NO: 100466 - DNA, 25 bp, Artificial
  Probe
gcaagaagaagagtgactcctgaag

SEQ ID NO: 100467 - DNA, 25 bp, Artificial
  Probe
gtcttgtgttctgtcctctcgtgta

SEQ ID NO: 100468 - DNA, 25 bp, Artificial
  Probe
aagagcaagaagaagagtgactcct

SEQ ID NO: 100469 - DNA, 25 bp, Artificial
  Probe
cgagacaagagagcagaaagagaag

SEQ ID NO: 100470 - DNA, 25 bp, Artificial
  Probe
agcaagaagaagagtgactcctgaa

SEQ ID NO: 100471 - DNA, 25 bp, Artificial
  Probe
caagaagaagaagaagttccgcacc

SEQ ID NO: 100472 - DNA, 25 bp, Artificial
  Probe
ccaagaagaagaagaagttccgcac

SEQ ID NO: 100473 - DNA, 25 bp, Artificial
  Probe
tgttctgtcctctcgtgtaatggaa

SEQ ID NO: 100474 - DNA, 25 bp, Artificial
  Probe
tgtgttctgtcctctcgtgtaatgg

SEQ ID NO: 100475 - DNA, 25 bp, Artificial
  Probe
cctctgtcttgtgttctgtcctctc

SEQ ID NO: 100476 - DNA, 25 bp, Artificial
  Probe
ctcctctgtcttgtgttctgtcctc

SEQ ID NO: 100477 - DNA, 25 bp, Artificial
  Probe
tccaagaagaagaagaagttccgca

SEQ ID NO: 100478 - DNA, 25 bp, Artificial
  Probe
gaagagaacctggacgagacaagag

SEQ ID NO: 100479 - DNA, 25 bp, Artificial
  Probe
acgagacaagagagcagaaagagaa

SEQ ID NO: 100480 - DNA, 25 bp, Artificial
  Probe
gagcaagaagaagagtgactcctga

SEQ ID NO: 100481 - DNA, 25 bp, Artificial
  Probe
agagcaagaagaagagtgactcctg

SEQ ID NO: 100482 - DNA, 25 bp, Artificial
  Probe
agagagcagaaagagaagagtcctc

SEQ ID NO: 100483 - DNA, 25 bp, Artificial
  Probe
ctctgtcttgtgttctgtcctctcg

SEQ ID NO: 100484 - DNA, 25 bp, Artificial
  Probe
tcctctgtcttgtgttctgtcctct

SEQ ID NO: 100485 - DNA, 25 bp, Artificial
  Probe
ctgaagagaacctggacgagacaag

SEQ ID NO: 100486 - DNA, 25 bp, Artificial
  Probe
gtctctctctcttctctctctgtat

SEQ ID NO: 100487 - DNA, 25 bp, Artificial
  Probe
agtctctctctcttctctctctgta

SEQ ID NO: 100488 - DNA, 25 bp, Artificial
  Probe
taagtctctctctcttctctctctg

SEQ ID NO: 100489 - DNA, 25 bp, Artificial
  Probe
ttaagtctctctctcttctctctct

SEQ ID NO: 100490 - DNA, 25 bp, Artificial
  Probe
tctctctctcttctctctctgtata

SEQ ID NO: 100491 - DNA, 25 bp, Artificial
  Probe
aagtctctctctcttctctctctgt

SEQ ID NO: 100492 - DNA, 25 bp, Artificial
  Probe
ctctctctcttctctctctgtatat

SEQ ID NO: 100493 - DNA, 25 bp, Artificial
  Probe
ggaactactattattcgtgacattc

SEQ ID NO: 100494 - DNA, 25 bp, Artificial
  Probe
ggcagacaagggaactactattatt

SEQ ID NO: 100495 - DNA, 25 bp, Artificial
  Probe
aagggaactactattattcgtgaca

SEQ ID NO: 100496 - DNA, 25 bp, Artificial
  Probe
acaagggaactactattattcgtga

SEQ ID NO: 100497 - DNA, 25 bp, Artificial
  Probe
agggaactactattattcgtgacat

SEQ ID NO: 100498 - DNA, 25 bp, Artificial
  Probe
caagggaactactattattcgtgac

SEQ ID NO: 100499 - DNA, 25 bp, Artificial
  Probe
gacaagggaactactattattcgtg

SEQ ID NO: 100500 - DNA, 25 bp, Artificial
  Probe
agacaagggaactactattattcgt

SEQ ID NO: 100501 - DNA, 25 bp, Artificial
  Probe
gcagacaagggaactactattattc

SEQ ID NO: 100502 - DNA, 25 bp, Artificial
  Probe
cagacaagggaactactattattcg

SEQ ID NO: 100503 - DNA, 25 bp, Artificial
  Probe
gggcagacaagggaactactattat

SEQ ID NO: 100504 - DNA, 25 bp, Artificial
  Probe
ctcttccttcaggtccaatcaaatc

SEQ ID NO: 100505 - DNA, 25 bp, Artificial
  Probe
gggaactactattattcgtgacatt

SEQ ID NO: 100506 - DNA, 25 bp, Artificial
  Probe
cttaagtctctctctcttctctctc

SEQ ID NO: 100507 - DNA, 25 bp, Artificial
  Probe
gtgttgtttgtctcttgactttgta

SEQ ID NO: 100508 - DNA, 25 bp, Artificial
  Probe
gaactactattattcgtgacattct

SEQ ID NO: 100509 - DNA, 25 bp, Artificial
  Probe
gtgtgttgtttgtctcttgactttg

SEQ ID NO: 100510 - DNA, 25 bp, Artificial
  Probe
tgttgtttgtctcttgactttgtac

SEQ ID NO: 100511 - DNA, 25 bp, Artificial
  Probe
ttgtttgtctcttgactttgtacct

SEQ ID NO: 100512 - DNA, 25 bp, Artificial
  Probe
gttgtttgtctcttgactttgtacc

SEQ ID NO: 100513 - DNA, 25 bp, Artificial
  Probe
tgtgttgtttgtctcttgactttgt

SEQ ID NO: 100514 - DNA, 25 bp, Artificial
  Probe
ttccttcaggtccaatcaaatccta

SEQ ID NO: 100515 - DNA, 25 bp, Artificial
  Probe
tgtttgtctcttgactttgtacctc

SEQ ID NO: 100516 - DNA, 25 bp, Artificial
  Probe
tctctctcttctctctctgtatata

SEQ ID NO: 100517 - DNA, 25 bp, Artificial
  Probe
tcttccttcaggtccaatcaaatcc

SEQ ID NO: 100518 - DNA, 25 bp, Artificial
  Probe
aactactattattcgtgacattctt

SEQ ID NO: 100519 - DNA, 25 bp, Artificial
  Probe
ttcctcttccttcaggtccaatcaa

SEQ ID NO: 100520 - DNA, 25 bp, Artificial
  Probe
ggtgtgttgtttgtctcttgacttt

SEQ ID NO: 100521 - DNA, 25 bp, Artificial
  Probe
tccttcaggtccaatcaaatcctag

SEQ ID NO: 100522 - DNA, 25 bp, Artificial
  Probe
ttattcgtgacattcttagtattgt

SEQ ID NO: 100523 - DNA, 25 bp, Artificial
  Probe
tattcgtatttatctgtgggtacac

SEQ ID NO: 100524 - DNA, 25 bp, Artificial
  Probe
cttccttcaggtccaatcaaatcct

SEQ ID NO: 100525 - DNA, 25 bp, Artificial
  Probe
cctcttccttcaggtccaatcaaat

SEQ ID NO: 100526 - DNA, 25 bp, Artificial
  Probe
cttcctcttccttcaggtccaatca

SEQ ID NO: 100527 - DNA, 25 bp, Artificial
  Probe
aggtgtgttgtttgtctcttgactt

SEQ ID NO: 100528 - DNA, 25 bp, Artificial
  Probe
attcgtatttatctgtgggtacacg

SEQ ID NO: 100529 - DNA, 25 bp, Artificial
  Probe
attattcgtgacattcttagtattg

SEQ ID NO: 100530 - DNA, 25 bp, Artificial
  Probe
actactattattcgtgacattctta

SEQ ID NO: 100531 - DNA, 25 bp, Artificial
  Probe
tctatccaccatcagttcagacgaa

SEQ ID NO: 100532 - DNA, 25 bp, Artificial
  Probe
ctctatccaccatcagttcagacga

SEQ ID NO: 100533 - DNA, 25 bp, Artificial
  Probe
gactcagaaatgaccattcaggaaa

SEQ ID NO: 100534 - DNA, 25 bp, Artificial
  Probe
actcagaaatgaccattcaggaaac

SEQ ID NO: 100535 - DNA, 25 bp, Artificial
  Probe
gactggtgtgctctttagagttaaa

SEQ ID NO: 100536 - DNA, 25 bp, Artificial
  Probe
tatccaccatcagttcagacgaaag

SEQ ID NO: 100537 - DNA, 25 bp, Artificial
  Probe
ctatccaccatcagttcagacgaaa

SEQ ID NO: 100538 - DNA, 25 bp, Artificial
  Probe
gaaaggctatccagttgagaggttt

SEQ ID NO: 100539 - DNA, 25 bp, Artificial
  Probe
tgctctatccaccatcagttcagac

SEQ ID NO: 100540 - DNA, 25 bp, Artificial
  Probe
tgactggtgtgctctttagagttaa

SEQ ID NO: 100541 - DNA, 25 bp, Artificial
  Probe
ctcagaaatgaccattcaggaaacg

SEQ ID NO: 100542 - DNA, 25 bp, Artificial
  Probe
ctgctctatccaccatcagttcaga

SEQ ID NO: 100543 - DNA, 25 bp, Artificial
  Probe
tctgctctatccaccatcagttcag

SEQ ID NO: 100544 - DNA, 25 bp, Artificial
  Probe
ctctgctctatccaccatcagttca

SEQ ID NO: 100545 - DNA, 25 bp, Artificial
  Probe
ctgactggtgtgctctttagagtta

SEQ ID NO: 100546 - DNA, 25 bp, Artificial
  Probe
ggactcagaaatgaccattcaggaa

SEQ ID NO: 100547 - DNA, 25 bp, Artificial
  Probe
gtgaactgactggtgtgctctttag

SEQ ID NO: 100548 - DNA, 25 bp, Artificial
  Probe
ctgaagtcttttcctctgctctatc

SEQ ID NO: 100549 - DNA, 25 bp, Artificial
  Probe
cctctgctctatccaccatcagttc

SEQ ID NO: 100550 - DNA, 25 bp, Artificial
  Probe
tgaactgactggtgtgctctttaga

SEQ ID NO: 100551 - DNA, 25 bp, Artificial
  Probe
cttcgtcattagtggtggaggtagc

SEQ ID NO: 100552 - DNA, 25 bp, Artificial
  Probe
gcttcgtcattagtggtggaggtag

SEQ ID NO: 100553 - DNA, 25 bp, Artificial
  Probe
tcagaaatgaccattcaggaaacgg

SEQ ID NO: 100554 - DNA, 25 bp, Artificial
  Probe
ctgctttgaatgacagtgaactgac

SEQ ID NO: 100555 - DNA, 25 bp, Artificial
  Probe
gaactgactggtgtgctctttagag

SEQ ID NO: 100556 - DNA, 25 bp, Artificial
  Probe
gaagtcttttcctctgctctatcca

SEQ ID NO: 100557 - DNA, 25 bp, Artificial
  Probe
tgaagtcttttcctctgctctatcc

SEQ ID NO: 100558 - DNA, 25 bp, Artificial
  Probe
aagtcttttcctctgctctatccac

SEQ ID NO: 100559 - DNA, 25 bp, Artificial
  Probe
aaaggctatccagttgagaggtttt

SEQ ID NO: 100560 - DNA, 25 bp, Artificial
  Probe
gctctatccaccatcagttcagacg

SEQ ID NO: 100561 - DNA, 25 bp, Artificial
  Probe
tgctttgaatgacagtgaactgact

SEQ ID NO: 100562 - DNA, 25 bp, Artificial
  Probe
actggtgtgctctttagagttaaaa

SEQ ID NO: 100563 - DNA, 25 bp, Artificial
  Probe
tttcctctgctctatccaccatcag

SEQ ID NO: 100564 - DNA, 25 bp, Artificial
  Probe
tcctctgctctatccaccatcagtt

SEQ ID NO: 100565 - DNA, 25 bp, Artificial
  Probe
ttcctctgctctatccaccatcagt

SEQ ID NO: 100566 - DNA, 25 bp, Artificial
  Probe
agtgaactgactggtgtgctcttta

SEQ ID NO: 100567 - DNA, 25 bp, Artificial
  Probe
tagagttaaaagaagagccatgttt

SEQ ID NO: 100568 - DNA, 25 bp, Artificial
  Probe
ttagagttaaaagaagagccatgtt

SEQ ID NO: 100569 - DNA, 25 bp, Artificial
  Probe
gctgaagtcttttcctctgctctat

SEQ ID NO: 100570 - DNA, 25 bp, Artificial
  Probe
gtcattagtggtggaggtagctctg

SEQ ID NO: 100571 - DNA, 25 bp, Artificial
  Probe
actgactggtgtgctctttagagtt

SEQ ID NO: 100572 - DNA, 25 bp, Artificial
  Probe
aactgactggtgtgctctttagagt

SEQ ID NO: 100573 - DNA, 25 bp, Artificial
  Probe
cttttcctctgctctatccaccatc

SEQ ID NO: 100574 - DNA, 25 bp, Artificial
  Probe
tttagagttaaaagaagagccatgt

SEQ ID NO: 100575 - DNA, 25 bp, Artificial
  Probe
cattagtggtggaggtagctctgtg

SEQ ID NO: 100576 - DNA, 25 bp, Artificial
  Probe
gtaactacctggacatcaataagaa

SEQ ID NO: 100577 - DNA, 25 bp, Artificial
  Probe
ctacagatgactctcagacaacacc

SEQ ID NO: 100578 - DNA, 25 bp, Artificial
  Probe
cctacagatgactctcagacaacac

SEQ ID NO: 100579 - DNA, 25 bp, Artificial
  Probe
cacctacagatgactctcagacaac

SEQ ID NO: 100580 - DNA, 25 bp, Artificial
  Probe
gctcttcttccactgttcttctgaa

SEQ ID NO: 100581 - DNA, 25 bp, Artificial
  Probe
tggtaactacctggacatcaataag

SEQ ID NO: 100582 - DNA, 25 bp, Artificial
  Probe
gaatggtaactacctggacatcaat

SEQ ID NO: 100583 - DNA, 25 bp, Artificial
  Probe
ggtaactacctggacatcaataaga

SEQ ID NO: 100584 - DNA, 25 bp, Artificial
  Probe
acctacagatgactctcagacaaca

SEQ ID NO: 100585 - DNA, 25 bp, Artificial
  Probe
atggtaactacctggacatcaataa

SEQ ID NO: 100586 - DNA, 25 bp, Artificial
  Probe
aatggtaactacctggacatcaata

SEQ ID NO: 100587 - DNA, 25 bp, Artificial
  Probe
agaatggtaactacctggacatcaa

SEQ ID NO: 100588 - DNA, 25 bp, Artificial
  Probe
gagaatggtaactacctggacatca

SEQ ID NO: 100589 - DNA, 25 bp, Artificial
  Probe
ccacctacagatgactctcagacaa

SEQ ID NO: 100590 - DNA, 25 bp, Artificial
  Probe
ggagaatggtaactacctggacatc

SEQ ID NO: 100591 - DNA, 25 bp, Artificial
  Probe
ctgttcttctgaaggtcctgtgttc

SEQ ID NO: 100592 - DNA, 25 bp, Artificial
  Probe
taactacctggacatcaataagaaa

SEQ ID NO: 100593 - DNA, 25 bp, Artificial
  Probe
ctcttcttccactgttcttctgaag

SEQ ID NO: 100594 - DNA, 25 bp, Artificial
  Probe
tacagatgactctcagacaacaccg

SEQ ID NO: 100595 - DNA, 25 bp, Artificial
  Probe
cttctgaaggtcctgtgttcaattc

SEQ ID NO: 100596 - DNA, 25 bp, Artificial
  Probe
agctcttcttccactgttcttctga

SEQ ID NO: 100597 - DNA, 25 bp, Artificial
  Probe
tcttctgaaggtcctgtgttcaatt

SEQ ID NO: 100598 - DNA, 25 bp, Artificial
  Probe
ttcttctgaaggtcctgtgttcaat

SEQ ID NO: 100599 - DNA, 25 bp, Artificial
  Probe
actgttcttctgaaggtcctgtgtt

SEQ ID NO: 100600 - DNA, 25 bp, Artificial
  Probe
tcttcttccactgttcttctgaagg

SEQ ID NO: 100601 - DNA, 25 bp, Artificial
  Probe
ataagaaaataaccagcacctccat

SEQ ID NO: 100602 - DNA, 25 bp, Artificial
  Probe
caataagaaaataaccagcacctcc

SEQ ID NO: 100603 - DNA, 25 bp, Artificial
  Probe
aataagaaaataaccagcacctcca

SEQ ID NO: 100604 - DNA, 25 bp, Artificial
  Probe
cttcttccactgttcttctgaaggt

SEQ ID NO: 100605 - DNA, 25 bp, Artificial
  Probe
tcaataagaaaataaccagcacctc

SEQ ID NO: 100606 - DNA, 25 bp, Artificial
  Probe
ttcttccactgttcttctgaaggtc

SEQ ID NO: 100607 - DNA, 25 bp, Artificial
  Probe
ttccactgttcttctgaaggtcctg

SEQ ID NO: 100608 - DNA, 25 bp, Artificial
  Probe
atcaataagaaaataaccagcacct

SEQ ID NO: 100609 - DNA, 25 bp, Artificial
  Probe
catcaataagaaaataaccagcacc

SEQ ID NO: 100610 - DNA, 25 bp, Artificial
  Probe
gttcttctgaaggtcctgtgttcaa

SEQ ID NO: 100611 - DNA, 25 bp, Artificial
  Probe
ttctgaaggtcctgtgttcaattcc

SEQ ID NO: 100612 - DNA, 25 bp, Artificial
  Probe
ggacatcaataagaaaataaccagc

SEQ ID NO: 100613 - DNA, 25 bp, Artificial
  Probe
acatcaataagaaaataaccagcac

SEQ ID NO: 100614 - DNA, 25 bp, Artificial
  Probe
aactacctggacatcaataagaaaa

SEQ ID NO: 100615 - DNA, 25 bp, Artificial
  Probe
taagaaaataaccagcacctccatg

SEQ ID NO: 100616 - DNA, 25 bp, Artificial
  Probe
gacatcaataagaaaataaccagca

SEQ ID NO: 100617 - DNA, 25 bp, Artificial
  Probe
cctggacatcaataagaaaataacc

SEQ ID NO: 100618 - DNA, 25 bp, Artificial
  Probe
actacctggacatcaataagaaaat

SEQ ID NO: 100619 - DNA, 25 bp, Artificial
  Probe
cactgttcttctgaaggtcctgtgt

SEQ ID NO: 100620 - DNA, 25 bp, Artificial
  Probe
ctagagatggctcaggagctaagag

SEQ ID NO: 100621 - DNA, 25 bp, Artificial
  Probe
ccatgaagagactactgattctgag

SEQ ID NO: 100622 - DNA, 25 bp, Artificial
  Probe
accatgaagagactactgattctga

SEQ ID NO: 100623 - DNA, 25 bp, Artificial
  Probe
caccatgaagagactactgattctg

SEQ ID NO: 100624 - DNA, 25 bp, Artificial
  Probe
catgaagagactactgattctgagt

SEQ ID NO: 100625 - DNA, 25 bp, Artificial
  Probe
tcaccatgaagagactactgattct

SEQ ID NO: 100626 - DNA, 25 bp, Artificial
  Probe
ctcaccatgaagagactactgattc

SEQ ID NO: 100627 - DNA, 25 bp, Artificial
  Probe
ttcaattatgccacctatcatacgc

SEQ ID NO: 100628 - DNA, 25 bp, Artificial
  Probe
ctctttcttctccttagtcccaata

SEQ ID NO: 100629 - DNA, 25 bp, Artificial
  Probe
actctttcaattatgccacctatca

SEQ ID NO: 100630 - DNA, 25 bp, Artificial
  Probe
caattatgccacctatcatacgctg

SEQ ID NO: 100631 - DNA, 25 bp, Artificial
  Probe
tcaattatgccacctatcatacgct

SEQ ID NO: 100632 - DNA, 25 bp, Artificial
  Probe
tctccttagtcccaataaagtctga

SEQ ID NO: 100633 - DNA, 25 bp, Artificial
  Probe
ttctccttagtcccaataaagtctg

SEQ ID NO: 100634 - DNA, 25 bp, Artificial
  Probe
gactctttcaattatgccacctatc

SEQ ID NO: 100635 - DNA, 25 bp, Artificial
  Probe
ctccttagtcccaataaagtctgat

SEQ ID NO: 100636 - DNA, 25 bp, Artificial
  Probe
cttctccttagtcccaataaagtct

SEQ ID NO: 100637 - DNA, 25 bp, Artificial
  Probe
tcttctccttagtcccaataaagtc

SEQ ID NO: 100638 - DNA, 25 bp, Artificial
  Probe
tctttcttctccttagtcccaataa

SEQ ID NO: 100639 - DNA, 25 bp, Artificial
  Probe
tccttagtcccaataaagtctgatt

SEQ ID NO: 100640 - DNA, 25 bp, Artificial
  Probe
ttcttctccttagtcccaataaagt

SEQ ID NO: 100641 - DNA, 25 bp, Artificial
  Probe
cctctttcttctccttagtcccaat

SEQ ID NO: 100642 - DNA, 25 bp, Artificial
  Probe
cgttcttgacaacatggacatcttc

SEQ ID NO: 100643 - DNA, 25 bp, Artificial
  Probe
tgactctttcaattatgccacctat

SEQ ID NO: 100644 - DNA, 25 bp, Artificial
  Probe
catccaatctgtgaaagcattcttg

SEQ ID NO: 100645 - DNA, 25 bp, Artificial
  Probe
ctctttcaattatgccacctatcat

SEQ ID NO: 100646 - DNA, 25 bp, Artificial
  Probe
ctgactctttcaattatgccaccta

SEQ ID NO: 100647 - DNA, 25 bp, Artificial
  Probe
ctttcttctccttagtcccaataaa

SEQ ID NO: 100648 - DNA, 25 bp, Artificial
  Probe
catgattgaagatgtgcagttactg

SEQ ID NO: 100649 - DNA, 25 bp, Artificial
  Probe
agcattcttggaatatcatggtatt

SEQ ID NO: 100650 - DNA, 25 bp, Artificial
  Probe
aagcattcttggaatatcatggtat

SEQ ID NO: 100651 - DNA, 25 bp, Artificial
  Probe
tttcttctccttagtcccaataaag

SEQ ID NO: 100652 - DNA, 25 bp, Artificial
  Probe
ttgtccactgactctttcaattatg

SEQ ID NO: 100653 - DNA, 25 bp, Artificial
  Probe
ccttgtccactgactctttcaatta

SEQ ID NO: 100654 - DNA, 25 bp, Artificial
  Probe
cttgtccactgactctttcaattat

SEQ ID NO: 100655 - DNA, 25 bp, Artificial
  Probe
ttcttggaatatcatggtattagct

SEQ ID NO: 100656 - DNA, 25 bp, Artificial
  Probe
tttcaattatgccacctatcatacg

SEQ ID NO: 100657 - DNA, 25 bp, Artificial
  Probe
tgtccactgactctttcaattatgc

SEQ ID NO: 100658 - DNA, 25 bp, Artificial
  Probe
gcatccaatctgtgaaagcattctt

SEQ ID NO: 100659 - DNA, 25 bp, Artificial
  Probe
acctctttcttctccttagtcccaa

SEQ ID NO: 100660 - DNA, 25 bp, Artificial
  Probe
aattatgccacctatcatacgctgg

SEQ ID NO: 100661 - DNA, 25 bp, Artificial
  Probe
actgactctttcaattatgccacct

SEQ ID NO: 100662 - DNA, 25 bp, Artificial
  Probe
cactgactctttcaattatgccacc

SEQ ID NO: 100663 - DNA, 25 bp, Artificial
  Probe
ccactgactctttcaattatgccac

SEQ ID NO: 100664 - DNA, 25 bp, Artificial
  Probe
caatctgtgaaagcattcttggaat

SEQ ID NO: 100665 - DNA, 25 bp, Artificial
  Probe
ctgtgaaagcattcttggaatatca

SEQ ID NO: 100666 - DNA, 25 bp, Artificial
  Probe
gtgtgtgtgtggaaataaatggata

SEQ ID NO: 100667 - DNA, 25 bp, Artificial
  Probe
tgtgtgtgtgtggaaataaatggat

SEQ ID NO: 100668 - DNA, 25 bp, Artificial
  Probe
gtgtgtgtgtgtgtggaaataaatg

SEQ ID NO: 100669 - DNA, 25 bp, Artificial
  Probe
tgtgtgtgtggaaataaatggatat

SEQ ID NO: 100670 - DNA, 25 bp, Artificial
  Probe
tgtgtgtgtgtgtgtggaaataaat

SEQ ID NO: 100671 - DNA, 25 bp, Artificial
  Probe
ttgtgtgtgtgtgtgtggaaataaa

SEQ ID NO: 100672 - DNA, 25 bp, Artificial
  Probe
gtgtgtgtgtgtggaaataaatgga

SEQ ID NO: 100673 - DNA, 25 bp, Artificial
  Probe
ctaaagcctgtttatgatccatcct

SEQ ID NO: 100674 - DNA, 25 bp, Artificial
  Probe
taaagcctgtttatgatccatcctg

SEQ ID NO: 100675 - DNA, 25 bp, Artificial
  Probe
tgtgtgtgtgtgtggaaataaatgg

SEQ ID NO: 100676 - DNA, 25 bp, Artificial
  Probe
gtgtgtgtggaaataaatggatatt

SEQ ID NO: 100677 - DNA, 25 bp, Artificial
  Probe
atccatcctggtttcaattactgtg

SEQ ID NO: 100678 - DNA, 25 bp, Artificial
  Probe
atgatccatcctggtttcaattact

SEQ ID NO: 100679 - DNA, 25 bp, Artificial
  Probe
tgtttatgatccatcctggtttcaa

SEQ ID NO: 100680 - DNA, 25 bp, Artificial
  Probe
caattactgtgcagtgactgacaag

SEQ ID NO: 100681 - DNA, 25 bp, Artificial
  Probe
gtttatgatccatcctggtttcaat

SEQ ID NO: 100682 - DNA, 25 bp, Artificial
  Probe
gatccatcctggtttcaattactgt

SEQ ID NO: 100683 - DNA, 25 bp, Artificial
  Probe
tgatccatcctggtttcaattactg

SEQ ID NO: 100684 - DNA, 25 bp, Artificial
  Probe
ctgtttatgatccatcctggtttca

SEQ ID NO: 100685 - DNA, 25 bp, Artificial
  Probe
tttatgatccatcctggtttcaatt

SEQ ID NO: 100686 - DNA, 25 bp, Artificial
  Probe
tcaattactgtgcagtgactgacaa

SEQ ID NO: 100687 - DNA, 25 bp, Artificial
  Probe
ttcaattactgtgcagtgactgaca

SEQ ID NO: 100688 - DNA, 25 bp, Artificial
  Probe
tatgatccatcctggtttcaattac

SEQ ID NO: 100689 - DNA, 25 bp, Artificial
  Probe
cctgtttatgatccatcctggtttc

SEQ ID NO: 100690 - DNA, 25 bp, Artificial
  Probe
ttatgatccatcctggtttcaatta

SEQ ID NO: 100691 - DNA, 25 bp, Artificial
  Probe
tttcaattactgtgcagtgactgac

SEQ ID NO: 100692 - DNA, 25 bp, Artificial
  Probe
gtttcaattactgtgcagtgactga

SEQ ID NO: 100693 - DNA, 25 bp, Artificial
  Probe
cagcaaaatgaacgaggtcagatta

SEQ ID NO: 100694 - DNA, 25 bp, Artificial
  Probe
aaagcctgtttatgatccatcctgg

SEQ ID NO: 100695 - DNA, 25 bp, Artificial
  Probe
catcctggtttcaattactgtgcag

SEQ ID NO: 100696 - DNA, 25 bp, Artificial
  Probe
aattactgtgcagtgactgacaagc

SEQ ID NO: 100697 - DNA, 25 bp, Artificial
  Probe
gcctgtttatgatccatcctggttt

SEQ ID NO: 100698 - DNA, 25 bp, Artificial
  Probe
tccatcctggtttcaattactgtgc

SEQ ID NO: 100699 - DNA, 25 bp, Artificial
  Probe
ggtttcaattactgtgcagtgactg

SEQ ID NO: 100700 - DNA, 25 bp, Artificial
  Probe
tggtttcaattactgtgcagtgact

SEQ ID NO: 100701 - DNA, 25 bp, Artificial
  Probe
ctggtttcaattactgtgcagtgac

SEQ ID NO: 100702 - DNA, 25 bp, Artificial
  Probe
atcctggtttcaattactgtgcagt

SEQ ID NO: 100703 - DNA, 25 bp, Artificial
  Probe
tgtgtgtggaaataaatggatattt

SEQ ID NO: 100704 - DNA, 25 bp, Artificial
  Probe
cagctcttctctgccttgtacatag

SEQ ID NO: 100705 - DNA, 25 bp, Artificial
  Probe
caggtcctgggaaatgaatacaaaa

SEQ ID NO: 100706 - DNA, 25 bp, Artificial
  Probe
agcctgtttatgatccatcctggtt

SEQ ID NO: 100707 - DNA, 25 bp, Artificial
  Probe
aagcctgtttatgatccatcctggt

SEQ ID NO: 100708 - DNA, 25 bp, Artificial
  Probe
cctggtttcaattactgtgcagtga

SEQ ID NO: 100709 - DNA, 25 bp, Artificial
  Probe
tcctggtttcaattactgtgcagtg

SEQ ID NO: 100710 - DNA, 25 bp, Artificial
  Probe
aaataaatggatatttcacacgtca

SEQ ID NO: 100711 - DNA, 25 bp, Artificial
  Probe
attctttaggtctcatagggtttcc

SEQ ID NO: 100712 - DNA, 25 bp, Artificial
  Probe
ggattctttaggtctcatagggttt

SEQ ID NO: 100713 - DNA, 25 bp, Artificial
  Probe
tggattctttaggtctcatagggtt

SEQ ID NO: 100714 - DNA, 25 bp, Artificial
  Probe
atggattctttaggtctcatagggt

SEQ ID NO: 100715 - DNA, 25 bp, Artificial
  Probe
ttccatttcttgagtgctgagatta

SEQ ID NO: 100716 - DNA, 25 bp, Artificial
  Probe
gattctttaggtctcatagggtttc

SEQ ID NO: 100717 - DNA, 25 bp, Artificial
  Probe
ttcttgagtgctgagattacaaatg

SEQ ID NO: 100718 - DNA, 25 bp, Artificial
  Probe
catttcttgagtgctgagattacaa

SEQ ID NO: 100719 - DNA, 25 bp, Artificial
  Probe
tccatttcttgagtgctgagattac

SEQ ID NO: 100720 - DNA, 25 bp, Artificial
  Probe
ccatttcttgagtgctgagattaca

SEQ ID NO: 100721 - DNA, 25 bp, Artificial
  Probe
tttcttgagtgctgagattacaaat

SEQ ID NO: 100722 - DNA, 25 bp, Artificial
  Probe
atttcttgagtgctgagattacaaa

SEQ ID NO: 100723 - DNA, 25 bp, Artificial
  Probe
cttccatttcttgagtgctgagatt

SEQ ID NO: 100724 - DNA, 25 bp, Artificial
  Probe
atgacctttctgcttccatttcttg

SEQ ID NO: 100725 - DNA, 25 bp, Artificial
  Probe
gacctttctgcttccatttcttgag

SEQ ID NO: 100726 - DNA, 25 bp, Artificial
  Probe
catggattctttaggtctcataggg

SEQ ID NO: 100727 - DNA, 25 bp, Artificial
  Probe
acatggattctttaggtctcatagg

SEQ ID NO: 100728 - DNA, 25 bp, Artificial
  Probe
tcttgagtgctgagattacaaatgc

SEQ ID NO: 100729 - DNA, 25 bp, Artificial
  Probe
cctttctgcttccatttcttgagtg

SEQ ID NO: 100730 - DNA, 25 bp, Artificial
  Probe
acctttctgcttccatttcttgagt

SEQ ID NO: 100731 - DNA, 25 bp, Artificial
  Probe
tgacctttctgcttccatttcttga

SEQ ID NO: 100732 - DNA, 25 bp, Artificial
  Probe
catgacctttctgcttccatttctt

SEQ ID NO: 100733 - DNA, 25 bp, Artificial
  Probe
ctggaactcgctatgtagtcaagga

SEQ ID NO: 100734 - DNA, 25 bp, Artificial
  Probe
cttgagtgctgagattacaaatgcc

SEQ ID NO: 100735 - DNA, 25 bp, Artificial
  Probe
ctttctgcttccatttcttgagtgc

SEQ ID NO: 100736 - DNA, 25 bp, Artificial
  Probe
cttccagaggctgacttagaactca

SEQ ID NO: 100737 - DNA, 25 bp, Artificial
  Probe
gacatggattctttaggtctcatag

SEQ ID NO: 100738 - DNA, 25 bp, Artificial
  Probe
tttctgcttccatttcttgagtgct

SEQ ID NO: 100739 - DNA, 25 bp, Artificial
  Probe
tggaactcgctatgtagtcaaggac

SEQ ID NO: 100740 - DNA, 25 bp, Artificial
  Probe
gaaccagctcggatttgtttagttt

SEQ ID NO: 100741 - DNA, 25 bp, Artificial
  Probe
gggtttgaggttttgtgtcttttaa

SEQ ID NO: 100742 - DNA, 25 bp, Artificial
  Probe
cagagacagccaaactcatctagtg

SEQ ID NO: 100743 - DNA, 25 bp, Artificial
  Probe
gcttccatttcttgagtgctgagat

SEQ ID NO: 100744 - DNA, 25 bp, Artificial
  Probe
aatctttgtggcatctacgaagaac

SEQ ID NO: 100745 - DNA, 25 bp, Artificial
  Probe
caatctttgtggcatctacgaagaa

SEQ ID NO: 100746 - DNA, 25 bp, Artificial
  Probe
agaaccagctcggatttgtttagtt

SEQ ID NO: 100747 - DNA, 25 bp, Artificial
  Probe
ttctgcttccatttcttgagtgctg

SEQ ID NO: 100748 - DNA, 25 bp, Artificial
  Probe
ggggtttgaggttttgtgtctttta

SEQ ID NO: 100749 - DNA, 25 bp, Artificial
  Probe
ttctttaggtctcatagggtttccc

SEQ ID NO: 100750 - DNA, 25 bp, Artificial
  Probe
gtcacgaagccatgaagacagaatg

SEQ ID NO: 100751 - DNA, 25 bp, Artificial
  Probe
agagaaccagctcggatttgtttag

SEQ ID NO: 100752 - DNA, 25 bp, Artificial
  Probe
gagagaaccagctcggatttgttta

SEQ ID NO: 100753 - DNA, 25 bp, Artificial
  Probe
ctgcttccatttcttgagtgctgag

SEQ ID NO: 100754 - DNA, 25 bp, Artificial
  Probe
atctttgtggcatctacgaagaaca

SEQ ID NO: 100755 - DNA, 25 bp, Artificial
  Probe
tccaatctttgtggcatctacgaag

SEQ ID NO: 100756 - DNA, 25 bp, Artificial
  Probe
tgcttgaatcctgagtggttaagag

SEQ ID NO: 100757 - DNA, 25 bp, Artificial
  Probe
ctgcttgaatcctgagtggttaaga

SEQ ID NO: 100758 - DNA, 25 bp, Artificial
  Probe
gcttgaatcctgagtggttaagagg

SEQ ID NO: 100759 - DNA, 25 bp, Artificial
  Probe
gctgcttgaatcctgagtggttaag

SEQ ID NO: 100760 - DNA, 25 bp, Artificial
  Probe
cttgaatcctgagtggttaagaggg

SEQ ID NO: 100761 - DNA, 25 bp, Artificial
  Probe
ttgctgcttgaatcctgagtggtta

SEQ ID NO: 100762 - DNA, 25 bp, Artificial
  Probe
tgctgcttgaatcctgagtggttaa

SEQ ID NO: 100763 - DNA, 25 bp, Artificial
  Probe
ctggatgtacctgtatgagacgtgt

SEQ ID NO: 100764 - DNA, 25 bp, Artificial
  Probe
tggatgtacctgtatgagacgtgtg

SEQ ID NO: 100765 - DNA, 25 bp, Artificial
  Probe
actatagggtccagtgggtatcatg

SEQ ID NO: 100766 - DNA, 25 bp, Artificial
  Probe
gactatagggtccagtgggtatcat

SEQ ID NO: 100767 - DNA, 25 bp, Artificial
  Probe
cctggatgtacctgtatgagacgtg

SEQ ID NO: 100768 - DNA, 25 bp, Artificial
  Probe
ctttccttgctgcttgaatcctgag

SEQ ID NO: 100769 - DNA, 25 bp, Artificial
  Probe
gatgtacctgtatgagacgtgtgca

SEQ ID NO: 100770 - DNA, 25 bp, Artificial
  Probe
cagactatagggtccagtgggtatc

SEQ ID NO: 100771 - DNA, 25 bp, Artificial
  Probe
agactatagggtccagtgggtatca

SEQ ID NO: 100772 - DNA, 25 bp, Artificial
  Probe
gaacctttccttgctgcttgaatcc

SEQ ID NO: 100773 - DNA, 25 bp, Artificial
  Probe
atgtacctgtatgagacgtgtgcag

SEQ ID NO: 100774 - DNA, 25 bp, Artificial
  Probe
acagactatagggtccagtgggtat

SEQ ID NO: 100775 - DNA, 25 bp, Artificial
  Probe
tttccttgctgcttgaatcctgagt

SEQ ID NO: 100776 - DNA, 25 bp, Artificial
  Probe
ttgaatcctgagtggttaagagggc

SEQ ID NO: 100777 - DNA, 25 bp, Artificial
  Probe
ctatagggtccagtgggtatcatgg

SEQ ID NO: 100778 - DNA, 25 bp, Artificial
  Probe
ggatgtacctgtatgagacgtgtgc

SEQ ID NO: 100779 - DNA, 25 bp, Artificial
  Probe
aacctttccttgctgcttgaatcct

SEQ ID NO: 100780 - DNA, 25 bp, Artificial
  Probe
gtacctgtatgagacgtgtgcagac

SEQ ID NO: 100781 - DNA, 25 bp, Artificial
  Probe
gacagactatagggtccagtgggta

SEQ ID NO: 100782 - DNA, 25 bp, Artificial
  Probe
tatagggtccagtgggtatcatggc

SEQ ID NO: 100783 - DNA, 25 bp, Artificial
  Probe
ctgacagactatagggtccagtggg

SEQ ID NO: 100784 - DNA, 25 bp, Artificial
  Probe
cctgacagactatagggtccagtgg

SEQ ID NO: 100785 - DNA, 25 bp, Artificial
  Probe
ggaacctttccttgctgcttgaatc

SEQ ID NO: 100786 - DNA, 25 bp, Artificial
  Probe
gtatatgaccaatctctgtgactcg

SEQ ID NO: 100787 - DNA, 25 bp, Artificial
  Probe
agtatatgaccaatctctgtgactc

SEQ ID NO: 100788 - DNA, 25 bp, Artificial
  Probe
gtagtatatgaccaatctctgtgac

SEQ ID NO: 100789 - DNA, 25 bp, Artificial
  Probe
agtagtatatgaccaatctctgtga

SEQ ID NO: 100790 - DNA, 25 bp, Artificial
  Probe
tatatgaccaatctctgtgactcgc

SEQ ID NO: 100791 - DNA, 25 bp, Artificial
  Probe
tagtatatgaccaatctctgtgact

SEQ ID NO: 100792 - DNA, 25 bp, Artificial
  Probe
tgagtgcccttaacataatgatttg

SEQ ID NO: 100793 - DNA, 25 bp, Artificial
  Probe
gagtgcccttaacataatgatttga

SEQ ID NO: 100794 - DNA, 25 bp, Artificial
  Probe
cgttatggaaatcttgcttcagtag

SEQ ID NO: 100795 - DNA, 25 bp, Artificial
  Probe
tgcccttaacataatgatttgaaca

SEQ ID NO: 100796 - DNA, 25 bp, Artificial
  Probe
gcccttaacataatgatttgaacac

SEQ ID NO: 100797 - DNA, 25 bp, Artificial
  Probe
gtgcccttaacataatgatttgaac

SEQ ID NO: 100798 - DNA, 25 bp, Artificial
  Probe
agtgcccttaacataatgatttgaa

SEQ ID NO: 100799 - DNA, 25 bp, Artificial
  Probe
ttgagtgcccttaacataatgattt

SEQ ID NO: 100800 - DNA, 25 bp, Artificial
  Probe
tttgagtgcccttaacataatgatt

SEQ ID NO: 100801 - DNA, 25 bp, Artificial
  Probe
tagtagtatatgaccaatctctgtg

SEQ ID NO: 100802 - DNA, 25 bp, Artificial
  Probe
gtagtagtatatgaccaatctctgt

SEQ ID NO: 100803 - DNA, 25 bp, Artificial
  Probe
tgtagtagtatatgaccaatctctg

SEQ ID NO: 100804 - DNA, 25 bp, Artificial
  Probe
atagagtggcgttatggaaatcttg

SEQ ID NO: 100805 - DNA, 25 bp, Artificial
  Probe
atttgagtgcccttaacataatgat

SEQ ID NO: 100806 - DNA, 25 bp, Artificial
  Probe
atatgaccaatctctgtgactcgct

SEQ ID NO: 100807 - DNA, 25 bp, Artificial
  Probe
tatttgagtgcccttaacataatga

SEQ ID NO: 100808 - DNA, 25 bp, Artificial
  Probe
gcgttatggaaatcttgcttcagta

SEQ ID NO: 100809 - DNA, 25 bp, Artificial
  Probe
atgaccaatctctgtgactcgctta

SEQ ID NO: 100810 - DNA, 25 bp, Artificial
  Probe
tatgaccaatctctgtgactcgctt

SEQ ID NO: 100811 - DNA, 25 bp, Artificial
  Probe
aacctaaggctatgtttccgaagat

SEQ ID NO: 100812 - DNA, 25 bp, Artificial
  Probe
cccttaacataatgatttgaacaca

SEQ ID NO: 100813 - DNA, 25 bp, Artificial
  Probe
catgtgtactgtctggaaacgaatt

SEQ ID NO: 100814 - DNA, 25 bp, Artificial
  Probe
catagagtggcgttatggaaatctt

SEQ ID NO: 100815 - DNA, 25 bp, Artificial
  Probe
catttatatttgagtgcccttaaca

SEQ ID NO: 100816 - DNA, 25 bp, Artificial
  Probe
acctaaggctatgtttccgaagatc

SEQ ID NO: 100817 - DNA, 25 bp, Artificial
  Probe
atatttgagtgcccttaacataatg

SEQ ID NO: 100818 - DNA, 25 bp, Artificial
  Probe
ttgtagtagtatatgaccaatctct

SEQ ID NO: 100819 - DNA, 25 bp, Artificial
  Probe
tgtacgtcagtgagatatttgctta

SEQ ID NO: 100820 - DNA, 25 bp, Artificial
  Probe
cgtcagtgagatatttgcttattta

SEQ ID NO: 100821 - DNA, 25 bp, Artificial
  Probe
attgtacgtcagtgagatatttgct

SEQ ID NO: 100822 - DNA, 25 bp, Artificial
  Probe
aattgtacgtcagtgagatatttgc

SEQ ID NO: 100823 - DNA, 25 bp, Artificial
  Probe
ttgtacgtcagtgagatatttgctt

SEQ ID NO: 100824 - DNA, 25 bp, Artificial
  Probe
tgaccaatctctgtgactcgcttag

SEQ ID NO: 100825 - DNA, 25 bp, Artificial
  Probe
acatagagtggcgttatggaaatct

SEQ ID NO: 100826 - DNA, 25 bp, Artificial
  Probe
acgtcagtgagatatttgcttattt

SEQ ID NO: 100827 - DNA, 25 bp, Artificial
  Probe
gtacgtcagtgagatatttgcttat

SEQ ID NO: 100828 - DNA, 25 bp, Artificial
  Probe
gttatggaaatcttgcttcagtagc

SEQ ID NO: 100829 - DNA, 25 bp, Artificial
  Probe
tacgtcagtgagatatttgcttatt

SEQ ID NO: 100830 - DNA, 25 bp, Artificial
  Probe
tagagtggcgttatggaaatcttgc

SEQ ID NO: 100831 - DNA, 25 bp, Artificial
  Probe
tggttagaactggaagaaagaggaa

SEQ ID NO: 100832 - DNA, 25 bp, Artificial
  Probe
tgtggagtgccttcgtattagtgta

SEQ ID NO: 100833 - DNA, 25 bp, Artificial
  Probe
gtctcagttgtgaaggtctatcctg

SEQ ID NO: 100834 - DNA, 25 bp, Artificial
  Probe
ctggttagaactggaagaaagagga

SEQ ID NO: 100835 - DNA, 25 bp, Artificial
  Probe
tttactcactgggcaggaaataaag

SEQ ID NO: 100836 - DNA, 25 bp, Artificial
  Probe
ctttactcactgggcaggaaataaa

SEQ ID NO: 100837 - DNA, 25 bp, Artificial
  Probe
gtggagtgccttcgtattagtgtac

SEQ ID NO: 100838 - DNA, 25 bp, Artificial
  Probe
ttactcactgggcaggaaataaaga

SEQ ID NO: 100839 - DNA, 25 bp, Artificial
  Probe
tactcactgggcaggaaataaagac

SEQ ID NO: 100840 - DNA, 25 bp, Artificial
  Probe
cagttgtgaaggtctatcctggttg

SEQ ID NO: 100841 - DNA, 25 bp, Artificial
  Probe
gaatcaaggaaatgacctgtctctc

SEQ ID NO: 100842 - DNA, 25 bp, Artificial
  Probe
tcagttgtgaaggtctatcctggtt

SEQ ID NO: 100843 - DNA, 25 bp, Artificial
  Probe
caaggaaatgacctgtctctcaaag

SEQ ID NO: 100844 - DNA, 25 bp, Artificial
  Probe
tctcagttgtgaaggtctatcctgg

SEQ ID NO: 100845 - DNA, 25 bp, Artificial
  Probe
aaggaaatgacctgtctctcaaaga

SEQ ID NO: 100846 - DNA, 25 bp, Artificial
  Probe
atcaaggaaatgacctgtctctcaa

SEQ ID NO: 100847 - DNA, 25 bp, Artificial
  Probe
aatcaaggaaatgacctgtctctca

SEQ ID NO: 100848 - DNA, 25 bp, Artificial
  Probe
tcaaggaaatgacctgtctctcaaa

SEQ ID NO: 100849 - DNA, 25 bp, Artificial
  Probe
ctcagttgtgaaggtctatcctggt

SEQ ID NO: 100850 - DNA, 25 bp, Artificial
  Probe
caggaaataaagacagtgtcagagg

SEQ ID NO: 100851 - DNA, 25 bp, Artificial
  Probe
tggagtgccttcgtattagtgtacc

SEQ ID NO: 100852 - DNA, 25 bp, Artificial
  Probe
gctggttagaactggaagaaagagg

SEQ ID NO: 100853 - DNA, 25 bp, Artificial
  Probe
ttcgtattagtgtaccctctcggaa

SEQ ID NO: 100854 - DNA, 25 bp, Artificial
  Probe
cgtctcagttgtgaaggtctatcct

SEQ ID NO: 100855 - DNA, 25 bp, Artificial
  Probe
ttggaatcaaggaaatgacctgtct

SEQ ID NO: 100856 - DNA, 25 bp, Artificial
  Probe
ggaatcaaggaaatgacctgtctct

SEQ ID NO: 100857 - DNA, 25 bp, Artificial
  Probe
gcaggaaataaagacagtgtcagag

SEQ ID NO: 100858 - DNA, 25 bp, Artificial
  Probe
agctggttagaactggaagaaagag

SEQ ID NO: 100859 - DNA, 25 bp, Artificial
  Probe
cctttactcactgggcaggaaataa

SEQ ID NO: 100860 - DNA, 25 bp, Artificial
  Probe
tcgtattagtgtaccctctcggaag

SEQ ID NO: 100861 - DNA, 25 bp, Artificial
  Probe
cttcgtattagtgtaccctctcgga

SEQ ID NO: 100862 - DNA, 25 bp, Artificial
  Probe
tggaatcaaggaaatgacctgtctc

SEQ ID NO: 100863 - DNA, 25 bp, Artificial
  Probe
taacttggacaatggagttggaagg

SEQ ID NO: 100864 - DNA, 25 bp, Artificial
  Probe
taagcgtccatcctgtttgaagttg

SEQ ID NO: 100865 - DNA, 25 bp, Artificial
  Probe
gtgtggagtgccttcgtattagtgt

SEQ ID NO: 100866 - DNA, 25 bp, Artificial
  Probe
aagagtcacaaccatccttctgagg

SEQ ID NO: 100867 - DNA, 25 bp, Artificial
  Probe
tgccttcgtattagtgtaccctctc

SEQ ID NO: 100868 - DNA, 25 bp, Artificial
  Probe
aggaaataaagacagtgtcagaggc

SEQ ID NO: 100869 - DNA, 25 bp, Artificial
  Probe
gtgaggaagaaatggagctgaaagt

SEQ ID NO: 100870 - DNA, 25 bp, Artificial
  Probe
ttgtgaaggtctatcctggttgctc

SEQ ID NO: 100871 - DNA, 25 bp, Artificial
  Probe
ggcaggaaataaagacagtgtcaga

SEQ ID NO: 100872 - DNA, 25 bp, Artificial
  Probe
ctcactgggcaggaaataaagacag

SEQ ID NO: 100873 - DNA, 25 bp, Artificial
  Probe
actcactgggcaggaaataaagaca

SEQ ID NO: 100874 - DNA, 25 bp, Artificial
  Probe
tattagtgtaccctctcggaagctg

SEQ ID NO: 100875 - DNA, 25 bp, Artificial
  Probe
gtattagtgtaccctctcggaagct

SEQ ID NO: 100876 - DNA, 25 bp, Artificial
  Probe
attgttcagaattggagatgtatgc

SEQ ID NO: 100877 - DNA, 25 bp, Artificial
  Probe
actatctgcttgtcaattctgctta

SEQ ID NO: 100878 - DNA, 25 bp, Artificial
  Probe
gttcagaattggagatgtatgccta

SEQ ID NO: 100879 - DNA, 25 bp, Artificial
  Probe
agaattggagatgtatgcctactac

SEQ ID NO: 100880 - DNA, 25 bp, Artificial
  Probe
cagaattggagatgtatgcctacta

SEQ ID NO: 100881 - DNA, 25 bp, Artificial
  Probe
ttcagaattggagatgtatgcctac

SEQ ID NO: 100882 - DNA, 25 bp, Artificial
  Probe
gaattggagatgtatgcctactacc

SEQ ID NO: 100883 - DNA, 25 bp, Artificial
  Probe
ctatctgcttgtcaattctgcttaa

SEQ ID NO: 100884 - DNA, 25 bp, Artificial
  Probe
atgtagtccagttattccatcttga

SEQ ID NO: 100885 - DNA, 25 bp, Artificial
  Probe
aactatctgcttgtcaattctgctt

SEQ ID NO: 100886 - DNA, 25 bp, Artificial
  Probe
tcagaattggagatgtatgcctact

SEQ ID NO: 100887 - DNA, 25 bp, Artificial
  Probe
cacacaacagatgctaagtagatgg

SEQ ID NO: 100888 - DNA, 25 bp, Artificial
  Probe
ctcaactatctgcttgtcaattctg

SEQ ID NO: 100889 - DNA, 25 bp, Artificial
  Probe
tctcaactatctgcttgtcaattct

SEQ ID NO: 100890 - DNA, 25 bp, Artificial
  Probe
gtctcaactatctgcttgtcaattc

SEQ ID NO: 100891 - DNA, 25 bp, Artificial
  Probe
tatctgcttgtcaattctgcttaat

SEQ ID NO: 100892 - DNA, 25 bp, Artificial
  Probe
tgtctcaactatctgcttgtcaatt

SEQ ID NO: 100893 - DNA, 25 bp, Artificial
  Probe
ttgttcagaattggagatgtatgcc

SEQ ID NO: 100894 - DNA, 25 bp, Artificial
  Probe
gtgtctcaactatctgcttgtcaat

SEQ ID NO: 100895 - DNA, 25 bp, Artificial
  Probe
tgttagcatctcttccttatgatcc

SEQ ID NO: 100896 - DNA, 25 bp, Artificial
  Probe
gttagcatctcttccttatgatcct

SEQ ID NO: 100897 - DNA, 25 bp, Artificial
  Probe
ttagcatctcttccttatgatcctc

SEQ ID NO: 100898 - DNA, 25 bp, Artificial
  Probe
atctgcttgtcaattctgcttaatt

SEQ ID NO: 100899 - DNA, 25 bp, Artificial
  Probe
actgtaatgtgtgtgcttcttcaag

SEQ ID NO: 100900 - DNA, 25 bp, Artificial
  Probe
tgtagtccagttattccatcttgac

SEQ ID NO: 100901 - DNA, 25 bp, Artificial
  Probe
tagcatctcttccttatgatcctca

SEQ ID NO: 100902 - DNA, 25 bp, Artificial
  Probe
gtagtccagttattccatcttgacc

SEQ ID NO: 100903 - DNA, 25 bp, Artificial
  Probe
caactatctgcttgtcaattctgct

SEQ ID NO: 100904 - DNA, 25 bp, Artificial
  Probe
tcaactatctgcttgtcaattctgc

SEQ ID NO: 100905 - DNA, 25 bp, Artificial
  Probe
tgttcagaattggagatgtatgcct

SEQ ID NO: 100906 - DNA, 25 bp, Artificial
  Probe
catgtagtccagttattccatcttg

SEQ ID NO: 100907 - DNA, 25 bp, Artificial
  Probe
atatcttcactgtaatgtgtgtgct

SEQ ID NO: 100908 - DNA, 25 bp, Artificial
  Probe
aatatcttcactgtaatgtgtgtgc

SEQ ID NO: 100909 - DNA, 25 bp, Artificial
  Probe
tcagataatcttgatgacgctgtat

SEQ ID NO: 100910 - DNA, 25 bp, Artificial
  Probe
tatcttcactgtaatgtgtgtgctt

SEQ ID NO: 100911 - DNA, 25 bp, Artificial
  Probe
cagataatcttgatgacgctgtatc

SEQ ID NO: 100912 - DNA, 25 bp, Artificial
  Probe
ttgttagcatctcttccttatgatc

SEQ ID NO: 100913 - DNA, 25 bp, Artificial
  Probe
agtgtctcaactatctgcttgtcaa

SEQ ID NO: 100914 - DNA, 25 bp, Artificial
  Probe
ctgtaatgtgtgtgcttcttcaagg

SEQ ID NO: 100915 - DNA, 25 bp, Artificial
  Probe
agagtgtctcaactatctgcttgtc

SEQ ID NO: 100916 - DNA, 25 bp, Artificial
  Probe
gtaatgtgtgtgcttcttcaaggtg

SEQ ID NO: 100917 - DNA, 25 bp, Artificial
  Probe
atcttcactgtaatgtgtgtgcttc

SEQ ID NO: 100918 - DNA, 25 bp, Artificial
  Probe
acgaagaaacagaatgagaagaaga

SEQ ID NO: 100919 - DNA, 25 bp, Artificial
  Probe
actctctaaatagccaaagcatcat

SEQ ID NO: 100920 - DNA, 25 bp, Artificial
  Probe
aatctttgtttgtgccttatgttca

SEQ ID NO: 100921 - DNA, 25 bp, Artificial
  Probe
gagattacacgcagagttcttcatc

SEQ ID NO: 100922 - DNA, 25 bp, Artificial
  Probe
atcatcagagattacacgcagagtt

SEQ ID NO: 100923 - DNA, 25 bp, Artificial
  Probe
agagattacacgcagagttcttcat

SEQ ID NO: 100924 - DNA, 25 bp, Artificial
  Probe
atcagagattacacgcagagttctt

SEQ ID NO: 100925 - DNA, 25 bp, Artificial
  Probe
tcatcatcagagattacacgcagag

SEQ ID NO: 100926 - DNA, 25 bp, Artificial
  Probe
tcatcagagattacacgcagagttc

SEQ ID NO: 100927 - DNA, 25 bp, Artificial
  Probe
catcatcagagattacacgcagagt

SEQ ID NO: 100928 - DNA, 25 bp, Artificial
  Probe
tcagagattacacgcagagttcttc

SEQ ID NO: 100929 - DNA, 25 bp, Artificial
  Probe
catcagagattacacgcagagttct

SEQ ID NO: 100930 - DNA, 25 bp, Artificial
  Probe
ctcatcatcagagattacacgcaga

SEQ ID NO: 100931 - DNA, 25 bp, Artificial
  Probe
cagagattacacgcagagttcttca

SEQ ID NO: 100932 - DNA, 25 bp, Artificial
  Probe
agattacacgcagagttcttcatcg

SEQ ID NO: 100933 - DNA, 25 bp, Artificial
  Probe
atcctctcccaaatatgacactctc

SEQ ID NO: 100934 - DNA, 25 bp, Artificial
  Probe
catcctctcccaaatatgacactct

SEQ ID NO: 100935 - DNA, 25 bp, Artificial
  Probe
atatgacactctcatcatcagagat

SEQ ID NO: 100936 - DNA, 25 bp, Artificial
  Probe
ccatcctctcccaaatatgacactc

SEQ ID NO: 100937 - DNA, 25 bp, Artificial
  Probe
catcccatcctctcccaaatatgac

SEQ ID NO: 100938 - DNA, 25 bp, Artificial
  Probe
tcctctcccaaatatgacactctca

SEQ ID NO: 100939 - DNA, 25 bp, Artificial
  Probe
atcccatcctctcccaaatatgaca

SEQ ID NO: 100940 - DNA, 25 bp, Artificial
  Probe
acactctcatcatcagagattacac

SEQ ID NO: 100941 - DNA, 25 bp, Artificial
  Probe
gacactctcatcatcagagattaca

SEQ ID NO: 100942 - DNA, 25 bp, Artificial
  Probe
tgacactctcatcatcagagattac

SEQ ID NO: 100943 - DNA, 25 bp, Artificial
  Probe
cactctcatcatcagagattacacg

SEQ ID NO: 100944 - DNA, 25 bp, Artificial
  Probe
atgacactctcatcatcagagatta

SEQ ID NO: 100945 - DNA, 25 bp, Artificial
  Probe
tatgacactctcatcatcagagatt

SEQ ID NO: 100946 - DNA, 25 bp, Artificial
  Probe
aatatgacactctcatcatcagaga

SEQ ID NO: 100947 - DNA, 25 bp, Artificial
  Probe
tcccaaatatgacactctcatcatc

SEQ ID NO: 100948 - DNA, 25 bp, Artificial
  Probe
ctcccaaatatgacactctcatcat

SEQ ID NO: 100949 - DNA, 25 bp, Artificial
  Probe
cccaaatatgacactctcatcatca

SEQ ID NO: 100950 - DNA, 25 bp, Artificial
  Probe
ctctcccaaatatgacactctcatc

SEQ ID NO: 100951 - DNA, 25 bp, Artificial
  Probe
ccaaatatgacactctcatcatcag

SEQ ID NO: 100952 - DNA, 25 bp, Artificial
  Probe
tctcccaaatatgacactctcatca

SEQ ID NO: 100953 - DNA, 25 bp, Artificial
  Probe
tactccaatctgctcctcctacctg

SEQ ID NO: 100954 - DNA, 25 bp, Artificial
  Probe
attacacgcagagttcttcatcgtt

SEQ ID NO: 100955 - DNA, 25 bp, Artificial
  Probe
cccatcctctcccaaatatgacact

SEQ ID NO: 100956 - DNA, 25 bp, Artificial
  Probe
tcccatcctctcccaaatatgacac

SEQ ID NO: 100957 - DNA, 25 bp, Artificial
  Probe
caaatatgacactctcatcatcaga

SEQ ID NO: 100958 - DNA, 25 bp, Artificial
  Probe
cctctcccaaatatgacactctcat

SEQ ID NO: 100959 - DNA, 25 bp, Artificial
  Probe
tctcatcatcagagattacacgcag

SEQ ID NO: 100960 - DNA, 25 bp, Artificial
  Probe
ctctcatcatcagagattacacgca

SEQ ID NO: 100961 - DNA, 25 bp, Artificial
  Probe
actctcatcatcagagattacacgc

SEQ ID NO: 100962 - DNA, 25 bp, Artificial
  Probe
gattacacgcagagttcttcatcgt

SEQ ID NO: 100963 - DNA, 25 bp, Artificial
  Probe
gtactccaatctgctcctcctacct

SEQ ID NO: 100964 - DNA, 25 bp, Artificial
  Probe
ctccaatctgctcctcctacctgat

SEQ ID NO: 100965 - DNA, 25 bp, Artificial
  Probe
gcatcccatcctctcccaaatatga

SEQ ID NO: 100966 - DNA, 25 bp, Artificial
  Probe
gacggctcacaatttaagaatactg

SEQ ID NO: 100967 - DNA, 25 bp, Artificial
  Probe
ggacggctcacaatttaagaatact

SEQ ID NO: 100968 - DNA, 25 bp, Artificial
  Probe
ctgatgaagtgaaaggtattctctc

SEQ ID NO: 100969 - DNA, 25 bp, Artificial
  Probe
cggctcacaatttaagaatactgac

SEQ ID NO: 100970 - DNA, 25 bp, Artificial
  Probe
atgaagtgaaaggtattctctcagc

SEQ ID NO: 100971 - DNA, 25 bp, Artificial
  Probe
tgatgaagtgaaaggtattctctca

SEQ ID NO: 100972 - DNA, 25 bp, Artificial
  Probe
acggctcacaatttaagaatactga

SEQ ID NO: 100973 - DNA, 25 bp, Artificial
  Probe
gatgaagtgaaaggtattctctcag

SEQ ID NO: 100974 - DNA, 25 bp, Artificial
  Probe
ggctcacaatttaagaatactgact

SEQ ID NO: 100975 - DNA, 25 bp, Artificial
  Probe
gaagtgaaaggtattctctcagcag

SEQ ID NO: 100976 - DNA, 25 bp, Artificial
  Probe
aagtgaaaggtattctctcagcaga

SEQ ID NO: 100977 - DNA, 25 bp, Artificial
  Probe
gggacggctcacaatttaagaatac

SEQ ID NO: 100978 - DNA, 25 bp, Artificial
  Probe
agggacggctcacaatttaagaata

SEQ ID NO: 100979 - DNA, 25 bp, Artificial
  Probe
tgaagtgaaaggtattctctcagca

SEQ ID NO: 100980 - DNA, 25 bp, Artificial
  Probe
cctgatgaagtgaaaggtattctct

SEQ ID NO: 100981 - DNA, 25 bp, Artificial
  Probe
gaagcagaccgttcacattctaaag

SEQ ID NO: 100982 - DNA, 25 bp, Artificial
  Probe
ttcacattctaaagctacgactacc

SEQ ID NO: 100983 - DNA, 25 bp, Artificial
  Probe
gttcacattctaaagctacgactac

SEQ ID NO: 100984 - DNA, 25 bp, Artificial
  Probe
cattctaaagctacgactacctcac

SEQ ID NO: 100985 - DNA, 25 bp, Artificial
  Probe
cacattctaaagctacgactacctc

SEQ ID NO: 100986 - DNA, 25 bp, Artificial
  Probe
acattctaaagctacgactacctca

SEQ ID NO: 100987 - DNA, 25 bp, Artificial
  Probe
tcacattctaaagctacgactacct

SEQ ID NO: 100988 - DNA, 25 bp, Artificial
  Probe
ttctcaggtgatgtacgaacataca

SEQ ID NO: 100989 - DNA, 25 bp, Artificial
  Probe
gcctgatgaagtgaaaggtattctc

SEQ ID NO: 100990 - DNA, 25 bp, Artificial
  Probe
attctaaagctacgactacctcacc

SEQ ID NO: 100991 - DNA, 25 bp, Artificial
  Probe
cagaccgttcacattctaaagctac

SEQ ID NO: 100992 - DNA, 25 bp, Artificial
  Probe
gtgaaaggtattctctcagcagaag

SEQ ID NO: 100993 - DNA, 25 bp, Artificial
  Probe
tgaaaggtattctctcagcagaaga

SEQ ID NO: 100994 - DNA, 25 bp, Artificial
  Probe
ggaagcagaccgttcacattctaaa

SEQ ID NO: 100995 - DNA, 25 bp, Artificial
  Probe
agtgaaaggtattctctcagcagaa

SEQ ID NO: 100996 - DNA, 25 bp, Artificial
  Probe
atttctcaggtgatgtacgaacata

SEQ ID NO: 100997 - DNA, 25 bp, Artificial
  Probe
tttctcaggtgatgtacgaacatac

SEQ ID NO: 100998 - DNA, 25 bp, Artificial
  Probe
ccatttctcaggtgatgtacgaaca

SEQ ID NO: 100999 - DNA, 25 bp, Artificial
  Probe
catttctcaggtgatgtacgaacat

SEQ ID NO: 101000 - DNA, 25 bp, Artificial
  Probe
cccatttctcaggtgatgtacgaac

SEQ ID NO: 101001 - DNA, 25 bp, Artificial
  Probe
aagcagaccgttcacattctaaagc

SEQ ID NO: 101002 - DNA, 25 bp, Artificial
  Probe
gaaaggtattctctcagcagaagag

SEQ ID NO: 101003 - DNA, 25 bp, Artificial
  Probe
cgttcacattctaaagctacgacta

SEQ ID NO: 101004 - DNA, 25 bp, Artificial
  Probe
gcagaccgttcacattctaaagcta

SEQ ID NO: 101005 - DNA, 25 bp, Artificial
  Probe
ctcaggtgatgtacgaacatacatg

SEQ ID NO: 101006 - DNA, 25 bp, Artificial
  Probe
tctcaggtgatgtacgaacatacat

SEQ ID NO: 101007 - DNA, 25 bp, Artificial
  Probe
ttctaaagctacgactacctcaccg

SEQ ID NO: 101008 - DNA, 25 bp, Artificial
  Probe
ggcctgatgaagtgaaaggtattct

SEQ ID NO: 101009 - DNA, 25 bp, Artificial
  Probe
gggaagcagaccgttcacattctaa

SEQ ID NO: 101010 - DNA, 25 bp, Artificial
  Probe
tatgggaagcagaccgttcacattc

SEQ ID NO: 101011 - DNA, 25 bp, Artificial
  Probe
ttgaatgagtctgaattatgtgctg

SEQ ID NO: 101012 - DNA, 25 bp, Artificial
  Probe
caagttgtaatagccatagaagagg

SEQ ID NO: 101013 - DNA, 25 bp, Artificial
  Probe
tgaatgagtctgaattatgtgctgg

SEQ ID NO: 101014 - DNA, 25 bp, Artificial
  Probe
cttgagtgttgtgagtgttcagata

SEQ ID NO: 101015 - DNA, 25 bp, Artificial
  Probe
ttgagtgttgtgagtgttcagatac

SEQ ID NO: 101016 - DNA, 25 bp, Artificial
  Probe
aactacttgagtgttgtgagtgttc

SEQ ID NO: 101017 - DNA, 25 bp, Artificial
  Probe
ctacttgagtgttgtgagtgttcag

SEQ ID NO: 101018 - DNA, 25 bp, Artificial
  Probe
tgagtgttgtgagtgttcagatact

SEQ ID NO: 101019 - DNA, 25 bp, Artificial
  Probe
tacttgagtgttgtgagtgttcaga

SEQ ID NO: 101020 - DNA, 25 bp, Artificial
  Probe
actacttgagtgttgtgagtgttca

SEQ ID NO: 101021 - DNA, 25 bp, Artificial
  Probe
acttgagtgttgtgagtgttcagat

SEQ ID NO: 101022 - DNA, 25 bp, Artificial
  Probe
tgtaaatgttgaagtgagttagggt

SEQ ID NO: 101023 - DNA, 25 bp, Artificial
  Probe
gttgtattgtttgtcagtgtccttt

SEQ ID NO: 101024 - DNA, 25 bp, Artificial
  Probe
acaagttgtaatagccatagaagag

SEQ ID NO: 101025 - DNA, 25 bp, Artificial
  Probe
ttgtaaatgttgaagtgagttaggg

SEQ ID NO: 101026 - DNA, 25 bp, Artificial
  Probe
tgttgtattgtttgtcagtgtcctt

SEQ ID NO: 101027 - DNA, 25 bp, Artificial
  Probe
tttgaatgagtctgaattatgtgct

SEQ ID NO: 101028 - DNA, 25 bp, Artificial
  Probe
ctttgaatgagtctgaattatgtgc

SEQ ID NO: 101029 - DNA, 25 bp, Artificial
  Probe
aacgcagatggtttattacgagtag

SEQ ID NO: 101030 - DNA, 25 bp, Artificial
  Probe
caacgcagatggtttattacgagta

SEQ ID NO: 101031 - DNA, 25 bp, Artificial
  Probe
cgagtagctcatctgtatattatgg

SEQ ID NO: 101032 - DNA, 25 bp, Artificial
  Probe
atcaacgcagatggtttattacgag

SEQ ID NO: 101033 - DNA, 25 bp, Artificial
  Probe
gaatgagtctgaattatgtgctggg

SEQ ID NO: 101034 - DNA, 25 bp, Artificial
  Probe
agatactcattaatatatgtggcgt

SEQ ID NO: 101035 - DNA, 25 bp, Artificial
  Probe
ttctgttgtattgtttgtcagtgtc

SEQ ID NO: 101036 - DNA, 25 bp, Artificial
  Probe
cagatactcattaatatatgtggcg

SEQ ID NO: 101037 - DNA, 25 bp, Artificial
  Probe
tttctgttgtattgtttgtcagtgt

SEQ ID NO: 101038 - DNA, 25 bp, Artificial
  Probe
atggttcttggtgtcattgttcctg

SEQ ID NO: 101039 - DNA, 25 bp, Artificial
  Probe
aattgatttacctagttatggctgt

SEQ ID NO: 101040 - DNA, 25 bp, Artificial
  Probe
agaatggttcttggtgtcattgttc

SEQ ID NO: 101041 - DNA, 25 bp, Artificial
  Probe
gagaatggttcttggtgtcattgtt

SEQ ID NO: 101042 - DNA, 25 bp, Artificial
  Probe
ttgatttacctagttatggctgtac

SEQ ID NO: 101043 - DNA, 25 bp, Artificial
  Probe
tttgtaaatgttgaagtgagttagg

SEQ ID NO: 101044 - DNA, 25 bp, Artificial
  Probe
acgagtagctcatctgtatattatg

SEQ ID NO: 101045 - DNA, 25 bp, Artificial
  Probe
atgagaatggttcttggtgtcattg

SEQ ID NO: 101046 - DNA, 25 bp, Artificial
  Probe
gatcaacgcagatggtttattacga

SEQ ID NO: 101047 - DNA, 25 bp, Artificial
  Probe
ctgttgtattgtttgtcagtgtcct

SEQ ID NO: 101048 - DNA, 25 bp, Artificial
  Probe
tctgttgtattgtttgtcagtgtcc

SEQ ID NO: 101049 - DNA, 25 bp, Artificial
  Probe
ttgacatacaagttgtaatagccat

SEQ ID NO: 101050 - DNA, 25 bp, Artificial
  Probe
gatactcattaatatatgtggcgtt

SEQ ID NO: 101051 - DNA, 25 bp, Artificial
  Probe
gaatggttcttggtgtcattgttcc

SEQ ID NO: 101052 - DNA, 25 bp, Artificial
  Probe
gttcttggtgtcattgttcctggtc

SEQ ID NO: 101053 - DNA, 25 bp, Artificial
  Probe
ttacctagttatggctgtacaatcc

SEQ ID NO: 101054 - DNA, 25 bp, Artificial
  Probe
attgatttacctagttatggctgta

SEQ ID NO: 101055 - DNA, 25 bp, Artificial
  Probe
tcaacgcagatggtttattacgagt

SEQ ID NO: 101056 - DNA, 25 bp, Artificial
  Probe
cttcttacatcattcaactcacctg

SEQ ID NO: 101057 - DNA, 25 bp, Artificial
  Probe
gtcttcttacatcattcaactcacc

SEQ ID NO: 101058 - DNA, 25 bp, Artificial
  Probe
ggtcttcttacatcattcaactcac

SEQ ID NO: 101059 - DNA, 25 bp, Artificial
  Probe
tcttcttacatcattcaactcacct

SEQ ID NO: 101060 - DNA, 25 bp, Artificial
  Probe
aactctaagaactacttcacatccg

SEQ ID NO: 101061 - DNA, 25 bp, Artificial
  Probe
caactctaagaactacttcacatcc

SEQ ID NO: 101062 - DNA, 25 bp, Artificial
  Probe
atctgtactgttcacttcgttcatt

SEQ ID NO: 101063 - DNA, 25 bp, Artificial
  Probe
aatctgtactgttcacttcgttcat

SEQ ID NO: 101064 - DNA, 25 bp, Artificial
  Probe
atcaccaatctgtactgttcacttc

SEQ ID NO: 101065 - DNA, 25 bp, Artificial
  Probe
gatcaccaatctgtactgttcactt

SEQ ID NO: 101066 - DNA, 25 bp, Artificial
  Probe
ttcttacatcattcaactcacctgt

SEQ ID NO: 101067 - DNA, 25 bp, Artificial
  Probe
gagaagtgctgacaatctgtatgta

SEQ ID NO: 101068 - DNA, 25 bp, Artificial
  Probe
cttgagaagtgctgacaatctgtat

SEQ ID NO: 101069 - DNA, 25 bp, Artificial
  Probe
caatctgtactgttcacttcgttca

SEQ ID NO: 101070 - DNA, 25 bp, Artificial
  Probe
tcaactctaagaactacttcacatc

SEQ ID NO: 101071 - DNA, 25 bp, Artificial
  Probe
ttgagaagtgctgacaatctgtatg

SEQ ID NO: 101072 - DNA, 25 bp, Artificial
  Probe
tctaagaactacttcacatccgcag

SEQ ID NO: 101073 - DNA, 25 bp, Artificial
  Probe
ctctaagaactacttcacatccgca

SEQ ID NO: 101074 - DNA, 25 bp, Artificial
  Probe
actctaagaactacttcacatccgc

SEQ ID NO: 101075 - DNA, 25 bp, Artificial
  Probe
agaagtgctgacaatctgtatgtac

SEQ ID NO: 101076 - DNA, 25 bp, Artificial
  Probe
ccaatctgtactgttcacttcgttc

SEQ ID NO: 101077 - DNA, 25 bp, Artificial
  Probe
gctgacaatctgtatgtaccatgta

SEQ ID NO: 101078 - DNA, 25 bp, Artificial
  Probe
tcttgagaagtgctgacaatctgta

SEQ ID NO: 101079 - DNA, 25 bp, Artificial
  Probe
aatcaactctaagaactacttcaca

SEQ ID NO: 101080 - DNA, 25 bp, Artificial
  Probe
aggagacagactgttgaatgttatt

SEQ ID NO: 101081 - DNA, 25 bp, Artificial
  Probe
aaggagacagactgttgaatgttat

SEQ ID NO: 101082 - DNA, 25 bp, Artificial
  Probe
tgagaagtgctgacaatctgtatgt

SEQ ID NO: 101083 - DNA, 25 bp, Artificial
  Probe
gaagtgctgacaatctgtatgtacc

SEQ ID NO: 101084 - DNA, 25 bp, Artificial
  Probe
gaaggagacagactgttgaatgtta

SEQ ID NO: 101085 - DNA, 25 bp, Artificial
  Probe
atcaactctaagaactacttcacat

SEQ ID NO: 101086 - DNA, 25 bp, Artificial
  Probe
gctaactaagggataagacaactga

SEQ ID NO: 101087 - DNA, 25 bp, Artificial
  Probe
tacagatgggctaactaagggataa

SEQ ID NO: 101088 - DNA, 25 bp, Artificial
  Probe
ttacagatgggctaactaagggata

SEQ ID NO: 101089 - DNA, 25 bp, Artificial
  Probe
tattacagatgggctaactaaggga

SEQ ID NO: 101090 - DNA, 25 bp, Artificial
  Probe
gggtcttcttacatcattcaactca

SEQ ID NO: 101091 - DNA, 25 bp, Artificial
  Probe
tgggtcttcttacatcattcaactc

SEQ ID NO: 101092 - DNA, 25 bp, Artificial
  Probe
ctgggtcttcttacatcattcaact

SEQ ID NO: 101093 - DNA, 25 bp, Artificial
  Probe
tctgggtcttcttacatcattcaac

SEQ ID NO: 101094 - DNA, 25 bp, Artificial
  Probe
gtctgggtcttcttacatcattcaa

SEQ ID NO: 101095 - DNA, 25 bp, Artificial
  Probe
ggatgggtaggataaagttgtaaga

SEQ ID NO: 101096 - DNA, 25 bp, Artificial
  Probe
ggctaactaagggataagacaactg

SEQ ID NO: 101097 - DNA, 25 bp, Artificial
  Probe
agtgctgacaatctgtatgtaccat

SEQ ID NO: 101098 - DNA, 25 bp, Artificial
  Probe
accaatctgtactgttcacttcgtt

SEQ ID NO: 101099 - DNA, 25 bp, Artificial
  Probe
cggatgggtaggataaagttgtaag

SEQ ID NO: 101100 - DNA, 25 bp, Artificial
  Probe
attacagatgggctaactaagggat

SEQ ID NO: 101101 - DNA, 25 bp, Artificial
  Probe
tagtgctcattaaggaacattgtca

SEQ ID NO: 101102 - DNA, 25 bp, Artificial
  Probe
ttagtgctcattaaggaacattgtc

SEQ ID NO: 101103 - DNA, 25 bp, Artificial
  Probe
agtgctcattaaggaacattgtcag

SEQ ID NO: 101104 - DNA, 25 bp, Artificial
  Probe
tgctcattaaggaacattgtcagtt

SEQ ID NO: 101105 - DNA, 25 bp, Artificial
  Probe
gtgctcattaaggaacattgtcagt

SEQ ID NO: 101106 - DNA, 25 bp, Artificial
  Probe
agatcacatccgttaagcagaatac

SEQ ID NO: 101107 - DNA, 25 bp, Artificial
  Probe
cttagtgctcattaaggaacattgt

SEQ ID NO: 101108 - DNA, 25 bp, Artificial
  Probe
gatcacatccgttaagcagaatacc

SEQ ID NO: 101109 - DNA, 25 bp, Artificial
  Probe
tctgttacctgtaagctgataccta

SEQ ID NO: 101110 - DNA, 25 bp, Artificial
  Probe
ctgttacctgtaagctgatacctaa

SEQ ID NO: 101111 - DNA, 25 bp, Artificial
  Probe
ctctgttacctgtaagctgatacct

SEQ ID NO: 101112 - DNA, 25 bp, Artificial
  Probe
gctcattaaggaacattgtcagttt

SEQ ID NO: 101113 - DNA, 25 bp, Artificial
  Probe
ggaagtttctatggcaaccttagtg

SEQ ID NO: 101114 - DNA, 25 bp, Artificial
  Probe
tatggcaaccttagtgctcattaag

SEQ ID NO: 101115 - DNA, 25 bp, Artificial
  Probe
ctatggcaaccttagtgctcattaa

SEQ ID NO: 101116 - DNA, 25 bp, Artificial
  Probe
tgttacctgtaagctgatacctaaa

SEQ ID NO: 101117 - DNA, 25 bp, Artificial
  Probe
caggaagtttctatggcaaccttag

SEQ ID NO: 101118 - DNA, 25 bp, Artificial
  Probe
tctatggcaaccttagtgctcatta

SEQ ID NO: 101119 - DNA, 25 bp, Artificial
  Probe
aggaagtttctatggcaaccttagt

SEQ ID NO: 101120 - DNA, 25 bp, Artificial
  Probe
atgctctgttacctgtaagctgata

SEQ ID NO: 101121 - DNA, 25 bp, Artificial
  Probe
tatgctctgttacctgtaagctgat

SEQ ID NO: 101122 - DNA, 25 bp, Artificial
  Probe
aagtgaagattgtaactgtttgaaa

SEQ ID NO: 101123 - DNA, 25 bp, Artificial
  Probe
aaagtgaagattgtaactgtttgaa

SEQ ID NO: 101124 - DNA, 25 bp, Artificial
  Probe
ttatgctctgttacctgtaagctga

SEQ ID NO: 101125 - DNA, 25 bp, Artificial
  Probe
agtgaagattgtaactgtttgaaat

SEQ ID NO: 101126 - DNA, 25 bp, Artificial
  Probe
ttctatggcaaccttagtgctcatt

SEQ ID NO: 101127 - DNA, 25 bp, Artificial
  Probe
tgctctgttacctgtaagctgatac

SEQ ID NO: 101128 - DNA, 25 bp, Artificial
  Probe
taaagtgaagattgtaactgtttga

SEQ ID NO: 101129 - DNA, 25 bp, Artificial
  Probe
ccaggaagtttctatggcaacctta

SEQ ID NO: 101130 - DNA, 25 bp, Artificial
  Probe
gctctgttacctgtaagctgatacc

SEQ ID NO: 101131 - DNA, 25 bp, Artificial
  Probe
tttatgctctgttacctgtaagctg

SEQ ID NO: 101132 - DNA, 25 bp, Artificial
  Probe
aaggaacattgtcagttttgtgaac

SEQ ID NO: 101133 - DNA, 25 bp, Artificial
  Probe
ggaacattgtcagttttgtgaacat

SEQ ID NO: 101134 - DNA, 25 bp, Artificial
  Probe
taaggaacattgtcagttttgtgaa

SEQ ID NO: 101135 - DNA, 25 bp, Artificial
  Probe
ttaaggaacattgtcagttttgtga

SEQ ID NO: 101136 - DNA, 25 bp, Artificial
  Probe
gtgaagattgtaactgtttgaaata

SEQ ID NO: 101137 - DNA, 25 bp, Artificial
  Probe
tcattaaggaacattgtcagttttg

SEQ ID NO: 101138 - DNA, 25 bp, Artificial
  Probe
ttaaagtgaagattgtaactgtttg

SEQ ID NO: 101139 - DNA, 25 bp, Artificial
  Probe
ctcattaaggaacattgtcagtttt

SEQ ID NO: 101140 - DNA, 25 bp, Artificial
  Probe
aggaacattgtcagttttgtgaaca

SEQ ID NO: 101141 - DNA, 25 bp, Artificial
  Probe
attaaggaacattgtcagttttgtg

SEQ ID NO: 101142 - DNA, 25 bp, Artificial
  Probe
cattaaggaacattgtcagttttgt

SEQ ID NO: 101143 - DNA, 25 bp, Artificial
  Probe
gaagtttctatggcaaccttagtgc

SEQ ID NO: 101144 - DNA, 25 bp, Artificial
  Probe
gtgccagttccaggaagtttctatg

SEQ ID NO: 101145 - DNA, 25 bp, Artificial
  Probe
tttctatggcaaccttagtgctcat

SEQ ID NO: 101146 - DNA, 25 bp, Artificial
  Probe
tctactattctcttcctgattccga

SEQ ID NO: 101147 - DNA, 25 bp, Artificial
  Probe
ggcttctactattctcttcctgatt

SEQ ID NO: 101148 - DNA, 25 bp, Artificial
  Probe
tggcttctactattctcttcctgat

SEQ ID NO: 101149 - DNA, 25 bp, Artificial
  Probe
ttctactattctcttcctgattccg

SEQ ID NO: 101150 - DNA, 25 bp, Artificial
  Probe
tcatctctgtggcaattatcttagg

SEQ ID NO: 101151 - DNA, 25 bp, Artificial
  Probe
ctggcttctactattctcttcctga

SEQ ID NO: 101152 - DNA, 25 bp, Artificial
  Probe
gcttctactattctcttcctgattc

SEQ ID NO: 101153 - DNA, 25 bp, Artificial
  Probe
ttcatctctgtggcaattatcttag

SEQ ID NO: 101154 - DNA, 25 bp, Artificial
  Probe
ctactattctcttcctgattccgag

SEQ ID NO: 101155 - DNA, 25 bp, Artificial
  Probe
cctggcttctactattctcttcctg

SEQ ID NO: 101156 - DNA, 25 bp, Artificial
  Probe
gtaattggtgagataattgtcagca

SEQ ID NO: 101157 - DNA, 25 bp, Artificial
  Probe
tgtaattggtgagataattgtcagc

SEQ ID NO: 101158 - DNA, 25 bp, Artificial
  Probe
cttctactattctcttcctgattcc

SEQ ID NO: 101159 - DNA, 25 bp, Artificial
  Probe
tcagtgtctgtagcaattcattcaa

SEQ ID NO: 101160 - DNA, 25 bp, Artificial
  Probe
taattggtgagataattgtcagcaa

SEQ ID NO: 101161 - DNA, 25 bp, Artificial
  Probe
ctcagtgtctgtagcaattcattca

SEQ ID NO: 101162 - DNA, 25 bp, Artificial
  Probe
tactattctcttcctgattccgagg

SEQ ID NO: 101163 - DNA, 25 bp, Artificial
  Probe
aagaagtaagatgtaattggtgaga

SEQ ID NO: 101164 - DNA, 25 bp, Artificial
  Probe
agaagtaagatgtaattggtgagat

SEQ ID NO: 101165 - DNA, 25 bp, Artificial
  Probe
ctgtcccttattctctgtatctgtg

SEQ ID NO: 101166 - DNA, 25 bp, Artificial
  Probe
cccttattctctgtatctgtgcttt

SEQ ID NO: 101167 - DNA, 25 bp, Artificial
  Probe
tactaccctggcttctactattctc

SEQ ID NO: 101168 - DNA, 25 bp, Artificial
  Probe
atactaccctggcttctactattct

SEQ ID NO: 101169 - DNA, 25 bp, Artificial
  Probe
actgtcccttattctctgtatctgt

SEQ ID NO: 101170 - DNA, 25 bp, Artificial
  Probe
aactgtcccttattctctgtatctg

SEQ ID NO: 101171 - DNA, 25 bp, Artificial
  Probe
gtataaatcagccgatgtaaaccag

SEQ ID NO: 101172 - DNA, 25 bp, Artificial
  Probe
tgtataaatcagccgatgtaaacca

SEQ ID NO: 101173 - DNA, 25 bp, Artificial
  Probe
tagggtctgaaatgtgaataaaggc

SEQ ID NO: 101174 - DNA, 25 bp, Artificial
  Probe
taccctggcttctactattctcttc

SEQ ID NO: 101175 - DNA, 25 bp, Artificial
  Probe
ctaccctggcttctactattctctt

SEQ ID NO: 101176 - DNA, 25 bp, Artificial
  Probe
tggcaattatcttagggtctgaaat

SEQ ID NO: 101177 - DNA, 25 bp, Artificial
  Probe
ggcaattatcttagggtctgaaatg

SEQ ID NO: 101178 - DNA, 25 bp, Artificial
  Probe
tcccttattctctgtatctgtgctt

SEQ ID NO: 101179 - DNA, 25 bp, Artificial
  Probe
ggcttcctgttatgctgtataaatc

SEQ ID NO: 101180 - DNA, 25 bp, Artificial
  Probe
gtggcaattatcttagggtctgaaa

SEQ ID NO: 101181 - DNA, 25 bp, Artificial
  Probe
gaactgtcccttattctctgtatct

SEQ ID NO: 101182 - DNA, 25 bp, Artificial
  Probe
tatactcctgtaacaccattcccat

SEQ ID NO: 101183 - DNA, 25 bp, Artificial
  Probe
gcaattatcttagggtctgaaatgt

SEQ ID NO: 101184 - DNA, 25 bp, Artificial
  Probe
ttagggtctgaaatgtgaataaagg

SEQ ID NO: 101185 - DNA, 25 bp, Artificial
  Probe
catctctgtggcaattatcttaggg

SEQ ID NO: 101186 - DNA, 25 bp, Artificial
  Probe
tataaatcagccgatgtaaaccagc

SEQ ID NO: 101187 - DNA, 25 bp, Artificial
  Probe
gcttcctgttatgctgtataaatca

SEQ ID NO: 101188 - DNA, 25 bp, Artificial
  Probe
aatactaccctggcttctactattc

SEQ ID NO: 101189 - DNA, 25 bp, Artificial
  Probe
atctctgtggcaattatcttagggt

SEQ ID NO: 101190 - DNA, 25 bp, Artificial
  Probe
aaggcaatttaagatttgggaaacc

SEQ ID NO: 101191 - DNA, 25 bp, Artificial
  Probe
aggtatggaggaagaaggaataaga

SEQ ID NO: 101192 - DNA, 25 bp, Artificial
  Probe
acaaggtagagaatgactgaagaag

SEQ ID NO: 101193 - DNA, 25 bp, Artificial
  Probe
caaggtagagaatgactgaagaaga

SEQ ID NO: 101194 - DNA, 25 bp, Artificial
  Probe
aataagatacagagtcacagtcagg

SEQ ID NO: 101195 - DNA, 25 bp, Artificial
  Probe
ggaataagatacagagtcacagtca

SEQ ID NO: 101196 - DNA, 25 bp, Artificial
  Probe
aacaaggtagagaatgactgaagaa

SEQ ID NO: 101197 - DNA, 25 bp, Artificial
  Probe
aggaataagatacagagtcacagtc

SEQ ID NO: 101198 - DNA, 25 bp, Artificial
  Probe
tggaggaagaaggaataagatacag

SEQ ID NO: 101199 - DNA, 25 bp, Artificial
  Probe
ggtatggaggaagaaggaataagat

SEQ ID NO: 101200 - DNA, 25 bp, Artificial
  Probe
aaggtagagaatgactgaagaagaa

SEQ ID NO: 101201 - DNA, 25 bp, Artificial
  Probe
ggaggaagaaggaataagatacaga

SEQ ID NO: 101202 - DNA, 25 bp, Artificial
  Probe
aaggaataagatacagagtcacagt

SEQ ID NO: 101203 - DNA, 25 bp, Artificial
  Probe
aggtagagaatgactgaagaagaat

SEQ ID NO: 101204 - DNA, 25 bp, Artificial
  Probe
taggtatggaggaagaaggaataag

SEQ ID NO: 101205 - DNA, 25 bp, Artificial
  Probe
agaaggaataagatacagagtcaca

SEQ ID NO: 101206 - DNA, 25 bp, Artificial
  Probe
atggaggaagaaggaataagataca

SEQ ID NO: 101207 - DNA, 25 bp, Artificial
  Probe
ggtagagaatgactgaagaagaatc

SEQ ID NO: 101208 - DNA, 25 bp, Artificial
  Probe
gaataagatacagagtcacagtcag

SEQ ID NO: 101209 - DNA, 25 bp, Artificial
  Probe
gaaggaataagatacagagtcacag

SEQ ID NO: 101210 - DNA, 25 bp, Artificial
  Probe
aactgagattctaggtatggaggaa

SEQ ID NO: 101211 - DNA, 25 bp, Artificial
  Probe
tggttgaactgagattctaggtatg

SEQ ID NO: 101212 - DNA, 25 bp, Artificial
  Probe
gtggttgaactgagattctaggtat

SEQ ID NO: 101213 - DNA, 25 bp, Artificial
  Probe
gttgaactgagattctaggtatgga

SEQ ID NO: 101214 - DNA, 25 bp, Artificial
  Probe
ggttgaactgagattctaggtatgg

SEQ ID NO: 101215 - DNA, 25 bp, Artificial
  Probe
ttaacttctgatctacacacacaca

SEQ ID NO: 101216 - DNA, 25 bp, Artificial
  Probe
aggaagaaggaataagatacagagt

SEQ ID NO: 101217 - DNA, 25 bp, Artificial
  Probe
actgagattctaggtatggaggaag

SEQ ID NO: 101218 - DNA, 25 bp, Artificial
  Probe
gaactgagattctaggtatggagga

SEQ ID NO: 101219 - DNA, 25 bp, Artificial
  Probe
ctgagattctaggtatggaggaaga

SEQ ID NO: 101220 - DNA, 25 bp, Artificial
  Probe
ttgaactgagattctaggtatggag

SEQ ID NO: 101221 - DNA, 25 bp, Artificial
  Probe
taacttctgatctacacacacacac

SEQ ID NO: 101222 - DNA, 25 bp, Artificial
  Probe
tgaactgagattctaggtatggagg

SEQ ID NO: 101223 - DNA, 25 bp, Artificial
  Probe
tctaggtatggaggaagaaggaata

SEQ ID NO: 101224 - DNA, 25 bp, Artificial
  Probe
ctaggtatggaggaagaaggaataa

SEQ ID NO: 101225 - DNA, 25 bp, Artificial
  Probe
ggaagaaggaataagatacagagtc

SEQ ID NO: 101226 - DNA, 25 bp, Artificial
  Probe
gaggaagaaggaataagatacagag

SEQ ID NO: 101227 - DNA, 25 bp, Artificial
  Probe
ggtggttgaactgagattctaggta

SEQ ID NO: 101228 - DNA, 25 bp, Artificial
  Probe
aagaaggaataagatacagagtcac

SEQ ID NO: 101229 - DNA, 25 bp, Artificial
  Probe
gtagagaatgactgaagaagaatct

SEQ ID NO: 101230 - DNA, 25 bp, Artificial
  Probe
gaagaaggaataagatacagagtca

SEQ ID NO: 101231 - DNA, 25 bp, Artificial
  Probe
aacttctgatctacacacacacaca

SEQ ID NO: 101232 - DNA, 25 bp, Artificial
  Probe
tcaatattcaatggataggttctgg

SEQ ID NO: 101233 - DNA, 25 bp, Artificial
  Probe
aaacaaggtagagaatgactgaaga

SEQ ID NO: 101234 - DNA, 25 bp, Artificial
  Probe
tatggaggaagaaggaataagatac

SEQ ID NO: 101235 - DNA, 25 bp, Artificial
  Probe
gtatggaggaagaaggaataagata

SEQ ID NO: 101236 - DNA, 25 bp, Artificial
  Probe
ccattcctattcaccatatcctcat

SEQ ID NO: 101237 - DNA, 25 bp, Artificial
  Probe
accattcctattcaccatatcctca

SEQ ID NO: 101238 - DNA, 25 bp, Artificial
  Probe
cagacataccagaagatgagaatga

SEQ ID NO: 101239 - DNA, 25 bp, Artificial
  Probe
taccattcctattcaccatatcctc

SEQ ID NO: 101240 - DNA, 25 bp, Artificial
  Probe
caattagatgagtaggagaagccac

SEQ ID NO: 101241 - DNA, 25 bp, Artificial
  Probe
tggataatgattcaggaacagaagg

SEQ ID NO: 101242 - DNA, 25 bp, Artificial
  Probe
agacataccagaagatgagaatgaa

SEQ ID NO: 101243 - DNA, 25 bp, Artificial
  Probe
cagcaattagatgagtaggagaagc

SEQ ID NO: 101244 - DNA, 25 bp, Artificial
  Probe
ttaatctccacagaactaccaagtc

SEQ ID NO: 101245 - DNA, 25 bp, Artificial
  Probe
gcagacataccagaagatgagaatg

SEQ ID NO: 101246 - DNA, 25 bp, Artificial
  Probe
tgaagacatcagattagaacaggaa

SEQ ID NO: 101247 - DNA, 25 bp, Artificial
  Probe
ttgaagacatcagattagaacagga

SEQ ID NO: 101248 - DNA, 25 bp, Artificial
  Probe
tcagcaattagatgagtaggagaag

SEQ ID NO: 101249 - DNA, 25 bp, Artificial
  Probe
attagatgagtaggagaagccactt

SEQ ID NO: 101250 - DNA, 25 bp, Artificial
  Probe
gtaccattcctattcaccatatcct

SEQ ID NO: 101251 - DNA, 25 bp, Artificial
  Probe
agtaccattcctattcaccatatcc

SEQ ID NO: 101252 - DNA, 25 bp, Artificial
  Probe
cttgaagacatcagattagaacagg

SEQ ID NO: 101253 - DNA, 25 bp, Artificial
  Probe
aattagatgagtaggagaagccact

SEQ ID NO: 101254 - DNA, 25 bp, Artificial
  Probe
cattcctattcaccatatcctcatt

SEQ ID NO: 101255 - DNA, 25 bp, Artificial
  Probe
acttgaagacatcagattagaacag

SEQ ID NO: 101256 - DNA, 25 bp, Artificial
  Probe
agcaattagatgagtaggagaagcc

SEQ ID NO: 101257 - DNA, 25 bp, Artificial
  Probe
cctgtgtctcctggataatgattca

SEQ ID NO: 101258 - DNA, 25 bp, Artificial
  Probe
taatctccacagaactaccaagtcc

SEQ ID NO: 101259 - DNA, 25 bp, Artificial
  Probe
ctgagtaccattcctattcaccata

SEQ ID NO: 101260 - DNA, 25 bp, Artificial
  Probe
tctgagtaccattcctattcaccat

SEQ ID NO: 101261 - DNA, 25 bp, Artificial
  Probe
ctggataatgattcaggaacagaag

SEQ ID NO: 101262 - DNA, 25 bp, Artificial
  Probe
ctgtgtctcctggataatgattcag

SEQ ID NO: 101263 - DNA, 25 bp, Artificial
  Probe
aacatagtgacaccagtgagaagag

SEQ ID NO: 101264 - DNA, 25 bp, Artificial
  Probe
gaacatagtgacaccagtgagaaga

SEQ ID NO: 101265 - DNA, 25 bp, Artificial
  Probe
gcaattagatgagtaggagaagcca

SEQ ID NO: 101266 - DNA, 25 bp, Artificial
  Probe
gagtaccattcctattcaccatatc

SEQ ID NO: 101267 - DNA, 25 bp, Artificial
  Probe
aacttgaagacatcagattagaaca

SEQ ID NO: 101268 - DNA, 25 bp, Artificial
  Probe
tcttgaaggaacatagtgacaccag

SEQ ID NO: 101269 - DNA, 25 bp, Artificial
  Probe
ctcttgaaggaacatagtgacacca

SEQ ID NO: 101270 - DNA, 25 bp, Artificial
  Probe
tgagtaccattcctattcaccatat

SEQ ID NO: 101271 - DNA, 25 bp, Artificial
  Probe
tattagttctaagatgtgaaggagc

SEQ ID NO: 101272 - DNA, 25 bp, Artificial
  Probe
cttgaaggaacatagtgacaccagt

SEQ ID NO: 101273 - DNA, 25 bp, Artificial
  Probe
ttagttctaagatgtgaaggagctt

SEQ ID NO: 101274 - DNA, 25 bp, Artificial
  Probe
attagttctaagatgtgaaggagct

SEQ ID NO: 101275 - DNA, 25 bp, Artificial
  Probe
ttcctgtgtctcctggataatgatt

SEQ ID NO: 101276 - DNA, 25 bp, Artificial
  Probe
ttgaaggaacatagtgacaccagtg

SEQ ID NO: 101277 - DNA, 25 bp, Artificial
  Probe
gaagagattgtgagggagaaagaat

SEQ ID NO: 101278 - DNA, 25 bp, Artificial
  Probe
tcaaataaaggaaagtcaccagagt

SEQ ID NO: 101279 - DNA, 25 bp, Artificial
  Probe
gctaaccactaccctttatcctatt

SEQ ID NO: 101280 - DNA, 25 bp, Artificial
  Probe
acatcagattagaacaggaaacaga

SEQ ID NO: 101281 - DNA, 25 bp, Artificial
  Probe
agccagttataggaagaaagacatt

SEQ ID NO: 101282 - DNA, 25 bp, Artificial
  Probe
cagccagttataggaagaaagacat

SEQ ID NO: 101283 - DNA, 25 bp, Artificial
  Probe
ctcacagccagttataggaagaaag

SEQ ID NO: 101284 - DNA, 25 bp, Artificial
  Probe
gccagttataggaagaaagacattt

SEQ ID NO: 101285 - DNA, 25 bp, Artificial
  Probe
cacagccagttataggaagaaagac

SEQ ID NO: 101286 - DNA, 25 bp, Artificial
  Probe
tcacagccagttataggaagaaaga

SEQ ID NO: 101287 - DNA, 25 bp, Artificial
  Probe
acagccagttataggaagaaagaca

SEQ ID NO: 101288 - DNA, 25 bp, Artificial
  Probe
tattgtagctcacagccagttatag

SEQ ID NO: 101289 - DNA, 25 bp, Artificial
  Probe
ttattgtagctcacagccagttata

SEQ ID NO: 101290 - DNA, 25 bp, Artificial
  Probe
ccttgtagtcacccatacatttcat

SEQ ID NO: 101291 - DNA, 25 bp, Artificial
  Probe
gtccttgtagtcacccatacatttc

SEQ ID NO: 101292 - DNA, 25 bp, Artificial
  Probe
attgtagctcacagccagttatagg

SEQ ID NO: 101293 - DNA, 25 bp, Artificial
  Probe
cttgtagtcacccatacatttcatg

SEQ ID NO: 101294 - DNA, 25 bp, Artificial
  Probe
tccttgtagtcacccatacatttca

SEQ ID NO: 101295 - DNA, 25 bp, Artificial
  Probe
tgtccttgtagtcacccatacattt

SEQ ID NO: 101296 - DNA, 25 bp, Artificial
  Probe
ttgtccttgtagtcacccatacatt

SEQ ID NO: 101297 - DNA, 25 bp, Artificial
  Probe
gtagctcacagccagttataggaag

SEQ ID NO: 101298 - DNA, 25 bp, Artificial
  Probe
tagctcacagccagttataggaaga

SEQ ID NO: 101299 - DNA, 25 bp, Artificial
  Probe
cttgtccttgtagtcacccatacat

SEQ ID NO: 101300 - DNA, 25 bp, Artificial
  Probe
tttattgtagctcacagccagttat

SEQ ID NO: 101301 - DNA, 25 bp, Artificial
  Probe
ttcccatcatgctgcttgatttaat

SEQ ID NO: 101302 - DNA, 25 bp, Artificial
  Probe
tttcccatcatgctgcttgatttaa

SEQ ID NO: 101303 - DNA, 25 bp, Artificial
  Probe
tgtagctcacagccagttataggaa

SEQ ID NO: 101304 - DNA, 25 bp, Artificial
  Probe
ttgtagctcacagccagttatagga

SEQ ID NO: 101305 - DNA, 25 bp, Artificial
  Probe
gctcacagccagttataggaagaaa

SEQ ID NO: 101306 - DNA, 25 bp, Artificial
  Probe
agctcacagccagttataggaagaa

SEQ ID NO: 101307 - DNA, 25 bp, Artificial
  Probe
tagtcacccatacatttcatgatca

SEQ ID NO: 101308 - DNA, 25 bp, Artificial
  Probe
gtagtcacccatacatttcatgatc

SEQ ID NO: 101309 - DNA, 25 bp, Artificial
  Probe
tgcttgtccttgtagtcacccatac

SEQ ID NO: 101310 - DNA, 25 bp, Artificial
  Probe
ccagttataggaagaaagacatttt

SEQ ID NO: 101311 - DNA, 25 bp, Artificial
  Probe
gaagaaagacattttcccatcatgc

SEQ ID NO: 101312 - DNA, 25 bp, Artificial
  Probe
tgtagtcacccatacatttcatgat

SEQ ID NO: 101313 - DNA, 25 bp, Artificial
  Probe
ttgtagtcacccatacatttcatga

SEQ ID NO: 101314 - DNA, 25 bp, Artificial
  Probe
gtgcttgtccttgtagtcacccata

SEQ ID NO: 101315 - DNA, 25 bp, Artificial
  Probe
aagaaagacattttcccatcatgct

SEQ ID NO: 101316 - DNA, 25 bp, Artificial
  Probe
agaaagacattttcccatcatgctg

SEQ ID NO: 101317 - DNA, 25 bp, Artificial
  Probe
ttttattgtagctcacagccagtta

SEQ ID NO: 101318 - DNA, 25 bp, Artificial
  Probe
gatcattttattgtagctcacagcc

SEQ ID NO: 101319 - DNA, 25 bp, Artificial
  Probe
atcattttattgtagctcacagcca

SEQ ID NO: 101320 - DNA, 25 bp, Artificial
  Probe
ttttcccatcatgctgcttgattta

SEQ ID NO: 101321 - DNA, 25 bp, Artificial
  Probe
attttattgtagctcacagccagtt

SEQ ID NO: 101322 - DNA, 25 bp, Artificial
  Probe
tcattttattgtagctcacagccag

SEQ ID NO: 101323 - DNA, 25 bp, Artificial
  Probe
gcttgtccttgtagtcacccataca

SEQ ID NO: 101324 - DNA, 25 bp, Artificial
  Probe
aagacattttcccatcatgctgctt

SEQ ID NO: 101325 - DNA, 25 bp, Artificial
  Probe
aaagacattttcccatcatgctgct

SEQ ID NO: 101326 - DNA, 25 bp, Artificial
  Probe
ggtctcttcagaatgtcaacatctt

SEQ ID NO: 101327 - DNA, 25 bp, Artificial
  Probe
gtctcttcagaatgtcaacatctta

SEQ ID NO: 101328 - DNA, 25 bp, Artificial
  Probe
tcctttgaagaaatccagaaccatc

SEQ ID NO: 101329 - DNA, 25 bp, Artificial
  Probe
ctcctttgaagaaatccagaaccat

SEQ ID NO: 101330 - DNA, 25 bp, Artificial
  Probe
tctcttcagaatgtcaacatcttat

SEQ ID NO: 101331 - DNA, 25 bp, Artificial
  Probe
cctttgaagaaatccagaaccatcc

SEQ ID NO: 101332 - DNA, 25 bp, Artificial
  Probe
ctcttcagaatgtcaacatcttatt

SEQ ID NO: 101333 - DNA, 25 bp, Artificial
  Probe
caaagggtctcttcagaatgtcaac

SEQ ID NO: 101334 - DNA, 25 bp, Artificial
  Probe
tttaggcaaagggtctcttcagaat

SEQ ID NO: 101335 - DNA, 25 bp, Artificial
  Probe
ctttgaagaaatccagaaccatccg

SEQ ID NO: 101336 - DNA, 25 bp, Artificial
  Probe
aaagggtctcttcagaatgtcaaca

SEQ ID NO: 101337 - DNA, 25 bp, Artificial
  Probe
gatattccatttgagcacgacgaag

SEQ ID NO: 101338 - DNA, 25 bp, Artificial
  Probe
tttgaagaaatccagaaccatccgt

SEQ ID NO: 101339 - DNA, 25 bp, Artificial
  Probe
aagggtctcttcagaatgtcaacat

SEQ ID NO: 101340 - DNA, 25 bp, Artificial
  Probe
cctcctttgaagaaatccagaacca

SEQ ID NO: 101341 - DNA, 25 bp, Artificial
  Probe
ttaggcaaagggtctcttcagaatg

SEQ ID NO: 101342 - DNA, 25 bp, Artificial
  Probe
atattccatttgagcacgacgaaga

SEQ ID NO: 101343 - DNA, 25 bp, Artificial
  Probe
agatattccatttgagcacgacgaa

SEQ ID NO: 101344 - DNA, 25 bp, Artificial
  Probe
tcaaggagaagagactagttcactc

SEQ ID NO: 101345 - DNA, 25 bp, Artificial
  Probe
ctcaaggagaagagactagttcact

SEQ ID NO: 101346 - DNA, 25 bp, Artificial
  Probe
gggtctcttcagaatgtcaacatct

SEQ ID NO: 101347 - DNA, 25 bp, Artificial
  Probe
agggtctcttcagaatgtcaacatc

SEQ ID NO: 101348 - DNA, 25 bp, Artificial
  Probe
gagatattccatttgagcacgacga

SEQ ID NO: 101349 - DNA, 25 bp, Artificial
  Probe
ttgaagaaatccagaaccatccgtg

SEQ ID NO: 101350 - DNA, 25 bp, Artificial
  Probe
cctcaaggagaagagactagttcac

SEQ ID NO: 101351 - DNA, 25 bp, Artificial
  Probe
ccctcctttgaagaaatccagaacc

SEQ ID NO: 101352 - DNA, 25 bp, Artificial
  Probe
tattccatttgagcacgacgaagag

SEQ ID NO: 101353 - DNA, 25 bp, Artificial
  Probe
gcaaagggtctcttcagaatgtcaa

SEQ ID NO: 101354 - DNA, 25 bp, Artificial
  Probe
caaggagaagagactagttcactcg

SEQ ID NO: 101355 - DNA, 25 bp, Artificial
  Probe
ttcagaatgtcaacatcttattaga

SEQ ID NO: 101356 - DNA, 25 bp, Artificial
  Probe
tcttcagaatgtcaacatcttatta

SEQ ID NO: 101357 - DNA, 25 bp, Artificial
  Probe
ttattagatggtgcctgtccctgag

SEQ ID NO: 101358 - DNA, 25 bp, Artificial
  Probe
cttattagatggtgcctgtccctga

SEQ ID NO: 101359 - DNA, 25 bp, Artificial
  Probe
tactttaggcaaagggtctcttcag

SEQ ID NO: 101360 - DNA, 25 bp, Artificial
  Probe
taggcaaagggtctcttcagaatgt

SEQ ID NO: 101361 - DNA, 25 bp, Artificial
  Probe
aaggagaagagactagttcactcgt

SEQ ID NO: 101362 - DNA, 25 bp, Artificial
  Probe
cttcagaatgtcaacatcttattag

SEQ ID NO: 101363 - DNA, 25 bp, Artificial
  Probe
tcttattagatggtgcctgtccctg

SEQ ID NO: 101364 - DNA, 25 bp, Artificial
  Probe
gccctcctttgaagaaatccagaac

SEQ ID NO: 101365 - DNA, 25 bp, Artificial
  Probe
gtactttaggcaaagggtctcttca

SEQ ID NO: 101366 - DNA, 25 bp, Artificial
  Probe
tgtactttaggcaaagggtctcttc

SEQ ID NO: 101367 - DNA, 25 bp, Artificial
  Probe
ctttaggcaaagggtctcttcagaa

SEQ ID NO: 101368 - DNA, 25 bp, Artificial
  Probe
gtgtactttaggcaaagggtctctt

SEQ ID NO: 101369 - DNA, 25 bp, Artificial
  Probe
aagtgtactttaggcaaagggtctc

SEQ ID NO: 101370 - DNA, 25 bp, Artificial
  Probe
atcttattagatggtgcctgtccct

SEQ ID NO: 101371 - DNA, 25 bp, Artificial
  Probe
cgtcagacagcagttattaccaata

SEQ ID NO: 101372 - DNA, 25 bp, Artificial
  Probe
gtacgcttcatggtagaggattatg

SEQ ID NO: 101373 - DNA, 25 bp, Artificial
  Probe
ccgtcagacagcagttattaccaat

SEQ ID NO: 101374 - DNA, 25 bp, Artificial
  Probe
agacagcagttattaccaataatgg

SEQ ID NO: 101375 - DNA, 25 bp, Artificial
  Probe
gtcagacagcagttattaccaataa

SEQ ID NO: 101376 - DNA, 25 bp, Artificial
  Probe
catgtccacctcttgtctaagaatg

SEQ ID NO: 101377 - DNA, 25 bp, Artificial
  Probe
cgcttcatggtagaggattatgatt

SEQ ID NO: 101378 - DNA, 25 bp, Artificial
  Probe
gcttcatggtagaggattatgattc

SEQ ID NO: 101379 - DNA, 25 bp, Artificial
  Probe
tacgcttcatggtagaggattatga

SEQ ID NO: 101380 - DNA, 25 bp, Artificial
  Probe
cagacagcagttattaccaataatg

SEQ ID NO: 101381 - DNA, 25 bp, Artificial
  Probe
taccctctagctgtctttatggata

SEQ ID NO: 101382 - DNA, 25 bp, Artificial
  Probe
accctctagctgtctttatggataa

SEQ ID NO: 101383 - DNA, 25 bp, Artificial
  Probe
atgtccacctcttgtctaagaatgg

SEQ ID NO: 101384 - DNA, 25 bp, Artificial
  Probe
tcagacagcagttattaccaataat

SEQ ID NO: 101385 - DNA, 25 bp, Artificial
  Probe
ccctctagctgtctttatggataag

SEQ ID NO: 101386 - DNA, 25 bp, Artificial
  Probe
acgcttcatggtagaggattatgat

SEQ ID NO: 101387 - DNA, 25 bp, Artificial
  Probe
cttcatggtagaggattatgattcc

SEQ ID NO: 101388 - DNA, 25 bp, Artificial
  Probe
cctctagctgtctttatggataagt

SEQ ID NO: 101389 - DNA, 25 bp, Artificial
  Probe
ccatgtccacctcttgtctaagaat

SEQ ID NO: 101390 - DNA, 25 bp, Artificial
  Probe
tagccgtcagacagcagttattacc

SEQ ID NO: 101391 - DNA, 25 bp, Artificial
  Probe
ctctagctgtctttatggataagtt

SEQ ID NO: 101392 - DNA, 25 bp, Artificial
  Probe
tctagctgtctttatggataagttt

SEQ ID NO: 101393 - DNA, 25 bp, Artificial
  Probe
gtgaagatctccatccaggactaag

SEQ ID NO: 101394 - DNA, 25 bp, Artificial
  Probe
cctcttgtctaagaatggagaccag

SEQ ID NO: 101395 - DNA, 25 bp, Artificial
  Probe
tgtgaagatctccatccaggactaa

SEQ ID NO: 101396 - DNA, 25 bp, Artificial
  Probe
ttgtgaagatctccatccaggacta

SEQ ID NO: 101397 - DNA, 25 bp, Artificial
  Probe
ttcatggtagaggattatgattcct

SEQ ID NO: 101398 - DNA, 25 bp, Artificial
  Probe
ttgtctaagaatggagaccagcatc

SEQ ID NO: 101399 - DNA, 25 bp, Artificial
  Probe
cttgtctaagaatggagaccagcat

SEQ ID NO: 101400 - DNA, 25 bp, Artificial
  Probe
cacctcttgtctaagaatggagacc

SEQ ID NO: 101401 - DNA, 25 bp, Artificial
  Probe
ccacctcttgtctaagaatggagac

SEQ ID NO: 101402 - DNA, 25 bp, Artificial
  Probe
ctcttgtctaagaatggagaccagc

SEQ ID NO: 101403 - DNA, 25 bp, Artificial
  Probe
acctcttgtctaagaatggagacca

SEQ ID NO: 101404 - DNA, 25 bp, Artificial
  Probe
gccgtcagacagcagttattaccaa

SEQ ID NO: 101405 - DNA, 25 bp, Artificial
  Probe
tcttgtctaagaatggagaccagca

SEQ ID NO: 101406 - DNA, 25 bp, Artificial
  Probe
gacagcagttattaccaataatggt

SEQ ID NO: 101407 - DNA, 25 bp, Artificial
  Probe
tgaagatctccatccaggactaagc

SEQ ID NO: 101408 - DNA, 25 bp, Artificial
  Probe
ttgagtttgaggtaacagtgcctga

SEQ ID NO: 101409 - DNA, 25 bp, Artificial
  Probe
acagcagttattaccaataatggtt

SEQ ID NO: 101410 - DNA, 25 bp, Artificial
  Probe
gccatgtccacctcttgtctaagaa

SEQ ID NO: 101411 - DNA, 25 bp, Artificial
  Probe
gtccacctcttgtctaagaatggag

SEQ ID NO: 101412 - DNA, 25 bp, Artificial
  Probe
tccacctcttgtctaagaatggaga

SEQ ID NO: 101413 - DNA, 25 bp, Artificial
  Probe
gaagatctccatccaggactaagcc

SEQ ID NO: 101414 - DNA, 25 bp, Artificial
  Probe
tgtctaagaatggagaccagcatcc

SEQ ID NO: 101415 - DNA, 25 bp, Artificial
  Probe
tgtccacctcttgtctaagaatgga

SEQ ID NO: 101416 - DNA, 25 bp, Artificial
  Probe
ctacatcctaacactataaccaagc

SEQ ID NO: 101417 - DNA, 25 bp, Artificial
  Probe
acgactctacatcctaacactataa

SEQ ID NO: 101418 - DNA, 25 bp, Artificial
  Probe
aacgactctacatcctaacactata

SEQ ID NO: 101419 - DNA, 25 bp, Artificial
  Probe
actctacatcctaacactataacca

SEQ ID NO: 101420 - DNA, 25 bp, Artificial
  Probe
cgactctacatcctaacactataac

SEQ ID NO: 101421 - DNA, 25 bp, Artificial
  Probe
gactctacatcctaacactataacc

SEQ ID NO: 101422 - DNA, 25 bp, Artificial
  Probe
atcctaacactataaccaagctcag

SEQ ID NO: 101423 - DNA, 25 bp, Artificial
  Probe
catcctaacactataaccaagctca

SEQ ID NO: 101424 - DNA, 25 bp, Artificial
  Probe
acatcctaacactataaccaagctc

SEQ ID NO: 101425 - DNA, 25 bp, Artificial
  Probe
tacatcctaacactataaccaagct

SEQ ID NO: 101426 - DNA, 25 bp, Artificial
  Probe
gattgctgtcgattgaagatgtata

SEQ ID NO: 101427 - DNA, 25 bp, Artificial
  Probe
catctacacagtgagacacagtgag

SEQ ID NO: 101428 - DNA, 25 bp, Artificial
  Probe
tctacatcctaacactataaccaag

SEQ ID NO: 101429 - DNA, 25 bp, Artificial
  Probe
ctctacatcctaacactataaccaa

SEQ ID NO: 101430 - DNA, 25 bp, Artificial
  Probe
ggattgctgtcgattgaagatgtat

SEQ ID NO: 101431 - DNA, 25 bp, Artificial
  Probe
cctaacactataaccaagctcagta

SEQ ID NO: 101432 - DNA, 25 bp, Artificial
  Probe
catgtcaacaacgactactcctatg

SEQ ID NO: 101433 - DNA, 25 bp, Artificial
  Probe
tcctaacactataaccaagctcagt

SEQ ID NO: 101434 - DNA, 25 bp, Artificial
  Probe
attgctgtcgattgaagatgtatat

SEQ ID NO: 101435 - DNA, 25 bp, Artificial
  Probe
atgtcaacaacgactactcctatgg

SEQ ID NO: 101436 - DNA, 25 bp, Artificial
  Probe
ttaaacgactctacatcctaacact

SEQ ID NO: 101437 - DNA, 25 bp, Artificial
  Probe
atctacacagtgagacacagtgagt

SEQ ID NO: 101438 - DNA, 25 bp, Artificial
  Probe
aaacgactctacatcctaacactat

SEQ ID NO: 101439 - DNA, 25 bp, Artificial
  Probe
cttaaacgactctacatcctaacac

SEQ ID NO: 101440 - DNA, 25 bp, Artificial
  Probe
tcttaaacgactctacatcctaaca

SEQ ID NO: 101441 - DNA, 25 bp, Artificial
  Probe
taaacgactctacatcctaacacta

SEQ ID NO: 101442 - DNA, 25 bp, Artificial
  Probe
tgctgtcgattgaagatgtatataa

SEQ ID NO: 101443 - DNA, 25 bp, Artificial
  Probe
ttgctgtcgattgaagatgtatata

SEQ ID NO: 101444 - DNA, 25 bp, Artificial
  Probe
ctaacactataaccaagctcagtat

SEQ ID NO: 101445 - DNA, 25 bp, Artificial
  Probe
atcttaaacgactctacatcctaac

SEQ ID NO: 101446 - DNA, 25 bp, Artificial
  Probe
tcaacctcataggataaccaaagtg

SEQ ID NO: 101447 - DNA, 25 bp, Artificial
  Probe
tctacacagtgagacacagtgagtg

SEQ ID NO: 101448 - DNA, 25 bp, Artificial
  Probe
gcatgtcaacaacgactactcctat

SEQ ID NO: 101449 - DNA, 25 bp, Artificial
  Probe
taacactataaccaagctcagtatt

SEQ ID NO: 101450 - DNA, 25 bp, Artificial
  Probe
caaaccaaacagaacacagttgagt

SEQ ID NO: 101451 - DNA, 25 bp, Artificial
  Probe
gctgtcgattgaagatgtatataat

SEQ ID NO: 101452 - DNA, 25 bp, Artificial
  Probe
caacctcataggataaccaaagtgc

SEQ ID NO: 101453 - DNA, 25 bp, Artificial
  Probe
aatcttaaacgactctacatcctaa

SEQ ID NO: 101454 - DNA, 25 bp, Artificial
  Probe
ccaaaccaaacagaacacagttgag

SEQ ID NO: 101455 - DNA, 25 bp, Artificial
  Probe
aaaccaaacagaacacagttgagtg

SEQ ID NO: 101456 - DNA, 25 bp, Artificial
  Probe
aacactataaccaagctcagtattt

SEQ ID NO: 101457 - DNA, 25 bp, Artificial
  Probe
ccatctacacagtgagacacagtga

SEQ ID NO: 101458 - DNA, 25 bp, Artificial
  Probe
gtcaacaacgactactcctatggct

SEQ ID NO: 101459 - DNA, 25 bp, Artificial
  Probe
aacctcataggataaccaaagtgcg

SEQ ID NO: 101460 - DNA, 25 bp, Artificial
  Probe
ctccttagtggcatcatctacgtga

SEQ ID NO: 101461 - DNA, 25 bp, Artificial
  Probe
ttagatcacatcaccaataaccagg

SEQ ID NO: 101462 - DNA, 25 bp, Artificial
  Probe
ctgattctgcgtcaactgatgatat

SEQ ID NO: 101463 - DNA, 25 bp, Artificial
  Probe
gatcacatcaccaataaccaggatt

SEQ ID NO: 101464 - DNA, 25 bp, Artificial
  Probe
tagatcacatcaccaataaccagga

SEQ ID NO: 101465 - DNA, 25 bp, Artificial
  Probe
gattctgcgtcaactgatgatatgt

SEQ ID NO: 101466 - DNA, 25 bp, Artificial
  Probe
tgattctgcgtcaactgatgatatg

SEQ ID NO: 101467 - DNA, 25 bp, Artificial
  Probe
attctgcgtcaactgatgatatgtg

SEQ ID NO: 101468 - DNA, 25 bp, Artificial
  Probe
ttctggagattgatgaacacatgag

SEQ ID NO: 101469 - DNA, 25 bp, Artificial
  Probe
ggagattgatgaacacatgagagtt

SEQ ID NO: 101470 - DNA, 25 bp, Artificial
  Probe
agatcacatcaccaataaccaggat

SEQ ID NO: 101471 - DNA, 25 bp, Artificial
  Probe
ctggagattgatgaacacatgagag

SEQ ID NO: 101472 - DNA, 25 bp, Artificial
  Probe
agagcctgaagtccatgatattgaa

SEQ ID NO: 101473 - DNA, 25 bp, Artificial
  Probe
gagattgatgaacacatgagagtta

SEQ ID NO: 101474 - DNA, 25 bp, Artificial
  Probe
cacttgttagatcacatcaccaata

SEQ ID NO: 101475 - DNA, 25 bp, Artificial
  Probe
tctggagattgatgaacacatgaga

SEQ ID NO: 101476 - DNA, 25 bp, Artificial
  Probe
actgattctgcgtcaactgatgata

SEQ ID NO: 101477 - DNA, 25 bp, Artificial
  Probe
tggagattgatgaacacatgagagt

SEQ ID NO: 101478 - DNA, 25 bp, Artificial
  Probe
tgttagatcacatcaccaataacca

SEQ ID NO: 101479 - DNA, 25 bp, Artificial
  Probe
gttagatcacatcaccaataaccag

SEQ ID NO: 101480 - DNA, 25 bp, Artificial
  Probe
tgcgtcaactgatgatatgtggtaa

SEQ ID NO: 101481 - DNA, 25 bp, Artificial
  Probe
gcacttgttagatcacatcaccaat

SEQ ID NO: 101482 - DNA, 25 bp, Artificial
  Probe
tcaagaccataaaccaagtaatcct

SEQ ID NO: 101483 - DNA, 25 bp, Artificial
  Probe
gattgatgaacacatgagagttatg

SEQ ID NO: 101484 - DNA, 25 bp, Artificial
  Probe
ttgttagatcacatcaccaataacc

SEQ ID NO: 101485 - DNA, 25 bp, Artificial
  Probe
caagaccataaaccaagtaatcctc

SEQ ID NO: 101486 - DNA, 25 bp, Artificial
  Probe
ctcaagaccataaaccaagtaatcc

SEQ ID NO: 101487 - DNA, 25 bp, Artificial
  Probe
atcacatcaccaataaccaggattt

SEQ ID NO: 101488 - DNA, 25 bp, Artificial
  Probe
agattgatgaacacatgagagttat

SEQ ID NO: 101489 - DNA, 25 bp, Artificial
  Probe
acttgttagatcacatcaccaataa

SEQ ID NO: 101490 - DNA, 25 bp, Artificial
  Probe
agaccataaaccaagtaatcctctg

SEQ ID NO: 101491 - DNA, 25 bp, Artificial
  Probe
ccgtttacaatagactgaaccctta

SEQ ID NO: 101492 - DNA, 25 bp, Artificial
  Probe
cgtttacaatagactgaacccttac

SEQ ID NO: 101493 - DNA, 25 bp, Artificial
  Probe
taaagaacggaatcagaacaggttt

SEQ ID NO: 101494 - DNA, 25 bp, Artificial
  Probe
ctgcgtcaactgatgatatgtggta

SEQ ID NO: 101495 - DNA, 25 bp, Artificial
  Probe
aagaccataaaccaagtaatcctct

SEQ ID NO: 101496 - DNA, 25 bp, Artificial
  Probe
ggactcaagaggtttactttgtaga

SEQ ID NO: 101497 - DNA, 25 bp, Artificial
  Probe
gtcaactgatgatatgtggtaaagc

SEQ ID NO: 101498 - DNA, 25 bp, Artificial
  Probe
cgtcaactgatgatatgtggtaaag

SEQ ID NO: 101499 - DNA, 25 bp, Artificial
  Probe
tcactcaagaccataaaccaagtaa

SEQ ID NO: 101500 - DNA, 25 bp, Artificial
  Probe
ttcactcaagaccataaaccaagta

SEQ ID NO: 101501 - DNA, 25 bp, Artificial
  Probe
ttcacttcttcactcaagaccataa

SEQ ID NO: 101502 - DNA, 25 bp, Artificial
  Probe
cctttaacatccatcaccgacttaa

SEQ ID NO: 101503 - DNA, 25 bp, Artificial
  Probe
gttcacttcttcactcaagaccata

SEQ ID NO: 101504 - DNA, 25 bp, Artificial
  Probe
gggactcaagaggtttactttgtag

SEQ ID NO: 101505 - DNA, 25 bp, Artificial
  Probe
gtaaagaacggaatcagaacaggtt

SEQ ID NO: 101506 - DNA, 25 bp, Artificial
  Probe
gtgaccactttagaatgaaccagtt

SEQ ID NO: 101507 - DNA, 25 bp, Artificial
  Probe
ctcagataagctgctaggaccttag

SEQ ID NO: 101508 - DNA, 25 bp, Artificial
  Probe
catttcttgtcaagtcatgtgatct

SEQ ID NO: 101509 - DNA, 25 bp, Artificial
  Probe
tctcagataagctgctaggacctta

SEQ ID NO: 101510 - DNA, 25 bp, Artificial
  Probe
tgaccactttagaatgaaccagttc

SEQ ID NO: 101511 - DNA, 25 bp, Artificial
  Probe
atttcttgtcaagtcatgtgatctt

SEQ ID NO: 101512 - DNA, 25 bp, Artificial
  Probe
cttgtctcagataagctgctaggac

SEQ ID NO: 101513 - DNA, 25 bp, Artificial
  Probe
acttgtctcagataagctgctagga

SEQ ID NO: 101514 - DNA, 25 bp, Artificial
  Probe
gacttgattgttaaaccatagaact

SEQ ID NO: 101515 - DNA, 25 bp, Artificial
  Probe
tacaacactgccctgtataaagaaa

SEQ ID NO: 101516 - DNA, 25 bp, Artificial
  Probe
ttacaacactgccctgtataaagaa

SEQ ID NO: 101517 - DNA, 25 bp, Artificial
  Probe
aagttacaacactgccctgtataaa

SEQ ID NO: 101518 - DNA, 25 bp, Artificial
  Probe
agttacaacactgccctgtataaag

SEQ ID NO: 101519 - DNA, 25 bp, Artificial
  Probe
gttacaacactgccctgtataaaga

SEQ ID NO: 101520 - DNA, 25 bp, Artificial
  Probe
tgagttttcctttctgttctttgac

SEQ ID NO: 101521 - DNA, 25 bp, Artificial
  Probe
gtgatgagttttcctttctgttctt

SEQ ID NO: 101522 - DNA, 25 bp, Artificial
  Probe
agtgatgagttttcctttctgttct

SEQ ID NO: 101523 - DNA, 25 bp, Artificial
  Probe
cgtgaccactttagaatgaaccagt

SEQ ID NO: 101524 - DNA, 25 bp, Artificial
  Probe
gtgccatataaaatacaaagcctct

SEQ ID NO: 101525 - DNA, 25 bp, Artificial
  Probe
ctgacttgggattgtgtttcttcgt

SEQ ID NO: 101526 - DNA, 25 bp, Artificial
  Probe
ggaccaaaagatgtgccatataaaa

SEQ ID NO: 101527 - DNA, 25 bp, Artificial
  Probe
atgagttttcctttctgttctttga

SEQ ID NO: 101528 - DNA, 25 bp, Artificial
  Probe
tgatgagttttcctttctgttcttt

SEQ ID NO: 101529 - DNA, 25 bp, Artificial
  Probe
gtctcagataagctgctaggacctt

SEQ ID NO: 101530 - DNA, 25 bp, Artificial
  Probe
gatgagttttcctttctgttctttg

SEQ ID NO: 101531 - DNA, 25 bp, Artificial
  Probe
tagaaaggaagctgacttgggattg

SEQ ID NO: 101532 - DNA, 25 bp, Artificial
  Probe
gtagaaaggaagctgacttgggatt

SEQ ID NO: 101533 - DNA, 25 bp, Artificial
  Probe
acttaacaaactaaatgatgtgtct

SEQ ID NO: 101534 - DNA, 25 bp, Artificial
  Probe
ccgtgaccactttagaatgaaccag

SEQ ID NO: 101535 - DNA, 25 bp, Artificial
  Probe
tgccatataaaatacaaagcctctt

SEQ ID NO: 101536 - DNA, 25 bp, Artificial
  Probe
acatttcttgtcaagtcatgtgatc

SEQ ID NO: 101537 - DNA, 25 bp, Artificial
  Probe
ttgtctcagataagctgctaggacc

SEQ ID NO: 101538 - DNA, 25 bp, Artificial
  Probe
cggaccaaaagatgtgccatataaa

SEQ ID NO: 101539 - DNA, 25 bp, Artificial
  Probe
tgtgccatataaaatacaaagcctc

SEQ ID NO: 101540 - DNA, 25 bp, Artificial
  Probe
gccatataaaatacaaagcctcttg

SEQ ID NO: 101541 - DNA, 25 bp, Artificial
  Probe
ttcaggtagaacttaacaaactaaa

SEQ ID NO: 101542 - DNA, 25 bp, Artificial
  Probe
tttcaggtagaacttaacaaactaa

SEQ ID NO: 101543 - DNA, 25 bp, Artificial
  Probe
ttagcttgtgttccgtgactggtaa

SEQ ID NO: 101544 - DNA, 25 bp, Artificial
  Probe
caggtagaacttaacaaactaaatg

SEQ ID NO: 101545 - DNA, 25 bp, Artificial
  Probe
acaacactgccctgtataaagaaaa

SEQ ID NO: 101546 - DNA, 25 bp, Artificial
  Probe
cagtgatgagttttcctttctgttc

SEQ ID NO: 101547 - DNA, 25 bp, Artificial
  Probe
atgtgccatataaaatacaaagcct

SEQ ID NO: 101548 - DNA, 25 bp, Artificial
  Probe
gaccaaaagatgtgccatataaaat

SEQ ID NO: 101549 - DNA, 25 bp, Artificial
  Probe
aagctgacttgggattgtgtttctt

SEQ ID NO: 101550 - DNA, 25 bp, Artificial
  Probe
ggcatgttttcaggtagaacttaac

SEQ ID NO: 101551 - DNA, 25 bp, Artificial
  Probe
gtaatggaaggatataattggtgcc

SEQ ID NO: 101552 - DNA, 25 bp, Artificial
  Probe
caccagacaccaactatctattcat

SEQ ID NO: 101553 - DNA, 25 bp, Artificial
  Probe
atcaccagacaccaactatctattc

SEQ ID NO: 101554 - DNA, 25 bp, Artificial
  Probe
cttatggaactcttcagaattggtg

SEQ ID NO: 101555 - DNA, 25 bp, Artificial
  Probe
aatcaccagacaccaactatctatt

SEQ ID NO: 101556 - DNA, 25 bp, Artificial
  Probe
ccttatggaactcttcagaattggt

SEQ ID NO: 101557 - DNA, 25 bp, Artificial
  Probe
accttatggaactcttcagaattgg

SEQ ID NO: 101558 - DNA, 25 bp, Artificial
  Probe
gaccttatggaactcttcagaattg

SEQ ID NO: 101559 - DNA, 25 bp, Artificial
  Probe
tgtaatggaaggatataattggtgc

SEQ ID NO: 101560 - DNA, 25 bp, Artificial
  Probe
gatattattctgtggagaccgtgac

SEQ ID NO: 101561 - DNA, 25 bp, Artificial
  Probe
ttatggaactcttcagaattggtgg

SEQ ID NO: 101562 - DNA, 25 bp, Artificial
  Probe
tcaccagacaccaactatctattca

SEQ ID NO: 101563 - DNA, 25 bp, Artificial
  Probe
tgaattactgttggatgttgacctg

SEQ ID NO: 101564 - DNA, 25 bp, Artificial
  Probe
atattattctgtggagaccgtgact

SEQ ID NO: 101565 - DNA, 25 bp, Artificial
  Probe
atgaccttatggaactcttcagaat

SEQ ID NO: 101566 - DNA, 25 bp, Artificial
  Probe
tgaccttatggaactcttcagaatt

SEQ ID NO: 101567 - DNA, 25 bp, Artificial
  Probe
cctctctccatccatagatacactg

SEQ ID NO: 101568 - DNA, 25 bp, Artificial
  Probe
agaggatattattctgtggagaccg

SEQ ID NO: 101569 - DNA, 25 bp, Artificial
  Probe
tagatacactggatcacataagagc

SEQ ID NO: 101570 - DNA, 25 bp, Artificial
  Probe
gaggatattattctgtggagaccgt

SEQ ID NO: 101571 - DNA, 25 bp, Artificial
  Probe
tatggaactcttcagaattggtgga

SEQ ID NO: 101572 - DNA, 25 bp, Artificial
  Probe
ggaaggatataattggtgccatgat

SEQ ID NO: 101573 - DNA, 25 bp, Artificial
  Probe
ggatattattctgtggagaccgtga

SEQ ID NO: 101574 - DNA, 25 bp, Artificial
  Probe
aggatattattctgtggagaccgtg

SEQ ID NO: 101575 - DNA, 25 bp, Artificial
  Probe
accgtgactcttcttgtagcattaa

SEQ ID NO: 101576 - DNA, 25 bp, Artificial
  Probe
caatgtgtgatctcttatggtcaga

SEQ ID NO: 101577 - DNA, 25 bp, Artificial
  Probe
accagacaccaactatctattcatg

SEQ ID NO: 101578 - DNA, 25 bp, Artificial
  Probe
catgaccttatggaactcttcagaa

SEQ ID NO: 101579 - DNA, 25 bp, Artificial
  Probe
gaccgtgactcttcttgtagcatta

SEQ ID NO: 101580 - DNA, 25 bp, Artificial
  Probe
agatacactggatcacataagagcc

SEQ ID NO: 101581 - DNA, 25 bp, Artificial
  Probe
tattattctgtggagaccgtgactc

SEQ ID NO: 101582 - DNA, 25 bp, Artificial
  Probe
atggaactcttcagaattggtggaa

SEQ ID NO: 101583 - DNA, 25 bp, Artificial
  Probe
gaattactgttggatgttgacctgc

SEQ ID NO: 101584 - DNA, 25 bp, Artificial
  Probe
gcttgtaatggaaggatataattgg

SEQ ID NO: 101585 - DNA, 25 bp, Artificial
  Probe
taatggaaggatataattggtgcca

SEQ ID NO: 101586 - DNA, 25 bp, Artificial
  Probe
ctctctccatccatagatacactgg

SEQ ID NO: 101587 - DNA, 25 bp, Artificial
  Probe
gcctctctccatccatagatacact

SEQ ID NO: 101588 - DNA, 25 bp, Artificial
  Probe
gagattcttgggagtatgttgtcat

SEQ ID NO: 101589 - DNA, 25 bp, Artificial
  Probe
tgactcttcttgtagcattaaaggt

SEQ ID NO: 101590 - DNA, 25 bp, Artificial
  Probe
cgtgactcttcttgtagcattaaag

SEQ ID NO: 101591 - DNA, 25 bp, Artificial
  Probe
atgatgaatgcctacgaaagtatgg

SEQ ID NO: 101592 - DNA, 25 bp, Artificial
  Probe
gactcttcttgtagcattaaaggtg

SEQ ID NO: 101593 - DNA, 25 bp, Artificial
  Probe
gtgactcttcttgtagcattaaagg

SEQ ID NO: 101594 - DNA, 25 bp, Artificial
  Probe
gctacacatttggacaagacatttc

SEQ ID NO: 101595 - DNA, 25 bp, Artificial
  Probe
catagatacactggatcacataaga

SEQ ID NO: 101596 - DNA, 25 bp, Artificial
  Probe
ataggttgcgtggatattatgagaa

SEQ ID NO: 101597 - DNA, 25 bp, Artificial
  Probe
tgtataggttgcgtggatattatga

SEQ ID NO: 101598 - DNA, 25 bp, Artificial
  Probe
gtataggttgcgtggatattatgag

SEQ ID NO: 101599 - DNA, 25 bp, Artificial
  Probe
tataggttgcgtggatattatgaga

SEQ ID NO: 101600 - DNA, 25 bp, Artificial
  Probe
ggctaattctgtaacatagtcttgg

SEQ ID NO: 101601 - DNA, 25 bp, Artificial
  Probe
atgtataggttgcgtggatattatg

SEQ ID NO: 101602 - DNA, 25 bp, Artificial
  Probe
gctaattctgtaacatagtcttggt

SEQ ID NO: 101603 - DNA, 25 bp, Artificial
  Probe
tggctaattctgtaacatagtcttg

SEQ ID NO: 101604 - DNA, 25 bp, Artificial
  Probe
gtggctaattctgtaacatagtctt

SEQ ID NO: 101605 - DNA, 25 bp, Artificial
  Probe
tgtggctaattctgtaacatagtct

SEQ ID NO: 101606 - DNA, 25 bp, Artificial
  Probe
catgtataggttgcgtggatattat

SEQ ID NO: 101607 - DNA, 25 bp, Artificial
  Probe
taggttgcgtggatattatgagaaa

SEQ ID NO: 101608 - DNA, 25 bp, Artificial
  Probe
aggttgcgtggatattatgagaaat

SEQ ID NO: 101609 - DNA, 25 bp, Artificial
  Probe
aaacagtagcacacaataaattcca

SEQ ID NO: 101610 - DNA, 25 bp, Artificial
  Probe
aacagtagcacacaataaattccat

SEQ ID NO: 101611 - DNA, 25 bp, Artificial
  Probe
aggtcatagttcttaaatgtggcta

SEQ ID NO: 101612 - DNA, 25 bp, Artificial
  Probe
caggtcatagttcttaaatgtggct

SEQ ID NO: 101613 - DNA, 25 bp, Artificial
  Probe
tcaggtcatagttcttaaatgtggc

SEQ ID NO: 101614 - DNA, 25 bp, Artificial
  Probe
ctcaggtcatagttcttaaatgtgg

SEQ ID NO: 101615 - DNA, 25 bp, Artificial
  Probe
agttcttaaatgtggctaattctgt

SEQ ID NO: 101616 - DNA, 25 bp, Artificial
  Probe
cctcaggtcatagttcttaaatgtg

SEQ ID NO: 101617 - DNA, 25 bp, Artificial
  Probe
ggtcatagttcttaaatgtggctaa

SEQ ID NO: 101618 - DNA, 25 bp, Artificial
  Probe
acagtagcacacaataaattccatg

SEQ ID NO: 101619 - DNA, 25 bp, Artificial
  Probe
gcatgtgcaggactattcaagtatt

SEQ ID NO: 101620 - DNA, 25 bp, Artificial
  Probe
gtagtttggtgatccctttactttg

SEQ ID NO: 101621 - DNA, 25 bp, Artificial
  Probe
tgtagtttggtgatccctttacttt

SEQ ID NO: 101622 - DNA, 25 bp, Artificial
  Probe
ctgtagtttggtgatccctttactt

SEQ ID NO: 101623 - DNA, 25 bp, Artificial
  Probe
gaactgcttggttaaattaaatgga

SEQ ID NO: 101624 - DNA, 25 bp, Artificial
  Probe
agaactgcttggttaaattaaatgg

SEQ ID NO: 101625 - DNA, 25 bp, Artificial
  Probe
tagtttggtgatccctttactttgg

SEQ ID NO: 101626 - DNA, 25 bp, Artificial
  Probe
tgatagttacagaactgcttggtta

SEQ ID NO: 101627 - DNA, 25 bp, Artificial
  Probe
ttgatagttacagaactgcttggtt

SEQ ID NO: 101628 - DNA, 25 bp, Artificial
  Probe
taaacagtagcacacaataaattcc

SEQ ID NO: 101629 - DNA, 25 bp, Artificial
  Probe
ttctcttcagcccttcagatgttag

SEQ ID NO: 101630 - DNA, 25 bp, Artificial
  Probe
actgtagtttggtgatccctttact

SEQ ID NO: 101631 - DNA, 25 bp, Artificial
  Probe
gttctcttcagcccttcagatgtta

SEQ ID NO: 101632 - DNA, 25 bp, Artificial
  Probe
gatagttacagaactgcttggttaa

SEQ ID NO: 101633 - DNA, 25 bp, Artificial
  Probe
ccttcagatgttagtggaagcataa

SEQ ID NO: 101634 - DNA, 25 bp, Artificial
  Probe
atgtggctaattctgtaacatagtc

SEQ ID NO: 101635 - DNA, 25 bp, Artificial
  Probe
gttacagaactgcttggttaaatta

SEQ ID NO: 101636 - DNA, 25 bp, Artificial
  Probe
gtttggtgatccctttactttggtg

SEQ ID NO: 101637 - DNA, 25 bp, Artificial
  Probe
tcttaaatgtggctaattctgtaac

SEQ ID NO: 101638 - DNA, 25 bp, Artificial
  Probe
gttcttaaatgtggctaattctgta

SEQ ID NO: 101639 - DNA, 25 bp, Artificial
  Probe
acagaactgcttggttaaattaaat

SEQ ID NO: 101640 - DNA, 25 bp, Artificial
  Probe
tggttcacacatttacgtttacaaa

SEQ ID NO: 101641 - DNA, 25 bp, Artificial
  Probe
caaacaaacaatcaaacacacaact

SEQ ID NO: 101642 - DNA, 25 bp, Artificial
  Probe
acaaacaaacaatcaaacacacaac

SEQ ID NO: 101643 - DNA, 25 bp, Artificial
  Probe
tgatttggaatacaggcttagaact

SEQ ID NO: 101644 - DNA, 25 bp, Artificial
  Probe
aggcttagaactttatatcacaggg

SEQ ID NO: 101645 - DNA, 25 bp, Artificial
  Probe
aacaaacaaacaatcaaacacacaa

SEQ ID NO: 101646 - DNA, 25 bp, Artificial
  Probe
aaacaaacaaacaatcaaacacaca

SEQ ID NO: 101647 - DNA, 25 bp, Artificial
  Probe
acaaacaaacaaacaatcaaacaca

SEQ ID NO: 101648 - DNA, 25 bp, Artificial
  Probe
caaacaaacaaacaatcaaacacac

SEQ ID NO: 101649 - DNA, 25 bp, Artificial
  Probe
gcttagaactttatatcacagggca

SEQ ID NO: 101650 - DNA, 25 bp, Artificial
  Probe
ttgatttggaatacaggcttagaac

SEQ ID NO: 101651 - DNA, 25 bp, Artificial
  Probe
gttgatttggaatacaggcttagaa

SEQ ID NO: 101652 - DNA, 25 bp, Artificial
  Probe
aaacaaacaatcaaacacacaactt

SEQ ID NO: 101653 - DNA, 25 bp, Artificial
  Probe
ggttgatttggaatacaggcttaga

SEQ ID NO: 101654 - DNA, 25 bp, Artificial
  Probe
aacaaacaatcaaacacacaacttt

SEQ ID NO: 101655 - DNA, 25 bp, Artificial
  Probe
gatttggaatacaggcttagaactt

SEQ ID NO: 101656 - DNA, 25 bp, Artificial
  Probe
gatgctgaatcctttgctaactaag

SEQ ID NO: 101657 - DNA, 25 bp, Artificial
  Probe
atgctgaatcctttgctaactaaga

SEQ ID NO: 101658 - DNA, 25 bp, Artificial
  Probe
tggttgatttggaatacaggcttag

SEQ ID NO: 101659 - DNA, 25 bp, Artificial
  Probe
caggcttagaactttatatcacagg

SEQ ID NO: 101660 - DNA, 25 bp, Artificial
  Probe
ttcctgaagaagacagtccttgatg

SEQ ID NO: 101661 - DNA, 25 bp, Artificial
  Probe
gttcctgaagaagacagtccttgat

SEQ ID NO: 101662 - DNA, 25 bp, Artificial
  Probe
ggcttagaactttatatcacagggc

SEQ ID NO: 101663 - DNA, 25 bp, Artificial
  Probe
aacaaacaaacaaacaatcaaacac

SEQ ID NO: 101664 - DNA, 25 bp, Artificial
  Probe
atttggaatacaggcttagaacttt

SEQ ID NO: 101665 - DNA, 25 bp, Artificial
  Probe
aagttagatttctggttgatttgga

SEQ ID NO: 101666 - DNA, 25 bp, Artificial
  Probe
acaaacaatcaaacacacaacttta

SEQ ID NO: 101667 - DNA, 25 bp, Artificial
  Probe
acaggcttagaactttatatcacag

SEQ ID NO: 101668 - DNA, 25 bp, Artificial
  Probe
agatttctggttgatttggaataca

SEQ ID NO: 101669 - DNA, 25 bp, Artificial
  Probe
agttagatttctggttgatttggaa

SEQ ID NO: 101670 - DNA, 25 bp, Artificial
  Probe
ttgttcctgaagaagacagtccttg

SEQ ID NO: 101671 - DNA, 25 bp, Artificial
  Probe
agtccttcaatgaataccgaaagag

SEQ ID NO: 101672 - DNA, 25 bp, Artificial
  Probe
aacaatcaaacacacaactttagaa

SEQ ID NO: 101673 - DNA, 25 bp, Artificial
  Probe
aaacaatcaaacacacaactttaga

SEQ ID NO: 101674 - DNA, 25 bp, Artificial
  Probe
caaacaatcaaacacacaactttag

SEQ ID NO: 101675 - DNA, 25 bp, Artificial
  Probe
tttggaatacaggcttagaacttta

SEQ ID NO: 101676 - DNA, 25 bp, Artificial
  Probe
tgaatgtctagaatgtggaattggt

SEQ ID NO: 101677 - DNA, 25 bp, Artificial
  Probe
cagtccttcaatgaataccgaaaga

SEQ ID NO: 101678 - DNA, 25 bp, Artificial
  Probe
aaacaaacaaacaaacaatcaaaca

SEQ ID NO: 101679 - DNA, 25 bp, Artificial
  Probe
cattgtgagagctgacattgacatt

SEQ ID NO: 101680 - DNA, 25 bp, Artificial
  Probe
aaagttagatttctggttgatttgg

SEQ ID NO: 101681 - DNA, 25 bp, Artificial
  Probe
gaatgtctagaatgtggaattggtt

SEQ ID NO: 101682 - DNA, 25 bp, Artificial
  Probe
ttgaatgtctagaatgtggaattgg

SEQ ID NO: 101683 - DNA, 25 bp, Artificial
  Probe
ttggaatacaggcttagaactttat

SEQ ID NO: 101684 - DNA, 25 bp, Artificial
  Probe
cttacacttctttccaggagttcac

SEQ ID NO: 101685 - DNA, 25 bp, Artificial
  Probe
acaatcaaacacacaactttagaat

SEQ ID NO: 101686 - DNA, 25 bp, Artificial
  Probe
agtcattataacacactccttgtct

SEQ ID NO: 101687 - DNA, 25 bp, Artificial
  Probe
tgaagtcattataacacactccttg

SEQ ID NO: 101688 - DNA, 25 bp, Artificial
  Probe
cattataacacactccttgtcttga

SEQ ID NO: 101689 - DNA, 25 bp, Artificial
  Probe
tcattataacacactccttgtcttg

SEQ ID NO: 101690 - DNA, 25 bp, Artificial
  Probe
gtcattataacacactccttgtctt

SEQ ID NO: 101691 - DNA, 25 bp, Artificial
  Probe
aagtcattataacacactccttgtc

SEQ ID NO: 101692 - DNA, 25 bp, Artificial
  Probe
gaagtcattataacacactccttgt

SEQ ID NO: 101693 - DNA, 25 bp, Artificial
  Probe
ttgatgaggatggtcaggatgagta

SEQ ID NO: 101694 - DNA, 25 bp, Artificial
  Probe
ttgaagtcattataacacactcctt

SEQ ID NO: 101695 - DNA, 25 bp, Artificial
  Probe
ggatggtcaggatgagtacaatgag

SEQ ID NO: 101696 - DNA, 25 bp, Artificial
  Probe
gaggatggtcaggatgagtacaatg

SEQ ID NO: 101697 - DNA, 25 bp, Artificial
  Probe
attataacacactccttgtcttgaa

SEQ ID NO: 101698 - DNA, 25 bp, Artificial
  Probe
aggatggtcaggatgagtacaatga

SEQ ID NO: 101699 - DNA, 25 bp, Artificial
  Probe
tgaggatggtcaggatgagtacaat

SEQ ID NO: 101700 - DNA, 25 bp, Artificial
  Probe
atgaggatggtcaggatgagtacaa

SEQ ID NO: 101701 - DNA, 25 bp, Artificial
  Probe
cggctttgaagtcattataacacac

SEQ ID NO: 101702 - DNA, 25 bp, Artificial
  Probe
gatggtcaggatgagtacaatgagc

SEQ ID NO: 101703 - DNA, 25 bp, Artificial
  Probe
aaactttgatgaggatggtcaggat

SEQ ID NO: 101704 - DNA, 25 bp, Artificial
  Probe
ggctttgaagtcattataacacact

SEQ ID NO: 101705 - DNA, 25 bp, Artificial
  Probe
gatgaggatggtcaggatgagtaca

SEQ ID NO: 101706 - DNA, 25 bp, Artificial
  Probe
tgatgaggatggtcaggatgagtac

SEQ ID NO: 101707 - DNA, 25 bp, Artificial
  Probe
gctttgaagtcattataacacactc

SEQ ID NO: 101708 - DNA, 25 bp, Artificial
  Probe
aactttgatgaggatggtcaggatg

SEQ ID NO: 101709 - DNA, 25 bp, Artificial
  Probe
ctttgatgaggatggtcaggatgag

SEQ ID NO: 101710 - DNA, 25 bp, Artificial
  Probe
tttgaagtcattataacacactcct

SEQ ID NO: 101711 - DNA, 25 bp, Artificial
  Probe
ttataacacactccttgtcttgaaa

SEQ ID NO: 101712 - DNA, 25 bp, Artificial
  Probe
ctttgaagtcattataacacactcc

SEQ ID NO: 101713 - DNA, 25 bp, Artificial
  Probe
atggtcaggatgagtacaatgagct

SEQ ID NO: 101714 - DNA, 25 bp, Artificial
  Probe
caaactttgatgaggatggtcagga

SEQ ID NO: 101715 - DNA, 25 bp, Artificial
  Probe
gagtcacatcactgtctggtatcca

SEQ ID NO: 101716 - DNA, 25 bp, Artificial
  Probe
tttgatgaggatggtcaggatgagt

SEQ ID NO: 101717 - DNA, 25 bp, Artificial
  Probe
actttgatgaggatggtcaggatga

SEQ ID NO: 101718 - DNA, 25 bp, Artificial
  Probe
ccggctttgaagtcattataacaca

SEQ ID NO: 101719 - DNA, 25 bp, Artificial
  Probe
accggctttgaagtcattataacac

SEQ ID NO: 101720 - DNA, 25 bp, Artificial
  Probe
caccggctttgaagtcattataaca

SEQ ID NO: 101721 - DNA, 25 bp, Artificial
  Probe
ggagtcacatcactgtctggtatcc

SEQ ID NO: 101722 - DNA, 25 bp, Artificial
  Probe
tataacacactccttgtcttgaaaa

SEQ ID NO: 101723 - DNA, 25 bp, Artificial
  Probe
gcaccggctttgaagtcattataac

SEQ ID NO: 101724 - DNA, 25 bp, Artificial
  Probe
tacatgggagtcacatcactgtctg

SEQ ID NO: 101725 - DNA, 25 bp, Artificial
  Probe
gtacatgggagtcacatcactgtct

SEQ ID NO: 101726 - DNA, 25 bp, Artificial
  Probe
ccaaactttgatgaggatggtcagg

SEQ ID NO: 101727 - DNA, 25 bp, Artificial
  Probe
gggagtcacatcactgtctggtatc

SEQ ID NO: 101728 - DNA, 25 bp, Artificial
  Probe
gagccaaactttgatgaggatggtc

SEQ ID NO: 101729 - DNA, 25 bp, Artificial
  Probe
cagagccaaactttgatgaggatgg

SEQ ID NO: 101730 - DNA, 25 bp, Artificial
  Probe
gcagagccaaactttgatgaggatg

SEQ ID NO: 101731 - DNA, 25 bp, Artificial
  Probe
atccaacacacatgctcaataaatg

SEQ ID NO: 101732 - DNA, 25 bp, Artificial
  Probe
tatccaacacacatgctcaataaat

SEQ ID NO: 101733 - DNA, 25 bp, Artificial
  Probe
caacacacatgctcaataaatggtt

SEQ ID NO: 101734 - DNA, 25 bp, Artificial
  Probe
aacacacatgctcaataaatggttg

SEQ ID NO: 101735 - DNA, 25 bp, Artificial
  Probe
cttcatgtttgttcctttaggctca

SEQ ID NO: 101736 - DNA, 25 bp, Artificial
  Probe
ttcatgtttgttcctttaggctcaa

SEQ ID NO: 101737 - DNA, 25 bp, Artificial
  Probe
tcatgtttgttcctttaggctcaag

SEQ ID NO: 101738 - DNA, 25 bp, Artificial
  Probe
ctgaatgtttggtgggatggagtta

SEQ ID NO: 101739 - DNA, 25 bp, Artificial
  Probe
tgaatgtttggtgggatggagttac

SEQ ID NO: 101740 - DNA, 25 bp, Artificial
  Probe
aatgtttggtgggatggagttacaa

SEQ ID NO: 101741 - DNA, 25 bp, Artificial
  Probe
gcttcatgtttgttcctttaggctc

SEQ ID NO: 101742 - DNA, 25 bp, Artificial
  Probe
gaatgtttggtgggatggagttaca

SEQ ID NO: 101743 - DNA, 25 bp, Artificial
  Probe
gactgtgaggtggagatgatggttc

SEQ ID NO: 101744 - DNA, 25 bp, Artificial
  Probe
atgctcaataaatggttgaatgtcc

SEQ ID NO: 101745 - DNA, 25 bp, Artificial
  Probe
tccaacacacatgctcaataaatgg

SEQ ID NO: 101746 - DNA, 25 bp, Artificial
  Probe
atgtttggtgggatggagttacaac

SEQ ID NO: 101747 - DNA, 25 bp, Artificial
  Probe
acatgctcaataaatggttgaatgt

SEQ ID NO: 101748 - DNA, 25 bp, Artificial
  Probe
acacatgctcaataaatggttgaat

SEQ ID NO: 101749 - DNA, 25 bp, Artificial
  Probe
cacatgctcaataaatggttgaatg

SEQ ID NO: 101750 - DNA, 25 bp, Artificial
  Probe
cacacatgctcaataaatggttgaa

SEQ ID NO: 101751 - DNA, 25 bp, Artificial
  Probe
catgctcaataaatggttgaatgtc

SEQ ID NO: 101752 - DNA, 25 bp, Artificial
  Probe
ccaacacacatgctcaataaatggt

SEQ ID NO: 101753 - DNA, 25 bp, Artificial
  Probe
caataaatggttgaatgtccgggta

SEQ ID NO: 101754 - DNA, 25 bp, Artificial
  Probe
acacacatgctcaataaatggttga

SEQ ID NO: 101755 - DNA, 25 bp, Artificial
  Probe
ctgtgaggtggagatgatggttcag

SEQ ID NO: 101756 - DNA, 25 bp, Artificial
  Probe
tgctcaataaatggttgaatgtccg

SEQ ID NO: 101757 - DNA, 25 bp, Artificial
  Probe
ggcttcatgtttgttcctttaggct

SEQ ID NO: 101758 - DNA, 25 bp, Artificial
  Probe
gtttggtgggatggagttacaacac

SEQ ID NO: 101759 - DNA, 25 bp, Artificial
  Probe
cgggcttcatgtttgttcctttagg

SEQ ID NO: 101760 - DNA, 25 bp, Artificial
  Probe
gtggagatgatggttcagctcgtag

SEQ ID NO: 101761 - DNA, 25 bp, Artificial
  Probe
tttggtgggatggagttacaacaca

SEQ ID NO: 101762 - DNA, 25 bp, Artificial
  Probe
gggcttcatgtttgttcctttaggc

SEQ ID NO: 101763 - DNA, 25 bp, Artificial
  Probe
cctgaatgtttggtgggatggagtt

SEQ ID NO: 101764 - DNA, 25 bp, Artificial
  Probe
catgtttgttcctttaggctcaagg

SEQ ID NO: 101765 - DNA, 25 bp, Artificial
  Probe
ttggtgggatggagttacaacacag

SEQ ID NO: 101766 - DNA, 25 bp, Artificial
  Probe
ctcaataaatggttgaatgtccggg

SEQ ID NO: 101767 - DNA, 25 bp, Artificial
  Probe
tcaataaatggttgaatgtccgggt

SEQ ID NO: 101768 - DNA, 25 bp, Artificial
  Probe
gctcaataaatggttgaatgtccgg

SEQ ID NO: 101769 - DNA, 25 bp, Artificial
  Probe
ccgggcttcatgtttgttcctttag

SEQ ID NO: 101770 - DNA, 25 bp, Artificial
  Probe
tgtttggtgggatggagttacaaca

SEQ ID NO: 101771 - DNA, 25 bp, Artificial
  Probe
ggagttaccaacctctccgtgttta

SEQ ID NO: 101772 - DNA, 25 bp, Artificial
  Probe
aagatgaccaaatacactaccacac

SEQ ID NO: 101773 - DNA, 25 bp, Artificial
  Probe
caagatgaccaaatacactaccaca

SEQ ID NO: 101774 - DNA, 25 bp, Artificial
  Probe
ccaagatgaccaaatacactaccac

SEQ ID NO: 101775 - DNA, 25 bp, Artificial
  Probe
ctgccaagatgaccaaatacactac

SEQ ID NO: 101776 - DNA, 25 bp, Artificial
  Probe
actgccaagatgaccaaatacacta

SEQ ID NO: 101777 - DNA, 25 bp, Artificial
  Probe
ctgtttatctgacaaaggaactcaa

SEQ ID NO: 101778 - DNA, 25 bp, Artificial
  Probe
caaatacactaccacacgaaccaag

SEQ ID NO: 101779 - DNA, 25 bp, Artificial
  Probe
ctccttcctctgcctttatactcac

SEQ ID NO: 101780 - DNA, 25 bp, Artificial
  Probe
atgaccaaatacactaccacacgaa

SEQ ID NO: 101781 - DNA, 25 bp, Artificial
  Probe
gctgtttatctgacaaaggaactca

SEQ ID NO: 101782 - DNA, 25 bp, Artificial
  Probe
tgctgtttatctgacaaaggaactc

SEQ ID NO: 101783 - DNA, 25 bp, Artificial
  Probe
ctgctgtttatctgacaaaggaact

SEQ ID NO: 101784 - DNA, 25 bp, Artificial
  Probe
aatacactaccacacgaaccaagga

SEQ ID NO: 101785 - DNA, 25 bp, Artificial
  Probe
tgtttatctgacaaaggaactcaat

SEQ ID NO: 101786 - DNA, 25 bp, Artificial
  Probe
agatgaccaaatacactaccacacg

SEQ ID NO: 101787 - DNA, 25 bp, Artificial
  Probe
gatgaccaaatacactaccacacga

SEQ ID NO: 101788 - DNA, 25 bp, Artificial
  Probe
gtttatctgacaaaggaactcaatt

SEQ ID NO: 101789 - DNA, 25 bp, Artificial
  Probe
gccaagatgaccaaatacactacca

SEQ ID NO: 101790 - DNA, 25 bp, Artificial
  Probe
tgccaagatgaccaaatacactacc

SEQ ID NO: 101791 - DNA, 25 bp, Artificial
  Probe
atacactaccacacgaaccaaggag

SEQ ID NO: 101792 - DNA, 25 bp, Artificial
  Probe
aaatacactaccacacgaaccaagg

SEQ ID NO: 101793 - DNA, 25 bp, Artificial
  Probe
tgaccaaatacactaccacacgaac

SEQ ID NO: 101794 - DNA, 25 bp, Artificial
  Probe
cctccttcctctgcctttatactca

SEQ ID NO: 101795 - DNA, 25 bp, Artificial
  Probe
tacacaacctacccatcatccctac

SEQ ID NO: 101796 - DNA, 25 bp, Artificial
  Probe
gttaggagaggctgctgtttatctg

SEQ ID NO: 101797 - DNA, 25 bp, Artificial
  Probe
agttaggagaggctgctgtttatct

SEQ ID NO: 101798 - DNA, 25 bp, Artificial
  Probe
ccaaatacactaccacacgaaccaa

SEQ ID NO: 101799 - DNA, 25 bp, Artificial
  Probe
cactgccaagatgaccaaatacact

SEQ ID NO: 101800 - DNA, 25 bp, Artificial
  Probe
gctgctgtttatctgacaaaggaac

SEQ ID NO: 101801 - DNA, 25 bp, Artificial
  Probe
ttaggagaggctgctgtttatctga

SEQ ID NO: 101802 - DNA, 25 bp, Artificial
  Probe
ctcactgccaagatgaccaaataca

SEQ ID NO: 101803 - DNA, 25 bp, Artificial
  Probe
actcactgccaagatgaccaaatac

SEQ ID NO: 101804 - DNA, 25 bp, Artificial
  Probe
cactcactgccaagatgaccaaata

SEQ ID NO: 101805 - DNA, 25 bp, Artificial
  Probe
gtacacaacctacccatcatcccta

SEQ ID NO: 101806 - DNA, 25 bp, Artificial
  Probe
gaccaaatacactaccacacgaacc

SEQ ID NO: 101807 - DNA, 25 bp, Artificial
  Probe
tcactgccaagatgaccaaatacac

SEQ ID NO: 101808 - DNA, 25 bp, Artificial
  Probe
agaggctgctgtttatctgacaaag

SEQ ID NO: 101809 - DNA, 25 bp, Artificial
  Probe
gagaggctgctgtttatctgacaaa

SEQ ID NO: 101810 - DNA, 25 bp, Artificial
  Probe
cagttaggagaggctgctgtttatc

SEQ ID NO: 101811 - DNA, 25 bp, Artificial
  Probe
tccttcctctgcctttatactcacg

SEQ ID NO: 101812 - DNA, 25 bp, Artificial
  Probe
taggagaggctgctgtttatctgac

SEQ ID NO: 101813 - DNA, 25 bp, Artificial
  Probe
tctcttgagacctcagttaggagag

SEQ ID NO: 101814 - DNA, 25 bp, Artificial
  Probe
tcagttaggagaggctgctgtttat

SEQ ID NO: 101815 - DNA, 25 bp, Artificial
  Probe
tatctgacaaaggaactcaattggg

SEQ ID NO: 101816 - DNA, 25 bp, Artificial
  Probe
ggctgctgtttatctgacaaaggaa

SEQ ID NO: 101817 - DNA, 25 bp, Artificial
  Probe
tacttttgtaattattgggaggggt

SEQ ID NO: 101818 - DNA, 25 bp, Artificial
  Probe
ccttggactgtgtcttttcttcata

SEQ ID NO: 101819 - DNA, 25 bp, Artificial
  Probe
acttttgtaattattgggaggggtg

SEQ ID NO: 101820 - DNA, 25 bp, Artificial
  Probe
cttggactgtgtcttttcttcataa

SEQ ID NO: 101821 - DNA, 25 bp, Artificial
  Probe
ttggactgtgtcttttcttcataaa

SEQ ID NO: 101822 - DNA, 25 bp, Artificial
  Probe
cttttgtaattattgggaggggtgg

SEQ ID NO: 101823 - DNA, 25 bp, Artificial
  Probe
tggactgtgtcttttcttcataaat

SEQ ID NO: 101824 - DNA, 25 bp, Artificial
  Probe
ggactgtgtcttttcttcataaatt

SEQ ID NO: 101825 - DNA, 25 bp, Artificial
  Probe
ttacttttgtaattattgggagggg

SEQ ID NO: 101826 - DNA, 25 bp, Artificial
  Probe
ttttgtaattattgggaggggtggg

SEQ ID NO: 101827 - DNA, 25 bp, Artificial
  Probe
gtaattattgggaggggtgggaatg

SEQ ID NO: 101828 - DNA, 25 bp, Artificial
  Probe
gaagcagtagccctacttgtcacta

SEQ ID NO: 101829 - DNA, 25 bp, Artificial
  Probe
tgtaattattgggaggggtgggaat

SEQ ID NO: 101830 - DNA, 25 bp, Artificial
  Probe
cttacttttgtaattattgggaggg

SEQ ID NO: 101831 - DNA, 25 bp, Artificial
  Probe
atcagaagcagtagccctacttgtc

SEQ ID NO: 101832 - DNA, 25 bp, Artificial
  Probe
ttgtaattattgggaggggtgggaa

SEQ ID NO: 101833 - DNA, 25 bp, Artificial
  Probe
tttgtaattattgggaggggtggga

SEQ ID NO: 101834 - DNA, 25 bp, Artificial
  Probe
gccaataaacctcaggtccactttg

SEQ ID NO: 101835 - DNA, 25 bp, Artificial
  Probe
gccttggactgtgtcttttcttcat

SEQ ID NO: 101836 - DNA, 25 bp, Artificial
  Probe
catcagaagcagtagccctacttgt

SEQ ID NO: 101837 - DNA, 25 bp, Artificial
  Probe
aagcagtagccctacttgtcactac

SEQ ID NO: 101838 - DNA, 25 bp, Artificial
  Probe
gtttcatccaggatcgagcagagag

SEQ ID NO: 101839 - DNA, 25 bp, Artificial
  Probe
taattattgggaggggtgggaatgg

SEQ ID NO: 101840 - DNA, 25 bp, Artificial
  Probe
tgccaataaacctcaggtccacttt

SEQ ID NO: 101841 - DNA, 25 bp, Artificial
  Probe
ataaacctcaggtccactttggaaa

SEQ ID NO: 101842 - DNA, 25 bp, Artificial
  Probe
aataaacctcaggtccactttggaa

SEQ ID NO: 101843 - DNA, 25 bp, Artificial
  Probe
ctgccttggactgtgtcttttcttc

SEQ ID NO: 101844 - DNA, 25 bp, Artificial
  Probe
tcttacttttgtaattattgggagg

SEQ ID NO: 101845 - DNA, 25 bp, Artificial
  Probe
tacttgtcactactagggtccccag

SEQ ID NO: 101846 - DNA, 25 bp, Artificial
  Probe
ctacttgtcactactagggtcccca

SEQ ID NO: 101847 - DNA, 25 bp, Artificial
  Probe
cagtagccctacttgtcactactag

SEQ ID NO: 101848 - DNA, 25 bp, Artificial
  Probe
caataaacctcaggtccactttgga

SEQ ID NO: 101849 - DNA, 25 bp, Artificial
  Probe
ccatcagaagcagtagccctacttg

SEQ ID NO: 101850 - DNA, 25 bp, Artificial
  Probe
tccatcagaagcagtagccctactt

SEQ ID NO: 101851 - DNA, 25 bp, Artificial
  Probe
ccaataaacctcaggtccactttgg

SEQ ID NO: 101852 - DNA, 25 bp, Artificial
  Probe
cagaagcagtagccctacttgtcac

SEQ ID NO: 101853 - DNA, 25 bp, Artificial
  Probe
gtgccaataaacctcaggtccactt

SEQ ID NO: 101854 - DNA, 25 bp, Artificial
  Probe
gactgtgtcttttcttcataaatta

SEQ ID NO: 101855 - DNA, 25 bp, Artificial
  Probe
agtagccctacttgtcactactagg

SEQ ID NO: 101856 - DNA, 25 bp, Artificial
  Probe
agaagcagtagccctacttgtcact

SEQ ID NO: 101857 - DNA, 25 bp, Artificial
  Probe
tcagaagcagtagccctacttgtca

SEQ ID NO: 101858 - DNA, 25 bp, Artificial
  Probe
tgccttggactgtgtcttttcttca

SEQ ID NO: 101859 - DNA, 25 bp, Artificial
  Probe
gcagtagccctacttgtcactacta

SEQ ID NO: 101860 - DNA, 25 bp, Artificial
  Probe
taaacctcaggtccactttggaaaa

SEQ ID NO: 101861 - DNA, 25 bp, Artificial
  Probe
ttcttacttttgtaattattgggag

SEQ ID NO: 101862 - DNA, 25 bp, Artificial
  Probe
aacaaaggaactgaggaaactgaag

SEQ ID NO: 101863 - DNA, 25 bp, Artificial
  Probe
gaatgtttgggaatgagaggatgag

SEQ ID NO: 101864 - DNA, 25 bp, Artificial
  Probe
ctgaatgtttgggaatgagaggatg

SEQ ID NO: 101865 - DNA, 25 bp, Artificial
  Probe
caacaaaggaactgaggaaactgaa

SEQ ID NO: 101866 - DNA, 25 bp, Artificial
  Probe
aatgtttgggaatgagaggatgagt

SEQ ID NO: 101867 - DNA, 25 bp, Artificial
  Probe
tgaatgtttgggaatgagaggatga

SEQ ID NO: 101868 - DNA, 25 bp, Artificial
  Probe
acaaaggaactgaggaaactgaaga

SEQ ID NO: 101869 - DNA, 25 bp, Artificial
  Probe
agcatttggaaaggatgtactgaaa

SEQ ID NO: 101870 - DNA, 25 bp, Artificial
  Probe
gatgctgaatgtttgggaatgagag

SEQ ID NO: 101871 - DNA, 25 bp, Artificial
  Probe
attagtagaagctaggccaatgatc

SEQ ID NO: 101872 - DNA, 25 bp, Artificial
  Probe
aattagtagaagctaggccaatgat

SEQ ID NO: 101873 - DNA, 25 bp, Artificial
  Probe
gcatttggaaaggatgtactgaaat

SEQ ID NO: 101874 - DNA, 25 bp, Artificial
  Probe
atgtttgggaatgagaggatgagtg

SEQ ID NO: 101875 - DNA, 25 bp, Artificial
  Probe
gagatcgaagactaacaaagcaaag

SEQ ID NO: 101876 - DNA, 25 bp, Artificial
  Probe
gatcgaagactaacaaagcaaagac

SEQ ID NO: 101877 - DNA, 25 bp, Artificial
  Probe
agatcgaagactaacaaagcaaaga

SEQ ID NO: 101878 - DNA, 25 bp, Artificial
  Probe
ggaatgagaggatgagtgagtgagg

SEQ ID NO: 101879 - DNA, 25 bp, Artificial
  Probe
ttagtagaagctaggccaatgatcc

SEQ ID NO: 101880 - DNA, 25 bp, Artificial
  Probe
gaggatcatacggatggagtggtag

SEQ ID NO: 101881 - DNA, 25 bp, Artificial
  Probe
gtgcaacccagagtagaatttattt

SEQ ID NO: 101882 - DNA, 25 bp, Artificial
  Probe
gtttgggaatgagaggatgagtgag

SEQ ID NO: 101883 - DNA, 25 bp, Artificial
  Probe
ttggaaaggatgtactgaaattagt

SEQ ID NO: 101884 - DNA, 25 bp, Artificial
  Probe
ggagatcgaagactaacaaagcaaa

SEQ ID NO: 101885 - DNA, 25 bp, Artificial
  Probe
cagcatttggaaaggatgtactgaa

SEQ ID NO: 101886 - DNA, 25 bp, Artificial
  Probe
atcgaagactaacaaagcaaagacc

SEQ ID NO: 101887 - DNA, 25 bp, Artificial
  Probe
acattgctggagatgaggatcatac

SEQ ID NO: 101888 - DNA, 25 bp, Artificial
  Probe
cacattgctggagatgaggatcata

SEQ ID NO: 101889 - DNA, 25 bp, Artificial
  Probe
atcacattgctggagatgaggatca

SEQ ID NO: 101890 - DNA, 25 bp, Artificial
  Probe
gctgaatgtttgggaatgagaggat

SEQ ID NO: 101891 - DNA, 25 bp, Artificial
  Probe
catttggaaaggatgtactgaaatt

SEQ ID NO: 101892 - DNA, 25 bp, Artificial
  Probe
ttattgatcacattgctggagatga

SEQ ID NO: 101893 - DNA, 25 bp, Artificial
  Probe
tttgggaatgagaggatgagtgagt

SEQ ID NO: 101894 - DNA, 25 bp, Artificial
  Probe
tttggaaaggatgtactgaaattag

SEQ ID NO: 101895 - DNA, 25 bp, Artificial
  Probe
tattgatcacattgctggagatgag

SEQ ID NO: 101896 - DNA, 25 bp, Artificial
  Probe
tacagcatttggaaaggatgtactg

SEQ ID NO: 101897 - DNA, 25 bp, Artificial
  Probe
atgctgaatgtttgggaatgagagg

SEQ ID NO: 101898 - DNA, 25 bp, Artificial
  Probe
ggatgctgaatgtttgggaatgaga

SEQ ID NO: 101899 - DNA, 25 bp, Artificial
  Probe
tagtagaagctaggccaatgatcca

SEQ ID NO: 101900 - DNA, 25 bp, Artificial
  Probe
gaatgagaggatgagtgagtgaggc

SEQ ID NO: 101901 - DNA, 25 bp, Artificial
  Probe
tgtttgggaatgagaggatgagtga

SEQ ID NO: 101902 - DNA, 25 bp, Artificial
  Probe
aggatgtactgaaattagtagaagc

SEQ ID NO: 101903 - DNA, 25 bp, Artificial
  Probe
acagcatttggaaaggatgtactga

SEQ ID NO: 101904 - DNA, 25 bp, Artificial
  Probe
cttgaaaacaccacactgaaaatcc

SEQ ID NO: 101905 - DNA, 25 bp, Artificial
  Probe
gatcatacggatggagtggtagctt

SEQ ID NO: 101906 - DNA, 25 bp, Artificial
  Probe
gtactgaaattagtagaagctaggc

SEQ ID NO: 101907 - DNA, 25 bp, Artificial
  Probe
ttctggagtgctaggattataggtt

SEQ ID NO: 101908 - DNA, 25 bp, Artificial
  Probe
cttctggagtgctaggattataggt

SEQ ID NO: 101909 - DNA, 25 bp, Artificial
  Probe
gcttctggagtgctaggattatagg

SEQ ID NO: 101910 - DNA, 25 bp, Artificial
  Probe
cctcacccttccatatagattcatc

SEQ ID NO: 101911 - DNA, 25 bp, Artificial
  Probe
tcctcacccttccatatagattcat

SEQ ID NO: 101912 - DNA, 25 bp, Artificial
  Probe
atgtcctcacccttccatatagatt

SEQ ID NO: 101913 - DNA, 25 bp, Artificial
  Probe
gtcctcacccttccatatagattca

SEQ ID NO: 101914 - DNA, 25 bp, Artificial
  Probe
tgtcctcacccttccatatagattc

SEQ ID NO: 101915 - DNA, 25 bp, Artificial
  Probe
gatgtcctcacccttccatatagat

SEQ ID NO: 101916 - DNA, 25 bp, Artificial
  Probe
ctggagtgctaggattataggtttg

SEQ ID NO: 101917 - DNA, 25 bp, Artificial
  Probe
tctggagtgctaggattataggttt

SEQ ID NO: 101918 - DNA, 25 bp, Artificial
  Probe
gctaaccttagtaaccctttatacg

SEQ ID NO: 101919 - DNA, 25 bp, Artificial
  Probe
ggctaaccttagtaaccctttatac

SEQ ID NO: 101920 - DNA, 25 bp, Artificial
  Probe
cattgctgacaaacctatttctcca

SEQ ID NO: 101921 - DNA, 25 bp, Artificial
  Probe
tcattgctgacaaacctatttctcc

SEQ ID NO: 101922 - DNA, 25 bp, Artificial
  Probe
gaactcacatttatggaaacagtgt

SEQ ID NO: 101923 - DNA, 25 bp, Artificial
  Probe
agaactcacatttatggaaacagtg

SEQ ID NO: 101924 - DNA, 25 bp, Artificial
  Probe
tagaactcacatttatggaaacagt

SEQ ID NO: 101925 - DNA, 25 bp, Artificial
  Probe
attgctgacaaacctatttctccag

SEQ ID NO: 101926 - DNA, 25 bp, Artificial
  Probe
tggagtgctaggattataggtttgc

SEQ ID NO: 101927 - DNA, 25 bp, Artificial
  Probe
gtgtcagttgtatccctgttcatac

SEQ ID NO: 101928 - DNA, 25 bp, Artificial
  Probe
atatatcccaggctgtccatgaatg

SEQ ID NO: 101929 - DNA, 25 bp, Artificial
  Probe
aactcacatttatggaaacagtgtt

SEQ ID NO: 101930 - DNA, 25 bp, Artificial
  Probe
agcttctggagtgctaggattatag

SEQ ID NO: 101931 - DNA, 25 bp, Artificial
  Probe
cctttatacgttagtgaatatgggc

SEQ ID NO: 101932 - DNA, 25 bp, Artificial
  Probe
cagcttctggagtgctaggattata

SEQ ID NO: 101933 - DNA, 25 bp, Artificial
  Probe
catatatcccaggctgtccatgaat

SEQ ID NO: 101934 - DNA, 25 bp, Artificial
  Probe
cctctaagagctgaacctgtcattg

SEQ ID NO: 101935 - DNA, 25 bp, Artificial
  Probe
ttatacgttagtgaatatgggctgc

SEQ ID NO: 101936 - DNA, 25 bp, Artificial
  Probe
tcagttgtatccctgttcataccag

SEQ ID NO: 101937 - DNA, 25 bp, Artificial
  Probe
atagaactcacatttatggaaacag

SEQ ID NO: 101938 - DNA, 25 bp, Artificial
  Probe
tcctctaagagctgaacctgtcatt

SEQ ID NO: 101939 - DNA, 25 bp, Artificial
  Probe
tttatacgttagtgaatatgggctg

SEQ ID NO: 101940 - DNA, 25 bp, Artificial
  Probe
agttgtatccctgttcataccagtg

SEQ ID NO: 101941 - DNA, 25 bp, Artificial
  Probe
cagttgtatccctgttcataccagt

SEQ ID NO: 101942 - DNA, 25 bp, Artificial
  Probe
gtcagttgtatccctgttcatacca

SEQ ID NO: 101943 - DNA, 25 bp, Artificial
  Probe
tgtcagttgtatccctgttcatacc

SEQ ID NO: 101944 - DNA, 25 bp, Artificial
  Probe
cgatgtcctcacccttccatataga

SEQ ID NO: 101945 - DNA, 25 bp, Artificial
  Probe
ttgctgacaaacctatttctccagt

SEQ ID NO: 101946 - DNA, 25 bp, Artificial
  Probe
cgtgtcagttgtatccctgttcata

SEQ ID NO: 101947 - DNA, 25 bp, Artificial
  Probe
ctttatacgttagtgaatatgggct

SEQ ID NO: 101948 - DNA, 25 bp, Artificial
  Probe
catgtggtagcctaactgatgaacc

SEQ ID NO: 101949 - DNA, 25 bp, Artificial
  Probe
accctttatacgttagtgaatatgg

SEQ ID NO: 101950 - DNA, 25 bp, Artificial
  Probe
ttgttatcagaaaggaggggaatac

SEQ ID NO: 101951 - DNA, 25 bp, Artificial
  Probe
tatatcccaggctgtccatgaatga

SEQ ID NO: 101952 - DNA, 25 bp, Artificial
  Probe
cacacatacacagacacacacaatt

SEQ ID NO: 101953 - DNA, 25 bp, Artificial
  Probe
acacacatacacagacacacacaat

SEQ ID NO: 101954 - DNA, 25 bp, Artificial
  Probe
ctatggacaatttaacacaggatgc

SEQ ID NO: 101955 - DNA, 25 bp, Artificial
  Probe
tataccagtatacacacacacacac

SEQ ID NO: 101956 - DNA, 25 bp, Artificial
  Probe
gcaactatggacaatttaacacagg

SEQ ID NO: 101957 - DNA, 25 bp, Artificial
  Probe
ttataccagtatacacacacacaca

SEQ ID NO: 101958 - DNA, 25 bp, Artificial
  Probe
caactatggacaatttaacacagga

SEQ ID NO: 101959 - DNA, 25 bp, Artificial
  Probe
actatggacaatttaacacaggatg

SEQ ID NO: 101960 - DNA, 25 bp, Artificial
  Probe
aacaaatacgcatacataccataca

SEQ ID NO: 101961 - DNA, 25 bp, Artificial
  Probe
tatacacacacacacacacaaacaa

SEQ ID NO: 101962 - DNA, 25 bp, Artificial
  Probe
acaaatacgcatacataccatacat

SEQ ID NO: 101963 - DNA, 25 bp, Artificial
  Probe
ttcttagttaatctttgggcactcc

SEQ ID NO: 101964 - DNA, 25 bp, Artificial
  Probe
caaacacacacatacacaaacacac

SEQ ID NO: 101965 - DNA, 25 bp, Artificial
  Probe
cacaaacacacacatacacaaacac

SEQ ID NO: 101966 - DNA, 25 bp, Artificial
  Probe
cacacaaacacacacatacacaaac

SEQ ID NO: 101967 - DNA, 25 bp, Artificial
  Probe
attcttagttaatctttgggcactc

SEQ ID NO: 101968 - DNA, 25 bp, Artificial
  Probe
aactatggacaatttaacacaggat

SEQ ID NO: 101969 - DNA, 25 bp, Artificial
  Probe
ctctcttcaacttagtttactggct

SEQ ID NO: 101970 - DNA, 25 bp, Artificial
  Probe
tctctcttcaacttagtttactggc

SEQ ID NO: 101971 - DNA, 25 bp, Artificial
  Probe
ataccagtatacacacacacacaca

SEQ ID NO: 101972 - DNA, 25 bp, Artificial
  Probe
cttcaacttagtttactggctgtac

SEQ ID NO: 101973 - DNA, 25 bp, Artificial
  Probe
tcttcaacttagtttactggctgta

SEQ ID NO: 101974 - DNA, 25 bp, Artificial
  Probe
tctcttcaacttagtttactggctg

SEQ ID NO: 101975 - DNA, 25 bp, Artificial
  Probe
aaacacacacatacacaaacacaca

SEQ ID NO: 101976 - DNA, 25 bp, Artificial
  Probe
acaaacacacacatacacaaacaca

SEQ ID NO: 101977 - DNA, 25 bp, Artificial
  Probe
acacaaacacacacatacacaaaca

SEQ ID NO: 101978 - DNA, 25 bp, Artificial
  Probe
acacacaaacacacacatacacaaa

SEQ ID NO: 101979 - DNA, 25 bp, Artificial
  Probe
atacacacacacacacacaaacaaa

SEQ ID NO: 101980 - DNA, 25 bp, Artificial
  Probe
ctcttcaacttagtttactggctgt

SEQ ID NO: 101981 - DNA, 25 bp, Artificial
  Probe
tactggctgtactatgttaactgag

SEQ ID NO: 101982 - DNA, 25 bp, Artificial
  Probe
tcaaagacttcatttaacactgagt

SEQ ID NO: 101983 - DNA, 25 bp, Artificial
  Probe
ttcaacttagtttactggctgtact

SEQ ID NO: 101984 - DNA, 25 bp, Artificial
  Probe
aattcttagttaatctttgggcact

SEQ ID NO: 101985 - DNA, 25 bp, Artificial
  Probe
ttactggctgtactatgttaactga

SEQ ID NO: 101986 - DNA, 25 bp, Artificial
  Probe
aaacaaatacgcatacataccatac

SEQ ID NO: 101987 - DNA, 25 bp, Artificial
  Probe
aaatattaccctgcctgtcaagttt

SEQ ID NO: 101988 - DNA, 25 bp, Artificial
  Probe
cacacacatacacagacacacacaa

SEQ ID NO: 101989 - DNA, 25 bp, Artificial
  Probe
cacacacacatacacagacacacac

SEQ ID NO: 101990 - DNA, 25 bp, Artificial
  Probe
cacacacacacatacacagacacac

SEQ ID NO: 101991 - DNA, 25 bp, Artificial
  Probe
cacacacacacacatacacagacac

SEQ ID NO: 101992 - DNA, 25 bp, Artificial
  Probe
cacacacacacacacatacacagac

SEQ ID NO: 101993 - DNA, 25 bp, Artificial
  Probe
cgtgtatatgagaatgtatgtgtat

SEQ ID NO: 101994 - DNA, 25 bp, Artificial
  Probe
gaaatattaccctgcctgtcaagtt

SEQ ID NO: 101995 - DNA, 25 bp, Artificial
  Probe
gctgtactatgttaactgagtgact

SEQ ID NO: 101996 - DNA, 25 bp, Artificial
  Probe
caaatacgcatacataccatacatt

SEQ ID NO: 101997 - DNA, 25 bp, Artificial
  Probe
ttgctactgtcaactacttcaccaa

SEQ ID NO: 101998 - DNA, 25 bp, Artificial
  Probe
tgctactgtcaactacttcaccaag

SEQ ID NO: 101999 - DNA, 25 bp, Artificial
  Probe
aacagtagataatagtggcagcaca

SEQ ID NO: 102000 - DNA, 25 bp, Artificial
  Probe
atccgcaaacagtagataatagtgg

SEQ ID NO: 102001 - DNA, 25 bp, Artificial
  Probe
cttcaactccaacagtgattgcttc

SEQ ID NO: 102002 - DNA, 25 bp, Artificial
  Probe
cttcttcaactccaacagtgattgc

SEQ ID NO: 102003 - DNA, 25 bp, Artificial
  Probe
gcttcttcaactccaacagtgattg

SEQ ID NO: 102004 - DNA, 25 bp, Artificial
  Probe
caaacagtagataatagtggcagca

SEQ ID NO: 102005 - DNA, 25 bp, Artificial
  Probe
acagtagataatagtggcagcacag

SEQ ID NO: 102006 - DNA, 25 bp, Artificial
  Probe
tgccatattcaatcttgtctattgg

SEQ ID NO: 102007 - DNA, 25 bp, Artificial
  Probe
atactgagttctccaccatctccaa

SEQ ID NO: 102008 - DNA, 25 bp, Artificial
  Probe
ctctttgccatattcaatcttgtct

SEQ ID NO: 102009 - DNA, 25 bp, Artificial
  Probe
tcttcaactccaacagtgattgctt

SEQ ID NO: 102010 - DNA, 25 bp, Artificial
  Probe
ttcttcaactccaacagtgattgct

SEQ ID NO: 102011 - DNA, 25 bp, Artificial
  Probe
tgcttcttcaactccaacagtgatt

SEQ ID NO: 102012 - DNA, 25 bp, Artificial
  Probe
aatttgctactgtcaactacttcac

SEQ ID NO: 102013 - DNA, 25 bp, Artificial
  Probe
gctctttgccatattcaatcttgtc

SEQ ID NO: 102014 - DNA, 25 bp, Artificial
  Probe
agtatcagtgccagaaactctttac

SEQ ID NO: 102015 - DNA, 25 bp, Artificial
  Probe
gaatttgctactgtcaactacttca

SEQ ID NO: 102016 - DNA, 25 bp, Artificial
  Probe
gtgctctttgccatattcaatcttg

SEQ ID NO: 102017 - DNA, 25 bp, Artificial
  Probe
atttgctactgtcaactacttcacc

SEQ ID NO: 102018 - DNA, 25 bp, Artificial
  Probe
tgatccgcaaacagtagataatagt

SEQ ID NO: 102019 - DNA, 25 bp, Artificial
  Probe
tgaatttgctactgtcaactacttc

SEQ ID NO: 102020 - DNA, 25 bp, Artificial
  Probe
cagtgccagaaactctttacctaaa

SEQ ID NO: 102021 - DNA, 25 bp, Artificial
  Probe
gatccgcaaacagtagataatagtg

SEQ ID NO: 102022 - DNA, 25 bp, Artificial
  Probe
tgctctttgccatattcaatcttgt

SEQ ID NO: 102023 - DNA, 25 bp, Artificial
  Probe
tgtgctctttgccatattcaatctt

SEQ ID NO: 102024 - DNA, 25 bp, Artificial
  Probe
cgcaaacagtagataatagtggcag

SEQ ID NO: 102025 - DNA, 25 bp, Artificial
  Probe
ctactgtcaactacttcaccaagcg

SEQ ID NO: 102026 - DNA, 25 bp, Artificial
  Probe
gcaaacagtagataatagtggcagc

SEQ ID NO: 102027 - DNA, 25 bp, Artificial
  Probe
gatactgagttctccaccatctcca

SEQ ID NO: 102028 - DNA, 25 bp, Artificial
  Probe
atcagtgccagaaactctttaccta

SEQ ID NO: 102029 - DNA, 25 bp, Artificial
  Probe
tatcagtgccagaaactctttacct

SEQ ID NO: 102030 - DNA, 25 bp, Artificial
  Probe
gtatcagtgccagaaactctttacc

SEQ ID NO: 102031 - DNA, 25 bp, Artificial
  Probe
ctgtgctctttgccatattcaatct

SEQ ID NO: 102032 - DNA, 25 bp, Artificial
  Probe
tctttgccatattcaatcttgtcta

SEQ ID NO: 102033 - DNA, 25 bp, Artificial
  Probe
atgatccgcaaacagtagataatag

SEQ ID NO: 102034 - DNA, 25 bp, Artificial
  Probe
tcagtgccagaaactctttacctaa

SEQ ID NO: 102035 - DNA, 25 bp, Artificial
  Probe
catgatccgcaaacagtagataata

SEQ ID NO: 102036 - DNA, 25 bp, Artificial
  Probe
tactgagttctccaccatctccaag

SEQ ID NO: 102037 - DNA, 25 bp, Artificial
  Probe
tagataatagtggcagcacagcaac

SEQ ID NO: 102038 - DNA, 25 bp, Artificial
  Probe
gtagataatagtggcagcacagcaa

SEQ ID NO: 102039 - DNA, 25 bp, Artificial
  Probe
aaacagtagataatagtggcagcac

SEQ ID NO: 102040 - DNA, 25 bp, Artificial
  Probe
gcatgatccgcaaacagtagataat

SEQ ID NO: 102041 - DNA, 25 bp, Artificial
  Probe
gtgcttcttcaactccaacagtgat

SEQ ID NO: 102042 - DNA, 25 bp, Artificial
  Probe
cctcatattgtcctcttccttctta

SEQ ID NO: 102043 - DNA, 25 bp, Artificial
  Probe
attgtcctcttccttcttatgaacc

SEQ ID NO: 102044 - DNA, 25 bp, Artificial
  Probe
acctcatattgtcctcttccttctt

SEQ ID NO: 102045 - DNA, 25 bp, Artificial
  Probe
ttctgctagtgtctgagttatagtt

SEQ ID NO: 102046 - DNA, 25 bp, Artificial
  Probe
tgctagtgtctgagttatagttagt

SEQ ID NO: 102047 - DNA, 25 bp, Artificial
  Probe
tctgctagtgtctgagttatagtta

SEQ ID NO: 102048 - DNA, 25 bp, Artificial
  Probe
tattgtcctcttccttcttatgaac

SEQ ID NO: 102049 - DNA, 25 bp, Artificial
  Probe
agtgtctgagttatagttagttgtc

SEQ ID NO: 102050 - DNA, 25 bp, Artificial
  Probe
ctgctagtgtctgagttatagttag

SEQ ID NO: 102051 - DNA, 25 bp, Artificial
  Probe
catagattggaaggatgaacctgtt

SEQ ID NO: 102052 - DNA, 25 bp, Artificial
  Probe
ttgtcctcttccttcttatgaaccg

SEQ ID NO: 102053 - DNA, 25 bp, Artificial
  Probe
gtgtctgagttatagttagttgtca

SEQ ID NO: 102054 - DNA, 25 bp, Artificial
  Probe
ctcatattgtcctcttccttcttat

SEQ ID NO: 102055 - DNA, 25 bp, Artificial
  Probe
gacctcatattgtcctcttccttct

SEQ ID NO: 102056 - DNA, 25 bp, Artificial
  Probe
tgacctcatattgtcctcttccttc

SEQ ID NO: 102057 - DNA, 25 bp, Artificial
  Probe
gtgacctcatattgtcctcttcctt

SEQ ID NO: 102058 - DNA, 25 bp, Artificial
  Probe
gctagtgtctgagttatagttagtt

SEQ ID NO: 102059 - DNA, 25 bp, Artificial
  Probe
ttcattaatctgagagaaggagctt

SEQ ID NO: 102060 - DNA, 25 bp, Artificial
  Probe
aaagcaaagaagaaacagacagaaa

SEQ ID NO: 102061 - DNA, 25 bp, Artificial
  Probe
gaaagcaaagaagaaacagacagaa

SEQ ID NO: 102062 - DNA, 25 bp, Artificial
  Probe
aagtcagaaagcaaagaagaaacag

SEQ ID NO: 102063 - DNA, 25 bp, Artificial
  Probe
agacagactttatttatggagcaca

SEQ ID NO: 102064 - DNA, 25 bp, Artificial
  Probe
caagtcagaaagcaaagaagaaaca

SEQ ID NO: 102065 - DNA, 25 bp, Artificial
  Probe
acaagtcagaaagcaaagaagaaac

SEQ ID NO: 102066 - DNA, 25 bp, Artificial
  Probe
cacaagtcagaaagcaaagaagaaa

SEQ ID NO: 102067 - DNA, 25 bp, Artificial
  Probe
gacagactttatttatggagcacaa

SEQ ID NO: 102068 - DNA, 25 bp, Artificial
  Probe
agaaagcaaagaagaaacagacaga

SEQ ID NO: 102069 - DNA, 25 bp, Artificial
  Probe
cagaaagcaaagaagaaacagacag

SEQ ID NO: 102070 - DNA, 25 bp, Artificial
  Probe
agtcagaaagcaaagaagaaacaga

SEQ ID NO: 102071 - DNA, 25 bp, Artificial
  Probe
tcctcttccttcttatgaaccgaga

SEQ ID NO: 102072 - DNA, 25 bp, Artificial
  Probe
gtcctcttccttcttatgaaccgag

SEQ ID NO: 102073 - DNA, 25 bp, Artificial
  Probe
atattgtcctcttccttcttatgaa

SEQ ID NO: 102074 - DNA, 25 bp, Artificial
  Probe
tatttatggagcacaagtcagaaag

SEQ ID NO: 102075 - DNA, 25 bp, Artificial
  Probe
tcagaaagcaaagaagaaacagaca

SEQ ID NO: 102076 - DNA, 25 bp, Artificial
  Probe
tgtctgagttatagttagttgtcaa

SEQ ID NO: 102077 - DNA, 25 bp, Artificial
  Probe
acagactttatttatggagcacaag

SEQ ID NO: 102078 - DNA, 25 bp, Artificial
  Probe
tgtcctcttccttcttatgaaccga

SEQ ID NO: 102079 - DNA, 25 bp, Artificial
  Probe
tcattaatctgagagaaggagctta

SEQ ID NO: 102080 - DNA, 25 bp, Artificial
  Probe
catattgtcctcttccttcttatga

SEQ ID NO: 102081 - DNA, 25 bp, Artificial
  Probe
tcatattgtcctcttccttcttatg

SEQ ID NO: 102082 - DNA, 25 bp, Artificial
  Probe
tttatttatggagcacaagtcagaa

SEQ ID NO: 102083 - DNA, 25 bp, Artificial
  Probe
ctttatttatggagcacaagtcaga

SEQ ID NO: 102084 - DNA, 25 bp, Artificial
  Probe
aagacagactttatttatggagcac

SEQ ID NO: 102085 - DNA, 25 bp, Artificial
  Probe
ttatttatggagcacaagtcagaaa

SEQ ID NO: 102086 - DNA, 25 bp, Artificial
  Probe
tttctgctagtgtctgagttatagt

SEQ ID NO: 102087 - DNA, 25 bp, Artificial
  Probe
gaaggcaattagactggtgtactat

SEQ ID NO: 102088 - DNA, 25 bp, Artificial
  Probe
aggcaattagactggtgtactataa

SEQ ID NO: 102089 - DNA, 25 bp, Artificial
  Probe
aaggcaattagactggtgtactata

SEQ ID NO: 102090 - DNA, 25 bp, Artificial
  Probe
tgaaggcaattagactggtgtacta

SEQ ID NO: 102091 - DNA, 25 bp, Artificial
  Probe
ggttacactctgcttatccagttaa

SEQ ID NO: 102092 - DNA, 25 bp, Artificial
  Probe
gttacactctgcttatccagttaat

SEQ ID NO: 102093 - DNA, 25 bp, Artificial
  Probe
gacataccgtgaaggcaattagact

SEQ ID NO: 102094 - DNA, 25 bp, Artificial
  Probe
tctttctggttacactctgcttatc

SEQ ID NO: 102095 - DNA, 25 bp, Artificial
  Probe
atctttctggttacactctgcttat

SEQ ID NO: 102096 - DNA, 25 bp, Artificial
  Probe
ttacactctgcttatccagttaatt

SEQ ID NO: 102097 - DNA, 25 bp, Artificial
  Probe
tggttacactctgcttatccagtta

SEQ ID NO: 102098 - DNA, 25 bp, Artificial
  Probe
acataccgtgaaggcaattagactg

SEQ ID NO: 102099 - DNA, 25 bp, Artificial
  Probe
gtgaaggcaattagactggtgtact

SEQ ID NO: 102100 - DNA, 25 bp, Artificial
  Probe
ctttctggttacactctgcttatcc

SEQ ID NO: 102101 - DNA, 25 bp, Artificial
  Probe
cttcaaccaccctttctctatcaac

SEQ ID NO: 102102 - DNA, 25 bp, Artificial
  Probe
caacttcaaccaccctttctctatc

SEQ ID NO: 102103 - DNA, 25 bp, Artificial
  Probe
tacaacttcaaccaccctttctcta

SEQ ID NO: 102104 - DNA, 25 bp, Artificial
  Probe
tattactgtgatatgacccattggc

SEQ ID NO: 102105 - DNA, 25 bp, Artificial
  Probe
acttcaaccaccctttctctatcaa

SEQ ID NO: 102106 - DNA, 25 bp, Artificial
  Probe
aacttcaaccaccctttctctatca

SEQ ID NO: 102107 - DNA, 25 bp, Artificial
  Probe
gacatcaacaccttccaaactagat

SEQ ID NO: 102108 - DNA, 25 bp, Artificial
  Probe
catcgtatttggtctattactgtga

SEQ ID NO: 102109 - DNA, 25 bp, Artificial
  Probe
gatctttctggttacactctgctta

SEQ ID NO: 102110 - DNA, 25 bp, Artificial
  Probe
cagaacagacatcaacaccttccaa

SEQ ID NO: 102111 - DNA, 25 bp, Artificial
  Probe
caaccaccctttctctatcaacaac

SEQ ID NO: 102112 - DNA, 25 bp, Artificial
  Probe
tcaaccaccctttctctatcaacaa

SEQ ID NO: 102113 - DNA, 25 bp, Artificial
  Probe
ttcaaccaccctttctctatcaaca

SEQ ID NO: 102114 - DNA, 25 bp, Artificial
  Probe
acaacttcaaccaccctttctctat

SEQ ID NO: 102115 - DNA, 25 bp, Artificial
  Probe
ttactgtgatatgacccattggcta

SEQ ID NO: 102116 - DNA, 25 bp, Artificial
  Probe
ctattactgtgatatgacccattgg

SEQ ID NO: 102117 - DNA, 25 bp, Artificial
  Probe
cagacatcaacaccttccaaactag

SEQ ID NO: 102118 - DNA, 25 bp, Artificial
  Probe
acagacatcaacaccttccaaacta

SEQ ID NO: 102119 - DNA, 25 bp, Artificial
  Probe
agacatcaacaccttccaaactaga

SEQ ID NO: 102120 - DNA, 25 bp, Artificial
  Probe
cataccgtgaaggcaattagactgg

SEQ ID NO: 102121 - DNA, 25 bp, Artificial
  Probe
ggacataccgtgaaggcaattagac

SEQ ID NO: 102122 - DNA, 25 bp, Artificial
  Probe
ctctatcaacaacctgatgtcagaa

SEQ ID NO: 102123 - DNA, 25 bp, Artificial
  Probe
ttctctatcaacaacctgatgtcag

SEQ ID NO: 102124 - DNA, 25 bp, Artificial
  Probe
ggcaattagactggtgtactataaa

SEQ ID NO: 102125 - DNA, 25 bp, Artificial
  Probe
tctatcaacaacctgatgtcagaac

SEQ ID NO: 102126 - DNA, 25 bp, Artificial
  Probe
acatcgtatttggtctattactgtg

SEQ ID NO: 102127 - DNA, 25 bp, Artificial
  Probe
tctattactgtgatatgacccattg

SEQ ID NO: 102128 - DNA, 25 bp, Artificial
  Probe
ctacaacttcaaccaccctttctct

SEQ ID NO: 102129 - DNA, 25 bp, Artificial
  Probe
attactgtgatatgacccattggct

SEQ ID NO: 102130 - DNA, 25 bp, Artificial
  Probe
tatcaacaacctgatgtcagaacag

SEQ ID NO: 102131 - DNA, 25 bp, Artificial
  Probe
ctatcaacaacctgatgtcagaaca

SEQ ID NO: 102132 - DNA, 25 bp, Artificial
  Probe
tataagcacactgtcatatccgaat

SEQ ID NO: 102133 - DNA, 25 bp, Artificial
  Probe
ataagcacactgtcatatccgaatt

SEQ ID NO: 102134 - DNA, 25 bp, Artificial
  Probe
atataagcacactgtcatatccgaa

SEQ ID NO: 102135 - DNA, 25 bp, Artificial
  Probe
tgagttgatataagcacactgtcat

SEQ ID NO: 102136 - DNA, 25 bp, Artificial
  Probe
actctgtctggataattctgtggaa

SEQ ID NO: 102137 - DNA, 25 bp, Artificial
  Probe
atgactctgtctggataattctgtg

SEQ ID NO: 102138 - DNA, 25 bp, Artificial
  Probe
gagttgatataagcacactgtcata

SEQ ID NO: 102139 - DNA, 25 bp, Artificial
  Probe
gtctacgagagccattcctattcaa

SEQ ID NO: 102140 - DNA, 25 bp, Artificial
  Probe
gtgagttgatataagcacactgtca

SEQ ID NO: 102141 - DNA, 25 bp, Artificial
  Probe
gactctgtctggataattctgtgga

SEQ ID NO: 102142 - DNA, 25 bp, Artificial
  Probe
catgactctgtctggataattctgt

SEQ ID NO: 102143 - DNA, 25 bp, Artificial
  Probe
agttgatataagcacactgtcatat

SEQ ID NO: 102144 - DNA, 25 bp, Artificial
  Probe
tgactctgtctggataattctgtgg

SEQ ID NO: 102145 - DNA, 25 bp, Artificial
  Probe
tcaaaccacacttaataggatgcta

SEQ ID NO: 102146 - DNA, 25 bp, Artificial
  Probe
ttcaaaccacacttaataggatgct

SEQ ID NO: 102147 - DNA, 25 bp, Artificial
  Probe
attcaaaccacacttaataggatgc

SEQ ID NO: 102148 - DNA, 25 bp, Artificial
  Probe
ccattcctattcaaaccacacttaa

SEQ ID NO: 102149 - DNA, 25 bp, Artificial
  Probe
ctctgtctggataattctgtggaaa

SEQ ID NO: 102150 - DNA, 25 bp, Artificial
  Probe
ccatgactctgtctggataattctg

SEQ ID NO: 102151 - DNA, 25 bp, Artificial
  Probe
gccattcctattcaaaccacactta

SEQ ID NO: 102152 - DNA, 25 bp, Artificial
  Probe
ctacgagagccattcctattcaaac

SEQ ID NO: 102153 - DNA, 25 bp, Artificial
  Probe
taagcgacaaatggtaactagaaac

SEQ ID NO: 102154 - DNA, 25 bp, Artificial
  Probe
atcaagcattcagtctatgggtcta

SEQ ID NO: 102155 - DNA, 25 bp, Artificial
  Probe
aagcgacaaatggtaactagaaaca

SEQ ID NO: 102156 - DNA, 25 bp, Artificial
  Probe
gcgacaaatggtaactagaaacatc

SEQ ID NO: 102157 - DNA, 25 bp, Artificial
  Probe
gacaaatggtaactagaaacatcgt

SEQ ID NO: 102158 - DNA, 25 bp, Artificial
  Probe
aatggtaactagaaacatcgtaggc

SEQ ID NO: 102159 - DNA, 25 bp, Artificial
  Probe
agcgacaaatggtaactagaaacat

SEQ ID NO: 102160 - DNA, 25 bp, Artificial
  Probe
tctacgagagccattcctattcaaa

SEQ ID NO: 102161 - DNA, 25 bp, Artificial
  Probe
ataagcgacaaatggtaactagaaa

SEQ ID NO: 102162 - DNA, 25 bp, Artificial
  Probe
aataagcgacaaatggtaactagaa

SEQ ID NO: 102163 - DNA, 25 bp, Artificial
  Probe
ctcatacctgtcatgtctactttca

SEQ ID NO: 102164 - DNA, 25 bp, Artificial
  Probe
aggatgctattctttactgacattt

SEQ ID NO: 102165 - DNA, 25 bp, Artificial
  Probe
tcaagcattcagtctatgggtctac

SEQ ID NO: 102166 - DNA, 25 bp, Artificial
  Probe
cctcatacctgtcatgtctactttc

SEQ ID NO: 102167 - DNA, 25 bp, Artificial
  Probe
atgccatgactctgtctggataatt

SEQ ID NO: 102168 - DNA, 25 bp, Artificial
  Probe
aaatggtaactagaaacatcgtagg

SEQ ID NO: 102169 - DNA, 25 bp, Artificial
  Probe
cattcagtctatgggtctacgagag

SEQ ID NO: 102170 - DNA, 25 bp, Artificial
  Probe
caaaccacacttaataggatgctat

SEQ ID NO: 102171 - DNA, 25 bp, Artificial
  Probe
ggtctacgagagccattcctattca

SEQ ID NO: 102172 - DNA, 25 bp, Artificial
  Probe
acaaatggtaactagaaacatcgta

SEQ ID NO: 102173 - DNA, 25 bp, Artificial
  Probe
tgcctcatacctgtcatgtctactt

SEQ ID NO: 102174 - DNA, 25 bp, Artificial
  Probe
gccatgactctgtctggataattct

SEQ ID NO: 102175 - DNA, 25 bp, Artificial
  Probe
tacgagagccattcctattcaaacc

SEQ ID NO: 102176 - DNA, 25 bp, Artificial
  Probe
gatgccatgactctgtctggataat

SEQ ID NO: 102177 - DNA, 25 bp, Artificial
  Probe
atgattcctgactacaacctgtatc

SEQ ID NO: 102178 - DNA, 25 bp, Artificial
  Probe
gattcctgactacaacctgtatcac

SEQ ID NO: 102179 - DNA, 25 bp, Artificial
  Probe
catgattcctgactacaacctgtat

SEQ ID NO: 102180 - DNA, 25 bp, Artificial
  Probe
tgattcctgactacaacctgtatca

SEQ ID NO: 102181 - DNA, 25 bp, Artificial
  Probe
attcctgactacaacctgtatcacc

SEQ ID NO: 102182 - DNA, 25 bp, Artificial
  Probe
ccatgattcctgactacaacctgta

SEQ ID NO: 102183 - DNA, 25 bp, Artificial
  Probe
ttcctgactacaacctgtatcacca

SEQ ID NO: 102184 - DNA, 25 bp, Artificial
  Probe
tcctgactacaacctgtatcaccac

SEQ ID NO: 102185 - DNA, 25 bp, Artificial
  Probe
caaaaggagaagaagtcggagaaag

SEQ ID NO: 102186 - DNA, 25 bp, Artificial
  Probe
aaaggagaagaagtcggagaaaggg

SEQ ID NO: 102187 - DNA, 25 bp, Artificial
  Probe
aaaaggagaagaagtcggagaaagg

SEQ ID NO: 102188 - DNA, 25 bp, Artificial
  Probe
cctgactacaacctgtatcaccacc

SEQ ID NO: 102189 - DNA, 25 bp, Artificial
  Probe
gcaaaaggagaagaagtcggagaaa

SEQ ID NO: 102190 - DNA, 25 bp, Artificial
  Probe
cccatgattcctgactacaacctgt

SEQ ID NO: 102191 - DNA, 25 bp, Artificial
  Probe
acctcaagcaaaaggagaagaagtc

SEQ ID NO: 102192 - DNA, 25 bp, Artificial
  Probe
agcaaaaggagaagaagtcggagaa

SEQ ID NO: 102193 - DNA, 25 bp, Artificial
  Probe
aagcaaaaggagaagaagtcggaga

SEQ ID NO: 102194 - DNA, 25 bp, Artificial
  Probe
caagcaaaaggagaagaagtcggag

SEQ ID NO: 102195 - DNA, 25 bp, Artificial
  Probe
cacctcaagcaaaaggagaagaagt

SEQ ID NO: 102196 - DNA, 25 bp, Artificial
  Probe
tattacccctctggagaccatcaag

SEQ ID NO: 102197 - DNA, 25 bp, Artificial
  Probe
ctattacccctctggagaccatcaa

SEQ ID NO: 102198 - DNA, 25 bp, Artificial
  Probe
ctgactacaacctgtatcaccaccc

SEQ ID NO: 102199 - DNA, 25 bp, Artificial
  Probe
tcaagcaaaaggagaagaagtcgga

SEQ ID NO: 102200 - DNA, 25 bp, Artificial
  Probe
ctcaagcaaaaggagaagaagtcgg

SEQ ID NO: 102201 - DNA, 25 bp, Artificial
  Probe
ccacctcaagcaaaaggagaagaag

SEQ ID NO: 102202 - DNA, 25 bp, Artificial
  Probe
cctcaagcaaaaggagaagaagtcg

SEQ ID NO: 102203 - DNA, 25 bp, Artificial
  Probe
gatccacctcaagcaaaaggagaag

SEQ ID NO: 102204 - DNA, 25 bp, Artificial
  Probe
atccacctcaagcaaaaggagaaga

SEQ ID NO: 102205 - DNA, 25 bp, Artificial
  Probe
caagatccacctcaagcaaaaggag

SEQ ID NO: 102206 - DNA, 25 bp, Artificial
  Probe
agatccacctcaagcaaaaggagaa

SEQ ID NO: 102207 - DNA, 25 bp, Artificial
  Probe
aagatccacctcaagcaaaaggaga

SEQ ID NO: 102208 - DNA, 25 bp, Artificial
  Probe
tccacctcaagcaaaaggagaagaa

SEQ ID NO: 102209 - DNA, 25 bp, Artificial
  Probe
cctattacccctctggagaccatca

SEQ ID NO: 102210 - DNA, 25 bp, Artificial
  Probe
ccctattacccctctggagaccatc

SEQ ID NO: 102211 - DNA, 25 bp, Artificial
  Probe
ctacaacctgtatcaccaccccaac

SEQ ID NO: 102212 - DNA, 25 bp, Artificial
  Probe
ccaagatccacctcaagcaaaagga

SEQ ID NO: 102213 - DNA, 25 bp, Artificial
  Probe
attacccctctggagaccatcaagg

SEQ ID NO: 102214 - DNA, 25 bp, Artificial
  Probe
actacaacctgtatcaccaccccaa

SEQ ID NO: 102215 - DNA, 25 bp, Artificial
  Probe
cgcactatgaagattgttatgaagg

SEQ ID NO: 102216 - DNA, 25 bp, Artificial
  Probe
gtcatcttcctgctcattatcatct

SEQ ID NO: 102217 - DNA, 25 bp, Artificial
  Probe
cacgcactatgaagattgttatgaa

SEQ ID NO: 102218 - DNA, 25 bp, Artificial
  Probe
cttacggactacagagaacaactac

SEQ ID NO: 102219 - DNA, 25 bp, Artificial
  Probe
tcatcttcctgctcattatcatctt

SEQ ID NO: 102220 - DNA, 25 bp, Artificial
  Probe
acgcactatgaagattgttatgaag

SEQ ID NO: 102221 - DNA, 25 bp, Artificial
  Probe
ttacggactacagagaacaactact

SEQ ID NO: 102222 - DNA, 25 bp, Artificial
  Probe
gcactatgaagattgttatgaaggt

SEQ ID NO: 102223 - DNA, 25 bp, Artificial
  Probe
ccttacggactacagagaacaacta

SEQ ID NO: 102224 - DNA, 25 bp, Artificial
  Probe
cgtcatcttcctgctcattatcatc

SEQ ID NO: 102225 - DNA, 25 bp, Artificial
  Probe
acacgcactatgaagattgttatga

SEQ ID NO: 102226 - DNA, 25 bp, Artificial
  Probe
tacacgcactatgaagattgttatg

SEQ ID NO: 102227 - DNA, 25 bp, Artificial
  Probe
ctatgaagattgttatgaaggttgg

SEQ ID NO: 102228 - DNA, 25 bp, Artificial
  Probe
gtacacgcactatgaagattgttat

SEQ ID NO: 102229 - DNA, 25 bp, Artificial
  Probe
tacggactacagagaacaactactg

SEQ ID NO: 102230 - DNA, 25 bp, Artificial
  Probe
cgtacacgcactatgaagattgtta

SEQ ID NO: 102231 - DNA, 25 bp, Artificial
  Probe
gaacatctactacaaggtctgagcg

SEQ ID NO: 102232 - DNA, 25 bp, Artificial
  Probe
cgaacatctactacaaggtctgagc

SEQ ID NO: 102233 - DNA, 25 bp, Artificial
  Probe
gcgaacatctactacaaggtctgag

SEQ ID NO: 102234 - DNA, 25 bp, Artificial
  Probe
actatgaagattgttatgaaggttg

SEQ ID NO: 102235 - DNA, 25 bp, Artificial
  Probe
cactatgaagattgttatgaaggtt

SEQ ID NO: 102236 - DNA, 25 bp, Artificial
  Probe
catcttcctgctcattatcatcttt

SEQ ID NO: 102237 - DNA, 25 bp, Artificial
  Probe
gcgtcatcttcctgctcattatcat

SEQ ID NO: 102238 - DNA, 25 bp, Artificial
  Probe
tatgaagattgttatgaaggttggg

SEQ ID NO: 102239 - DNA, 25 bp, Artificial
  Probe
ctttaactccaaggtagcattgttc

SEQ ID NO: 102240 - DNA, 25 bp, Artificial
  Probe
cttctttaactccaaggtagcattg

SEQ ID NO: 102241 - DNA, 25 bp, Artificial
  Probe
tctttaactccaaggtagcattgtt

SEQ ID NO: 102242 - DNA, 25 bp, Artificial
  Probe
ttctttaactccaaggtagcattgt

SEQ ID NO: 102243 - DNA, 25 bp, Artificial
  Probe
atgaagattgttatgaaggttgggc

SEQ ID NO: 102244 - DNA, 25 bp, Artificial
  Probe
tttaactccaaggtagcattgttcg

SEQ ID NO: 102245 - DNA, 25 bp, Artificial
  Probe
gattgttatgaaggttgggcaagat

SEQ ID NO: 102246 - DNA, 25 bp, Artificial
  Probe
ctgcgtcatcttcctgctcattatc

SEQ ID NO: 102247 - DNA, 25 bp, Artificial
  Probe
aagattgttatgaaggttgggcaag

SEQ ID NO: 102248 - DNA, 25 bp, Artificial
  Probe
gaagattgttatgaaggttgggcaa

SEQ ID NO: 102249 - DNA, 25 bp, Artificial
  Probe
ttaactccaaggtagcattgttcgc

SEQ ID NO: 102250 - DNA, 25 bp, Artificial
  Probe
attgttatgaaggttgggcaagatc

SEQ ID NO: 102251 - DNA, 25 bp, Artificial
  Probe
aacatctactacaaggtctgagcgg

SEQ ID NO: 102252 - DNA, 25 bp, Artificial
  Probe
ggcgaacatctactacaaggtctga

SEQ ID NO: 102253 - DNA, 25 bp, Artificial
  Probe
tgaagattgttatgaaggttgggca

SEQ ID NO: 102254 - DNA, 25 bp, Artificial
  Probe
agattgttatgaaggttgggcaaga

SEQ ID NO: 102255 - DNA, 25 bp, Artificial
  Probe
gacagcttctttaactccaaggtag

SEQ ID NO: 102256 - DNA, 25 bp, Artificial
  Probe
tgcgtcatcttcctgctcattatca

SEQ ID NO: 102257 - DNA, 25 bp, Artificial
  Probe
ccgtacacgcactatgaagattgtt

SEQ ID NO: 102258 - DNA, 25 bp, Artificial
  Probe
atgagactgtgaaccagcaagagaa

SEQ ID NO: 102259 - DNA, 25 bp, Artificial
  Probe
cccttacggactacagagaacaact

SEQ ID NO: 102260 - DNA, 25 bp, Artificial
  Probe
ttctggtccttattctaacttatgg

SEQ ID NO: 102261 - DNA, 25 bp, Artificial
  Probe
ccctttctggtccttattctaactt

SEQ ID NO: 102262 - DNA, 25 bp, Artificial
  Probe
tggtccttattctaacttatggaga

SEQ ID NO: 102263 - DNA, 25 bp, Artificial
  Probe
tctggtccttattctaacttatgga

SEQ ID NO: 102264 - DNA, 25 bp, Artificial
  Probe
acctggagtatatattgtctacaca

SEQ ID NO: 102265 - DNA, 25 bp, Artificial
  Probe
ctggtccttattctaacttatggag

SEQ ID NO: 102266 - DNA, 25 bp, Artificial
  Probe
cctctaagaaccctaaccaattcat

SEQ ID NO: 102267 - DNA, 25 bp, Artificial
  Probe
aacctggagtatatattgtctacac

SEQ ID NO: 102268 - DNA, 25 bp, Artificial
  Probe
ctttcttagtgcctatgtggaattt

SEQ ID NO: 102269 - DNA, 25 bp, Artificial
  Probe
cctttcttagtgcctatgtggaatt

SEQ ID NO: 102270 - DNA, 25 bp, Artificial
  Probe
caacctggagtatatattgtctaca

SEQ ID NO: 102271 - DNA, 25 bp, Artificial
  Probe
ccctctaagaaccctaaccaattca

SEQ ID NO: 102272 - DNA, 25 bp, Artificial
  Probe
tttgtcagcctttcttagtgcctat

SEQ ID NO: 102273 - DNA, 25 bp, Artificial
  Probe
ccaacctggagtatatattgtctac

SEQ ID NO: 102274 - DNA, 25 bp, Artificial
  Probe
ataccatgtttgaatgtttccaacc

SEQ ID NO: 102275 - DNA, 25 bp, Artificial
  Probe
ctctaagaaccctaaccaattcatg

SEQ ID NO: 102276 - DNA, 25 bp, Artificial
  Probe
cctttctggtccttattctaactta

SEQ ID NO: 102277 - DNA, 25 bp, Artificial
  Probe
ggtccttattctaacttatggagat

SEQ ID NO: 102278 - DNA, 25 bp, Artificial
  Probe
cctggagtatatattgtctacacat

SEQ ID NO: 102279 - DNA, 25 bp, Artificial
  Probe
taccatgtttgaatgtttccaacct

SEQ ID NO: 102280 - DNA, 25 bp, Artificial
  Probe
caataccatgtttgaatgtttccaa

SEQ ID NO: 102281 - DNA, 25 bp, Artificial
  Probe
aataccatgtttgaatgtttccaac

SEQ ID NO: 102282 - DNA, 25 bp, Artificial
  Probe
accctttctggtccttattctaact

SEQ ID NO: 102283 - DNA, 25 bp, Artificial
  Probe
caccctttctggtccttattctaac

SEQ ID NO: 102284 - DNA, 25 bp, Artificial
  Probe
ttgtcagcctttcttagtgcctatg

SEQ ID NO: 102285 - DNA, 25 bp, Artificial
  Probe
actattatagcacattacaactgaa

SEQ ID NO: 102286 - DNA, 25 bp, Artificial
  Probe
caagtatttgtaatgtaccaatgct

SEQ ID NO: 102287 - DNA, 25 bp, Artificial
  Probe
gcctttcttagtgcctatgtggaat

SEQ ID NO: 102288 - DNA, 25 bp, Artificial
  Probe
tctaagaaccctaaccaattcatgg

SEQ ID NO: 102289 - DNA, 25 bp, Artificial
  Probe
ccaccctttctggtccttattctaa

SEQ ID NO: 102290 - DNA, 25 bp, Artificial
  Probe
accatgtttgaatgtttccaacctg

SEQ ID NO: 102291 - DNA, 25 bp, Artificial
  Probe
tagcacattacaactgaaaaggact

SEQ ID NO: 102292 - DNA, 25 bp, Artificial
  Probe
atagcacattacaactgaaaaggac

SEQ ID NO: 102293 - DNA, 25 bp, Artificial
  Probe
gcacattacaactgaaaaggactta

SEQ ID NO: 102294 - DNA, 25 bp, Artificial
  Probe
gtcagcctttcttagtgcctatgtg

SEQ ID NO: 102295 - DNA, 25 bp, Artificial
  Probe
agtatttgtaatgtaccaatgcttt

SEQ ID NO: 102296 - DNA, 25 bp, Artificial
  Probe
aagtatttgtaatgtaccaatgctt

SEQ ID NO: 102297 - DNA, 25 bp, Artificial
  Probe
agcacattacaactgaaaaggactt

SEQ ID NO: 102298 - DNA, 25 bp, Artificial
  Probe
atatttcccctctaagaaccctaac

SEQ ID NO: 102299 - DNA, 25 bp, Artificial
  Probe
tatttcccctctaagaaccctaacc

SEQ ID NO: 102300 - DNA, 25 bp, Artificial
  Probe
accaatgcttttaacaacagaattt

SEQ ID NO: 102301 - DNA, 25 bp, Artificial
  Probe
tttcttagtgcctatgtggaatttt

SEQ ID NO: 102302 - DNA, 25 bp, Artificial
  Probe
tgtcagcctttcttagtgcctatgt

SEQ ID NO: 102303 - DNA, 25 bp, Artificial
  Probe
tttctggtccttattctaacttatg

SEQ ID NO: 102304 - DNA, 25 bp, Artificial
  Probe
tactattatagcacattacaactga

SEQ ID NO: 102305 - DNA, 25 bp, Artificial
  Probe
cttaggtctaccatcctctctgaat

SEQ ID NO: 102306 - DNA, 25 bp, Artificial
  Probe
ttaggtctaccatcctctctgaatg

SEQ ID NO: 102307 - DNA, 25 bp, Artificial
  Probe
gagatgtccttgtattgttcccttt

SEQ ID NO: 102308 - DNA, 25 bp, Artificial
  Probe
atattctcaggtccgaatcctcatc

SEQ ID NO: 102309 - DNA, 25 bp, Artificial
  Probe
gatattctcaggtccgaatcctcat

SEQ ID NO: 102310 - DNA, 25 bp, Artificial
  Probe
aaagagatgtccttgtattgttccc

SEQ ID NO: 102311 - DNA, 25 bp, Artificial
  Probe
tttaggtgacgattaggaagggatt

SEQ ID NO: 102312 - DNA, 25 bp, Artificial
  Probe
caaagagatgtccttgtattgttcc

SEQ ID NO: 102313 - DNA, 25 bp, Artificial
  Probe
agagatgtccttgtattgttccctt

SEQ ID NO: 102314 - DNA, 25 bp, Artificial
  Probe
ccttaggtctaccatcctctctgaa

SEQ ID NO: 102315 - DNA, 25 bp, Artificial
  Probe
atgacaggaaatggtgggatattct

SEQ ID NO: 102316 - DNA, 25 bp, Artificial
  Probe
aagagatgtccttgtattgttccct

SEQ ID NO: 102317 - DNA, 25 bp, Artificial
  Probe
ttaggtgacgattaggaagggattg

SEQ ID NO: 102318 - DNA, 25 bp, Artificial
  Probe
acaggaaatggtgggatattctcag

SEQ ID NO: 102319 - DNA, 25 bp, Artificial
  Probe
gacaggaaatggtgggatattctca

SEQ ID NO: 102320 - DNA, 25 bp, Artificial
  Probe
tgacaggaaatggtgggatattctc

SEQ ID NO: 102321 - DNA, 25 bp, Artificial
  Probe
tattctcaggtccgaatcctcatca

SEQ ID NO: 102322 - DNA, 25 bp, Artificial
  Probe
catgacaggaaatggtgggatattc

SEQ ID NO: 102323 - DNA, 25 bp, Artificial
  Probe
attaggaagggattggcacacttag

SEQ ID NO: 102324 - DNA, 25 bp, Artificial
  Probe
gattaggaagggattggcacactta

SEQ ID NO: 102325 - DNA, 25 bp, Artificial
  Probe
ggaaatggtgggatattctcaggtc

SEQ ID NO: 102326 - DNA, 25 bp, Artificial
  Probe
caggaaatggtgggatattctcagg

SEQ ID NO: 102327 - DNA, 25 bp, Artificial
  Probe
gaacatttccaagctattaagttgc

SEQ ID NO: 102328 - DNA, 25 bp, Artificial
  Probe
aggaaatggtgggatattctcaggt

SEQ ID NO: 102329 - DNA, 25 bp, Artificial
  Probe
taggtgacgattaggaagggattgg

SEQ ID NO: 102330 - DNA, 25 bp, Artificial
  Probe
agatgtccttgtattgttccctttt

SEQ ID NO: 102331 - DNA, 25 bp, Artificial
  Probe
ttgtacatcaacattgagagagctg

SEQ ID NO: 102332 - DNA, 25 bp, Artificial
  Probe
atgtccttgtattgttcccttttag

SEQ ID NO: 102333 - DNA, 25 bp, Artificial
  Probe
gatgtccttgtattgttccctttta

SEQ ID NO: 102334 - DNA, 25 bp, Artificial
  Probe
tctaccatcctctctgaatggatat

SEQ ID NO: 102335 - DNA, 25 bp, Artificial
  Probe
ttttaggtgacgattaggaagggat

SEQ ID NO: 102336 - DNA, 25 bp, Artificial
  Probe
gtctaccatcctctctgaatggata

SEQ ID NO: 102337 - DNA, 25 bp, Artificial
  Probe
gaaatggtgggatattctcaggtcc

SEQ ID NO: 102338 - DNA, 25 bp, Artificial
  Probe
attctcaggtccgaatcctcatcac

SEQ ID NO: 102339 - DNA, 25 bp, Artificial
  Probe
ttccaagctattaagttgctgtttc

SEQ ID NO: 102340 - DNA, 25 bp, Artificial
  Probe
catttccaagctattaagttgctgt

SEQ ID NO: 102341 - DNA, 25 bp, Artificial
  Probe
acatttccaagctattaagttgctg

SEQ ID NO: 102342 - DNA, 25 bp, Artificial
  Probe
ccaagctattaagttgctgtttcaa

SEQ ID NO: 102343 - DNA, 25 bp, Artificial
  Probe
tttccaagctattaagttgctgttt

SEQ ID NO: 102344 - DNA, 25 bp, Artificial
  Probe
ctgatgtgggtaagaaaagttcctg

SEQ ID NO: 102345 - DNA, 25 bp, Artificial
  Probe
atttccaagctattaagttgctgtt

SEQ ID NO: 102346 - DNA, 25 bp, Artificial
  Probe
aacatttccaagctattaagttgct

SEQ ID NO: 102347 - DNA, 25 bp, Artificial
  Probe
tccaagctattaagttgctgtttca

SEQ ID NO: 102348 - DNA, 25 bp, Artificial
  Probe
cttttaggtgacgattaggaaggga

SEQ ID NO: 102349 - DNA, 25 bp, Artificial
  Probe
caagctattaagttgctgtttcaaa

SEQ ID NO: 102350 - DNA, 25 bp, Artificial
  Probe
ggaggatggagagtgaggttattaa

SEQ ID NO: 102351 - DNA, 25 bp, Artificial
  Probe
ttcttcagttcttgctcagacttag

SEQ ID NO: 102352 - DNA, 25 bp, Artificial
  Probe
cttcttcagttcttgctcagactta

SEQ ID NO: 102353 - DNA, 25 bp, Artificial
  Probe
cttcagttcttgctcagacttagtg

SEQ ID NO: 102354 - DNA, 25 bp, Artificial
  Probe
tcttcagttcttgctcagacttagt

SEQ ID NO: 102355 - DNA, 25 bp, Artificial
  Probe
tcttcttcagttcttgctcagactt

SEQ ID NO: 102356 - DNA, 25 bp, Artificial
  Probe
ttcttcttcagttcttgctcagact

SEQ ID NO: 102357 - DNA, 25 bp, Artificial
  Probe
atcccatatccagtttcttcttcag

SEQ ID NO: 102358 - DNA, 25 bp, Artificial
  Probe
tcatcccatatccagtttcttcttc

SEQ ID NO: 102359 - DNA, 25 bp, Artificial
  Probe
ctcatcccatatccagtttcttctt

SEQ ID NO: 102360 - DNA, 25 bp, Artificial
  Probe
ttcagttcttgctcagacttagtgg

SEQ ID NO: 102361 - DNA, 25 bp, Artificial
  Probe
catcccatatccagtttcttcttca

SEQ ID NO: 102362 - DNA, 25 bp, Artificial
  Probe
cccatatccagtttcttcttcagtt

SEQ ID NO: 102363 - DNA, 25 bp, Artificial
  Probe
ccatatccagtttcttcttcagttc

SEQ ID NO: 102364 - DNA, 25 bp, Artificial
  Probe
tcccatatccagtttcttcttcagt

SEQ ID NO: 102365 - DNA, 25 bp, Artificial
  Probe
agtttcttcttcagttcttgctcag

SEQ ID NO: 102366 - DNA, 25 bp, Artificial
  Probe
tatccagtttcttcttcagttcttg

SEQ ID NO: 102367 - DNA, 25 bp, Artificial
  Probe
cagtttcttcttcagttcttgctca

SEQ ID NO: 102368 - DNA, 25 bp, Artificial
  Probe
atccagtttcttcttcagttcttgc

SEQ ID NO: 102369 - DNA, 25 bp, Artificial
  Probe
catatccagtttcttcttcagttct

SEQ ID NO: 102370 - DNA, 25 bp, Artificial
  Probe
cctcatcccatatccagtttcttct

SEQ ID NO: 102371 - DNA, 25 bp, Artificial
  Probe
tttcttcttcagttcttgctcagac

SEQ ID NO: 102372 - DNA, 25 bp, Artificial
  Probe
gtttcttcttcagttcttgctcaga

SEQ ID NO: 102373 - DNA, 25 bp, Artificial
  Probe
ccagtttcttcttcagttcttgctc

SEQ ID NO: 102374 - DNA, 25 bp, Artificial
  Probe
atatccagtttcttcttcagttctt

SEQ ID NO: 102375 - DNA, 25 bp, Artificial
  Probe
tccagtttcttcttcagttcttgct

SEQ ID NO: 102376 - DNA, 25 bp, Artificial
  Probe
gggaggatggagagtgaggttatta

SEQ ID NO: 102377 - DNA, 25 bp, Artificial
  Probe
ctctcttgagtctccataaagcagg

SEQ ID NO: 102378 - DNA, 25 bp, Artificial
  Probe
aagctgctctcttgagtctccataa

SEQ ID NO: 102379 - DNA, 25 bp, Artificial
  Probe
gctgctctcttgagtctccataaag

SEQ ID NO: 102380 - DNA, 25 bp, Artificial
  Probe
tctcttgagtctccataaagcagga

SEQ ID NO: 102381 - DNA, 25 bp, Artificial
  Probe
tttattttgcctttggtttgcgttc

SEQ ID NO: 102382 - DNA, 25 bp, Artificial
  Probe
ctttattttgcctttggtttgcgtt

SEQ ID NO: 102383 - DNA, 25 bp, Artificial
  Probe
aactttattttgcctttggtttgcg

SEQ ID NO: 102384 - DNA, 25 bp, Artificial
  Probe
gaagctaagggatctggtttggttc

SEQ ID NO: 102385 - DNA, 25 bp, Artificial
  Probe
tgggaggatggagagtgaggttatt

SEQ ID NO: 102386 - DNA, 25 bp, Artificial
  Probe
ttgggaggatggagagtgaggttat

SEQ ID NO: 102387 - DNA, 25 bp, Artificial
  Probe
agctgctctcttgagtctccataaa

SEQ ID NO: 102388 - DNA, 25 bp, Artificial
  Probe
gctctcttgagtctccataaagcag

SEQ ID NO: 102389 - DNA, 25 bp, Artificial
  Probe
ctgctctcttgagtctccataaagc

SEQ ID NO: 102390 - DNA, 25 bp, Artificial
  Probe
actttattttgcctttggtttgcgt

SEQ ID NO: 102391 - DNA, 25 bp, Artificial
  Probe
aaactttattttgcctttggtttgc

SEQ ID NO: 102392 - DNA, 25 bp, Artificial
  Probe
ttattttgcctttggtttgcgttcc

SEQ ID NO: 102393 - DNA, 25 bp, Artificial
  Probe
gttgggaggatggagagtgaggtta

SEQ ID NO: 102394 - DNA, 25 bp, Artificial
  Probe
cttcggaagctaagggatctggttt

SEQ ID NO: 102395 - DNA, 25 bp, Artificial
  Probe
taagagaagtagaagtgatgtggtg

SEQ ID NO: 102396 - DNA, 25 bp, Artificial
  Probe
gtaagagaagtagaagtgatgtggt

SEQ ID NO: 102397 - DNA, 25 bp, Artificial
  Probe
tgtaagagaagtagaagtgatgtgg

SEQ ID NO: 102398 - DNA, 25 bp, Artificial
  Probe
ctgtgtgtaagagaagtagaagtga

SEQ ID NO: 102399 - DNA, 25 bp, Artificial
  Probe
tgtgtaagagaagtagaagtgatgt

SEQ ID NO: 102400 - DNA, 25 bp, Artificial
  Probe
tgtgtgtaagagaagtagaagtgat

SEQ ID NO: 102401 - DNA, 25 bp, Artificial
  Probe
gtgtaagagaagtagaagtgatgtg

SEQ ID NO: 102402 - DNA, 25 bp, Artificial
  Probe
gtgtgtaagagaagtagaagtgatg

SEQ ID NO: 102403 - DNA, 25 bp, Artificial
  Probe
gctgtgtgtaagagaagtagaagtg

SEQ ID NO: 102404 - DNA, 25 bp, Artificial
  Probe
aagagaagtagaagtgatgtggtgt

SEQ ID NO: 102405 - DNA, 25 bp, Artificial
  Probe
gagaagtagaagtgatgtggtgtga

SEQ ID NO: 102406 - DNA, 25 bp, Artificial
  Probe
agagaagtagaagtgatgtggtgtg

SEQ ID NO: 102407 - DNA, 25 bp, Artificial
  Probe
agaagtagaagtgatgtggtgtgac

SEQ ID NO: 102408 - DNA, 25 bp, Artificial
  Probe
gaagtagaagtgatgtggtgtgact

SEQ ID NO: 102409 - DNA, 25 bp, Artificial
  Probe
aagtagaagtgatgtggtgtgactg

SEQ ID NO: 102410 - DNA, 25 bp, Artificial
  Probe
tcatacaccaaacagtaacagaagt

SEQ ID NO: 102411 - DNA, 25 bp, Artificial
  Probe
ctgtgggtcttaactttgtgatact

SEQ ID NO: 102412 - DNA, 25 bp, Artificial
  Probe
tgtgggtcttaactttgtgatacta

SEQ ID NO: 102413 - DNA, 25 bp, Artificial
  Probe
atcatacaccaaacagtaacagaag

SEQ ID NO: 102414 - DNA, 25 bp, Artificial
  Probe
cgtatcatacaccaaacagtaacag

SEQ ID NO: 102415 - DNA, 25 bp, Artificial
  Probe
gcagatgggttaaagttaaacaagt

SEQ ID NO: 102416 - DNA, 25 bp, Artificial
  Probe
agcagatgggttaaagttaaacaag

SEQ ID NO: 102417 - DNA, 25 bp, Artificial
  Probe
accaaacagtaacagaagtgattat

SEQ ID NO: 102418 - DNA, 25 bp, Artificial
  Probe
gtgggtcttaactttgtgatactaa

SEQ ID NO: 102419 - DNA, 25 bp, Artificial
  Probe
agttaaacaagttatagcacaggaa

SEQ ID NO: 102420 - DNA, 25 bp, Artificial
  Probe
aagttaaacaagttatagcacagga

SEQ ID NO: 102421 - DNA, 25 bp, Artificial
  Probe
gtatcatacaccaaacagtaacaga

SEQ ID NO: 102422 - DNA, 25 bp, Artificial
  Probe
tagcagatgggttaaagttaaacaa

SEQ ID NO: 102423 - DNA, 25 bp, Artificial
  Probe
gctgtgggtcttaactttgtgatac

SEQ ID NO: 102424 - DNA, 25 bp, Artificial
  Probe
atagcagatgggttaaagttaaaca

SEQ ID NO: 102425 - DNA, 25 bp, Artificial
  Probe
catgtgtgaaatccaatagcagatg

SEQ ID NO: 102426 - DNA, 25 bp, Artificial
  Probe
tatcatacaccaaacagtaacagaa

SEQ ID NO: 102427 - DNA, 25 bp, Artificial
  Probe
gttatagcacaggaaattaaagacc

SEQ ID NO: 102428 - DNA, 25 bp, Artificial
  Probe
tgctgtgggtcttaactttgtgata

SEQ ID NO: 102429 - DNA, 25 bp, Artificial
  Probe
tacaccaaacagtaacagaagtgat

SEQ ID NO: 102430 - DNA, 25 bp, Artificial
  Probe
atacaccaaacagtaacagaagtga

SEQ ID NO: 102431 - DNA, 25 bp, Artificial
  Probe
catacaccaaacagtaacagaagtg

SEQ ID NO: 102432 - DNA, 25 bp, Artificial
  Probe
gttaaacaagttatagcacaggaaa

SEQ ID NO: 102433 - DNA, 25 bp, Artificial
  Probe
aaagttaaacaagttatagcacagg

SEQ ID NO: 102434 - DNA, 25 bp, Artificial
  Probe
caccaaacagtaacagaagtgatta

SEQ ID NO: 102435 - DNA, 25 bp, Artificial
  Probe
acaccaaacagtaacagaagtgatt

SEQ ID NO: 102436 - DNA, 25 bp, Artificial
  Probe
agcacaggaaattaaagacctagat

SEQ ID NO: 102437 - DNA, 25 bp, Artificial
  Probe
cagatgggttaaagttaaacaagtt

SEQ ID NO: 102438 - DNA, 25 bp, Artificial
  Probe
caatagcagatgggttaaagttaaa

SEQ ID NO: 102439 - DNA, 25 bp, Artificial
  Probe
tagcacaggaaattaaagacctaga

SEQ ID NO: 102440 - DNA, 25 bp, Artificial
  Probe
acagcagaaggtgttagagtacatg

SEQ ID NO: 102441 - DNA, 25 bp, Artificial
  Probe
cacagcagaaggtgttagagtacat

SEQ ID NO: 102442 - DNA, 25 bp, Artificial
  Probe
gaacaccttcatttcctcactacct

SEQ ID NO: 102443 - DNA, 25 bp, Artificial
  Probe
caagaaggcagtgaacaaagatagc

SEQ ID NO: 102444 - DNA, 25 bp, Artificial
  Probe
gcaagaaggcagtgaacaaagatag

SEQ ID NO: 102445 - DNA, 25 bp, Artificial
  Probe
aacaccttcatttcctcactacctg

SEQ ID NO: 102446 - DNA, 25 bp, Artificial
  Probe
cagcagaaggtgttagagtacatgg

SEQ ID NO: 102447 - DNA, 25 bp, Artificial
  Probe
agtgaacaaagatagcctggagtac

SEQ ID NO: 102448 - DNA, 25 bp, Artificial
  Probe
atttgcctatccctcacacacattt

SEQ ID NO: 102449 - DNA, 25 bp, Artificial
  Probe
cagtgaacaaagatagcctggagta

SEQ ID NO: 102450 - DNA, 25 bp, Artificial
  Probe
tactttctgacctctttgccatgaa

SEQ ID NO: 102451 - DNA, 25 bp, Artificial
  Probe
cattatggagacacagcagaaggtg

SEQ ID NO: 102452 - DNA, 25 bp, Artificial
  Probe
ctactttctgacctctttgccatga

SEQ ID NO: 102453 - DNA, 25 bp, Artificial
  Probe
gtgaacaaagatagcctggagtacc

SEQ ID NO: 102454 - DNA, 25 bp, Artificial
  Probe
catttgcctatccctcacacacatt

SEQ ID NO: 102455 - DNA, 25 bp, Artificial
  Probe
tttgcctatccctcacacacatttg

SEQ ID NO: 102456 - DNA, 25 bp, Artificial
  Probe
gaacagctactttctgacctctttg

SEQ ID NO: 102457 - DNA, 25 bp, Artificial
  Probe
ggcaagaaggcagtgaacaaagata

SEQ ID NO: 102458 - DNA, 25 bp, Artificial
  Probe
actttctgacctctttgccatgaag

SEQ ID NO: 102459 - DNA, 25 bp, Artificial
  Probe
gcattatggagacacagcagaaggt

SEQ ID NO: 102460 - DNA, 25 bp, Artificial
  Probe
agcagaaggtgttagagtacatggc

SEQ ID NO: 102461 - DNA, 25 bp, Artificial
  Probe
gttagacactctccgcaacctcttc

SEQ ID NO: 102462 - DNA, 25 bp, Artificial
  Probe
agaacagctactttctgacctcttt

SEQ ID NO: 102463 - DNA, 25 bp, Artificial
  Probe
aagaacagctactttctgacctctt

SEQ ID NO: 102464 - DNA, 25 bp, Artificial
  Probe
gaaggtgttagagtacatggcggaa

SEQ ID NO: 102465 - DNA, 25 bp, Artificial
  Probe
gctactttctgacctctttgccatg

SEQ ID NO: 102466 - DNA, 25 bp, Artificial
  Probe
gttagagtacatggcggaaaatgag

SEQ ID NO: 102467 - DNA, 25 bp, Artificial
  Probe
gaagaacagctactttctgacctct

SEQ ID NO: 102468 - DNA, 25 bp, Artificial
  Probe
tgaacaaagatagcctggagtaccg

SEQ ID NO: 102469 - DNA, 25 bp, Artificial
  Probe
acaccttcatttcctcactacctgc

SEQ ID NO: 102470 - DNA, 25 bp, Artificial
  Probe
aacagctactttctgacctctttgc

SEQ ID NO: 102471 - DNA, 25 bp, Artificial
  Probe
agctactttctgacctctttgccat

SEQ ID NO: 102472 - DNA, 25 bp, Artificial
  Probe
aaggtgttagagtacatggcggaaa

SEQ ID NO: 102473 - DNA, 25 bp, Artificial
  Probe
cagaaggtgttagagtacatggcgg

SEQ ID NO: 102474 - DNA, 25 bp, Artificial
  Probe
ggaagaacagctactttctgacctc

SEQ ID NO: 102475 - DNA, 25 bp, Artificial
  Probe
tgttagagtacatggcggaaaatga

SEQ ID NO: 102476 - DNA, 25 bp, Artificial
  Probe
gtgttagagtacatggcggaaaatg

SEQ ID NO: 102477 - DNA, 25 bp, Artificial
  Probe
agaaggtgttagagtacatggcgga

SEQ ID NO: 102478 - DNA, 25 bp, Artificial
  Probe
ctttctgacctctttgccatgaagc

SEQ ID NO: 102479 - DNA, 25 bp, Artificial
  Probe
ccatttgcctatccctcacacacat

SEQ ID NO: 102480 - DNA, 25 bp, Artificial
  Probe
gacacagcagaaggtgttagagtac

SEQ ID NO: 102481 - DNA, 25 bp, Artificial
  Probe
ttgcctatccctcacacacatttgg

SEQ ID NO: 102482 - DNA, 25 bp, Artificial
  Probe
agacacagcagaaggtgttagagta

SEQ ID NO: 102483 - DNA, 25 bp, Artificial
  Probe
ttagagtacatggcggaaaatgagc

SEQ ID NO: 102484 - DNA, 25 bp, Artificial
  Probe
caccttcatttcctcactacctgcc

SEQ ID NO: 102485 - DNA, 25 bp, Artificial
  Probe
ccagaacagatcaatgcagtctatg

SEQ ID NO: 102486 - DNA, 25 bp, Artificial
  Probe
tccagaacagatcaatgcagtctat

SEQ ID NO: 102487 - DNA, 25 bp, Artificial
  Probe
gtgctatctccagaacagatcaatg

SEQ ID NO: 102488 - DNA, 25 bp, Artificial
  Probe
tgtgctatctccagaacagatcaat

SEQ ID NO: 102489 - DNA, 25 bp, Artificial
  Probe
ttgtgctatctccagaacagatcaa

SEQ ID NO: 102490 - DNA, 25 bp, Artificial
  Probe
ctccagaacagatcaatgcagtcta

SEQ ID NO: 102491 - DNA, 25 bp, Artificial
  Probe
tcagcactagagcatggaatttaaa

SEQ ID NO: 102492 - DNA, 25 bp, Artificial
  Probe
ctcagcactagagcatggaatttaa

SEQ ID NO: 102493 - DNA, 25 bp, Artificial
  Probe
gattacattctctcccttgtccctc

SEQ ID NO: 102494 - DNA, 25 bp, Artificial
  Probe
ctatctccagaacagatcaatgcag

SEQ ID NO: 102495 - DNA, 25 bp, Artificial
  Probe
gactttgtgctatctccagaacaga

SEQ ID NO: 102496 - DNA, 25 bp, Artificial
  Probe
attctctcccttgtccctccttatg

SEQ ID NO: 102497 - DNA, 25 bp, Artificial
  Probe
cattctctcccttgtccctccttat

SEQ ID NO: 102498 - DNA, 25 bp, Artificial
  Probe
tatctccagaacagatcaatgcagt

SEQ ID NO: 102499 - DNA, 25 bp, Artificial
  Probe
tgctatctccagaacagatcaatgc

SEQ ID NO: 102500 - DNA, 25 bp, Artificial
  Probe
ctgaagtatgaaacacacggtgatg

SEQ ID NO: 102501 - DNA, 25 bp, Artificial
  Probe
actgaagtatgaaacacacggtgat

SEQ ID NO: 102502 - DNA, 25 bp, Artificial
  Probe
cctcagcactagagcatggaattta

SEQ ID NO: 102503 - DNA, 25 bp, Artificial
  Probe
cttgtccctccttatgaacctttta

SEQ ID NO: 102504 - DNA, 25 bp, Artificial
  Probe
ctttgtgctatctccagaacagatc

SEQ ID NO: 102505 - DNA, 25 bp, Artificial
  Probe
ttgtccctccttatgaaccttttaa

SEQ ID NO: 102506 - DNA, 25 bp, Artificial
  Probe
tgtccctccttatgaaccttttaac

SEQ ID NO: 102507 - DNA, 25 bp, Artificial
  Probe
actttgtgctatctccagaacagat

SEQ ID NO: 102508 - DNA, 25 bp, Artificial
  Probe
gtgcatcccactactctttatcaaa

SEQ ID NO: 102509 - DNA, 25 bp, Artificial
  Probe
ctccttatgaaccttttaaccccag

SEQ ID NO: 102510 - DNA, 25 bp, Artificial
  Probe
gtccctccttatgaaccttttaacc

SEQ ID NO: 102511 - DNA, 25 bp, Artificial
  Probe
tgaagtatgaaacacacggtgatgt

SEQ ID NO: 102512 - DNA, 25 bp, Artificial
  Probe
tctccagaacagatcaatgcagtct

SEQ ID NO: 102513 - DNA, 25 bp, Artificial
  Probe
tttgtgctatctccagaacagatca

SEQ ID NO: 102514 - DNA, 25 bp, Artificial
  Probe
catgtgcatcccactactctttatc

SEQ ID NO: 102515 - DNA, 25 bp, Artificial
  Probe
attacattctctcccttgtccctcc

SEQ ID NO: 102516 - DNA, 25 bp, Artificial
  Probe
atctccagaacagatcaatgcagtc

SEQ ID NO: 102517 - DNA, 25 bp, Artificial
  Probe
atgtgcatcccactactctttatca

SEQ ID NO: 102518 - DNA, 25 bp, Artificial
  Probe
gctatctccagaacagatcaatgca

SEQ ID NO: 102519 - DNA, 25 bp, Artificial
  Probe
tgtgcatcccactactctttatcaa

SEQ ID NO: 102520 - DNA, 25 bp, Artificial
  Probe
ctctcccttgtccctccttatgaac

SEQ ID NO: 102521 - DNA, 25 bp, Artificial
  Probe
cttatgaaccttttaaccccagcag

SEQ ID NO: 102522 - DNA, 25 bp, Artificial
  Probe
ttaaatgtaaggcttccagcatgtg

SEQ ID NO: 102523 - DNA, 25 bp, Artificial
  Probe
tatgaaccttttaaccccagcagat

SEQ ID NO: 102524 - DNA, 25 bp, Artificial
  Probe
tccctccttatgaaccttttaaccc

SEQ ID NO: 102525 - DNA, 25 bp, Artificial
  Probe
tgcatcccactactctttatcaaag

SEQ ID NO: 102526 - DNA, 25 bp, Artificial
  Probe
cccttgtccctccttatgaaccttt

SEQ ID NO: 102527 - DNA, 25 bp, Artificial
  Probe
tctctcccttgtccctccttatgaa

SEQ ID NO: 102528 - DNA, 25 bp, Artificial
  Probe
ttctctcccttgtccctccttatga

SEQ ID NO: 102529 - DNA, 25 bp, Artificial
  Probe
tttaaatgtaaggcttccagcatgt

SEQ ID NO: 102530 - DNA, 25 bp, Artificial
  Probe
gcaaccacctatgaagaatatgaga

SEQ ID NO: 102531 - DNA, 25 bp, Artificial
  Probe
caaccacctatgaagaatatgagaa

SEQ ID NO: 102532 - DNA, 25 bp, Artificial
  Probe
tctgaggattggttagatattgtca

SEQ ID NO: 102533 - DNA, 25 bp, Artificial
  Probe
ggttagactactggattgtcaagaa

SEQ ID NO: 102534 - DNA, 25 bp, Artificial
  Probe
tagactactggattgtcaagaacag

SEQ ID NO: 102535 - DNA, 25 bp, Artificial
  Probe
ttagactactggattgtcaagaaca

SEQ ID NO: 102536 - DNA, 25 bp, Artificial
  Probe
ttctgaggattggttagatattgtc

SEQ ID NO: 102537 - DNA, 25 bp, Artificial
  Probe
gttagactactggattgtcaagaac

SEQ ID NO: 102538 - DNA, 25 bp, Artificial
  Probe
ctgaggattggttagatattgtcaa

SEQ ID NO: 102539 - DNA, 25 bp, Artificial
  Probe
tacgagatttgataaggagaagtgg

SEQ ID NO: 102540 - DNA, 25 bp, Artificial
  Probe
gagcatacgagatttgataaggaga

SEQ ID NO: 102541 - DNA, 25 bp, Artificial
  Probe
tgagcatacgagatttgataaggag

SEQ ID NO: 102542 - DNA, 25 bp, Artificial
  Probe
ctgagcatacgagatttgataagga

SEQ ID NO: 102543 - DNA, 25 bp, Artificial
  Probe
agaaactgagcatacgagatttgat

SEQ ID NO: 102544 - DNA, 25 bp, Artificial
  Probe
tgcaaccacctatgaagaatatgag

SEQ ID NO: 102545 - DNA, 25 bp, Artificial
  Probe
ctgcaaccacctatgaagaatatga

SEQ ID NO: 102546 - DNA, 25 bp, Artificial
  Probe
gactgcaaccacctatgaagaatat

SEQ ID NO: 102547 - DNA, 25 bp, Artificial
  Probe
agcatacgagatttgataaggagaa

SEQ ID NO: 102548 - DNA, 25 bp, Artificial
  Probe
actgagcatacgagatttgataagg

SEQ ID NO: 102549 - DNA, 25 bp, Artificial
  Probe
gcatacgagatttgataaggagaag

SEQ ID NO: 102550 - DNA, 25 bp, Artificial
  Probe
actgcaaccacctatgaagaatatg

SEQ ID NO: 102551 - DNA, 25 bp, Artificial
  Probe
tactactatgtgggtggtttctatg

SEQ ID NO: 102552 - DNA, 25 bp, Artificial
  Probe
actctgagaaggtttatgtgaatgt

SEQ ID NO: 102553 - DNA, 25 bp, Artificial
  Probe
ctctgagaaggtttatgtgaatgtg

SEQ ID NO: 102554 - DNA, 25 bp, Artificial
  Probe
tctgagaaggtttatgtgaatgtgg

SEQ ID NO: 102555 - DNA, 25 bp, Artificial
  Probe
gagaaactgagcatacgagatttga

SEQ ID NO: 102556 - DNA, 25 bp, Artificial
  Probe
agccataccgattcctaaattgtag

SEQ ID NO: 102557 - DNA, 25 bp, Artificial
  Probe
atgagaaactgagcatacgagattt

SEQ ID NO: 102558 - DNA, 25 bp, Artificial
  Probe
aactgagcatacgagatttgataag

SEQ ID NO: 102559 - DNA, 25 bp, Artificial
  Probe
gaaactgagcatacgagatttgata

SEQ ID NO: 102560 - DNA, 25 bp, Artificial
  Probe
cagccataccgattcctaaattgta

SEQ ID NO: 102561 - DNA, 25 bp, Artificial
  Probe
tgagaaactgagcatacgagatttg

SEQ ID NO: 102562 - DNA, 25 bp, Artificial
  Probe
cgtatattaaccaacaattctcaga

SEQ ID NO: 102563 - DNA, 25 bp, Artificial
  Probe
tcgtatattaaccaacaattctcag

SEQ ID NO: 102564 - DNA, 25 bp, Artificial
  Probe
aaactgagcatacgagatttgataa

SEQ ID NO: 102565 - DNA, 25 bp, Artificial
  Probe
atattaaccaacaattctcagaccc

SEQ ID NO: 102566 - DNA, 25 bp, Artificial
  Probe
ctactatgtgggtggtttctatggt

SEQ ID NO: 102567 - DNA, 25 bp, Artificial
  Probe
actactatgtgggtggtttctatgg

SEQ ID NO: 102568 - DNA, 25 bp, Artificial
  Probe
gcaaatcactctgagaaggtttatg

SEQ ID NO: 102569 - DNA, 25 bp, Artificial
  Probe
agactactggattgtcaagaacagc

SEQ ID NO: 102570 - DNA, 25 bp, Artificial
  Probe
tactatgtgggtggtttctatggtg

SEQ ID NO: 102571 - DNA, 25 bp, Artificial
  Probe
gtactactatgtgggtggtttctat

SEQ ID NO: 102572 - DNA, 25 bp, Artificial
  Probe
accacctatgaagaatatgagaaac

SEQ ID NO: 102573 - DNA, 25 bp, Artificial
  Probe
atacgagatttgataaggagaagtg

SEQ ID NO: 102574 - DNA, 25 bp, Artificial
  Probe
catacgagatttgataaggagaagt

SEQ ID NO: 102575 - DNA, 25 bp, Artificial
  Probe
aagtgagaagaattacgacgagttc

SEQ ID NO: 102576 - DNA, 25 bp, Artificial
  Probe
taacttcaagatcatcacagaggtc

SEQ ID NO: 102577 - DNA, 25 bp, Artificial
  Probe
gtaacttcaagatcatcacagaggt

SEQ ID NO: 102578 - DNA, 25 bp, Artificial
  Probe
gtgagaagaattacgacgagttcat

SEQ ID NO: 102579 - DNA, 25 bp, Artificial
  Probe
cgtaacttcaagatcatcacagagg

SEQ ID NO: 102580 - DNA, 25 bp, Artificial
  Probe
agtgagaagaattacgacgagttca

SEQ ID NO: 102581 - DNA, 25 bp, Artificial
  Probe
tgagaagaattacgacgagttcatg

SEQ ID NO: 102582 - DNA, 25 bp, Artificial
  Probe
aacttcaagatcatcacagaggtcc

SEQ ID NO: 102583 - DNA, 25 bp, Artificial
  Probe
acgtaacttcaagatcatcacagag

SEQ ID NO: 102584 - DNA, 25 bp, Artificial
  Probe
gacgtaacttcaagatcatcacaga

SEQ ID NO: 102585 - DNA, 25 bp, Artificial
  Probe
tttgaaagtgagaagaattacgacg

SEQ ID NO: 102586 - DNA, 25 bp, Artificial
  Probe
aaagtgagaagaattacgacgagtt

SEQ ID NO: 102587 - DNA, 25 bp, Artificial
  Probe
ttgaaagtgagaagaattacgacga

SEQ ID NO: 102588 - DNA, 25 bp, Artificial
  Probe
cttcaagatcatcacagaggtccag

SEQ ID NO: 102589 - DNA, 25 bp, Artificial
  Probe
gaaagtgagaagaattacgacgagt

SEQ ID NO: 102590 - DNA, 25 bp, Artificial
  Probe
tgaaagtgagaagaattacgacgag

SEQ ID NO: 102591 - DNA, 25 bp, Artificial
  Probe
ggacgtaacttcaagatcatcacag

SEQ ID NO: 102592 - DNA, 25 bp, Artificial
  Probe
acttcaagatcatcacagaggtcca

SEQ ID NO: 102593 - DNA, 25 bp, Artificial
  Probe
atttgaaagtgagaagaattacgac

SEQ ID NO: 102594 - DNA, 25 bp, Artificial
  Probe
aacaagttcaccattggcaaagaat

SEQ ID NO: 102595 - DNA, 25 bp, Artificial
  Probe
aatacgaatttgaaagtgagaagaa

SEQ ID NO: 102596 - DNA, 25 bp, Artificial
  Probe
gagaagaattacgacgagttcatga

SEQ ID NO: 102597 - DNA, 25 bp, Artificial
  Probe
atacgaatttgaaagtgagaagaat

SEQ ID NO: 102598 - DNA, 25 bp, Artificial
  Probe
caaagaatgtgaaatgcagaccatg

SEQ ID NO: 102599 - DNA, 25 bp, Artificial
  Probe
caacaagttcaccattggcaaagaa

SEQ ID NO: 102600 - DNA, 25 bp, Artificial
  Probe
aatttgaaagtgagaagaattacga

SEQ ID NO: 102601 - DNA, 25 bp, Artificial
  Probe
acgaatttgaaagtgagaagaatta

SEQ ID NO: 102602 - DNA, 25 bp, Artificial
  Probe
tacgaatttgaaagtgagaagaatt

SEQ ID NO: 102603 - DNA, 25 bp, Artificial
  Probe
aaatacgaatttgaaagtgagaaga

SEQ ID NO: 102604 - DNA, 25 bp, Artificial
  Probe
gaatttgaaagtgagaagaattacg

SEQ ID NO: 102605 - DNA, 25 bp, Artificial
  Probe
cgaatttgaaagtgagaagaattac

SEQ ID NO: 102606 - DNA, 25 bp, Artificial
  Probe
caccattggcaaagaatgtgaaatg

SEQ ID NO: 102607 - DNA, 25 bp, Artificial
  Probe
ttcaagatcatcacagaggtccagc

SEQ ID NO: 102608 - DNA, 25 bp, Artificial
  Probe
gggacgtaacttcaagatcatcaca

SEQ ID NO: 102609 - DNA, 25 bp, Artificial
  Probe
atcatgagcaacaagttcaccattg

SEQ ID NO: 102610 - DNA, 25 bp, Artificial
  Probe
catcatgagcaacaagttcaccatt

SEQ ID NO: 102611 - DNA, 25 bp, Artificial
  Probe
aagttcaccattggcaaagaatgtg

SEQ ID NO: 102612 - DNA, 25 bp, Artificial
  Probe
caagttcaccattggcaaagaatgt

SEQ ID NO: 102613 - DNA, 25 bp, Artificial
  Probe
acaagttcaccattggcaaagaatg

SEQ ID NO: 102614 - DNA, 25 bp, Artificial
  Probe
caactatcaccagacttcggaggtc

SEQ ID NO: 102615 - DNA, 25 bp, Artificial
  Probe
caagatcatcacagaggtccagcag

SEQ ID NO: 102616 - DNA, 25 bp, Artificial
  Probe
caacatcatgagcaacaagttcacc

SEQ ID NO: 102617 - DNA, 25 bp, Artificial
  Probe
acatcatgagcaacaagttcaccat

SEQ ID NO: 102618 - DNA, 25 bp, Artificial
  Probe
aacatcatgagcaacaagttcacca

SEQ ID NO: 102619 - DNA, 25 bp, Artificial
  Probe
cattggcaaagaatgtgaaatgcag

SEQ ID NO: 102620 - DNA, 25 bp, Artificial
  Probe
ttactgaaggatgaatatgaagcca

SEQ ID NO: 102621 - DNA, 25 bp, Artificial
  Probe
gttactgaaggatgaatatgaagcc

SEQ ID NO: 102622 - DNA, 25 bp, Artificial
  Probe
tctgtattgtggctatcttggtcta

SEQ ID NO: 102623 - DNA, 25 bp, Artificial
  Probe
ctgtattgtggctatcttggtctac

SEQ ID NO: 102624 - DNA, 25 bp, Artificial
  Probe
tactgaaggatgaatatgaagccat

SEQ ID NO: 102625 - DNA, 25 bp, Artificial
  Probe
tgttactgaaggatgaatatgaagc

SEQ ID NO: 102626 - DNA, 25 bp, Artificial
  Probe
ttgtctgtattgtggctatcttggt

SEQ ID NO: 102627 - DNA, 25 bp, Artificial
  Probe
gtctgtattgtggctatcttggtct

SEQ ID NO: 102628 - DNA, 25 bp, Artificial
  Probe
tgtattgtggctatcttggtctacg

SEQ ID NO: 102629 - DNA, 25 bp, Artificial
  Probe
tgaaggatgaatatgaagccatgag

SEQ ID NO: 102630 - DNA, 25 bp, Artificial
  Probe
ctgaaggatgaatatgaagccatga

SEQ ID NO: 102631 - DNA, 25 bp, Artificial
  Probe
ctctgttactgaaggatgaatatga

SEQ ID NO: 102632 - DNA, 25 bp, Artificial
  Probe
tctctgttactgaaggatgaatatg

SEQ ID NO: 102633 - DNA, 25 bp, Artificial
  Probe
actgaaggatgaatatgaagccatg

SEQ ID NO: 102634 - DNA, 25 bp, Artificial
  Probe
tgtctgtattgtggctatcttggtc

SEQ ID NO: 102635 - DNA, 25 bp, Artificial
  Probe
tctgttactgaaggatgaatatgaa

SEQ ID NO: 102636 - DNA, 25 bp, Artificial
  Probe
gaaggatgaatatgaagccatgagc

SEQ ID NO: 102637 - DNA, 25 bp, Artificial
  Probe
ctgttactgaaggatgaatatgaag

SEQ ID NO: 102638 - DNA, 25 bp, Artificial
  Probe
ctttgtctgtattgtggctatcttg

SEQ ID NO: 102639 - DNA, 25 bp, Artificial
  Probe
ttctctgttactgaaggatgaatat

SEQ ID NO: 102640 - DNA, 25 bp, Artificial
  Probe
tttgtctgtattgtggctatcttgg

SEQ ID NO: 102641 - DNA, 25 bp, Artificial
  Probe
cgatttctctgttactgaaggatga

SEQ ID NO: 102642 - DNA, 25 bp, Artificial
  Probe
gacgatttctctgttactgaaggat

SEQ ID NO: 102643 - DNA, 25 bp, Artificial
  Probe
acgatttctctgttactgaaggatg

SEQ ID NO: 102644 - DNA, 25 bp, Artificial
  Probe
atgacgatttctctgttactgaagg

SEQ ID NO: 102645 - DNA, 25 bp, Artificial
  Probe
gctttgtctgtattgtggctatctt

SEQ ID NO: 102646 - DNA, 25 bp, Artificial
  Probe
gatttctctgttactgaaggatgaa

SEQ ID NO: 102647 - DNA, 25 bp, Artificial
  Probe
tgacgatttctctgttactgaagga

SEQ ID NO: 102648 - DNA, 25 bp, Artificial
  Probe
tattgtggctatcttggtctacgtg

SEQ ID NO: 102649 - DNA, 25 bp, Artificial
  Probe
catgacgatttctctgttactgaag

SEQ ID NO: 102650 - DNA, 25 bp, Artificial
  Probe
gtattgtggctatcttggtctacgt

SEQ ID NO: 102651 - DNA, 25 bp, Artificial
  Probe
atttctctgttactgaaggatgaat

SEQ ID NO: 102652 - DNA, 25 bp, Artificial
  Probe
ctggtttattgtggctgaactcttc

SEQ ID NO: 102653 - DNA, 25 bp, Artificial
  Probe
tttctctgttactgaaggatgaata

SEQ ID NO: 102654 - DNA, 25 bp, Artificial
  Probe
aaggatgaatatgaagccatgagct

SEQ ID NO: 102655 - DNA, 25 bp, Artificial
  Probe
ttcctcgttttcttcctaatcttca

SEQ ID NO: 102656 - DNA, 25 bp, Artificial
  Probe
ctcgttttcttcctaatcttcacct

SEQ ID NO: 102657 - DNA, 25 bp, Artificial
  Probe
tcctcgttttcttcctaatcttcac

SEQ ID NO: 102658 - DNA, 25 bp, Artificial
  Probe
ccttcctcgttttcttcctaatctt

SEQ ID NO: 102659 - DNA, 25 bp, Artificial
  Probe
cttcctcgttttcttcctaatcttc

SEQ ID NO: 102660 - DNA, 25 bp, Artificial
  Probe
aaggcaggactttcgaggatattac

SEQ ID NO: 102661 - DNA, 25 bp, Artificial
  Probe
cctggtttattgtggctgaactctt

SEQ ID NO: 102662 - DNA, 25 bp, Artificial
  Probe
cattccctggtttattgtggctgaa

SEQ ID NO: 102663 - DNA, 25 bp, Artificial
  Probe
attccctggtttattgtggctgaac

SEQ ID NO: 102664 - DNA, 25 bp, Artificial
  Probe
cctcgttttcttcctaatcttcacc

SEQ ID NO: 102665 - DNA, 25 bp, Artificial
  Probe
ctagatccttctctccacttctgag

SEQ ID NO: 102666 - DNA, 25 bp, Artificial
  Probe
tagatccttctctccacttctgagt

SEQ ID NO: 102667 - DNA, 25 bp, Artificial
  Probe
gaatgaagtccctaaagaaacagtg

SEQ ID NO: 102668 - DNA, 25 bp, Artificial
  Probe
gagcagggaaggagataggtaaata

SEQ ID NO: 102669 - DNA, 25 bp, Artificial
  Probe
aatgaagtccctaaagaaacagtgg

SEQ ID NO: 102670 - DNA, 25 bp, Artificial
  Probe
agcagggaaggagataggtaaatac

SEQ ID NO: 102671 - DNA, 25 bp, Artificial
  Probe
cttggatatgcttcacctggatgtc

SEQ ID NO: 102672 - DNA, 25 bp, Artificial
  Probe
agatccttctctccacttctgagtt

SEQ ID NO: 102673 - DNA, 25 bp, Artificial
  Probe
cttgcggataataaagtgtgtgtgt

SEQ ID NO: 102674 - DNA, 25 bp, Artificial
  Probe
taataaagtgtgtgtgtgcccagta

SEQ ID NO: 102675 - DNA, 25 bp, Artificial
  Probe
gataataaagtgtgtgtgtgcccag

SEQ ID NO: 102676 - DNA, 25 bp, Artificial
  Probe
ttgcggataataaagtgtgtgtgtg

SEQ ID NO: 102677 - DNA, 25 bp, Artificial
  Probe
cttctagatccttctctccacttct

SEQ ID NO: 102678 - DNA, 25 bp, Artificial
  Probe
ttctagatccttctctccacttctg

SEQ ID NO: 102679 - DNA, 25 bp, Artificial
  Probe
gcccactatttaaagacaaacaaga

SEQ ID NO: 102680 - DNA, 25 bp, Artificial
  Probe
agcccactatttaaagacaaacaag

SEQ ID NO: 102681 - DNA, 25 bp, Artificial
  Probe
aggaatgaagtccctaaagaaacag

SEQ ID NO: 102682 - DNA, 25 bp, Artificial
  Probe
ggaatgaagtccctaaagaaacagt

SEQ ID NO: 102683 - DNA, 25 bp, Artificial
  Probe
aagcccactatttaaagacaaacaa

SEQ ID NO: 102684 - DNA, 25 bp, Artificial
  Probe
ataataaagtgtgtgtgtgcccagt

SEQ ID NO: 102685 - DNA, 25 bp, Artificial
  Probe
tctagatccttctctccacttctga

SEQ ID NO: 102686 - DNA, 25 bp, Artificial
  Probe
gatccttctctccacttctgagttt

SEQ ID NO: 102687 - DNA, 25 bp, Artificial
  Probe
taagcccactatttaaagacaaaca

SEQ ID NO: 102688 - DNA, 25 bp, Artificial
  Probe
ataaagtgtgtgtgtgcccagtaaa

SEQ ID NO: 102689 - DNA, 25 bp, Artificial
  Probe
aataaagtgtgtgtgtgcccagtaa

SEQ ID NO: 102690 - DNA, 25 bp, Artificial
  Probe
atgaagtccctaaagaaacagtggc

SEQ ID NO: 102691 - DNA, 25 bp, Artificial
  Probe
gcttctagatccttctctccacttc

SEQ ID NO: 102692 - DNA, 25 bp, Artificial
  Probe
gcttgcggataataaagtgtgtgtg

SEQ ID NO: 102693 - DNA, 25 bp, Artificial
  Probe
ggaaggagataggtaaataccgagt

SEQ ID NO: 102694 - DNA, 25 bp, Artificial
  Probe
cccactatttaaagacaaacaagag

SEQ ID NO: 102695 - DNA, 25 bp, Artificial
  Probe
ggagcagggaaggagataggtaaat

SEQ ID NO: 102696 - DNA, 25 bp, Artificial
  Probe
agcttctagatccttctctccactt

SEQ ID NO: 102697 - DNA, 25 bp, Artificial
  Probe
ggataataaagtgtgtgtgtgccca

SEQ ID NO: 102698 - DNA, 25 bp, Artificial
  Probe
gaaggagataggtaaataccgagta

SEQ ID NO: 102699 - DNA, 25 bp, Artificial
  Probe
ggacaagacatccctgtttaatatt

SEQ ID NO: 102700 - DNA, 25 bp, Artificial
  Probe
gggaaggagataggtaaataccgag

SEQ ID NO: 102701 - DNA, 25 bp, Artificial
  Probe
ccttggatatgcttcacctggatgt

SEQ ID NO: 102702 - DNA, 25 bp, Artificial
  Probe
accttggatatgcttcacctggatg

SEQ ID NO: 102703 - DNA, 25 bp, Artificial
  Probe
caccttggatatgcttcacctggat

SEQ ID NO: 102704 - DNA, 25 bp, Artificial
  Probe
catagaggaaggctgacctgtctac

SEQ ID NO: 102705 - DNA, 25 bp, Artificial
  Probe
aaagacaaacaagagaaaatggagc

SEQ ID NO: 102706 - DNA, 25 bp, Artificial
  Probe
agggaaggagataggtaaataccga

SEQ ID NO: 102707 - DNA, 25 bp, Artificial
  Probe
cagggaaggagataggtaaataccg

SEQ ID NO: 102708 - DNA, 25 bp, Artificial
  Probe
ctaagcttctagatccttctctcca

SEQ ID NO: 102709 - DNA, 25 bp, Artificial
  Probe
taagcttctagatccttctctccac

SEQ ID NO: 102710 - DNA, 25 bp, Artificial
  Probe
gtatgactgtggaagatgtagagac

SEQ ID NO: 102711 - DNA, 25 bp, Artificial
  Probe
ggaagatgtagagaccataatcagt

SEQ ID NO: 102712 - DNA, 25 bp, Artificial
  Probe
tatgactgtggaagatgtagagacc

SEQ ID NO: 102713 - DNA, 25 bp, Artificial
  Probe
atgtagagaccataatcagtgagac

SEQ ID NO: 102714 - DNA, 25 bp, Artificial
  Probe
gtagagaccataatcagtgagacca

SEQ ID NO: 102715 - DNA, 25 bp, Artificial
  Probe
tgtagagaccataatcagtgagacc

SEQ ID NO: 102716 - DNA, 25 bp, Artificial
  Probe
gatgtagagaccataatcagtgaga

SEQ ID NO: 102717 - DNA, 25 bp, Artificial
  Probe
agatgtagagaccataatcagtgag

SEQ ID NO: 102718 - DNA, 25 bp, Artificial
  Probe
agtatgactgtggaagatgtagaga

SEQ ID NO: 102719 - DNA, 25 bp, Artificial
  Probe
aagatgtagagaccataatcagtga

SEQ ID NO: 102720 - DNA, 25 bp, Artificial
  Probe
gaagatgtagagaccataatcagtg

SEQ ID NO: 102721 - DNA, 25 bp, Artificial
  Probe
aagtcatgttagtgtgttgtctgtt

SEQ ID NO: 102722 - DNA, 25 bp, Artificial
  Probe
gaagtcatgttagtgtgttgtctgt

SEQ ID NO: 102723 - DNA, 25 bp, Artificial
  Probe
tgaagtcatgttagtgtgttgtctg

SEQ ID NO: 102724 - DNA, 25 bp, Artificial
  Probe
gtgaagtcatgttagtgtgttgtct

SEQ ID NO: 102725 - DNA, 25 bp, Artificial
  Probe
gatggtgaagtcatgttagtgtgtt

SEQ ID NO: 102726 - DNA, 25 bp, Artificial
  Probe
tagagaccataatcagtgagaccac

SEQ ID NO: 102727 - DNA, 25 bp, Artificial
  Probe
atggtgaagtcatgttagtgtgttg

SEQ ID NO: 102728 - DNA, 25 bp, Artificial
  Probe
ttgatggtgaagtcatgttagtgtg

SEQ ID NO: 102729 - DNA, 25 bp, Artificial
  Probe
gtggaagatgtagagaccataatca

SEQ ID NO: 102730 - DNA, 25 bp, Artificial
  Probe
tgtggaagatgtagagaccataatc

SEQ ID NO: 102731 - DNA, 25 bp, Artificial
  Probe
ctgtggaagatgtagagaccataat

SEQ ID NO: 102732 - DNA, 25 bp, Artificial
  Probe
tggaagatgtagagaccataatcag

SEQ ID NO: 102733 - DNA, 25 bp, Artificial
  Probe
actgtggaagatgtagagaccataa

SEQ ID NO: 102734 - DNA, 25 bp, Artificial
  Probe
ggtgaagtcatgttagtgtgttgtc

SEQ ID NO: 102735 - DNA, 25 bp, Artificial
  Probe
atgttagtgtgttgtctgtttccta

SEQ ID NO: 102736 - DNA, 25 bp, Artificial
  Probe
gactgtggaagatgtagagaccata

SEQ ID NO: 102737 - DNA, 25 bp, Artificial
  Probe
tgttagtgtgttgtctgtttcctac

SEQ ID NO: 102738 - DNA, 25 bp, Artificial
  Probe
tgatggtgaagtcatgttagtgtgt

SEQ ID NO: 102739 - DNA, 25 bp, Artificial
  Probe
tggtgaagtcatgttagtgtgttgt

SEQ ID NO: 102740 - DNA, 25 bp, Artificial
  Probe
gtttcctacaagttaatccagttgc

SEQ ID NO: 102741 - DNA, 25 bp, Artificial
  Probe
atcatttatttcacggagcactcac

SEQ ID NO: 102742 - DNA, 25 bp, Artificial
  Probe
catcatttatttcacggagcactca

SEQ ID NO: 102743 - DNA, 25 bp, Artificial
  Probe
tgtctgtttcctacaagttaatcca

SEQ ID NO: 102744 - DNA, 25 bp, Artificial
  Probe
gtcatgttagtgtgttgtctgtttc

SEQ ID NO: 102745 - DNA, 25 bp, Artificial
  Probe
agtcatgttagtgtgttgtctgttt

SEQ ID NO: 102746 - DNA, 25 bp, Artificial
  Probe
tgtttcctacaagttaatccagttg

SEQ ID NO: 102747 - DNA, 25 bp, Artificial
  Probe
gttagtgtgttgtctgtttcctaca

SEQ ID NO: 102748 - DNA, 25 bp, Artificial
  Probe
tctgtttcctacaagttaatccagt

SEQ ID NO: 102749 - DNA, 25 bp, Artificial
  Probe
gtctgtttcctacaagttaatccag

SEQ ID NO: 102750 - DNA, 25 bp, Artificial
  Probe
catgttagtgtgttgtctgtttcct

SEQ ID NO: 102751 - DNA, 25 bp, Artificial
  Probe
tcatgttagtgtgttgtctgtttcc

SEQ ID NO: 102752 - DNA, 25 bp, Artificial
  Probe
gtttgatggtgaagtcatgttagtg

SEQ ID NO: 102753 - DNA, 25 bp, Artificial
  Probe
atgtttgatggtgaagtcatgttag

SEQ ID NO: 102754 - DNA, 25 bp, Artificial
  Probe
catggatgtactttattaactgggt

SEQ ID NO: 102755 - DNA, 25 bp, Artificial
  Probe
tagacagacaaggcatcactacatc

SEQ ID NO: 102756 - DNA, 25 bp, Artificial
  Probe
ctagacagacaaggcatcactacat

SEQ ID NO: 102757 - DNA, 25 bp, Artificial
  Probe
acctccttgaccatgacattctaat

SEQ ID NO: 102758 - DNA, 25 bp, Artificial
  Probe
cctccttgaccatgacattctaatg

SEQ ID NO: 102759 - DNA, 25 bp, Artificial
  Probe
ctccttgaccatgacattctaatgc

SEQ ID NO: 102760 - DNA, 25 bp, Artificial
  Probe
ccttgaccatgacattctaatgctg

SEQ ID NO: 102761 - DNA, 25 bp, Artificial
  Probe
cttgaccatgacattctaatgctgt

SEQ ID NO: 102762 - DNA, 25 bp, Artificial
  Probe
tccttgaccatgacattctaatgct

SEQ ID NO: 102763 - DNA, 25 bp, Artificial
  Probe
cacctccttgaccatgacattctaa

SEQ ID NO: 102764 - DNA, 25 bp, Artificial
  Probe
tatgcttcctaaatacatctgtccc

SEQ ID NO: 102765 - DNA, 25 bp, Artificial
  Probe
caaggcatcactacatccaccatac

SEQ ID NO: 102766 - DNA, 25 bp, Artificial
  Probe
atgcttcctaaatacatctgtccca

SEQ ID NO: 102767 - DNA, 25 bp, Artificial
  Probe
catcactacatccaccatacgcttg

SEQ ID NO: 102768 - DNA, 25 bp, Artificial
  Probe
acaaggcatcactacatccaccata

SEQ ID NO: 102769 - DNA, 25 bp, Artificial
  Probe
atatgcttcctaaatacatctgtcc

SEQ ID NO: 102770 - DNA, 25 bp, Artificial
  Probe
ctaaatacatctgtcccaggaactg

SEQ ID NO: 102771 - DNA, 25 bp, Artificial
  Probe
cttctagacagacaaggcatcacta

SEQ ID NO: 102772 - DNA, 25 bp, Artificial
  Probe
cctaaatacatctgtcccaggaact

SEQ ID NO: 102773 - DNA, 25 bp, Artificial
  Probe
ttctagacagacaaggcatcactac

SEQ ID NO: 102774 - DNA, 25 bp, Artificial
  Probe
agacagacaaggcatcactacatcc

SEQ ID NO: 102775 - DNA, 25 bp, Artificial
  Probe
tgcttcctaaatacatctgtcccag

SEQ ID NO: 102776 - DNA, 25 bp, Artificial
  Probe
ccacctccttgaccatgacattcta

SEQ ID NO: 102777 - DNA, 25 bp, Artificial
  Probe
acattctaatgctgtctgactgagc

SEQ ID NO: 102778 - DNA, 25 bp, Artificial
  Probe
tcttctccgactagcctctatccag

SEQ ID NO: 102779 - DNA, 25 bp, Artificial
  Probe
ctcttctccgactagcctctatcca

SEQ ID NO: 102780 - DNA, 25 bp, Artificial
  Probe
gacagacaaggcatcactacatcca

SEQ ID NO: 102781 - DNA, 25 bp, Artificial
  Probe
tattagtattttgcttgcctttggg

SEQ ID NO: 102782 - DNA, 25 bp, Artificial
  Probe
aaggcatcactacatccaccatacg

SEQ ID NO: 102783 - DNA, 25 bp, Artificial
  Probe
gcttcctaaatacatctgtcccagg

SEQ ID NO: 102784 - DNA, 25 bp, Artificial
  Probe
tctagacagacaaggcatcactaca

SEQ ID NO: 102785 - DNA, 25 bp, Artificial
  Probe
aatatgcttcctaaatacatctgtc

SEQ ID NO: 102786 - DNA, 25 bp, Artificial
  Probe
gacaaggcatcactacatccaccat

SEQ ID NO: 102787 - DNA, 25 bp, Artificial
  Probe
acagacaaggcatcactacatccac

SEQ ID NO: 102788 - DNA, 25 bp, Artificial
  Probe
agtcttattagtattttgcttgcct

SEQ ID NO: 102789 - DNA, 25 bp, Artificial
  Probe
cagtcttattagtattttgcttgcc

SEQ ID NO: 102790 - DNA, 25 bp, Artificial
  Probe
ttattagtattttgcttgcctttgg

SEQ ID NO: 102791 - DNA, 25 bp, Artificial
  Probe
atgacattctaatgctgtctgactg

SEQ ID NO: 102792 - DNA, 25 bp, Artificial
  Probe
catgacattctaatgctgtctgact

SEQ ID NO: 102793 - DNA, 25 bp, Artificial
  Probe
tgatctacattcccacctccttgac

SEQ ID NO: 102794 - DNA, 25 bp, Artificial
  Probe
aaatatgcttcctaaatacatctgt

SEQ ID NO: 102795 - DNA, 25 bp, Artificial
  Probe
gtcttattagtattttgcttgcctt

SEQ ID NO: 102796 - DNA, 25 bp, Artificial
  Probe
gacattctaatgctgtctgactgag

SEQ ID NO: 102797 - DNA, 25 bp, Artificial
  Probe
ttgaccatgacattctaatgctgtc

SEQ ID NO: 102798 - DNA, 25 bp, Artificial
  Probe
cctcttctccgactagcctctatcc

SEQ ID NO: 102799 - DNA, 25 bp, Artificial
  Probe
cattctaatgctgtctgactgagcg

SEQ ID NO: 102800 - DNA, 25 bp, Artificial
  Probe
ctcctagattagacttctcactcct

SEQ ID NO: 102801 - DNA, 25 bp, Artificial
  Probe
gatgctcctagattagacttctcac

SEQ ID NO: 102802 - DNA, 25 bp, Artificial
  Probe
tcctagattagacttctcactcctg

SEQ ID NO: 102803 - DNA, 25 bp, Artificial
  Probe
atgctcctagattagacttctcact

SEQ ID NO: 102804 - DNA, 25 bp, Artificial
  Probe
cctagattagacttctcactcctgt

SEQ ID NO: 102805 - DNA, 25 bp, Artificial
  Probe
ctgagagatacaataggaaccttct

SEQ ID NO: 102806 - DNA, 25 bp, Artificial
  Probe
gatacattctcattaagccacattg

SEQ ID NO: 102807 - DNA, 25 bp, Artificial
  Probe
tgctcctagattagacttctcactc

SEQ ID NO: 102808 - DNA, 25 bp, Artificial
  Probe
atgatgctcctagattagacttctc

SEQ ID NO: 102809 - DNA, 25 bp, Artificial
  Probe
tgatgctcctagattagacttctca

SEQ ID NO: 102810 - DNA, 25 bp, Artificial
  Probe
acatgatgctcctagattagacttc

SEQ ID NO: 102811 - DNA, 25 bp, Artificial
  Probe
gacatgatgctcctagattagactt

SEQ ID NO: 102812 - DNA, 25 bp, Artificial
  Probe
agacatgatgctcctagattagact

SEQ ID NO: 102813 - DNA, 25 bp, Artificial
  Probe
attgtagacatgatgctcctagatt

SEQ ID NO: 102814 - DNA, 25 bp, Artificial
  Probe
tacattctcattaagccacattgaa

SEQ ID NO: 102815 - DNA, 25 bp, Artificial
  Probe
tgtagacatgatgctcctagattag

SEQ ID NO: 102816 - DNA, 25 bp, Artificial
  Probe
agatacattctcattaagccacatt

SEQ ID NO: 102817 - DNA, 25 bp, Artificial
  Probe
aagatacattctcattaagccacat

SEQ ID NO: 102818 - DNA, 25 bp, Artificial
  Probe
tagacatgatgctcctagattagac

SEQ ID NO: 102819 - DNA, 25 bp, Artificial
  Probe
gtagacatgatgctcctagattaga

SEQ ID NO: 102820 - DNA, 25 bp, Artificial
  Probe
atacattctcattaagccacattga

SEQ ID NO: 102821 - DNA, 25 bp, Artificial
  Probe
gctcctagattagacttctcactcc

SEQ ID NO: 102822 - DNA, 25 bp, Artificial
  Probe
catgatgctcctagattagacttct

SEQ ID NO: 102823 - DNA, 25 bp, Artificial
  Probe
ttgtagacatgatgctcctagatta

SEQ ID NO: 102824 - DNA, 25 bp, Artificial
  Probe
ttattgtagacatgatgctcctaga

SEQ ID NO: 102825 - DNA, 25 bp, Artificial
  Probe
cctgagagatacaataggaaccttc

SEQ ID NO: 102826 - DNA, 25 bp, Artificial
  Probe
tagattagacttctcactcctgtgt

SEQ ID NO: 102827 - DNA, 25 bp, Artificial
  Probe
tattgtagacatgatgctcctagat

SEQ ID NO: 102828 - DNA, 25 bp, Artificial
  Probe
ctagattagacttctcactcctgtg

SEQ ID NO: 102829 - DNA, 25 bp, Artificial
  Probe
attagacttctcactcctgtgtcat

SEQ ID NO: 102830 - DNA, 25 bp, Artificial
  Probe
ttagacttctcactcctgtgtcatt

SEQ ID NO: 102831 - DNA, 25 bp, Artificial
  Probe
agattagacttctcactcctgtgtc

SEQ ID NO: 102832 - DNA, 25 bp, Artificial
  Probe
gattagacttctcactcctgtgtca

SEQ ID NO: 102833 - DNA, 25 bp, Artificial
  Probe
ttctatgttcaggatgtctccatat

SEQ ID NO: 102834 - DNA, 25 bp, Artificial
  Probe
attattgtagacatgatgctcctag

SEQ ID NO: 102835 - DNA, 25 bp, Artificial
  Probe
gttcacagttggaagtatttagagc

SEQ ID NO: 102836 - DNA, 25 bp, Artificial
  Probe
tggttcacagttggaagtatttaga

SEQ ID NO: 102837 - DNA, 25 bp, Artificial
  Probe
ggttcacagttggaagtatttagag

SEQ ID NO: 102838 - DNA, 25 bp, Artificial
  Probe
ttattattgtagacatgatgctcct

SEQ ID NO: 102839 - DNA, 25 bp, Artificial
  Probe
actcaatcaagggaaatatgtgttt

SEQ ID NO: 102840 - DNA, 25 bp, Artificial
  Probe
gaatttatggttcacagttggaagt

SEQ ID NO: 102841 - DNA, 25 bp, Artificial
  Probe
atttcctgtttctagtcccttcttt

SEQ ID NO: 102842 - DNA, 25 bp, Artificial
  Probe
cctgtttctagtcccttctttcatt

SEQ ID NO: 102843 - DNA, 25 bp, Artificial
  Probe
tttcctgtttctagtcccttctttc

SEQ ID NO: 102844 - DNA, 25 bp, Artificial
  Probe
catttcctgtttctagtcccttctt

SEQ ID NO: 102845 - DNA, 25 bp, Artificial
  Probe
cttccagtgctttgtgtattgttta

SEQ ID NO: 102846 - DNA, 25 bp, Artificial
  Probe
gtttattgttgtgtgtgttgtttgt

SEQ ID NO: 102847 - DNA, 25 bp, Artificial
  Probe
tgtttattgttgtgtgtgttgtttg

SEQ ID NO: 102848 - DNA, 25 bp, Artificial
  Probe
attgttgtgtgtgttgtttgtaaag

SEQ ID NO: 102849 - DNA, 25 bp, Artificial
  Probe
ccagtgctttgtgtattgtttattg

SEQ ID NO: 102850 - DNA, 25 bp, Artificial
  Probe
tccagtgctttgtgtattgtttatt

SEQ ID NO: 102851 - DNA, 25 bp, Artificial
  Probe
ttccagtgctttgtgtattgtttat

SEQ ID NO: 102852 - DNA, 25 bp, Artificial
  Probe
ttgtttattgttgtgtgtgttgttt

SEQ ID NO: 102853 - DNA, 25 bp, Artificial
  Probe
attgtttattgttgtgtgtgttgtt

SEQ ID NO: 102854 - DNA, 25 bp, Artificial
  Probe
gtgtattgtttattgttgtgtgtgt

SEQ ID NO: 102855 - DNA, 25 bp, Artificial
  Probe
tgtgtattgtttattgttgtgtgtg

SEQ ID NO: 102856 - DNA, 25 bp, Artificial
  Probe
cagtgctttgtgtattgtttattgt

SEQ ID NO: 102857 - DNA, 25 bp, Artificial
  Probe
ttgttgtgtgtgttgtttgtaaagc

SEQ ID NO: 102858 - DNA, 25 bp, Artificial
  Probe
tgctttgtgtattgtttattgttgt

SEQ ID NO: 102859 - DNA, 25 bp, Artificial
  Probe
tattgttgtgtgtgttgtttgtaaa

SEQ ID NO: 102860 - DNA, 25 bp, Artificial
  Probe
ttattgttgtgtgtgttgtttgtaa

SEQ ID NO: 102861 - DNA, 25 bp, Artificial
  Probe
tttattgttgtgtgtgttgtttgta

SEQ ID NO: 102862 - DNA, 25 bp, Artificial
  Probe
gctttgtgtattgtttattgttgtg

SEQ ID NO: 102863 - DNA, 25 bp, Artificial
  Probe
gtgctttgtgtattgtttattgttg

SEQ ID NO: 102864 - DNA, 25 bp, Artificial
  Probe
agtgctttgtgtattgtttattgtt

SEQ ID NO: 102865 - DNA, 25 bp, Artificial
  Probe
tattgtttattgttgtgtgtgttgt

SEQ ID NO: 102866 - DNA, 25 bp, Artificial
  Probe
tgtattgtttattgttgtgtgtgtt

SEQ ID NO: 102867 - DNA, 25 bp, Artificial
  Probe
ttgtgtattgtttattgttgtgtgt

SEQ ID NO: 102868 - DNA, 25 bp, Artificial
  Probe
ttaactgactccttaaagcagagag

SEQ ID NO: 102869 - DNA, 25 bp, Artificial
  Probe
gtattgtttattgttgtgtgtgttg

SEQ ID NO: 102870 - DNA, 25 bp, Artificial
  Probe
ccttccagtgctttgtgtattgttt

SEQ ID NO: 102871 - DNA, 25 bp, Artificial
  Probe
gaaccttccagtgctttgtgtattg

SEQ ID NO: 102872 - DNA, 25 bp, Artificial
  Probe
tgttgtttgtaaagctgtcatctga

SEQ ID NO: 102873 - DNA, 25 bp, Artificial
  Probe
gtgttgtttgtaaagctgtcatctg

SEQ ID NO: 102874 - DNA, 25 bp, Artificial
  Probe
tttgtgtattgtttattgttgtgtg

SEQ ID NO: 102875 - DNA, 25 bp, Artificial
  Probe
tgtgttgtttgtaaagctgtcatct

SEQ ID NO: 102876 - DNA, 25 bp, Artificial
  Probe
gtgtgttgtttgtaaagctgtcatc

SEQ ID NO: 102877 - DNA, 25 bp, Artificial
  Probe
ttgctaacttatttggatttccttt

SEQ ID NO: 102878 - DNA, 25 bp, Artificial
  Probe
tttgctaacttatttggatttcctt

SEQ ID NO: 102879 - DNA, 25 bp, Artificial
  Probe
ctttgtgtattgtttattgttgtgt

SEQ ID NO: 102880 - DNA, 25 bp, Artificial
  Probe
accttccagtgctttgtgtattgtt

SEQ ID NO: 102881 - DNA, 25 bp, Artificial
  Probe
aaccttccagtgctttgtgtattgt

SEQ ID NO: 102882 - DNA, 25 bp, Artificial
  Probe
tgtgtgttgtttgtaaagctgtcat

SEQ ID NO: 102883 - DNA, 25 bp, Artificial
  Probe
gttgtgtgtgttgtttgtaaagctg

SEQ ID NO: 102884 - DNA, 25 bp, Artificial
  Probe
gttgtttgtaaagctgtcatctgac

SEQ ID NO: 102885 - DNA, 25 bp, Artificial
  Probe
ttgtgtgtgttgtttgtaaagctgt

SEQ ID NO: 102886 - DNA, 25 bp, Artificial
  Probe
tgttgtgtgtgttgtttgtaaagct

SEQ ID NO: 102887 - DNA, 25 bp, Artificial
  Probe
gggaatttaactgactccttaaagc

SEQ ID NO: 102888 - DNA, 25 bp, Artificial
  Probe
tttaactgactccttaaagcagaga

SEQ ID NO: 102889 - DNA, 25 bp, Artificial
  Probe
tttgtaaagctgtcatctgaccaag

SEQ ID NO: 102890 - DNA, 25 bp, Artificial
  Probe
cttggataacacagatttacccgtc

SEQ ID NO: 102891 - DNA, 25 bp, Artificial
  Probe
cacttggataacacagatttacccg

SEQ ID NO: 102892 - DNA, 25 bp, Artificial
  Probe
acttggataacacagatttacccgt

SEQ ID NO: 102893 - DNA, 25 bp, Artificial
  Probe
gcacttggataacacagatttaccc

SEQ ID NO: 102894 - DNA, 25 bp, Artificial
  Probe
ttggataacacagatttacccgtct

SEQ ID NO: 102895 - DNA, 25 bp, Artificial
  Probe
ttgcacttggataacacagatttac

SEQ ID NO: 102896 - DNA, 25 bp, Artificial
  Probe
ctttgcacttggataacacagattt

SEQ ID NO: 102897 - DNA, 25 bp, Artificial
  Probe
tttgcacttggataacacagattta

SEQ ID NO: 102898 - DNA, 25 bp, Artificial
  Probe
tgcacttggataacacagatttacc

SEQ ID NO: 102899 - DNA, 25 bp, Artificial
  Probe
tctttgcacttggataacacagatt

SEQ ID NO: 102900 - DNA, 25 bp, Artificial
  Probe
ctctttgcacttggataacacagat

SEQ ID NO: 102901 - DNA, 25 bp, Artificial
  Probe
cctctttgcacttggataacacaga

SEQ ID NO: 102902 - DNA, 25 bp, Artificial
  Probe
ttttgtttgttttggtggggaagac

SEQ ID NO: 102903 - DNA, 25 bp, Artificial
  Probe
tggataacacagatttacccgtctg

SEQ ID NO: 102904 - DNA, 25 bp, Artificial
  Probe
gcctctttgcacttggataacacag

SEQ ID NO: 102905 - DNA, 25 bp, Artificial
  Probe
tttgtttgttttggtggggaagacc

SEQ ID NO: 102906 - DNA, 25 bp, Artificial
  Probe
ctgcctctttgcacttggataacac

SEQ ID NO: 102907 - DNA, 25 bp, Artificial
  Probe
tgcctctttgcacttggataacaca

SEQ ID NO: 102908 - DNA, 25 bp, Artificial
  Probe
atgaagactcagaagaaggatgaca

SEQ ID NO: 102909 - DNA, 25 bp, Artificial
  Probe
tgaagactcagaagaaggatgacag

SEQ ID NO: 102910 - DNA, 25 bp, Artificial
  Probe
catgaagactcagaagaaggatgac

SEQ ID NO: 102911 - DNA, 25 bp, Artificial
  Probe
aaccatgaagactcagaagaaggat

SEQ ID NO: 102912 - DNA, 25 bp, Artificial
  Probe
agggaatatgaagaagcagaagaaa

SEQ ID NO: 102913 - DNA, 25 bp, Artificial
  Probe
tatgaagaagcagaagaaagaagga

SEQ ID NO: 102914 - DNA, 25 bp, Artificial
  Probe
gggaatatgaagaagcagaagaaag

SEQ ID NO: 102915 - DNA, 25 bp, Artificial
  Probe
atgaagaagcagaagaaagaaggag

SEQ ID NO: 102916 - DNA, 25 bp, Artificial
  Probe
cagggaatatgaagaagcagaagaa

SEQ ID NO: 102917 - DNA, 25 bp, Artificial
  Probe
ccatgaagactcagaagaaggatga

SEQ ID NO: 102918 - DNA, 25 bp, Artificial
  Probe
caattcaggataacagtcgagtcac

SEQ ID NO: 102919 - DNA, 25 bp, Artificial
  Probe
ttagcagccataattgtctttgtct

SEQ ID NO: 102920 - DNA, 25 bp, Artificial
  Probe
gttagcagccataattgtctttgtc

SEQ ID NO: 102921 - DNA, 25 bp, Artificial
  Probe
accatgaagactcagaagaaggatg

SEQ ID NO: 102922 - DNA, 25 bp, Artificial
  Probe
atatgaagaagcagaagaaagaagg

SEQ ID NO: 102923 - DNA, 25 bp, Artificial
  Probe
ggaatatgaagaagcagaagaaaga

SEQ ID NO: 102924 - DNA, 25 bp, Artificial
  Probe
tagcagccataattgtctttgtctc

SEQ ID NO: 102925 - DNA, 25 bp, Artificial
  Probe
gaagactcagaagaaggatgacagc

SEQ ID NO: 102926 - DNA, 25 bp, Artificial
  Probe
aattcaggataacagtcgagtcact

SEQ ID NO: 102927 - DNA, 25 bp, Artificial
  Probe
tgccattgtcatcaggattactttg

SEQ ID NO: 102928 - DNA, 25 bp, Artificial
  Probe
tcagggaatatgaagaagcagaaga

SEQ ID NO: 102929 - DNA, 25 bp, Artificial
  Probe
tgatggcaattcaggataacagtcg

SEQ ID NO: 102930 - DNA, 25 bp, Artificial
  Probe
atggtgaatgcagatacatcgagaa

SEQ ID NO: 102931 - DNA, 25 bp, Artificial
  Probe
cgttagcagccataattgtctttgt

SEQ ID NO: 102932 - DNA, 25 bp, Artificial
  Probe
tgaagaagcagaagaaagaaggagg

SEQ ID NO: 102933 - DNA, 25 bp, Artificial
  Probe
ctgccattgtcatcaggattacttt

SEQ ID NO: 102934 - DNA, 25 bp, Artificial
  Probe
gcaattcaggataacagtcgagtca

SEQ ID NO: 102935 - DNA, 25 bp, Artificial
  Probe
attgtcatcaggattactttggcga

SEQ ID NO: 102936 - DNA, 25 bp, Artificial
  Probe
cattgtcatcaggattactttggcg

SEQ ID NO: 102937 - DNA, 25 bp, Artificial
  Probe
atggcaattcaggataacagtcgag

SEQ ID NO: 102938 - DNA, 25 bp, Artificial
  Probe
gatggcaattcaggataacagtcga

SEQ ID NO: 102939 - DNA, 25 bp, Artificial
  Probe
aatatgaagaagcagaagaaagaag

SEQ ID NO: 102940 - DNA, 25 bp, Artificial
  Probe
gaatatgaagaagcagaagaaagaa

SEQ ID NO: 102941 - DNA, 25 bp, Artificial
  Probe
ataattgtctttgtctccgccgtaa

SEQ ID NO: 102942 - DNA, 25 bp, Artificial
  Probe
ggaaacgattcttcagggaatatga

SEQ ID NO: 102943 - DNA, 25 bp, Artificial
  Probe
ttgtcatcaggattactttggcgaa

SEQ ID NO: 102944 - DNA, 25 bp, Artificial
  Probe
aaaccatgaagactcagaagaagga

SEQ ID NO: 102945 - DNA, 25 bp, Artificial
  Probe
gtgaatgcagatacatcgagaacct

SEQ ID NO: 102946 - DNA, 25 bp, Artificial
  Probe
catggtgaatgcagatacatcgaga

SEQ ID NO: 102947 - DNA, 25 bp, Artificial
  Probe
tggtgaatgcagatacatcgagaac

SEQ ID NO: 102948 - DNA, 25 bp, Artificial
  Probe
tcatggtgaatgcagatacatcgag

SEQ ID NO: 102949 - DNA, 25 bp, Artificial
  Probe
ggcaattcaggataacagtcgagtc

SEQ ID NO: 102950 - DNA, 25 bp, Artificial
  Probe
cggaaacgattcttcagggaatatg

SEQ ID NO: 102951 - DNA, 25 bp, Artificial
  Probe
agaagaaggatgacagcgacctatc

SEQ ID NO: 102952 - DNA, 25 bp, Artificial
  Probe
cataattgtctttgtctccgccgta

SEQ ID NO: 102953 - DNA, 25 bp, Artificial
  Probe
gcacaacaatatcatctccatagtg

SEQ ID NO: 102954 - DNA, 25 bp, Artificial
  Probe
cacaacaatatcatctccatagtgg

SEQ ID NO: 102955 - DNA, 25 bp, Artificial
  Probe
tgcacaacaatatcatctccatagt

SEQ ID NO: 102956 - DNA, 25 bp, Artificial
  Probe
ctgcacaacaatatcatctccatag

SEQ ID NO: 102957 - DNA, 25 bp, Artificial
  Probe
gctgcacaacaatatcatctccata

SEQ ID NO: 102958 - DNA, 25 bp, Artificial
  Probe
cgatattcctgtgtagaaatctgga

SEQ ID NO: 102959 - DNA, 25 bp, Artificial
  Probe
tcccacatgacacctcaaataaatc

SEQ ID NO: 102960 - DNA, 25 bp, Artificial
  Probe
ctcccacatgacacctcaaataaat

SEQ ID NO: 102961 - DNA, 25 bp, Artificial
  Probe
caacctcttcttctttgtactagga

SEQ ID NO: 102962 - DNA, 25 bp, Artificial
  Probe
tcaacctcttcttctttgtactagg

SEQ ID NO: 102963 - DNA, 25 bp, Artificial
  Probe
caacaatatcatctccatagtggga

SEQ ID NO: 102964 - DNA, 25 bp, Artificial
  Probe
acaacaatatcatctccatagtggg

SEQ ID NO: 102965 - DNA, 25 bp, Artificial
  Probe
atcatctccatagtgggaatttgtc

SEQ ID NO: 102966 - DNA, 25 bp, Artificial
  Probe
aacctcttcttctttgtactaggag

SEQ ID NO: 102967 - DNA, 25 bp, Artificial
  Probe
tcgatattcctgtgtagaaatctgg

SEQ ID NO: 102968 - DNA, 25 bp, Artificial
  Probe
ttcaacctcttcttctttgtactag

SEQ ID NO: 102969 - DNA, 25 bp, Artificial
  Probe
attcctgtgtagaaatctggatcac

SEQ ID NO: 102970 - DNA, 25 bp, Artificial
  Probe
ctttgataagctctttctctcccag

SEQ ID NO: 102971 - DNA, 25 bp, Artificial
  Probe
tatcatctccatagtgggaatttgt

SEQ ID NO: 102972 - DNA, 25 bp, Artificial
  Probe
aacaatatcatctccatagtgggaa

SEQ ID NO: 102973 - DNA, 25 bp, Artificial
  Probe
acaatatcatctccatagtgggaat

SEQ ID NO: 102974 - DNA, 25 bp, Artificial
  Probe
actctcgatattcctgtgtagaaat

SEQ ID NO: 102975 - DNA, 25 bp, Artificial
  Probe
tattcctgtgtagaaatctggatca

SEQ ID NO: 102976 - DNA, 25 bp, Artificial
  Probe
ctcgatattcctgtgtagaaatctg

SEQ ID NO: 102977 - DNA, 25 bp, Artificial
  Probe
cttcatgacactctcgatattcctg

SEQ ID NO: 102978 - DNA, 25 bp, Artificial
  Probe
catctccatagtgggaatttgtctg

SEQ ID NO: 102979 - DNA, 25 bp, Artificial
  Probe
tcatctccatagtgggaatttgtct

SEQ ID NO: 102980 - DNA, 25 bp, Artificial
  Probe
ccacatgacacctcaaataaatccc

SEQ ID NO: 102981 - DNA, 25 bp, Artificial
  Probe
cccacatgacacctcaaataaatcc

SEQ ID NO: 102982 - DNA, 25 bp, Artificial
  Probe
catagtgggaatttgtctgggagtc

SEQ ID NO: 102983 - DNA, 25 bp, Artificial
  Probe
tctcgatattcctgtgtagaaatct

SEQ ID NO: 102984 - DNA, 25 bp, Artificial
  Probe
tttcaacctcttcttctttgtacta

SEQ ID NO: 102985 - DNA, 25 bp, Artificial
  Probe
ctctcgatattcctgtgtagaaatc

SEQ ID NO: 102986 - DNA, 25 bp, Artificial
  Probe
gaactgtttccttcctggttggtta

SEQ ID NO: 102987 - DNA, 25 bp, Artificial
  Probe
atatcatctccatagtgggaatttg

SEQ ID NO: 102988 - DNA, 25 bp, Artificial
  Probe
caatatcatctccatagtgggaatt

SEQ ID NO: 102989 - DNA, 25 bp, Artificial
  Probe
aactgtttccttcctggttggttac

SEQ ID NO: 102990 - DNA, 25 bp, Artificial
  Probe
gatattcctgtgtagaaatctggat

SEQ ID NO: 102991 - DNA, 25 bp, Artificial
  Probe
cactctcgatattcctgtgtagaaa

SEQ ID NO: 102992 - DNA, 25 bp, Artificial
  Probe
gatcctcattgacaagaccagcttc

SEQ ID NO: 102993 - DNA, 25 bp, Artificial
  Probe
atctccatagtgggaatttgtctgg

SEQ ID NO: 102994 - DNA, 25 bp, Artificial
  Probe
acacctcaaataaatccccttcttt

SEQ ID NO: 102995 - DNA, 25 bp, Artificial
  Probe
gaagtggctgcacaacaatatcatc

SEQ ID NO: 102996 - DNA, 25 bp, Artificial
  Probe
cacctcaaataaatccccttctttt

SEQ ID NO: 102997 - DNA, 25 bp, Artificial
  Probe
ggctgcacaacaatatcatctccat

SEQ ID NO: 102998 - DNA, 25 bp, Artificial
  Probe
ggaaggtaatcataagccagagact

SEQ ID NO: 102999 - DNA, 25 bp, Artificial
  Probe
ataagccagagactgactaccttaa

SEQ ID NO: 103000 - DNA, 25 bp, Artificial
  Probe
taatcataagccagagactgactac

SEQ ID NO: 103001 - DNA, 25 bp, Artificial
  Probe
gtaatcataagccagagactgacta

SEQ ID NO: 103002 - DNA, 25 bp, Artificial
  Probe
gaaggtaatcataagccagagactg

SEQ ID NO: 103003 - DNA, 25 bp, Artificial
  Probe
aaggtaatcataagccagagactga

SEQ ID NO: 103004 - DNA, 25 bp, Artificial
  Probe
cataagccagagactgactacctta

SEQ ID NO: 103005 - DNA, 25 bp, Artificial
  Probe
aatcataagccagagactgactacc

SEQ ID NO: 103006 - DNA, 25 bp, Artificial
  Probe
ggtaatcataagccagagactgact

SEQ ID NO: 103007 - DNA, 25 bp, Artificial
  Probe
aggtaatcataagccagagactgac

SEQ ID NO: 103008 - DNA, 25 bp, Artificial
  Probe
cagaagaatggaacaatcagtgtgg

SEQ ID NO: 103009 - DNA, 25 bp, Artificial
  Probe
tgactaccttaaaccaccgaaataa

SEQ ID NO: 103010 - DNA, 25 bp, Artificial
  Probe
ctgactaccttaaaccaccgaaata

SEQ ID NO: 103011 - DNA, 25 bp, Artificial
  Probe
aacgaaacgggaaggtaatcataag

SEQ ID NO: 103012 - DNA, 25 bp, Artificial
  Probe
gaacgaaacgggaaggtaatcataa

SEQ ID NO: 103013 - DNA, 25 bp, Artificial
  Probe
atcataagccagagactgactacct

SEQ ID NO: 103014 - DNA, 25 bp, Artificial
  Probe
gactaccttaaaccaccgaaataaa

SEQ ID NO: 103015 - DNA, 25 bp, Artificial
  Probe
ctctgggcattaagtatttctcaat

SEQ ID NO: 103016 - DNA, 25 bp, Artificial
  Probe
taccttaaaccaccgaaataaatgt

SEQ ID NO: 103017 - DNA, 25 bp, Artificial
  Probe
tcataagccagagactgactacctt

SEQ ID NO: 103018 - DNA, 25 bp, Artificial
  Probe
tatttctcaatgactgaagtggaca

SEQ ID NO: 103019 - DNA, 25 bp, Artificial
  Probe
gtatttctcaatgactgaagtggac

SEQ ID NO: 103020 - DNA, 25 bp, Artificial
  Probe
agtatttctcaatgactgaagtgga

SEQ ID NO: 103021 - DNA, 25 bp, Artificial
  Probe
tcaggactagatatcatggaagtga

SEQ ID NO: 103022 - DNA, 25 bp, Artificial
  Probe
ggactagatatcatggaagtgaacc

SEQ ID NO: 103023 - DNA, 25 bp, Artificial
  Probe
atttctcaatgactgaagtggacaa

SEQ ID NO: 103024 - DNA, 25 bp, Artificial
  Probe
tatgtatgtattctagcagttcctt

SEQ ID NO: 103025 - DNA, 25 bp, Artificial
  Probe
actaccttaaaccaccgaaataaat

SEQ ID NO: 103026 - DNA, 25 bp, Artificial
  Probe
aggactagatatcatggaagtgaac

SEQ ID NO: 103027 - DNA, 25 bp, Artificial
  Probe
caggactagatatcatggaagtgaa

SEQ ID NO: 103028 - DNA, 25 bp, Artificial
  Probe
ttcaggactagatatcatggaagtg

SEQ ID NO: 103029 - DNA, 25 bp, Artificial
  Probe
ccagaagaatggaacaatcagtgtg

SEQ ID NO: 103030 - DNA, 25 bp, Artificial
  Probe
aagtatttctcaatgactgaagtgg

SEQ ID NO: 103031 - DNA, 25 bp, Artificial
  Probe
ctaccttaaaccaccgaaataaatg

SEQ ID NO: 103032 - DNA, 25 bp, Artificial
  Probe
tttctcaatgactgaagtggacaag

SEQ ID NO: 103033 - DNA, 25 bp, Artificial
  Probe
atatgtatgtattctagcagttcct

SEQ ID NO: 103034 - DNA, 25 bp, Artificial
  Probe
actgactaccttaaaccaccgaaat

SEQ ID NO: 103035 - DNA, 25 bp, Artificial
  Probe
tgtatgtattctagcagttcctttc

SEQ ID NO: 103036 - DNA, 25 bp, Artificial
  Probe
ctctagcctgtaaagtggatcatct

SEQ ID NO: 103037 - DNA, 25 bp, Artificial
  Probe
ctctctagcctgtaaagtggatcat

SEQ ID NO: 103038 - DNA, 25 bp, Artificial
  Probe
tacttacccatgaacataccatacc

SEQ ID NO: 103039 - DNA, 25 bp, Artificial
  Probe
tctagcctgtaaagtggatcatctc

SEQ ID NO: 103040 - DNA, 25 bp, Artificial
  Probe
tctctagcctgtaaagtggatcatc

SEQ ID NO: 103041 - DNA, 25 bp, Artificial
  Probe
taagccagagactgactaccttaaa

SEQ ID NO: 103042 - DNA, 25 bp, Artificial
  Probe
tgtaaagtggatcatctcaggctta

SEQ ID NO: 103043 - DNA, 25 bp, Artificial
  Probe
aatctgtgatgtggacctagtaatc

SEQ ID NO: 103044 - DNA, 25 bp, Artificial
  Probe
gaatctgtgatgtggacctagtaat

SEQ ID NO: 103045 - DNA, 25 bp, Artificial
  Probe
agaatctgtgatgtggacctagtaa

SEQ ID NO: 103046 - DNA, 25 bp, Artificial
  Probe
gaagatgataaacctgaagcacttg

SEQ ID NO: 103047 - DNA, 25 bp, Artificial
  Probe
cagaatctgtgatgtggacctagta

SEQ ID NO: 103048 - DNA, 25 bp, Artificial
  Probe
cttatgtttacacgctcttctccaa

SEQ ID NO: 103049 - DNA, 25 bp, Artificial
  Probe
ggaagatgataaacctgaagcactt

SEQ ID NO: 103050 - DNA, 25 bp, Artificial
  Probe
cctaatgatgtcagaactggagacc

SEQ ID NO: 103051 - DNA, 25 bp, Artificial
  Probe
ctcttgtccaacaggaagatgataa

SEQ ID NO: 103052 - DNA, 25 bp, Artificial
  Probe
tataacctagacttcaacccacctc

SEQ ID NO: 103053 - DNA, 25 bp, Artificial
  Probe
ctataacctagacttcaacccacct

SEQ ID NO: 103054 - DNA, 25 bp, Artificial
  Probe
attcaatccaaagaagcctactgag

SEQ ID NO: 103055 - DNA, 25 bp, Artificial
  Probe
atcacacccattcaatccaaagaag

SEQ ID NO: 103056 - DNA, 25 bp, Artificial
  Probe
cattcaatccaaagaagcctactga

SEQ ID NO: 103057 - DNA, 25 bp, Artificial
  Probe
ttatgtttacacgctcttctccaac

SEQ ID NO: 103058 - DNA, 25 bp, Artificial
  Probe
gatgtggacctagtaatcagtttga

SEQ ID NO: 103059 - DNA, 25 bp, Artificial
  Probe
tgtggacctagtaatcagtttgaat

SEQ ID NO: 103060 - DNA, 25 bp, Artificial
  Probe
atgtggacctagtaatcagtttgaa

SEQ ID NO: 103061 - DNA, 25 bp, Artificial
  Probe
atctgtgatgtggacctagtaatca

SEQ ID NO: 103062 - DNA, 25 bp, Artificial
  Probe
ccattcaatccaaagaagcctactg

SEQ ID NO: 103063 - DNA, 25 bp, Artificial
  Probe
tgtgatgtggacctagtaatcagtt

SEQ ID NO: 103064 - DNA, 25 bp, Artificial
  Probe
gcctaatgatgtcagaactggagac

SEQ ID NO: 103065 - DNA, 25 bp, Artificial
  Probe
aagatcacacccattcaatccaaag

SEQ ID NO: 103066 - DNA, 25 bp, Artificial
  Probe
cctcttgtccaacaggaagatgata

SEQ ID NO: 103067 - DNA, 25 bp, Artificial
  Probe
tctgtgatgtggacctagtaatcag

SEQ ID NO: 103068 - DNA, 25 bp, Artificial
  Probe
gatcacacccattcaatccaaagaa

SEQ ID NO: 103069 - DNA, 25 bp, Artificial
  Probe
caagatcacacccattcaatccaaa

SEQ ID NO: 103070 - DNA, 25 bp, Artificial
  Probe
ctgtgatgtggacctagtaatcagt

SEQ ID NO: 103071 - DNA, 25 bp, Artificial
  Probe
cttgtccaacaggaagatgataaac

SEQ ID NO: 103072 - DNA, 25 bp, Artificial
  Probe
aagatgataaacctgaagcacttgc

SEQ ID NO: 103073 - DNA, 25 bp, Artificial
  Probe
ttgtccaacaggaagatgataaacc

SEQ ID NO: 103074 - DNA, 25 bp, Artificial
  Probe
ttagatggattcccaaggacattag

SEQ ID NO: 103075 - DNA, 25 bp, Artificial
  Probe
ccttatgtttacacgctcttctcca

SEQ ID NO: 103076 - DNA, 25 bp, Artificial
  Probe
gtggacctagtaatcagtttgaata

SEQ ID NO: 103077 - DNA, 25 bp, Artificial
  Probe
ctattagatggattcccaaggacat

SEQ ID NO: 103078 - DNA, 25 bp, Artificial
  Probe
agatcacacccattcaatccaaaga

SEQ ID NO: 103079 - DNA, 25 bp, Artificial
  Probe
tctataacctagacttcaacccacc

SEQ ID NO: 103080 - DNA, 25 bp, Artificial
  Probe
tagatggattcccaaggacattagt

SEQ ID NO: 103081 - DNA, 25 bp, Artificial
  Probe
attagatggattcccaaggacatta

SEQ ID NO: 103082 - DNA, 25 bp, Artificial
  Probe
tattagatggattcccaaggacatt

SEQ ID NO: 103083 - DNA, 25 bp, Artificial
  Probe
aggaagatgataaacctgaagcact

SEQ ID NO: 103084 - DNA, 25 bp, Artificial
  Probe
caacaagatcacacccattcaatcc

SEQ ID NO: 103085 - DNA, 25 bp, Artificial
  Probe
ccaacaagatcacacccattcaatc

SEQ ID NO: 103086 - DNA, 25 bp, Artificial
  Probe
cccattcaatccaaagaagcctact

SEQ ID NO: 103087 - DNA, 25 bp, Artificial
  Probe
ataacctagacttcaacccacctca

SEQ ID NO: 103088 - DNA, 25 bp, Artificial
  Probe
tactagaggaagatgatgctgtgat

SEQ ID NO: 103089 - DNA, 25 bp, Artificial
  Probe
ttactagaggaagatgatgctgtga

SEQ ID NO: 103090 - DNA, 25 bp, Artificial
  Probe
gttactagaggaagatgatgctgtg

SEQ ID NO: 103091 - DNA, 25 bp, Artificial
  Probe
ctagaggaagatgatgctgtgattg

SEQ ID NO: 103092 - DNA, 25 bp, Artificial
  Probe
actagaggaagatgatgctgtgatt

SEQ ID NO: 103093 - DNA, 25 bp, Artificial
  Probe
ggttactagaggaagatgatgctgt

SEQ ID NO: 103094 - DNA, 25 bp, Artificial
  Probe
tagaggaagatgatgctgtgattgg

SEQ ID NO: 103095 - DNA, 25 bp, Artificial
  Probe
ttcggttactagaggaagatgatgc

SEQ ID NO: 103096 - DNA, 25 bp, Artificial
  Probe
tcaggaagaacctcatctccaataa

SEQ ID NO: 103097 - DNA, 25 bp, Artificial
  Probe
ttcaggaagaacctcatctccaata

SEQ ID NO: 103098 - DNA, 25 bp, Artificial
  Probe
tctccaataaagtctctgtttcctc

SEQ ID NO: 103099 - DNA, 25 bp, Artificial
  Probe
cctcatctccaataaagtctctgtt

SEQ ID NO: 103100 - DNA, 25 bp, Artificial
  Probe
aacctcatctccaataaagtctctg

SEQ ID NO: 103101 - DNA, 25 bp, Artificial
  Probe
gaacctcatctccaataaagtctct

SEQ ID NO: 103102 - DNA, 25 bp, Artificial
  Probe
cggttactagaggaagatgatgctg

SEQ ID NO: 103103 - DNA, 25 bp, Artificial
  Probe
gcagagcccaatgtaaagtttatag

SEQ ID NO: 103104 - DNA, 25 bp, Artificial
  Probe
atctccaataaagtctctgtttcct

SEQ ID NO: 103105 - DNA, 25 bp, Artificial
  Probe
catctccaataaagtctctgtttcc

SEQ ID NO: 103106 - DNA, 25 bp, Artificial
  Probe
tcggttactagaggaagatgatgct

SEQ ID NO: 103107 - DNA, 25 bp, Artificial
  Probe
ctccaataaagtctctgtttcctcc

SEQ ID NO: 103108 - DNA, 25 bp, Artificial
  Probe
acctcatctccaataaagtctctgt

SEQ ID NO: 103109 - DNA, 25 bp, Artificial
  Probe
agaacctcatctccaataaagtctc

SEQ ID NO: 103110 - DNA, 25 bp, Artificial
  Probe
gcccaatgtaaagtttatagaaggt

SEQ ID NO: 103111 - DNA, 25 bp, Artificial
  Probe
aagaacctcatctccaataaagtct

SEQ ID NO: 103112 - DNA, 25 bp, Artificial
  Probe
aaagtttatagaaggtgttgtgctt

SEQ ID NO: 103113 - DNA, 25 bp, Artificial
  Probe
caataaagtctctgtttcctcccac

SEQ ID NO: 103114 - DNA, 25 bp, Artificial
  Probe
tcaagtgtttggatttcagtattgg

SEQ ID NO: 103115 - DNA, 25 bp, Artificial
  Probe
agcccaatgtaaagtttatagaagg

SEQ ID NO: 103116 - DNA, 25 bp, Artificial
  Probe
gaagaacctcatctccaataaagtc

SEQ ID NO: 103117 - DNA, 25 bp, Artificial
  Probe
tcatctccaataaagtctctgtttc

SEQ ID NO: 103118 - DNA, 25 bp, Artificial
  Probe
caagtgtttggatttcagtattggg

SEQ ID NO: 103119 - DNA, 25 bp, Artificial
  Probe
gacctttatgatgatgccgctattt

SEQ ID NO: 103120 - DNA, 25 bp, Artificial
  Probe
atcacttgaaggaatcatttctgga

SEQ ID NO: 103121 - DNA, 25 bp, Artificial
  Probe
ctcatctccaataaagtctctgttt

SEQ ID NO: 103122 - DNA, 25 bp, Artificial
  Probe
cagagcccaatgtaaagtttataga

SEQ ID NO: 103123 - DNA, 25 bp, Artificial
  Probe
tcacttgaaggaatcatttctggag

SEQ ID NO: 103124 - DNA, 25 bp, Artificial
  Probe
taaagtttatagaaggtgttgtgct

SEQ ID NO: 103125 - DNA, 25 bp, Artificial
  Probe
gtaaagtttatagaaggtgttgtgc

SEQ ID NO: 103126 - DNA, 25 bp, Artificial
  Probe
ctcaagtgtttggatttcagtattg

SEQ ID NO: 103127 - DNA, 25 bp, Artificial
  Probe
cagtccagttctcatctaccagatt

SEQ ID NO: 103128 - DNA, 25 bp, Artificial
  Probe
cgaggagaattgccaagaaacttaa

SEQ ID NO: 103129 - DNA, 25 bp, Artificial
  Probe
tccaataaagtctctgtttcctccc

SEQ ID NO: 103130 - DNA, 25 bp, Artificial
  Probe
actcaagtgtttggatttcagtatt

SEQ ID NO: 103131 - DNA, 25 bp, Artificial
  Probe
aataaagtctctgtttcctcccact

SEQ ID NO: 103132 - DNA, 25 bp, Artificial
  Probe
gatcacttgaaggaatcatttctgg

SEQ ID NO: 103133 - DNA, 25 bp, Artificial
  Probe
ggaacctccaatgacaagatgtata

SEQ ID NO: 103134 - DNA, 25 bp, Artificial
  Probe
gaacctccaatgacaagatgtatat

SEQ ID NO: 103135 - DNA, 25 bp, Artificial
  Probe
acctccaatgacaagatgtatatag

SEQ ID NO: 103136 - DNA, 25 bp, Artificial
  Probe
gatagtgatgacaagtgccagtgac

SEQ ID NO: 103137 - DNA, 25 bp, Artificial
  Probe
cctccaatgacaagatgtatataga

SEQ ID NO: 103138 - DNA, 25 bp, Artificial
  Probe
ctctgatagtgatgacaagtgccag

SEQ ID NO: 103139 - DNA, 25 bp, Artificial
  Probe
aacctccaatgacaagatgtatata

SEQ ID NO: 103140 - DNA, 25 bp, Artificial
  Probe
tgatagtgatgacaagtgccagtga

SEQ ID NO: 103141 - DNA, 25 bp, Artificial
  Probe
ctgatagtgatgacaagtgccagtg

SEQ ID NO: 103142 - DNA, 25 bp, Artificial
  Probe
tctgatagtgatgacaagtgccagt

SEQ ID NO: 103143 - DNA, 25 bp, Artificial
  Probe
cctctgatagtgatgacaagtgcca

SEQ ID NO: 103144 - DNA, 25 bp, Artificial
  Probe
ttgagaaaagggcagaactaaaatg

SEQ ID NO: 103145 - DNA, 25 bp, Artificial
  Probe
tttgagaaaagggcagaactaaaat

SEQ ID NO: 103146 - DNA, 25 bp, Artificial
  Probe
atagtgatgacaagtgccagtgacc

SEQ ID NO: 103147 - DNA, 25 bp, Artificial
  Probe
gggcagaactaaaatgggtttatac

SEQ ID NO: 103148 - DNA, 25 bp, Artificial
  Probe
agggcagaactaaaatgggtttata

SEQ ID NO: 103149 - DNA, 25 bp, Artificial
  Probe
tgagaaaagggcagaactaaaatgg

SEQ ID NO: 103150 - DNA, 25 bp, Artificial
  Probe
aagggcagaactaaaatgggtttat

SEQ ID NO: 103151 - DNA, 25 bp, Artificial
  Probe
ctccaatgacaagatgtatatagaa

SEQ ID NO: 103152 - DNA, 25 bp, Artificial
  Probe
aaagggcagaactaaaatgggttta

SEQ ID NO: 103153 - DNA, 25 bp, Artificial
  Probe
ggcagaactaaaatgggtttatact

SEQ ID NO: 103154 - DNA, 25 bp, Artificial
  Probe
aaaagggcagaactaaaatgggttt

SEQ ID NO: 103155 - DNA, 25 bp, Artificial
  Probe
gagaaaagggcagaactaaaatggg

SEQ ID NO: 103156 - DNA, 25 bp, Artificial
  Probe
gaaaagggcagaactaaaatgggtt

SEQ ID NO: 103157 - DNA, 25 bp, Artificial
  Probe
ttttgagaaaagggcagaactaaaa

SEQ ID NO: 103158 - DNA, 25 bp, Artificial
  Probe
agaaaagggcagaactaaaatgggt

SEQ ID NO: 103159 - DNA, 25 bp, Artificial
  Probe
ttatactggaacctccaatgacaag

SEQ ID NO: 103160 - DNA, 25 bp, Artificial
  Probe
tatactggaacctccaatgacaaga

SEQ ID NO: 103161 - DNA, 25 bp, Artificial
  Probe
actcattgggattgtcaccctaaag

SEQ ID NO: 103162 - DNA, 25 bp, Artificial
  Probe
gactcattgggattgtcaccctaaa

SEQ ID NO: 103163 - DNA, 25 bp, Artificial
  Probe
agaactaaaatgggtttatactgga

SEQ ID NO: 103164 - DNA, 25 bp, Artificial
  Probe
gcagaactaaaatgggtttatactg

SEQ ID NO: 103165 - DNA, 25 bp, Artificial
  Probe
atactggaacctccaatgacaagat

SEQ ID NO: 103166 - DNA, 25 bp, Artificial
  Probe
tggaacctccaatgacaagatgtat

SEQ ID NO: 103167 - DNA, 25 bp, Artificial
  Probe
aactaaaatgggtttatactggaac

SEQ ID NO: 103168 - DNA, 25 bp, Artificial
  Probe
cagaactaaaatgggtttatactgg

SEQ ID NO: 103169 - DNA, 25 bp, Artificial
  Probe
cattggcagactcattgggattgtc

SEQ ID NO: 103170 - DNA, 25 bp, Artificial
  Probe
ccctctgatagtgatgacaagtgcc

SEQ ID NO: 103171 - DNA, 25 bp, Artificial
  Probe
cattgggattgtcaccctaaaggag

SEQ ID NO: 103172 - DNA, 25 bp, Artificial
  Probe
ctcattgggattgtcaccctaaagg

SEQ ID NO: 103173 - DNA, 25 bp, Artificial
  Probe
gaactaaaatgggtttatactggaa

SEQ ID NO: 103174 - DNA, 25 bp, Artificial
  Probe
agactcattgggattgtcaccctaa

SEQ ID NO: 103175 - DNA, 25 bp, Artificial
  Probe
ctggaacctccaatgacaagatgta

SEQ ID NO: 103176 - DNA, 25 bp, Artificial
  Probe
tactggaacctccaatgacaagatg

SEQ ID NO: 103177 - DNA, 25 bp, Artificial
  Probe
tcattgggattgtcaccctaaagga

SEQ ID NO: 103178 - DNA, 25 bp, Artificial
  Probe
atcagtgatgtttcttgtcatgtgc

SEQ ID NO: 103179 - DNA, 25 bp, Artificial
  Probe
tcagtgatgtttcttgtcatgtgct

SEQ ID NO: 103180 - DNA, 25 bp, Artificial
  Probe
cagtgatgtttcttgtcatgtgctg

SEQ ID NO: 103181 - DNA, 25 bp, Artificial
  Probe
gatgtttcttgtcatgtgctgcttg

SEQ ID NO: 103182 - DNA, 25 bp, Artificial
  Probe
tgatgtttcttgtcatgtgctgctt

SEQ ID NO: 103183 - DNA, 25 bp, Artificial
  Probe
atgtttcttgtcatgtgctgcttgt

SEQ ID NO: 103184 - DNA, 25 bp, Artificial
  Probe
catcagtgatgtttcttgtcatgtg

SEQ ID NO: 103185 - DNA, 25 bp, Artificial
  Probe
ccatcagtgatgtttcttgtcatgt

SEQ ID NO: 103186 - DNA, 25 bp, Artificial
  Probe
gtgatgtttcttgtcatgtgctgct

SEQ ID NO: 103187 - DNA, 25 bp, Artificial
  Probe
agtgatgtttcttgtcatgtgctgc

SEQ ID NO: 103188 - DNA, 25 bp, Artificial
  Probe
cccatcagtgatgtttcttgtcatg

SEQ ID NO: 103189 - DNA, 25 bp, Artificial
  Probe
tgtttcttgtcatgtgctgcttgtg

SEQ ID NO: 103190 - DNA, 25 bp, Artificial
  Probe
cgcattcttctttccaacacccatg

SEQ ID NO: 103191 - DNA, 25 bp, Artificial
  Probe
ccccatcagtgatgtttcttgtcat

SEQ ID NO: 103192 - DNA, 25 bp, Artificial
  Probe
cattcttctttccaacacccatggc

SEQ ID NO: 103193 - DNA, 25 bp, Artificial
  Probe
gcattcttctttccaacacccatgg

SEQ ID NO: 103194 - DNA, 25 bp, Artificial
  Probe
aactgccccatcagtgatgtttctt

SEQ ID NO: 103195 - DNA, 25 bp, Artificial
  Probe
ctgtgatctataccaccttcaatgt

SEQ ID NO: 103196 - DNA, 25 bp, Artificial
  Probe
gaatcctgtgatctataccaccttc

SEQ ID NO: 103197 - DNA, 25 bp, Artificial
  Probe
tgtgatctataccaccttcaatgtg

SEQ ID NO: 103198 - DNA, 25 bp, Artificial
  Probe
cctgtgatctataccaccttcaatg

SEQ ID NO: 103199 - DNA, 25 bp, Artificial
  Probe
tcctgtgatctataccaccttcaat

SEQ ID NO: 103200 - DNA, 25 bp, Artificial
  Probe
atcctgtgatctataccaccttcaa

SEQ ID NO: 103201 - DNA, 25 bp, Artificial
  Probe
aatcctgtgatctataccaccttca

SEQ ID NO: 103202 - DNA, 25 bp, Artificial
  Probe
tgaatcctgtgatctataccacctt

SEQ ID NO: 103203 - DNA, 25 bp, Artificial
  Probe
tcttcctgactcacgttcttaatac

SEQ ID NO: 103204 - DNA, 25 bp, Artificial
  Probe
ctgaatcctgtgatctataccacct

SEQ ID NO: 103205 - DNA, 25 bp, Artificial
  Probe
ttcttcctgactcacgttcttaata

SEQ ID NO: 103206 - DNA, 25 bp, Artificial
  Probe
cttcttcctgactcacgttcttaat

SEQ ID NO: 103207 - DNA, 25 bp, Artificial
  Probe
cttcctgactcacgttcttaatacc

SEQ ID NO: 103208 - DNA, 25 bp, Artificial
  Probe
gttcttaatacccactgtcaagcat

SEQ ID NO: 103209 - DNA, 25 bp, Artificial
  Probe
cctgaatcctgtgatctataccacc

SEQ ID NO: 103210 - DNA, 25 bp, Artificial
  Probe
ccttcttcctgactcacgttcttaa

SEQ ID NO: 103211 - DNA, 25 bp, Artificial
  Probe
ttcttaatacccactgtcaagcatg

SEQ ID NO: 103212 - DNA, 25 bp, Artificial
  Probe
gtgccctgaatcctgtgatctatac

SEQ ID NO: 103213 - DNA, 25 bp, Artificial
  Probe
agtgccctgaatcctgtgatctata

SEQ ID NO: 103214 - DNA, 25 bp, Artificial
  Probe
cgttcttaatacccactgtcaagca

SEQ ID NO: 103215 - DNA, 25 bp, Artificial
  Probe
ccctgaatcctgtgatctataccac

SEQ ID NO: 103216 - DNA, 25 bp, Artificial
  Probe
cacgttcttaatacccactgtcaag

SEQ ID NO: 103217 - DNA, 25 bp, Artificial
  Probe
tcacgttcttaatacccactgtcaa

SEQ ID NO: 103218 - DNA, 25 bp, Artificial
  Probe
aagacaaacaatatccccagaaatg

SEQ ID NO: 103219 - DNA, 25 bp, Artificial
  Probe
ctgactcacgttcttaatacccact

SEQ ID NO: 103220 - DNA, 25 bp, Artificial
  Probe
ttcctgactcacgttcttaataccc

SEQ ID NO: 103221 - DNA, 25 bp, Artificial
  Probe
ctcacgttcttaatacccactgtca

SEQ ID NO: 103222 - DNA, 25 bp, Artificial
  Probe
actcacgttcttaatacccactgtc

SEQ ID NO: 103223 - DNA, 25 bp, Artificial
  Probe
gactcacgttcttaatacccactgt

SEQ ID NO: 103224 - DNA, 25 bp, Artificial
  Probe
tgactcacgttcttaatacccactg

SEQ ID NO: 103225 - DNA, 25 bp, Artificial
  Probe
agacaaacaatatccccagaaatgc

SEQ ID NO: 103226 - DNA, 25 bp, Artificial
  Probe
ctactacagcatctgccaagacact

SEQ ID NO: 103227 - DNA, 25 bp, Artificial
  Probe
gccctgaatcctgtgatctatacca

SEQ ID NO: 103228 - DNA, 25 bp, Artificial
  Probe
tgccctgaatcctgtgatctatacc

SEQ ID NO: 103229 - DNA, 25 bp, Artificial
  Probe
cctgactcacgttcttaatacccac

SEQ ID NO: 103230 - DNA, 25 bp, Artificial
  Probe
tcctgactcacgttcttaataccca

SEQ ID NO: 103231 - DNA, 25 bp, Artificial
  Probe
tactacagcatctgccaagacactg

SEQ ID NO: 103232 - DNA, 25 bp, Artificial
  Probe
caaacaatatccccagaaatgccag

SEQ ID NO: 103233 - DNA, 25 bp, Artificial
  Probe
gacaaacaatatccccagaaatgcc

SEQ ID NO: 103234 - DNA, 25 bp, Artificial
  Probe
acgttcttaatacccactgtcaagc

SEQ ID NO: 103235 - DNA, 25 bp, Artificial
  Probe
acaaacaatatccccagaaatgcca

SEQ ID NO: 103236 - DNA, 25 bp, Artificial
  Probe
cagtgccctgaatcctgtgatctat

SEQ ID NO: 103237 - DNA, 25 bp, Artificial
  Probe
cccttcttcctgactcacgttctta

SEQ ID NO: 103238 - DNA, 25 bp, Artificial
  Probe
aaacaatatccccagaaatgccagg

SEQ ID NO: 103239 - DNA, 25 bp, Artificial
  Probe
ctatgtgaacagtgccctgaatcct

SEQ ID NO: 103240 - DNA, 25 bp, Artificial
  Probe
agaagcaactactcaatgagaacag

SEQ ID NO: 103241 - DNA, 25 bp, Artificial
  Probe
aactactcaatgagaacagcaactc

SEQ ID NO: 103242 - DNA, 25 bp, Artificial
  Probe
cagaagcaactactcaatgagaaca

SEQ ID NO: 103243 - DNA, 25 bp, Artificial
  Probe
caactactcaatgagaacagcaact

SEQ ID NO: 103244 - DNA, 25 bp, Artificial
  Probe
gctaagaaaccacagtatgacattt

SEQ ID NO: 103245 - DNA, 25 bp, Artificial
  Probe
actactcaatgagaacagcaactct

SEQ ID NO: 103246 - DNA, 25 bp, Artificial
  Probe
ctactcaatgagaacagcaactctg

SEQ ID NO: 103247 - DNA, 25 bp, Artificial
  Probe
cgctaagaaaccacagtatgacatt

SEQ ID NO: 103248 - DNA, 25 bp, Artificial
  Probe
gaagcaactactcaatgagaacagc

SEQ ID NO: 103249 - DNA, 25 bp, Artificial
  Probe
gcagaagcaactactcaatgagaac

SEQ ID NO: 103250 - DNA, 25 bp, Artificial
  Probe
ctaagaaaccacagtatgacatttg

SEQ ID NO: 103251 - DNA, 25 bp, Artificial
  Probe
gagagatatatgtgaagggcatcag

SEQ ID NO: 103252 - DNA, 25 bp, Artificial
  Probe
gcaactactcaatgagaacagcaac

SEQ ID NO: 103253 - DNA, 25 bp, Artificial
  Probe
agcaactactcaatgagaacagcaa

SEQ ID NO: 103254 - DNA, 25 bp, Artificial
  Probe
aagcaactactcaatgagaacagca

SEQ ID NO: 103255 - DNA, 25 bp, Artificial
  Probe
tactcaatgagaacagcaactctgg

SEQ ID NO: 103256 - DNA, 25 bp, Artificial
  Probe
caaaggcagaagcaactactcaatg

SEQ ID NO: 103257 - DNA, 25 bp, Artificial
  Probe
ggagagatatatgtgaagggcatca

SEQ ID NO: 103258 - DNA, 25 bp, Artificial
  Probe
ggcagaagcaactactcaatgagaa

SEQ ID NO: 103259 - DNA, 25 bp, Artificial
  Probe
aaggcagaagcaactactcaatgag

SEQ ID NO: 103260 - DNA, 25 bp, Artificial
  Probe
aaaggcagaagcaactactcaatga

SEQ ID NO: 103261 - DNA, 25 bp, Artificial
  Probe
taagaaaccacagtatgacatttgg

SEQ ID NO: 103262 - DNA, 25 bp, Artificial
  Probe
gggagagatatatgtgaagggcatc

SEQ ID NO: 103263 - DNA, 25 bp, Artificial
  Probe
agagatatatgtgaagggcatcagc

SEQ ID NO: 103264 - DNA, 25 bp, Artificial
  Probe
aagaaaccacagtatgacatttggg

SEQ ID NO: 103265 - DNA, 25 bp, Artificial
  Probe
atccaagttcctgaggagacctatc

SEQ ID NO: 103266 - DNA, 25 bp, Artificial
  Probe
gatccaagttcctgaggagacctat

SEQ ID NO: 103267 - DNA, 25 bp, Artificial
  Probe
cacagtatgacatttggggtaaaac

SEQ ID NO: 103268 - DNA, 25 bp, Artificial
  Probe
cgaacaagaagggaaaatcaaaaca

SEQ ID NO: 103269 - DNA, 25 bp, Artificial
  Probe
gcatcatcaagagccattacaaccg

SEQ ID NO: 103270 - DNA, 25 bp, Artificial
  Probe
aggcagaagcaactactcaatgaga

SEQ ID NO: 103271 - DNA, 25 bp, Artificial
  Probe
gcattttctttgtgtttctttctct

SEQ ID NO: 103272 - DNA, 25 bp, Artificial
  Probe
agcattttctttgtgtttctttctc

SEQ ID NO: 103273 - DNA, 25 bp, Artificial
  Probe
catttggggtaaaactgtgaacttg

SEQ ID NO: 103274 - DNA, 25 bp, Artificial
  Probe
gtccaacccaacccattcatcttac

SEQ ID NO: 103275 - DNA, 25 bp, Artificial
  Probe
gatatatgtgaagggcatcagcgaa

SEQ ID NO: 103276 - DNA, 25 bp, Artificial
  Probe
gaacaagaagggaaaatcaaaacat

SEQ ID NO: 103277 - DNA, 25 bp, Artificial
  Probe
agtccaacccaacccattcatctta

SEQ ID NO: 103278 - DNA, 25 bp, Artificial
  Probe
acagtatgacatttggggtaaaact

SEQ ID NO: 103279 - DNA, 25 bp, Artificial
  Probe
atatatgtgaagggcatcagcgaac

SEQ ID NO: 103280 - DNA, 25 bp, Artificial
  Probe
aagcattttctttgtgtttctttct

SEQ ID NO: 103281 - DNA, 25 bp, Artificial
  Probe
gcgaacaagaagggaaaatcaaaac

SEQ ID NO: 103282 - DNA, 25 bp, Artificial
  Probe
agcgaacaagaagggaaaatcaaaa

SEQ ID NO: 103283 - DNA, 25 bp, Artificial
  Probe
gagatatatgtgaagggcatcagcg

SEQ ID NO: 103284 - DNA, 25 bp, Artificial
  Probe
tccaagttcctgaggagacctatct

SEQ ID NO: 103285 - DNA, 25 bp, Artificial
  Probe
cttcagcattacgcagaatatgttc

SEQ ID NO: 103286 - DNA, 25 bp, Artificial
  Probe
gcttcagcattacgcagaatatgtt

SEQ ID NO: 103287 - DNA, 25 bp, Artificial
  Probe
atcatcaagcacaacaagtttcaga

SEQ ID NO: 103288 - DNA, 25 bp, Artificial
  Probe
ctattaaagcagtccttctccagaa

SEQ ID NO: 103289 - DNA, 25 bp, Artificial
  Probe
tattaaagcagtccttctccagaaa

SEQ ID NO: 103290 - DNA, 25 bp, Artificial
  Probe
ttcagcattacgcagaatatgttct

SEQ ID NO: 103291 - DNA, 25 bp, Artificial
  Probe
cctattaaagcagtccttctccaga

SEQ ID NO: 103292 - DNA, 25 bp, Artificial
  Probe
gatcatcaagcacaacaagtttcag

SEQ ID NO: 103293 - DNA, 25 bp, Artificial
  Probe
tcatcaagcacaacaagtttcagag

SEQ ID NO: 103294 - DNA, 25 bp, Artificial
  Probe
ttaacccatccaccctattaaagca

SEQ ID NO: 103295 - DNA, 25 bp, Artificial
  Probe
taacccatccaccctattaaagcag

SEQ ID NO: 103296 - DNA, 25 bp, Artificial
  Probe
atccaccctattaaagcagtccttc

SEQ ID NO: 103297 - DNA, 25 bp, Artificial
  Probe
tcacacgattcaaagacacctactt

SEQ ID NO: 103298 - DNA, 25 bp, Artificial
  Probe
cagcttcagcattacgcagaatatg

SEQ ID NO: 103299 - DNA, 25 bp, Artificial
  Probe
ccctattaaagcagtccttctccag

SEQ ID NO: 103300 - DNA, 25 bp, Artificial
  Probe
catccaccctattaaagcagtcctt

SEQ ID NO: 103301 - DNA, 25 bp, Artificial
  Probe
aaggaaagggaaatacggcatctac

SEQ ID NO: 103302 - DNA, 25 bp, Artificial
  Probe
caaggaaagggaaatacggcatcta

SEQ ID NO: 103303 - DNA, 25 bp, Artificial
  Probe
agcttcagcattacgcagaatatgt

SEQ ID NO: 103304 - DNA, 25 bp, Artificial
  Probe
catcaagcacaacaagtttcagagg

SEQ ID NO: 103305 - DNA, 25 bp, Artificial
  Probe
caccctattaaagcagtccttctcc

SEQ ID NO: 103306 - DNA, 25 bp, Artificial
  Probe
ccaccctattaaagcagtccttctc

SEQ ID NO: 103307 - DNA, 25 bp, Artificial
  Probe
accctattaaagcagtccttctcca

SEQ ID NO: 103308 - DNA, 25 bp, Artificial
  Probe
tccaccctattaaagcagtccttct

SEQ ID NO: 103309 - DNA, 25 bp, Artificial
  Probe
ccagcttcagcattacgcagaatat

SEQ ID NO: 103310 - DNA, 25 bp, Artificial
  Probe
cacacgattcaaagacacctacttt

SEQ ID NO: 103311 - DNA, 25 bp, Artificial
  Probe
gtcacacgattcaaagacacctact

SEQ ID NO: 103312 - DNA, 25 bp, Artificial
  Probe
ggaaagggaaatacggcatctacac

SEQ ID NO: 103313 - DNA, 25 bp, Artificial
  Probe
gaaatacggcatctacacgaaggtc

SEQ ID NO: 103314 - DNA, 25 bp, Artificial
  Probe
aggaaagggaaatacggcatctaca

SEQ ID NO: 103315 - DNA, 25 bp, Artificial
  Probe
atcaagcacaacaagtttcagaggg

SEQ ID NO: 103316 - DNA, 25 bp, Artificial
  Probe
aacccatccaccctattaaagcagt

SEQ ID NO: 103317 - DNA, 25 bp, Artificial
  Probe
aatacggcatctacacgaaggtcac

SEQ ID NO: 103318 - DNA, 25 bp, Artificial
  Probe
gaaagggaaatacggcatctacacg

SEQ ID NO: 103319 - DNA, 25 bp, Artificial
  Probe
attaaagcagtccttctccagaaaa

SEQ ID NO: 103320 - DNA, 25 bp, Artificial
  Probe
ccatccaccctattaaagcagtcct

SEQ ID NO: 103321 - DNA, 25 bp, Artificial
  Probe
gttaacccatccaccctattaaagc

SEQ ID NO: 103322 - DNA, 25 bp, Artificial
  Probe
caacaagtttcagagggacacctac

SEQ ID NO: 103323 - DNA, 25 bp, Artificial
  Probe
caaagtcctgaagatgatggaggtg

SEQ ID NO: 103324 - DNA, 25 bp, Artificial
  Probe
aaatacggcatctacacgaaggtca

SEQ ID NO: 103325 - DNA, 25 bp, Artificial
  Probe
aagggaaatacggcatctacacgaa

SEQ ID NO: 103326 - DNA, 25 bp, Artificial
  Probe
aaagggaaatacggcatctacacga

SEQ ID NO: 103327 - DNA, 25 bp, Artificial
  Probe
acccatccaccctattaaagcagtc

SEQ ID NO: 103328 - DNA, 25 bp, Artificial
  Probe
cagtccaaagtcctgaagatgatgg

SEQ ID NO: 103329 - DNA, 25 bp, Artificial
  Probe
acaacaagtttcagagggacaccta

SEQ ID NO: 103330 - DNA, 25 bp, Artificial
  Probe
tatcacacctgaaactgcttgctaa

SEQ ID NO: 103331 - DNA, 25 bp, Artificial
  Probe
atcacacctgaaactgcttgctaat

SEQ ID NO: 103332 - DNA, 25 bp, Artificial
  Probe
gtatcacacctgaaactgcttgcta

SEQ ID NO: 103333 - DNA, 25 bp, Artificial
  Probe
tcacacctgaaactgcttgctaatg

SEQ ID NO: 103334 - DNA, 25 bp, Artificial
  Probe
aactgcttgctaatgggcctttata

SEQ ID NO: 103335 - DNA, 25 bp, Artificial
  Probe
cacacctgaaactgcttgctaatgg

SEQ ID NO: 103336 - DNA, 25 bp, Artificial
  Probe
cttgaactggatcagcctgtctctg

SEQ ID NO: 103337 - DNA, 25 bp, Artificial
  Probe
ctgcttgctaatgggcctttatagt

SEQ ID NO: 103338 - DNA, 25 bp, Artificial
  Probe
actgcttgctaatgggcctttatag

SEQ ID NO: 103339 - DNA, 25 bp, Artificial
  Probe
aaactgcttgctaatgggcctttat

SEQ ID NO: 103340 - DNA, 25 bp, Artificial
  Probe
ttaaacagggtttctctgtaggtca

SEQ ID NO: 103341 - DNA, 25 bp, Artificial
  Probe
tttaaacagggtttctctgtaggtc

SEQ ID NO: 103342 - DNA, 25 bp, Artificial
  Probe
taaacagggtttctctgtaggtcag

SEQ ID NO: 103343 - DNA, 25 bp, Artificial
  Probe
tgtatcacacctgaaactgcttgct

SEQ ID NO: 103344 - DNA, 25 bp, Artificial
  Probe
ctgactgagcctttagcttggattc

SEQ ID NO: 103345 - DNA, 25 bp, Artificial
  Probe
ctccggtgatctattgagttttaag

SEQ ID NO: 103346 - DNA, 25 bp, Artificial
  Probe
gaaactgcttgctaatgggccttta

SEQ ID NO: 103347 - DNA, 25 bp, Artificial
  Probe
gttcactccggtgatctattgagtt

SEQ ID NO: 103348 - DNA, 25 bp, Artificial
  Probe
tgactgagcctttagcttggattct

SEQ ID NO: 103349 - DNA, 25 bp, Artificial
  Probe
cagttcactccggtgatctattgag

SEQ ID NO: 103350 - DNA, 25 bp, Artificial
  Probe
agttcactccggtgatctattgagt

SEQ ID NO: 103351 - DNA, 25 bp, Artificial
  Probe
acagttcactccggtgatctattga

SEQ ID NO: 103352 - DNA, 25 bp, Artificial
  Probe
ttcactccggtgatctattgagttt

SEQ ID NO: 103353 - DNA, 25 bp, Artificial
  Probe
agtgtatcacacctgaaactgcttg

SEQ ID NO: 103354 - DNA, 25 bp, Artificial
  Probe
cagtgtatcacacctgaaactgctt

SEQ ID NO: 103355 - DNA, 25 bp, Artificial
  Probe
cctgactgagcctttagcttggatt

SEQ ID NO: 103356 - DNA, 25 bp, Artificial
  Probe
ttttaaacagggtttctctgtaggt

SEQ ID NO: 103357 - DNA, 25 bp, Artificial
  Probe
ccacagtgtatcacacctgaaactg

SEQ ID NO: 103358 - DNA, 25 bp, Artificial
  Probe
aaacagggtttctctgtaggtcagg

SEQ ID NO: 103359 - DNA, 25 bp, Artificial
  Probe
actccggtgatctattgagttttaa

SEQ ID NO: 103360 - DNA, 25 bp, Artificial
  Probe
cactccggtgatctattgagtttta

SEQ ID NO: 103361 - DNA, 25 bp, Artificial
  Probe
cacagtgtatcacacctgaaactgc

SEQ ID NO: 103362 - DNA, 25 bp, Artificial
  Probe
acagtgtatcacacctgaaactgct

SEQ ID NO: 103363 - DNA, 25 bp, Artificial
  Probe
cccacagtgtatcacacctgaaact

SEQ ID NO: 103364 - DNA, 25 bp, Artificial
  Probe
tcactccggtgatctattgagtttt

SEQ ID NO: 103365 - DNA, 25 bp, Artificial
  Probe
gtgtatcacacctgaaactgcttgc

SEQ ID NO: 103366 - DNA, 25 bp, Artificial
  Probe
gcagatacattagagaacacaccta

SEQ ID NO: 103367 - DNA, 25 bp, Artificial
  Probe
aactgttaatggtatgtgtctgctt

SEQ ID NO: 103368 - DNA, 25 bp, Artificial
  Probe
ctgttaatggtatgtgtctgcttca

SEQ ID NO: 103369 - DNA, 25 bp, Artificial
  Probe
actgttaatggtatgtgtctgcttc

SEQ ID NO: 103370 - DNA, 25 bp, Artificial
  Probe
agatacattagagaacacacctagc

SEQ ID NO: 103371 - DNA, 25 bp, Artificial
  Probe
gatacattagagaacacacctagcc

SEQ ID NO: 103372 - DNA, 25 bp, Artificial
  Probe
taatggtatgtgtctgcttcagtta

SEQ ID NO: 103373 - DNA, 25 bp, Artificial
  Probe
aatggtatgtgtctgcttcagttaa

SEQ ID NO: 103374 - DNA, 25 bp, Artificial
  Probe
ttaatggtatgtgtctgcttcagtt

SEQ ID NO: 103375 - DNA, 25 bp, Artificial
  Probe
cagatacattagagaacacacctag

SEQ ID NO: 103376 - DNA, 25 bp, Artificial
  Probe
gagtctgataggacatattcttggt

SEQ ID NO: 103377 - DNA, 25 bp, Artificial
  Probe
gcagtagagtctgataggacatatt

SEQ ID NO: 103378 - DNA, 25 bp, Artificial
  Probe
agagtctgataggacatattcttgg

SEQ ID NO: 103379 - DNA, 25 bp, Artificial
  Probe
gttaatggtatgtgtctgcttcagt

SEQ ID NO: 103380 - DNA, 25 bp, Artificial
  Probe
tgttaatggtatgtgtctgcttcag

SEQ ID NO: 103381 - DNA, 25 bp, Artificial
  Probe
catcagtatgtgcttacttgtgttc

SEQ ID NO: 103382 - DNA, 25 bp, Artificial
  Probe
atcagtatgtgcttacttgtgttca

SEQ ID NO: 103383 - DNA, 25 bp, Artificial
  Probe
tcagtatgtgcttacttgtgttcaa

SEQ ID NO: 103384 - DNA, 25 bp, Artificial
  Probe
agtctgataggacatattcttggta

SEQ ID NO: 103385 - DNA, 25 bp, Artificial
  Probe
agggatagatgagaaactgaatgtc

SEQ ID NO: 103386 - DNA, 25 bp, Artificial
  Probe
aagggatagatgagaaactgaatgt

SEQ ID NO: 103387 - DNA, 25 bp, Artificial
  Probe
caagggatagatgagaaactgaatg

SEQ ID NO: 103388 - DNA, 25 bp, Artificial
  Probe
aaactgttaatggtatgtgtctgct

SEQ ID NO: 103389 - DNA, 25 bp, Artificial
  Probe
taaactgttaatggtatgtgtctgc

SEQ ID NO: 103390 - DNA, 25 bp, Artificial
  Probe
gtctgataggacatattcttggtac

SEQ ID NO: 103391 - DNA, 25 bp, Artificial
  Probe
gggatagatgagaaactgaatgtct

SEQ ID NO: 103392 - DNA, 25 bp, Artificial
  Probe
gtagttaccttgccaaatgagtctt

SEQ ID NO: 103393 - DNA, 25 bp, Artificial
  Probe
tgcagatacattagagaacacacct

SEQ ID NO: 103394 - DNA, 25 bp, Artificial
  Probe
aagtagttaccttgccaaatgagtc

SEQ ID NO: 103395 - DNA, 25 bp, Artificial
  Probe
cagtagagtctgataggacatattc

SEQ ID NO: 103396 - DNA, 25 bp, Artificial
  Probe
ggatagatgagaaactgaatgtctg

SEQ ID NO: 103397 - DNA, 25 bp, Artificial
  Probe
cttcaagggatagatgagaaactga

SEQ ID NO: 103398 - DNA, 25 bp, Artificial
  Probe
tcttcaagggatagatgagaaactg

SEQ ID NO: 103399 - DNA, 25 bp, Artificial
  Probe
ctctgttatcgctcgaagacattag

SEQ ID NO: 103400 - DNA, 25 bp, Artificial
  Probe
agtagagtctgataggacatattct

SEQ ID NO: 103401 - DNA, 25 bp, Artificial
  Probe
tagttaccttgccaaatgagtcttg

SEQ ID NO: 103402 - DNA, 25 bp, Artificial
  Probe
tcaagggatagatgagaaactgaat

SEQ ID NO: 103403 - DNA, 25 bp, Artificial
  Probe
agtagttaccttgccaaatgagtct

SEQ ID NO: 103404 - DNA, 25 bp, Artificial
  Probe
tgcagtagagtctgataggacatat

SEQ ID NO: 103405 - DNA, 25 bp, Artificial
  Probe
atgcagtagagtctgataggacata

SEQ ID NO: 103406 - DNA, 25 bp, Artificial
  Probe
gctagttcttcaagggatagatgag

SEQ ID NO: 103407 - DNA, 25 bp, Artificial
  Probe
aatgcagtagagtctgataggacat

SEQ ID NO: 103408 - DNA, 25 bp, Artificial
  Probe
atacattagagaacacacctagccc

SEQ ID NO: 103409 - DNA, 25 bp, Artificial
  Probe
atagatgagaaactgaatgtctgac

SEQ ID NO: 103410 - DNA, 25 bp, Artificial
  Probe
gatagatgagaaactgaatgtctga

SEQ ID NO: 103411 - DNA, 25 bp, Artificial
  Probe
gtatgtaaccagaatcctcacacac

SEQ ID NO: 103412 - DNA, 25 bp, Artificial
  Probe
cctactcactcaatggtgtatgtaa

SEQ ID NO: 103413 - DNA, 25 bp, Artificial
  Probe
tgtatgtaaccagaatcctcacaca

SEQ ID NO: 103414 - DNA, 25 bp, Artificial
  Probe
aagcacatcctgtagtatccagatt

SEQ ID NO: 103415 - DNA, 25 bp, Artificial
  Probe
ctactcactcaatggtgtatgtaac

SEQ ID NO: 103416 - DNA, 25 bp, Artificial
  Probe
tactcactcaatggtgtatgtaacc

SEQ ID NO: 103417 - DNA, 25 bp, Artificial
  Probe
tatgtaaccagaatcctcacacacc

SEQ ID NO: 103418 - DNA, 25 bp, Artificial
  Probe
caagcacatcctgtagtatccagat

SEQ ID NO: 103419 - DNA, 25 bp, Artificial
  Probe
gtgtttgaaatgagtttaggaagca

SEQ ID NO: 103420 - DNA, 25 bp, Artificial
  Probe
tgagtttaggaagcatttgtgttat

SEQ ID NO: 103421 - DNA, 25 bp, Artificial
  Probe
tgtttgaaatgagtttaggaagcat

SEQ ID NO: 103422 - DNA, 25 bp, Artificial
  Probe
cgtgtttgaaatgagtttaggaagc

SEQ ID NO: 103423 - DNA, 25 bp, Artificial
  Probe
agtttaggaagcatttgtgttatgt

SEQ ID NO: 103424 - DNA, 25 bp, Artificial
  Probe
aagcatttgtgttatgtccctactc

SEQ ID NO: 103425 - DNA, 25 bp, Artificial
  Probe
gaagcatttgtgttatgtccctact

SEQ ID NO: 103426 - DNA, 25 bp, Artificial
  Probe
gtttaggaagcatttgtgttatgtc

SEQ ID NO: 103427 - DNA, 25 bp, Artificial
  Probe
atgagtttaggaagcatttgtgtta

SEQ ID NO: 103428 - DNA, 25 bp, Artificial
  Probe
gagtttaggaagcatttgtgttatg

SEQ ID NO: 103429 - DNA, 25 bp, Artificial
  Probe
ggtgtatgtaaccagaatcctcaca

SEQ ID NO: 103430 - DNA, 25 bp, Artificial
  Probe
gttatgtccctactcactcaatggt

SEQ ID NO: 103431 - DNA, 25 bp, Artificial
  Probe
tgttatgtccctactcactcaatgg

SEQ ID NO: 103432 - DNA, 25 bp, Artificial
  Probe
agcatttgtgttatgtccctactca

SEQ ID NO: 103433 - DNA, 25 bp, Artificial
  Probe
cacatcctgtagtatccagatttcc

SEQ ID NO: 103434 - DNA, 25 bp, Artificial
  Probe
cttacatcgctcaagtcactcaaag

SEQ ID NO: 103435 - DNA, 25 bp, Artificial
  Probe
ctgtgaggatctgaagagaaggtct

SEQ ID NO: 103436 - DNA, 25 bp, Artificial
  Probe
tctgtgaggatctgaagagaaggtc

SEQ ID NO: 103437 - DNA, 25 bp, Artificial
  Probe
cacaagcacatcctgtagtatccag

SEQ ID NO: 103438 - DNA, 25 bp, Artificial
  Probe
atttgtgttatgtccctactcactc

SEQ ID NO: 103439 - DNA, 25 bp, Artificial
  Probe
gcacatcctgtagtatccagatttc

SEQ ID NO: 103440 - DNA, 25 bp, Artificial
  Probe
catttgtgttatgtccctactcact

SEQ ID NO: 103441 - DNA, 25 bp, Artificial
  Probe
acaagcacatcctgtagtatccaga

SEQ ID NO: 103442 - DNA, 25 bp, Artificial
  Probe
gtgttatgtccctactcactcaatg

SEQ ID NO: 103443 - DNA, 25 bp, Artificial
  Probe
tttaggaagcatttgtgttatgtcc

SEQ ID NO: 103444 - DNA, 25 bp, Artificial
  Probe
agcacatcctgtagtatccagattt

SEQ ID NO: 103445 - DNA, 25 bp, Artificial
  Probe
gtctgtgaggatctgaagagaaggt

SEQ ID NO: 103446 - DNA, 25 bp, Artificial
  Probe
tggtctgtgaggatctgaagagaag

SEQ ID NO: 103447 - DNA, 25 bp, Artificial
  Probe
ctggtctgtgaggatctgaagagaa

SEQ ID NO: 103448 - DNA, 25 bp, Artificial
  Probe
tgaatcttaaaccaaagttcctcta

SEQ ID NO: 103449 - DNA, 25 bp, Artificial
  Probe
tgtgttatgtccctactcactcaat

SEQ ID NO: 103450 - DNA, 25 bp, Artificial
  Probe
ccctactcactcaatggtgtatgta

SEQ ID NO: 103451 - DNA, 25 bp, Artificial
  Probe
ttgtgttatgtccctactcactcaa

SEQ ID NO: 103452 - DNA, 25 bp, Artificial
  Probe
tttgtgttatgtccctactcactca

SEQ ID NO: 103453 - DNA, 25 bp, Artificial
  Probe
acatcctgtagtatccagatttccg

SEQ ID NO: 103454 - DNA, 25 bp, Artificial
  Probe
atgtaaccagaatcctcacacacct

SEQ ID NO: 103455 - DNA, 25 bp, Artificial
  Probe
ttaggaagcatttgtgttatgtccc

SEQ ID NO: 103456 - DNA, 25 bp, Artificial
  Probe
aggctaacagatacacttaggaatc

SEQ ID NO: 103457 - DNA, 25 bp, Artificial
  Probe
gaggctaacagatacacttaggaat

SEQ ID NO: 103458 - DNA, 25 bp, Artificial
  Probe
tgaggctaacagatacacttaggaa

SEQ ID NO: 103459 - DNA, 25 bp, Artificial
  Probe
ctgaggctaacagatacacttagga

SEQ ID NO: 103460 - DNA, 25 bp, Artificial
  Probe
tgactgaaacttaccttactgtgaa

SEQ ID NO: 103461 - DNA, 25 bp, Artificial
  Probe
ctgctcttacttactgtgtggatgg

SEQ ID NO: 103462 - DNA, 25 bp, Artificial
  Probe
tgcttctctctcacattacagttta

SEQ ID NO: 103463 - DNA, 25 bp, Artificial
  Probe
ttgcttctctctcacattacagttt

SEQ ID NO: 103464 - DNA, 25 bp, Artificial
  Probe
tttgcttctctctcacattacagtt

SEQ ID NO: 103465 - DNA, 25 bp, Artificial
  Probe
atgactgaaacttaccttactgtga

SEQ ID NO: 103466 - DNA, 25 bp, Artificial
  Probe
agtttgcttctctctcacattacag

SEQ ID NO: 103467 - DNA, 25 bp, Artificial
  Probe
actgaaacttaccttactgtgaaac

SEQ ID NO: 103468 - DNA, 25 bp, Artificial
  Probe
cctgaggctaacagatacacttagg

SEQ ID NO: 103469 - DNA, 25 bp, Artificial
  Probe
gtttgcttctctctcacattacagt

SEQ ID NO: 103470 - DNA, 25 bp, Artificial
  Probe
aatgactgaaacttaccttactgtg

SEQ ID NO: 103471 - DNA, 25 bp, Artificial
  Probe
gactgaaacttaccttactgtgaaa

SEQ ID NO: 103472 - DNA, 25 bp, Artificial
  Probe
ggctaacagatacacttaggaatct

SEQ ID NO: 103473 - DNA, 25 bp, Artificial
  Probe
ttatttcaacttctttgggtgtgtc

SEQ ID NO: 103474 - DNA, 25 bp, Artificial
  Probe
ggtttatttcaacttctttgggtgt

SEQ ID NO: 103475 - DNA, 25 bp, Artificial
  Probe
tggtttatttcaacttctttgggtg

SEQ ID NO: 103476 - DNA, 25 bp, Artificial
  Probe
gcttctctctcacattacagtttat

SEQ ID NO: 103477 - DNA, 25 bp, Artificial
  Probe
tttatttcaacttctttgggtgtgt

SEQ ID NO: 103478 - DNA, 25 bp, Artificial
  Probe
cctagctgtgtattatatccagtga

SEQ ID NO: 103479 - DNA, 25 bp, Artificial
  Probe
ttaagaatctgcctcattcgtggta

SEQ ID NO: 103480 - DNA, 25 bp, Artificial
  Probe
gtttatttcaacttctttgggtgtg

SEQ ID NO: 103481 - DNA, 25 bp, Artificial
  Probe
atggtttatttcaacttctttgggt

SEQ ID NO: 103482 - DNA, 25 bp, Artificial
  Probe
ctctctcacattacagtttattgga

SEQ ID NO: 103483 - DNA, 25 bp, Artificial
  Probe
tctctctcacattacagtttattgg

SEQ ID NO: 103484 - DNA, 25 bp, Artificial
  Probe
aaatgactgaaacttaccttactgt

SEQ ID NO: 103485 - DNA, 25 bp, Artificial
  Probe
ctgtagtgttaatttagggaatggt

SEQ ID NO: 103486 - DNA, 25 bp, Artificial
  Probe
actgtagtgttaatttagggaatgg

SEQ ID NO: 103487 - DNA, 25 bp, Artificial
  Probe
gagtttgcttctctctcacattaca

SEQ ID NO: 103488 - DNA, 25 bp, Artificial
  Probe
taagaatctgcctcattcgtggtag

SEQ ID NO: 103489 - DNA, 25 bp, Artificial
  Probe
tatttcaacttctttgggtgtgtcc

SEQ ID NO: 103490 - DNA, 25 bp, Artificial
  Probe
gctgctcttacttactgtgtggatg

SEQ ID NO: 103491 - DNA, 25 bp, Artificial
  Probe
gatacacttaggaatctattcagct

SEQ ID NO: 103492 - DNA, 25 bp, Artificial
  Probe
ctgaaacttaccttactgtgaaaca

SEQ ID NO: 103493 - DNA, 25 bp, Artificial
  Probe
ttaccttactgtgaaacactgtgaa

SEQ ID NO: 103494 - DNA, 25 bp, Artificial
  Probe
aacttaccttactgtgaaacactgt

SEQ ID NO: 103495 - DNA, 25 bp, Artificial
  Probe
tctctcacattacagtttattggat

SEQ ID NO: 103496 - DNA, 25 bp, Artificial
  Probe
aaacttaccttactgtgaaacactg

SEQ ID NO: 103497 - DNA, 25 bp, Artificial
  Probe
tgaaacttaccttactgtgaaacac

SEQ ID NO: 103498 - DNA, 25 bp, Artificial
  Probe
ccttactgtgaaacactgtgaacta

SEQ ID NO: 103499 - DNA, 25 bp, Artificial
  Probe
cttaccttactgtgaaacactgtga

SEQ ID NO: 103500 - DNA, 25 bp, Artificial
  Probe
catggtttatttcaacttctttggg

SEQ ID NO: 103501 - DNA, 25 bp, Artificial
  Probe
gagtatcttctgttgtatgtgacca

SEQ ID NO: 103502 - DNA, 25 bp, Artificial
  Probe
aggagtatcttctgttgtatgtgac

SEQ ID NO: 103503 - DNA, 25 bp, Artificial
  Probe
ggtattattggagacatctacagca

SEQ ID NO: 103504 - DNA, 25 bp, Artificial
  Probe
tggtattattggagacatctacagc

SEQ ID NO: 103505 - DNA, 25 bp, Artificial
  Probe
ggagtatcttctgttgtatgtgacc

SEQ ID NO: 103506 - DNA, 25 bp, Artificial
  Probe
gtctcttctatcaacaatatcgctg

SEQ ID NO: 103507 - DNA, 25 bp, Artificial
  Probe
attattggagacatctacagcactg

SEQ ID NO: 103508 - DNA, 25 bp, Artificial
  Probe
gtattattggagacatctacagcac

SEQ ID NO: 103509 - DNA, 25 bp, Artificial
  Probe
tattattggagacatctacagcact

SEQ ID NO: 103510 - DNA, 25 bp, Artificial
  Probe
aaggagtatcttctgttgtatgtga

SEQ ID NO: 103511 - DNA, 25 bp, Artificial
  Probe
agtatcttctgttgtatgtgaccaa

SEQ ID NO: 103512 - DNA, 25 bp, Artificial
  Probe
tcttctatcaacaatatcgctgaga

SEQ ID NO: 103513 - DNA, 25 bp, Artificial
  Probe
tctcttctatcaacaatatcgctga

SEQ ID NO: 103514 - DNA, 25 bp, Artificial
  Probe
atattaacagtgctactccattcct

SEQ ID NO: 103515 - DNA, 25 bp, Artificial
  Probe
tacgatactcaaggagattaagcag

SEQ ID NO: 103516 - DNA, 25 bp, Artificial
  Probe
gatattaacagtgctactccattcc

SEQ ID NO: 103517 - DNA, 25 bp, Artificial
  Probe
tctatcaacaatatcgctgagaatg

SEQ ID NO: 103518 - DNA, 25 bp, Artificial
  Probe
ctcttctatcaacaatatcgctgag

SEQ ID NO: 103519 - DNA, 25 bp, Artificial
  Probe
gaatgttaagcacaagacctattgg

SEQ ID NO: 103520 - DNA, 25 bp, Artificial
  Probe
tgagaatgttaagcacaagacctat

SEQ ID NO: 103521 - DNA, 25 bp, Artificial
  Probe
tgtctcttctatcaacaatatcgct

SEQ ID NO: 103522 - DNA, 25 bp, Artificial
  Probe
atacgatactcaaggagattaagca

SEQ ID NO: 103523 - DNA, 25 bp, Artificial
  Probe
ctgagaatgttaagcacaagaccta

SEQ ID NO: 103524 - DNA, 25 bp, Artificial
  Probe
agaatgttaagcacaagacctattg

SEQ ID NO: 103525 - DNA, 25 bp, Artificial
  Probe
tattaacagtgctactccattcctg

SEQ ID NO: 103526 - DNA, 25 bp, Artificial
  Probe
gagaatgttaagcacaagacctatt

SEQ ID NO: 103527 - DNA, 25 bp, Artificial
  Probe
ctatcaacaatatcgctgagaatgt

SEQ ID NO: 103528 - DNA, 25 bp, Artificial
  Probe
cagatattaacagtgctactccatt

SEQ ID NO: 103529 - DNA, 25 bp, Artificial
  Probe
ttattggagacatctacagcactgg

SEQ ID NO: 103530 - DNA, 25 bp, Artificial
  Probe
agatattaacagtgctactccattc

SEQ ID NO: 103531 - DNA, 25 bp, Artificial
  Probe
attaacagtgctactccattcctga

SEQ ID NO: 103532 - DNA, 25 bp, Artificial
  Probe
atggtattattggagacatctacag

SEQ ID NO: 103533 - DNA, 25 bp, Artificial
  Probe
gcactgaaggttattgtggataata

SEQ ID NO: 103534 - DNA, 25 bp, Artificial
  Probe
ggcactgaaggttattgtggataat

SEQ ID NO: 103535 - DNA, 25 bp, Artificial
  Probe
acgatactcaaggagattaagcagg

SEQ ID NO: 103536 - DNA, 25 bp, Artificial
  Probe
aagctgatggtattattggagacat

SEQ ID NO: 103537 - DNA, 25 bp, Artificial
  Probe
gaaggttattgtggataatatcagc

SEQ ID NO: 103538 - DNA, 25 bp, Artificial
  Probe
gtggataatatcagcttgaggatca

SEQ ID NO: 103539 - DNA, 25 bp, Artificial
  Probe
tgtggataatatcagcttgaggatc

SEQ ID NO: 103540 - DNA, 25 bp, Artificial
  Probe
tgggactgtgagaagactatgtata

SEQ ID NO: 103541 - DNA, 25 bp, Artificial
  Probe
ttgtggataatatcagcttgaggat

SEQ ID NO: 103542 - DNA, 25 bp, Artificial
  Probe
attgtggataatatcagcttgagga

SEQ ID NO: 103543 - DNA, 25 bp, Artificial
  Probe
gtcatatacaccataaacaaccagc

SEQ ID NO: 103544 - DNA, 25 bp, Artificial
  Probe
tactatattcccttcaactacgagc

SEQ ID NO: 103545 - DNA, 25 bp, Artificial
  Probe
ttaacagtgctactccattcctgag

SEQ ID NO: 103546 - DNA, 25 bp, Artificial
  Probe
ctacactcagctagtcgatctgcat

SEQ ID NO: 103547 - DNA, 25 bp, Artificial
  Probe
taaactacactcagctagtcgatct

SEQ ID NO: 103548 - DNA, 25 bp, Artificial
  Probe
gtaaactacactcagctagtcgatc

SEQ ID NO: 103549 - DNA, 25 bp, Artificial
  Probe
tacactcagctagtcgatctgcatg

SEQ ID NO: 103550 - DNA, 25 bp, Artificial
  Probe
aaactacactcagctagtcgatctg

SEQ ID NO: 103551 - DNA, 25 bp, Artificial
  Probe
cgtaaactacactcagctagtcgat

SEQ ID NO: 103552 - DNA, 25 bp, Artificial
  Probe
aactacactcagctagtcgatctgc

SEQ ID NO: 103553 - DNA, 25 bp, Artificial
  Probe
gacgtaaactacactcagctagtcg

SEQ ID NO: 103554 - DNA, 25 bp, Artificial
  Probe
cgacgtaaactacactcagctagtc

SEQ ID NO: 103555 - DNA, 25 bp, Artificial
  Probe
acgtaaactacactcagctagtcga

SEQ ID NO: 103556 - DNA, 25 bp, Artificial
  Probe
actacactcagctagtcgatctgca

SEQ ID NO: 103557 - DNA, 25 bp, Artificial
  Probe
ccactgtggaaatggatgaaagtcc

SEQ ID NO: 103558 - DNA, 25 bp, Artificial
  Probe
cccactgtggaaatggatgaaagtc

SEQ ID NO: 103559 - DNA, 25 bp, Artificial
  Probe
ccgacgtaaactacactcagctagt

SEQ ID NO: 103560 - DNA, 25 bp, Artificial
  Probe
cacccactgtggaaatggatgaaag

SEQ ID NO: 103561 - DNA, 25 bp, Artificial
  Probe
acccactgtggaaatggatgaaagt

SEQ ID NO: 103562 - DNA, 25 bp, Artificial
  Probe
aagatctgtgtaaatggggacgatg

SEQ ID NO: 103563 - DNA, 25 bp, Artificial
  Probe
caagatctgtgtaaatggggacgat

SEQ ID NO: 103564 - DNA, 25 bp, Artificial
  Probe
actgtggaaatggatgaaagtccag

SEQ ID NO: 103565 - DNA, 25 bp, Artificial
  Probe
cactgtggaaatggatgaaagtcca

SEQ ID NO: 103566 - DNA, 25 bp, Artificial
  Probe
ctgtggaaatggatgaaagtccagc

SEQ ID NO: 103567 - DNA, 25 bp, Artificial
  Probe
agatctgtgtaaatggggacgatgc

SEQ ID NO: 103568 - DNA, 25 bp, Artificial
  Probe
gcaagatctgtgtaaatggggacga

SEQ ID NO: 103569 - DNA, 25 bp, Artificial
  Probe
tgagagagaagagagtgagtaacag

SEQ ID NO: 103570 - DNA, 25 bp, Artificial
  Probe
ctgagagagaagagagtgagtaaca

SEQ ID NO: 103571 - DNA, 25 bp, Artificial
  Probe
gaagaagaactctattcctcctgtc

SEQ ID NO: 103572 - DNA, 25 bp, Artificial
  Probe
gtgaagaagaactctattcctcctg

SEQ ID NO: 103573 - DNA, 25 bp, Artificial
  Probe
tgaagaagaactctattcctcctgt

SEQ ID NO: 103574 - DNA, 25 bp, Artificial
  Probe
agtgaagaagaactctattcctcct

SEQ ID NO: 103575 - DNA, 25 bp, Artificial
  Probe
caccttggacaacttaacttatact

SEQ ID NO: 103576 - DNA, 25 bp, Artificial
  Probe
aagaggttcatctgtgacattcatt

SEQ ID NO: 103577 - DNA, 25 bp, Artificial
  Probe
gaagaggttcatctgtgacattcat

SEQ ID NO: 103578 - DNA, 25 bp, Artificial
  Probe
agaggttcatctgtgacattcattg

SEQ ID NO: 103579 - DNA, 25 bp, Artificial
  Probe
aagaagaactctattcctcctgtcg

SEQ ID NO: 103580 - DNA, 25 bp, Artificial
  Probe
accttggacaacttaacttatactc

SEQ ID NO: 103581 - DNA, 25 bp, Artificial
  Probe
gagagagaagagagtgagtaacagc

SEQ ID NO: 103582 - DNA, 25 bp, Artificial
  Probe
gctgagagagaagagagtgagtaac

SEQ ID NO: 103583 - DNA, 25 bp, Artificial
  Probe
gagagaagagagtgagtaacagcag

SEQ ID NO: 103584 - DNA, 25 bp, Artificial
  Probe
gaggttcatctgtgacattcattgt

SEQ ID NO: 103585 - DNA, 25 bp, Artificial
  Probe
agagagaagagagtgagtaacagca

SEQ ID NO: 103586 - DNA, 25 bp, Artificial
  Probe
gagagtgagtaacagcaggttctac

SEQ ID NO: 103587 - DNA, 25 bp, Artificial
  Probe
caccaaggagaacaacatgaagtac

SEQ ID NO: 103588 - DNA, 25 bp, Artificial
  Probe
agagagtgagtaacagcaggttcta

SEQ ID NO: 103589 - DNA, 25 bp, Artificial
  Probe
ccttggacaacttaacttatactcc

SEQ ID NO: 103590 - DNA, 25 bp, Artificial
  Probe
ccaccttggacaacttaacttatac

SEQ ID NO: 103591 - DNA, 25 bp, Artificial
  Probe
aggaagaggttcatctgtgacattc

SEQ ID NO: 103592 - DNA, 25 bp, Artificial
  Probe
gaggaatcagtccattgctattgag

SEQ ID NO: 103593 - DNA, 25 bp, Artificial
  Probe
gagaggaatcagtccattgctattg

SEQ ID NO: 103594 - DNA, 25 bp, Artificial
  Probe
acaccaaggagaacaacatgaagta

SEQ ID NO: 103595 - DNA, 25 bp, Artificial
  Probe
ggctgagagagaagagagtgagtaa

SEQ ID NO: 103596 - DNA, 25 bp, Artificial
  Probe
agaggaatcagtccattgctattga

SEQ ID NO: 103597 - DNA, 25 bp, Artificial
  Probe
ggaagaggttcatctgtgacattca

SEQ ID NO: 103598 - DNA, 25 bp, Artificial
  Probe
gaagagagtgagtaacagcaggttc

SEQ ID NO: 103599 - DNA, 25 bp, Artificial
  Probe
catagagatgacatttctgaagacg

SEQ ID NO: 103600 - DNA, 25 bp, Artificial
  Probe
ccattaaaggcatcaaatcaggatt

SEQ ID NO: 103601 - DNA, 25 bp, Artificial
  Probe
accatagagatgacatttctgaaga

SEQ ID NO: 103602 - DNA, 25 bp, Artificial
  Probe
caccatagagatgacatttctgaag

SEQ ID NO: 103603 - DNA, 25 bp, Artificial
  Probe
cttggacaacttaacttatactcct

SEQ ID NO: 103604 - DNA, 25 bp, Artificial
  Probe
ccatagagatgacatttctgaagac

SEQ ID NO: 103605 - DNA, 25 bp, Artificial
  Probe
cccattaaaggcatcaaatcaggat

SEQ ID NO: 103606 - DNA, 25 bp, Artificial
  Probe
tcaccatagagatgacatttctgaa

SEQ ID NO: 103607 - DNA, 25 bp, Artificial
  Probe
agagaagagagtgagtaacagcagg

SEQ ID NO: 103608 - DNA, 25 bp, Artificial
  Probe
agtatgacagcaacaaattcaagac

SEQ ID NO: 103609 - DNA, 25 bp, Artificial
  Probe
ggagaggaatcagtccattgctatt

SEQ ID NO: 103610 - DNA, 25 bp, Artificial
  Probe
gagtatgacagcaacaaattcaaga

SEQ ID NO: 103611 - DNA, 25 bp, Artificial
  Probe
caggaagaggttcatctgtgacatt

SEQ ID NO: 103612 - DNA, 25 bp, Artificial
  Probe
agtaacagcaggttctactcctaga

SEQ ID NO: 103613 - DNA, 25 bp, Artificial
  Probe
ctcaccatagagatgacatttctga

SEQ ID NO: 103614 - DNA, 25 bp, Artificial
  Probe
aacaagcctccttccaatagcatat

SEQ ID NO: 103615 - DNA, 25 bp, Artificial
  Probe
acaagcctccttccaatagcatatt

SEQ ID NO: 103616 - DNA, 25 bp, Artificial
  Probe
cttgaacctccgtatagtccgaatc

SEQ ID NO: 103617 - DNA, 25 bp, Artificial
  Probe
cacaggacataggagatccattatt

SEQ ID NO: 103618 - DNA, 25 bp, Artificial
  Probe
tcttgaacctccgtatagtccgaat

SEQ ID NO: 103619 - DNA, 25 bp, Artificial
  Probe
gcacaggacataggagatccattat

SEQ ID NO: 103620 - DNA, 25 bp, Artificial
  Probe
ttgaacctccgtatagtccgaatcc

SEQ ID NO: 103621 - DNA, 25 bp, Artificial
  Probe
gtcttgaacctccgtatagtccgaa

SEQ ID NO: 103622 - DNA, 25 bp, Artificial
  Probe
aaacaagcctccttccaatagcata

SEQ ID NO: 103623 - DNA, 25 bp, Artificial
  Probe
ggagatccattatttagagaccttt

SEQ ID NO: 103624 - DNA, 25 bp, Artificial
  Probe
acaggacataggagatccattattt

SEQ ID NO: 103625 - DNA, 25 bp, Artificial
  Probe
aggagatccattatttagagacctt

SEQ ID NO: 103626 - DNA, 25 bp, Artificial
  Probe
gaacatgcacaggacataggagatc

SEQ ID NO: 103627 - DNA, 25 bp, Artificial
  Probe
agaacatgcacaggacataggagat

SEQ ID NO: 103628 - DNA, 25 bp, Artificial
  Probe
tgtggtcttgaacctccgtatagtc

SEQ ID NO: 103629 - DNA, 25 bp, Artificial
  Probe
cctcaaaatataaaacaagcctcct

SEQ ID NO: 103630 - DNA, 25 bp, Artificial
  Probe
tcctcaaaatataaaacaagcctcc

SEQ ID NO: 103631 - DNA, 25 bp, Artificial
  Probe
taggagatccattatttagagacct

SEQ ID NO: 103632 - DNA, 25 bp, Artificial
  Probe
ataggagatccattatttagagacc

SEQ ID NO: 103633 - DNA, 25 bp, Artificial
  Probe
tgcacaggacataggagatccatta

SEQ ID NO: 103634 - DNA, 25 bp, Artificial
  Probe
gtgtggtcttgaacctccgtatagt

SEQ ID NO: 103635 - DNA, 25 bp, Artificial
  Probe
tgtgtggtcttgaacctccgtatag

SEQ ID NO: 103636 - DNA, 25 bp, Artificial
  Probe
ctgtgtggtcttgaacctccgtata

SEQ ID NO: 103637 - DNA, 25 bp, Artificial
  Probe
tggctctcctcaaaatataaaacaa

SEQ ID NO: 103638 - DNA, 25 bp, Artificial
  Probe
aaatataaaacaagcctccttccaa

SEQ ID NO: 103639 - DNA, 25 bp, Artificial
  Probe
aaaatataaaacaagcctccttcca

SEQ ID NO: 103640 - DNA, 25 bp, Artificial
  Probe
caagcctccttccaatagcatattg

SEQ ID NO: 103641 - DNA, 25 bp, Artificial
  Probe
ataaaacaagcctccttccaatagc

SEQ ID NO: 103642 - DNA, 25 bp, Artificial
  Probe
aatataaaacaagcctccttccaat

SEQ ID NO: 103643 - DNA, 25 bp, Artificial
  Probe
caaaatataaaacaagcctccttcc

SEQ ID NO: 103644 - DNA, 25 bp, Artificial
  Probe
tctcctcaaaatataaaacaagcct

SEQ ID NO: 103645 - DNA, 25 bp, Artificial
  Probe
tataaaacaagcctccttccaatag

SEQ ID NO: 103646 - DNA, 25 bp, Artificial
  Probe
caggacataggagatccattattta

SEQ ID NO: 103647 - DNA, 25 bp, Artificial
  Probe
ctcctcaaaatataaaacaagcctc

SEQ ID NO: 103648 - DNA, 25 bp, Artificial
  Probe
ctctcctcaaaatataaaacaagcc

SEQ ID NO: 103649 - DNA, 25 bp, Artificial
  Probe
ggctctcctcaaaatataaaacaag

SEQ ID NO: 103650 - DNA, 25 bp, Artificial
  Probe
ggacataggagatccattatttaga

SEQ ID NO: 103651 - DNA, 25 bp, Artificial
  Probe
aaaagattcaaggaggggaacagat

SEQ ID NO: 103652 - DNA, 25 bp, Artificial
  Probe
atgcacaggacataggagatccatt

SEQ ID NO: 103653 - DNA, 25 bp, Artificial
  Probe
aggacataggagatccattatttag

SEQ ID NO: 103654 - DNA, 25 bp, Artificial
  Probe
gtggtcttgaacctccgtatagtcc

SEQ ID NO: 103655 - DNA, 25 bp, Artificial
  Probe
atataaaacaagcctccttccaata

SEQ ID NO: 103656 - DNA, 25 bp, Artificial
  Probe
cagaacatgcacaggacataggaga

SEQ ID NO: 103657 - DNA, 25 bp, Artificial
  Probe
tcaaaatataaaacaagcctccttc

SEQ ID NO: 103658 - DNA, 25 bp, Artificial
  Probe
ctcaaaatataaaacaagcctcctt

SEQ ID NO: 103659 - DNA, 25 bp, Artificial
  Probe
atcgtcaatgatgaggttcgttatc

SEQ ID NO: 103660 - DNA, 25 bp, Artificial
  Probe
tcgtcaatgatgaggttcgttatcc

SEQ ID NO: 103661 - DNA, 25 bp, Artificial
  Probe
catcgtcaatgatgaggttcgttat

SEQ ID NO: 103662 - DNA, 25 bp, Artificial
  Probe
gaggaggaagtatttgacagcatcg

SEQ ID NO: 103663 - DNA, 25 bp, Artificial
  Probe
cgaggaggaagtatttgacagcatc

SEQ ID NO: 103664 - DNA, 25 bp, Artificial
  Probe
aggaggaagtatttgacagcatcgt

SEQ ID NO: 103665 - DNA, 25 bp, Artificial
  Probe
acgaggaggaagtatttgacagcat

SEQ ID NO: 103666 - DNA, 25 bp, Artificial
  Probe
cgtcaatgatgaggttcgttatccc

SEQ ID NO: 103667 - DNA, 25 bp, Artificial
  Probe
gaagtgctcacagacacatcctaca

SEQ ID NO: 103668 - DNA, 25 bp, Artificial
  Probe
ggaggaagtatttgacagcatcgtc

SEQ ID NO: 103669 - DNA, 25 bp, Artificial
  Probe
acgacgaggaggaagtatttgacag

SEQ ID NO: 103670 - DNA, 25 bp, Artificial
  Probe
gacgacgaggaggaagtatttgaca

SEQ ID NO: 103671 - DNA, 25 bp, Artificial
  Probe
aagtgctcacagacacatcctacac

SEQ ID NO: 103672 - DNA, 25 bp, Artificial
  Probe
gcatcgtcaatgatgaggttcgtta

SEQ ID NO: 103673 - DNA, 25 bp, Artificial
  Probe
gacgaggaggaagtatttgacagca

SEQ ID NO: 103674 - DNA, 25 bp, Artificial
  Probe
gtgctcacagacacatcctacactc

SEQ ID NO: 103675 - DNA, 25 bp, Artificial
  Probe
ggaagtgctcacagacacatcctac

SEQ ID NO: 103676 - DNA, 25 bp, Artificial
  Probe
ggacgacgaggaggaagtatttgac

SEQ ID NO: 103677 - DNA, 25 bp, Artificial
  Probe
gacagcatcgtcaatgatgaggttc

SEQ ID NO: 103678 - DNA, 25 bp, Artificial
  Probe
gtcaatgatgaggttcgttatcccc

SEQ ID NO: 103679 - DNA, 25 bp, Artificial
  Probe
tttcttcaggactctggactgggat

SEQ ID NO: 103680 - DNA, 25 bp, Artificial
  Probe
aaaacagcctttcttcaggactctg

SEQ ID NO: 103681 - DNA, 25 bp, Artificial
  Probe
aaacagcctttcttcaggactctgg

SEQ ID NO: 103682 - DNA, 25 bp, Artificial
  Probe
agcatcgtcaatgatgaggttcgtt

SEQ ID NO: 103683 - DNA, 25 bp, Artificial
  Probe
gaggaagtatttgacagcatcgtca

SEQ ID NO: 103684 - DNA, 25 bp, Artificial
  Probe
agcaacttcgatgaggagttcactg

SEQ ID NO: 103685 - DNA, 25 bp, Artificial
  Probe
cagcaacttcgatgaggagttcact

SEQ ID NO: 103686 - DNA, 25 bp, Artificial
  Probe
tcagcaacttcgatgaggagttcac

SEQ ID NO: 103687 - DNA, 25 bp, Artificial
  Probe
gtcagcaacttcgatgaggagttca

SEQ ID NO: 103688 - DNA, 25 bp, Artificial
  Probe
tgagcgtgatgcagaagatgtgaaa

SEQ ID NO: 103689 - DNA, 25 bp, Artificial
  Probe
tcaatgatgaggttcgttatccccg

SEQ ID NO: 103690 - DNA, 25 bp, Artificial
  Probe
tgacagcatcgtcaatgatgaggtt

SEQ ID NO: 103691 - DNA, 25 bp, Artificial
  Probe
gagcgtgatgcagaagatgtgaaaa

SEQ ID NO: 103692 - DNA, 25 bp, Artificial
  Probe
ctcacagacacatcctacactcgag

SEQ ID NO: 103693 - DNA, 25 bp, Artificial
  Probe
caacttcgatgaggagttcactggg

SEQ ID NO: 103694 - DNA, 25 bp, Artificial
  Probe
ctaagtgagactgtcgttgaagtag

SEQ ID NO: 103695 - DNA, 25 bp, Artificial
  Probe
tctaagtgagactgtcgttgaagta

SEQ ID NO: 103696 - DNA, 25 bp, Artificial
  Probe
ctctaagtgagactgtcgttgaagt

SEQ ID NO: 103697 - DNA, 25 bp, Artificial
  Probe
atttctgtgagtgggtttacgatta

SEQ ID NO: 103698 - DNA, 25 bp, Artificial
  Probe
taagtgagactgtcgttgaagtagc

SEQ ID NO: 103699 - DNA, 25 bp, Artificial
  Probe
ggtgtagactccttggtattagaaa

SEQ ID NO: 103700 - DNA, 25 bp, Artificial
  Probe
cttggtattagaaagcgtgatgttc

SEQ ID NO: 103701 - DNA, 25 bp, Artificial
  Probe
tgtagactccttggtattagaaagc

SEQ ID NO: 103702 - DNA, 25 bp, Artificial
  Probe
ggtttacgattacacttacgaggag

SEQ ID NO: 103703 - DNA, 25 bp, Artificial
  Probe
tttctgtgagtgggtttacgattac

SEQ ID NO: 103704 - DNA, 25 bp, Artificial
  Probe
gggtgtagactccttggtattagaa

SEQ ID NO: 103705 - DNA, 25 bp, Artificial
  Probe
gtagactccttggtattagaaagcg

SEQ ID NO: 103706 - DNA, 25 bp, Artificial
  Probe
tagactccttggtattagaaagcgt

SEQ ID NO: 103707 - DNA, 25 bp, Artificial
  Probe
cctctaagtgagactgtcgttgaag

SEQ ID NO: 103708 - DNA, 25 bp, Artificial
  Probe
catttctgtgagtgggtttacgatt

SEQ ID NO: 103709 - DNA, 25 bp, Artificial
  Probe
gaatcatttctgtgagtgggtttac

SEQ ID NO: 103710 - DNA, 25 bp, Artificial
  Probe
gtttacgattacacttacgaggagt

SEQ ID NO: 103711 - DNA, 25 bp, Artificial
  Probe
ccttggtattagaaagcgtgatgtt

SEQ ID NO: 103712 - DNA, 25 bp, Artificial
  Probe
ctccttggtattagaaagcgtgatg

SEQ ID NO: 103713 - DNA, 25 bp, Artificial
  Probe
ggaatcatttctgtgagtgggttta

SEQ ID NO: 103714 - DNA, 25 bp, Artificial
  Probe
ctttgacattgggaatcatttctgt

SEQ ID NO: 103715 - DNA, 25 bp, Artificial
  Probe
gctttgacattgggaatcatttctg

SEQ ID NO: 103716 - DNA, 25 bp, Artificial
  Probe
gtgtagactccttggtattagaaag

SEQ ID NO: 103717 - DNA, 25 bp, Artificial
  Probe
tttgacattgggaatcatttctgtg

SEQ ID NO: 103718 - DNA, 25 bp, Artificial
  Probe
ttggtattagaaagcgtgatgttcg

SEQ ID NO: 103719 - DNA, 25 bp, Artificial
  Probe
actccttggtattagaaagcgtgat

SEQ ID NO: 103720 - DNA, 25 bp, Artificial
  Probe
ttgacattgggaatcatttctgtga

SEQ ID NO: 103721 - DNA, 25 bp, Artificial
  Probe
gggtttacgattacacttacgagga

SEQ ID NO: 103722 - DNA, 25 bp, Artificial
  Probe
aatcatttctgtgagtgggtttacg

SEQ ID NO: 103723 - DNA, 25 bp, Artificial
  Probe
tccttggtattagaaagcgtgatgt

SEQ ID NO: 103724 - DNA, 25 bp, Artificial
  Probe
gacattgggaatcatttctgtgagt

SEQ ID NO: 103725 - DNA, 25 bp, Artificial
  Probe
tgacattgggaatcatttctgtgag

SEQ ID NO: 103726 - DNA, 25 bp, Artificial
  Probe
tgggtttacgattacacttacgagg

SEQ ID NO: 103727 - DNA, 25 bp, Artificial
  Probe
acattgggaatcatttctgtgagtg

SEQ ID NO: 103728 - DNA, 25 bp, Artificial
  Probe
gactccttggtattagaaagcgtga

SEQ ID NO: 103729 - DNA, 25 bp, Artificial
  Probe
agactccttggtattagaaagcgtg

SEQ ID NO: 103730 - DNA, 25 bp, Artificial
  Probe
ggctttgacattgggaatcatttct

SEQ ID NO: 103731 - DNA, 25 bp, Artificial
  Probe
ttggttgatttcgagtacagtagtt

SEQ ID NO: 103732 - DNA, 25 bp, Artificial
  Probe
tggttgatttcgagtacagtagtta

SEQ ID NO: 103733 - DNA, 25 bp, Artificial
  Probe
cattgggaatcatttctgtgagtgg

SEQ ID NO: 103734 - DNA, 25 bp, Artificial
  Probe
ggttgatttcgagtacagtagttac

SEQ ID NO: 103735 - DNA, 25 bp, Artificial
  Probe
gttggttgatttcgagtacagtagt

SEQ ID NO: 103736 - DNA, 25 bp, Artificial
  Probe
ttctgtgagtgggtttacgattaca

SEQ ID NO: 103737 - DNA, 25 bp, Artificial
  Probe
tcatttctgtgagtgggtttacgat

SEQ ID NO: 103738 - DNA, 25 bp, Artificial
  Probe
atcatttctgtgagtgggtttacga

SEQ ID NO: 103739 - DNA, 25 bp, Artificial
  Probe
caactccagcacatgaagtataatg

SEQ ID NO: 103740 - DNA, 25 bp, Artificial
  Probe
tcaactccagcacatgaagtataat

SEQ ID NO: 103741 - DNA, 25 bp, Artificial
  Probe
agcacatgaagtataatggtcagag

SEQ ID NO: 103742 - DNA, 25 bp, Artificial
  Probe
gcacatgaagtataatggtcagagt

SEQ ID NO: 103743 - DNA, 25 bp, Artificial
  Probe
cagcacatgaagtataatggtcaga

SEQ ID NO: 103744 - DNA, 25 bp, Artificial
  Probe
cacatgaagtataatggtcagagtt

SEQ ID NO: 103745 - DNA, 25 bp, Artificial
  Probe
ttggataagaaccagacattactga

SEQ ID NO: 103746 - DNA, 25 bp, Artificial
  Probe
ggataagaaccagacattactgatc

SEQ ID NO: 103747 - DNA, 25 bp, Artificial
  Probe
tggataagaaccagacattactgat

SEQ ID NO: 103748 - DNA, 25 bp, Artificial
  Probe
aactccagcacatgaagtataatgg

SEQ ID NO: 103749 - DNA, 25 bp, Artificial
  Probe
attattcaattctcaggaatgttgc

SEQ ID NO: 103750 - DNA, 25 bp, Artificial
  Probe
ccctcataaagaagtggaaattgac

SEQ ID NO: 103751 - DNA, 25 bp, Artificial
  Probe
gataagaaccagacattactgatct

SEQ ID NO: 103752 - DNA, 25 bp, Artificial
  Probe
ctccagcacatgaagtataatggtc

SEQ ID NO: 103753 - DNA, 25 bp, Artificial
  Probe
cactctgctgactttcaagattatt

SEQ ID NO: 103754 - DNA, 25 bp, Artificial
  Probe
caatctccatgttgtacctagatga

SEQ ID NO: 103755 - DNA, 25 bp, Artificial
  Probe
ccactctgctgactttcaagattat

SEQ ID NO: 103756 - DNA, 25 bp, Artificial
  Probe
ataatccactctgctgactttcaag

SEQ ID NO: 103757 - DNA, 25 bp, Artificial
  Probe
gataatccactctgctgactttcaa

SEQ ID NO: 103758 - DNA, 25 bp, Artificial
  Probe
gttaaagttcacaagttcaaatcca

SEQ ID NO: 103759 - DNA, 25 bp, Artificial
  Probe
tttcagttgtgtgtatttaagatgc

SEQ ID NO: 103760 - DNA, 25 bp, Artificial
  Probe
aatcagaagaaatatcgggtttgta

SEQ ID NO: 103761 - DNA, 25 bp, Artificial
  Probe
taatcagaagaaatatcgggtttgt

SEQ ID NO: 103762 - DNA, 25 bp, Artificial
  Probe
tgtaatcagaagaaatatcgggttt

SEQ ID NO: 103763 - DNA, 25 bp, Artificial
  Probe
ccagcacatgaagtataatggtcag

SEQ ID NO: 103764 - DNA, 25 bp, Artificial
  Probe
aatctccatgttgtacctagatgaa

SEQ ID NO: 103765 - DNA, 25 bp, Artificial
  Probe
cctcataaagaagtggaaattgact

SEQ ID NO: 103766 - DNA, 25 bp, Artificial
  Probe
gcactactgttaaagttcacaagtt

SEQ ID NO: 103767 - DNA, 25 bp, Artificial
  Probe
atgtaatcagaagaaatatcgggtt

SEQ ID NO: 103768 - DNA, 25 bp, Artificial
  Probe
atcagaagaaatatcgggtttgtat

SEQ ID NO: 103769 - DNA, 25 bp, Artificial
  Probe
gtaatcagaagaaatatcgggtttg

SEQ ID NO: 103770 - DNA, 25 bp, Artificial
  Probe
agcactactgttaaagttcacaagt

SEQ ID NO: 103771 - DNA, 25 bp, Artificial
  Probe
tccagcacatgaagtataatggtca

SEQ ID NO: 103772 - DNA, 25 bp, Artificial
  Probe
actccagcacatgaagtataatggt

SEQ ID NO: 103773 - DNA, 25 bp, Artificial
  Probe
gccctcataaagaagtggaaattga

SEQ ID NO: 103774 - DNA, 25 bp, Artificial
  Probe
gcaatctccatgttgtacctagatg

SEQ ID NO: 103775 - DNA, 25 bp, Artificial
  Probe
cagcactactgttaaagttcacaag

SEQ ID NO: 103776 - DNA, 25 bp, Artificial
  Probe
tccactctgctgactttcaagatta

SEQ ID NO: 103777 - DNA, 25 bp, Artificial
  Probe
taatccactctgctgactttcaaga

SEQ ID NO: 103778 - DNA, 25 bp, Artificial
  Probe
taaagttcacaagttcaaatccaaa

SEQ ID NO: 103779 - DNA, 25 bp, Artificial
  Probe
ttaaagttcacaagttcaaatccaa

SEQ ID NO: 103780 - DNA, 25 bp, Artificial
  Probe
acatgaagtataatggtcagagtta

SEQ ID NO: 103781 - DNA, 25 bp, Artificial
  Probe
tattcaattctcaggaatgttgcag

SEQ ID NO: 103782 - DNA, 25 bp, Artificial
  Probe
ttcaactccagcacatgaagtataa

SEQ ID NO: 103783 - DNA, 25 bp, Artificial
  Probe
actactgttaaagttcacaagttca

SEQ ID NO: 103784 - DNA, 25 bp, Artificial
  Probe
atcacctaacgtaatggaccttgta

SEQ ID NO: 103785 - DNA, 25 bp, Artificial
  Probe
aacctatttcctagtaagccctgat

SEQ ID NO: 103786 - DNA, 25 bp, Artificial
  Probe
aaacctatttcctagtaagccctga

SEQ ID NO: 103787 - DNA, 25 bp, Artificial
  Probe
tcacctaacgtaatggaccttgtag

SEQ ID NO: 103788 - DNA, 25 bp, Artificial
  Probe
cctatttcctagtaagccctgatct

SEQ ID NO: 103789 - DNA, 25 bp, Artificial
  Probe
tatttcctagtaagccctgatcttg

SEQ ID NO: 103790 - DNA, 25 bp, Artificial
  Probe
ctatttcctagtaagccctgatctt

SEQ ID NO: 103791 - DNA, 25 bp, Artificial
  Probe
acctatttcctagtaagccctgatc

SEQ ID NO: 103792 - DNA, 25 bp, Artificial
  Probe
cgtaatggaccttgtaggagcaatt

SEQ ID NO: 103793 - DNA, 25 bp, Artificial
  Probe
cttgtaggagcaatttatgtactgt

SEQ ID NO: 103794 - DNA, 25 bp, Artificial
  Probe
ggaccttgtaggagcaatttatgta

SEQ ID NO: 103795 - DNA, 25 bp, Artificial
  Probe
aatggaccttgtaggagcaatttat

SEQ ID NO: 103796 - DNA, 25 bp, Artificial
  Probe
taatggaccttgtaggagcaattta

SEQ ID NO: 103797 - DNA, 25 bp, Artificial
  Probe
gatcacctaacgtaatggaccttgt

SEQ ID NO: 103798 - DNA, 25 bp, Artificial
  Probe
atgcctattctaagacatttctgaa

SEQ ID NO: 103799 - DNA, 25 bp, Artificial
  Probe
agatgactatttatgaacctttgga

SEQ ID NO: 103800 - DNA, 25 bp, Artificial
  Probe
atggaccttgtaggagcaatttatg

SEQ ID NO: 103801 - DNA, 25 bp, Artificial
  Probe
gtaatggaccttgtaggagcaattt

SEQ ID NO: 103802 - DNA, 25 bp, Artificial
  Probe
atttcctagtaagccctgatcttgg

SEQ ID NO: 103803 - DNA, 25 bp, Artificial
  Probe
accttgtaggagcaatttatgtact

SEQ ID NO: 103804 - DNA, 25 bp, Artificial
  Probe
ccttgtaggagcaatttatgtactg

SEQ ID NO: 103805 - DNA, 25 bp, Artificial
  Probe
gaccttgtaggagcaatttatgtac

SEQ ID NO: 103806 - DNA, 25 bp, Artificial
  Probe
tgtaggagcaatttatgtactgtaa

SEQ ID NO: 103807 - DNA, 25 bp, Artificial
  Probe
ggatcacctaacgtaatggaccttg

SEQ ID NO: 103808 - DNA, 25 bp, Artificial
  Probe
gatgactatttatgaacctttggaa

SEQ ID NO: 103809 - DNA, 25 bp, Artificial
  Probe
tggaccttgtaggagcaatttatgt

SEQ ID NO: 103810 - DNA, 25 bp, Artificial
  Probe
tcagaaacctatttcctagtaagcc

SEQ ID NO: 103811 - DNA, 25 bp, Artificial
  Probe
ttggaaggatcacctaacgtaatgg

SEQ ID NO: 103812 - DNA, 25 bp, Artificial
  Probe
ttgtaggagcaatttatgtactgta

SEQ ID NO: 103813 - DNA, 25 bp, Artificial
  Probe
gaaacctatttcctagtaagccctg

SEQ ID NO: 103814 - DNA, 25 bp, Artificial
  Probe
agaaacctatttcctagtaagccct

SEQ ID NO: 103815 - DNA, 25 bp, Artificial
  Probe
cagaaacctatttcctagtaagccc

SEQ ID NO: 103816 - DNA, 25 bp, Artificial
  Probe
atgactatttatgaacctttggaag

SEQ ID NO: 103817 - DNA, 25 bp, Artificial
  Probe
aagatgactatttatgaacctttgg

SEQ ID NO: 103818 - DNA, 25 bp, Artificial
  Probe
aagtgggaagagtgcattactattt

SEQ ID NO: 103819 - DNA, 25 bp, Artificial
  Probe
agtgggaagagtgcattactattta

SEQ ID NO: 103820 - DNA, 25 bp, Artificial
  Probe
gaagtgggaagagtgcattactatt

SEQ ID NO: 103821 - DNA, 25 bp, Artificial
  Probe
tgcctattctaagacatttctgaat

SEQ ID NO: 103822 - DNA, 25 bp, Artificial
  Probe
gtgggaagagtgcattactatttaa

SEQ ID NO: 103823 - DNA, 25 bp, Artificial
  Probe
ctaacgtaatggaccttgtaggagc

SEQ ID NO: 103824 - DNA, 25 bp, Artificial
  Probe
gaaggatcacctaacgtaatggacc

SEQ ID NO: 103825 - DNA, 25 bp, Artificial
  Probe
ggaaggatcacctaacgtaatggac

SEQ ID NO: 103826 - DNA, 25 bp, Artificial
  Probe
gcattactatttaagttcacttgga

SEQ ID NO: 103827 - DNA, 25 bp, Artificial
  Probe
gggaagagtgcattactatttaagt

SEQ ID NO: 103828 - DNA, 25 bp, Artificial
  Probe
tgggaagagtgcattactatttaag

SEQ ID NO: 103829 - DNA, 25 bp, Artificial
  Probe
gctcattaccagagactgtgatatt

SEQ ID NO: 103830 - DNA, 25 bp, Artificial
  Probe
ggacttctcaagatcatggctaatt

SEQ ID NO: 103831 - DNA, 25 bp, Artificial
  Probe
tctcaagatcatggctaattatggc

SEQ ID NO: 103832 - DNA, 25 bp, Artificial
  Probe
tggacttctcaagatcatggctaat

SEQ ID NO: 103833 - DNA, 25 bp, Artificial
  Probe
atggacttctcaagatcatggctaa

SEQ ID NO: 103834 - DNA, 25 bp, Artificial
  Probe
ttctcaagatcatggctaattatgg

SEQ ID NO: 103835 - DNA, 25 bp, Artificial
  Probe
ggctcattaccagagactgtgatat

SEQ ID NO: 103836 - DNA, 25 bp, Artificial
  Probe
gacttctcaagatcatggctaatta

SEQ ID NO: 103837 - DNA, 25 bp, Artificial
  Probe
ctccactaccctctaagactgttta

SEQ ID NO: 103838 - DNA, 25 bp, Artificial
  Probe
ccactaccctctaagactgtttact

SEQ ID NO: 103839 - DNA, 25 bp, Artificial
  Probe
tccactaccctctaagactgtttac

SEQ ID NO: 103840 - DNA, 25 bp, Artificial
  Probe
cactaccctctaagactgtttactt

SEQ ID NO: 103841 - DNA, 25 bp, Artificial
  Probe
acttctcaagatcatggctaattat

SEQ ID NO: 103842 - DNA, 25 bp, Artificial
  Probe
aggtaataatacatccaagtggagg

SEQ ID NO: 103843 - DNA, 25 bp, Artificial
  Probe
gagactgtgatatttgaattgatgc

SEQ ID NO: 103844 - DNA, 25 bp, Artificial
  Probe
cttctcaagatcatggctaattatg

SEQ ID NO: 103845 - DNA, 25 bp, Artificial
  Probe
accagagactgtgatatttgaattg

SEQ ID NO: 103846 - DNA, 25 bp, Artificial
  Probe
ccagagactgtgatatttgaattga

SEQ ID NO: 103847 - DNA, 25 bp, Artificial
  Probe
tggctcattaccagagactgtgata

SEQ ID NO: 103848 - DNA, 25 bp, Artificial
  Probe
cattaccagagactgtgatatttga

SEQ ID NO: 103849 - DNA, 25 bp, Artificial
  Probe
tcattaccagagactgtgatatttg

SEQ ID NO: 103850 - DNA, 25 bp, Artificial
  Probe
gtgaacgccagaacgagattaacaa

SEQ ID NO: 103851 - DNA, 25 bp, Artificial
  Probe
gaacgccagaacgagattaacaaag

SEQ ID NO: 103852 - DNA, 25 bp, Artificial
  Probe
ctcattaccagagactgtgatattt

SEQ ID NO: 103853 - DNA, 25 bp, Artificial
  Probe
actaccctctaagactgtttactta

SEQ ID NO: 103854 - DNA, 25 bp, Artificial
  Probe
tgatatttgaattgatgcagttccc

SEQ ID NO: 103855 - DNA, 25 bp, Artificial
  Probe
atttgaattgatgcagttccctcta

SEQ ID NO: 103856 - DNA, 25 bp, Artificial
  Probe
tatttgaattgatgcagttccctct

SEQ ID NO: 103857 - DNA, 25 bp, Artificial
  Probe
atatttgaattgatgcagttccctc

SEQ ID NO: 103858 - DNA, 25 bp, Artificial
  Probe
gatatttgaattgatgcagttccct

SEQ ID NO: 103859 - DNA, 25 bp, Artificial
  Probe
ctttggaagctactgagattcttgg

SEQ ID NO: 103860 - DNA, 25 bp, Artificial
  Probe
agactgtgatatttgaattgatgca

SEQ ID NO: 103861 - DNA, 25 bp, Artificial
  Probe
agagactgtgatatttgaattgatg

SEQ ID NO: 103862 - DNA, 25 bp, Artificial
  Probe
cctccactaccctctaagactgttt

SEQ ID NO: 103863 - DNA, 25 bp, Artificial
  Probe
taggtaataatacatccaagtggag

SEQ ID NO: 103864 - DNA, 25 bp, Artificial
  Probe
gtgatatttgaattgatgcagttcc

SEQ ID NO: 103865 - DNA, 25 bp, Artificial
  Probe
atggctcattaccagagactgtgat

SEQ ID NO: 103866 - DNA, 25 bp, Artificial
  Probe
taccagagactgtgatatttgaatt

SEQ ID NO: 103867 - DNA, 25 bp, Artificial
  Probe
ttaccagagactgtgatatttgaat

SEQ ID NO: 103868 - DNA, 25 bp, Artificial
  Probe
attaccagagactgtgatatttgaa

SEQ ID NO: 103869 - DNA, 25 bp, Artificial
  Probe
taataatacatccaagtggagggtg

SEQ ID NO: 103870 - DNA, 25 bp, Artificial
  Probe
gtaataatacatccaagtggagggt

SEQ ID NO: 103871 - DNA, 25 bp, Artificial
  Probe
ggtaataatacatccaagtggaggg

SEQ ID NO: 103872 - DNA, 25 bp, Artificial
  Probe
tttgaattgatgcagttccctctac

SEQ ID NO: 103873 - DNA, 25 bp, Artificial
  Probe
tgtgatatttgaattgatgcagttc

SEQ ID NO: 103874 - DNA, 25 bp, Artificial
  Probe
cggaagttgagaggaaatctaagat

SEQ ID NO: 103875 - DNA, 25 bp, Artificial
  Probe
ttgagaggaaatctaagatcactgc

SEQ ID NO: 103876 - DNA, 25 bp, Artificial
  Probe
ggaagttgagaggaaatctaagatc

SEQ ID NO: 103877 - DNA, 25 bp, Artificial
  Probe
gttgagaggaaatctaagatcactg

SEQ ID NO: 103878 - DNA, 25 bp, Artificial
  Probe
agttgagaggaaatctaagatcact

SEQ ID NO: 103879 - DNA, 25 bp, Artificial
  Probe
aagttgagaggaaatctaagatcac

SEQ ID NO: 103880 - DNA, 25 bp, Artificial
  Probe
tgagaggaaatctaagatcactgcc

SEQ ID NO: 103881 - DNA, 25 bp, Artificial
  Probe
gaagttgagaggaaatctaagatca

SEQ ID NO: 103882 - DNA, 25 bp, Artificial
  Probe
gagaggaaatctaagatcactgcct

SEQ ID NO: 103883 - DNA, 25 bp, Artificial
  Probe
ctatgatatcgaagccaaatgcctc

SEQ ID NO: 103884 - DNA, 25 bp, Artificial
  Probe
atctaagatcactgcctcccgtaaa

SEQ ID NO: 103885 - DNA, 25 bp, Artificial
  Probe
aatctaagatcactgcctcccgtaa

SEQ ID NO: 103886 - DNA, 25 bp, Artificial
  Probe
aaatctaagatcactgcctcccgta

SEQ ID NO: 103887 - DNA, 25 bp, Artificial
  Probe
cacgagagagatcaaggacctgaag

SEQ ID NO: 103888 - DNA, 25 bp, Artificial
  Probe
agagatcaaggacctgaagctgaag

SEQ ID NO: 103889 - DNA, 25 bp, Artificial
  Probe
gagagatcaaggacctgaagctgaa

SEQ ID NO: 103890 - DNA, 25 bp, Artificial
  Probe
caacacgagagagatcaaggacctg

SEQ ID NO: 103891 - DNA, 25 bp, Artificial
  Probe
tatgatatcgaagccaaatgcctcc

SEQ ID NO: 103892 - DNA, 25 bp, Artificial
  Probe
ccggaagttgagaggaaatctaaga

SEQ ID NO: 103893 - DNA, 25 bp, Artificial
  Probe
gagagagatcaaggacctgaagctg

SEQ ID NO: 103894 - DNA, 25 bp, Artificial
  Probe
taagatcactgcctcccgtaaactc

SEQ ID NO: 103895 - DNA, 25 bp, Artificial
  Probe
ctaagatcactgcctcccgtaaact

SEQ ID NO: 103896 - DNA, 25 bp, Artificial
  Probe
tctaagatcactgcctcccgtaaac

SEQ ID NO: 103897 - DNA, 25 bp, Artificial
  Probe
ctccacaacacgagagagatcaagg

SEQ ID NO: 103898 - DNA, 25 bp, Artificial
  Probe
cctccacaacacgagagagatcaag

SEQ ID NO: 103899 - DNA, 25 bp, Artificial
  Probe
acacgagagagatcaaggacctgaa

SEQ ID NO: 103900 - DNA, 25 bp, Artificial
  Probe
aacacgagagagatcaaggacctga

SEQ ID NO: 103901 - DNA, 25 bp, Artificial
  Probe
cacaacacgagagagatcaaggacc

SEQ ID NO: 103902 - DNA, 25 bp, Artificial
  Probe
ccacaacacgagagagatcaaggac

SEQ ID NO: 103903 - DNA, 25 bp, Artificial
  Probe
acaacacgagagagatcaaggacct

SEQ ID NO: 103904 - DNA, 25 bp, Artificial
  Probe
agagagatcaaggacctgaagctga

SEQ ID NO: 103905 - DNA, 25 bp, Artificial
  Probe
taaactcatgctgaagagcctgatg

SEQ ID NO: 103906 - DNA, 25 bp, Artificial
  Probe
gtaaactcatgctgaagagcctgat

SEQ ID NO: 103907 - DNA, 25 bp, Artificial
  Probe
aggaaatctaagatcactgcctccc

SEQ ID NO: 103908 - DNA, 25 bp, Artificial
  Probe
gaaatctaagatcactgcctcccgt

SEQ ID NO: 103909 - DNA, 25 bp, Artificial
  Probe
gagatcaaggacctgaagctgaagg

SEQ ID NO: 103910 - DNA, 25 bp, Artificial
  Probe
gccggaagttgagaggaaatctaag

SEQ ID NO: 103911 - DNA, 25 bp, Artificial
  Probe
tccacaacacgagagagatcaagga

SEQ ID NO: 103912 - DNA, 25 bp, Artificial
  Probe
atgccggaagttgagaggaaatcta

SEQ ID NO: 103913 - DNA, 25 bp, Artificial
  Probe
tgccggaagttgagaggaaatctaa

SEQ ID NO: 103914 - DNA, 25 bp, Artificial
  Probe
gctatgatatcgaagccaaatgcct

SEQ ID NO: 103915 - DNA, 25 bp, Artificial
  Probe
ctcatgctgaagagcctgatgctag

SEQ ID NO: 103916 - DNA, 25 bp, Artificial
  Probe
atgatatcgaagccaaatgcctcca

SEQ ID NO: 103917 - DNA, 25 bp, Artificial
  Probe
cctcccgtaaactcatgctgaagag

SEQ ID NO: 103918 - DNA, 25 bp, Artificial
  Probe
atatcgaagccaaatgcctccacaa

SEQ ID NO: 103919 - DNA, 25 bp, Artificial
  Probe
ggaggaagaatattgaggagaagtc

SEQ ID NO: 103920 - DNA, 25 bp, Artificial
  Probe
ctggaggaagaatattgaggagaag

SEQ ID NO: 103921 - DNA, 25 bp, Artificial
  Probe
tggaggaagaatattgaggagaagt

SEQ ID NO: 103922 - DNA, 25 bp, Artificial
  Probe
actggaggaagaatattgaggagaa

SEQ ID NO: 103923 - DNA, 25 bp, Artificial
  Probe
gactggaggaagaatattgaggaga

SEQ ID NO: 103924 - DNA, 25 bp, Artificial
  Probe
ggaagaatattgaggagaagtctgg

SEQ ID NO: 103925 - DNA, 25 bp, Artificial
  Probe
aggaagaatattgaggagaagtctg

SEQ ID NO: 103926 - DNA, 25 bp, Artificial
  Probe
gaatattgaggagaagtctggcatg

SEQ ID NO: 103927 - DNA, 25 bp, Artificial
  Probe
gaggaagaatattgaggagaagtct

SEQ ID NO: 103928 - DNA, 25 bp, Artificial
  Probe
caagaaggaagacactgagaaggag

SEQ ID NO: 103929 - DNA, 25 bp, Artificial
  Probe
tgactggaggaagaatattgaggag

SEQ ID NO: 103930 - DNA, 25 bp, Artificial
  Probe
gaagaatattgaggagaagtctggc

SEQ ID NO: 103931 - DNA, 25 bp, Artificial
  Probe
gtgactggaggaagaatattgagga

SEQ ID NO: 103932 - DNA, 25 bp, Artificial
  Probe
agaatattgaggagaagtctggcat

SEQ ID NO: 103933 - DNA, 25 bp, Artificial
  Probe
aagaatattgaggagaagtctggca

SEQ ID NO: 103934 - DNA, 25 bp, Artificial
  Probe
aatattgaggagaagtctggcatgg

SEQ ID NO: 103935 - DNA, 25 bp, Artificial
  Probe
ggtgactggaggaagaatattgagg

SEQ ID NO: 103936 - DNA, 25 bp, Artificial
  Probe
tcaagaaggaagacactgagaagga

SEQ ID NO: 103937 - DNA, 25 bp, Artificial
  Probe
tgaagaggagaaatatgacatggag

SEQ ID NO: 103938 - DNA, 25 bp, Artificial
  Probe
ctgaagaggagaaatatgacatgga

SEQ ID NO: 103939 - DNA, 25 bp, Artificial
  Probe
gaagaggagaaatatgacatggagg

SEQ ID NO: 103940 - DNA, 25 bp, Artificial
  Probe
gtcaagaaggaagacactgagaagg

SEQ ID NO: 103941 - DNA, 25 bp, Artificial
  Probe
ggtcaagaaggaagacactgagaag

SEQ ID NO: 103942 - DNA, 25 bp, Artificial
  Probe
ggagaaatatgacatggaggtgaag

SEQ ID NO: 103943 - DNA, 25 bp, Artificial
  Probe
aagaggagaaatatgacatggaggt

SEQ ID NO: 103944 - DNA, 25 bp, Artificial
  Probe
atattgaggagaagtctggcatgga

SEQ ID NO: 103945 - DNA, 25 bp, Artificial
  Probe
aggagaaatatgacatggaggtgaa

SEQ ID NO: 103946 - DNA, 25 bp, Artificial
  Probe
gctgaagaggagaaatatgacatgg

SEQ ID NO: 103947 - DNA, 25 bp, Artificial
  Probe
ggctgaagaggagaaatatgacatg

SEQ ID NO: 103948 - DNA, 25 bp, Artificial
  Probe
aggtcaagaaggaagacactgagaa

SEQ ID NO: 103949 - DNA, 25 bp, Artificial
  Probe
gaagacatgaaccagaagctatttg

SEQ ID NO: 103950 - DNA, 25 bp, Artificial
  Probe
aagacatgaaccagaagctatttga

SEQ ID NO: 103951 - DNA, 25 bp, Artificial
  Probe
gaggagaaatatgacatggaggtga

SEQ ID NO: 103952 - DNA, 25 bp, Artificial
  Probe
agaggagaaatatgacatggaggtg

SEQ ID NO: 103953 - DNA, 25 bp, Artificial
  Probe
cggctgaagaggagaaatatgacat

SEQ ID NO: 103954 - DNA, 25 bp, Artificial
  Probe
agacatgaaccagaagctatttgac

SEQ ID NO: 103955 - DNA, 25 bp, Artificial
  Probe
ggaagacatgaaccagaagctattt

SEQ ID NO: 103956 - DNA, 25 bp, Artificial
  Probe
tggaagacatgaaccagaagctatt

SEQ ID NO: 103957 - DNA, 25 bp, Artificial
  Probe
aagaaggaagacactgagaaggagc

SEQ ID NO: 103958 - DNA, 25 bp, Artificial
  Probe
tattgaggagaagtctggcatggag

SEQ ID NO: 103959 - DNA, 25 bp, Artificial
  Probe
ctcactccaataaaggattcgcatc

SEQ ID NO: 103960 - DNA, 25 bp, Artificial
  Probe
caggtcaagaaggaagacactgaga

SEQ ID NO: 103961 - DNA, 25 bp, Artificial
  Probe
gggtgactggaggaagaatattgag

SEQ ID NO: 103962 - DNA, 25 bp, Artificial
  Probe
gatgcggctgaagaggagaaatatg

SEQ ID NO: 103963 - DNA, 25 bp, Artificial
  Probe
gtgggtgactggaggaagaatattg

SEQ ID NO: 103964 - DNA, 25 bp, Artificial
  Probe
ataagttctccagcagtaaggtcta

SEQ ID NO: 103965 - DNA, 25 bp, Artificial
  Probe
tataagttctccagcagtaaggtct

SEQ ID NO: 103966 - DNA, 25 bp, Artificial
  Probe
atataagttctccagcagtaaggtc

SEQ ID NO: 103967 - DNA, 25 bp, Artificial
  Probe
gatataagttctccagcagtaaggt

SEQ ID NO: 103968 - DNA, 25 bp, Artificial
  Probe
taagttctccagcagtaaggtctac

SEQ ID NO: 103969 - DNA, 25 bp, Artificial
  Probe
agatataagttctccagcagtaagg

SEQ ID NO: 103970 - DNA, 25 bp, Artificial
  Probe
gtacggagattatgatgaagcacaa

SEQ ID NO: 103971 - DNA, 25 bp, Artificial
  Probe
tatgatgaagcacaaacctggaata

SEQ ID NO: 103972 - DNA, 25 bp, Artificial
  Probe
gagattatgatgaagcacaaacctg

SEQ ID NO: 103973 - DNA, 25 bp, Artificial
  Probe
tacggagattatgatgaagcacaaa

SEQ ID NO: 103974 - DNA, 25 bp, Artificial
  Probe
aagttctccagcagtaaggtctaca

SEQ ID NO: 103975 - DNA, 25 bp, Artificial
  Probe
aagtcctactgacgacacctactat

SEQ ID NO: 103976 - DNA, 25 bp, Artificial
  Probe
cttggatcacttcaacaacgagatg

SEQ ID NO: 103977 - DNA, 25 bp, Artificial
  Probe
ggtgtacggagattatgatgaagca

SEQ ID NO: 103978 - DNA, 25 bp, Artificial
  Probe
tgtacggagattatgatgaagcaca

SEQ ID NO: 103979 - DNA, 25 bp, Artificial
  Probe
atgatgaagcacaaacctggaataa

SEQ ID NO: 103980 - DNA, 25 bp, Artificial
  Probe
ttatgatgaagcacaaacctggaat

SEQ ID NO: 103981 - DNA, 25 bp, Artificial
  Probe
attatgatgaagcacaaacctggaa

SEQ ID NO: 103982 - DNA, 25 bp, Artificial
  Probe
tgatgaagcacaaacctggaataaa

SEQ ID NO: 103983 - DNA, 25 bp, Artificial
  Probe
ggagattatgatgaagcacaaacct

SEQ ID NO: 103984 - DNA, 25 bp, Artificial
  Probe
gtgtacggagattatgatgaagcac

SEQ ID NO: 103985 - DNA, 25 bp, Artificial
  Probe
gattatgatgaagcacaaacctgga

SEQ ID NO: 103986 - DNA, 25 bp, Artificial
  Probe
agattatgatgaagcacaaacctgg

SEQ ID NO: 103987 - DNA, 25 bp, Artificial
  Probe
atgctcctaaacctctgttctttaa

SEQ ID NO: 103988 - DNA, 25 bp, Artificial
  Probe
gatgctcctaaacctctgttcttta

SEQ ID NO: 103989 - DNA, 25 bp, Artificial
  Probe
agtcctactgacgacacctactatc

SEQ ID NO: 103990 - DNA, 25 bp, Artificial
  Probe
agttctccagcagtaaggtctacag

SEQ ID NO: 103991 - DNA, 25 bp, Artificial
  Probe
gaagtcctactgacgacacctacta

SEQ ID NO: 103992 - DNA, 25 bp, Artificial
  Probe
acggagattatgatgaagcacaaac

SEQ ID NO: 103993 - DNA, 25 bp, Artificial
  Probe
agatgctcctaaacctctgttcttt

SEQ ID NO: 103994 - DNA, 25 bp, Artificial
  Probe
ctactgacgacacctactatccacc

SEQ ID NO: 103995 - DNA, 25 bp, Artificial
  Probe
cctactgacgacacctactatccac

SEQ ID NO: 103996 - DNA, 25 bp, Artificial
  Probe
cacttcaacaacgagatgctcctaa

SEQ ID NO: 103997 - DNA, 25 bp, Artificial
  Probe
tcctactgacgacacctactatcca

SEQ ID NO: 103998 - DNA, 25 bp, Artificial
  Probe
cggagattatgatgaagcacaaacc

SEQ ID NO: 103999 - DNA, 25 bp, Artificial
  Probe
ctagaagatccaacttccaccttag

SEQ ID NO: 104000 - DNA, 25 bp, Artificial
  Probe
tagaagatccaacttccaccttaga

SEQ ID NO: 104001 - DNA, 25 bp, Artificial
  Probe
gaagatccaacttccaccttagatc

SEQ ID NO: 104002 - DNA, 25 bp, Artificial
  Probe
gtcctactgacgacacctactatcc

SEQ ID NO: 104003 - DNA, 25 bp, Artificial
  Probe
gagatgctcctaaacctctgttctt

SEQ ID NO: 104004 - DNA, 25 bp, Artificial
  Probe
agaagatccaacttccaccttagat

SEQ ID NO: 104005 - DNA, 25 bp, Artificial
  Probe
tgctcctaaacctctgttctttaaa

SEQ ID NO: 104006 - DNA, 25 bp, Artificial
  Probe
cttcaacaacgagatgctcctaaac

SEQ ID NO: 104007 - DNA, 25 bp, Artificial
  Probe
cacctactatccaccctatcctctg

SEQ ID NO: 104008 - DNA, 25 bp, Artificial
  Probe
gacacctactatccaccctatcctc

SEQ ID NO: 104009 - DNA, 25 bp, Artificial
  Probe
aatcaccaagttccaaccattaaga

SEQ ID NO: 104010 - DNA, 25 bp, Artificial
  Probe
atcaccaagttccaaccattaagat

SEQ ID NO: 104011 - DNA, 25 bp, Artificial
  Probe
tcaccaagttccaaccattaagatc

SEQ ID NO: 104012 - DNA, 25 bp, Artificial
  Probe
aagttccaaccattaagatccacac

SEQ ID NO: 104013 - DNA, 25 bp, Artificial
  Probe
caagttccaaccattaagatccaca

SEQ ID NO: 104014 - DNA, 25 bp, Artificial
  Probe
ccaagttccaaccattaagatccac

SEQ ID NO: 104015 - DNA, 25 bp, Artificial
  Probe
caccaagttccaaccattaagatcc

SEQ ID NO: 104016 - DNA, 25 bp, Artificial
  Probe
ggagaacacttaggtactgctgatt

SEQ ID NO: 104017 - DNA, 25 bp, Artificial
  Probe
taactgaccgcttctaagtgatgag

SEQ ID NO: 104018 - DNA, 25 bp, Artificial
  Probe
ttccaaccattaagatccacaccat

SEQ ID NO: 104019 - DNA, 25 bp, Artificial
  Probe
accaagttccaaccattaagatcca

SEQ ID NO: 104020 - DNA, 25 bp, Artificial
  Probe
gtaactgaccgcttctaagtgatga

SEQ ID NO: 104021 - DNA, 25 bp, Artificial
  Probe
tactggcgactacatttgacattta

SEQ ID NO: 104022 - DNA, 25 bp, Artificial
  Probe
aaatcaccaagttccaaccattaag

SEQ ID NO: 104023 - DNA, 25 bp, Artificial
  Probe
actggcgactacatttgacatttat

SEQ ID NO: 104024 - DNA, 25 bp, Artificial
  Probe
gactacatttgacatttatggagcg

SEQ ID NO: 104025 - DNA, 25 bp, Artificial
  Probe
cgactacatttgacatttatggagc

SEQ ID NO: 104026 - DNA, 25 bp, Artificial
  Probe
gcgactacatttgacatttatggag

SEQ ID NO: 104027 - DNA, 25 bp, Artificial
  Probe
tccaaccattaagatccacaccatc

SEQ ID NO: 104028 - DNA, 25 bp, Artificial
  Probe
ctggcgactacatttgacatttatg

SEQ ID NO: 104029 - DNA, 25 bp, Artificial
  Probe
ctactggcgactacatttgacattt

SEQ ID NO: 104030 - DNA, 25 bp, Artificial
  Probe
agttccaaccattaagatccacacc

SEQ ID NO: 104031 - DNA, 25 bp, Artificial
  Probe
gagaacacttaggtactgctgattt

SEQ ID NO: 104032 - DNA, 25 bp, Artificial
  Probe
actacatttgacatttatggagcgg

SEQ ID NO: 104033 - DNA, 25 bp, Artificial
  Probe
ggcgactacatttgacatttatgga

SEQ ID NO: 104034 - DNA, 25 bp, Artificial
  Probe
gttccaaccattaagatccacacca

SEQ ID NO: 104035 - DNA, 25 bp, Artificial
  Probe
tggcgactacatttgacatttatgg

SEQ ID NO: 104036 - DNA, 25 bp, Artificial
  Probe
caaccattaagatccacaccatctc

SEQ ID NO: 104037 - DNA, 25 bp, Artificial
  Probe
ctacatttgacatttatggagcggg

SEQ ID NO: 104038 - DNA, 25 bp, Artificial
  Probe
aactgaccgcttctaagtgatgaga

SEQ ID NO: 104039 - DNA, 25 bp, Artificial
  Probe
gtttggagctatttcttgatggaag

SEQ ID NO: 104040 - DNA, 25 bp, Artificial
  Probe
agtttggagctatttcttgatggaa

SEQ ID NO: 104041 - DNA, 25 bp, Artificial
  Probe
aagtttggagctatttcttgatgga

SEQ ID NO: 104042 - DNA, 25 bp, Artificial
  Probe
tttccactactgaccctttcaacaa

SEQ ID NO: 104043 - DNA, 25 bp, Artificial
  Probe
gagaaggaggatgccagtttatcag

SEQ ID NO: 104044 - DNA, 25 bp, Artificial
  Probe
aaccattaagatccacaccatctcc

SEQ ID NO: 104045 - DNA, 25 bp, Artificial
  Probe
taagtttggagctatttcttgatgg

SEQ ID NO: 104046 - DNA, 25 bp, Artificial
  Probe
tttggagctatttcttgatggaagg

SEQ ID NO: 104047 - DNA, 25 bp, Artificial
  Probe
cctactggcgactacatttgacatt

SEQ ID NO: 104048 - DNA, 25 bp, Artificial
  Probe
acacactctaagtttggagctattt

SEQ ID NO: 104049 - DNA, 25 bp, Artificial
  Probe
ccaaccattaagatccacaccatct

SEQ ID NO: 104050 - DNA, 25 bp, Artificial
  Probe
cacactctaagtttggagctatttc

SEQ ID NO: 104051 - DNA, 25 bp, Artificial
  Probe
acactctaagtttggagctatttct

SEQ ID NO: 104052 - DNA, 25 bp, Artificial
  Probe
ggtaactgaccgcttctaagtgatg

SEQ ID NO: 104053 - DNA, 25 bp, Artificial
  Probe
cacacactctaagtttggagctatt

SEQ ID NO: 104054 - DNA, 25 bp, Artificial
  Probe
agatagatcaactaactgtgtcctg

SEQ ID NO: 104055 - DNA, 25 bp, Artificial
  Probe
gagatagatcaactaactgtgtcct

SEQ ID NO: 104056 - DNA, 25 bp, Artificial
  Probe
agagatagatcaactaactgtgtcc

SEQ ID NO: 104057 - DNA, 25 bp, Artificial
  Probe
atagatcaactaactgtgtcctgag

SEQ ID NO: 104058 - DNA, 25 bp, Artificial
  Probe
gatagatcaactaactgtgtcctga

SEQ ID NO: 104059 - DNA, 25 bp, Artificial
  Probe
tagatcaactaactgtgtcctgagt

SEQ ID NO: 104060 - DNA, 25 bp, Artificial
  Probe
ccagagatagatcaactaactgtgt

SEQ ID NO: 104061 - DNA, 25 bp, Artificial
  Probe
cagagatagatcaactaactgtgtc

SEQ ID NO: 104062 - DNA, 25 bp, Artificial
  Probe
agatcaactaactgtgtcctgagtg

SEQ ID NO: 104063 - DNA, 25 bp, Artificial
  Probe
caaacggtatttatgtgtgtctgtg

SEQ ID NO: 104064 - DNA, 25 bp, Artificial
  Probe
cgccttaaagaaatgtgtgaaagaa

SEQ ID NO: 104065 - DNA, 25 bp, Artificial
  Probe
gccttaaagaaatgtgtgaaagaaa

SEQ ID NO: 104066 - DNA, 25 bp, Artificial
  Probe
gctgctttcaatttgtctttgtagt

SEQ ID NO: 104067 - DNA, 25 bp, Artificial
  Probe
tagacatttgccacttggtacatag

SEQ ID NO: 104068 - DNA, 25 bp, Artificial
  Probe
ctagacatttgccacttggtacata

SEQ ID NO: 104069 - DNA, 25 bp, Artificial
  Probe
ctgctttcaatttgtctttgtagtt

SEQ ID NO: 104070 - DNA, 25 bp, Artificial
  Probe
ggctgctttcaatttgtctttgtag

SEQ ID NO: 104071 - DNA, 25 bp, Artificial
  Probe
tacaaacggtatttatgtgtgtctg

SEQ ID NO: 104072 - DNA, 25 bp, Artificial
  Probe
acaaacggtatttatgtgtgtctgt

SEQ ID NO: 104073 - DNA, 25 bp, Artificial
  Probe
ctccgccttaaagaaatgtgtgaaa

SEQ ID NO: 104074 - DNA, 25 bp, Artificial
  Probe
aacaacaacaacaacaacacctgtc

SEQ ID NO: 104075 - DNA, 25 bp, Artificial
  Probe
aggctgctttcaatttgtctttgta

SEQ ID NO: 104076 - DNA, 25 bp, Artificial
  Probe
tgctttcaatttgtctttgtagttt

SEQ ID NO: 104077 - DNA, 25 bp, Artificial
  Probe
ccgccttaaagaaatgtgtgaaaga

SEQ ID NO: 104078 - DNA, 25 bp, Artificial
  Probe
tccgccttaaagaaatgtgtgaaag

SEQ ID NO: 104079 - DNA, 25 bp, Artificial
  Probe
cctcccagagatagatcaactaact

SEQ ID NO: 104080 - DNA, 25 bp, Artificial
  Probe
gacctcccagagatagatcaactaa

SEQ ID NO: 104081 - DNA, 25 bp, Artificial
  Probe
ggtacaaacggtatttatgtgtgtc

SEQ ID NO: 104082 - DNA, 25 bp, Artificial
  Probe
tacggtacaaacggtatttatgtgt

SEQ ID NO: 104083 - DNA, 25 bp, Artificial
  Probe
acctcccagagatagatcaactaac

SEQ ID NO: 104084 - DNA, 25 bp, Artificial
  Probe
gtacaaacggtatttatgtgtgtct

SEQ ID NO: 104085 - DNA, 25 bp, Artificial
  Probe
caacaacaacaacaacaacacctgt

SEQ ID NO: 104086 - DNA, 25 bp, Artificial
  Probe
cccagagatagatcaactaactgtg

SEQ ID NO: 104087 - DNA, 25 bp, Artificial
  Probe
tcccagagatagatcaactaactgt

SEQ ID NO: 104088 - DNA, 25 bp, Artificial
  Probe
ctcccagagatagatcaactaactg

SEQ ID NO: 104089 - DNA, 25 bp, Artificial
  Probe
cttcttccctttccttctgtgttca

SEQ ID NO: 104090 - DNA, 25 bp, Artificial
  Probe
ttatcaactgctgcttcttcccttt

SEQ ID NO: 104091 - DNA, 25 bp, Artificial
  Probe
tttatcaactgctgcttcttccctt

SEQ ID NO: 104092 - DNA, 25 bp, Artificial
  Probe
aaatccaatacggtacaaacggtat

SEQ ID NO: 104093 - DNA, 25 bp, Artificial
  Probe
atacggtacaaacggtatttatgtg

SEQ ID NO: 104094 - DNA, 25 bp, Artificial
  Probe
aaggctgctttcaatttgtctttgt

SEQ ID NO: 104095 - DNA, 25 bp, Artificial
  Probe
atcaactaactgtgtcctgagtgct

SEQ ID NO: 104096 - DNA, 25 bp, Artificial
  Probe
gatcaactaactgtgtcctgagtgc

SEQ ID NO: 104097 - DNA, 25 bp, Artificial
  Probe
cggtacaaacggtatttatgtgtgt

SEQ ID NO: 104098 - DNA, 25 bp, Artificial
  Probe
acggtacaaacggtatttatgtgtg

SEQ ID NO: 104099 - DNA, 25 bp, Artificial
  Probe
caatgctgaagaggtggagttaatc

SEQ ID NO: 104100 - DNA, 25 bp, Artificial
  Probe
tacaatgctgaagaggtggagttaa

SEQ ID NO: 104101 - DNA, 25 bp, Artificial
  Probe
ctacaatgctgaagaggtggagtta

SEQ ID NO: 104102 - DNA, 25 bp, Artificial
  Probe
gactgtcttcttgttcctaattgcc

SEQ ID NO: 104103 - DNA, 25 bp, Artificial
  Probe
aatgctgaagaggtggagttaatct

SEQ ID NO: 104104 - DNA, 25 bp, Artificial
  Probe
acaatgctgaagaggtggagttaat

SEQ ID NO: 104105 - DNA, 25 bp, Artificial
  Probe
cagactgtcttcttgttcctaattg

SEQ ID NO: 104106 - DNA, 25 bp, Artificial
  Probe
ccagactgtcttcttgttcctaatt

SEQ ID NO: 104107 - DNA, 25 bp, Artificial
  Probe
gtcattaacatcattgtgccttgtg

SEQ ID NO: 104108 - DNA, 25 bp, Artificial
  Probe
cattaacatcattgtgccttgtgtg

SEQ ID NO: 104109 - DNA, 25 bp, Artificial
  Probe
tcattaacatcattgtgccttgtgt

SEQ ID NO: 104110 - DNA, 25 bp, Artificial
  Probe
agactgtcttcttgttcctaattgc

SEQ ID NO: 104111 - DNA, 25 bp, Artificial
  Probe
cgtcattaacatcattgtgccttgt

SEQ ID NO: 104112 - DNA, 25 bp, Artificial
  Probe
caataaatctggtttgtgaacttgc

SEQ ID NO: 104113 - DNA, 25 bp, Artificial
  Probe
attaacatcattgtgccttgtgtgc

SEQ ID NO: 104114 - DNA, 25 bp, Artificial
  Probe
tacgtcattaacatcattgtgcctt

SEQ ID NO: 104115 - DNA, 25 bp, Artificial
  Probe
ttacgtcattaacatcattgtgcct

SEQ ID NO: 104116 - DNA, 25 bp, Artificial
  Probe
ttacttcaaccaagttcctgatctc

SEQ ID NO: 104117 - DNA, 25 bp, Artificial
  Probe
atgctgaagaggtggagttaatctt

SEQ ID NO: 104118 - DNA, 25 bp, Artificial
  Probe
gttacttcaaccaagttcctgatct

SEQ ID NO: 104119 - DNA, 25 bp, Artificial
  Probe
cttggtgctactcgcttacttccta

SEQ ID NO: 104120 - DNA, 25 bp, Artificial
  Probe
acgtcattaacatcattgtgccttg

SEQ ID NO: 104121 - DNA, 25 bp, Artificial
  Probe
ttggtgctactcgcttacttcctac

SEQ ID NO: 104122 - DNA, 25 bp, Artificial
  Probe
cccagactgtcttcttgttcctaat

SEQ ID NO: 104123 - DNA, 25 bp, Artificial
  Probe
tacttcaaccaagttcctgatctcc

SEQ ID NO: 104124 - DNA, 25 bp, Artificial
  Probe
aataaatctggtttgtgaacttgca

SEQ ID NO: 104125 - DNA, 25 bp, Artificial
  Probe
ttaacatcattgtgccttgtgtgct

SEQ ID NO: 104126 - DNA, 25 bp, Artificial
  Probe
ctacgactgcaatgttctggtctat

SEQ ID NO: 104127 - DNA, 25 bp, Artificial
  Probe
gtcttcttgttcctaattgcccaga

SEQ ID NO: 104128 - DNA, 25 bp, Artificial
  Probe
tgtcttcttgttcctaattgcccag

SEQ ID NO: 104129 - DNA, 25 bp, Artificial
  Probe
ctgtcttcttgttcctaattgccca

SEQ ID NO: 104130 - DNA, 25 bp, Artificial
  Probe
actgtcttcttgttcctaattgccc

SEQ ID NO: 104131 - DNA, 25 bp, Artificial
  Probe
tacgactgcaatgttctggtctatg

SEQ ID NO: 104132 - DNA, 25 bp, Artificial
  Probe
tttacgtcattaacatcattgtgcc

SEQ ID NO: 104133 - DNA, 25 bp, Artificial
  Probe
ttaatctttgcagtggatgacgatg

SEQ ID NO: 104134 - DNA, 25 bp, Artificial
  Probe
gttaatctttgcagtggatgacgat

SEQ ID NO: 104135 - DNA, 25 bp, Artificial
  Probe
ggagttaatctttgcagtggatgac

SEQ ID NO: 104136 - DNA, 25 bp, Artificial
  Probe
gtgctactcgcttacttcctacctg

SEQ ID NO: 104137 - DNA, 25 bp, Artificial
  Probe
taacatcattgtgccttgtgtgctc

SEQ ID NO: 104138 - DNA, 25 bp, Artificial
  Probe
agaaagagattttgaaaacaggctg

SEQ ID NO: 104139 - DNA, 25 bp, Artificial
  Probe
cttcttgttcctaattgcccagaaa

SEQ ID NO: 104140 - DNA, 25 bp, Artificial
  Probe
aagaaagagattttgaaaacaggct

SEQ ID NO: 104141 - DNA, 25 bp, Artificial
  Probe
gtggagttaatctttgcagtggatg

SEQ ID NO: 104142 - DNA, 25 bp, Artificial
  Probe
catcattgtgccttgtgtgctcatt

SEQ ID NO: 104143 - DNA, 25 bp, Artificial
  Probe
gagttaatctttgcagtggatgacg

SEQ ID NO: 104144 - DNA, 25 bp, Artificial
  Probe
acagagacatcaagagtgacaatat

SEQ ID NO: 104145 - DNA, 25 bp, Artificial
  Probe
aagtcattcacagagacatcaagag

SEQ ID NO: 104146 - DNA, 25 bp, Artificial
  Probe
caagtcattcacagagacatcaaga

SEQ ID NO: 104147 - DNA, 25 bp, Artificial
  Probe
cacagagacatcaagagtgacaata

SEQ ID NO: 104148 - DNA, 25 bp, Artificial
  Probe
cttgagatggatgtggagaagagag

SEQ ID NO: 104149 - DNA, 25 bp, Artificial
  Probe
atcctaagaagaagtacacacgctt

SEQ ID NO: 104150 - DNA, 25 bp, Artificial
  Probe
agtcattcacagagacatcaagagt

SEQ ID NO: 104151 - DNA, 25 bp, Artificial
  Probe
catcaagagtgacaatattctgctg

SEQ ID NO: 104152 - DNA, 25 bp, Artificial
  Probe
gacatcaagagtgacaatattctgc

SEQ ID NO: 104153 - DNA, 25 bp, Artificial
  Probe
acatcaagagtgacaatattctgct

SEQ ID NO: 104154 - DNA, 25 bp, Artificial
  Probe
ccaagtcattcacagagacatcaag

SEQ ID NO: 104155 - DNA, 25 bp, Artificial
  Probe
gatcctaagaagaagtacacacgct

SEQ ID NO: 104156 - DNA, 25 bp, Artificial
  Probe
gtcattcacagagacatcaagagtg

SEQ ID NO: 104157 - DNA, 25 bp, Artificial
  Probe
atcaagagtgacaatattctgctgg

SEQ ID NO: 104158 - DNA, 25 bp, Artificial
  Probe
ctgtcttgagatggatgtggagaag

SEQ ID NO: 104159 - DNA, 25 bp, Artificial
  Probe
ctacgaaacagaaatctcaaccatc

SEQ ID NO: 104160 - DNA, 25 bp, Artificial
  Probe
attcaaaccaagtcattcacagaga

SEQ ID NO: 104161 - DNA, 25 bp, Artificial
  Probe
cattcaaaccaagtcattcacagag

SEQ ID NO: 104162 - DNA, 25 bp, Artificial
  Probe
aaatctcaaccatcccattccttac

SEQ ID NO: 104163 - DNA, 25 bp, Artificial
  Probe
ctccttaacagatgtggtgacagaa

SEQ ID NO: 104164 - DNA, 25 bp, Artificial
  Probe
agacatcaagagtgacaatattctg

SEQ ID NO: 104165 - DNA, 25 bp, Artificial
  Probe
cagagacatcaagagtgacaatatt

SEQ ID NO: 104166 - DNA, 25 bp, Artificial
  Probe
cagccgaagaaagaactcattatta

SEQ ID NO: 104167 - DNA, 25 bp, Artificial
  Probe
aattaactgactttggattctgtgc

SEQ ID NO: 104168 - DNA, 25 bp, Artificial
  Probe
accaagtcattcacagagacatcaa

SEQ ID NO: 104169 - DNA, 25 bp, Artificial
  Probe
aaccaagtcattcacagagacatca

SEQ ID NO: 104170 - DNA, 25 bp, Artificial
  Probe
tagagaaattacggagcatagtgag

SEQ ID NO: 104171 - DNA, 25 bp, Artificial
  Probe
aaacagaaatctcaaccatcccatt

SEQ ID NO: 104172 - DNA, 25 bp, Artificial
  Probe
agccttctatgaaataaacactcgt

SEQ ID NO: 104173 - DNA, 25 bp, Artificial
  Probe
gaatggatggctctgtcaaattaac

SEQ ID NO: 104174 - DNA, 25 bp, Artificial
  Probe
gaaatctcaaccatcccattcctta

SEQ ID NO: 104175 - DNA, 25 bp, Artificial
  Probe
aatggatggctctgtcaaattaact

SEQ ID NO: 104176 - DNA, 25 bp, Artificial
  Probe
ttagagaaattacggagcatagtga

SEQ ID NO: 104177 - DNA, 25 bp, Artificial
  Probe
tctacgaaacagaaatctcaaccat

SEQ ID NO: 104178 - DNA, 25 bp, Artificial
  Probe
aagccttctatgaaataaacactcg

SEQ ID NO: 104179 - DNA, 25 bp, Artificial
  Probe
gagacatcaagagtgacaatattct

SEQ ID NO: 104180 - DNA, 25 bp, Artificial
  Probe
agagacatcaagagtgacaatattc

SEQ ID NO: 104181 - DNA, 25 bp, Artificial
  Probe
gccttctatgaaataaacactcgtt

SEQ ID NO: 104182 - DNA, 25 bp, Artificial
  Probe
ccaagccttctatgaaataaacact

SEQ ID NO: 104183 - DNA, 25 bp, Artificial
  Probe
gccaagccttctatgaaataaacac

SEQ ID NO: 104184 - DNA, 25 bp, Artificial
  Probe
gtgccaagccttctatgaaataaac

SEQ ID NO: 104185 - DNA, 25 bp, Artificial
  Probe
atgtgccaagccttctatgaaataa

SEQ ID NO: 104186 - DNA, 25 bp, Artificial
  Probe
tacgaaacagaaatctcaaccatcc

SEQ ID NO: 104187 - DNA, 25 bp, Artificial
  Probe
cttagagaaattacggagcatagtg

SEQ ID NO: 104188 - DNA, 25 bp, Artificial
  Probe
gaaacagaaatctcaaccatcccat

SEQ ID NO: 104189 - DNA, 25 bp, Artificial
  Probe
tcgtgtgtgtctgtatatgtgtatt

SEQ ID NO: 104190 - DNA, 25 bp, Artificial
  Probe
ttcgtgtgtgtctgtatatgtgtat

SEQ ID NO: 104191 - DNA, 25 bp, Artificial
  Probe
aatgttactctgtgtgtgtgtgtgt

SEQ ID NO: 104192 - DNA, 25 bp, Artificial
  Probe
tttcgtgtgtgtctgtatatgtgta

SEQ ID NO: 104193 - DNA, 25 bp, Artificial
  Probe
cgtgtgtgtctgtatatgtgtattt

SEQ ID NO: 104194 - DNA, 25 bp, Artificial
  Probe
gtttcgtgtgtgtctgtatatgtgt

SEQ ID NO: 104195 - DNA, 25 bp, Artificial
  Probe
tgtttcgtgtgtgtctgtatatgtg

SEQ ID NO: 104196 - DNA, 25 bp, Artificial
  Probe
gtgtttcgtgtgtgtctgtatatgt

SEQ ID NO: 104197 - DNA, 25 bp, Artificial
  Probe
tgtgtttcgtgtgtgtctgtatatg

SEQ ID NO: 104198 - DNA, 25 bp, Artificial
  Probe
gtgtgtttcgtgtgtgtctgtatat

SEQ ID NO: 104199 - DNA, 25 bp, Artificial
  Probe
ccgtttactaaccttagattctcct

SEQ ID NO: 104200 - DNA, 25 bp, Artificial
  Probe
tgccgtttactaaccttagattctc

SEQ ID NO: 104201 - DNA, 25 bp, Artificial
  Probe
ctgccgtttactaaccttagattct

SEQ ID NO: 104202 - DNA, 25 bp, Artificial
  Probe
ggagaggatggactttcatattgat

SEQ ID NO: 104203 - DNA, 25 bp, Artificial
  Probe
gccgtttactaaccttagattctcc

SEQ ID NO: 104204 - DNA, 25 bp, Artificial
  Probe
cctgccgtttactaaccttagattc

SEQ ID NO: 104205 - DNA, 25 bp, Artificial
  Probe
tatagagtctgtcatacactttgcc

SEQ ID NO: 104206 - DNA, 25 bp, Artificial
  Probe
aaatgttactctgtgtgtgtgtgtg

SEQ ID NO: 104207 - DNA, 25 bp, Artificial
  Probe
gtcatacactttgccacttgaattg

SEQ ID NO: 104208 - DNA, 25 bp, Artificial
  Probe
atgttactctgtgtgtgtgtgtgtg

SEQ ID NO: 104209 - DNA, 25 bp, Artificial
  Probe
ctttcctgccgtttactaaccttag

SEQ ID NO: 104210 - DNA, 25 bp, Artificial
  Probe
tcctgccgtttactaaccttagatt

SEQ ID NO: 104211 - DNA, 25 bp, Artificial
  Probe
ttcctgccgtttactaaccttagat

SEQ ID NO: 104212 - DNA, 25 bp, Artificial
  Probe
tttcctgccgtttactaaccttaga

SEQ ID NO: 104213 - DNA, 25 bp, Artificial
  Probe
gagaggatggactttcatattgatt

SEQ ID NO: 104214 - DNA, 25 bp, Artificial
  Probe
gggagaggatggactttcatattga

SEQ ID NO: 104215 - DNA, 25 bp, Artificial
  Probe
tgtcatacactttgccacttgaatt

SEQ ID NO: 104216 - DNA, 25 bp, Artificial
  Probe
atagagtctgtcatacactttgcca

SEQ ID NO: 104217 - DNA, 25 bp, Artificial
  Probe
tgtgtgtttcgtgtgtgtctgtata

SEQ ID NO: 104218 - DNA, 25 bp, Artificial
  Probe
ggaccaggtttacagagctttatat

SEQ ID NO: 104219 - DNA, 25 bp, Artificial
  Probe
ctgtcatacactttgccacttgaat

SEQ ID NO: 104220 - DNA, 25 bp, Artificial
  Probe
agaggatggactttcatattgattt

SEQ ID NO: 104221 - DNA, 25 bp, Artificial
  Probe
atatagagtctgtcatacactttgc

SEQ ID NO: 104222 - DNA, 25 bp, Artificial
  Probe
aggaccaggtttacagagctttata

SEQ ID NO: 104223 - DNA, 25 bp, Artificial
  Probe
taggaccaggtttacagagctttat

SEQ ID NO: 104224 - DNA, 25 bp, Artificial
  Probe
gaccaggtttacagagctttatatt

SEQ ID NO: 104225 - DNA, 25 bp, Artificial
  Probe
ctaggaccaggtttacagagcttta

SEQ ID NO: 104226 - DNA, 25 bp, Artificial
  Probe
cgtttactaaccttagattctccta

SEQ ID NO: 104227 - DNA, 25 bp, Artificial
  Probe
tagagtctgtcatacactttgccac

SEQ ID NO: 104228 - DNA, 25 bp, Artificial
  Probe
gttactctgtgtgtgtgtgtgtgtg

SEQ ID NO: 104229 - DNA, 25 bp, Artificial
  Probe
accaggtttacagagctttatattt

SEQ ID NO: 104230 - DNA, 25 bp, Artificial
  Probe
ccaggtttacagagctttatatttg

SEQ ID NO: 104231 - DNA, 25 bp, Artificial
  Probe
tctgtcatacactttgccacttgaa

SEQ ID NO: 104232 - DNA, 25 bp, Artificial
  Probe
gctttcctgccgtttactaacctta

SEQ ID NO: 104233 - DNA, 25 bp, Artificial
  Probe
atacactttgccacttgaattggtc

SEQ ID NO: 104234 - DNA, 25 bp, Artificial
  Probe
tctttgaagcagattctcactatgt

SEQ ID NO: 104235 - DNA, 25 bp, Artificial
  Probe
tgtctttgaagcagattctcactat

SEQ ID NO: 104236 - DNA, 25 bp, Artificial
  Probe
gtctttgaagcagattctcactatg

SEQ ID NO: 104237 - DNA, 25 bp, Artificial
  Probe
tttgtgtctttgaagcagattctca

SEQ ID NO: 104238 - DNA, 25 bp, Artificial
  Probe
ctttgaagcagattctcactatgtg

SEQ ID NO: 104239 - DNA, 25 bp, Artificial
  Probe
gtgtctttgaagcagattctcacta

SEQ ID NO: 104240 - DNA, 25 bp, Artificial
  Probe
ttgtgtctttgaagcagattctcac

SEQ ID NO: 104241 - DNA, 25 bp, Artificial
  Probe
tgtgtctttgaagcagattctcact

SEQ ID NO: 104242 - DNA, 25 bp, Artificial
  Probe
ttttgtgtctttgaagcagattctc

SEQ ID NO: 104243 - DNA, 25 bp, Artificial
  Probe
cttttgtgtctttgaagcagattct

SEQ ID NO: 104244 - DNA, 25 bp, Artificial
  Probe
ccttttgtgtctttgaagcagattc

SEQ ID NO: 104245 - DNA, 25 bp, Artificial
  Probe
tgaagcagattctcactatgtgatt

SEQ ID NO: 104246 - DNA, 25 bp, Artificial
  Probe
ttgaagcagattctcactatgtgat

SEQ ID NO: 104247 - DNA, 25 bp, Artificial
  Probe
catgaagccttttgtgtctttgaag

SEQ ID NO: 104248 - DNA, 25 bp, Artificial
  Probe
agccaaggtcatccaactgaagaac

SEQ ID NO: 104249 - DNA, 25 bp, Artificial
  Probe
atgaagccttttgtgtctttgaagc

SEQ ID NO: 104250 - DNA, 25 bp, Artificial
  Probe
gccttttgtgtctttgaagcagatt

SEQ ID NO: 104251 - DNA, 25 bp, Artificial
  Probe
cagccaaggtcatccaactgaagaa

SEQ ID NO: 104252 - DNA, 25 bp, Artificial
  Probe
ccatgaagccttttgtgtctttgaa

SEQ ID NO: 104253 - DNA, 25 bp, Artificial
  Probe
tttgaagcagattctcactatgtga

SEQ ID NO: 104254 - DNA, 25 bp, Artificial
  Probe
gaagccttttgtgtctttgaagcag

SEQ ID NO: 104255 - DNA, 25 bp, Artificial
  Probe
ctccatgaagccttttgtgtctttg

SEQ ID NO: 104256 - DNA, 25 bp, Artificial
  Probe
agccttttgtgtctttgaagcagat

SEQ ID NO: 104257 - DNA, 25 bp, Artificial
  Probe
tccatgaagccttttgtgtctttga

SEQ ID NO: 104258 - DNA, 25 bp, Artificial
  Probe
aagccttttgtgtctttgaagcaga

SEQ ID NO: 104259 - DNA, 25 bp, Artificial
  Probe
tgaagccttttgtgtctttgaagca

SEQ ID NO: 104260 - DNA, 25 bp, Artificial
  Probe
cctccatgaagccttttgtgtcttt

SEQ ID NO: 104261 - DNA, 25 bp, Artificial
  Probe
caaggtcatccaactgaagaacctg

SEQ ID NO: 104262 - DNA, 25 bp, Artificial
  Probe
aaggtcatccaactgaagaacctgg

SEQ ID NO: 104263 - DNA, 25 bp, Artificial
  Probe
ccaaggtcatccaactgaagaacct

SEQ ID NO: 104264 - DNA, 25 bp, Artificial
  Probe
ggtcatccaactgaagaacctggag

SEQ ID NO: 104265 - DNA, 25 bp, Artificial
  Probe
aggtcatccaactgaagaacctgga

SEQ ID NO: 104266 - DNA, 25 bp, Artificial
  Probe
catccaactgaagaacctggagctc

SEQ ID NO: 104267 - DNA, 25 bp, Artificial
  Probe
ttgacaaccttccataatctgagag

SEQ ID NO: 104268 - DNA, 25 bp, Artificial
  Probe
cttgacaaccttccataatctgaga

SEQ ID NO: 104269 - DNA, 25 bp, Artificial
  Probe
acttgacaaccttccataatctgag

SEQ ID NO: 104270 - DNA, 25 bp, Artificial
  Probe
gacttgacaaccttccataatctga

SEQ ID NO: 104271 - DNA, 25 bp, Artificial
  Probe
tgacttgacaaccttccataatctg

SEQ ID NO: 104272 - DNA, 25 bp, Artificial
  Probe
gtgacttgacaaccttccataatct

SEQ ID NO: 104273 - DNA, 25 bp, Artificial
  Probe
gacaaccttccataatctgagagag

SEQ ID NO: 104274 - DNA, 25 bp, Artificial
  Probe
tgacaaccttccataatctgagaga

SEQ ID NO: 104275 - DNA, 25 bp, Artificial
  Probe
ctgtctgacctgactacattcatag

SEQ ID NO: 104276 - DNA, 25 bp, Artificial
  Probe
tctgtctgacctgactacattcata

SEQ ID NO: 104277 - DNA, 25 bp, Artificial
  Probe
ttactctgtctgacctgactacatt

SEQ ID NO: 104278 - DNA, 25 bp, Artificial
  Probe
tctgacctgactacattcataggaa

SEQ ID NO: 104279 - DNA, 25 bp, Artificial
  Probe
tactctgtctgacctgactacattc

SEQ ID NO: 104280 - DNA, 25 bp, Artificial
  Probe
aagttactctgtctgacctgactac

SEQ ID NO: 104281 - DNA, 25 bp, Artificial
  Probe
caagttactctgtctgacctgacta

SEQ ID NO: 104282 - DNA, 25 bp, Artificial
  Probe
caaccttccataatctgagagagca

SEQ ID NO: 104283 - DNA, 25 bp, Artificial
  Probe
acaaccttccataatctgagagagc

SEQ ID NO: 104284 - DNA, 25 bp, Artificial
  Probe
gttactctgtctgacctgactacat

SEQ ID NO: 104285 - DNA, 25 bp, Artificial
  Probe
gtctgacctgactacattcatagga

SEQ ID NO: 104286 - DNA, 25 bp, Artificial
  Probe
ctctgtctgacctgactacattcat

SEQ ID NO: 104287 - DNA, 25 bp, Artificial
  Probe
tgtctgacctgactacattcatagg

SEQ ID NO: 104288 - DNA, 25 bp, Artificial
  Probe
ctgacctgactacattcataggaat

SEQ ID NO: 104289 - DNA, 25 bp, Artificial
  Probe
ttccataatctgagagagcagtgtc

SEQ ID NO: 104290 - DNA, 25 bp, Artificial
  Probe
cttccataatctgagagagcagtgt

SEQ ID NO: 104291 - DNA, 25 bp, Artificial
  Probe
aaccttccataatctgagagagcag

SEQ ID NO: 104292 - DNA, 25 bp, Artificial
  Probe
actacattcataggaatactgtggt

SEQ ID NO: 104293 - DNA, 25 bp, Artificial
  Probe
actctaataggcactggataaatgt

SEQ ID NO: 104294 - DNA, 25 bp, Artificial
  Probe
agttactctgtctgacctgactaca

SEQ ID NO: 104295 - DNA, 25 bp, Artificial
  Probe
cactctaataggcactggataaatg

SEQ ID NO: 104296 - DNA, 25 bp, Artificial
  Probe
gactacattcataggaatactgtgg

SEQ ID NO: 104297 - DNA, 25 bp, Artificial
  Probe
acctgactacattcataggaatact

SEQ ID NO: 104298 - DNA, 25 bp, Artificial
  Probe
tgacctgactacattcataggaata

SEQ ID NO: 104299 - DNA, 25 bp, Artificial
  Probe
ggtgacttgacaaccttccataatc

SEQ ID NO: 104300 - DNA, 25 bp, Artificial
  Probe
cctgactacattcataggaatactg

SEQ ID NO: 104301 - DNA, 25 bp, Artificial
  Probe
gacctgactacattcataggaatac

SEQ ID NO: 104302 - DNA, 25 bp, Artificial
  Probe
ccttccataatctgagagagcagtg

SEQ ID NO: 104303 - DNA, 25 bp, Artificial
  Probe
ctaataggcactggataaatgttct

SEQ ID NO: 104304 - DNA, 25 bp, Artificial
  Probe
tctaataggcactggataaatgttc

SEQ ID NO: 104305 - DNA, 25 bp, Artificial
  Probe
ctctaataggcactggataaatgtt

SEQ ID NO: 104306 - DNA, 25 bp, Artificial
  Probe
ctacattcataggaatactgtggtt

SEQ ID NO: 104307 - DNA, 25 bp, Artificial
  Probe
actctgtctgacctgactacattca

SEQ ID NO: 104308 - DNA, 25 bp, Artificial
  Probe
ctccaagttactctgtctgacctga

SEQ ID NO: 104309 - DNA, 25 bp, Artificial
  Probe
tgactacattcataggaatactgtg

SEQ ID NO: 104310 - DNA, 25 bp, Artificial
  Probe
tggtgacttgacaaccttccataat

SEQ ID NO: 104311 - DNA, 25 bp, Artificial
  Probe
accttccataatctgagagagcagt

SEQ ID NO: 104312 - DNA, 25 bp, Artificial
  Probe
tccaagtctcaccattattgaagaa

SEQ ID NO: 104313 - DNA, 25 bp, Artificial
  Probe
tgaatccaagtctcaccattattga

SEQ ID NO: 104314 - DNA, 25 bp, Artificial
  Probe
atccaagtctcaccattattgaaga

SEQ ID NO: 104315 - DNA, 25 bp, Artificial
  Probe
gaatccaagtctcaccattattgaa

SEQ ID NO: 104316 - DNA, 25 bp, Artificial
  Probe
aatccaagtctcaccattattgaag

SEQ ID NO: 104317 - DNA, 25 bp, Artificial
  Probe
actcatagtgtgaatccaagtctca

SEQ ID NO: 104318 - DNA, 25 bp, Artificial
  Probe
ttgataaggtgctctcctattccta

SEQ ID NO: 104319 - DNA, 25 bp, Artificial
  Probe
ctcttgataaggtgctctcctattc

SEQ ID NO: 104320 - DNA, 25 bp, Artificial
  Probe
tctcttgataaggtgctctcctatt

SEQ ID NO: 104321 - DNA, 25 bp, Artificial
  Probe
tgataaggtgctctcctattcctac

SEQ ID NO: 104322 - DNA, 25 bp, Artificial
  Probe
ctctcttgataaggtgctctcctat

SEQ ID NO: 104323 - DNA, 25 bp, Artificial
  Probe
cttgataaggtgctctcctattcct

SEQ ID NO: 104324 - DNA, 25 bp, Artificial
  Probe
tcttgataaggtgctctcctattcc

SEQ ID NO: 104325 - DNA, 25 bp, Artificial
  Probe
tacaaatgactactgcttaggtgag

SEQ ID NO: 104326 - DNA, 25 bp, Artificial
  Probe
ctacaaatgactactgcttaggtga

SEQ ID NO: 104327 - DNA, 25 bp, Artificial
  Probe
gatgcttccaatgaaacacatagat

SEQ ID NO: 104328 - DNA, 25 bp, Artificial
  Probe
ctgatgcttccaatgaaacacatag

SEQ ID NO: 104329 - DNA, 25 bp, Artificial
  Probe
gataaggtgctctcctattcctacc

SEQ ID NO: 104330 - DNA, 25 bp, Artificial
  Probe
tgatgcttccaatgaaacacataga

SEQ ID NO: 104331 - DNA, 25 bp, Artificial
  Probe
atgactttgagattgtacctgtact

SEQ ID NO: 104332 - DNA, 25 bp, Artificial
  Probe
atgcttccaatgaaacacatagatc

SEQ ID NO: 104333 - DNA, 25 bp, Artificial
  Probe
catgactttgagattgtacctgtac

SEQ ID NO: 104334 - DNA, 25 bp, Artificial
  Probe
ccaggaggaagtaagctcttatgag

SEQ ID NO: 104335 - DNA, 25 bp, Artificial
  Probe
cctctcttgataaggtgctctccta

SEQ ID NO: 104336 - DNA, 25 bp, Artificial
  Probe
ctggagatggatgtttgagaggaat

SEQ ID NO: 104337 - DNA, 25 bp, Artificial
  Probe
tgactttgagattgtacctgtactc

SEQ ID NO: 104338 - DNA, 25 bp, Artificial
  Probe
acaaatgactactgcttaggtgagg

SEQ ID NO: 104339 - DNA, 25 bp, Artificial
  Probe
cccgaggttatcttaattctttcct

SEQ ID NO: 104340 - DNA, 25 bp, Artificial
  Probe
tctgtttctgccatgtgctttatag

SEQ ID NO: 104341 - DNA, 25 bp, Artificial
  Probe
gactttgagattgtacctgtactcc

SEQ ID NO: 104342 - DNA, 25 bp, Artificial
  Probe
gctgatgcttccaatgaaacacata

SEQ ID NO: 104343 - DNA, 25 bp, Artificial
  Probe
attctttcctctcttgataaggtgc

SEQ ID NO: 104344 - DNA, 25 bp, Artificial
  Probe
gtctgtttctgccatgtgctttata

SEQ ID NO: 104345 - DNA, 25 bp, Artificial
  Probe
ttctttcctctcttgataaggtgct

SEQ ID NO: 104346 - DNA, 25 bp, Artificial
  Probe
aattctttcctctcttgataaggtg

SEQ ID NO: 104347 - DNA, 25 bp, Artificial
  Probe
ctttgagattgtacctgtactccca

SEQ ID NO: 104348 - DNA, 25 bp, Artificial
  Probe
actttgagattgtacctgtactccc

SEQ ID NO: 104349 - DNA, 25 bp, Artificial
  Probe
caaatgactactgcttaggtgaggg

SEQ ID NO: 104350 - DNA, 25 bp, Artificial
  Probe
ttcctctcttgataaggtgctctcc

SEQ ID NO: 104351 - DNA, 25 bp, Artificial
  Probe
ctgtttctgccatgtgctttatagg

SEQ ID NO: 104352 - DNA, 25 bp, Artificial
  Probe
tttcctctcttgataaggtgctctc

SEQ ID NO: 104353 - DNA, 25 bp, Artificial
  Probe
ctttcctctcttgataaggtgctct

SEQ ID NO: 104354 - DNA, 25 bp, Artificial
  Probe
tctttcctctcttgataaggtgctc

SEQ ID NO: 104355 - DNA, 25 bp, Artificial
  Probe
aaacaccaaagttagcagagaccaa

SEQ ID NO: 104356 - DNA, 25 bp, Artificial
  Probe
ctgtcagatgagcctctttacttcc

SEQ ID NO: 104357 - DNA, 25 bp, Artificial
  Probe
atagaatgagaacttcggtcaatgt

SEQ ID NO: 104358 - DNA, 25 bp, Artificial
  Probe
aagcaactctaatcagtgtgtctat

SEQ ID NO: 104359 - DNA, 25 bp, Artificial
  Probe
agcaactctaatcagtgtgtctatg

SEQ ID NO: 104360 - DNA, 25 bp, Artificial
  Probe
gatagaatgagaacttcggtcaatg

SEQ ID NO: 104361 - DNA, 25 bp, Artificial
  Probe
ggatagaatgagaacttcggtcaat

SEQ ID NO: 104362 - DNA, 25 bp, Artificial
  Probe
tagaatgagaacttcggtcaatgta

SEQ ID NO: 104363 - DNA, 25 bp, Artificial
  Probe
agaatgagaacttcggtcaatgtag

SEQ ID NO: 104364 - DNA, 25 bp, Artificial
  Probe
gaatgagaacttcggtcaatgtagt

SEQ ID NO: 104365 - DNA, 25 bp, Artificial
  Probe
aatgagaacttcggtcaatgtagtg

SEQ ID NO: 104366 - DNA, 25 bp, Artificial
  Probe
acacaactctgtcgtaatagatgag

SEQ ID NO: 104367 - DNA, 25 bp, Artificial
  Probe
ttctcagccaattcttgaataactc

SEQ ID NO: 104368 - DNA, 25 bp, Artificial
  Probe
cacacaactctgtcgtaatagatga

SEQ ID NO: 104369 - DNA, 25 bp, Artificial
  Probe
caactctaatcagtgtgtctatgcc

SEQ ID NO: 104370 - DNA, 25 bp, Artificial
  Probe
tctcagccaattcttgaataactcc

SEQ ID NO: 104371 - DNA, 25 bp, Artificial
  Probe
tggatagaatgagaacttcggtcaa

SEQ ID NO: 104372 - DNA, 25 bp, Artificial
  Probe
ctggatagaatgagaacttcggtca

SEQ ID NO: 104373 - DNA, 25 bp, Artificial
  Probe
gcacacaactctgtcgtaatagatg

SEQ ID NO: 104374 - DNA, 25 bp, Artificial
  Probe
cgattctcagccaattcttgaataa

SEQ ID NO: 104375 - DNA, 25 bp, Artificial
  Probe
tcgtaatagatgagtgcaaggtaac

SEQ ID NO: 104376 - DNA, 25 bp, Artificial
  Probe
gtcgtaatagatgagtgcaaggtaa

SEQ ID NO: 104377 - DNA, 25 bp, Artificial
  Probe
aactctaatcagtgtgtctatgccg

SEQ ID NO: 104378 - DNA, 25 bp, Artificial
  Probe
ccgattctcagccaattcttgaata

SEQ ID NO: 104379 - DNA, 25 bp, Artificial
  Probe
atgagaacttcggtcaatgtagtgg

SEQ ID NO: 104380 - DNA, 25 bp, Artificial
  Probe
attctcagccaattcttgaataact

SEQ ID NO: 104381 - DNA, 25 bp, Artificial
  Probe
gattctcagccaattcttgaataac

SEQ ID NO: 104382 - DNA, 25 bp, Artificial
  Probe
tgtcgtaatagatgagtgcaaggta

SEQ ID NO: 104383 - DNA, 25 bp, Artificial
  Probe
cgtaatagatgagtgcaaggtaact

SEQ ID NO: 104384 - DNA, 25 bp, Artificial
  Probe
gctggatagaatgagaacttcggtc

SEQ ID NO: 104385 - DNA, 25 bp, Artificial
  Probe
ctgctggatagaatgagaacttcgg

SEQ ID NO: 104386 - DNA, 25 bp, Artificial
  Probe
aaagcaactctaatcagtgtgtcta

SEQ ID NO: 104387 - DNA, 25 bp, Artificial
  Probe
gattgtctatcacctttccaagtcc

SEQ ID NO: 104388 - DNA, 25 bp, Artificial
  Probe
ctctgtcgtaatagatgagtgcaag

SEQ ID NO: 104389 - DNA, 25 bp, Artificial
  Probe
gaaagcaactctaatcagtgtgtct

SEQ ID NO: 104390 - DNA, 25 bp, Artificial
  Probe
ggctgctggatagaatgagaacttc

SEQ ID NO: 104391 - DNA, 25 bp, Artificial
  Probe
cgcacacaactctgtcgtaatagat

SEQ ID NO: 104392 - DNA, 25 bp, Artificial
  Probe
tgctggatagaatgagaacttcggt

SEQ ID NO: 104393 - DNA, 25 bp, Artificial
  Probe
gctgctggatagaatgagaacttcg

SEQ ID NO: 104394 - DNA, 25 bp, Artificial
  Probe
ggaaagcaactctaatcagtgtgtc

SEQ ID NO: 104395 - DNA, 25 bp, Artificial
  Probe
ctgtcgtaatagatgagtgcaaggt

SEQ ID NO: 104396 - DNA, 25 bp, Artificial
  Probe
tctgtcgtaatagatgagtgcaagg

SEQ ID NO: 104397 - DNA, 25 bp, Artificial
  Probe
ctcagccaattcttgaataactccc

SEQ ID NO: 104398 - DNA, 25 bp, Artificial
  Probe
tggctgctggatagaatgagaactt

SEQ ID NO: 104399 - DNA, 25 bp, Artificial
  Probe
gctctaaacaggcttcctttacaaa

SEQ ID NO: 104400 - DNA, 25 bp, Artificial
  Probe
ggattgtctatcacctttccaagtc

SEQ ID NO: 104401 - DNA, 25 bp, Artificial
  Probe
gcaactctaatcagtgtgtctatgc

SEQ ID NO: 104402 - DNA, 25 bp, Artificial
  Probe
gaggaagatgaagatgaggagtatg

SEQ ID NO: 104403 - DNA, 25 bp, Artificial
  Probe
aggaagatgaagatgaggagtatga

SEQ ID NO: 104404 - DNA, 25 bp, Artificial
  Probe
ggaagatgaagatgaggagtatgaa

SEQ ID NO: 104405 - DNA, 25 bp, Artificial
  Probe
ggaggaagatgaagatgaggagtat

SEQ ID NO: 104406 - DNA, 25 bp, Artificial
  Probe
tactgaggaggaagatgaagatgag

SEQ ID NO: 104407 - DNA, 25 bp, Artificial
  Probe
aggaggaagatgaagatgaggagta

SEQ ID NO: 104408 - DNA, 25 bp, Artificial
  Probe
cacaactccagatgaagactatgag

SEQ ID NO: 104409 - DNA, 25 bp, Artificial
  Probe
gtactgaggaggaagatgaagatga

SEQ ID NO: 104410 - DNA, 25 bp, Artificial
  Probe
atgaggagtatgaatacatgaaccg

SEQ ID NO: 104411 - DNA, 25 bp, Artificial
  Probe
gaagatgaagatgaggagtatgaat

SEQ ID NO: 104412 - DNA, 25 bp, Artificial
  Probe
atgaagactatgagtacatgaaccg

SEQ ID NO: 104413 - DNA, 25 bp, Artificial
  Probe
gcacaactccagatgaagactatga

SEQ ID NO: 104414 - DNA, 25 bp, Artificial
  Probe
ctccagatgaagactatgagtacat

SEQ ID NO: 104415 - DNA, 25 bp, Artificial
  Probe
ccagatgaagactatgagtacatga

SEQ ID NO: 104416 - DNA, 25 bp, Artificial
  Probe
tccagatgaagactatgagtacatg

SEQ ID NO: 104417 - DNA, 25 bp, Artificial
  Probe
gatgaggagtatgaatacatgaacc

SEQ ID NO: 104418 - DNA, 25 bp, Artificial
  Probe
ggtactgaggaggaagatgaagatg

SEQ ID NO: 104419 - DNA, 25 bp, Artificial
  Probe
gatgaagatgaggagtatgaataca

SEQ ID NO: 104420 - DNA, 25 bp, Artificial
  Probe
gatgaagactatgagtacatgaacc

SEQ ID NO: 104421 - DNA, 25 bp, Artificial
  Probe
agatgaagatgaggagtatgaatac

SEQ ID NO: 104422 - DNA, 25 bp, Artificial
  Probe
gaggaggaagatgaagatgaggagt

SEQ ID NO: 104423 - DNA, 25 bp, Artificial
  Probe
tgaggaggaagatgaagatgaggag

SEQ ID NO: 104424 - DNA, 25 bp, Artificial
  Probe
ctgaggaggaagatgaagatgagga

SEQ ID NO: 104425 - DNA, 25 bp, Artificial
  Probe
agatgaggagtatgaatacatgaac

SEQ ID NO: 104426 - DNA, 25 bp, Artificial
  Probe
tgaagatgaggagtatgaatacatg

SEQ ID NO: 104427 - DNA, 25 bp, Artificial
  Probe
actgaggaggaagatgaagatgagg

SEQ ID NO: 104428 - DNA, 25 bp, Artificial
  Probe
gaagatgaggagtatgaatacatga

SEQ ID NO: 104429 - DNA, 25 bp, Artificial
  Probe
agatgaagactatgagtacatgaac

SEQ ID NO: 104430 - DNA, 25 bp, Artificial
  Probe
cagatgaagactatgagtacatgaa

SEQ ID NO: 104431 - DNA, 25 bp, Artificial
  Probe
ggcacaactccagatgaagactatg

SEQ ID NO: 104432 - DNA, 25 bp, Artificial
  Probe
atgaagatgaggagtatgaatacat

SEQ ID NO: 104433 - DNA, 25 bp, Artificial
  Probe
aagatgaagatgaggagtatgaata

SEQ ID NO: 104434 - DNA, 25 bp, Artificial
  Probe
aagatgaggagtatgaatacatgaa

SEQ ID NO: 104435 - DNA, 25 bp, Artificial
  Probe
gtatgaatacatgaaccggaagaga

SEQ ID NO: 104436 - DNA, 25 bp, Artificial
  Probe
agtatgaatacatgaaccggaagag

SEQ ID NO: 104437 - DNA, 25 bp, Artificial
  Probe
gagtatgaatacatgaaccggaaga

SEQ ID NO: 104438 - DNA, 25 bp, Artificial
  Probe
tatgaatacatgaaccggaagagaa

SEQ ID NO: 104439 - DNA, 25 bp, Artificial
  Probe
atgaatacatgaaccggaagagaag

SEQ ID NO: 104440 - DNA, 25 bp, Artificial
  Probe
ggagtatgaatacatgaaccggaag

SEQ ID NO: 104441 - DNA, 25 bp, Artificial
  Probe
aggagtatgaatacatgaaccggaa

SEQ ID NO: 104442 - DNA, 25 bp, Artificial
  Probe
gaggagtatgaatacatgaaccgga

SEQ ID NO: 104443 - DNA, 25 bp, Artificial
  Probe
gaagactatgagtacatgaaccgga

SEQ ID NO: 104444 - DNA, 25 bp, Artificial
  Probe
tgaggagtatgaatacatgaaccgg

SEQ ID NO: 104445 - DNA, 25 bp, Artificial
  Probe
tgaatacatgaaccggaagagaagg

SEQ ID NO: 104446 - DNA, 25 bp, Artificial
  Probe
tgaagactatgagtacatgaaccgg

SEQ ID NO: 104447 - DNA, 25 bp, Artificial
  Probe
ctcaacacaagagaagaatggactt

SEQ ID NO: 104448 - DNA, 25 bp, Artificial
  Probe
cctcaacacaagagaagaatggact

SEQ ID NO: 104449 - DNA, 25 bp, Artificial
  Probe
tcaacacaagagaagaatggacttt

SEQ ID NO: 104450 - DNA, 25 bp, Artificial
  Probe
caagagaagaatggactttgagaac

SEQ ID NO: 104451 - DNA, 25 bp, Artificial
  Probe
acaagagaagaatggactttgagaa

SEQ ID NO: 104452 - DNA, 25 bp, Artificial
  Probe
aagagaagaatggactttgagaacg

SEQ ID NO: 104453 - DNA, 25 bp, Artificial
  Probe
aacacaagagaagaatggactttga

SEQ ID NO: 104454 - DNA, 25 bp, Artificial
  Probe
caacacaagagaagaatggactttg

SEQ ID NO: 104455 - DNA, 25 bp, Artificial
  Probe
cacaagagaagaatggactttgaga

SEQ ID NO: 104456 - DNA, 25 bp, Artificial
  Probe
acacaagagaagaatggactttgag

SEQ ID NO: 104457 - DNA, 25 bp, Artificial
  Probe
gaagaatggactttgagaacggaag

SEQ ID NO: 104458 - DNA, 25 bp, Artificial
  Probe
agaagaatggactttgagaacggaa

SEQ ID NO: 104459 - DNA, 25 bp, Artificial
  Probe
ctctgactatgtgcagcttcttaag

SEQ ID NO: 104460 - DNA, 25 bp, Artificial
  Probe
gagaagaatggactttgagaacgga

SEQ ID NO: 104461 - DNA, 25 bp, Artificial
  Probe
agagaagaatggactttgagaacgg

SEQ ID NO: 104462 - DNA, 25 bp, Artificial
  Probe
gcaaagaatctcagacaattaaatg

SEQ ID NO: 104463 - DNA, 25 bp, Artificial
  Probe
aagaatggactttgagaacggaagg

SEQ ID NO: 104464 - DNA, 25 bp, Artificial
  Probe
gcctcaacacaagagaagaatggac

SEQ ID NO: 104465 - DNA, 25 bp, Artificial
  Probe
tcttaagcagaatgttctcgtcacc

SEQ ID NO: 104466 - DNA, 25 bp, Artificial
  Probe
cttcttaagcagaatgttctcgtca

SEQ ID NO: 104467 - DNA, 25 bp, Artificial
  Probe
atgtcagtagacccactaggaacaa

SEQ ID NO: 104468 - DNA, 25 bp, Artificial
  Probe
ttcttaagcagaatgttctcgtcac

SEQ ID NO: 104469 - DNA, 25 bp, Artificial
  Probe
tgtcagtagacccactaggaacaaa

SEQ ID NO: 104470 - DNA, 25 bp, Artificial
  Probe
tgcaaagaatctcagacaattaaat

SEQ ID NO: 104471 - DNA, 25 bp, Artificial
  Probe
gagcagaggaaagcagaatcaacag

SEQ ID NO: 104472 - DNA, 25 bp, Artificial
  Probe
gctctgactatgtgcagcttcttaa

SEQ ID NO: 104473 - DNA, 25 bp, Artificial
  Probe
tcatgtcagtagacccactaggaac

SEQ ID NO: 104474 - DNA, 25 bp, Artificial
  Probe
gtcatgtcagtagacccactaggaa

SEQ ID NO: 104475 - DNA, 25 bp, Artificial
  Probe
cagaggaaagcagaatcaacagcag

SEQ ID NO: 104476 - DNA, 25 bp, Artificial
  Probe
tcagtagacccactaggaacaaaag

SEQ ID NO: 104477 - DNA, 25 bp, Artificial
  Probe
tcagacaattaaatgaatctcttct

SEQ ID NO: 104478 - DNA, 25 bp, Artificial
  Probe
tctcagacaattaaatgaatctctt

SEQ ID NO: 104479 - DNA, 25 bp, Artificial
  Probe
actaggaacaaaagctctgactatg

SEQ ID NO: 104480 - DNA, 25 bp, Artificial
  Probe
cactaggaacaaaagctctgactat

SEQ ID NO: 104481 - DNA, 25 bp, Artificial
  Probe
catgtcagtagacccactaggaaca

SEQ ID NO: 104482 - DNA, 25 bp, Artificial
  Probe
ctcagacaattaaatgaatctcttc

SEQ ID NO: 104483 - DNA, 25 bp, Artificial
  Probe
cttaagcagaatgttctcgtcaccg

SEQ ID NO: 104484 - DNA, 25 bp, Artificial
  Probe
atctcagacaattaaatgaatctct

SEQ ID NO: 104485 - DNA, 25 bp, Artificial
  Probe
caaagaatctcagacaattaaatga

SEQ ID NO: 104486 - DNA, 25 bp, Artificial
  Probe
gtcagtagacccactaggaacaaaa

SEQ ID NO: 104487 - DNA, 25 bp, Artificial
  Probe
ctaggaacaaaagctctgactatgt

SEQ ID NO: 104488 - DNA, 25 bp, Artificial
  Probe
taggaacaaaagctctgactatgtg

SEQ ID NO: 104489 - DNA, 25 bp, Artificial
  Probe
agaatggactttgagaacggaaggg

SEQ ID NO: 104490 - DNA, 25 bp, Artificial
  Probe
ccactaggaacaaaagctctgacta

SEQ ID NO: 104491 - DNA, 25 bp, Artificial
  Probe
aggagcagaggaaagcagaatcaac

SEQ ID NO: 104492 - DNA, 25 bp, Artificial
  Probe
ctactacagtcacctgaagaaggag

SEQ ID NO: 104493 - DNA, 25 bp, Artificial
  Probe
tactacagtcacctgaagaaggaga

SEQ ID NO: 104494 - DNA, 25 bp, Artificial
  Probe
actactacagtcacctgaagaagga

SEQ ID NO: 104495 - DNA, 25 bp, Artificial
  Probe
gacagaaagtggacagtatcttgga

SEQ ID NO: 104496 - DNA, 25 bp, Artificial
  Probe
ctacagtcacctgaagaaggagagt

SEQ ID NO: 104497 - DNA, 25 bp, Artificial
  Probe
actacagtcacctgaagaaggagag

SEQ ID NO: 104498 - DNA, 25 bp, Artificial
  Probe
acagaaagtggacagtatcttggac

SEQ ID NO: 104499 - DNA, 25 bp, Artificial
  Probe
tacagtcacctgaagaaggagagtg

SEQ ID NO: 104500 - DNA, 25 bp, Artificial
  Probe
cagaaagtggacagtatcttggacc

SEQ ID NO: 104501 - DNA, 25 bp, Artificial
  Probe
ggacagaaagtggacagtatcttgg

SEQ ID NO: 104502 - DNA, 25 bp, Artificial
  Probe
gggacagaaagtggacagtatcttg

SEQ ID NO: 104503 - DNA, 25 bp, Artificial
  Probe
cttttcttctgtatgcccaatcctt

SEQ ID NO: 104504 - DNA, 25 bp, Artificial
  Probe
gactactacagtcacctgaagaagg

SEQ ID NO: 104505 - DNA, 25 bp, Artificial
  Probe
ggactactacagtcacctgaagaag

SEQ ID NO: 104506 - DNA, 25 bp, Artificial
  Probe
gaaagtggacagtatcttggaccag

SEQ ID NO: 104507 - DNA, 25 bp, Artificial
  Probe
ttttcttctgtatgcccaatccttg

SEQ ID NO: 104508 - DNA, 25 bp, Artificial
  Probe
aggactactacagtcacctgaagaa

SEQ ID NO: 104509 - DNA, 25 bp, Artificial
  Probe
agaaagtggacagtatcttggacca

SEQ ID NO: 104510 - DNA, 25 bp, Artificial
  Probe
ctgcttttcttctgtatgcccaatc

SEQ ID NO: 104511 - DNA, 25 bp, Artificial
  Probe
gaggactactacagtcacctgaaga

SEQ ID NO: 104512 - DNA, 25 bp, Artificial
  Probe
cacctgaagaaggagagtgacaagc

SEQ ID NO: 104513 - DNA, 25 bp, Artificial
  Probe
ggaggactactacagtcacctgaag

SEQ ID NO: 104514 - DNA, 25 bp, Artificial
  Probe
gcttttcttctgtatgcccaatcct

SEQ ID NO: 104515 - DNA, 25 bp, Artificial
  Probe
aagtggacagtatcttggaccaggt

SEQ ID NO: 104516 - DNA, 25 bp, Artificial
  Probe
aaagtggacagtatcttggaccagg

SEQ ID NO: 104517 - DNA, 25 bp, Artificial
  Probe
gaagttcttcgtcaccagctctttg

SEQ ID NO: 104518 - DNA, 25 bp, Artificial
  Probe
ccatcccctgcttttcttctgtatg

SEQ ID NO: 104519 - DNA, 25 bp, Artificial
  Probe
tgcttttcttctgtatgcccaatcc

SEQ ID NO: 104520 - DNA, 25 bp, Artificial
  Probe
cctgcttttcttctgtatgcccaat

SEQ ID NO: 104521 - DNA, 25 bp, Artificial
  Probe
aggaggactactacagtcacctgaa

SEQ ID NO: 104522 - DNA, 25 bp, Artificial
  Probe
tgttagatgtggctgttttgcgtag

SEQ ID NO: 104523 - DNA, 25 bp, Artificial
  Probe
ctgttagatgtggctgttttgcgta

SEQ ID NO: 104524 - DNA, 25 bp, Artificial
  Probe
ggggacagaaagtggacagtatctt

SEQ ID NO: 104525 - DNA, 25 bp, Artificial
  Probe
tcacctgaagaaggagagtgacaag

SEQ ID NO: 104526 - DNA, 25 bp, Artificial
  Probe
catcccctgcttttcttctgtatgc

SEQ ID NO: 104527 - DNA, 25 bp, Artificial
  Probe
cccatcccctgcttttcttctgtat

SEQ ID NO: 104528 - DNA, 25 bp, Artificial
  Probe
tttcttctgtatgcccaatccttgg

SEQ ID NO: 104529 - DNA, 25 bp, Artificial
  Probe
gtggggacagaaagtggacagtatc

SEQ ID NO: 104530 - DNA, 25 bp, Artificial
  Probe
ctaatccccttcttcctcaccctct

SEQ ID NO: 104531 - DNA, 25 bp, Artificial
  Probe
taatccccttcttcctcaccctctg

SEQ ID NO: 104532 - DNA, 25 bp, Artificial
  Probe
tggggacagaaagtggacagtatct

SEQ ID NO: 104533 - DNA, 25 bp, Artificial
  Probe
atcccctgcttttcttctgtatgcc

SEQ ID NO: 104534 - DNA, 25 bp, Artificial
  Probe
acagtcacctgaagaaggagagtga

SEQ ID NO: 104535 - DNA, 25 bp, Artificial
  Probe
atctgttagatgtggctgttttgcg

SEQ ID NO: 104536 - DNA, 25 bp, Artificial
  Probe
ctttgaggtgaaacctagtgagctg

SEQ ID NO: 104537 - DNA, 25 bp, Artificial
  Probe
ggactgaggacctttgttatactta

SEQ ID NO: 104538 - DNA, 25 bp, Artificial
  Probe
gactgaggacctttgttatacttaa

SEQ ID NO: 104539 - DNA, 25 bp, Artificial
  Probe
ggagtctgaattctgttcttactga

SEQ ID NO: 104540 - DNA, 25 bp, Artificial
  Probe
aggagtctgaattctgttcttactg

SEQ ID NO: 104541 - DNA, 25 bp, Artificial
  Probe
aggactgaggacctttgttatactt

SEQ ID NO: 104542 - DNA, 25 bp, Artificial
  Probe
gaaacaaacttctatgcttaatcca

SEQ ID NO: 104543 - DNA, 25 bp, Artificial
  Probe
cctcgggtatttccaaatatatctt

SEQ ID NO: 104544 - DNA, 25 bp, Artificial
  Probe
aacaaacttctatgcttaatccaaa

SEQ ID NO: 104545 - DNA, 25 bp, Artificial
  Probe
aaacaaacttctatgcttaatccaa

SEQ ID NO: 104546 - DNA, 25 bp, Artificial
  Probe
caggagtctgaattctgttcttact

SEQ ID NO: 104547 - DNA, 25 bp, Artificial
  Probe
tacactgttccatgtggttctccta

SEQ ID NO: 104548 - DNA, 25 bp, Artificial
  Probe
gagtctgaattctgttcttactgat

SEQ ID NO: 104549 - DNA, 25 bp, Artificial
  Probe
tttatttctgccgaaagtattcagg

SEQ ID NO: 104550 - DNA, 25 bp, Artificial
  Probe
cattgtcctaatattgatgttacct

SEQ ID NO: 104551 - DNA, 25 bp, Artificial
  Probe
ttattcttgctcaggatacataatt

SEQ ID NO: 104552 - DNA, 25 bp, Artificial
  Probe
tatttctgccgaaagtattcaggtt

SEQ ID NO: 104553 - DNA, 25 bp, Artificial
  Probe
ttatttctgccgaaagtattcaggt

SEQ ID NO: 104554 - DNA, 25 bp, Artificial
  Probe
actgaggacctttgttatacttaac

SEQ ID NO: 104555 - DNA, 25 bp, Artificial
  Probe
acctcgggtatttccaaatatatct

SEQ ID NO: 104556 - DNA, 25 bp, Artificial
  Probe
gaaagtattcaggtttgctgtggac

SEQ ID NO: 104557 - DNA, 25 bp, Artificial
  Probe
gccagaaacaaacttctatgcttaa

SEQ ID NO: 104558 - DNA, 25 bp, Artificial
  Probe
agtctgaattctgttcttactgatt

SEQ ID NO: 104559 - DNA, 25 bp, Artificial
  Probe
atttctgccgaaagtattcaggttt

SEQ ID NO: 104560 - DNA, 25 bp, Artificial
  Probe
ttccatgtggttctcctagcttcat

SEQ ID NO: 104561 - DNA, 25 bp, Artificial
  Probe
cagtacactgttccatgtggttctc

SEQ ID NO: 104562 - DNA, 25 bp, Artificial
  Probe
gttaccttttatgaaatgagcacca

SEQ ID NO: 104563 - DNA, 25 bp, Artificial
  Probe
tgttaccttttatgaaatgagcacc

SEQ ID NO: 104564 - DNA, 25 bp, Artificial
  Probe
aagtattcaggtttgctgtggacat

SEQ ID NO: 104565 - DNA, 25 bp, Artificial
  Probe
tcgggtatttccaaatatatcttct

SEQ ID NO: 104566 - DNA, 25 bp, Artificial
  Probe
ctcgggtatttccaaatatatcttc

SEQ ID NO: 104567 - DNA, 25 bp, Artificial
  Probe
aaagtattcaggtttgctgtggaca

SEQ ID NO: 104568 - DNA, 25 bp, Artificial
  Probe
ttctgttcttactgattttgttcca

SEQ ID NO: 104569 - DNA, 25 bp, Artificial
  Probe
tctgttcttactgattttgttccat

SEQ ID NO: 104570 - DNA, 25 bp, Artificial
  Probe
tttctgccgaaagtattcaggtttg

SEQ ID NO: 104571 - DNA, 25 bp, Artificial
  Probe
ttaccttttatgaaatgagcaccat

SEQ ID NO: 104572 - DNA, 25 bp, Artificial
  Probe
tatatcttctatgtctttgtttggg

SEQ ID NO: 104573 - DNA, 25 bp, Artificial
  Probe
tccatgtggttctcctagcttcatc

SEQ ID NO: 104574 - DNA, 25 bp, Artificial
  Probe
tattcaggtttgctgtggacatcag

SEQ ID NO: 104575 - DNA, 25 bp, Artificial
  Probe
agtattcaggtttgctgtggacatc

SEQ ID NO: 104576 - DNA, 25 bp, Artificial
  Probe
atatcttctatgtctttgtttgggg

SEQ ID NO: 104577 - DNA, 25 bp, Artificial
  Probe
attgtcctaatattgatgttacctt

SEQ ID NO: 104578 - DNA, 25 bp, Artificial
  Probe
agtgtttaacaatgaaggaacttta

SEQ ID NO: 104579 - DNA, 25 bp, Artificial
  Probe
gtattcaggtttgctgtggacatca

SEQ ID NO: 104580 - DNA, 25 bp, Artificial
  Probe
atgttaccttttatgaaatgagcac

SEQ ID NO: 104581 - DNA, 25 bp, Artificial
  Probe
acactgttccatgtggttctcctag

SEQ ID NO: 104582 - DNA, 25 bp, Artificial
  Probe
tgtgttccaggctcttagtattctt

SEQ ID NO: 104583 - DNA, 25 bp, Artificial
  Probe
tcattctctacatctcattatcagc

SEQ ID NO: 104584 - DNA, 25 bp, Artificial
  Probe
aattcaggttaagtatgtgactgct

SEQ ID NO: 104585 - DNA, 25 bp, Artificial
  Probe
attcaggttaagtatgtgactgctg

SEQ ID NO: 104586 - DNA, 25 bp, Artificial
  Probe
gcattatgtcagaattgatgtacct

SEQ ID NO: 104587 - DNA, 25 bp, Artificial
  Probe
tgacaatcattctctacatctcatt

SEQ ID NO: 104588 - DNA, 25 bp, Artificial
  Probe
ctgtgttccaggctcttagtattct

SEQ ID NO: 104589 - DNA, 25 bp, Artificial
  Probe
ctcacctacacacgttatacagatt

SEQ ID NO: 104590 - DNA, 25 bp, Artificial
  Probe
aatattgactcacctacacacgtta

SEQ ID NO: 104591 - DNA, 25 bp, Artificial
  Probe
cctacacacgttatacagattgaca

SEQ ID NO: 104592 - DNA, 25 bp, Artificial
  Probe
acctacacacgttatacagattgac

SEQ ID NO: 104593 - DNA, 25 bp, Artificial
  Probe
cacctacacacgttatacagattga

SEQ ID NO: 104594 - DNA, 25 bp, Artificial
  Probe
tcacctacacacgttatacagattg

SEQ ID NO: 104595 - DNA, 25 bp, Artificial
  Probe
attgactcacctacacacgttatac

SEQ ID NO: 104596 - DNA, 25 bp, Artificial
  Probe
atattgactcacctacacacgttat

SEQ ID NO: 104597 - DNA, 25 bp, Artificial
  Probe
gttccaggctcttagtattctttct

SEQ ID NO: 104598 - DNA, 25 bp, Artificial
  Probe
tgttccaggctcttagtattctttc

SEQ ID NO: 104599 - DNA, 25 bp, Artificial
  Probe
gtgttccaggctcttagtattcttt

SEQ ID NO: 104600 - DNA, 25 bp, Artificial
  Probe
tccaggctcttagtattctttcttt

SEQ ID NO: 104601 - DNA, 25 bp, Artificial
  Probe
ttccaggctcttagtattctttctt

SEQ ID NO: 104602 - DNA, 25 bp, Artificial
  Probe
gctctccttactctgtttcttgtag

SEQ ID NO: 104603 - DNA, 25 bp, Artificial
  Probe
tattgactcacctacacacgttata

SEQ ID NO: 104604 - DNA, 25 bp, Artificial
  Probe
actcacctacacacgttatacagat

SEQ ID NO: 104605 - DNA, 25 bp, Artificial
  Probe
ctacacacgttatacagattgacat

SEQ ID NO: 104606 - DNA, 25 bp, Artificial
  Probe
gatgctctccttactctgtttcttg

SEQ ID NO: 104607 - DNA, 25 bp, Artificial
  Probe
tgctctccttactctgtttcttgta

SEQ ID NO: 104608 - DNA, 25 bp, Artificial
  Probe
atgatgctctccttactctgtttct

SEQ ID NO: 104609 - DNA, 25 bp, Artificial
  Probe
ttgactcacctacacacgttataca

SEQ ID NO: 104610 - DNA, 25 bp, Artificial
  Probe
tgcattatgtcagaattgatgtacc

SEQ ID NO: 104611 - DNA, 25 bp, Artificial
  Probe
tgatgctctccttactctgtttctt

SEQ ID NO: 104612 - DNA, 25 bp, Artificial
  Probe
cattctctacatctcattatcagct

SEQ ID NO: 104613 - DNA, 25 bp, Artificial
  Probe
gactcacctacacacgttatacaga

SEQ ID NO: 104614 - DNA, 25 bp, Artificial
  Probe
ctccttactctgtttcttgtagtca

SEQ ID NO: 104615 - DNA, 25 bp, Artificial
  Probe
tctccttactctgtttcttgtagtc

SEQ ID NO: 104616 - DNA, 25 bp, Artificial
  Probe
ctctccttactctgtttcttgtagt

SEQ ID NO: 104617 - DNA, 25 bp, Artificial
  Probe
atgctctccttactctgtttcttgt

SEQ ID NO: 104618 - DNA, 25 bp, Artificial
  Probe
tacacacgttatacagattgacatt

SEQ ID NO: 104619 - DNA, 25 bp, Artificial
  Probe
aatgattacctccctgtactactgt

SEQ ID NO: 104620 - DNA, 25 bp, Artificial
  Probe
aaacagagtcagttagtgggtagtt

SEQ ID NO: 104621 - DNA, 25 bp, Artificial
  Probe
tgactcacctacacacgttatacag

SEQ ID NO: 104622 - DNA, 25 bp, Artificial
  Probe
tccttactctgtttcttgtagtcat

SEQ ID NO: 104623 - DNA, 25 bp, Artificial
  Probe
ttcggaggaagaagttactttagac

SEQ ID NO: 104624 - DNA, 25 bp, Artificial
  Probe
cggaggaagaagttactttagacaa

SEQ ID NO: 104625 - DNA, 25 bp, Artificial
  Probe
gtttaagcctactacaagtgtttct

SEQ ID NO: 104626 - DNA, 25 bp, Artificial
  Probe
atgattacctccctgtactactgtg

SEQ ID NO: 104627 - DNA, 25 bp, Artificial
  Probe
ggagtggaactgagttgtgtatata

SEQ ID NO: 104628 - DNA, 25 bp, Artificial
  Probe
catgaataccaatgatctcagcaat

SEQ ID NO: 104629 - DNA, 25 bp, Artificial
  Probe
atgaataccaatgatctcagcaatt

SEQ ID NO: 104630 - DNA, 25 bp, Artificial
  Probe
gacctagtgttcaggcatagtctat

SEQ ID NO: 104631 - DNA, 25 bp, Artificial
  Probe
agtagcagaggtgtagtaaccatat

SEQ ID NO: 104632 - DNA, 25 bp, Artificial
  Probe
ccagcatgaataccaatgatctcag

SEQ ID NO: 104633 - DNA, 25 bp, Artificial
  Probe
tgatcttacgtgttgtatgtggaat

SEQ ID NO: 104634 - DNA, 25 bp, Artificial
  Probe
cagtagcagaggtgtagtaaccata

SEQ ID NO: 104635 - DNA, 25 bp, Artificial
  Probe
gcatgaataccaatgatctcagcaa

SEQ ID NO: 104636 - DNA, 25 bp, Artificial
  Probe
tcccatatctgaaagttgtcctatc

SEQ ID NO: 104637 - DNA, 25 bp, Artificial
  Probe
ctcccatatctgaaagttgtcctat

SEQ ID NO: 104638 - DNA, 25 bp, Artificial
  Probe
cggagtggaactgagttgtgtatat

SEQ ID NO: 104639 - DNA, 25 bp, Artificial
  Probe
gtgttcaggcatagtctatgtaact

SEQ ID NO: 104640 - DNA, 25 bp, Artificial
  Probe
agtgttcaggcatagtctatgtaac

SEQ ID NO: 104641 - DNA, 25 bp, Artificial
  Probe
tgttcaggcatagtctatgtaactt

SEQ ID NO: 104642 - DNA, 25 bp, Artificial
  Probe
cttacgtgttgtatgtggaatatct

SEQ ID NO: 104643 - DNA, 25 bp, Artificial
  Probe
tcttacgtgttgtatgtggaatatc

SEQ ID NO: 104644 - DNA, 25 bp, Artificial
  Probe
gatcttacgtgttgtatgtggaata

SEQ ID NO: 104645 - DNA, 25 bp, Artificial
  Probe
cagcatgaataccaatgatctcagc

SEQ ID NO: 104646 - DNA, 25 bp, Artificial
  Probe
caacatttgccagtaacaatcctta

SEQ ID NO: 104647 - DNA, 25 bp, Artificial
  Probe
tatccaacatttgccagtaacaatc

SEQ ID NO: 104648 - DNA, 25 bp, Artificial
  Probe
ctatccaacatttgccagtaacaat

SEQ ID NO: 104649 - DNA, 25 bp, Artificial
  Probe
cctcccatatctgaaagttgtccta

SEQ ID NO: 104650 - DNA, 25 bp, Artificial
  Probe
ctagtgttcaggcatagtctatgta

SEQ ID NO: 104651 - DNA, 25 bp, Artificial
  Probe
tttcctatccaacatttgccagtaa

SEQ ID NO: 104652 - DNA, 25 bp, Artificial
  Probe
cccatatctgaaagttgtcctatca

SEQ ID NO: 104653 - DNA, 25 bp, Artificial
  Probe
caaagtatgaagaggcatcaagttt

SEQ ID NO: 104654 - DNA, 25 bp, Artificial
  Probe
atcaaagtatgaagaggcatcaagt

SEQ ID NO: 104655 - DNA, 25 bp, Artificial
  Probe
acatttgccagtaacaatccttatt

SEQ ID NO: 104656 - DNA, 25 bp, Artificial
  Probe
aacatttgccagtaacaatccttat

SEQ ID NO: 104657 - DNA, 25 bp, Artificial
  Probe
tcaaagtatgaagaggcatcaagtt

SEQ ID NO: 104658 - DNA, 25 bp, Artificial
  Probe
agcatgaataccaatgatctcagca

SEQ ID NO: 104659 - DNA, 25 bp, Artificial
  Probe
tagtgttcaggcatagtctatgtaa

SEQ ID NO: 104660 - DNA, 25 bp, Artificial
  Probe
tacgtgttgtatgtggaatatctac

SEQ ID NO: 104661 - DNA, 25 bp, Artificial
  Probe
cctagtgttcaggcatagtctatgt

SEQ ID NO: 104662 - DNA, 25 bp, Artificial
  Probe
acctagtgttcaggcatagtctatg

SEQ ID NO: 104663 - DNA, 25 bp, Artificial
  Probe
ttcctatccaacatttgccagtaac

SEQ ID NO: 104664 - DNA, 25 bp, Artificial
  Probe
atcttacgtgttgtatgtggaatat

SEQ ID NO: 104665 - DNA, 25 bp, Artificial
  Probe
gagtacacacggaacattcagaaca

SEQ ID NO: 104666 - DNA, 25 bp, Artificial
  Probe
cctatccaacatttgccagtaacaa

SEQ ID NO: 104667 - DNA, 25 bp, Artificial
  Probe
tatcaaagtatgaagaggcatcaag

SEQ ID NO: 104668 - DNA, 25 bp, Artificial
  Probe
aggcatagtctatgtaacttacacc

SEQ ID NO: 104669 - DNA, 25 bp, Artificial
  Probe
catttgccagtaacaatccttattt

SEQ ID NO: 104670 - DNA, 25 bp, Artificial
  Probe
agtacacacggaacattcagaacac

SEQ ID NO: 104671 - DNA, 25 bp, Artificial
  Probe
ccatatctgaaagttgtcctatcaa

SEQ ID NO: 104672 - DNA, 25 bp, Artificial
  Probe
agtacctgaatgagatcaaggacag

SEQ ID NO: 104673 - DNA, 25 bp, Artificial
  Probe
tacctgaatgagatcaaggacagtg

SEQ ID NO: 104674 - DNA, 25 bp, Artificial
  Probe
gtacctgaatgagatcaaggacagt

SEQ ID NO: 104675 - DNA, 25 bp, Artificial
  Probe
cagtacctgaatgagatcaaggaca

SEQ ID NO: 104676 - DNA, 25 bp, Artificial
  Probe
ctatctacctggtggagattcagtg

SEQ ID NO: 104677 - DNA, 25 bp, Artificial
  Probe
gaatgagatcaaggacagtgtggtg

SEQ ID NO: 104678 - DNA, 25 bp, Artificial
  Probe
aaagtatgagtgggatgttgctgaa

SEQ ID NO: 104679 - DNA, 25 bp, Artificial
  Probe
tatctacctggtggagattcagtgt

SEQ ID NO: 104680 - DNA, 25 bp, Artificial
  Probe
gcagtacctgaatgagatcaaggac

SEQ ID NO: 104681 - DNA, 25 bp, Artificial
  Probe
cctatctacctggtggagattcagt

SEQ ID NO: 104682 - DNA, 25 bp, Artificial
  Probe
ctgaatgagatcaaggacagtgtgg

SEQ ID NO: 104683 - DNA, 25 bp, Artificial
  Probe
aagtatgagtgggatgttgctgaag

SEQ ID NO: 104684 - DNA, 25 bp, Artificial
  Probe
caacattctcaccgacatcaccaag

SEQ ID NO: 104685 - DNA, 25 bp, Artificial
  Probe
cctgaatgagatcaaggacagtgtg

SEQ ID NO: 104686 - DNA, 25 bp, Artificial
  Probe
tgtgcagtacctgaatgagatcaag

SEQ ID NO: 104687 - DNA, 25 bp, Artificial
  Probe
tgaatgagatcaaggacagtgtggt

SEQ ID NO: 104688 - DNA, 25 bp, Artificial
  Probe
acctgaatgagatcaaggacagtgt

SEQ ID NO: 104689 - DNA, 25 bp, Artificial
  Probe
gtgtgcagtacctgaatgagatcaa

SEQ ID NO: 104690 - DNA, 25 bp, Artificial
  Probe
atctacctggtggagattcagtgtc

SEQ ID NO: 104691 - DNA, 25 bp, Artificial
  Probe
gagcctatctacctggtggagattc

SEQ ID NO: 104692 - DNA, 25 bp, Artificial
  Probe
gtgcagtacctgaatgagatcaagg

SEQ ID NO: 104693 - DNA, 25 bp, Artificial
  Probe
tgcagtacctgaatgagatcaagga

SEQ ID NO: 104694 - DNA, 25 bp, Artificial
  Probe
aatgagatcaaggacagtgtggtgg

SEQ ID NO: 104695 - DNA, 25 bp, Artificial
  Probe
gatttgatgtccatgatgtgaccct

SEQ ID NO: 104696 - DNA, 25 bp, Artificial
  Probe
gcctatctacctggtggagattcag

SEQ ID NO: 104697 - DNA, 25 bp, Artificial
  Probe
gaaaagtatgagtgggatgttgctg

SEQ ID NO: 104698 - DNA, 25 bp, Artificial
  Probe
atttgatgtccatgatgtgaccctg

SEQ ID NO: 104699 - DNA, 25 bp, Artificial
  Probe
aacattctcaccgacatcaccaagg

SEQ ID NO: 104700 - DNA, 25 bp, Artificial
  Probe
aaaagtatgagtgggatgttgctga

SEQ ID NO: 104701 - DNA, 25 bp, Artificial
  Probe
agcctatctacctggtggagattca

SEQ ID NO: 104702 - DNA, 25 bp, Artificial
  Probe
catcaagaaatctgaccctgtcgtg

SEQ ID NO: 104703 - DNA, 25 bp, Artificial
  Probe
gtgcgatttgatgtccatgatgtga

SEQ ID NO: 104704 - DNA, 25 bp, Artificial
  Probe
atcaagaaatctgaccctgtcgtgt

SEQ ID NO: 104705 - DNA, 25 bp, Artificial
  Probe
tgtgcgatttgatgtccatgatgtg

SEQ ID NO: 104706 - DNA, 25 bp, Artificial
  Probe
gtgtgcgatttgatgtccatgatgt

SEQ ID NO: 104707 - DNA, 25 bp, Artificial
  Probe
cgaaaagtatgagtgggatgttgct

SEQ ID NO: 104708 - DNA, 25 bp, Artificial
  Probe
cgatttgatgtccatgatgtgaccc

SEQ ID NO: 104709 - DNA, 25 bp, Artificial
  Probe
tgcgatttgatgtccatgatgtgac

SEQ ID NO: 104710 - DNA, 25 bp, Artificial
  Probe
ggagcctatctacctggtggagatt

SEQ ID NO: 104711 - DNA, 25 bp, Artificial
  Probe
gacatcgataagggtgaggtatctg

SEQ ID NO: 104712 - DNA, 25 bp, Artificial
  Probe
tcaagaaatctgaccctgtcgtgtc

SEQ ID NO: 104713 - DNA, 25 bp, Artificial
  Probe
ggtgtgcagtacctgaatgagatca

SEQ ID NO: 104714 - DNA, 25 bp, Artificial
  Probe
gaaatctgaccctgtcgtgtcctac

SEQ ID NO: 104715 - DNA, 25 bp, Artificial
  Probe
ccatcaagaaatctgaccctgtcgt

SEQ ID NO: 104716 - DNA, 25 bp, Artificial
  Probe
agtatgagtgggatgttgctgaagc

SEQ ID NO: 104717 - DNA, 25 bp, Artificial
  Probe
tctcagattcacttccaagcaatag

SEQ ID NO: 104718 - DNA, 25 bp, Artificial
  Probe
gtctcagattcacttccaagcaata

SEQ ID NO: 104719 - DNA, 25 bp, Artificial
  Probe
gtgtgactcatcgtatatcatagga

SEQ ID NO: 104720 - DNA, 25 bp, Artificial
  Probe
agtgtgactcatcgtatatcatagg

SEQ ID NO: 104721 - DNA, 25 bp, Artificial
  Probe
tattctgttagacatcacactggag

SEQ ID NO: 104722 - DNA, 25 bp, Artificial
  Probe
ctcagattcacttccaagcaatagc

SEQ ID NO: 104723 - DNA, 25 bp, Artificial
  Probe
ttattctgttagacatcacactgga

SEQ ID NO: 104724 - DNA, 25 bp, Artificial
  Probe
gttattctgttagacatcacactgg

SEQ ID NO: 104725 - DNA, 25 bp, Artificial
  Probe
ggttattctgttagacatcacactg

SEQ ID NO: 104726 - DNA, 25 bp, Artificial
  Probe
aggttattctgttagacatcacact

SEQ ID NO: 104727 - DNA, 25 bp, Artificial
  Probe
tgtgactcatcgtatatcataggat

SEQ ID NO: 104728 - DNA, 25 bp, Artificial
  Probe
aaggttattctgttagacatcacac

SEQ ID NO: 104729 - DNA, 25 bp, Artificial
  Probe
aagtgtgactcatcgtatatcatag

SEQ ID NO: 104730 - DNA, 25 bp, Artificial
  Probe
gtgactcatcgtatatcataggatt

SEQ ID NO: 104731 - DNA, 25 bp, Artificial
  Probe
ggtctcagattcacttccaagcaat

SEQ ID NO: 104732 - DNA, 25 bp, Artificial
  Probe
attctgttagacatcacactggagc

SEQ ID NO: 104733 - DNA, 25 bp, Artificial
  Probe
aattctatagccaagacgtatgttg

SEQ ID NO: 104734 - DNA, 25 bp, Artificial
  Probe
ataagtgtgactcatcgtatatcat

SEQ ID NO: 104735 - DNA, 25 bp, Artificial
  Probe
gaacaagacatacggtatcgagaca

SEQ ID NO: 104736 - DNA, 25 bp, Artificial
  Probe
tgaacaagacatacggtatcgagac

SEQ ID NO: 104737 - DNA, 25 bp, Artificial
  Probe
aggcacagtctacaaagcatatcat

SEQ ID NO: 104738 - DNA, 25 bp, Artificial
  Probe
aacaagacatacggtatcgagacac

SEQ ID NO: 104739 - DNA, 25 bp, Artificial
  Probe
ggtgaattctatagccaagacgtat

SEQ ID NO: 104740 - DNA, 25 bp, Artificial
  Probe
gctgtaaaggttattctgttagaca

SEQ ID NO: 104741 - DNA, 25 bp, Artificial
  Probe
tgaattctatagccaagacgtatgt

SEQ ID NO: 104742 - DNA, 25 bp, Artificial
  Probe
gtgaattctatagccaagacgtatg

SEQ ID NO: 104743 - DNA, 25 bp, Artificial
  Probe
aaaggatttcaggagagcagtatgg

SEQ ID NO: 104744 - DNA, 25 bp, Artificial
  Probe
taagtgtgactcatcgtatatcata

SEQ ID NO: 104745 - DNA, 25 bp, Artificial
  Probe
tataagtgtgactcatcgtatatca

SEQ ID NO: 104746 - DNA, 25 bp, Artificial
  Probe
atgttggaacaaatgcttatatggc

SEQ ID NO: 104747 - DNA, 25 bp, Artificial
  Probe
gccttacctatctgtggagtttaaa

SEQ ID NO: 104748 - DNA, 25 bp, Artificial
  Probe
cacagtctacaaagcatatcatgtc

SEQ ID NO: 104749 - DNA, 25 bp, Artificial
  Probe
gaattctatagccaagacgtatgtt

SEQ ID NO: 104750 - DNA, 25 bp, Artificial
  Probe
tctacaaagcatatcatgtcccaag

SEQ ID NO: 104751 - DNA, 25 bp, Artificial
  Probe
acagtctacaaagcatatcatgtcc

SEQ ID NO: 104752 - DNA, 25 bp, Artificial
  Probe
ctacaaagcatatcatgtcccaagt

SEQ ID NO: 104753 - DNA, 25 bp, Artificial
  Probe
gaggcacagtctacaaagcatatca

SEQ ID NO: 104754 - DNA, 25 bp, Artificial
  Probe
gtctacaaagcatatcatgtcccaa

SEQ ID NO: 104755 - DNA, 25 bp, Artificial
  Probe
aaaggttattctgttagacatcaca

SEQ ID NO: 104756 - DNA, 25 bp, Artificial
  Probe
tacaaagcatatcatgtcccaagtg

SEQ ID NO: 104757 - DNA, 25 bp, Artificial
  Probe
cagtctacaaagcatatcatgtccc

SEQ ID NO: 104758 - DNA, 25 bp, Artificial
  Probe
ctgtggtctcagattcacttccaag

SEQ ID NO: 104759 - DNA, 25 bp, Artificial
  Probe
gcacagtctacaaagcatatcatgt

SEQ ID NO: 104760 - DNA, 25 bp, Artificial
  Probe
ggcacagtctacaaagcatatcatg

SEQ ID NO: 104761 - DNA, 25 bp, Artificial
  Probe
tactgttgtaaagggtcagcctatc

SEQ ID NO: 104762 - DNA, 25 bp, Artificial
  Probe
tactgaaaggattgaaagaagaggt

SEQ ID NO: 104763 - DNA, 25 bp, Artificial
  Probe
actgaaaggattgaaagaagaggtc

SEQ ID NO: 104764 - DNA, 25 bp, Artificial
  Probe
ctatacacctcagtctgtcaggaac

SEQ ID NO: 104765 - DNA, 25 bp, Artificial
  Probe
tgaaaggattgaaagaagaggtcat

SEQ ID NO: 104766 - DNA, 25 bp, Artificial
  Probe
ctgaaaggattgaaagaagaggtca

SEQ ID NO: 104767 - DNA, 25 bp, Artificial
  Probe
gtactgaaaggattgaaagaagagg

SEQ ID NO: 104768 - DNA, 25 bp, Artificial
  Probe
ggtactgaaaggattgaaagaagag

SEQ ID NO: 104769 - DNA, 25 bp, Artificial
  Probe
cggtactgaaaggattgaaagaaga

SEQ ID NO: 104770 - DNA, 25 bp, Artificial
  Probe
ctgtagaagattagagtccctcaaa

SEQ ID NO: 104771 - DNA, 25 bp, Artificial
  Probe
cctgtagaagattagagtccctcaa

SEQ ID NO: 104772 - DNA, 25 bp, Artificial
  Probe
cctatacacctcagtctgtcaggaa

SEQ ID NO: 104773 - DNA, 25 bp, Artificial
  Probe
gaaaggattgaaagaagaggtcatg

SEQ ID NO: 104774 - DNA, 25 bp, Artificial
  Probe
aaaggattgaaagaagaggtcatgg

SEQ ID NO: 104775 - DNA, 25 bp, Artificial
  Probe
tttgcggtactgaaaggattgaaag

SEQ ID NO: 104776 - DNA, 25 bp, Artificial
  Probe
gcggtactgaaaggattgaaagaag

SEQ ID NO: 104777 - DNA, 25 bp, Artificial
  Probe
ccctgtagaagattagagtccctca

SEQ ID NO: 104778 - DNA, 25 bp, Artificial
  Probe
tatacacctcagtctgtcaggaacg

SEQ ID NO: 104779 - DNA, 25 bp, Artificial
  Probe
aaacagccctgtagaagattagagt

SEQ ID NO: 104780 - DNA, 25 bp, Artificial
  Probe
gaacatgggctcattatttccaaat

SEQ ID NO: 104781 - DNA, 25 bp, Artificial
  Probe
tgcggtactgaaaggattgaaagaa

SEQ ID NO: 104782 - DNA, 25 bp, Artificial
  Probe
ttgcggtactgaaaggattgaaaga

SEQ ID NO: 104783 - DNA, 25 bp, Artificial
  Probe
aacagccctgtagaagattagagtc

SEQ ID NO: 104784 - DNA, 25 bp, Artificial
  Probe
tgaacatgggctcattatttccaaa

SEQ ID NO: 104785 - DNA, 25 bp, Artificial
  Probe
ctcattatttccaaatgccctgtct

SEQ ID NO: 104786 - DNA, 25 bp, Artificial
  Probe
aacatgggctcattatttccaaatg

SEQ ID NO: 104787 - DNA, 25 bp, Artificial
  Probe
ctgaacatgggctcattatttccaa

SEQ ID NO: 104788 - DNA, 25 bp, Artificial
  Probe
tcattatttccaaatgccctgtctg

SEQ ID NO: 104789 - DNA, 25 bp, Artificial
  Probe
tttacttctcacatggaaactgcac

SEQ ID NO: 104790 - DNA, 25 bp, Artificial
  Probe
ctcagtctgtcaggaacggttgtag

SEQ ID NO: 104791 - DNA, 25 bp, Artificial
  Probe
attatttccaaatgccctgtctggt

SEQ ID NO: 104792 - DNA, 25 bp, Artificial
  Probe
tacttctcacatggaaactgcactt

SEQ ID NO: 104793 - DNA, 25 bp, Artificial
  Probe
ttacttctcacatggaaactgcact

SEQ ID NO: 104794 - DNA, 25 bp, Artificial
  Probe
agccctgtagaagattagagtccct

SEQ ID NO: 104795 - DNA, 25 bp, Artificial
  Probe
ctttgcggtactgaaaggattgaaa

SEQ ID NO: 104796 - DNA, 25 bp, Artificial
  Probe
cagccctgtagaagattagagtccc

SEQ ID NO: 104797 - DNA, 25 bp, Artificial
  Probe
aaggattgaaagaagaggtcatggc

SEQ ID NO: 104798 - DNA, 25 bp, Artificial
  Probe
gccctgtagaagattagagtccctc

SEQ ID NO: 104799 - DNA, 25 bp, Artificial
  Probe
cattatttccaaatgccctgtctgg

SEQ ID NO: 104800 - DNA, 25 bp, Artificial
  Probe
attttacttctcacatggaaactgc

SEQ ID NO: 104801 - DNA, 25 bp, Artificial
  Probe
tgtagaagattagagtccctcaaaa

SEQ ID NO: 104802 - DNA, 25 bp, Artificial
  Probe
acagccctgtagaagattagagtcc

SEQ ID NO: 104803 - DNA, 25 bp, Artificial
  Probe
gctcattatttccaaatgccctgtc

SEQ ID NO: 104804 - DNA, 25 bp, Artificial
  Probe
acatgggctcattatttccaaatgc

SEQ ID NO: 104805 - DNA, 25 bp, Artificial
  Probe
cagtctgtcaggaacggttgtagtg

SEQ ID NO: 104806 - DNA, 25 bp, Artificial
  Probe
ttatttccaaatgccctgtctggtc

SEQ ID NO: 104807 - DNA, 25 bp, Artificial
  Probe
aacttggaatgtcatcagattggat

SEQ ID NO: 104808 - DNA, 25 bp, Artificial
  Probe
gaggaacttggaatgtcatcagatt

SEQ ID NO: 104809 - DNA, 25 bp, Artificial
  Probe
gaacttggaatgtcatcagattgga

SEQ ID NO: 104810 - DNA, 25 bp, Artificial
  Probe
aggaacttggaatgtcatcagattg

SEQ ID NO: 104811 - DNA, 25 bp, Artificial
  Probe
cctggttactgactacaagaataag

SEQ ID NO: 104812 - DNA, 25 bp, Artificial
  Probe
acctggttactgactacaagaataa

SEQ ID NO: 104813 - DNA, 25 bp, Artificial
  Probe
acttggaatgtcatcagattggatc

SEQ ID NO: 104814 - DNA, 25 bp, Artificial
  Probe
ggaacttggaatgtcatcagattgg

SEQ ID NO: 104815 - DNA, 25 bp, Artificial
  Probe
ctggttactgactacaagaataaga

SEQ ID NO: 104816 - DNA, 25 bp, Artificial
  Probe
tattgacatcaacagtgagaagttc

SEQ ID NO: 104817 - DNA, 25 bp, Artificial
  Probe
ctattgacatcaacagtgagaagtt

SEQ ID NO: 104818 - DNA, 25 bp, Artificial
  Probe
ggaggaacttggaatgtcatcagat

SEQ ID NO: 104819 - DNA, 25 bp, Artificial
  Probe
gctattgacatcaacagtgagaagt

SEQ ID NO: 104820 - DNA, 25 bp, Artificial
  Probe
attgacatcaacagtgagaagttcc

SEQ ID NO: 104821 - DNA, 25 bp, Artificial
  Probe
aacctggttactgactacaagaata

SEQ ID NO: 104822 - DNA, 25 bp, Artificial
  Probe
tggttactgactacaagaataagaa

SEQ ID NO: 104823 - DNA, 25 bp, Artificial
  Probe
agctattgacatcaacagtgagaag

SEQ ID NO: 104824 - DNA, 25 bp, Artificial
  Probe
gtctttctgctgtaattggatgtaa

SEQ ID NO: 104825 - DNA, 25 bp, Artificial
  Probe
ggtctttctgctgtaattggatgta

SEQ ID NO: 104826 - DNA, 25 bp, Artificial
  Probe
cttaatcccagagacctagacaaac

SEQ ID NO: 104827 - DNA, 25 bp, Artificial
  Probe
ggagcaaaggttgatgaaatgaata

SEQ ID NO: 104828 - DNA, 25 bp, Artificial
  Probe
aggaggaacttggaatgtcatcaga

SEQ ID NO: 104829 - DNA, 25 bp, Artificial
  Probe
caggaggaacttggaatgtcatcag

SEQ ID NO: 104830 - DNA, 25 bp, Artificial
  Probe
tctttctgctgtaattggatgtaaa

SEQ ID NO: 104831 - DNA, 25 bp, Artificial
  Probe
gtccaagatgtcatcactgaactga

SEQ ID NO: 104832 - DNA, 25 bp, Artificial
  Probe
ctgtccaagatgtcatcactgaact

SEQ ID NO: 104833 - DNA, 25 bp, Artificial
  Probe
ccttaatcccagagacctagacaaa

SEQ ID NO: 104834 - DNA, 25 bp, Artificial
  Probe
ttaatcccagagacctagacaaacc

SEQ ID NO: 104835 - DNA, 25 bp, Artificial
  Probe
aattcgatctggacttactggtgac

SEQ ID NO: 104836 - DNA, 25 bp, Artificial
  Probe
tgatgaaatgaatatatccaccgtg

SEQ ID NO: 104837 - DNA, 25 bp, Artificial
  Probe
tgtccaagatgtcatcactgaactg

SEQ ID NO: 104838 - DNA, 25 bp, Artificial
  Probe
gagcaaaggttgatgaaatgaatat

SEQ ID NO: 104839 - DNA, 25 bp, Artificial
  Probe
aggtctttctgctgtaattggatgt

SEQ ID NO: 104840 - DNA, 25 bp, Artificial
  Probe
aaacctggttactgactacaagaat

SEQ ID NO: 104841 - DNA, 25 bp, Artificial
  Probe
ttgatgaaatgaatatatccaccgt

SEQ ID NO: 104842 - DNA, 25 bp, Artificial
  Probe
caaacctggttactgactacaagaa

SEQ ID NO: 104843 - DNA, 25 bp, Artificial
  Probe
taatcccagagacctagacaaacct

SEQ ID NO: 104844 - DNA, 25 bp, Artificial
  Probe
gttgatgaaatgaatatatccaccg

SEQ ID NO: 104845 - DNA, 25 bp, Artificial
  Probe
tagctattgacatcaacagtgagaa

SEQ ID NO: 104846 - DNA, 25 bp, Artificial
  Probe
cggagcaaaggttgatgaaatgaat

SEQ ID NO: 104847 - DNA, 25 bp, Artificial
  Probe
aagaaattcgatctggacttactgg

SEQ ID NO: 104848 - DNA, 25 bp, Artificial
  Probe
cctgtccaagatgtcatcactgaac

SEQ ID NO: 104849 - DNA, 25 bp, Artificial
  Probe
gaaattcgatctggacttactggtg

SEQ ID NO: 104850 - DNA, 25 bp, Artificial
  Probe
acatcaacagtgagaagttcccaaa

SEQ ID NO: 104851 - DNA, 25 bp, Artificial
  Probe
aaattcgatctggacttactggtga

SEQ ID NO: 104852 - DNA, 25 bp, Artificial
  Probe
tccaaccaataaagacaaacagaac

SEQ ID NO: 104853 - DNA, 25 bp, Artificial
  Probe
tttccaaccaataaagacaaacaga

SEQ ID NO: 104854 - DNA, 25 bp, Artificial
  Probe
gtcagtgagcagatccagaagaatt

SEQ ID NO: 104855 - DNA, 25 bp, Artificial
  Probe
ttccaaccaataaagacaaacagaa

SEQ ID NO: 104856 - DNA, 25 bp, Artificial
  Probe
tagttcctcctctttccaaccaata

SEQ ID NO: 104857 - DNA, 25 bp, Artificial
  Probe
gttcctcctctttccaaccaataaa

SEQ ID NO: 104858 - DNA, 25 bp, Artificial
  Probe
ctatggaaactgaggaggtattcaa

SEQ ID NO: 104859 - DNA, 25 bp, Artificial
  Probe
tctatggaaactgaggaggtattca

SEQ ID NO: 104860 - DNA, 25 bp, Artificial
  Probe
tatggaaactgaggaggtattcaaa

SEQ ID NO: 104861 - DNA, 25 bp, Artificial
  Probe
ctctatggaaactgaggaggtattc

SEQ ID NO: 104862 - DNA, 25 bp, Artificial
  Probe
agttcctcctctttccaaccaataa

SEQ ID NO: 104863 - DNA, 25 bp, Artificial
  Probe
ttagttcctcctctttccaaccaat

SEQ ID NO: 104864 - DNA, 25 bp, Artificial
  Probe
tttagttcctcctctttccaaccaa

SEQ ID NO: 104865 - DNA, 25 bp, Artificial
  Probe
gtagccctttagttcctcctctttc

SEQ ID NO: 104866 - DNA, 25 bp, Artificial
  Probe
ctttagttcctcctctttccaacca

SEQ ID NO: 104867 - DNA, 25 bp, Artificial
  Probe
tcagtgagcagatccagaagaattt

SEQ ID NO: 104868 - DNA, 25 bp, Artificial
  Probe
tgtcagtgagcagatccagaagaat

SEQ ID NO: 104869 - DNA, 25 bp, Artificial
  Probe
ttgtgttgtagccctttagttcctc

SEQ ID NO: 104870 - DNA, 25 bp, Artificial
  Probe
cttgtgttgtagccctttagttcct

SEQ ID NO: 104871 - DNA, 25 bp, Artificial
  Probe
cattcaatgccacatcattcctacg

SEQ ID NO: 104872 - DNA, 25 bp, Artificial
  Probe
tgtagccctttagttcctcctcttt

SEQ ID NO: 104873 - DNA, 25 bp, Artificial
  Probe
ttgtagccctttagttcctcctctt

SEQ ID NO: 104874 - DNA, 25 bp, Artificial
  Probe
cctttagttcctcctctttccaacc

SEQ ID NO: 104875 - DNA, 25 bp, Artificial
  Probe
ccctttagttcctcctctttccaac

SEQ ID NO: 104876 - DNA, 25 bp, Artificial
  Probe
ttcctcctctttccaaccaataaag

SEQ ID NO: 104877 - DNA, 25 bp, Artificial
  Probe
ctttccaaccaataaagacaaacag

SEQ ID NO: 104878 - DNA, 25 bp, Artificial
  Probe
tagccctttagttcctcctctttcc

SEQ ID NO: 104879 - DNA, 25 bp, Artificial
  Probe
gttgtagccctttagttcctcctct

SEQ ID NO: 104880 - DNA, 25 bp, Artificial
  Probe
atggaaactgaggaggtattcaaaa

SEQ ID NO: 104881 - DNA, 25 bp, Artificial
  Probe
tgttgtagccctttagttcctcctc

SEQ ID NO: 104882 - DNA, 25 bp, Artificial
  Probe
ctgtcagtgagcagatccagaagaa

SEQ ID NO: 104883 - DNA, 25 bp, Artificial
  Probe
attcaatgccacatcattcctacgt

SEQ ID NO: 104884 - DNA, 25 bp, Artificial
  Probe
gtgttgtagccctttagttcctcct

SEQ ID NO: 104885 - DNA, 25 bp, Artificial
  Probe
agtgagcagatccagaagaattttg

SEQ ID NO: 104886 - DNA, 25 bp, Artificial
  Probe
cagtgagcagatccagaagaatttt

SEQ ID NO: 104887 - DNA, 25 bp, Artificial
  Probe
gccctttagttcctcctctttccaa

SEQ ID NO: 104888 - DNA, 25 bp, Artificial
  Probe
tgtgttgtagccctttagttcctcc

SEQ ID NO: 104889 - DNA, 25 bp, Artificial
  Probe
ttcaatgccacatcattcctacgtc

SEQ ID NO: 104890 - DNA, 25 bp, Artificial
  Probe
ttttctttcctccagcccttttgat

SEQ ID NO: 104891 - DNA, 25 bp, Artificial
  Probe
atgccacatcattcctacgtcacat

SEQ ID NO: 104892 - DNA, 25 bp, Artificial
  Probe
actgactcctagcttttctttcctc

SEQ ID NO: 104893 - DNA, 25 bp, Artificial
  Probe
gactgactcctagcttttctttcct

SEQ ID NO: 104894 - DNA, 25 bp, Artificial
  Probe
tgcttgtgttgtagccctttagttc

SEQ ID NO: 104895 - DNA, 25 bp, Artificial
  Probe
ctgcttgtgttgtagccctttagtt

SEQ ID NO: 104896 - DNA, 25 bp, Artificial
  Probe
cttttctttcctccagcccttttga

SEQ ID NO: 104897 - DNA, 25 bp, Artificial
  Probe
aagtggagattgaagagtgctatac

SEQ ID NO: 104898 - DNA, 25 bp, Artificial
  Probe
gaagtggagattgaagagtgctata

SEQ ID NO: 104899 - DNA, 25 bp, Artificial
  Probe
ggagattgaagagtgctataccagt

SEQ ID NO: 104900 - DNA, 25 bp, Artificial
  Probe
agtggagattgaagagtgctatacc

SEQ ID NO: 104901 - DNA, 25 bp, Artificial
  Probe
ttatggagaagactaacagcagtac

SEQ ID NO: 104902 - DNA, 25 bp, Artificial
  Probe
ggagaagactaacagcagtacatat

SEQ ID NO: 104903 - DNA, 25 bp, Artificial
  Probe
aaggttaagtgctatatatggaggt

SEQ ID NO: 104904 - DNA, 25 bp, Artificial
  Probe
caaggttaagtgctatatatggagg

SEQ ID NO: 104905 - DNA, 25 bp, Artificial
  Probe
tggagaagactaacagcagtacata

SEQ ID NO: 104906 - DNA, 25 bp, Artificial
  Probe
tatggagaagactaacagcagtaca

SEQ ID NO: 104907 - DNA, 25 bp, Artificial
  Probe
ttcatggaatggctagtcagaattg

SEQ ID NO: 104908 - DNA, 25 bp, Artificial
  Probe
cgaagtggagattgaagagtgctat

SEQ ID NO: 104909 - DNA, 25 bp, Artificial
  Probe
atggagaagactaacagcagtacat

SEQ ID NO: 104910 - DNA, 25 bp, Artificial
  Probe
atggaatggctagtcagaattggtt

SEQ ID NO: 104911 - DNA, 25 bp, Artificial
  Probe
ggttaagtgctatatatggaggtac

SEQ ID NO: 104912 - DNA, 25 bp, Artificial
  Probe
tatgatcgaagtggagattgaagag

SEQ ID NO: 104913 - DNA, 25 bp, Artificial
  Probe
ttatgatcgaagtggagattgaaga

SEQ ID NO: 104914 - DNA, 25 bp, Artificial
  Probe
aggttaagtgctatatatggaggta

SEQ ID NO: 104915 - DNA, 25 bp, Artificial
  Probe
gagaagactaacagcagtacatatt

SEQ ID NO: 104916 - DNA, 25 bp, Artificial
  Probe
atcaagaacaccaacgatgctaact

SEQ ID NO: 104917 - DNA, 25 bp, Artificial
  Probe
gagactaaggaaccagagaaagaaa

SEQ ID NO: 104918 - DNA, 25 bp, Artificial
  Probe
acatttatggagaagactaacagca

SEQ ID NO: 104919 - DNA, 25 bp, Artificial
  Probe
aaagatttgggaacagatagtcaga

SEQ ID NO: 104920 - DNA, 25 bp, Artificial
  Probe
actaaggaaccagagaaagaaatca

SEQ ID NO: 104921 - DNA, 25 bp, Artificial
  Probe
aagatttgggaacagatagtcagat

SEQ ID NO: 104922 - DNA, 25 bp, Artificial
  Probe
catttatggagaagactaacagcag

SEQ ID NO: 104923 - DNA, 25 bp, Artificial
  Probe
gacatttatggagaagactaacagc

SEQ ID NO: 104924 - DNA, 25 bp, Artificial
  Probe
aatggctagtcagaattggttggtt

SEQ ID NO: 104925 - DNA, 25 bp, Artificial
  Probe
acctaaagatttgggaacagatagt

SEQ ID NO: 104926 - DNA, 25 bp, Artificial
  Probe
aaggaaccagagaaagaaatcagac

SEQ ID NO: 104927 - DNA, 25 bp, Artificial
  Probe
taaggaaccagagaaagaaatcaga

SEQ ID NO: 104928 - DNA, 25 bp, Artificial
  Probe
agactaaggaaccagagaaagaaat

SEQ ID NO: 104929 - DNA, 25 bp, Artificial
  Probe
ctaaggaaccagagaaagaaatcag

SEQ ID NO: 104930 - DNA, 25 bp, Artificial
  Probe
gactaaggaaccagagaaagaaatc

SEQ ID NO: 104931 - DNA, 25 bp, Artificial
  Probe
atgatcgaagtggagattgaagagt

SEQ ID NO: 104932 - DNA, 25 bp, Artificial
  Probe
aattggttggttctgttcagtttaa

SEQ ID NO: 104933 - DNA, 25 bp, Artificial
  Probe
cctaaagatttgggaacagatagtc

SEQ ID NO: 104934 - DNA, 25 bp, Artificial
  Probe
atctttatttcccgtgcctatgatg

SEQ ID NO: 104935 - DNA, 25 bp, Artificial
  Probe
gaattggttggttctgttcagttta

SEQ ID NO: 104936 - DNA, 25 bp, Artificial
  Probe
tggagattgaagagtgctataccag

SEQ ID NO: 104937 - DNA, 25 bp, Artificial
  Probe
gaaccagagaaagaaatcagaccag

SEQ ID NO: 104938 - DNA, 25 bp, Artificial
  Probe
attggttggttctgttcagtttaac

SEQ ID NO: 104939 - DNA, 25 bp, Artificial
  Probe
ggagactaaggaaccagagaaagaa

SEQ ID NO: 104940 - DNA, 25 bp, Artificial
  Probe
gcaagaagaatgacatttatggaga

SEQ ID NO: 104941 - DNA, 25 bp, Artificial
  Probe
cgcaagaagaatgacatttatggag

SEQ ID NO: 104942 - DNA, 25 bp, Artificial
  Probe
acagtttgcagaatatatccagaaa

SEQ ID NO: 104943 - DNA, 25 bp, Artificial
  Probe
gtacagtttgcagaatatatccaga

SEQ ID NO: 104944 - DNA, 25 bp, Artificial
  Probe
aaaatgcggaatggatatgaattgt

SEQ ID NO: 104945 - DNA, 25 bp, Artificial
  Probe
tacagtttgcagaatatatccagaa

SEQ ID NO: 104946 - DNA, 25 bp, Artificial
  Probe
taaaatgcggaatggatatgaattg

SEQ ID NO: 104947 - DNA, 25 bp, Artificial
  Probe
tgtacagtttgcagaatatatccag

SEQ ID NO: 104948 - DNA, 25 bp, Artificial
  Probe
ataaaatgcggaatggatatgaatt

SEQ ID NO: 104949 - DNA, 25 bp, Artificial
  Probe
aatcttactcctatgtgttggagag

SEQ ID NO: 104950 - DNA, 25 bp, Artificial
  Probe
atcttactcctatgtgttggagagg

SEQ ID NO: 104951 - DNA, 25 bp, Artificial
  Probe
tataaaatgcggaatggatatgaat

SEQ ID NO: 104952 - DNA, 25 bp, Artificial
  Probe
aatattgtccagatgaaggacgatc

SEQ ID NO: 104953 - DNA, 25 bp, Artificial
  Probe
cagtttgcagaatatatccagaaaa

SEQ ID NO: 104954 - DNA, 25 bp, Artificial
  Probe
ttataaaatgcggaatggatatgaa

SEQ ID NO: 104955 - DNA, 25 bp, Artificial
  Probe
atattgtccagatgaaggacgatca

SEQ ID NO: 104956 - DNA, 25 bp, Artificial
  Probe
cagctttataaaatgcggaatggat

SEQ ID NO: 104957 - DNA, 25 bp, Artificial
  Probe
agctttataaaatgcggaatggata

SEQ ID NO: 104958 - DNA, 25 bp, Artificial
  Probe
aaatcttactcctatgtgttggaga

SEQ ID NO: 104959 - DNA, 25 bp, Artificial
  Probe
gctttataaaatgcggaatggatat

SEQ ID NO: 104960 - DNA, 25 bp, Artificial
  Probe
cttactcctatgtgttggagaggct

SEQ ID NO: 104961 - DNA, 25 bp, Artificial
  Probe
tcttactcctatgtgttggagaggc

SEQ ID NO: 104962 - DNA, 25 bp, Artificial
  Probe
ttactcctatgtgttggagaggctg

SEQ ID NO: 104963 - DNA, 25 bp, Artificial
  Probe
tttataaaatgcggaatggatatga

SEQ ID NO: 104964 - DNA, 25 bp, Artificial
  Probe
ctttataaaatgcggaatggatatg

SEQ ID NO: 104965 - DNA, 25 bp, Artificial
  Probe
gtgcagctttataaaatgcggaatg

SEQ ID NO: 104966 - DNA, 25 bp, Artificial
  Probe
aaaacgtgcagctttataaaatgcg

SEQ ID NO: 104967 - DNA, 25 bp, Artificial
  Probe
aaaatcttactcctatgtgttggag

SEQ ID NO: 104968 - DNA, 25 bp, Artificial
  Probe
gcagctttataaaatgcggaatgga

SEQ ID NO: 104969 - DNA, 25 bp, Artificial
  Probe
caatattgtccagatgaaggacgat

SEQ ID NO: 104970 - DNA, 25 bp, Artificial
  Probe
tgcagctttataaaatgcggaatgg

SEQ ID NO: 104971 - DNA, 25 bp, Artificial
  Probe
tactcctatgtgttggagaggctgg

SEQ ID NO: 104972 - DNA, 25 bp, Artificial
  Probe
cgtgcagctttataaaatgcggaat

SEQ ID NO: 104973 - DNA, 25 bp, Artificial
  Probe
aaacgtgcagctttataaaatgcgg

SEQ ID NO: 104974 - DNA, 25 bp, Artificial
  Probe
acgtgcagctttataaaatgcggaa

SEQ ID NO: 104975 - DNA, 25 bp, Artificial
  Probe
aacgtgcagctttataaaatgcgga

SEQ ID NO: 104976 - DNA, 25 bp, Artificial
  Probe
gagcccaatacagagcgactttatc

SEQ ID NO: 104977 - DNA, 25 bp, Artificial
  Probe
agagcccaatacagagcgactttat

SEQ ID NO: 104978 - DNA, 25 bp, Artificial
  Probe
agcccaatacagagcgactttatct

SEQ ID NO: 104979 - DNA, 25 bp, Artificial
  Probe
gcccaatacagagcgactttatctc

SEQ ID NO: 104980 - DNA, 25 bp, Artificial
  Probe
gagagcccaatacagagcgacttta

SEQ ID NO: 104981 - DNA, 25 bp, Artificial
  Probe
aagacctttaagcccttcatttgct

SEQ ID NO: 104982 - DNA, 25 bp, Artificial
  Probe
cgaagacctttaagcccttcatttg

SEQ ID NO: 104983 - DNA, 25 bp, Artificial
  Probe
gacctttaagcccttcatttgctct

SEQ ID NO: 104984 - DNA, 25 bp, Artificial
  Probe
agacctttaagcccttcatttgctc

SEQ ID NO: 104985 - DNA, 25 bp, Artificial
  Probe
gaagacctttaagcccttcatttgc

SEQ ID NO: 104986 - DNA, 25 bp, Artificial
  Probe
ccgaagacctttaagcccttcattt

SEQ ID NO: 104987 - DNA, 25 bp, Artificial
  Probe
tctcaagttccgactgaacctgtac

SEQ ID NO: 104988 - DNA, 25 bp, Artificial
  Probe
gtctcaagttccgactgaacctgta

SEQ ID NO: 104989 - DNA, 25 bp, Artificial
  Probe
cccgaagacctttaagcccttcatt

SEQ ID NO: 104990 - DNA, 25 bp, Artificial
  Probe
tatcttcttcaacttccagcctctc

SEQ ID NO: 104991 - DNA, 25 bp, Artificial
  Probe
ctatcttcttcaacttccagcctct

SEQ ID NO: 104992 - DNA, 25 bp, Artificial
  Probe
cctatcttcttcaacttccagcctc

SEQ ID NO: 104993 - DNA, 25 bp, Artificial
  Probe
tttatgaaatggcacacaacttgaa

SEQ ID NO: 104994 - DNA, 25 bp, Artificial
  Probe
acacaacttgaaggtacaggagatg

SEQ ID NO: 104995 - DNA, 25 bp, Artificial
  Probe
cacacaacttgaaggtacaggagat

SEQ ID NO: 104996 - DNA, 25 bp, Artificial
  Probe
ttatgaaatggcacacaacttgaag

SEQ ID NO: 104997 - DNA, 25 bp, Artificial
  Probe
ctttatgaaatggcacacaacttga

SEQ ID NO: 104998 - DNA, 25 bp, Artificial
  Probe
aagcctatcttcttcaacttccagc

SEQ ID NO: 104999 - DNA, 25 bp, Artificial
  Probe
caatggaacctttatgaaatggcac

SEQ ID NO: 105000 - DNA, 25 bp, Artificial
  Probe
ctctatatctccagaaacagcactc

SEQ ID NO: 105001 - DNA, 25 bp, Artificial
  Probe
tctatatctccagaaacagcactct

SEQ ID NO: 105002 - DNA, 25 bp, Artificial
  Probe
tctctatatctccagaaacagcact

SEQ ID NO: 105003 - DNA, 25 bp, Artificial
  Probe
gtctctatatctccagaaacagcac

SEQ ID NO: 105004 - DNA, 25 bp, Artificial
  Probe
gaacctttatgaaatggcacacaac

SEQ ID NO: 105005 - DNA, 25 bp, Artificial
  Probe
aatggaacctttatgaaatggcaca

SEQ ID NO: 105006 - DNA, 25 bp, Artificial
  Probe
cctttatgaaatggcacacaacttg

SEQ ID NO: 105007 - DNA, 25 bp, Artificial
  Probe
acctttatgaaatggcacacaactt

SEQ ID NO: 105008 - DNA, 25 bp, Artificial
  Probe
aacctttatgaaatggcacacaact

SEQ ID NO: 105009 - DNA, 25 bp, Artificial
  Probe
cttctttcccaatccaaacaagttt

SEQ ID NO: 105010 - DNA, 25 bp, Artificial
  Probe
gatgaatacacccagaacttctact

SEQ ID NO: 105011 - DNA, 25 bp, Artificial
  Probe
tgatgaatacacccagaacttctac

SEQ ID NO: 105012 - DNA, 25 bp, Artificial
  Probe
cttcttcaacttccagcctctcaag

SEQ ID NO: 105013 - DNA, 25 bp, Artificial
  Probe
tagaactaagacctggaaggaccat

SEQ ID NO: 105014 - DNA, 25 bp, Artificial
  Probe
atcttcttcaacttccagcctctca

SEQ ID NO: 105015 - DNA, 25 bp, Artificial
  Probe
atggaacctttatgaaatggcacac

SEQ ID NO: 105016 - DNA, 25 bp, Artificial
  Probe
ttagaactaagacctggaaggacca

SEQ ID NO: 105017 - DNA, 25 bp, Artificial
  Probe
tatgaaatggcacacaacttgaagg

SEQ ID NO: 105018 - DNA, 25 bp, Artificial
  Probe
tcttcttcaacttccagcctctcaa

SEQ ID NO: 105019 - DNA, 25 bp, Artificial
  Probe
cttactcaggaggttaataaacaca

SEQ ID NO: 105020 - DNA, 25 bp, Artificial
  Probe
acttactcaggaggttaataaacac

SEQ ID NO: 105021 - DNA, 25 bp, Artificial
  Probe
ggaacctttatgaaatggcacacaa

SEQ ID NO: 105022 - DNA, 25 bp, Artificial
  Probe
ctttagaactaagacctggaaggac

SEQ ID NO: 105023 - DNA, 25 bp, Artificial
  Probe
atgaatacacccagaacttctactg

SEQ ID NO: 105024 - DNA, 25 bp, Artificial
  Probe
ctgatgaatacacccagaacttcta

SEQ ID NO: 105025 - DNA, 25 bp, Artificial
  Probe
ccctttctacttactcaggaggtta

SEQ ID NO: 105026 - DNA, 25 bp, Artificial
  Probe
cctttctacttactcaggaggttaa

SEQ ID NO: 105027 - DNA, 25 bp, Artificial
  Probe
ttctacttactcaggaggttaataa

SEQ ID NO: 105028 - DNA, 25 bp, Artificial
  Probe
ctcaacatgcctccagacttatttc

SEQ ID NO: 105029 - DNA, 25 bp, Artificial
  Probe
gcaatggaacctttatgaaatggca

SEQ ID NO: 105030 - DNA, 25 bp, Artificial
  Probe
gcttctttcccaatccaaacaagtt

SEQ ID NO: 105031 - DNA, 25 bp, Artificial
  Probe
ctttctacttactcaggaggttaat

SEQ ID NO: 105032 - DNA, 25 bp, Artificial
  Probe
cacaacttgaaggtacaggagatgc

SEQ ID NO: 105033 - DNA, 25 bp, Artificial
  Probe
tttagaactaagacctggaaggacc

SEQ ID NO: 105034 - DNA, 25 bp, Artificial
  Probe
ggaggttaataaacacataaatgct

SEQ ID NO: 105035 - DNA, 25 bp, Artificial
  Probe
catcttcatcaccaatgtcacctac

SEQ ID NO: 105036 - DNA, 25 bp, Artificial
  Probe
caagatcctacgctatgagaatgag

SEQ ID NO: 105037 - DNA, 25 bp, Artificial
  Probe
tcaagatcctacgctatgagaatga

SEQ ID NO: 105038 - DNA, 25 bp, Artificial
  Probe
gtcaagatcctacgctatgagaatg

SEQ ID NO: 105039 - DNA, 25 bp, Artificial
  Probe
tgtcaagatcctacgctatgagaat

SEQ ID NO: 105040 - DNA, 25 bp, Artificial
  Probe
ttgtcaagatcctacgctatgagaa

SEQ ID NO: 105041 - DNA, 25 bp, Artificial
  Probe
ccatcttcatcaccaatgtcaccta

SEQ ID NO: 105042 - DNA, 25 bp, Artificial
  Probe
atcttcatcaccaatgtcacctaca

SEQ ID NO: 105043 - DNA, 25 bp, Artificial
  Probe
cttcatcaccaatgtcacctacaac

SEQ ID NO: 105044 - DNA, 25 bp, Artificial
  Probe
tcttcatcaccaatgtcacctacaa

SEQ ID NO: 105045 - DNA, 25 bp, Artificial
  Probe
ttgataattacgagcacaacaccag

SEQ ID NO: 105046 - DNA, 25 bp, Artificial
  Probe
ctaccgtctcctcttctttgataat

SEQ ID NO: 105047 - DNA, 25 bp, Artificial
  Probe
tctaccgtctcctcttctttgataa

SEQ ID NO: 105048 - DNA, 25 bp, Artificial
  Probe
ctgtccatcttcatcaccaatgtca

SEQ ID NO: 105049 - DNA, 25 bp, Artificial
  Probe
aagatcctacgctatgagaatgagg

SEQ ID NO: 105050 - DNA, 25 bp, Artificial
  Probe
gtctaccgtctcctcttctttgata

SEQ ID NO: 105051 - DNA, 25 bp, Artificial
  Probe
taccgtctcctcttctttgataatt

SEQ ID NO: 105052 - DNA, 25 bp, Artificial
  Probe
tgtccatcttcatcaccaatgtcac

SEQ ID NO: 105053 - DNA, 25 bp, Artificial
  Probe
gatggtgtactgctacaagaagatt

SEQ ID NO: 105054 - DNA, 25 bp, Artificial
  Probe
atggtgtactgctacaagaagattg

SEQ ID NO: 105055 - DNA, 25 bp, Artificial
  Probe
gaatttgtcaagatcctacgctatg

SEQ ID NO: 105056 - DNA, 25 bp, Artificial
  Probe
aatcctgtgtatctcctgtaagcgt

SEQ ID NO: 105057 - DNA, 25 bp, Artificial
  Probe
agatggtgtactgctacaagaagat

SEQ ID NO: 105058 - DNA, 25 bp, Artificial
  Probe
tactgctacaagaagattgctgctg

SEQ ID NO: 105059 - DNA, 25 bp, Artificial
  Probe
attacttccgagagcaaagagaact

SEQ ID NO: 105060 - DNA, 25 bp, Artificial
  Probe
cattacttccgagagcaaagagaac

SEQ ID NO: 105061 - DNA, 25 bp, Artificial
  Probe
gtatctcctgtaagcgtcgtagtga

SEQ ID NO: 105062 - DNA, 25 bp, Artificial
  Probe
cctgtccatcttcatcaccaatgtc

SEQ ID NO: 105063 - DNA, 25 bp, Artificial
  Probe
gatcctacgctatgagaatgaggtg

SEQ ID NO: 105064 - DNA, 25 bp, Artificial
  Probe
ttcatcaccaatgtcacctacaacc

SEQ ID NO: 105065 - DNA, 25 bp, Artificial
  Probe
aatttgtcaagatcctacgctatga

SEQ ID NO: 105066 - DNA, 25 bp, Artificial
  Probe
agatcctacgctatgagaatgaggt

SEQ ID NO: 105067 - DNA, 25 bp, Artificial
  Probe
atttgtcaagatcctacgctatgag

SEQ ID NO: 105068 - DNA, 25 bp, Artificial
  Probe
accgtctcctcttctttgataatta

SEQ ID NO: 105069 - DNA, 25 bp, Artificial
  Probe
gacctgtccatcttcatcaccaatg

SEQ ID NO: 105070 - DNA, 25 bp, Artificial
  Probe
ccgtctcctcttctttgataattac

SEQ ID NO: 105071 - DNA, 25 bp, Artificial
  Probe
gagatggtgtactgctacaagaaga

SEQ ID NO: 105072 - DNA, 25 bp, Artificial
  Probe
tgtatctcctgtaagcgtcgtagtg

SEQ ID NO: 105073 - DNA, 25 bp, Artificial
  Probe
gtgtatctcctgtaagcgtcgtagt

SEQ ID NO: 105074 - DNA, 25 bp, Artificial
  Probe
tgtgtatctcctgtaagcgtcgtag

SEQ ID NO: 105075 - DNA, 25 bp, Artificial
  Probe
ctgtgtatctcctgtaagcgtcgta

SEQ ID NO: 105076 - DNA, 25 bp, Artificial
  Probe
atcctgtgtatctcctgtaagcgtc

SEQ ID NO: 105077 - DNA, 25 bp, Artificial
  Probe
tatctcctgtaagcgtcgtagtgag

SEQ ID NO: 105078 - DNA, 25 bp, Artificial
  Probe
tctttgataattacgagcacaacac

SEQ ID NO: 105079 - DNA, 25 bp, Artificial
  Probe
gtgtactgctacaagaagattgctg

SEQ ID NO: 105080 - DNA, 25 bp, Artificial
  Probe
tcaggatcagagagaaagagagtag

SEQ ID NO: 105081 - DNA, 25 bp, Artificial
  Probe
atcaggatcagagagaaagagagta

SEQ ID NO: 105082 - DNA, 25 bp, Artificial
  Probe
gatcaggatcagagagaaagagagt

SEQ ID NO: 105083 - DNA, 25 bp, Artificial
  Probe
caggatcagagagaaagagagtagg

SEQ ID NO: 105084 - DNA, 25 bp, Artificial
  Probe
ggatcaggatcagagagaaagagag

SEQ ID NO: 105085 - DNA, 25 bp, Artificial
  Probe
aggatcagagagaaagagagtaggg

SEQ ID NO: 105086 - DNA, 25 bp, Artificial
  Probe
gggatcaggatcagagagaaagaga

SEQ ID NO: 105087 - DNA, 25 bp, Artificial
  Probe
tgggatcaggatcagagagaaagag

SEQ ID NO: 105088 - DNA, 25 bp, Artificial
  Probe
ctttacctcaattttgctctaccag

SEQ ID NO: 105089 - DNA, 25 bp, Artificial
  Probe
gtgggatcaggatcagagagaaaga

SEQ ID NO: 105090 - DNA, 25 bp, Artificial
  Probe
tgtgggatcaggatcagagagaaag

SEQ ID NO: 105091 - DNA, 25 bp, Artificial
  Probe
gctttacctcaattttgctctacca

SEQ ID NO: 105092 - DNA, 25 bp, Artificial
  Probe
aactggaggagaagggcattatgag

SEQ ID NO: 105093 - DNA, 25 bp, Artificial
  Probe
gaactggaggagaagggcattatga

SEQ ID NO: 105094 - DNA, 25 bp, Artificial
  Probe
gtgaactggaggagaagggcattat

SEQ ID NO: 105095 - DNA, 25 bp, Artificial
  Probe
ggctttacctcaattttgctctacc

SEQ ID NO: 105096 - DNA, 25 bp, Artificial
  Probe
gggctttacctcaattttgctctac

SEQ ID NO: 105097 - DNA, 25 bp, Artificial
  Probe
tgaactggaggagaagggcattatg

SEQ ID NO: 105098 - DNA, 25 bp, Artificial
  Probe
ctgtgaagttttagactcaggatgg

SEQ ID NO: 105099 - DNA, 25 bp, Artificial
  Probe
ctgtgggatcaggatcagagagaaa

SEQ ID NO: 105100 - DNA, 25 bp, Artificial
  Probe
atcagagagaaagagagtaggggtg

SEQ ID NO: 105101 - DNA, 25 bp, Artificial
  Probe
tgggctttacctcaattttgctcta

SEQ ID NO: 105102 - DNA, 25 bp, Artificial
  Probe
gctgtgaagttttagactcaggatg

SEQ ID NO: 105103 - DNA, 25 bp, Artificial
  Probe
tgtgaagttttagactcaggatggg

SEQ ID NO: 105104 - DNA, 25 bp, Artificial
  Probe
gatcagagagaaagagagtaggggt

SEQ ID NO: 105105 - DNA, 25 bp, Artificial
  Probe
gagagaaagagagtaggggtggatg

SEQ ID NO: 105106 - DNA, 25 bp, Artificial
  Probe
ggatcagagagaaagagagtagggg

SEQ ID NO: 105107 - DNA, 25 bp, Artificial
  Probe
agagagaaagagagtaggggtggat

SEQ ID NO: 105108 - DNA, 25 bp, Artificial
  Probe
agctgtgaagttttagactcaggat

SEQ ID NO: 105109 - DNA, 25 bp, Artificial
  Probe
tttacctcaattttgctctaccagc

SEQ ID NO: 105110 - DNA, 25 bp, Artificial
  Probe
ctgggctttacctcaattttgctct

SEQ ID NO: 105111 - DNA, 25 bp, Artificial
  Probe
gagaaagagagtaggggtggatgac

SEQ ID NO: 105112 - DNA, 25 bp, Artificial
  Probe
agagaaagagagtaggggtggatga

SEQ ID NO: 105113 - DNA, 25 bp, Artificial
  Probe
gtgaagttttagactcaggatgggc

SEQ ID NO: 105114 - DNA, 25 bp, Artificial
  Probe
ctctcatggtgaactggaggagaag

SEQ ID NO: 105115 - DNA, 25 bp, Artificial
  Probe
gagctgtgaagttttagactcagga

SEQ ID NO: 105116 - DNA, 25 bp, Artificial
  Probe
cttgggagctgtgaagttttagact

SEQ ID NO: 105117 - DNA, 25 bp, Artificial
  Probe
ttgggagctgtgaagttttagactc

SEQ ID NO: 105118 - DNA, 25 bp, Artificial
  Probe
ctccctgggctttacctcaattttg

SEQ ID NO: 105119 - DNA, 25 bp, Artificial
  Probe
cagagagaaagagagtaggggtgga

SEQ ID NO: 105120 - DNA, 25 bp, Artificial
  Probe
tcagagagaaagagagtaggggtgg

SEQ ID NO: 105121 - DNA, 25 bp, Artificial
  Probe
ctttgctctgtgggatcaggatcag

SEQ ID NO: 105122 - DNA, 25 bp, Artificial
  Probe
ggagctgtgaagttttagactcagg

SEQ ID NO: 105123 - DNA, 25 bp, Artificial
  Probe
gggagctgtgaagttttagactcag

SEQ ID NO: 105124 - DNA, 25 bp, Artificial
  Probe
ccttgggagctgtgaagttttagac

SEQ ID NO: 105125 - DNA, 25 bp, Artificial
  Probe
cctgctaacctgctatattgaagag

SEQ ID NO: 105126 - DNA, 25 bp, Artificial
  Probe
tggatggcttaatcaacagagatat

SEQ ID NO: 105127 - DNA, 25 bp, Artificial
  Probe
ctatattgaagagcacagactggat

SEQ ID NO: 105128 - DNA, 25 bp, Artificial
  Probe
tatattgaagagcacagactggatg

SEQ ID NO: 105129 - DNA, 25 bp, Artificial
  Probe
ctggatggcttaatcaacagagata

SEQ ID NO: 105130 - DNA, 25 bp, Artificial
  Probe
ggatggcttaatcaacagagatata

SEQ ID NO: 105131 - DNA, 25 bp, Artificial
  Probe
aacaataagaactgctgaggtcact

SEQ ID NO: 105132 - DNA, 25 bp, Artificial
  Probe
ttcctacttagaagacagtctctca

SEQ ID NO: 105133 - DNA, 25 bp, Artificial
  Probe
acaataagaactgctgaggtcactt

SEQ ID NO: 105134 - DNA, 25 bp, Artificial
  Probe
tcctacttagaagacagtctctcat

SEQ ID NO: 105135 - DNA, 25 bp, Artificial
  Probe
gcctgctaacctgctatattgaaga

SEQ ID NO: 105136 - DNA, 25 bp, Artificial
  Probe
atattgaagagcacagactggatgg

SEQ ID NO: 105137 - DNA, 25 bp, Artificial
  Probe
cctacttagaagacagtctctcatt

SEQ ID NO: 105138 - DNA, 25 bp, Artificial
  Probe
attcctacttagaagacagtctctc

SEQ ID NO: 105139 - DNA, 25 bp, Artificial
  Probe
actggatggcttaatcaacagagat

SEQ ID NO: 105140 - DNA, 25 bp, Artificial
  Probe
cactgtcttcttcctcaccactaag

SEQ ID NO: 105141 - DNA, 25 bp, Artificial
  Probe
aaacatttaccatcaaagccaacaa

SEQ ID NO: 105142 - DNA, 25 bp, Artificial
  Probe
tacaaacaataagaactgctgaggt

SEQ ID NO: 105143 - DNA, 25 bp, Artificial
  Probe
aattcctacttagaagacagtctct

SEQ ID NO: 105144 - DNA, 25 bp, Artificial
  Probe
atacaaacaataagaactgctgagg

SEQ ID NO: 105145 - DNA, 25 bp, Artificial
  Probe
gaaacatttaccatcaaagccaaca

SEQ ID NO: 105146 - DNA, 25 bp, Artificial
  Probe
tggctattctttactctggtcataa

SEQ ID NO: 105147 - DNA, 25 bp, Artificial
  Probe
aacatttaccatcaaagccaacaac

SEQ ID NO: 105148 - DNA, 25 bp, Artificial
  Probe
acaaataacaaattcaggaagtccc

SEQ ID NO: 105149 - DNA, 25 bp, Artificial
  Probe
catttaccatcaaagccaacaactt

SEQ ID NO: 105150 - DNA, 25 bp, Artificial
  Probe
ctagagactgatgtccaaggtcaag

SEQ ID NO: 105151 - DNA, 25 bp, Artificial
  Probe
gtgctgcgaaacctatcttcatata

SEQ ID NO: 105152 - DNA, 25 bp, Artificial
  Probe
gactggatggcttaatcaacagaga

SEQ ID NO: 105153 - DNA, 25 bp, Artificial
  Probe
agactggatggcttaatcaacagag

SEQ ID NO: 105154 - DNA, 25 bp, Artificial
  Probe
ctctgtagcaacaacctctgtctag

SEQ ID NO: 105155 - DNA, 25 bp, Artificial
  Probe
atggctattctttactctggtcata

SEQ ID NO: 105156 - DNA, 25 bp, Artificial
  Probe
tccctttctccctagttacattgta

SEQ ID NO: 105157 - DNA, 25 bp, Artificial
  Probe
ccctttctccctagttacattgtat

SEQ ID NO: 105158 - DNA, 25 bp, Artificial
  Probe
acaaacaataagaactgctgaggtc

SEQ ID NO: 105159 - DNA, 25 bp, Artificial
  Probe
atgaaacatttaccatcaaagccaa

SEQ ID NO: 105160 - DNA, 25 bp, Artificial
  Probe
cacagactggatggcttaatcaaca

SEQ ID NO: 105161 - DNA, 25 bp, Artificial
  Probe
atccctttctccctagttacattgt

SEQ ID NO: 105162 - DNA, 25 bp, Artificial
  Probe
caataagaactgctgaggtcacttt

SEQ ID NO: 105163 - DNA, 25 bp, Artificial
  Probe
cagactggatggcttaatcaacaga

SEQ ID NO: 105164 - DNA, 25 bp, Artificial
  Probe
acatttaccatcaaagccaacaact

SEQ ID NO: 105165 - DNA, 25 bp, Artificial
  Probe
aaacaataagaactgctgaggtcac

SEQ ID NO: 105166 - DNA, 25 bp, Artificial
  Probe
caaacaataagaactgctgaggtca

SEQ ID NO: 105167 - DNA, 25 bp, Artificial
  Probe
gatccctttctccctagttacattg

SEQ ID NO: 105168 - DNA, 25 bp, Artificial
  Probe
tgaaacatttaccatcaaagccaac

SEQ ID NO: 105169 - DNA, 25 bp, Artificial
  Probe
gctcaggaaacaaataacaaattca

SEQ ID NO: 105170 - DNA, 25 bp, Artificial
  Probe
gttcacactattccagatcacactt

SEQ ID NO: 105171 - DNA, 25 bp, Artificial
  Probe
agttcacactattccagatcacact

SEQ ID NO: 105172 - DNA, 25 bp, Artificial
  Probe
ctaatgaccacacttcctacaccag

SEQ ID NO: 105173 - DNA, 25 bp, Artificial
  Probe
gacctaatgaccacacttcctacac

SEQ ID NO: 105174 - DNA, 25 bp, Artificial
  Probe
tagttcacactattccagatcacac

SEQ ID NO: 105175 - DNA, 25 bp, Artificial
  Probe
ctagttcacactattccagatcaca

SEQ ID NO: 105176 - DNA, 25 bp, Artificial
  Probe
cctagttcacactattccagatcac

SEQ ID NO: 105177 - DNA, 25 bp, Artificial
  Probe
tcctagttcacactattccagatca

SEQ ID NO: 105178 - DNA, 25 bp, Artificial
  Probe
ttcctagttcacactattccagatc

SEQ ID NO: 105179 - DNA, 25 bp, Artificial
  Probe
ggttgatatttcctgccttctacat

SEQ ID NO: 105180 - DNA, 25 bp, Artificial
  Probe
tgatatttcctgccttctacatagt

SEQ ID NO: 105181 - DNA, 25 bp, Artificial
  Probe
actctatatcttccagaacacccat

SEQ ID NO: 105182 - DNA, 25 bp, Artificial
  Probe
aattgacttcatccagaaagaaagg

SEQ ID NO: 105183 - DNA, 25 bp, Artificial
  Probe
gactctatatcttccagaacaccca

SEQ ID NO: 105184 - DNA, 25 bp, Artificial
  Probe
ttcacactattccagatcacacttt

SEQ ID NO: 105185 - DNA, 25 bp, Artificial
  Probe
gttgatatttcctgccttctacata

SEQ ID NO: 105186 - DNA, 25 bp, Artificial
  Probe
ccattgacaaatactccaggttgat

SEQ ID NO: 105187 - DNA, 25 bp, Artificial
  Probe
atacatggacctaatgaccacactt

SEQ ID NO: 105188 - DNA, 25 bp, Artificial
  Probe
cattgacaaatactccaggttgata

SEQ ID NO: 105189 - DNA, 25 bp, Artificial
  Probe
gatatttcctgccttctacatagtt

SEQ ID NO: 105190 - DNA, 25 bp, Artificial
  Probe
ttgatatttcctgccttctacatag

SEQ ID NO: 105191 - DNA, 25 bp, Artificial
  Probe
attgacttcatccagaaagaaaggc

SEQ ID NO: 105192 - DNA, 25 bp, Artificial
  Probe
gaattgacttcatccagaaagaaag

SEQ ID NO: 105193 - DNA, 25 bp, Artificial
  Probe
gatacatggacctaatgaccacact

SEQ ID NO: 105194 - DNA, 25 bp, Artificial
  Probe
ctctatatcttccagaacacccatg

SEQ ID NO: 105195 - DNA, 25 bp, Artificial
  Probe
ttgacaaatactccaggttgatatt

SEQ ID NO: 105196 - DNA, 25 bp, Artificial
  Probe
tacatggacctaatgaccacacttc

SEQ ID NO: 105197 - DNA, 25 bp, Artificial
  Probe
ttggtggatacatggacctaatgac

SEQ ID NO: 105198 - DNA, 25 bp, Artificial
  Probe
gttggtggatacatggacctaatga

SEQ ID NO: 105199 - DNA, 25 bp, Artificial
  Probe
aacagtgaattgacttcatccagaa

SEQ ID NO: 105200 - DNA, 25 bp, Artificial
  Probe
atatttcctgccttctacatagttt

SEQ ID NO: 105201 - DNA, 25 bp, Artificial
  Probe
attgacaaatactccaggttgatat

SEQ ID NO: 105202 - DNA, 25 bp, Artificial
  Probe
atggacctaatgaccacacttccta

SEQ ID NO: 105203 - DNA, 25 bp, Artificial
  Probe
cctaatgaccacacttcctacacca

SEQ ID NO: 105204 - DNA, 25 bp, Artificial
  Probe
acctaatgaccacacttcctacacc

SEQ ID NO: 105205 - DNA, 25 bp, Artificial
  Probe
caacagtgaattgacttcatccaga

SEQ ID NO: 105206 - DNA, 25 bp, Artificial
  Probe
tcaacagtgaattgacttcatccag

SEQ ID NO: 105207 - DNA, 25 bp, Artificial
  Probe
ctcaacagtgaattgacttcatcca

SEQ ID NO: 105208 - DNA, 25 bp, Artificial
  Probe
tccagaagaagaaaggcaagacaaa

SEQ ID NO: 105209 - DNA, 25 bp, Artificial
  Probe
ctttgtgttcgtgtttctctcagtg

SEQ ID NO: 105210 - DNA, 25 bp, Artificial
  Probe
atgggactctatatcttccagaaca

SEQ ID NO: 105211 - DNA, 25 bp, Artificial
  Probe
ccaaatgggactctatatcttccag

SEQ ID NO: 105212 - DNA, 25 bp, Artificial
  Probe
aggttgatatttcctgccttctaca

SEQ ID NO: 105213 - DNA, 25 bp, Artificial
  Probe
ttccagaagaagaaaggcaagacaa

SEQ ID NO: 105214 - DNA, 25 bp, Artificial
  Probe
aatgggactctatatcttccagaac

SEQ ID NO: 105215 - DNA, 25 bp, Artificial
  Probe
tatgacttgagtaagcaggacattg

SEQ ID NO: 105216 - DNA, 25 bp, Artificial
  Probe
tcaagattccataagacttacgaag

SEQ ID NO: 105217 - DNA, 25 bp, Artificial
  Probe
atgacttgagtaagcaggacattga

SEQ ID NO: 105218 - DNA, 25 bp, Artificial
  Probe
cttgagtaagcaggacattgacaat

SEQ ID NO: 105219 - DNA, 25 bp, Artificial
  Probe
ttcaagattccataagacttacgaa

SEQ ID NO: 105220 - DNA, 25 bp, Artificial
  Probe
attcaagattccataagacttacga

SEQ ID NO: 105221 - DNA, 25 bp, Artificial
  Probe
acttgagtaagcaggacattgacaa

SEQ ID NO: 105222 - DNA, 25 bp, Artificial
  Probe
gacttgagtaagcaggacattgaca

SEQ ID NO: 105223 - DNA, 25 bp, Artificial
  Probe
tgacttgagtaagcaggacattgac

SEQ ID NO: 105224 - DNA, 25 bp, Artificial
  Probe
ccagagacttagcagagaagaaata

SEQ ID NO: 105225 - DNA, 25 bp, Artificial
  Probe
agactattcaagattccataagact

SEQ ID NO: 105226 - DNA, 25 bp, Artificial
  Probe
acttagcagagaagaaatacatcct

SEQ ID NO: 105227 - DNA, 25 bp, Artificial
  Probe
gacttagcagagaagaaatacatcc

SEQ ID NO: 105228 - DNA, 25 bp, Artificial
  Probe
agagacttagcagagaagaaataca

SEQ ID NO: 105229 - DNA, 25 bp, Artificial
  Probe
agaagaaatacatcctctcaaatgc

SEQ ID NO: 105230 - DNA, 25 bp, Artificial
  Probe
cagagacttagcagagaagaaatac

SEQ ID NO: 105231 - DNA, 25 bp, Artificial
  Probe
gcttctcaaatctaggatcacttca

SEQ ID NO: 105232 - DNA, 25 bp, Artificial
  Probe
tcaaatctaggatcacttcagaagg

SEQ ID NO: 105233 - DNA, 25 bp, Artificial
  Probe
agacttagcagagaagaaatacatc

SEQ ID NO: 105234 - DNA, 25 bp, Artificial
  Probe
gagacttagcagagaagaaatacat

SEQ ID NO: 105235 - DNA, 25 bp, Artificial
  Probe
caaatctaggatcacttcagaaggg

SEQ ID NO: 105236 - DNA, 25 bp, Artificial
  Probe
cttagcagagaagaaatacatcctc

SEQ ID NO: 105237 - DNA, 25 bp, Artificial
  Probe
cttctcaaatctaggatcacttcag

SEQ ID NO: 105238 - DNA, 25 bp, Artificial
  Probe
aagacttacgaagtacctaacactc

SEQ ID NO: 105239 - DNA, 25 bp, Artificial
  Probe
tctcaaatctaggatcacttcagaa

SEQ ID NO: 105240 - DNA, 25 bp, Artificial
  Probe
ttctcaaatctaggatcacttcaga

SEQ ID NO: 105241 - DNA, 25 bp, Artificial
  Probe
ctcaaatctaggatcacttcagaag

SEQ ID NO: 105242 - DNA, 25 bp, Artificial
  Probe
attccataagacttacgaagtacct

SEQ ID NO: 105243 - DNA, 25 bp, Artificial
  Probe
atgaaatagacgaagacagcccttt

SEQ ID NO: 105244 - DNA, 25 bp, Artificial
  Probe
taacaagcaaagaggaagaggacag

SEQ ID NO: 105245 - DNA, 25 bp, Artificial
  Probe
ctaacaagcaaagaggaagaggaca

SEQ ID NO: 105246 - DNA, 25 bp, Artificial
  Probe
tattcaagattccataagacttacg

SEQ ID NO: 105247 - DNA, 25 bp, Artificial
  Probe
gactattcaagattccataagactt

SEQ ID NO: 105248 - DNA, 25 bp, Artificial
  Probe
gccagagacttagcagagaagaaat

SEQ ID NO: 105249 - DNA, 25 bp, Artificial
  Probe
gattccataagacttacgaagtacc

SEQ ID NO: 105250 - DNA, 25 bp, Artificial
  Probe
agcttctcaaatctaggatcacttc

SEQ ID NO: 105251 - DNA, 25 bp, Artificial
  Probe
cagcttctcaaatctaggatcactt

SEQ ID NO: 105252 - DNA, 25 bp, Artificial
  Probe
tttgaaatcgttgtcatcctggaag

SEQ ID NO: 105253 - DNA, 25 bp, Artificial
  Probe
ctttgaaatcgttgtcatcctggaa

SEQ ID NO: 105254 - DNA, 25 bp, Artificial
  Probe
agacttacgaagtacctaacactcc

SEQ ID NO: 105255 - DNA, 25 bp, Artificial
  Probe
taagacttacgaagtacctaacact

SEQ ID NO: 105256 - DNA, 25 bp, Artificial
  Probe
caagattccataagacttacgaagt

SEQ ID NO: 105257 - DNA, 25 bp, Artificial
  Probe
agactttgaaatcgttgtcatcctg

SEQ ID NO: 105258 - DNA, 25 bp, Artificial
  Probe
cagactttgaaatcgttgtcatcct

SEQ ID NO: 105259 - DNA, 25 bp, Artificial
  Probe
ccataagacttacgaagtacctaac

SEQ ID NO: 105260 - DNA, 25 bp, Artificial
  Probe
aagaagagtctaagtgtggagcaga

SEQ ID NO: 105261 - DNA, 25 bp, Artificial
  Probe
ttctcaaccttcctaatgctgtgac

SEQ ID NO: 105262 - DNA, 25 bp, Artificial
  Probe
gttctcaaccttcctaatgctgtga

SEQ ID NO: 105263 - DNA, 25 bp, Artificial
  Probe
tcggtcagtgaagcattatgttgaa

SEQ ID NO: 105264 - DNA, 25 bp, Artificial
  Probe
ctagggaaagaagagtctaagtgtg

SEQ ID NO: 105265 - DNA, 25 bp, Artificial
  Probe
tagggaaagaagagtctaagtgtgg

SEQ ID NO: 105266 - DNA, 25 bp, Artificial
  Probe
actagggaaagaagagtctaagtgt

SEQ ID NO: 105267 - DNA, 25 bp, Artificial
  Probe
agaagagtctaagtgtggagcagag

SEQ ID NO: 105268 - DNA, 25 bp, Artificial
  Probe
tatagttcctcatgttgtgatgacc

SEQ ID NO: 105269 - DNA, 25 bp, Artificial
  Probe
gtcggtcagtgaagcattatgttga

SEQ ID NO: 105270 - DNA, 25 bp, Artificial
  Probe
aaagaagagtctaagtgtggagcag

SEQ ID NO: 105271 - DNA, 25 bp, Artificial
  Probe
gaaagaagagtctaagtgtggagca

SEQ ID NO: 105272 - DNA, 25 bp, Artificial
  Probe
gggaaagaagagtctaagtgtggag

SEQ ID NO: 105273 - DNA, 25 bp, Artificial
  Probe
cggtcagtgaagcattatgttgaaa

SEQ ID NO: 105274 - DNA, 25 bp, Artificial
  Probe
gatggtcggtcagtgaagcattatg

SEQ ID NO: 105275 - DNA, 25 bp, Artificial
  Probe
atatagttcctcatgttgtgatgac

SEQ ID NO: 105276 - DNA, 25 bp, Artificial
  Probe
agggaaagaagagtctaagtgtgga

SEQ ID NO: 105277 - DNA, 25 bp, Artificial
  Probe
tcaaccttcctaatgctgtgacctt

SEQ ID NO: 105278 - DNA, 25 bp, Artificial
  Probe
ggaaagaagagtctaagtgtggagc

SEQ ID NO: 105279 - DNA, 25 bp, Artificial
  Probe
aatatagttcctcatgttgtgatga

SEQ ID NO: 105280 - DNA, 25 bp, Artificial
  Probe
ggtcggtcagtgaagcattatgttg

SEQ ID NO: 105281 - DNA, 25 bp, Artificial
  Probe
taatatagttcctcatgttgtgatg

SEQ ID NO: 105282 - DNA, 25 bp, Artificial
  Probe
caaccttcctaatgctgtgaccttt

SEQ ID NO: 105283 - DNA, 25 bp, Artificial
  Probe
tgatggtcggtcagtgaagcattat

SEQ ID NO: 105284 - DNA, 25 bp, Artificial
  Probe
atggtcggtcagtgaagcattatgt

SEQ ID NO: 105285 - DNA, 25 bp, Artificial
  Probe
ctcttccagtctaggagatctgatg

SEQ ID NO: 105286 - DNA, 25 bp, Artificial
  Probe
caaggagatgagacgctaaggctag

SEQ ID NO: 105287 - DNA, 25 bp, Artificial
  Probe
cttcctaatgctgtgaccttttaat

SEQ ID NO: 105288 - DNA, 25 bp, Artificial
  Probe
ctctgagaatagaagcaccttcctg

SEQ ID NO: 105289 - DNA, 25 bp, Artificial
  Probe
ctcaaccttcctaatgctgtgacct

SEQ ID NO: 105290 - DNA, 25 bp, Artificial
  Probe
tctcaaccttcctaatgctgtgacc

SEQ ID NO: 105291 - DNA, 25 bp, Artificial
  Probe
tggtcggtcagtgaagcattatgtt

SEQ ID NO: 105292 - DNA, 25 bp, Artificial
  Probe
ccttcctaatgctgtgaccttttaa

SEQ ID NO: 105293 - DNA, 25 bp, Artificial
  Probe
cagcctctgagaatagaagcacctt

SEQ ID NO: 105294 - DNA, 25 bp, Artificial
  Probe
tcaaccagcctctgagaatagaagc

SEQ ID NO: 105295 - DNA, 25 bp, Artificial
  Probe
tgctgtgaccttttaatatagttcc

SEQ ID NO: 105296 - DNA, 25 bp, Artificial
  Probe
gctgtgaccttttaatatagttcct

SEQ ID NO: 105297 - DNA, 25 bp, Artificial
  Probe
ggtcagtgaagcattatgttgaaaa

SEQ ID NO: 105298 - DNA, 25 bp, Artificial
  Probe
gtcagtgaagcattatgttgaaaac

SEQ ID NO: 105299 - DNA, 25 bp, Artificial
  Probe
gaagagtctaagtgtggagcagagc

SEQ ID NO: 105300 - DNA, 25 bp, Artificial
  Probe
aaccagcctctgagaatagaagcac

SEQ ID NO: 105301 - DNA, 25 bp, Artificial
  Probe
caaccagcctctgagaatagaagca

SEQ ID NO: 105302 - DNA, 25 bp, Artificial
  Probe
accttcctaatgctgtgacctttta

SEQ ID NO: 105303 - DNA, 25 bp, Artificial
  Probe
ttcctaatgctgtgaccttttaata

SEQ ID NO: 105304 - DNA, 25 bp, Artificial
  Probe
ttaatatagttcctcatgttgtgat

SEQ ID NO: 105305 - DNA, 25 bp, Artificial
  Probe
cagaactaggagaattagaggcaat

SEQ ID NO: 105306 - DNA, 25 bp, Artificial
  Probe
acagaactaggagaattagaggcaa

SEQ ID NO: 105307 - DNA, 25 bp, Artificial
  Probe
aacagaactaggagaattagaggca

SEQ ID NO: 105308 - DNA, 25 bp, Artificial
  Probe
cataagaacttgacacttcagaact

SEQ ID NO: 105309 - DNA, 25 bp, Artificial
  Probe
tcataagaacttgacacttcagaac

SEQ ID NO: 105310 - DNA, 25 bp, Artificial
  Probe
agaggcaattctcacatattcagta

SEQ ID NO: 105311 - DNA, 25 bp, Artificial
  Probe
tagaggcaattctcacatattcagt

SEQ ID NO: 105312 - DNA, 25 bp, Artificial
  Probe
gaggcaattctcacatattcagtaa

SEQ ID NO: 105313 - DNA, 25 bp, Artificial
  Probe
ttagaggcaattctcacatattcag

SEQ ID NO: 105314 - DNA, 25 bp, Artificial
  Probe
ttcataagaacttgacacttcagaa

SEQ ID NO: 105315 - DNA, 25 bp, Artificial
  Probe
agaactaggagaattagaggcaatt

SEQ ID NO: 105316 - DNA, 25 bp, Artificial
  Probe
ataagaacttgacacttcagaactt

SEQ ID NO: 105317 - DNA, 25 bp, Artificial
  Probe
attagaggcaattctcacatattca

SEQ ID NO: 105318 - DNA, 25 bp, Artificial
  Probe
ttaagcgatgccagtttacataaag

SEQ ID NO: 105319 - DNA, 25 bp, Artificial
  Probe
gttaagcgatgccagtttacataaa

SEQ ID NO: 105320 - DNA, 25 bp, Artificial
  Probe
cgatgccagtttacataaagagaac

SEQ ID NO: 105321 - DNA, 25 bp, Artificial
  Probe
taagcgatgccagtttacataaaga

SEQ ID NO: 105322 - DNA, 25 bp, Artificial
  Probe
aaacagaactaggagaattagaggc

SEQ ID NO: 105323 - DNA, 25 bp, Artificial
  Probe
gggctaaacagaactaggagaatta

SEQ ID NO: 105324 - DNA, 25 bp, Artificial
  Probe
gccagtttacataaagagaacatca

SEQ ID NO: 105325 - DNA, 25 bp, Artificial
  Probe
tgccagtttacataaagagaacatc

SEQ ID NO: 105326 - DNA, 25 bp, Artificial
  Probe
gatgccagtttacataaagagaaca

SEQ ID NO: 105327 - DNA, 25 bp, Artificial
  Probe
aattatcgtaccgtatttgaactgc

SEQ ID NO: 105328 - DNA, 25 bp, Artificial
  Probe
agacggtcagttctgtcacattaag

SEQ ID NO: 105329 - DNA, 25 bp, Artificial
  Probe
ctaacaatcgtagtttcccaccaaa

SEQ ID NO: 105330 - DNA, 25 bp, Artificial
  Probe
aggcaattctcacatattcagtaaa

SEQ ID NO: 105331 - DNA, 25 bp, Artificial
  Probe
atgccagtttacataaagagaacat

SEQ ID NO: 105332 - DNA, 25 bp, Artificial
  Probe
acataaagagaacatcactcagacg

SEQ ID NO: 105333 - DNA, 25 bp, Artificial
  Probe
aattagaggcaattctcacatattc

SEQ ID NO: 105334 - DNA, 25 bp, Artificial
  Probe
cagttctgtcacattaagggcaatt

SEQ ID NO: 105335 - DNA, 25 bp, Artificial
  Probe
gcgatgccagtttacataaagagaa

SEQ ID NO: 105336 - DNA, 25 bp, Artificial
  Probe
aagcgatgccagtttacataaagag

SEQ ID NO: 105337 - DNA, 25 bp, Artificial
  Probe
cataaagagaacatcactcagacgg

SEQ ID NO: 105338 - DNA, 25 bp, Artificial
  Probe
taagaacttgacacttcagaacttt

SEQ ID NO: 105339 - DNA, 25 bp, Artificial
  Probe
tgttaagcgatgccagtttacataa

SEQ ID NO: 105340 - DNA, 25 bp, Artificial
  Probe
ttgttaagcgatgccagtttacata

SEQ ID NO: 105341 - DNA, 25 bp, Artificial
  Probe
ataaagagaacatcactcagacggt

SEQ ID NO: 105342 - DNA, 25 bp, Artificial
  Probe
ccagtttacataaagagaacatcac

SEQ ID NO: 105343 - DNA, 25 bp, Artificial
  Probe
agcgatgccagtttacataaagaga

SEQ ID NO: 105344 - DNA, 25 bp, Artificial
  Probe
tttgttaagcgatgccagtttacat

SEQ ID NO: 105345 - DNA, 25 bp, Artificial
  Probe
tacataaagagaacatcactcagac

SEQ ID NO: 105346 - DNA, 25 bp, Artificial
  Probe
ggctaaacagaactaggagaattag

SEQ ID NO: 105347 - DNA, 25 bp, Artificial
  Probe
tcagttctgtcacattaagggcaat

SEQ ID NO: 105348 - DNA, 25 bp, Artificial
  Probe
cgggctaaacagaactaggagaatt

SEQ ID NO: 105349 - DNA, 25 bp, Artificial
  Probe
tttactcgggctaaacagaactagg

SEQ ID NO: 105350 - DNA, 25 bp, Artificial
  Probe
ttaggccacagaactctctccttag

SEQ ID NO: 105351 - DNA, 25 bp, Artificial
  Probe
gttaggccacagaactctctcctta

SEQ ID NO: 105352 - DNA, 25 bp, Artificial
  Probe
cagcctacttcatgctttagcaatg

SEQ ID NO: 105353 - DNA, 25 bp, Artificial
  Probe
cttcaggttaggccacagaactctc

SEQ ID NO: 105354 - DNA, 25 bp, Artificial
  Probe
agcctacttcatgctttagcaatgg

SEQ ID NO: 105355 - DNA, 25 bp, Artificial
  Probe
ccagcctacttcatgctttagcaat

SEQ ID NO: 105356 - DNA, 25 bp, Artificial
  Probe
ttcaggttaggccacagaactctct

SEQ ID NO: 105357 - DNA, 25 bp, Artificial
  Probe
taggccacagaactctctccttagg

SEQ ID NO: 105358 - DNA, 25 bp, Artificial
  Probe
ttaaaacttgacattaaaatggaga

SEQ ID NO: 105359 - DNA, 25 bp, Artificial
  Probe
taagcccagcctacttcatgcttta

SEQ ID NO: 105360 - DNA, 25 bp, Artificial
  Probe
cccagcctacttcatgctttagcaa

SEQ ID NO: 105361 - DNA, 25 bp, Artificial
  Probe
aagcccagcctacttcatgctttag

SEQ ID NO: 105362 - DNA, 25 bp, Artificial
  Probe
ctaagcccagcctacttcatgcttt

SEQ ID NO: 105363 - DNA, 25 bp, Artificial
  Probe
cagggtactggttacctgtcctagg

SEQ ID NO: 105364 - DNA, 25 bp, Artificial
  Probe
cctaaggactatgctgctgtaatac

SEQ ID NO: 105365 - DNA, 25 bp, Artificial
  Probe
aatcacctacttgaacattgtatgc

SEQ ID NO: 105366 - DNA, 25 bp, Artificial
  Probe
ctaaggactatgctgctgtaataca

SEQ ID NO: 105367 - DNA, 25 bp, Artificial
  Probe
gcctaaggactatgctgctgtaata

SEQ ID NO: 105368 - DNA, 25 bp, Artificial
  Probe
taacttcataagactgctattctga

SEQ ID NO: 105369 - DNA, 25 bp, Artificial
  Probe
atcacctacttgaacattgtatgca

SEQ ID NO: 105370 - DNA, 25 bp, Artificial
  Probe
tcacctacttgaacattgtatgcaa

SEQ ID NO: 105371 - DNA, 25 bp, Artificial
  Probe
atggagcaatcagacatttcagatg

SEQ ID NO: 105372 - DNA, 25 bp, Artificial
  Probe
tcataagactgctattctgaaatgc

SEQ ID NO: 105373 - DNA, 25 bp, Artificial
  Probe
agccttatttgaacaatactgaact

SEQ ID NO: 105374 - DNA, 25 bp, Artificial
  Probe
gccttatttgaacaatactgaactc

SEQ ID NO: 105375 - DNA, 25 bp, Artificial
  Probe
aaatactcatggtttcactctgtcc

SEQ ID NO: 105376 - DNA, 25 bp, Artificial
  Probe
ttaacttcataagactgctattctg

SEQ ID NO: 105377 - DNA, 25 bp, Artificial
  Probe
taaatactcatggtttcactctgtc

SEQ ID NO: 105378 - DNA, 25 bp, Artificial
  Probe
cggcaaagaatggtggtaaatcaaa

SEQ ID NO: 105379 - DNA, 25 bp, Artificial
  Probe
tgtagccttatttgaacaatactga

SEQ ID NO: 105380 - DNA, 25 bp, Artificial
  Probe
actgtagccttatttgaacaatact

SEQ ID NO: 105381 - DNA, 25 bp, Artificial
  Probe
cacctacttgaacattgtatgcaat

SEQ ID NO: 105382 - DNA, 25 bp, Artificial
  Probe
ctgtagccttatttgaacaatactg

SEQ ID NO: 105383 - DNA, 25 bp, Artificial
  Probe
ataaatactcatggtttcactctgt

SEQ ID NO: 105384 - DNA, 25 bp, Artificial
  Probe
tagccttatttgaacaatactgaac

SEQ ID NO: 105385 - DNA, 25 bp, Artificial
  Probe
gtagccttatttgaacaatactgaa

SEQ ID NO: 105386 - DNA, 25 bp, Artificial
  Probe
aaatcacctacttgaacattgtatg

SEQ ID NO: 105387 - DNA, 25 bp, Artificial
  Probe
actcataaatactcatggtttcact

SEQ ID NO: 105388 - DNA, 25 bp, Artificial
  Probe
aacttcataagactgctattctgaa

SEQ ID NO: 105389 - DNA, 25 bp, Artificial
  Probe
ctactgagctatgactgtccttggt

SEQ ID NO: 105390 - DNA, 25 bp, Artificial
  Probe
cataaatactcatggtttcactctg

SEQ ID NO: 105391 - DNA, 25 bp, Artificial
  Probe
acctacttgaacattgtatgcaata

SEQ ID NO: 105392 - DNA, 25 bp, Artificial
  Probe
gctattctgaaatgcaacaatcttg

SEQ ID NO: 105393 - DNA, 25 bp, Artificial
  Probe
tcataaatactcatggtttcactct

SEQ ID NO: 105394 - DNA, 25 bp, Artificial
  Probe
actgaactcataaatactcatggtt

SEQ ID NO: 105395 - DNA, 25 bp, Artificial
  Probe
ccttatttgaacaatactgaactca

SEQ ID NO: 105396 - DNA, 25 bp, Artificial
  Probe
aatggagcaatcagacatttcagat

SEQ ID NO: 105397 - DNA, 25 bp, Artificial
  Probe
aagtctcttgtaacgtaaaggcaaa

SEQ ID NO: 105398 - DNA, 25 bp, Artificial
  Probe
aaagtctcttgtaacgtaaaggcaa

SEQ ID NO: 105399 - DNA, 25 bp, Artificial
  Probe
cctacttgaacattgtatgcaatac

SEQ ID NO: 105400 - DNA, 25 bp, Artificial
  Probe
atgacggcaaagaatggtggtaaat

SEQ ID NO: 105401 - DNA, 25 bp, Artificial
  Probe
ctcataaatactcatggtttcactc

SEQ ID NO: 105402 - DNA, 25 bp, Artificial
  Probe
ccatcgctttcttttctctttcttt

SEQ ID NO: 105403 - DNA, 25 bp, Artificial
  Probe
ctaccatcgctttcttttctctttc

SEQ ID NO: 105404 - DNA, 25 bp, Artificial
  Probe
aactcataaatactcatggtttcac

SEQ ID NO: 105405 - DNA, 25 bp, Artificial
  Probe
gcaaagaatggtggtaaatcaaaag

SEQ ID NO: 105406 - DNA, 25 bp, Artificial
  Probe
taccatcgctttcttttctctttct

SEQ ID NO: 105407 - DNA, 25 bp, Artificial
  Probe
tctaccatcgctttcttttctcttt

SEQ ID NO: 105408 - DNA, 25 bp, Artificial
  Probe
agtctcttgtaacgtaaaggcaaac

SEQ ID NO: 105409 - DNA, 25 bp, Artificial
  Probe
atcatccactcctgaacaactcatt

SEQ ID NO: 105410 - DNA, 25 bp, Artificial
  Probe
atccactcctgaacaactcattgaa

SEQ ID NO: 105411 - DNA, 25 bp, Artificial
  Probe
tgaaggaaaggattgtaagtgaaga

SEQ ID NO: 105412 - DNA, 25 bp, Artificial
  Probe
ggattgtaagtgaagaagggagaaa

SEQ ID NO: 105413 - DNA, 25 bp, Artificial
  Probe
aaaggattgtaagtgaagaagggag

SEQ ID NO: 105414 - DNA, 25 bp, Artificial
  Probe
gaaaggattgtaagtgaagaaggga

SEQ ID NO: 105415 - DNA, 25 bp, Artificial
  Probe
aggaaaggattgtaagtgaagaagg

SEQ ID NO: 105416 - DNA, 25 bp, Artificial
  Probe
gttgaaggaaaggattgtaagtgaa

SEQ ID NO: 105417 - DNA, 25 bp, Artificial
  Probe
ttgaaggaaaggattgtaagtgaag

SEQ ID NO: 105418 - DNA, 25 bp, Artificial
  Probe
ggttgaaggaaaggattgtaagtga

SEQ ID NO: 105419 - DNA, 25 bp, Artificial
  Probe
agtggttgaaggaaaggattgtaag

SEQ ID NO: 105420 - DNA, 25 bp, Artificial
  Probe
aggattgtaagtgaagaagggagaa

SEQ ID NO: 105421 - DNA, 25 bp, Artificial
  Probe
aaggattgtaagtgaagaagggaga

SEQ ID NO: 105422 - DNA, 25 bp, Artificial
  Probe
aaggaaaggattgtaagtgaagaag

SEQ ID NO: 105423 - DNA, 25 bp, Artificial
  Probe
gaaggaaaggattgtaagtgaagaa

SEQ ID NO: 105424 - DNA, 25 bp, Artificial
  Probe
tggttgaaggaaaggattgtaagtg

SEQ ID NO: 105425 - DNA, 25 bp, Artificial
  Probe
gtggttgaaggaaaggattgtaagt

SEQ ID NO: 105426 - DNA, 25 bp, Artificial
  Probe
cagtggttgaaggaaaggattgtaa

SEQ ID NO: 105427 - DNA, 25 bp, Artificial
  Probe
cttgcttgtggaattatttcaggaa

SEQ ID NO: 105428 - DNA, 25 bp, Artificial
  Probe
ggaaaggattgtaagtgaagaaggg

SEQ ID NO: 105429 - DNA, 25 bp, Artificial
  Probe
catccactcctgaacaactcattga

SEQ ID NO: 105430 - DNA, 25 bp, Artificial
  Probe
tcatccactcctgaacaactcattg

SEQ ID NO: 105431 - DNA, 25 bp, Artificial
  Probe
gatcatccactcctgaacaactcat

SEQ ID NO: 105432 - DNA, 25 bp, Artificial
  Probe
acttgcttgtggaattatttcagga

SEQ ID NO: 105433 - DNA, 25 bp, Artificial
  Probe
ttgcttgtggaattatttcaggaaa

SEQ ID NO: 105434 - DNA, 25 bp, Artificial
  Probe
cacttgcttgtggaattatttcagg

SEQ ID NO: 105435 - DNA, 25 bp, Artificial
  Probe
ggactatagatcctaaggcaatgca

SEQ ID NO: 105436 - DNA, 25 bp, Artificial
  Probe
tccactcctgaacaactcattgaaa

SEQ ID NO: 105437 - DNA, 25 bp, Artificial
  Probe
ccagtggttgaaggaaaggattgta

SEQ ID NO: 105438 - DNA, 25 bp, Artificial
  Probe
attcaggtcctccctaagatgacat

SEQ ID NO: 105439 - DNA, 25 bp, Artificial
  Probe
tatagatcctaaggcaatgcatgag

SEQ ID NO: 105440 - DNA, 25 bp, Artificial
  Probe
ctatagatcctaaggcaatgcatga

SEQ ID NO: 105441 - DNA, 25 bp, Artificial
  Probe
gactatagatcctaaggcaatgcat

SEQ ID NO: 105442 - DNA, 25 bp, Artificial
  Probe
actatagatcctaaggcaatgcatg

SEQ ID NO: 105443 - DNA, 25 bp, Artificial
  Probe
attgtaagtgaagaagggagaaaac

SEQ ID NO: 105444 - DNA, 25 bp, Artificial
  Probe
gattgtaagtgaagaagggagaaaa

SEQ ID NO: 105445 - DNA, 25 bp, Artificial
  Probe
ttaagctgcatgagtaaatcctggt

SEQ ID NO: 105446 - DNA, 25 bp, Artificial
  Probe
gtcctccctaagatgacatcacatg

SEQ ID NO: 105447 - DNA, 25 bp, Artificial
  Probe
cttaagctgcatgagtaaatcctgg

SEQ ID NO: 105448 - DNA, 25 bp, Artificial
  Probe
catgtggtaaatgagattgataaca

SEQ ID NO: 105449 - DNA, 25 bp, Artificial
  Probe
ggattctctgaggtctctgctgttg

SEQ ID NO: 105450 - DNA, 25 bp, Artificial
  Probe
acttaagctgcatgagtaaatcctg

SEQ ID NO: 105451 - DNA, 25 bp, Artificial
  Probe
cacttaagctgcatgagtaaatcct

SEQ ID NO: 105452 - DNA, 25 bp, Artificial
  Probe
ttcaggaaaatatggaaatggggtg

SEQ ID NO: 105453 - DNA, 25 bp, Artificial
  Probe
tgcttgtggaattatttcaggaaaa

SEQ ID NO: 105454 - DNA, 25 bp, Artificial
  Probe
gcgtgaatcatagccaataatagga

SEQ ID NO: 105455 - DNA, 25 bp, Artificial
  Probe
gaacaacttatggagaacattggag

SEQ ID NO: 105456 - DNA, 25 bp, Artificial
  Probe
agaacaacttatggagaacattgga

SEQ ID NO: 105457 - DNA, 25 bp, Artificial
  Probe
cagaacaacttatggagaacattgg

SEQ ID NO: 105458 - DNA, 25 bp, Artificial
  Probe
gcagaacaacttatggagaacattg

SEQ ID NO: 105459 - DNA, 25 bp, Artificial
  Probe
tgaatcatagccaataataggatgc

SEQ ID NO: 105460 - DNA, 25 bp, Artificial
  Probe
cgtgaatcatagccaataataggat

SEQ ID NO: 105461 - DNA, 25 bp, Artificial
  Probe
caacttatggagaacattggagcaa

SEQ ID NO: 105462 - DNA, 25 bp, Artificial
  Probe
aacaacttatggagaacattggagc

SEQ ID NO: 105463 - DNA, 25 bp, Artificial
  Probe
acaacttatggagaacattggagca

SEQ ID NO: 105464 - DNA, 25 bp, Artificial
  Probe
gtgaatcatagccaataataggatg

SEQ ID NO: 105465 - DNA, 25 bp, Artificial
  Probe
caatgcagaacaacttatggagaac

SEQ ID NO: 105466 - DNA, 25 bp, Artificial
  Probe
tagggaacatcattaagaagaaggg

SEQ ID NO: 105467 - DNA, 25 bp, Artificial
  Probe
ctatgacaatggcatcaacctgttc

SEQ ID NO: 105468 - DNA, 25 bp, Artificial
  Probe
aatgcagaacaacttatggagaaca

SEQ ID NO: 105469 - DNA, 25 bp, Artificial
  Probe
atgcagaacaacttatggagaacat

SEQ ID NO: 105470 - DNA, 25 bp, Artificial
  Probe
ttatggagaacattggagcaataca

SEQ ID NO: 105471 - DNA, 25 bp, Artificial
  Probe
cttatggagaacattggagcaatac

SEQ ID NO: 105472 - DNA, 25 bp, Artificial
  Probe
acttatggagaacattggagcaata

SEQ ID NO: 105473 - DNA, 25 bp, Artificial
  Probe
tgcagaacaacttatggagaacatt

SEQ ID NO: 105474 - DNA, 25 bp, Artificial
  Probe
tatggagaacattggagcaatacag

SEQ ID NO: 105475 - DNA, 25 bp, Artificial
  Probe
aacttatggagaacattggagcaat

SEQ ID NO: 105476 - DNA, 25 bp, Artificial
  Probe
ctgaagtggtattagggaacatcat

SEQ ID NO: 105477 - DNA, 25 bp, Artificial
  Probe
tgaagtggtattagggaacatcatt

SEQ ID NO: 105478 - DNA, 25 bp, Artificial
  Probe
ctgttccacaagataggagtaggtg

SEQ ID NO: 105479 - DNA, 25 bp, Artificial
  Probe
ttagggaacatcattaagaagaagg

SEQ ID NO: 105480 - DNA, 25 bp, Artificial
  Probe
gaagtggtattagggaacatcatta

SEQ ID NO: 105481 - DNA, 25 bp, Artificial
  Probe
gtggtattagggaacatcattaaga

SEQ ID NO: 105482 - DNA, 25 bp, Artificial
  Probe
agtggtattagggaacatcattaag

SEQ ID NO: 105483 - DNA, 25 bp, Artificial
  Probe
gaatcatagccaataataggatgct

SEQ ID NO: 105484 - DNA, 25 bp, Artificial
  Probe
aagtggtattagggaacatcattaa

SEQ ID NO: 105485 - DNA, 25 bp, Artificial
  Probe
ggaagcacataatcgaaggactgaa

SEQ ID NO: 105486 - DNA, 25 bp, Artificial
  Probe
cctatgacaatggcatcaacctgtt

SEQ ID NO: 105487 - DNA, 25 bp, Artificial
  Probe
gagctgttccacaagataggagtag

SEQ ID NO: 105488 - DNA, 25 bp, Artificial
  Probe
tggtattagggaacatcattaagaa

SEQ ID NO: 105489 - DNA, 25 bp, Artificial
  Probe
ccaatgcagaacaacttatggagaa

SEQ ID NO: 105490 - DNA, 25 bp, Artificial
  Probe
gctgaagtggtattagggaacatca

SEQ ID NO: 105491 - DNA, 25 bp, Artificial
  Probe
ggatgatctacagtactcggtatgg

SEQ ID NO: 105492 - DNA, 25 bp, Artificial
  Probe
acaagataggagtaggtgccatgac

SEQ ID NO: 105493 - DNA, 25 bp, Artificial
  Probe
aagcacataatcgaaggactgaaag

SEQ ID NO: 105494 - DNA, 25 bp, Artificial
  Probe
gaagcacataatcgaaggactgaaa

SEQ ID NO: 105495 - DNA, 25 bp, Artificial
  Probe
agagctgttccacaagataggagta

SEQ ID NO: 105496 - DNA, 25 bp, Artificial
  Probe
ggctgaagtggtattagggaacatc

SEQ ID NO: 105497 - DNA, 25 bp, Artificial
  Probe
tatgacaatggcatcaacctgttcg

SEQ ID NO: 105498 - DNA, 25 bp, Artificial
  Probe
ctaatgaccttggcctatgacaatg

SEQ ID NO: 105499 - DNA, 25 bp, Artificial
  Probe
tggttactgattggatggtattctc

SEQ ID NO: 105500 - DNA, 25 bp, Artificial
  Probe
ttgtggttactgattggatggtatt

SEQ ID NO: 105501 - DNA, 25 bp, Artificial
  Probe
gtggttactgattggatggtattct

SEQ ID NO: 105502 - DNA, 25 bp, Artificial
  Probe
tgtggttactgattggatggtattc

SEQ ID NO: 105503 - DNA, 25 bp, Artificial
  Probe
agagagacgaattaagaatcagaca

SEQ ID NO: 105504 - DNA, 25 bp, Artificial
  Probe
gagacgaattaagaatcagacaagt

SEQ ID NO: 105505 - DNA, 25 bp, Artificial
  Probe
ggttactgattggatggtattctca

SEQ ID NO: 105506 - DNA, 25 bp, Artificial
  Probe
agagacgaattaagaatcagacaag

SEQ ID NO: 105507 - DNA, 25 bp, Artificial
  Probe
gagagacgaattaagaatcagacaa

SEQ ID NO: 105508 - DNA, 25 bp, Artificial
  Probe
gttactgattggatggtattctcaa

SEQ ID NO: 105509 - DNA, 25 bp, Artificial
  Probe
agacgaattaagaatcagacaagta

SEQ ID NO: 105510 - DNA, 25 bp, Artificial
  Probe
tagagagacgaattaagaatcagac

SEQ ID NO: 105511 - DNA, 25 bp, Artificial
  Probe
ctagagagacgaattaagaatcaga

SEQ ID NO: 105512 - DNA, 25 bp, Artificial
  Probe
tttgtggttactgattggatggtat

SEQ ID NO: 105513 - DNA, 25 bp, Artificial
  Probe
gagactttgtggttactgattggat

SEQ ID NO: 105514 - DNA, 25 bp, Artificial
  Probe
ctttgtggttactgattggatggta

SEQ ID NO: 105515 - DNA, 25 bp, Artificial
  Probe
gacgaattaagaatcagacaagtaa

SEQ ID NO: 105516 - DNA, 25 bp, Artificial
  Probe
agactttgtggttactgattggatg

SEQ ID NO: 105517 - DNA, 25 bp, Artificial
  Probe
ttacagaatttgacctaagagccta

SEQ ID NO: 105518 - DNA, 25 bp, Artificial
  Probe
acagaatttgacctaagagcctata

SEQ ID NO: 105519 - DNA, 25 bp, Artificial
  Probe
tacagaatttgacctaagagcctat

SEQ ID NO: 105520 - DNA, 25 bp, Artificial
  Probe
agtgagactttgtggttactgattg

SEQ ID NO: 105521 - DNA, 25 bp, Artificial
  Probe
gactttgtggttactgattggatgg

SEQ ID NO: 105522 - DNA, 25 bp, Artificial
  Probe
tgagactttgtggttactgattgga

SEQ ID NO: 105523 - DNA, 25 bp, Artificial
  Probe
gtgagactttgtggttactgattgg

SEQ ID NO: 105524 - DNA, 25 bp, Artificial
  Probe
tgtgtgtctataactcagtttccat

SEQ ID NO: 105525 - DNA, 25 bp, Artificial
  Probe
atgtgtgtctataactcagtttcca

SEQ ID NO: 105526 - DNA, 25 bp, Artificial
  Probe
cagaatttgacctaagagcctataa

SEQ ID NO: 105527 - DNA, 25 bp, Artificial
  Probe
cttacagaatttgacctaagagcct

SEQ ID NO: 105528 - DNA, 25 bp, Artificial
  Probe
acttacagaatttgacctaagagcc

SEQ ID NO: 105529 - DNA, 25 bp, Artificial
  Probe
catgtgtgtctataactcagtttcc

SEQ ID NO: 105530 - DNA, 25 bp, Artificial
  Probe
gtgtgtctataactcagtttccatt

SEQ ID NO: 105531 - DNA, 25 bp, Artificial
  Probe
aacttacagaatttgacctaagagc

SEQ ID NO: 105532 - DNA, 25 bp, Artificial
  Probe
actttgtggttactgattggatggt

SEQ ID NO: 105533 - DNA, 25 bp, Artificial
  Probe
gatggtctgcctatcagttgacaag

SEQ ID NO: 105534 - DNA, 25 bp, Artificial
  Probe
actgattggatggtattctcaatta

SEQ ID NO: 105535 - DNA, 25 bp, Artificial
  Probe
tactgattggatggtattctcaatt

SEQ ID NO: 105536 - DNA, 25 bp, Artificial
  Probe
ttactgattggatggtattctcaat

SEQ ID NO: 105537 - DNA, 25 bp, Artificial
  Probe
tgtgtctataactcagtttccattt

SEQ ID NO: 105538 - DNA, 25 bp, Artificial
  Probe
aggtaactgttaaatttggcaatgt

SEQ ID NO: 105539 - DNA, 25 bp, Artificial
  Probe
tgattggatggtattctcaattaga

SEQ ID NO: 105540 - DNA, 25 bp, Artificial
  Probe
ttggatggtattctcaattagaagt

SEQ ID NO: 105541 - DNA, 25 bp, Artificial
  Probe
atggtctgcctatcagttgacaaga

SEQ ID NO: 105542 - DNA, 25 bp, Artificial
  Probe
gagttctatgttaaaccagtacagt

SEQ ID NO: 105543 - DNA, 25 bp, Artificial
  Probe
ctgattggatggtattctcaattag

SEQ ID NO: 105544 - DNA, 25 bp, Artificial
  Probe
aacgaagtgttattgaactcctacc

SEQ ID NO: 105545 - DNA, 25 bp, Artificial
  Probe
aagagcatatcagtatggtggagaa

SEQ ID NO: 105546 - DNA, 25 bp, Artificial
  Probe
ctctctgtgtgtgtaaatggaagta

SEQ ID NO: 105547 - DNA, 25 bp, Artificial
  Probe
tctctgtgtgtgtaaatggaagtat

SEQ ID NO: 105548 - DNA, 25 bp, Artificial
  Probe
atatcagtatggtggagaaagggaa

SEQ ID NO: 105549 - DNA, 25 bp, Artificial
  Probe
aaccataataaacgcagataaggac

SEQ ID NO: 105550 - DNA, 25 bp, Artificial
  Probe
aactcctaccctctcaataactcag

SEQ ID NO: 105551 - DNA, 25 bp, Artificial
  Probe
gaactcctaccctctcaataactca

SEQ ID NO: 105552 - DNA, 25 bp, Artificial
  Probe
ctctgtgtgtgtaaatggaagtatt

SEQ ID NO: 105553 - DNA, 25 bp, Artificial
  Probe
accataataaacgcagataaggacg

SEQ ID NO: 105554 - DNA, 25 bp, Artificial
  Probe
cctaccctctcaataactcagtgta

SEQ ID NO: 105555 - DNA, 25 bp, Artificial
  Probe
tatcagtatggtggagaaagggaag

SEQ ID NO: 105556 - DNA, 25 bp, Artificial
  Probe
aagatacgcagttacagcagattgt

SEQ ID NO: 105557 - DNA, 25 bp, Artificial
  Probe
aaaccataataaacgcagataagga

SEQ ID NO: 105558 - DNA, 25 bp, Artificial
  Probe
gaaagatacgcagttacagcagatt

SEQ ID NO: 105559 - DNA, 25 bp, Artificial
  Probe
taccctctcaataactcagtgtagc

SEQ ID NO: 105560 - DNA, 25 bp, Artificial
  Probe
ataaagacggctatatttccaatgg

SEQ ID NO: 105561 - DNA, 25 bp, Artificial
  Probe
cataataaacgcagataaggacggg

SEQ ID NO: 105562 - DNA, 25 bp, Artificial
  Probe
ccataataaacgcagataaggacgg

SEQ ID NO: 105563 - DNA, 25 bp, Artificial
  Probe
gaagtgttattgaactcctaccctc

SEQ ID NO: 105564 - DNA, 25 bp, Artificial
  Probe
aagtgttattgaactcctaccctct

SEQ ID NO: 105565 - DNA, 25 bp, Artificial
  Probe
aaagatacgcagttacagcagattg

SEQ ID NO: 105566 - DNA, 25 bp, Artificial
  Probe
ctcctaccctctcaataactcagtg

SEQ ID NO: 105567 - DNA, 25 bp, Artificial
  Probe
tgaactcctaccctctcaataactc

SEQ ID NO: 105568 - DNA, 25 bp, Artificial
  Probe
gatacgcagttacagcagattgtag

SEQ ID NO: 105569 - DNA, 25 bp, Artificial
  Probe
agtgttattgaactcctaccctctc

SEQ ID NO: 105570 - DNA, 25 bp, Artificial
  Probe
cgacatggataaagacggctatatt

SEQ ID NO: 105571 - DNA, 25 bp, Artificial
  Probe
gataaagacggctatatttccaatg

SEQ ID NO: 105572 - DNA, 25 bp, Artificial
  Probe
tacgacatggataaagacggctata

SEQ ID NO: 105573 - DNA, 25 bp, Artificial
  Probe
gtgttattgaactcctaccctctca

SEQ ID NO: 105574 - DNA, 25 bp, Artificial
  Probe
atacgcagttacagcagattgtaga

SEQ ID NO: 105575 - DNA, 25 bp, Artificial
  Probe
agatacgcagttacagcagattgta

SEQ ID NO: 105576 - DNA, 25 bp, Artificial
  Probe
acatggataaagacggctatatttc

SEQ ID NO: 105577 - DNA, 25 bp, Artificial
  Probe
gacatggataaagacggctatattt

SEQ ID NO: 105578 - DNA, 25 bp, Artificial
  Probe
tcctaccctctcaataactcagtgt

SEQ ID NO: 105579 - DNA, 25 bp, Artificial
  Probe
tgaaagatacgcagttacagcagat

SEQ ID NO: 105580 - DNA, 25 bp, Artificial
  Probe
tctgtgtgtgtaaatggaagtattt

SEQ ID NO: 105581 - DNA, 25 bp, Artificial
  Probe
gagcatatcagtatggtggagaaag

SEQ ID NO: 105582 - DNA, 25 bp, Artificial
  Probe
acgacatggataaagacggctatat

SEQ ID NO: 105583 - DNA, 25 bp, Artificial
  Probe
actcctaccctctcaataactcagt

SEQ ID NO: 105584 - DNA, 25 bp, Artificial
  Probe
agagcatatcagtatggtggagaaa

SEQ ID NO: 105585 - DNA, 25 bp, Artificial
  Probe
aaagagcatatcagtatggtggaga

SEQ ID NO: 105586 - DNA, 25 bp, Artificial
  Probe
cgaagtgttattgaactcctaccct

SEQ ID NO: 105587 - DNA, 25 bp, Artificial
  Probe
aacaacctgaaagatacgcagttac

SEQ ID NO: 105588 - DNA, 25 bp, Artificial
  Probe
caacaacctgaaagatacgcagtta

SEQ ID NO: 105589 - DNA, 25 bp, Artificial
  Probe
aagtcacagagagccttggtatatt

SEQ ID NO: 105590 - DNA, 25 bp, Artificial
  Probe
gatcatatcatcaggacagaacagg

SEQ ID NO: 105591 - DNA, 25 bp, Artificial
  Probe
agtcacagagagccttggtatattg

SEQ ID NO: 105592 - DNA, 25 bp, Artificial
  Probe
gaagtcacagagagccttggtatat

SEQ ID NO: 105593 - DNA, 25 bp, Artificial
  Probe
cacagtcttgaagagagaatcatct

SEQ ID NO: 105594 - DNA, 25 bp, Artificial
  Probe
ttgaagagagaatcatctatggagt

SEQ ID NO: 105595 - DNA, 25 bp, Artificial
  Probe
cagaagaaggattcaggcaattacc

SEQ ID NO: 105596 - DNA, 25 bp, Artificial
  Probe
cttgaagagagaatcatctatggag

SEQ ID NO: 105597 - DNA, 25 bp, Artificial
  Probe
acagtcttgaagagagaatcatcta

SEQ ID NO: 105598 - DNA, 25 bp, Artificial
  Probe
gcacagtcttgaagagagaatcatc

SEQ ID NO: 105599 - DNA, 25 bp, Artificial
  Probe
tcttgaagagagaatcatctatgga

SEQ ID NO: 105600 - DNA, 25 bp, Artificial
  Probe
gtcttgaagagagaatcatctatgg

SEQ ID NO: 105601 - DNA, 25 bp, Artificial
  Probe
gcagaagaaggattcaggcaattac

SEQ ID NO: 105602 - DNA, 25 bp, Artificial
  Probe
tgaagagagaatcatctatggagta

SEQ ID NO: 105603 - DNA, 25 bp, Artificial
  Probe
gaagagagaatcatctatggagtag

SEQ ID NO: 105604 - DNA, 25 bp, Artificial
  Probe
gtcacagagagccttggtatattgg

SEQ ID NO: 105605 - DNA, 25 bp, Artificial
  Probe
agaagaaggattcaggcaattacct

SEQ ID NO: 105606 - DNA, 25 bp, Artificial
  Probe
gatacagaacatttggaggaacttc

SEQ ID NO: 105607 - DNA, 25 bp, Artificial
  Probe
cgatacagaacatttggaggaactt

SEQ ID NO: 105608 - DNA, 25 bp, Artificial
  Probe
agtcttgaagagagaatcatctatg

SEQ ID NO: 105609 - DNA, 25 bp, Artificial
  Probe
cagtcttgaagagagaatcatctat

SEQ ID NO: 105610 - DNA, 25 bp, Artificial
  Probe
gaacatttggaggaacttcttcata

SEQ ID NO: 105611 - DNA, 25 bp, Artificial
  Probe
ggcacagtcttgaagagagaatcat

SEQ ID NO: 105612 - DNA, 25 bp, Artificial
  Probe
atcatatcatcaggacagaacaggg

SEQ ID NO: 105613 - DNA, 25 bp, Artificial
  Probe
acatttggaggaacttcttcataaa

SEQ ID NO: 105614 - DNA, 25 bp, Artificial
  Probe
aacatttggaggaacttcttcataa

SEQ ID NO: 105615 - DNA, 25 bp, Artificial
  Probe
agagagaatcatctatggagtagaa

SEQ ID NO: 105616 - DNA, 25 bp, Artificial
  Probe
aagagagaatcatctatggagtaga

SEQ ID NO: 105617 - DNA, 25 bp, Artificial
  Probe
cttggtatattggcaatttcagagg

SEQ ID NO: 105618 - DNA, 25 bp, Artificial
  Probe
ccttggtatattggcaatttcagag

SEQ ID NO: 105619 - DNA, 25 bp, Artificial
  Probe
ctctaagaccaaagaaatgtccagt

SEQ ID NO: 105620 - DNA, 25 bp, Artificial
  Probe
catttggaggaacttcttcataaag

SEQ ID NO: 105621 - DNA, 25 bp, Artificial
  Probe
aagatgacgatggagatggctctaa

SEQ ID NO: 105622 - DNA, 25 bp, Artificial
  Probe
taagaccaaagaaatgtccagtagc

SEQ ID NO: 105623 - DNA, 25 bp, Artificial
  Probe
tctaagaccaaagaaatgtccagta

SEQ ID NO: 105624 - DNA, 25 bp, Artificial
  Probe
agagcaagaaaggtagaaacaggag

SEQ ID NO: 105625 - DNA, 25 bp, Artificial
  Probe
gagagcaagaaaggtagaaacagga

SEQ ID NO: 105626 - DNA, 25 bp, Artificial
  Probe
aggagagcaagaaaggtagaaacag

SEQ ID NO: 105627 - DNA, 25 bp, Artificial
  Probe
ctaagaccaaagaaatgtccagtag

SEQ ID NO: 105628 - DNA, 25 bp, Artificial
  Probe
gtatattggcaatttcagaggcgaa

SEQ ID NO: 105629 - DNA, 25 bp, Artificial
  Probe
ttggtatattggcaatttcagaggc

SEQ ID NO: 105630 - DNA, 25 bp, Artificial
  Probe
caggagagcaagaaaggtagaaaca

SEQ ID NO: 105631 - DNA, 25 bp, Artificial
  Probe
cgaagtcacagagagccttggtata

SEQ ID NO: 105632 - DNA, 25 bp, Artificial
  Probe
gatgacgatggagatggctctaaga

SEQ ID NO: 105633 - DNA, 25 bp, Artificial
  Probe
agatgacgatggagatggctctaag

SEQ ID NO: 105634 - DNA, 25 bp, Artificial
  Probe
aagaaggtcaaacaggaagatactc

SEQ ID NO: 105635 - DNA, 25 bp, Artificial
  Probe
caagaaggtcaaacaggaagatact

SEQ ID NO: 105636 - DNA, 25 bp, Artificial
  Probe
aaggtcaaacaggaagatactcgta

SEQ ID NO: 105637 - DNA, 25 bp, Artificial
  Probe
ccaagaaggtcaaacaggaagatac

SEQ ID NO: 105638 - DNA, 25 bp, Artificial
  Probe
agaaggtcaaacaggaagatactcg

SEQ ID NO: 105639 - DNA, 25 bp, Artificial
  Probe
gaaggtcaaacaggaagatactcgt

SEQ ID NO: 105640 - DNA, 25 bp, Artificial
  Probe
aggtcaaacaggaagatactcgtac

SEQ ID NO: 105641 - DNA, 25 bp, Artificial
  Probe
ttaacaagtttcattgcactttgaa

SEQ ID NO: 105642 - DNA, 25 bp, Artificial
  Probe
acaagtttcattgcactttgaataa

SEQ ID NO: 105643 - DNA, 25 bp, Artificial
  Probe
aacaagtttcattgcactttgaata

SEQ ID NO: 105644 - DNA, 25 bp, Artificial
  Probe
taacaagtttcattgcactttgaat

SEQ ID NO: 105645 - DNA, 25 bp, Artificial
  Probe
gttaacaagtttcattgcactttga

SEQ ID NO: 105646 - DNA, 25 bp, Artificial
  Probe
caagtttcattgcactttgaataaa

SEQ ID NO: 105647 - DNA, 25 bp, Artificial
  Probe
aagtttcattgcactttgaataaag

SEQ ID NO: 105648 - DNA, 25 bp, Artificial
  Probe
tttccctatcttttaagctgttaac

SEQ ID NO: 105649 - DNA, 25 bp, Artificial
  Probe
attgcactttgaataaagttcttgc

SEQ ID NO: 105650 - DNA, 25 bp, Artificial
  Probe
agtttcattgcactttgaataaagt

SEQ ID NO: 105651 - DNA, 25 bp, Artificial
  Probe
cattgcactttgaataaagttcttg

SEQ ID NO: 105652 - DNA, 25 bp, Artificial
  Probe
tcattgcactttgaataaagttctt

SEQ ID NO: 105653 - DNA, 25 bp, Artificial
  Probe
ttcattgcactttgaataaagttct

SEQ ID NO: 105654 - DNA, 25 bp, Artificial
  Probe
gtttcattgcactttgaataaagtt

SEQ ID NO: 105655 - DNA, 25 bp, Artificial
  Probe
tttcattgcactttgaataaagttc

SEQ ID NO: 105656 - DNA, 25 bp, Artificial
  Probe
tatttctctgtcctctttagccctc

SEQ ID NO: 105657 - DNA, 25 bp, Artificial
  Probe
gtatttctctgtcctctttagccct

SEQ ID NO: 105658 - DNA, 25 bp, Artificial
  Probe
agtatttctctgtcctctttagccc

SEQ ID NO: 105659 - DNA, 25 bp, Artificial
  Probe
tttcacatctgttcctttcctctct

SEQ ID NO: 105660 - DNA, 25 bp, Artificial
  Probe
ttcacatctgttcctttcctctctc

SEQ ID NO: 105661 - DNA, 25 bp, Artificial
  Probe
cagtatttctctgtcctctttagcc

SEQ ID NO: 105662 - DNA, 25 bp, Artificial
  Probe
ccagtatttctctgtcctctttagc

SEQ ID NO: 105663 - DNA, 25 bp, Artificial
  Probe
gccagtatttctctgtcctctttag

SEQ ID NO: 105664 - DNA, 25 bp, Artificial
  Probe
agccagtatttctctgtcctcttta

SEQ ID NO: 105665 - DNA, 25 bp, Artificial
  Probe
ttgtagagaagctggtgagatgaga

SEQ ID NO: 105666 - DNA, 25 bp, Artificial
  Probe
atctgttcctttcctctctcacatt

SEQ ID NO: 105667 - DNA, 25 bp, Artificial
  Probe
ctgttcctttcctctctcacatttg

SEQ ID NO: 105668 - DNA, 25 bp, Artificial
  Probe
tatttgtagagaagctggtgagatg

SEQ ID NO: 105669 - DNA, 25 bp, Artificial
  Probe
tttatttgtagagaagctggtgaga

SEQ ID NO: 105670 - DNA, 25 bp, Artificial
  Probe
tctgttcctttcctctctcacattt

SEQ ID NO: 105671 - DNA, 25 bp, Artificial
  Probe
ttatttgtagagaagctggtgagat

SEQ ID NO: 105672 - DNA, 25 bp, Artificial
  Probe
ggaatttatttaatgtgagtttggc

SEQ ID NO: 105673 - DNA, 25 bp, Artificial
  Probe
tgtagagaagctggtgagatgagag

SEQ ID NO: 105674 - DNA, 25 bp, Artificial
  Probe
tgttcctttcctctctcacatttgt

SEQ ID NO: 105675 - DNA, 25 bp, Artificial
  Probe
catctgttcctttcctctctcacat

SEQ ID NO: 105676 - DNA, 25 bp, Artificial
  Probe
atggacatttgagagccagtatttc

SEQ ID NO: 105677 - DNA, 25 bp, Artificial
  Probe
atttgtagagaagctggtgagatga

SEQ ID NO: 105678 - DNA, 25 bp, Artificial
  Probe
gagccagtatttctctgtcctcttt

SEQ ID NO: 105679 - DNA, 25 bp, Artificial
  Probe
tttctcttctccctctttcctcctc

SEQ ID NO: 105680 - DNA, 25 bp, Artificial
  Probe
atttctctgtcctctttagccctca

SEQ ID NO: 105681 - DNA, 25 bp, Artificial
  Probe
cacatctgttcctttcctctctcac

SEQ ID NO: 105682 - DNA, 25 bp, Artificial
  Probe
tcacatctgttcctttcctctctca

SEQ ID NO: 105683 - DNA, 25 bp, Artificial
  Probe
gtttctcttctccctctttcctcct

SEQ ID NO: 105684 - DNA, 25 bp, Artificial
  Probe
tttgtagagaagctggtgagatgag

SEQ ID NO: 105685 - DNA, 25 bp, Artificial
  Probe
tggacatttgagagccagtatttct

SEQ ID NO: 105686 - DNA, 25 bp, Artificial
  Probe
catggacatttgagagccagtattt

SEQ ID NO: 105687 - DNA, 25 bp, Artificial
  Probe
cagagaggggttttatttgtagaga

SEQ ID NO: 105688 - DNA, 25 bp, Artificial
  Probe
agaggggttttatttgtagagaagc

SEQ ID NO: 105689 - DNA, 25 bp, Artificial
  Probe
agagaggggttttatttgtagagaa

SEQ ID NO: 105690 - DNA, 25 bp, Artificial
  Probe
gagaggggttttatttgtagagaag

SEQ ID NO: 105691 - DNA, 25 bp, Artificial
  Probe
gttcctttcctctctcacatttgtg

SEQ ID NO: 105692 - DNA, 25 bp, Artificial
  Probe
ttttcacatctgttcctttcctctc

SEQ ID NO: 105693 - DNA, 25 bp, Artificial
  Probe
cttttcacatctgttcctttcctct

SEQ ID NO: 105694 - DNA, 25 bp, Artificial
  Probe
tttatttaatgtgagtttggcctgg

SEQ ID NO: 105695 - DNA, 25 bp, Artificial
  Probe
acatctgttcctttcctctctcaca

SEQ ID NO: 105696 - DNA, 25 bp, Artificial
  Probe
ttatttaatgtgagtttggcctgga

SEQ ID NO: 105697 - DNA, 25 bp, Artificial
  Probe
cccctcttttcttagtcctcctttt

SEQ ID NO: 105698 - DNA, 25 bp, Artificial
  Probe
tggaatttatttaatgtgagtttgg

SEQ ID NO: 105699 - DNA, 25 bp, Artificial
  Probe
acagagaggggttttatttgtagag

SEQ ID NO: 105700 - DNA, 25 bp, Artificial
  Probe
gacagagaggggttttatttgtaga

SEQ ID NO: 105701 - DNA, 25 bp, Artificial
  Probe
tcagagaggacagaatggatatact

SEQ ID NO: 105702 - DNA, 25 bp, Artificial
  Probe
ttgatgacatagtgaatgctgaaga

SEQ ID NO: 105703 - DNA, 25 bp, Artificial
  Probe
atgacatagtgaatgctgaagacaa

SEQ ID NO: 105704 - DNA, 25 bp, Artificial
  Probe
ttgaagagatacctgaagtctgaac

SEQ ID NO: 105705 - DNA, 25 bp, Artificial
  Probe
cttgaagagatacctgaagtctgaa

SEQ ID NO: 105706 - DNA, 25 bp, Artificial
  Probe
atcagagaggacagaatggatatac

SEQ ID NO: 105707 - DNA, 25 bp, Artificial
  Probe
gatgacatagtgaatgctgaagaca

SEQ ID NO: 105708 - DNA, 25 bp, Artificial
  Probe
tgatgacatagtgaatgctgaagac

SEQ ID NO: 105709 - DNA, 25 bp, Artificial
  Probe
catcagagaggacagaatggatata

SEQ ID NO: 105710 - DNA, 25 bp, Artificial
  Probe
tgacatagtgaatgctgaagacaag

SEQ ID NO: 105711 - DNA, 25 bp, Artificial
  Probe
cagagaggacagaatggatatactc

SEQ ID NO: 105712 - DNA, 25 bp, Artificial
  Probe
catagtgaatgctgaagacaaggac

SEQ ID NO: 105713 - DNA, 25 bp, Artificial
  Probe
gacatagtgaatgctgaagacaagg

SEQ ID NO: 105714 - DNA, 25 bp, Artificial
  Probe
atggcaacttgaagagatacctgaa

SEQ ID NO: 105715 - DNA, 25 bp, Artificial
  Probe
acatagtgaatgctgaagacaagga

SEQ ID NO: 105716 - DNA, 25 bp, Artificial
  Probe
ttgatggcaacttgaagagatacct

SEQ ID NO: 105717 - DNA, 25 bp, Artificial
  Probe
gatggcaacttgaagagatacctga

SEQ ID NO: 105718 - DNA, 25 bp, Artificial
  Probe
tgatggcaacttgaagagatacctg

SEQ ID NO: 105719 - DNA, 25 bp, Artificial
  Probe
tggcaacttgaagagatacctgaag

SEQ ID NO: 105720 - DNA, 25 bp, Artificial
  Probe
atattgtcatagccaagatggatgc

SEQ ID NO: 105721 - DNA, 25 bp, Artificial
  Probe
atagtgaatgctgaagacaaggacg

SEQ ID NO: 105722 - DNA, 25 bp, Artificial
  Probe
ctgctaaaggagagaagtttgtcat

SEQ ID NO: 105723 - DNA, 25 bp, Artificial
  Probe
tttgatgacatagtgaatgctgaag

SEQ ID NO: 105724 - DNA, 25 bp, Artificial
  Probe
ctttgatggcaacttgaagagatac

SEQ ID NO: 105725 - DNA, 25 bp, Artificial
  Probe
aatactttgatggcaacttgaagag

SEQ ID NO: 105726 - DNA, 25 bp, Artificial
  Probe
gaatactttgatggcaacttgaaga

SEQ ID NO: 105727 - DNA, 25 bp, Artificial
  Probe
actttgatggcaacttgaagagata

SEQ ID NO: 105728 - DNA, 25 bp, Artificial
  Probe
tactttgatggcaacttgaagagat

SEQ ID NO: 105729 - DNA, 25 bp, Artificial
  Probe
atactttgatggcaacttgaagaga

SEQ ID NO: 105730 - DNA, 25 bp, Artificial
  Probe
ggaatactttgatggcaacttgaag

SEQ ID NO: 105731 - DNA, 25 bp, Artificial
  Probe
gttcattagtgataaagatgcctcg

SEQ ID NO: 105732 - DNA, 25 bp, Artificial
  Probe
aggaatactttgatggcaacttgaa

SEQ ID NO: 105733 - DNA, 25 bp, Artificial
  Probe
ttcattagtgataaagatgcctcgg

SEQ ID NO: 105734 - DNA, 25 bp, Artificial
  Probe
aatattgtcatagccaagatggatg

SEQ ID NO: 105735 - DNA, 25 bp, Artificial
  Probe
tttgatggcaacttgaagagatacc

SEQ ID NO: 105736 - DNA, 25 bp, Artificial
  Probe
tttggaacagtgacaataaatgtgc

SEQ ID NO: 105737 - DNA, 25 bp, Artificial
  Probe
catctacttctcaccagccaacaag

SEQ ID NO: 105738 - DNA, 25 bp, Artificial
  Probe
caggaatactttgatggcaacttga

SEQ ID NO: 105739 - DNA, 25 bp, Artificial
  Probe
agttcattagtgataaagatgcctc

SEQ ID NO: 105740 - DNA, 25 bp, Artificial
  Probe
tgctaaaggagagaagtttgtcatg

SEQ ID NO: 105741 - DNA, 25 bp, Artificial
  Probe
ctaccatctacttctcaccagccaa

SEQ ID NO: 105742 - DNA, 25 bp, Artificial
  Probe
aacttgaagagatacctgaagtctg

SEQ ID NO: 105743 - DNA, 25 bp, Artificial
  Probe
caacttgaagagatacctgaagtct

SEQ ID NO: 105744 - DNA, 25 bp, Artificial
  Probe
tcattagtgataaagatgcctcggt

SEQ ID NO: 105745 - DNA, 25 bp, Artificial
  Probe
atctacttctcaccagccaacaaga

SEQ ID NO: 105746 - DNA, 25 bp, Artificial
  Probe
ttgtgtgtggttagtaccttaggat

SEQ ID NO: 105747 - DNA, 25 bp, Artificial
  Probe
cttgtgtgtggttagtaccttagga

SEQ ID NO: 105748 - DNA, 25 bp, Artificial
  Probe
tgtgtgtggttagtaccttaggatg

SEQ ID NO: 105749 - DNA, 25 bp, Artificial
  Probe
attgttattgtggtttgctaagttt

SEQ ID NO: 105750 - DNA, 25 bp, Artificial
  Probe
accttgtgtgtggttagtaccttag

SEQ ID NO: 105751 - DNA, 25 bp, Artificial
  Probe
aattgttattgtggtttgctaagtt

SEQ ID NO: 105752 - DNA, 25 bp, Artificial
  Probe
aaattgttattgtggtttgctaagt

SEQ ID NO: 105753 - DNA, 25 bp, Artificial
  Probe
caccttgtgtgtggttagtacctta

SEQ ID NO: 105754 - DNA, 25 bp, Artificial
  Probe
gtgtgtggttagtaccttaggatgg

SEQ ID NO: 105755 - DNA, 25 bp, Artificial
  Probe
ccttgtgtgtggttagtaccttagg

SEQ ID NO: 105756 - DNA, 25 bp, Artificial
  Probe
ccaatgtgacctggcttacactatg

SEQ ID NO: 105757 - DNA, 25 bp, Artificial
  Probe
gtggttagtaccttaggatgggaaa

SEQ ID NO: 105758 - DNA, 25 bp, Artificial
  Probe
tatcttaaactaggtttggctctcc

SEQ ID NO: 105759 - DNA, 25 bp, Artificial
  Probe
atcttaaactaggtttggctctcca

SEQ ID NO: 105760 - DNA, 25 bp, Artificial
  Probe
caatgtgacctggcttacactatgc

SEQ ID NO: 105761 - DNA, 25 bp, Artificial
  Probe
ttatcttaaactaggtttggctctc

SEQ ID NO: 105762 - DNA, 25 bp, Artificial
  Probe
tgtggttagtaccttaggatgggaa

SEQ ID NO: 105763 - DNA, 25 bp, Artificial
  Probe
ttgttattgtggtttgctaagtttt

SEQ ID NO: 105764 - DNA, 25 bp, Artificial
  Probe
tttatcttaaactaggtttggctct

SEQ ID NO: 105765 - DNA, 25 bp, Artificial
  Probe
gtctctaatccctcagcttctttta

SEQ ID NO: 105766 - DNA, 25 bp, Artificial
  Probe
tggagcctccctacaacctttataa

SEQ ID NO: 105767 - DNA, 25 bp, Artificial
  Probe
gtgtggttagtaccttaggatggga

SEQ ID NO: 105768 - DNA, 25 bp, Artificial
  Probe
tgtgtggttagtaccttaggatggg

SEQ ID NO: 105769 - DNA, 25 bp, Artificial
  Probe
ttacactatgcctagggtctctaat

SEQ ID NO: 105770 - DNA, 25 bp, Artificial
  Probe
tggttagtaccttaggatgggaaaa

SEQ ID NO: 105771 - DNA, 25 bp, Artificial
  Probe
tacactatgcctagggtctctaatc

SEQ ID NO: 105772 - DNA, 25 bp, Artificial
  Probe
tttaaatggggtcgaaaatgtgtgt

SEQ ID NO: 105773 - DNA, 25 bp, Artificial
  Probe
cttacactatgcctagggtctctaa

SEQ ID NO: 105774 - DNA, 25 bp, Artificial
  Probe
tctctaatccctcagcttcttttag

SEQ ID NO: 105775 - DNA, 25 bp, Artificial
  Probe
gtggagcctccctacaacctttata

SEQ ID NO: 105776 - DNA, 25 bp, Artificial
  Probe
ggtctctaatccctcagcttctttt

SEQ ID NO: 105777 - DNA, 25 bp, Artificial
  Probe
ttaaatggggtcgaaaatgtgtgtc

SEQ ID NO: 105778 - DNA, 25 bp, Artificial
  Probe
ctcttttaaatggggtcgaaaatgt

SEQ ID NO: 105779 - DNA, 25 bp, Artificial
  Probe
caagctcttttaaatggggtcgaaa

SEQ ID NO: 105780 - DNA, 25 bp, Artificial
  Probe
tcttttaaatggggtcgaaaatgtg

SEQ ID NO: 105781 - DNA, 25 bp, Artificial
  Probe
cttttaaatggggtcgaaaatgtgt

SEQ ID NO: 105782 - DNA, 25 bp, Artificial
  Probe
ttttaaatggggtcgaaaatgtgtg

SEQ ID NO: 105783 - DNA, 25 bp, Artificial
  Probe
ggagcctccctacaacctttataaa

SEQ ID NO: 105784 - DNA, 25 bp, Artificial
  Probe
gctcttttaaatggggtcgaaaatg

SEQ ID NO: 105785 - DNA, 25 bp, Artificial
  Probe
agctcttttaaatggggtcgaaaat

SEQ ID NO: 105786 - DNA, 25 bp, Artificial
  Probe
aagctcttttaaatggggtcgaaaa

SEQ ID NO: 105787 - DNA, 25 bp, Artificial
  Probe
cttaaactaggtttggctctccaag

SEQ ID NO: 105788 - DNA, 25 bp, Artificial
  Probe
taaatggggtcgaaaatgtgtgtct

SEQ ID NO: 105789 - DNA, 25 bp, Artificial
  Probe
tcttaaactaggtttggctctccaa

SEQ ID NO: 105790 - DNA, 25 bp, Artificial
  Probe
cccaatgtgacctggcttacactat

SEQ ID NO: 105791 - DNA, 25 bp, Artificial
  Probe
catcctgtttggcatctatttcttt

SEQ ID NO: 105792 - DNA, 25 bp, Artificial
  Probe
atgcttctgatttagtaatgctgtg

SEQ ID NO: 105793 - DNA, 25 bp, Artificial
  Probe
tgcttctgatttagtaatgctgtga

SEQ ID NO: 105794 - DNA, 25 bp, Artificial
  Probe
ctatgaccagtcttaccagtacctg

SEQ ID NO: 105795 - DNA, 25 bp, Artificial
  Probe
gtcctatgaccagtcttaccagtac

SEQ ID NO: 105796 - DNA, 25 bp, Artificial
  Probe
ggaaactgtgaatgcttctgattta

SEQ ID NO: 105797 - DNA, 25 bp, Artificial
  Probe
cctatgaccagtcttaccagtacct

SEQ ID NO: 105798 - DNA, 25 bp, Artificial
  Probe
tcctatgaccagtcttaccagtacc

SEQ ID NO: 105799 - DNA, 25 bp, Artificial
  Probe
gcttctgatttagtaatgctgtgaa

SEQ ID NO: 105800 - DNA, 25 bp, Artificial
  Probe
aatgcttctgatttagtaatgctgt

SEQ ID NO: 105801 - DNA, 25 bp, Artificial
  Probe
gtgaatgcttctgatttagtaatgc

SEQ ID NO: 105802 - DNA, 25 bp, Artificial
  Probe
tgaatgcttctgatttagtaatgct

SEQ ID NO: 105803 - DNA, 25 bp, Artificial
  Probe
gaaactgtgaatgcttctgatttag

SEQ ID NO: 105804 - DNA, 25 bp, Artificial
  Probe
gaatgcttctgatttagtaatgctg

SEQ ID NO: 105805 - DNA, 25 bp, Artificial
  Probe
aaactgtgaatgcttctgatttagt

SEQ ID NO: 105806 - DNA, 25 bp, Artificial
  Probe
actgtgaatgcttctgatttagtaa

SEQ ID NO: 105807 - DNA, 25 bp, Artificial
  Probe
aactgtgaatgcttctgatttagta

SEQ ID NO: 105808 - DNA, 25 bp, Artificial
  Probe
gggaaactgtgaatgcttctgattt

SEQ ID NO: 105809 - DNA, 25 bp, Artificial
  Probe
tgtgaatgcttctgatttagtaatg

SEQ ID NO: 105810 - DNA, 25 bp, Artificial
  Probe
cttctgatttagtaatgctgtgaat

SEQ ID NO: 105811 - DNA, 25 bp, Artificial
  Probe
ctgtgaatgcttctgatttagtaat

SEQ ID NO: 105812 - DNA, 25 bp, Artificial
  Probe
agggaaactgtgaatgcttctgatt

SEQ ID NO: 105813 - DNA, 25 bp, Artificial
  Probe
ccatcctgtttggcatctatttctt

SEQ ID NO: 105814 - DNA, 25 bp, Artificial
  Probe
taaccacgttgtttattccaaagag

SEQ ID NO: 105815 - DNA, 25 bp, Artificial
  Probe
ttaaccacgttgtttattccaaaga

SEQ ID NO: 105816 - DNA, 25 bp, Artificial
  Probe
gagggaaactgtgaatgcttctgat

SEQ ID NO: 105817 - DNA, 25 bp, Artificial
  Probe
tttaaccacgttgtttattccaaag

SEQ ID NO: 105818 - DNA, 25 bp, Artificial
  Probe
aaccacgttgtttattccaaagagt

SEQ ID NO: 105819 - DNA, 25 bp, Artificial
  Probe
atttcttttccgcaccttattgatt

SEQ ID NO: 105820 - DNA, 25 bp, Artificial
  Probe
tcctgtttggcatctatttcttttc

SEQ ID NO: 105821 - DNA, 25 bp, Artificial
  Probe
ctatttcttttccgcaccttattga

SEQ ID NO: 105822 - DNA, 25 bp, Artificial
  Probe
tctatttcttttccgcaccttattg

SEQ ID NO: 105823 - DNA, 25 bp, Artificial
  Probe
tttcttttccgcaccttattgattg

SEQ ID NO: 105824 - DNA, 25 bp, Artificial
  Probe
catctatttcttttccgcaccttat

SEQ ID NO: 105825 - DNA, 25 bp, Artificial
  Probe
cctgtttggcatctatttcttttcc

SEQ ID NO: 105826 - DNA, 25 bp, Artificial
  Probe
taccatagagccatcaaaatcacag

SEQ ID NO: 105827 - DNA, 25 bp, Artificial
  Probe
ctaccatagagccatcaaaatcaca

SEQ ID NO: 105828 - DNA, 25 bp, Artificial
  Probe
ctctgaccatcaccgtctttacaaa

SEQ ID NO: 105829 - DNA, 25 bp, Artificial
  Probe
atcctgtttggcatctatttctttt

SEQ ID NO: 105830 - DNA, 25 bp, Artificial
  Probe
ctgtttggcatctatttcttttccg

SEQ ID NO: 105831 - DNA, 25 bp, Artificial
  Probe
tatttcttttccgcaccttattgat

SEQ ID NO: 105832 - DNA, 25 bp, Artificial
  Probe
ttaaccctcagcctcaaagtcagat

SEQ ID NO: 105833 - DNA, 25 bp, Artificial
  Probe
atctatttcttttccgcaccttatt

SEQ ID NO: 105834 - DNA, 25 bp, Artificial
  Probe
cctaccatagagccatcaaaatcac

SEQ ID NO: 105835 - DNA, 25 bp, Artificial
  Probe
cacctaccatagagccatcaaaatc

SEQ ID NO: 105836 - DNA, 25 bp, Artificial
  Probe
ctcttgtcctgtatagcaacctatt

SEQ ID NO: 105837 - DNA, 25 bp, Artificial
  Probe
ccacagacacgaataatatccaggt

SEQ ID NO: 105838 - DNA, 25 bp, Artificial
  Probe
cctcttgtcctgtatagcaacctat

SEQ ID NO: 105839 - DNA, 25 bp, Artificial
  Probe
gacacgaataatatccaggtggtat

SEQ ID NO: 105840 - DNA, 25 bp, Artificial
  Probe
acacgaataatatccaggtggtatt

SEQ ID NO: 105841 - DNA, 25 bp, Artificial
  Probe
ttgtactgacctcttgtcctgtata

SEQ ID NO: 105842 - DNA, 25 bp, Artificial
  Probe
agacacgaataatatccaggtggta

SEQ ID NO: 105843 - DNA, 25 bp, Artificial
  Probe
tgtactgacctcttgtcctgtatag

SEQ ID NO: 105844 - DNA, 25 bp, Artificial
  Probe
cacagacacgaataatatccaggtg

SEQ ID NO: 105845 - DNA, 25 bp, Artificial
  Probe
tgccacagacacgaataatatccag

SEQ ID NO: 105846 - DNA, 25 bp, Artificial
  Probe
acctcttgtcctgtatagcaaccta

SEQ ID NO: 105847 - DNA, 25 bp, Artificial
  Probe
actcaccatttcatccatatttcct

SEQ ID NO: 105848 - DNA, 25 bp, Artificial
  Probe
cttgtactgacctcttgtcctgtat

SEQ ID NO: 105849 - DNA, 25 bp, Artificial
  Probe
ttggcgagaagattaagaagtcacc

SEQ ID NO: 105850 - DNA, 25 bp, Artificial
  Probe
aactcaccatttcatccatatttcc

SEQ ID NO: 105851 - DNA, 25 bp, Artificial
  Probe
ctcaccatttcatccatatttcctt

SEQ ID NO: 105852 - DNA, 25 bp, Artificial
  Probe
tactgacctcttgtcctgtatagca

SEQ ID NO: 105853 - DNA, 25 bp, Artificial
  Probe
gtactgacctcttgtcctgtatagc

SEQ ID NO: 105854 - DNA, 25 bp, Artificial
  Probe
tcaccatttcatccatatttccttt

SEQ ID NO: 105855 - DNA, 25 bp, Artificial
  Probe
cagacacgaataatatccaggtggt

SEQ ID NO: 105856 - DNA, 25 bp, Artificial
  Probe
acagacacgaataatatccaggtgg

SEQ ID NO: 105857 - DNA, 25 bp, Artificial
  Probe
tttggcgagaagattaagaagtcac

SEQ ID NO: 105858 - DNA, 25 bp, Artificial
  Probe
gagaagattaagaagtcacccttga

SEQ ID NO: 105859 - DNA, 25 bp, Artificial
  Probe
ctttggcgagaagattaagaagtca

SEQ ID NO: 105860 - DNA, 25 bp, Artificial
  Probe
cgagaagattaagaagtcacccttg

SEQ ID NO: 105861 - DNA, 25 bp, Artificial
  Probe
gccacagacacgaataatatccagg

SEQ ID NO: 105862 - DNA, 25 bp, Artificial
  Probe
cttgaccatctgctttcctgaatac

SEQ ID NO: 105863 - DNA, 25 bp, Artificial
  Probe
ctgacctcttgtcctgtatagcaac

SEQ ID NO: 105864 - DNA, 25 bp, Artificial
  Probe
ttgtgccacagacacgaataatatc

SEQ ID NO: 105865 - DNA, 25 bp, Artificial
  Probe
cttgtgccacagacacgaataatat

SEQ ID NO: 105866 - DNA, 25 bp, Artificial
  Probe
tcctgtatagcaacctatttgactg

SEQ ID NO: 105867 - DNA, 25 bp, Artificial
  Probe
ttgtcctgtatagcaacctatttga

SEQ ID NO: 105868 - DNA, 25 bp, Artificial
  Probe
cttgtcctgtatagcaacctatttg

SEQ ID NO: 105869 - DNA, 25 bp, Artificial
  Probe
tcttgtcctgtatagcaacctattt

SEQ ID NO: 105870 - DNA, 25 bp, Artificial
  Probe
gtcctgtatagcaacctatttgact

SEQ ID NO: 105871 - DNA, 25 bp, Artificial
  Probe
tgtcctgtatagcaacctatttgac

SEQ ID NO: 105872 - DNA, 25 bp, Artificial
  Probe
actgacctcttgtcctgtatagcaa

SEQ ID NO: 105873 - DNA, 25 bp, Artificial
  Probe
aaactcaccatttcatccatatttc

SEQ ID NO: 105874 - DNA, 25 bp, Artificial
  Probe
tatttgactgcttcatggactcttt

SEQ ID NO: 105875 - DNA, 25 bp, Artificial
  Probe
gtgccacagacacgaataatatcca

SEQ ID NO: 105876 - DNA, 25 bp, Artificial
  Probe
ctatttgactgcttcatggactctt

SEQ ID NO: 105877 - DNA, 25 bp, Artificial
  Probe
ccttgaccatctgctttcctgaata

SEQ ID NO: 105878 - DNA, 25 bp, Artificial
  Probe
gacatcatcattgccaacaatctcc

SEQ ID NO: 105879 - DNA, 25 bp, Artificial
  Probe
gcgagaagattaagaagtcaccctt

SEQ ID NO: 105880 - DNA, 25 bp, Artificial
  Probe
ttgaccatctgctttcctgaatacc

SEQ ID NO: 105881 - DNA, 25 bp, Artificial
  Probe
atctacggatgcttatctgaaggtc

SEQ ID NO: 105882 - DNA, 25 bp, Artificial
  Probe
ctacggatgcttatctgaaggtctt

SEQ ID NO: 105883 - DNA, 25 bp, Artificial
  Probe
tacggatgcttatctgaaggtcttc

SEQ ID NO: 105884 - DNA, 25 bp, Artificial
  Probe
tctacggatgcttatctgaaggtct

SEQ ID NO: 105885 - DNA, 25 bp, Artificial
  Probe
cggatgcttatctgaaggtcttctt

SEQ ID NO: 105886 - DNA, 25 bp, Artificial
  Probe
gatgcttatctgaaggtcttctttg

SEQ ID NO: 105887 - DNA, 25 bp, Artificial
  Probe
ggatgcttatctgaaggtcttcttt

SEQ ID NO: 105888 - DNA, 25 bp, Artificial
  Probe
atgcttatctgaaggtcttctttgg

SEQ ID NO: 105889 - DNA, 25 bp, Artificial
  Probe
cttatctgaaggtcttctttggtgg

SEQ ID NO: 105890 - DNA, 25 bp, Artificial
  Probe
gcttatctgaaggtcttctttggtg

SEQ ID NO: 105891 - DNA, 25 bp, Artificial
  Probe
tacatcacatctacggatgcttatc

SEQ ID NO: 105892 - DNA, 25 bp, Artificial
  Probe
acggatgcttatctgaaggtcttct

SEQ ID NO: 105893 - DNA, 25 bp, Artificial
  Probe
tgcttatctgaaggtcttctttggt

SEQ ID NO: 105894 - DNA, 25 bp, Artificial
  Probe
cacatctacggatgcttatctgaag

SEQ ID NO: 105895 - DNA, 25 bp, Artificial
  Probe
atcacatctacggatgcttatctga

SEQ ID NO: 105896 - DNA, 25 bp, Artificial
  Probe
catcacatctacggatgcttatctg

SEQ ID NO: 105897 - DNA, 25 bp, Artificial
  Probe
tcacatctacggatgcttatctgaa

SEQ ID NO: 105898 - DNA, 25 bp, Artificial
  Probe
acatcacatctacggatgcttatct

SEQ ID NO: 105899 - DNA, 25 bp, Artificial
  Probe
gagtgacaagatggactttgggaat

SEQ ID NO: 105900 - DNA, 25 bp, Artificial
  Probe
catctacggatgcttatctgaaggt

SEQ ID NO: 105901 - DNA, 25 bp, Artificial
  Probe
acatctacggatgcttatctgaagg

SEQ ID NO: 105902 - DNA, 25 bp, Artificial
  Probe
ttatctgaaggtcttctttggtggc

SEQ ID NO: 105903 - DNA, 25 bp, Artificial
  Probe
gcagtataaaattcatctaccaggc

SEQ ID NO: 105904 - DNA, 25 bp, Artificial
  Probe
acggcagtataaaattcatctacca

SEQ ID NO: 105905 - DNA, 25 bp, Artificial
  Probe
cacggcagtataaaattcatctacc

SEQ ID NO: 105906 - DNA, 25 bp, Artificial
  Probe
ccacggcagtataaaattcatctac

SEQ ID NO: 105907 - DNA, 25 bp, Artificial
  Probe
cggcagtataaaattcatctaccag

SEQ ID NO: 105908 - DNA, 25 bp, Artificial
  Probe
ggcagtataaaattcatctaccagg

SEQ ID NO: 105909 - DNA, 25 bp, Artificial
  Probe
gtgtagtagcacatgccttcaatcc

SEQ ID NO: 105910 - DNA, 25 bp, Artificial
  Probe
ggtgtagtagcacatgccttcaatc

SEQ ID NO: 105911 - DNA, 25 bp, Artificial
  Probe
aagtctggtttccatgaggtgaatt

SEQ ID NO: 105912 - DNA, 25 bp, Artificial
  Probe
acctatctcaataaaagcaaacaac

SEQ ID NO: 105913 - DNA, 25 bp, Artificial
  Probe
agacctatctcaataaaagcaaaca

SEQ ID NO: 105914 - DNA, 25 bp, Artificial
  Probe
gacctatctcaataaaagcaaacaa

SEQ ID NO: 105915 - DNA, 25 bp, Artificial
  Probe
tctggtttccatgaggtgaattgtc

SEQ ID NO: 105916 - DNA, 25 bp, Artificial
  Probe
agtctggtttccatgaggtgaattg

SEQ ID NO: 105917 - DNA, 25 bp, Artificial
  Probe
caagtctggtttccatgaggtgaat

SEQ ID NO: 105918 - DNA, 25 bp, Artificial
  Probe
aattcatctaccaggccaattgctt

SEQ ID NO: 105919 - DNA, 25 bp, Artificial
  Probe
ctgagagttgggtgtagtagcacat

SEQ ID NO: 105920 - DNA, 25 bp, Artificial
  Probe
gtctggtttccatgaggtgaattgt

SEQ ID NO: 105921 - DNA, 25 bp, Artificial
  Probe
attcatctaccaggccaattgcttg

SEQ ID NO: 105922 - DNA, 25 bp, Artificial
  Probe
ggagtgacaagatggactttgggaa

SEQ ID NO: 105923 - DNA, 25 bp, Artificial
  Probe
tagtagcacatgccttcaatcccag

SEQ ID NO: 105924 - DNA, 25 bp, Artificial
  Probe
catgcctgagagttgggtgtagtag

SEQ ID NO: 105925 - DNA, 25 bp, Artificial
  Probe
ctcgtggagtgacaagatggacttt

SEQ ID NO: 105926 - DNA, 25 bp, Artificial
  Probe
gaaggaacactcactgaatctcatt

SEQ ID NO: 105927 - DNA, 25 bp, Artificial
  Probe
ctcactgaatctcattgtcctcatc

SEQ ID NO: 105928 - DNA, 25 bp, Artificial
  Probe
aaggaacactcactgaatctcattg

SEQ ID NO: 105929 - DNA, 25 bp, Artificial
  Probe
actcactgaatctcattgtcctcat

SEQ ID NO: 105930 - DNA, 25 bp, Artificial
  Probe
aaggaaggaacactcactgaatctc

SEQ ID NO: 105931 - DNA, 25 bp, Artificial
  Probe
gaaggaaggaacactcactgaatct

SEQ ID NO: 105932 - DNA, 25 bp, Artificial
  Probe
cctcatcgtggacagatagcattaa

SEQ ID NO: 105933 - DNA, 25 bp, Artificial
  Probe
gaacactcactgaatctcattgtcc

SEQ ID NO: 105934 - DNA, 25 bp, Artificial
  Probe
ggaacactcactgaatctcattgtc

SEQ ID NO: 105935 - DNA, 25 bp, Artificial
  Probe
ttgaaggaaggaacactcactgaat

SEQ ID NO: 105936 - DNA, 25 bp, Artificial
  Probe
cactcactgaatctcattgtcctca

SEQ ID NO: 105937 - DNA, 25 bp, Artificial
  Probe
ggaaggaacactcactgaatctcat

SEQ ID NO: 105938 - DNA, 25 bp, Artificial
  Probe
ctcatcttgaaggaaggaacactca

SEQ ID NO: 105939 - DNA, 25 bp, Artificial
  Probe
aacactcactgaatctcattgtcct

SEQ ID NO: 105940 - DNA, 25 bp, Artificial
  Probe
aggaacactcactgaatctcattgt

SEQ ID NO: 105941 - DNA, 25 bp, Artificial
  Probe
tcactgaatctcattgtcctcatcg

SEQ ID NO: 105942 - DNA, 25 bp, Artificial
  Probe
tgaaggaaggaacactcactgaatc

SEQ ID NO: 105943 - DNA, 25 bp, Artificial
  Probe
atcttgaaggaaggaacactcactg

SEQ ID NO: 105944 - DNA, 25 bp, Artificial
  Probe
catcttgaaggaaggaacactcact

SEQ ID NO: 105945 - DNA, 25 bp, Artificial
  Probe
tcatcttgaaggaaggaacactcac

SEQ ID NO: 105946 - DNA, 25 bp, Artificial
  Probe
acactcactgaatctcattgtcctc

SEQ ID NO: 105947 - DNA, 25 bp, Artificial
  Probe
ctcatcgtggacagatagcattaaa

SEQ ID NO: 105948 - DNA, 25 bp, Artificial
  Probe
actgaatctcattgtcctcatcgtg

SEQ ID NO: 105949 - DNA, 25 bp, Artificial
  Probe
cactgaatctcattgtcctcatcgt

SEQ ID NO: 105950 - DNA, 25 bp, Artificial
  Probe
cttgaaggaaggaacactcactgaa

SEQ ID NO: 105951 - DNA, 25 bp, Artificial
  Probe
atacagctcatcttgaaggaaggaa

SEQ ID NO: 105952 - DNA, 25 bp, Artificial
  Probe
aatacagctcatcttgaaggaagga

SEQ ID NO: 105953 - DNA, 25 bp, Artificial
  Probe
taactttccacacctgatatttcac

SEQ ID NO: 105954 - DNA, 25 bp, Artificial
  Probe
aggaaggaacactcactgaatctca

SEQ ID NO: 105955 - DNA, 25 bp, Artificial
  Probe
aactttccacacctgatatttcacg

SEQ ID NO: 105956 - DNA, 25 bp, Artificial
  Probe
ctgaatctcattgtcctcatcgtgg

SEQ ID NO: 105957 - DNA, 25 bp, Artificial
  Probe
tacagctcatcttgaaggaaggaac

SEQ ID NO: 105958 - DNA, 25 bp, Artificial
  Probe
ctgatatttcacgggctgtttacaa

SEQ ID NO: 105959 - DNA, 25 bp, Artificial
  Probe
tcttgaaggaaggaacactcactga

SEQ ID NO: 105960 - DNA, 25 bp, Artificial
  Probe
gctcatcttgaaggaaggaacactc

SEQ ID NO: 105961 - DNA, 25 bp, Artificial
  Probe
tgatatttcacgggctgtttacaac

SEQ ID NO: 105962 - DNA, 25 bp, Artificial
  Probe
tcctcatcgtggacagatagcatta

SEQ ID NO: 105963 - DNA, 25 bp, Artificial
  Probe
cactcacagcccacttacatttaaa

SEQ ID NO: 105964 - DNA, 25 bp, Artificial
  Probe
aaatacagctcatcttgaaggaagg

SEQ ID NO: 105965 - DNA, 25 bp, Artificial
  Probe
taaatacagctcatcttgaaggaag

SEQ ID NO: 105966 - DNA, 25 bp, Artificial
  Probe
gcaataaatacagctcatcttgaag

SEQ ID NO: 105967 - DNA, 25 bp, Artificial
  Probe
tgaatctcattgtcctcatcgtgga

SEQ ID NO: 105968 - DNA, 25 bp, Artificial
  Probe
tattcaggggtttattatccagtcc

SEQ ID NO: 105969 - DNA, 25 bp, Artificial
  Probe
actttccacacctgatatttcacgg

SEQ ID NO: 105970 - DNA, 25 bp, Artificial
  Probe
caataaatacagctcatcttgaagg

SEQ ID NO: 105971 - DNA, 25 bp, Artificial
  Probe
ctctccagtcaagcaagaactcatt

SEQ ID NO: 105972 - DNA, 25 bp, Artificial
  Probe
ttgttaagttcccatctagcctcta

SEQ ID NO: 105973 - DNA, 25 bp, Artificial
  Probe
ataccttgttaagttcccatctagc

SEQ ID NO: 105974 - DNA, 25 bp, Artificial
  Probe
aatgaagaatcagaaaggcaaagtg

SEQ ID NO: 105975 - DNA, 25 bp, Artificial
  Probe
aaatgaagaatcagaaaggcaaagt

SEQ ID NO: 105976 - DNA, 25 bp, Artificial
  Probe
atctagcctctacctaccaaacttc

SEQ ID NO: 105977 - DNA, 25 bp, Artificial
  Probe
tctccagtcaagcaagaactcattg

SEQ ID NO: 105978 - DNA, 25 bp, Artificial
  Probe
taagttcccatctagcctctaccta

SEQ ID NO: 105979 - DNA, 25 bp, Artificial
  Probe
atgaagaatcagaaaggcaaagtga

SEQ ID NO: 105980 - DNA, 25 bp, Artificial
  Probe
catctagcctctacctaccaaactt

SEQ ID NO: 105981 - DNA, 25 bp, Artificial
  Probe
tgttaagttcccatctagcctctac

SEQ ID NO: 105982 - DNA, 25 bp, Artificial
  Probe
tagcctctacctaccaaacttctct

SEQ ID NO: 105983 - DNA, 25 bp, Artificial
  Probe
cataccttgttaagttcccatctag

SEQ ID NO: 105984 - DNA, 25 bp, Artificial
  Probe
ctagcctctacctaccaaacttctc

SEQ ID NO: 105985 - DNA, 25 bp, Artificial
  Probe
acataccttgttaagttcccatcta

SEQ ID NO: 105986 - DNA, 25 bp, Artificial
  Probe
tctagcctctacctaccaaacttct

SEQ ID NO: 105987 - DNA, 25 bp, Artificial
  Probe
ttaagttcccatctagcctctacct

SEQ ID NO: 105988 - DNA, 25 bp, Artificial
  Probe
gttaagttcccatctagcctctacc

SEQ ID NO: 105989 - DNA, 25 bp, Artificial
  Probe
cttgttaagttcccatctagcctct

SEQ ID NO: 105990 - DNA, 25 bp, Artificial
  Probe
taccttgttaagttcccatctagcc

SEQ ID NO: 105991 - DNA, 25 bp, Artificial
  Probe
agcctctacctaccaaacttctctt

SEQ ID NO: 105992 - DNA, 25 bp, Artificial
  Probe
aagttcccatctagcctctacctac

SEQ ID NO: 105993 - DNA, 25 bp, Artificial
  Probe
gcctctacctaccaaacttctcttg

SEQ ID NO: 105994 - DNA, 25 bp, Artificial
  Probe
ccttgttaagttcccatctagcctc

SEQ ID NO: 105995 - DNA, 25 bp, Artificial
  Probe
ccatctagcctctacctaccaaact

SEQ ID NO: 105996 - DNA, 25 bp, Artificial
  Probe
gaagaatcagaaaggcaaagtgata

SEQ ID NO: 105997 - DNA, 25 bp, Artificial
  Probe
accttgttaagttcccatctagcct

SEQ ID NO: 105998 - DNA, 25 bp, Artificial
  Probe
cctctccagtcaagcaagaactcat

SEQ ID NO: 105999 - DNA, 25 bp, Artificial
  Probe
tgaagaatcagaaaggcaaagtgat

SEQ ID NO: 106000 - DNA, 25 bp, Artificial
  Probe
agaatcagaaaggcaaagtgatatt

SEQ ID NO: 106001 - DNA, 25 bp, Artificial
  Probe
aagaatcagaaaggcaaagtgatat

SEQ ID NO: 106002 - DNA, 25 bp, Artificial
  Probe
ggcaaagtgatattttcaaggtcat

SEQ ID NO: 106003 - DNA, 25 bp, Artificial
  Probe
aaggcaaagtgatattttcaaggtc

SEQ ID NO: 106004 - DNA, 25 bp, Artificial
  Probe
gaatctgtttgccaagacttttgaa

SEQ ID NO: 106005 - DNA, 25 bp, Artificial
  Probe
aaaggcaaagtgatattttcaaggt

SEQ ID NO: 106006 - DNA, 25 bp, Artificial
  Probe
aatctgtttgccaagacttttgaac

SEQ ID NO: 106007 - DNA, 25 bp, Artificial
  Probe
aggcaaagtgatattttcaaggtca

SEQ ID NO: 106008 - DNA, 25 bp, Artificial
  Probe
cccatctagcctctacctaccaaac

SEQ ID NO: 106009 - DNA, 25 bp, Artificial
  Probe
aaaatgaagaatcagaaaggcaaag

SEQ ID NO: 106010 - DNA, 25 bp, Artificial
  Probe
gaatcagaaaggcaaagtgatattt

SEQ ID NO: 106011 - DNA, 25 bp, Artificial
  Probe
atctgtttgccaagacttttgaact

SEQ ID NO: 106012 - DNA, 25 bp, Artificial
  Probe
tcccatctagcctctacctaccaaa

SEQ ID NO: 106013 - DNA, 25 bp, Artificial
  Probe
ttcccatctagcctctacctaccaa

SEQ ID NO: 106014 - DNA, 25 bp, Artificial
  Probe
cttttgaactcaatgtcctgacttt

SEQ ID NO: 106015 - DNA, 25 bp, Artificial
  Probe
aacataccttgttaagttcccatct

SEQ ID NO: 106016 - DNA, 25 bp, Artificial
  Probe
attacttgtctgacttgtcgtagtg

SEQ ID NO: 106017 - DNA, 25 bp, Artificial
  Probe
cattacttgtctgacttgtcgtagt

SEQ ID NO: 106018 - DNA, 25 bp, Artificial
  Probe
aacattacttgtctgacttgtcgta

SEQ ID NO: 106019 - DNA, 25 bp, Artificial
  Probe
acattacttgtctgacttgtcgtag

SEQ ID NO: 106020 - DNA, 25 bp, Artificial
  Probe
ttacttgtctgacttgtcgtagtgg

SEQ ID NO: 106021 - DNA, 25 bp, Artificial
  Probe
aattcagaagtcaggacaacgaact

SEQ ID NO: 106022 - DNA, 25 bp, Artificial
  Probe
attcagaagtcaggacaacgaactc

SEQ ID NO: 106023 - DNA, 25 bp, Artificial
  Probe
ctgactctgaactctgagaaatctt

SEQ ID NO: 106024 - DNA, 25 bp, Artificial
  Probe
tgactctgaactctgagaaatcttg

SEQ ID NO: 106025 - DNA, 25 bp, Artificial
  Probe
tctgactctgaactctgagaaatct

SEQ ID NO: 106026 - DNA, 25 bp, Artificial
  Probe
gactctgaactctgagaaatcttgg

SEQ ID NO: 106027 - DNA, 25 bp, Artificial
  Probe
gtctgactctgaactctgagaaatc

SEQ ID NO: 106028 - DNA, 25 bp, Artificial
  Probe
ctctgaactctgagaaatcttggtg

SEQ ID NO: 106029 - DNA, 25 bp, Artificial
  Probe
gtggattccgacaggatattctctg

SEQ ID NO: 106030 - DNA, 25 bp, Artificial
  Probe
actctgaactctgagaaatcttggt

SEQ ID NO: 106031 - DNA, 25 bp, Artificial
  Probe
aaacattacttgtctgacttgtcgt

SEQ ID NO: 106032 - DNA, 25 bp, Artificial
  Probe
gacaggatattctctgggttctttg

SEQ ID NO: 106033 - DNA, 25 bp, Artificial
  Probe
atcttggtgcctagccttctttatt

SEQ ID NO: 106034 - DNA, 25 bp, Artificial
  Probe
aatcttggtgcctagccttctttat

SEQ ID NO: 106035 - DNA, 25 bp, Artificial
  Probe
gaactctgagaaatcttggtgccta

SEQ ID NO: 106036 - DNA, 25 bp, Artificial
  Probe
tcttggtgcctagccttctttattt

SEQ ID NO: 106037 - DNA, 25 bp, Artificial
  Probe
aaatcttggtgcctagccttcttta

SEQ ID NO: 106038 - DNA, 25 bp, Artificial
  Probe
aactctgagaaatcttggtgcctag

SEQ ID NO: 106039 - DNA, 25 bp, Artificial
  Probe
agtctgactctgaactctgagaaat

SEQ ID NO: 106040 - DNA, 25 bp, Artificial
  Probe
tagtgggtttcttccttgttgacag

SEQ ID NO: 106041 - DNA, 25 bp, Artificial
  Probe
tattctctgggttctttgcatttct

SEQ ID NO: 106042 - DNA, 25 bp, Artificial
  Probe
atattctctgggttctttgcatttc

SEQ ID NO: 106043 - DNA, 25 bp, Artificial
  Probe
gatattctctgggttctttgcattt

SEQ ID NO: 106044 - DNA, 25 bp, Artificial
  Probe
gtagtgggtttcttccttgttgaca

SEQ ID NO: 106045 - DNA, 25 bp, Artificial
  Probe
cgacaggatattctctgggttcttt

SEQ ID NO: 106046 - DNA, 25 bp, Artificial
  Probe
ggatattctctgggttctttgcatt

SEQ ID NO: 106047 - DNA, 25 bp, Artificial
  Probe
tctgaactctgagaaatcttggtgc

SEQ ID NO: 106048 - DNA, 25 bp, Artificial
  Probe
gaattcagaagtcaggacaacgaac

SEQ ID NO: 106049 - DNA, 25 bp, Artificial
  Probe
ttcagaagtcaggacaacgaactca

SEQ ID NO: 106050 - DNA, 25 bp, Artificial
  Probe
tggattccgacaggatattctctgg

SEQ ID NO: 106051 - DNA, 25 bp, Artificial
  Probe
attctctgggttctttgcatttctg

SEQ ID NO: 106052 - DNA, 25 bp, Artificial
  Probe
aggatattctctgggttctttgcat

SEQ ID NO: 106053 - DNA, 25 bp, Artificial
  Probe
acaggatattctctgggttctttgc

SEQ ID NO: 106054 - DNA, 25 bp, Artificial
  Probe
tcagaagtcaggacaacgaactcag

SEQ ID NO: 106055 - DNA, 25 bp, Artificial
  Probe
cgtggattccgacaggatattctct

SEQ ID NO: 106056 - DNA, 25 bp, Artificial
  Probe
cttgtcgtagtgggtttcttccttg

SEQ ID NO: 106057 - DNA, 25 bp, Artificial
  Probe
gctagtggcattttattctttggat

SEQ ID NO: 106058 - DNA, 25 bp, Artificial
  Probe
gaaatcttggtgcctagccttcttt

SEQ ID NO: 106059 - DNA, 25 bp, Artificial
  Probe
ctgaactctgagaaatcttggtgcc

SEQ ID NO: 106060 - DNA, 25 bp, Artificial
  Probe
tgggtttcttccttgttgacagttg

SEQ ID NO: 106061 - DNA, 25 bp, Artificial
  Probe
tagatgacagtgatgattcaggaga

SEQ ID NO: 106062 - DNA, 25 bp, Artificial
  Probe
gtagatgacagtgatgattcaggag

SEQ ID NO: 106063 - DNA, 25 bp, Artificial
  Probe
ggtagatgacagtgatgattcagga

SEQ ID NO: 106064 - DNA, 25 bp, Artificial
  Probe
tatcaaggaggaggaggaagagaag

SEQ ID NO: 106065 - DNA, 25 bp, Artificial
  Probe
ctatcaaggaggaggaggaagagaa

SEQ ID NO: 106066 - DNA, 25 bp, Artificial
  Probe
agatgacagtgatgattcaggagac

SEQ ID NO: 106067 - DNA, 25 bp, Artificial
  Probe
gatgacagtgatgattcaggagaca

SEQ ID NO: 106068 - DNA, 25 bp, Artificial
  Probe
gatgtggaagaaagtgattgaagag

SEQ ID NO: 106069 - DNA, 25 bp, Artificial
  Probe
aaatgggtagatgacagtgatgatt

SEQ ID NO: 106070 - DNA, 25 bp, Artificial
  Probe
tgatgtggaagaaagtgattgaaga

SEQ ID NO: 106071 - DNA, 25 bp, Artificial
  Probe
aatgggtagatgacagtgatgattc

SEQ ID NO: 106072 - DNA, 25 bp, Artificial
  Probe
atgatgtggaagaaagtgattgaag

SEQ ID NO: 106073 - DNA, 25 bp, Artificial
  Probe
tgattgaagaggagcagtgtttatc

SEQ ID NO: 106074 - DNA, 25 bp, Artificial
  Probe
gtgattgaagaggagcagtgtttat

SEQ ID NO: 106075 - DNA, 25 bp, Artificial
  Probe
atgtggaagaaagtgattgaagagg

SEQ ID NO: 106076 - DNA, 25 bp, Artificial
  Probe
gtggaagaaagtgattgaagaggag

SEQ ID NO: 106077 - DNA, 25 bp, Artificial
  Probe
ctcagaacaaatccaggctatcaag

SEQ ID NO: 106078 - DNA, 25 bp, Artificial
  Probe
atgacagtgatgattcaggagacac

SEQ ID NO: 106079 - DNA, 25 bp, Artificial
  Probe
gaagaaagtgattgaagaggagcag

SEQ ID NO: 106080 - DNA, 25 bp, Artificial
  Probe
attgaagaggagcagtgtttatcag

SEQ ID NO: 106081 - DNA, 25 bp, Artificial
  Probe
gattgaagaggagcagtgtttatca

SEQ ID NO: 106082 - DNA, 25 bp, Artificial
  Probe
tgtggaagaaagtgattgaagagga

SEQ ID NO: 106083 - DNA, 25 bp, Artificial
  Probe
catgatgtggaagaaagtgattgaa

SEQ ID NO: 106084 - DNA, 25 bp, Artificial
  Probe
agtgattgaagaggagcagtgttta

SEQ ID NO: 106085 - DNA, 25 bp, Artificial
  Probe
atgggtagatgacagtgatgattca

SEQ ID NO: 106086 - DNA, 25 bp, Artificial
  Probe
tgtgtataaagttggctgacatcaa

SEQ ID NO: 106087 - DNA, 25 bp, Artificial
  Probe
aagaaagtgattgaagaggagcagt

SEQ ID NO: 106088 - DNA, 25 bp, Artificial
  Probe
atctactgtcaaataactcagcacc

SEQ ID NO: 106089 - DNA, 25 bp, Artificial
  Probe
tactgtcaaataactcagcaccttc

SEQ ID NO: 106090 - DNA, 25 bp, Artificial
  Probe
ctactgtcaaataactcagcacctt

SEQ ID NO: 106091 - DNA, 25 bp, Artificial
  Probe
aatctactgtcaaataactcagcac

SEQ ID NO: 106092 - DNA, 25 bp, Artificial
  Probe
gaatctactgtcaaataactcagca

SEQ ID NO: 106093 - DNA, 25 bp, Artificial
  Probe
tgggtagatgacagtgatgattcag

SEQ ID NO: 106094 - DNA, 25 bp, Artificial
  Probe
cagatgtgtataaagttggctgaca

SEQ ID NO: 106095 - DNA, 25 bp, Artificial
  Probe
aaagaaggagaatctactgtcaaat

SEQ ID NO: 106096 - DNA, 25 bp, Artificial
  Probe
tctactgtcaaataactcagcacct

SEQ ID NO: 106097 - DNA, 25 bp, Artificial
  Probe
agaatctactgtcaaataactcagc

SEQ ID NO: 106098 - DNA, 25 bp, Artificial
  Probe
tcagaacaaatccaggctatcaagg

SEQ ID NO: 106099 - DNA, 25 bp, Artificial
  Probe
ggagaatctactgtcaaataactca

SEQ ID NO: 106100 - DNA, 25 bp, Artificial
  Probe
acatgatgtggaagaaagtgattga

SEQ ID NO: 106101 - DNA, 25 bp, Artificial
  Probe
aagtgattgaagaggagcagtgttt

SEQ ID NO: 106102 - DNA, 25 bp, Artificial
  Probe
aaagtgattgaagaggagcagtgtt

SEQ ID NO: 106103 - DNA, 25 bp, Artificial
  Probe
aaggagaatctactgtcaaataact

SEQ ID NO: 106104 - DNA, 25 bp, Artificial
  Probe
agaaagtgattgaagaggagcagtg

SEQ ID NO: 106105 - DNA, 25 bp, Artificial
  Probe
ggaagaaagtgattgaagaggagca

SEQ ID NO: 106106 - DNA, 25 bp, Artificial
  Probe
cttctcagtctagtcttgcttcata

SEQ ID NO: 106107 - DNA, 25 bp, Artificial
  Probe
ttctcagtctagtcttgcttcataa

SEQ ID NO: 106108 - DNA, 25 bp, Artificial
  Probe
gcttctcagtctagtcttgcttcat

SEQ ID NO: 106109 - DNA, 25 bp, Artificial
  Probe
catctggattcctagtagagcttct

SEQ ID NO: 106110 - DNA, 25 bp, Artificial
  Probe
tcatctggattcctagtagagcttc

SEQ ID NO: 106111 - DNA, 25 bp, Artificial
  Probe
aagtgttggttgtttgggaaataaa

SEQ ID NO: 106112 - DNA, 25 bp, Artificial
  Probe
aaagtgttggttgtttgggaaataa

SEQ ID NO: 106113 - DNA, 25 bp, Artificial
  Probe
cagtcatctggattcctagtagagc

SEQ ID NO: 106114 - DNA, 25 bp, Artificial
  Probe
gcagtcatctggattcctagtagag

SEQ ID NO: 106115 - DNA, 25 bp, Artificial
  Probe
agtttccatcttgctttcttcctat

SEQ ID NO: 106116 - DNA, 25 bp, Artificial
  Probe
ataaagtgttggttgtttgggaaat

SEQ ID NO: 106117 - DNA, 25 bp, Artificial
  Probe
ttgctttcttcctataacttgatgc

SEQ ID NO: 106118 - DNA, 25 bp, Artificial
  Probe
gtcatctggattcctagtagagctt

SEQ ID NO: 106119 - DNA, 25 bp, Artificial
  Probe
tccatcttgctttcttcctataact

SEQ ID NO: 106120 - DNA, 25 bp, Artificial
  Probe
cataaagtgttggttgtttgggaaa

SEQ ID NO: 106121 - DNA, 25 bp, Artificial
  Probe
ctctgggctattatgggttactttc

SEQ ID NO: 106122 - DNA, 25 bp, Artificial
  Probe
gattcctagtagagcttctcagtct

SEQ ID NO: 106123 - DNA, 25 bp, Artificial
  Probe
atctggattcctagtagagcttctc

SEQ ID NO: 106124 - DNA, 25 bp, Artificial
  Probe
taaagtgttggttgtttgggaaata

SEQ ID NO: 106125 - DNA, 25 bp, Artificial
  Probe
tctctgggctattatgggttacttt

SEQ ID NO: 106126 - DNA, 25 bp, Artificial
  Probe
ttctctgggctattatgggttactt

SEQ ID NO: 106127 - DNA, 25 bp, Artificial
  Probe
ttgcttcataaagtgttggttgttt

SEQ ID NO: 106128 - DNA, 25 bp, Artificial
  Probe
ctgggctattatgggttactttcat

SEQ ID NO: 106129 - DNA, 25 bp, Artificial
  Probe
tagtcttgcttcataaagtgttggt

SEQ ID NO: 106130 - DNA, 25 bp, Artificial
  Probe
cagtttccatcttgctttcttccta

SEQ ID NO: 106131 - DNA, 25 bp, Artificial
  Probe
cttgcttcataaagtgttggttgtt

SEQ ID NO: 106132 - DNA, 25 bp, Artificial
  Probe
tctgggctattatgggttactttca

SEQ ID NO: 106133 - DNA, 25 bp, Artificial
  Probe
ccatcttgctttcttcctataactt

SEQ ID NO: 106134 - DNA, 25 bp, Artificial
  Probe
ttccatcttgctttcttcctataac

SEQ ID NO: 106135 - DNA, 25 bp, Artificial
  Probe
gtttccatcttgctttcttcctata

SEQ ID NO: 106136 - DNA, 25 bp, Artificial
  Probe
tcataaagtgttggttgtttgggaa

SEQ ID NO: 106137 - DNA, 25 bp, Artificial
  Probe
ttcataaagtgttggttgtttggga

SEQ ID NO: 106138 - DNA, 25 bp, Artificial
  Probe
tgcttcataaagtgttggttgtttg

SEQ ID NO: 106139 - DNA, 25 bp, Artificial
  Probe
tttccagtttccatcttgctttctt

SEQ ID NO: 106140 - DNA, 25 bp, Artificial
  Probe
cttcataaagtgttggttgtttggg

SEQ ID NO: 106141 - DNA, 25 bp, Artificial
  Probe
gtcttgcttcataaagtgttggttg

SEQ ID NO: 106142 - DNA, 25 bp, Artificial
  Probe
agtcttgcttcataaagtgttggtt

SEQ ID NO: 106143 - DNA, 25 bp, Artificial
  Probe
tctcagtctagtcttgcttcataaa

SEQ ID NO: 106144 - DNA, 25 bp, Artificial
  Probe
ggattcctagtagagcttctcagtc

SEQ ID NO: 106145 - DNA, 25 bp, Artificial
  Probe
tacacacaagacctcaacaagtttc

SEQ ID NO: 106146 - DNA, 25 bp, Artificial
  Probe
ctagtcttgcttcataaagtgttgg

SEQ ID NO: 106147 - DNA, 25 bp, Artificial
  Probe
agtcatctggattcctagtagagct

SEQ ID NO: 106148 - DNA, 25 bp, Artificial
  Probe
agtctagtcttgcttcataaagtgt

SEQ ID NO: 106149 - DNA, 25 bp, Artificial
  Probe
tcttgcttcataaagtgttggttgt

SEQ ID NO: 106150 - DNA, 25 bp, Artificial
  Probe
cagtctagtcttgcttcataaagtg

SEQ ID NO: 106151 - DNA, 25 bp, Artificial
  Probe
tatagaggcatgaggaacattcatt

SEQ ID NO: 106152 - DNA, 25 bp, Artificial
  Probe
atagaggcatgaggaacattcattc

SEQ ID NO: 106153 - DNA, 25 bp, Artificial
  Probe
cctatagaggcatgaggaacattca

SEQ ID NO: 106154 - DNA, 25 bp, Artificial
  Probe
ctatagaggcatgaggaacattcat

SEQ ID NO: 106155 - DNA, 25 bp, Artificial
  Probe
gacatgatggtggtttacaggctaa

SEQ ID NO: 106156 - DNA, 25 bp, Artificial
  Probe
gagagacatgatggtggtttacagg

SEQ ID NO: 106157 - DNA, 25 bp, Artificial
  Probe
ggagagacatgatggtggtttacag

SEQ ID NO: 106158 - DNA, 25 bp, Artificial
  Probe
caacccaacgacaaaactaatatcc

SEQ ID NO: 106159 - DNA, 25 bp, Artificial
  Probe
aacccaacgacaaaactaatatcca

SEQ ID NO: 106160 - DNA, 25 bp, Artificial
  Probe
acccaacgacaaaactaatatccag

SEQ ID NO: 106161 - DNA, 25 bp, Artificial
  Probe
gcaacccaacgacaaaactaatatc

SEQ ID NO: 106162 - DNA, 25 bp, Artificial
  Probe
agcaacccaacgacaaaactaatat

SEQ ID NO: 106163 - DNA, 25 bp, Artificial
  Probe
acatgatggtggtttacaggctaac

SEQ ID NO: 106164 - DNA, 25 bp, Artificial
  Probe
caacgacaaaactaatatccagggg

SEQ ID NO: 106165 - DNA, 25 bp, Artificial
  Probe
ccaacgacaaaactaatatccaggg

SEQ ID NO: 106166 - DNA, 25 bp, Artificial
  Probe
cccaacgacaaaactaatatccagg

SEQ ID NO: 106167 - DNA, 25 bp, Artificial
  Probe
caaagtgacatagatcagcctgctt

SEQ ID NO: 106168 - DNA, 25 bp, Artificial
  Probe
atgaaggagcaactagtggagatga

SEQ ID NO: 106169 - DNA, 25 bp, Artificial
  Probe
catgaaggagcaactagtggagatg

SEQ ID NO: 106170 - DNA, 25 bp, Artificial
  Probe
agacatgatggtggtttacaggcta

SEQ ID NO: 106171 - DNA, 25 bp, Artificial
  Probe
cagcaacccaacgacaaaactaata

SEQ ID NO: 106172 - DNA, 25 bp, Artificial
  Probe
aaagtgacatagatcagcctgcttt

SEQ ID NO: 106173 - DNA, 25 bp, Artificial
  Probe
caacagcatggtagccagtcctata

SEQ ID NO: 106174 - DNA, 25 bp, Artificial
  Probe
tcatgaaggagcaactagtggagat

SEQ ID NO: 106175 - DNA, 25 bp, Artificial
  Probe
aacagcatggtagccagtcctatag

SEQ ID NO: 106176 - DNA, 25 bp, Artificial
  Probe
aaacaagaggtgcaaggacaagaaa

SEQ ID NO: 106177 - DNA, 25 bp, Artificial
  Probe
cagcatggtagccagtcctatagag

SEQ ID NO: 106178 - DNA, 25 bp, Artificial
  Probe
tcctatagaggcatgaggaacattc

SEQ ID NO: 106179 - DNA, 25 bp, Artificial
  Probe
tgaaggagcaactagtggagatgac

SEQ ID NO: 106180 - DNA, 25 bp, Artificial
  Probe
gtcctatagaggcatgaggaacatt

SEQ ID NO: 106181 - DNA, 25 bp, Artificial
  Probe
aacgacaaaactaatatccagggga

SEQ ID NO: 106182 - DNA, 25 bp, Artificial
  Probe
aagtgacatagatcagcctgctttt

SEQ ID NO: 106183 - DNA, 25 bp, Artificial
  Probe
ctaacccagttgaggtgcaaagtta

SEQ ID NO: 106184 - DNA, 25 bp, Artificial
  Probe
cggagagacatgatggtggtttaca

SEQ ID NO: 106185 - DNA, 25 bp, Artificial
  Probe
agtcctatagaggcatgaggaacat

SEQ ID NO: 106186 - DNA, 25 bp, Artificial
  Probe
aacaagaggtgcaaggacaagaaac

SEQ ID NO: 106187 - DNA, 25 bp, Artificial
  Probe
ctcatgaaggagcaactagtggaga

SEQ ID NO: 106188 - DNA, 25 bp, Artificial
  Probe
taacccagttgaggtgcaaagttac

SEQ ID NO: 106189 - DNA, 25 bp, Artificial
  Probe
agtgacatagatcagcctgcttttc

SEQ ID NO: 106190 - DNA, 25 bp, Artificial
  Probe
acagcatggtagccagtcctataga

SEQ ID NO: 106191 - DNA, 25 bp, Artificial
  Probe
gaaggagcaactagtggagatgacc

SEQ ID NO: 106192 - DNA, 25 bp, Artificial
  Probe
gagacatgatggtggtttacaggct

SEQ ID NO: 106193 - DNA, 25 bp, Artificial
  Probe
agagacatgatggtggtttacaggc

SEQ ID NO: 106194 - DNA, 25 bp, Artificial
  Probe
tgacatagatcagcctgcttttcag

SEQ ID NO: 106195 - DNA, 25 bp, Artificial
  Probe
gtgacatagatcagcctgcttttca

SEQ ID NO: 106196 - DNA, 25 bp, Artificial
  Probe
ttgtggagatcatcaaggtactagg

SEQ ID NO: 106197 - DNA, 25 bp, Artificial
  Probe
gtcctacatctgttctcggtactac

SEQ ID NO: 106198 - DNA, 25 bp, Artificial
  Probe
gagatgaaccctaactacacagaat

SEQ ID NO: 106199 - DNA, 25 bp, Artificial
  Probe
agagatgaaccctaactacacagaa

SEQ ID NO: 106200 - DNA, 25 bp, Artificial
  Probe
aaatccgagagatgaaccctaacta

SEQ ID NO: 106201 - DNA, 25 bp, Artificial
  Probe
agatgaaccctaactacacagaatt

SEQ ID NO: 106202 - DNA, 25 bp, Artificial
  Probe
gagagatgaaccctaactacacaga

SEQ ID NO: 106203 - DNA, 25 bp, Artificial
  Probe
tgtcctacatctgttctcggtacta

SEQ ID NO: 106204 - DNA, 25 bp, Artificial
  Probe
aatccgagagatgaaccctaactac

SEQ ID NO: 106205 - DNA, 25 bp, Artificial
  Probe
taaagaggatttaactgtttgtggg

SEQ ID NO: 106206 - DNA, 25 bp, Artificial
  Probe
gtaaatgaactacccagcatctagg

SEQ ID NO: 106207 - DNA, 25 bp, Artificial
  Probe
ctcccatgtcccttgtaaatagaac

SEQ ID NO: 106208 - DNA, 25 bp, Artificial
  Probe
ccatgtcccttgtaaatagaaccag

SEQ ID NO: 106209 - DNA, 25 bp, Artificial
  Probe
caaatccgagagatgaaccctaact

SEQ ID NO: 106210 - DNA, 25 bp, Artificial
  Probe
cgagagatgaaccctaactacacag

SEQ ID NO: 106211 - DNA, 25 bp, Artificial
  Probe
tccctatcatctatgtcaaggtgta

SEQ ID NO: 106212 - DNA, 25 bp, Artificial
  Probe
catccctatcatctatgtcaaggtg

SEQ ID NO: 106213 - DNA, 25 bp, Artificial
  Probe
tcatccctatcatctatgtcaaggt

SEQ ID NO: 106214 - DNA, 25 bp, Artificial
  Probe
atccctatcatctatgtcaaggtgt

SEQ ID NO: 106215 - DNA, 25 bp, Artificial
  Probe
atccgagagatgaaccctaactaca

SEQ ID NO: 106216 - DNA, 25 bp, Artificial
  Probe
atcatccctatcatctatgtcaagg

SEQ ID NO: 106217 - DNA, 25 bp, Artificial
  Probe
catgtcccttgtaaatagaaccagc

SEQ ID NO: 106218 - DNA, 25 bp, Artificial
  Probe
atgtcccttgtaaatagaaccagcc

SEQ ID NO: 106219 - DNA, 25 bp, Artificial
  Probe
cctcccatgtcccttgtaaatagaa

SEQ ID NO: 106220 - DNA, 25 bp, Artificial
  Probe
ccctatcatctatgtcaaggtgtac

SEQ ID NO: 106221 - DNA, 25 bp, Artificial
  Probe
taaatgaactacccagcatctaggc

SEQ ID NO: 106222 - DNA, 25 bp, Artificial
  Probe
gatcatccctatcatctatgtcaag

SEQ ID NO: 106223 - DNA, 25 bp, Artificial
  Probe
tcccatgtcccttgtaaatagaacc

SEQ ID NO: 106224 - DNA, 25 bp, Artificial
  Probe
tcctacatctgttctcggtactacc

SEQ ID NO: 106225 - DNA, 25 bp, Artificial
  Probe
cccatgtcccttgtaaatagaacca

SEQ ID NO: 106226 - DNA, 25 bp, Artificial
  Probe
gtgtcctacatctgttctcggtact

SEQ ID NO: 106227 - DNA, 25 bp, Artificial
  Probe
tggagatcatcaaggtactagggac

SEQ ID NO: 106228 - DNA, 25 bp, Artificial
  Probe
gtggagatcatcaaggtactaggga

SEQ ID NO: 106229 - DNA, 25 bp, Artificial
  Probe
tccgagagatgaaccctaactacac

SEQ ID NO: 106230 - DNA, 25 bp, Artificial
  Probe
cttgtggagatcatcaaggtactag

SEQ ID NO: 106231 - DNA, 25 bp, Artificial
  Probe
tgtggagatcatcaaggtactaggg

SEQ ID NO: 106232 - DNA, 25 bp, Artificial
  Probe
ccgagagatgaaccctaactacaca

SEQ ID NO: 106233 - DNA, 25 bp, Artificial
  Probe
ctgagggcagaggtaaatgaactac

SEQ ID NO: 106234 - DNA, 25 bp, Artificial
  Probe
tagactgagggcagaggtaaatgaa

SEQ ID NO: 106235 - DNA, 25 bp, Artificial
  Probe
gcaaatccgagagatgaaccctaac

SEQ ID NO: 106236 - DNA, 25 bp, Artificial
  Probe
cctatcatctatgtcaaggtgtaca

SEQ ID NO: 106237 - DNA, 25 bp, Artificial
  Probe
cacctaccctcactaactcttcctg

SEQ ID NO: 106238 - DNA, 25 bp, Artificial
  Probe
gcttgtggagatcatcaaggtacta

SEQ ID NO: 106239 - DNA, 25 bp, Artificial
  Probe
aaccgtctctcaatgccattctcat

SEQ ID NO: 106240 - DNA, 25 bp, Artificial
  Probe
cttcaacttcagtcctggtgaactt

SEQ ID NO: 106241 - DNA, 25 bp, Artificial
  Probe
cacacacacacacttactcatattg

SEQ ID NO: 106242 - DNA, 25 bp, Artificial
  Probe
acacacacacacacttactcatatt

SEQ ID NO: 106243 - DNA, 25 bp, Artificial
  Probe
cacacacacacacacttactcatat

SEQ ID NO: 106244 - DNA, 25 bp, Artificial
  Probe
acacacacttactcatattgccttc

SEQ ID NO: 106245 - DNA, 25 bp, Artificial
  Probe
cacacacacttactcatattgcctt

SEQ ID NO: 106246 - DNA, 25 bp, Artificial
  Probe
acacacacacacttactcatattgc

SEQ ID NO: 106247 - DNA, 25 bp, Artificial
  Probe
cacacacttactcatattgccttcg

SEQ ID NO: 106248 - DNA, 25 bp, Artificial
  Probe
acacacacacacacacttactcata

SEQ ID NO: 106249 - DNA, 25 bp, Artificial
  Probe
cacacacacacttactcatattgcc

SEQ ID NO: 106250 - DNA, 25 bp, Artificial
  Probe
acacacacacttactcatattgcct

SEQ ID NO: 106251 - DNA, 25 bp, Artificial
  Probe
acttactcatattgccttcgatacc

SEQ ID NO: 106252 - DNA, 25 bp, Artificial
  Probe
acacttactcatattgccttcgata

SEQ ID NO: 106253 - DNA, 25 bp, Artificial
  Probe
cacttactcatattgccttcgatac

SEQ ID NO: 106254 - DNA, 25 bp, Artificial
  Probe
cacacttactcatattgccttcgat

SEQ ID NO: 106255 - DNA, 25 bp, Artificial
  Probe
acacacttactcatattgccttcga

SEQ ID NO: 106256 - DNA, 25 bp, Artificial
  Probe
cacacacacacacacacttactcat

SEQ ID NO: 106257 - DNA, 25 bp, Artificial
  Probe
ttgtaggcagatgtctgagtctcta

SEQ ID NO: 106258 - DNA, 25 bp, Artificial
  Probe
tgtaaatacaccgtgactttgaaag

SEQ ID NO: 106259 - DNA, 25 bp, Artificial
  Probe
gaatgtaaatacaccgtgactttga

SEQ ID NO: 106260 - DNA, 25 bp, Artificial
  Probe
ggaatgtaaatacaccgtgactttg

SEQ ID NO: 106261 - DNA, 25 bp, Artificial
  Probe
atgtaaatacaccgtgactttgaaa

SEQ ID NO: 106262 - DNA, 25 bp, Artificial
  Probe
aatgtaaatacaccgtgactttgaa

SEQ ID NO: 106263 - DNA, 25 bp, Artificial
  Probe
gctttgatgatctcactccaagaaa

SEQ ID NO: 106264 - DNA, 25 bp, Artificial
  Probe
gatgtctgagtctctaggtggtttc

SEQ ID NO: 106265 - DNA, 25 bp, Artificial
  Probe
tgtaggcagatgtctgagtctctag

SEQ ID NO: 106266 - DNA, 25 bp, Artificial
  Probe
gggaatgtaaatacaccgtgacttt

SEQ ID NO: 106267 - DNA, 25 bp, Artificial
  Probe
cttactcatattgccttcgataccc

SEQ ID NO: 106268 - DNA, 25 bp, Artificial
  Probe
ttagctttgatgatctcactccaag

SEQ ID NO: 106269 - DNA, 25 bp, Artificial
  Probe
ttactcatattgccttcgataccca

SEQ ID NO: 106270 - DNA, 25 bp, Artificial
  Probe
gttagctttgatgatctcactccaa

SEQ ID NO: 106271 - DNA, 25 bp, Artificial
  Probe
cagatgtctgagtctctaggtggtt

SEQ ID NO: 106272 - DNA, 25 bp, Artificial
  Probe
agatgtctgagtctctaggtggttt

SEQ ID NO: 106273 - DNA, 25 bp, Artificial
  Probe
gttgggaatgtaaatacaccgtgac

SEQ ID NO: 106274 - DNA, 25 bp, Artificial
  Probe
tagctttgatgatctcactccaaga

SEQ ID NO: 106275 - DNA, 25 bp, Artificial
  Probe
cagttagctttgatgatctcactcc

SEQ ID NO: 106276 - DNA, 25 bp, Artificial
  Probe
cacacacacacacacacacttactc

SEQ ID NO: 106277 - DNA, 25 bp, Artificial
  Probe
tgggaatgtaaatacaccgtgactt

SEQ ID NO: 106278 - DNA, 25 bp, Artificial
  Probe
ttgggaatgtaaatacaccgtgact

SEQ ID NO: 106279 - DNA, 25 bp, Artificial
  Probe
gtaggcagatgtctgagtctctagg

SEQ ID NO: 106280 - DNA, 25 bp, Artificial
  Probe
ctcctcccattgctattccactttc

SEQ ID NO: 106281 - DNA, 25 bp, Artificial
  Probe
agttagctttgatgatctcactcca

SEQ ID NO: 106282 - DNA, 25 bp, Artificial
  Probe
cttgtaggcagatgtctgagtctct

SEQ ID NO: 106283 - DNA, 25 bp, Artificial
  Probe
tactcatattgccttcgatacccac

SEQ ID NO: 106284 - DNA, 25 bp, Artificial
  Probe
cattgctattccactttcaggacac

SEQ ID NO: 106285 - DNA, 25 bp, Artificial
  Probe
gcagttagctttgatgatctcactc

SEQ ID NO: 106286 - DNA, 25 bp, Artificial
  Probe
tggttgagttaatattgttgctgtt

SEQ ID NO: 106287 - DNA, 25 bp, Artificial
  Probe
ttggttgagttaatattgttgctgt

SEQ ID NO: 106288 - DNA, 25 bp, Artificial
  Probe
cttggttgagttaatattgttgctg

SEQ ID NO: 106289 - DNA, 25 bp, Artificial
  Probe
tcttggttgagttaatattgttgct

SEQ ID NO: 106290 - DNA, 25 bp, Artificial
  Probe
gcctcttggttgagttaatattgtt

SEQ ID NO: 106291 - DNA, 25 bp, Artificial
  Probe
ctcttggttgagttaatattgttgc

SEQ ID NO: 106292 - DNA, 25 bp, Artificial
  Probe
ggttgagttaatattgttgctgtta

SEQ ID NO: 106293 - DNA, 25 bp, Artificial
  Probe
cctcttggttgagttaatattgttg

SEQ ID NO: 106294 - DNA, 25 bp, Artificial
  Probe
caagaactggaagagaattgagaaa

SEQ ID NO: 106295 - DNA, 25 bp, Artificial
  Probe
tcaagaactggaagagaattgagaa

SEQ ID NO: 106296 - DNA, 25 bp, Artificial
  Probe
ggcctcttggttgagttaatattgt

SEQ ID NO: 106297 - DNA, 25 bp, Artificial
  Probe
caatgaatcagtgcttggaggctac

SEQ ID NO: 106298 - DNA, 25 bp, Artificial
  Probe
aatgaatcagtgcttggaggctaca

SEQ ID NO: 106299 - DNA, 25 bp, Artificial
  Probe
gttgagttaatattgttgctgttat

SEQ ID NO: 106300 - DNA, 25 bp, Artificial
  Probe
gaactggaagagaattgagaaaagg

SEQ ID NO: 106301 - DNA, 25 bp, Artificial
  Probe
gcctcaagaactggaagagaattga

SEQ ID NO: 106302 - DNA, 25 bp, Artificial
  Probe
aactggaagagaattgagaaaaggg

SEQ ID NO: 106303 - DNA, 25 bp, Artificial
  Probe
agaactggaagagaattgagaaaag

SEQ ID NO: 106304 - DNA, 25 bp, Artificial
  Probe
atgaatcagtgcttggaggctacag

SEQ ID NO: 106305 - DNA, 25 bp, Artificial
  Probe
aagaactggaagagaattgagaaaa

SEQ ID NO: 106306 - DNA, 25 bp, Artificial
  Probe
acctttggatgttcctacgaagaga

SEQ ID NO: 106307 - DNA, 25 bp, Artificial
  Probe
cacctttggatgttcctacgaagag

SEQ ID NO: 106308 - DNA, 25 bp, Artificial
  Probe
cttggaggctacaggcttagatgtg

SEQ ID NO: 106309 - DNA, 25 bp, Artificial
  Probe
gggcctcttggttgagttaatattg

SEQ ID NO: 106310 - DNA, 25 bp, Artificial
  Probe
ttgagttaatattgttgctgttatt

SEQ ID NO: 106311 - DNA, 25 bp, Artificial
  Probe
ctggaagagaattgagaaaagggct

SEQ ID NO: 106312 - DNA, 25 bp, Artificial
  Probe
ggcctcaagaactggaagagaattg

SEQ ID NO: 106313 - DNA, 25 bp, Artificial
  Probe
tggaagagaattgagaaaagggctg

SEQ ID NO: 106314 - DNA, 25 bp, Artificial
  Probe
actggaagagaattgagaaaagggc

SEQ ID NO: 106315 - DNA, 25 bp, Artificial
  Probe
ctacaggcttagatgtgctgggaaa

SEQ ID NO: 106316 - DNA, 25 bp, Artificial
  Probe
tacaggcttagatgtgctgggaaac

SEQ ID NO: 106317 - DNA, 25 bp, Artificial
  Probe
ggaagagaattgagaaaagggctgc

SEQ ID NO: 106318 - DNA, 25 bp, Artificial
  Probe
gcacctttggatgttcctacgaaga

SEQ ID NO: 106319 - DNA, 25 bp, Artificial
  Probe
agcacctttggatgttcctacgaag

SEQ ID NO: 106320 - DNA, 25 bp, Artificial
  Probe
cagcacctttggatgttcctacgaa

SEQ ID NO: 106321 - DNA, 25 bp, Artificial
  Probe
gaagagaattgagaaaagggctgcg

SEQ ID NO: 106322 - DNA, 25 bp, Artificial
  Probe
ggggcctcttggttgagttaatatt

SEQ ID NO: 106323 - DNA, 25 bp, Artificial
  Probe
gggcctcaagaactggaagagaatt

SEQ ID NO: 106324 - DNA, 25 bp, Artificial
  Probe
ccaatgaatcagtgcttggaggcta

SEQ ID NO: 106325 - DNA, 25 bp, Artificial
  Probe
gaaaccggagttacaccgtaagagg

SEQ ID NO: 106326 - DNA, 25 bp, Artificial
  Probe
ggaaaccggagttacaccgtaagag

SEQ ID NO: 106327 - DNA, 25 bp, Artificial
  Probe
attcagtctgttagtctggagtcat

SEQ ID NO: 106328 - DNA, 25 bp, Artificial
  Probe
catagtaactgccttggctaagatc

SEQ ID NO: 106329 - DNA, 25 bp, Artificial
  Probe
atagtaactgccttggctaagatca

SEQ ID NO: 106330 - DNA, 25 bp, Artificial
  Probe
ttcagtctgttagtctggagtcatc

SEQ ID NO: 106331 - DNA, 25 bp, Artificial
  Probe
cattcagtctgttagtctggagtca

SEQ ID NO: 106332 - DNA, 25 bp, Artificial
  Probe
catcaccctcatcaacaaacattta

SEQ ID NO: 106333 - DNA, 25 bp, Artificial
  Probe
ccctcatcaacaaacatttatccaa

SEQ ID NO: 106334 - DNA, 25 bp, Artificial
  Probe
caccctcatcaacaaacatttatcc

SEQ ID NO: 106335 - DNA, 25 bp, Artificial
  Probe
tcaccctcatcaacaaacatttatc

SEQ ID NO: 106336 - DNA, 25 bp, Artificial
  Probe
accctcatcaacaaacatttatcca

SEQ ID NO: 106337 - DNA, 25 bp, Artificial
  Probe
gtatttggcattacttctgatggtc

SEQ ID NO: 106338 - DNA, 25 bp, Artificial
  Probe
atcaccctcatcaacaaacatttat

SEQ ID NO: 106339 - DNA, 25 bp, Artificial
  Probe
tcatcaccctcatcaacaaacattt

SEQ ID NO: 106340 - DNA, 25 bp, Artificial
  Probe
tagtaactgccttggctaagatcac

SEQ ID NO: 106341 - DNA, 25 bp, Artificial
  Probe
cagtctgttagtctggagtcatcac

SEQ ID NO: 106342 - DNA, 25 bp, Artificial
  Probe
taatgaaaccatagtaactgccttg

SEQ ID NO: 106343 - DNA, 25 bp, Artificial
  Probe
gtaatgaaaccatagtaactgcctt

SEQ ID NO: 106344 - DNA, 25 bp, Artificial
  Probe
tcagtctgttagtctggagtcatca

SEQ ID NO: 106345 - DNA, 25 bp, Artificial
  Probe
tatttggcattacttctgatggtca

SEQ ID NO: 106346 - DNA, 25 bp, Artificial
  Probe
agtaatgaaaccatagtaactgcct

SEQ ID NO: 106347 - DNA, 25 bp, Artificial
  Probe
agtctgttagtctggagtcatcacc

SEQ ID NO: 106348 - DNA, 25 bp, Artificial
  Probe
gtcatcaccctcatcaacaaacatt

SEQ ID NO: 106349 - DNA, 25 bp, Artificial
  Probe
tatctaaattgtcagtgtctatggc

SEQ ID NO: 106350 - DNA, 25 bp, Artificial
  Probe
cccaaactatctaaattgtcagtgt

SEQ ID NO: 106351 - DNA, 25 bp, Artificial
  Probe
cctcatcaacaaacatttatccaat

SEQ ID NO: 106352 - DNA, 25 bp, Artificial
  Probe
ccattcagtctgttagtctggagtc

SEQ ID NO: 106353 - DNA, 25 bp, Artificial
  Probe
agtcatcaccctcatcaacaaacat

SEQ ID NO: 106354 - DNA, 25 bp, Artificial
  Probe
caccattcagtctgttagtctggag

SEQ ID NO: 106355 - DNA, 25 bp, Artificial
  Probe
ccatagtaactgccttggctaagat

SEQ ID NO: 106356 - DNA, 25 bp, Artificial
  Probe
ccaaactatctaaattgtcagtgtc

SEQ ID NO: 106357 - DNA, 25 bp, Artificial
  Probe
accattcagtctgttagtctggagt

SEQ ID NO: 106358 - DNA, 25 bp, Artificial
  Probe
agtatttggcattacttctgatggt

SEQ ID NO: 106359 - DNA, 25 bp, Artificial
  Probe
gagtatttggcattacttctgatgg

SEQ ID NO: 106360 - DNA, 25 bp, Artificial
  Probe
ggagtatttggcattacttctgatg

SEQ ID NO: 106361 - DNA, 25 bp, Artificial
  Probe
cggagtatttggcattacttctgat

SEQ ID NO: 106362 - DNA, 25 bp, Artificial
  Probe
aattgtcagtgtctatggcctaatt

SEQ ID NO: 106363 - DNA, 25 bp, Artificial
  Probe
aaccatagtaactgccttggctaag

SEQ ID NO: 106364 - DNA, 25 bp, Artificial
  Probe
aatgaaaccatagtaactgccttgg

SEQ ID NO: 106365 - DNA, 25 bp, Artificial
  Probe
aaatccaatccagtgtgtttgcttg

SEQ ID NO: 106366 - DNA, 25 bp, Artificial
  Probe
cttgggttctcctgcatttagatag

SEQ ID NO: 106367 - DNA, 25 bp, Artificial
  Probe
agtaactgccttggctaagatcaca

SEQ ID NO: 106368 - DNA, 25 bp, Artificial
  Probe
attacttctgatggtcagtcaagaa

SEQ ID NO: 106369 - DNA, 25 bp, Artificial
  Probe
cattacttctgatggtcagtcaaga

SEQ ID NO: 106370 - DNA, 25 bp, Artificial
  Probe
ctatctaaattgtcagtgtctatgg

SEQ ID NO: 106371 - DNA, 25 bp, Artificial
  Probe
caaactatctaaattgtcagtgtct

SEQ ID NO: 106372 - DNA, 25 bp, Artificial
  Probe
aatgtgcttgagtcctataacctat

SEQ ID NO: 106373 - DNA, 25 bp, Artificial
  Probe
ataatgtgcttgagtcctataacct

SEQ ID NO: 106374 - DNA, 25 bp, Artificial
  Probe
taatgtgcttgagtcctataaccta

SEQ ID NO: 106375 - DNA, 25 bp, Artificial
  Probe
aataatgtgcttgagtcctataacc

SEQ ID NO: 106376 - DNA, 25 bp, Artificial
  Probe
atgtgcttgagtcctataacctata

SEQ ID NO: 106377 - DNA, 25 bp, Artificial
  Probe
tctgtgactgcttgcgactattata

SEQ ID NO: 106378 - DNA, 25 bp, Artificial
  Probe
atctgtgactgcttgcgactattat

SEQ ID NO: 106379 - DNA, 25 bp, Artificial
  Probe
cacttctgttgtattatagtccagc

SEQ ID NO: 106380 - DNA, 25 bp, Artificial
  Probe
gcacttctgttgtattatagtccag

SEQ ID NO: 106381 - DNA, 25 bp, Artificial
  Probe
tgaataatgtgcttgagtcctataa

SEQ ID NO: 106382 - DNA, 25 bp, Artificial
  Probe
ctgtgactgcttgcgactattataa

SEQ ID NO: 106383 - DNA, 25 bp, Artificial
  Probe
catgaataatgtgcttgagtcctat

SEQ ID NO: 106384 - DNA, 25 bp, Artificial
  Probe
gaataatgtgcttgagtcctataac

SEQ ID NO: 106385 - DNA, 25 bp, Artificial
  Probe
atgaataatgtgcttgagtcctata

SEQ ID NO: 106386 - DNA, 25 bp, Artificial
  Probe
accactgcacttctgttgtattata

SEQ ID NO: 106387 - DNA, 25 bp, Artificial
  Probe
atcaacattaactacagcaatcatt

SEQ ID NO: 106388 - DNA, 25 bp, Artificial
  Probe
agtccagctcttatcaacattaact

SEQ ID NO: 106389 - DNA, 25 bp, Artificial
  Probe
ccagctcttatcaacattaactaca

SEQ ID NO: 106390 - DNA, 25 bp, Artificial
  Probe
gagacatttcatcccaacataaacc

SEQ ID NO: 106391 - DNA, 25 bp, Artificial
  Probe
ccactgcacttctgttgtattatag

SEQ ID NO: 106392 - DNA, 25 bp, Artificial
  Probe
ctcttatcaacattaactacagcaa

SEQ ID NO: 106393 - DNA, 25 bp, Artificial
  Probe
tccagctcttatcaacattaactac

SEQ ID NO: 106394 - DNA, 25 bp, Artificial
  Probe
gtccagctcttatcaacattaacta

SEQ ID NO: 106395 - DNA, 25 bp, Artificial
  Probe
tagtccagctcttatcaacattaac

SEQ ID NO: 106396 - DNA, 25 bp, Artificial
  Probe
catctgtgactgcttgcgactatta

SEQ ID NO: 106397 - DNA, 25 bp, Artificial
  Probe
tagtgtatgacatcaccaacggtaa

SEQ ID NO: 106398 - DNA, 25 bp, Artificial
  Probe
tcaataccacctttatttccaccat

SEQ ID NO: 106399 - DNA, 25 bp, Artificial
  Probe
cttcaataccacctttatttccacc

SEQ ID NO: 106400 - DNA, 25 bp, Artificial
  Probe
ccttcaataccacctttatttccac

SEQ ID NO: 106401 - DNA, 25 bp, Artificial
  Probe
ttcaataccacctttatttccacca

SEQ ID NO: 106402 - DNA, 25 bp, Artificial
  Probe
caccactgcacttctgttgtattat

SEQ ID NO: 106403 - DNA, 25 bp, Artificial
  Probe
atgccttcaataccacctttatttc

SEQ ID NO: 106404 - DNA, 25 bp, Artificial
  Probe
gatgccttcaataccacctttattt

SEQ ID NO: 106405 - DNA, 25 bp, Artificial
  Probe
agacatttcatcccaacataaaccc

SEQ ID NO: 106406 - DNA, 25 bp, Artificial
  Probe
acagcaatcatttcaactctattct

SEQ ID NO: 106407 - DNA, 25 bp, Artificial
  Probe
tgcacttctgttgtattatagtcca

SEQ ID NO: 106408 - DNA, 25 bp, Artificial
  Probe
acttctgttgtattatagtccagct

SEQ ID NO: 106409 - DNA, 25 bp, Artificial
  Probe
ctgcacttctgttgtattatagtcc

SEQ ID NO: 106410 - DNA, 25 bp, Artificial
  Probe
aactacagcaatcatttcaactcta

SEQ ID NO: 106411 - DNA, 25 bp, Artificial
  Probe
taactacagcaatcatttcaactct

SEQ ID NO: 106412 - DNA, 25 bp, Artificial
  Probe
atgatgccttcaataccacctttat

SEQ ID NO: 106413 - DNA, 25 bp, Artificial
  Probe
tctgttgtattatagtccagctctt

SEQ ID NO: 106414 - DNA, 25 bp, Artificial
  Probe
ttctgttgtattatagtccagctct

SEQ ID NO: 106415 - DNA, 25 bp, Artificial
  Probe
cagtggaactacaaggaaagaagat

SEQ ID NO: 106416 - DNA, 25 bp, Artificial
  Probe
tgatgccttcaataccacctttatt

SEQ ID NO: 106417 - DNA, 25 bp, Artificial
  Probe
tcaaatgaccaaacgaaagagaatg

SEQ ID NO: 106418 - DNA, 25 bp, Artificial
  Probe
atcaaatgaccaaacgaaagagaat

SEQ ID NO: 106419 - DNA, 25 bp, Artificial
  Probe
catcaaatgaccaaacgaaagagaa

SEQ ID NO: 106420 - DNA, 25 bp, Artificial
  Probe
agagaaattgtattggcaaggaaac

SEQ ID NO: 106421 - DNA, 25 bp, Artificial
  Probe
gaagagaaattgtattggcaaggaa

SEQ ID NO: 106422 - DNA, 25 bp, Artificial
  Probe
agaagagaaattgtattggcaagga

SEQ ID NO: 106423 - DNA, 25 bp, Artificial
  Probe
aagagaaattgtattggcaaggaaa

SEQ ID NO: 106424 - DNA, 25 bp, Artificial
  Probe
tagaagagaaattgtattggcaagg

SEQ ID NO: 106425 - DNA, 25 bp, Artificial
  Probe
aagtagaagagaaattgtattggca

SEQ ID NO: 106426 - DNA, 25 bp, Artificial
  Probe
agaaattgtattggcaaggaaacag

SEQ ID NO: 106427 - DNA, 25 bp, Artificial
  Probe
gagaaattgtattggcaaggaaaca

SEQ ID NO: 106428 - DNA, 25 bp, Artificial
  Probe
catctgctgttctgagtccttgaag

SEQ ID NO: 106429 - DNA, 25 bp, Artificial
  Probe
agtagaagagaaattgtattggcaa

SEQ ID NO: 106430 - DNA, 25 bp, Artificial
  Probe
ttataacatcatggtcctggtttcc

SEQ ID NO: 106431 - DNA, 25 bp, Artificial
  Probe
ccttataacatcatggtcctggttt

SEQ ID NO: 106432 - DNA, 25 bp, Artificial
  Probe
aatggttctggtcaaagagaggaaa

SEQ ID NO: 106433 - DNA, 25 bp, Artificial
  Probe
gtagaagagaaattgtattggcaag

SEQ ID NO: 106434 - DNA, 25 bp, Artificial
  Probe
cttataacatcatggtcctggtttc

SEQ ID NO: 106435 - DNA, 25 bp, Artificial
  Probe
gaaattgtattggcaaggaaacagc

SEQ ID NO: 106436 - DNA, 25 bp, Artificial
  Probe
aaagtagaagagaaattgtattggc

SEQ ID NO: 106437 - DNA, 25 bp, Artificial
  Probe
atggttctggtcaaagagaggaaag

SEQ ID NO: 106438 - DNA, 25 bp, Artificial
  Probe
gaatggttctggtcaaagagaggaa

SEQ ID NO: 106439 - DNA, 25 bp, Artificial
  Probe
tcatctgctgttctgagtccttgaa

SEQ ID NO: 106440 - DNA, 25 bp, Artificial
  Probe
aattgtattggcaaggaaacagcaa

SEQ ID NO: 106441 - DNA, 25 bp, Artificial
  Probe
aaattgtattggcaaggaaacagca

SEQ ID NO: 106442 - DNA, 25 bp, Artificial
  Probe
caaatgaccaaacgaaagagaatgg

SEQ ID NO: 106443 - DNA, 25 bp, Artificial
  Probe
tttgcttgtttaaagaacgtcatct

SEQ ID NO: 106444 - DNA, 25 bp, Artificial
  Probe
gtttgcttgtttaaagaacgtcatc

SEQ ID NO: 106445 - DNA, 25 bp, Artificial
  Probe
aaacctttaagctgcttcttctctg

SEQ ID NO: 106446 - DNA, 25 bp, Artificial
  Probe
ttgcttgtttaaagaacgtcatctg

SEQ ID NO: 106447 - DNA, 25 bp, Artificial
  Probe
cccttataacatcatggtcctggtt

SEQ ID NO: 106448 - DNA, 25 bp, Artificial
  Probe
gtctggtttgcttgtttaaagaacg

SEQ ID NO: 106449 - DNA, 25 bp, Artificial
  Probe
cgtctggtttgcttgtttaaagaac

SEQ ID NO: 106450 - DNA, 25 bp, Artificial
  Probe
ttctgtcaaatgaagagtcgtcaca

SEQ ID NO: 106451 - DNA, 25 bp, Artificial
  Probe
cttgtttaaagaacgtcatctgctg

SEQ ID NO: 106452 - DNA, 25 bp, Artificial
  Probe
ggtttgcttgtttaaagaacgtcat

SEQ ID NO: 106453 - DNA, 25 bp, Artificial
  Probe
attgtattggcaaggaaacagcaag

SEQ ID NO: 106454 - DNA, 25 bp, Artificial
  Probe
tgtttaaagaacgtcatctgctgtt

SEQ ID NO: 106455 - DNA, 25 bp, Artificial
  Probe
ttgtttaaagaacgtcatctgctgt

SEQ ID NO: 106456 - DNA, 25 bp, Artificial
  Probe
tgtcaaatgaagagtcgtcacacat

SEQ ID NO: 106457 - DNA, 25 bp, Artificial
  Probe
ctggtttgcttgtttaaagaacgtc

SEQ ID NO: 106458 - DNA, 25 bp, Artificial
  Probe
tataacatcatggtcctggtttcca

SEQ ID NO: 106459 - DNA, 25 bp, Artificial
  Probe
gtcaaatgaagagtcgtcacacatg

SEQ ID NO: 106460 - DNA, 25 bp, Artificial
  Probe
aaagagaatggttctggtcaaagag

SEQ ID NO: 106461 - DNA, 25 bp, Artificial
  Probe
gaaagagaatggttctggtcaaaga

SEQ ID NO: 106462 - DNA, 25 bp, Artificial
  Probe
catcagacaccagagaatccatatt

SEQ ID NO: 106463 - DNA, 25 bp, Artificial
  Probe
acatcagacaccagagaatccatat

SEQ ID NO: 106464 - DNA, 25 bp, Artificial
  Probe
cacatcagacaccagagaatccata

SEQ ID NO: 106465 - DNA, 25 bp, Artificial
  Probe
atcagacaccagagaatccatattc

SEQ ID NO: 106466 - DNA, 25 bp, Artificial
  Probe
gacaccagagaatccatattcacta

SEQ ID NO: 106467 - DNA, 25 bp, Artificial
  Probe
acaccagagaatccatattcactaa

SEQ ID NO: 106468 - DNA, 25 bp, Artificial
  Probe
cagacaccagagaatccatattcac

SEQ ID NO: 106469 - DNA, 25 bp, Artificial
  Probe
agacaccagagaatccatattcact

SEQ ID NO: 106470 - DNA, 25 bp, Artificial
  Probe
tcagacaccagagaatccatattca

SEQ ID NO: 106471 - DNA, 25 bp, Artificial
  Probe
tatgagtgtaaagtctgtgggaaag

SEQ ID NO: 106472 - DNA, 25 bp, Artificial
  Probe
ctatgagtgtaaagtctgtgggaaa

SEQ ID NO: 106473 - DNA, 25 bp, Artificial
  Probe
ataagccctatgagtgtaaagtctg

SEQ ID NO: 106474 - DNA, 25 bp, Artificial
  Probe
ctcatcaaacatcacaacattcaca

SEQ ID NO: 106475 - DNA, 25 bp, Artificial
  Probe
ccctataaatgtaacgagtgtggaa

SEQ ID NO: 106476 - DNA, 25 bp, Artificial
  Probe
gataagccctatgagtgtaaagtct

SEQ ID NO: 106477 - DNA, 25 bp, Artificial
  Probe
tacctcatcaaacatcacaacattc

SEQ ID NO: 106478 - DNA, 25 bp, Artificial
  Probe
tcatcaaacatcacaacattcacac

SEQ ID NO: 106479 - DNA, 25 bp, Artificial
  Probe
cctataaatgtaacgagtgtggaac

SEQ ID NO: 106480 - DNA, 25 bp, Artificial
  Probe
aaccctataaatgtaacgagtgtgg

SEQ ID NO: 106481 - DNA, 25 bp, Artificial
  Probe
ttatgaatgtaaagggtgtgggaag

SEQ ID NO: 106482 - DNA, 25 bp, Artificial
  Probe
catcacatcagacaccagagaatcc

SEQ ID NO: 106483 - DNA, 25 bp, Artificial
  Probe
ccatcacatcagacaccagagaatc

SEQ ID NO: 106484 - DNA, 25 bp, Artificial
  Probe
cgataagccctatgagtgtaaagtc

SEQ ID NO: 106485 - DNA, 25 bp, Artificial
  Probe
taagccctatgagtgtaaagtctgt

SEQ ID NO: 106486 - DNA, 25 bp, Artificial
  Probe
cctcatcaaacatcacaacattcac

SEQ ID NO: 106487 - DNA, 25 bp, Artificial
  Probe
aaaccctataaatgtaacgagtgtg

SEQ ID NO: 106488 - DNA, 25 bp, Artificial
  Probe
cttcattcagaaatcaagcctcatc

SEQ ID NO: 106489 - DNA, 25 bp, Artificial
  Probe
ggagagaaaccctataaatgtaacg

SEQ ID NO: 106490 - DNA, 25 bp, Artificial
  Probe
acctcatcaaacatcacaacattca

SEQ ID NO: 106491 - DNA, 25 bp, Artificial
  Probe
gaaaccctataaatgtaacgagtgt

SEQ ID NO: 106492 - DNA, 25 bp, Artificial
  Probe
ttcattcagaaatcaagcctcatca

SEQ ID NO: 106493 - DNA, 25 bp, Artificial
  Probe
cttatgaatgtaaagggtgtgggaa

SEQ ID NO: 106494 - DNA, 25 bp, Artificial
  Probe
accctataaatgtaacgagtgtgga

SEQ ID NO: 106495 - DNA, 25 bp, Artificial
  Probe
attcagaaatcaagcctcatcagac

SEQ ID NO: 106496 - DNA, 25 bp, Artificial
  Probe
cattcagaaatcaagcctcatcaga

SEQ ID NO: 106497 - DNA, 25 bp, Artificial
  Probe
tcattcagaaatcaagcctcatcag

SEQ ID NO: 106498 - DNA, 25 bp, Artificial
  Probe
ggagagaagccttatgaatgtaaag

SEQ ID NO: 106499 - DNA, 25 bp, Artificial
  Probe
agaaaccctataaatgtaacgagtg

SEQ ID NO: 106500 - DNA, 25 bp, Artificial
  Probe
tcacatcagacaccagagaatccat

SEQ ID NO: 106501 - DNA, 25 bp, Artificial
  Probe
atcacatcagacaccagagaatcca

SEQ ID NO: 106502 - DNA, 25 bp, Artificial
  Probe
gtacctcatcaaacatcacaacatt

SEQ ID NO: 106503 - DNA, 25 bp, Artificial
  Probe
gagaaaccctataaatgtaacgagt

SEQ ID NO: 106504 - DNA, 25 bp, Artificial
  Probe
ccttcattcagaaatcaagcctcat

SEQ ID NO: 106505 - DNA, 25 bp, Artificial
  Probe
agtacctcatcaaacatcacaacat

SEQ ID NO: 106506 - DNA, 25 bp, Artificial
  Probe
cctatgagtgtaaagtctgtgggaa

SEQ ID NO: 106507 - DNA, 25 bp, Artificial
  Probe
gaagacctccattaagaagaacacg

SEQ ID NO: 106508 - DNA, 25 bp, Artificial
  Probe
ctccattaagaagaacacgctgaac

SEQ ID NO: 106509 - DNA, 25 bp, Artificial
  Probe
ctcagtatcgcagtggtagactatg

SEQ ID NO: 106510 - DNA, 25 bp, Artificial
  Probe
tctcagtatcgcagtggtagactat

SEQ ID NO: 106511 - DNA, 25 bp, Artificial
  Probe
ggaagacctccattaagaagaacac

SEQ ID NO: 106512 - DNA, 25 bp, Artificial
  Probe
agtatcgcagtggtagactatgact

SEQ ID NO: 106513 - DNA, 25 bp, Artificial
  Probe
cagtatcgcagtggtagactatgac

SEQ ID NO: 106514 - DNA, 25 bp, Artificial
  Probe
tcagtatcgcagtggtagactatga

SEQ ID NO: 106515 - DNA, 25 bp, Artificial
  Probe
gcctccattgtctgtcttcttatcc

SEQ ID NO: 106516 - DNA, 25 bp, Artificial
  Probe
aacggaagacctccattaagaagaa

SEQ ID NO: 106517 - DNA, 25 bp, Artificial
  Probe
tagtggaggagaagactctaagcag

SEQ ID NO: 106518 - DNA, 25 bp, Artificial
  Probe
cctccattaagaagaacacgctgaa

SEQ ID NO: 106519 - DNA, 25 bp, Artificial
  Probe
aagacctccattaagaagaacacgc

SEQ ID NO: 106520 - DNA, 25 bp, Artificial
  Probe
gaactcatctcgaagccataatgtc

SEQ ID NO: 106521 - DNA, 25 bp, Artificial
  Probe
ctagtggaggagaagactctaagca

SEQ ID NO: 106522 - DNA, 25 bp, Artificial
  Probe
gtgaactcatctcgaagccataatg

SEQ ID NO: 106523 - DNA, 25 bp, Artificial
  Probe
caaaggattgtcagagaaagagaat

SEQ ID NO: 106524 - DNA, 25 bp, Artificial
  Probe
tccattaagaagaacacgctgaacc

SEQ ID NO: 106525 - DNA, 25 bp, Artificial
  Probe
tgtgaactcatctcgaagccataat

SEQ ID NO: 106526 - DNA, 25 bp, Artificial
  Probe
cggaagacctccattaagaagaaca

SEQ ID NO: 106527 - DNA, 25 bp, Artificial
  Probe
acggaagacctccattaagaagaac

SEQ ID NO: 106528 - DNA, 25 bp, Artificial
  Probe
gcaaaggattgtcagagaaagagaa

SEQ ID NO: 106529 - DNA, 25 bp, Artificial
  Probe
tgaactcatctcgaagccataatgt

SEQ ID NO: 106530 - DNA, 25 bp, Artificial
  Probe
aaaggattgtcagagaaagagaatt

SEQ ID NO: 106531 - DNA, 25 bp, Artificial
  Probe
ctgtgaactcatctcgaagccataa

SEQ ID NO: 106532 - DNA, 25 bp, Artificial
  Probe
cctccattgtctgtcttcttatccc

SEQ ID NO: 106533 - DNA, 25 bp, Artificial
  Probe
gacctccattaagaagaacacgctg

SEQ ID NO: 106534 - DNA, 25 bp, Artificial
  Probe
agctagtggaggagaagactctaag

SEQ ID NO: 106535 - DNA, 25 bp, Artificial
  Probe
agacctccattaagaagaacacgct

SEQ ID NO: 106536 - DNA, 25 bp, Artificial
  Probe
aactcatctcgaagccataatgtcc

SEQ ID NO: 106537 - DNA, 25 bp, Artificial
  Probe
cagctagtggaggagaagactctaa

SEQ ID NO: 106538 - DNA, 25 bp, Artificial
  Probe
acctccattaagaagaacacgctga

SEQ ID NO: 106539 - DNA, 25 bp, Artificial
  Probe
gaaacggaagacctccattaagaag

SEQ ID NO: 106540 - DNA, 25 bp, Artificial
  Probe
gaagaaacggaagacctccattaag

SEQ ID NO: 106541 - DNA, 25 bp, Artificial
  Probe
gaagactctaagcagctttaccaag

SEQ ID NO: 106542 - DNA, 25 bp, Artificial
  Probe
aaacggaagacctccattaagaaga

SEQ ID NO: 106543 - DNA, 25 bp, Artificial
  Probe
agaaacggaagacctccattaagaa

SEQ ID NO: 106544 - DNA, 25 bp, Artificial
  Probe
aagaaacggaagacctccattaaga

SEQ ID NO: 106545 - DNA, 25 bp, Artificial
  Probe
ggcaaaggattgtcagagaaagaga

SEQ ID NO: 106546 - DNA, 25 bp, Artificial
  Probe
agaagactctaagcagctttaccaa

SEQ ID NO: 106547 - DNA, 25 bp, Artificial
  Probe
tgaagaaacggaagacctccattaa

SEQ ID NO: 106548 - DNA, 25 bp, Artificial
  Probe
gaggagaagactctaagcagcttta

SEQ ID NO: 106549 - DNA, 25 bp, Artificial
  Probe
actgtgaactcatctcgaagccata

SEQ ID NO: 106550 - DNA, 25 bp, Artificial
  Probe
ctgaagaaacggaagacctccatta

SEQ ID NO: 106551 - DNA, 25 bp, Artificial
  Probe
aggagaagactctaagcagctttac

SEQ ID NO: 106552 - DNA, 25 bp, Artificial
  Probe
atgctattgtaacttgcttgagaac

SEQ ID NO: 106553 - DNA, 25 bp, Artificial
  Probe
tgctattgtaacttgcttgagaact

SEQ ID NO: 106554 - DNA, 25 bp, Artificial
  Probe
aatgctattgtaacttgcttgagaa

SEQ ID NO: 106555 - DNA, 25 bp, Artificial
  Probe
aaatgctattgtaacttgcttgaga

SEQ ID NO: 106556 - DNA, 25 bp, Artificial
  Probe
accttaaatgctattgtaacttgct

SEQ ID NO: 106557 - DNA, 25 bp, Artificial
  Probe
gaccttaaatgctattgtaacttgc

SEQ ID NO: 106558 - DNA, 25 bp, Artificial
  Probe
attggaagaccttaaatgctattgt

SEQ ID NO: 106559 - DNA, 25 bp, Artificial
  Probe
gaaagcaacttcccaatagtgtttg

SEQ ID NO: 106560 - DNA, 25 bp, Artificial
  Probe
atgaaagcaacttcccaatagtgtt

SEQ ID NO: 106561 - DNA, 25 bp, Artificial
  Probe
tggaagaccttaaatgctattgtaa

SEQ ID NO: 106562 - DNA, 25 bp, Artificial
  Probe
ttggaagaccttaaatgctattgta

SEQ ID NO: 106563 - DNA, 25 bp, Artificial
  Probe
ccttaaatgctattgtaacttgctt

SEQ ID NO: 106564 - DNA, 25 bp, Artificial
  Probe
tgaaagcaacttcccaatagtgttt

SEQ ID NO: 106565 - DNA, 25 bp, Artificial
  Probe
taaatgctattgtaacttgcttgag

SEQ ID NO: 106566 - DNA, 25 bp, Artificial
  Probe
ggaagaccttaaatgctattgtaac

SEQ ID NO: 106567 - DNA, 25 bp, Artificial
  Probe
aaataactggcaccatctacccttt

SEQ ID NO: 106568 - DNA, 25 bp, Artificial
  Probe
ttaaatgctattgtaacttgcttga

SEQ ID NO: 106569 - DNA, 25 bp, Artificial
  Probe
agaccttaaatgctattgtaacttg

SEQ ID NO: 106570 - DNA, 25 bp, Artificial
  Probe
cttaaatgctattgtaacttgcttg

SEQ ID NO: 106571 - DNA, 25 bp, Artificial
  Probe
catgaaagcaacttcccaatagtgt

SEQ ID NO: 106572 - DNA, 25 bp, Artificial
  Probe
caaataactggcaccatctaccctt

SEQ ID NO: 106573 - DNA, 25 bp, Artificial
  Probe
gaagaccttaaatgctattgtaact

SEQ ID NO: 106574 - DNA, 25 bp, Artificial
  Probe
tattggaagaccttaaatgctattg

SEQ ID NO: 106575 - DNA, 25 bp, Artificial
  Probe
cagcgtggactctggaacataattc

SEQ ID NO: 106576 - DNA, 25 bp, Artificial
  Probe
ccatgaaagcaacttcccaatagtg

SEQ ID NO: 106577 - DNA, 25 bp, Artificial
  Probe
aagaccttaaatgctattgtaactt

SEQ ID NO: 106578 - DNA, 25 bp, Artificial
  Probe
ataattcctgccatgaaagcaactt

SEQ ID NO: 106579 - DNA, 25 bp, Artificial
  Probe
atggcaaacaaaagcaattaaaatt

SEQ ID NO: 106580 - DNA, 25 bp, Artificial
  Probe
catggcaaacaaaagcaattaaaat

SEQ ID NO: 106581 - DNA, 25 bp, Artificial
  Probe
aacataattcctgccatgaaagcaa

SEQ ID NO: 106582 - DNA, 25 bp, Artificial
  Probe
aaagtttctttctcctgtggtctgg

SEQ ID NO: 106583 - DNA, 25 bp, Artificial
  Probe
tctggaacataattcctgccatgaa

SEQ ID NO: 106584 - DNA, 25 bp, Artificial
  Probe
taattcctgccatgaaagcaacttc

SEQ ID NO: 106585 - DNA, 25 bp, Artificial
  Probe
cataattcctgccatgaaagcaact

SEQ ID NO: 106586 - DNA, 25 bp, Artificial
  Probe
gaacataattcctgccatgaaagca

SEQ ID NO: 106587 - DNA, 25 bp, Artificial
  Probe
tggcaaacaaaagcaattaaaatta

SEQ ID NO: 106588 - DNA, 25 bp, Artificial
  Probe
acataattcctgccatgaaagcaac

SEQ ID NO: 106589 - DNA, 25 bp, Artificial
  Probe
gccatgaaagcaacttcccaatagt

SEQ ID NO: 106590 - DNA, 25 bp, Artificial
  Probe
ctctggaacataattcctgccatga

SEQ ID NO: 106591 - DNA, 25 bp, Artificial
  Probe
gactctggaacataattcctgccat

SEQ ID NO: 106592 - DNA, 25 bp, Artificial
  Probe
agtgtttggaattacgttttctgtt

SEQ ID NO: 106593 - DNA, 25 bp, Artificial
  Probe
gtgtttggaattacgttttctgttc

SEQ ID NO: 106594 - DNA, 25 bp, Artificial
  Probe
aagtttctttctcctgtggtctggg

SEQ ID NO: 106595 - DNA, 25 bp, Artificial
  Probe
tagtgtttggaattacgttttctgt

SEQ ID NO: 106596 - DNA, 25 bp, Artificial
  Probe
actctggaacataattcctgccatg

SEQ ID NO: 106597 - DNA, 25 bp, Artificial
  Probe
ccacttctcattcctcaagatgtcc

SEQ ID NO: 106598 - DNA, 25 bp, Artificial
  Probe
ggtcctaaatccagttctcacattg

SEQ ID NO: 106599 - DNA, 25 bp, Artificial
  Probe
ttctacatcccacttctcattcctc

SEQ ID NO: 106600 - DNA, 25 bp, Artificial
  Probe
ctacatcccacttctcattcctcaa

SEQ ID NO: 106601 - DNA, 25 bp, Artificial
  Probe
gttctacatcccacttctcattcct

SEQ ID NO: 106602 - DNA, 25 bp, Artificial
  Probe
tacatcccacttctcattcctcaag

SEQ ID NO: 106603 - DNA, 25 bp, Artificial
  Probe
gacacctactctgagaaccctaaac

SEQ ID NO: 106604 - DNA, 25 bp, Artificial
  Probe
cttctcattcctcaagatgtccctt

SEQ ID NO: 106605 - DNA, 25 bp, Artificial
  Probe
atcccacttctcattcctcaagatg

SEQ ID NO: 106606 - DNA, 25 bp, Artificial
  Probe
catcccacttctcattcctcaagat

SEQ ID NO: 106607 - DNA, 25 bp, Artificial
  Probe
tctacatcccacttctcattcctca

SEQ ID NO: 106608 - DNA, 25 bp, Artificial
  Probe
tgacacctactctgagaaccctaaa

SEQ ID NO: 106609 - DNA, 25 bp, Artificial
  Probe
taaatccagttctcacattgggaat

SEQ ID NO: 106610 - DNA, 25 bp, Artificial
  Probe
ggttctacatcccacttctcattcc

SEQ ID NO: 106611 - DNA, 25 bp, Artificial
  Probe
ctaaatccagttctcacattgggaa

SEQ ID NO: 106612 - DNA, 25 bp, Artificial
  Probe
ctgacacctactctgagaaccctaa

SEQ ID NO: 106613 - DNA, 25 bp, Artificial
  Probe
aaatccagttctcacattgggaatc

SEQ ID NO: 106614 - DNA, 25 bp, Artificial
  Probe
gtcctaaatccagttctcacattgg

SEQ ID NO: 106615 - DNA, 25 bp, Artificial
  Probe
cacttctcattcctcaagatgtccc

SEQ ID NO: 106616 - DNA, 25 bp, Artificial
  Probe
cccacttctcattcctcaagatgtc

SEQ ID NO: 106617 - DNA, 25 bp, Artificial
  Probe
tggtcctaaatccagttctcacatt

SEQ ID NO: 106618 - DNA, 25 bp, Artificial
  Probe
acttctcattcctcaagatgtccct

SEQ ID NO: 106619 - DNA, 25 bp, Artificial
  Probe
acacctactctgagaaccctaaacc

SEQ ID NO: 106620 - DNA, 25 bp, Artificial
  Probe
tggttctacatcccacttctcattc

SEQ ID NO: 106621 - DNA, 25 bp, Artificial
  Probe
ctggttctacatcccacttctcatt

SEQ ID NO: 106622 - DNA, 25 bp, Artificial
  Probe
tcccacttctcattcctcaagatgt

SEQ ID NO: 106623 - DNA, 25 bp, Artificial
  Probe
acatcccacttctcattcctcaaga

SEQ ID NO: 106624 - DNA, 25 bp, Artificial
  Probe
cctaaatccagttctcacattggga

SEQ ID NO: 106625 - DNA, 25 bp, Artificial
  Probe
tcctaaatccagttctcacattggg

SEQ ID NO: 106626 - DNA, 25 bp, Artificial
  Probe
gtggtcctaaatccagttctcacat

SEQ ID NO: 106627 - DNA, 25 bp, Artificial
  Probe
gaatccccaagtccatttagaatcc

SEQ ID NO: 106628 - DNA, 25 bp, Artificial
  Probe
ctcttctccgactgacacctactct

SEQ ID NO: 106629 - DNA, 25 bp, Artificial
  Probe
aacaaatcccagtctctgaccaatg

SEQ ID NO: 106630 - DNA, 25 bp, Artificial
  Probe
caacaaatcccagtctctgaccaat

SEQ ID NO: 106631 - DNA, 25 bp, Artificial
  Probe
aatccccaagtccatttagaatcct

SEQ ID NO: 106632 - DNA, 25 bp, Artificial
  Probe
actgacacctactctgagaacccta

SEQ ID NO: 106633 - DNA, 25 bp, Artificial
  Probe
aatccagttctcacattgggaatcc

SEQ ID NO: 106634 - DNA, 25 bp, Artificial
  Probe
cacctactctgagaaccctaaaccc

SEQ ID NO: 106635 - DNA, 25 bp, Artificial
  Probe
cttctccgactgacacctactctga

SEQ ID NO: 106636 - DNA, 25 bp, Artificial
  Probe
tcttctccgactgacacctactctg

SEQ ID NO: 106637 - DNA, 25 bp, Artificial
  Probe
atccccaagtccatttagaatcctg

SEQ ID NO: 106638 - DNA, 25 bp, Artificial
  Probe
tctctgaccaatgccttcaaccttc

SEQ ID NO: 106639 - DNA, 25 bp, Artificial
  Probe
ctactctgagaaccctaaaccccta

SEQ ID NO: 106640 - DNA, 25 bp, Artificial
  Probe
tccgactgacacctactctgagaac

SEQ ID NO: 106641 - DNA, 25 bp, Artificial
  Probe
ctccgactgacacctactctgagaa

SEQ ID NO: 106642 - DNA, 25 bp, Artificial
  Probe
taagttgttattgacagactggtgt

SEQ ID NO: 106643 - DNA, 25 bp, Artificial
  Probe
ttgtaccttggtgtccgaataatta

SEQ ID NO: 106644 - DNA, 25 bp, Artificial
  Probe
gttgtaccttggtgtccgaataatt

SEQ ID NO: 106645 - DNA, 25 bp, Artificial
  Probe
ttaagttgttattgacagactggtg

SEQ ID NO: 106646 - DNA, 25 bp, Artificial
  Probe
tgtaccttggtgtccgaataattac

SEQ ID NO: 106647 - DNA, 25 bp, Artificial
  Probe
aagttgttattgacagactggtgtg

SEQ ID NO: 106648 - DNA, 25 bp, Artificial
  Probe
taccttggtgtccgaataattacaa

SEQ ID NO: 106649 - DNA, 25 bp, Artificial
  Probe
gtaccttggtgtccgaataattaca

SEQ ID NO: 106650 - DNA, 25 bp, Artificial
  Probe
tgttgtaccttggtgtccgaataat

SEQ ID NO: 106651 - DNA, 25 bp, Artificial
  Probe
atgttgtaccttggtgtccgaataa

SEQ ID NO: 106652 - DNA, 25 bp, Artificial
  Probe
aatgttgtaccttggtgtccgaata

SEQ ID NO: 106653 - DNA, 25 bp, Artificial
  Probe
actggttagaggaaatcacaagaat

SEQ ID NO: 106654 - DNA, 25 bp, Artificial
  Probe
ctactggttagaggaaatcacaaga

SEQ ID NO: 106655 - DNA, 25 bp, Artificial
  Probe
ctggttagaggaaatcacaagaatg

SEQ ID NO: 106656 - DNA, 25 bp, Artificial
  Probe
gggctctctttaagttgttattgac

SEQ ID NO: 106657 - DNA, 25 bp, Artificial
  Probe
tactggttagaggaaatcacaagaa

SEQ ID NO: 106658 - DNA, 25 bp, Artificial
  Probe
aattaataagagctggctgacatgc

SEQ ID NO: 106659 - DNA, 25 bp, Artificial
  Probe
gactatcccacctgattctacataa

SEQ ID NO: 106660 - DNA, 25 bp, Artificial
  Probe
ttgtcgctggtgaataagaaattaa

SEQ ID NO: 106661 - DNA, 25 bp, Artificial
  Probe
gctactggttagaggaaatcacaag

SEQ ID NO: 106662 - DNA, 25 bp, Artificial
  Probe
agactatcccacctgattctacata

SEQ ID NO: 106663 - DNA, 25 bp, Artificial
  Probe
cttgtcgctggtgaataagaaatta

SEQ ID NO: 106664 - DNA, 25 bp, Artificial
  Probe
cgggctctctttaagttgttattga

SEQ ID NO: 106665 - DNA, 25 bp, Artificial
  Probe
actatcccacctgattctacataaa

SEQ ID NO: 106666 - DNA, 25 bp, Artificial
  Probe
gagactatcccacctgattctacat

SEQ ID NO: 106667 - DNA, 25 bp, Artificial
  Probe
atgttccacttagacgaaatagagt

SEQ ID NO: 106668 - DNA, 25 bp, Artificial
  Probe
gttagaaatcctgaccaagaacctc

SEQ ID NO: 106669 - DNA, 25 bp, Artificial
  Probe
tgctactggttagaggaaatcacaa

SEQ ID NO: 106670 - DNA, 25 bp, Artificial
  Probe
tgcttatatgataaatggcttggtt

SEQ ID NO: 106671 - DNA, 25 bp, Artificial
  Probe
atgcttatatgataaatggcttggt

SEQ ID NO: 106672 - DNA, 25 bp, Artificial
  Probe
agaataacaaggatataagtggaga

SEQ ID NO: 106673 - DNA, 25 bp, Artificial
  Probe
tggttagaggaaatcacaagaatgt

SEQ ID NO: 106674 - DNA, 25 bp, Artificial
  Probe
gatttgaccactgctgagaaattaa

SEQ ID NO: 106675 - DNA, 25 bp, Artificial
  Probe
ggttagaggaaatcacaagaatgtc

SEQ ID NO: 106676 - DNA, 25 bp, Artificial
  Probe
ttagaaatcctgaccaagaacctcc

SEQ ID NO: 106677 - DNA, 25 bp, Artificial
  Probe
agatttgaccactgctgagaaatta

SEQ ID NO: 106678 - DNA, 25 bp, Artificial
  Probe
aaaggatctatttcggatttgttgt

SEQ ID NO: 106679 - DNA, 25 bp, Artificial
  Probe
atttgaccactgctgagaaattaaa

SEQ ID NO: 106680 - DNA, 25 bp, Artificial
  Probe
ggctctctttaagttgttattgaca

SEQ ID NO: 106681 - DNA, 25 bp, Artificial
  Probe
atgagaaatgttgtaccttggtgtc

SEQ ID NO: 106682 - DNA, 25 bp, Artificial
  Probe
gatgagaaatgttgtaccttggtgt

SEQ ID NO: 106683 - DNA, 25 bp, Artificial
  Probe
aggatctatttcggatttgttgtac

SEQ ID NO: 106684 - DNA, 25 bp, Artificial
  Probe
ataacaaggatataagtggagaact

SEQ ID NO: 106685 - DNA, 25 bp, Artificial
  Probe
ctgtgctactggttagaggaaatca

SEQ ID NO: 106686 - DNA, 25 bp, Artificial
  Probe
cttagacgaaatagagtcccaacat

SEQ ID NO: 106687 - DNA, 25 bp, Artificial
  Probe
cacacatttcaacaaagggacatat

SEQ ID NO: 106688 - DNA, 25 bp, Artificial
  Probe
acacatttcaacaaagggacatatt

SEQ ID NO: 106689 - DNA, 25 bp, Artificial
  Probe
cacatttcaacaaagggacatattc

SEQ ID NO: 106690 - DNA, 25 bp, Artificial
  Probe
ccacacatttcaacaaagggacata

SEQ ID NO: 106691 - DNA, 25 bp, Artificial
  Probe
ggaataaaggatctctgctcacaaa

SEQ ID NO: 106692 - DNA, 25 bp, Artificial
  Probe
ctgtgaccctcctatcttaacttcc

SEQ ID NO: 106693 - DNA, 25 bp, Artificial
  Probe
cctgtgaccctcctatcttaacttc

SEQ ID NO: 106694 - DNA, 25 bp, Artificial
  Probe
ttaaatctctccttgtccatctggg

SEQ ID NO: 106695 - DNA, 25 bp, Artificial
  Probe
gaccctcctatcttaacttcccaag

SEQ ID NO: 106696 - DNA, 25 bp, Artificial
  Probe
gaacctgtgaccctcctatcttaac

SEQ ID NO: 106697 - DNA, 25 bp, Artificial
  Probe
tgaccctcctatcttaacttcccaa

SEQ ID NO: 106698 - DNA, 25 bp, Artificial
  Probe
acctgtgaccctcctatcttaactt

SEQ ID NO: 106699 - DNA, 25 bp, Artificial
  Probe
aacctgtgaccctcctatcttaact

SEQ ID NO: 106700 - DNA, 25 bp, Artificial
  Probe
tgaacctgtgaccctcctatcttaa

SEQ ID NO: 106701 - DNA, 25 bp, Artificial
  Probe
tttaaatctctccttgtccatctgg

SEQ ID NO: 106702 - DNA, 25 bp, Artificial
  Probe
cctttaaatctctccttgtccatct

SEQ ID NO: 106703 - DNA, 25 bp, Artificial
  Probe
acatttcaacaaagggacatattcc

SEQ ID NO: 106704 - DNA, 25 bp, Artificial
  Probe
ctttaaatctctccttgtccatctg

SEQ ID NO: 106705 - DNA, 25 bp, Artificial
  Probe
ccctttaaatctctccttgtccatc

SEQ ID NO: 106706 - DNA, 25 bp, Artificial
  Probe
aaggatgctgggaataaaggatctc

SEQ ID NO: 106707 - DNA, 25 bp, Artificial
  Probe
ctgaacctgtgaccctcctatctta

SEQ ID NO: 106708 - DNA, 25 bp, Artificial
  Probe
gggaataaaggatctctgctcacaa

SEQ ID NO: 106709 - DNA, 25 bp, Artificial
  Probe
caaggatgctgggaataaaggatct

SEQ ID NO: 106710 - DNA, 25 bp, Artificial
  Probe
gtgaccctcctatcttaacttccca

SEQ ID NO: 106711 - DNA, 25 bp, Artificial
  Probe
tgtgaccctcctatcttaacttccc

SEQ ID NO: 106712 - DNA, 25 bp, Artificial
  Probe
ctgggaataaaggatctctgctcac

SEQ ID NO: 106713 - DNA, 25 bp, Artificial
  Probe
ggatgctgggaataaaggatctctg

SEQ ID NO: 106714 - DNA, 25 bp, Artificial
  Probe
aggatgctgggaataaaggatctct

SEQ ID NO: 106715 - DNA, 25 bp, Artificial
  Probe
gaacttgatatggctgaccctgaac

SEQ ID NO: 106716 - DNA, 25 bp, Artificial
  Probe
cagactgccacacatttcaacaaag

SEQ ID NO: 106717 - DNA, 25 bp, Artificial
  Probe
atagattcgaacttgatatggctga

SEQ ID NO: 106718 - DNA, 25 bp, Artificial
  Probe
ggatagattcgaacttgatatggct

SEQ ID NO: 106719 - DNA, 25 bp, Artificial
  Probe
aggatagattcgaacttgatatggc

SEQ ID NO: 106720 - DNA, 25 bp, Artificial
  Probe
tagattcgaacttgatatggctgac

SEQ ID NO: 106721 - DNA, 25 bp, Artificial
  Probe
gatagattcgaacttgatatggctg

SEQ ID NO: 106722 - DNA, 25 bp, Artificial
  Probe
gccctttaaatctctccttgtccat

SEQ ID NO: 106723 - DNA, 25 bp, Artificial
  Probe
tgggaataaaggatctctgctcaca

SEQ ID NO: 106724 - DNA, 25 bp, Artificial
  Probe
gatcagagagatgagtagtgggagg

SEQ ID NO: 106725 - DNA, 25 bp, Artificial
  Probe
gatgctgggaataaaggatctctgc

SEQ ID NO: 106726 - DNA, 25 bp, Artificial
  Probe
tgtgccctttaaatctctccttgtc

SEQ ID NO: 106727 - DNA, 25 bp, Artificial
  Probe
ctgtgtgccctttaaatctctcctt

SEQ ID NO: 106728 - DNA, 25 bp, Artificial
  Probe
accctcctatcttaacttcccaagg

SEQ ID NO: 106729 - DNA, 25 bp, Artificial
  Probe
gaataaaggatctctgctcacaaaa

SEQ ID NO: 106730 - DNA, 25 bp, Artificial
  Probe
gtgtgccctttaaatctctccttgt

SEQ ID NO: 106731 - DNA, 25 bp, Artificial
  Probe
tgtgtgccctttaaatctctccttg

SEQ ID NO: 106732 - DNA, 25 bp, Artificial
  Probe
cgataccttaggactgaagagagtt

SEQ ID NO: 106733 - DNA, 25 bp, Artificial
  Probe
ctttggatgtgatgtctttgctttg

SEQ ID NO: 106734 - DNA, 25 bp, Artificial
  Probe
gataccttaggactgaagagagttt

SEQ ID NO: 106735 - DNA, 25 bp, Artificial
  Probe
gcgataccttaggactgaagagagt

SEQ ID NO: 106736 - DNA, 25 bp, Artificial
  Probe
cctttggatgtgatgtctttgcttt

SEQ ID NO: 106737 - DNA, 25 bp, Artificial
  Probe
tttggatgtgatgtctttgctttgg

SEQ ID NO: 106738 - DNA, 25 bp, Artificial
  Probe
ggcgataccttaggactgaagagag

SEQ ID NO: 106739 - DNA, 25 bp, Artificial
  Probe
caagcctttggatgtgatgtctttg

SEQ ID NO: 106740 - DNA, 25 bp, Artificial
  Probe
ctttgctttggggttatttcctttt

SEQ ID NO: 106741 - DNA, 25 bp, Artificial
  Probe
gatgtctttgctttggggttatttc

SEQ ID NO: 106742 - DNA, 25 bp, Artificial
  Probe
tctttgctttggggttatttccttt

SEQ ID NO: 106743 - DNA, 25 bp, Artificial
  Probe
caggcgataccttaggactgaagag

SEQ ID NO: 106744 - DNA, 25 bp, Artificial
  Probe
tgatgtctttgctttggggttattt

SEQ ID NO: 106745 - DNA, 25 bp, Artificial
  Probe
aggcgataccttaggactgaagaga

SEQ ID NO: 106746 - DNA, 25 bp, Artificial
  Probe
gtctttgctttggggttatttcctt

SEQ ID NO: 106747 - DNA, 25 bp, Artificial
  Probe
atgtctttgctttggggttatttcc

SEQ ID NO: 106748 - DNA, 25 bp, Artificial
  Probe
gtgatgtctttgctttggggttatt

SEQ ID NO: 106749 - DNA, 25 bp, Artificial
  Probe
tctttatcccttcccagagtcaagc

SEQ ID NO: 106750 - DNA, 25 bp, Artificial
  Probe
ttggatgtgatgtctttgctttggg

SEQ ID NO: 106751 - DNA, 25 bp, Artificial
  Probe
ataccttaggactgaagagagtttt

SEQ ID NO: 106752 - DNA, 25 bp, Artificial
  Probe
tttgtaaagcagacgctactctcaa

SEQ ID NO: 106753 - DNA, 25 bp, Artificial
  Probe
gcctttggatgtgatgtctttgctt

SEQ ID NO: 106754 - DNA, 25 bp, Artificial
  Probe
tctctcaagaactttgtacagcaag

SEQ ID NO: 106755 - DNA, 25 bp, Artificial
  Probe
ttgtaaagcagacgctactctcaag

SEQ ID NO: 106756 - DNA, 25 bp, Artificial
  Probe
gtctctcaagaactttgtacagcaa

SEQ ID NO: 106757 - DNA, 25 bp, Artificial
  Probe
aagcctttggatgtgatgtctttgc

SEQ ID NO: 106758 - DNA, 25 bp, Artificial
  Probe
tgtctttgctttggggttatttcct

SEQ ID NO: 106759 - DNA, 25 bp, Artificial
  Probe
tgtgatgtctttgctttggggttat

SEQ ID NO: 106760 - DNA, 25 bp, Artificial
  Probe
atgtgatgtctttgctttggggtta

SEQ ID NO: 106761 - DNA, 25 bp, Artificial
  Probe
gcaagcctttggatgtgatgtcttt

SEQ ID NO: 106762 - DNA, 25 bp, Artificial
  Probe
ctctttatcccttcccagagtcaag

SEQ ID NO: 106763 - DNA, 25 bp, Artificial
  Probe
ctttatcccttcccagagtcaagct

SEQ ID NO: 106764 - DNA, 25 bp, Artificial
  Probe
caagcatttgacaaaactgtttatt

SEQ ID NO: 106765 - DNA, 25 bp, Artificial
  Probe
acgctactctcaagcatttgacaaa

SEQ ID NO: 106766 - DNA, 25 bp, Artificial
  Probe
tactctcaagcatttgacaaaactg

SEQ ID NO: 106767 - DNA, 25 bp, Artificial
  Probe
ctactctcaagcatttgacaaaact

SEQ ID NO: 106768 - DNA, 25 bp, Artificial
  Probe
tctcaagcatttgacaaaactgttt

SEQ ID NO: 106769 - DNA, 25 bp, Artificial
  Probe
ttcctctttatcccttcccagagtc

SEQ ID NO: 106770 - DNA, 25 bp, Artificial
  Probe
cttcctctttatcccttcccagagt

SEQ ID NO: 106771 - DNA, 25 bp, Artificial
  Probe
ctctcaagcatttgacaaaactgtt

SEQ ID NO: 106772 - DNA, 25 bp, Artificial
  Probe
ggtctctcaagaactttgtacagca

SEQ ID NO: 106773 - DNA, 25 bp, Artificial
  Probe
aagcatttgacaaaactgtttattt

SEQ ID NO: 106774 - DNA, 25 bp, Artificial
  Probe
ctcaagcatttgacaaaactgttta

SEQ ID NO: 106775 - DNA, 25 bp, Artificial
  Probe
tttatcccttcccagagtcaagctg

SEQ ID NO: 106776 - DNA, 25 bp, Artificial
  Probe
gctactctcaagcatttgacaaaac

SEQ ID NO: 106777 - DNA, 25 bp, Artificial
  Probe
gatggagaatagcaatgtggaagtg

SEQ ID NO: 106778 - DNA, 25 bp, Artificial
  Probe
atggagaatagcaatgtggaagtgt

SEQ ID NO: 106779 - DNA, 25 bp, Artificial
  Probe
tggagaatagcaatgtggaagtgtt

SEQ ID NO: 106780 - DNA, 25 bp, Artificial
  Probe
ggagaatagcaatgtggaagtgttg

SEQ ID NO: 106781 - DNA, 25 bp, Artificial
  Probe
ggatggagaatagcaatgtggaagt

SEQ ID NO: 106782 - DNA, 25 bp, Artificial
  Probe
gtattgacatttctaacgatggcac

SEQ ID NO: 106783 - DNA, 25 bp, Artificial
  Probe
tattgacatttctaacgatggcacc

SEQ ID NO: 106784 - DNA, 25 bp, Artificial
  Probe
ttgtattgacatttctaacgatggc

SEQ ID NO: 106785 - DNA, 25 bp, Artificial
  Probe
tgtattgacatttctaacgatggca

SEQ ID NO: 106786 - DNA, 25 bp, Artificial
  Probe
atctctgcggatgacaagtacattg

SEQ ID NO: 106787 - DNA, 25 bp, Artificial
  Probe
gttgtattgacatttctaacgatgg

SEQ ID NO: 106788 - DNA, 25 bp, Artificial
  Probe
caagaaagctacggtttatgaagtt

SEQ ID NO: 106789 - DNA, 25 bp, Artificial
  Probe
gacaagaaagctacggtttatgaag

SEQ ID NO: 106790 - DNA, 25 bp, Artificial
  Probe
ttgaatgcttggaggacaccttatg

SEQ ID NO: 106791 - DNA, 25 bp, Artificial
  Probe
acaagaaagctacggtttatgaagt

SEQ ID NO: 106792 - DNA, 25 bp, Artificial
  Probe
atttattaaggacaaatcttcgtgc

SEQ ID NO: 106793 - DNA, 25 bp, Artificial
  Probe
ggacaagaaagctacggtttatgaa

SEQ ID NO: 106794 - DNA, 25 bp, Artificial
  Probe
aagaaagctacggtttatgaagtta

SEQ ID NO: 106795 - DNA, 25 bp, Artificial
  Probe
aaatggtttgtaagacctggaaagg

SEQ ID NO: 106796 - DNA, 25 bp, Artificial
  Probe
attaaggacaaatcttcgtgcaaac

SEQ ID NO: 106797 - DNA, 25 bp, Artificial
  Probe
tattaaggacaaatcttcgtgcaaa

SEQ ID NO: 106798 - DNA, 25 bp, Artificial
  Probe
ttattaaggacaaatcttcgtgcaa

SEQ ID NO: 106799 - DNA, 25 bp, Artificial
  Probe
tttattaaggacaaatcttcgtgca

SEQ ID NO: 106800 - DNA, 25 bp, Artificial
  Probe
agaaagctacggtttatgaagttat

SEQ ID NO: 106801 - DNA, 25 bp, Artificial
  Probe
agttgtattgacatttctaacgatg

SEQ ID NO: 106802 - DNA, 25 bp, Artificial
  Probe
aaaccaaggatttcaataccattgc

SEQ ID NO: 106803 - DNA, 25 bp, Artificial
  Probe
aataccagttgcatcttcatgagag

SEQ ID NO: 106804 - DNA, 25 bp, Artificial
  Probe
gacaaataccagttgcatcttcatg

SEQ ID NO: 106805 - DNA, 25 bp, Artificial
  Probe
agacaaataccagttgcatcttcat

SEQ ID NO: 106806 - DNA, 25 bp, Artificial
  Probe
ttaaggacaaatcttcgtgcaaact

SEQ ID NO: 106807 - DNA, 25 bp, Artificial
  Probe
gggatggagaatagcaatgtggaag

SEQ ID NO: 106808 - DNA, 25 bp, Artificial
  Probe
cttccagtccaaagaatcctcatcg

SEQ ID NO: 106809 - DNA, 25 bp, Artificial
  Probe
tttgaatgcttggaggacaccttat

SEQ ID NO: 106810 - DNA, 25 bp, Artificial
  Probe
aatggtttgtaagacctggaaagga

SEQ ID NO: 106811 - DNA, 25 bp, Artificial
  Probe
cccattctaaaaccaaggatttcaa

SEQ ID NO: 106812 - DNA, 25 bp, Artificial
  Probe
cacccattctaaaaccaaggatttc

SEQ ID NO: 106813 - DNA, 25 bp, Artificial
  Probe
attgacatttctaacgatggcacca

SEQ ID NO: 106814 - DNA, 25 bp, Artificial
  Probe
acccattctaaaaccaaggatttca

SEQ ID NO: 106815 - DNA, 25 bp, Artificial
  Probe
tcacccattctaaaaccaaggattt

SEQ ID NO: 106816 - DNA, 25 bp, Artificial
  Probe
gaaagctacggtttatgaagttatt

SEQ ID NO: 106817 - DNA, 25 bp, Artificial
  Probe
cagacaaataccagttgcatcttca

SEQ ID NO: 106818 - DNA, 25 bp, Artificial
  Probe
caaatggtttgtaagacctggaaag

SEQ ID NO: 106819 - DNA, 25 bp, Artificial
  Probe
ctcacccattctaaaaccaaggatt

SEQ ID NO: 106820 - DNA, 25 bp, Artificial
  Probe
atcttccagtccaaagaatcctcat

SEQ ID NO: 106821 - DNA, 25 bp, Artificial
  Probe
taaggacaaatcttcgtgcaaactg

SEQ ID NO: 106822 - DNA, 25 bp, Artificial
  Probe
attgatgatgagattacagaagcca

SEQ ID NO: 106823 - DNA, 25 bp, Artificial
  Probe
ttggactatgaatggaaggttgtaa

SEQ ID NO: 106824 - DNA, 25 bp, Artificial
  Probe
gttggactatgaatggaaggttgta

SEQ ID NO: 106825 - DNA, 25 bp, Artificial
  Probe
ttgatgatgagattacagaagccaa

SEQ ID NO: 106826 - DNA, 25 bp, Artificial
  Probe
tattgatgatgagattacagaagcc

SEQ ID NO: 106827 - DNA, 25 bp, Artificial
  Probe
ccgaagtattgatgatgagattaca

SEQ ID NO: 106828 - DNA, 25 bp, Artificial
  Probe
caatcaagcagttggactatgaatg

SEQ ID NO: 106829 - DNA, 25 bp, Artificial
  Probe
tccgaagtattgatgatgagattac

SEQ ID NO: 106830 - DNA, 25 bp, Artificial
  Probe
ctcagaagtctctcttacctcatcc

SEQ ID NO: 106831 - DNA, 25 bp, Artificial
  Probe
cctcagaagtctctcttacctcatc

SEQ ID NO: 106832 - DNA, 25 bp, Artificial
  Probe
aatcaagcagttggactatgaatgg

SEQ ID NO: 106833 - DNA, 25 bp, Artificial
  Probe
gctataccaagtggatagtaggact

SEQ ID NO: 106834 - DNA, 25 bp, Artificial
  Probe
cagttggactatgaatggaaggttg

SEQ ID NO: 106835 - DNA, 25 bp, Artificial
  Probe
tagagcaatcaagcagttggactat

SEQ ID NO: 106836 - DNA, 25 bp, Artificial
  Probe
gtattgatgatgagattacagaagc

SEQ ID NO: 106837 - DNA, 25 bp, Artificial
  Probe
agttggactatgaatggaaggttgt

SEQ ID NO: 106838 - DNA, 25 bp, Artificial
  Probe
agtctacagctataccaagtggata

SEQ ID NO: 106839 - DNA, 25 bp, Artificial
  Probe
caagcagttggactatgaatggaag

SEQ ID NO: 106840 - DNA, 25 bp, Artificial
  Probe
gcaatcaagcagttggactatgaat

SEQ ID NO: 106841 - DNA, 25 bp, Artificial
  Probe
aatgagtctacagctataccaagtg

SEQ ID NO: 106842 - DNA, 25 bp, Artificial
  Probe
ttccgaagtattgatgatgagatta

SEQ ID NO: 106843 - DNA, 25 bp, Artificial
  Probe
atcaagcagttggactatgaatgga

SEQ ID NO: 106844 - DNA, 25 bp, Artificial
  Probe
cgaagtattgatgatgagattacag

SEQ ID NO: 106845 - DNA, 25 bp, Artificial
  Probe
gagtctacagctataccaagtggat

SEQ ID NO: 106846 - DNA, 25 bp, Artificial
  Probe
tcaagcagttggactatgaatggaa

SEQ ID NO: 106847 - DNA, 25 bp, Artificial
  Probe
atgagtctacagctataccaagtgg

SEQ ID NO: 106848 - DNA, 25 bp, Artificial
  Probe
tgatgatgagattacagaagccaaa

SEQ ID NO: 106849 - DNA, 25 bp, Artificial
  Probe
tggactatgaatggaaggttgtaaa

SEQ ID NO: 106850 - DNA, 25 bp, Artificial
  Probe
gatgatgagattacagaagccaaat

SEQ ID NO: 106851 - DNA, 25 bp, Artificial
  Probe
gtagagcaatcaagcagttggacta

SEQ ID NO: 106852 - DNA, 25 bp, Artificial
  Probe
aagtgtgtagagcaatcaagcagtt

SEQ ID NO: 106853 - DNA, 25 bp, Artificial
  Probe
tctacagctataccaagtggatagt

SEQ ID NO: 106854 - DNA, 25 bp, Artificial
  Probe
gtctacagctataccaagtggatag

SEQ ID NO: 106855 - DNA, 25 bp, Artificial
  Probe
tggatttccgaagtattgatgatga

SEQ ID NO: 106856 - DNA, 25 bp, Artificial
  Probe
agctataccaagtggatagtaggac

SEQ ID NO: 106857 - DNA, 25 bp, Artificial
  Probe
cagctataccaagtggatagtagga

SEQ ID NO: 106858 - DNA, 25 bp, Artificial
  Probe
agaagtgtgtagagcaatcaagcag

SEQ ID NO: 106859 - DNA, 25 bp, Artificial
  Probe
tcagaagtctctcttacctcatccg

SEQ ID NO: 106860 - DNA, 25 bp, Artificial
  Probe
ggatttccgaagtattgatgatgag

SEQ ID NO: 106861 - DNA, 25 bp, Artificial
  Probe
ggactatgaatggaaggttgtaaac

SEQ ID NO: 106862 - DNA, 25 bp, Artificial
  Probe
ttggatttccgaagtattgatgatg

SEQ ID NO: 106863 - DNA, 25 bp, Artificial
  Probe
gaccaggaagtcacacgatagaatt

SEQ ID NO: 106864 - DNA, 25 bp, Artificial
  Probe
gatttccgaagtattgatgatgaga

SEQ ID NO: 106865 - DNA, 25 bp, Artificial
  Probe
acagctataccaagtggatagtagg

SEQ ID NO: 106866 - DNA, 25 bp, Artificial
  Probe
aagcagttggactatgaatggaagg

SEQ ID NO: 106867 - DNA, 25 bp, Artificial
  Probe
ctgctcagtattattgtctaagaga

SEQ ID NO: 106868 - DNA, 25 bp, Artificial
  Probe
ttgtatgcagttgataagaggaatt

SEQ ID NO: 106869 - DNA, 25 bp, Artificial
  Probe
tgctcagtattattgtctaagagaa

SEQ ID NO: 106870 - DNA, 25 bp, Artificial
  Probe
cttccctcttaaatggtgacagttg

SEQ ID NO: 106871 - DNA, 25 bp, Artificial
  Probe
actgctcagtattattgtctaagag

SEQ ID NO: 106872 - DNA, 25 bp, Artificial
  Probe
tttgagacttccctcttaaatggtg

SEQ ID NO: 106873 - DNA, 25 bp, Artificial
  Probe
tactactgtggaaagacaagtgttt

SEQ ID NO: 106874 - DNA, 25 bp, Artificial
  Probe
ttactactgtggaaagacaagtgtt

SEQ ID NO: 106875 - DNA, 25 bp, Artificial
  Probe
tttactactgtggaaagacaagtgt

SEQ ID NO: 106876 - DNA, 25 bp, Artificial
  Probe
ttgagacttccctcttaaatggtga

SEQ ID NO: 106877 - DNA, 25 bp, Artificial
  Probe
agacttccctcttaaatggtgacag

SEQ ID NO: 106878 - DNA, 25 bp, Artificial
  Probe
tgtatgcagttgataagaggaattc

SEQ ID NO: 106879 - DNA, 25 bp, Artificial
  Probe
aagttcttgtgatttggtctgggat

SEQ ID NO: 106880 - DNA, 25 bp, Artificial
  Probe
acttccctcttaaatggtgacagtt

SEQ ID NO: 106881 - DNA, 25 bp, Artificial
  Probe
tgcagttgataagaggaattcagta

SEQ ID NO: 106882 - DNA, 25 bp, Artificial
  Probe
atgcagttgataagaggaattcagt

SEQ ID NO: 106883 - DNA, 25 bp, Artificial
  Probe
aaagttcttgtgatttggtctggga

SEQ ID NO: 106884 - DNA, 25 bp, Artificial
  Probe
gagacttccctcttaaatggtgaca

SEQ ID NO: 106885 - DNA, 25 bp, Artificial
  Probe
tgagacttccctcttaaatggtgac

SEQ ID NO: 106886 - DNA, 25 bp, Artificial
  Probe
attgtattgaagacactttgtatgc

SEQ ID NO: 106887 - DNA, 25 bp, Artificial
  Probe
actcactgtcccaacaatcctaatt

SEQ ID NO: 106888 - DNA, 25 bp, Artificial
  Probe
gtatgcagttgataagaggaattca

SEQ ID NO: 106889 - DNA, 25 bp, Artificial
  Probe
gacttccctcttaaatggtgacagt

SEQ ID NO: 106890 - DNA, 25 bp, Artificial
  Probe
gccctatagtgagtcgtataacaaa

SEQ ID NO: 106891 - DNA, 25 bp, Artificial
  Probe
gtacatgccaacactttactactgt

SEQ ID NO: 106892 - DNA, 25 bp, Artificial
  Probe
ttccctcttaaatggtgacagttgg

SEQ ID NO: 106893 - DNA, 25 bp, Artificial
  Probe
gcagttgataagaggaattcagtat

SEQ ID NO: 106894 - DNA, 25 bp, Artificial
  Probe
tatgcagttgataagaggaattcag

SEQ ID NO: 106895 - DNA, 25 bp, Artificial
  Probe
ctgttctgcttcagggtattcagta

SEQ ID NO: 106896 - DNA, 25 bp, Artificial
  Probe
tacatgccaacactttactactgtg

SEQ ID NO: 106897 - DNA, 25 bp, Artificial
  Probe
acactttactactgtggaaagacaa

SEQ ID NO: 106898 - DNA, 25 bp, Artificial
  Probe
aacactttactactgtggaaagaca

SEQ ID NO: 106899 - DNA, 25 bp, Artificial
  Probe
caacactttactactgtggaaagac

SEQ ID NO: 106900 - DNA, 25 bp, Artificial
  Probe
ctttactactgtggaaagacaagtg

SEQ ID NO: 106901 - DNA, 25 bp, Artificial
  Probe
cactttactactgtggaaagacaag

SEQ ID NO: 106902 - DNA, 25 bp, Artificial
  Probe
ctttgtatgcagttgataagaggaa

SEQ ID NO: 106903 - DNA, 25 bp, Artificial
  Probe
gactcactgtcccaacaatcctaat

SEQ ID NO: 106904 - DNA, 25 bp, Artificial
  Probe
ccaacactttactactgtggaaaga

SEQ ID NO: 106905 - DNA, 25 bp, Artificial
  Probe
actttgtatgcagttgataagagga

SEQ ID NO: 106906 - DNA, 25 bp, Artificial
  Probe
cactttgtatgcagttgataagagg

SEQ ID NO: 106907 - DNA, 25 bp, Artificial
  Probe
ccaacaatcctaattgcctagaaat

SEQ ID NO: 106908 - DNA, 25 bp, Artificial
  Probe
gctcagtattattgtctaagagaat

SEQ ID NO: 106909 - DNA, 25 bp, Artificial
  Probe
gcaggaagttaaaccagacagttct

SEQ ID NO: 106910 - DNA, 25 bp, Artificial
  Probe
agcaggaagttaaaccagacagttc

SEQ ID NO: 106911 - DNA, 25 bp, Artificial
  Probe
gagcaggaagttaaaccagacagtt

SEQ ID NO: 106912 - DNA, 25 bp, Artificial
  Probe
tgaagacctgaagaaagacaatctc

SEQ ID NO: 106913 - DNA, 25 bp, Artificial
  Probe
ctgaagacctgaagaaagacaatct

SEQ ID NO: 106914 - DNA, 25 bp, Artificial
  Probe
cctgaagacctgaagaaagacaatc

SEQ ID NO: 106915 - DNA, 25 bp, Artificial
  Probe
agacctgaagaaagacaatctcatt

SEQ ID NO: 106916 - DNA, 25 bp, Artificial
  Probe
aagacctgaagaaagacaatctcat

SEQ ID NO: 106917 - DNA, 25 bp, Artificial
  Probe
gaagacctgaagaaagacaatctca

SEQ ID NO: 106918 - DNA, 25 bp, Artificial
  Probe
tcctgaagacctgaagaaagacaat

SEQ ID NO: 106919 - DNA, 25 bp, Artificial
  Probe
ctcctgaagacctgaagaaagacaa

SEQ ID NO: 106920 - DNA, 25 bp, Artificial
  Probe
ggaacctttcatgtctttcaagaga

SEQ ID NO: 106921 - DNA, 25 bp, Artificial
  Probe
ctctgtgccttgatggaatggaatc

SEQ ID NO: 106922 - DNA, 25 bp, Artificial
  Probe
aataccaactcctctgtgccttgat

SEQ ID NO: 106923 - DNA, 25 bp, Artificial
  Probe
gggaacctttcatgtctttcaagag

SEQ ID NO: 106924 - DNA, 25 bp, Artificial
  Probe
gacctgaagaaagacaatctcattg

SEQ ID NO: 106925 - DNA, 25 bp, Artificial
  Probe
ctgaagaaagacaatctcattgctg

SEQ ID NO: 106926 - DNA, 25 bp, Artificial
  Probe
gaagaaagacaatctcattgctgtg

SEQ ID NO: 106927 - DNA, 25 bp, Artificial
  Probe
tgaagaaagacaatctcattgctgt

SEQ ID NO: 106928 - DNA, 25 bp, Artificial
  Probe
cctgaagaaagacaatctcattgct

SEQ ID NO: 106929 - DNA, 25 bp, Artificial
  Probe
aaagacaatctcattgctgtggaaa

SEQ ID NO: 106930 - DNA, 25 bp, Artificial
  Probe
acctgaagaaagacaatctcattgc

SEQ ID NO: 106931 - DNA, 25 bp, Artificial
  Probe
ataccaactcctctgtgccttgatg

SEQ ID NO: 106932 - DNA, 25 bp, Artificial
  Probe
gaataccaactcctctgtgccttga

SEQ ID NO: 106933 - DNA, 25 bp, Artificial
  Probe
gaaagacaatctcattgctgtggaa

SEQ ID NO: 106934 - DNA, 25 bp, Artificial
  Probe
aagaaagacaatctcattgctgtgg

SEQ ID NO: 106935 - DNA, 25 bp, Artificial
  Probe
cctccctctaagacaccagaagttt

SEQ ID NO: 106936 - DNA, 25 bp, Artificial
  Probe
agaaagacaatctcattgctgtgga

SEQ ID NO: 106937 - DNA, 25 bp, Artificial
  Probe
cctctgtgccttgatggaatggaat

SEQ ID NO: 106938 - DNA, 25 bp, Artificial
  Probe
ctccctctaagacaccagaagtttt

SEQ ID NO: 106939 - DNA, 25 bp, Artificial
  Probe
gctcctgaagacctgaagaaagaca

SEQ ID NO: 106940 - DNA, 25 bp, Artificial
  Probe
tctttcaagagaccctgccttactc

SEQ ID NO: 106941 - DNA, 25 bp, Artificial
  Probe
ctttcaagagaccctgccttactca

SEQ ID NO: 106942 - DNA, 25 bp, Artificial
  Probe
tgccttgatggaatggaatcctctg

SEQ ID NO: 106943 - DNA, 25 bp, Artificial
  Probe
gtgccttgatggaatggaatcctct

SEQ ID NO: 106944 - DNA, 25 bp, Artificial
  Probe
gaacctttcatgtctttcaagagac

SEQ ID NO: 106945 - DNA, 25 bp, Artificial
  Probe
taccctccctctaagacaccagaag

SEQ ID NO: 106946 - DNA, 25 bp, Artificial
  Probe
ctaccctccctctaagacaccagaa

SEQ ID NO: 106947 - DNA, 25 bp, Artificial
  Probe
tttcaagagaccctgccttactcag

SEQ ID NO: 106948 - DNA, 25 bp, Artificial
  Probe
aacctttcatgtctttcaagagacc

SEQ ID NO: 106949 - DNA, 25 bp, Artificial
  Probe
aactcctctgtgccttgatggaatg

SEQ ID NO: 106950 - DNA, 25 bp, Artificial
  Probe
caactcctctgtgccttgatggaat

SEQ ID NO: 106951 - DNA, 25 bp, Artificial
  Probe
ctttcatgtctttcaagagaccctg

SEQ ID NO: 106952 - DNA, 25 bp, Artificial
  Probe
tgtgccttgatggaatggaatcctc

SEQ ID NO: 106953 - DNA, 25 bp, Artificial
  Probe
ctgtgccttgatggaatggaatcct

SEQ ID NO: 106954 - DNA, 25 bp, Artificial
  Probe
tctgtgccttgatggaatggaatcc

SEQ ID NO: 106955 - DNA, 25 bp, Artificial
  Probe
aagacaatctcattgctgtggaaaa

SEQ ID NO: 106956 - DNA, 25 bp, Artificial
  Probe
atggaatggaatcctctgggtgaag

SEQ ID NO: 106957 - DNA, 25 bp, Artificial
  Probe
atgtaatgctgaaccacttgtagat

SEQ ID NO: 106958 - DNA, 25 bp, Artificial
  Probe
tatgtaatgctgaaccacttgtaga

SEQ ID NO: 106959 - DNA, 25 bp, Artificial
  Probe
gtatgtaatgctgaaccacttgtag

SEQ ID NO: 106960 - DNA, 25 bp, Artificial
  Probe
tgtaatgctgaaccacttgtagatt

SEQ ID NO: 106961 - DNA, 25 bp, Artificial
  Probe
cgtatgtaatgctgaaccacttgta

SEQ ID NO: 106962 - DNA, 25 bp, Artificial
  Probe
taagacacattctaaggactgactg

SEQ ID NO: 106963 - DNA, 25 bp, Artificial
  Probe
attcgtatgtaatgctgaaccactt

SEQ ID NO: 106964 - DNA, 25 bp, Artificial
  Probe
ttaagacacattctaaggactgact

SEQ ID NO: 106965 - DNA, 25 bp, Artificial
  Probe
gtatcagattgtgtgaagttggaag

SEQ ID NO: 106966 - DNA, 25 bp, Artificial
  Probe
agtatcagattgtgtgaagttggaa

SEQ ID NO: 106967 - DNA, 25 bp, Artificial
  Probe
aagtatcagattgtgtgaagttgga

SEQ ID NO: 106968 - DNA, 25 bp, Artificial
  Probe
aagacacattctaaggactgactga

SEQ ID NO: 106969 - DNA, 25 bp, Artificial
  Probe
agtgctattaccaagttcaagatca

SEQ ID NO: 106970 - DNA, 25 bp, Artificial
  Probe
gtgctattaccaagttcaagatcaa

SEQ ID NO: 106971 - DNA, 25 bp, Artificial
  Probe
aagtgctattaccaagttcaagatc

SEQ ID NO: 106972 - DNA, 25 bp, Artificial
  Probe
ttcgtatgtaatgctgaaccacttg

SEQ ID NO: 106973 - DNA, 25 bp, Artificial
  Probe
agacacattctaaggactgactgag

SEQ ID NO: 106974 - DNA, 25 bp, Artificial
  Probe
tatcagattgtgtgaagttggaagc

SEQ ID NO: 106975 - DNA, 25 bp, Artificial
  Probe
gacacattctaaggactgactgagg

SEQ ID NO: 106976 - DNA, 25 bp, Artificial
  Probe
tcgtatgtaatgctgaaccacttgt

SEQ ID NO: 106977 - DNA, 25 bp, Artificial
  Probe
gctgaaccacttgtagatttgattt

SEQ ID NO: 106978 - DNA, 25 bp, Artificial
  Probe
taatgctgaaccacttgtagatttg

SEQ ID NO: 106979 - DNA, 25 bp, Artificial
  Probe
gtaatgctgaaccacttgtagattt

SEQ ID NO: 106980 - DNA, 25 bp, Artificial
  Probe
atgctgaaccacttgtagatttgat

SEQ ID NO: 106981 - DNA, 25 bp, Artificial
  Probe
tgatttcattgttgttgtctactgc

SEQ ID NO: 106982 - DNA, 25 bp, Artificial
  Probe
ctcagaaccacagcaactatcacaa

SEQ ID NO: 106983 - DNA, 25 bp, Artificial
  Probe
tgctgaaccacttgtagatttgatt

SEQ ID NO: 106984 - DNA, 25 bp, Artificial
  Probe
aatgctgaaccacttgtagatttga

SEQ ID NO: 106985 - DNA, 25 bp, Artificial
  Probe
agtagttctgtatttgaaagtgcct

SEQ ID NO: 106986 - DNA, 25 bp, Artificial
  Probe
tagtttctcttggaaggatgggata

SEQ ID NO: 106987 - DNA, 25 bp, Artificial
  Probe
aaatagtttctcttggaaggatggg

SEQ ID NO: 106988 - DNA, 25 bp, Artificial
  Probe
gtagttctgtatttgaaagtgcctt

SEQ ID NO: 106989 - DNA, 25 bp, Artificial
  Probe
aagtagttctgtatttgaaagtgcc

SEQ ID NO: 106990 - DNA, 25 bp, Artificial
  Probe
gaaagtgctattaccaagttcaaga

SEQ ID NO: 106991 - DNA, 25 bp, Artificial
  Probe
aaagtgctattaccaagttcaagat

SEQ ID NO: 106992 - DNA, 25 bp, Artificial
  Probe
atagtttctcttggaaggatgggat

SEQ ID NO: 106993 - DNA, 25 bp, Artificial
  Probe
ttatgatgacgtacaagtagttctg

SEQ ID NO: 106994 - DNA, 25 bp, Artificial
  Probe
aatagtttctcttggaaggatggga

SEQ ID NO: 106995 - DNA, 25 bp, Artificial
  Probe
gatgtgttgttcctggcaataaatt

SEQ ID NO: 106996 - DNA, 25 bp, Artificial
  Probe
cacagcaactatcacaaatgacttt

SEQ ID NO: 106997 - DNA, 25 bp, Artificial
  Probe
aaagtatcagattgtgtgaagttgg

SEQ ID NO: 106998 - DNA, 25 bp, Artificial
  Probe
gactgactgaggcagattgagaatt

SEQ ID NO: 106999 - DNA, 25 bp, Artificial
  Probe
agaaccacagcaactatcacaaatg

SEQ ID NO: 107000 - DNA, 25 bp, Artificial
  Probe
cagaaccacagcaactatcacaaat

SEQ ID NO: 107001 - DNA, 25 bp, Artificial
  Probe
cattcgtatgtaatgctgaaccact

SEQ ID NO: 107002 - DNA, 25 bp, Artificial
  Probe
aatggataattagaggtgaatgccg

SEQ ID NO: 107003 - DNA, 25 bp, Artificial
  Probe
tgctgtaatggataattagaggtga

SEQ ID NO: 107004 - DNA, 25 bp, Artificial
  Probe
atgctgtaatggataattagaggtg

SEQ ID NO: 107005 - DNA, 25 bp, Artificial
  Probe
catgctgtaatggataattagaggt

SEQ ID NO: 107006 - DNA, 25 bp, Artificial
  Probe
ctgtaggaggaagagatgcaataat

SEQ ID NO: 107007 - DNA, 25 bp, Artificial
  Probe
taatggataattagaggtgaatgcc

SEQ ID NO: 107008 - DNA, 25 bp, Artificial
  Probe
gctgtaatggataattagaggtgaa

SEQ ID NO: 107009 - DNA, 25 bp, Artificial
  Probe
aggaggaagagatgcaataatatga

SEQ ID NO: 107010 - DNA, 25 bp, Artificial
  Probe
tgtaggaggaagagatgcaataata

SEQ ID NO: 107011 - DNA, 25 bp, Artificial
  Probe
ggaggaagagatgcaataatatgat

SEQ ID NO: 107012 - DNA, 25 bp, Artificial
  Probe
gtaatggataattagaggtgaatgc

SEQ ID NO: 107013 - DNA, 25 bp, Artificial
  Probe
aaattaaggtttgttcaggttgctg

SEQ ID NO: 107014 - DNA, 25 bp, Artificial
  Probe
taggaggaagagatgcaataatatg

SEQ ID NO: 107015 - DNA, 25 bp, Artificial
  Probe
gtaggaggaagagatgcaataatat

SEQ ID NO: 107016 - DNA, 25 bp, Artificial
  Probe
cctgtaggaggaagagatgcaataa

SEQ ID NO: 107017 - DNA, 25 bp, Artificial
  Probe
cgggaatgagtagaatggaaattta

SEQ ID NO: 107018 - DNA, 25 bp, Artificial
  Probe
gaggaagagatgcaataatatgatt

SEQ ID NO: 107019 - DNA, 25 bp, Artificial
  Probe
acctgtaggaggaagagatgcaata

SEQ ID NO: 107020 - DNA, 25 bp, Artificial
  Probe
tgtaatggataattagaggtgaatg

SEQ ID NO: 107021 - DNA, 25 bp, Artificial
  Probe
tgatattcagaatgctaacaatact

SEQ ID NO: 107022 - DNA, 25 bp, Artificial
  Probe
atggataattagaggtgaatgccgg

SEQ ID NO: 107023 - DNA, 25 bp, Artificial
  Probe
gcacttttatttctgaggttgttct

SEQ ID NO: 107024 - DNA, 25 bp, Artificial
  Probe
aattaaggtttgttcaggttgctgc

SEQ ID NO: 107025 - DNA, 25 bp, Artificial
  Probe
ctgtaatggataattagaggtgaat

SEQ ID NO: 107026 - DNA, 25 bp, Artificial
  Probe
ggcacttttatttctgaggttgttc

SEQ ID NO: 107027 - DNA, 25 bp, Artificial
  Probe
aaaattaaggtttgttcaggttgct

SEQ ID NO: 107028 - DNA, 25 bp, Artificial
  Probe
aggcacttttatttctgaggttgtt

SEQ ID NO: 107029 - DNA, 25 bp, Artificial
  Probe
aagaggcacttttatttctgaggtt

SEQ ID NO: 107030 - DNA, 25 bp, Artificial
  Probe
gaggcacttttatttctgaggttgt

SEQ ID NO: 107031 - DNA, 25 bp, Artificial
  Probe
taaaattaaggtttgttcaggttgc

SEQ ID NO: 107032 - DNA, 25 bp, Artificial
  Probe
ccgggaatgagtagaatggaaattt

SEQ ID NO: 107033 - DNA, 25 bp, Artificial
  Probe
agaggcacttttatttctgaggttg

SEQ ID NO: 107034 - DNA, 25 bp, Artificial
  Probe
gagacatctgctaccacactaggta

SEQ ID NO: 107035 - DNA, 25 bp, Artificial
  Probe
ataattagaggtgaatgccgggaat

SEQ ID NO: 107036 - DNA, 25 bp, Artificial
  Probe
aatttaactatccttccaccccgag

SEQ ID NO: 107037 - DNA, 25 bp, Artificial
  Probe
gggaatgagtagaatggaaatttaa

SEQ ID NO: 107038 - DNA, 25 bp, Artificial
  Probe
cacttttatttctgaggttgttctc

SEQ ID NO: 107039 - DNA, 25 bp, Artificial
  Probe
gatattcagaatgctaacaatactt

SEQ ID NO: 107040 - DNA, 25 bp, Artificial
  Probe
atgatattcagaatgctaacaatac

SEQ ID NO: 107041 - DNA, 25 bp, Artificial
  Probe
gataattagaggtgaatgccgggaa

SEQ ID NO: 107042 - DNA, 25 bp, Artificial
  Probe
cacctgtaggaggaagagatgcaat

SEQ ID NO: 107043 - DNA, 25 bp, Artificial
  Probe
tacagttttgcagttcctatacagt

SEQ ID NO: 107044 - DNA, 25 bp, Artificial
  Probe
gttaaagtacagttttgcagttcct

SEQ ID NO: 107045 - DNA, 25 bp, Artificial
  Probe
atttaactatccttccaccccgaga

SEQ ID NO: 107046 - DNA, 25 bp, Artificial
  Probe
cagttttgcagttcctatacagttt

SEQ ID NO: 107047 - DNA, 25 bp, Artificial
  Probe
gagtattgatgtgaagacagtgttg

SEQ ID NO: 107048 - DNA, 25 bp, Artificial
  Probe
agagtattgatgtgaagacagtgtt

SEQ ID NO: 107049 - DNA, 25 bp, Artificial
  Probe
cagagtattgatgtgaagacagtgt

SEQ ID NO: 107050 - DNA, 25 bp, Artificial
  Probe
tataaggctaattactgctctggag

SEQ ID NO: 107051 - DNA, 25 bp, Artificial
  Probe
ataaggctaattactgctctggaga

SEQ ID NO: 107052 - DNA, 25 bp, Artificial
  Probe
atataaggctaattactgctctgga

SEQ ID NO: 107053 - DNA, 25 bp, Artificial
  Probe
agtattgatgtgaagacagtgttgc

SEQ ID NO: 107054 - DNA, 25 bp, Artificial
  Probe
gatataaggctaattactgctctgg

SEQ ID NO: 107055 - DNA, 25 bp, Artificial
  Probe
gcagagtattgatgtgaagacagtg

SEQ ID NO: 107056 - DNA, 25 bp, Artificial
  Probe
taattactgctctggagagtgtgaa

SEQ ID NO: 107057 - DNA, 25 bp, Artificial
  Probe
atttggcagagtattgatgtgaaga

SEQ ID NO: 107058 - DNA, 25 bp, Artificial
  Probe
gtatttggcagagtattgatgtgaa

SEQ ID NO: 107059 - DNA, 25 bp, Artificial
  Probe
attactgctctggagagtgtgaatt

SEQ ID NO: 107060 - DNA, 25 bp, Artificial
  Probe
aattactgctctggagagtgtgaat

SEQ ID NO: 107061 - DNA, 25 bp, Artificial
  Probe
taaggctaattactgctctggagag

SEQ ID NO: 107062 - DNA, 25 bp, Artificial
  Probe
ttggcagagtattgatgtgaagaca

SEQ ID NO: 107063 - DNA, 25 bp, Artificial
  Probe
tatttggcagagtattgatgtgaag

SEQ ID NO: 107064 - DNA, 25 bp, Artificial
  Probe
ggtatttggcagagtattgatgtga

SEQ ID NO: 107065 - DNA, 25 bp, Artificial
  Probe
ctaattactgctctggagagtgtga

SEQ ID NO: 107066 - DNA, 25 bp, Artificial
  Probe
tggtatttggcagagtattgatgtg

SEQ ID NO: 107067 - DNA, 25 bp, Artificial
  Probe
tttggcagagtattgatgtgaagac

SEQ ID NO: 107068 - DNA, 25 bp, Artificial
  Probe
ggagagtgtgaatttgtgttcttac

SEQ ID NO: 107069 - DNA, 25 bp, Artificial
  Probe
tgaatccaacttaggcattgaaatc

SEQ ID NO: 107070 - DNA, 25 bp, Artificial
  Probe
ctgaatccaacttaggcattgaaat

SEQ ID NO: 107071 - DNA, 25 bp, Artificial
  Probe
tggagagtgtgaatttgtgttctta

SEQ ID NO: 107072 - DNA, 25 bp, Artificial
  Probe
gaatccaacttaggcattgaaatca

SEQ ID NO: 107073 - DNA, 25 bp, Artificial
  Probe
ggcagagtattgatgtgaagacagt

SEQ ID NO: 107074 - DNA, 25 bp, Artificial
  Probe
tggcagagtattgatgtgaagacag

SEQ ID NO: 107075 - DNA, 25 bp, Artificial
  Probe
agatataaggctaattactgctctg

SEQ ID NO: 107076 - DNA, 25 bp, Artificial
  Probe
gaatccgatctctgaaacttgacat

SEQ ID NO: 107077 - DNA, 25 bp, Artificial
  Probe
ctggagagtgtgaatttgtgttctt

SEQ ID NO: 107078 - DNA, 25 bp, Artificial
  Probe
gagagtgtgaatttgtgttcttaca

SEQ ID NO: 107079 - DNA, 25 bp, Artificial
  Probe
tccaacttaggcattgaaatcaaag

SEQ ID NO: 107080 - DNA, 25 bp, Artificial
  Probe
atccaacttaggcattgaaatcaaa

SEQ ID NO: 107081 - DNA, 25 bp, Artificial
  Probe
aatccaacttaggcattgaaatcaa

SEQ ID NO: 107082 - DNA, 25 bp, Artificial
  Probe
tagaagtcaaagtaacagacacacc

SEQ ID NO: 107083 - DNA, 25 bp, Artificial
  Probe
aatccgatctctgaaacttgacatg

SEQ ID NO: 107084 - DNA, 25 bp, Artificial
  Probe
ctggtatttggcagagtattgatgt

SEQ ID NO: 107085 - DNA, 25 bp, Artificial
  Probe
actggtatttggcagagtattgatg

SEQ ID NO: 107086 - DNA, 25 bp, Artificial
  Probe
cactggtatttggcagagtattgat

SEQ ID NO: 107087 - DNA, 25 bp, Artificial
  Probe
ttagaagtcaaagtaacagacacac

SEQ ID NO: 107088 - DNA, 25 bp, Artificial
  Probe
aagatataaggctaattactgctct

SEQ ID NO: 107089 - DNA, 25 bp, Artificial
  Probe
tctggagagtgtgaatttgtgttct

SEQ ID NO: 107090 - DNA, 25 bp, Artificial
  Probe
gtattgatgtgaagacagtgttgca

SEQ ID NO: 107091 - DNA, 25 bp, Artificial
  Probe
ccaacttaggcattgaaatcaaagc

SEQ ID NO: 107092 - DNA, 25 bp, Artificial
  Probe
aaagtgatagaattccttccagaag

SEQ ID NO: 107093 - DNA, 25 bp, Artificial
  Probe
aagtgatagaattccttccagaagg

SEQ ID NO: 107094 - DNA, 25 bp, Artificial
  Probe
gcctcagatacatgttatgttcagt

SEQ ID NO: 107095 - DNA, 25 bp, Artificial
  Probe
cctcagatacatgttatgttcagtc

SEQ ID NO: 107096 - DNA, 25 bp, Artificial
  Probe
ggcctcagatacatgttatgttcag

SEQ ID NO: 107097 - DNA, 25 bp, Artificial
  Probe
ctcagatacatgttatgttcagtct

SEQ ID NO: 107098 - DNA, 25 bp, Artificial
  Probe
agtgatagaattccttccagaaggc

SEQ ID NO: 107099 - DNA, 25 bp, Artificial
  Probe
tcagatacatgttatgttcagtctt

SEQ ID NO: 107100 - DNA, 25 bp, Artificial
  Probe
gtgatagaattccttccagaaggcc

SEQ ID NO: 107101 - DNA, 25 bp, Artificial
  Probe
cagatacatgttatgttcagtcttt

SEQ ID NO: 107102 - DNA, 25 bp, Artificial
  Probe
tgatgtgaggttgcaagtgactctc

SEQ ID NO: 107103 - DNA, 25 bp, Artificial
  Probe
ctgatgtgaggttgcaagtgactct

SEQ ID NO: 107104 - DNA, 25 bp, Artificial
  Probe
ttaccatgccagaagatgagtattg

SEQ ID NO: 107105 - DNA, 25 bp, Artificial
  Probe
agaagatgagtattggagctatgac

SEQ ID NO: 107106 - DNA, 25 bp, Artificial
  Probe
cagaagatgagtattggagctatga

SEQ ID NO: 107107 - DNA, 25 bp, Artificial
  Probe
cttccgaggtgagtattgctatgag

SEQ ID NO: 107108 - DNA, 25 bp, Artificial
  Probe
aattacgattatgatatgaactggc

SEQ ID NO: 107109 - DNA, 25 bp, Artificial
  Probe
gatgagtattggagctatgactacc

SEQ ID NO: 107110 - DNA, 25 bp, Artificial
  Probe
gaagatgagtattggagctatgact

SEQ ID NO: 107111 - DNA, 25 bp, Artificial
  Probe
gactataaagccaacaactcctgat

SEQ ID NO: 107112 - DNA, 25 bp, Artificial
  Probe
agatgagtattggagctatgactac

SEQ ID NO: 107113 - DNA, 25 bp, Artificial
  Probe
gaacacctctctacactttaaccta

SEQ ID NO: 107114 - DNA, 25 bp, Artificial
  Probe
cgaagagactataaagccaacaact

SEQ ID NO: 107115 - DNA, 25 bp, Artificial
  Probe
aacacctctctacactttaacctaa

SEQ ID NO: 107116 - DNA, 25 bp, Artificial
  Probe
aagatgagtattggagctatgacta

SEQ ID NO: 107117 - DNA, 25 bp, Artificial
  Probe
agactataaagccaacaactcctga

SEQ ID NO: 107118 - DNA, 25 bp, Artificial
  Probe
agaacacctctctacactttaacct

SEQ ID NO: 107119 - DNA, 25 bp, Artificial
  Probe
acacctctctacactttaacctaaa

SEQ ID NO: 107120 - DNA, 25 bp, Artificial
  Probe
actataaagccaacaactcctgatc

SEQ ID NO: 107121 - DNA, 25 bp, Artificial
  Probe
ccgaagagactataaagccaacaac

SEQ ID NO: 107122 - DNA, 25 bp, Artificial
  Probe
aagagactataaagccaacaactcc

SEQ ID NO: 107123 - DNA, 25 bp, Artificial
  Probe
aaagggtctacttcttcaagggaaa

SEQ ID NO: 107124 - DNA, 25 bp, Artificial
  Probe
gaagagactataaagccaacaactc

SEQ ID NO: 107125 - DNA, 25 bp, Artificial
  Probe
ccagaagatgagtattggagctatg

SEQ ID NO: 107126 - DNA, 25 bp, Artificial
  Probe
catctacatcactggctccacattc

SEQ ID NO: 107127 - DNA, 25 bp, Artificial
  Probe
ctataaagccaacaactcctgatcc

SEQ ID NO: 107128 - DNA, 25 bp, Artificial
  Probe
gagactataaagccaacaactcctg

SEQ ID NO: 107129 - DNA, 25 bp, Artificial
  Probe
agagactataaagccaacaactcct

SEQ ID NO: 107130 - DNA, 25 bp, Artificial
  Probe
tttaccatgccagaagatgagtatt

SEQ ID NO: 107131 - DNA, 25 bp, Artificial
  Probe
gtttaccatgccagaagatgagtat

SEQ ID NO: 107132 - DNA, 25 bp, Artificial
  Probe
ccattcagagcgtctatttcttctc

SEQ ID NO: 107133 - DNA, 25 bp, Artificial
  Probe
gaaagggtctacttcttcaagggaa

SEQ ID NO: 107134 - DNA, 25 bp, Artificial
  Probe
tataaagccaacaactcctgatcct

SEQ ID NO: 107135 - DNA, 25 bp, Artificial
  Probe
taccatgccagaagatgagtattgg

SEQ ID NO: 107136 - DNA, 25 bp, Artificial
  Probe
tactaccgagttaaccttagaacac

SEQ ID NO: 107137 - DNA, 25 bp, Artificial
  Probe
gtactaccgagttaaccttagaaca

SEQ ID NO: 107138 - DNA, 25 bp, Artificial
  Probe
gaggaaaccaagaacagtaccaatg

SEQ ID NO: 107139 - DNA, 25 bp, Artificial
  Probe
gatgccttcacagacctcaagaatg

SEQ ID NO: 107140 - DNA, 25 bp, Artificial
  Probe
gtgagtattgctatgagctagatga

SEQ ID NO: 107141 - DNA, 25 bp, Artificial
  Probe
ggtgagtattgctatgagctagatg

SEQ ID NO: 107142 - DNA, 25 bp, Artificial
  Probe
aggtgagtattgctatgagctagat

SEQ ID NO: 107143 - DNA, 25 bp, Artificial
  Probe
tgagtattgctatgagctagatgaa

SEQ ID NO: 107144 - DNA, 25 bp, Artificial
  Probe
acaagtactaccgagttaaccttag

SEQ ID NO: 107145 - DNA, 25 bp, Artificial
  Probe
gacaagtactaccgagttaacctta

SEQ ID NO: 107146 - DNA, 25 bp, Artificial
  Probe
ctatttcttctctggagacaagtac

SEQ ID NO: 107147 - DNA, 25 bp, Artificial
  Probe
tctatttcttctctggagacaagta

SEQ ID NO: 107148 - DNA, 25 bp, Artificial
  Probe
tgtttaccatgccagaagatgagta

SEQ ID NO: 107149 - DNA, 25 bp, Artificial
  Probe
acaactcatcactgatctagtcatc

SEQ ID NO: 107150 - DNA, 25 bp, Artificial
  Probe
gacaactcatcactgatctagtcat

SEQ ID NO: 107151 - DNA, 25 bp, Artificial
  Probe
cagacaactcatcactgatctagtc

SEQ ID NO: 107152 - DNA, 25 bp, Artificial
  Probe
gacagacaactcatcactgatctag

SEQ ID NO: 107153 - DNA, 25 bp, Artificial
  Probe
agacaactcatcactgatctagtca

SEQ ID NO: 107154 - DNA, 25 bp, Artificial
  Probe
acagacaactcatcactgatctagt

SEQ ID NO: 107155 - DNA, 25 bp, Artificial
  Probe
ggacagacaactcatcactgatcta

SEQ ID NO: 107156 - DNA, 25 bp, Artificial
  Probe
caactcatcactgatctagtcatca

SEQ ID NO: 107157 - DNA, 25 bp, Artificial
  Probe
gaggacagacaactcatcactgatc

SEQ ID NO: 107158 - DNA, 25 bp, Artificial
  Probe
ggcaaagatggcaaagactacattt

SEQ ID NO: 107159 - DNA, 25 bp, Artificial
  Probe
aggacagacaactcatcactgatct

SEQ ID NO: 107160 - DNA, 25 bp, Artificial
  Probe
atggcaaagatggcaaagactacat

SEQ ID NO: 107161 - DNA, 25 bp, Artificial
  Probe
tggcaaagatggcaaagactacatt

SEQ ID NO: 107162 - DNA, 25 bp, Artificial
  Probe
ggaggacagacaactcatcactgat

SEQ ID NO: 107163 - DNA, 25 bp, Artificial
  Probe
caagtggaggacagacaactcatca

SEQ ID NO: 107164 - DNA, 25 bp, Artificial
  Probe
gcaaagatggcaaagactacatttt

SEQ ID NO: 107165 - DNA, 25 bp, Artificial
  Probe
aagtggaggacagacaactcatcac

SEQ ID NO: 107166 - DNA, 25 bp, Artificial
  Probe
cttcttaaagcgatcagtagttaac

SEQ ID NO: 107167 - DNA, 25 bp, Artificial
  Probe
catggcaaagatggcaaagactaca

SEQ ID NO: 107168 - DNA, 25 bp, Artificial
  Probe
ccaagtggaggacagacaactcatc

SEQ ID NO: 107169 - DNA, 25 bp, Artificial
  Probe
catgtttctcctatcgagtgtcagc

SEQ ID NO: 107170 - DNA, 25 bp, Artificial
  Probe
gcatgtttctcctatcgagtgtcag

SEQ ID NO: 107171 - DNA, 25 bp, Artificial
  Probe
acagagacctttaaccacccaacag

SEQ ID NO: 107172 - DNA, 25 bp, Artificial
  Probe
gtggaggacagacaactcatcactg

SEQ ID NO: 107173 - DNA, 25 bp, Artificial
  Probe
tggaggacagacaactcatcactga

SEQ ID NO: 107174 - DNA, 25 bp, Artificial
  Probe
cacagagacctttaaccacccaaca

SEQ ID NO: 107175 - DNA, 25 bp, Artificial
  Probe
tcaaaacagaaaacttaagccaaaa

SEQ ID NO: 107176 - DNA, 25 bp, Artificial
  Probe
ttcaaaacagaaaacttaagccaaa

SEQ ID NO: 107177 - DNA, 25 bp, Artificial
  Probe
atgtttctcctatcgagtgtcagcc

SEQ ID NO: 107178 - DNA, 25 bp, Artificial
  Probe
cagtaggtccaaaacaagtccaagc

SEQ ID NO: 107179 - DNA, 25 bp, Artificial
  Probe
gcagtaggtccaaaacaagtccaag

SEQ ID NO: 107180 - DNA, 25 bp, Artificial
  Probe
ggcatgtttctcctatcgagtgtca

SEQ ID NO: 107181 - DNA, 25 bp, Artificial
  Probe
gcatggcaaagatggcaaagactac

SEQ ID NO: 107182 - DNA, 25 bp, Artificial
  Probe
agcttcttaaagcgatcagtagtta

SEQ ID NO: 107183 - DNA, 25 bp, Artificial
  Probe
gcttcttaaagcgatcagtagttaa

SEQ ID NO: 107184 - DNA, 25 bp, Artificial
  Probe
ccaaaacaagtccaagcttcttaaa

SEQ ID NO: 107185 - DNA, 25 bp, Artificial
  Probe
caaaacaagtccaagcttcttaaag

SEQ ID NO: 107186 - DNA, 25 bp, Artificial
  Probe
tttcaaaacagaaaacttaagccaa

SEQ ID NO: 107187 - DNA, 25 bp, Artificial
  Probe
tccaaaacaagtccaagcttcttaa

SEQ ID NO: 107188 - DNA, 25 bp, Artificial
  Probe
gtccaaaacaagtccaagcttctta

SEQ ID NO: 107189 - DNA, 25 bp, Artificial
  Probe
ctgacggcatgtttctcctatcgag

SEQ ID NO: 107190 - DNA, 25 bp, Artificial
  Probe
agtaggtccaaaacaagtccaagct

SEQ ID NO: 107191 - DNA, 25 bp, Artificial
  Probe
agtggaggacagacaactcatcact

SEQ ID NO: 107192 - DNA, 25 bp, Artificial
  Probe
tgcagtaggtccaaaacaagtccaa

SEQ ID NO: 107193 - DNA, 25 bp, Artificial
  Probe
taggtccaaaacaagtccaagcttc

SEQ ID NO: 107194 - DNA, 25 bp, Artificial
  Probe
aagtatagcacacaaggaacagaga

SEQ ID NO: 107195 - DNA, 25 bp, Artificial
  Probe
caagtatagcacacaaggaacagag

SEQ ID NO: 107196 - DNA, 25 bp, Artificial
  Probe
agtatagcacacaaggaacagagag

SEQ ID NO: 107197 - DNA, 25 bp, Artificial
  Probe
agctcttatctattcctcaaccatg

SEQ ID NO: 107198 - DNA, 25 bp, Artificial
  Probe
cagctcttatctattcctcaaccat

SEQ ID NO: 107199 - DNA, 25 bp, Artificial
  Probe
ttccagctcttatctattcctcaac

SEQ ID NO: 107200 - DNA, 25 bp, Artificial
  Probe
ccaagtatagcacacaaggaacaga

SEQ ID NO: 107201 - DNA, 25 bp, Artificial
  Probe
gtatagcacacaaggaacagagagg

SEQ ID NO: 107202 - DNA, 25 bp, Artificial
  Probe
tccagctcttatctattcctcaacc

SEQ ID NO: 107203 - DNA, 25 bp, Artificial
  Probe
ccagctcttatctattcctcaacca

SEQ ID NO: 107204 - DNA, 25 bp, Artificial
  Probe
ttctacagtgttctggttggtaagg

SEQ ID NO: 107205 - DNA, 25 bp, Artificial
  Probe
tttctactttgccacggattatctc

SEQ ID NO: 107206 - DNA, 25 bp, Artificial
  Probe
gttggtgaatatggctgaaggagac

SEQ ID NO: 107207 - DNA, 25 bp, Artificial
  Probe
tttctacagtgttctggttggtaag

SEQ ID NO: 107208 - DNA, 25 bp, Artificial
  Probe
ctttccagctcttatctattcctca

SEQ ID NO: 107209 - DNA, 25 bp, Artificial
  Probe
tctttccagctcttatctattcctc

SEQ ID NO: 107210 - DNA, 25 bp, Artificial
  Probe
ctctttccagctcttatctattcct

SEQ ID NO: 107211 - DNA, 25 bp, Artificial
  Probe
tctctttccagctcttatctattcc

SEQ ID NO: 107212 - DNA, 25 bp, Artificial
  Probe
tttccagctcttatctattcctcaa

SEQ ID NO: 107213 - DNA, 25 bp, Artificial
  Probe
gactctctttccagctcttatctat

SEQ ID NO: 107214 - DNA, 25 bp, Artificial
  Probe
agactctctttccagctcttatcta

SEQ ID NO: 107215 - DNA, 25 bp, Artificial
  Probe
ttctactttgccacggattatctcg

SEQ ID NO: 107216 - DNA, 25 bp, Artificial
  Probe
actctctttccagctcttatctatt

SEQ ID NO: 107217 - DNA, 25 bp, Artificial
  Probe
gtgtggttggtgaatatggctgaag

SEQ ID NO: 107218 - DNA, 25 bp, Artificial
  Probe
atgagactctctttccagctcttat

SEQ ID NO: 107219 - DNA, 25 bp, Artificial
  Probe
ctctctttccagctcttatctattc

SEQ ID NO: 107220 - DNA, 25 bp, Artificial
  Probe
aatgagactctctttccagctctta

SEQ ID NO: 107221 - DNA, 25 bp, Artificial
  Probe
gagactctctttccagctcttatct

SEQ ID NO: 107222 - DNA, 25 bp, Artificial
  Probe
tgagactctctttccagctcttatc

SEQ ID NO: 107223 - DNA, 25 bp, Artificial
  Probe
ggttggtgaatatggctgaaggaga

SEQ ID NO: 107224 - DNA, 25 bp, Artificial
  Probe
aaatgagactctctttccagctctt

SEQ ID NO: 107225 - DNA, 25 bp, Artificial
  Probe
cccaagtatagcacacaaggaacag

SEQ ID NO: 107226 - DNA, 25 bp, Artificial
  Probe
cattttctactttgccacggattat

SEQ ID NO: 107227 - DNA, 25 bp, Artificial
  Probe
attttctactttgccacggattatc

SEQ ID NO: 107228 - DNA, 25 bp, Artificial
  Probe
ttttctactttgccacggattatct

SEQ ID NO: 107229 - DNA, 25 bp, Artificial
  Probe
tcattttctactttgccacggatta

SEQ ID NO: 107230 - DNA, 25 bp, Artificial
  Probe
tatagcacacaaggaacagagaggg

SEQ ID NO: 107231 - DNA, 25 bp, Artificial
  Probe
tggttggtgaatatggctgaaggag

SEQ ID NO: 107232 - DNA, 25 bp, Artificial
  Probe
tgggagatttcattttctacagtgt

SEQ ID NO: 107233 - DNA, 25 bp, Artificial
  Probe
gtcgaaacagctcaggaaagaaatg

SEQ ID NO: 107234 - DNA, 25 bp, Artificial
  Probe
tctacagtgttctggttggtaaggc

SEQ ID NO: 107235 - DNA, 25 bp, Artificial
  Probe
gggagatttcattttctacagtgtt

SEQ ID NO: 107236 - DNA, 25 bp, Artificial
  Probe
catagcctgctttgtagccatattg

SEQ ID NO: 107237 - DNA, 25 bp, Artificial
  Probe
ctcattttctactttgccacggatt

SEQ ID NO: 107238 - DNA, 25 bp, Artificial
  Probe
tagcctgctttgtagccatattgat

SEQ ID NO: 107239 - DNA, 25 bp, Artificial
  Probe
agccttatgataacctactctgtat

SEQ ID NO: 107240 - DNA, 25 bp, Artificial
  Probe
gagccttatgataacctactctgta

SEQ ID NO: 107241 - DNA, 25 bp, Artificial
  Probe
aagatagtgaagtaagaggactggc

SEQ ID NO: 107242 - DNA, 25 bp, Artificial
  Probe
gccttatgataacctactctgtatt

SEQ ID NO: 107243 - DNA, 25 bp, Artificial
  Probe
gatagtgaagtaagaggactggctg

SEQ ID NO: 107244 - DNA, 25 bp, Artificial
  Probe
agatagtgaagtaagaggactggct

SEQ ID NO: 107245 - DNA, 25 bp, Artificial
  Probe
atgaccaagttctcttcgttgacaa

SEQ ID NO: 107246 - DNA, 25 bp, Artificial
  Probe
aatgaccaagttctcttcgttgaca

SEQ ID NO: 107247 - DNA, 25 bp, Artificial
  Probe
cataaatgaccaagttctcttcgtt

SEQ ID NO: 107248 - DNA, 25 bp, Artificial
  Probe
atagtgaagtaagaggactggctgt

SEQ ID NO: 107249 - DNA, 25 bp, Artificial
  Probe
taaatgaccaagttctcttcgttga

SEQ ID NO: 107250 - DNA, 25 bp, Artificial
  Probe
ataaatgaccaagttctcttcgttg

SEQ ID NO: 107251 - DNA, 25 bp, Artificial
  Probe
aaagatagtgaagtaagaggactgg

SEQ ID NO: 107252 - DNA, 25 bp, Artificial
  Probe
gagcataaatgaccaagttctcttc

SEQ ID NO: 107253 - DNA, 25 bp, Artificial
  Probe
agcataaatgaccaagttctcttcg

SEQ ID NO: 107254 - DNA, 25 bp, Artificial
  Probe
gggataaatctgtaatgttcactct

SEQ ID NO: 107255 - DNA, 25 bp, Artificial
  Probe
acaaagatagtgaagtaagaggact

SEQ ID NO: 107256 - DNA, 25 bp, Artificial
  Probe
gcataaatgaccaagttctcttcgt

SEQ ID NO: 107257 - DNA, 25 bp, Artificial
  Probe
ggagcataaatgaccaagttctctt

SEQ ID NO: 107258 - DNA, 25 bp, Artificial
  Probe
caaagatagtgaagtaagaggactg

SEQ ID NO: 107259 - DNA, 25 bp, Artificial
  Probe
gaatcccagaccagactgataatat

SEQ ID NO: 107260 - DNA, 25 bp, Artificial
  Probe
aaatgaccaagttctcttcgttgac

SEQ ID NO: 107261 - DNA, 25 bp, Artificial
  Probe
gccgcatgatttatagagtaaacaa

SEQ ID NO: 107262 - DNA, 25 bp, Artificial
  Probe
tacaaagatagtgaagtaagaggac

SEQ ID NO: 107263 - DNA, 25 bp, Artificial
  Probe
tagtgaagtaagaggactggctgtg

SEQ ID NO: 107264 - DNA, 25 bp, Artificial
  Probe
cgaatcccagaccagactgataata

SEQ ID NO: 107265 - DNA, 25 bp, Artificial
  Probe
aatcccagaccagactgataatata

SEQ ID NO: 107266 - DNA, 25 bp, Artificial
  Probe
ccgcatgatttatagagtaaacaag

SEQ ID NO: 107267 - DNA, 25 bp, Artificial
  Probe
aggtattaaggtttctgtattccag

SEQ ID NO: 107268 - DNA, 25 bp, Artificial
  Probe
gtacaaagatagtgaagtaagagga

SEQ ID NO: 107269 - DNA, 25 bp, Artificial
  Probe
tgaccaagttctcttcgttgacaaa

SEQ ID NO: 107270 - DNA, 25 bp, Artificial
  Probe
atcccagaccagactgataatatat

SEQ ID NO: 107271 - DNA, 25 bp, Artificial
  Probe
taggtattaaggtttctgtattcca

SEQ ID NO: 107272 - DNA, 25 bp, Artificial
  Probe
cggagcataaatgaccaagttctct

SEQ ID NO: 107273 - DNA, 25 bp, Artificial
  Probe
aggaaggatgaaaatggggataaat

SEQ ID NO: 107274 - DNA, 25 bp, Artificial
  Probe
tggggataaatctgtaatgttcact

SEQ ID NO: 107275 - DNA, 25 bp, Artificial
  Probe
aggatgaaaatggggataaatctgt

SEQ ID NO: 107276 - DNA, 25 bp, Artificial
  Probe
ggaaggatgaaaatggggataaatc

SEQ ID NO: 107277 - DNA, 25 bp, Artificial
  Probe
ggggataaatctgtaatgttcactc

SEQ ID NO: 107278 - DNA, 25 bp, Artificial
  Probe
aaggatgaaaatggggataaatctg

SEQ ID NO: 107279 - DNA, 25 bp, Artificial
  Probe
atggggataaatctgtaatgttcac

SEQ ID NO: 107280 - DNA, 25 bp, Artificial
  Probe
tcccagaccagactgataatatata

SEQ ID NO: 107281 - DNA, 25 bp, Artificial
  Probe
gaaggatgaaaatggggataaatct

SEQ ID NO: 107282 - DNA, 25 bp, Artificial
  Probe
ggatgaaaatggggataaatctgta

SEQ ID NO: 107283 - DNA, 25 bp, Artificial
  Probe
acgaatcccagaccagactgataat

SEQ ID NO: 107284 - DNA, 25 bp, Artificial
  Probe
ggtgacttctggtgacatagtaata

SEQ ID NO: 107285 - DNA, 25 bp, Artificial
  Probe
tggtgacttctggtgacatagtaat

SEQ ID NO: 107286 - DNA, 25 bp, Artificial
  Probe
ctctatgacatccatccatctgttg

SEQ ID NO: 107287 - DNA, 25 bp, Artificial
  Probe
ctcctctatgacatccatccatctg

SEQ ID NO: 107288 - DNA, 25 bp, Artificial
  Probe
ctatgacatccatccatctgttgtg

SEQ ID NO: 107289 - DNA, 25 bp, Artificial
  Probe
tctatgacatccatccatctgttgt

SEQ ID NO: 107290 - DNA, 25 bp, Artificial
  Probe
atcctcctctatgacatccatccat

SEQ ID NO: 107291 - DNA, 25 bp, Artificial
  Probe
tatgacatccatccatctgttgtga

SEQ ID NO: 107292 - DNA, 25 bp, Artificial
  Probe
gtgacttctggtgacatagtaataa

SEQ ID NO: 107293 - DNA, 25 bp, Artificial
  Probe
cctctatgacatccatccatctgtt

SEQ ID NO: 107294 - DNA, 25 bp, Artificial
  Probe
gtggtgacttctggtgacatagtaa

SEQ ID NO: 107295 - DNA, 25 bp, Artificial
  Probe
cctcctctatgacatccatccatct

SEQ ID NO: 107296 - DNA, 25 bp, Artificial
  Probe
tcctcctctatgacatccatccatc

SEQ ID NO: 107297 - DNA, 25 bp, Artificial
  Probe
tcctctatgacatccatccatctgt

SEQ ID NO: 107298 - DNA, 25 bp, Artificial
  Probe
catcctcctctatgacatccatcca

SEQ ID NO: 107299 - DNA, 25 bp, Artificial
  Probe
atccatctgttgtgaccaagtgaag

SEQ ID NO: 107300 - DNA, 25 bp, Artificial
  Probe
gtaataaagtgaagactcaactccc

SEQ ID NO: 107301 - DNA, 25 bp, Artificial
  Probe
atgacatccatccatctgttgtgac

SEQ ID NO: 107302 - DNA, 25 bp, Artificial
  Probe
catccatctgttgtgaccaagtgaa

SEQ ID NO: 107303 - DNA, 25 bp, Artificial
  Probe
agtaataaagtgaagactcaactcc

SEQ ID NO: 107304 - DNA, 25 bp, Artificial
  Probe
ggtggtgacttctggtgacatagta

SEQ ID NO: 107305 - DNA, 25 bp, Artificial
  Probe
tggtgacatagtaataaagtgaaga

SEQ ID NO: 107306 - DNA, 25 bp, Artificial
  Probe
tctggtgacatagtaataaagtgaa

SEQ ID NO: 107307 - DNA, 25 bp, Artificial
  Probe
ttctggtgacatagtaataaagtga

SEQ ID NO: 107308 - DNA, 25 bp, Artificial
  Probe
catccatccatctgttgtgaccaag

SEQ ID NO: 107309 - DNA, 25 bp, Artificial
  Probe
ggtgacatagtaataaagtgaagac

SEQ ID NO: 107310 - DNA, 25 bp, Artificial
  Probe
ctggtgacatagtaataaagtgaag

SEQ ID NO: 107311 - DNA, 25 bp, Artificial
  Probe
cttctggtgacatagtaataaagtg

SEQ ID NO: 107312 - DNA, 25 bp, Artificial
  Probe
aaggtggtgacttctggtgacatag

SEQ ID NO: 107313 - DNA, 25 bp, Artificial
  Probe
tgacttctggtgacatagtaataaa

SEQ ID NO: 107314 - DNA, 25 bp, Artificial
  Probe
gcatcctcctctatgacatccatcc

SEQ ID NO: 107315 - DNA, 25 bp, Artificial
  Probe
ggcatcctcctctatgacatccatc

SEQ ID NO: 107316 - DNA, 25 bp, Artificial
  Probe
atccatccatctgttgtgaccaagt

SEQ ID NO: 107317 - DNA, 25 bp, Artificial
  Probe
gacttctggtgacatagtaataaag

SEQ ID NO: 107318 - DNA, 25 bp, Artificial
  Probe
ccttttcgttcttctccattttcac

SEQ ID NO: 107319 - DNA, 25 bp, Artificial
  Probe
acatccatccatctgttgtgaccaa

SEQ ID NO: 107320 - DNA, 25 bp, Artificial
  Probe
taataaagtgaagactcaactcccc

SEQ ID NO: 107321 - DNA, 25 bp, Artificial
  Probe
catctgttgtgaccaagtgaaggtg

SEQ ID NO: 107322 - DNA, 25 bp, Artificial
  Probe
tccatctgttgtgaccaagtgaagg

SEQ ID NO: 107323 - DNA, 25 bp, Artificial
  Probe
ccatccatctgttgtgaccaagtga

SEQ ID NO: 107324 - DNA, 25 bp, Artificial
  Probe
tccatccatctgttgtgaccaagtg

SEQ ID NO: 107325 - DNA, 25 bp, Artificial
  Probe
gtgacatagtaataaagtgaagact

SEQ ID NO: 107326 - DNA, 25 bp, Artificial
  Probe
aggcatcctcctctatgacatccat

SEQ ID NO: 107327 - DNA, 25 bp, Artificial
  Probe
ctagccttccagcggtatcagattg

SEQ ID NO: 107328 - DNA, 25 bp, Artificial
  Probe
gccttttcgttcttctccattttca

SEQ ID NO: 107329 - DNA, 25 bp, Artificial
  Probe
tgttcatttcctcatctttctcact

SEQ ID NO: 107330 - DNA, 25 bp, Artificial
  Probe
ctgttcatttcctcatctttctcac

SEQ ID NO: 107331 - DNA, 25 bp, Artificial
  Probe
catttcctcatctttctcactatgc

SEQ ID NO: 107332 - DNA, 25 bp, Artificial
  Probe
atcctttcacacctagtttcctatg

SEQ ID NO: 107333 - DNA, 25 bp, Artificial
  Probe
catcctttcacacctagtttcctat

SEQ ID NO: 107334 - DNA, 25 bp, Artificial
  Probe
gctgttcatttcctcatctttctca

SEQ ID NO: 107335 - DNA, 25 bp, Artificial
  Probe
gttcatttcctcatctttctcacta

SEQ ID NO: 107336 - DNA, 25 bp, Artificial
  Probe
tcatttcctcatctttctcactatg

SEQ ID NO: 107337 - DNA, 25 bp, Artificial
  Probe
ggctgttcatttcctcatctttctc

SEQ ID NO: 107338 - DNA, 25 bp, Artificial
  Probe
ttaaaggaccaaagggcatctaaca

SEQ ID NO: 107339 - DNA, 25 bp, Artificial
  Probe
tgttaaaggaccaaagggcatctaa

SEQ ID NO: 107340 - DNA, 25 bp, Artificial
  Probe
ttcatttcctcatctttctcactat

SEQ ID NO: 107341 - DNA, 25 bp, Artificial
  Probe
taaaggaccaaagggcatctaacag

SEQ ID NO: 107342 - DNA, 25 bp, Artificial
  Probe
tttcacacctagtttcctatgccaa

SEQ ID NO: 107343 - DNA, 25 bp, Artificial
  Probe
ttgttaaaggaccaaagggcatcta

SEQ ID NO: 107344 - DNA, 25 bp, Artificial
  Probe
tcctttcacacctagtttcctatgc

SEQ ID NO: 107345 - DNA, 25 bp, Artificial
  Probe
gcatcctttcacacctagtttccta

SEQ ID NO: 107346 - DNA, 25 bp, Artificial
  Probe
ctccaagcatttccgtaaaggtttc

SEQ ID NO: 107347 - DNA, 25 bp, Artificial
  Probe
aaggctgttcatttcctcatctttc

SEQ ID NO: 107348 - DNA, 25 bp, Artificial
  Probe
ctttcacacctagtttcctatgcca

SEQ ID NO: 107349 - DNA, 25 bp, Artificial
  Probe
caaggctgttcatttcctcatcttt

SEQ ID NO: 107350 - DNA, 25 bp, Artificial
  Probe
atttcctcatctttctcactatgca

SEQ ID NO: 107351 - DNA, 25 bp, Artificial
  Probe
tctccaagcatttccgtaaaggttt

SEQ ID NO: 107352 - DNA, 25 bp, Artificial
  Probe
tttcctcatctttctcactatgcac

SEQ ID NO: 107353 - DNA, 25 bp, Artificial
  Probe
gttaaaggaccaaagggcatctaac

SEQ ID NO: 107354 - DNA, 25 bp, Artificial
  Probe
aggctgttcatttcctcatctttct

SEQ ID NO: 107355 - DNA, 25 bp, Artificial
  Probe
ttcacacctagtttcctatgccaac

SEQ ID NO: 107356 - DNA, 25 bp, Artificial
  Probe
cctttcacacctagtttcctatgcc

SEQ ID NO: 107357 - DNA, 25 bp, Artificial
  Probe
cttgttaaaggaccaaagggcatct

SEQ ID NO: 107358 - DNA, 25 bp, Artificial
  Probe
gtgctagtcctcagtctgacctatg

SEQ ID NO: 107359 - DNA, 25 bp, Artificial
  Probe
gtctccaagcatttccgtaaaggtt

SEQ ID NO: 107360 - DNA, 25 bp, Artificial
  Probe
agtgctagtcctcagtctgacctat

SEQ ID NO: 107361 - DNA, 25 bp, Artificial
  Probe
ttcctatgccaactcctgtgtcaac

SEQ ID NO: 107362 - DNA, 25 bp, Artificial
  Probe
tccaagcatttccgtaaaggtttcc

SEQ ID NO: 107363 - DNA, 25 bp, Artificial
  Probe
ttcctcatctttctcactatgcacg

SEQ ID NO: 107364 - DNA, 25 bp, Artificial
  Probe
ccaaagggcatctaacagcttctag

SEQ ID NO: 107365 - DNA, 25 bp, Artificial
  Probe
tttcctatgccaactcctgtgtcaa

SEQ ID NO: 107366 - DNA, 25 bp, Artificial
  Probe
tttccgtaaaggtttccgcaaaatc

SEQ ID NO: 107367 - DNA, 25 bp, Artificial
  Probe
gcaaggctgttcatttcctcatctt

SEQ ID NO: 107368 - DNA, 25 bp, Artificial
  Probe
atttccgtaaaggtttccgcaaaat

SEQ ID NO: 107369 - DNA, 25 bp, Artificial
  Probe
cagtgctagtcctcagtctgaccta

SEQ ID NO: 107370 - DNA, 25 bp, Artificial
  Probe
catttccgtaaaggtttccgcaaaa

SEQ ID NO: 107371 - DNA, 25 bp, Artificial
  Probe
accaaagggcatctaacagcttcta

SEQ ID NO: 107372 - DNA, 25 bp, Artificial
  Probe
ctagtttcctatgccaactcctgtg

SEQ ID NO: 107373 - DNA, 25 bp, Artificial
  Probe
ctggtctccaagcatttccgtaaag

SEQ ID NO: 107374 - DNA, 25 bp, Artificial
  Probe
gtggtggtggagagactagactaac

SEQ ID NO: 107375 - DNA, 25 bp, Artificial
  Probe
gtggagagactagactaaccctgtc

SEQ ID NO: 107376 - DNA, 25 bp, Artificial
  Probe
cgtggtggtggagagactagactaa

SEQ ID NO: 107377 - DNA, 25 bp, Artificial
  Probe
tggtggtggagagactagactaacc

SEQ ID NO: 107378 - DNA, 25 bp, Artificial
  Probe
tggagagactagactaaccctgtcc

SEQ ID NO: 107379 - DNA, 25 bp, Artificial
  Probe
ggtggagagactagactaaccctgt

SEQ ID NO: 107380 - DNA, 25 bp, Artificial
  Probe
tggtggagagactagactaaccctg

SEQ ID NO: 107381 - DNA, 25 bp, Artificial
  Probe
gtggtggagagactagactaaccct

SEQ ID NO: 107382 - DNA, 25 bp, Artificial
  Probe
ggagagactagactaaccctgtccc

SEQ ID NO: 107383 - DNA, 25 bp, Artificial
  Probe
ggtggtggagagactagactaaccc

SEQ ID NO: 107384 - DNA, 25 bp, Artificial
  Probe
gagagactagactaaccctgtcccc

SEQ ID NO: 107385 - DNA, 25 bp, Artificial
  Probe
aagctctactatgaccaagaacaga

SEQ ID NO: 107386 - DNA, 25 bp, Artificial
  Probe
ttctctttctcaatctttccaggtt

SEQ ID NO: 107387 - DNA, 25 bp, Artificial
  Probe
cttctctttctcaatctttccaggt

SEQ ID NO: 107388 - DNA, 25 bp, Artificial
  Probe
ggatatggcttctctttctcaatct

SEQ ID NO: 107389 - DNA, 25 bp, Artificial
  Probe
aggatatggcttctctttctcaatc

SEQ ID NO: 107390 - DNA, 25 bp, Artificial
  Probe
atggcttctctttctcaatctttcc

SEQ ID NO: 107391 - DNA, 25 bp, Artificial
  Probe
tatggcttctctttctcaatctttc

SEQ ID NO: 107392 - DNA, 25 bp, Artificial
  Probe
tctctttctcaatctttccaggttg

SEQ ID NO: 107393 - DNA, 25 bp, Artificial
  Probe
gatatggcttctctttctcaatctt

SEQ ID NO: 107394 - DNA, 25 bp, Artificial
  Probe
gcttctctttctcaatctttccagg

SEQ ID NO: 107395 - DNA, 25 bp, Artificial
  Probe
ggcttctctttctcaatctttccag

SEQ ID NO: 107396 - DNA, 25 bp, Artificial
  Probe
gaggatatggcttctctttctcaat

SEQ ID NO: 107397 - DNA, 25 bp, Artificial
  Probe
atatggcttctctttctcaatcttt

SEQ ID NO: 107398 - DNA, 25 bp, Artificial
  Probe
caacctttagaggatatggcttctc

SEQ ID NO: 107399 - DNA, 25 bp, Artificial
  Probe
ctcaacctttagaggatatggcttc

SEQ ID NO: 107400 - DNA, 25 bp, Artificial
  Probe
tcaacctttagaggatatggcttct

SEQ ID NO: 107401 - DNA, 25 bp, Artificial
  Probe
atggagagagcagagacctatggat

SEQ ID NO: 107402 - DNA, 25 bp, Artificial
  Probe
aaagctctactatgaccaagaacag

SEQ ID NO: 107403 - DNA, 25 bp, Artificial
  Probe
tgatggtcaaattctggatatctgg

SEQ ID NO: 107404 - DNA, 25 bp, Artificial
  Probe
gttgaacatgaaggacaatgtgagg

SEQ ID NO: 107405 - DNA, 25 bp, Artificial
  Probe
gatggtcaaattctggatatctggc

SEQ ID NO: 107406 - DNA, 25 bp, Artificial
  Probe
tggcttctctttctcaatctttcca

SEQ ID NO: 107407 - DNA, 25 bp, Artificial
  Probe
gatggagagagcagagacctatgga

SEQ ID NO: 107408 - DNA, 25 bp, Artificial
  Probe
caggttgaactttggggactattaa

SEQ ID NO: 107409 - DNA, 25 bp, Artificial
  Probe
tgagactgtcatctggactgtgttc

SEQ ID NO: 107410 - DNA, 25 bp, Artificial
  Probe
cttcccctaacccctgattaaatta

SEQ ID NO: 107411 - DNA, 25 bp, Artificial
  Probe
gactattaaggtgtgctgtggtggt

SEQ ID NO: 107412 - DNA, 25 bp, Artificial
  Probe
tcccctaacccctgattaaattaaa

SEQ ID NO: 107413 - DNA, 25 bp, Artificial
  Probe
ttcccctaacccctgattaaattaa

SEQ ID NO: 107414 - DNA, 25 bp, Artificial
  Probe
aggttgaactttggggactattaag

SEQ ID NO: 107415 - DNA, 25 bp, Artificial
  Probe
gaaactgtctgcctacttccgttac

SEQ ID NO: 107416 - DNA, 25 bp, Artificial
  Probe
ttgaactttggggactattaaggtg

SEQ ID NO: 107417 - DNA, 25 bp, Artificial
  Probe
gttgaactttggggactattaaggt

SEQ ID NO: 107418 - DNA, 25 bp, Artificial
  Probe
aaaagaagaaactgtctgcctactt

SEQ ID NO: 107419 - DNA, 25 bp, Artificial
  Probe
ggagagagcagagacctatggatct

SEQ ID NO: 107420 - DNA, 25 bp, Artificial
  Probe
caatctttccaggttgaactttggg

SEQ ID NO: 107421 - DNA, 25 bp, Artificial
  Probe
ctttctcaatctttccaggttgaac

SEQ ID NO: 107422 - DNA, 25 bp, Artificial
  Probe
tctttctcaatctttccaggttgaa

SEQ ID NO: 107423 - DNA, 25 bp, Artificial
  Probe
ctcaatctttccaggttgaactttg

SEQ ID NO: 107424 - DNA, 25 bp, Artificial
  Probe
tctcaatctttccaggttgaacttt

SEQ ID NO: 107425 - DNA, 25 bp, Artificial
  Probe
ttctcaatctttccaggttgaactt

SEQ ID NO: 107426 - DNA, 25 bp, Artificial
  Probe
tttctcaatctttccaggttgaact

SEQ ID NO: 107427 - DNA, 25 bp, Artificial
  Probe
agaaactgtctgcctacttccgtta

SEQ ID NO: 107428 - DNA, 25 bp, Artificial
  Probe
ctctttctcaatctttccaggttga

SEQ ID NO: 107429 - DNA, 25 bp, Artificial
  Probe
gaaaagaagaaactgtctgcctact

SEQ ID NO: 107430 - DNA, 25 bp, Artificial
  Probe
gaagatcaggataaggtggtacatg

SEQ ID NO: 107431 - DNA, 25 bp, Artificial
  Probe
ggaagatcaggataaggtggtacat

SEQ ID NO: 107432 - DNA, 25 bp, Artificial
  Probe
aagatcaggataaggtggtacatgg

SEQ ID NO: 107433 - DNA, 25 bp, Artificial
  Probe
gatcaggataaggtggtacatggag

SEQ ID NO: 107434 - DNA, 25 bp, Artificial
  Probe
tacacagatgtctgcactcatatca

SEQ ID NO: 107435 - DNA, 25 bp, Artificial
  Probe
agatcaggataaggtggtacatgga

SEQ ID NO: 107436 - DNA, 25 bp, Artificial
  Probe
ctgtgcttgattcttgctaagtcag

SEQ ID NO: 107437 - DNA, 25 bp, Artificial
  Probe
aagaaagactgctctgagaagaatc

SEQ ID NO: 107438 - DNA, 25 bp, Artificial
  Probe
gaagaaagactgctctgagaagaat

SEQ ID NO: 107439 - DNA, 25 bp, Artificial
  Probe
aaacatcatcagaaacaagtgactc

SEQ ID NO: 107440 - DNA, 25 bp, Artificial
  Probe
aacatcatcagaaacaagtgactct

SEQ ID NO: 107441 - DNA, 25 bp, Artificial
  Probe
tttgaagaaagactgctctgagaag

SEQ ID NO: 107442 - DNA, 25 bp, Artificial
  Probe
ttacacagatgtctgcactcatatc

SEQ ID NO: 107443 - DNA, 25 bp, Artificial
  Probe
tgaagaaagactgctctgagaagaa

SEQ ID NO: 107444 - DNA, 25 bp, Artificial
  Probe
ttgaagaaagactgctctgagaaga

SEQ ID NO: 107445 - DNA, 25 bp, Artificial
  Probe
acacagatgtctgcactcatatcag

SEQ ID NO: 107446 - DNA, 25 bp, Artificial
  Probe
tcggaagatcaggataaggtggtac

SEQ ID NO: 107447 - DNA, 25 bp, Artificial
  Probe
gtcggaagatcaggataaggtggta

SEQ ID NO: 107448 - DNA, 25 bp, Artificial
  Probe
cctgtgcttgattcttgctaagtca

SEQ ID NO: 107449 - DNA, 25 bp, Artificial
  Probe
aaactgagactttccaaaggcaaat

SEQ ID NO: 107450 - DNA, 25 bp, Artificial
  Probe
ctgtttgaagaactctcaccctttc

SEQ ID NO: 107451 - DNA, 25 bp, Artificial
  Probe
atcaggataaggtggtacatggagg

SEQ ID NO: 107452 - DNA, 25 bp, Artificial
  Probe
agaaagactgctctgagaagaatcc

SEQ ID NO: 107453 - DNA, 25 bp, Artificial
  Probe
cggaagatcaggataaggtggtaca

SEQ ID NO: 107454 - DNA, 25 bp, Artificial
  Probe
caatctacggcaaactgagactttc

SEQ ID NO: 107455 - DNA, 25 bp, Artificial
  Probe
aactgagactttccaaaggcaaatc

SEQ ID NO: 107456 - DNA, 25 bp, Artificial
  Probe
gtccagtcaaattctctcaaaggat

SEQ ID NO: 107457 - DNA, 25 bp, Artificial
  Probe
gaaacacaatctacggcaaactgag

SEQ ID NO: 107458 - DNA, 25 bp, Artificial
  Probe
tttgaagaactctcaccctttccaa

SEQ ID NO: 107459 - DNA, 25 bp, Artificial
  Probe
tccagtcaaattctctcaaaggatc

SEQ ID NO: 107460 - DNA, 25 bp, Artificial
  Probe
caaactgagactttccaaaggcaaa

SEQ ID NO: 107461 - DNA, 25 bp, Artificial
  Probe
acaatctacggcaaactgagacttt

SEQ ID NO: 107462 - DNA, 25 bp, Artificial
  Probe
aaacgtccagtcaaattctctcaaa

SEQ ID NO: 107463 - DNA, 25 bp, Artificial
  Probe
gactttccaaaggcaaatctctgtg

SEQ ID NO: 107464 - DNA, 25 bp, Artificial
  Probe
caaatctctgtggacaggactattg

SEQ ID NO: 107465 - DNA, 25 bp, Artificial
  Probe
ttgaagaactctcaccctttccaag

SEQ ID NO: 107466 - DNA, 25 bp, Artificial
  Probe
gaaagactgctctgagaagaatccc

SEQ ID NO: 107467 - DNA, 25 bp, Artificial
  Probe
agactttccaaaggcaaatctctgt

SEQ ID NO: 107468 - DNA, 25 bp, Artificial
  Probe
actgagactttccaaaggcaaatct

SEQ ID NO: 107469 - DNA, 25 bp, Artificial
  Probe
ctttgaagaaagactgctctgagaa

SEQ ID NO: 107470 - DNA, 25 bp, Artificial
  Probe
aaatctctgtggacaggactattgt

SEQ ID NO: 107471 - DNA, 25 bp, Artificial
  Probe
aaacacaatctacggcaaactgaga

SEQ ID NO: 107472 - DNA, 25 bp, Artificial
  Probe
aacgtccagtcaaattctctcaaag

SEQ ID NO: 107473 - DNA, 25 bp, Artificial
  Probe
gtttgaagaactctcaccctttcca

SEQ ID NO: 107474 - DNA, 25 bp, Artificial
  Probe
tgtttgaagaactctcaccctttcc

SEQ ID NO: 107475 - DNA, 25 bp, Artificial
  Probe
ttcctctcactcactcatcctataa

SEQ ID NO: 107476 - DNA, 25 bp, Artificial
  Probe
ggtctagtcctagtccaatatgtca

SEQ ID NO: 107477 - DNA, 25 bp, Artificial
  Probe
gtctagtcctagtccaatatgtcaa

SEQ ID NO: 107478 - DNA, 25 bp, Artificial
  Probe
ataacttgtgcttatacagatcggt

SEQ ID NO: 107479 - DNA, 25 bp, Artificial
  Probe
cataacttgtgcttatacagatcgg

SEQ ID NO: 107480 - DNA, 25 bp, Artificial
  Probe
ccataacttgtgcttatacagatcg

SEQ ID NO: 107481 - DNA, 25 bp, Artificial
  Probe
taacttgtgcttatacagatcggta

SEQ ID NO: 107482 - DNA, 25 bp, Artificial
  Probe
acttgtgcttatacagatcggtatt

SEQ ID NO: 107483 - DNA, 25 bp, Artificial
  Probe
aacttgtgcttatacagatcggtat

SEQ ID NO: 107484 - DNA, 25 bp, Artificial
  Probe
aagatcaaggaaggcgactataacc

SEQ ID NO: 107485 - DNA, 25 bp, Artificial
  Probe
tggtctagtcctagtccaatatgtc

SEQ ID NO: 107486 - DNA, 25 bp, Artificial
  Probe
ctggtctagtcctagtccaatatgt

SEQ ID NO: 107487 - DNA, 25 bp, Artificial
  Probe
ttccataacttgtgcttatacagat

SEQ ID NO: 107488 - DNA, 25 bp, Artificial
  Probe
attccataacttgtgcttatacaga

SEQ ID NO: 107489 - DNA, 25 bp, Artificial
  Probe
tccataacttgtgcttatacagatc

SEQ ID NO: 107490 - DNA, 25 bp, Artificial
  Probe
tcctctcactcactcatcctataaa

SEQ ID NO: 107491 - DNA, 25 bp, Artificial
  Probe
tttcctctcactcactcatcctata

SEQ ID NO: 107492 - DNA, 25 bp, Artificial
  Probe
atttcctctcactcactcatcctat

SEQ ID NO: 107493 - DNA, 25 bp, Artificial
  Probe
cctggtctagtcctagtccaatatg

SEQ ID NO: 107494 - DNA, 25 bp, Artificial
  Probe
tcctggtctagtcctagtccaatat

SEQ ID NO: 107495 - DNA, 25 bp, Artificial
  Probe
cctctcactcactcatcctataaat

SEQ ID NO: 107496 - DNA, 25 bp, Artificial
  Probe
ctaatttcctctcactcactcatcc

SEQ ID NO: 107497 - DNA, 25 bp, Artificial
  Probe
cctaatttcctctcactcactcatc

SEQ ID NO: 107498 - DNA, 25 bp, Artificial
  Probe
aatttcctctcactcactcatccta

SEQ ID NO: 107499 - DNA, 25 bp, Artificial
  Probe
taatttcctctcactcactcatcct

SEQ ID NO: 107500 - DNA, 25 bp, Artificial
  Probe
tcctaatttcctctcactcactcat

SEQ ID NO: 107501 - DNA, 25 bp, Artificial
  Probe
ctcctaatttcctctcactcactca

SEQ ID NO: 107502 - DNA, 25 bp, Artificial
  Probe
ctcctggtctagtcctagtccaata

SEQ ID NO: 107503 - DNA, 25 bp, Artificial
  Probe
ccttactgattgatcctttgtgaga

SEQ ID NO: 107504 - DNA, 25 bp, Artificial
  Probe
tccttactgattgatcctttgtgag

SEQ ID NO: 107505 - DNA, 25 bp, Artificial
  Probe
tttgtgagaggaaagtcataaggta

SEQ ID NO: 107506 - DNA, 25 bp, Artificial
  Probe
tctcactcactcatcctataaatct

SEQ ID NO: 107507 - DNA, 25 bp, Artificial
  Probe
atccttactgattgatcctttgtga

SEQ ID NO: 107508 - DNA, 25 bp, Artificial
  Probe
aaagatcaaggaaggcgactataac

SEQ ID NO: 107509 - DNA, 25 bp, Artificial
  Probe
caaagatcaaggaaggcgactataa

SEQ ID NO: 107510 - DNA, 25 bp, Artificial
  Probe
cttactgattgatcctttgtgagag

SEQ ID NO: 107511 - DNA, 25 bp, Artificial
  Probe
gaagtttctcaaagatcaaggaagg

SEQ ID NO: 107512 - DNA, 25 bp, Artificial
  Probe
ctctcactcactcatcctataaatc

SEQ ID NO: 107513 - DNA, 25 bp, Artificial
  Probe
cctcctaatttcctctcactcactc

SEQ ID NO: 107514 - DNA, 25 bp, Artificial
  Probe
ctcctcctaatttcctctcactcac

SEQ ID NO: 107515 - DNA, 25 bp, Artificial
  Probe
tctagtcctagtccaatatgtcaaa

SEQ ID NO: 107516 - DNA, 25 bp, Artificial
  Probe
tcaaagatcaaggaaggcgactata

SEQ ID NO: 107517 - DNA, 25 bp, Artificial
  Probe
ttgtgagaggaaagtcataaggtac

SEQ ID NO: 107518 - DNA, 25 bp, Artificial
  Probe
agaagtttctcaaagatcaaggaag

SEQ ID NO: 107519 - DNA, 25 bp, Artificial
  Probe
tgtgagaggaaagtcataaggtact

SEQ ID NO: 107520 - DNA, 25 bp, Artificial
  Probe
accttatcctctgaagcaagtgaag

SEQ ID NO: 107521 - DNA, 25 bp, Artificial
  Probe
tttctgtggctcattaaagtatgtg

SEQ ID NO: 107522 - DNA, 25 bp, Artificial
  Probe
ttatcctctgaagcaagtgaaggtc

SEQ ID NO: 107523 - DNA, 25 bp, Artificial
  Probe
cttatcctctgaagcaagtgaaggt

SEQ ID NO: 107524 - DNA, 25 bp, Artificial
  Probe
tctgtggctcattaaagtatgtgaa

SEQ ID NO: 107525 - DNA, 25 bp, Artificial
  Probe
ttctgtggctcattaaagtatgtga

SEQ ID NO: 107526 - DNA, 25 bp, Artificial
  Probe
ctgtggctcattaaagtatgtgaaa

SEQ ID NO: 107527 - DNA, 25 bp, Artificial
  Probe
caccttatcctctgaagcaagtgaa

SEQ ID NO: 107528 - DNA, 25 bp, Artificial
  Probe
ctacacaggagatgatgttcccatt

SEQ ID NO: 107529 - DNA, 25 bp, Artificial
  Probe
ctgtctttaactcactgcttcctgg

SEQ ID NO: 107530 - DNA, 25 bp, Artificial
  Probe
tatcctctgaagcaagtgaaggtcc

SEQ ID NO: 107531 - DNA, 25 bp, Artificial
  Probe
tacacaggagatgatgttcccattg

SEQ ID NO: 107532 - DNA, 25 bp, Artificial
  Probe
ttttctgtggctcattaaagtatgt

SEQ ID NO: 107533 - DNA, 25 bp, Artificial
  Probe
tctacacaggagatgatgttcccat

SEQ ID NO: 107534 - DNA, 25 bp, Artificial
  Probe
ccaccttatcctctgaagcaagtga

SEQ ID NO: 107535 - DNA, 25 bp, Artificial
  Probe
tgtggctcattaaagtatgtgaaaa

SEQ ID NO: 107536 - DNA, 25 bp, Artificial
  Probe
gctgtctttaactcactgcttcctg

SEQ ID NO: 107537 - DNA, 25 bp, Artificial
  Probe
ctgctgtctttaactcactgcttcc

SEQ ID NO: 107538 - DNA, 25 bp, Artificial
  Probe
cctgctgtctttaactcactgcttc

SEQ ID NO: 107539 - DNA, 25 bp, Artificial
  Probe
tccctcttttctgtggctcattaaa

SEQ ID NO: 107540 - DNA, 25 bp, Artificial
  Probe
gacgtactacctggactggattcac

SEQ ID NO: 107541 - DNA, 25 bp, Artificial
  Probe
gtgacgtactacctggactggattc

SEQ ID NO: 107542 - DNA, 25 bp, Artificial
  Probe
gtggctcattaaagtatgtgaaaat

SEQ ID NO: 107543 - DNA, 25 bp, Artificial
  Probe
cacaggagatgatgttcccattgtc

SEQ ID NO: 107544 - DNA, 25 bp, Artificial
  Probe
ctctacacaggagatgatgttccca

SEQ ID NO: 107545 - DNA, 25 bp, Artificial
  Probe
tgctgtctttaactcactgcttcct

SEQ ID NO: 107546 - DNA, 25 bp, Artificial
  Probe
ctctcctgccaccttatcctctgaa

SEQ ID NO: 107547 - DNA, 25 bp, Artificial
  Probe
gcctctacacaggagatgatgttcc

SEQ ID NO: 107548 - DNA, 25 bp, Artificial
  Probe
ctccctcttttctgtggctcattaa

SEQ ID NO: 107549 - DNA, 25 bp, Artificial
  Probe
gatgatgttcccattgtccaggatg

SEQ ID NO: 107550 - DNA, 25 bp, Artificial
  Probe
tctcctgccaccttatcctctgaag

SEQ ID NO: 107551 - DNA, 25 bp, Artificial
  Probe
agatgatgttcccattgtccaggat

SEQ ID NO: 107552 - DNA, 25 bp, Artificial
  Probe
acctgctgtctttaactcactgctt

SEQ ID NO: 107553 - DNA, 25 bp, Artificial
  Probe
tggctcattaaagtatgtgaaaatt

SEQ ID NO: 107554 - DNA, 25 bp, Artificial
  Probe
ccttatcctctgaagcaagtgaagg

SEQ ID NO: 107555 - DNA, 25 bp, Artificial
  Probe
cctctacacaggagatgatgttccc

SEQ ID NO: 107556 - DNA, 25 bp, Artificial
  Probe
ctcttttctgtggctcattaaagta

SEQ ID NO: 107557 - DNA, 25 bp, Artificial
  Probe
tgacgtactacctggactggattca

SEQ ID NO: 107558 - DNA, 25 bp, Artificial
  Probe
acacaggagatgatgttcccattgt

SEQ ID NO: 107559 - DNA, 25 bp, Artificial
  Probe
cctcttttctgtggctcattaaagt

SEQ ID NO: 107560 - DNA, 25 bp, Artificial
  Probe
gagatgatgttcccattgtccagga

SEQ ID NO: 107561 - DNA, 25 bp, Artificial
  Probe
aggagatgatgttcccattgtccag

SEQ ID NO: 107562 - DNA, 25 bp, Artificial
  Probe
cttttctgtggctcattaaagtatg

SEQ ID NO: 107563 - DNA, 25 bp, Artificial
  Probe
tcttttctgtggctcattaaagtat

SEQ ID NO: 107564 - DNA, 25 bp, Artificial
  Probe
ccctcttttctgtggctcattaaag

SEQ ID NO: 107565 - DNA, 25 bp, Artificial
  Probe
gtctgctaaggaagattgagagatt

SEQ ID NO: 107566 - DNA, 25 bp, Artificial
  Probe
cttgtctgctaaggaagattgagag

SEQ ID NO: 107567 - DNA, 25 bp, Artificial
  Probe
tgtctgctaaggaagattgagagat

SEQ ID NO: 107568 - DNA, 25 bp, Artificial
  Probe
ttgtctgctaaggaagattgagaga

SEQ ID NO: 107569 - DNA, 25 bp, Artificial
  Probe
tctgctaaggaagattgagagatta

SEQ ID NO: 107570 - DNA, 25 bp, Artificial
  Probe
gagaacagtgacctcaagtattcag

SEQ ID NO: 107571 - DNA, 25 bp, Artificial
  Probe
ctgctaaggaagattgagagattaa

SEQ ID NO: 107572 - DNA, 25 bp, Artificial
  Probe
agaacagtgacctcaagtattcagg

SEQ ID NO: 107573 - DNA, 25 bp, Artificial
  Probe
atgcagacataacattccttcgatg

SEQ ID NO: 107574 - DNA, 25 bp, Artificial
  Probe
cataacattccttcgatgcgtgatt

SEQ ID NO: 107575 - DNA, 25 bp, Artificial
  Probe
tattgaagtaagaagagatgggtct

SEQ ID NO: 107576 - DNA, 25 bp, Artificial
  Probe
agcttattgaagtaagaagagatgg

SEQ ID NO: 107577 - DNA, 25 bp, Artificial
  Probe
ttattgaagtaagaagagatgggtc

SEQ ID NO: 107578 - DNA, 25 bp, Artificial
  Probe
gcttattgaagtaagaagagatggg

SEQ ID NO: 107579 - DNA, 25 bp, Artificial
  Probe
tgctaaggaagattgagagattaaa

SEQ ID NO: 107580 - DNA, 25 bp, Artificial
  Probe
tattgctccaaatcatgtgcttctt

SEQ ID NO: 107581 - DNA, 25 bp, Artificial
  Probe
cctcaagtattcaggtcaagatggc

SEQ ID NO: 107582 - DNA, 25 bp, Artificial
  Probe
tctacataggtgtcagtttgtcctc

SEQ ID NO: 107583 - DNA, 25 bp, Artificial
  Probe
ctctacataggtgtcagtttgtcct

SEQ ID NO: 107584 - DNA, 25 bp, Artificial
  Probe
acataacattccttcgatgcgtgat

SEQ ID NO: 107585 - DNA, 25 bp, Artificial
  Probe
aatgcagacataacattccttcgat

SEQ ID NO: 107586 - DNA, 25 bp, Artificial
  Probe
cttattgaagtaagaagagatgggt

SEQ ID NO: 107587 - DNA, 25 bp, Artificial
  Probe
gtattgctccaaatcatgtgcttct

SEQ ID NO: 107588 - DNA, 25 bp, Artificial
  Probe
cttcttgtgatcaaccttggttatc

SEQ ID NO: 107589 - DNA, 25 bp, Artificial
  Probe
ataacattccttcgatgcgtgattt

SEQ ID NO: 107590 - DNA, 25 bp, Artificial
  Probe
tgtattgctccaaatcatgtgcttc

SEQ ID NO: 107591 - DNA, 25 bp, Artificial
  Probe
ttcttgtgatcaaccttggttatcc

SEQ ID NO: 107592 - DNA, 25 bp, Artificial
  Probe
gtgtattgctccaaatcatgtgctt

SEQ ID NO: 107593 - DNA, 25 bp, Artificial
  Probe
taagaagagatgggtctttgtagga

SEQ ID NO: 107594 - DNA, 25 bp, Artificial
  Probe
gtaagaagagatgggtctttgtagg

SEQ ID NO: 107595 - DNA, 25 bp, Artificial
  Probe
gaagtaagaagagatgggtctttgt

SEQ ID NO: 107596 - DNA, 25 bp, Artificial
  Probe
tgaagtaagaagagatgggtctttg

SEQ ID NO: 107597 - DNA, 25 bp, Artificial
  Probe
ttgaagtaagaagagatgggtcttt

SEQ ID NO: 107598 - DNA, 25 bp, Artificial
  Probe
gatcaaccttggttatcccagaatt

SEQ ID NO: 107599 - DNA, 25 bp, Artificial
  Probe
agtaagaagagatgggtctttgtag

SEQ ID NO: 107600 - DNA, 25 bp, Artificial
  Probe
ctacataggtgtcagtttgtcctcc

SEQ ID NO: 107601 - DNA, 25 bp, Artificial
  Probe
cctctacataggtgtcagtttgtcc

SEQ ID NO: 107602 - DNA, 25 bp, Artificial
  Probe
attgaagtaagaagagatgggtctt

SEQ ID NO: 107603 - DNA, 25 bp, Artificial
  Probe
gacataacattccttcgatgcgtga

SEQ ID NO: 107604 - DNA, 25 bp, Artificial
  Probe
agacataacattccttcgatgcgtg

SEQ ID NO: 107605 - DNA, 25 bp, Artificial
  Probe
cagacataacattccttcgatgcgt

SEQ ID NO: 107606 - DNA, 25 bp, Artificial
  Probe
aagtaagaagagatgggtctttgta

SEQ ID NO: 107607 - DNA, 25 bp, Artificial
  Probe
attgctccaaatcatgtgcttcttg

SEQ ID NO: 107608 - DNA, 25 bp, Artificial
  Probe
taacattccttcgatgcgtgatttc

SEQ ID NO: 107609 - DNA, 25 bp, Artificial
  Probe
gcttcttgtgatcaaccttggttat

SEQ ID NO: 107610 - DNA, 25 bp, Artificial
  Probe
ggacaaggataagagcagatatgat

SEQ ID NO: 107611 - DNA, 25 bp, Artificial
  Probe
gacaaggataagagcagatatgatg

SEQ ID NO: 107612 - DNA, 25 bp, Artificial
  Probe
caaggataagagcagatatgatgtt

SEQ ID NO: 107613 - DNA, 25 bp, Artificial
  Probe
acaaggataagagcagatatgatgt

SEQ ID NO: 107614 - DNA, 25 bp, Artificial
  Probe
ttgtctcaatgatggtgctcagatt

SEQ ID NO: 107615 - DNA, 25 bp, Artificial
  Probe
gggacaaggataagagcagatatga

SEQ ID NO: 107616 - DNA, 25 bp, Artificial
  Probe
cttgtctcaatgatggtgctcagat

SEQ ID NO: 107617 - DNA, 25 bp, Artificial
  Probe
gattgcgaaagtgggtcagatattt

SEQ ID NO: 107618 - DNA, 25 bp, Artificial
  Probe
tgggacaaggataagagcagatatg

SEQ ID NO: 107619 - DNA, 25 bp, Artificial
  Probe
attgcgaaagtgggtcagatatttg

SEQ ID NO: 107620 - DNA, 25 bp, Artificial
  Probe
tttcacttactgtaaagagtcgttt

SEQ ID NO: 107621 - DNA, 25 bp, Artificial
  Probe
aaggataagagcagatatgatgttt

SEQ ID NO: 107622 - DNA, 25 bp, Artificial
  Probe
agattgcgaaagtgggtcagatatt

SEQ ID NO: 107623 - DNA, 25 bp, Artificial
  Probe
ctgggacaaggataagagcagatat

SEQ ID NO: 107624 - DNA, 25 bp, Artificial
  Probe
cagattgcgaaagtgggtcagatat

SEQ ID NO: 107625 - DNA, 25 bp, Artificial
  Probe
tgtctcaatgatggtgctcagattg

SEQ ID NO: 107626 - DNA, 25 bp, Artificial
  Probe
tgtaaagagtcgttttcataaaggc

SEQ ID NO: 107627 - DNA, 25 bp, Artificial
  Probe
cgtgaaagttttgttcgtttgtttt

SEQ ID NO: 107628 - DNA, 25 bp, Artificial
  Probe
tcagattgcgaaagtgggtcagata

SEQ ID NO: 107629 - DNA, 25 bp, Artificial
  Probe
ctgtaaagagtcgttttcataaagg

SEQ ID NO: 107630 - DNA, 25 bp, Artificial
  Probe
cacttactgtaaagagtcgttttca

SEQ ID NO: 107631 - DNA, 25 bp, Artificial
  Probe
gttttctgtttcacatccaacttca

SEQ ID NO: 107632 - DNA, 25 bp, Artificial
  Probe
tgttttctgtttcacatccaacttc

SEQ ID NO: 107633 - DNA, 25 bp, Artificial
  Probe
tcacttactgtaaagagtcgttttc

SEQ ID NO: 107634 - DNA, 25 bp, Artificial
  Probe
ttcacttactgtaaagagtcgtttt

SEQ ID NO: 107635 - DNA, 25 bp, Artificial
  Probe
ttttcacttactgtaaagagtcgtt

SEQ ID NO: 107636 - DNA, 25 bp, Artificial
  Probe
aggataagagcagatatgatgtttt

SEQ ID NO: 107637 - DNA, 25 bp, Artificial
  Probe
acttactgtaaagagtcgttttcat

SEQ ID NO: 107638 - DNA, 25 bp, Artificial
  Probe
ttgcgaaagtgggtcagatatttgc

SEQ ID NO: 107639 - DNA, 25 bp, Artificial
  Probe
tttcataaaggccaattcattcaaa

SEQ ID NO: 107640 - DNA, 25 bp, Artificial
  Probe
ggataagagcagatatgatgttttc

SEQ ID NO: 107641 - DNA, 25 bp, Artificial
  Probe
ctacgggttctgggacaaggataag

SEQ ID NO: 107642 - DNA, 25 bp, Artificial
  Probe
gtctcaatgatggtgctcagattgc

SEQ ID NO: 107643 - DNA, 25 bp, Artificial
  Probe
actgtaaagagtcgttttcataaag

SEQ ID NO: 107644 - DNA, 25 bp, Artificial
  Probe
aatgatggtgctcagattgcgaaag

SEQ ID NO: 107645 - DNA, 25 bp, Artificial
  Probe
gcttgtctcaatgatggtgctcaga

SEQ ID NO: 107646 - DNA, 25 bp, Artificial
  Probe
gattttactacctgatccaccccac

SEQ ID NO: 107647 - DNA, 25 bp, Artificial
  Probe
tacgggttctgggacaaggataaga

SEQ ID NO: 107648 - DNA, 25 bp, Artificial
  Probe
gaaagtgggtcagatatttgctgcc

SEQ ID NO: 107649 - DNA, 25 bp, Artificial
  Probe
actacgggttctgggacaaggataa

SEQ ID NO: 107650 - DNA, 25 bp, Artificial
  Probe
tgcgaaagtgggtcagatatttgct

SEQ ID NO: 107651 - DNA, 25 bp, Artificial
  Probe
gataagagcagatatgatgttttct

SEQ ID NO: 107652 - DNA, 25 bp, Artificial
  Probe
aactacgggttctgggacaaggata

SEQ ID NO: 107653 - DNA, 25 bp, Artificial
  Probe
ctcagattgcgaaagtgggtcagat

SEQ ID NO: 107654 - DNA, 25 bp, Artificial
  Probe
tctgggacaaggataagagcagata

SEQ ID NO: 107655 - DNA, 25 bp, Artificial
  Probe
agatgataaccagttgttccattga

SEQ ID NO: 107656 - DNA, 25 bp, Artificial
  Probe
cagatgataaccagttgttccattg

SEQ ID NO: 107657 - DNA, 25 bp, Artificial
  Probe
gatgataaccagttgttccattgat

SEQ ID NO: 107658 - DNA, 25 bp, Artificial
  Probe
ctaaccagacttcagcagatgataa

SEQ ID NO: 107659 - DNA, 25 bp, Artificial
  Probe
taaccagacttcagcagatgataac

SEQ ID NO: 107660 - DNA, 25 bp, Artificial
  Probe
atgataaccagttgttccattgatt

SEQ ID NO: 107661 - DNA, 25 bp, Artificial
  Probe
tctaaccagacttcagcagatgata

SEQ ID NO: 107662 - DNA, 25 bp, Artificial
  Probe
tgataaccagttgttccattgatta

SEQ ID NO: 107663 - DNA, 25 bp, Artificial
  Probe
gcagatgataaccagttgttccatt

SEQ ID NO: 107664 - DNA, 25 bp, Artificial
  Probe
ttcagcagatgataaccagttgttc

SEQ ID NO: 107665 - DNA, 25 bp, Artificial
  Probe
cttcagcagatgataaccagttgtt

SEQ ID NO: 107666 - DNA, 25 bp, Artificial
  Probe
tcttccaacgccagtctgataataa

SEQ ID NO: 107667 - DNA, 25 bp, Artificial
  Probe
ttcttccaacgccagtctgataata

SEQ ID NO: 107668 - DNA, 25 bp, Artificial
  Probe
ttactacaggttgtcacagaagaga

SEQ ID NO: 107669 - DNA, 25 bp, Artificial
  Probe
ttctaaccagacttcagcagatgat

SEQ ID NO: 107670 - DNA, 25 bp, Artificial
  Probe
gacttcagcagatgataaccagttg

SEQ ID NO: 107671 - DNA, 25 bp, Artificial
  Probe
agacttcagcagatgataaccagtt

SEQ ID NO: 107672 - DNA, 25 bp, Artificial
  Probe
tcttctaaccagacttcagcagatg

SEQ ID NO: 107673 - DNA, 25 bp, Artificial
  Probe
agcagatgataaccagttgttccat

SEQ ID NO: 107674 - DNA, 25 bp, Artificial
  Probe
tactacaggttgtcacagaagagac

SEQ ID NO: 107675 - DNA, 25 bp, Artificial
  Probe
ataaccagttgttccattgattaac

SEQ ID NO: 107676 - DNA, 25 bp, Artificial
  Probe
cttctaaccagacttcagcagatga

SEQ ID NO: 107677 - DNA, 25 bp, Artificial
  Probe
acttcagcagatgataaccagttgt

SEQ ID NO: 107678 - DNA, 25 bp, Artificial
  Probe
gataaccagttgttccattgattaa

SEQ ID NO: 107679 - DNA, 25 bp, Artificial
  Probe
cagacttcagcagatgataaccagt

SEQ ID NO: 107680 - DNA, 25 bp, Artificial
  Probe
ctgttcctaaagtgtatcgtctgta

SEQ ID NO: 107681 - DNA, 25 bp, Artificial
  Probe
atctgttcctaaagtgtatcgtctg

SEQ ID NO: 107682 - DNA, 25 bp, Artificial
  Probe
catctgttcctaaagtgtatcgtct

SEQ ID NO: 107683 - DNA, 25 bp, Artificial
  Probe
atctcagtatgtttccttcttccaa

SEQ ID NO: 107684 - DNA, 25 bp, Artificial
  Probe
tgttcctaaagtgtatcgtctgtaa

SEQ ID NO: 107685 - DNA, 25 bp, Artificial
  Probe
tgatgtcattgtggtaaatagttgc

SEQ ID NO: 107686 - DNA, 25 bp, Artificial
  Probe
aaccagacttcagcagatgataacc

SEQ ID NO: 107687 - DNA, 25 bp, Artificial
  Probe
taaaggattgtgtgagcagtaagtc

SEQ ID NO: 107688 - DNA, 25 bp, Artificial
  Probe
agtaaaggattgtgtgagcagtaag

SEQ ID NO: 107689 - DNA, 25 bp, Artificial
  Probe
cttcttccaacgccagtctgataat

SEQ ID NO: 107690 - DNA, 25 bp, Artificial
  Probe
tcatctcagtatgtttccttcttcc

SEQ ID NO: 107691 - DNA, 25 bp, Artificial
  Probe
catctcagtatgtttccttcttcca

SEQ ID NO: 107692 - DNA, 25 bp, Artificial
  Probe
ccatctgttcctaaagtgtatcgtc

SEQ ID NO: 107693 - DNA, 25 bp, Artificial
  Probe
gtaaaggattgtgtgagcagtaagt

SEQ ID NO: 107694 - DNA, 25 bp, Artificial
  Probe
cagtaaaggattgtgtgagcagtaa

SEQ ID NO: 107695 - DNA, 25 bp, Artificial
  Probe
ctttgtgccatttctgttctgattc

SEQ ID NO: 107696 - DNA, 25 bp, Artificial
  Probe
ccaacgccagtctgataataaagta

SEQ ID NO: 107697 - DNA, 25 bp, Artificial
  Probe
tctgttcctaaagtgtatcgtctgt

SEQ ID NO: 107698 - DNA, 25 bp, Artificial
  Probe
tctcagtatgtttccttcttccaac

SEQ ID NO: 107699 - DNA, 25 bp, Artificial
  Probe
gtgccatttctgttctgattcaaag

SEQ ID NO: 107700 - DNA, 25 bp, Artificial
  Probe
atatacgactctatcccgaccttag

SEQ ID NO: 107701 - DNA, 25 bp, Artificial
  Probe
cattagtaacctcatccctcaccta

SEQ ID NO: 107702 - DNA, 25 bp, Artificial
  Probe
gatccagttctgcattagtaacctc

SEQ ID NO: 107703 - DNA, 25 bp, Artificial
  Probe
cagttctgcattagtaacctcatcc

SEQ ID NO: 107704 - DNA, 25 bp, Artificial
  Probe
ccagttctgcattagtaacctcatc

SEQ ID NO: 107705 - DNA, 25 bp, Artificial
  Probe
agatccagttctgcattagtaacct

SEQ ID NO: 107706 - DNA, 25 bp, Artificial
  Probe
tccagttctgcattagtaacctcat

SEQ ID NO: 107707 - DNA, 25 bp, Artificial
  Probe
atccagttctgcattagtaacctca

SEQ ID NO: 107708 - DNA, 25 bp, Artificial
  Probe
tatatacgactctatcccgacctta

SEQ ID NO: 107709 - DNA, 25 bp, Artificial
  Probe
attagtaacctcatccctcacctaa

SEQ ID NO: 107710 - DNA, 25 bp, Artificial
  Probe
tagtaacctcatccctcacctaact

SEQ ID NO: 107711 - DNA, 25 bp, Artificial
  Probe
ttagtaacctcatccctcacctaac

SEQ ID NO: 107712 - DNA, 25 bp, Artificial
  Probe
tatacgactctatcccgaccttaga

SEQ ID NO: 107713 - DNA, 25 bp, Artificial
  Probe
cagaaataaccctctatcccaggac

SEQ ID NO: 107714 - DNA, 25 bp, Artificial
  Probe
ttctgcattagtaacctcatccctc

SEQ ID NO: 107715 - DNA, 25 bp, Artificial
  Probe
acactcaatggacactctgatcctt

SEQ ID NO: 107716 - DNA, 25 bp, Artificial
  Probe
gtaacctcatccctcacctaactga

SEQ ID NO: 107717 - DNA, 25 bp, Artificial
  Probe
agtaacctcatccctcacctaactg

SEQ ID NO: 107718 - DNA, 25 bp, Artificial
  Probe
gaagtcgttctcaagtctttcaggg

SEQ ID NO: 107719 - DNA, 25 bp, Artificial
  Probe
ctcaatggacactctgatcctttca

SEQ ID NO: 107720 - DNA, 25 bp, Artificial
  Probe
actcaatggacactctgatcctttc

SEQ ID NO: 107721 - DNA, 25 bp, Artificial
  Probe
gcattagtaacctcatccctcacct

SEQ ID NO: 107722 - DNA, 25 bp, Artificial
  Probe
gttctgcattagtaacctcatccct

SEQ ID NO: 107723 - DNA, 25 bp, Artificial
  Probe
agttctgcattagtaacctcatccc

SEQ ID NO: 107724 - DNA, 25 bp, Artificial
  Probe
aacagccagtatatacgactctatc

SEQ ID NO: 107725 - DNA, 25 bp, Artificial
  Probe
gaacagccagtatatacgactctat

SEQ ID NO: 107726 - DNA, 25 bp, Artificial
  Probe
acagccagtatatacgactctatcc

SEQ ID NO: 107727 - DNA, 25 bp, Artificial
  Probe
gtcactaaggactcactgaggacag

SEQ ID NO: 107728 - DNA, 25 bp, Artificial
  Probe
ctgtcactaaggactcactgaggac

SEQ ID NO: 107729 - DNA, 25 bp, Artificial
  Probe
gacactcaatggacactctgatcct

SEQ ID NO: 107730 - DNA, 25 bp, Artificial
  Probe
gaaataaccctctatcccaggacct

SEQ ID NO: 107731 - DNA, 25 bp, Artificial
  Probe
agaaataaccctctatcccaggacc

SEQ ID NO: 107732 - DNA, 25 bp, Artificial
  Probe
ccagaaataaccctctatcccagga

SEQ ID NO: 107733 - DNA, 25 bp, Artificial
  Probe
ggaacagccagtatatacgactcta

SEQ ID NO: 107734 - DNA, 25 bp, Artificial
  Probe
tcaatggacactctgatcctttcac

SEQ ID NO: 107735 - DNA, 25 bp, Artificial
  Probe
cactcaatggacactctgatccttt

SEQ ID NO: 107736 - DNA, 25 bp, Artificial
  Probe
aagtcgttctcaagtctttcaggga

SEQ ID NO: 107737 - DNA, 25 bp, Artificial
  Probe
ctgcattagtaacctcatccctcac

SEQ ID NO: 107738 - DNA, 25 bp, Artificial
  Probe
tctgcattagtaacctcatccctca

SEQ ID NO: 107739 - DNA, 25 bp, Artificial
  Probe
agaagtcgttctcaagtctttcagg

SEQ ID NO: 107740 - DNA, 25 bp, Artificial
  Probe
catccccagaaataaccctctatcc

SEQ ID NO: 107741 - DNA, 25 bp, Artificial
  Probe
ccatccccagaaataaccctctatc

SEQ ID NO: 107742 - DNA, 25 bp, Artificial
  Probe
cagatccagttctgcattagtaacc

SEQ ID NO: 107743 - DNA, 25 bp, Artificial
  Probe
ccagatccagttctgcattagtaac

SEQ ID NO: 107744 - DNA, 25 bp, Artificial
  Probe
catcagccctcaggaccctattatg

SEQ ID NO: 107745 - DNA, 25 bp, Artificial
  Probe
cctcattgtaatctccacaggaata

SEQ ID NO: 107746 - DNA, 25 bp, Artificial
  Probe
atagctctagcagaattacttggac

SEQ ID NO: 107747 - DNA, 25 bp, Artificial
  Probe
catagctctagcagaattacttgga

SEQ ID NO: 107748 - DNA, 25 bp, Artificial
  Probe
tcatagctctagcagaattacttgg

SEQ ID NO: 107749 - DNA, 25 bp, Artificial
  Probe
agctctagcagaattacttggacta

SEQ ID NO: 107750 - DNA, 25 bp, Artificial
  Probe
tagctctagcagaattacttggact

SEQ ID NO: 107751 - DNA, 25 bp, Artificial
  Probe
ggaatcatagctctagcagaattac

SEQ ID NO: 107752 - DNA, 25 bp, Artificial
  Probe
gctctagcagaattacttggactag

SEQ ID NO: 107753 - DNA, 25 bp, Artificial
  Probe
aaccagcgaactatacaacctccta

SEQ ID NO: 107754 - DNA, 25 bp, Artificial
  Probe
ctcattgtaatctccacaggaatat

SEQ ID NO: 107755 - DNA, 25 bp, Artificial
  Probe
atcatagctctagcagaattacttg

SEQ ID NO: 107756 - DNA, 25 bp, Artificial
  Probe
gaatcatagctctagcagaattact

SEQ ID NO: 107757 - DNA, 25 bp, Artificial
  Probe
ctaggaataactgaagggaagtgac

SEQ ID NO: 107758 - DNA, 25 bp, Artificial
  Probe
cctctttcaccattgccatattgat

SEQ ID NO: 107759 - DNA, 25 bp, Artificial
  Probe
ctctttcaccattgccatattgatc

SEQ ID NO: 107760 - DNA, 25 bp, Artificial
  Probe
gacctctttcaccattgccatattg

SEQ ID NO: 107761 - DNA, 25 bp, Artificial
  Probe
accagcgaactatacaacctcctag

SEQ ID NO: 107762 - DNA, 25 bp, Artificial
  Probe
aatcatagctctagcagaattactt

SEQ ID NO: 107763 - DNA, 25 bp, Artificial
  Probe
gcctcattgtaatctccacaggaat

SEQ ID NO: 107764 - DNA, 25 bp, Artificial
  Probe
taggaataactgaagggaagtgacg

SEQ ID NO: 107765 - DNA, 25 bp, Artificial
  Probe
cttccaaccagcgaactatacaacc

SEQ ID NO: 107766 - DNA, 25 bp, Artificial
  Probe
tcattgtaatctccacaggaatatt

SEQ ID NO: 107767 - DNA, 25 bp, Artificial
  Probe
gggaatcatagctctagcagaatta

SEQ ID NO: 107768 - DNA, 25 bp, Artificial
  Probe
atgacctctttcaccattgccatat

SEQ ID NO: 107769 - DNA, 25 bp, Artificial
  Probe
atttcaggtttgggaatcatagctc

SEQ ID NO: 107770 - DNA, 25 bp, Artificial
  Probe
ttcaggtttgggaatcatagctcta

SEQ ID NO: 107771 - DNA, 25 bp, Artificial
  Probe
acctctttcaccattgccatattga

SEQ ID NO: 107772 - DNA, 25 bp, Artificial
  Probe
tgacctctttcaccattgccatatt

SEQ ID NO: 107773 - DNA, 25 bp, Artificial
  Probe
ttccaaccagcgaactatacaacct

SEQ ID NO: 107774 - DNA, 25 bp, Artificial
  Probe
tcaggtttgggaatcatagctctag

SEQ ID NO: 107775 - DNA, 25 bp, Artificial
  Probe
ctagtttatatgaagtttgtcgctt

SEQ ID NO: 107776 - DNA, 25 bp, Artificial
  Probe
tgggaatcatagctctagcagaatt

SEQ ID NO: 107777 - DNA, 25 bp, Artificial
  Probe
ttgggaatcatagctctagcagaat

SEQ ID NO: 107778 - DNA, 25 bp, Artificial
  Probe
ccacaggaatattaatactgcttca

SEQ ID NO: 107779 - DNA, 25 bp, Artificial
  Probe
tctccacaggaatattaatactgct

SEQ ID NO: 107780 - DNA, 25 bp, Artificial
  Probe
tttgggaatcatagctctagcagaa

SEQ ID NO: 107781 - DNA, 25 bp, Artificial
  Probe
tttcaggtttgggaatcatagctct

SEQ ID NO: 107782 - DNA, 25 bp, Artificial
  Probe
aacagtgactgactttcatctctga

SEQ ID NO: 107783 - DNA, 25 bp, Artificial
  Probe
caacagtgactgactttcatctctg

SEQ ID NO: 107784 - DNA, 25 bp, Artificial
  Probe
tccacaggaatattaatactgcttc

SEQ ID NO: 107785 - DNA, 25 bp, Artificial
  Probe
ctccacaggaatattaatactgctt

SEQ ID NO: 107786 - DNA, 25 bp, Artificial
  Probe
caaccagcgaactatacaacctcct

SEQ ID NO: 107787 - DNA, 25 bp, Artificial
  Probe
tccaaccagcgaactatacaacctc

SEQ ID NO: 107788 - DNA, 25 bp, Artificial
  Probe
acaacagtgactgactttcatctct

SEQ ID NO: 107789 - DNA, 25 bp, Artificial
  Probe
atctccacaggaatattaatactgc

SEQ ID NO: 107790 - DNA, 25 bp, Artificial
  Probe
ctggtgaggaattatgtgttcaatc

SEQ ID NO: 107791 - DNA, 25 bp, Artificial
  Probe
actggtgaggaattatgtgttcaat

SEQ ID NO: 107792 - DNA, 25 bp, Artificial
  Probe
aactggtgaggaattatgtgttcaa

SEQ ID NO: 107793 - DNA, 25 bp, Artificial
  Probe
caactggtgaggaattatgtgttca

SEQ ID NO: 107794 - DNA, 25 bp, Artificial
  Probe
tggtgaggaattatgtgttcaatcc

SEQ ID NO: 107795 - DNA, 25 bp, Artificial
  Probe
gtagtcatggaagacagagaagaag

SEQ ID NO: 107796 - DNA, 25 bp, Artificial
  Probe
gcaactggtgaggaattatgtgttc

SEQ ID NO: 107797 - DNA, 25 bp, Artificial
  Probe
agcgtgaaactcctacattagaata

SEQ ID NO: 107798 - DNA, 25 bp, Artificial
  Probe
gcgtgaaactcctacattagaatag

SEQ ID NO: 107799 - DNA, 25 bp, Artificial
  Probe
tctaatgctgatttaacggactgat

SEQ ID NO: 107800 - DNA, 25 bp, Artificial
  Probe
ttctaatgctgatttaacggactga

SEQ ID NO: 107801 - DNA, 25 bp, Artificial
  Probe
agcaactggtgaggaattatgtgtt

SEQ ID NO: 107802 - DNA, 25 bp, Artificial
  Probe
taatgctgatttaacggactgatac

SEQ ID NO: 107803 - DNA, 25 bp, Artificial
  Probe
ttaagtctaagggaaacagatggag

SEQ ID NO: 107804 - DNA, 25 bp, Artificial
  Probe
tttaagtctaagggaaacagatgga

SEQ ID NO: 107805 - DNA, 25 bp, Artificial
  Probe
ctaatgctgatttaacggactgata

SEQ ID NO: 107806 - DNA, 25 bp, Artificial
  Probe
gagcaactggtgaggaattatgtgt

SEQ ID NO: 107807 - DNA, 25 bp, Artificial
  Probe
tagtcatggaagacagagaagaagc

SEQ ID NO: 107808 - DNA, 25 bp, Artificial
  Probe
cgtagtcatggaagacagagaagaa

SEQ ID NO: 107809 - DNA, 25 bp, Artificial
  Probe
ttagagcgtgaaactcctacattag

SEQ ID NO: 107810 - DNA, 25 bp, Artificial
  Probe
tttagagcgtgaaactcctacatta

SEQ ID NO: 107811 - DNA, 25 bp, Artificial
  Probe
aaataatgttgctaccctgtgttgg

SEQ ID NO: 107812 - DNA, 25 bp, Artificial
  Probe
ggttgtatgccattagtaaattgac

SEQ ID NO: 107813 - DNA, 25 bp, Artificial
  Probe
gagcgtgaaactcctacattagaat

SEQ ID NO: 107814 - DNA, 25 bp, Artificial
  Probe
tagagcgtgaaactcctacattaga

SEQ ID NO: 107815 - DNA, 25 bp, Artificial
  Probe
cgtgaaactcctacattagaataga

SEQ ID NO: 107816 - DNA, 25 bp, Artificial
  Probe
taagtctaagggaaacagatggagc

SEQ ID NO: 107817 - DNA, 25 bp, Artificial
  Probe
tgacttcatttcactgctgtatatt

SEQ ID NO: 107818 - DNA, 25 bp, Artificial
  Probe
agagcgtgaaactcctacattagaa

SEQ ID NO: 107819 - DNA, 25 bp, Artificial
  Probe
tgaggaattatgtgttcaatcccat

SEQ ID NO: 107820 - DNA, 25 bp, Artificial
  Probe
gaggaattatgtgttcaatcccatt

SEQ ID NO: 107821 - DNA, 25 bp, Artificial
  Probe
tgtatgccattagtaaattgacaga

SEQ ID NO: 107822 - DNA, 25 bp, Artificial
  Probe
gtgaggaattatgtgttcaatccca

SEQ ID NO: 107823 - DNA, 25 bp, Artificial
  Probe
aggaattatgtgttcaatcccattt

SEQ ID NO: 107824 - DNA, 25 bp, Artificial
  Probe
gtatgccattagtaaattgacagaa

SEQ ID NO: 107825 - DNA, 25 bp, Artificial
  Probe
tcactgctgtatattaacatcttac

SEQ ID NO: 107826 - DNA, 25 bp, Artificial
  Probe
gttgtatgccattagtaaattgaca

SEQ ID NO: 107827 - DNA, 25 bp, Artificial
  Probe
cgagcaactggtgaggaattatgtg

SEQ ID NO: 107828 - DNA, 25 bp, Artificial
  Probe
tcttctaagaaacatccactccacg

SEQ ID NO: 107829 - DNA, 25 bp, Artificial
  Probe
ggtgaggaattatgtgttcaatccc

SEQ ID NO: 107830 - DNA, 25 bp, Artificial
  Probe
tggttgtatgccattagtaaattga

SEQ ID NO: 107831 - DNA, 25 bp, Artificial
  Probe
ttgtatgccattagtaaattgacag

SEQ ID NO: 107832 - DNA, 25 bp, Artificial
  Probe
gacttcatttcactgctgtatatta

SEQ ID NO: 107833 - DNA, 25 bp, Artificial
  Probe
acacgttcagtaccatgctattgtt

SEQ ID NO: 107834 - DNA, 25 bp, Artificial
  Probe
aacacgttcagtaccatgctattgt

SEQ ID NO: 107835 - DNA, 25 bp, Artificial
  Probe
gagagcgagaagtatatctgtatga

SEQ ID NO: 107836 - DNA, 25 bp, Artificial
  Probe
agagagcgagaagtatatctgtatg

SEQ ID NO: 107837 - DNA, 25 bp, Artificial
  Probe
gagcgagaagtatatctgtatgaac

SEQ ID NO: 107838 - DNA, 25 bp, Artificial
  Probe
agagcgagaagtatatctgtatgaa

SEQ ID NO: 107839 - DNA, 25 bp, Artificial
  Probe
agcgagaagtatatctgtatgaaca

SEQ ID NO: 107840 - DNA, 25 bp, Artificial
  Probe
gagatcgtactggagaacaactaca

SEQ ID NO: 107841 - DNA, 25 bp, Artificial
  Probe
gcgagaagtatatctgtatgaacaa

SEQ ID NO: 107842 - DNA, 25 bp, Artificial
  Probe
agatcgtactggagaacaactacac

SEQ ID NO: 107843 - DNA, 25 bp, Artificial
  Probe
gatcgtactggagaacaactacaca

SEQ ID NO: 107844 - DNA, 25 bp, Artificial
  Probe
cgagatcgtactggagaacaactac

SEQ ID NO: 107845 - DNA, 25 bp, Artificial
  Probe
atcgtactggagaacaactacacag

SEQ ID NO: 107846 - DNA, 25 bp, Artificial
  Probe
tattcaccgagatcgtactggagaa

SEQ ID NO: 107847 - DNA, 25 bp, Artificial
  Probe
cgagaagtatatctgtatgaacaag

SEQ ID NO: 107848 - DNA, 25 bp, Artificial
  Probe
gtattcaccgagatcgtactggaga

SEQ ID NO: 107849 - DNA, 25 bp, Artificial
  Probe
ccgagatcgtactggagaacaacta

SEQ ID NO: 107850 - DNA, 25 bp, Artificial
  Probe
gaacaactacacagccttccagaac

SEQ ID NO: 107851 - DNA, 25 bp, Artificial
  Probe
gaagtatatctgtatgaacaagagg

SEQ ID NO: 107852 - DNA, 25 bp, Artificial
  Probe
tactggagaacaactacacagcctt

SEQ ID NO: 107853 - DNA, 25 bp, Artificial
  Probe
agaacaactacacagccttccagaa

SEQ ID NO: 107854 - DNA, 25 bp, Artificial
  Probe
aagtatatctgtatgaacaagaggg

SEQ ID NO: 107855 - DNA, 25 bp, Artificial
  Probe
gagaacaactacacagccttccaga

SEQ ID NO: 107856 - DNA, 25 bp, Artificial
  Probe
attcaccgagatcgtactggagaac

SEQ ID NO: 107857 - DNA, 25 bp, Artificial
  Probe
cagagagcgagaagtatatctgtat

SEQ ID NO: 107858 - DNA, 25 bp, Artificial
  Probe
gaatcacccgtctcctaattttaac

SEQ ID NO: 107859 - DNA, 25 bp, Artificial
  Probe
gcagagagcgagaagtatatctgta

SEQ ID NO: 107860 - DNA, 25 bp, Artificial
  Probe
aatcacccgtctcctaattttaacc

SEQ ID NO: 107861 - DNA, 25 bp, Artificial
  Probe
agaatcacccgtctcctaattttaa

SEQ ID NO: 107862 - DNA, 25 bp, Artificial
  Probe
acccgtctcctaattttaaccagta

SEQ ID NO: 107863 - DNA, 25 bp, Artificial
  Probe
gtactggagaacaactacacagcct

SEQ ID NO: 107864 - DNA, 25 bp, Artificial
  Probe
cgtattcaccgagatcgtactggag

SEQ ID NO: 107865 - DNA, 25 bp, Artificial
  Probe
agaagtatatctgtatgaacaagag

SEQ ID NO: 107866 - DNA, 25 bp, Artificial
  Probe
gagaagtatatctgtatgaacaaga

SEQ ID NO: 107867 - DNA, 25 bp, Artificial
  Probe
cccgtctcctaattttaaccagtac

SEQ ID NO: 107868 - DNA, 25 bp, Artificial
  Probe
atcacccgtctcctaattttaacca

SEQ ID NO: 107869 - DNA, 25 bp, Artificial
  Probe
gtatatctgtatgaacaagaggggc

SEQ ID NO: 107870 - DNA, 25 bp, Artificial
  Probe
tatatctgtatgaacaagaggggca

SEQ ID NO: 107871 - DNA, 25 bp, Artificial
  Probe
agtatatctgtatgaacaagagggg

SEQ ID NO: 107872 - DNA, 25 bp, Artificial
  Probe
actggagaacaactacacagccttc

SEQ ID NO: 107873 - DNA, 25 bp, Artificial
  Probe
tcgtactggagaacaactacacagc

SEQ ID NO: 107874 - DNA, 25 bp, Artificial
  Probe
caaagactgcgtattcaccgagatc

SEQ ID NO: 107875 - DNA, 25 bp, Artificial
  Probe
tcacccgtctcctaattttaaccag

SEQ ID NO: 107876 - DNA, 25 bp, Artificial
  Probe
atatctgtatgaacaagaggggcaa

SEQ ID NO: 107877 - DNA, 25 bp, Artificial
  Probe
caccgagatcgtactggagaacaac

SEQ ID NO: 107878 - DNA, 25 bp, Artificial
  Probe
cacccgtctcctaattttaaccagt

SEQ ID NO: 107879 - DNA, 25 bp, Artificial
  Probe
tatctgtatgaacaagaggggcaag

SEQ ID NO: 107880 - DNA, 25 bp, Artificial
  Probe
ccttcaagtacaccacagttactaa

SEQ ID NO: 107881 - DNA, 25 bp, Artificial
  Probe
ttcaagtacaccacagttactaagc

SEQ ID NO: 107882 - DNA, 25 bp, Artificial
  Probe
cttcaagtacaccacagttactaag

SEQ ID NO: 107883 - DNA, 25 bp, Artificial
  Probe
aagtacaccacagttactaagcgat

SEQ ID NO: 107884 - DNA, 25 bp, Artificial
  Probe
gtacaccacagttactaagcgatcc

SEQ ID NO: 107885 - DNA, 25 bp, Artificial
  Probe
agtacaccacagttactaagcgatc

SEQ ID NO: 107886 - DNA, 25 bp, Artificial
  Probe
gtgttcattgagaaggttctggaaa

SEQ ID NO: 107887 - DNA, 25 bp, Artificial
  Probe
cgtgttcattgagaaggttctggaa

SEQ ID NO: 107888 - DNA, 25 bp, Artificial
  Probe
caagtacaccacagttactaagcga

SEQ ID NO: 107889 - DNA, 25 bp, Artificial
  Probe
tcaagtacaccacagttactaagcg

SEQ ID NO: 107890 - DNA, 25 bp, Artificial
  Probe
caagggcaaagagacagagttctac

SEQ ID NO: 107891 - DNA, 25 bp, Artificial
  Probe
cccttcaagtacaccacagttacta

SEQ ID NO: 107892 - DNA, 25 bp, Artificial
  Probe
tcaagggcaaagagacagagttcta

SEQ ID NO: 107893 - DNA, 25 bp, Artificial
  Probe
gagtgcgtgttcattgagaaggttc

SEQ ID NO: 107894 - DNA, 25 bp, Artificial
  Probe
ttctacctgtgtatgaaccgaaaag

SEQ ID NO: 107895 - DNA, 25 bp, Artificial
  Probe
caaggagtgcgtgttcattgagaag

SEQ ID NO: 107896 - DNA, 25 bp, Artificial
  Probe
gagttctacctgtgtatgaaccgaa

SEQ ID NO: 107897 - DNA, 25 bp, Artificial
  Probe
gatcaagggcaaagagacagagttc

SEQ ID NO: 107898 - DNA, 25 bp, Artificial
  Probe
aagagacagagttctacctgtgtat

SEQ ID NO: 107899 - DNA, 25 bp, Artificial
  Probe
gttcattgagaaggttctggaaaac

SEQ ID NO: 107900 - DNA, 25 bp, Artificial
  Probe
atcaagggcaaagagacagagttct

SEQ ID NO: 107901 - DNA, 25 bp, Artificial
  Probe
ttgagaaggttctggaaaacaacta

SEQ ID NO: 107902 - DNA, 25 bp, Artificial
  Probe
gacagagttctacctgtgtatgaac

SEQ ID NO: 107903 - DNA, 25 bp, Artificial
  Probe
agacagagttctacctgtgtatgaa

SEQ ID NO: 107904 - DNA, 25 bp, Artificial
  Probe
ttcattgagaaggttctggaaaaca

SEQ ID NO: 107905 - DNA, 25 bp, Artificial
  Probe
tgttcattgagaaggttctggaaaa

SEQ ID NO: 107906 - DNA, 25 bp, Artificial
  Probe
gagaaggttctggaaaacaactaca

SEQ ID NO: 107907 - DNA, 25 bp, Artificial
  Probe
tgagaaggttctggaaaacaactac

SEQ ID NO: 107908 - DNA, 25 bp, Artificial
  Probe
attgagaaggttctggaaaacaact

SEQ ID NO: 107909 - DNA, 25 bp, Artificial
  Probe
cattgagaaggttctggaaaacaac

SEQ ID NO: 107910 - DNA, 25 bp, Artificial
  Probe
tcattgagaaggttctggaaaacaa

SEQ ID NO: 107911 - DNA, 25 bp, Artificial
  Probe
gagacagagttctacctgtgtatga

SEQ ID NO: 107912 - DNA, 25 bp, Artificial
  Probe
agagacagagttctacctgtgtatg

SEQ ID NO: 107913 - DNA, 25 bp, Artificial
  Probe
agaaggttctggaaaacaactacac

SEQ ID NO: 107914 - DNA, 25 bp, Artificial
  Probe
gtgcgtgttcattgagaaggttctg

SEQ ID NO: 107915 - DNA, 25 bp, Artificial
  Probe
cagagttctacctgtgtatgaaccg

SEQ ID NO: 107916 - DNA, 25 bp, Artificial
  Probe
agagttctacctgtgtatgaaccga

SEQ ID NO: 107917 - DNA, 25 bp, Artificial
  Probe
agtgcgtgttcattgagaaggttct

SEQ ID NO: 107918 - DNA, 25 bp, Artificial
  Probe
aagggcaaagagacagagttctacc

SEQ ID NO: 107919 - DNA, 25 bp, Artificial
  Probe
acagagttctacctgtgtatgaacc

SEQ ID NO: 107920 - DNA, 25 bp, Artificial
  Probe
tacaccacagttactaagcgatccc

SEQ ID NO: 107921 - DNA, 25 bp, Artificial
  Probe
aagcccttcaagtacaccacagtta

SEQ ID NO: 107922 - DNA, 25 bp, Artificial
  Probe
gaaggttctggaaaacaactacacg

SEQ ID NO: 107923 - DNA, 25 bp, Artificial
  Probe
gaagcctgatggtactagcaaggag

SEQ ID NO: 107924 - DNA, 25 bp, Artificial
  Probe
agttctacctgtgtatgaaccgaaa

SEQ ID NO: 107925 - DNA, 25 bp, Artificial
  Probe
caggtatatggatggaggataatgc

SEQ ID NO: 107926 - DNA, 25 bp, Artificial
  Probe
aggtatatggatggaggataatgcg

SEQ ID NO: 107927 - DNA, 25 bp, Artificial
  Probe
ggtatatggatggaggataatgcgg

SEQ ID NO: 107928 - DNA, 25 bp, Artificial
  Probe
ccaggtatatggatggaggataatg

SEQ ID NO: 107929 - DNA, 25 bp, Artificial
  Probe
ctaaagaagagaaggagttgagagg

SEQ ID NO: 107930 - DNA, 25 bp, Artificial
  Probe
atctacaccagggattgactttatg

SEQ ID NO: 107931 - DNA, 25 bp, Artificial
  Probe
catctacaccagggattgactttat

SEQ ID NO: 107932 - DNA, 25 bp, Artificial
  Probe
taaagaagagaaggagttgagaggg

SEQ ID NO: 107933 - DNA, 25 bp, Artificial
  Probe
tcatctacaccagggattgacttta

SEQ ID NO: 107934 - DNA, 25 bp, Artificial
  Probe
attcatctacaccagggattgactt

SEQ ID NO: 107935 - DNA, 25 bp, Artificial
  Probe
ttcatctacaccagggattgacttt

SEQ ID NO: 107936 - DNA, 25 bp, Artificial
  Probe
cctaaagaagagaaggagttgagag

SEQ ID NO: 107937 - DNA, 25 bp, Artificial
  Probe
tctacaccagggattgactttatgc

SEQ ID NO: 107938 - DNA, 25 bp, Artificial
  Probe
gtatatggatggaggataatgcggg

SEQ ID NO: 107939 - DNA, 25 bp, Artificial
  Probe
cattcatctacaccagggattgact

SEQ ID NO: 107940 - DNA, 25 bp, Artificial
  Probe
ccctaaagaagagaaggagttgaga

SEQ ID NO: 107941 - DNA, 25 bp, Artificial
  Probe
gagaccctaaagaagagaaggagtt

SEQ ID NO: 107942 - DNA, 25 bp, Artificial
  Probe
atactcgaacgaaatgattacatgc

SEQ ID NO: 107943 - DNA, 25 bp, Artificial
  Probe
accctaaagaagagaaggagttgag

SEQ ID NO: 107944 - DNA, 25 bp, Artificial
  Probe
gaccctaaagaagagaaggagttga

SEQ ID NO: 107945 - DNA, 25 bp, Artificial
  Probe
agaccctaaagaagagaaggagttg

SEQ ID NO: 107946 - DNA, 25 bp, Artificial
  Probe
ctgagaccctaaagaagagaaggag

SEQ ID NO: 107947 - DNA, 25 bp, Artificial
  Probe
cccaggtatatggatggaggataat

SEQ ID NO: 107948 - DNA, 25 bp, Artificial
  Probe
tcgaacgaaatgattacatgcaaat

SEQ ID NO: 107949 - DNA, 25 bp, Artificial
  Probe
ctctcaaatccatcatcccaccttc

SEQ ID NO: 107950 - DNA, 25 bp, Artificial
  Probe
ctcgaacgaaatgattacatgcaaa

SEQ ID NO: 107951 - DNA, 25 bp, Artificial
  Probe
tactcgaacgaaatgattacatgca

SEQ ID NO: 107952 - DNA, 25 bp, Artificial
  Probe
tgagaccctaaagaagagaaggagt

SEQ ID NO: 107953 - DNA, 25 bp, Artificial
  Probe
cgaacgaaatgattacatgcaaata

SEQ ID NO: 107954 - DNA, 25 bp, Artificial
  Probe
gttcctctcaaatccatcatcccac

SEQ ID NO: 107955 - DNA, 25 bp, Artificial
  Probe
ttgcctgagaccctaaagaagagaa

SEQ ID NO: 107956 - DNA, 25 bp, Artificial
  Probe
ctacaccagggattgactttatgcc

SEQ ID NO: 107957 - DNA, 25 bp, Artificial
  Probe
ccattcatctacaccagggattgac

SEQ ID NO: 107958 - DNA, 25 bp, Artificial
  Probe
actcgaacgaaatgattacatgcaa

SEQ ID NO: 107959 - DNA, 25 bp, Artificial
  Probe
aatactcgaacgaaatgattacatg

SEQ ID NO: 107960 - DNA, 25 bp, Artificial
  Probe
tgtgatgagggtagaaaagtagaaa

SEQ ID NO: 107961 - DNA, 25 bp, Artificial
  Probe
ttgtgatgagggtagaaaagtagaa

SEQ ID NO: 107962 - DNA, 25 bp, Artificial
  Probe
tgcctgagaccctaaagaagagaag

SEQ ID NO: 107963 - DNA, 25 bp, Artificial
  Probe
cttgtgatgagggtagaaaagtaga

SEQ ID NO: 107964 - DNA, 25 bp, Artificial
  Probe
gtcagaggacacaaggaccaaatag

SEQ ID NO: 107965 - DNA, 25 bp, Artificial
  Probe
cctgagaccctaaagaagagaagga

SEQ ID NO: 107966 - DNA, 25 bp, Artificial
  Probe
cttgcctgagaccctaaagaagaga

SEQ ID NO: 107967 - DNA, 25 bp, Artificial
  Probe
tacaccagggattgactttatgcca

SEQ ID NO: 107968 - DNA, 25 bp, Artificial
  Probe
gcttgtgatgagggtagaaaagtag

SEQ ID NO: 107969 - DNA, 25 bp, Artificial
  Probe
attgactttatgccaggcttgtgat

SEQ ID NO: 107970 - DNA, 25 bp, Artificial
  Probe
ctacaacattccacagacagatgag

SEQ ID NO: 107971 - DNA, 25 bp, Artificial
  Probe
tacaacattccacagacagatgagt

SEQ ID NO: 107972 - DNA, 25 bp, Artificial
  Probe
cagacagatgagtcaacacttatga

SEQ ID NO: 107973 - DNA, 25 bp, Artificial
  Probe
acagacagatgagtcaacacttatg

SEQ ID NO: 107974 - DNA, 25 bp, Artificial
  Probe
cacagacagatgagtcaacacttat

SEQ ID NO: 107975 - DNA, 25 bp, Artificial
  Probe
aacattccacagacagatgagtcaa

SEQ ID NO: 107976 - DNA, 25 bp, Artificial
  Probe
gctacaacattccacagacagatga

SEQ ID NO: 107977 - DNA, 25 bp, Artificial
  Probe
cgtgagttggagatatggatggtac

SEQ ID NO: 107978 - DNA, 25 bp, Artificial
  Probe
aacacttatgaccatagcctatgtc

SEQ ID NO: 107979 - DNA, 25 bp, Artificial
  Probe
tcaacacttatgaccatagcctatg

SEQ ID NO: 107980 - DNA, 25 bp, Artificial
  Probe
ccacagacagatgagtcaacactta

SEQ ID NO: 107981 - DNA, 25 bp, Artificial
  Probe
caacacttatgaccatagcctatgt

SEQ ID NO: 107982 - DNA, 25 bp, Artificial
  Probe
attccacagacagatgagtcaacac

SEQ ID NO: 107983 - DNA, 25 bp, Artificial
  Probe
cattccacagacagatgagtcaaca

SEQ ID NO: 107984 - DNA, 25 bp, Artificial
  Probe
acattccacagacagatgagtcaac

SEQ ID NO: 107985 - DNA, 25 bp, Artificial
  Probe
caacattccacagacagatgagtca

SEQ ID NO: 107986 - DNA, 25 bp, Artificial
  Probe
acaacattccacagacagatgagtc

SEQ ID NO: 107987 - DNA, 25 bp, Artificial
  Probe
gatgacatctccctgctgaaataag

SEQ ID NO: 107988 - DNA, 25 bp, Artificial
  Probe
atggaagactgtggctacaacattc

SEQ ID NO: 107989 - DNA, 25 bp, Artificial
  Probe
gaaggcttctatgtggtctttgatc

SEQ ID NO: 107990 - DNA, 25 bp, Artificial
  Probe
tgatgacatctccctgctgaaataa

SEQ ID NO: 107991 - DNA, 25 bp, Artificial
  Probe
ggctacaacattccacagacagatg

SEQ ID NO: 107992 - DNA, 25 bp, Artificial
  Probe
atcatggaaggcttctatgtggtct

SEQ ID NO: 107993 - DNA, 25 bp, Artificial
  Probe
catcatggaaggcttctatgtggtc

SEQ ID NO: 107994 - DNA, 25 bp, Artificial
  Probe
gtcatcatggaaggcttctatgtgg

SEQ ID NO: 107995 - DNA, 25 bp, Artificial
  Probe
ggtcatcatggaaggcttctatgtg

SEQ ID NO: 107996 - DNA, 25 bp, Artificial
  Probe
ctgatgacatctccctgctgaaata

SEQ ID NO: 107997 - DNA, 25 bp, Artificial
  Probe
acgtgagttggagatatggatggta

SEQ ID NO: 107998 - DNA, 25 bp, Artificial
  Probe
tcatggaaggcttctatgtggtctt

SEQ ID NO: 107999 - DNA, 25 bp, Artificial
  Probe
tcatcatggaaggcttctatgtggt

SEQ ID NO: 108000 - DNA, 25 bp, Artificial
  Probe
catggaagactgtggctacaacatt

SEQ ID NO: 108001 - DNA, 25 bp, Artificial
  Probe
tccacagacagatgagtcaacactt

SEQ ID NO: 108002 - DNA, 25 bp, Artificial
  Probe
ttccacagacagatgagtcaacact

SEQ ID NO: 108003 - DNA, 25 bp, Artificial
  Probe
ggaaggcttctatgtggtctttgat

SEQ ID NO: 108004 - DNA, 25 bp, Artificial
  Probe
atgacatctccctgctgaaataagg

SEQ ID NO: 108005 - DNA, 25 bp, Artificial
  Probe
atggaaggcttctatgtggtctttg

SEQ ID NO: 108006 - DNA, 25 bp, Artificial
  Probe
aaggcttctatgtggtctttgatcg

SEQ ID NO: 108007 - DNA, 25 bp, Artificial
  Probe
catggaaggcttctatgtggtcttt

SEQ ID NO: 108008 - DNA, 25 bp, Artificial
  Probe
gtcaacacttatgaccatagcctat

SEQ ID NO: 108009 - DNA, 25 bp, Artificial
  Probe
agacagatgagtcaacacttatgac

SEQ ID NO: 108010 - DNA, 25 bp, Artificial
  Probe
tggctacaacattccacagacagat

SEQ ID NO: 108011 - DNA, 25 bp, Artificial
  Probe
atgagtcaacacttatgaccatagc

SEQ ID NO: 108012 - DNA, 25 bp, Artificial
  Probe
cagatgagtcaacacttatgaccat

SEQ ID NO: 108013 - DNA, 25 bp, Artificial
  Probe
agatgagtcaacacttatgaccata

SEQ ID NO: 108014 - DNA, 25 bp, Artificial
  Probe
agtcaacacttatgaccatagccta

SEQ ID NO: 108015 - DNA, 25 bp, Artificial
  Probe
gtaactgaggatgataggaggacta

SEQ ID NO: 108016 - DNA, 25 bp, Artificial
  Probe
ggaaggagatgtaggattattgagg

SEQ ID NO: 108017 - DNA, 25 bp, Artificial
  Probe
taactgaggatgataggaggactaa

SEQ ID NO: 108018 - DNA, 25 bp, Artificial
  Probe
tggaaggagatgtaggattattgag

SEQ ID NO: 108019 - DNA, 25 bp, Artificial
  Probe
gaaggagatgtaggattattgagga

SEQ ID NO: 108020 - DNA, 25 bp, Artificial
  Probe
aaggagatgtaggattattgaggaa

SEQ ID NO: 108021 - DNA, 25 bp, Artificial
  Probe
atggaaggagatgtaggattattga

SEQ ID NO: 108022 - DNA, 25 bp, Artificial
  Probe
aggagatgtaggattattgaggaat

SEQ ID NO: 108023 - DNA, 25 bp, Artificial
  Probe
aacttactatgtagaccaggctgac

SEQ ID NO: 108024 - DNA, 25 bp, Artificial
  Probe
caacttactatgtagaccaggctga

SEQ ID NO: 108025 - DNA, 25 bp, Artificial
  Probe
gcatggaaggagatgtaggattatt

SEQ ID NO: 108026 - DNA, 25 bp, Artificial
  Probe
agcatggaaggagatgtaggattat

SEQ ID NO: 108027 - DNA, 25 bp, Artificial
  Probe
ggtaactgaggatgataggaggact

SEQ ID NO: 108028 - DNA, 25 bp, Artificial
  Probe
catggaaggagatgtaggattattg

SEQ ID NO: 108029 - DNA, 25 bp, Artificial
  Probe
gagcatggaaggagatgtaggatta

SEQ ID NO: 108030 - DNA, 25 bp, Artificial
  Probe
gacttggcttcatgtagttacagat

SEQ ID NO: 108031 - DNA, 25 bp, Artificial
  Probe
acttggcttcatgtagttacagatg

SEQ ID NO: 108032 - DNA, 25 bp, Artificial
  Probe
caaggacttggcttcatgtagttac

SEQ ID NO: 108033 - DNA, 25 bp, Artificial
  Probe
actgaggatgataggaggactaaat

SEQ ID NO: 108034 - DNA, 25 bp, Artificial
  Probe
aactgaggatgataggaggactaaa

SEQ ID NO: 108035 - DNA, 25 bp, Artificial
  Probe
atgatgtttgatgagataagccaga

SEQ ID NO: 108036 - DNA, 25 bp, Artificial
  Probe
ttgcttgtttgcttgtttgaaatag

SEQ ID NO: 108037 - DNA, 25 bp, Artificial
  Probe
aggaatagaaaggaatgagttaggg

SEQ ID NO: 108038 - DNA, 25 bp, Artificial
  Probe
cttggcttcatgtagttacagatgg

SEQ ID NO: 108039 - DNA, 25 bp, Artificial
  Probe
gatgtttgatgagataagccagact

SEQ ID NO: 108040 - DNA, 25 bp, Artificial
  Probe
tttgcttgtttgcttgtttgaaata

SEQ ID NO: 108041 - DNA, 25 bp, Artificial
  Probe
ttgtttgcttgtttgaaatagggtc

SEQ ID NO: 108042 - DNA, 25 bp, Artificial
  Probe
cttgtttgcttgtttgaaatagggt

SEQ ID NO: 108043 - DNA, 25 bp, Artificial
  Probe
gtttgcttgtttgaaatagggtctc

SEQ ID NO: 108044 - DNA, 25 bp, Artificial
  Probe
tgatgtttgatgagataagccagac

SEQ ID NO: 108045 - DNA, 25 bp, Artificial
  Probe
gaggactaaatactatcaaagcacc

SEQ ID NO: 108046 - DNA, 25 bp, Artificial
  Probe
ggaggactaaatactatcaaagcac

SEQ ID NO: 108047 - DNA, 25 bp, Artificial
  Probe
aggaggactaaatactatcaaagca

SEQ ID NO: 108048 - DNA, 25 bp, Artificial
  Probe
ttgacctgcaacttactatgtagac

SEQ ID NO: 108049 - DNA, 25 bp, Artificial
  Probe
tgattgacctgcaacttactatgta

SEQ ID NO: 108050 - DNA, 25 bp, Artificial
  Probe
ggagatgtaggattattgaggaata

SEQ ID NO: 108051 - DNA, 25 bp, Artificial
  Probe
attgacctgcaacttactatgtaga

SEQ ID NO: 108052 - DNA, 25 bp, Artificial
  Probe
tgcttgtttgcttgtttgaaatagg

SEQ ID NO: 108053 - DNA, 25 bp, Artificial
  Probe
gcaacttactatgtagaccaggctg

SEQ ID NO: 108054 - DNA, 25 bp, Artificial
  Probe
gattgacctgcaacttactatgtag

SEQ ID NO: 108055 - DNA, 25 bp, Artificial
  Probe
ctgattgacctgcaacttactatgt

SEQ ID NO: 108056 - DNA, 25 bp, Artificial
  Probe
tgtttgcttgtttgaaatagggtct

SEQ ID NO: 108057 - DNA, 25 bp, Artificial
  Probe
tgaggatgataggaggactaaatac

SEQ ID NO: 108058 - DNA, 25 bp, Artificial
  Probe
aaggacttggcttcatgtagttaca

SEQ ID NO: 108059 - DNA, 25 bp, Artificial
  Probe
acttactatgtagaccaggctgacc

SEQ ID NO: 108060 - DNA, 25 bp, Artificial
  Probe
cggagggtactttaatttattcagg

SEQ ID NO: 108061 - DNA, 25 bp, Artificial
  Probe
gggtactttaatttattcaggatgc

SEQ ID NO: 108062 - DNA, 25 bp, Artificial
  Probe
ggagggtactttaatttattcagga

SEQ ID NO: 108063 - DNA, 25 bp, Artificial
  Probe
aatttattcaggatgcttcattcat

SEQ ID NO: 108064 - DNA, 25 bp, Artificial
  Probe
actttaatttattcaggatgcttca

SEQ ID NO: 108065 - DNA, 25 bp, Artificial
  Probe
ttattcaggatgcttcattcatatg

SEQ ID NO: 108066 - DNA, 25 bp, Artificial
  Probe
ggtactttaatttattcaggatgct

SEQ ID NO: 108067 - DNA, 25 bp, Artificial
  Probe
gctgacaatacaatgaaaaggctta

SEQ ID NO: 108068 - DNA, 25 bp, Artificial
  Probe
taatttattcaggatgcttcattca

SEQ ID NO: 108069 - DNA, 25 bp, Artificial
  Probe
tttattcaggatgcttcattcatat

SEQ ID NO: 108070 - DNA, 25 bp, Artificial
  Probe
atttattcaggatgcttcattcata

SEQ ID NO: 108071 - DNA, 25 bp, Artificial
  Probe
ccggagggtactttaatttattcag

SEQ ID NO: 108072 - DNA, 25 bp, Artificial
  Probe
gccggagggtactttaatttattca

SEQ ID NO: 108073 - DNA, 25 bp, Artificial
  Probe
gtgatttggaaaagggacagatgag

SEQ ID NO: 108074 - DNA, 25 bp, Artificial
  Probe
agggtactttaatttattcaggatg

SEQ ID NO: 108075 - DNA, 25 bp, Artificial
  Probe
ctgacaatacaatgaaaaggcttaa

SEQ ID NO: 108076 - DNA, 25 bp, Artificial
  Probe
ggccggagggtactttaatttattc

SEQ ID NO: 108077 - DNA, 25 bp, Artificial
  Probe
gacgaggtgaaaagtcaattttaca

SEQ ID NO: 108078 - DNA, 25 bp, Artificial
  Probe
agacgaggtgaaaagtcaattttac

SEQ ID NO: 108079 - DNA, 25 bp, Artificial
  Probe
gaagacgaggtgaaaagtcaatttt

SEQ ID NO: 108080 - DNA, 25 bp, Artificial
  Probe
acgaggtgaaaagtcaattttacaa

SEQ ID NO: 108081 - DNA, 25 bp, Artificial
  Probe
gagggtactttaatttattcaggat

SEQ ID NO: 108082 - DNA, 25 bp, Artificial
  Probe
ggctgacaatacaatgaaaaggctt

SEQ ID NO: 108083 - DNA, 25 bp, Artificial
  Probe
tgaagacgaggtgaaaagtcaattt

SEQ ID NO: 108084 - DNA, 25 bp, Artificial
  Probe
tgacaatacaatgaaaaggcttaaa

SEQ ID NO: 108085 - DNA, 25 bp, Artificial
  Probe
aagacgaggtgaaaagtcaatttta

SEQ ID NO: 108086 - DNA, 25 bp, Artificial
  Probe
ttaatttattcaggatgcttcattc

SEQ ID NO: 108087 - DNA, 25 bp, Artificial
  Probe
ctgaagacgaggtgaaaagtcaatt

SEQ ID NO: 108088 - DNA, 25 bp, Artificial
  Probe
cgaggtgaaaagtcaattttacaat

SEQ ID NO: 108089 - DNA, 25 bp, Artificial
  Probe
cttcagtgtgatttggaaaagggac

SEQ ID NO: 108090 - DNA, 25 bp, Artificial
  Probe
ctttaatttattcaggatgcttcat

SEQ ID NO: 108091 - DNA, 25 bp, Artificial
  Probe
acttcagtgtgatttggaaaaggga

SEQ ID NO: 108092 - DNA, 25 bp, Artificial
  Probe
gggccggagggtactttaatttatt

SEQ ID NO: 108093 - DNA, 25 bp, Artificial
  Probe
tgtgatttggaaaagggacagatga

SEQ ID NO: 108094 - DNA, 25 bp, Artificial
  Probe
gtgtgatttggaaaagggacagatg

SEQ ID NO: 108095 - DNA, 25 bp, Artificial
  Probe
agtgtgatttggaaaagggacagat

SEQ ID NO: 108096 - DNA, 25 bp, Artificial
  Probe
acaatttgtagaactctaatgaaga

SEQ ID NO: 108097 - DNA, 25 bp, Artificial
  Probe
gaagaactgagtgcttgcatagcta

SEQ ID NO: 108098 - DNA, 25 bp, Artificial
  Probe
gtactttaatttattcaggatgctt

SEQ ID NO: 108099 - DNA, 25 bp, Artificial
  Probe
tgatttggaaaagggacagatgagc

SEQ ID NO: 108100 - DNA, 25 bp, Artificial
  Probe
gacaatacaatgaaaaggcttaaaa

SEQ ID NO: 108101 - DNA, 25 bp, Artificial
  Probe
tttaatttattcaggatgcttcatt

SEQ ID NO: 108102 - DNA, 25 bp, Artificial
  Probe
ttcagtgtgatttggaaaagggaca

SEQ ID NO: 108103 - DNA, 25 bp, Artificial
  Probe
tactttaatttattcaggatgcttc

SEQ ID NO: 108104 - DNA, 25 bp, Artificial
  Probe
ccaccacttcagtgtgatttggaaa

SEQ ID NO: 108105 - DNA, 25 bp, Artificial
  Probe
attaagaacagtagccgttagaagt

SEQ ID NO: 108106 - DNA, 25 bp, Artificial
  Probe
cattaagaacagtagccgttagaag

SEQ ID NO: 108107 - DNA, 25 bp, Artificial
  Probe
ttaagaacagtagccgttagaagtg

SEQ ID NO: 108108 - DNA, 25 bp, Artificial
  Probe
ccattaagaacagtagccgttagaa

SEQ ID NO: 108109 - DNA, 25 bp, Artificial
  Probe
aagccattaagaacagtagccgtta

SEQ ID NO: 108110 - DNA, 25 bp, Artificial
  Probe
aaggaagccattaagaacagtagcc

SEQ ID NO: 108111 - DNA, 25 bp, Artificial
  Probe
taagaacagtagccgttagaagtgc

SEQ ID NO: 108112 - DNA, 25 bp, Artificial
  Probe
gccattaagaacagtagccgttaga

SEQ ID NO: 108113 - DNA, 25 bp, Artificial
  Probe
agccattaagaacagtagccgttag

SEQ ID NO: 108114 - DNA, 25 bp, Artificial
  Probe
caaaggaagccattaagaacagtag

SEQ ID NO: 108115 - DNA, 25 bp, Artificial
  Probe
cttgcattgtcttagatgtccagaa

SEQ ID NO: 108116 - DNA, 25 bp, Artificial
  Probe
aaaggaagccattaagaacagtagc

SEQ ID NO: 108117 - DNA, 25 bp, Artificial
  Probe
ttcacttgcattgtcttagatgtcc

SEQ ID NO: 108118 - DNA, 25 bp, Artificial
  Probe
cccttccattcaaacctctttcaaa

SEQ ID NO: 108119 - DNA, 25 bp, Artificial
  Probe
gcaaaggaagccattaagaacagta

SEQ ID NO: 108120 - DNA, 25 bp, Artificial
  Probe
cacttgcattgtcttagatgtccag

SEQ ID NO: 108121 - DNA, 25 bp, Artificial
  Probe
acttgcattgtcttagatgtccaga

SEQ ID NO: 108122 - DNA, 25 bp, Artificial
  Probe
gaagccattaagaacagtagccgtt

SEQ ID NO: 108123 - DNA, 25 bp, Artificial
  Probe
tcacttgcattgtcttagatgtcca

SEQ ID NO: 108124 - DNA, 25 bp, Artificial
  Probe
tttcacttgcattgtcttagatgtc

SEQ ID NO: 108125 - DNA, 25 bp, Artificial
  Probe
ttgcattgtcttagatgtccagaaa

SEQ ID NO: 108126 - DNA, 25 bp, Artificial
  Probe
cattcgtgcatttactttgaagaaa

SEQ ID NO: 108127 - DNA, 25 bp, Artificial
  Probe
aatccctcattcgtgcatttacttt

SEQ ID NO: 108128 - DNA, 25 bp, Artificial
  Probe
ctcattcgtgcatttactttgaaga

SEQ ID NO: 108129 - DNA, 25 bp, Artificial
  Probe
tcattcgtgcatttactttgaagaa

SEQ ID NO: 108130 - DNA, 25 bp, Artificial
  Probe
caatgtcgaagtagccattaagtgg

SEQ ID NO: 108131 - DNA, 25 bp, Artificial
  Probe
aaagagatttctcaaagatgcacac

SEQ ID NO: 108132 - DNA, 25 bp, Artificial
  Probe
aagagatttctcaaagatgcacact

SEQ ID NO: 108133 - DNA, 25 bp, Artificial
  Probe
cctcattcgtgcatttactttgaag

SEQ ID NO: 108134 - DNA, 25 bp, Artificial
  Probe
gggttctttaactttcaagtgaata

SEQ ID NO: 108135 - DNA, 25 bp, Artificial
  Probe
cagcaatgtcgaagtagccattaag

SEQ ID NO: 108136 - DNA, 25 bp, Artificial
  Probe
caaacctctttcaaaatcccttacc

SEQ ID NO: 108137 - DNA, 25 bp, Artificial
  Probe
cattcaaacctctttcaaaatccct

SEQ ID NO: 108138 - DNA, 25 bp, Artificial
  Probe
tccattcaaacctctttcaaaatcc

SEQ ID NO: 108139 - DNA, 25 bp, Artificial
  Probe
ccttccattcaaacctctttcaaaa

SEQ ID NO: 108140 - DNA, 25 bp, Artificial
  Probe
agagatttctcaaagatgcacactc

SEQ ID NO: 108141 - DNA, 25 bp, Artificial
  Probe
atccctcattcgtgcatttactttg

SEQ ID NO: 108142 - DNA, 25 bp, Artificial
  Probe
tcaaacctctttcaaaatcccttac

SEQ ID NO: 108143 - DNA, 25 bp, Artificial
  Probe
attcaaacctctttcaaaatccctt

SEQ ID NO: 108144 - DNA, 25 bp, Artificial
  Probe
ccattcaaacctctttcaaaatccc

SEQ ID NO: 108145 - DNA, 25 bp, Artificial
  Probe
gcaatgtcgaagtagccattaagtg

SEQ ID NO: 108146 - DNA, 25 bp, Artificial
  Probe
agcaatgtcgaagtagccattaagt

SEQ ID NO: 108147 - DNA, 25 bp, Artificial
  Probe
aaacctctttcaaaatcccttaccc

SEQ ID NO: 108148 - DNA, 25 bp, Artificial
  Probe
ttcaaacctctttcaaaatccctta

SEQ ID NO: 108149 - DNA, 25 bp, Artificial
  Probe
aggaagccattaagaacagtagccg

SEQ ID NO: 108150 - DNA, 25 bp, Artificial
  Probe
tagtctctctctctctctctctctc

SEQ ID NO: 108151 - DNA, 25 bp, Artificial
  Probe
ctagtctctctctctctctctctct

SEQ ID NO: 108152 - DNA, 25 bp, Artificial
  Probe
tctagtctctctctctctctctctc

SEQ ID NO: 108153 - DNA, 25 bp, Artificial
  Probe
ctctctctctctctctctcaagtaa

SEQ ID NO: 108154 - DNA, 25 bp, Artificial
  Probe
tctctctctctctctctctcaagta

SEQ ID NO: 108155 - DNA, 25 bp, Artificial
  Probe
ttctagtctctctctctctctctct

SEQ ID NO: 108156 - DNA, 25 bp, Artificial
  Probe
gttctagtctctctctctctctctc

SEQ ID NO: 108157 - DNA, 25 bp, Artificial
  Probe
tctctctctctctctctctctcaag

SEQ ID NO: 108158 - DNA, 25 bp, Artificial
  Probe
ctctctctctctctctctctctcaa

SEQ ID NO: 108159 - DNA, 25 bp, Artificial
  Probe
ctctctctctctctctctctcaagt

SEQ ID NO: 108160 - DNA, 25 bp, Artificial
  Probe
catatctacctagaagtgacctcct

SEQ ID NO: 108161 - DNA, 25 bp, Artificial
  Probe
cctaccttattcactacctcagatc

SEQ ID NO: 108162 - DNA, 25 bp, Artificial
  Probe
acatcagcatatctacctagaagtg

SEQ ID NO: 108163 - DNA, 25 bp, Artificial
  Probe
cacatcagcatatctacctagaagt

SEQ ID NO: 108164 - DNA, 25 bp, Artificial
  Probe
agcatatctacctagaagtgacctc

SEQ ID NO: 108165 - DNA, 25 bp, Artificial
  Probe
gcacatcagcatatctacctagaag

SEQ ID NO: 108166 - DNA, 25 bp, Artificial
  Probe
gcttcttaattgaacttgacattgt

SEQ ID NO: 108167 - DNA, 25 bp, Artificial
  Probe
cagcatatctacctagaagtgacct

SEQ ID NO: 108168 - DNA, 25 bp, Artificial
  Probe
tagaagtgacctcctagagatgtag

SEQ ID NO: 108169 - DNA, 25 bp, Artificial
  Probe
atcagcatatctacctagaagtgac

SEQ ID NO: 108170 - DNA, 25 bp, Artificial
  Probe
catcagcatatctacctagaagtga

SEQ ID NO: 108171 - DNA, 25 bp, Artificial
  Probe
cgttctagtctctctctctctctct

SEQ ID NO: 108172 - DNA, 25 bp, Artificial
  Probe
tcagcatatctacctagaagtgacc

SEQ ID NO: 108173 - DNA, 25 bp, Artificial
  Probe
atatctacctagaagtgacctccta

SEQ ID NO: 108174 - DNA, 25 bp, Artificial
  Probe
gcatatctacctagaagtgacctcc

SEQ ID NO: 108175 - DNA, 25 bp, Artificial
  Probe
tggatagaattaacaatctgtgacc

SEQ ID NO: 108176 - DNA, 25 bp, Artificial
  Probe
ggcacatcagcatatctacctagaa

SEQ ID NO: 108177 - DNA, 25 bp, Artificial
  Probe
gccaacttatagctctaggtcttag

SEQ ID NO: 108178 - DNA, 25 bp, Artificial
  Probe
accatgtcatacacagaactcatta

SEQ ID NO: 108179 - DNA, 25 bp, Artificial
  Probe
taccatgtcatacacagaactcatt

SEQ ID NO: 108180 - DNA, 25 bp, Artificial
  Probe
ttaccatgtcatacacagaactcat

SEQ ID NO: 108181 - DNA, 25 bp, Artificial
  Probe
attaccatgtcatacacagaactca

SEQ ID NO: 108182 - DNA, 25 bp, Artificial
  Probe
ggatagaattaacaatctgtgacct

SEQ ID NO: 108183 - DNA, 25 bp, Artificial
  Probe
ccagagcttcttaattgaacttgac

SEQ ID NO: 108184 - DNA, 25 bp, Artificial
  Probe
tccagagcttcttaattgaacttga

SEQ ID NO: 108185 - DNA, 25 bp, Artificial
  Probe
caattaccatgtcatacacagaact

SEQ ID NO: 108186 - DNA, 25 bp, Artificial
  Probe
tcaattaccatgtcatacacagaac

SEQ ID NO: 108187 - DNA, 25 bp, Artificial
  Probe
cagagcttcttaattgaacttgaca

SEQ ID NO: 108188 - DNA, 25 bp, Artificial
  Probe
aattaccatgtcatacacagaactc

SEQ ID NO: 108189 - DNA, 25 bp, Artificial
  Probe
catcaattaccatgtcatacacaga

SEQ ID NO: 108190 - DNA, 25 bp, Artificial
  Probe
tcatcaattaccatgtcatacacag

SEQ ID NO: 108191 - DNA, 25 bp, Artificial
  Probe
atccagagcttcttaattgaacttg

SEQ ID NO: 108192 - DNA, 25 bp, Artificial
  Probe
acacagaactcattatctaagtcaa

SEQ ID NO: 108193 - DNA, 25 bp, Artificial
  Probe
tagttcttcacgttctagtctctct

SEQ ID NO: 108194 - DNA, 25 bp, Artificial
  Probe
ttagttcttcacgttctagtctctc

SEQ ID NO: 108195 - DNA, 25 bp, Artificial
  Probe
agttcctgttcaccttatctattgt

SEQ ID NO: 108196 - DNA, 25 bp, Artificial
  Probe
gttcctgttcaccttatctattgtt

SEQ ID NO: 108197 - DNA, 25 bp, Artificial
  Probe
aagttcctgttcaccttatctattg

SEQ ID NO: 108198 - DNA, 25 bp, Artificial
  Probe
tatttattgtcgttactgcctttgg

SEQ ID NO: 108199 - DNA, 25 bp, Artificial
  Probe
atcaaagttcctgttcaccttatct

SEQ ID NO: 108200 - DNA, 25 bp, Artificial
  Probe
atttattgtcgttactgcctttgga

SEQ ID NO: 108201 - DNA, 25 bp, Artificial
  Probe
tgtatttattgtcgttactgccttt

SEQ ID NO: 108202 - DNA, 25 bp, Artificial
  Probe
tcaaagttcctgttcaccttatcta

SEQ ID NO: 108203 - DNA, 25 bp, Artificial
  Probe
tttattgtcgttactgcctttggaa

SEQ ID NO: 108204 - DNA, 25 bp, Artificial
  Probe
gtatttattgtcgttactgcctttg

SEQ ID NO: 108205 - DNA, 25 bp, Artificial
  Probe
atgtatttattgtcgttactgcctt

SEQ ID NO: 108206 - DNA, 25 bp, Artificial
  Probe
cgtgtagctgtattcagatcgtatt

SEQ ID NO: 108207 - DNA, 25 bp, Artificial
  Probe
tcgtgtagctgtattcagatcgtat

SEQ ID NO: 108208 - DNA, 25 bp, Artificial
  Probe
caaagttcctgttcaccttatctat

SEQ ID NO: 108209 - DNA, 25 bp, Artificial
  Probe
ttattgtcgttactgcctttggaag

SEQ ID NO: 108210 - DNA, 25 bp, Artificial
  Probe
ttcgtgtagctgtattcagatcgta

SEQ ID NO: 108211 - DNA, 25 bp, Artificial
  Probe
gatcaaagttcctgttcaccttatc

SEQ ID NO: 108212 - DNA, 25 bp, Artificial
  Probe
ttcctgttcaccttatctattgttt

SEQ ID NO: 108213 - DNA, 25 bp, Artificial
  Probe
tatgtatttattgtcgttactgcct

SEQ ID NO: 108214 - DNA, 25 bp, Artificial
  Probe
gccttagcacttctttcttctctaa

SEQ ID NO: 108215 - DNA, 25 bp, Artificial
  Probe
gtgtagctgtattcagatcgtatta

SEQ ID NO: 108216 - DNA, 25 bp, Artificial
  Probe
agcacttctttcttctctaattgta

SEQ ID NO: 108217 - DNA, 25 bp, Artificial
  Probe
tagcacttctttcttctctaattgt

SEQ ID NO: 108218 - DNA, 25 bp, Artificial
  Probe
aaagttcctgttcaccttatctatt

SEQ ID NO: 108219 - DNA, 25 bp, Artificial
  Probe
tattgtcgttactgcctttggaaga

SEQ ID NO: 108220 - DNA, 25 bp, Artificial
  Probe
atatgtatttattgtcgttactgcc

SEQ ID NO: 108221 - DNA, 25 bp, Artificial
  Probe
ccttagcacttctttcttctctaat

SEQ ID NO: 108222 - DNA, 25 bp, Artificial
  Probe
tgtagctgtattcagatcgtattaa

SEQ ID NO: 108223 - DNA, 25 bp, Artificial
  Probe
ggatcaaagttcctgttcaccttat

SEQ ID NO: 108224 - DNA, 25 bp, Artificial
  Probe
gcacttctttcttctctaattgtaa

SEQ ID NO: 108225 - DNA, 25 bp, Artificial
  Probe
attgtcgttactgcctttggaagaa

SEQ ID NO: 108226 - DNA, 25 bp, Artificial
  Probe
aatttcgtgtagctgtattcagatc

SEQ ID NO: 108227 - DNA, 25 bp, Artificial
  Probe
ttgtcgttactgcctttggaagaaa

SEQ ID NO: 108228 - DNA, 25 bp, Artificial
  Probe
atttcgtgtagctgtattcagatcg

SEQ ID NO: 108229 - DNA, 25 bp, Artificial
  Probe
accagcattttactacttgttacct

SEQ ID NO: 108230 - DNA, 25 bp, Artificial
  Probe
ccagcattttactacttgttacctt

SEQ ID NO: 108231 - DNA, 25 bp, Artificial
  Probe
gaatttcgtgtagctgtattcagat

SEQ ID NO: 108232 - DNA, 25 bp, Artificial
  Probe
atcgtattaattatctgatcgggat

SEQ ID NO: 108233 - DNA, 25 bp, Artificial
  Probe
aaccagcattttactacttgttacc

SEQ ID NO: 108234 - DNA, 25 bp, Artificial
  Probe
ttagcacttctttcttctctaattg

SEQ ID NO: 108235 - DNA, 25 bp, Artificial
  Probe
gggatcaaagttcctgttcacctta

SEQ ID NO: 108236 - DNA, 25 bp, Artificial
  Probe
ttcaaccagcattttactacttgtt

SEQ ID NO: 108237 - DNA, 25 bp, Artificial
  Probe
tttcaaccagcattttactacttgt

SEQ ID NO: 108238 - DNA, 25 bp, Artificial
  Probe
tcaagcaataattaggatctatgca

SEQ ID NO: 108239 - DNA, 25 bp, Artificial
  Probe
gcattttactacttgttacctttcc

SEQ ID NO: 108240 - DNA, 25 bp, Artificial
  Probe
gacaatgtggtgcttatctggaatg

SEQ ID NO: 108241 - DNA, 25 bp, Artificial
  Probe
caatgtggtgcttatctggaatgtg

SEQ ID NO: 108242 - DNA, 25 bp, Artificial
  Probe
tgacaatgtggtgcttatctggaat

SEQ ID NO: 108243 - DNA, 25 bp, Artificial
  Probe
cctacatccactttctgaatacctt

SEQ ID NO: 108244 - DNA, 25 bp, Artificial
  Probe
atccactttctgaatacctttacca

SEQ ID NO: 108245 - DNA, 25 bp, Artificial
  Probe
ctccctacatccactttctgaatac

SEQ ID NO: 108246 - DNA, 25 bp, Artificial
  Probe
catccactttctgaatacctttacc

SEQ ID NO: 108247 - DNA, 25 bp, Artificial
  Probe
acatccactttctgaatacctttac

SEQ ID NO: 108248 - DNA, 25 bp, Artificial
  Probe
ctgatccaatcctcatctcactacg

SEQ ID NO: 108249 - DNA, 25 bp, Artificial
  Probe
cctccctacatccactttctgaata

SEQ ID NO: 108250 - DNA, 25 bp, Artificial
  Probe
ctacatccactttctgaataccttt

SEQ ID NO: 108251 - DNA, 25 bp, Artificial
  Probe
ccctacatccactttctgaatacct

SEQ ID NO: 108252 - DNA, 25 bp, Artificial
  Probe
tccctacatccactttctgaatacc

SEQ ID NO: 108253 - DNA, 25 bp, Artificial
  Probe
gctgatccaatcctcatctcactac

SEQ ID NO: 108254 - DNA, 25 bp, Artificial
  Probe
acaatgtggtgcttatctggaatgt

SEQ ID NO: 108255 - DNA, 25 bp, Artificial
  Probe
aatgtggtgcttatctggaatgtgg

SEQ ID NO: 108256 - DNA, 25 bp, Artificial
  Probe
gtgacaatgtggtgcttatctggaa

SEQ ID NO: 108257 - DNA, 25 bp, Artificial
  Probe
gttgtgacaatgtggtgcttatctg

SEQ ID NO: 108258 - DNA, 25 bp, Artificial
  Probe
tgctgatccaatcctcatctcacta

SEQ ID NO: 108259 - DNA, 25 bp, Artificial
  Probe
gtactttgagatcacagatgaacct

SEQ ID NO: 108260 - DNA, 25 bp, Artificial
  Probe
tactttgagatcacagatgaacctc

SEQ ID NO: 108261 - DNA, 25 bp, Artificial
  Probe
gtgaaattgccaggttctacaaact

SEQ ID NO: 108262 - DNA, 25 bp, Artificial
  Probe
cggtactttgagatcacagatgaac

SEQ ID NO: 108263 - DNA, 25 bp, Artificial
  Probe
tacatccactttctgaataccttta

SEQ ID NO: 108264 - DNA, 25 bp, Artificial
  Probe
atgctgatccaatcctcatctcact

SEQ ID NO: 108265 - DNA, 25 bp, Artificial
  Probe
tgaaattgccaggttctacaaactg

SEQ ID NO: 108266 - DNA, 25 bp, Artificial
  Probe
tgtgaaattgccaggttctacaaac

SEQ ID NO: 108267 - DNA, 25 bp, Artificial
  Probe
gtgtgaaattgccaggttctacaaa

SEQ ID NO: 108268 - DNA, 25 bp, Artificial
  Probe
tgatccaatcctcatctcactacgg

SEQ ID NO: 108269 - DNA, 25 bp, Artificial
  Probe
caagtgtgaaattgccaggttctac

SEQ ID NO: 108270 - DNA, 25 bp, Artificial
  Probe
acctccctacatccactttctgaat

SEQ ID NO: 108271 - DNA, 25 bp, Artificial
  Probe
ttgtgacaatgtggtgcttatctgg

SEQ ID NO: 108272 - DNA, 25 bp, Artificial
  Probe
ggttgtgacaatgtggtgcttatct

SEQ ID NO: 108273 - DNA, 25 bp, Artificial
  Probe
aggttgtgacaatgtggtgcttatc

SEQ ID NO: 108274 - DNA, 25 bp, Artificial
  Probe
ggtactttgagatcacagatgaacc

SEQ ID NO: 108275 - DNA, 25 bp, Artificial
  Probe
atgaacctccctacatccactttct

SEQ ID NO: 108276 - DNA, 25 bp, Artificial
  Probe
actttgagatcacagatgaacctcc

SEQ ID NO: 108277 - DNA, 25 bp, Artificial
  Probe
tgtgacaatgtggtgcttatctgga

SEQ ID NO: 108278 - DNA, 25 bp, Artificial
  Probe
aacctccctacatccactttctgaa

SEQ ID NO: 108279 - DNA, 25 bp, Artificial
  Probe
caggttgtgacaatgtggtgcttat

SEQ ID NO: 108280 - DNA, 25 bp, Artificial
  Probe
agatcacagatgaacctccctacat

SEQ ID NO: 108281 - DNA, 25 bp, Artificial
  Probe
ttgagatcacagatgaacctcccta

SEQ ID NO: 108282 - DNA, 25 bp, Artificial
  Probe
agtgtgaaattgccaggttctacaa

SEQ ID NO: 108283 - DNA, 25 bp, Artificial
  Probe
aagtgtgaaattgccaggttctaca

SEQ ID NO: 108284 - DNA, 25 bp, Artificial
  Probe
gaacctccctacatccactttctga

SEQ ID NO: 108285 - DNA, 25 bp, Artificial
  Probe
ttaggatgatattggagaactggaa

SEQ ID NO: 108286 - DNA, 25 bp, Artificial
  Probe
gcattaggatgatattggagaactg

SEQ ID NO: 108287 - DNA, 25 bp, Artificial
  Probe
attaggatgatattggagaactgga

SEQ ID NO: 108288 - DNA, 25 bp, Artificial
  Probe
cattaggatgatattggagaactgg

SEQ ID NO: 108289 - DNA, 25 bp, Artificial
  Probe
gtgcattaggatgatattggagaac

SEQ ID NO: 108290 - DNA, 25 bp, Artificial
  Probe
tgcattaggatgatattggagaact

SEQ ID NO: 108291 - DNA, 25 bp, Artificial
  Probe
agtgcattaggatgatattggagaa

SEQ ID NO: 108292 - DNA, 25 bp, Artificial
  Probe
aagtgcattaggatgatattggaga

SEQ ID NO: 108293 - DNA, 25 bp, Artificial
  Probe
cttatgctcgctatttgaaatctcc

SEQ ID NO: 108294 - DNA, 25 bp, Artificial
  Probe
ggattcttatgctcgctatttgaaa

SEQ ID NO: 108295 - DNA, 25 bp, Artificial
  Probe
gaaggattcttatgctcgctatttg

SEQ ID NO: 108296 - DNA, 25 bp, Artificial
  Probe
aggattcttatgctcgctatttgaa

SEQ ID NO: 108297 - DNA, 25 bp, Artificial
  Probe
aaggattcttatgctcgctatttga

SEQ ID NO: 108298 - DNA, 25 bp, Artificial
  Probe
tcttatgctcgctatttgaaatctc

SEQ ID NO: 108299 - DNA, 25 bp, Artificial
  Probe
caagtgcattaggatgatattggag

SEQ ID NO: 108300 - DNA, 25 bp, Artificial
  Probe
taggatgatattggagaactggaaa

SEQ ID NO: 108301 - DNA, 25 bp, Artificial
  Probe
ttcttatgctcgctatttgaaatct

SEQ ID NO: 108302 - DNA, 25 bp, Artificial
  Probe
ttatgctcgctatttgaaatctccg

SEQ ID NO: 108303 - DNA, 25 bp, Artificial
  Probe
tctccgatctataaagaaatgctgg

SEQ ID NO: 108304 - DNA, 25 bp, Artificial
  Probe
cgctatttgaaatctccgatctata

SEQ ID NO: 108305 - DNA, 25 bp, Artificial
  Probe
attcttatgctcgctatttgaaatc

SEQ ID NO: 108306 - DNA, 25 bp, Artificial
  Probe
gattcttatgctcgctatttgaaat

SEQ ID NO: 108307 - DNA, 25 bp, Artificial
  Probe
atctccgatctataaagaaatgctg

SEQ ID NO: 108308 - DNA, 25 bp, Artificial
  Probe
gaagcctgtgaggatctgaagtatg

SEQ ID NO: 108309 - DNA, 25 bp, Artificial
  Probe
ctccgatctataaagaaatgctggc

SEQ ID NO: 108310 - DNA, 25 bp, Artificial
  Probe
aatctccgatctataaagaaatgct

SEQ ID NO: 108311 - DNA, 25 bp, Artificial
  Probe
aacccaagtgcattaggatgatatt

SEQ ID NO: 108312 - DNA, 25 bp, Artificial
  Probe
aaacccaagtgcattaggatgatat

SEQ ID NO: 108313 - DNA, 25 bp, Artificial
  Probe
caaacccaagtgcattaggatgata

SEQ ID NO: 108314 - DNA, 25 bp, Artificial
  Probe
acccaagtgcattaggatgatattg

SEQ ID NO: 108315 - DNA, 25 bp, Artificial
  Probe
agaaggattcttatgctcgctattt

SEQ ID NO: 108316 - DNA, 25 bp, Artificial
  Probe
tcgctatttgaaatctccgatctat

SEQ ID NO: 108317 - DNA, 25 bp, Artificial
  Probe
ctcgctatttgaaatctccgatcta

SEQ ID NO: 108318 - DNA, 25 bp, Artificial
  Probe
aaatctccgatctataaagaaatgc

SEQ ID NO: 108319 - DNA, 25 bp, Artificial
  Probe
ggaagcctgtgaggatctgaagtat

SEQ ID NO: 108320 - DNA, 25 bp, Artificial
  Probe
aatcaataaaagggtcatctggagg

SEQ ID NO: 108321 - DNA, 25 bp, Artificial
  Probe
aggatgatattggagaactggaaaa

SEQ ID NO: 108322 - DNA, 25 bp, Artificial
  Probe
ctgaaacccaagaaagtagccaact

SEQ ID NO: 108323 - DNA, 25 bp, Artificial
  Probe
aaatcaataaaagggtcatctggag

SEQ ID NO: 108324 - DNA, 25 bp, Artificial
  Probe
cccttgctgccttaaaatcaataaa

SEQ ID NO: 108325 - DNA, 25 bp, Artificial
  Probe
aaaatcaataaaagggtcatctgga

SEQ ID NO: 108326 - DNA, 25 bp, Artificial
  Probe
aagcctgtgaggatctgaagtatgg

SEQ ID NO: 108327 - DNA, 25 bp, Artificial
  Probe
tcccttgctgccttaaaatcaataa

SEQ ID NO: 108328 - DNA, 25 bp, Artificial
  Probe
ccagtactttctcaagaaggaattc

SEQ ID NO: 108329 - DNA, 25 bp, Artificial
  Probe
ccttgctgccttaaaatcaataaaa

SEQ ID NO: 108330 - DNA, 25 bp, Artificial
  Probe
acaccattatgctaacagactgaag

SEQ ID NO: 108331 - DNA, 25 bp, Artificial
  Probe
gacaccattatgctaacagactgaa

SEQ ID NO: 108332 - DNA, 25 bp, Artificial
  Probe
ggacaccattatgctaacagactga

SEQ ID NO: 108333 - DNA, 25 bp, Artificial
  Probe
actaggctacagtggaatagtcatt

SEQ ID NO: 108334 - DNA, 25 bp, Artificial
  Probe
aggctacagtggaatagtcatttaa

SEQ ID NO: 108335 - DNA, 25 bp, Artificial
  Probe
ctaggctacagtggaatagtcattt

SEQ ID NO: 108336 - DNA, 25 bp, Artificial
  Probe
taggctacagtggaatagtcattta

SEQ ID NO: 108337 - DNA, 25 bp, Artificial
  Probe
ggctacagtggaatagtcatttaat

SEQ ID NO: 108338 - DNA, 25 bp, Artificial
  Probe
cagtggaatagtcatttaatggcag

SEQ ID NO: 108339 - DNA, 25 bp, Artificial
  Probe
tcaatttgggaagtacactacagag

SEQ ID NO: 108340 - DNA, 25 bp, Artificial
  Probe
ctcaatttgggaagtacactacaga

SEQ ID NO: 108341 - DNA, 25 bp, Artificial
  Probe
acagtggaatagtcatttaatggca

SEQ ID NO: 108342 - DNA, 25 bp, Artificial
  Probe
atagtcatttaatggcaggctcaat

SEQ ID NO: 108343 - DNA, 25 bp, Artificial
  Probe
tagtcatttaatggcaggctcaatt

SEQ ID NO: 108344 - DNA, 25 bp, Artificial
  Probe
aatagtcatttaatggcaggctcaa

SEQ ID NO: 108345 - DNA, 25 bp, Artificial
  Probe
agtggaatagtcatttaatggcagg

SEQ ID NO: 108346 - DNA, 25 bp, Artificial
  Probe
ttgggaagtacactacagaggttaa

SEQ ID NO: 108347 - DNA, 25 bp, Artificial
  Probe
tttgggaagtacactacagaggtta

SEQ ID NO: 108348 - DNA, 25 bp, Artificial
  Probe
gaatagtcatttaatggcaggctca

SEQ ID NO: 108349 - DNA, 25 bp, Artificial
  Probe
tacagtggaatagtcatttaatggc

SEQ ID NO: 108350 - DNA, 25 bp, Artificial
  Probe
caatttgggaagtacactacagagg

SEQ ID NO: 108351 - DNA, 25 bp, Artificial
  Probe
gactgggaaacatcactttgtagat

SEQ ID NO: 108352 - DNA, 25 bp, Artificial
  Probe
atttgggaagtacactacagaggtt

SEQ ID NO: 108353 - DNA, 25 bp, Artificial
  Probe
aatttgggaagtacactacagaggt

SEQ ID NO: 108354 - DNA, 25 bp, Artificial
  Probe
gagtggacaccattatgctaacaga

SEQ ID NO: 108355 - DNA, 25 bp, Artificial
  Probe
gtcatttaatggcaggctcaatttg

SEQ ID NO: 108356 - DNA, 25 bp, Artificial
  Probe
agtcatttaatggcaggctcaattt

SEQ ID NO: 108357 - DNA, 25 bp, Artificial
  Probe
gctcaatttgggaagtacactacag

SEQ ID NO: 108358 - DNA, 25 bp, Artificial
  Probe
tggacaccattatgctaacagactg

SEQ ID NO: 108359 - DNA, 25 bp, Artificial
  Probe
gtggacaccattatgctaacagact

SEQ ID NO: 108360 - DNA, 25 bp, Artificial
  Probe
agtggacaccattatgctaacagac

SEQ ID NO: 108361 - DNA, 25 bp, Artificial
  Probe
tgagtggacaccattatgctaacag

SEQ ID NO: 108362 - DNA, 25 bp, Artificial
  Probe
ctgagtggacaccattatgctaaca

SEQ ID NO: 108363 - DNA, 25 bp, Artificial
  Probe
ggaatagtcatttaatggcaggctc

SEQ ID NO: 108364 - DNA, 25 bp, Artificial
  Probe
caatcaaagatactcaatgggagcc

SEQ ID NO: 108365 - DNA, 25 bp, Artificial
  Probe
gacgctagtagaacaaacttaaccg

SEQ ID NO: 108366 - DNA, 25 bp, Artificial
  Probe
cgacgctagtagaacaaacttaacc

SEQ ID NO: 108367 - DNA, 25 bp, Artificial
  Probe
tccaatcaaagatactcaatgggag

SEQ ID NO: 108368 - DNA, 25 bp, Artificial
  Probe
atccaatcaaagatactcaatggga

SEQ ID NO: 108369 - DNA, 25 bp, Artificial
  Probe
tggaatagtcatttaatggcaggct

SEQ ID NO: 108370 - DNA, 25 bp, Artificial
  Probe
gtggaatagtcatttaatggcaggc

SEQ ID NO: 108371 - DNA, 25 bp, Artificial
  Probe
gctacagtggaatagtcatttaatg

SEQ ID NO: 108372 - DNA, 25 bp, Artificial
  Probe
tcatttaatggcaggctcaatttgg

SEQ ID NO: 108373 - DNA, 25 bp, Artificial
  Probe
tcaaattaacgctgtttacccagtg

SEQ ID NO: 108374 - DNA, 25 bp, Artificial
  Probe
gtcaaattaacgctgtttacccagt

SEQ ID NO: 108375 - DNA, 25 bp, Artificial
  Probe
gtttacctcatttgaccttagttgc

SEQ ID NO: 108376 - DNA, 25 bp, Artificial
  Probe
agcagtttacctcatttgaccttag

SEQ ID NO: 108377 - DNA, 25 bp, Artificial
  Probe
tcaaagagacccactatcccatatc

SEQ ID NO: 108378 - DNA, 25 bp, Artificial
  Probe
gcagtttacctcatttgaccttagt

SEQ ID NO: 108379 - DNA, 25 bp, Artificial
  Probe
agtttacctcatttgaccttagttg

SEQ ID NO: 108380 - DNA, 25 bp, Artificial
  Probe
cagtttacctcatttgaccttagtt

SEQ ID NO: 108381 - DNA, 25 bp, Artificial
  Probe
aaagagacccactatcccatatcac

SEQ ID NO: 108382 - DNA, 25 bp, Artificial
  Probe
caaagagacccactatcccatatca

SEQ ID NO: 108383 - DNA, 25 bp, Artificial
  Probe
gagcagtttacctcatttgacctta

SEQ ID NO: 108384 - DNA, 25 bp, Artificial
  Probe
cagcaatgaatcatatgttgtccat

SEQ ID NO: 108385 - DNA, 25 bp, Artificial
  Probe
agcaatgaatcatatgttgtccatc

SEQ ID NO: 108386 - DNA, 25 bp, Artificial
  Probe
gcaatgaatcatatgttgtccatcc

SEQ ID NO: 108387 - DNA, 25 bp, Artificial
  Probe
ctcaaagagacccactatcccatat

SEQ ID NO: 108388 - DNA, 25 bp, Artificial
  Probe
aagagacccactatcccatatcact

SEQ ID NO: 108389 - DNA, 25 bp, Artificial
  Probe
ccagcaatgaatcatatgttgtcca

SEQ ID NO: 108390 - DNA, 25 bp, Artificial
  Probe
agagacccactatcccatatcactg

SEQ ID NO: 108391 - DNA, 25 bp, Artificial
  Probe
ttgaccttagttgcatgtgatcgaa

SEQ ID NO: 108392 - DNA, 25 bp, Artificial
  Probe
agagcagtttacctcatttgacctt

SEQ ID NO: 108393 - DNA, 25 bp, Artificial
  Probe
agccagcaatgaatcatatgttgtc

SEQ ID NO: 108394 - DNA, 25 bp, Artificial
  Probe
ttacctcatttgaccttagttgcat

SEQ ID NO: 108395 - DNA, 25 bp, Artificial
  Probe
tttacctcatttgaccttagttgca

SEQ ID NO: 108396 - DNA, 25 bp, Artificial
  Probe
cagccagcaatgaatcatatgttgt

SEQ ID NO: 108397 - DNA, 25 bp, Artificial
  Probe
catttgaccttagttgcatgtgatc

SEQ ID NO: 108398 - DNA, 25 bp, Artificial
  Probe
cttagttgcatgtgatcgaaatgtc

SEQ ID NO: 108399 - DNA, 25 bp, Artificial
  Probe
tacctcatttgaccttagttgcatg

SEQ ID NO: 108400 - DNA, 25 bp, Artificial
  Probe
ttagttgcatgtgatcgaaatgtct

SEQ ID NO: 108401 - DNA, 25 bp, Artificial
  Probe
cagagcagtttacctcatttgacct

SEQ ID NO: 108402 - DNA, 25 bp, Artificial
  Probe
tcatttgaccttagttgcatgtgat

SEQ ID NO: 108403 - DNA, 25 bp, Artificial
  Probe
gaccttagttgcatgtgatcgaaat

SEQ ID NO: 108404 - DNA, 25 bp, Artificial
  Probe
cctcaaagagacccactatcccata

SEQ ID NO: 108405 - DNA, 25 bp, Artificial
  Probe
gccagcaatgaatcatatgttgtcc

SEQ ID NO: 108406 - DNA, 25 bp, Artificial
  Probe
ccagccagcaatgaatcatatgttg

SEQ ID NO: 108407 - DNA, 25 bp, Artificial
  Probe
tagttgcatgtgatcgaaatgtctg

SEQ ID NO: 108408 - DNA, 25 bp, Artificial
  Probe
atttgaccttagttgcatgtgatcg

SEQ ID NO: 108409 - DNA, 25 bp, Artificial
  Probe
caatgaatcatatgttgtccatccc

SEQ ID NO: 108410 - DNA, 25 bp, Artificial
  Probe
ctcatttgaccttagttgcatgtga

SEQ ID NO: 108411 - DNA, 25 bp, Artificial
  Probe
ccttagttgcatgtgatcgaaatgt

SEQ ID NO: 108412 - DNA, 25 bp, Artificial
  Probe
accttagttgcatgtgatcgaaatg

SEQ ID NO: 108413 - DNA, 25 bp, Artificial
  Probe
tttgtgctttcctagtcactcagac

SEQ ID NO: 108414 - DNA, 25 bp, Artificial
  Probe
atgtgatcgaaatgtctgagtcctg

SEQ ID NO: 108415 - DNA, 25 bp, Artificial
  Probe
cctcatttgaccttagttgcatgtg

SEQ ID NO: 108416 - DNA, 25 bp, Artificial
  Probe
catgtgatcgaaatgtctgagtcct

SEQ ID NO: 108417 - DNA, 25 bp, Artificial
  Probe
tgaccttagttgcatgtgatcgaaa

SEQ ID NO: 108418 - DNA, 25 bp, Artificial
  Probe
tttgaccttagttgcatgtgatcga

SEQ ID NO: 108419 - DNA, 25 bp, Artificial
  Probe
acctcatttgaccttagttgcatgt

SEQ ID NO: 108420 - DNA, 25 bp, Artificial
  Probe
gggaagtcatcaccatctattcttg

SEQ ID NO: 108421 - DNA, 25 bp, Artificial
  Probe
gatgacatggaccagagacaagtac

SEQ ID NO: 108422 - DNA, 25 bp, Artificial
  Probe
ctaagaacagtgagggtgatgagaa

SEQ ID NO: 108423 - DNA, 25 bp, Artificial
  Probe
agatgacatggaccagagacaagta

SEQ ID NO: 108424 - DNA, 25 bp, Artificial
  Probe
gtgtggatgtcatcatttcagaaag

SEQ ID NO: 108425 - DNA, 25 bp, Artificial
  Probe
taagaacagtgagggtgatgagaac

SEQ ID NO: 108426 - DNA, 25 bp, Artificial
  Probe
tattgtgtggatgtcatcatttcag

SEQ ID NO: 108427 - DNA, 25 bp, Artificial
  Probe
attgtgtggatgtcatcatttcaga

SEQ ID NO: 108428 - DNA, 25 bp, Artificial
  Probe
tgtgtggatgtcatcatttcagaaa

SEQ ID NO: 108429 - DNA, 25 bp, Artificial
  Probe
ttgtgtggatgtcatcatttcagaa

SEQ ID NO: 108430 - DNA, 25 bp, Artificial
  Probe
ttattgtgtggatgtcatcatttca

SEQ ID NO: 108431 - DNA, 25 bp, Artificial
  Probe
gactggctcacaagtgctatttatt

SEQ ID NO: 108432 - DNA, 25 bp, Artificial
  Probe
tgtggatgtcatcatttcagaaagg

SEQ ID NO: 108433 - DNA, 25 bp, Artificial
  Probe
atgacatggaccagagacaagtaca

SEQ ID NO: 108434 - DNA, 25 bp, Artificial
  Probe
cgggaagtcatcaccatctattctt

SEQ ID NO: 108435 - DNA, 25 bp, Artificial
  Probe
actggctcacaagtgctatttattg

SEQ ID NO: 108436 - DNA, 25 bp, Artificial
  Probe
tgacatggaccagagacaagtacat

SEQ ID NO: 108437 - DNA, 25 bp, Artificial
  Probe
agggtgatgagaactacatggaatt

SEQ ID NO: 108438 - DNA, 25 bp, Artificial
  Probe
agactggctcacaagtgctatttat

SEQ ID NO: 108439 - DNA, 25 bp, Artificial
  Probe
gtggatgtcatcatttcagaaaggg

SEQ ID NO: 108440 - DNA, 25 bp, Artificial
  Probe
tttattgtgtggatgtcatcatttc

SEQ ID NO: 108441 - DNA, 25 bp, Artificial
  Probe
gagggtgatgagaactacatggaat

SEQ ID NO: 108442 - DNA, 25 bp, Artificial
  Probe
gaacagtgagggtgatgagaactac

SEQ ID NO: 108443 - DNA, 25 bp, Artificial
  Probe
agaacagtgagggtgatgagaacta

SEQ ID NO: 108444 - DNA, 25 bp, Artificial
  Probe
atttattgtgtggatgtcatcattt

SEQ ID NO: 108445 - DNA, 25 bp, Artificial
  Probe
cagactggctcacaagtgctattta

SEQ ID NO: 108446 - DNA, 25 bp, Artificial
  Probe
acagtgagggtgatgagaactacat

SEQ ID NO: 108447 - DNA, 25 bp, Artificial
  Probe
cagatgacatggaccagagacaagt

SEQ ID NO: 108448 - DNA, 25 bp, Artificial
  Probe
aacagtgagggtgatgagaactaca

SEQ ID NO: 108449 - DNA, 25 bp, Artificial
  Probe
cagtgagggtgatgagaactacatg

SEQ ID NO: 108450 - DNA, 25 bp, Artificial
  Probe
ttgtatatttattgtgtggatgtca

SEQ ID NO: 108451 - DNA, 25 bp, Artificial
  Probe
tgagggtgatgagaactacatggaa

SEQ ID NO: 108452 - DNA, 25 bp, Artificial
  Probe
aagaacagtgagggtgatgagaact

SEQ ID NO: 108453 - DNA, 25 bp, Artificial
  Probe
tatttattgtgtggatgtcatcatt

SEQ ID NO: 108454 - DNA, 25 bp, Artificial
  Probe
gggtgatgagaactacatggaattc

SEQ ID NO: 108455 - DNA, 25 bp, Artificial
  Probe
tgtatatttattgtgtggatgtcat

SEQ ID NO: 108456 - DNA, 25 bp, Artificial
  Probe
atatttattgtgtggatgtcatcat

SEQ ID NO: 108457 - DNA, 25 bp, Artificial
  Probe
cctaagaacagtgagggtgatgaga

SEQ ID NO: 108458 - DNA, 25 bp, Artificial
  Probe
tggctcacaagtgctatttattgta

SEQ ID NO: 108459 - DNA, 25 bp, Artificial
  Probe
ggctcacaagtgctatttattgtat

SEQ ID NO: 108460 - DNA, 25 bp, Artificial
  Probe
ctggaagacctttatcgacactgtg

SEQ ID NO: 108461 - DNA, 25 bp, Artificial
  Probe
tgctgtgaagctcaatgaagtcatt

SEQ ID NO: 108462 - DNA, 25 bp, Artificial
  Probe
gtgagggtgatgagaactacatgga

SEQ ID NO: 108463 - DNA, 25 bp, Artificial
  Probe
gacatggaccagagacaagtacatg

SEQ ID NO: 108464 - DNA, 25 bp, Artificial
  Probe
agtgagggtgatgagaactacatgg

SEQ ID NO: 108465 - DNA, 25 bp, Artificial
  Probe
tattagatcaagactcctcaagcaa

SEQ ID NO: 108466 - DNA, 25 bp, Artificial
  Probe
ttattagatcaagactcctcaagca

SEQ ID NO: 108467 - DNA, 25 bp, Artificial
  Probe
aggagatactaatgagggactgaat

SEQ ID NO: 108468 - DNA, 25 bp, Artificial
  Probe
gtaggagatactaatgagggactga

SEQ ID NO: 108469 - DNA, 25 bp, Artificial
  Probe
ggatgtaggagatactaatgaggga

SEQ ID NO: 108470 - DNA, 25 bp, Artificial
  Probe
agggatgtaggagatactaatgagg

SEQ ID NO: 108471 - DNA, 25 bp, Artificial
  Probe
tgtaggagatactaatgagggactg

SEQ ID NO: 108472 - DNA, 25 bp, Artificial
  Probe
taggagatactaatgagggactgaa

SEQ ID NO: 108473 - DNA, 25 bp, Artificial
  Probe
atgtaggagatactaatgagggact

SEQ ID NO: 108474 - DNA, 25 bp, Artificial
  Probe
gatgtaggagatactaatgagggac

SEQ ID NO: 108475 - DNA, 25 bp, Artificial
  Probe
cttaccgatgtggaagaaagaaatg

SEQ ID NO: 108476 - DNA, 25 bp, Artificial
  Probe
gggatgtaggagatactaatgaggg

SEQ ID NO: 108477 - DNA, 25 bp, Artificial
  Probe
ggagatactaatgagggactgaatt

SEQ ID NO: 108478 - DNA, 25 bp, Artificial
  Probe
tttcaagttggaagttctgtttcat

SEQ ID NO: 108479 - DNA, 25 bp, Artificial
  Probe
atttcaagttggaagttctgtttca

SEQ ID NO: 108480 - DNA, 25 bp, Artificial
  Probe
catttcaagttggaagttctgtttc

SEQ ID NO: 108481 - DNA, 25 bp, Artificial
  Probe
gcatttcaagttggaagttctgttt

SEQ ID NO: 108482 - DNA, 25 bp, Artificial
  Probe
ccttaccgatgtggaagaaagaaat

SEQ ID NO: 108483 - DNA, 25 bp, Artificial
  Probe
aagggatgtaggagatactaatgag

SEQ ID NO: 108484 - DNA, 25 bp, Artificial
  Probe
cttaaacttcaaactcagtgtggac

SEQ ID NO: 108485 - DNA, 25 bp, Artificial
  Probe
tcttaaacttcaaactcagtgtgga

SEQ ID NO: 108486 - DNA, 25 bp, Artificial
  Probe
ttcttaaacttcaaactcagtgtgg

SEQ ID NO: 108487 - DNA, 25 bp, Artificial
  Probe
tcaagttggaagttctgtttcataa

SEQ ID NO: 108488 - DNA, 25 bp, Artificial
  Probe
ttcaagttggaagttctgtttcata

SEQ ID NO: 108489 - DNA, 25 bp, Artificial
  Probe
attagatcaagactcctcaagcaaa

SEQ ID NO: 108490 - DNA, 25 bp, Artificial
  Probe
caagttggaagttctgtttcataac

SEQ ID NO: 108491 - DNA, 25 bp, Artificial
  Probe
ttagatcaagactcctcaagcaaag

SEQ ID NO: 108492 - DNA, 25 bp, Artificial
  Probe
ttaaacttcaaactcagtgtggaca

SEQ ID NO: 108493 - DNA, 25 bp, Artificial
  Probe
ttaccgatgtggaagaaagaaatgc

SEQ ID NO: 108494 - DNA, 25 bp, Artificial
  Probe
taaacttcaaactcagtgtggacag

SEQ ID NO: 108495 - DNA, 25 bp, Artificial
  Probe
tagatcaagactcctcaagcaaaga

SEQ ID NO: 108496 - DNA, 25 bp, Artificial
  Probe
gaaaccttaccgatgtggaagaaag

SEQ ID NO: 108497 - DNA, 25 bp, Artificial
  Probe
gactcctcaagcaaagactcaaatg

SEQ ID NO: 108498 - DNA, 25 bp, Artificial
  Probe
agactcctcaagcaaagactcaaat

SEQ ID NO: 108499 - DNA, 25 bp, Artificial
  Probe
agtgtgtatgttagactgaaagttt

SEQ ID NO: 108500 - DNA, 25 bp, Artificial
  Probe
tttattagatcaagactcctcaagc

SEQ ID NO: 108501 - DNA, 25 bp, Artificial
  Probe
gagatactaatgagggactgaattt

SEQ ID NO: 108502 - DNA, 25 bp, Artificial
  Probe
accttaccgatgtggaagaaagaaa

SEQ ID NO: 108503 - DNA, 25 bp, Artificial
  Probe
aaccttaccgatgtggaagaaagaa

SEQ ID NO: 108504 - DNA, 25 bp, Artificial
  Probe
aaaccttaccgatgtggaagaaaga

SEQ ID NO: 108505 - DNA, 25 bp, Artificial
  Probe
aagactcctcaagcaaagactcaaa

SEQ ID NO: 108506 - DNA, 25 bp, Artificial
  Probe
tttcttaaacttcaaactcagtgtg

SEQ ID NO: 108507 - DNA, 25 bp, Artificial
  Probe
atcaagactcctcaagcaaagactc

SEQ ID NO: 108508 - DNA, 25 bp, Artificial
  Probe
taagggatgtaggagatactaatga

SEQ ID NO: 108509 - DNA, 25 bp, Artificial
  Probe
gtgtgtatgttagactgaaagtttc

SEQ ID NO: 108510 - DNA, 25 bp, Artificial
  Probe
tcagggtttataggaatgtagtgtc

SEQ ID NO: 108511 - DNA, 25 bp, Artificial
  Probe
ctcagggtttataggaatgtagtgt

SEQ ID NO: 108512 - DNA, 25 bp, Artificial
  Probe
tgtcactacttctatctcagggttt

SEQ ID NO: 108513 - DNA, 25 bp, Artificial
  Probe
ttgtcactacttctatctcagggtt

SEQ ID NO: 108514 - DNA, 25 bp, Artificial
  Probe
tttgtcactacttctatctcagggt

SEQ ID NO: 108515 - DNA, 25 bp, Artificial
  Probe
tctcagggtttataggaatgtagtg

SEQ ID NO: 108516 - DNA, 25 bp, Artificial
  Probe
cgaatggaaacaacacatctacaaa

SEQ ID NO: 108517 - DNA, 25 bp, Artificial
  Probe
gtcactacttctatctcagggttta

SEQ ID NO: 108518 - DNA, 25 bp, Artificial
  Probe
tggaaacaacacatctacaaagaga

SEQ ID NO: 108519 - DNA, 25 bp, Artificial
  Probe
atggaaacaacacatctacaaagag

SEQ ID NO: 108520 - DNA, 25 bp, Artificial
  Probe
aatggaaacaacacatctacaaaga

SEQ ID NO: 108521 - DNA, 25 bp, Artificial
  Probe
gaatggaaacaacacatctacaaag

SEQ ID NO: 108522 - DNA, 25 bp, Artificial
  Probe
acgaatggaaacaacacatctacaa

SEQ ID NO: 108523 - DNA, 25 bp, Artificial
  Probe
atctcagggtttataggaatgtagt

SEQ ID NO: 108524 - DNA, 25 bp, Artificial
  Probe
gacgaatggaaacaacacatctaca

SEQ ID NO: 108525 - DNA, 25 bp, Artificial
  Probe
tcactacttctatctcagggtttat

SEQ ID NO: 108526 - DNA, 25 bp, Artificial
  Probe
ggacgaatggaaacaacacatctac

SEQ ID NO: 108527 - DNA, 25 bp, Artificial
  Probe
cagggtttataggaatgtagtgtcc

SEQ ID NO: 108528 - DNA, 25 bp, Artificial
  Probe
tggacgaatggaaacaacacatcta

SEQ ID NO: 108529 - DNA, 25 bp, Artificial
  Probe
tctatctcagggtttataggaatgt

SEQ ID NO: 108530 - DNA, 25 bp, Artificial
  Probe
ccttatagggaatgactagggtctg

SEQ ID NO: 108531 - DNA, 25 bp, Artificial
  Probe
acttctatctcagggtttataggaa

SEQ ID NO: 108532 - DNA, 25 bp, Artificial
  Probe
ggatgagggcttaaagagatgactg

SEQ ID NO: 108533 - DNA, 25 bp, Artificial
  Probe
caggatgagggcttaaagagatgac

SEQ ID NO: 108534 - DNA, 25 bp, Artificial
  Probe
aggatgagggcttaaagagatgact

SEQ ID NO: 108535 - DNA, 25 bp, Artificial
  Probe
cttatagggaatgactagggtctgc

SEQ ID NO: 108536 - DNA, 25 bp, Artificial
  Probe
tatagggaatgactagggtctgctt

SEQ ID NO: 108537 - DNA, 25 bp, Artificial
  Probe
ttatagggaatgactagggtctgct

SEQ ID NO: 108538 - DNA, 25 bp, Artificial
  Probe
ggaaacaacacatctacaaagagat

SEQ ID NO: 108539 - DNA, 25 bp, Artificial
  Probe
actctccctcaggaccaatattatt

SEQ ID NO: 108540 - DNA, 25 bp, Artificial
  Probe
aactctccctcaggaccaatattat

SEQ ID NO: 108541 - DNA, 25 bp, Artificial
  Probe
tatctcagggtttataggaatgtag

SEQ ID NO: 108542 - DNA, 25 bp, Artificial
  Probe
ctctccctcaggaccaatattattt

SEQ ID NO: 108543 - DNA, 25 bp, Artificial
  Probe
aaactctccctcaggaccaatatta

SEQ ID NO: 108544 - DNA, 25 bp, Artificial
  Probe
aaacaacacatctacaaagagatcg

SEQ ID NO: 108545 - DNA, 25 bp, Artificial
  Probe
tacttctatctcagggtttatagga

SEQ ID NO: 108546 - DNA, 25 bp, Artificial
  Probe
cactacttctatctcagggtttata

SEQ ID NO: 108547 - DNA, 25 bp, Artificial
  Probe
tctacaaagagatcgccaacttcag

SEQ ID NO: 108548 - DNA, 25 bp, Artificial
  Probe
gatgagggcttaaagagatgactgc

SEQ ID NO: 108549 - DNA, 25 bp, Artificial
  Probe
ttctatctcagggtttataggaatg

SEQ ID NO: 108550 - DNA, 25 bp, Artificial
  Probe
ttttgtcactacttctatctcaggg

SEQ ID NO: 108551 - DNA, 25 bp, Artificial
  Probe
tacaaagagatcgccaacttcagtc

SEQ ID NO: 108552 - DNA, 25 bp, Artificial
  Probe
ctacaaagagatcgccaacttcagt

SEQ ID NO: 108553 - DNA, 25 bp, Artificial
  Probe
ctacttctatctcagggtttatagg

SEQ ID NO: 108554 - DNA, 25 bp, Artificial
  Probe
cttctatctcagggtttataggaat

SEQ ID NO: 108555 - DNA, 25 bp, Artificial
  Probe
gctgacagaacatcttagaagagaa

SEQ ID NO: 108556 - DNA, 25 bp, Artificial
  Probe
gttgtaagcatcaatgtgacacttg

SEQ ID NO: 108557 - DNA, 25 bp, Artificial
  Probe
tgttgtaagcatcaatgtgacactt

SEQ ID NO: 108558 - DNA, 25 bp, Artificial
  Probe
ttgttgtaagcatcaatgtgacact

SEQ ID NO: 108559 - DNA, 25 bp, Artificial
  Probe
agctgacagaacatcttagaagaga

SEQ ID NO: 108560 - DNA, 25 bp, Artificial
  Probe
acattgtttgtttcttccacatttg

SEQ ID NO: 108561 - DNA, 25 bp, Artificial
  Probe
gacattgtttgtttcttccacattt

SEQ ID NO: 108562 - DNA, 25 bp, Artificial
  Probe
tttgttgtaagcatcaatgtgacac

SEQ ID NO: 108563 - DNA, 25 bp, Artificial
  Probe
agttagtgtgagtgctatgcctgat

SEQ ID NO: 108564 - DNA, 25 bp, Artificial
  Probe
tctttgattaactgggatgatctca

SEQ ID NO: 108565 - DNA, 25 bp, Artificial
  Probe
gttagtgtgagtgctatgcctgatc

SEQ ID NO: 108566 - DNA, 25 bp, Artificial
  Probe
gagaaggaagatgcaggtctaagag

SEQ ID NO: 108567 - DNA, 25 bp, Artificial
  Probe
atctcattaataagaagatcacgcc

SEQ ID NO: 108568 - DNA, 25 bp, Artificial
  Probe
ctgacagaacatcttagaagagaaa

SEQ ID NO: 108569 - DNA, 25 bp, Artificial
  Probe
tctcattaataagaagatcacgccc

SEQ ID NO: 108570 - DNA, 25 bp, Artificial
  Probe
ctttgattaactgggatgatctcat

SEQ ID NO: 108571 - DNA, 25 bp, Artificial
  Probe
ggacattgtttgtttcttccacatt

SEQ ID NO: 108572 - DNA, 25 bp, Artificial
  Probe
ggatgactttatggagattaagagt

SEQ ID NO: 108573 - DNA, 25 bp, Artificial
  Probe
cattgtttgtttcttccacatttgg

SEQ ID NO: 108574 - DNA, 25 bp, Artificial
  Probe
aggatgactttatggagattaagag

SEQ ID NO: 108575 - DNA, 25 bp, Artificial
  Probe
gccaaggatgactttatggagatta

SEQ ID NO: 108576 - DNA, 25 bp, Artificial
  Probe
gtgagaaggaagatgcaggtctaag

SEQ ID NO: 108577 - DNA, 25 bp, Artificial
  Probe
tttgattaactgggatgatctcatt

SEQ ID NO: 108578 - DNA, 25 bp, Artificial
  Probe
cttagaagagaaatttgcacaccag

SEQ ID NO: 108579 - DNA, 25 bp, Artificial
  Probe
tgagaaggaagatgcaggtctaaga

SEQ ID NO: 108580 - DNA, 25 bp, Artificial
  Probe
tgacagaacatcttagaagagaaat

SEQ ID NO: 108581 - DNA, 25 bp, Artificial
  Probe
caaggatgactttatggagattaag

SEQ ID NO: 108582 - DNA, 25 bp, Artificial
  Probe
tttctgagattgtgttagctccaaa

SEQ ID NO: 108583 - DNA, 25 bp, Artificial
  Probe
atcttagaagagaaatttgcacacc

SEQ ID NO: 108584 - DNA, 25 bp, Artificial
  Probe
aaggatgactttatggagattaaga

SEQ ID NO: 108585 - DNA, 25 bp, Artificial
  Probe
tcttagaagagaaatttgcacacca

SEQ ID NO: 108586 - DNA, 25 bp, Artificial
  Probe
ttctgagattgtgttagctccaaag

SEQ ID NO: 108587 - DNA, 25 bp, Artificial
  Probe
agtgagaaggaagatgcaggtctaa

SEQ ID NO: 108588 - DNA, 25 bp, Artificial
  Probe
ttagaagagaaatttgcacaccagg

SEQ ID NO: 108589 - DNA, 25 bp, Artificial
  Probe
ggtctgagctgtgatcaagaatatt

SEQ ID NO: 108590 - DNA, 25 bp, Artificial
  Probe
ccaaggatgactttatggagattaa

SEQ ID NO: 108591 - DNA, 25 bp, Artificial
  Probe
acatcttagaagagaaatttgcaca

SEQ ID NO: 108592 - DNA, 25 bp, Artificial
  Probe
gggacattgtttgtttcttccacat

SEQ ID NO: 108593 - DNA, 25 bp, Artificial
  Probe
catcttagaagagaaatttgcacac

SEQ ID NO: 108594 - DNA, 25 bp, Artificial
  Probe
tgccaaggatgactttatggagatt

SEQ ID NO: 108595 - DNA, 25 bp, Artificial
  Probe
tgattaactgggatgatctcattaa

SEQ ID NO: 108596 - DNA, 25 bp, Artificial
  Probe
ttgattaactgggatgatctcatta

SEQ ID NO: 108597 - DNA, 25 bp, Artificial
  Probe
ttgtaagcatcaatgtgacacttgc

SEQ ID NO: 108598 - DNA, 25 bp, Artificial
  Probe
aggtctgagctgtgatcaagaatat

SEQ ID NO: 108599 - DNA, 25 bp, Artificial
  Probe
tacaggcttatttgtaaaccatcat

SEQ ID NO: 108600 - DNA, 25 bp, Artificial
  Probe
aacatgagactgcctagaggagtag

SEQ ID NO: 108601 - DNA, 25 bp, Artificial
  Probe
gaacatgagactgcctagaggagta

SEQ ID NO: 108602 - DNA, 25 bp, Artificial
  Probe
gagccagctaaagggtctagtattg

SEQ ID NO: 108603 - DNA, 25 bp, Artificial
  Probe
tgagccagctaaagggtctagtatt

SEQ ID NO: 108604 - DNA, 25 bp, Artificial
  Probe
cagaacatgagactgcctagaggag

SEQ ID NO: 108605 - DNA, 25 bp, Artificial
  Probe
agaacatgagactgcctagaggagt

SEQ ID NO: 108606 - DNA, 25 bp, Artificial
  Probe
ctgagccagctaaagggtctagtat

SEQ ID NO: 108607 - DNA, 25 bp, Artificial
  Probe
agccagctaaagggtctagtattgc

SEQ ID NO: 108608 - DNA, 25 bp, Artificial
  Probe
acatgagactgcctagaggagtagg

SEQ ID NO: 108609 - DNA, 25 bp, Artificial
  Probe
ccagctaaagggtctagtattgccg

SEQ ID NO: 108610 - DNA, 25 bp, Artificial
  Probe
gccagctaaagggtctagtattgcc

SEQ ID NO: 108611 - DNA, 25 bp, Artificial
  Probe
cctgagccagctaaagggtctagta

SEQ ID NO: 108612 - DNA, 25 bp, Artificial
  Probe
catgagactgcctagaggagtaggg

SEQ ID NO: 108613 - DNA, 25 bp, Artificial
  Probe
catggtaggttcctggatgttccac

SEQ ID NO: 108614 - DNA, 25 bp, Artificial
  Probe
acctgggtctttggatagctacctc

SEQ ID NO: 108615 - DNA, 25 bp, Artificial
  Probe
ttcccgctattcgaagttggagaag

SEQ ID NO: 108616 - DNA, 25 bp, Artificial
  Probe
cttcccgctattcgaagttggagaa

SEQ ID NO: 108617 - DNA, 25 bp, Artificial
  Probe
aacaagaagtgcatctggacaataa

SEQ ID NO: 108618 - DNA, 25 bp, Artificial
  Probe
acaagaagtgcatctggacaataac

SEQ ID NO: 108619 - DNA, 25 bp, Artificial
  Probe
cacatactgccgatatgactctgtc

SEQ ID NO: 108620 - DNA, 25 bp, Artificial
  Probe
gacacatactgccgatatgactctg

SEQ ID NO: 108621 - DNA, 25 bp, Artificial
  Probe
ctgacacatactgccgatatgactc

SEQ ID NO: 108622 - DNA, 25 bp, Artificial
  Probe
caagaagtgcatctggacaataacg

SEQ ID NO: 108623 - DNA, 25 bp, Artificial
  Probe
gactctgtcagtgtgttcaatggag

SEQ ID NO: 108624 - DNA, 25 bp, Artificial
  Probe
tgacacatactgccgatatgactct

SEQ ID NO: 108625 - DNA, 25 bp, Artificial
  Probe
ctaaagtccagcctgtagagaaacc

SEQ ID NO: 108626 - DNA, 25 bp, Artificial
  Probe
cctaaagtccagcctgtagagaaac

SEQ ID NO: 108627 - DNA, 25 bp, Artificial
  Probe
ctgtccttccgagtctttgatatgg

SEQ ID NO: 108628 - DNA, 25 bp, Artificial
  Probe
cctgtccttccgagtctttgatatg

SEQ ID NO: 108629 - DNA, 25 bp, Artificial
  Probe
acacatactgccgatatgactctgt

SEQ ID NO: 108630 - DNA, 25 bp, Artificial
  Probe
taaagtccagcctgtagagaaacct

SEQ ID NO: 108631 - DNA, 25 bp, Artificial
  Probe
aaacaagaagtgcatctggacaata

SEQ ID NO: 108632 - DNA, 25 bp, Artificial
  Probe
aagaagtgcatctggacaataacgg

SEQ ID NO: 108633 - DNA, 25 bp, Artificial
  Probe
taagcctaaagtccagcctgtagag

SEQ ID NO: 108634 - DNA, 25 bp, Artificial
  Probe
caaaccacccagtaagcctaaagtc

SEQ ID NO: 108635 - DNA, 25 bp, Artificial
  Probe
gtcaaaccacccagtaagcctaaag

SEQ ID NO: 108636 - DNA, 25 bp, Artificial
  Probe
cctgacacatactgccgatatgact

SEQ ID NO: 108637 - DNA, 25 bp, Artificial
  Probe
ccctgtccttccgagtctttgatat

SEQ ID NO: 108638 - DNA, 25 bp, Artificial
  Probe
agtttgtatcagatctcagtgtcac

SEQ ID NO: 108639 - DNA, 25 bp, Artificial
  Probe
cagtttgtatcagatctcagtgtca

SEQ ID NO: 108640 - DNA, 25 bp, Artificial
  Probe
gtaagcctaaagtccagcctgtaga

SEQ ID NO: 108641 - DNA, 25 bp, Artificial
  Probe
agtaagcctaaagtccagcctgtag

SEQ ID NO: 108642 - DNA, 25 bp, Artificial
  Probe
gatcatgctaaccttcgggaagttt

SEQ ID NO: 108643 - DNA, 25 bp, Artificial
  Probe
caaacaagaagtgcatctggacaat

SEQ ID NO: 108644 - DNA, 25 bp, Artificial
  Probe
ccagtttgtatcagatctcagtgtc

SEQ ID NO: 108645 - DNA, 25 bp, Artificial
  Probe
gtccagtttgtatcagatctcagtg

SEQ ID NO: 108646 - DNA, 25 bp, Artificial
  Probe
atatgactctgtcagtgtgttcaat

SEQ ID NO: 108647 - DNA, 25 bp, Artificial
  Probe
tccagtttgtatcagatctcagtgt

SEQ ID NO: 108648 - DNA, 25 bp, Artificial
  Probe
gatatgactctgtcagtgtgttcaa

SEQ ID NO: 108649 - DNA, 25 bp, Artificial
  Probe
tcaaaccacccagtaagcctaaagt

SEQ ID NO: 108650 - DNA, 25 bp, Artificial
  Probe
agtcaaaccacccagtaagcctaaa

SEQ ID NO: 108651 - DNA, 25 bp, Artificial
  Probe
aagtcaaaccacccagtaagcctaa

SEQ ID NO: 108652 - DNA, 25 bp, Artificial
  Probe
aaagtcaaaccacccagtaagccta

SEQ ID NO: 108653 - DNA, 25 bp, Artificial
  Probe
tatgactctgtcagtgtgttcaatg

SEQ ID NO: 108654 - DNA, 25 bp, Artificial
  Probe
tctttgatatggaactccacccttc

SEQ ID NO: 108655 - DNA, 25 bp, Artificial
  Probe
atgctaaccttcgggaagtttgatg

SEQ ID NO: 108656 - DNA, 25 bp, Artificial
  Probe
gtttgtatcagatctcagtgtcact

SEQ ID NO: 108657 - DNA, 25 bp, Artificial
  Probe
tgtccttccgagtctttgatatgga

SEQ ID NO: 108658 - DNA, 25 bp, Artificial
  Probe
ctcctggtccagtttgtatcagatc

SEQ ID NO: 108659 - DNA, 25 bp, Artificial
  Probe
catgctaaccttcgggaagtttgat

SEQ ID NO: 108660 - DNA, 25 bp, Artificial
  Probe
atcatgctaaccttcgggaagtttg

SEQ ID NO: 108661 - DNA, 25 bp, Artificial
  Probe
gtctttgatatggaactccaccctt

SEQ ID NO: 108662 - DNA, 25 bp, Artificial
  Probe
gaagactatgtccagagagaacact

SEQ ID NO: 108663 - DNA, 25 bp, Artificial
  Probe
agaagactatgtccagagagaacac

SEQ ID NO: 108664 - DNA, 25 bp, Artificial
  Probe
cagaagactatgtccagagagaaca

SEQ ID NO: 108665 - DNA, 25 bp, Artificial
  Probe
acagaagactatgtccagagagaac

SEQ ID NO: 108666 - DNA, 25 bp, Artificial
  Probe
cacagaagactatgtccagagagaa

SEQ ID NO: 108667 - DNA, 25 bp, Artificial
  Probe
tggctagaatgctgattgaatctat

SEQ ID NO: 108668 - DNA, 25 bp, Artificial
  Probe
ctatgtccagagagaacactgactt

SEQ ID NO: 108669 - DNA, 25 bp, Artificial
  Probe
aagactatgtccagagagaacactg

SEQ ID NO: 108670 - DNA, 25 bp, Artificial
  Probe
ctggctagaatgctgattgaatcta

SEQ ID NO: 108671 - DNA, 25 bp, Artificial
  Probe
ggctagaatgctgattgaatctatt

SEQ ID NO: 108672 - DNA, 25 bp, Artificial
  Probe
aacctggctagaatgctgattgaat

SEQ ID NO: 108673 - DNA, 25 bp, Artificial
  Probe
tcacagaagactatgtccagagaga

SEQ ID NO: 108674 - DNA, 25 bp, Artificial
  Probe
gtcacagaagactatgtccagagag

SEQ ID NO: 108675 - DNA, 25 bp, Artificial
  Probe
gactatgtccagagagaacactgac

SEQ ID NO: 108676 - DNA, 25 bp, Artificial
  Probe
agactatgtccagagagaacactga

SEQ ID NO: 108677 - DNA, 25 bp, Artificial
  Probe
cctggctagaatgctgattgaatct

SEQ ID NO: 108678 - DNA, 25 bp, Artificial
  Probe
actatgtccagagagaacactgact

SEQ ID NO: 108679 - DNA, 25 bp, Artificial
  Probe
acctggctagaatgctgattgaatc

SEQ ID NO: 108680 - DNA, 25 bp, Artificial
  Probe
gaacctggctagaatgctgattgaa

SEQ ID NO: 108681 - DNA, 25 bp, Artificial
  Probe
tagtgaacctggctagaatgctgat

SEQ ID NO: 108682 - DNA, 25 bp, Artificial
  Probe
tatgtccagagagaacactgacttt

SEQ ID NO: 108683 - DNA, 25 bp, Artificial
  Probe
ggtcacagaagactatgtccagaga

SEQ ID NO: 108684 - DNA, 25 bp, Artificial
  Probe
aggtcacagaagactatgtccagag

SEQ ID NO: 108685 - DNA, 25 bp, Artificial
  Probe
gatcctagtgaacctggctagaatg

SEQ ID NO: 108686 - DNA, 25 bp, Artificial
  Probe
caggtcacagaagactatgtccaga

SEQ ID NO: 108687 - DNA, 25 bp, Artificial
  Probe
tgatcctagtgaacctggctagaat

SEQ ID NO: 108688 - DNA, 25 bp, Artificial
  Probe
catgtgatcctagtgaacctggcta

SEQ ID NO: 108689 - DNA, 25 bp, Artificial
  Probe
tgaacctggctagaatgctgattga

SEQ ID NO: 108690 - DNA, 25 bp, Artificial
  Probe
gtgaacctggctagaatgctgattg

SEQ ID NO: 108691 - DNA, 25 bp, Artificial
  Probe
agtgaacctggctagaatgctgatt

SEQ ID NO: 108692 - DNA, 25 bp, Artificial
  Probe
atgtccagagagaacactgactttg

SEQ ID NO: 108693 - DNA, 25 bp, Artificial
  Probe
gtgatcctagtgaacctggctagaa

SEQ ID NO: 108694 - DNA, 25 bp, Artificial
  Probe
atgtgatcctagtgaacctggctag

SEQ ID NO: 108695 - DNA, 25 bp, Artificial
  Probe
atttaatttgaaacagcctttgaat

SEQ ID NO: 108696 - DNA, 25 bp, Artificial
  Probe
ctatttaatttgaaacagcctttga

SEQ ID NO: 108697 - DNA, 25 bp, Artificial
  Probe
tctatttaatttgaaacagcctttg

SEQ ID NO: 108698 - DNA, 25 bp, Artificial
  Probe
gctagaatgctgattgaatctattt

SEQ ID NO: 108699 - DNA, 25 bp, Artificial
  Probe
catagaagagatttatcaccgggtc

SEQ ID NO: 108700 - DNA, 25 bp, Artificial
  Probe
tacatagaagagatttatcaccggg

SEQ ID NO: 108701 - DNA, 25 bp, Artificial
  Probe
acatagaagagatttatcaccgggt

SEQ ID NO: 108702 - DNA, 25 bp, Artificial
  Probe
tgaatctatttaatttgaaacagcc

SEQ ID NO: 108703 - DNA, 25 bp, Artificial
  Probe
atagaagagatttatcaccgggtcc

SEQ ID NO: 108704 - DNA, 25 bp, Artificial
  Probe
gtacatagaagagatttatcaccgg

SEQ ID NO: 108705 - DNA, 25 bp, Artificial
  Probe
ctagtgaacctggctagaatgctga

SEQ ID NO: 108706 - DNA, 25 bp, Artificial
  Probe
atcctagtgaacctggctagaatgc

SEQ ID NO: 108707 - DNA, 25 bp, Artificial
  Probe
ccgatatgtggatatatgtgtcttc

SEQ ID NO: 108708 - DNA, 25 bp, Artificial
  Probe
cgatatgtggatatatgtgtcttcc

SEQ ID NO: 108709 - DNA, 25 bp, Artificial
  Probe
aaaggaattgaggtttaggcaagtt

SEQ ID NO: 108710 - DNA, 25 bp, Artificial
  Probe
aattgaggtttaggcaagttctctt

SEQ ID NO: 108711 - DNA, 25 bp, Artificial
  Probe
cccgatatgtggatatatgtgtctt

SEQ ID NO: 108712 - DNA, 25 bp, Artificial
  Probe
attgaggtttaggcaagttctcttc

SEQ ID NO: 108713 - DNA, 25 bp, Artificial
  Probe
gaattgaggtttaggcaagttctct

SEQ ID NO: 108714 - DNA, 25 bp, Artificial
  Probe
aaggaattgaggtttaggcaagttc

SEQ ID NO: 108715 - DNA, 25 bp, Artificial
  Probe
gaaaggaattgaggtttaggcaagt

SEQ ID NO: 108716 - DNA, 25 bp, Artificial
  Probe
tttagaaatgtcccgatatgtggat

SEQ ID NO: 108717 - DNA, 25 bp, Artificial
  Probe
atttagaaatgtcccgatatgtgga

SEQ ID NO: 108718 - DNA, 25 bp, Artificial
  Probe
ggaattgaggtttaggcaagttctc

SEQ ID NO: 108719 - DNA, 25 bp, Artificial
  Probe
aggaattgaggtttaggcaagttct

SEQ ID NO: 108720 - DNA, 25 bp, Artificial
  Probe
ttagaaatgtcccgatatgtggata

SEQ ID NO: 108721 - DNA, 25 bp, Artificial
  Probe
agaaatgtcccgatatgtggatata

SEQ ID NO: 108722 - DNA, 25 bp, Artificial
  Probe
tagaaatgtcccgatatgtggatat

SEQ ID NO: 108723 - DNA, 25 bp, Artificial
  Probe
atgtcccgatatgtggatatatgtg

SEQ ID NO: 108724 - DNA, 25 bp, Artificial
  Probe
tcccgatatgtggatatatgtgtct

SEQ ID NO: 108725 - DNA, 25 bp, Artificial
  Probe
gtcccgatatgtggatatatgtgtc

SEQ ID NO: 108726 - DNA, 25 bp, Artificial
  Probe
aatgtcccgatatgtggatatatgt

SEQ ID NO: 108727 - DNA, 25 bp, Artificial
  Probe
tgtcccgatatgtggatatatgtgt

SEQ ID NO: 108728 - DNA, 25 bp, Artificial
  Probe
ttgaggtttaggcaagttctcttcc

SEQ ID NO: 108729 - DNA, 25 bp, Artificial
  Probe
gatatgtggatatatgtgtcttccc

SEQ ID NO: 108730 - DNA, 25 bp, Artificial
  Probe
aaatgtcccgatatgtggatatatg

SEQ ID NO: 108731 - DNA, 25 bp, Artificial
  Probe
gaaatgtcccgatatgtggatatat

SEQ ID NO: 108732 - DNA, 25 bp, Artificial
  Probe
catttagaaatgtcccgatatgtgg

SEQ ID NO: 108733 - DNA, 25 bp, Artificial
  Probe
aatcctcatttagaaatgtcccgat

SEQ ID NO: 108734 - DNA, 25 bp, Artificial
  Probe
aaatcctcatttagaaatgtcccga

SEQ ID NO: 108735 - DNA, 25 bp, Artificial
  Probe
caaatcctcatttagaaatgtcccg

SEQ ID NO: 108736 - DNA, 25 bp, Artificial
  Probe
cctcatttagaaatgtcccgatatg

SEQ ID NO: 108737 - DNA, 25 bp, Artificial
  Probe
tcctcatttagaaatgtcccgatat

SEQ ID NO: 108738 - DNA, 25 bp, Artificial
  Probe
atcctcatttagaaatgtcccgata

SEQ ID NO: 108739 - DNA, 25 bp, Artificial
  Probe
tcatttagaaatgtcccgatatgtg

SEQ ID NO: 108740 - DNA, 25 bp, Artificial
  Probe
tcaaatcctcatttagaaatgtccc

SEQ ID NO: 108741 - DNA, 25 bp, Artificial
  Probe
ctcatttagaaatgtcccgatatgt

SEQ ID NO: 108742 - DNA, 25 bp, Artificial
  Probe
gctggatcaaatcctcatttagaaa

SEQ ID NO: 108743 - DNA, 25 bp, Artificial
  Probe
gtagacaaagaggtctcgtgtattt

SEQ ID NO: 108744 - DNA, 25 bp, Artificial
  Probe
atatgtggatatatgtgtcttcccc

SEQ ID NO: 108745 - DNA, 25 bp, Artificial
  Probe
atcaaatcctcatttagaaatgtcc

SEQ ID NO: 108746 - DNA, 25 bp, Artificial
  Probe
agctggatcaaatcctcatttagaa

SEQ ID NO: 108747 - DNA, 25 bp, Artificial
  Probe
tttagcttcactgatggcaacagag

SEQ ID NO: 108748 - DNA, 25 bp, Artificial
  Probe
tgaggtttaggcaagttctcttccc

SEQ ID NO: 108749 - DNA, 25 bp, Artificial
  Probe
cagattctcggtgacacacagttgt

SEQ ID NO: 108750 - DNA, 25 bp, Artificial
  Probe
ccaaggttatacaaactaattgtgt

SEQ ID NO: 108751 - DNA, 25 bp, Artificial
  Probe
aggattttccgtagacaaagaggtc

SEQ ID NO: 108752 - DNA, 25 bp, Artificial
  Probe
tcccatctttggagctaattgttaa

SEQ ID NO: 108753 - DNA, 25 bp, Artificial
  Probe
ttcccatctttggagctaattgtta

SEQ ID NO: 108754 - DNA, 25 bp, Artificial
  Probe
gtatacctaggaacactctcaacag

SEQ ID NO: 108755 - DNA, 25 bp, Artificial
  Probe
cccatctttggagctaattgttaat

SEQ ID NO: 108756 - DNA, 25 bp, Artificial
  Probe
cttcccatctttggagctaattgtt

SEQ ID NO: 108757 - DNA, 25 bp, Artificial
  Probe
tatacctaggaacactctcaacaga

SEQ ID NO: 108758 - DNA, 25 bp, Artificial
  Probe
atacctaggaacactctcaacagaa

SEQ ID NO: 108759 - DNA, 25 bp, Artificial
  Probe
tacctaggaacactctcaacagaag

SEQ ID NO: 108760 - DNA, 25 bp, Artificial
  Probe
ctgtatacctaggaacactctcaac

SEQ ID NO: 108761 - DNA, 25 bp, Artificial
  Probe
tgtatacctaggaacactctcaaca

SEQ ID NO: 108762 - DNA, 25 bp, Artificial
  Probe
cctgtatacctaggaacactctcaa

SEQ ID NO: 108763 - DNA, 25 bp, Artificial
  Probe
ccttcccatctttggagctaattgt

SEQ ID NO: 108764 - DNA, 25 bp, Artificial
  Probe
gtaccttcactaccactcacccttc

SEQ ID NO: 108765 - DNA, 25 bp, Artificial
  Probe
tctttggagctaattgttaatatga

SEQ ID NO: 108766 - DNA, 25 bp, Artificial
  Probe
ccatctttggagctaattgttaata

SEQ ID NO: 108767 - DNA, 25 bp, Artificial
  Probe
cttcattaccctttcctgtgtgcct

SEQ ID NO: 108768 - DNA, 25 bp, Artificial
  Probe
ctgccttcattaccctttcctgtgt

SEQ ID NO: 108769 - DNA, 25 bp, Artificial
  Probe
acctaggaacactctcaacagaagt

SEQ ID NO: 108770 - DNA, 25 bp, Artificial
  Probe
cccttcccatctttggagctaattg

SEQ ID NO: 108771 - DNA, 25 bp, Artificial
  Probe
ctaggaacactctcaacagaagtgc

SEQ ID NO: 108772 - DNA, 25 bp, Artificial
  Probe
gcctgtatacctaggaacactctca

SEQ ID NO: 108773 - DNA, 25 bp, Artificial
  Probe
tgcctgtatacctaggaacactctc

SEQ ID NO: 108774 - DNA, 25 bp, Artificial
  Probe
taccttcactaccactcacccttcc

SEQ ID NO: 108775 - DNA, 25 bp, Artificial
  Probe
attaccctttcctgtgtgcctgttc

SEQ ID NO: 108776 - DNA, 25 bp, Artificial
  Probe
ttcattaccctttcctgtgtgcctg

SEQ ID NO: 108777 - DNA, 25 bp, Artificial
  Probe
tgccttcattaccctttcctgtgtg

SEQ ID NO: 108778 - DNA, 25 bp, Artificial
  Probe
ctttggagctaattgttaatatgaa

SEQ ID NO: 108779 - DNA, 25 bp, Artificial
  Probe
gtgcctgtatacctaggaacactct

SEQ ID NO: 108780 - DNA, 25 bp, Artificial
  Probe
ttggagctaattgttaatatgaatt

SEQ ID NO: 108781 - DNA, 25 bp, Artificial
  Probe
aagttatgcagcaggtgcctgtata

SEQ ID NO: 108782 - DNA, 25 bp, Artificial
  Probe
atctttggagctaattgttaatatg

SEQ ID NO: 108783 - DNA, 25 bp, Artificial
  Probe
catctttggagctaattgttaatat

SEQ ID NO: 108784 - DNA, 25 bp, Artificial
  Probe
taggaacactctcaacagaagtgcc

SEQ ID NO: 108785 - DNA, 25 bp, Artificial
  Probe
tttggagctaattgttaatatgaat

SEQ ID NO: 108786 - DNA, 25 bp, Artificial
  Probe
ggtgcctgtatacctaggaacactc

SEQ ID NO: 108787 - DNA, 25 bp, Artificial
  Probe
agttatgcagcaggtgcctgtatac

SEQ ID NO: 108788 - DNA, 25 bp, Artificial
  Probe
tggagctaattgttaatatgaattt

SEQ ID NO: 108789 - DNA, 25 bp, Artificial
  Probe
ctagacatgcctaccctgaaagcag

SEQ ID NO: 108790 - DNA, 25 bp, Artificial
  Probe
cctaggaacactctcaacagaagtg

SEQ ID NO: 108791 - DNA, 25 bp, Artificial
  Probe
ccccttcccatctttggagctaatt

SEQ ID NO: 108792 - DNA, 25 bp, Artificial
  Probe
tatgcagcaggtgcctgtataccta

SEQ ID NO: 108793 - DNA, 25 bp, Artificial
  Probe
tccccttcccatctttggagctaat

SEQ ID NO: 108794 - DNA, 25 bp, Artificial
  Probe
caggtgcctgtatacctaggaacac

SEQ ID NO: 108795 - DNA, 25 bp, Artificial
  Probe
aggtgcctgtatacctaggaacact

SEQ ID NO: 108796 - DNA, 25 bp, Artificial
  Probe
agtaattcacagcctctctggacag

SEQ ID NO: 108797 - DNA, 25 bp, Artificial
  Probe
cagtaattcacagcctctctggaca

SEQ ID NO: 108798 - DNA, 25 bp, Artificial
  Probe
gtaattcacagcctctctggacagg

SEQ ID NO: 108799 - DNA, 25 bp, Artificial
  Probe
cttatgtataccgggacccgtgtaa

SEQ ID NO: 108800 - DNA, 25 bp, Artificial
  Probe
ttatgtataccgggacccgtgtaac

SEQ ID NO: 108801 - DNA, 25 bp, Artificial
  Probe
tatgtataccgggacccgtgtaact

SEQ ID NO: 108802 - DNA, 25 bp, Artificial
  Probe
ccttatgtataccgggacccgtgta

SEQ ID NO: 108803 - DNA, 25 bp, Artificial
  Probe
cctgctacacatacaacactgaatt

SEQ ID NO: 108804 - DNA, 25 bp, Artificial
  Probe
aatctacctggacattcttggctag

SEQ ID NO: 108805 - DNA, 25 bp, Artificial
  Probe
caatctacctggacattcttggcta

SEQ ID NO: 108806 - DNA, 25 bp, Artificial
  Probe
ttatactctgttgcctcctctctcc

SEQ ID NO: 108807 - DNA, 25 bp, Artificial
  Probe
aacagcgactgaatattaaggagat

SEQ ID NO: 108808 - DNA, 25 bp, Artificial
  Probe
acagcgactgaatattaaggagatc

SEQ ID NO: 108809 - DNA, 25 bp, Artificial
  Probe
ttcatataaactcaagtgcctgcta

SEQ ID NO: 108810 - DNA, 25 bp, Artificial
  Probe
ctgctacacatacaacactgaattt

SEQ ID NO: 108811 - DNA, 25 bp, Artificial
  Probe
caacagcgactgaatattaaggaga

SEQ ID NO: 108812 - DNA, 25 bp, Artificial
  Probe
tcatataaactcaagtgcctgctac

SEQ ID NO: 108813 - DNA, 25 bp, Artificial
  Probe
atctacctggacattcttggctagt

SEQ ID NO: 108814 - DNA, 25 bp, Artificial
  Probe
acaacagcgactgaatattaaggag

SEQ ID NO: 108815 - DNA, 25 bp, Artificial
  Probe
catataaactcaagtgcctgctaca

SEQ ID NO: 108816 - DNA, 25 bp, Artificial
  Probe
aaccacaacagcgactgaatattaa

SEQ ID NO: 108817 - DNA, 25 bp, Artificial
  Probe
gaccgaaacgaacatcttcatataa

SEQ ID NO: 108818 - DNA, 25 bp, Artificial
  Probe
cacaacagcgactgaatattaagga

SEQ ID NO: 108819 - DNA, 25 bp, Artificial
  Probe
tttatactctgttgcctcctctctc

SEQ ID NO: 108820 - DNA, 25 bp, Artificial
  Probe
acatcttcatataaactcaagtgcc

SEQ ID NO: 108821 - DNA, 25 bp, Artificial
  Probe
accgaaacgaacatcttcatataaa

SEQ ID NO: 108822 - DNA, 25 bp, Artificial
  Probe
tgaccgaaacgaacatcttcatata

SEQ ID NO: 108823 - DNA, 25 bp, Artificial
  Probe
accacaacagcgactgaatattaag

SEQ ID NO: 108824 - DNA, 25 bp, Artificial
  Probe
gaaccacaacagcgactgaatatta

SEQ ID NO: 108825 - DNA, 25 bp, Artificial
  Probe
gtttatactctgttgcctcctctct

SEQ ID NO: 108826 - DNA, 25 bp, Artificial
  Probe
tgctacacatacaacactgaattta

SEQ ID NO: 108827 - DNA, 25 bp, Artificial
  Probe
cttcatataaactcaagtgcctgct

SEQ ID NO: 108828 - DNA, 25 bp, Artificial
  Probe
tcttcatataaactcaagtgcctgc

SEQ ID NO: 108829 - DNA, 25 bp, Artificial
  Probe
atcttcatataaactcaagtgcctg

SEQ ID NO: 108830 - DNA, 25 bp, Artificial
  Probe
catcttcatataaactcaagtgcct

SEQ ID NO: 108831 - DNA, 25 bp, Artificial
  Probe
ccgaaacgaacatcttcatataaac

SEQ ID NO: 108832 - DNA, 25 bp, Artificial
  Probe
ttgaccgaaacgaacatcttcatat

SEQ ID NO: 108833 - DNA, 25 bp, Artificial
  Probe
gcctgctacacatacaacactgaat

SEQ ID NO: 108834 - DNA, 25 bp, Artificial
  Probe
tttgaccgaaacgaacatcttcata

SEQ ID NO: 108835 - DNA, 25 bp, Artificial
  Probe
atctttgaccgaaacgaacatcttc

SEQ ID NO: 108836 - DNA, 25 bp, Artificial
  Probe
ccacaacagcgactgaatattaagg

SEQ ID NO: 108837 - DNA, 25 bp, Artificial
  Probe
aagaagtatatgatgtcatgctggg

SEQ ID NO: 108838 - DNA, 25 bp, Artificial
  Probe
catctttgaccgaaacgaacatctt

SEQ ID NO: 108839 - DNA, 25 bp, Artificial
  Probe
gctacacatacaacactgaatttaa

SEQ ID NO: 108840 - DNA, 25 bp, Artificial
  Probe
aaagaagtatatgatgtcatgctgg

SEQ ID NO: 108841 - DNA, 25 bp, Artificial
  Probe
tctaacacagaggtcattgaatgca

SEQ ID NO: 108842 - DNA, 25 bp, Artificial
  Probe
cgaaacgaacatcttcatataaact

SEQ ID NO: 108843 - DNA, 25 bp, Artificial
  Probe
atataaactcaagtgcctgctacac

SEQ ID NO: 108844 - DNA, 25 bp, Artificial
  Probe
tctacctggacattcttggctagtg

SEQ ID NO: 108845 - DNA, 25 bp, Artificial
  Probe
aacatcttcatataaactcaagtgc

SEQ ID NO: 108846 - DNA, 25 bp, Artificial
  Probe
ctttgaccgaaacgaacatcttcat

SEQ ID NO: 108847 - DNA, 25 bp, Artificial
  Probe
gcgactgaatattaaggagatctac

SEQ ID NO: 108848 - DNA, 25 bp, Artificial
  Probe
ttcatggaggtcctagcctttctta

SEQ ID NO: 108849 - DNA, 25 bp, Artificial
  Probe
tcatggaggtcctagcctttcttag

SEQ ID NO: 108850 - DNA, 25 bp, Artificial
  Probe
gtacaagactacatgcaatgggagg

SEQ ID NO: 108851 - DNA, 25 bp, Artificial
  Probe
caagactacatgcaatgggaggttt

SEQ ID NO: 108852 - DNA, 25 bp, Artificial
  Probe
tacaagactacatgcaatgggaggt

SEQ ID NO: 108853 - DNA, 25 bp, Artificial
  Probe
cttcatggaggtcctagcctttctt

SEQ ID NO: 108854 - DNA, 25 bp, Artificial
  Probe
gattggggtggggcaatatttattt

SEQ ID NO: 108855 - DNA, 25 bp, Artificial
  Probe
acaagactacatgcaatgggaggtt

SEQ ID NO: 108856 - DNA, 25 bp, Artificial
  Probe
catggaggtcctagcctttcttagg

SEQ ID NO: 108857 - DNA, 25 bp, Artificial
  Probe
tgattggggtggggcaatatttatt

SEQ ID NO: 108858 - DNA, 25 bp, Artificial
  Probe
tgtacaagactacatgcaatgggag

SEQ ID NO: 108859 - DNA, 25 bp, Artificial
  Probe
gtgtacaagactacatgcaatggga

SEQ ID NO: 108860 - DNA, 25 bp, Artificial
  Probe
ctgattggggtggggcaatatttat

SEQ ID NO: 108861 - DNA, 25 bp, Artificial
  Probe
cagaggactagctgactttgccaag

SEQ ID NO: 108862 - DNA, 25 bp, Artificial
  Probe
ggtgtacaagactacatgcaatggg

SEQ ID NO: 108863 - DNA, 25 bp, Artificial
  Probe
gggtgtacaagactacatgcaatgg

SEQ ID NO: 108864 - DNA, 25 bp, Artificial
  Probe
cgggtgtacaagactacatgcaatg

SEQ ID NO: 108865 - DNA, 25 bp, Artificial
  Probe
ccgggtgtacaagactacatgcaat

SEQ ID NO: 108866 - DNA, 25 bp, Artificial
  Probe
ttattccacggcatacagagacatt

SEQ ID NO: 108867 - DNA, 25 bp, Artificial
  Probe
aatctgctcgtggtcattgaataga

SEQ ID NO: 108868 - DNA, 25 bp, Artificial
  Probe
ttaaccatgattccacagctacttg

SEQ ID NO: 108869 - DNA, 25 bp, Artificial
  Probe
atatttattccacggcatacagaga

SEQ ID NO: 108870 - DNA, 25 bp, Artificial
  Probe
aaagaggacagatatagtgggaaac

SEQ ID NO: 108871 - DNA, 25 bp, Artificial
  Probe
agaaagaggacagatatagtgggaa

SEQ ID NO: 108872 - DNA, 25 bp, Artificial
  Probe
tggagagaaagaggacagatatagt

SEQ ID NO: 108873 - DNA, 25 bp, Artificial
  Probe
tatttattccacggcatacagagac

SEQ ID NO: 108874 - DNA, 25 bp, Artificial
  Probe
gaaagaggacagatatagtgggaaa

SEQ ID NO: 108875 - DNA, 25 bp, Artificial
  Probe
gagagaaagaggacagatatagtgg

SEQ ID NO: 108876 - DNA, 25 bp, Artificial
  Probe
ggagagaaagaggacagatatagtg

SEQ ID NO: 108877 - DNA, 25 bp, Artificial
  Probe
gagaaagaggacagatatagtggga

SEQ ID NO: 108878 - DNA, 25 bp, Artificial
  Probe
agagaaagaggacagatatagtggg

SEQ ID NO: 108879 - DNA, 25 bp, Artificial
  Probe
atctgctcgtggtcattgaatagag

SEQ ID NO: 108880 - DNA, 25 bp, Artificial
  Probe
tcgtggtcattgaatagagcaataa

SEQ ID NO: 108881 - DNA, 25 bp, Artificial
  Probe
tgaatagagcaataaacagagcatt

SEQ ID NO: 108882 - DNA, 25 bp, Artificial
  Probe
ctcgtggtcattgaatagagcaata

SEQ ID NO: 108883 - DNA, 25 bp, Artificial
  Probe
aagaggacagatatagtgggaaacc

SEQ ID NO: 108884 - DNA, 25 bp, Artificial
  Probe
ctatgagacactggagagaaagagg

SEQ ID NO: 108885 - DNA, 25 bp, Artificial
  Probe
cctatgagacactggagagaaagag

SEQ ID NO: 108886 - DNA, 25 bp, Artificial
  Probe
ttgaatagagcaataaacagagcat

SEQ ID NO: 108887 - DNA, 25 bp, Artificial
  Probe
tatgagacactggagagaaagagga

SEQ ID NO: 108888 - DNA, 25 bp, Artificial
  Probe
gaatagagcaataaacagagcattt

SEQ ID NO: 108889 - DNA, 25 bp, Artificial
  Probe
actggagagaaagaggacagatata

SEQ ID NO: 108890 - DNA, 25 bp, Artificial
  Probe
tattccacggcatacagagacattt

SEQ ID NO: 108891 - DNA, 25 bp, Artificial
  Probe
tttattccacggcatacagagacat

SEQ ID NO: 108892 - DNA, 25 bp, Artificial
  Probe
atttattccacggcatacagagaca

SEQ ID NO: 108893 - DNA, 25 bp, Artificial
  Probe
ctggagagaaagaggacagatatag

SEQ ID NO: 108894 - DNA, 25 bp, Artificial
  Probe
cactggagagaaagaggacagatat

SEQ ID NO: 108895 - DNA, 25 bp, Artificial
  Probe
tttaaccatgattccacagctactt

SEQ ID NO: 108896 - DNA, 25 bp, Artificial
  Probe
gaagcattactggttcacatcctgg

SEQ ID NO: 108897 - DNA, 25 bp, Artificial
  Probe
atgatccaaacatgcgaacagtatc

SEQ ID NO: 108898 - DNA, 25 bp, Artificial
  Probe
ctagctcttctactgtacatactgc

SEQ ID NO: 108899 - DNA, 25 bp, Artificial
  Probe
catgttctgtctgtccatccatcac

SEQ ID NO: 108900 - DNA, 25 bp, Artificial
  Probe
tagctcttctactgtacatactgca

SEQ ID NO: 108901 - DNA, 25 bp, Artificial
  Probe
cctagctcttctactgtacatactg

SEQ ID NO: 108902 - DNA, 25 bp, Artificial
  Probe
gcctagctcttctactgtacatact

SEQ ID NO: 108903 - DNA, 25 bp, Artificial
  Probe
acactggagagaaagaggacagata

SEQ ID NO: 108904 - DNA, 25 bp, Artificial
  Probe
gatccaaacatgcgaacagtatcag

SEQ ID NO: 108905 - DNA, 25 bp, Artificial
  Probe
cgtggtcattgaatagagcaataaa

SEQ ID NO: 108906 - DNA, 25 bp, Artificial
  Probe
cttgaagcattactggttcacatcc

SEQ ID NO: 108907 - DNA, 25 bp, Artificial
  Probe
atgttctgtctgtccatccatcaca

SEQ ID NO: 108908 - DNA, 25 bp, Artificial
  Probe
atgagacactggagagaaagaggac

SEQ ID NO: 108909 - DNA, 25 bp, Artificial
  Probe
attgaatagagcaataaacagagca

SEQ ID NO: 108910 - DNA, 25 bp, Artificial
  Probe
ttgaagcattactggttcacatcct

SEQ ID NO: 108911 - DNA, 25 bp, Artificial
  Probe
acacacagagacatatacacactac

SEQ ID NO: 108912 - DNA, 25 bp, Artificial
  Probe
gacacacagagacatatacacacta

SEQ ID NO: 108913 - DNA, 25 bp, Artificial
  Probe
agacacacagagacatatacacact

SEQ ID NO: 108914 - DNA, 25 bp, Artificial
  Probe
gaagacacacagagacatatacaca

SEQ ID NO: 108915 - DNA, 25 bp, Artificial
  Probe
tgaagacacacagagacatatacac

SEQ ID NO: 108916 - DNA, 25 bp, Artificial
  Probe
gacatatacacactaccactaccac

SEQ ID NO: 108917 - DNA, 25 bp, Artificial
  Probe
agacatatacacactaccactacca

SEQ ID NO: 108918 - DNA, 25 bp, Artificial
  Probe
gagacatatacacactaccactacc

SEQ ID NO: 108919 - DNA, 25 bp, Artificial
  Probe
aagacacacagagacatatacacac

SEQ ID NO: 108920 - DNA, 25 bp, Artificial
  Probe
acagagacatatacacactaccact

SEQ ID NO: 108921 - DNA, 25 bp, Artificial
  Probe
cacagagacatatacacactaccac

SEQ ID NO: 108922 - DNA, 25 bp, Artificial
  Probe
cacacagagacatatacacactacc

SEQ ID NO: 108923 - DNA, 25 bp, Artificial
  Probe
acacagagacatatacacactacca

SEQ ID NO: 108924 - DNA, 25 bp, Artificial
  Probe
ctacaccttcacaaccacatcttaa

SEQ ID NO: 108925 - DNA, 25 bp, Artificial
  Probe
agagacatatacacactaccactac

SEQ ID NO: 108926 - DNA, 25 bp, Artificial
  Probe
cagagacatatacacactaccacta

SEQ ID NO: 108927 - DNA, 25 bp, Artificial
  Probe
atgaagacacacagagacatataca

SEQ ID NO: 108928 - DNA, 25 bp, Artificial
  Probe
atatacacactaccactaccaccac

SEQ ID NO: 108929 - DNA, 25 bp, Artificial
  Probe
catatacacactaccactaccacca

SEQ ID NO: 108930 - DNA, 25 bp, Artificial
  Probe
acatatacacactaccactaccacc

SEQ ID NO: 108931 - DNA, 25 bp, Artificial
  Probe
cacatgaagacacacagagacatat

SEQ ID NO: 108932 - DNA, 25 bp, Artificial
  Probe
acatgaagacacacagagacatata

SEQ ID NO: 108933 - DNA, 25 bp, Artificial
  Probe
catgaagacacacagagacatatac

SEQ ID NO: 108934 - DNA, 25 bp, Artificial
  Probe
cctacaccttcacaaccacatctta

SEQ ID NO: 108935 - DNA, 25 bp, Artificial
  Probe
tatacacactaccactaccaccaca

SEQ ID NO: 108936 - DNA, 25 bp, Artificial
  Probe
catacacatgaagacacacagagac

SEQ ID NO: 108937 - DNA, 25 bp, Artificial
  Probe
ccatgtaatctgatgaccttgaacc

SEQ ID NO: 108938 - DNA, 25 bp, Artificial
  Probe
atacacatgaagacacacagagaca

SEQ ID NO: 108939 - DNA, 25 bp, Artificial
  Probe
cacatacacatgaagacacacagag

SEQ ID NO: 108940 - DNA, 25 bp, Artificial
  Probe
acacatgaagacacacagagacata

SEQ ID NO: 108941 - DNA, 25 bp, Artificial
  Probe
tacacatgaagacacacagagacat

SEQ ID NO: 108942 - DNA, 25 bp, Artificial
  Probe
acatacacatgaagacacacagaga

SEQ ID NO: 108943 - DNA, 25 bp, Artificial
  Probe
gccatgtaatctgatgaccttgaac

SEQ ID NO: 108944 - DNA, 25 bp, Artificial
  Probe
cttgccatgtaatctgatgaccttg

SEQ ID NO: 108945 - DNA, 25 bp, Artificial
  Probe
tacaccttcacaaccacatcttaaa

SEQ ID NO: 108946 - DNA, 25 bp, Artificial
  Probe
acacatacacatgaagacacacaga

SEQ ID NO: 108947 - DNA, 25 bp, Artificial
  Probe
cacacatacacatgaagacacacag

SEQ ID NO: 108948 - DNA, 25 bp, Artificial
  Probe
tgccatgtaatctgatgaccttgaa

SEQ ID NO: 108949 - DNA, 25 bp, Artificial
  Probe
ttgccatgtaatctgatgaccttga

SEQ ID NO: 108950 - DNA, 25 bp, Artificial
  Probe
atacacactaccactaccaccacaa

SEQ ID NO: 108951 - DNA, 25 bp, Artificial
  Probe
caagcacacatacacatgaagacac

SEQ ID NO: 108952 - DNA, 25 bp, Artificial
  Probe
cacaagcacacatacacatgaagac

SEQ ID NO: 108953 - DNA, 25 bp, Artificial
  Probe
ctaaagtttggatgtggcttggtag

SEQ ID NO: 108954 - DNA, 25 bp, Artificial
  Probe
ccaatgagtccgaggcaatctaatg

SEQ ID NO: 108955 - DNA, 25 bp, Artificial
  Probe
aagcacacatacacatgaagacaca

SEQ ID NO: 108956 - DNA, 25 bp, Artificial
  Probe
aacattaacaatagcatccctccaa

SEQ ID NO: 108957 - DNA, 25 bp, Artificial
  Probe
ttcaacattaacaatagcatccctc

SEQ ID NO: 108958 - DNA, 25 bp, Artificial
  Probe
tcaacattaacaatagcatccctcc

SEQ ID NO: 108959 - DNA, 25 bp, Artificial
  Probe
acattaacaatagcatccctccaac

SEQ ID NO: 108960 - DNA, 25 bp, Artificial
  Probe
caacattaacaatagcatccctcca

SEQ ID NO: 108961 - DNA, 25 bp, Artificial
  Probe
tttcaacattaacaatagcatccct

SEQ ID NO: 108962 - DNA, 25 bp, Artificial
  Probe
ctttcaacattaacaatagcatccc

SEQ ID NO: 108963 - DNA, 25 bp, Artificial
  Probe
cagaactgacatcaactcccaattt

SEQ ID NO: 108964 - DNA, 25 bp, Artificial
  Probe
gtcactttcaacattaacaatagca

SEQ ID NO: 108965 - DNA, 25 bp, Artificial
  Probe
attaacaatagcatccctccaacct

SEQ ID NO: 108966 - DNA, 25 bp, Artificial
  Probe
cattaacaatagcatccctccaacc

SEQ ID NO: 108967 - DNA, 25 bp, Artificial
  Probe
taacaatagcatccctccaaccttt

SEQ ID NO: 108968 - DNA, 25 bp, Artificial
  Probe
ttaacaatagcatccctccaacctt

SEQ ID NO: 108969 - DNA, 25 bp, Artificial
  Probe
actttcaacattaacaatagcatcc

SEQ ID NO: 108970 - DNA, 25 bp, Artificial
  Probe
tcactgtcactttcaacattaacaa

SEQ ID NO: 108971 - DNA, 25 bp, Artificial
  Probe
atcactgtcactttcaacattaaca

SEQ ID NO: 108972 - DNA, 25 bp, Artificial
  Probe
attatcgccgttacacctccattta

SEQ ID NO: 108973 - DNA, 25 bp, Artificial
  Probe
taaattatcgccgttacacctccat

SEQ ID NO: 108974 - DNA, 25 bp, Artificial
  Probe
cactgtcactttcaacattaacaat

SEQ ID NO: 108975 - DNA, 25 bp, Artificial
  Probe
aagtttaaattatcgccgttacacc

SEQ ID NO: 108976 - DNA, 25 bp, Artificial
  Probe
aagcaagtttaaattatcgccgtta

SEQ ID NO: 108977 - DNA, 25 bp, Artificial
  Probe
ttaaattatcgccgttacacctcca

SEQ ID NO: 108978 - DNA, 25 bp, Artificial
  Probe
agcaagtttaaattatcgccgttac

SEQ ID NO: 108979 - DNA, 25 bp, Artificial
  Probe
tgtcactttcaacattaacaatagc

SEQ ID NO: 108980 - DNA, 25 bp, Artificial
  Probe
gtttaaattatcgccgttacacctc

SEQ ID NO: 108981 - DNA, 25 bp, Artificial
  Probe
caagtttaaattatcgccgttacac

SEQ ID NO: 108982 - DNA, 25 bp, Artificial
  Probe
aaagcaagtttaaattatcgccgtt

SEQ ID NO: 108983 - DNA, 25 bp, Artificial
  Probe
gcaagtttaaattatcgccgttaca

SEQ ID NO: 108984 - DNA, 25 bp, Artificial
  Probe
agtttaaattatcgccgttacacct

SEQ ID NO: 108985 - DNA, 25 bp, Artificial
  Probe
tgatgatgaacaataaactgacttc

SEQ ID NO: 108986 - DNA, 25 bp, Artificial
  Probe
tcactttcaacattaacaatagcat

SEQ ID NO: 108987 - DNA, 25 bp, Artificial
  Probe
gaaagcaagtttaaattatcgccgt

SEQ ID NO: 108988 - DNA, 25 bp, Artificial
  Probe
gatcactgtcactttcaacattaac

SEQ ID NO: 108989 - DNA, 25 bp, Artificial
  Probe
agatcactgtcactttcaacattaa

SEQ ID NO: 108990 - DNA, 25 bp, Artificial
  Probe
aagatcactgtcactttcaacatta

SEQ ID NO: 108991 - DNA, 25 bp, Artificial
  Probe
gggaaagcaagtttaaattatcgcc

SEQ ID NO: 108992 - DNA, 25 bp, Artificial
  Probe
cactttcaacattaacaatagcatc

SEQ ID NO: 108993 - DNA, 25 bp, Artificial
  Probe
tttaaattatcgccgttacacctcc

SEQ ID NO: 108994 - DNA, 25 bp, Artificial
  Probe
ggaaagcaagtttaaattatcgccg

SEQ ID NO: 108995 - DNA, 25 bp, Artificial
  Probe
acatgatgatgaacaataaactgac

SEQ ID NO: 108996 - DNA, 25 bp, Artificial
  Probe
ttatcgccgttacacctccatttac

SEQ ID NO: 108997 - DNA, 25 bp, Artificial
  Probe
aattatcgccgttacacctccattt

SEQ ID NO: 108998 - DNA, 25 bp, Artificial
  Probe
aaattatcgccgttacacctccatt

SEQ ID NO: 108999 - DNA, 25 bp, Artificial
  Probe
tctctattaaggaagtgagctttca

SEQ ID NO: 109000 - DNA, 25 bp, Artificial
  Probe
atgatgatgaacaataaactgactt

SEQ ID NO: 109001 - DNA, 25 bp, Artificial
  Probe
gtgtcttgagggaaatgtatggata

SEQ ID NO: 109002 - DNA, 25 bp, Artificial
  Probe
tgtcttgagggaaatgtatggataa

SEQ ID NO: 109003 - DNA, 25 bp, Artificial
  Probe
tgtgtcttgagggaaatgtatggat

SEQ ID NO: 109004 - DNA, 25 bp, Artificial
  Probe
ctgtgtcttgagggaaatgtatgga

SEQ ID NO: 109005 - DNA, 25 bp, Artificial
  Probe
tgtaaattgtgttcacagtctctca

SEQ ID NO: 109006 - DNA, 25 bp, Artificial
  Probe
atgtaaattgtgttcacagtctctc

SEQ ID NO: 109007 - DNA, 25 bp, Artificial
  Probe
cactgctgtgtaaatcagaactcag

SEQ ID NO: 109008 - DNA, 25 bp, Artificial
  Probe
aatgtaaattgtgttcacagtctct

SEQ ID NO: 109009 - DNA, 25 bp, Artificial
  Probe
aaatgtaaattgtgttcacagtctc

SEQ ID NO: 109010 - DNA, 25 bp, Artificial
  Probe
gaaatgtaaattgtgttcacagtct

SEQ ID NO: 109011 - DNA, 25 bp, Artificial
  Probe
agaaatgtaaattgtgttcacagtc

SEQ ID NO: 109012 - DNA, 25 bp, Artificial
  Probe
actgctgtgtaaatcagaactcagg

SEQ ID NO: 109013 - DNA, 25 bp, Artificial
  Probe
aagaaatgtaaattgtgttcacagt

SEQ ID NO: 109014 - DNA, 25 bp, Artificial
  Probe
tccactgctgtgtaaatcagaactc

SEQ ID NO: 109015 - DNA, 25 bp, Artificial
  Probe
ctccactgctgtgtaaatcagaact

SEQ ID NO: 109016 - DNA, 25 bp, Artificial
  Probe
gctgtgtcttgagggaaatgtatgg

SEQ ID NO: 109017 - DNA, 25 bp, Artificial
  Probe
ggctgtgtcttgagggaaatgtatg

SEQ ID NO: 109018 - DNA, 25 bp, Artificial
  Probe
tgggcaaggatatggttttaataaa

SEQ ID NO: 109019 - DNA, 25 bp, Artificial
  Probe
ttgggcaaggatatggttttaataa

SEQ ID NO: 109020 - DNA, 25 bp, Artificial
  Probe
ccactgctgtgtaaatcagaactca

SEQ ID NO: 109021 - DNA, 25 bp, Artificial
  Probe
tggctgtgtcttgagggaaatgtat

SEQ ID NO: 109022 - DNA, 25 bp, Artificial
  Probe
tttgtgaaagctactgaagtgcctt

SEQ ID NO: 109023 - DNA, 25 bp, Artificial
  Probe
cttgggcaaggatatggttttaata

SEQ ID NO: 109024 - DNA, 25 bp, Artificial
  Probe
tattttgtgaaagctactgaagtgc

SEQ ID NO: 109025 - DNA, 25 bp, Artificial
  Probe
aaagaaatgtaaattgtgttcacag

SEQ ID NO: 109026 - DNA, 25 bp, Artificial
  Probe
gaaagaaatgtaaattgtgttcaca

SEQ ID NO: 109027 - DNA, 25 bp, Artificial
  Probe
ttggctgtgtcttgagggaaatgta

SEQ ID NO: 109028 - DNA, 25 bp, Artificial
  Probe
cctccactgctgtgtaaatcagaac

SEQ ID NO: 109029 - DNA, 25 bp, Artificial
  Probe
ctgtgtaaatcagaactcaggctgc

SEQ ID NO: 109030 - DNA, 25 bp, Artificial
  Probe
gctgtgtaaatcagaactcaggctg

SEQ ID NO: 109031 - DNA, 25 bp, Artificial
  Probe
ctgctgtgtaaatcagaactcaggc

SEQ ID NO: 109032 - DNA, 25 bp, Artificial
  Probe
ttgtgaaagctactgaagtgccttg

SEQ ID NO: 109033 - DNA, 25 bp, Artificial
  Probe
cttcacgctcttaaaatgcaaaaca

SEQ ID NO: 109034 - DNA, 25 bp, Artificial
  Probe
tgctgtgtaaatcagaactcaggct

SEQ ID NO: 109035 - DNA, 25 bp, Artificial
  Probe
attttgtgaaagctactgaagtgcc

SEQ ID NO: 109036 - DNA, 25 bp, Artificial
  Probe
gggcaaggatatggttttaataaac

SEQ ID NO: 109037 - DNA, 25 bp, Artificial
  Probe
gcttcacgctcttaaaatgcaaaac

SEQ ID NO: 109038 - DNA, 25 bp, Artificial
  Probe
ttttgtgaaagctactgaagtgcct

SEQ ID NO: 109039 - DNA, 25 bp, Artificial
  Probe
ggcaaggatatggttttaataaact

SEQ ID NO: 109040 - DNA, 25 bp, Artificial
  Probe
taaatcagaactcaggctgccagac

SEQ ID NO: 109041 - DNA, 25 bp, Artificial
  Probe
gtaaatcagaactcaggctgccaga

SEQ ID NO: 109042 - DNA, 25 bp, Artificial
  Probe
gcctccactgctgtgtaaatcagaa

SEQ ID NO: 109043 - DNA, 25 bp, Artificial
  Probe
tgtaaatcagaactcaggctgccag

SEQ ID NO: 109044 - DNA, 25 bp, Artificial
  Probe
gcaaggatatggttttaataaactg

SEQ ID NO: 109045 - DNA, 25 bp, Artificial
  Probe
gtgtaaatcagaactcaggctgcca

SEQ ID NO: 109046 - DNA, 25 bp, Artificial
  Probe
ggttcctacttacacgacttcataa

SEQ ID NO: 109047 - DNA, 25 bp, Artificial
  Probe
tggttcctacttacacgacttcata

SEQ ID NO: 109048 - DNA, 25 bp, Artificial
  Probe
aagtcttacacgataccttcagatt

SEQ ID NO: 109049 - DNA, 25 bp, Artificial
  Probe
gttactaattcggacctgactgatg

SEQ ID NO: 109050 - DNA, 25 bp, Artificial
  Probe
atggttcctacttacacgacttcat

SEQ ID NO: 109051 - DNA, 25 bp, Artificial
  Probe
agatggttcctacttacacgacttc

SEQ ID NO: 109052 - DNA, 25 bp, Artificial
  Probe
gaagttactaattcggacctgactg

SEQ ID NO: 109053 - DNA, 25 bp, Artificial
  Probe
agttactaattcggacctgactgat

SEQ ID NO: 109054 - DNA, 25 bp, Artificial
  Probe
aagttactaattcggacctgactga

SEQ ID NO: 109055 - DNA, 25 bp, Artificial
  Probe
gatggttcctacttacacgacttca

SEQ ID NO: 109056 - DNA, 25 bp, Artificial
  Probe
cagatggttcctacttacacgactt

SEQ ID NO: 109057 - DNA, 25 bp, Artificial
  Probe
tcctacttacacgacttcataagaa

SEQ ID NO: 109058 - DNA, 25 bp, Artificial
  Probe
ttcctacttacacgacttcataaga

SEQ ID NO: 109059 - DNA, 25 bp, Artificial
  Probe
gttcctacttacacgacttcataag

SEQ ID NO: 109060 - DNA, 25 bp, Artificial
  Probe
acataagcaagtgagagtcagtgta

SEQ ID NO: 109061 - DNA, 25 bp, Artificial
  Probe
tacataagcaagtgagagtcagtgt

SEQ ID NO: 109062 - DNA, 25 bp, Artificial
  Probe
cataagcaagtgagagtcagtgtac

SEQ ID NO: 109063 - DNA, 25 bp, Artificial
  Probe
gtacataagcaagtgagagtcagtg

SEQ ID NO: 109064 - DNA, 25 bp, Artificial
  Probe
ggaagttactaattcggacctgact

SEQ ID NO: 109065 - DNA, 25 bp, Artificial
  Probe
ttactaattcggacctgactgatgc

SEQ ID NO: 109066 - DNA, 25 bp, Artificial
  Probe
ttacacgataccttcagatttcctc

SEQ ID NO: 109067 - DNA, 25 bp, Artificial
  Probe
cttacacgataccttcagatttcct

SEQ ID NO: 109068 - DNA, 25 bp, Artificial
  Probe
cacgataccttcagatttcctcaat

SEQ ID NO: 109069 - DNA, 25 bp, Artificial
  Probe
ataagcaagtgagagtcagtgtacc

SEQ ID NO: 109070 - DNA, 25 bp, Artificial
  Probe
acgataccttcagatttcctcaatt

SEQ ID NO: 109071 - DNA, 25 bp, Artificial
  Probe
tacacgataccttcagatttcctca

SEQ ID NO: 109072 - DNA, 25 bp, Artificial
  Probe
tcttacacgataccttcagatttcc

SEQ ID NO: 109073 - DNA, 25 bp, Artificial
  Probe
ggaaactgtcgtctttgaaatgtta

SEQ ID NO: 109074 - DNA, 25 bp, Artificial
  Probe
agtcttacacgataccttcagattt

SEQ ID NO: 109075 - DNA, 25 bp, Artificial
  Probe
cgtttctacagtaacctttccagat

SEQ ID NO: 109076 - DNA, 25 bp, Artificial
  Probe
gtttctacagtaacctttccagatg

SEQ ID NO: 109077 - DNA, 25 bp, Artificial
  Probe
gtcttacacgataccttcagatttc

SEQ ID NO: 109078 - DNA, 25 bp, Artificial
  Probe
gaaactgtcgtctttgaaatgttac

SEQ ID NO: 109079 - DNA, 25 bp, Artificial
  Probe
ttccagatggttcctacttacacga

SEQ ID NO: 109080 - DNA, 25 bp, Artificial
  Probe
ctttccagatggttcctacttacac

SEQ ID NO: 109081 - DNA, 25 bp, Artificial
  Probe
cggaagttactaattcggacctgac

SEQ ID NO: 109082 - DNA, 25 bp, Artificial
  Probe
tttctacagtaacctttccagatgg

SEQ ID NO: 109083 - DNA, 25 bp, Artificial
  Probe
aaggaaactgtcgtctttgaaatgt

SEQ ID NO: 109084 - DNA, 25 bp, Artificial
  Probe
acacgataccttcagatttcctcaa

SEQ ID NO: 109085 - DNA, 25 bp, Artificial
  Probe
aggaaactgtcgtctttgaaatgtt

SEQ ID NO: 109086 - DNA, 25 bp, Artificial
  Probe
cgataccttcagatttcctcaatta

SEQ ID NO: 109087 - DNA, 25 bp, Artificial
  Probe
aaactgtcgtctttgaaatgttaca

SEQ ID NO: 109088 - DNA, 25 bp, Artificial
  Probe
cctttccagatggttcctacttaca

SEQ ID NO: 109089 - DNA, 25 bp, Artificial
  Probe
gcagtatcacaggaagattaaagtg

SEQ ID NO: 109090 - DNA, 25 bp, Artificial
  Probe
tatcacaggaagattaaagtggcag

SEQ ID NO: 109091 - DNA, 25 bp, Artificial
  Probe
tagcagcattgatcgttcattgtaa

SEQ ID NO: 109092 - DNA, 25 bp, Artificial
  Probe
ctagcagcattgatcgttcattgta

SEQ ID NO: 109093 - DNA, 25 bp, Artificial
  Probe
atctaacctagcagcattgatcgtt

SEQ ID NO: 109094 - DNA, 25 bp, Artificial
  Probe
taaataaagcattacccacagcaaa

SEQ ID NO: 109095 - DNA, 25 bp, Artificial
  Probe
ataaataaagcattacccacagcaa

SEQ ID NO: 109096 - DNA, 25 bp, Artificial
  Probe
ttaaagaagatttgcctcagtgact

SEQ ID NO: 109097 - DNA, 25 bp, Artificial
  Probe
gttaaagaagatttgcctcagtgac

SEQ ID NO: 109098 - DNA, 25 bp, Artificial
  Probe
ggaaatacaagcaggttaaagaaga

SEQ ID NO: 109099 - DNA, 25 bp, Artificial
  Probe
aggaaatacaagcaggttaaagaag

SEQ ID NO: 109100 - DNA, 25 bp, Artificial
  Probe
taaagaagatttgcctcagtgactt

SEQ ID NO: 109101 - DNA, 25 bp, Artificial
  Probe
ggttaaagaagatttgcctcagtga

SEQ ID NO: 109102 - DNA, 25 bp, Artificial
  Probe
gtaggaaatacaagcaggttaaaga

SEQ ID NO: 109103 - DNA, 25 bp, Artificial
  Probe
taacctagcagcattgatcgttcat

SEQ ID NO: 109104 - DNA, 25 bp, Artificial
  Probe
catctaacctagcagcattgatcgt

SEQ ID NO: 109105 - DNA, 25 bp, Artificial
  Probe
tataaataaagcattacccacagca

SEQ ID NO: 109106 - DNA, 25 bp, Artificial
  Probe
tctaacctagcagcattgatcgttc

SEQ ID NO: 109107 - DNA, 25 bp, Artificial
  Probe
gtataaataaagcattacccacagc

SEQ ID NO: 109108 - DNA, 25 bp, Artificial
  Probe
cgtataaataaagcattacccacag

SEQ ID NO: 109109 - DNA, 25 bp, Artificial
  Probe
aagaagatttgcctcagtgactttc

SEQ ID NO: 109110 - DNA, 25 bp, Artificial
  Probe
taggaaatacaagcaggttaaagaa

SEQ ID NO: 109111 - DNA, 25 bp, Artificial
  Probe
agcattgatcgttcattgtaaagtg

SEQ ID NO: 109112 - DNA, 25 bp, Artificial
  Probe
cagcattgatcgttcattgtaaagt

SEQ ID NO: 109113 - DNA, 25 bp, Artificial
  Probe
cattgatcgttcattgtaaagtggg

SEQ ID NO: 109114 - DNA, 25 bp, Artificial
  Probe
gagtttctgttctgctttccttgac

SEQ ID NO: 109115 - DNA, 25 bp, Artificial
  Probe
ctaacctagcagcattgatcgttca

SEQ ID NO: 109116 - DNA, 25 bp, Artificial
  Probe
aacctagcagcattgatcgttcatt

SEQ ID NO: 109117 - DNA, 25 bp, Artificial
  Probe
gcattgatcgttcattgtaaagtgg

SEQ ID NO: 109118 - DNA, 25 bp, Artificial
  Probe
gaaatacaagcaggttaaagaagat

SEQ ID NO: 109119 - DNA, 25 bp, Artificial
  Probe
aggttaaagaagatttgcctcagtg

SEQ ID NO: 109120 - DNA, 25 bp, Artificial
  Probe
caggttaaagaagatttgcctcagt

SEQ ID NO: 109121 - DNA, 25 bp, Artificial
  Probe
gtctatacactggtgtgcctagaag

SEQ ID NO: 109122 - DNA, 25 bp, Artificial
  Probe
atacaagcaggttaaagaagatttg

SEQ ID NO: 109123 - DNA, 25 bp, Artificial
  Probe
ccttcttgcttcattctcctgtgtg

SEQ ID NO: 109124 - DNA, 25 bp, Artificial
  Probe
gcagcattgatcgttcattgtaaag

SEQ ID NO: 109125 - DNA, 25 bp, Artificial
  Probe
ggcatctaacctagcagcattgatc

SEQ ID NO: 109126 - DNA, 25 bp, Artificial
  Probe
agcagcattgatcgttcattgtaaa

SEQ ID NO: 109127 - DNA, 25 bp, Artificial
  Probe
agaagatttgcctcagtgactttca

SEQ ID NO: 109128 - DNA, 25 bp, Artificial
  Probe
aatacaagcaggttaaagaagattt

SEQ ID NO: 109129 - DNA, 25 bp, Artificial
  Probe
aaatacaagcaggttaaagaagatt

SEQ ID NO: 109130 - DNA, 25 bp, Artificial
  Probe
tgtctatacactggtgtgcctagaa

SEQ ID NO: 109131 - DNA, 25 bp, Artificial
  Probe
tgtgtaggaaatacaagcaggttaa

SEQ ID NO: 109132 - DNA, 25 bp, Artificial
  Probe
ctgaaattgtatgcaaagtgtctgt

SEQ ID NO: 109133 - DNA, 25 bp, Artificial
  Probe
gaaattgtatgcaaagtgtctgtgt

SEQ ID NO: 109134 - DNA, 25 bp, Artificial
  Probe
tgaaattgtatgcaaagtgtctgtg

SEQ ID NO: 109135 - DNA, 25 bp, Artificial
  Probe
ctctggaagagtgtgtgtctataca

SEQ ID NO: 109136 - DNA, 25 bp, Artificial
  Probe
cataattctcttcctcttgtcctcc

SEQ ID NO: 109137 - DNA, 25 bp, Artificial
  Probe
taattctcttcctcttgtcctccat

SEQ ID NO: 109138 - DNA, 25 bp, Artificial
  Probe
ataattctcttcctcttgtcctcca

SEQ ID NO: 109139 - DNA, 25 bp, Artificial
  Probe
tatgtgctctctcttagttcctcag

SEQ ID NO: 109140 - DNA, 25 bp, Artificial
  Probe
ctatgtgctctctcttagttcctca

SEQ ID NO: 109141 - DNA, 25 bp, Artificial
  Probe
gcataattctcttcctcttgtcctc

SEQ ID NO: 109142 - DNA, 25 bp, Artificial
  Probe
ttacctgctatgtcactgtctactc

SEQ ID NO: 109143 - DNA, 25 bp, Artificial
  Probe
tgctctctcttagttcctcagatac

SEQ ID NO: 109144 - DNA, 25 bp, Artificial
  Probe
gtgctctctcttagttcctcagata

SEQ ID NO: 109145 - DNA, 25 bp, Artificial
  Probe
aattctcttcctcttgtcctccatt

SEQ ID NO: 109146 - DNA, 25 bp, Artificial
  Probe
gttacctgctatgtcactgtctact

SEQ ID NO: 109147 - DNA, 25 bp, Artificial
  Probe
ctgttacctgctatgtcactgtcta

SEQ ID NO: 109148 - DNA, 25 bp, Artificial
  Probe
cctatgtgctctctcttagttcctc

SEQ ID NO: 109149 - DNA, 25 bp, Artificial
  Probe
gctctctcttagttcctcagatacc

SEQ ID NO: 109150 - DNA, 25 bp, Artificial
  Probe
tgttacctgctatgtcactgtctac

SEQ ID NO: 109151 - DNA, 25 bp, Artificial
  Probe
atctgttacctgctatgtcactgtc

SEQ ID NO: 109152 - DNA, 25 bp, Artificial
  Probe
ggcataattctcttcctcttgtcct

SEQ ID NO: 109153 - DNA, 25 bp, Artificial
  Probe
catctgttacctgctatgtcactgt

SEQ ID NO: 109154 - DNA, 25 bp, Artificial
  Probe
caggcataattctcttcctcttgtc

SEQ ID NO: 109155 - DNA, 25 bp, Artificial
  Probe
tgtgctctctcttagttcctcagat

SEQ ID NO: 109156 - DNA, 25 bp, Artificial
  Probe
atgtgctctctcttagttcctcaga

SEQ ID NO: 109157 - DNA, 25 bp, Artificial
  Probe
tacctgctatgtcactgtctactcc

SEQ ID NO: 109158 - DNA, 25 bp, Artificial
  Probe
ctcttcctcttgtcctccatttaat

SEQ ID NO: 109159 - DNA, 25 bp, Artificial
  Probe
tctgttacctgctatgtcactgtct

SEQ ID NO: 109160 - DNA, 25 bp, Artificial
  Probe
ttctcttcctcttgtcctccattta

SEQ ID NO: 109161 - DNA, 25 bp, Artificial
  Probe
aatcctcctcttctccttcttctgg

SEQ ID NO: 109162 - DNA, 25 bp, Artificial
  Probe
tgtcctccatttaatttgttcaacc

SEQ ID NO: 109163 - DNA, 25 bp, Artificial
  Probe
tcctcttgtcctccatttaatttgt

SEQ ID NO: 109164 - DNA, 25 bp, Artificial
  Probe
gtcctccatttaatttgttcaacct

SEQ ID NO: 109165 - DNA, 25 bp, Artificial
  Probe
aagtcaatgagaccagtgttgtgta

SEQ ID NO: 109166 - DNA, 25 bp, Artificial
  Probe
gagccaatttctacaaacaccataa

SEQ ID NO: 109167 - DNA, 25 bp, Artificial
  Probe
tcttcctcttgtcctccatttaatt

SEQ ID NO: 109168 - DNA, 25 bp, Artificial
  Probe
tcctccatttaatttgttcaacctc

SEQ ID NO: 109169 - DNA, 25 bp, Artificial
  Probe
tctcttcctcttgtcctccatttaa

SEQ ID NO: 109170 - DNA, 25 bp, Artificial
  Probe
cctccatttaatttgttcaacctct

SEQ ID NO: 109171 - DNA, 25 bp, Artificial
  Probe
cctcttgtcctccatttaatttgtt

SEQ ID NO: 109172 - DNA, 25 bp, Artificial
  Probe
aggcataattctcttcctcttgtcc

SEQ ID NO: 109173 - DNA, 25 bp, Artificial
  Probe
ttcctcttgtcctccatttaatttg

SEQ ID NO: 109174 - DNA, 25 bp, Artificial
  Probe
agccaatttctacaaacaccataat

SEQ ID NO: 109175 - DNA, 25 bp, Artificial
  Probe
attctcttcctcttgtcctccattt

SEQ ID NO: 109176 - DNA, 25 bp, Artificial
  Probe
aacctctttggacaatcatttcttg

SEQ ID NO: 109177 - DNA, 25 bp, Artificial
  Probe
caacctctttggacaatcatttctt

SEQ ID NO: 109178 - DNA, 25 bp, Artificial
  Probe
ttcaacctctttggacaatcatttc

SEQ ID NO: 109179 - DNA, 25 bp, Artificial
  Probe
gttcaacctctttggacaatcattt

SEQ ID NO: 109180 - DNA, 25 bp, Artificial
  Probe
cttcctcttgtcctccatttaattt

SEQ ID NO: 109181 - DNA, 25 bp, Artificial
  Probe
ggatatattcttgctgctacgacat

SEQ ID NO: 109182 - DNA, 25 bp, Artificial
  Probe
gatatattcttgctgctacgacatg

SEQ ID NO: 109183 - DNA, 25 bp, Artificial
  Probe
aaggatatattcttgctgctacgac

SEQ ID NO: 109184 - DNA, 25 bp, Artificial
  Probe
aggatatattcttgctgctacgaca

SEQ ID NO: 109185 - DNA, 25 bp, Artificial
  Probe
atatattcttgctgctacgacatgc

SEQ ID NO: 109186 - DNA, 25 bp, Artificial
  Probe
ctgtaatgcctgatctcttctggaa

SEQ ID NO: 109187 - DNA, 25 bp, Artificial
  Probe
gaccactgaatcctgtcttaattct

SEQ ID NO: 109188 - DNA, 25 bp, Artificial
  Probe
ttaagaaccacatcataggaggtga

SEQ ID NO: 109189 - DNA, 25 bp, Artificial
  Probe
accactgaatcctgtcttaattcta

SEQ ID NO: 109190 - DNA, 25 bp, Artificial
  Probe
ggaccactgaatcctgtcttaattc

SEQ ID NO: 109191 - DNA, 25 bp, Artificial
  Probe
gggcaaacaagaaataaaggtgatt

SEQ ID NO: 109192 - DNA, 25 bp, Artificial
  Probe
tatattcttgctgctacgacatgct

SEQ ID NO: 109193 - DNA, 25 bp, Artificial
  Probe
tatttactattctgggacttctggg

SEQ ID NO: 109194 - DNA, 25 bp, Artificial
  Probe
taagaaccacatcataggaggtgag

SEQ ID NO: 109195 - DNA, 25 bp, Artificial
  Probe
atttactattctgggacttctgggt

SEQ ID NO: 109196 - DNA, 25 bp, Artificial
  Probe
tggaccactgaatcctgtcttaatt

SEQ ID NO: 109197 - DNA, 25 bp, Artificial
  Probe
ttggaccactgaatcctgtcttaat

SEQ ID NO: 109198 - DNA, 25 bp, Artificial
  Probe
ctgtgaatggtatttcctgagagaa

SEQ ID NO: 109199 - DNA, 25 bp, Artificial
  Probe
gaaataaaggtgattcttggctgtg

SEQ ID NO: 109200 - DNA, 25 bp, Artificial
  Probe
ggcaaacaagaaataaaggtgattc

SEQ ID NO: 109201 - DNA, 25 bp, Artificial
  Probe
gatttaagaaccacatcataggagg

SEQ ID NO: 109202 - DNA, 25 bp, Artificial
  Probe
ataaaggtgattcttggctgtgaaa

SEQ ID NO: 109203 - DNA, 25 bp, Artificial
  Probe
aataaaggtgattcttggctgtgaa

SEQ ID NO: 109204 - DNA, 25 bp, Artificial
  Probe
aaataaaggtgattcttggctgtga

SEQ ID NO: 109205 - DNA, 25 bp, Artificial
  Probe
tgggcaaacaagaaataaaggtgat

SEQ ID NO: 109206 - DNA, 25 bp, Artificial
  Probe
ccactgaatcctgtcttaattctaa

SEQ ID NO: 109207 - DNA, 25 bp, Artificial
  Probe
ctctcaagatttaagaaccacatca

SEQ ID NO: 109208 - DNA, 25 bp, Artificial
  Probe
gtctctcaagatttaagaaccacat

SEQ ID NO: 109209 - DNA, 25 bp, Artificial
  Probe
tttactattctgggacttctgggtg

SEQ ID NO: 109210 - DNA, 25 bp, Artificial
  Probe
ctatttactattctgggacttctgg

SEQ ID NO: 109211 - DNA, 25 bp, Artificial
  Probe
tctctcaagatttaagaaccacatc

SEQ ID NO: 109212 - DNA, 25 bp, Artificial
  Probe
gctgggtctctcaagatttaagaac

SEQ ID NO: 109213 - DNA, 25 bp, Artificial
  Probe
tgctgggtctctcaagatttaagaa

SEQ ID NO: 109214 - DNA, 25 bp, Artificial
  Probe
atattcttgctgctacgacatgctt

SEQ ID NO: 109215 - DNA, 25 bp, Artificial
  Probe
agatttaagaaccacatcataggag

SEQ ID NO: 109216 - DNA, 25 bp, Artificial
  Probe
gtgggcaaacaagaaataaaggtga

SEQ ID NO: 109217 - DNA, 25 bp, Artificial
  Probe
tctcaagatttaagaaccacatcat

SEQ ID NO: 109218 - DNA, 25 bp, Artificial
  Probe
gtaatgcctgatctcttctggaaag

SEQ ID NO: 109219 - DNA, 25 bp, Artificial
  Probe
ctgctgggtctctcaagatttaaga

SEQ ID NO: 109220 - DNA, 25 bp, Artificial
  Probe
tgtaatgcctgatctcttctggaaa

SEQ ID NO: 109221 - DNA, 25 bp, Artificial
  Probe
atttctgagaactgccttcccatat

SEQ ID NO: 109222 - DNA, 25 bp, Artificial
  Probe
ccacatcataggaggtgagaaattc

SEQ ID NO: 109223 - DNA, 25 bp, Artificial
  Probe
agaaccacatcataggaggtgagaa

SEQ ID NO: 109224 - DNA, 25 bp, Artificial
  Probe
aagaaccacatcataggaggtgaga

SEQ ID NO: 109225 - DNA, 25 bp, Artificial
  Probe
tgagaactgccttcccatatttcat

SEQ ID NO: 109226 - DNA, 25 bp, Artificial
  Probe
caagacaccttctactaactgacag

SEQ ID NO: 109227 - DNA, 25 bp, Artificial
  Probe
tggatcatgtgtagagttggttatt

SEQ ID NO: 109228 - DNA, 25 bp, Artificial
  Probe
ttatggatcatgtgtagagttggtt

SEQ ID NO: 109229 - DNA, 25 bp, Artificial
  Probe
atggatcatgtgtagagttggttat

SEQ ID NO: 109230 - DNA, 25 bp, Artificial
  Probe
attatggatcatgtgtagagttggt

SEQ ID NO: 109231 - DNA, 25 bp, Artificial
  Probe
cattatggatcatgtgtagagttgg

SEQ ID NO: 109232 - DNA, 25 bp, Artificial
  Probe
tatggatcatgtgtagagttggtta

SEQ ID NO: 109233 - DNA, 25 bp, Artificial
  Probe
gcaagacaccttctactaactgaca

SEQ ID NO: 109234 - DNA, 25 bp, Artificial
  Probe
aagacaccttctactaactgacagg

SEQ ID NO: 109235 - DNA, 25 bp, Artificial
  Probe
ggcaagacaccttctactaactgac

SEQ ID NO: 109236 - DNA, 25 bp, Artificial
  Probe
cagttggtaacaggtagtttggata

SEQ ID NO: 109237 - DNA, 25 bp, Artificial
  Probe
agttggtaacaggtagtttggatat

SEQ ID NO: 109238 - DNA, 25 bp, Artificial
  Probe
gttggtaacaggtagtttggatatt

SEQ ID NO: 109239 - DNA, 25 bp, Artificial
  Probe
tggcaagacaccttctactaactga

SEQ ID NO: 109240 - DNA, 25 bp, Artificial
  Probe
tttgtacttgatttgatgtgtgact

SEQ ID NO: 109241 - DNA, 25 bp, Artificial
  Probe
ggatcatgtgtagagttggttattt

SEQ ID NO: 109242 - DNA, 25 bp, Artificial
  Probe
ttggtaacaggtagtttggatattt

SEQ ID NO: 109243 - DNA, 25 bp, Artificial
  Probe
ccttctactaactgacaggcaacag

SEQ ID NO: 109244 - DNA, 25 bp, Artificial
  Probe
caccttctactaactgacaggcaac

SEQ ID NO: 109245 - DNA, 25 bp, Artificial
  Probe
gtggcaagacaccttctactaactg

SEQ ID NO: 109246 - DNA, 25 bp, Artificial
  Probe
cagtggcaagacaccttctactaac

SEQ ID NO: 109247 - DNA, 25 bp, Artificial
  Probe
agtggcaagacaccttctactaact

SEQ ID NO: 109248 - DNA, 25 bp, Artificial
  Probe
tcagtggcaagacaccttctactaa

SEQ ID NO: 109249 - DNA, 25 bp, Artificial
  Probe
acattatggatcatgtgtagagttg

SEQ ID NO: 109250 - DNA, 25 bp, Artificial
  Probe
cttctactaactgacaggcaacagc

SEQ ID NO: 109251 - DNA, 25 bp, Artificial
  Probe
accttctactaactgacaggcaaca

SEQ ID NO: 109252 - DNA, 25 bp, Artificial
  Probe
acaccttctactaactgacaggcaa

SEQ ID NO: 109253 - DNA, 25 bp, Artificial
  Probe
agacaccttctactaactgacaggc

SEQ ID NO: 109254 - DNA, 25 bp, Artificial
  Probe
ctcagtggcaagacaccttctacta

SEQ ID NO: 109255 - DNA, 25 bp, Artificial
  Probe
aatctcagtggcaagacaccttcta

SEQ ID NO: 109256 - DNA, 25 bp, Artificial
  Probe
ttgaatccaatctcagtggcaagac

SEQ ID NO: 109257 - DNA, 25 bp, Artificial
  Probe
gtacattatggatcatgtgtagagt

SEQ ID NO: 109258 - DNA, 25 bp, Artificial
  Probe
gcagttggtaacaggtagtttggat

SEQ ID NO: 109259 - DNA, 25 bp, Artificial
  Probe
gacaccttctactaactgacaggca

SEQ ID NO: 109260 - DNA, 25 bp, Artificial
  Probe
ctttgtagacgttgaagtagaagcg

SEQ ID NO: 109261 - DNA, 25 bp, Artificial
  Probe
tacattatggatcatgtgtagagtt

SEQ ID NO: 109262 - DNA, 25 bp, Artificial
  Probe
atctcagtggcaagacaccttctac

SEQ ID NO: 109263 - DNA, 25 bp, Artificial
  Probe
gaatccaatctcagtggcaagacac

SEQ ID NO: 109264 - DNA, 25 bp, Artificial
  Probe
tttgaatccaatctcagtggcaaga

SEQ ID NO: 109265 - DNA, 25 bp, Artificial
  Probe
ttttgtacttgatttgatgtgtgac

SEQ ID NO: 109266 - DNA, 25 bp, Artificial
  Probe
tgaatccaatctcagtggcaagaca

SEQ ID NO: 109267 - DNA, 25 bp, Artificial
  Probe
tggtaacaggtagtttggatatttt

SEQ ID NO: 109268 - DNA, 25 bp, Artificial
  Probe
atcccttggtggtgactttgtagac

SEQ ID NO: 109269 - DNA, 25 bp, Artificial
  Probe
agtgtgaataaaaccaagatcatca

SEQ ID NO: 109270 - DNA, 25 bp, Artificial
  Probe
ttgatcccttggtggtgactttgta

SEQ ID NO: 109271 - DNA, 25 bp, Artificial
  Probe
aagtgttctgtgttatcctctgtaa

SEQ ID NO: 109272 - DNA, 25 bp, Artificial
  Probe
agagatccgtgatagagtaagtgat

SEQ ID NO: 109273 - DNA, 25 bp, Artificial
  Probe
tgtagagatccgtgatagagtaagt

SEQ ID NO: 109274 - DNA, 25 bp, Artificial
  Probe
tagagatccgtgatagagtaagtga

SEQ ID NO: 109275 - DNA, 25 bp, Artificial
  Probe
gtagagatccgtgatagagtaagtg

SEQ ID NO: 109276 - DNA, 25 bp, Artificial
  Probe
ctgtagagatccgtgatagagtaag

SEQ ID NO: 109277 - DNA, 25 bp, Artificial
  Probe
gagatccgtgatagagtaagtgata

SEQ ID NO: 109278 - DNA, 25 bp, Artificial
  Probe
actgtagagatccgtgatagagtaa

SEQ ID NO: 109279 - DNA, 25 bp, Artificial
  Probe
gactgtagagatccgtgatagagta

SEQ ID NO: 109280 - DNA, 25 bp, Artificial
  Probe
agatccgtgatagagtaagtgataa

SEQ ID NO: 109281 - DNA, 25 bp, Artificial
  Probe
gttggtatggtagtcctataacatt

SEQ ID NO: 109282 - DNA, 25 bp, Artificial
  Probe
aatgttggtatggtagtcctataac

SEQ ID NO: 109283 - DNA, 25 bp, Artificial
  Probe
agaatattaggtgaatgctcaggaa

SEQ ID NO: 109284 - DNA, 25 bp, Artificial
  Probe
gagaatattaggtgaatgctcagga

SEQ ID NO: 109285 - DNA, 25 bp, Artificial
  Probe
tattgtcagacattgtagtgttgtg

SEQ ID NO: 109286 - DNA, 25 bp, Artificial
  Probe
ggagaatattaggtgaatgctcagg

SEQ ID NO: 109287 - DNA, 25 bp, Artificial
  Probe
gtcagacattgtagtgttgtggtac

SEQ ID NO: 109288 - DNA, 25 bp, Artificial
  Probe
ggcaatggaaatcaagagaaactaa

SEQ ID NO: 109289 - DNA, 25 bp, Artificial
  Probe
agtgttctgtgttatcctctgtaaa

SEQ ID NO: 109290 - DNA, 25 bp, Artificial
  Probe
aaagtgttctgtgttatcctctgta

SEQ ID NO: 109291 - DNA, 25 bp, Artificial
  Probe
tgatacacacagcaaatgacaaatg

SEQ ID NO: 109292 - DNA, 25 bp, Artificial
  Probe
tggcaatggaaatcaagagaaacta

SEQ ID NO: 109293 - DNA, 25 bp, Artificial
  Probe
tagtggcaatggaaatcaagagaaa

SEQ ID NO: 109294 - DNA, 25 bp, Artificial
  Probe
ttattgtcagacattgtagtgttgt

SEQ ID NO: 109295 - DNA, 25 bp, Artificial
  Probe
gtattagagaagatgacacaaaggg

SEQ ID NO: 109296 - DNA, 25 bp, Artificial
  Probe
ctcttattgtcagacattgtagtgt

SEQ ID NO: 109297 - DNA, 25 bp, Artificial
  Probe
gtgttctgtgttatcctctgtaaac

SEQ ID NO: 109298 - DNA, 25 bp, Artificial
  Probe
attgtcagacattgtagtgttgtgg

SEQ ID NO: 109299 - DNA, 25 bp, Artificial
  Probe
tctcttattgtcagacattgtagtg

SEQ ID NO: 109300 - DNA, 25 bp, Artificial
  Probe
cgtgatagagtaagtgataaagacc

SEQ ID NO: 109301 - DNA, 25 bp, Artificial
  Probe
ccgtgatagagtaagtgataaagac

SEQ ID NO: 109302 - DNA, 25 bp, Artificial
  Probe
tccgtgatagagtaagtgataaaga

SEQ ID NO: 109303 - DNA, 25 bp, Artificial
  Probe
gcaaatgacaaatgttggtatggta

SEQ ID NO: 109304 - DNA, 25 bp, Artificial
  Probe
ggtgaatgctcaggaaagtctaata

SEQ ID NO: 109305 - DNA, 25 bp, Artificial
  Probe
tattaggtgaatgctcaggaaagtc

SEQ ID NO: 109306 - DNA, 25 bp, Artificial
  Probe
atattaggtgaatgctcaggaaagt

SEQ ID NO: 109307 - DNA, 25 bp, Artificial
  Probe
acaaatgttggtatggtagtcctat

SEQ ID NO: 109308 - DNA, 25 bp, Artificial
  Probe
tgtcagacattgtagtgttgtggta

SEQ ID NO: 109309 - DNA, 25 bp, Artificial
  Probe
cttattgtcagacattgtagtgttg

SEQ ID NO: 109310 - DNA, 25 bp, Artificial
  Probe
tcttattgtcagacattgtagtgtt

SEQ ID NO: 109311 - DNA, 25 bp, Artificial
  Probe
ctagtggcaatggaaatcaagagaa

SEQ ID NO: 109312 - DNA, 25 bp, Artificial
  Probe
aaggactgtagagatccgtgataga

SEQ ID NO: 109313 - DNA, 25 bp, Artificial
  Probe
gtgaatgctcaggaaagtctaatag

SEQ ID NO: 109314 - DNA, 25 bp, Artificial
  Probe
gcaatggaaatcaagagaaactaaa

SEQ ID NO: 109315 - DNA, 25 bp, Artificial
  Probe
tggtagtcctataacattatcatgg

SEQ ID NO: 109316 - DNA, 25 bp, Artificial
  Probe
aatactcagtgctgtcgttggaatt

SEQ ID NO: 109317 - DNA, 25 bp, Artificial
  Probe
ctcataaggaaatactcagtgctgt

SEQ ID NO: 109318 - DNA, 25 bp, Artificial
  Probe
tcataaggaaatactcagtgctgtc

SEQ ID NO: 109319 - DNA, 25 bp, Artificial
  Probe
gctctccaggacagtaaattatttg

SEQ ID NO: 109320 - DNA, 25 bp, Artificial
  Probe
ataaattgtgtatgaaactggttgc

SEQ ID NO: 109321 - DNA, 25 bp, Artificial
  Probe
tcagtgctgtcgttggaatttattt

SEQ ID NO: 109322 - DNA, 25 bp, Artificial
  Probe
cataaggaaatactcagtgctgtcg

SEQ ID NO: 109323 - DNA, 25 bp, Artificial
  Probe
gctcataaggaaatactcagtgctg

SEQ ID NO: 109324 - DNA, 25 bp, Artificial
  Probe
tgctcataaggaaatactcagtgct

SEQ ID NO: 109325 - DNA, 25 bp, Artificial
  Probe
ctcagtgctgtcgttggaatttatt

SEQ ID NO: 109326 - DNA, 25 bp, Artificial
  Probe
ataaggaaatactcagtgctgtcgt

SEQ ID NO: 109327 - DNA, 25 bp, Artificial
  Probe
taaggaaatactcagtgctgtcgtt

SEQ ID NO: 109328 - DNA, 25 bp, Artificial
  Probe
ccactgctcataaggaaatactcag

SEQ ID NO: 109329 - DNA, 25 bp, Artificial
  Probe
tactcagtgctgtcgttggaattta

SEQ ID NO: 109330 - DNA, 25 bp, Artificial
  Probe
agctctccaggacagtaaattattt

SEQ ID NO: 109331 - DNA, 25 bp, Artificial
  Probe
cagctctccaggacagtaaattatt

SEQ ID NO: 109332 - DNA, 25 bp, Artificial
  Probe
ctctccaggacagtaaattatttgt

SEQ ID NO: 109333 - DNA, 25 bp, Artificial
  Probe
ctgctcataaggaaatactcagtgc

SEQ ID NO: 109334 - DNA, 25 bp, Artificial
  Probe
gccactgctcataaggaaatactca

SEQ ID NO: 109335 - DNA, 25 bp, Artificial
  Probe
tcagctctccaggacagtaaattat

SEQ ID NO: 109336 - DNA, 25 bp, Artificial
  Probe
cttgaaggagtttctgtttgtgtcg

SEQ ID NO: 109337 - DNA, 25 bp, Artificial
  Probe
acccaataaattgtgtatgaaactg

SEQ ID NO: 109338 - DNA, 25 bp, Artificial
  Probe
tccaggacagtaaattatttgttct

SEQ ID NO: 109339 - DNA, 25 bp, Artificial
  Probe
tctccaggacagtaaattatttgtt

SEQ ID NO: 109340 - DNA, 25 bp, Artificial
  Probe
taaattgtgtatgaaactggttgca

SEQ ID NO: 109341 - DNA, 25 bp, Artificial
  Probe
tttctgtttgtgtcggctatagttt

SEQ ID NO: 109342 - DNA, 25 bp, Artificial
  Probe
ggagtttctgtttgtgtcggctata

SEQ ID NO: 109343 - DNA, 25 bp, Artificial
  Probe
ctcagctctccaggacagtaaatta

SEQ ID NO: 109344 - DNA, 25 bp, Artificial
  Probe
actcagtgctgtcgttggaatttat

SEQ ID NO: 109345 - DNA, 25 bp, Artificial
  Probe
atactcagtgctgtcgttggaattt

SEQ ID NO: 109346 - DNA, 25 bp, Artificial
  Probe
aaatactcagtgctgtcgttggaat

SEQ ID NO: 109347 - DNA, 25 bp, Artificial
  Probe
gcttgaaggagtttctgtttgtgtc

SEQ ID NO: 109348 - DNA, 25 bp, Artificial
  Probe
ctccaggacagtaaattatttgttc

SEQ ID NO: 109349 - DNA, 25 bp, Artificial
  Probe
cccaataaattgtgtatgaaactgg

SEQ ID NO: 109350 - DNA, 25 bp, Artificial
  Probe
atatcttgaaagttcctgaagtcag

SEQ ID NO: 109351 - DNA, 25 bp, Artificial
  Probe
ttctgtttgtgtcggctatagtttg

SEQ ID NO: 109352 - DNA, 25 bp, Artificial
  Probe
gtttctgtttgtgtcggctatagtt

SEQ ID NO: 109353 - DNA, 25 bp, Artificial
  Probe
aacccaataaattgtgtatgaaact

SEQ ID NO: 109354 - DNA, 25 bp, Artificial
  Probe
gagtttctgtttgtgtcggctatag

SEQ ID NO: 109355 - DNA, 25 bp, Artificial
  Probe
gaaatactcagtgctgtcgttggaa

SEQ ID NO: 109356 - DNA, 25 bp, Artificial
  Probe
aaggaaatactcagtgctgtcgttg

SEQ ID NO: 109357 - DNA, 25 bp, Artificial
  Probe
ccaataaattgtgtatgaaactggt

SEQ ID NO: 109358 - DNA, 25 bp, Artificial
  Probe
agtttctgtttgtgtcggctatagt

SEQ ID NO: 109359 - DNA, 25 bp, Artificial
  Probe
gatatcttgaaagttcctgaagtca

SEQ ID NO: 109360 - DNA, 25 bp, Artificial
  Probe
aataaattgtgtatgaaactggttg

SEQ ID NO: 109361 - DNA, 25 bp, Artificial
  Probe
tctgttagtcacctgtaagtcaatc

SEQ ID NO: 109362 - DNA, 25 bp, Artificial
  Probe
gtctgttagtcacctgtaagtcaat

SEQ ID NO: 109363 - DNA, 25 bp, Artificial
  Probe
gaagtctgttagtcacctgtaagtc

SEQ ID NO: 109364 - DNA, 25 bp, Artificial
  Probe
ctgttagtcacctgtaagtcaatcc

SEQ ID NO: 109365 - DNA, 25 bp, Artificial
  Probe
agtctgttagtcacctgtaagtcaa

SEQ ID NO: 109366 - DNA, 25 bp, Artificial
  Probe
aagtctgttagtcacctgtaagtca

SEQ ID NO: 109367 - DNA, 25 bp, Artificial
  Probe
tgttagtcacctgtaagtcaatcca

SEQ ID NO: 109368 - DNA, 25 bp, Artificial
  Probe
ttggaactcacagcattatctacct

SEQ ID NO: 109369 - DNA, 25 bp, Artificial
  Probe
ctgaagtctgttagtcacctgtaag

SEQ ID NO: 109370 - DNA, 25 bp, Artificial
  Probe
tctgaagtctgttagtcacctgtaa

SEQ ID NO: 109371 - DNA, 25 bp, Artificial
  Probe
ttctgaagtctgttagtcacctgta

SEQ ID NO: 109372 - DNA, 25 bp, Artificial
  Probe
tgaagtctgttagtcacctgtaagt

SEQ ID NO: 109373 - DNA, 25 bp, Artificial
  Probe
ctgtaagtcaatccagtgatgttca

SEQ ID NO: 109374 - DNA, 25 bp, Artificial
  Probe
gttagtcacctgtaagtcaatccag

SEQ ID NO: 109375 - DNA, 25 bp, Artificial
  Probe
ttagtcacctgtaagtcaatccagt

SEQ ID NO: 109376 - DNA, 25 bp, Artificial
  Probe
cctgtaagtcaatccagtgatgttc

SEQ ID NO: 109377 - DNA, 25 bp, Artificial
  Probe
acctgtaagtcaatccagtgatgtt

SEQ ID NO: 109378 - DNA, 25 bp, Artificial
  Probe
tagtcacctgtaagtcaatccagtg

SEQ ID NO: 109379 - DNA, 25 bp, Artificial
  Probe
cttctgaagtctgttagtcacctgt

SEQ ID NO: 109380 - DNA, 25 bp, Artificial
  Probe
tttggaactcacagcattatctacc

SEQ ID NO: 109381 - DNA, 25 bp, Artificial
  Probe
gaacaaatgaactcacagaaaggac

SEQ ID NO: 109382 - DNA, 25 bp, Artificial
  Probe
tggaactcacagcattatctacctg

SEQ ID NO: 109383 - DNA, 25 bp, Artificial
  Probe
aaatgaactcacagaaaggacacaa

SEQ ID NO: 109384 - DNA, 25 bp, Artificial
  Probe
aacaaatgaactcacagaaaggaca

SEQ ID NO: 109385 - DNA, 25 bp, Artificial
  Probe
aatgaactcacagaaaggacacaag

SEQ ID NO: 109386 - DNA, 25 bp, Artificial
  Probe
ggaacaaatgaactcacagaaagga

SEQ ID NO: 109387 - DNA, 25 bp, Artificial
  Probe
agagaaagtaatatgtgtgactggt

SEQ ID NO: 109388 - DNA, 25 bp, Artificial
  Probe
caaatgaactcacagaaaggacaca

SEQ ID NO: 109389 - DNA, 25 bp, Artificial
  Probe
acaaatgaactcacagaaaggacac

SEQ ID NO: 109390 - DNA, 25 bp, Artificial
  Probe
aattgaggagccattgtcattattt

SEQ ID NO: 109391 - DNA, 25 bp, Artificial
  Probe
cacctgtaagtcaatccagtgatgt

SEQ ID NO: 109392 - DNA, 25 bp, Artificial
  Probe
ggaactcacagcattatctacctgg

SEQ ID NO: 109393 - DNA, 25 bp, Artificial
  Probe
gaactcacagaaaggacacaagtag

SEQ ID NO: 109394 - DNA, 25 bp, Artificial
  Probe
ccgaggtactgagggataattctag

SEQ ID NO: 109395 - DNA, 25 bp, Artificial
  Probe
aagagaaagtaatatgtgtgactgg

SEQ ID NO: 109396 - DNA, 25 bp, Artificial
  Probe
gggaacaaatgaactcacagaaagg

SEQ ID NO: 109397 - DNA, 25 bp, Artificial
  Probe
tgaactcacagaaaggacacaagta

SEQ ID NO: 109398 - DNA, 25 bp, Artificial
  Probe
atgaactcacagaaaggacacaagt

SEQ ID NO: 109399 - DNA, 25 bp, Artificial
  Probe
aactcacagaaaggacacaagtagg

SEQ ID NO: 109400 - DNA, 25 bp, Artificial
  Probe
gaagtgagaggctgtgtaggaagag

SEQ ID NO: 109401 - DNA, 25 bp, Artificial
  Probe
actccattaggctgtgaagtgagag

SEQ ID NO: 109402 - DNA, 25 bp, Artificial
  Probe
tgtgtaggaagagaaagacagatcc

SEQ ID NO: 109403 - DNA, 25 bp, Artificial
  Probe
agaaagagaaagtaatatgtgtgac

SEQ ID NO: 109404 - DNA, 25 bp, Artificial
  Probe
gagaggctgtgtaggaagagaaaga

SEQ ID NO: 109405 - DNA, 25 bp, Artificial
  Probe
ttcacttctgaagtctgttagtcac

SEQ ID NO: 109406 - DNA, 25 bp, Artificial
  Probe
tcctgataatagtgaactggcatag

SEQ ID NO: 109407 - DNA, 25 bp, Artificial
  Probe
ctcctgataatagtgaactggcata

SEQ ID NO: 109408 - DNA, 25 bp, Artificial
  Probe
cttcctgctcctgataatagtgaac

SEQ ID NO: 109409 - DNA, 25 bp, Artificial
  Probe
cctgataatagtgaactggcatagc

SEQ ID NO: 109410 - DNA, 25 bp, Artificial
  Probe
ttcctgctcctgataatagtgaact

SEQ ID NO: 109411 - DNA, 25 bp, Artificial
  Probe
tcctgctcctgataatagtgaactg

SEQ ID NO: 109412 - DNA, 25 bp, Artificial
  Probe
ccttcctgctcctgataatagtgaa

SEQ ID NO: 109413 - DNA, 25 bp, Artificial
  Probe
ctgataatagtgaactggcatagct

SEQ ID NO: 109414 - DNA, 25 bp, Artificial
  Probe
tgataatagtgaactggcatagctg

SEQ ID NO: 109415 - DNA, 25 bp, Artificial
  Probe
gctcctgataatagtgaactggcat

SEQ ID NO: 109416 - DNA, 25 bp, Artificial
  Probe
cctgctcctgataatagtgaactgg

SEQ ID NO: 109417 - DNA, 25 bp, Artificial
  Probe
ctgctcctgataatagtgaactggc

SEQ ID NO: 109418 - DNA, 25 bp, Artificial
  Probe
acattagccctaacacagtttatct

SEQ ID NO: 109419 - DNA, 25 bp, Artificial
  Probe
ccttacattagccctaacacagttt

SEQ ID NO: 109420 - DNA, 25 bp, Artificial
  Probe
acaacacttctgtgagatggtcatt

SEQ ID NO: 109421 - DNA, 25 bp, Artificial
  Probe
aacaacacttctgtgagatggtcat

SEQ ID NO: 109422 - DNA, 25 bp, Artificial
  Probe
gctttgagatatttctgccttctag

SEQ ID NO: 109423 - DNA, 25 bp, Artificial
  Probe
ccatctcagcacatacctttatcct

SEQ ID NO: 109424 - DNA, 25 bp, Artificial
  Probe
cttacattagccctaacacagttta

SEQ ID NO: 109425 - DNA, 25 bp, Artificial
  Probe
tacattagccctaacacagtttatc

SEQ ID NO: 109426 - DNA, 25 bp, Artificial
  Probe
acccatctcagcacatacctttatc

SEQ ID NO: 109427 - DNA, 25 bp, Artificial
  Probe
gacccatctcagcacatacctttat

SEQ ID NO: 109428 - DNA, 25 bp, Artificial
  Probe
cattagccctaacacagtttatctg

SEQ ID NO: 109429 - DNA, 25 bp, Artificial
  Probe
attagccctaacacagtttatctgc

SEQ ID NO: 109430 - DNA, 25 bp, Artificial
  Probe
catctcagcacatacctttatcctg

SEQ ID NO: 109431 - DNA, 25 bp, Artificial
  Probe
tcaacaacacttctgtgagatggtc

SEQ ID NO: 109432 - DNA, 25 bp, Artificial
  Probe
tattctggtgaatggcatgagtcaa

SEQ ID NO: 109433 - DNA, 25 bp, Artificial
  Probe
ttacattagccctaacacagtttat

SEQ ID NO: 109434 - DNA, 25 bp, Artificial
  Probe
aacacttctgtgagatggtcatttc

SEQ ID NO: 109435 - DNA, 25 bp, Artificial
  Probe
gcatgtgtttatgagctttgagata

SEQ ID NO: 109436 - DNA, 25 bp, Artificial
  Probe
caacaacacttctgtgagatggtca

SEQ ID NO: 109437 - DNA, 25 bp, Artificial
  Probe
agctttgagatatttctgccttcta

SEQ ID NO: 109438 - DNA, 25 bp, Artificial
  Probe
tatgagctttgagatatttctgcct

SEQ ID NO: 109439 - DNA, 25 bp, Artificial
  Probe
atgagctttgagatatttctgcctt

SEQ ID NO: 109440 - DNA, 25 bp, Artificial
  Probe
caacacttctgtgagatggtcattt

SEQ ID NO: 109441 - DNA, 25 bp, Artificial
  Probe
cccatctcagcacatacctttatcc

SEQ ID NO: 109442 - DNA, 25 bp, Artificial
  Probe
atttcactgttgagcatgtgtttat

SEQ ID NO: 109443 - DNA, 25 bp, Artificial
  Probe
ttatgagctttgagatatttctgcc

SEQ ID NO: 109444 - DNA, 25 bp, Artificial
  Probe
tttcactgttgagcatgtgtttatg

SEQ ID NO: 109445 - DNA, 25 bp, Artificial
  Probe
catttcactgttgagcatgtgttta

SEQ ID NO: 109446 - DNA, 25 bp, Artificial
  Probe
gagctttgagatatttctgccttct

SEQ ID NO: 109447 - DNA, 25 bp, Artificial
  Probe
atctcagcacatacctttatcctgg

SEQ ID NO: 109448 - DNA, 25 bp, Artificial
  Probe
tctgtattctggtgaatggcatgag

SEQ ID NO: 109449 - DNA, 25 bp, Artificial
  Probe
ctctgtattctggtgaatggcatga

SEQ ID NO: 109450 - DNA, 25 bp, Artificial
  Probe
tgagctttgagatatttctgccttc

SEQ ID NO: 109451 - DNA, 25 bp, Artificial
  Probe
gaactactaccttgctatggatgag

SEQ ID NO: 109452 - DNA, 25 bp, Artificial
  Probe
tatgacggaactactaccttgctat

SEQ ID NO: 109453 - DNA, 25 bp, Artificial
  Probe
ctatgacggaactactaccttgcta

SEQ ID NO: 109454 - DNA, 25 bp, Artificial
  Probe
ggaactactaccttgctatggatga

SEQ ID NO: 109455 - DNA, 25 bp, Artificial
  Probe
ttcctcgccatattgaatatcatct

SEQ ID NO: 109456 - DNA, 25 bp, Artificial
  Probe
atgaagagatgttaccaagtcaacg

SEQ ID NO: 109457 - DNA, 25 bp, Artificial
  Probe
atgacggaactactaccttgctatg

SEQ ID NO: 109458 - DNA, 25 bp, Artificial
  Probe
tatgaagagatgttaccaagtcaac

SEQ ID NO: 109459 - DNA, 25 bp, Artificial
  Probe
cctcgccatattgaatatcatctac

SEQ ID NO: 109460 - DNA, 25 bp, Artificial
  Probe
tcctcgccatattgaatatcatcta

SEQ ID NO: 109461 - DNA, 25 bp, Artificial
  Probe
tatacaagcagataatgacggcatg

SEQ ID NO: 109462 - DNA, 25 bp, Artificial
  Probe
tgaagagatgttaccaagtcaacga

SEQ ID NO: 109463 - DNA, 25 bp, Artificial
  Probe
ctcgccatattgaatatcatctaca

SEQ ID NO: 109464 - DNA, 25 bp, Artificial
  Probe
cggaactactaccttgctatggatg

SEQ ID NO: 109465 - DNA, 25 bp, Artificial
  Probe
aactactaccttgctatggatgagg

SEQ ID NO: 109466 - DNA, 25 bp, Artificial
  Probe
gaagagatgttaccaagtcaacgac

SEQ ID NO: 109467 - DNA, 25 bp, Artificial
  Probe
aagagattcctcgccatattgaata

SEQ ID NO: 109468 - DNA, 25 bp, Artificial
  Probe
gacacttctgaagcaatgttaggaa

SEQ ID NO: 109469 - DNA, 25 bp, Artificial
  Probe
agattcctcgccatattgaatatca

SEQ ID NO: 109470 - DNA, 25 bp, Artificial
  Probe
agagattcctcgccatattgaatat

SEQ ID NO: 109471 - DNA, 25 bp, Artificial
  Probe
gagattcctcgccatattgaatatc

SEQ ID NO: 109472 - DNA, 25 bp, Artificial
  Probe
atatgaagagatgttaccaagtcaa

SEQ ID NO: 109473 - DNA, 25 bp, Artificial
  Probe
acggaactactaccttgctatggat

SEQ ID NO: 109474 - DNA, 25 bp, Artificial
  Probe
gagatgttaccaagtcaacgacaag

SEQ ID NO: 109475 - DNA, 25 bp, Artificial
  Probe
tcgccatattgaatatcatctacat

SEQ ID NO: 109476 - DNA, 25 bp, Artificial
  Probe
attcctcgccatattgaatatcatc

SEQ ID NO: 109477 - DNA, 25 bp, Artificial
  Probe
gattcctcgccatattgaatatcat

SEQ ID NO: 109478 - DNA, 25 bp, Artificial
  Probe
agagatgttaccaagtcaacgacaa

SEQ ID NO: 109479 - DNA, 25 bp, Artificial
  Probe
aagagatgttaccaagtcaacgaca

SEQ ID NO: 109480 - DNA, 25 bp, Artificial
  Probe
ctgacacttctgaagcaatgttagg

SEQ ID NO: 109481 - DNA, 25 bp, Artificial
  Probe
attaacctcttctttctgtggcaaa

SEQ ID NO: 109482 - DNA, 25 bp, Artificial
  Probe
aattaacctcttctttctgtggcaa

SEQ ID NO: 109483 - DNA, 25 bp, Artificial
  Probe
aaattaacctcttctttctgtggca

SEQ ID NO: 109484 - DNA, 25 bp, Artificial
  Probe
taaattaacctcttctttctgtggc

SEQ ID NO: 109485 - DNA, 25 bp, Artificial
  Probe
tctgaagcaatgttaggaaagactt

SEQ ID NO: 109486 - DNA, 25 bp, Artificial
  Probe
ttctgaagcaatgttaggaaagact

SEQ ID NO: 109487 - DNA, 25 bp, Artificial
  Probe
ggcaggatttaatggtctcatagaa

SEQ ID NO: 109488 - DNA, 25 bp, Artificial
  Probe
caggatttaatggtctcatagaagc

SEQ ID NO: 109489 - DNA, 25 bp, Artificial
  Probe
gcaggatttaatggtctcatagaag

SEQ ID NO: 109490 - DNA, 25 bp, Artificial
  Probe
tgacacttctgaagcaatgttagga

SEQ ID NO: 109491 - DNA, 25 bp, Artificial
  Probe
taccaagtcaacgacaagccttatt

SEQ ID NO: 109492 - DNA, 25 bp, Artificial
  Probe
ttaccaagtcaacgacaagccttat

SEQ ID NO: 109493 - DNA, 25 bp, Artificial
  Probe
ctgaagcaatgttaggaaagacttt

SEQ ID NO: 109494 - DNA, 25 bp, Artificial
  Probe
gtatacaagcagataatgacggcat

SEQ ID NO: 109495 - DNA, 25 bp, Artificial
  Probe
gttgtatgttgctagagactttcgt

SEQ ID NO: 109496 - DNA, 25 bp, Artificial
  Probe
acttcttcatcttcttcttcacact

SEQ ID NO: 109497 - DNA, 25 bp, Artificial
  Probe
ttcttcatcttcttcttcacactcc

SEQ ID NO: 109498 - DNA, 25 bp, Artificial
  Probe
cttcttcatcttcttcttcacactc

SEQ ID NO: 109499 - DNA, 25 bp, Artificial
  Probe
cttcatcttcttcttcacactcctc

SEQ ID NO: 109500 - DNA, 25 bp, Artificial
  Probe
tcttcatcttcttcttcacactcct

SEQ ID NO: 109501 - DNA, 25 bp, Artificial
  Probe
tacttcttcatcttcttcttcacac

SEQ ID NO: 109502 - DNA, 25 bp, Artificial
  Probe
ctacttcttcatcttcttcttcaca

SEQ ID NO: 109503 - DNA, 25 bp, Artificial
  Probe
agttcagtggagtagagaagatcaa

SEQ ID NO: 109504 - DNA, 25 bp, Artificial
  Probe
aagttcagtggagtagagaagatca

SEQ ID NO: 109505 - DNA, 25 bp, Artificial
  Probe
tctacttcttcatcttcttcttcac

SEQ ID NO: 109506 - DNA, 25 bp, Artificial
  Probe
ttcatcttcttcttcacactcctcg

SEQ ID NO: 109507 - DNA, 25 bp, Artificial
  Probe
gctatctacttcttcatcttcttct

SEQ ID NO: 109508 - DNA, 25 bp, Artificial
  Probe
aactgagacaatggagaatgtactc

SEQ ID NO: 109509 - DNA, 25 bp, Artificial
  Probe
ggagctatctacttcttcatcttct

SEQ ID NO: 109510 - DNA, 25 bp, Artificial
  Probe
aattctactcggaatccaacatcaa

SEQ ID NO: 109511 - DNA, 25 bp, Artificial
  Probe
attctactcggaatccaacatcaac

SEQ ID NO: 109512 - DNA, 25 bp, Artificial
  Probe
atctacttcttcatcttcttcttca

SEQ ID NO: 109513 - DNA, 25 bp, Artificial
  Probe
ctactcggaatccaacatcaaccat

SEQ ID NO: 109514 - DNA, 25 bp, Artificial
  Probe
aactctgtacctacttcctgaacac

SEQ ID NO: 109515 - DNA, 25 bp, Artificial
  Probe
caactctgtacctacttcctgaaca

SEQ ID NO: 109516 - DNA, 25 bp, Artificial
  Probe
ttctactcggaatccaacatcaacc

SEQ ID NO: 109517 - DNA, 25 bp, Artificial
  Probe
catcttcttcttcacactcctcgtc

SEQ ID NO: 109518 - DNA, 25 bp, Artificial
  Probe
caaagttcagtggagtagagaagat

SEQ ID NO: 109519 - DNA, 25 bp, Artificial
  Probe
gaggaaactgagacaatggagaatg

SEQ ID NO: 109520 - DNA, 25 bp, Artificial
  Probe
agaggaaactgagacaatggagaat

SEQ ID NO: 109521 - DNA, 25 bp, Artificial
  Probe
tcatcttcttcttcacactcctcgt

SEQ ID NO: 109522 - DNA, 25 bp, Artificial
  Probe
gcaactctgtacctacttcctgaac

SEQ ID NO: 109523 - DNA, 25 bp, Artificial
  Probe
tacgaatgtgtttgtgtcctctttg

SEQ ID NO: 109524 - DNA, 25 bp, Artificial
  Probe
tattactgtcgcctggacttcctat

SEQ ID NO: 109525 - DNA, 25 bp, Artificial
  Probe
gttcagtggagtagagaagatcaaa

SEQ ID NO: 109526 - DNA, 25 bp, Artificial
  Probe
aaagttcagtggagtagagaagatc

SEQ ID NO: 109527 - DNA, 25 bp, Artificial
  Probe
agctatctacttcttcatcttcttc

SEQ ID NO: 109528 - DNA, 25 bp, Artificial
  Probe
gagctatctacttcttcatcttctt

SEQ ID NO: 109529 - DNA, 25 bp, Artificial
  Probe
gagaggaaactgagacaatggagaa

SEQ ID NO: 109530 - DNA, 25 bp, Artificial
  Probe
actctgtacctacttcctgaacaca

SEQ ID NO: 109531 - DNA, 25 bp, Artificial
  Probe
ggaaactgagacaatggagaatgta

SEQ ID NO: 109532 - DNA, 25 bp, Artificial
  Probe
tactcggaatccaacatcaaccatg

SEQ ID NO: 109533 - DNA, 25 bp, Artificial
  Probe
agaatgagtattactgtcgcctgga

SEQ ID NO: 109534 - DNA, 25 bp, Artificial
  Probe
tctactcggaatccaacatcaacca

SEQ ID NO: 109535 - DNA, 25 bp, Artificial
  Probe
aaactgagacaatggagaatgtact

SEQ ID NO: 109536 - DNA, 25 bp, Artificial
  Probe
gaaactgagacaatggagaatgtac

SEQ ID NO: 109537 - DNA, 25 bp, Artificial
  Probe
gtacgaatgtgtttgtgtcctcttt

SEQ ID NO: 109538 - DNA, 25 bp, Artificial
  Probe
gaatgagtattactgtcgcctggac

SEQ ID NO: 109539 - DNA, 25 bp, Artificial
  Probe
cagaatgagtattactgtcgcctgg

SEQ ID NO: 109540 - DNA, 25 bp, Artificial
  Probe
ctcggcagaatgagtattactgtcg

SEQ ID NO: 109541 - DNA, 25 bp, Artificial
  Probe
atcaactaaccacagactcaagatc

SEQ ID NO: 109542 - DNA, 25 bp, Artificial
  Probe
gatcaactaaccacagactcaagat

SEQ ID NO: 109543 - DNA, 25 bp, Artificial
  Probe
agatcaactaaccacagactcaaga

SEQ ID NO: 109544 - DNA, 25 bp, Artificial
  Probe
gagagagatcaactaaccacagact

SEQ ID NO: 109545 - DNA, 25 bp, Artificial
  Probe
gagatcaactaaccacagactcaag

SEQ ID NO: 109546 - DNA, 25 bp, Artificial
  Probe
agagatcaactaaccacagactcaa

SEQ ID NO: 109547 - DNA, 25 bp, Artificial
  Probe
agagagatcaactaaccacagactc

SEQ ID NO: 109548 - DNA, 25 bp, Artificial
  Probe
ggagagagatcaactaaccacagac

SEQ ID NO: 109549 - DNA, 25 bp, Artificial
  Probe
gagagatcaactaaccacagactca

SEQ ID NO: 109550 - DNA, 25 bp, Artificial
  Probe
gcctactgggttcatatcaattcat

SEQ ID NO: 109551 - DNA, 25 bp, Artificial
  Probe
ctgcctactgggttcatatcaattc

SEQ ID NO: 109552 - DNA, 25 bp, Artificial
  Probe
tgatcctttgagagtcctatgaaac

SEQ ID NO: 109553 - DNA, 25 bp, Artificial
  Probe
gtgatcctttgagagtcctatgaaa

SEQ ID NO: 109554 - DNA, 25 bp, Artificial
  Probe
cctactgggttcatatcaattcatt

SEQ ID NO: 109555 - DNA, 25 bp, Artificial
  Probe
gacagaaatgggtgaacaaatgact

SEQ ID NO: 109556 - DNA, 25 bp, Artificial
  Probe
tgtgatcctttgagagtcctatgaa

SEQ ID NO: 109557 - DNA, 25 bp, Artificial
  Probe
tgcctactgggttcatatcaattca

SEQ ID NO: 109558 - DNA, 25 bp, Artificial
  Probe
actgcctactgggttcatatcaatt

SEQ ID NO: 109559 - DNA, 25 bp, Artificial
  Probe
gatcctttgagagtcctatgaaact

SEQ ID NO: 109560 - DNA, 25 bp, Artificial
  Probe
gactgcctactgggttcatatcaat

SEQ ID NO: 109561 - DNA, 25 bp, Artificial
  Probe
gtgtgatcctttgagagtcctatga

SEQ ID NO: 109562 - DNA, 25 bp, Artificial
  Probe
aagtcatgggagagagatcaactaa

SEQ ID NO: 109563 - DNA, 25 bp, Artificial
  Probe
aaagtcatgggagagagatcaacta

SEQ ID NO: 109564 - DNA, 25 bp, Artificial
  Probe
ggacagaaatgggtgaacaaatgac

SEQ ID NO: 109565 - DNA, 25 bp, Artificial
  Probe
ctaattaccatgtagcttcattgct

SEQ ID NO: 109566 - DNA, 25 bp, Artificial
  Probe
aactaaccacagactcaagatctct

SEQ ID NO: 109567 - DNA, 25 bp, Artificial
  Probe
caactaaccacagactcaagatctc

SEQ ID NO: 109568 - DNA, 25 bp, Artificial
  Probe
agtcatgggagagagatcaactaac

SEQ ID NO: 109569 - DNA, 25 bp, Artificial
  Probe
tcaactaaccacagactcaagatct

SEQ ID NO: 109570 - DNA, 25 bp, Artificial
  Probe
taattaccatgtagcttcattgctt

SEQ ID NO: 109571 - DNA, 25 bp, Artificial
  Probe
gtcatgggagagagatcaactaacc

SEQ ID NO: 109572 - DNA, 25 bp, Artificial
  Probe
acagaaatgggtgaacaaatgactg

SEQ ID NO: 109573 - DNA, 25 bp, Artificial
  Probe
aaatgggtgaacaaatgactgccta

SEQ ID NO: 109574 - DNA, 25 bp, Artificial
  Probe
ggtgtgatcctttgagagtcctatg

SEQ ID NO: 109575 - DNA, 25 bp, Artificial
  Probe
gtgagcgacgaaacatttcttcttt

SEQ ID NO: 109576 - DNA, 25 bp, Artificial
  Probe
caaagtcatgggagagagatcaact

SEQ ID NO: 109577 - DNA, 25 bp, Artificial
  Probe
tggtgtgatcctttgagagtcctat

SEQ ID NO: 109578 - DNA, 25 bp, Artificial
  Probe
aattgtgagcgacgaaacatttctt

SEQ ID NO: 109579 - DNA, 25 bp, Artificial
  Probe
agactcaagatctctgcaattgtga

SEQ ID NO: 109580 - DNA, 25 bp, Artificial
  Probe
tttatagagcaagacaaaagtgagc

SEQ ID NO: 109581 - DNA, 25 bp, Artificial
  Probe
attgtgagcgacgaaacatttcttc

SEQ ID NO: 109582 - DNA, 25 bp, Artificial
  Probe
gggagagagatcaactaaccacaga

SEQ ID NO: 109583 - DNA, 25 bp, Artificial
  Probe
aatgggtgaacaaatgactgcctac

SEQ ID NO: 109584 - DNA, 25 bp, Artificial
  Probe
gggacagaaatgggtgaacaaatga

SEQ ID NO: 109585 - DNA, 25 bp, Artificial
  Probe
agggacagaaatgggtgaacaaatg

SEQ ID NO: 109586 - DNA, 25 bp, Artificial
  Probe
caattcctctgacagtgactatgac

SEQ ID NO: 109587 - DNA, 25 bp, Artificial
  Probe
gacaattcctctgacagtgactatg

SEQ ID NO: 109588 - DNA, 25 bp, Artificial
  Probe
acaattcctctgacagtgactatga

SEQ ID NO: 109589 - DNA, 25 bp, Artificial
  Probe
tgacaattcctctgacagtgactat

SEQ ID NO: 109590 - DNA, 25 bp, Artificial
  Probe
aattcctctgacagtgactatgacc

SEQ ID NO: 109591 - DNA, 25 bp, Artificial
  Probe
attcctctgacagtgactatgacct

SEQ ID NO: 109592 - DNA, 25 bp, Artificial
  Probe
ctgacaattcctctgacagtgacta

SEQ ID NO: 109593 - DNA, 25 bp, Artificial
  Probe
ccatgaacgaatgatgtgatacacc

SEQ ID NO: 109594 - DNA, 25 bp, Artificial
  Probe
gccatgaacgaatgatgtgatacac

SEQ ID NO: 109595 - DNA, 25 bp, Artificial
  Probe
ttcctctgacagtgactatgacctg

SEQ ID NO: 109596 - DNA, 25 bp, Artificial
  Probe
cacacaacctgacaattcctctgac

SEQ ID NO: 109597 - DNA, 25 bp, Artificial
  Probe
cttccacacaacctgacaattcctc

SEQ ID NO: 109598 - DNA, 25 bp, Artificial
  Probe
ctcttccacacaacctgacaattcc

SEQ ID NO: 109599 - DNA, 25 bp, Artificial
  Probe
ttgactttctccttggactcttgac

SEQ ID NO: 109600 - DNA, 25 bp, Artificial
  Probe
gttgactttctccttggactcttga

SEQ ID NO: 109601 - DNA, 25 bp, Artificial
  Probe
gacgccatgaacgaatgatgtgata

SEQ ID NO: 109602 - DNA, 25 bp, Artificial
  Probe
aacctgacaattcctctgacagtga

SEQ ID NO: 109603 - DNA, 25 bp, Artificial
  Probe
caacctgacaattcctctgacagtg

SEQ ID NO: 109604 - DNA, 25 bp, Artificial
  Probe
cacaacctgacaattcctctgacag

SEQ ID NO: 109605 - DNA, 25 bp, Artificial
  Probe
acacaacctgacaattcctctgaca

SEQ ID NO: 109606 - DNA, 25 bp, Artificial
  Probe
ttccacacaacctgacaattcctct

SEQ ID NO: 109607 - DNA, 25 bp, Artificial
  Probe
tcttccacacaacctgacaattcct

SEQ ID NO: 109608 - DNA, 25 bp, Artificial
  Probe
gaacgaatgatgtgatacacccaag

SEQ ID NO: 109609 - DNA, 25 bp, Artificial
  Probe
gaggaagcatttaccactctgagta

SEQ ID NO: 109610 - DNA, 25 bp, Artificial
  Probe
aggaagcatttaccactctgagtac

SEQ ID NO: 109611 - DNA, 25 bp, Artificial
  Probe
acgccatgaacgaatgatgtgatac

SEQ ID NO: 109612 - DNA, 25 bp, Artificial
  Probe
atgaacgaatgatgtgatacaccca

SEQ ID NO: 109613 - DNA, 25 bp, Artificial
  Probe
gctcttccacacaacctgacaattc

SEQ ID NO: 109614 - DNA, 25 bp, Artificial
  Probe
ctgaggaagcatttaccactctgag

SEQ ID NO: 109615 - DNA, 25 bp, Artificial
  Probe
acaacctgacaattcctctgacagt

SEQ ID NO: 109616 - DNA, 25 bp, Artificial
  Probe
aacgaatgatgtgatacacccaagt

SEQ ID NO: 109617 - DNA, 25 bp, Artificial
  Probe
tgaacgaatgatgtgatacacccaa

SEQ ID NO: 109618 - DNA, 25 bp, Artificial
  Probe
catgaacgaatgatgtgatacaccc

SEQ ID NO: 109619 - DNA, 25 bp, Artificial
  Probe
ggttgactttctccttggactcttg

SEQ ID NO: 109620 - DNA, 25 bp, Artificial
  Probe
cctgacaattcctctgacagtgact

SEQ ID NO: 109621 - DNA, 25 bp, Artificial
  Probe
cgccatgaacgaatgatgtgataca

SEQ ID NO: 109622 - DNA, 25 bp, Artificial
  Probe
acctgacaattcctctgacagtgac

SEQ ID NO: 109623 - DNA, 25 bp, Artificial
  Probe
ccacacaacctgacaattcctctga

SEQ ID NO: 109624 - DNA, 25 bp, Artificial
  Probe
tccacacaacctgacaattcctctg

SEQ ID NO: 109625 - DNA, 25 bp, Artificial
  Probe
acgaatgatgtgatacacccaagtg

SEQ ID NO: 109626 - DNA, 25 bp, Artificial
  Probe
aggttgactttctccttggactctt

SEQ ID NO: 109627 - DNA, 25 bp, Artificial
  Probe
ctcttgacgccatgaacgaatgatg

SEQ ID NO: 109628 - DNA, 25 bp, Artificial
  Probe
gaagcatttaccactctgagtactg

SEQ ID NO: 109629 - DNA, 25 bp, Artificial
  Probe
tgaggaagcatttaccactctgagt

SEQ ID NO: 109630 - DNA, 25 bp, Artificial
  Probe
tgactttctccttggactcttgacg

SEQ ID NO: 109631 - DNA, 25 bp, Artificial
  Probe
atcggagaggaggaggtaggataag

SEQ ID NO: 109632 - DNA, 25 bp, Artificial
  Probe
cgccaagaaagagacagagttatct

SEQ ID NO: 109633 - DNA, 25 bp, Artificial
  Probe
catcggagaggaggaggtaggataa

SEQ ID NO: 109634 - DNA, 25 bp, Artificial
  Probe
ctcttccagaactacactgccacta

SEQ ID NO: 109635 - DNA, 25 bp, Artificial
  Probe
ctccaagtgaggtctcattcatttg

SEQ ID NO: 109636 - DNA, 25 bp, Artificial
  Probe
tcttccagaactacactgccactac

SEQ ID NO: 109637 - DNA, 25 bp, Artificial
  Probe
ttcacacctccgttcacacatagtc

SEQ ID NO: 109638 - DNA, 25 bp, Artificial
  Probe
cttcacacctccgttcacacatagt

SEQ ID NO: 109639 - DNA, 25 bp, Artificial
  Probe
gaactacactgccactaccttcctc

SEQ ID NO: 109640 - DNA, 25 bp, Artificial
  Probe
taagtagaggccagagatcacagag

SEQ ID NO: 109641 - DNA, 25 bp, Artificial
  Probe
gtaagtagaggccagagatcacaga

SEQ ID NO: 109642 - DNA, 25 bp, Artificial
  Probe
tcatcggagaggaggaggtaggata

SEQ ID NO: 109643 - DNA, 25 bp, Artificial
  Probe
agctccaagtgaggtctcattcatt

SEQ ID NO: 109644 - DNA, 25 bp, Artificial
  Probe
agaactacactgccactaccttcct

SEQ ID NO: 109645 - DNA, 25 bp, Artificial
  Probe
caagtgaggtctcattcatttgcag

SEQ ID NO: 109646 - DNA, 25 bp, Artificial
  Probe
cagcctctcttccagaactacactg

SEQ ID NO: 109647 - DNA, 25 bp, Artificial
  Probe
gctccaagtgaggtctcattcattt

SEQ ID NO: 109648 - DNA, 25 bp, Artificial
  Probe
tccaagtgaggtctcattcatttgc

SEQ ID NO: 109649 - DNA, 25 bp, Artificial
  Probe
cagagttatctgtgacctccaagtc

SEQ ID NO: 109650 - DNA, 25 bp, Artificial
  Probe
cagaactacactgccactaccttcc

SEQ ID NO: 109651 - DNA, 25 bp, Artificial
  Probe
ccagaactacactgccactaccttc

SEQ ID NO: 109652 - DNA, 25 bp, Artificial
  Probe
cttccagaactacactgccactacc

SEQ ID NO: 109653 - DNA, 25 bp, Artificial
  Probe
ctctcttccagaactacactgccac

SEQ ID NO: 109654 - DNA, 25 bp, Artificial
  Probe
agttatctgtgacctccaagtcatc

SEQ ID NO: 109655 - DNA, 25 bp, Artificial
  Probe
gagttatctgtgacctccaagtcat

SEQ ID NO: 109656 - DNA, 25 bp, Artificial
  Probe
cagctccaagtgaggtctcattcat

SEQ ID NO: 109657 - DNA, 25 bp, Artificial
  Probe
ggtaagtagaggccagagatcacag

SEQ ID NO: 109658 - DNA, 25 bp, Artificial
  Probe
tccagaactacactgccactacctt

SEQ ID NO: 109659 - DNA, 25 bp, Artificial
  Probe
ttccagaactacactgccactacct

SEQ ID NO: 109660 - DNA, 25 bp, Artificial
  Probe
tctcttccagaactacactgccact

SEQ ID NO: 109661 - DNA, 25 bp, Artificial
  Probe
gccaagaaagagacagagttatctg

SEQ ID NO: 109662 - DNA, 25 bp, Artificial
  Probe
agagttatctgtgacctccaagtca

SEQ ID NO: 109663 - DNA, 25 bp, Artificial
  Probe
ccaagtgaggtctcattcatttgca

SEQ ID NO: 109664 - DNA, 25 bp, Artificial
  Probe
gttatctgtgacctccaagtcatcg

SEQ ID NO: 109665 - DNA, 25 bp, Artificial
  Probe
aagtgaggtctcattcatttgcagc

SEQ ID NO: 109666 - DNA, 25 bp, Artificial
  Probe
gtctcattcatttgcagctcctcac

SEQ ID NO: 109667 - DNA, 25 bp, Artificial
  Probe
gtgaggtctcattcatttgcagctc

SEQ ID NO: 109668 - DNA, 25 bp, Artificial
  Probe
gtactgggtgcaagatggatctctc

SEQ ID NO: 109669 - DNA, 25 bp, Artificial
  Probe
tggtaagtagaggccagagatcaca

SEQ ID NO: 109670 - DNA, 25 bp, Artificial
  Probe
ttatctgtgacctccaagtcatcgg

SEQ ID NO: 109671 - DNA, 25 bp, Artificial
  Probe
agtgaggtctcattcatttgcagct

SEQ ID NO: 109672 - DNA, 25 bp, Artificial
  Probe
gcgccaagaaagagacagagttatc

SEQ ID NO: 109673 - DNA, 25 bp, Artificial
  Probe
tctcattcatttgcagctcctcacc

SEQ ID NO: 109674 - DNA, 25 bp, Artificial
  Probe
ggtctcattcatttgcagctcctca

SEQ ID NO: 109675 - DNA, 25 bp, Artificial
  Probe
tatctgtgacctccaagtcatcgga

SEQ ID NO: 109676 - DNA, 25 bp, Artificial
  Probe
cttctacatcatcaacatcctggta

SEQ ID NO: 109677 - DNA, 25 bp, Artificial
  Probe
aatctgtcttcctgttgcttatctc

SEQ ID NO: 109678 - DNA, 25 bp, Artificial
  Probe
ctcttctacatcatcaacatcctgg

SEQ ID NO: 109679 - DNA, 25 bp, Artificial
  Probe
tcttctacatcatcaacatcctggt

SEQ ID NO: 109680 - DNA, 25 bp, Artificial
  Probe
gctcttctacatcatcaacatcctg

SEQ ID NO: 109681 - DNA, 25 bp, Artificial
  Probe
caatctgtcttcctgttgcttatct

SEQ ID NO: 109682 - DNA, 25 bp, Artificial
  Probe
ttctacatcatcaacatcctggtac

SEQ ID NO: 109683 - DNA, 25 bp, Artificial
  Probe
ccaatctgtcttcctgttgcttatc

SEQ ID NO: 109684 - DNA, 25 bp, Artificial
  Probe
atctgtcttcctgttgcttatctcc

SEQ ID NO: 109685 - DNA, 25 bp, Artificial
  Probe
cgctcttctacatcatcaacatcct

SEQ ID NO: 109686 - DNA, 25 bp, Artificial
  Probe
tgtcttcctgttgcttatctccaag

SEQ ID NO: 109687 - DNA, 25 bp, Artificial
  Probe
ctgtcttcctgttgcttatctccaa

SEQ ID NO: 109688 - DNA, 25 bp, Artificial
  Probe
tataccgccaaggagatcagactta

SEQ ID NO: 109689 - DNA, 25 bp, Artificial
  Probe
ccctcaaattcagttcactcaagta

SEQ ID NO: 109690 - DNA, 25 bp, Artificial
  Probe
cctcaaattcagttcactcaagtat

SEQ ID NO: 109691 - DNA, 25 bp, Artificial
  Probe
tctgtcttcctgttgcttatctcca

SEQ ID NO: 109692 - DNA, 25 bp, Artificial
  Probe
aattcagttcactcaagtataccgc

SEQ ID NO: 109693 - DNA, 25 bp, Artificial
  Probe
ccgctcttctacatcatcaacatcc

SEQ ID NO: 109694 - DNA, 25 bp, Artificial
  Probe
ctccctcaaattcagttcactcaag

SEQ ID NO: 109695 - DNA, 25 bp, Artificial
  Probe
aaataaaggagagagacacttgaaa

SEQ ID NO: 109696 - DNA, 25 bp, Artificial
  Probe
tccctcaaattcagttcactcaagt

SEQ ID NO: 109697 - DNA, 25 bp, Artificial
  Probe
cttcctgttgcttatctccaagagg

SEQ ID NO: 109698 - DNA, 25 bp, Artificial
  Probe
ctaaataaaggagagagacacttga

SEQ ID NO: 109699 - DNA, 25 bp, Artificial
  Probe
tctaaataaaggagagagacacttg

SEQ ID NO: 109700 - DNA, 25 bp, Artificial
  Probe
tcttcctgttgcttatctccaagag

SEQ ID NO: 109701 - DNA, 25 bp, Artificial
  Probe
tctgagaattgtccttgagcttgtg

SEQ ID NO: 109702 - DNA, 25 bp, Artificial
  Probe
gtctgagaattgtccttgagcttgt

SEQ ID NO: 109703 - DNA, 25 bp, Artificial
  Probe
gccgctcttctacatcatcaacatc

SEQ ID NO: 109704 - DNA, 25 bp, Artificial
  Probe
ataccgccaaggagatcagacttag

SEQ ID NO: 109705 - DNA, 25 bp, Artificial
  Probe
gtcttcctgttgcttatctccaaga

SEQ ID NO: 109706 - DNA, 25 bp, Artificial
  Probe
attcagttcactcaagtataccgcc

SEQ ID NO: 109707 - DNA, 25 bp, Artificial
  Probe
taaataaaggagagagacacttgaa

SEQ ID NO: 109708 - DNA, 25 bp, Artificial
  Probe
cttcatgatcaacctggtcttctac

SEQ ID NO: 109709 - DNA, 25 bp, Artificial
  Probe
aattgtccttgagcttgtgcctatc

SEQ ID NO: 109710 - DNA, 25 bp, Artificial
  Probe
gaattgtccttgagcttgtgcctat

SEQ ID NO: 109711 - DNA, 25 bp, Artificial
  Probe
cccaatctgtcttcctgttgcttat

SEQ ID NO: 109712 - DNA, 25 bp, Artificial
  Probe
aaattcagttcactcaagtataccg

SEQ ID NO: 109713 - DNA, 25 bp, Artificial
  Probe
ttctaaataaaggagagagacactt

SEQ ID NO: 109714 - DNA, 25 bp, Artificial
  Probe
tttctaaataaaggagagagacact

SEQ ID NO: 109715 - DNA, 25 bp, Artificial
  Probe
caagccgctcttctacatcatcaac

SEQ ID NO: 109716 - DNA, 25 bp, Artificial
  Probe
tgacggctcattccagatttcttac

SEQ ID NO: 109717 - DNA, 25 bp, Artificial
  Probe
ggtctgagaattgtccttgagcttg

SEQ ID NO: 109718 - DNA, 25 bp, Artificial
  Probe
ctcaaattcagttcactcaagtata

SEQ ID NO: 109719 - DNA, 25 bp, Artificial
  Probe
ccttcatgatcaacctggtcttcta

SEQ ID NO: 109720 - DNA, 25 bp, Artificial
  Probe
gctccctcaaattcagttcactcaa

SEQ ID NO: 109721 - DNA, 25 bp, Artificial
  Probe
attcctccagttatgagagattgtg

SEQ ID NO: 109722 - DNA, 25 bp, Artificial
  Probe
cattcctccagttatgagagattgt

SEQ ID NO: 109723 - DNA, 25 bp, Artificial
  Probe
acattcctccagttatgagagattg

SEQ ID NO: 109724 - DNA, 25 bp, Artificial
  Probe
tacattcctccagttatgagagatt

SEQ ID NO: 109725 - DNA, 25 bp, Artificial
  Probe
ttacattcctccagttatgagagat

SEQ ID NO: 109726 - DNA, 25 bp, Artificial
  Probe
attacattcctccagttatgagaga

SEQ ID NO: 109727 - DNA, 25 bp, Artificial
  Probe
ggtattacattcctccagttatgag

SEQ ID NO: 109728 - DNA, 25 bp, Artificial
  Probe
gcattatggtattacattcctccag

SEQ ID NO: 109729 - DNA, 25 bp, Artificial
  Probe
tggtattacattcctccagttatga

SEQ ID NO: 109730 - DNA, 25 bp, Artificial
  Probe
ttcctccagttatgagagattgtgc

SEQ ID NO: 109731 - DNA, 25 bp, Artificial
  Probe
gtattacattcctccagttatgaga

SEQ ID NO: 109732 - DNA, 25 bp, Artificial
  Probe
tattacattcctccagttatgagag

SEQ ID NO: 109733 - DNA, 25 bp, Artificial
  Probe
atggtattacattcctccagttatg

SEQ ID NO: 109734 - DNA, 25 bp, Artificial
  Probe
cattatggtattacattcctccagt

SEQ ID NO: 109735 - DNA, 25 bp, Artificial
  Probe
tgcattatggtattacattcctcca

SEQ ID NO: 109736 - DNA, 25 bp, Artificial
  Probe
attatggtattacattcctccagtt

SEQ ID NO: 109737 - DNA, 25 bp, Artificial
  Probe
gtgtgttgctcacttcatgtgtaac

SEQ ID NO: 109738 - DNA, 25 bp, Artificial
  Probe
aacaagatattgctgttcttcagtt

SEQ ID NO: 109739 - DNA, 25 bp, Artificial
  Probe
ttatggtattacattcctccagtta

SEQ ID NO: 109740 - DNA, 25 bp, Artificial
  Probe
atagtttctactggctactgctgga

SEQ ID NO: 109741 - DNA, 25 bp, Artificial
  Probe
catagtttctactggctactgctgg

SEQ ID NO: 109742 - DNA, 25 bp, Artificial
  Probe
tatggtattacattcctccagttat

SEQ ID NO: 109743 - DNA, 25 bp, Artificial
  Probe
cctccagttatgagagattgtgcag

SEQ ID NO: 109744 - DNA, 25 bp, Artificial
  Probe
acaagatattgctgttcttcagttt

SEQ ID NO: 109745 - DNA, 25 bp, Artificial
  Probe
ttgctcacttcatgtgtaacaggtg

SEQ ID NO: 109746 - DNA, 25 bp, Artificial
  Probe
gttgctcacttcatgtgtaacaggt

SEQ ID NO: 109747 - DNA, 25 bp, Artificial
  Probe
tcacatctcccaacattttaaccta

SEQ ID NO: 109748 - DNA, 25 bp, Artificial
  Probe
ctcacatctcccaacattttaacct

SEQ ID NO: 109749 - DNA, 25 bp, Artificial
  Probe
tcctccagttatgagagattgtgca

SEQ ID NO: 109750 - DNA, 25 bp, Artificial
  Probe
gtgaagaagacatgcattatggtat

SEQ ID NO: 109751 - DNA, 25 bp, Artificial
  Probe
acatctcccaacattttaacctagt

SEQ ID NO: 109752 - DNA, 25 bp, Artificial
  Probe
ggtgaagaagacatgcattatggta

SEQ ID NO: 109753 - DNA, 25 bp, Artificial
  Probe
cacatctcccaacattttaacctag

SEQ ID NO: 109754 - DNA, 25 bp, Artificial
  Probe
tagtttctactggctactgctggag

SEQ ID NO: 109755 - DNA, 25 bp, Artificial
  Probe
atgcattatggtattacattcctcc

SEQ ID NO: 109756 - DNA, 25 bp, Artificial
  Probe
ctccagttatgagagattgtgcagc

SEQ ID NO: 109757 - DNA, 25 bp, Artificial
  Probe
tgaagaagacatgcattatggtatt

SEQ ID NO: 109758 - DNA, 25 bp, Artificial
  Probe
gtgttgctcacttcatgtgtaacag

SEQ ID NO: 109759 - DNA, 25 bp, Artificial
  Probe
cctcacatctcccaacattttaacc

SEQ ID NO: 109760 - DNA, 25 bp, Artificial
  Probe
ccctcacatctcccaacattttaac

SEQ ID NO: 109761 - DNA, 25 bp, Artificial
  Probe
acatgcattatggtattacattcct

SEQ ID NO: 109762 - DNA, 25 bp, Artificial
  Probe
gacatgcattatggtattacattcc

SEQ ID NO: 109763 - DNA, 25 bp, Artificial
  Probe
agaagacatgcattatggtattaca

SEQ ID NO: 109764 - DNA, 25 bp, Artificial
  Probe
catctcccaacattttaacctagta

SEQ ID NO: 109765 - DNA, 25 bp, Artificial
  Probe
agatattgctgttcttcagttttgt

SEQ ID NO: 109766 - DNA, 25 bp, Artificial
  Probe
gttacgaagattaatgtgagtggtc

SEQ ID NO: 109767 - DNA, 25 bp, Artificial
  Probe
aggttacgaagattaatgtgagtgg

SEQ ID NO: 109768 - DNA, 25 bp, Artificial
  Probe
ggttacgaagattaatgtgagtggt

SEQ ID NO: 109769 - DNA, 25 bp, Artificial
  Probe
aaggttacgaagattaatgtgagtg

SEQ ID NO: 109770 - DNA, 25 bp, Artificial
  Probe
ttacgaagattaatgtgagtggtca

SEQ ID NO: 109771 - DNA, 25 bp, Artificial
  Probe
tacgaagattaatgtgagtggtcag

SEQ ID NO: 109772 - DNA, 25 bp, Artificial
  Probe
gaagattaatgtgagtggtcagtgg

SEQ ID NO: 109773 - DNA, 25 bp, Artificial
  Probe
cgaagattaatgtgagtggtcagtg

SEQ ID NO: 109774 - DNA, 25 bp, Artificial
  Probe
aggtgtcaaagcagtctagtttata

SEQ ID NO: 109775 - DNA, 25 bp, Artificial
  Probe
catttatgccagggttatccagaag

SEQ ID NO: 109776 - DNA, 25 bp, Artificial
  Probe
caggtgtcaaagcagtctagtttat

SEQ ID NO: 109777 - DNA, 25 bp, Artificial
  Probe
acgaagattaatgtgagtggtcagt

SEQ ID NO: 109778 - DNA, 25 bp, Artificial
  Probe
ggtgtcaaagcagtctagtttatat

SEQ ID NO: 109779 - DNA, 25 bp, Artificial
  Probe
ttcttacaggtgtcaaagcagtcta

SEQ ID NO: 109780 - DNA, 25 bp, Artificial
  Probe
gagtatagttccacactttgctgac

SEQ ID NO: 109781 - DNA, 25 bp, Artificial
  Probe
ctgagtatagttccacactttgctg

SEQ ID NO: 109782 - DNA, 25 bp, Artificial
  Probe
actttgctgacagatgagaacaatc

SEQ ID NO: 109783 - DNA, 25 bp, Artificial
  Probe
acaggtgtcaaagcagtctagttta

SEQ ID NO: 109784 - DNA, 25 bp, Artificial
  Probe
tacaggtgtcaaagcagtctagttt

SEQ ID NO: 109785 - DNA, 25 bp, Artificial
  Probe
ttacaggtgtcaaagcagtctagtt

SEQ ID NO: 109786 - DNA, 25 bp, Artificial
  Probe
tgagtatagttccacactttgctga

SEQ ID NO: 109787 - DNA, 25 bp, Artificial
  Probe
tatagttccacactttgctgacaga

SEQ ID NO: 109788 - DNA, 25 bp, Artificial
  Probe
gtatagttccacactttgctgacag

SEQ ID NO: 109789 - DNA, 25 bp, Artificial
  Probe
cactttgctgacagatgagaacaat

SEQ ID NO: 109790 - DNA, 25 bp, Artificial
  Probe
agtatagttccacactttgctgaca

SEQ ID NO: 109791 - DNA, 25 bp, Artificial
  Probe
tcttacaggtgtcaaagcagtctag

SEQ ID NO: 109792 - DNA, 25 bp, Artificial
  Probe
ccatttatgccagggttatccagaa

SEQ ID NO: 109793 - DNA, 25 bp, Artificial
  Probe
tttcttacaggtgtcaaagcagtct

SEQ ID NO: 109794 - DNA, 25 bp, Artificial
  Probe
aaaggttacgaagattaatgtgagt

SEQ ID NO: 109795 - DNA, 25 bp, Artificial
  Probe
cttacaggtgtcaaagcagtctagt

SEQ ID NO: 109796 - DNA, 25 bp, Artificial
  Probe
tatataagcatcctgttgcctgtga

SEQ ID NO: 109797 - DNA, 25 bp, Artificial
  Probe
gttatccagaagcgagtccctaatg

SEQ ID NO: 109798 - DNA, 25 bp, Artificial
  Probe
atagttccacactttgctgacagat

SEQ ID NO: 109799 - DNA, 25 bp, Artificial
  Probe
atttatgccagggttatccagaagc

SEQ ID NO: 109800 - DNA, 25 bp, Artificial
  Probe
agtatcggctctgattggaggtaac

SEQ ID NO: 109801 - DNA, 25 bp, Artificial
  Probe
atataagcatcctgttgcctgtgat

SEQ ID NO: 109802 - DNA, 25 bp, Artificial
  Probe
cagtatcggctctgattggaggtaa

SEQ ID NO: 109803 - DNA, 25 bp, Artificial
  Probe
acactttgctgacagatgagaacaa

SEQ ID NO: 109804 - DNA, 25 bp, Artificial
  Probe
gctggtaaaggttacgaagattaat

SEQ ID NO: 109805 - DNA, 25 bp, Artificial
  Probe
gctgagtatagttccacactttgct

SEQ ID NO: 109806 - DNA, 25 bp, Artificial
  Probe
agctggtaaaggttacgaagattaa

SEQ ID NO: 109807 - DNA, 25 bp, Artificial
  Probe
ctttgctgacagatgagaacaatct

SEQ ID NO: 109808 - DNA, 25 bp, Artificial
  Probe
gagctggtaaaggttacgaagatta

SEQ ID NO: 109809 - DNA, 25 bp, Artificial
  Probe
tagttccacactttgctgacagatg

SEQ ID NO: 109810 - DNA, 25 bp, Artificial
  Probe
tataagcatcctgttgcctgtgatc

SEQ ID NO: 109811 - DNA, 25 bp, Artificial
  Probe
gttcatatacctcacctccattctc

SEQ ID NO: 109812 - DNA, 25 bp, Artificial
  Probe
ctgttcatatacctcacctccattc

SEQ ID NO: 109813 - DNA, 25 bp, Artificial
  Probe
tgttcatatacctcacctccattct

SEQ ID NO: 109814 - DNA, 25 bp, Artificial
  Probe
ttcatatacctcacctccattctcc

SEQ ID NO: 109815 - DNA, 25 bp, Artificial
  Probe
catatacctcacctccattctccag

SEQ ID NO: 109816 - DNA, 25 bp, Artificial
  Probe
atatacctcacctccattctccaga

SEQ ID NO: 109817 - DNA, 25 bp, Artificial
  Probe
tcatatacctcacctccattctcca

SEQ ID NO: 109818 - DNA, 25 bp, Artificial
  Probe
gctgttcatatacctcacctccatt

SEQ ID NO: 109819 - DNA, 25 bp, Artificial
  Probe
atgccaatcaatccttcaagaagag

SEQ ID NO: 109820 - DNA, 25 bp, Artificial
  Probe
gatgccaatcaatccttcaagaaga

SEQ ID NO: 109821 - DNA, 25 bp, Artificial
  Probe
tatacctcacctccattctccagaa

SEQ ID NO: 109822 - DNA, 25 bp, Artificial
  Probe
actatgactccgaccaattcaagac

SEQ ID NO: 109823 - DNA, 25 bp, Artificial
  Probe
cactatgactccgaccaattcaaga

SEQ ID NO: 109824 - DNA, 25 bp, Artificial
  Probe
gaaatacccatcttatacgcacaga

SEQ ID NO: 109825 - DNA, 25 bp, Artificial
  Probe
tggctgtttgtatcatttcctagta

SEQ ID NO: 109826 - DNA, 25 bp, Artificial
  Probe
aaatacccatcttatacgcacagac

SEQ ID NO: 109827 - DNA, 25 bp, Artificial
  Probe
ggaaatacccatcttatacgcacag

SEQ ID NO: 109828 - DNA, 25 bp, Artificial
  Probe
ctggctgtttgtatcatttcctagt

SEQ ID NO: 109829 - DNA, 25 bp, Artificial
  Probe
tcctggctgtttgtatcatttccta

SEQ ID NO: 109830 - DNA, 25 bp, Artificial
  Probe
tttcctggctgtttgtatcatttcc

SEQ ID NO: 109831 - DNA, 25 bp, Artificial
  Probe
ggctgtttgtatcatttcctagtaa

SEQ ID NO: 109832 - DNA, 25 bp, Artificial
  Probe
ctatgactccgaccaattcaagacc

SEQ ID NO: 109833 - DNA, 25 bp, Artificial
  Probe
cctggctgtttgtatcatttcctag

SEQ ID NO: 109834 - DNA, 25 bp, Artificial
  Probe
atacctcacctccattctccagaac

SEQ ID NO: 109835 - DNA, 25 bp, Artificial
  Probe
ttcctggctgtttgtatcatttcct

SEQ ID NO: 109836 - DNA, 25 bp, Artificial
  Probe
agctgttcatatacctcacctccat

SEQ ID NO: 109837 - DNA, 25 bp, Artificial
  Probe
aatacccatcttatacgcacagacc

SEQ ID NO: 109838 - DNA, 25 bp, Artificial
  Probe
catggagctgttcatatacctcacc

SEQ ID NO: 109839 - DNA, 25 bp, Artificial
  Probe
gcactatgactccgaccaattcaag

SEQ ID NO: 109840 - DNA, 25 bp, Artificial
  Probe
tgccaatcaatccttcaagaagagc

SEQ ID NO: 109841 - DNA, 25 bp, Artificial
  Probe
atggagctgttcatatacctcacct

SEQ ID NO: 109842 - DNA, 25 bp, Artificial
  Probe
gctgtttgtatcatttcctagtaaa

SEQ ID NO: 109843 - DNA, 25 bp, Artificial
  Probe
ctcacctccattctccagaacttca

SEQ ID NO: 109844 - DNA, 25 bp, Artificial
  Probe
tcacctccattctccagaacttcac

SEQ ID NO: 109845 - DNA, 25 bp, Artificial
  Probe
gcatggagctgttcatatacctcac

SEQ ID NO: 109846 - DNA, 25 bp, Artificial
  Probe
tactttacccttcctatcttaagcg

SEQ ID NO: 109847 - DNA, 25 bp, Artificial
  Probe
ttttcctggctgtttgtatcatttc

SEQ ID NO: 109848 - DNA, 25 bp, Artificial
  Probe
cttttcctggctgtttgtatcattt

SEQ ID NO: 109849 - DNA, 25 bp, Artificial
  Probe
gagctgttcatatacctcacctcca

SEQ ID NO: 109850 - DNA, 25 bp, Artificial
  Probe
tggagctgttcatatacctcacctc

SEQ ID NO: 109851 - DNA, 25 bp, Artificial
  Probe
cagatgtcatcacgctccttaacac

SEQ ID NO: 109852 - DNA, 25 bp, Artificial
  Probe
cttcctatcttaagcgcatcttcat

SEQ ID NO: 109853 - DNA, 25 bp, Artificial
  Probe
tacctcacctccattctccagaact

SEQ ID NO: 109854 - DNA, 25 bp, Artificial
  Probe
ctatcttaagcgcatcttcatggaa

SEQ ID NO: 109855 - DNA, 25 bp, Artificial
  Probe
ttcctatcttaagcgcatcttcatg

SEQ ID NO: 109856 - DNA, 25 bp, Artificial
  Probe
ctggcagaagttgatggtgaaggaa

SEQ ID NO: 109857 - DNA, 25 bp, Artificial
  Probe
gacaacagcctctgacagtattata

SEQ ID NO: 109858 - DNA, 25 bp, Artificial
  Probe
ctattgttcaatcctcctgtgactc

SEQ ID NO: 109859 - DNA, 25 bp, Artificial
  Probe
caacagcctctgacagtattataca

SEQ ID NO: 109860 - DNA, 25 bp, Artificial
  Probe
acaacagcctctgacagtattatac

SEQ ID NO: 109861 - DNA, 25 bp, Artificial
  Probe
aacagcctctgacagtattatacat

SEQ ID NO: 109862 - DNA, 25 bp, Artificial
  Probe
actattgttcaatcctcctgtgact

SEQ ID NO: 109863 - DNA, 25 bp, Artificial
  Probe
agacaacagcctctgacagtattat

SEQ ID NO: 109864 - DNA, 25 bp, Artificial
  Probe
acagcctctgacagtattatacata

SEQ ID NO: 109865 - DNA, 25 bp, Artificial
  Probe
tattgttcaatcctcctgtgactcc

SEQ ID NO: 109866 - DNA, 25 bp, Artificial
  Probe
cactattgttcaatcctcctgtgac

SEQ ID NO: 109867 - DNA, 25 bp, Artificial
  Probe
acactattgttcaatcctcctgtga

SEQ ID NO: 109868 - DNA, 25 bp, Artificial
  Probe
tatatgagtttacacctattccgct

SEQ ID NO: 109869 - DNA, 25 bp, Artificial
  Probe
cagcctctgacagtattatacatat

SEQ ID NO: 109870 - DNA, 25 bp, Artificial
  Probe
atatgagtttacacctattccgctc

SEQ ID NO: 109871 - DNA, 25 bp, Artificial
  Probe
atatatgagtttacacctattccgc

SEQ ID NO: 109872 - DNA, 25 bp, Artificial
  Probe
tatgagtttacacctattccgctcc

SEQ ID NO: 109873 - DNA, 25 bp, Artificial
  Probe
aacactattgttcaatcctcctgtg

SEQ ID NO: 109874 - DNA, 25 bp, Artificial
  Probe
agcctctgacagtattatacatata

SEQ ID NO: 109875 - DNA, 25 bp, Artificial
  Probe
attgttcaatcctcctgtgactcca

SEQ ID NO: 109876 - DNA, 25 bp, Artificial
  Probe
tgactccacgttagagaaatccttt

SEQ ID NO: 109877 - DNA, 25 bp, Artificial
  Probe
atgagtttacacctattccgctcct

SEQ ID NO: 109878 - DNA, 25 bp, Artificial
  Probe
tctcgtgacttttaatcgtgctttt

SEQ ID NO: 109879 - DNA, 25 bp, Artificial
  Probe
ttctcgtgacttttaatcgtgcttt

SEQ ID NO: 109880 - DNA, 25 bp, Artificial
  Probe
ttgttttgtttgttgtcgctgtttt

SEQ ID NO: 109881 - DNA, 25 bp, Artificial
  Probe
tttgttttgtttgttgtcgctgttt

SEQ ID NO: 109882 - DNA, 25 bp, Artificial
  Probe
ttttgttttgtttgttgtcgctgtt

SEQ ID NO: 109883 - DNA, 25 bp, Artificial
  Probe
cagacaacagcctctgacagtatta

SEQ ID NO: 109884 - DNA, 25 bp, Artificial
  Probe
ttttgactaacaagaatgtaacccc

SEQ ID NO: 109885 - DNA, 25 bp, Artificial
  Probe
cagacccagtaagtcattagctcag

SEQ ID NO: 109886 - DNA, 25 bp, Artificial
  Probe
cttctcgtgacttttaatcgtgctt

SEQ ID NO: 109887 - DNA, 25 bp, Artificial
  Probe
aaacactattgttcaatcctcctgt

SEQ ID NO: 109888 - DNA, 25 bp, Artificial
  Probe
gttttgtttgttgtcgctgttttga

SEQ ID NO: 109889 - DNA, 25 bp, Artificial
  Probe
gactccacgttagagaaatcctttc

SEQ ID NO: 109890 - DNA, 25 bp, Artificial
  Probe
tgttttgtttgttgtcgctgttttg

SEQ ID NO: 109891 - DNA, 25 bp, Artificial
  Probe
gcctctgacagtattatacatatat

SEQ ID NO: 109892 - DNA, 25 bp, Artificial
  Probe
gttttgactaacaagaatgtaaccc

SEQ ID NO: 109893 - DNA, 25 bp, Artificial
  Probe
ttgttcaatcctcctgtgactccac

SEQ ID NO: 109894 - DNA, 25 bp, Artificial
  Probe
gtgactccacgttagagaaatcctt

SEQ ID NO: 109895 - DNA, 25 bp, Artificial
  Probe
tgagtttacacctattccgctcctc

SEQ ID NO: 109896 - DNA, 25 bp, Artificial
  Probe
ctgcttctcgtgacttttaatcgtg

SEQ ID NO: 109897 - DNA, 25 bp, Artificial
  Probe
aaatcctttctaagtcccaacggct

SEQ ID NO: 109898 - DNA, 25 bp, Artificial
  Probe
gtttgttgtcgctgttttgactaac

SEQ ID NO: 109899 - DNA, 25 bp, Artificial
  Probe
tgtttgttgtcgctgttttgactaa

SEQ ID NO: 109900 - DNA, 25 bp, Artificial
  Probe
ttgtttgttgtcgctgttttgacta

SEQ ID NO: 109901 - DNA, 25 bp, Artificial
  Probe
ttttgtttgttgtcgctgttttgac

SEQ ID NO: 109902 - DNA, 25 bp, Artificial
  Probe
gtactgaggaagaatatccaccatc

SEQ ID NO: 109903 - DNA, 25 bp, Artificial
  Probe
gatgtactgaggaagaatatccacc

SEQ ID NO: 109904 - DNA, 25 bp, Artificial
  Probe
tgatgtactgaggaagaatatccac

SEQ ID NO: 109905 - DNA, 25 bp, Artificial
  Probe
tgtactgaggaagaatatccaccat

SEQ ID NO: 109906 - DNA, 25 bp, Artificial
  Probe
atgtactgaggaagaatatccacca

SEQ ID NO: 109907 - DNA, 25 bp, Artificial
  Probe
tactgaggaagaatatccaccatcg

SEQ ID NO: 109908 - DNA, 25 bp, Artificial
  Probe
tgtgctgtattaagtgctttatgaa

SEQ ID NO: 109909 - DNA, 25 bp, Artificial
  Probe
gtgctgtattaagtgctttatgaac

SEQ ID NO: 109910 - DNA, 25 bp, Artificial
  Probe
atgtgctgtattaagtgctttatga

SEQ ID NO: 109911 - DNA, 25 bp, Artificial
  Probe
tgtttcctagtatgtgtgaccaata

SEQ ID NO: 109912 - DNA, 25 bp, Artificial
  Probe
gtgtttcctagtatgtgtgaccaat

SEQ ID NO: 109913 - DNA, 25 bp, Artificial
  Probe
ttaataataataatggtcaggtgcc

SEQ ID NO: 109914 - DNA, 25 bp, Artificial
  Probe
taggttattcaggagggcaggtata

SEQ ID NO: 109915 - DNA, 25 bp, Artificial
  Probe
ggttattcaggagggcaggtatata

SEQ ID NO: 109916 - DNA, 25 bp, Artificial
  Probe
aaatagtgtaccctcttcttctcaa

SEQ ID NO: 109917 - DNA, 25 bp, Artificial
  Probe
aatagtgtaccctcttcttctcaag

SEQ ID NO: 109918 - DNA, 25 bp, Artificial
  Probe
ccatgtgctgtattaagtgctttat

SEQ ID NO: 109919 - DNA, 25 bp, Artificial
  Probe
gtttcctagtatgtgtgaccaataa

SEQ ID NO: 109920 - DNA, 25 bp, Artificial
  Probe
taataataataatggtcaggtgcca

SEQ ID NO: 109921 - DNA, 25 bp, Artificial
  Probe
tgctttatgaacatttgttaggctg

SEQ ID NO: 109922 - DNA, 25 bp, Artificial
  Probe
gtgctttatgaacatttgttaggct

SEQ ID NO: 109923 - DNA, 25 bp, Artificial
  Probe
agtgctttatgaacatttgttaggc

SEQ ID NO: 109924 - DNA, 25 bp, Artificial
  Probe
ctgaggaagaatatccaccatcgtc

SEQ ID NO: 109925 - DNA, 25 bp, Artificial
  Probe
tgctgtattaagtgctttatgaaca

SEQ ID NO: 109926 - DNA, 25 bp, Artificial
  Probe
taccctgtgtttcctagtatgtgtg

SEQ ID NO: 109927 - DNA, 25 bp, Artificial
  Probe
tgtgtttcctagtatgtgtgaccaa

SEQ ID NO: 109928 - DNA, 25 bp, Artificial
  Probe
ctttatgaacatttgttaggctggc

SEQ ID NO: 109929 - DNA, 25 bp, Artificial
  Probe
gctttatgaacatttgttaggctgg

SEQ ID NO: 109930 - DNA, 25 bp, Artificial
  Probe
catgtgctgtattaagtgctttatg

SEQ ID NO: 109931 - DNA, 25 bp, Artificial
  Probe
aggttattcaggagggcaggtatat

SEQ ID NO: 109932 - DNA, 25 bp, Artificial
  Probe
atagtgtaccctcttcttctcaagc

SEQ ID NO: 109933 - DNA, 25 bp, Artificial
  Probe
tttcctagtatgtgtgaccaataaa

SEQ ID NO: 109934 - DNA, 25 bp, Artificial
  Probe
tataccctgtgtttcctagtatgtg

SEQ ID NO: 109935 - DNA, 25 bp, Artificial
  Probe
ctgtgtttcctagtatgtgtgacca

SEQ ID NO: 109936 - DNA, 25 bp, Artificial
  Probe
ataccctgtgtttcctagtatgtgt

SEQ ID NO: 109937 - DNA, 25 bp, Artificial
  Probe
tcctagtatgtgtgaccaataaatt

SEQ ID NO: 109938 - DNA, 25 bp, Artificial
  Probe
ttcctagtatgtgtgaccaataaat

SEQ ID NO: 109939 - DNA, 25 bp, Artificial
  Probe
aagtgctttatgaacatttgttagg

SEQ ID NO: 109940 - DNA, 25 bp, Artificial
  Probe
gccatgtgctgtattaagtgcttta

SEQ ID NO: 109941 - DNA, 25 bp, Artificial
  Probe
actgaggaagaatatccaccatcgt

SEQ ID NO: 109942 - DNA, 25 bp, Artificial
  Probe
gtgaccaataaattgtggctttcta

SEQ ID NO: 109943 - DNA, 25 bp, Artificial
  Probe
agtatgtgtgaccaataaattgtgg

SEQ ID NO: 109944 - DNA, 25 bp, Artificial
  Probe
gctgtattaagtgctttatgaacat

SEQ ID NO: 109945 - DNA, 25 bp, Artificial
  Probe
cctagtatgtgtgaccaataaattg

SEQ ID NO: 109946 - DNA, 25 bp, Artificial
  Probe
tgaccaataaattgtggctttctaa

SEQ ID NO: 109947 - DNA, 25 bp, Artificial
  Probe
cactttggagaagagaagagagatt

SEQ ID NO: 109948 - DNA, 25 bp, Artificial
  Probe
gtggcgtttctaattctctctaaat

SEQ ID NO: 109949 - DNA, 25 bp, Artificial
  Probe
ggtggcgtttctaattctctctaaa

SEQ ID NO: 109950 - DNA, 25 bp, Artificial
  Probe
actttggagaagagaagagagattt

SEQ ID NO: 109951 - DNA, 25 bp, Artificial
  Probe
acactttggagaagagaagagagat

SEQ ID NO: 109952 - DNA, 25 bp, Artificial
  Probe
gacactttggagaagagaagagaga

SEQ ID NO: 109953 - DNA, 25 bp, Artificial
  Probe
aggtggcgtttctaattctctctaa

SEQ ID NO: 109954 - DNA, 25 bp, Artificial
  Probe
tagaagagaattgcacagagctagg

SEQ ID NO: 109955 - DNA, 25 bp, Artificial
  Probe
tacaggacactttggagaagagaag

SEQ ID NO: 109956 - DNA, 25 bp, Artificial
  Probe
ctacaggacactttggagaagagaa

SEQ ID NO: 109957 - DNA, 25 bp, Artificial
  Probe
tggcgtttctaattctctctaaata

SEQ ID NO: 109958 - DNA, 25 bp, Artificial
  Probe
tctagaagagaattgcacagagcta

SEQ ID NO: 109959 - DNA, 25 bp, Artificial
  Probe
ggacactttggagaagagaagagag

SEQ ID NO: 109960 - DNA, 25 bp, Artificial
  Probe
gaggtggcgtttctaattctctcta

SEQ ID NO: 109961 - DNA, 25 bp, Artificial
  Probe
ctagaagagaattgcacagagctag

SEQ ID NO: 109962 - DNA, 25 bp, Artificial
  Probe
aggacactttggagaagagaagaga

SEQ ID NO: 109963 - DNA, 25 bp, Artificial
  Probe
caggacactttggagaagagaagag

SEQ ID NO: 109964 - DNA, 25 bp, Artificial
  Probe
actacaggacactttggagaagaga

SEQ ID NO: 109965 - DNA, 25 bp, Artificial
  Probe
cactacaggacactttggagaagag

SEQ ID NO: 109966 - DNA, 25 bp, Artificial
  Probe
ggcgtttctaattctctctaaatag

SEQ ID NO: 109967 - DNA, 25 bp, Artificial
  Probe
acaggacactttggagaagagaaga

SEQ ID NO: 109968 - DNA, 25 bp, Artificial
  Probe
attcttcttccttttcctgtctgag

SEQ ID NO: 109969 - DNA, 25 bp, Artificial
  Probe
gattcttcttccttttcctgtctga

SEQ ID NO: 109970 - DNA, 25 bp, Artificial
  Probe
ctgattcttcttccttttcctgtct

SEQ ID NO: 109971 - DNA, 25 bp, Artificial
  Probe
tgattcttcttccttttcctgtctg

SEQ ID NO: 109972 - DNA, 25 bp, Artificial
  Probe
ggtgtggatgattgactttgggaaa

SEQ ID NO: 109973 - DNA, 25 bp, Artificial
  Probe
cctgattcttcttccttttcctgtc

SEQ ID NO: 109974 - DNA, 25 bp, Artificial
  Probe
cttcccctgattcttcttccttttc

SEQ ID NO: 109975 - DNA, 25 bp, Artificial
  Probe
atctctcttcccctgattcttcttc

SEQ ID NO: 109976 - DNA, 25 bp, Artificial
  Probe
tcttcccctgattcttcttcctttt

SEQ ID NO: 109977 - DNA, 25 bp, Artificial
  Probe
catctctcttcccctgattcttctt

SEQ ID NO: 109978 - DNA, 25 bp, Artificial
  Probe
tttctaggtctttatctcccgcctt

SEQ ID NO: 109979 - DNA, 25 bp, Artificial
  Probe
ctttggagaagagaagagagatttt

SEQ ID NO: 109980 - DNA, 25 bp, Artificial
  Probe
ctcttcccctgattcttcttccttt

SEQ ID NO: 109981 - DNA, 25 bp, Artificial
  Probe
tgtggatgattgactttgggaaaac

SEQ ID NO: 109982 - DNA, 25 bp, Artificial
  Probe
gtgtggatgattgactttgggaaaa

SEQ ID NO: 109983 - DNA, 25 bp, Artificial
  Probe
ttctaggtctttatctcccgccttc

SEQ ID NO: 109984 - DNA, 25 bp, Artificial
  Probe
ccctgattcttcttccttttcctgt

SEQ ID NO: 109985 - DNA, 25 bp, Artificial
  Probe
ttcccctgattcttcttccttttcc

SEQ ID NO: 109986 - DNA, 25 bp, Artificial
  Probe
aggtgtggatgattgactttgggaa

SEQ ID NO: 109987 - DNA, 25 bp, Artificial
  Probe
gtggatgattgactttgggaaaacc

SEQ ID NO: 109988 - DNA, 25 bp, Artificial
  Probe
gcgtttctaattctctctaaataga

SEQ ID NO: 109989 - DNA, 25 bp, Artificial
  Probe
gcactacaggacactttggagaaga

SEQ ID NO: 109990 - DNA, 25 bp, Artificial
  Probe
ttcttcttccttttcctgtctgagc

SEQ ID NO: 109991 - DNA, 25 bp, Artificial
  Probe
tctcttcccctgattcttcttcctt

SEQ ID NO: 109992 - DNA, 25 bp, Artificial
  Probe
atacagggactgatacaatgacttt

SEQ ID NO: 109993 - DNA, 25 bp, Artificial
  Probe
tatacagggactgatacaatgactt

SEQ ID NO: 109994 - DNA, 25 bp, Artificial
  Probe
gaactgactggactggcattcattc

SEQ ID NO: 109995 - DNA, 25 bp, Artificial
  Probe
gcctcgacatttctaagtaaatcag

SEQ ID NO: 109996 - DNA, 25 bp, Artificial
  Probe
tttctaagtaaatcagaagcctcca

SEQ ID NO: 109997 - DNA, 25 bp, Artificial
  Probe
actgatacaatgacttttcttcgga

SEQ ID NO: 109998 - DNA, 25 bp, Artificial
  Probe
gactgatacaatgacttttcttcgg

SEQ ID NO: 109999 - DNA, 25 bp, Artificial
  Probe
ggactgatacaatgacttttcttcg

SEQ ID NO: 110000 - DNA, 25 bp, Artificial
  Probe
agggactgatacaatgacttttctt

SEQ ID NO: 110001 - DNA, 25 bp, Artificial
  Probe
gggactgatacaatgacttttcttc

SEQ ID NO: 110002 - DNA, 25 bp, Artificial
  Probe
cctcgacatttctaagtaaatcaga

SEQ ID NO: 110003 - DNA, 25 bp, Artificial
  Probe
atttctaagtaaatcagaagcctcc

SEQ ID NO: 110004 - DNA, 25 bp, Artificial
  Probe
ctgatacaatgacttttcttcggaa

SEQ ID NO: 110005 - DNA, 25 bp, Artificial
  Probe
cgacatttctaagtaaatcagaagc

SEQ ID NO: 110006 - DNA, 25 bp, Artificial
  Probe
gtatacagggactgatacaatgact

SEQ ID NO: 110007 - DNA, 25 bp, Artificial
  Probe
acatttctaagtaaatcagaagcct

SEQ ID NO: 110008 - DNA, 25 bp, Artificial
  Probe
gacatttctaagtaaatcagaagcc

SEQ ID NO: 110009 - DNA, 25 bp, Artificial
  Probe
catttctaagtaaatcagaagcctc

SEQ ID NO: 110010 - DNA, 25 bp, Artificial
  Probe
tacagggactgatacaatgactttt

SEQ ID NO: 110011 - DNA, 25 bp, Artificial
  Probe
cagggactgatacaatgacttttct

SEQ ID NO: 110012 - DNA, 25 bp, Artificial
  Probe
acagggactgatacaatgacttttc

SEQ ID NO: 110013 - DNA, 25 bp, Artificial
  Probe
ggcctcgacatttctaagtaaatca

SEQ ID NO: 110014 - DNA, 25 bp, Artificial
  Probe
ccaagtctcatagcccaagccatat

SEQ ID NO: 110015 - DNA, 25 bp, Artificial
  Probe
gggcctcgacatttctaagtaaatc

SEQ ID NO: 110016 - DNA, 25 bp, Artificial
  Probe
tgatacaatgacttttcttcggaaa

SEQ ID NO: 110017 - DNA, 25 bp, Artificial
  Probe
catgcattgagtacttgctgtatac

SEQ ID NO: 110018 - DNA, 25 bp, Artificial
  Probe
ctggactggcattcattcctctgag

SEQ ID NO: 110019 - DNA, 25 bp, Artificial
  Probe
ccatgcattgagtacttgctgtata

SEQ ID NO: 110020 - DNA, 25 bp, Artificial
  Probe
aactgactggactggcattcattcc

SEQ ID NO: 110021 - DNA, 25 bp, Artificial
  Probe
tcgacatttctaagtaaatcagaag

SEQ ID NO: 110022 - DNA, 25 bp, Artificial
  Probe
ctcgacatttctaagtaaatcagaa

SEQ ID NO: 110023 - DNA, 25 bp, Artificial
  Probe
tgaactgactggactggcattcatt

SEQ ID NO: 110024 - DNA, 25 bp, Artificial
  Probe
caagtctcatagcccaagccatatg

SEQ ID NO: 110025 - DNA, 25 bp, Artificial
  Probe
ggggcctcgacatttctaagtaaat

SEQ ID NO: 110026 - DNA, 25 bp, Artificial
  Probe
aagtctcatagcccaagccatatgc

SEQ ID NO: 110027 - DNA, 25 bp, Artificial
  Probe
cccatgcattgagtacttgctgtat

SEQ ID NO: 110028 - DNA, 25 bp, Artificial
  Probe
gatacaatgacttttcttcggaaaa

SEQ ID NO: 110029 - DNA, 25 bp, Artificial
  Probe
aaagtcactgcccatgcattgagta

SEQ ID NO: 110030 - DNA, 25 bp, Artificial
  Probe
tagagacacagatggagaactatga

SEQ ID NO: 110031 - DNA, 25 bp, Artificial
  Probe
cctatggttctaatcagcgttatcc

SEQ ID NO: 110032 - DNA, 25 bp, Artificial
  Probe
gacacagatggagaactatgacaag

SEQ ID NO: 110033 - DNA, 25 bp, Artificial
  Probe
tcatagagacacagatggagaacta

SEQ ID NO: 110034 - DNA, 25 bp, Artificial
  Probe
cttcatagagacacagatggagaac

SEQ ID NO: 110035 - DNA, 25 bp, Artificial
  Probe
ttcatagagacacagatggagaact

SEQ ID NO: 110036 - DNA, 25 bp, Artificial
  Probe
acttcatagagacacagatggagaa

SEQ ID NO: 110037 - DNA, 25 bp, Artificial
  Probe
ctatggttctaatcagcgttatccg

SEQ ID NO: 110038 - DNA, 25 bp, Artificial
  Probe
agacacagatggagaactatgacaa

SEQ ID NO: 110039 - DNA, 25 bp, Artificial
  Probe
agagacacagatggagaactatgac

SEQ ID NO: 110040 - DNA, 25 bp, Artificial
  Probe
gacttcatagagacacagatggaga

SEQ ID NO: 110041 - DNA, 25 bp, Artificial
  Probe
gagacacagatggagaactatgaca

SEQ ID NO: 110042 - DNA, 25 bp, Artificial
  Probe
acagatggagaactatgacaagcat

SEQ ID NO: 110043 - DNA, 25 bp, Artificial
  Probe
atagagacacagatggagaactatg

SEQ ID NO: 110044 - DNA, 25 bp, Artificial
  Probe
catagagacacagatggagaactat

SEQ ID NO: 110045 - DNA, 25 bp, Artificial
  Probe
ggacttcatagagacacagatggag

SEQ ID NO: 110046 - DNA, 25 bp, Artificial
  Probe
cacagatggagaactatgacaagca

SEQ ID NO: 110047 - DNA, 25 bp, Artificial
  Probe
acacagatggagaactatgacaagc

SEQ ID NO: 110048 - DNA, 25 bp, Artificial
  Probe
cagatggagaactatgacaagcatg

SEQ ID NO: 110049 - DNA, 25 bp, Artificial
  Probe
ccctatggttctaatcagcgttatc

SEQ ID NO: 110050 - DNA, 25 bp, Artificial
  Probe
agattgttcctcctgtaatttcact

SEQ ID NO: 110051 - DNA, 25 bp, Artificial
  Probe
agatggagaactatgacaagcatgt

SEQ ID NO: 110052 - DNA, 25 bp, Artificial
  Probe
aaagggacttcatagagacacagat

SEQ ID NO: 110053 - DNA, 25 bp, Artificial
  Probe
tgttcctcctgtaatttcactaact

SEQ ID NO: 110054 - DNA, 25 bp, Artificial
  Probe
cgacttaaatgaaaggagtgaagac

SEQ ID NO: 110055 - DNA, 25 bp, Artificial
  Probe
ttgttcctcctgtaatttcactaac

SEQ ID NO: 110056 - DNA, 25 bp, Artificial
  Probe
agaaactttgattggtagcattcat

SEQ ID NO: 110057 - DNA, 25 bp, Artificial
  Probe
ccgacttaaatgaaaggagtgaaga

SEQ ID NO: 110058 - DNA, 25 bp, Artificial
  Probe
gattgttcctcctgtaatttcacta

SEQ ID NO: 110059 - DNA, 25 bp, Artificial
  Probe
tagattgttcctcctgtaatttcac

SEQ ID NO: 110060 - DNA, 25 bp, Artificial
  Probe
aagggacttcatagagacacagatg

SEQ ID NO: 110061 - DNA, 25 bp, Artificial
  Probe
gttcctcctgtaatttcactaactt

SEQ ID NO: 110062 - DNA, 25 bp, Artificial
  Probe
caaagggacttcatagagacacaga

SEQ ID NO: 110063 - DNA, 25 bp, Artificial
  Probe
tagaaactttgattggtagcattca

SEQ ID NO: 110064 - DNA, 25 bp, Artificial
  Probe
gacttaaatgaaaggagtgaagact

SEQ ID NO: 110065 - DNA, 25 bp, Artificial
  Probe
attgttcctcctgtaatttcactaa

SEQ ID NO: 110066 - DNA, 25 bp, Artificial
  Probe
ttcctcctgtaatttcactaacttt

SEQ ID NO: 110067 - DNA, 25 bp, Artificial
  Probe
gcacttcaaacaaactttactacta

SEQ ID NO: 110068 - DNA, 25 bp, Artificial
  Probe
acttaaatgaaaggagtgaagactt

SEQ ID NO: 110069 - DNA, 25 bp, Artificial
  Probe
ttagaaactttgattggtagcattc

SEQ ID NO: 110070 - DNA, 25 bp, Artificial
  Probe
gaaactttgattggtagcattcatg

SEQ ID NO: 110071 - DNA, 25 bp, Artificial
  Probe
atagattgttcctcctgtaatttca

SEQ ID NO: 110072 - DNA, 25 bp, Artificial
  Probe
tcatctgagagtagctagaagagaa

SEQ ID NO: 110073 - DNA, 25 bp, Artificial
  Probe
ttcatctgagagtagctagaagaga

SEQ ID NO: 110074 - DNA, 25 bp, Artificial
  Probe
ttccgacttaaatgaaaggagtgaa

SEQ ID NO: 110075 - DNA, 25 bp, Artificial
  Probe
tggaattgttgttatggtgatagag

SEQ ID NO: 110076 - DNA, 25 bp, Artificial
  Probe
ggaattgttgttatggtgatagaga

SEQ ID NO: 110077 - DNA, 25 bp, Artificial
  Probe
ttggaattgttgttatggtgataga

SEQ ID NO: 110078 - DNA, 25 bp, Artificial
  Probe
attcctggagagtacaagttcttct

SEQ ID NO: 110079 - DNA, 25 bp, Artificial
  Probe
cattcctggagagtacaagttcttc

SEQ ID NO: 110080 - DNA, 25 bp, Artificial
  Probe
gaattgttgttatggtgatagagac

SEQ ID NO: 110081 - DNA, 25 bp, Artificial
  Probe
ttcctggagagtacaagttcttctg

SEQ ID NO: 110082 - DNA, 25 bp, Artificial
  Probe
attgttgttatggtgatagagaccg

SEQ ID NO: 110083 - DNA, 25 bp, Artificial
  Probe
gaaatgccttatcagtttatccacc

SEQ ID NO: 110084 - DNA, 25 bp, Artificial
  Probe
aaatgccttatcagtttatccacca

SEQ ID NO: 110085 - DNA, 25 bp, Artificial
  Probe
cctcaacaagatcaacttcaacacc

SEQ ID NO: 110086 - DNA, 25 bp, Artificial
  Probe
gccttatcagtttatccaccatcat

SEQ ID NO: 110087 - DNA, 25 bp, Artificial
  Probe
ttgttatggtgatagagaccgaact

SEQ ID NO: 110088 - DNA, 25 bp, Artificial
  Probe
gttgttatggtgatagagaccgaac

SEQ ID NO: 110089 - DNA, 25 bp, Artificial
  Probe
aattgttgttatggtgatagagacc

SEQ ID NO: 110090 - DNA, 25 bp, Artificial
  Probe
ttatcagtttatccaccatcatcct

SEQ ID NO: 110091 - DNA, 25 bp, Artificial
  Probe
ggatgtttggaattgttgttatggt

SEQ ID NO: 110092 - DNA, 25 bp, Artificial
  Probe
tgggatgtttggaattgttgttatg

SEQ ID NO: 110093 - DNA, 25 bp, Artificial
  Probe
tttgggatgtttggaattgttgtta

SEQ ID NO: 110094 - DNA, 25 bp, Artificial
  Probe
tgtttggaattgttgttatggtgat

SEQ ID NO: 110095 - DNA, 25 bp, Artificial
  Probe
atgtttggaattgttgttatggtga

SEQ ID NO: 110096 - DNA, 25 bp, Artificial
  Probe
ttgggatgtttggaattgttgttat

SEQ ID NO: 110097 - DNA, 25 bp, Artificial
  Probe
aatgccttatcagtttatccaccat

SEQ ID NO: 110098 - DNA, 25 bp, Artificial
  Probe
ctggagagtacaagttcttctggac

SEQ ID NO: 110099 - DNA, 25 bp, Artificial
  Probe
cttatcagtttatccaccatcatcc

SEQ ID NO: 110100 - DNA, 25 bp, Artificial
  Probe
ccttatcagtttatccaccatcatc

SEQ ID NO: 110101 - DNA, 25 bp, Artificial
  Probe
gatgtttggaattgttgttatggtg

SEQ ID NO: 110102 - DNA, 25 bp, Artificial
  Probe
atgccttatcagtttatccaccatc

SEQ ID NO: 110103 - DNA, 25 bp, Artificial
  Probe
tgttgttatggtgatagagaccgaa

SEQ ID NO: 110104 - DNA, 25 bp, Artificial
  Probe
ttgttgttatggtgatagagaccga

SEQ ID NO: 110105 - DNA, 25 bp, Artificial
  Probe
gggatgtttggaattgttgttatgg

SEQ ID NO: 110106 - DNA, 25 bp, Artificial
  Probe
ttatggtgatagagaccgaactgtc

SEQ ID NO: 110107 - DNA, 25 bp, Artificial
  Probe
tgaaatgccttatcagtttatccac

SEQ ID NO: 110108 - DNA, 25 bp, Artificial
  Probe
gttatggtgatagagaccgaactgt

SEQ ID NO: 110109 - DNA, 25 bp, Artificial
  Probe
tgttatggtgatagagaccgaactg

SEQ ID NO: 110110 - DNA, 25 bp, Artificial
  Probe
tgccttatcagtttatccaccatca

SEQ ID NO: 110111 - DNA, 25 bp, Artificial
  Probe
ccattcctggagagtacaagttctt

SEQ ID NO: 110112 - DNA, 25 bp, Artificial
  Probe
tatcagtttatccaccatcatcctg

SEQ ID NO: 110113 - DNA, 25 bp, Artificial
  Probe
gtttggaattgttgttatggtgata

SEQ ID NO: 110114 - DNA, 25 bp, Artificial
  Probe
cctggagagtacaagttcttctgga

SEQ ID NO: 110115 - DNA, 25 bp, Artificial
  Probe
tcctggagagtacaagttcttctgg

SEQ ID NO: 110116 - DNA, 25 bp, Artificial
  Probe
atggctgatctacaaacacacaaag

SEQ ID NO: 110117 - DNA, 25 bp, Artificial
  Probe
tttggaattgttgttatggtgatag

SEQ ID NO: 110118 - DNA, 25 bp, Artificial
  Probe
gaagttcctccaagctattcaccaa

SEQ ID NO: 110119 - DNA, 25 bp, Artificial
  Probe
gaaacatggctgatctacaaacaca

SEQ ID NO: 110120 - DNA, 25 bp, Artificial
  Probe
ctcctatgaagttccattatgccag

SEQ ID NO: 110121 - DNA, 25 bp, Artificial
  Probe
atgaagttccattatgccagactaa

SEQ ID NO: 110122 - DNA, 25 bp, Artificial
  Probe
tcctgacctcatcacatactactaa

SEQ ID NO: 110123 - DNA, 25 bp, Artificial
  Probe
atcctgacctcatcacatactacta

SEQ ID NO: 110124 - DNA, 25 bp, Artificial
  Probe
tacatcctgacctcatcacatacta

SEQ ID NO: 110125 - DNA, 25 bp, Artificial
  Probe
cctatgaagttccattatgccagac

SEQ ID NO: 110126 - DNA, 25 bp, Artificial
  Probe
tcctatgaagttccattatgccaga

SEQ ID NO: 110127 - DNA, 25 bp, Artificial
  Probe
catcacatactactaaggcagtctc

SEQ ID NO: 110128 - DNA, 25 bp, Artificial
  Probe
ctcatcacatactactaaggcagtc

SEQ ID NO: 110129 - DNA, 25 bp, Artificial
  Probe
cctgacctcatcacatactactaag

SEQ ID NO: 110130 - DNA, 25 bp, Artificial
  Probe
ctatgaagttccattatgccagact

SEQ ID NO: 110131 - DNA, 25 bp, Artificial
  Probe
tcatcacatactactaaggcagtct

SEQ ID NO: 110132 - DNA, 25 bp, Artificial
  Probe
atacatcctgacctcatcacatact

SEQ ID NO: 110133 - DNA, 25 bp, Artificial
  Probe
catacatcctgacctcatcacatac

SEQ ID NO: 110134 - DNA, 25 bp, Artificial
  Probe
tgaagttccattatgccagactaag

SEQ ID NO: 110135 - DNA, 25 bp, Artificial
  Probe
tatgaagttccattatgccagacta

SEQ ID NO: 110136 - DNA, 25 bp, Artificial
  Probe
atcacatactactaaggcagtctcc

SEQ ID NO: 110137 - DNA, 25 bp, Artificial
  Probe
catcctgacctcatcacatactact

SEQ ID NO: 110138 - DNA, 25 bp, Artificial
  Probe
gaagttccattatgccagactaagg

SEQ ID NO: 110139 - DNA, 25 bp, Artificial
  Probe
acatcctgacctcatcacatactac

SEQ ID NO: 110140 - DNA, 25 bp, Artificial
  Probe
ccatacatcctgacctcatcacata

SEQ ID NO: 110141 - DNA, 25 bp, Artificial
  Probe
ctgacctcatcacatactactaagg

SEQ ID NO: 110142 - DNA, 25 bp, Artificial
  Probe
ctaagccatacatcctgacctcatc

SEQ ID NO: 110143 - DNA, 25 bp, Artificial
  Probe
cctcatcacatactactaaggcagt

SEQ ID NO: 110144 - DNA, 25 bp, Artificial
  Probe
acctcatcacatactactaaggcag

SEQ ID NO: 110145 - DNA, 25 bp, Artificial
  Probe
gacctcatcacatactactaaggca

SEQ ID NO: 110146 - DNA, 25 bp, Artificial
  Probe
tgacctcatcacatactactaaggc

SEQ ID NO: 110147 - DNA, 25 bp, Artificial
  Probe
gtgctgacacatagaaggaagattc

SEQ ID NO: 110148 - DNA, 25 bp, Artificial
  Probe
acatactactaaggcagtctccact

SEQ ID NO: 110149 - DNA, 25 bp, Artificial
  Probe
cacatactactaaggcagtctccac

SEQ ID NO: 110150 - DNA, 25 bp, Artificial
  Probe
tcacatactactaaggcagtctcca

SEQ ID NO: 110151 - DNA, 25 bp, Artificial
  Probe
gctcctatgaagttccattatgcca

SEQ ID NO: 110152 - DNA, 25 bp, Artificial
  Probe
cactctgtgaagatccttgtgtatg

SEQ ID NO: 110153 - DNA, 25 bp, Artificial
  Probe
gacacatagaaggaagattccagtc

SEQ ID NO: 110154 - DNA, 25 bp, Artificial
  Probe
ctgacacatagaaggaagattccag

SEQ ID NO: 110155 - DNA, 25 bp, Artificial
  Probe
attgacaagttcctcccaaataatg

SEQ ID NO: 110156 - DNA, 25 bp, Artificial
  Probe
actctgtgaagatccttgtgtatgc

SEQ ID NO: 110157 - DNA, 25 bp, Artificial
  Probe
caaattgacaagttcctcccaaata

SEQ ID NO: 110158 - DNA, 25 bp, Artificial
  Probe
tgacacatagaaggaagattccagt

SEQ ID NO: 110159 - DNA, 25 bp, Artificial
  Probe
taagccatacatcctgacctcatca

SEQ ID NO: 110160 - DNA, 25 bp, Artificial
  Probe
aaattgacaagttcctcccaaataa

SEQ ID NO: 110161 - DNA, 25 bp, Artificial
  Probe
ctgtgaagatccttgtgtatgcctt

SEQ ID NO: 110162 - DNA, 25 bp, Artificial
  Probe
ggtgctgacacatagaaggaagatt

SEQ ID NO: 110163 - DNA, 25 bp, Artificial
  Probe
aattgacaagttcctcccaaataat

SEQ ID NO: 110164 - DNA, 25 bp, Artificial
  Probe
acacatagaaggaagattccagtcc

SEQ ID NO: 110165 - DNA, 25 bp, Artificial
  Probe
gtgtctcctccacttatggttactt

SEQ ID NO: 110166 - DNA, 25 bp, Artificial
  Probe
atgtggattgagaggaaagagagag

SEQ ID NO: 110167 - DNA, 25 bp, Artificial
  Probe
gatgtggattgagaggaaagagaga

SEQ ID NO: 110168 - DNA, 25 bp, Artificial
  Probe
agccaatttgtaactagaaccattt

SEQ ID NO: 110169 - DNA, 25 bp, Artificial
  Probe
aagccaatttgtaactagaaccatt

SEQ ID NO: 110170 - DNA, 25 bp, Artificial
  Probe
caagccaatttgtaactagaaccat

SEQ ID NO: 110171 - DNA, 25 bp, Artificial
  Probe
gagttggtatctcttccttctcgaa

SEQ ID NO: 110172 - DNA, 25 bp, Artificial
  Probe
ccaagccaatttgtaactagaacca

SEQ ID NO: 110173 - DNA, 25 bp, Artificial
  Probe
ggatgtggattgagaggaaagagag

SEQ ID NO: 110174 - DNA, 25 bp, Artificial
  Probe
gtctcctccacttatggttacttta

SEQ ID NO: 110175 - DNA, 25 bp, Artificial
  Probe
tgtctcctccacttatggttacttt

SEQ ID NO: 110176 - DNA, 25 bp, Artificial
  Probe
tctcctccacttatggttactttaa

SEQ ID NO: 110177 - DNA, 25 bp, Artificial
  Probe
gccaagccaatttgtaactagaacc

SEQ ID NO: 110178 - DNA, 25 bp, Artificial
  Probe
tgtggattgagaggaaagagagagg

SEQ ID NO: 110179 - DNA, 25 bp, Artificial
  Probe
agttggtatctcttccttctcgaag

SEQ ID NO: 110180 - DNA, 25 bp, Artificial
  Probe
gggatgtggattgagaggaaagaga

SEQ ID NO: 110181 - DNA, 25 bp, Artificial
  Probe
atagtgtctcctccacttatggtta

SEQ ID NO: 110182 - DNA, 25 bp, Artificial
  Probe
ctcctccacttatggttactttaaa

SEQ ID NO: 110183 - DNA, 25 bp, Artificial
  Probe
gccaatttgtaactagaaccatttt

SEQ ID NO: 110184 - DNA, 25 bp, Artificial
  Probe
tagtgtctcctccacttatggttac

SEQ ID NO: 110185 - DNA, 25 bp, Artificial
  Probe
agagttggtatctcttccttctcga

SEQ ID NO: 110186 - DNA, 25 bp, Artificial
  Probe
gatagtgtctcctccacttatggtt

SEQ ID NO: 110187 - DNA, 25 bp, Artificial
  Probe
gtggattgagaggaaagagagaggc

SEQ ID NO: 110188 - DNA, 25 bp, Artificial
  Probe
agtgtctcctccacttatggttact

SEQ ID NO: 110189 - DNA, 25 bp, Artificial
  Probe
ttttattttggtgggaggggatgtg

SEQ ID NO: 110190 - DNA, 25 bp, Artificial
  Probe
ggatagtgtctcctccacttatggt

SEQ ID NO: 110191 - DNA, 25 bp, Artificial
  Probe
agaatccaaacatacaaaaggaaaa

SEQ ID NO: 110192 - DNA, 25 bp, Artificial
  Probe
aagaatccaaacatacaaaaggaaa

SEQ ID NO: 110193 - DNA, 25 bp, Artificial
  Probe
aaagaatccaaacatacaaaaggaa

SEQ ID NO: 110194 - DNA, 25 bp, Artificial
  Probe
aaaagaatccaaacatacaaaagga

SEQ ID NO: 110195 - DNA, 25 bp, Artificial
  Probe
tcctccacttatggttactttaaaa

SEQ ID NO: 110196 - DNA, 25 bp, Artificial
  Probe
attgagaggaaagagagaggccaag

SEQ ID NO: 110197 - DNA, 25 bp, Artificial
  Probe
gattgagaggaaagagagaggccaa

SEQ ID NO: 110198 - DNA, 25 bp, Artificial
  Probe
ggggatgtggattgagaggaaagag

SEQ ID NO: 110199 - DNA, 25 bp, Artificial
  Probe
gaggggatgtggattgagaggaaag

SEQ ID NO: 110200 - DNA, 25 bp, Artificial
  Probe
aggggatgtggattgagaggaaaga

SEQ ID NO: 110201 - DNA, 25 bp, Artificial
  Probe
tttattttggtgggaggggatgtgg

SEQ ID NO: 110202 - DNA, 25 bp, Artificial
  Probe
gggatagtgtctcctccacttatgg

SEQ ID NO: 110203 - DNA, 25 bp, Artificial
  Probe
ggccaagccaatttgtaactagaac

SEQ ID NO: 110204 - DNA, 25 bp, Artificial
  Probe
aggccaagccaatttgtaactagaa

SEQ ID NO: 110205 - DNA, 25 bp, Artificial
  Probe
gaggccaagccaatttgtaactaga

SEQ ID NO: 110206 - DNA, 25 bp, Artificial
  Probe
agaggccaagccaatttgtaactag

SEQ ID NO: 110207 - DNA, 25 bp, Artificial
  Probe
gagaggccaagccaatttgtaacta

SEQ ID NO: 110208 - DNA, 25 bp, Artificial
  Probe
tgagtttcggggatagtgtctcctc

SEQ ID NO: 110209 - DNA, 25 bp, Artificial
  Probe
ctgagtttcggggatagtgtctcct

SEQ ID NO: 110210 - DNA, 25 bp, Artificial
  Probe
gacaacatacacagtacagtggtat

SEQ ID NO: 110211 - DNA, 25 bp, Artificial
  Probe
acaacatacacagtacagtggtata

SEQ ID NO: 110212 - DNA, 25 bp, Artificial
  Probe
ccctaaagtaaacaaacaaacaagc

SEQ ID NO: 110213 - DNA, 25 bp, Artificial
  Probe
aaatgtatgatgggaaatgtttggc

SEQ ID NO: 110214 - DNA, 25 bp, Artificial
  Probe
agtaaacaaacaaacaagcaaacaa

SEQ ID NO: 110215 - DNA, 25 bp, Artificial
  Probe
aagtaaacaaacaaacaagcaaaca

SEQ ID NO: 110216 - DNA, 25 bp, Artificial
  Probe
atgaattgaaggcagaggcttgtaa

SEQ ID NO: 110217 - DNA, 25 bp, Artificial
  Probe
gcagttaagacaaatgtaaggcaaa

SEQ ID NO: 110218 - DNA, 25 bp, Artificial
  Probe
cctaaagtaaacaaacaaacaagca

SEQ ID NO: 110219 - DNA, 25 bp, Artificial
  Probe
caacatacacagtacagtggtataa

SEQ ID NO: 110220 - DNA, 25 bp, Artificial
  Probe
gtttattgttcagaaggaagattgc

SEQ ID NO: 110221 - DNA, 25 bp, Artificial
  Probe
taaacaaacaaacaagcaaacaaac

SEQ ID NO: 110222 - DNA, 25 bp, Artificial
  Probe
gtaaacaaacaaacaagcaaacaaa

SEQ ID NO: 110223 - DNA, 25 bp, Artificial
  Probe
aaagtaaacaaacaaacaagcaaac

SEQ ID NO: 110224 - DNA, 25 bp, Artificial
  Probe
ggacaacatacacagtacagtggta

SEQ ID NO: 110225 - DNA, 25 bp, Artificial
  Probe
aaatgtaaggcaaatgtaacacaca

SEQ ID NO: 110226 - DNA, 25 bp, Artificial
  Probe
acaaatgtaaggcaaatgtaacaca

SEQ ID NO: 110227 - DNA, 25 bp, Artificial
  Probe
caaatgtaaggcaaatgtaacacac

SEQ ID NO: 110228 - DNA, 25 bp, Artificial
  Probe
agttaagacaaatgtaaggcaaatg

SEQ ID NO: 110229 - DNA, 25 bp, Artificial
  Probe
cagttaagacaaatgtaaggcaaat

SEQ ID NO: 110230 - DNA, 25 bp, Artificial
  Probe
aatgtaaggcaaatgtaacacacac

SEQ ID NO: 110231 - DNA, 25 bp, Artificial
  Probe
gacaaatgtaaggcaaatgtaacac

SEQ ID NO: 110232 - DNA, 25 bp, Artificial
  Probe
agacaaatgtaaggcaaatgtaaca

SEQ ID NO: 110233 - DNA, 25 bp, Artificial
  Probe
acctcttaatgggaccctcatattt

SEQ ID NO: 110234 - DNA, 25 bp, Artificial
  Probe
acacacacacacacacctcttaatg

SEQ ID NO: 110235 - DNA, 25 bp, Artificial
  Probe
cacacacacacacacacctcttaat

SEQ ID NO: 110236 - DNA, 25 bp, Artificial
  Probe
aaactgttgctatttcctaacctgc

SEQ ID NO: 110237 - DNA, 25 bp, Artificial
  Probe
tcagtttattgttcagaaggaagat

SEQ ID NO: 110238 - DNA, 25 bp, Artificial
  Probe
atcagtttattgttcagaaggaaga

SEQ ID NO: 110239 - DNA, 25 bp, Artificial
  Probe
gaattgaaggcagaggcttgtaaat

SEQ ID NO: 110240 - DNA, 25 bp, Artificial
  Probe
aattgaaggcagaggcttgtaaatt

SEQ ID NO: 110241 - DNA, 25 bp, Artificial
  Probe
cacctcttaatgggaccctcatatt

SEQ ID NO: 110242 - DNA, 25 bp, Artificial
  Probe
atgtaaggcaaatgtaacacacaca

SEQ ID NO: 110243 - DNA, 25 bp, Artificial
  Probe
aagacaaatgtaaggcaaatgtaac

SEQ ID NO: 110244 - DNA, 25 bp, Artificial
  Probe
gttaagacaaatgtaaggcaaatgt

SEQ ID NO: 110245 - DNA, 25 bp, Artificial
  Probe
ctaaagtaaacaaacaaacaagcaa

SEQ ID NO: 110246 - DNA, 25 bp, Artificial
  Probe
catgaattgaaggcagaggcttgta

SEQ ID NO: 110247 - DNA, 25 bp, Artificial
  Probe
agtttattgttcagaaggaagattg

SEQ ID NO: 110248 - DNA, 25 bp, Artificial
  Probe
cagtttattgttcagaaggaagatt

SEQ ID NO: 110249 - DNA, 25 bp, Artificial
  Probe
aatcagtttattgttcagaaggaag

SEQ ID NO: 110250 - DNA, 25 bp, Artificial
  Probe
tgcaaatgtatgatgggaaatgttt

SEQ ID NO: 110251 - DNA, 25 bp, Artificial
  Probe
cacacacacacacacctcttaatgg

SEQ ID NO: 110252 - DNA, 25 bp, Artificial
  Probe
aacggacaacatacacagtacagtg

SEQ ID NO: 110253 - DNA, 25 bp, Artificial
  Probe
aatgtaacacacacacacacacaca

SEQ ID NO: 110254 - DNA, 25 bp, Artificial
  Probe
taaggcaaatgtaacacacacacac

SEQ ID NO: 110255 - DNA, 25 bp, Artificial
  Probe
aatggacacgagataatgttagagg

SEQ ID NO: 110256 - DNA, 25 bp, Artificial
  Probe
atggacacgagataatgttagaggt

SEQ ID NO: 110257 - DNA, 25 bp, Artificial
  Probe
tggacacgagataatgttagaggtt

SEQ ID NO: 110258 - DNA, 25 bp, Artificial
  Probe
taatggacacgagataatgttagag

SEQ ID NO: 110259 - DNA, 25 bp, Artificial
  Probe
gttggttctatttaatggacacgag

SEQ ID NO: 110260 - DNA, 25 bp, Artificial
  Probe
cctggcattgttggttctatttaat

SEQ ID NO: 110261 - DNA, 25 bp, Artificial
  Probe
ttggttctatttaatggacacgaga

SEQ ID NO: 110262 - DNA, 25 bp, Artificial
  Probe
ttaatggacacgagataatgttaga

SEQ ID NO: 110263 - DNA, 25 bp, Artificial
  Probe
tggttctatttaatggacacgagat

SEQ ID NO: 110264 - DNA, 25 bp, Artificial
  Probe
ttgttggttctatttaatggacacg

SEQ ID NO: 110265 - DNA, 25 bp, Artificial
  Probe
ggacacgagataatgttagaggttt

SEQ ID NO: 110266 - DNA, 25 bp, Artificial
  Probe
tgttggttctatttaatggacacga

SEQ ID NO: 110267 - DNA, 25 bp, Artificial
  Probe
taggctgacatcatctgtttcaaat

SEQ ID NO: 110268 - DNA, 25 bp, Artificial
  Probe
ggttctatttaatggacacgagata

SEQ ID NO: 110269 - DNA, 25 bp, Artificial
  Probe
gtaggctgacatcatctgtttcaaa

SEQ ID NO: 110270 - DNA, 25 bp, Artificial
  Probe
aggctgacatcatctgtttcaaatg

SEQ ID NO: 110271 - DNA, 25 bp, Artificial
  Probe
gcctggcattgttggttctatttaa

SEQ ID NO: 110272 - DNA, 25 bp, Artificial
  Probe
attgttggttctatttaatggacac

SEQ ID NO: 110273 - DNA, 25 bp, Artificial
  Probe
ggcattgttggttctatttaatgga

SEQ ID NO: 110274 - DNA, 25 bp, Artificial
  Probe
tggcattgttggttctatttaatgg

SEQ ID NO: 110275 - DNA, 25 bp, Artificial
  Probe
aaagtgattaaacgtgcagactatg

SEQ ID NO: 110276 - DNA, 25 bp, Artificial
  Probe
gcattgttggttctatttaatggac

SEQ ID NO: 110277 - DNA, 25 bp, Artificial
  Probe
ctggcattgttggttctatttaatg

SEQ ID NO: 110278 - DNA, 25 bp, Artificial
  Probe
gctgacatcatctgtttcaaatggg

SEQ ID NO: 110279 - DNA, 25 bp, Artificial
  Probe
ggctgacatcatctgtttcaaatgg

SEQ ID NO: 110280 - DNA, 25 bp, Artificial
  Probe
ttaaagtgattaaacgtgcagacta

SEQ ID NO: 110281 - DNA, 25 bp, Artificial
  Probe
taaagtgattaaacgtgcagactat

SEQ ID NO: 110282 - DNA, 25 bp, Artificial
  Probe
ggtaggctgacatcatctgtttcaa

SEQ ID NO: 110283 - DNA, 25 bp, Artificial
  Probe
gttctatttaatggacacgagataa

SEQ ID NO: 110284 - DNA, 25 bp, Artificial
  Probe
tttaatggacacgagataatgttag

SEQ ID NO: 110285 - DNA, 25 bp, Artificial
  Probe
tctatttaatggacacgagataatg

SEQ ID NO: 110286 - DNA, 25 bp, Artificial
  Probe
ctatttaatggacacgagataatgt

SEQ ID NO: 110287 - DNA, 25 bp, Artificial
  Probe
cattgttggttctatttaatggaca

SEQ ID NO: 110288 - DNA, 25 bp, Artificial
  Probe
gacacgagataatgttagaggtttt

SEQ ID NO: 110289 - DNA, 25 bp, Artificial
  Probe
atcatctgtttcaaatggggttgtg

SEQ ID NO: 110290 - DNA, 25 bp, Artificial
  Probe
catcatctgtttcaaatggggttgt

SEQ ID NO: 110291 - DNA, 25 bp, Artificial
  Probe
atttaatggacacgagataatgtta

SEQ ID NO: 110292 - DNA, 25 bp, Artificial
  Probe
tatttaatggacacgagataatgtt

SEQ ID NO: 110293 - DNA, 25 bp, Artificial
  Probe
tttaaagtgattaaacgtgcagact

SEQ ID NO: 110294 - DNA, 25 bp, Artificial
  Probe
gacatcatctgtttcaaatggggtt

SEQ ID NO: 110295 - DNA, 25 bp, Artificial
  Probe
acatcatctgtttcaaatggggttg

SEQ ID NO: 110296 - DNA, 25 bp, Artificial
  Probe
ttctatttaatggacacgagataat

SEQ ID NO: 110297 - DNA, 25 bp, Artificial
  Probe
ctgacatcatctgtttcaaatgggg

SEQ ID NO: 110298 - DNA, 25 bp, Artificial
  Probe
acacgagataatgttagaggtttta

SEQ ID NO: 110299 - DNA, 25 bp, Artificial
  Probe
cacgagataatgttagaggttttaa

SEQ ID NO: 110300 - DNA, 25 bp, Artificial
  Probe
gacagcctccttctctcatatttat

SEQ ID NO: 110301 - DNA, 25 bp, Artificial
  Probe
agacagcctccttctctcatattta

SEQ ID NO: 110302 - DNA, 25 bp, Artificial
  Probe
acagcctccttctctcatatttatg

SEQ ID NO: 110303 - DNA, 25 bp, Artificial
  Probe
cagcctccttctctcatatttatgg

SEQ ID NO: 110304 - DNA, 25 bp, Artificial
  Probe
agcctccttctctcatatttatggg

SEQ ID NO: 110305 - DNA, 25 bp, Artificial
  Probe
catttctcttagtggaagcatgaag

SEQ ID NO: 110306 - DNA, 25 bp, Artificial
  Probe
atttctcttagtggaagcatgaagt

SEQ ID NO: 110307 - DNA, 25 bp, Artificial
  Probe
gttaataaagggaacactgagcagg

SEQ ID NO: 110308 - DNA, 25 bp, Artificial
  Probe
tttctcttagtggaagcatgaagtc

SEQ ID NO: 110309 - DNA, 25 bp, Artificial
  Probe
ttctcttagtggaagcatgaagtcc

SEQ ID NO: 110310 - DNA, 25 bp, Artificial
  Probe
cctgctccacctcatgttaataaag

SEQ ID NO: 110311 - DNA, 25 bp, Artificial
  Probe
gcatttctcttagtggaagcatgaa

SEQ ID NO: 110312 - DNA, 25 bp, Artificial
  Probe
ctgctttacttctgtgctttgacat

SEQ ID NO: 110313 - DNA, 25 bp, Artificial
  Probe
gttctgactctacacccttgatctg

SEQ ID NO: 110314 - DNA, 25 bp, Artificial
  Probe
aacagtgtccaggcatttctcttag

SEQ ID NO: 110315 - DNA, 25 bp, Artificial
  Probe
ctccacctcatgttaataaagggaa

SEQ ID NO: 110316 - DNA, 25 bp, Artificial
  Probe
tccacctcatgttaataaagggaac

SEQ ID NO: 110317 - DNA, 25 bp, Artificial
  Probe
caacagtgtccaggcatttctctta

SEQ ID NO: 110318 - DNA, 25 bp, Artificial
  Probe
ctgctccacctcatgttaataaagg

SEQ ID NO: 110319 - DNA, 25 bp, Artificial
  Probe
ttaataaagggaacactgagcaggc

SEQ ID NO: 110320 - DNA, 25 bp, Artificial
  Probe
caggcatttctcttagtggaagcat

SEQ ID NO: 110321 - DNA, 25 bp, Artificial
  Probe
tgtttcatgtactctcacacaccat

SEQ ID NO: 110322 - DNA, 25 bp, Artificial
  Probe
atgtttcatgtactctcacacacca

SEQ ID NO: 110323 - DNA, 25 bp, Artificial
  Probe
cagtgtccaggcatttctcttagtg

SEQ ID NO: 110324 - DNA, 25 bp, Artificial
  Probe
tgctttacttctgtgctttgacatg

SEQ ID NO: 110325 - DNA, 25 bp, Artificial
  Probe
ttctgactctacacccttgatctgt

SEQ ID NO: 110326 - DNA, 25 bp, Artificial
  Probe
gcctgctccacctcatgttaataaa

SEQ ID NO: 110327 - DNA, 25 bp, Artificial
  Probe
ggcatttctcttagtggaagcatga

SEQ ID NO: 110328 - DNA, 25 bp, Artificial
  Probe
aggcatttctcttagtggaagcatg

SEQ ID NO: 110329 - DNA, 25 bp, Artificial
  Probe
gctccacctcatgttaataaaggga

SEQ ID NO: 110330 - DNA, 25 bp, Artificial
  Probe
acagtgtccaggcatttctcttagt

SEQ ID NO: 110331 - DNA, 25 bp, Artificial
  Probe
tgctccacctcatgttaataaaggg

SEQ ID NO: 110332 - DNA, 25 bp, Artificial
  Probe
tctgactctacacccttgatctgtc

SEQ ID NO: 110333 - DNA, 25 bp, Artificial
  Probe
gtacctccaggttctgactctacac

SEQ ID NO: 110334 - DNA, 25 bp, Artificial
  Probe
caagacacaccaggacctacaagac

SEQ ID NO: 110335 - DNA, 25 bp, Artificial
  Probe
atgttaataaagggaacactgagca

SEQ ID NO: 110336 - DNA, 25 bp, Artificial
  Probe
cacctcatgttaataaagggaacac

SEQ ID NO: 110337 - DNA, 25 bp, Artificial
  Probe
catgttaataaagggaacactgagc

SEQ ID NO: 110338 - DNA, 25 bp, Artificial
  Probe
acctcatgttaataaagggaacact

SEQ ID NO: 110339 - DNA, 25 bp, Artificial
  Probe
cctcatgttaataaagggaacactg

SEQ ID NO: 110340 - DNA, 25 bp, Artificial
  Probe
taataaagggaacactgagcaggca

SEQ ID NO: 110341 - DNA, 25 bp, Artificial
  Probe
ccacctcatgttaataaagggaaca

SEQ ID NO: 110342 - DNA, 25 bp, Artificial
  Probe
tgttaataaagggaacactgagcag

SEQ ID NO: 110343 - DNA, 25 bp, Artificial
  Probe
cctgctttacttctgtgctttgaca

SEQ ID NO: 110344 - DNA, 25 bp, Artificial
  Probe
tcatgttaataaagggaacactgag

SEQ ID NO: 110345 - DNA, 25 bp, Artificial
  Probe
ttctagcatataagacagccaatgg

SEQ ID NO: 110346 - DNA, 25 bp, Artificial
  Probe
cttctagcatataagacagccaatg

SEQ ID NO: 110347 - DNA, 25 bp, Artificial
  Probe
ccaaaggagaagccaaatgtattaa

SEQ ID NO: 110348 - DNA, 25 bp, Artificial
  Probe
atataagacagccaatgggaggtaa

SEQ ID NO: 110349 - DNA, 25 bp, Artificial
  Probe
ttcttctagcatataagacagccaa

SEQ ID NO: 110350 - DNA, 25 bp, Artificial
  Probe
attatacactcacccagatgactct

SEQ ID NO: 110351 - DNA, 25 bp, Artificial
  Probe
gctattatacactcacccagatgac

SEQ ID NO: 110352 - DNA, 25 bp, Artificial
  Probe
tcttctagcatataagacagccaat

SEQ ID NO: 110353 - DNA, 25 bp, Artificial
  Probe
attcttctagcatataagacagcca

SEQ ID NO: 110354 - DNA, 25 bp, Artificial
  Probe
ttatacactcacccagatgactctt

SEQ ID NO: 110355 - DNA, 25 bp, Artificial
  Probe
tacaaactgactgagtgagtgacta

SEQ ID NO: 110356 - DNA, 25 bp, Artificial
  Probe
tattatacactcacccagatgactc

SEQ ID NO: 110357 - DNA, 25 bp, Artificial
  Probe
ctattatacactcacccagatgact

SEQ ID NO: 110358 - DNA, 25 bp, Artificial
  Probe
agccaatgggaggtaagtattctag

SEQ ID NO: 110359 - DNA, 25 bp, Artificial
  Probe
cagccaatgggaggtaagtattcta

SEQ ID NO: 110360 - DNA, 25 bp, Artificial
  Probe
tataagacagccaatgggaggtaag

SEQ ID NO: 110361 - DNA, 25 bp, Artificial
  Probe
cttacaaactgactgagtgagtgac

SEQ ID NO: 110362 - DNA, 25 bp, Artificial
  Probe
tatacactcacccagatgactcttg

SEQ ID NO: 110363 - DNA, 25 bp, Artificial
  Probe
ggctattatacactcacccagatga

SEQ ID NO: 110364 - DNA, 25 bp, Artificial
  Probe
caaaggagaagccaaatgtattaaa

SEQ ID NO: 110365 - DNA, 25 bp, Artificial
  Probe
ttacaaactgactgagtgagtgact

SEQ ID NO: 110366 - DNA, 25 bp, Artificial
  Probe
catataagacagccaatgggaggta

SEQ ID NO: 110367 - DNA, 25 bp, Artificial
  Probe
tagcatataagacagccaatgggag

SEQ ID NO: 110368 - DNA, 25 bp, Artificial
  Probe
tccaaaggagaagccaaatgtatta

SEQ ID NO: 110369 - DNA, 25 bp, Artificial
  Probe
ctagcatataagacagccaatggga

SEQ ID NO: 110370 - DNA, 25 bp, Artificial
  Probe
tctagcatataagacagccaatggg

SEQ ID NO: 110371 - DNA, 25 bp, Artificial
  Probe
atccaaaggagaagccaaatgtatt

SEQ ID NO: 110372 - DNA, 25 bp, Artificial
  Probe
cggctattatacactcacccagatg

SEQ ID NO: 110373 - DNA, 25 bp, Artificial
  Probe
acaaactgactgagtgagtgactag

SEQ ID NO: 110374 - DNA, 25 bp, Artificial
  Probe
tattcttctagcatataagacagcc

SEQ ID NO: 110375 - DNA, 25 bp, Artificial
  Probe
taagacagccaatgggaggtaagta

SEQ ID NO: 110376 - DNA, 25 bp, Artificial
  Probe
gatccaaaggagaagccaaatgtat

SEQ ID NO: 110377 - DNA, 25 bp, Artificial
  Probe
ctagatccaaaggagaagccaaatg

SEQ ID NO: 110378 - DNA, 25 bp, Artificial
  Probe
gcttacaaactgactgagtgagtga

SEQ ID NO: 110379 - DNA, 25 bp, Artificial
  Probe
gacagccaatgggaggtaagtattc

SEQ ID NO: 110380 - DNA, 25 bp, Artificial
  Probe
tgcttacaaactgactgagtgagtg

SEQ ID NO: 110381 - DNA, 25 bp, Artificial
  Probe
gtgcttacaaactgactgagtgagt

SEQ ID NO: 110382 - DNA, 25 bp, Artificial
  Probe
agatccaaaggagaagccaaatgta

SEQ ID NO: 110383 - DNA, 25 bp, Artificial
  Probe
tagatccaaaggagaagccaaatgt

SEQ ID NO: 110384 - DNA, 25 bp, Artificial
  Probe
ctcaaacgactgtgcttacaaactg

SEQ ID NO: 110385 - DNA, 25 bp, Artificial
  Probe
acagccaatgggaggtaagtattct

SEQ ID NO: 110386 - DNA, 25 bp, Artificial
  Probe
agacagccaatgggaggtaagtatt

SEQ ID NO: 110387 - DNA, 25 bp, Artificial
  Probe
aagacagccaatgggaggtaagtat

SEQ ID NO: 110388 - DNA, 25 bp, Artificial
  Probe
ataagacagccaatgggaggtaagt

SEQ ID NO: 110389 - DNA, 25 bp, Artificial
  Probe
tgtgcttacaaactgactgagtgag

SEQ ID NO: 110390 - DNA, 25 bp, Artificial
  Probe
atcttcatctgttctctggacattg

SEQ ID NO: 110391 - DNA, 25 bp, Artificial
  Probe
tcttcatctgttctctggacattgt

SEQ ID NO: 110392 - DNA, 25 bp, Artificial
  Probe
cttcatctgttctctggacattgtc

SEQ ID NO: 110393 - DNA, 25 bp, Artificial
  Probe
ttcatctgttctctggacattgtct

SEQ ID NO: 110394 - DNA, 25 bp, Artificial
  Probe
ctgtcatctcattgcctccatcttc

SEQ ID NO: 110395 - DNA, 25 bp, Artificial
  Probe
gttctctggacattgtctgttcatg

SEQ ID NO: 110396 - DNA, 25 bp, Artificial
  Probe
atctgttctctggacattgtctgtt

SEQ ID NO: 110397 - DNA, 25 bp, Artificial
  Probe
taataaattggcatggaaggaaggt

SEQ ID NO: 110398 - DNA, 25 bp, Artificial
  Probe
ataataaattggcatggaaggaagg

SEQ ID NO: 110399 - DNA, 25 bp, Artificial
  Probe
tactccagatgtatcaaagttgacc

SEQ ID NO: 110400 - DNA, 25 bp, Artificial
  Probe
tgttctctggacattgtctgttcat

SEQ ID NO: 110401 - DNA, 25 bp, Artificial
  Probe
tcatctgttctctggacattgtctg

SEQ ID NO: 110402 - DNA, 25 bp, Artificial
  Probe
tctgttctctggacattgtctgttc

SEQ ID NO: 110403 - DNA, 25 bp, Artificial
  Probe
actgtcatctcattgcctccatctt

SEQ ID NO: 110404 - DNA, 25 bp, Artificial
  Probe
catctgttctctggacattgtctgt

SEQ ID NO: 110405 - DNA, 25 bp, Artificial
  Probe
actccagatgtatcaaagttgacct

SEQ ID NO: 110406 - DNA, 25 bp, Artificial
  Probe
ttactccagatgtatcaaagttgac

SEQ ID NO: 110407 - DNA, 25 bp, Artificial
  Probe
aataaattggcatggaaggaaggtg

SEQ ID NO: 110408 - DNA, 25 bp, Artificial
  Probe
ctgttctctggacattgtctgttca

SEQ ID NO: 110409 - DNA, 25 bp, Artificial
  Probe
aataataaattggcatggaaggaag

SEQ ID NO: 110410 - DNA, 25 bp, Artificial
  Probe
ccaagatgttgcatgaatgaaggac

SEQ ID NO: 110411 - DNA, 25 bp, Artificial
  Probe
attgtctgttcatgtttcttgcatt

SEQ ID NO: 110412 - DNA, 25 bp, Artificial
  Probe
tgtctgttcatgtttcttgcattta

SEQ ID NO: 110413 - DNA, 25 bp, Artificial
  Probe
ttgtctgttcatgtttcttgcattt

SEQ ID NO: 110414 - DNA, 25 bp, Artificial
  Probe
tttactccagatgtatcaaagttga

SEQ ID NO: 110415 - DNA, 25 bp, Artificial
  Probe
cattgtctgttcatgtttcttgcat

SEQ ID NO: 110416 - DNA, 25 bp, Artificial
  Probe
ataaattggcatggaaggaaggtgt

SEQ ID NO: 110417 - DNA, 25 bp, Artificial
  Probe
aaataataaattggcatggaaggaa

SEQ ID NO: 110418 - DNA, 25 bp, Artificial
  Probe
gtctgttcatgtttcttgcatttat

SEQ ID NO: 110419 - DNA, 25 bp, Artificial
  Probe
tgtcatctcattgcctccatcttcc

SEQ ID NO: 110420 - DNA, 25 bp, Artificial
  Probe
cactgtcatctcattgcctccatct

SEQ ID NO: 110421 - DNA, 25 bp, Artificial
  Probe
cgtggcttcacatctattaaataat

SEQ ID NO: 110422 - DNA, 25 bp, Artificial
  Probe
tctctggacattgtctgttcatgtt

SEQ ID NO: 110423 - DNA, 25 bp, Artificial
  Probe
ttctctggacattgtctgttcatgt

SEQ ID NO: 110424 - DNA, 25 bp, Artificial
  Probe
tctgttcatgtttcttgcatttatt

SEQ ID NO: 110425 - DNA, 25 bp, Artificial
  Probe
caccttttactccagatgtatcaaa

SEQ ID NO: 110426 - DNA, 25 bp, Artificial
  Probe
acactgtcatctcattgcctccatc

SEQ ID NO: 110427 - DNA, 25 bp, Artificial
  Probe
taaattggcatggaaggaaggtgtc

SEQ ID NO: 110428 - DNA, 25 bp, Artificial
  Probe
acgtggcttcacatctattaaataa

SEQ ID NO: 110429 - DNA, 25 bp, Artificial
  Probe
taaataataaattggcatggaagga

SEQ ID NO: 110430 - DNA, 25 bp, Artificial
  Probe
ttaacgagttcaagtgaaggaaaac

SEQ ID NO: 110431 - DNA, 25 bp, Artificial
  Probe
acaccttttactccagatgtatcaa

SEQ ID NO: 110432 - DNA, 25 bp, Artificial
  Probe
aacaccttttactccagatgtatca

SEQ ID NO: 110433 - DNA, 25 bp, Artificial
  Probe
tttaacgagttcaagtgaaggaaaa

SEQ ID NO: 110434 - DNA, 25 bp, Artificial
  Probe
ttttaacgagttcaagtgaaggaaa

SEQ ID NO: 110435 - DNA, 25 bp, Artificial
  Probe
aatatccaagcatacctcatctctg

SEQ ID NO: 110436 - DNA, 25 bp, Artificial
  Probe
caatatccaagcatacctcatctct

SEQ ID NO: 110437 - DNA, 25 bp, Artificial
  Probe
gtatgaaggagcaagttggagtatc

SEQ ID NO: 110438 - DNA, 25 bp, Artificial
  Probe
gcaatatccaagcatacctcatctc

SEQ ID NO: 110439 - DNA, 25 bp, Artificial
  Probe
atatccaagcatacctcatctctga

SEQ ID NO: 110440 - DNA, 25 bp, Artificial
  Probe
agcaatatccaagcatacctcatct

SEQ ID NO: 110441 - DNA, 25 bp, Artificial
  Probe
tagagcaatatccaagcatacctca

SEQ ID NO: 110442 - DNA, 25 bp, Artificial
  Probe
ctagagcaatatccaagcatacctc

SEQ ID NO: 110443 - DNA, 25 bp, Artificial
  Probe
ggtatgaaggagcaagttggagtat

SEQ ID NO: 110444 - DNA, 25 bp, Artificial
  Probe
gagcaatatccaagcatacctcatc

SEQ ID NO: 110445 - DNA, 25 bp, Artificial
  Probe
agagcaatatccaagcatacctcat

SEQ ID NO: 110446 - DNA, 25 bp, Artificial
  Probe
aagttggagtatcctgagttctgta

SEQ ID NO: 110447 - DNA, 25 bp, Artificial
  Probe
agttggagtatcctgagttctgtag

SEQ ID NO: 110448 - DNA, 25 bp, Artificial
  Probe
aggtatgaaggagcaagttggagta

SEQ ID NO: 110449 - DNA, 25 bp, Artificial
  Probe
tatgaaggagcaagttggagtatcc

SEQ ID NO: 110450 - DNA, 25 bp, Artificial
  Probe
caagttggagtatcctgagttctgt

SEQ ID NO: 110451 - DNA, 25 bp, Artificial
  Probe
gttggagtatcctgagttctgtagc

SEQ ID NO: 110452 - DNA, 25 bp, Artificial
  Probe
atctagagcaatatccaagcatacc

SEQ ID NO: 110453 - DNA, 25 bp, Artificial
  Probe
aacatctagagcaatatccaagcat

SEQ ID NO: 110454 - DNA, 25 bp, Artificial
  Probe
tgtgtgtgtgtaactgtgagtcttg

SEQ ID NO: 110455 - DNA, 25 bp, Artificial
  Probe
gtgtgtgtgtgtaactgtgagtctt

SEQ ID NO: 110456 - DNA, 25 bp, Artificial
  Probe
acatctagagcaatatccaagcata

SEQ ID NO: 110457 - DNA, 25 bp, Artificial
  Probe
tctagagcaatatccaagcatacct

SEQ ID NO: 110458 - DNA, 25 bp, Artificial
  Probe
catctagagcaatatccaagcatac

SEQ ID NO: 110459 - DNA, 25 bp, Artificial
  Probe
caacatctagagcaatatccaagca

SEQ ID NO: 110460 - DNA, 25 bp, Artificial
  Probe
acaacatctagagcaatatccaagc

SEQ ID NO: 110461 - DNA, 25 bp, Artificial
  Probe
gagcaagttggagtatcctgagttc

SEQ ID NO: 110462 - DNA, 25 bp, Artificial
  Probe
gagtatcctgagttctgtagctaga

SEQ ID NO: 110463 - DNA, 25 bp, Artificial
  Probe
gatgtgtggtgaaacagagaaatgt

SEQ ID NO: 110464 - DNA, 25 bp, Artificial
  Probe
tgatgtgtggtgaaacagagaaatg

SEQ ID NO: 110465 - DNA, 25 bp, Artificial
  Probe
ctgatgtgtggtgaaacagagaaat

SEQ ID NO: 110466 - DNA, 25 bp, Artificial
  Probe
agtatcctgagttctgtagctagac

SEQ ID NO: 110467 - DNA, 25 bp, Artificial
  Probe
cttcattaaagatgccactgcttcc

SEQ ID NO: 110468 - DNA, 25 bp, Artificial
  Probe
tacaacatctagagcaatatccaag

SEQ ID NO: 110469 - DNA, 25 bp, Artificial
  Probe
gcaagttggagtatcctgagttctg

SEQ ID NO: 110470 - DNA, 25 bp, Artificial
  Probe
agcaagttggagtatcctgagttct

SEQ ID NO: 110471 - DNA, 25 bp, Artificial
  Probe
gtgtgtgtgtaactgtgagtcttgg

SEQ ID NO: 110472 - DNA, 25 bp, Artificial
  Probe
ttggagtatcctgagttctgtagct

SEQ ID NO: 110473 - DNA, 25 bp, Artificial
  Probe
gaggtatgaaggagcaagttggagt

SEQ ID NO: 110474 - DNA, 25 bp, Artificial
  Probe
ttacaacatctagagcaatatccaa

SEQ ID NO: 110475 - DNA, 25 bp, Artificial
  Probe
cagtataccacagacatgctcttcc

SEQ ID NO: 110476 - DNA, 25 bp, Artificial
  Probe
gtgtgtgtgtgtgtgtaactgtgag

SEQ ID NO: 110477 - DNA, 25 bp, Artificial
  Probe
atctgcctcaccaggtcttcattaa

SEQ ID NO: 110478 - DNA, 25 bp, Artificial
  Probe
tatcctgagttctgtagctagacga

SEQ ID NO: 110479 - DNA, 25 bp, Artificial
  Probe
gtatcctgagttctgtagctagacg

SEQ ID NO: 110480 - DNA, 25 bp, Artificial
  Probe
gtttaatttctggaggttgtgtgta

SEQ ID NO: 110481 - DNA, 25 bp, Artificial
  Probe
ttaatttctggaggttgtgtgtagg

SEQ ID NO: 110482 - DNA, 25 bp, Artificial
  Probe
tttaatttctggaggttgtgtgtag

SEQ ID NO: 110483 - DNA, 25 bp, Artificial
  Probe
tagtgtgctcctttgaagttgattg

SEQ ID NO: 110484 - DNA, 25 bp, Artificial
  Probe
aggtttaatttctggaggttgtgtg

SEQ ID NO: 110485 - DNA, 25 bp, Artificial
  Probe
ctagtgtgctcctttgaagttgatt

SEQ ID NO: 110486 - DNA, 25 bp, Artificial
  Probe
ggtttaatttctggaggttgtgtgt

SEQ ID NO: 110487 - DNA, 25 bp, Artificial
  Probe
ccttctaaatgatcttcaaacccac

SEQ ID NO: 110488 - DNA, 25 bp, Artificial
  Probe
accttctaaatgatcttcaaaccca

SEQ ID NO: 110489 - DNA, 25 bp, Artificial
  Probe
aacaggtttaatttctggaggttgt

SEQ ID NO: 110490 - DNA, 25 bp, Artificial
  Probe
tctaaatgatcttcaaacccactcg

SEQ ID NO: 110491 - DNA, 25 bp, Artificial
  Probe
aaccttctaaatgatcttcaaaccc

SEQ ID NO: 110492 - DNA, 25 bp, Artificial
  Probe
tctagtgtgctcctttgaagttgat

SEQ ID NO: 110493 - DNA, 25 bp, Artificial
  Probe
ttctaaatgatcttcaaacccactc

SEQ ID NO: 110494 - DNA, 25 bp, Artificial
  Probe
cttctaaatgatcttcaaacccact

SEQ ID NO: 110495 - DNA, 25 bp, Artificial
  Probe
gcaaccttctaaatgatcttcaaac

SEQ ID NO: 110496 - DNA, 25 bp, Artificial
  Probe
aaacaggtttaatttctggaggttg

SEQ ID NO: 110497 - DNA, 25 bp, Artificial
  Probe
taatttctggaggttgtgtgtaggg

SEQ ID NO: 110498 - DNA, 25 bp, Artificial
  Probe
ctaaatgatcttcaaacccactcgt

SEQ ID NO: 110499 - DNA, 25 bp, Artificial
  Probe
taaatgatcttcaaacccactcgtg

SEQ ID NO: 110500 - DNA, 25 bp, Artificial
  Probe
caggtttaatttctggaggttgtgt

SEQ ID NO: 110501 - DNA, 25 bp, Artificial
  Probe
acaggtttaatttctggaggttgtg

SEQ ID NO: 110502 - DNA, 25 bp, Artificial
  Probe
caaccttctaaatgatcttcaaacc

SEQ ID NO: 110503 - DNA, 25 bp, Artificial
  Probe
ctctagtgtgctcctttgaagttga

SEQ ID NO: 110504 - DNA, 25 bp, Artificial
  Probe
tctctagtgtgctcctttgaagttg

SEQ ID NO: 110505 - DNA, 25 bp, Artificial
  Probe
gtctctagtgtgctcctttgaagtt

SEQ ID NO: 110506 - DNA, 25 bp, Artificial
  Probe
tgcaaccttctaaatgatcttcaaa

SEQ ID NO: 110507 - DNA, 25 bp, Artificial
  Probe
tgtataagaaagcaggctgagcaag

SEQ ID NO: 110508 - DNA, 25 bp, Artificial
  Probe
aattgacaaatgcctcctgctgatt

SEQ ID NO: 110509 - DNA, 25 bp, Artificial
  Probe
aaatgatcttcaaacccactcgtgt

SEQ ID NO: 110510 - DNA, 25 bp, Artificial
  Probe
gtgtataagaaagcaggctgagcaa

SEQ ID NO: 110511 - DNA, 25 bp, Artificial
  Probe
aatttctggaggttgtgtgtagggt

SEQ ID NO: 110512 - DNA, 25 bp, Artificial
  Probe
atttctggaggttgtgtgtagggtc

SEQ ID NO: 110513 - DNA, 25 bp, Artificial
  Probe
aaaacaggtttaatttctggaggtt

SEQ ID NO: 110514 - DNA, 25 bp, Artificial
  Probe
agtgtgctcctttgaagttgattgc

SEQ ID NO: 110515 - DNA, 25 bp, Artificial
  Probe
attgacaaatgcctcctgctgattg

SEQ ID NO: 110516 - DNA, 25 bp, Artificial
  Probe
gaggagtgtctcttcatggcttctg

SEQ ID NO: 110517 - DNA, 25 bp, Artificial
  Probe
aatgatcttcaaacccactcgtgtg

SEQ ID NO: 110518 - DNA, 25 bp, Artificial
  Probe
cattcacataggcatgtttcacgag

SEQ ID NO: 110519 - DNA, 25 bp, Artificial
  Probe
gtgaggagtgtctcttcatggcttc

SEQ ID NO: 110520 - DNA, 25 bp, Artificial
  Probe
tgaggagtgtctcttcatggcttct

SEQ ID NO: 110521 - DNA, 25 bp, Artificial
  Probe
cacattcacataggcatgtttcacg

SEQ ID NO: 110522 - DNA, 25 bp, Artificial
  Probe
tgattgcaaccttctaaatgatctt

SEQ ID NO: 110523 - DNA, 25 bp, Artificial
  Probe
acattcacataggcatgtttcacga

SEQ ID NO: 110524 - DNA, 25 bp, Artificial
  Probe
gcacattcacataggcatgtttcac

SEQ ID NO: 110525 - DNA, 25 bp, Artificial
  Probe
atgtgtatctatgtgtctctgtgtc

SEQ ID NO: 110526 - DNA, 25 bp, Artificial
  Probe
tgtgtatctatgtgtctctgtgtct

SEQ ID NO: 110527 - DNA, 25 bp, Artificial
  Probe
catgtgtatctatgtgtctctgtgt

SEQ ID NO: 110528 - DNA, 25 bp, Artificial
  Probe
gtgtatctatgtgtctctgtgtctt

SEQ ID NO: 110529 - DNA, 25 bp, Artificial
  Probe
tgtatctatgtgtctctgtgtcttc

SEQ ID NO: 110530 - DNA, 25 bp, Artificial
  Probe
gtatctatgtgtctctgtgtcttcg

SEQ ID NO: 110531 - DNA, 25 bp, Artificial
  Probe
tatctatgtgtctctgtgtcttcgt

SEQ ID NO: 110532 - DNA, 25 bp, Artificial
  Probe
gcatgtgtatctatgtgtctctgtg

SEQ ID NO: 110533 - DNA, 25 bp, Artificial
  Probe
atctatgtgtctctgtgtcttcgtg

SEQ ID NO: 110534 - DNA, 25 bp, Artificial
  Probe
ctgcatgtgtatctatgtgtctctg

SEQ ID NO: 110535 - DNA, 25 bp, Artificial
  Probe
tctgcatgtgtatctatgtgtctct

SEQ ID NO: 110536 - DNA, 25 bp, Artificial
  Probe
ttgtgtgtatatgtgtctctgtatt

SEQ ID NO: 110537 - DNA, 25 bp, Artificial
  Probe
tgcatgtgtatctatgtgtctctgt

SEQ ID NO: 110538 - DNA, 25 bp, Artificial
  Probe
ctgtatgtgtatcttgcctgtgtgt

SEQ ID NO: 110539 - DNA, 25 bp, Artificial
  Probe
atatgtgtctctgtatttctgtggg

SEQ ID NO: 110540 - DNA, 25 bp, Artificial
  Probe
agtttgtgtgtatatgtgtctctgt

SEQ ID NO: 110541 - DNA, 25 bp, Artificial
  Probe
gtcttcgtgagtttgtgtgtatatg

SEQ ID NO: 110542 - DNA, 25 bp, Artificial
  Probe
cttcgtgagtttgtgtgtatatgtg

SEQ ID NO: 110543 - DNA, 25 bp, Artificial
  Probe
tcttcgtgagtttgtgtgtatatgt

SEQ ID NO: 110544 - DNA, 25 bp, Artificial
  Probe
tgtcttcgtgagtttgtgtgtatat

SEQ ID NO: 110545 - DNA, 25 bp, Artificial
  Probe
ttcgtgagtttgtgtgtatatgtgt

SEQ ID NO: 110546 - DNA, 25 bp, Artificial
  Probe
tctatgtgtctctgtgtcttcgtga

SEQ ID NO: 110547 - DNA, 25 bp, Artificial
  Probe
ttctgcatgtgtatctatgtgtctc

SEQ ID NO: 110548 - DNA, 25 bp, Artificial
  Probe
cttctgcatgtgtatctatgtgtct

SEQ ID NO: 110549 - DNA, 25 bp, Artificial
  Probe
tatgtgtctctgtatttctgtgggt

SEQ ID NO: 110550 - DNA, 25 bp, Artificial
  Probe
gtgtcttcgtgagtttgtgtgtata

SEQ ID NO: 110551 - DNA, 25 bp, Artificial
  Probe
tatgtgtatcttgcctgtgtgtgtg

SEQ ID NO: 110552 - DNA, 25 bp, Artificial
  Probe
gtatgtgtatcttgcctgtgtgtgt

SEQ ID NO: 110553 - DNA, 25 bp, Artificial
  Probe
tgtatgtgtatcttgcctgtgtgtg

SEQ ID NO: 110554 - DNA, 25 bp, Artificial
  Probe
tgtgtgtggctgtatgtgtatcttg

SEQ ID NO: 110555 - DNA, 25 bp, Artificial
  Probe
gtgtgtgtggctgtatgtgtatctt

SEQ ID NO: 110556 - DNA, 25 bp, Artificial
  Probe
cgtgagtttgtgtgtatatgtgtct

SEQ ID NO: 110557 - DNA, 25 bp, Artificial
  Probe
tcgtgagtttgtgtgtatatgtgtc

SEQ ID NO: 110558 - DNA, 25 bp, Artificial
  Probe
ctatgtgtctctgtgtcttcgtgag

SEQ ID NO: 110559 - DNA, 25 bp, Artificial
  Probe
gtttgtgtgtatatgtgtctctgta

SEQ ID NO: 110560 - DNA, 25 bp, Artificial
  Probe
tgagtttgtgtgtatatgtgtctct

SEQ ID NO: 110561 - DNA, 25 bp, Artificial
  Probe
gtgagtttgtgtgtatatgtgtctc

SEQ ID NO: 110562 - DNA, 25 bp, Artificial
  Probe
gagtttgtgtgtatatgtgtctctg

SEQ ID NO: 110563 - DNA, 25 bp, Artificial
  Probe
gcttctgcatgtgtatctatgtgtc

SEQ ID NO: 110564 - DNA, 25 bp, Artificial
  Probe
tatatgtgtctctgtatttctgtgg

SEQ ID NO: 110565 - DNA, 25 bp, Artificial
  Probe
tgtgtgtatatgtgtctctgtattt

SEQ ID NO: 110566 - DNA, 25 bp, Artificial
  Probe
tttgtgtgtatatgtgtctctgtat

SEQ ID NO: 110567 - DNA, 25 bp, Artificial
  Probe
ctgtgtgtgtggctgtatgtgtatc

SEQ ID NO: 110568 - DNA, 25 bp, Artificial
  Probe
tatgtgtctctgtgtcttcgtgagt

SEQ ID NO: 110569 - DNA, 25 bp, Artificial
  Probe
atgtgtctctgtatttctgtgggtg

SEQ ID NO: 110570 - DNA, 25 bp, Artificial
  Probe
gacttgagttacttatggaatggct

SEQ ID NO: 110571 - DNA, 25 bp, Artificial
  Probe
tgacttgagttacttatggaatggc

SEQ ID NO: 110572 - DNA, 25 bp, Artificial
  Probe
ctgacttgagttacttatggaatgg

SEQ ID NO: 110573 - DNA, 25 bp, Artificial
  Probe
agttacttatggaatggctctcaga

SEQ ID NO: 110574 - DNA, 25 bp, Artificial
  Probe
ttgagttacttatggaatggctctc

SEQ ID NO: 110575 - DNA, 25 bp, Artificial
  Probe
cttgagttacttatggaatggctct

SEQ ID NO: 110576 - DNA, 25 bp, Artificial
  Probe
acttgagttacttatggaatggctc

SEQ ID NO: 110577 - DNA, 25 bp, Artificial
  Probe
gagttacttatggaatggctctcag

SEQ ID NO: 110578 - DNA, 25 bp, Artificial
  Probe
tctgacttgagttacttatggaatg

SEQ ID NO: 110579 - DNA, 25 bp, Artificial
  Probe
caacatccaatcatagtgtaagcaa

SEQ ID NO: 110580 - DNA, 25 bp, Artificial
  Probe
tccaacatccaatcatagtgtaagc

SEQ ID NO: 110581 - DNA, 25 bp, Artificial
  Probe
ccaacatccaatcatagtgtaagca

SEQ ID NO: 110582 - DNA, 25 bp, Artificial
  Probe
gttcactaatgagttccaactgtct

SEQ ID NO: 110583 - DNA, 25 bp, Artificial
  Probe
ttccaacatccaatcatagtgtaag

SEQ ID NO: 110584 - DNA, 25 bp, Artificial
  Probe
ttcactaatgagttccaactgtctc

SEQ ID NO: 110585 - DNA, 25 bp, Artificial
  Probe
gttacttatggaatggctctcagag

SEQ ID NO: 110586 - DNA, 25 bp, Artificial
  Probe
ggttcactaatgagttccaactgtc

SEQ ID NO: 110587 - DNA, 25 bp, Artificial
  Probe
ttctgacttgagttacttatggaat

SEQ ID NO: 110588 - DNA, 25 bp, Artificial
  Probe
attctgacttgagttacttatggaa

SEQ ID NO: 110589 - DNA, 25 bp, Artificial
  Probe
ttacttatggaatggctctcagagg

SEQ ID NO: 110590 - DNA, 25 bp, Artificial
  Probe
catccaatcatagtgtaagcaaacg

SEQ ID NO: 110591 - DNA, 25 bp, Artificial
  Probe
tccatatcctgtaaactaaccaact

SEQ ID NO: 110592 - DNA, 25 bp, Artificial
  Probe
gccctgtggaagtttattcttagat

SEQ ID NO: 110593 - DNA, 25 bp, Artificial
  Probe
ccatatcctgtaaactaaccaactc

SEQ ID NO: 110594 - DNA, 25 bp, Artificial
  Probe
tgctagtcacctctttcagttattt

SEQ ID NO: 110595 - DNA, 25 bp, Artificial
  Probe
ttgctagtcacctctttcagttatt

SEQ ID NO: 110596 - DNA, 25 bp, Artificial
  Probe
cttgctagtcacctctttcagttat

SEQ ID NO: 110597 - DNA, 25 bp, Artificial
  Probe
tattctgacttgagttacttatgga

SEQ ID NO: 110598 - DNA, 25 bp, Artificial
  Probe
tacttatggaatggctctcagagga

SEQ ID NO: 110599 - DNA, 25 bp, Artificial
  Probe
ttccatatcctgtaaactaaccaac

SEQ ID NO: 110600 - DNA, 25 bp, Artificial
  Probe
catatcctgtaaactaaccaactca

SEQ ID NO: 110601 - DNA, 25 bp, Artificial
  Probe
ttgttgccaaggatttctttaccat

SEQ ID NO: 110602 - DNA, 25 bp, Artificial
  Probe
gaaacatcatctggtaaggagtgac

SEQ ID NO: 110603 - DNA, 25 bp, Artificial
  Probe
agaaacatcatctggtaaggagtga

SEQ ID NO: 110604 - DNA, 25 bp, Artificial
  Probe
gtgccctgtggaagtttattcttag

SEQ ID NO: 110605 - DNA, 25 bp, Artificial
  Probe
tgccctgtggaagtttattcttaga

SEQ ID NO: 110606 - DNA, 25 bp, Artificial
  Probe
acatccaatcatagtgtaagcaaac

SEQ ID NO: 110607 - DNA, 25 bp, Artificial
  Probe
tttgttgccaaggatttctttacca

SEQ ID NO: 110608 - DNA, 25 bp, Artificial
  Probe
atttctttaccatgacaaggaagga

SEQ ID NO: 110609 - DNA, 25 bp, Artificial
  Probe
gatttctttaccatgacaaggaagg

SEQ ID NO: 110610 - DNA, 25 bp, Artificial
  Probe
ggatttctttaccatgacaaggaag

SEQ ID NO: 110611 - DNA, 25 bp, Artificial
  Probe
aggatttctttaccatgacaaggaa

SEQ ID NO: 110612 - DNA, 25 bp, Artificial
  Probe
aaggatttctttaccatgacaagga

SEQ ID NO: 110613 - DNA, 25 bp, Artificial
  Probe
caaggatttctttaccatgacaagg

SEQ ID NO: 110614 - DNA, 25 bp, Artificial
  Probe
ccaaggatttctttaccatgacaag

SEQ ID NO: 110615 - DNA, 25 bp, Artificial
  Probe
gtggtcaagacgagatatatgaact

SEQ ID NO: 110616 - DNA, 25 bp, Artificial
  Probe
tgatgtggtcaagacgagatatatg

SEQ ID NO: 110617 - DNA, 25 bp, Artificial
  Probe
tgtggtcaagacgagatatatgaac

SEQ ID NO: 110618 - DNA, 25 bp, Artificial
  Probe
gatgtggtcaagacgagatatatga

SEQ ID NO: 110619 - DNA, 25 bp, Artificial
  Probe
atgtggtcaagacgagatatatgaa

SEQ ID NO: 110620 - DNA, 25 bp, Artificial
  Probe
tcaagacgagatatatgaactctgc

SEQ ID NO: 110621 - DNA, 25 bp, Artificial
  Probe
tggtcaagacgagatatatgaactc

SEQ ID NO: 110622 - DNA, 25 bp, Artificial
  Probe
ggtcaagacgagatatatgaactct

SEQ ID NO: 110623 - DNA, 25 bp, Artificial
  Probe
gacgagatatatgaactctgccttg

SEQ ID NO: 110624 - DNA, 25 bp, Artificial
  Probe
agacgagatatatgaactctgcctt

SEQ ID NO: 110625 - DNA, 25 bp, Artificial
  Probe
aagacgagatatatgaactctgcct

SEQ ID NO: 110626 - DNA, 25 bp, Artificial
  Probe
caagacgagatatatgaactctgcc

SEQ ID NO: 110627 - DNA, 25 bp, Artificial
  Probe
gtcaagacgagatatatgaactctg

SEQ ID NO: 110628 - DNA, 25 bp, Artificial
  Probe
acgagatatatgaactctgccttgg

SEQ ID NO: 110629 - DNA, 25 bp, Artificial
  Probe
tagtaatgtttgtcacctatgagca

SEQ ID NO: 110630 - DNA, 25 bp, Artificial
  Probe
gtagtaatgtttgtcacctatgagc

SEQ ID NO: 110631 - DNA, 25 bp, Artificial
  Probe
cgtagtaatgtttgtcacctatgag

SEQ ID NO: 110632 - DNA, 25 bp, Artificial
  Probe
agtaatgtttgtcacctatgagcag

SEQ ID NO: 110633 - DNA, 25 bp, Artificial
  Probe
gttgatgtggtcaagacgagatata

SEQ ID NO: 110634 - DNA, 25 bp, Artificial
  Probe
ttgatgtggtcaagacgagatatat

SEQ ID NO: 110635 - DNA, 25 bp, Artificial
  Probe
ccttaccctagcacatctcactatg

SEQ ID NO: 110636 - DNA, 25 bp, Artificial
  Probe
gtaatgtttgtcacctatgagcagc

SEQ ID NO: 110637 - DNA, 25 bp, Artificial
  Probe
ggaacgtagtaatgtttgtcaccta

SEQ ID NO: 110638 - DNA, 25 bp, Artificial
  Probe
atcctggaacgtagtaatgtttgtc

SEQ ID NO: 110639 - DNA, 25 bp, Artificial
  Probe
gatcctggaacgtagtaatgtttgt

SEQ ID NO: 110640 - DNA, 25 bp, Artificial
  Probe
acgtagtaatgtttgtcacctatga

SEQ ID NO: 110641 - DNA, 25 bp, Artificial
  Probe
aacgtagtaatgtttgtcacctatg

SEQ ID NO: 110642 - DNA, 25 bp, Artificial
  Probe
gaacgtagtaatgtttgtcacctat

SEQ ID NO: 110643 - DNA, 25 bp, Artificial
  Probe
tgctaacagttaagcccaaatcttt

SEQ ID NO: 110644 - DNA, 25 bp, Artificial
  Probe
catctccctatacctcctcagcaag

SEQ ID NO: 110645 - DNA, 25 bp, Artificial
  Probe
cgagatatatgaactctgccttggg

SEQ ID NO: 110646 - DNA, 25 bp, Artificial
  Probe
cgttgatgtggtcaagacgagatat

SEQ ID NO: 110647 - DNA, 25 bp, Artificial
  Probe
ctggaacgtagtaatgtttgtcacc

SEQ ID NO: 110648 - DNA, 25 bp, Artificial
  Probe
cctggaacgtagtaatgtttgtcac

SEQ ID NO: 110649 - DNA, 25 bp, Artificial
  Probe
tcctggaacgtagtaatgtttgtca

SEQ ID NO: 110650 - DNA, 25 bp, Artificial
  Probe
ctgctaacagttaagcccaaatctt

SEQ ID NO: 110651 - DNA, 25 bp, Artificial
  Probe
taatgtttgtcacctatgagcagct

SEQ ID NO: 110652 - DNA, 25 bp, Artificial
  Probe
tggaacgtagtaatgtttgtcacct

SEQ ID NO: 110653 - DNA, 25 bp, Artificial
  Probe
gccttaccctagcacatctcactat

SEQ ID NO: 110654 - DNA, 25 bp, Artificial
  Probe
tcatctccctatacctcctcagcaa

SEQ ID NO: 110655 - DNA, 25 bp, Artificial
  Probe
ctcatctccctatacctcctcagca

SEQ ID NO: 110656 - DNA, 25 bp, Artificial
  Probe
accctcagtcctgctaacagttaag

SEQ ID NO: 110657 - DNA, 25 bp, Artificial
  Probe
cttaccctagcacatctcactatgc

SEQ ID NO: 110658 - DNA, 25 bp, Artificial
  Probe
cctgctaacagttaagcccaaatct

SEQ ID NO: 110659 - DNA, 25 bp, Artificial
  Probe
tcctgctaacagttaagcccaaatc

SEQ ID NO: 110660 - DNA, 25 bp, Artificial
  Probe
cagaagagacatctatgaccagaag

SEQ ID NO: 110661 - DNA, 25 bp, Artificial
  Probe
taccagaagagacatctatgaccag

SEQ ID NO: 110662 - DNA, 25 bp, Artificial
  Probe
aaggattccatacaaccattgacat

SEQ ID NO: 110663 - DNA, 25 bp, Artificial
  Probe
ccagaagagacatctatgaccagaa

SEQ ID NO: 110664 - DNA, 25 bp, Artificial
  Probe
aggattccatacaaccattgacatc

SEQ ID NO: 110665 - DNA, 25 bp, Artificial
  Probe
agaagagacatctatgaccagaagc

SEQ ID NO: 110666 - DNA, 25 bp, Artificial
  Probe
gtaccagaagagacatctatgacca

SEQ ID NO: 110667 - DNA, 25 bp, Artificial
  Probe
gattactagagtcacacacaggagt

SEQ ID NO: 110668 - DNA, 25 bp, Artificial
  Probe
gattccatacaaccattgacatcgg

SEQ ID NO: 110669 - DNA, 25 bp, Artificial
  Probe
accagaagagacatctatgaccaga

SEQ ID NO: 110670 - DNA, 25 bp, Artificial
  Probe
cgattactagagtcacacacaggag

SEQ ID NO: 110671 - DNA, 25 bp, Artificial
  Probe
ggattccatacaaccattgacatcg

SEQ ID NO: 110672 - DNA, 25 bp, Artificial
  Probe
acatctatgaccagaagctaacatt

SEQ ID NO: 110673 - DNA, 25 bp, Artificial
  Probe
gacatctatgaccagaagctaacat

SEQ ID NO: 110674 - DNA, 25 bp, Artificial
  Probe
gagacatctatgaccagaagctaac

SEQ ID NO: 110675 - DNA, 25 bp, Artificial
  Probe
agagacatctatgaccagaagctaa

SEQ ID NO: 110676 - DNA, 25 bp, Artificial
  Probe
aagagacatctatgaccagaagcta

SEQ ID NO: 110677 - DNA, 25 bp, Artificial
  Probe
tctatgaccagaagctaacattaca

SEQ ID NO: 110678 - DNA, 25 bp, Artificial
  Probe
ctatgaccagaagctaacattacag

SEQ ID NO: 110679 - DNA, 25 bp, Artificial
  Probe
attactagagtcacacacaggagtg

SEQ ID NO: 110680 - DNA, 25 bp, Artificial
  Probe
agacatctatgaccagaagctaaca

SEQ ID NO: 110681 - DNA, 25 bp, Artificial
  Probe
ttagtccattgtttatccagtgaga

SEQ ID NO: 110682 - DNA, 25 bp, Artificial
  Probe
tttagtccattgtttatccagtgag

SEQ ID NO: 110683 - DNA, 25 bp, Artificial
  Probe
gaagagacatctatgaccagaagct

SEQ ID NO: 110684 - DNA, 25 bp, Artificial
  Probe
atctatgaccagaagctaacattac

SEQ ID NO: 110685 - DNA, 25 bp, Artificial
  Probe
catctatgaccagaagctaacatta

SEQ ID NO: 110686 - DNA, 25 bp, Artificial
  Probe
aaaggattccatacaaccattgaca

SEQ ID NO: 110687 - DNA, 25 bp, Artificial
  Probe
atacaaccattgacatcggcgttaa

SEQ ID NO: 110688 - DNA, 25 bp, Artificial
  Probe
atctcgtcttcctaaacactattac

SEQ ID NO: 110689 - DNA, 25 bp, Artificial
  Probe
acaaatgggtcagaaatcagtgata

SEQ ID NO: 110690 - DNA, 25 bp, Artificial
  Probe
caaatgggtcagaaatcagtgatag

SEQ ID NO: 110691 - DNA, 25 bp, Artificial
  Probe
tagtccattgtttatccagtgagac

SEQ ID NO: 110692 - DNA, 25 bp, Artificial
  Probe
gaacaaatgggtcagaaatcagtga

SEQ ID NO: 110693 - DNA, 25 bp, Artificial
  Probe
cattgtttatccagtgagacccaag

SEQ ID NO: 110694 - DNA, 25 bp, Artificial
  Probe
tcgattactagagtcacacacagga

SEQ ID NO: 110695 - DNA, 25 bp, Artificial
  Probe
aacaaatgggtcagaaatcagtgat

SEQ ID NO: 110696 - DNA, 25 bp, Artificial
  Probe
aaatgggtcagaaatcagtgatagc

SEQ ID NO: 110697 - DNA, 25 bp, Artificial
  Probe
ggaacaaatgggtcagaaatcagtg

SEQ ID NO: 110698 - DNA, 25 bp, Artificial
  Probe
tatgaccagaagctaacattacagc

SEQ ID NO: 110699 - DNA, 25 bp, Artificial
  Probe
caaccattgacatcggcgttaagta

SEQ ID NO: 110700 - DNA, 25 bp, Artificial
  Probe
tacaaccattgacatcggcgttaag

SEQ ID NO: 110701 - DNA, 25 bp, Artificial
  Probe
catacaaccattgacatcggcgtta

SEQ ID NO: 110702 - DNA, 25 bp, Artificial
  Probe
attccatacaaccattgacatcggc

SEQ ID NO: 110703 - DNA, 25 bp, Artificial
  Probe
gtcagaaatcagtgatagcgattac

SEQ ID NO: 110704 - DNA, 25 bp, Artificial
  Probe
agaaatcagtgatagcgattaccag

SEQ ID NO: 110705 - DNA, 25 bp, Artificial
  Probe
gattgtgctccatagaagttcactg

SEQ ID NO: 110706 - DNA, 25 bp, Artificial
  Probe
tctacaggaattatgactccatgaa

SEQ ID NO: 110707 - DNA, 25 bp, Artificial
  Probe
ttctacaggaattatgactccatga

SEQ ID NO: 110708 - DNA, 25 bp, Artificial
  Probe
ctgacctgtgttcctgaactatgaa

SEQ ID NO: 110709 - DNA, 25 bp, Artificial
  Probe
gcagatttctacaggaattatgact

SEQ ID NO: 110710 - DNA, 25 bp, Artificial
  Probe
ggattgtgctccatagaagttcact

SEQ ID NO: 110711 - DNA, 25 bp, Artificial
  Probe
ctgaaccaagaaagaaggcttatgc

SEQ ID NO: 110712 - DNA, 25 bp, Artificial
  Probe
gctgaaccaagaaagaaggcttatg

SEQ ID NO: 110713 - DNA, 25 bp, Artificial
  Probe
gacctgtgttcctgaactatgaaac

SEQ ID NO: 110714 - DNA, 25 bp, Artificial
  Probe
gaactatgaaacgtgaatatgtggg

SEQ ID NO: 110715 - DNA, 25 bp, Artificial
  Probe
tgacctgtgttcctgaactatgaaa

SEQ ID NO: 110716 - DNA, 25 bp, Artificial
  Probe
tatgaaacgtgaatatgtgggctaa

SEQ ID NO: 110717 - DNA, 25 bp, Artificial
  Probe
tgaactatgaaacgtgaatatgtgg

SEQ ID NO: 110718 - DNA, 25 bp, Artificial
  Probe
ctatgaaacgtgaatatgtgggcta

SEQ ID NO: 110719 - DNA, 25 bp, Artificial
  Probe
catagaagttcactgctgacctgtg

SEQ ID NO: 110720 - DNA, 25 bp, Artificial
  Probe
ctccatagaagttcactgctgacct

SEQ ID NO: 110721 - DNA, 25 bp, Artificial
  Probe
attgtgctccatagaagttcactgc

SEQ ID NO: 110722 - DNA, 25 bp, Artificial
  Probe
cctgaactatgaaacgtgaatatgt

SEQ ID NO: 110723 - DNA, 25 bp, Artificial
  Probe
acaggaattatgactccatgaaaga

SEQ ID NO: 110724 - DNA, 25 bp, Artificial
  Probe
caagaaagaaggcttatgcagattt

SEQ ID NO: 110725 - DNA, 25 bp, Artificial
  Probe
tcctgaactatgaaacgtgaatatg

SEQ ID NO: 110726 - DNA, 25 bp, Artificial
  Probe
gcttatgcagatttctacaggaatt

SEQ ID NO: 110727 - DNA, 25 bp, Artificial
  Probe
tgttcctgaactatgaaacgtgaat

SEQ ID NO: 110728 - DNA, 25 bp, Artificial
  Probe
ggcttatgcagatttctacaggaat

SEQ ID NO: 110729 - DNA, 25 bp, Artificial
  Probe
gttcctgaactatgaaacgtgaata

SEQ ID NO: 110730 - DNA, 25 bp, Artificial
  Probe
gatttctacaggaattatgactcca

SEQ ID NO: 110731 - DNA, 25 bp, Artificial
  Probe
tgcagatttctacaggaattatgac

SEQ ID NO: 110732 - DNA, 25 bp, Artificial
  Probe
cagatttctacaggaattatgactc

SEQ ID NO: 110733 - DNA, 25 bp, Artificial
  Probe
caggaattatgactccatgaaagat

SEQ ID NO: 110734 - DNA, 25 bp, Artificial
  Probe
aactatgaaacgtgaatatgtgggc

SEQ ID NO: 110735 - DNA, 25 bp, Artificial
  Probe
ctgaactatgaaacgtgaatatgtg

SEQ ID NO: 110736 - DNA, 25 bp, Artificial
  Probe
atagaagttcactgctgacctgtgt

SEQ ID NO: 110737 - DNA, 25 bp, Artificial
  Probe
agatttctacaggaattatgactcc

SEQ ID NO: 110738 - DNA, 25 bp, Artificial
  Probe
tccatagaagttcactgctgacctg

SEQ ID NO: 110739 - DNA, 25 bp, Artificial
  Probe
aaggcttatgcagatttctacagga

SEQ ID NO: 110740 - DNA, 25 bp, Artificial
  Probe
gaaggcttatgcagatttctacagg

SEQ ID NO: 110741 - DNA, 25 bp, Artificial
  Probe
ccaagaaagaaggcttatgcagatt

SEQ ID NO: 110742 - DNA, 25 bp, Artificial
  Probe
gtgttcctgaactatgaaacgtgaa

SEQ ID NO: 110743 - DNA, 25 bp, Artificial
  Probe
tacaggaattatgactccatgaaag

SEQ ID NO: 110744 - DNA, 25 bp, Artificial
  Probe
ctacaggaattatgactccatgaaa

SEQ ID NO: 110745 - DNA, 25 bp, Artificial
  Probe
tttctacaggaattatgactccatg

SEQ ID NO: 110746 - DNA, 25 bp, Artificial
  Probe
atgaaagattttgaagagatgaggc

SEQ ID NO: 110747 - DNA, 25 bp, Artificial
  Probe
ggctgaaccaagaaagaaggcttat

SEQ ID NO: 110748 - DNA, 25 bp, Artificial
  Probe
ttcctgaactatgaaacgtgaatat

SEQ ID NO: 110749 - DNA, 25 bp, Artificial
  Probe
aggcttatgcagatttctacaggaa

SEQ ID NO: 110750 - DNA, 25 bp, Artificial
  Probe
ggattcattgtttgtaaggcgataa

SEQ ID NO: 110751 - DNA, 25 bp, Artificial
  Probe
gataggattcattgtttgtaaggcg

SEQ ID NO: 110752 - DNA, 25 bp, Artificial
  Probe
aggattcattgtttgtaaggcgata

SEQ ID NO: 110753 - DNA, 25 bp, Artificial
  Probe
taggattcattgtttgtaaggcgat

SEQ ID NO: 110754 - DNA, 25 bp, Artificial
  Probe
ataggattcattgtttgtaaggcga

SEQ ID NO: 110755 - DNA, 25 bp, Artificial
  Probe
gataaacttgaccacaccagaatct

SEQ ID NO: 110756 - DNA, 25 bp, Artificial
  Probe
gattcattgtttgtaaggcgataaa

SEQ ID NO: 110757 - DNA, 25 bp, Artificial
  Probe
tgataggattcattgtttgtaaggc

SEQ ID NO: 110758 - DNA, 25 bp, Artificial
  Probe
cgataaacttgaccacaccagaatc

SEQ ID NO: 110759 - DNA, 25 bp, Artificial
  Probe
tttgtaaggcgataaacttgaccac

SEQ ID NO: 110760 - DNA, 25 bp, Artificial
  Probe
gtgataggattcattgtttgtaagg

SEQ ID NO: 110761 - DNA, 25 bp, Artificial
  Probe
ataaacttgaccacaccagaatctg

SEQ ID NO: 110762 - DNA, 25 bp, Artificial
  Probe
ttgtttgtaaggcgataaacttgac

SEQ ID NO: 110763 - DNA, 25 bp, Artificial
  Probe
ttgtaaggcgataaacttgaccaca

SEQ ID NO: 110764 - DNA, 25 bp, Artificial
  Probe
taaacttgaccacaccagaatctga

SEQ ID NO: 110765 - DNA, 25 bp, Artificial
  Probe
attgtttgtaaggcgataaacttga

SEQ ID NO: 110766 - DNA, 25 bp, Artificial
  Probe
cattgtttgtaaggcgataaacttg

SEQ ID NO: 110767 - DNA, 25 bp, Artificial
  Probe
tcattgtttgtaaggcgataaactt

SEQ ID NO: 110768 - DNA, 25 bp, Artificial
  Probe
ttcattgtttgtaaggcgataaact

SEQ ID NO: 110769 - DNA, 25 bp, Artificial
  Probe
ctccttacaagctaaccctagatgc

SEQ ID NO: 110770 - DNA, 25 bp, Artificial
  Probe
attcattgtttgtaaggcgataaac

SEQ ID NO: 110771 - DNA, 25 bp, Artificial
  Probe
gcgataaacttgaccacaccagaat

SEQ ID NO: 110772 - DNA, 25 bp, Artificial
  Probe
gtttgtaaggcgataaacttgacca

SEQ ID NO: 110773 - DNA, 25 bp, Artificial
  Probe
tgtttgtaaggcgataaacttgacc

SEQ ID NO: 110774 - DNA, 25 bp, Artificial
  Probe
acttgaccacaccagaatctgagtt

SEQ ID NO: 110775 - DNA, 25 bp, Artificial
  Probe
aacttgaccacaccagaatctgagt

SEQ ID NO: 110776 - DNA, 25 bp, Artificial
  Probe
tgtaaggcgataaacttgaccacac

SEQ ID NO: 110777 - DNA, 25 bp, Artificial
  Probe
gtaaggcgataaacttgaccacacc

SEQ ID NO: 110778 - DNA, 25 bp, Artificial
  Probe
cttgaccacaccagaatctgagttt

SEQ ID NO: 110779 - DNA, 25 bp, Artificial
  Probe
aaacttgaccacaccagaatctgag

SEQ ID NO: 110780 - DNA, 25 bp, Artificial
  Probe
atgtattatgaacctaacaaacctt

SEQ ID NO: 110781 - DNA, 25 bp, Artificial
  Probe
aacaaaacaaaacaaaacagaaaga

SEQ ID NO: 110782 - DNA, 25 bp, Artificial
  Probe
taaggcgataaacttgaccacacca

SEQ ID NO: 110783 - DNA, 25 bp, Artificial
  Probe
attgctccttacaagctaaccctag

SEQ ID NO: 110784 - DNA, 25 bp, Artificial
  Probe
acaccagaatctgagttttacttga

SEQ ID NO: 110785 - DNA, 25 bp, Artificial
  Probe
cacaccagaatctgagttttacttg

SEQ ID NO: 110786 - DNA, 25 bp, Artificial
  Probe
caccagaatctgagttttacttgaa

SEQ ID NO: 110787 - DNA, 25 bp, Artificial
  Probe
cgttcgagaataaatatttccaacc

SEQ ID NO: 110788 - DNA, 25 bp, Artificial
  Probe
acaaaacaaaacaaaacagaaagat

SEQ ID NO: 110789 - DNA, 25 bp, Artificial
  Probe
ccacaccagaatctgagttttactt

SEQ ID NO: 110790 - DNA, 25 bp, Artificial
  Probe
tcgagaataaatatttccaacccaa

SEQ ID NO: 110791 - DNA, 25 bp, Artificial
  Probe
ttcgagaataaatatttccaaccca

SEQ ID NO: 110792 - DNA, 25 bp, Artificial
  Probe
cattgctccttacaagctaacccta

SEQ ID NO: 110793 - DNA, 25 bp, Artificial
  Probe
cgagaataaatatttccaacccaag

SEQ ID NO: 110794 - DNA, 25 bp, Artificial
  Probe
gctccttacaagctaaccctagatg

SEQ ID NO: 110795 - DNA, 25 bp, Artificial
  Probe
cagaatggcttgtgaagataagttc

SEQ ID NO: 110796 - DNA, 25 bp, Artificial
  Probe
atcagaatggcttgtgaagataagt

SEQ ID NO: 110797 - DNA, 25 bp, Artificial
  Probe
tcagaatggcttgtgaagataagtt

SEQ ID NO: 110798 - DNA, 25 bp, Artificial
  Probe
aatcagaatggcttgtgaagataag

SEQ ID NO: 110799 - DNA, 25 bp, Artificial
  Probe
tactccagatacacctgagacatta

SEQ ID NO: 110800 - DNA, 25 bp, Artificial
  Probe
actccagatacacctgagacattat

SEQ ID NO: 110801 - DNA, 25 bp, Artificial
  Probe
atactccagatacacctgagacatt

SEQ ID NO: 110802 - DNA, 25 bp, Artificial
  Probe
gatactccagatacacctgagacat

SEQ ID NO: 110803 - DNA, 25 bp, Artificial
  Probe
ctccagatacacctgagacattata

SEQ ID NO: 110804 - DNA, 25 bp, Artificial
  Probe
ttctcttgaggatactccagataca

SEQ ID NO: 110805 - DNA, 25 bp, Artificial
  Probe
tctcttgaggatactccagatacac

SEQ ID NO: 110806 - DNA, 25 bp, Artificial
  Probe
aaggattggctcaacaactacagaa

SEQ ID NO: 110807 - DNA, 25 bp, Artificial
  Probe
ctcttgaggatactccagatacacc

SEQ ID NO: 110808 - DNA, 25 bp, Artificial
  Probe
cttgaggatactccagatacacctg

SEQ ID NO: 110809 - DNA, 25 bp, Artificial
  Probe
tcttgaggatactccagatacacct

SEQ ID NO: 110810 - DNA, 25 bp, Artificial
  Probe
atatgaacttctgaaaggattggct

SEQ ID NO: 110811 - DNA, 25 bp, Artificial
  Probe
aatatgaacttctgaaaggattggc

SEQ ID NO: 110812 - DNA, 25 bp, Artificial
  Probe
gattcggaagtttctcttgaggata

SEQ ID NO: 110813 - DNA, 25 bp, Artificial
  Probe
gtctctctgctctaagatgctaaat

SEQ ID NO: 110814 - DNA, 25 bp, Artificial
  Probe
attcggaagtttctcttgaggatac

SEQ ID NO: 110815 - DNA, 25 bp, Artificial
  Probe
atacctgtgtgagtgaaatatgaac

SEQ ID NO: 110816 - DNA, 25 bp, Artificial
  Probe
tatgaacttctgaaaggattggctc

SEQ ID NO: 110817 - DNA, 25 bp, Artificial
  Probe
ttgaggatactccagatacacctga

SEQ ID NO: 110818 - DNA, 25 bp, Artificial
  Probe
tccagatacacctgagacattataa

SEQ ID NO: 110819 - DNA, 25 bp, Artificial
  Probe
ttactgattcggaagtttctcttga

SEQ ID NO: 110820 - DNA, 25 bp, Artificial
  Probe
cctgtgtgagtgaaatatgaacttc

SEQ ID NO: 110821 - DNA, 25 bp, Artificial
  Probe
aggattggctcaacaactacagaac

SEQ ID NO: 110822 - DNA, 25 bp, Artificial
  Probe
tacctgtgtgagtgaaatatgaact

SEQ ID NO: 110823 - DNA, 25 bp, Artificial
  Probe
acctgtgtgagtgaaatatgaactt

SEQ ID NO: 110824 - DNA, 25 bp, Artificial
  Probe
gaggatactccagatacacctgaga

SEQ ID NO: 110825 - DNA, 25 bp, Artificial
  Probe
tactgattcggaagtttctcttgag

SEQ ID NO: 110826 - DNA, 25 bp, Artificial
  Probe
ctgtattcatctaagggtctgggag

SEQ ID NO: 110827 - DNA, 25 bp, Artificial
  Probe
tttactgattcggaagtttctcttg

SEQ ID NO: 110828 - DNA, 25 bp, Artificial
  Probe
tgtgtgagtgaaatatgaacttctg

SEQ ID NO: 110829 - DNA, 25 bp, Artificial
  Probe
ctttactgattcggaagtttctctt

SEQ ID NO: 110830 - DNA, 25 bp, Artificial
  Probe
gtgtgagtgaaatatgaacttctga

SEQ ID NO: 110831 - DNA, 25 bp, Artificial
  Probe
ctgtgtgagtgaaatatgaacttct

SEQ ID NO: 110832 - DNA, 25 bp, Artificial
  Probe
tctctctgctctaagatgctaaata

SEQ ID NO: 110833 - DNA, 25 bp, Artificial
  Probe
aaatcagaatggcttgtgaagataa

SEQ ID NO: 110834 - DNA, 25 bp, Artificial
  Probe
gtattcatctaagggtctgggagag

SEQ ID NO: 110835 - DNA, 25 bp, Artificial
  Probe
aggatactccagatacacctgagac

SEQ ID NO: 110836 - DNA, 25 bp, Artificial
  Probe
tgaggatactccagatacacctgag

SEQ ID NO: 110837 - DNA, 25 bp, Artificial
  Probe
gctttactgattcggaagtttctct

SEQ ID NO: 110838 - DNA, 25 bp, Artificial
  Probe
cactcaaacaccctgtattcatcta

SEQ ID NO: 110839 - DNA, 25 bp, Artificial
  Probe
actcaaacaccctgtattcatctaa

SEQ ID NO: 110840 - DNA, 25 bp, Artificial
  Probe
cctcctaactatcatacacctcctt

SEQ ID NO: 110841 - DNA, 25 bp, Artificial
  Probe
tgaatgacaatgaatacaccaagtt

SEQ ID NO: 110842 - DNA, 25 bp, Artificial
  Probe
actccttccatcataagactcctaa

SEQ ID NO: 110843 - DNA, 25 bp, Artificial
  Probe
ccttccatcataagactcctaatgt

SEQ ID NO: 110844 - DNA, 25 bp, Artificial
  Probe
gactccttccatcataagactccta

SEQ ID NO: 110845 - DNA, 25 bp, Artificial
  Probe
tatcatacacctccttatctcactg

SEQ ID NO: 110846 - DNA, 25 bp, Artificial
  Probe
actatcatacacctccttatctcac

SEQ ID NO: 110847 - DNA, 25 bp, Artificial
  Probe
tccttccatcataagactcctaatg

SEQ ID NO: 110848 - DNA, 25 bp, Artificial
  Probe
ctccttccatcataagactcctaat

SEQ ID NO: 110849 - DNA, 25 bp, Artificial
  Probe
cagttgaatgacaatgaatacacca

SEQ ID NO: 110850 - DNA, 25 bp, Artificial
  Probe
accagttgaatgacaatgaatacac

SEQ ID NO: 110851 - DNA, 25 bp, Artificial
  Probe
ccagttgaatgacaatgaatacacc

SEQ ID NO: 110852 - DNA, 25 bp, Artificial
  Probe
gaccagttgaatgacaatgaataca

SEQ ID NO: 110853 - DNA, 25 bp, Artificial
  Probe
ctatcatacacctccttatctcact

SEQ ID NO: 110854 - DNA, 25 bp, Artificial
  Probe
agaccagttgaatgacaatgaatac

SEQ ID NO: 110855 - DNA, 25 bp, Artificial
  Probe
cagaccagttgaatgacaatgaata

SEQ ID NO: 110856 - DNA, 25 bp, Artificial
  Probe
ttgaatgacaatgaatacaccaagt

SEQ ID NO: 110857 - DNA, 25 bp, Artificial
  Probe
agttgaatgacaatgaatacaccaa

SEQ ID NO: 110858 - DNA, 25 bp, Artificial
  Probe
atcatacacctccttatctcactgc

SEQ ID NO: 110859 - DNA, 25 bp, Artificial
  Probe
gttgaatgacaatgaatacaccaag

SEQ ID NO: 110860 - DNA, 25 bp, Artificial
  Probe
taagtgatactatcctggcagttct

SEQ ID NO: 110861 - DNA, 25 bp, Artificial
  Probe
gtaagtgatactatcctggcagttc

SEQ ID NO: 110862 - DNA, 25 bp, Artificial
  Probe
ctcctaactatcatacacctcctta

SEQ ID NO: 110863 - DNA, 25 bp, Artificial
  Probe
aactatcatacacctccttatctca

SEQ ID NO: 110864 - DNA, 25 bp, Artificial
  Probe
ttaacaatgactcaccaactaagaa

SEQ ID NO: 110865 - DNA, 25 bp, Artificial
  Probe
tagtgttagcaactgatggattgtg

SEQ ID NO: 110866 - DNA, 25 bp, Artificial
  Probe
catagacaggatgtggttaggattg

SEQ ID NO: 110867 - DNA, 25 bp, Artificial
  Probe
ccagaccagttgaatgacaatgaat

SEQ ID NO: 110868 - DNA, 25 bp, Artificial
  Probe
ctagtgttagcaactgatggattgt

SEQ ID NO: 110869 - DNA, 25 bp, Artificial
  Probe
aattcctagtgttagcaactgatgg

SEQ ID NO: 110870 - DNA, 25 bp, Artificial
  Probe
aacaatgactcaccaactaagaata

SEQ ID NO: 110871 - DNA, 25 bp, Artificial
  Probe
taacaatgactcaccaactaagaat

SEQ ID NO: 110872 - DNA, 25 bp, Artificial
  Probe
aagtgatactatcctggcagttctt

SEQ ID NO: 110873 - DNA, 25 bp, Artificial
  Probe
atagacaggatgtggttaggattgt

SEQ ID NO: 110874 - DNA, 25 bp, Artificial
  Probe
agactccttccatcataagactcct

SEQ ID NO: 110875 - DNA, 25 bp, Artificial
  Probe
cagactccttccatcataagactcc

SEQ ID NO: 110876 - DNA, 25 bp, Artificial
  Probe
acaatgactcaccaactaagaatat

SEQ ID NO: 110877 - DNA, 25 bp, Artificial
  Probe
agtgatactatcctggcagttcttc

SEQ ID NO: 110878 - DNA, 25 bp, Artificial
  Probe
caatgactcaccaactaagaatatg

SEQ ID NO: 110879 - DNA, 25 bp, Artificial
  Probe
tcctaactatcatacacctccttat

SEQ ID NO: 110880 - DNA, 25 bp, Artificial
  Probe
cctagtgttagcaactgatggattg

SEQ ID NO: 110881 - DNA, 25 bp, Artificial
  Probe
catacacctccttatctcactgctg

SEQ ID NO: 110882 - DNA, 25 bp, Artificial
  Probe
gtgatactatcctggcagttcttca

SEQ ID NO: 110883 - DNA, 25 bp, Artificial
  Probe
tcatacacctccttatctcactgct

SEQ ID NO: 110884 - DNA, 25 bp, Artificial
  Probe
cctaactatcatacacctccttatc

SEQ ID NO: 110885 - DNA, 25 bp, Artificial
  Probe
tcagcacagttgttcttcatagtat

SEQ ID NO: 110886 - DNA, 25 bp, Artificial
  Probe
ctcagcacagttgttcttcatagta

SEQ ID NO: 110887 - DNA, 25 bp, Artificial
  Probe
cagcacagttgttcttcatagtatg

SEQ ID NO: 110888 - DNA, 25 bp, Artificial
  Probe
ctacagtagagagaaccaagaacag

SEQ ID NO: 110889 - DNA, 25 bp, Artificial
  Probe
cactacagtagagagaaccaagaac

SEQ ID NO: 110890 - DNA, 25 bp, Artificial
  Probe
ttggatgattcttcaatgttctgtg

SEQ ID NO: 110891 - DNA, 25 bp, Artificial
  Probe
actacagtagagagaaccaagaaca

SEQ ID NO: 110892 - DNA, 25 bp, Artificial
  Probe
acactacagtagagagaaccaagaa

SEQ ID NO: 110893 - DNA, 25 bp, Artificial
  Probe
atgattcttcaatgttctgtggatg

SEQ ID NO: 110894 - DNA, 25 bp, Artificial
  Probe
gatgattcttcaatgttctgtggat

SEQ ID NO: 110895 - DNA, 25 bp, Artificial
  Probe
tacagtagagagaaccaagaacagc

SEQ ID NO: 110896 - DNA, 25 bp, Artificial
  Probe
gacactacagtagagagaaccaaga

SEQ ID NO: 110897 - DNA, 25 bp, Artificial
  Probe
ggatgattcttcaatgttctgtgga

SEQ ID NO: 110898 - DNA, 25 bp, Artificial
  Probe
gtctcagcacagttgttcttcatag

SEQ ID NO: 110899 - DNA, 25 bp, Artificial
  Probe
tggatgattcttcaatgttctgtgg

SEQ ID NO: 110900 - DNA, 25 bp, Artificial
  Probe
ttactgatgtgctagatccgtgtat

SEQ ID NO: 110901 - DNA, 25 bp, Artificial
  Probe
ttccttaccagtattctgcctaatg

SEQ ID NO: 110902 - DNA, 25 bp, Artificial
  Probe
ccttaccagtattctgcctaatgtt

SEQ ID NO: 110903 - DNA, 25 bp, Artificial
  Probe
tctcagcacagttgttcttcatagt

SEQ ID NO: 110904 - DNA, 25 bp, Artificial
  Probe
tccttaccagtattctgcctaatgt

SEQ ID NO: 110905 - DNA, 25 bp, Artificial
  Probe
acacagagtaatcaggacgatgtaa

SEQ ID NO: 110906 - DNA, 25 bp, Artificial
  Probe
ggacactacagtagagagaaccaag

SEQ ID NO: 110907 - DNA, 25 bp, Artificial
  Probe
tgattcttcaatgttctgtggatgc

SEQ ID NO: 110908 - DNA, 25 bp, Artificial
  Probe
tactgatgtgctagatccgtgtatg

SEQ ID NO: 110909 - DNA, 25 bp, Artificial
  Probe
gttactgatgtgctagatccgtgta

SEQ ID NO: 110910 - DNA, 25 bp, Artificial
  Probe
cttacacagagtaatcaggacgatg

SEQ ID NO: 110911 - DNA, 25 bp, Artificial
  Probe
catggacactacagtagagagaacc

SEQ ID NO: 110912 - DNA, 25 bp, Artificial
  Probe
gattcttcaatgttctgtggatgcg

SEQ ID NO: 110913 - DNA, 25 bp, Artificial
  Probe
ttacacagagtaatcaggacgatgt

SEQ ID NO: 110914 - DNA, 25 bp, Artificial
  Probe
ggtctcagcacagttgttcttcata

SEQ ID NO: 110915 - DNA, 25 bp, Artificial
  Probe
gatgtgctagatccgtgtatgtctt

SEQ ID NO: 110916 - DNA, 25 bp, Artificial
  Probe
ccttacacagagtaatcaggacgat

SEQ ID NO: 110917 - DNA, 25 bp, Artificial
  Probe
attatagcaacgtgttcctgattag

SEQ ID NO: 110918 - DNA, 25 bp, Artificial
  Probe
gtttgtccatctgctgaaatatgaa

SEQ ID NO: 110919 - DNA, 25 bp, Artificial
  Probe
cttgggaagcctttattagtcagta

SEQ ID NO: 110920 - DNA, 25 bp, Artificial
  Probe
tttcttgggaagcctttattagtca

SEQ ID NO: 110921 - DNA, 25 bp, Artificial
  Probe
ttcttgggaagcctttattagtcag

SEQ ID NO: 110922 - DNA, 25 bp, Artificial
  Probe
ttatagcaacgtgttcctgattagc

SEQ ID NO: 110923 - DNA, 25 bp, Artificial
  Probe
gcatggacactacagtagagagaac

SEQ ID NO: 110924 - DNA, 25 bp, Artificial
  Probe
tacacagagtaatcaggacgatgta

SEQ ID NO: 110925 - DNA, 25 bp, Artificial
  Probe
tttgtccatctgctgaaatatgaaa

SEQ ID NO: 110926 - DNA, 25 bp, Artificial
  Probe
agtattctgcctaatgtttgcttcc

SEQ ID NO: 110927 - DNA, 25 bp, Artificial
  Probe
ttattatagcaacgtgttcctgatt

SEQ ID NO: 110928 - DNA, 25 bp, Artificial
  Probe
caagaagacttagaacacagggaag

SEQ ID NO: 110929 - DNA, 25 bp, Artificial
  Probe
tcaagaagacttagaacacagggaa

SEQ ID NO: 110930 - DNA, 25 bp, Artificial
  Probe
gtgttctgtgtaattattgaagtgc

SEQ ID NO: 110931 - DNA, 25 bp, Artificial
  Probe
caatgaccctgaaatgttaatagca

SEQ ID NO: 110932 - DNA, 25 bp, Artificial
  Probe
tggtgatattctatgcaactctagt

SEQ ID NO: 110933 - DNA, 25 bp, Artificial
  Probe
tgttctgtgtaattattgaagtgca

SEQ ID NO: 110934 - DNA, 25 bp, Artificial
  Probe
tgtgttctgtgtaattattgaagtg

SEQ ID NO: 110935 - DNA, 25 bp, Artificial
  Probe
tcaatgaccctgaaatgttaatagc

SEQ ID NO: 110936 - DNA, 25 bp, Artificial
  Probe
aatgaccctgaaatgttaatagcat

SEQ ID NO: 110937 - DNA, 25 bp, Artificial
  Probe
catggtgatattctatgcaactcta

SEQ ID NO: 110938 - DNA, 25 bp, Artificial
  Probe
gttctgtgtaattattgaagtgcaa

SEQ ID NO: 110939 - DNA, 25 bp, Artificial
  Probe
atggtgatattctatgcaactctag

SEQ ID NO: 110940 - DNA, 25 bp, Artificial
  Probe
ggtgatattctatgcaactctagtt

SEQ ID NO: 110941 - DNA, 25 bp, Artificial
  Probe
cctgaaatgttaatagcatggtgat

SEQ ID NO: 110942 - DNA, 25 bp, Artificial
  Probe
atgaccctgaaatgttaatagcatg

SEQ ID NO: 110943 - DNA, 25 bp, Artificial
  Probe
ttgtgttctgtgtaattattgaagt

SEQ ID NO: 110944 - DNA, 25 bp, Artificial
  Probe
acttgtgttctgtgtaattattgaa

SEQ ID NO: 110945 - DNA, 25 bp, Artificial
  Probe
ccctgaaatgttaatagcatggtga

SEQ ID NO: 110946 - DNA, 25 bp, Artificial
  Probe
tgaccctgaaatgttaatagcatgg

SEQ ID NO: 110947 - DNA, 25 bp, Artificial
  Probe
tgtaattattgaagtgcaatggtgt

SEQ ID NO: 110948 - DNA, 25 bp, Artificial
  Probe
tgtgtaattattgaagtgcaatggt

SEQ ID NO: 110949 - DNA, 25 bp, Artificial
  Probe
cttgtgttctgtgtaattattgaag

SEQ ID NO: 110950 - DNA, 25 bp, Artificial
  Probe
gtgtaattattgaagtgcaatggtg

SEQ ID NO: 110951 - DNA, 25 bp, Artificial
  Probe
ctgtgtaattattgaagtgcaatgg

SEQ ID NO: 110952 - DNA, 25 bp, Artificial
  Probe
ttgtatattcaatcaaggcaacttt

SEQ ID NO: 110953 - DNA, 25 bp, Artificial
  Probe
ttctatgcaactctagttatacctt

SEQ ID NO: 110954 - DNA, 25 bp, Artificial
  Probe
gaccctgaaatgttaatagcatggt

SEQ ID NO: 110955 - DNA, 25 bp, Artificial
  Probe
tctgtgtaattattgaagtgcaatg

SEQ ID NO: 110956 - DNA, 25 bp, Artificial
  Probe
aatgttaatagcatggtgatattct

SEQ ID NO: 110957 - DNA, 25 bp, Artificial
  Probe
accctgaaatgttaatagcatggtg

SEQ ID NO: 110958 - DNA, 25 bp, Artificial
  Probe
attctatgcaactctagttatacct

SEQ ID NO: 110959 - DNA, 25 bp, Artificial
  Probe
taattattgaagtgcaatggtgtac

SEQ ID NO: 110960 - DNA, 25 bp, Artificial
  Probe
gtaattattgaagtgcaatggtgta

SEQ ID NO: 110961 - DNA, 25 bp, Artificial
  Probe
ctgaaatgttaatagcatggtgata

SEQ ID NO: 110962 - DNA, 25 bp, Artificial
  Probe
ccttttggtttgacactgtattttc

SEQ ID NO: 110963 - DNA, 25 bp, Artificial
  Probe
ttgcactgatgtgtcgaaccttatt

SEQ ID NO: 110964 - DNA, 25 bp, Artificial
  Probe
ttctgtgtaattattgaagtgcaat

SEQ ID NO: 110965 - DNA, 25 bp, Artificial
  Probe
tttggtttgacactgtattttcaca

SEQ ID NO: 110966 - DNA, 25 bp, Artificial
  Probe
tggtttgacactgtattttcacatt

SEQ ID NO: 110967 - DNA, 25 bp, Artificial
  Probe
ttggtttgacactgtattttcacat

SEQ ID NO: 110968 - DNA, 25 bp, Artificial
  Probe
ttttggtttgacactgtattttcac

SEQ ID NO: 110969 - DNA, 25 bp, Artificial
  Probe
ggtttgacactgtattttcacattg

SEQ ID NO: 110970 - DNA, 25 bp, Artificial
  Probe
attattgaagtgcaatggtgtacaa

SEQ ID NO: 110971 - DNA, 25 bp, Artificial
  Probe
aattattgaagtgcaatggtgtaca

SEQ ID NO: 110972 - DNA, 25 bp, Artificial
  Probe
cttttggtttgacactgtattttca

SEQ ID NO: 110973 - DNA, 25 bp, Artificial
  Probe
tgaaatgttaatagcatggtgatat

SEQ ID NO: 110974 - DNA, 25 bp, Artificial
  Probe
atgttaatagcatggtgatattcta

SEQ ID NO: 110975 - DNA, 25 bp, Artificial
  Probe
aaccacttatatgtctaactagcca

SEQ ID NO: 110976 - DNA, 25 bp, Artificial
  Probe
accacttatatgtctaactagccat

SEQ ID NO: 110977 - DNA, 25 bp, Artificial
  Probe
ccacttatatgtctaactagccatt

SEQ ID NO: 110978 - DNA, 25 bp, Artificial
  Probe
aaaccacttatatgtctaactagcc

SEQ ID NO: 110979 - DNA, 25 bp, Artificial
  Probe
ccagaaaccacttatatgtctaact

SEQ ID NO: 110980 - DNA, 25 bp, Artificial
  Probe
agccatacaacatgcagaatctcat

SEQ ID NO: 110981 - DNA, 25 bp, Artificial
  Probe
gaaaccacttatatgtctaactagc

SEQ ID NO: 110982 - DNA, 25 bp, Artificial
  Probe
taccagccatacaacatgcagaatc

SEQ ID NO: 110983 - DNA, 25 bp, Artificial
  Probe
ctaccagccatacaacatgcagaat

SEQ ID NO: 110984 - DNA, 25 bp, Artificial
  Probe
cagccatacaacatgcagaatctca

SEQ ID NO: 110985 - DNA, 25 bp, Artificial
  Probe
atgagacaaaagaagcaggagtatc

SEQ ID NO: 110986 - DNA, 25 bp, Artificial
  Probe
tgagacaaaagaagcaggagtatct

SEQ ID NO: 110987 - DNA, 25 bp, Artificial
  Probe
cacttatatgtctaactagccattt

SEQ ID NO: 110988 - DNA, 25 bp, Artificial
  Probe
catgagacaaaagaagcaggagtat

SEQ ID NO: 110989 - DNA, 25 bp, Artificial
  Probe
ccagccatacaacatgcagaatctc

SEQ ID NO: 110990 - DNA, 25 bp, Artificial
  Probe
gagacaaaagaagcaggagtatctg

SEQ ID NO: 110991 - DNA, 25 bp, Artificial
  Probe
acttatatgtctaactagccatttc

SEQ ID NO: 110992 - DNA, 25 bp, Artificial
  Probe
aaagaagcaggagtatctggaggtg

SEQ ID NO: 110993 - DNA, 25 bp, Artificial
  Probe
cagaaaccacttatatgtctaacta

SEQ ID NO: 110994 - DNA, 25 bp, Artificial
  Probe
ccagtgcagaacagtgaaaataaaa

SEQ ID NO: 110995 - DNA, 25 bp, Artificial
  Probe
gccatacaacatgcagaatctcatg

SEQ ID NO: 110996 - DNA, 25 bp, Artificial
  Probe
agtgcagaacagtgaaaataaaatg

SEQ ID NO: 110997 - DNA, 25 bp, Artificial
  Probe
cagtgcagaacagtgaaaataaaat

SEQ ID NO: 110998 - DNA, 25 bp, Artificial
  Probe
acaaaagaagcaggagtatctggag

SEQ ID NO: 110999 - DNA, 25 bp, Artificial
  Probe
gacaaaagaagcaggagtatctgga

SEQ ID NO: 111000 - DNA, 25 bp, Artificial
  Probe
agacaaaagaagcaggagtatctgg

SEQ ID NO: 111001 - DNA, 25 bp, Artificial
  Probe
accagccatacaacatgcagaatct

SEQ ID NO: 111002 - DNA, 25 bp, Artificial
  Probe
catacaacatgcagaatctcatgac

SEQ ID NO: 111003 - DNA, 25 bp, Artificial
  Probe
ctctccgatgcatggtgtgtatatg

SEQ ID NO: 111004 - DNA, 25 bp, Artificial
  Probe
agaaaccacttatatgtctaactag

SEQ ID NO: 111005 - DNA, 25 bp, Artificial
  Probe
gtgcagaacagtgaaaataaaatgt

SEQ ID NO: 111006 - DNA, 25 bp, Artificial
  Probe
atacaacatgcagaatctcatgacc

SEQ ID NO: 111007 - DNA, 25 bp, Artificial
  Probe
ccatacaacatgcagaatctcatga

SEQ ID NO: 111008 - DNA, 25 bp, Artificial
  Probe
acagaagctggagatcatgagacaa

SEQ ID NO: 111009 - DNA, 25 bp, Artificial
  Probe
ctccgatgcatggtgtgtatatgag

SEQ ID NO: 111010 - DNA, 25 bp, Artificial
  Probe
caaaagaagcaggagtatctggagg

SEQ ID NO: 111011 - DNA, 25 bp, Artificial
  Probe
tctccgatgcatggtgtgtatatga

SEQ ID NO: 111012 - DNA, 25 bp, Artificial
  Probe
aaaagaagcaggagtatctggaggt

SEQ ID NO: 111013 - DNA, 25 bp, Artificial
  Probe
cagaagctggagatcatgagacaaa

SEQ ID NO: 111014 - DNA, 25 bp, Artificial
  Probe
gcagaacagtgaaaataaaatgtat

SEQ ID NO: 111015 - DNA, 25 bp, Artificial
  Probe
tacaacatgcagaatctcatgacca

SEQ ID NO: 111016 - DNA, 25 bp, Artificial
  Probe
tgcagaacagtgaaaataaaatgta

SEQ ID NO: 111017 - DNA, 25 bp, Artificial
  Probe
cacagaagctggagatcatgagaca

SEQ ID NO: 111018 - DNA, 25 bp, Artificial
  Probe
gatgcatggtgtgtatatgagccag

SEQ ID NO: 111019 - DNA, 25 bp, Artificial
  Probe
tcatgagacaaaagaagcaggagta

SEQ ID NO: 111020 - DNA, 25 bp, Artificial
  Probe
tacagaagaactcatcatacgcatt

SEQ ID NO: 111021 - DNA, 25 bp, Artificial
  Probe
ttacagaagaactcatcatacgcat

SEQ ID NO: 111022 - DNA, 25 bp, Artificial
  Probe
cttacagaagaactcatcatacgca

SEQ ID NO: 111023 - DNA, 25 bp, Artificial
  Probe
acttacagaagaactcatcatacgc

SEQ ID NO: 111024 - DNA, 25 bp, Artificial
  Probe
ttgctgaccgaataatctagttgat

SEQ ID NO: 111025 - DNA, 25 bp, Artificial
  Probe
aacttacagaagaactcatcatacg

SEQ ID NO: 111026 - DNA, 25 bp, Artificial
  Probe
tgaccgaataatctagttgatcctc

SEQ ID NO: 111027 - DNA, 25 bp, Artificial
  Probe
ctgaccgaataatctagttgatcct

SEQ ID NO: 111028 - DNA, 25 bp, Artificial
  Probe
accgaataatctagttgatcctctc

SEQ ID NO: 111029 - DNA, 25 bp, Artificial
  Probe
gaccgaataatctagttgatcctct

SEQ ID NO: 111030 - DNA, 25 bp, Artificial
  Probe
tgctgaccgaataatctagttgatc

SEQ ID NO: 111031 - DNA, 25 bp, Artificial
  Probe
gctgaccgaataatctagttgatcc

SEQ ID NO: 111032 - DNA, 25 bp, Artificial
  Probe
gagaacagaagatgagtaactgact

SEQ ID NO: 111033 - DNA, 25 bp, Artificial
  Probe
ccgaataatctagttgatcctctca

SEQ ID NO: 111034 - DNA, 25 bp, Artificial
  Probe
ggagaacagaagatgagtaactgac

SEQ ID NO: 111035 - DNA, 25 bp, Artificial
  Probe
acagaagatgagtaactgactaaga

SEQ ID NO: 111036 - DNA, 25 bp, Artificial
  Probe
agaacagaagatgagtaactgacta

SEQ ID NO: 111037 - DNA, 25 bp, Artificial
  Probe
acttaacttacagaagaactcatca

SEQ ID NO: 111038 - DNA, 25 bp, Artificial
  Probe
aacagaagatgagtaactgactaag

SEQ ID NO: 111039 - DNA, 25 bp, Artificial
  Probe
gaacagaagatgagtaactgactaa

SEQ ID NO: 111040 - DNA, 25 bp, Artificial
  Probe
tttgggagaacagaagatgagtaac

SEQ ID NO: 111041 - DNA, 25 bp, Artificial
  Probe
aacacagtaatcctacagaaaccaa

SEQ ID NO: 111042 - DNA, 25 bp, Artificial
  Probe
aaacacagtaatcctacagaaacca

SEQ ID NO: 111043 - DNA, 25 bp, Artificial
  Probe
cagaagaactcatcatacgcatttg

SEQ ID NO: 111044 - DNA, 25 bp, Artificial
  Probe
acacagtaatcctacagaaaccaag

SEQ ID NO: 111045 - DNA, 25 bp, Artificial
  Probe
gaaacacagtaatcctacagaaacc

SEQ ID NO: 111046 - DNA, 25 bp, Artificial
  Probe
acagaagaactcatcatacgcattt

SEQ ID NO: 111047 - DNA, 25 bp, Artificial
  Probe
aagaatgttgaccaatgctatggag

SEQ ID NO: 111048 - DNA, 25 bp, Artificial
  Probe
aaaccagaagccttaaacaagaaag

SEQ ID NO: 111049 - DNA, 25 bp, Artificial
  Probe
gaaaccagaagccttaaacaagaaa

SEQ ID NO: 111050 - DNA, 25 bp, Artificial
  Probe
gacttaacttacagaagaactcatc

SEQ ID NO: 111051 - DNA, 25 bp, Artificial
  Probe
tgaaacacagtaatcctacagaaac

SEQ ID NO: 111052 - DNA, 25 bp, Artificial
  Probe
cagaagatgagtaactgactaagaa

SEQ ID NO: 111053 - DNA, 25 bp, Artificial
  Probe
gtaatcctacagaaaccaagccttt

SEQ ID NO: 111054 - DNA, 25 bp, Artificial
  Probe
cttatcaagcaagcgacatctcatg

SEQ ID NO: 111055 - DNA, 25 bp, Artificial
  Probe
cattctttcattggagatggtttgg

SEQ ID NO: 111056 - DNA, 25 bp, Artificial
  Probe
caagaatgttgaccaatgctatgga

SEQ ID NO: 111057 - DNA, 25 bp, Artificial
  Probe
tttgctgaccgaataatctagttga

SEQ ID NO: 111058 - DNA, 25 bp, Artificial
  Probe
ttgggagaacagaagatgagtaact

SEQ ID NO: 111059 - DNA, 25 bp, Artificial
  Probe
ctagacaccattgtatctgagtaat

SEQ ID NO: 111060 - DNA, 25 bp, Artificial
  Probe
atttgctgaccgaataatctagttg

SEQ ID NO: 111061 - DNA, 25 bp, Artificial
  Probe
catttgctgaccgaataatctagtt

SEQ ID NO: 111062 - DNA, 25 bp, Artificial
  Probe
attctttcattggagatggtttggt

SEQ ID NO: 111063 - DNA, 25 bp, Artificial
  Probe
tgaaaccagaagccttaaacaagaa

SEQ ID NO: 111064 - DNA, 25 bp, Artificial
  Probe
acaagaatgttgaccaatgctatgg

SEQ ID NO: 111065 - DNA, 25 bp, Artificial
  Probe
tcctgccacaagtctaagataagtt

SEQ ID NO: 111066 - DNA, 25 bp, Artificial
  Probe
actgtgtaatgtgagacctactata

SEQ ID NO: 111067 - DNA, 25 bp, Artificial
  Probe
agtcctgccacaagtctaagataag

SEQ ID NO: 111068 - DNA, 25 bp, Artificial
  Probe
cctgccacaagtctaagataagttg

SEQ ID NO: 111069 - DNA, 25 bp, Artificial
  Probe
gtcctgccacaagtctaagataagt

SEQ ID NO: 111070 - DNA, 25 bp, Artificial
  Probe
cagtcctgccacaagtctaagataa

SEQ ID NO: 111071 - DNA, 25 bp, Artificial
  Probe
cactgtgtaatgtgagacctactat

SEQ ID NO: 111072 - DNA, 25 bp, Artificial
  Probe
ctgccacaagtctaagataagttgc

SEQ ID NO: 111073 - DNA, 25 bp, Artificial
  Probe
ctgtgtaatgtgagacctactataa

SEQ ID NO: 111074 - DNA, 25 bp, Artificial
  Probe
ttctgtttgggaatgttctttgaag

SEQ ID NO: 111075 - DNA, 25 bp, Artificial
  Probe
gcgttctgtcagcattatcttaaat

SEQ ID NO: 111076 - DNA, 25 bp, Artificial
  Probe
ccacaagtctaagataagttgcatt

SEQ ID NO: 111077 - DNA, 25 bp, Artificial
  Probe
gccacaagtctaagataagttgcat

SEQ ID NO: 111078 - DNA, 25 bp, Artificial
  Probe
tctgtttgggaatgttctttgaaga

SEQ ID NO: 111079 - DNA, 25 bp, Artificial
  Probe
cgttctgtcagcattatcttaaatt

SEQ ID NO: 111080 - DNA, 25 bp, Artificial
  Probe
ccagtcctgccacaagtctaagata

SEQ ID NO: 111081 - DNA, 25 bp, Artificial
  Probe
attctgtttgggaatgttctttgaa

SEQ ID NO: 111082 - DNA, 25 bp, Artificial
  Probe
gtgcgttctgtcagcattatcttaa

SEQ ID NO: 111083 - DNA, 25 bp, Artificial
  Probe
tattctgtttgggaatgttctttga

SEQ ID NO: 111084 - DNA, 25 bp, Artificial
  Probe
tgtgtaatgtgagacctactataaa

SEQ ID NO: 111085 - DNA, 25 bp, Artificial
  Probe
ttattctgtttgggaatgttctttg

SEQ ID NO: 111086 - DNA, 25 bp, Artificial
  Probe
tgtgagacctactataaacaatgaa

SEQ ID NO: 111087 - DNA, 25 bp, Artificial
  Probe
gtgtaatgtgagacctactataaac

SEQ ID NO: 111088 - DNA, 25 bp, Artificial
  Probe
tctgtcagcattatcttaaattcaa

SEQ ID NO: 111089 - DNA, 25 bp, Artificial
  Probe
ttctgtcagcattatcttaaattca

SEQ ID NO: 111090 - DNA, 25 bp, Artificial
  Probe
atgtgagacctactataaacaatga

SEQ ID NO: 111091 - DNA, 25 bp, Artificial
  Probe
gtgagacctactataaacaatgaaa

SEQ ID NO: 111092 - DNA, 25 bp, Artificial
  Probe
gttctgtcagcattatcttaaattc

SEQ ID NO: 111093 - DNA, 25 bp, Artificial
  Probe
tgtaatgtgagacctactataaaca

SEQ ID NO: 111094 - DNA, 25 bp, Artificial
  Probe
catttattctgtttgggaatgttct

SEQ ID NO: 111095 - DNA, 25 bp, Artificial
  Probe
tttattctgtttgggaatgttcttt

SEQ ID NO: 111096 - DNA, 25 bp, Artificial
  Probe
cacaagtctaagataagttgcattt

SEQ ID NO: 111097 - DNA, 25 bp, Artificial
  Probe
tgtttgggaatgttctttgaagaag

SEQ ID NO: 111098 - DNA, 25 bp, Artificial
  Probe
ctgtttgggaatgttctttgaagaa

SEQ ID NO: 111099 - DNA, 25 bp, Artificial
  Probe
tgcgttctgtcagcattatcttaaa

SEQ ID NO: 111100 - DNA, 25 bp, Artificial
  Probe
catatcactgtgtaatgtgagacct

SEQ ID NO: 111101 - DNA, 25 bp, Artificial
  Probe
tttgggaatgttctttgaagaagga

SEQ ID NO: 111102 - DNA, 25 bp, Artificial
  Probe
gtttgggaatgttctttgaagaagg

SEQ ID NO: 111103 - DNA, 25 bp, Artificial
  Probe
cttagaacaaacagggccttagtta

SEQ ID NO: 111104 - DNA, 25 bp, Artificial
  Probe
tcactgtgtaatgtgagacctacta

SEQ ID NO: 111105 - DNA, 25 bp, Artificial
  Probe
tatcactgtgtaatgtgagacctac

SEQ ID NO: 111106 - DNA, 25 bp, Artificial
  Probe
atttattctgtttgggaatgttctt

SEQ ID NO: 111107 - DNA, 25 bp, Artificial
  Probe
ttagaacaaacagggccttagttac

SEQ ID NO: 111108 - DNA, 25 bp, Artificial
  Probe
atcactgtgtaatgtgagacctact

SEQ ID NO: 111109 - DNA, 25 bp, Artificial
  Probe
aatgtgagacctactataaacaatg

SEQ ID NO: 111110 - DNA, 25 bp, Artificial
  Probe
gttggatgatgaggacacaaggaag

SEQ ID NO: 111111 - DNA, 25 bp, Artificial
  Probe
atatgtttcctcagttggatgatga

SEQ ID NO: 111112 - DNA, 25 bp, Artificial
  Probe
aggcagagattaggaagtcatggag

SEQ ID NO: 111113 - DNA, 25 bp, Artificial
  Probe
aatatgtttcctcagttggatgatg

SEQ ID NO: 111114 - DNA, 25 bp, Artificial
  Probe
agttggatgatgaggacacaaggaa

SEQ ID NO: 111115 - DNA, 25 bp, Artificial
  Probe
caggcagagattaggaagtcatgga

SEQ ID NO: 111116 - DNA, 25 bp, Artificial
  Probe
aaatatgtttcctcagttggatgat

SEQ ID NO: 111117 - DNA, 25 bp, Artificial
  Probe
taaatatgtttcctcagttggatga

SEQ ID NO: 111118 - DNA, 25 bp, Artificial
  Probe
ttggatgatgaggacacaaggaagg

SEQ ID NO: 111119 - DNA, 25 bp, Artificial
  Probe
cagttggatgatgaggacacaagga

SEQ ID NO: 111120 - DNA, 25 bp, Artificial
  Probe
tcagttggatgatgaggacacaagg

SEQ ID NO: 111121 - DNA, 25 bp, Artificial
  Probe
gaagaatgggaaacagtcatgtgac

SEQ ID NO: 111122 - DNA, 25 bp, Artificial
  Probe
ttaaatatgtttcctcagttggatg

SEQ ID NO: 111123 - DNA, 25 bp, Artificial
  Probe
gaattaaatatgtttcctcagttgg

SEQ ID NO: 111124 - DNA, 25 bp, Artificial
  Probe
ggaagaatgggaaacagtcatgtga

SEQ ID NO: 111125 - DNA, 25 bp, Artificial
  Probe
aggaagaatgggaaacagtcatgtg

SEQ ID NO: 111126 - DNA, 25 bp, Artificial
  Probe
caggaagaatgggaaacagtcatgt

SEQ ID NO: 111127 - DNA, 25 bp, Artificial
  Probe
cagagattaggaagtcatggagccg

SEQ ID NO: 111128 - DNA, 25 bp, Artificial
  Probe
aattaaatatgtttcctcagttgga

SEQ ID NO: 111129 - DNA, 25 bp, Artificial
  Probe
gcagagattaggaagtcatggagcc

SEQ ID NO: 111130 - DNA, 25 bp, Artificial
  Probe
ggcagagattaggaagtcatggagc

SEQ ID NO: 111131 - DNA, 25 bp, Artificial
  Probe
tgcaggcagagattaggaagtcatg

SEQ ID NO: 111132 - DNA, 25 bp, Artificial
  Probe
gtgcaggcagagattaggaagtcat

SEQ ID NO: 111133 - DNA, 25 bp, Artificial
  Probe
tatgtttcctcagttggatgatgag

SEQ ID NO: 111134 - DNA, 25 bp, Artificial
  Probe
ggaagaggttttgcaggaattaaat

SEQ ID NO: 111135 - DNA, 25 bp, Artificial
  Probe
attaaatatgtttcctcagttggat

SEQ ID NO: 111136 - DNA, 25 bp, Artificial
  Probe
aggaagaggttttgcaggaattaaa

SEQ ID NO: 111137 - DNA, 25 bp, Artificial
  Probe
aaggaagaggttttgcaggaattaa

SEQ ID NO: 111138 - DNA, 25 bp, Artificial
  Probe
gcaggcagagattaggaagtcatgg

SEQ ID NO: 111139 - DNA, 25 bp, Artificial
  Probe
gaaggaagaggttttgcaggaatta

SEQ ID NO: 111140 - DNA, 25 bp, Artificial
  Probe
ctcagttggatgatgaggacacaag

SEQ ID NO: 111141 - DNA, 25 bp, Artificial
  Probe
gcaggaagaatgggaaacagtcatg

SEQ ID NO: 111142 - DNA, 25 bp, Artificial
  Probe
gaggttttgcaggaattaaatatgt

SEQ ID NO: 111143 - DNA, 25 bp, Artificial
  Probe
agaggttttgcaggaattaaatatg

SEQ ID NO: 111144 - DNA, 25 bp, Artificial
  Probe
gaagaggttttgcaggaattaaata

SEQ ID NO: 111145 - DNA, 25 bp, Artificial
  Probe
cattgttgcaggaagaatgggaaac

SEQ ID NO: 111146 - DNA, 25 bp, Artificial
  Probe
aggttttgcaggaattaaatatgtt

SEQ ID NO: 111147 - DNA, 25 bp, Artificial
  Probe
agaaggaagaggttttgcaggaatt

SEQ ID NO: 111148 - DNA, 25 bp, Artificial
  Probe
aagaaggaagaggttttgcaggaat

SEQ ID NO: 111149 - DNA, 25 bp, Artificial
  Probe
tatcgggactggaccaggaagataa

SEQ ID NO: 111150 - DNA, 25 bp, Artificial
  Probe
gttgcaggaagaatgggaaacagtc

SEQ ID NO: 111151 - DNA, 25 bp, Artificial
  Probe
aagaggttttgcaggaattaaatat

SEQ ID NO: 111152 - DNA, 25 bp, Artificial
  Probe
ggttttgcaggaattaaatatgttt

SEQ ID NO: 111153 - DNA, 25 bp, Artificial
  Probe
ctgaaaccctaccagtcactatggc

SEQ ID NO: 111154 - DNA, 25 bp, Artificial
  Probe
tgcaggaagaatgggaaacagtcat

SEQ ID NO: 111155 - DNA, 25 bp, Artificial
  Probe
tgatagcaagttgatgaacaatact

SEQ ID NO: 111156 - DNA, 25 bp, Artificial
  Probe
tatccgcagctatatgtgtattgaa

SEQ ID NO: 111157 - DNA, 25 bp, Artificial
  Probe
atccgcagctatatgtgtattgaat

SEQ ID NO: 111158 - DNA, 25 bp, Artificial
  Probe
ttgatagcaagttgatgaacaatac

SEQ ID NO: 111159 - DNA, 25 bp, Artificial
  Probe
tccgcagctatatgtgtattgaatc

SEQ ID NO: 111160 - DNA, 25 bp, Artificial
  Probe
atatccgcagctatatgtgtattga

SEQ ID NO: 111161 - DNA, 25 bp, Artificial
  Probe
gctgttatctatcttattgttctgg

SEQ ID NO: 111162 - DNA, 25 bp, Artificial
  Probe
cgcagctatatgtgtattgaatcat

SEQ ID NO: 111163 - DNA, 25 bp, Artificial
  Probe
ccgcagctatatgtgtattgaatca

SEQ ID NO: 111164 - DNA, 25 bp, Artificial
  Probe
aatatccgcagctatatgtgtattg

SEQ ID NO: 111165 - DNA, 25 bp, Artificial
  Probe
gggaagaccaaatgttgtttatcta

SEQ ID NO: 111166 - DNA, 25 bp, Artificial
  Probe
tgctgttatctatcttattgttctg

SEQ ID NO: 111167 - DNA, 25 bp, Artificial
  Probe
tagcaagttgatgaacaatacttca

SEQ ID NO: 111168 - DNA, 25 bp, Artificial
  Probe
ggaagaccaaatgttgtttatctaa

SEQ ID NO: 111169 - DNA, 25 bp, Artificial
  Probe
tttgatagcaagttgatgaacaata

SEQ ID NO: 111170 - DNA, 25 bp, Artificial
  Probe
ctgttatctatcttattgttctgga

SEQ ID NO: 111171 - DNA, 25 bp, Artificial
  Probe
aaggaattatgctttaatgctgtta

SEQ ID NO: 111172 - DNA, 25 bp, Artificial
  Probe
taaggaattatgctttaatgctgtt

SEQ ID NO: 111173 - DNA, 25 bp, Artificial
  Probe
aaatatccgcagctatatgtgtatt

SEQ ID NO: 111174 - DNA, 25 bp, Artificial
  Probe
atgctgttatctatcttattgttct

SEQ ID NO: 111175 - DNA, 25 bp, Artificial
  Probe
atagcaagttgatgaacaatacttc

SEQ ID NO: 111176 - DNA, 25 bp, Artificial
  Probe
gatagcaagttgatgaacaatactt

SEQ ID NO: 111177 - DNA, 25 bp, Artificial
  Probe
aggaattatgctttaatgctgttat

SEQ ID NO: 111178 - DNA, 25 bp, Artificial
  Probe
ataaggaattatgctttaatgctgt

SEQ ID NO: 111179 - DNA, 25 bp, Artificial
  Probe
agcagtctcaggataagttttacag

SEQ ID NO: 111180 - DNA, 25 bp, Artificial
  Probe
ggaattatgctttaatgctgttatc

SEQ ID NO: 111181 - DNA, 25 bp, Artificial
  Probe
gcagctatatgtgtattgaatcata

SEQ ID NO: 111182 - DNA, 25 bp, Artificial
  Probe
actttgtgtaccacgtttaaatgag

SEQ ID NO: 111183 - DNA, 25 bp, Artificial
  Probe
atgctttaatgctgttatctatctt

SEQ ID NO: 111184 - DNA, 25 bp, Artificial
  Probe
tgataaggaattatgctttaatgct

SEQ ID NO: 111185 - DNA, 25 bp, Artificial
  Probe
aatcctgttacccctttcctcatta

SEQ ID NO: 111186 - DNA, 25 bp, Artificial
  Probe
gcagtctcaggataagttttacaga

SEQ ID NO: 111187 - DNA, 25 bp, Artificial
  Probe
atggtgaggggtataaattctgtta

SEQ ID NO: 111188 - DNA, 25 bp, Artificial
  Probe
atcctgttacccctttcctcattaa

SEQ ID NO: 111189 - DNA, 25 bp, Artificial
  Probe
tgttatctatcttattgttctggaa

SEQ ID NO: 111190 - DNA, 25 bp, Artificial
  Probe
gataaggaattatgctttaatgctg

SEQ ID NO: 111191 - DNA, 25 bp, Artificial
  Probe
tgaggggtataaattctgttatggc

SEQ ID NO: 111192 - DNA, 25 bp, Artificial
  Probe
tactttgtgtaccacgtttaaatga

SEQ ID NO: 111193 - DNA, 25 bp, Artificial
  Probe
agaaaataaaatgaaacacagtggc

SEQ ID NO: 111194 - DNA, 25 bp, Artificial
  Probe
ctttgtgtaccacgtttaaatgagc

SEQ ID NO: 111195 - DNA, 25 bp, Artificial
  Probe
tgtaccacgtttaaatgagcagtct

SEQ ID NO: 111196 - DNA, 25 bp, Artificial
  Probe
tggtgaggggtataaattctgttat

SEQ ID NO: 111197 - DNA, 25 bp, Artificial
  Probe
gtaccacgtttaaatgagcagtctc

SEQ ID NO: 111198 - DNA, 25 bp, Artificial
  Probe
aatgcttggaaaagactcttgaatc

SEQ ID NO: 111199 - DNA, 25 bp, Artificial
  Probe
aaaatgcttggaaaagactcttgaa

SEQ ID NO: 111200 - DNA, 25 bp, Artificial
  Probe
ttccagtgtcatgtaattctcttca

SEQ ID NO: 111201 - DNA, 25 bp, Artificial
  Probe
cagtgtcatgtaattctcttcagtg

SEQ ID NO: 111202 - DNA, 25 bp, Artificial
  Probe
tccagtgtcatgtaattctcttcag

SEQ ID NO: 111203 - DNA, 25 bp, Artificial
  Probe
gtgtcatgtaattctcttcagtgga

SEQ ID NO: 111204 - DNA, 25 bp, Artificial
  Probe
agtgtcatgtaattctcttcagtgg

SEQ ID NO: 111205 - DNA, 25 bp, Artificial
  Probe
ccagtgtcatgtaattctcttcagt

SEQ ID NO: 111206 - DNA, 25 bp, Artificial
  Probe
tgaatcaagagtgtgtagaagatac

SEQ ID NO: 111207 - DNA, 25 bp, Artificial
  Probe
agattccagtgtcatgtaattctct

SEQ ID NO: 111208 - DNA, 25 bp, Artificial
  Probe
gtaataacaagaagcattgccactg

SEQ ID NO: 111209 - DNA, 25 bp, Artificial
  Probe
attccagtgtcatgtaattctcttc

SEQ ID NO: 111210 - DNA, 25 bp, Artificial
  Probe
gattccagtgtcatgtaattctctt

SEQ ID NO: 111211 - DNA, 25 bp, Artificial
  Probe
atgtaataacaagaagcattgccac

SEQ ID NO: 111212 - DNA, 25 bp, Artificial
  Probe
aagattccagtgtcatgtaattctc

SEQ ID NO: 111213 - DNA, 25 bp, Artificial
  Probe
catgtaattctcttcagtggacaga

SEQ ID NO: 111214 - DNA, 25 bp, Artificial
  Probe
tcatgtaattctcttcagtggacag

SEQ ID NO: 111215 - DNA, 25 bp, Artificial
  Probe
tatgtaataacaagaagcattgcca

SEQ ID NO: 111216 - DNA, 25 bp, Artificial
  Probe
gaatcaagagtgtgtagaagatact

SEQ ID NO: 111217 - DNA, 25 bp, Artificial
  Probe
taataacaagaagcattgccactgt

SEQ ID NO: 111218 - DNA, 25 bp, Artificial
  Probe
tgtaataacaagaagcattgccact

SEQ ID NO: 111219 - DNA, 25 bp, Artificial
  Probe
gtatgtaataacaagaagcattgcc

SEQ ID NO: 111220 - DNA, 25 bp, Artificial
  Probe
ggtatgtaataacaagaagcattgc

SEQ ID NO: 111221 - DNA, 25 bp, Artificial
  Probe
gtcatgtaattctcttcagtggaca

SEQ ID NO: 111222 - DNA, 25 bp, Artificial
  Probe
tgtcatgtaattctcttcagtggac

SEQ ID NO: 111223 - DNA, 25 bp, Artificial
  Probe
tgaaagtgaaagtgaatccaaagac

SEQ ID NO: 111224 - DNA, 25 bp, Artificial
  Probe
aatcaagagtgtgtagaagatactt

SEQ ID NO: 111225 - DNA, 25 bp, Artificial
  Probe
gccagaaatcatatctctccataca

SEQ ID NO: 111226 - DNA, 25 bp, Artificial
  Probe
ttgaaagtgaaagtgaatccaaaga

SEQ ID NO: 111227 - DNA, 25 bp, Artificial
  Probe
gaaagtgaaagtgaatccaaagact

SEQ ID NO: 111228 - DNA, 25 bp, Artificial
  Probe
ttgaatcaagagtgtgtagaagata

SEQ ID NO: 111229 - DNA, 25 bp, Artificial
  Probe
atgtaattctcttcagtggacagaa

SEQ ID NO: 111230 - DNA, 25 bp, Artificial
  Probe
caatttgaaagtgaaagtgaatcca

SEQ ID NO: 111231 - DNA, 25 bp, Artificial
  Probe
acaatttgaaagtgaaagtgaatcc

SEQ ID NO: 111232 - DNA, 25 bp, Artificial
  Probe
ccagaaatcatatctctccatacac

SEQ ID NO: 111233 - DNA, 25 bp, Artificial
  Probe
gcaaagattccagtgtcatgtaatt

SEQ ID NO: 111234 - DNA, 25 bp, Artificial
  Probe
aataacaagaagcattgccactgtg

SEQ ID NO: 111235 - DNA, 25 bp, Artificial
  Probe
caagtgaagaacaatttgaaagtga

SEQ ID NO: 111236 - DNA, 25 bp, Artificial
  Probe
agcaaagattccagtgtcatgtaat

SEQ ID NO: 111237 - DNA, 25 bp, Artificial
  Probe
aaagtgaaagtgaatccaaagacta

SEQ ID NO: 111238 - DNA, 25 bp, Artificial
  Probe
aagtgaaagtgaatccaaagactag

SEQ ID NO: 111239 - DNA, 25 bp, Artificial
  Probe
agaacaatttgaaagtgaaagtgaa

SEQ ID NO: 111240 - DNA, 25 bp, Artificial
  Probe
aagaacaatttgaaagtgaaagtga

SEQ ID NO: 111241 - DNA, 25 bp, Artificial
  Probe
tgaagaacaatttgaaagtgaaagt

SEQ ID NO: 111242 - DNA, 25 bp, Artificial
  Probe
agtgaagaacaatttgaaagtgaaa

SEQ ID NO: 111243 - DNA, 25 bp, Artificial
  Probe
aagtgaagaacaatttgaaagtgaa

SEQ ID NO: 111244 - DNA, 25 bp, Artificial
  Probe
atcatctgtttgcctgaaagtcaag

SEQ ID NO: 111245 - DNA, 25 bp, Artificial
  Probe
tacactcactcctccagattcctta

SEQ ID NO: 111246 - DNA, 25 bp, Artificial
  Probe
gtaacaactggtattatcgtgtgaa

SEQ ID NO: 111247 - DNA, 25 bp, Artificial
  Probe
cgtaacaactggtattatcgtgtga

SEQ ID NO: 111248 - DNA, 25 bp, Artificial
  Probe
ttattgtcctgctgtgctgtctaat

SEQ ID NO: 111249 - DNA, 25 bp, Artificial
  Probe
cttgtgttgctcttctctaccgtaa

SEQ ID NO: 111250 - DNA, 25 bp, Artificial
  Probe
ccgtaacaactggtattatcgtgtg

SEQ ID NO: 111251 - DNA, 25 bp, Artificial
  Probe
atatacacttgtgttgctcttctct

SEQ ID NO: 111252 - DNA, 25 bp, Artificial
  Probe
atacacttgtgttgctcttctctac

SEQ ID NO: 111253 - DNA, 25 bp, Artificial
  Probe
tattgtcctgctgtgctgtctaatg

SEQ ID NO: 111254 - DNA, 25 bp, Artificial
  Probe
cttattgtcctgctgtgctgtctaa

SEQ ID NO: 111255 - DNA, 25 bp, Artificial
  Probe
ttgctcttctctaccgtaacaactg

SEQ ID NO: 111256 - DNA, 25 bp, Artificial
  Probe
atctaaatgttctaacttgccctgt

SEQ ID NO: 111257 - DNA, 25 bp, Artificial
  Probe
tgaagcatgttccaatgaggatata

SEQ ID NO: 111258 - DNA, 25 bp, Artificial
  Probe
tatgaagcatgttccaatgaggata

SEQ ID NO: 111259 - DNA, 25 bp, Artificial
  Probe
tatacacttgtgttgctcttctcta

SEQ ID NO: 111260 - DNA, 25 bp, Artificial
  Probe
atgaagcatgttccaatgaggatat

SEQ ID NO: 111261 - DNA, 25 bp, Artificial
  Probe
atatgaagcatgttccaatgaggat

SEQ ID NO: 111262 - DNA, 25 bp, Artificial
  Probe
cgataggatttattactgctctggg

SEQ ID NO: 111263 - DNA, 25 bp, Artificial
  Probe
tgcgataggatttattactgctctg

SEQ ID NO: 111264 - DNA, 25 bp, Artificial
  Probe
gtgcgataggatttattactgctct

SEQ ID NO: 111265 - DNA, 25 bp, Artificial
  Probe
aatatgaagcatgttccaatgagga

SEQ ID NO: 111266 - DNA, 25 bp, Artificial
  Probe
tctaaatgttctaacttgccctgtc

SEQ ID NO: 111267 - DNA, 25 bp, Artificial
  Probe
ttgtgttgctcttctctaccgtaac

SEQ ID NO: 111268 - DNA, 25 bp, Artificial
  Probe
tgtaagaaccctgataagcaatgtg

SEQ ID NO: 111269 - DNA, 25 bp, Artificial
  Probe
gtgtaagaaccctgataagcaatgt

SEQ ID NO: 111270 - DNA, 25 bp, Artificial
  Probe
tgtgtaagaaccctgataagcaatg

SEQ ID NO: 111271 - DNA, 25 bp, Artificial
  Probe
ctacactcactcctccagattcctt

SEQ ID NO: 111272 - DNA, 25 bp, Artificial
  Probe
ctaaatgttctaacttgccctgtca

SEQ ID NO: 111273 - DNA, 25 bp, Artificial
  Probe
ccgaggagtgttacatttcagttaa

SEQ ID NO: 111274 - DNA, 25 bp, Artificial
  Probe
gcgataggatttattactgctctgg

SEQ ID NO: 111275 - DNA, 25 bp, Artificial
  Probe
cgaggagtgttacatttcagttaat

SEQ ID NO: 111276 - DNA, 25 bp, Artificial
  Probe
taaatgttctaacttgccctgtcag

SEQ ID NO: 111277 - DNA, 25 bp, Artificial
  Probe
ttgtgtaagaaccctgataagcaat

SEQ ID NO: 111278 - DNA, 25 bp, Artificial
  Probe
gaagcatgttccaatgaggatatat

SEQ ID NO: 111279 - DNA, 25 bp, Artificial
  Probe
tttgtgtaagaaccctgataagcaa

SEQ ID NO: 111280 - DNA, 25 bp, Artificial
  Probe
tatatacacttgtgttgctcttctc

SEQ ID NO: 111281 - DNA, 25 bp, Artificial
  Probe
agttggtatgcacggatgttagata

SEQ ID NO: 111282 - DNA, 25 bp, Artificial
  Probe
tttcagttaatactaaagccaaccg

SEQ ID NO: 111283 - DNA, 25 bp, Artificial
  Probe
acactcactcctccagattccttac

SEQ ID NO: 111284 - DNA, 25 bp, Artificial
  Probe
gatctaaatgttctaacttgccctg

SEQ ID NO: 111285 - DNA, 25 bp, Artificial
  Probe
agtgcgataggatttattactgctc

SEQ ID NO: 111286 - DNA, 25 bp, Artificial
  Probe
gtttgtgtaagaaccctgataagca

SEQ ID NO: 111287 - DNA, 25 bp, Artificial
  Probe
ggatctaaatgttctaacttgccct

SEQ ID NO: 111288 - DNA, 25 bp, Artificial
  Probe
accgtaacaactggtattatcgtgt

SEQ ID NO: 111289 - DNA, 25 bp, Artificial
  Probe
tgggatctaaatgttctaacttgcc

SEQ ID NO: 111290 - DNA, 25 bp, Artificial
  Probe
attcaactaatgagtatggcgacaa

SEQ ID NO: 111291 - DNA, 25 bp, Artificial
  Probe
aattcaactaatgagtatggcgaca

SEQ ID NO: 111292 - DNA, 25 bp, Artificial
  Probe
taattcaactaatgagtatggcgac

SEQ ID NO: 111293 - DNA, 25 bp, Artificial
  Probe
actaattcaactaatgagtatggcg

SEQ ID NO: 111294 - DNA, 25 bp, Artificial
  Probe
ctaattcaactaatgagtatggcga

SEQ ID NO: 111295 - DNA, 25 bp, Artificial
  Probe
caactaatgagtatggcgacaacat

SEQ ID NO: 111296 - DNA, 25 bp, Artificial
  Probe
ttcaactaatgagtatggcgacaac

SEQ ID NO: 111297 - DNA, 25 bp, Artificial
  Probe
ctccatcagcctatctcttccattc

SEQ ID NO: 111298 - DNA, 25 bp, Artificial
  Probe
tctccatcagcctatctcttccatt

SEQ ID NO: 111299 - DNA, 25 bp, Artificial
  Probe
tatgaccattgtgtgtattctggaa

SEQ ID NO: 111300 - DNA, 25 bp, Artificial
  Probe
atatgaccattgtgtgtattctgga

SEQ ID NO: 111301 - DNA, 25 bp, Artificial
  Probe
tcaactaatgagtatggcgacaaca

SEQ ID NO: 111302 - DNA, 25 bp, Artificial
  Probe
aactaatgagtatggcgacaacatg

SEQ ID NO: 111303 - DNA, 25 bp, Artificial
  Probe
aatatgaccattgtgtgtattctgg

SEQ ID NO: 111304 - DNA, 25 bp, Artificial
  Probe
tgaaacaagaaacactggcataaat

SEQ ID NO: 111305 - DNA, 25 bp, Artificial
  Probe
caacatgcagatatcacaagacaat

SEQ ID NO: 111306 - DNA, 25 bp, Artificial
  Probe
atgaaacaagaaacactggcataaa

SEQ ID NO: 111307 - DNA, 25 bp, Artificial
  Probe
aatgaaacaagaaacactggcataa

SEQ ID NO: 111308 - DNA, 25 bp, Artificial
  Probe
gaatgaaacaagaaacactggcata

SEQ ID NO: 111309 - DNA, 25 bp, Artificial
  Probe
ttctggaaacggagtcaatgaatat

SEQ ID NO: 111310 - DNA, 25 bp, Artificial
  Probe
aacatgcagatatcacaagacaatg

SEQ ID NO: 111311 - DNA, 25 bp, Artificial
  Probe
acaacatgcagatatcacaagacaa

SEQ ID NO: 111312 - DNA, 25 bp, Artificial
  Probe
gaaacaagaaacactggcataaatt

SEQ ID NO: 111313 - DNA, 25 bp, Artificial
  Probe
gtctccatcagcctatctcttccat

SEQ ID NO: 111314 - DNA, 25 bp, Artificial
  Probe
agtgtctccatcagcctatctcttc

SEQ ID NO: 111315 - DNA, 25 bp, Artificial
  Probe
gtattctggaaacggagtcaatgaa

SEQ ID NO: 111316 - DNA, 25 bp, Artificial
  Probe
aactaattcaactaatgagtatggc

SEQ ID NO: 111317 - DNA, 25 bp, Artificial
  Probe
gacaacatgcagatatcacaagaca

SEQ ID NO: 111318 - DNA, 25 bp, Artificial
  Probe
tatttcctccaaacctcacaatatg

SEQ ID NO: 111319 - DNA, 25 bp, Artificial
  Probe
gaaatagaggaggctcagaatgaaa

SEQ ID NO: 111320 - DNA, 25 bp, Artificial
  Probe
aaatagaggaggctcagaatgaaac

SEQ ID NO: 111321 - DNA, 25 bp, Artificial
  Probe
cagtgtctccatcagcctatctctt

SEQ ID NO: 111322 - DNA, 25 bp, Artificial
  Probe
ttcagtgtctccatcagcctatctc

SEQ ID NO: 111323 - DNA, 25 bp, Artificial
  Probe
agaatgaaacaagaaacactggcat

SEQ ID NO: 111324 - DNA, 25 bp, Artificial
  Probe
gtgtattctggaaacggagtcaatg

SEQ ID NO: 111325 - DNA, 25 bp, Artificial
  Probe
tccatcagcctatctcttccattcc

SEQ ID NO: 111326 - DNA, 25 bp, Artificial
  Probe
caatatgaccattgtgtgtattctg

SEQ ID NO: 111327 - DNA, 25 bp, Artificial
  Probe
tgtattctggaaacggagtcaatga

SEQ ID NO: 111328 - DNA, 25 bp, Artificial
  Probe
catgcagatatcacaagacaatgtc

SEQ ID NO: 111329 - DNA, 25 bp, Artificial
  Probe
tgaaatagaggaggctcagaatgaa

SEQ ID NO: 111330 - DNA, 25 bp, Artificial
  Probe
atgcagatatcacaagacaatgtca

SEQ ID NO: 111331 - DNA, 25 bp, Artificial
  Probe
ctcagaatgaaacaagaaacactgg

SEQ ID NO: 111332 - DNA, 25 bp, Artificial
  Probe
cattgtgtgtattctggaaacggag

SEQ ID NO: 111333 - DNA, 25 bp, Artificial
  Probe
tctggaaacggagtcaatgaatatt

SEQ ID NO: 111334 - DNA, 25 bp, Artificial
  Probe
ctcatctaagcaaggatacccgaaa

SEQ ID NO: 111335 - DNA, 25 bp, Artificial
  Probe
caagaatggcaatatgaactgtcac

SEQ ID NO: 111336 - DNA, 25 bp, Artificial
  Probe
aatggcaatatgaactgtcacgaag

SEQ ID NO: 111337 - DNA, 25 bp, Artificial
  Probe
gaatggcaatatgaactgtcacgaa

SEQ ID NO: 111338 - DNA, 25 bp, Artificial
  Probe
aagaatggcaatatgaactgtcacg

SEQ ID NO: 111339 - DNA, 25 bp, Artificial
  Probe
aatatgaactgtcacgaaggcatag

SEQ ID NO: 111340 - DNA, 25 bp, Artificial
  Probe
caatatgaactgtcacgaaggcata

SEQ ID NO: 111341 - DNA, 25 bp, Artificial
  Probe
gcaagaatggcaatatgaactgtca

SEQ ID NO: 111342 - DNA, 25 bp, Artificial
  Probe
atagaatgtaccaacggttccttag

SEQ ID NO: 111343 - DNA, 25 bp, Artificial
  Probe
gatagaatgtaccaacggttcctta

SEQ ID NO: 111344 - DNA, 25 bp, Artificial
  Probe
atatgaactgtcacgaaggcatagt

SEQ ID NO: 111345 - DNA, 25 bp, Artificial
  Probe
agaatggcaatatgaactgtcacga

SEQ ID NO: 111346 - DNA, 25 bp, Artificial
  Probe
tagaatgtaccaacggttccttaga

SEQ ID NO: 111347 - DNA, 25 bp, Artificial
  Probe
ttctaggtgacgatggacatacaga

SEQ ID NO: 111348 - DNA, 25 bp, Artificial
  Probe
agatagaatgtaccaacggttcctt

SEQ ID NO: 111349 - DNA, 25 bp, Artificial
  Probe
aagatagaatgtaccaacggttcct

SEQ ID NO: 111350 - DNA, 25 bp, Artificial
  Probe
caagatagaatgtaccaacggttcc

SEQ ID NO: 111351 - DNA, 25 bp, Artificial
  Probe
ccaagatagaatgtaccaacggttc

SEQ ID NO: 111352 - DNA, 25 bp, Artificial
  Probe
agatagatgacatctgtagctgcta

SEQ ID NO: 111353 - DNA, 25 bp, Artificial
  Probe
tctaggtgacgatggacatacagag

SEQ ID NO: 111354 - DNA, 25 bp, Artificial
  Probe
tatgaactgtcacgaaggcatagtg

SEQ ID NO: 111355 - DNA, 25 bp, Artificial
  Probe
agaatgtaccaacggttccttagac

SEQ ID NO: 111356 - DNA, 25 bp, Artificial
  Probe
atctgtgatactgccaatatcccat

SEQ ID NO: 111357 - DNA, 25 bp, Artificial
  Probe
tttctaggtgacgatggacatacag

SEQ ID NO: 111358 - DNA, 25 bp, Artificial
  Probe
ctttctaggtgacgatggacataca

SEQ ID NO: 111359 - DNA, 25 bp, Artificial
  Probe
actttctaggtgacgatggacatac

SEQ ID NO: 111360 - DNA, 25 bp, Artificial
  Probe
atggcaatatgaactgtcacgaagg

SEQ ID NO: 111361 - DNA, 25 bp, Artificial
  Probe
aatgtaccaacggttccttagacag

SEQ ID NO: 111362 - DNA, 25 bp, Artificial
  Probe
gaatgtaccaacggttccttagaca

SEQ ID NO: 111363 - DNA, 25 bp, Artificial
  Probe
gatagatgacatctgtagctgctac

SEQ ID NO: 111364 - DNA, 25 bp, Artificial
  Probe
cagcatctgtgatactgccaatatc

SEQ ID NO: 111365 - DNA, 25 bp, Artificial
  Probe
ctaggtgacgatggacatacagagg

SEQ ID NO: 111366 - DNA, 25 bp, Artificial
  Probe
atagatgacatctgtagctgctact

SEQ ID NO: 111367 - DNA, 25 bp, Artificial
  Probe
gaacattcgcagcatctgtgatact

SEQ ID NO: 111368 - DNA, 25 bp, Artificial
  Probe
catctgtgatactgccaatatccca

SEQ ID NO: 111369 - DNA, 25 bp, Artificial
  Probe
taggtgacgatggacatacagagga

SEQ ID NO: 111370 - DNA, 25 bp, Artificial
  Probe
tgcactttgacagatagatgacatc

SEQ ID NO: 111371 - DNA, 25 bp, Artificial
  Probe
cactttctaggtgacgatggacata

SEQ ID NO: 111372 - DNA, 25 bp, Artificial
  Probe
aacattcgcagcatctgtgatactg

SEQ ID NO: 111373 - DNA, 25 bp, Artificial
  Probe
tagatgacatctgtagctgctactg

SEQ ID NO: 111374 - DNA, 25 bp, Artificial
  Probe
gcaatatgaactgtcacgaaggcat

SEQ ID NO: 111375 - DNA, 25 bp, Artificial
  Probe
gccaagatagaatgtaccaacggtt

SEQ ID NO: 111376 - DNA, 25 bp, Artificial
  Probe
tctgtgatactgccaatatcccatg

SEQ ID NO: 111377 - DNA, 25 bp, Artificial
  Probe
agcatctgtgatactgccaatatcc

SEQ ID NO: 111378 - DNA, 25 bp, Artificial
  Probe
catgcaagaatggcaatatgaactg

SEQ ID NO: 111379 - DNA, 25 bp, Artificial
  Probe
atgcaagaatggcaatatgaactgt

SEQ ID NO: 111380 - DNA, 25 bp, Artificial
  Probe
taatctcgctctcatccctttatct

SEQ ID NO: 111381 - DNA, 25 bp, Artificial
  Probe
ttaatctcgctctcatccctttatc

SEQ ID NO: 111382 - DNA, 25 bp, Artificial
  Probe
tttaatctcgctctcatccctttat

SEQ ID NO: 111383 - DNA, 25 bp, Artificial
  Probe
ctgaacctctctgtcttgaagtgtg

SEQ ID NO: 111384 - DNA, 25 bp, Artificial
  Probe
ttcctgaacctctctgtcttgaagt

SEQ ID NO: 111385 - DNA, 25 bp, Artificial
  Probe
aatctcgctctcatccctttatctc

SEQ ID NO: 111386 - DNA, 25 bp, Artificial
  Probe
ctctcatccctttatctctgtacca

SEQ ID NO: 111387 - DNA, 25 bp, Artificial
  Probe
tgaacctctctgtcttgaagtgtga

SEQ ID NO: 111388 - DNA, 25 bp, Artificial
  Probe
tttcctgaacctctctgtcttgaag

SEQ ID NO: 111389 - DNA, 25 bp, Artificial
  Probe
ctttcctgaacctctctgtcttgaa

SEQ ID NO: 111390 - DNA, 25 bp, Artificial
  Probe
tcgctctcatccctttatctctgta

SEQ ID NO: 111391 - DNA, 25 bp, Artificial
  Probe
tcctgaacctctctgtcttgaagtg

SEQ ID NO: 111392 - DNA, 25 bp, Artificial
  Probe
gaacctctctgtcttgaagtgtgac

SEQ ID NO: 111393 - DNA, 25 bp, Artificial
  Probe
atctcgctctcatccctttatctct

SEQ ID NO: 111394 - DNA, 25 bp, Artificial
  Probe
tctcatccctttatctctgtaccag

SEQ ID NO: 111395 - DNA, 25 bp, Artificial
  Probe
gctctcatccctttatctctgtacc

SEQ ID NO: 111396 - DNA, 25 bp, Artificial
  Probe
cctgaacctctctgtcttgaagtgt

SEQ ID NO: 111397 - DNA, 25 bp, Artificial
  Probe
cgctctcatccctttatctctgtac

SEQ ID NO: 111398 - DNA, 25 bp, Artificial
  Probe
gtcttgaagtgtgacagagttggtc

SEQ ID NO: 111399 - DNA, 25 bp, Artificial
  Probe
ctttatctctgtaccagctttcctg

SEQ ID NO: 111400 - DNA, 25 bp, Artificial
  Probe
tctcgctctcatccctttatctctg

SEQ ID NO: 111401 - DNA, 25 bp, Artificial
  Probe
ttatctctgtaccagctttcctgaa

SEQ ID NO: 111402 - DNA, 25 bp, Artificial
  Probe
tttatctctgtaccagctttcctga

SEQ ID NO: 111403 - DNA, 25 bp, Artificial
  Probe
atccctttatctctgtaccagcttt

SEQ ID NO: 111404 - DNA, 25 bp, Artificial
  Probe
ctcatccctttatctctgtaccagc

SEQ ID NO: 111405 - DNA, 25 bp, Artificial
  Probe
ttttaatctcgctctcatcccttta

SEQ ID NO: 111406 - DNA, 25 bp, Artificial
  Probe
ctcgctctcatccctttatctctgt

SEQ ID NO: 111407 - DNA, 25 bp, Artificial
  Probe
cctttatctctgtaccagctttcct

SEQ ID NO: 111408 - DNA, 25 bp, Artificial
  Probe
cttttaatctcgctctcatcccttt

SEQ ID NO: 111409 - DNA, 25 bp, Artificial
  Probe
tatctctgtaccagctttcctgaac

SEQ ID NO: 111410 - DNA, 25 bp, Artificial
  Probe
tccctttatctctgtaccagctttc

SEQ ID NO: 111411 - DNA, 25 bp, Artificial
  Probe
catccctttatctctgtaccagctt

SEQ ID NO: 111412 - DNA, 25 bp, Artificial
  Probe
ttatttataatgggtaggggctgac

SEQ ID NO: 111413 - DNA, 25 bp, Artificial
  Probe
tcatccctttatctctgtaccagct

SEQ ID NO: 111414 - DNA, 25 bp, Artificial
  Probe
tttatttataatgggtaggggctga

SEQ ID NO: 111415 - DNA, 25 bp, Artificial
  Probe
ctttatttataatgggtaggggctg

SEQ ID NO: 111416 - DNA, 25 bp, Artificial
  Probe
ccctttatctctgtaccagctttcc

SEQ ID NO: 111417 - DNA, 25 bp, Artificial
  Probe
cagtcttcctttatttataatgggt

SEQ ID NO: 111418 - DNA, 25 bp, Artificial
  Probe
ccttttaatctcgctctcatccctt

SEQ ID NO: 111419 - DNA, 25 bp, Artificial
  Probe
gctttcctgaacctctctgtcttga

SEQ ID NO: 111420 - DNA, 25 bp, Artificial
  Probe
ccagtcttcctttatttataatggg

SEQ ID NO: 111421 - DNA, 25 bp, Artificial
  Probe
cccagtcttcctttatttataatgg

SEQ ID NO: 111422 - DNA, 25 bp, Artificial
  Probe
catccttatttgaccccatctcctg

SEQ ID NO: 111423 - DNA, 25 bp, Artificial
  Probe
atccttatttgaccccatctcctga

SEQ ID NO: 111424 - DNA, 25 bp, Artificial
  Probe
cttcctttatttataatgggtaggg

SEQ ID NO: 111425 - DNA, 25 bp, Artificial
  Probe
agtagcagcaacatccagttcttaa

SEQ ID NO: 111426 - DNA, 25 bp, Artificial
  Probe
aaactaaaggatgaacgaatgaacc

SEQ ID NO: 111427 - DNA, 25 bp, Artificial
  Probe
aatgagatgggaaagaggtaacaaa

SEQ ID NO: 111428 - DNA, 25 bp, Artificial
  Probe
taagacagaatgagatgggaaagag

SEQ ID NO: 111429 - DNA, 25 bp, Artificial
  Probe
ctaaaggatgaacgaatgaaccaac

SEQ ID NO: 111430 - DNA, 25 bp, Artificial
  Probe
gaatgagatgggaaagaggtaacaa

SEQ ID NO: 111431 - DNA, 25 bp, Artificial
  Probe
actaaaggatgaacgaatgaaccaa

SEQ ID NO: 111432 - DNA, 25 bp, Artificial
  Probe
aactaaaggatgaacgaatgaacca

SEQ ID NO: 111433 - DNA, 25 bp, Artificial
  Probe
ttaagacagaatgagatgggaaaga

SEQ ID NO: 111434 - DNA, 25 bp, Artificial
  Probe
cagaatgagatgggaaagaggtaac

SEQ ID NO: 111435 - DNA, 25 bp, Artificial
  Probe
agaatgagatgggaaagaggtaaca

SEQ ID NO: 111436 - DNA, 25 bp, Artificial
  Probe
acagaatgagatgggaaagaggtaa

SEQ ID NO: 111437 - DNA, 25 bp, Artificial
  Probe
cagtagcagcaacatccagttctta

SEQ ID NO: 111438 - DNA, 25 bp, Artificial
  Probe
gacagaatgagatgggaaagaggta

SEQ ID NO: 111439 - DNA, 25 bp, Artificial
  Probe
aaggatgaacgaatgaaccaacgaa

SEQ ID NO: 111440 - DNA, 25 bp, Artificial
  Probe
taaaggatgaacgaatgaaccaacg

SEQ ID NO: 111441 - DNA, 25 bp, Artificial
  Probe
aagacagaatgagatgggaaagagg

SEQ ID NO: 111442 - DNA, 25 bp, Artificial
  Probe
cctcatcctgaagtagactagagct

SEQ ID NO: 111443 - DNA, 25 bp, Artificial
  Probe
atgaacgaatgaaccaacgaacgaa

SEQ ID NO: 111444 - DNA, 25 bp, Artificial
  Probe
ttgagttcaaatgctactgtccaag

SEQ ID NO: 111445 - DNA, 25 bp, Artificial
  Probe
aggatgaacgaatgaaccaacgaac

SEQ ID NO: 111446 - DNA, 25 bp, Artificial
  Probe
gtagcagcaacatccagttcttaag

SEQ ID NO: 111447 - DNA, 25 bp, Artificial
  Probe
tccctcatcctgaagtagactagag

SEQ ID NO: 111448 - DNA, 25 bp, Artificial
  Probe
tcaccaacattgaattccagtactc

SEQ ID NO: 111449 - DNA, 25 bp, Artificial
  Probe
ccaacattgaattccagtactccac

SEQ ID NO: 111450 - DNA, 25 bp, Artificial
  Probe
caccaacattgaattccagtactcc

SEQ ID NO: 111451 - DNA, 25 bp, Artificial
  Probe
agacagaatgagatgggaaagaggt

SEQ ID NO: 111452 - DNA, 25 bp, Artificial
  Probe
tcctaaggagacgaagacctaacag

SEQ ID NO: 111453 - DNA, 25 bp, Artificial
  Probe
gtccctcatcctgaagtagactaga

SEQ ID NO: 111454 - DNA, 25 bp, Artificial
  Probe
gatgaacgaatgaaccaacgaacga

SEQ ID NO: 111455 - DNA, 25 bp, Artificial
  Probe
caacattgaattccagtactccacg

SEQ ID NO: 111456 - DNA, 25 bp, Artificial
  Probe
accaacattgaattccagtactcca

SEQ ID NO: 111457 - DNA, 25 bp, Artificial
  Probe
caaagtccctcatcctgaagtagac

SEQ ID NO: 111458 - DNA, 25 bp, Artificial
  Probe
aaaggatgaacgaatgaaccaacga

SEQ ID NO: 111459 - DNA, 25 bp, Artificial
  Probe
cctaaggagacgaagacctaacagg

SEQ ID NO: 111460 - DNA, 25 bp, Artificial
  Probe
tgagatgggaaagaggtaacaaaat

SEQ ID NO: 111461 - DNA, 25 bp, Artificial
  Probe
atgagatgggaaagaggtaacaaaa

SEQ ID NO: 111462 - DNA, 25 bp, Artificial
  Probe
ggaaaacaaaactaaaggatgaacg

SEQ ID NO: 111463 - DNA, 25 bp, Artificial
  Probe
cttaagacagaatgagatgggaaag

SEQ ID NO: 111464 - DNA, 25 bp, Artificial
  Probe
acaaaactaaaggatgaacgaatga

SEQ ID NO: 111465 - DNA, 25 bp, Artificial
  Probe
tgaggaaaacaaaactaaaggatga

SEQ ID NO: 111466 - DNA, 25 bp, Artificial
  Probe
ccacaaattctgaggaaaacaaaac

SEQ ID NO: 111467 - DNA, 25 bp, Artificial
  Probe
ctcgaaggttcaccaacattgaatt

SEQ ID NO: 111468 - DNA, 25 bp, Artificial
  Probe
acagtagcagcaacatccagttctt

SEQ ID NO: 111469 - DNA, 25 bp, Artificial
  Probe
aacaaaactaaaggatgaacgaatg

SEQ ID NO: 111470 - DNA, 25 bp, Artificial
  Probe
tgttagaagatcgcatcatatcctg

SEQ ID NO: 111471 - DNA, 25 bp, Artificial
  Probe
atgttagaagatcgcatcatatcct

SEQ ID NO: 111472 - DNA, 25 bp, Artificial
  Probe
ggatagccatgttctcatacctcat

SEQ ID NO: 111473 - DNA, 25 bp, Artificial
  Probe
ctgaagagattatgggtttgacgat

SEQ ID NO: 111474 - DNA, 25 bp, Artificial
  Probe
atgttccttctctactttgtgttcc

SEQ ID NO: 111475 - DNA, 25 bp, Artificial
  Probe
gtctcaccacaccaatcaaataata

SEQ ID NO: 111476 - DNA, 25 bp, Artificial
  Probe
atcttctcaatcgcttcgtgtaaat

SEQ ID NO: 111477 - DNA, 25 bp, Artificial
  Probe
tcagtgtgatgttagaagatcgcat

SEQ ID NO: 111478 - DNA, 25 bp, Artificial
  Probe
gggatttctgaagagattatgggtt

SEQ ID NO: 111479 - DNA, 25 bp, Artificial
  Probe
ttgggatttctgaagagattatggg

SEQ ID NO: 111480 - DNA, 25 bp, Artificial
  Probe
gttccttctctactttgtgttcctg

SEQ ID NO: 111481 - DNA, 25 bp, Artificial
  Probe
cggtgggcagtaacatatttgatat

SEQ ID NO: 111482 - DNA, 25 bp, Artificial
  Probe
catctggatagccatgttctcatac

SEQ ID NO: 111483 - DNA, 25 bp, Artificial
  Probe
tcatctggatagccatgttctcata

SEQ ID NO: 111484 - DNA, 25 bp, Artificial
  Probe
tgatcttctcaatcgcttcgtgtaa

SEQ ID NO: 111485 - DNA, 25 bp, Artificial
  Probe
gcttcaccatgttccttctctactt

SEQ ID NO: 111486 - DNA, 25 bp, Artificial
  Probe
ttctgaagagattatgggtttgacg

SEQ ID NO: 111487 - DNA, 25 bp, Artificial
  Probe
tgttccttctctactttgtgttcct

SEQ ID NO: 111488 - DNA, 25 bp, Artificial
  Probe
tttctgaagagattatgggtttgac

SEQ ID NO: 111489 - DNA, 25 bp, Artificial
  Probe
tctcaccacaccaatcaaataataa

SEQ ID NO: 111490 - DNA, 25 bp, Artificial
  Probe
cgtctcaccacaccaatcaaataat

SEQ ID NO: 111491 - DNA, 25 bp, Artificial
  Probe
ttctctactttgtgttcctggtgat

SEQ ID NO: 111492 - DNA, 25 bp, Artificial
  Probe
accattgggatttctgaagagatta

SEQ ID NO: 111493 - DNA, 25 bp, Artificial
  Probe
aaccattgggatttctgaagagatt

SEQ ID NO: 111494 - DNA, 25 bp, Artificial
  Probe
aaaccattgggatttctgaagagat

SEQ ID NO: 111495 - DNA, 25 bp, Artificial
  Probe
ggatttctgaagagattatgggttt

SEQ ID NO: 111496 - DNA, 25 bp, Artificial
  Probe
tgggatttctgaagagattatgggt

SEQ ID NO: 111497 - DNA, 25 bp, Artificial
  Probe
ccacaccaatcaaataataaacaca

SEQ ID NO: 111498 - DNA, 25 bp, Artificial
  Probe
accacaccaatcaaataataaacac

SEQ ID NO: 111499 - DNA, 25 bp, Artificial
  Probe
caccacaccaatcaaataataaaca

SEQ ID NO: 111500 - DNA, 25 bp, Artificial
  Probe
tcttctcaatcgcttcgtgtaaatg

SEQ ID NO: 111501 - DNA, 25 bp, Artificial
  Probe
atcatctggatagccatgttctcat

SEQ ID NO: 111502 - DNA, 25 bp, Artificial
  Probe
gagattatgggtttgacgatcctag

SEQ ID NO: 111503 - DNA, 25 bp, Artificial
  Probe
tgaagagattatgggtttgacgatc

SEQ ID NO: 111504 - DNA, 25 bp, Artificial
  Probe
attgggatttctgaagagattatgg

SEQ ID NO: 111505 - DNA, 25 bp, Artificial
  Probe
catgttccttctctactttgtgttc

SEQ ID NO: 111506 - DNA, 25 bp, Artificial
  Probe
tcggtgggcagtaacatatttgata

SEQ ID NO: 111507 - DNA, 25 bp, Artificial
  Probe
agagattatgggtttgacgatccta

SEQ ID NO: 111508 - DNA, 25 bp, Artificial
  Probe
cttcaccatgttccttctctacttt

SEQ ID NO: 111509 - DNA, 25 bp, Artificial
  Probe
ttcgtgtaaatggagaatgaacaag

SEQ ID NO: 111510 - DNA, 25 bp, Artificial
  Probe
cttcgtgtaaatggagaatgaacaa

SEQ ID NO: 111511 - DNA, 25 bp, Artificial
  Probe
tctgaagagattatgggtttgacga

SEQ ID NO: 111512 - DNA, 25 bp, Artificial
  Probe
tcaccacaccaatcaaataataaac

SEQ ID NO: 111513 - DNA, 25 bp, Artificial
  Probe
cgtgtaaatggagaatgaacaagat

SEQ ID NO: 111514 - DNA, 25 bp, Artificial
  Probe
tcgtgtaaatggagaatgaacaaga

SEQ ID NO: 111515 - DNA, 25 bp, Artificial
  Probe
gaccaagtgcttcaagttcatctag

SEQ ID NO: 111516 - DNA, 25 bp, Artificial
  Probe
agaccaagtgcttcaagttcatcta

SEQ ID NO: 111517 - DNA, 25 bp, Artificial
  Probe
caagaccaagtgcttcaagttcatc

SEQ ID NO: 111518 - DNA, 25 bp, Artificial
  Probe
tccaaggcttatttatatgtgcgta

SEQ ID NO: 111519 - DNA, 25 bp, Artificial
  Probe
aagaccaagtgcttcaagttcatct

SEQ ID NO: 111520 - DNA, 25 bp, Artificial
  Probe
ccaaggcttatttatatgtgcgtat

SEQ ID NO: 111521 - DNA, 25 bp, Artificial
  Probe
atccaaggcttatttatatgtgcgt

SEQ ID NO: 111522 - DNA, 25 bp, Artificial
  Probe
ccatccaaggcttatttatatgtgc

SEQ ID NO: 111523 - DNA, 25 bp, Artificial
  Probe
catccaaggcttatttatatgtgcg

SEQ ID NO: 111524 - DNA, 25 bp, Artificial
  Probe
accaagtgcttcaagttcatctagg

SEQ ID NO: 111525 - DNA, 25 bp, Artificial
  Probe
ttaaagagagagtttcacatctgcc

SEQ ID NO: 111526 - DNA, 25 bp, Artificial
  Probe
acaagaccaagtgcttcaagttcat

SEQ ID NO: 111527 - DNA, 25 bp, Artificial
  Probe
atgacaagaccaagtgcttcaagtt

SEQ ID NO: 111528 - DNA, 25 bp, Artificial
  Probe
taaagagagagtttcacatctgcca

SEQ ID NO: 111529 - DNA, 25 bp, Artificial
  Probe
aaagagagagtttcacatctgccat

SEQ ID NO: 111530 - DNA, 25 bp, Artificial
  Probe
gacaagaccaagtgcttcaagttca

SEQ ID NO: 111531 - DNA, 25 bp, Artificial
  Probe
tttaaagagagagtttcacatctgc

SEQ ID NO: 111532 - DNA, 25 bp, Artificial
  Probe
tgacaagaccaagtgcttcaagttc

SEQ ID NO: 111533 - DNA, 25 bp, Artificial
  Probe
aagagagagtttcacatctgccatc

SEQ ID NO: 111534 - DNA, 25 bp, Artificial
  Probe
caaggcttatttatatgtgcgtata

SEQ ID NO: 111535 - DNA, 25 bp, Artificial
  Probe
ggcttatttatatgtgcgtatatgt

SEQ ID NO: 111536 - DNA, 25 bp, Artificial
  Probe
tagaaagggatggctgtctttattt

SEQ ID NO: 111537 - DNA, 25 bp, Artificial
  Probe
gtagaaagggatggctgtctttatt

SEQ ID NO: 111538 - DNA, 25 bp, Artificial
  Probe
aggcttatttatatgtgcgtatatg

SEQ ID NO: 111539 - DNA, 25 bp, Artificial
  Probe
agtagaaagggatggctgtctttat

SEQ ID NO: 111540 - DNA, 25 bp, Artificial
  Probe
catgacaagaccaagtgcttcaagt

SEQ ID NO: 111541 - DNA, 25 bp, Artificial
  Probe
ggatggctgtctttattttgaagtc

SEQ ID NO: 111542 - DNA, 25 bp, Artificial
  Probe
gatggctgtctttattttgaagtca

SEQ ID NO: 111543 - DNA, 25 bp, Artificial
  Probe
gagtagaaagggatggctgtcttta

SEQ ID NO: 111544 - DNA, 25 bp, Artificial
  Probe
tttgtcaaggtgtacggctatatgc

SEQ ID NO: 111545 - DNA, 25 bp, Artificial
  Probe
aagggatggctgtctttattttgaa

SEQ ID NO: 111546 - DNA, 25 bp, Artificial
  Probe
ccaagtgcttcaagttcatctaggg

SEQ ID NO: 111547 - DNA, 25 bp, Artificial
  Probe
gagaagagcagggagagtagaaagg

SEQ ID NO: 111548 - DNA, 25 bp, Artificial
  Probe
ggagaagagcagggagagtagaaag

SEQ ID NO: 111549 - DNA, 25 bp, Artificial
  Probe
agggatggctgtctttattttgaag

SEQ ID NO: 111550 - DNA, 25 bp, Artificial
  Probe
gagagtagaaagggatggctgtctt

SEQ ID NO: 111551 - DNA, 25 bp, Artificial
  Probe
gggatggctgtctttattttgaagt

SEQ ID NO: 111552 - DNA, 25 bp, Artificial
  Probe
gagagtttcacatctgccatccaag

SEQ ID NO: 111553 - DNA, 25 bp, Artificial
  Probe
aaggcttatttatatgtgcgtatat

SEQ ID NO: 111554 - DNA, 25 bp, Artificial
  Probe
ttttgtcaaggtgtacggctatatg

SEQ ID NO: 111555 - DNA, 25 bp, Artificial
  Probe
ccatgacaagaccaagtgcttcaag

SEQ ID NO: 111556 - DNA, 25 bp, Artificial
  Probe
atggctgtctttattttgaagtcag

SEQ ID NO: 111557 - DNA, 25 bp, Artificial
  Probe
atttaaagagagagtttcacatctg

SEQ ID NO: 111558 - DNA, 25 bp, Artificial
  Probe
caagtgcttcaagttcatctagggc

SEQ ID NO: 111559 - DNA, 25 bp, Artificial
  Probe
agagagtttcacatctgccatccaa

SEQ ID NO: 111560 - DNA, 25 bp, Artificial
  Probe
cacatacaaggaacagataaggcta

SEQ ID NO: 111561 - DNA, 25 bp, Artificial
  Probe
ctacataatacggcagagtcattgg

SEQ ID NO: 111562 - DNA, 25 bp, Artificial
  Probe
cctacataatacggcagagtcattg

SEQ ID NO: 111563 - DNA, 25 bp, Artificial
  Probe
ttcacatacaaggaacagataaggc

SEQ ID NO: 111564 - DNA, 25 bp, Artificial
  Probe
atacaaggaacagataaggctagtg

SEQ ID NO: 111565 - DNA, 25 bp, Artificial
  Probe
catacaaggaacagataaggctagt

SEQ ID NO: 111566 - DNA, 25 bp, Artificial
  Probe
acatacaaggaacagataaggctag

SEQ ID NO: 111567 - DNA, 25 bp, Artificial
  Probe
aggaagtctctctgctctagtaatt

SEQ ID NO: 111568 - DNA, 25 bp, Artificial
  Probe
taggaagtctctctgctctagtaat

SEQ ID NO: 111569 - DNA, 25 bp, Artificial
  Probe
ataggaagtctctctgctctagtaa

SEQ ID NO: 111570 - DNA, 25 bp, Artificial
  Probe
aataggaagtctctctgctctagta

SEQ ID NO: 111571 - DNA, 25 bp, Artificial
  Probe
tcacatacaaggaacagataaggct

SEQ ID NO: 111572 - DNA, 25 bp, Artificial
  Probe
tacataatacggcagagtcattgga

SEQ ID NO: 111573 - DNA, 25 bp, Artificial
  Probe
tacaaggaacagataaggctagtgg

SEQ ID NO: 111574 - DNA, 25 bp, Artificial
  Probe
acataatacggcagagtcattggaa

SEQ ID NO: 111575 - DNA, 25 bp, Artificial
  Probe
agataaggctagtggttggttactt

SEQ ID NO: 111576 - DNA, 25 bp, Artificial
  Probe
aacagataaggctagtggttggtta

SEQ ID NO: 111577 - DNA, 25 bp, Artificial
  Probe
ctagaggttgagataggaggatcac

SEQ ID NO: 111578 - DNA, 25 bp, Artificial
  Probe
acagataaggctagtggttggttac

SEQ ID NO: 111579 - DNA, 25 bp, Artificial
  Probe
tagaggttgagataggaggatcaca

SEQ ID NO: 111580 - DNA, 25 bp, Artificial
  Probe
cagataaggctagtggttggttact

SEQ ID NO: 111581 - DNA, 25 bp, Artificial
  Probe
aaggaacagataaggctagtggttg

SEQ ID NO: 111582 - DNA, 25 bp, Artificial
  Probe
caaggaacagataaggctagtggtt

SEQ ID NO: 111583 - DNA, 25 bp, Artificial
  Probe
ccacaatctatagcacacacataat

SEQ ID NO: 111584 - DNA, 25 bp, Artificial
  Probe
ttaatgcccaaataggaagtctctc

SEQ ID NO: 111585 - DNA, 25 bp, Artificial
  Probe
tttaatgcccaaataggaagtctct

SEQ ID NO: 111586 - DNA, 25 bp, Artificial
  Probe
acttactttcaggtcagatgttgtg

SEQ ID NO: 111587 - DNA, 25 bp, Artificial
  Probe
cacttactttcaggtcagatgttgt

SEQ ID NO: 111588 - DNA, 25 bp, Artificial
  Probe
taatgcccaaataggaagtctctct

SEQ ID NO: 111589 - DNA, 25 bp, Artificial
  Probe
ataatacggcagagtcattggaaag

SEQ ID NO: 111590 - DNA, 25 bp, Artificial
  Probe
gttgagataggaggatcacaggttc

SEQ ID NO: 111591 - DNA, 25 bp, Artificial
  Probe
gaacagataaggctagtggttggtt

SEQ ID NO: 111592 - DNA, 25 bp, Artificial
  Probe
acaatctatagcacacacataatcc

SEQ ID NO: 111593 - DNA, 25 bp, Artificial
  Probe
ccaaataggaagtctctctgctcta

SEQ ID NO: 111594 - DNA, 25 bp, Artificial
  Probe
agagtttcacatacaaggaacagat

SEQ ID NO: 111595 - DNA, 25 bp, Artificial
  Probe
ggacaacttggtgagaactctttaa

SEQ ID NO: 111596 - DNA, 25 bp, Artificial
  Probe
cataatacggcagagtcattggaaa

SEQ ID NO: 111597 - DNA, 25 bp, Artificial
  Probe
tagagtttcacatacaaggaacaga

SEQ ID NO: 111598 - DNA, 25 bp, Artificial
  Probe
agtctctctgctctagtaatttcct

SEQ ID NO: 111599 - DNA, 25 bp, Artificial
  Probe
aaataggaagtctctctgctctagt

SEQ ID NO: 111600 - DNA, 25 bp, Artificial
  Probe
caaataggaagtctctctgctctag

SEQ ID NO: 111601 - DNA, 25 bp, Artificial
  Probe
aagtctctctgctctagtaatttcc

SEQ ID NO: 111602 - DNA, 25 bp, Artificial
  Probe
ggaagtctctctgctctagtaattt

SEQ ID NO: 111603 - DNA, 25 bp, Artificial
  Probe
ggcagagagttatagtagctgatta

SEQ ID NO: 111604 - DNA, 25 bp, Artificial
  Probe
ttgagataggaggatcacaggttca

SEQ ID NO: 111605 - DNA, 25 bp, Artificial
  Probe
aagagtaaggaatgatgagaccaag

SEQ ID NO: 111606 - DNA, 25 bp, Artificial
  Probe
taaggaatgatgagaccaaggatga

SEQ ID NO: 111607 - DNA, 25 bp, Artificial
  Probe
gtaaggaatgatgagaccaaggatg

SEQ ID NO: 111608 - DNA, 25 bp, Artificial
  Probe
agtaaggaatgatgagaccaaggat

SEQ ID NO: 111609 - DNA, 25 bp, Artificial
  Probe
taagagtaaggaatgatgagaccaa

SEQ ID NO: 111610 - DNA, 25 bp, Artificial
  Probe
ttaagagtaaggaatgatgagacca

SEQ ID NO: 111611 - DNA, 25 bp, Artificial
  Probe
aagtgctgtaagtctgaggattgta

SEQ ID NO: 111612 - DNA, 25 bp, Artificial
  Probe
gagtaaggaatgatgagaccaagga

SEQ ID NO: 111613 - DNA, 25 bp, Artificial
  Probe
agagtaaggaatgatgagaccaagg

SEQ ID NO: 111614 - DNA, 25 bp, Artificial
  Probe
tgatgagaccaaggatgacacatat

SEQ ID NO: 111615 - DNA, 25 bp, Artificial
  Probe
atgatgagaccaaggatgacacata

SEQ ID NO: 111616 - DNA, 25 bp, Artificial
  Probe
atggttgttaagcagaatatctcaa

SEQ ID NO: 111617 - DNA, 25 bp, Artificial
  Probe
aatgatgagaccaaggatgacacat

SEQ ID NO: 111618 - DNA, 25 bp, Artificial
  Probe
ctgacatacgatgacatctacaatt

SEQ ID NO: 111619 - DNA, 25 bp, Artificial
  Probe
aaggaatgatgagaccaaggatgac

SEQ ID NO: 111620 - DNA, 25 bp, Artificial
  Probe
tatggttgttaagcagaatatctca

SEQ ID NO: 111621 - DNA, 25 bp, Artificial
  Probe
gaatgatgagaccaaggatgacaca

SEQ ID NO: 111622 - DNA, 25 bp, Artificial
  Probe
agtgctgtaagtctgaggattgtac

SEQ ID NO: 111623 - DNA, 25 bp, Artificial
  Probe
tcagcaatacattccgaaggcataa

SEQ ID NO: 111624 - DNA, 25 bp, Artificial
  Probe
aattaacgacagcaagcagtcatag

SEQ ID NO: 111625 - DNA, 25 bp, Artificial
  Probe
ttcagcaatacattccgaaggcata

SEQ ID NO: 111626 - DNA, 25 bp, Artificial
  Probe
caaggagaggaagagtttagtgaag

SEQ ID NO: 111627 - DNA, 25 bp, Artificial
  Probe
atcagaagaaattaacgacagcaag

SEQ ID NO: 111628 - DNA, 25 bp, Artificial
  Probe
atacattccgaaggcataaaggttt

SEQ ID NO: 111629 - DNA, 25 bp, Artificial
  Probe
aatacattccgaaggcataaaggtt

SEQ ID NO: 111630 - DNA, 25 bp, Artificial
  Probe
gaatccttcagcaatacattccgaa

SEQ ID NO: 111631 - DNA, 25 bp, Artificial
  Probe
ggagaggaagagtttagtgaaggat

SEQ ID NO: 111632 - DNA, 25 bp, Artificial
  Probe
attaacgacagcaagcagtcataga

SEQ ID NO: 111633 - DNA, 25 bp, Artificial
  Probe
gccattatggttgttaagcagaata

SEQ ID NO: 111634 - DNA, 25 bp, Artificial
  Probe
ggaatgatgagaccaaggatgacac

SEQ ID NO: 111635 - DNA, 25 bp, Artificial
  Probe
tgttcaatatacttacttgggaggc

SEQ ID NO: 111636 - DNA, 25 bp, Artificial
  Probe
aaggagaggaagagtttagtgaagg

SEQ ID NO: 111637 - DNA, 25 bp, Artificial
  Probe
tatcagaagaaattaacgacagcaa

SEQ ID NO: 111638 - DNA, 25 bp, Artificial
  Probe
caatacattccgaaggcataaaggt

SEQ ID NO: 111639 - DNA, 25 bp, Artificial
  Probe
attgtgacagccattatggttgtta

SEQ ID NO: 111640 - DNA, 25 bp, Artificial
  Probe
aggaatgatgagaccaaggatgaca

SEQ ID NO: 111641 - DNA, 25 bp, Artificial
  Probe
gaagacacaggagacagaagttgtt

SEQ ID NO: 111642 - DNA, 25 bp, Artificial
  Probe
gagaggaagagtttagtgaaggatc

SEQ ID NO: 111643 - DNA, 25 bp, Artificial
  Probe
atatcagaagaaattaacgacagca

SEQ ID NO: 111644 - DNA, 25 bp, Artificial
  Probe
agccattatggttgttaagcagaat

SEQ ID NO: 111645 - DNA, 25 bp, Artificial
  Probe
gtgctgtaagtctgaggattgtacc

SEQ ID NO: 111646 - DNA, 25 bp, Artificial
  Probe
ctgacctagattgccttctgaagac

SEQ ID NO: 111647 - DNA, 25 bp, Artificial
  Probe
ttgtgacagccattatggttgttaa

SEQ ID NO: 111648 - DNA, 25 bp, Artificial
  Probe
gcagtcatagagccaaagcatttat

SEQ ID NO: 111649 - DNA, 25 bp, Artificial
  Probe
agcaatacattccgaaggcataaag

SEQ ID NO: 111650 - DNA, 25 bp, Artificial
  Probe
cgtcttaaccagaataacttgtaac

SEQ ID NO: 111651 - DNA, 25 bp, Artificial
  Probe
tgtgtgaggataaataccattagcc

SEQ ID NO: 111652 - DNA, 25 bp, Artificial
  Probe
gtatgaatgaaacagttggcagaat

SEQ ID NO: 111653 - DNA, 25 bp, Artificial
  Probe
atgaatgaaacagttggcagaatat

SEQ ID NO: 111654 - DNA, 25 bp, Artificial
  Probe
aacacgtcttaaccagaataacttg

SEQ ID NO: 111655 - DNA, 25 bp, Artificial
  Probe
ttgtgtgaggataaataccattagc

SEQ ID NO: 111656 - DNA, 25 bp, Artificial
  Probe
tgaaacagttggcagaatataagaa

SEQ ID NO: 111657 - DNA, 25 bp, Artificial
  Probe
tgaatgaaacagttggcagaatata

SEQ ID NO: 111658 - DNA, 25 bp, Artificial
  Probe
tatgaatgaaacagttggcagaata

SEQ ID NO: 111659 - DNA, 25 bp, Artificial
  Probe
cacgtcttaaccagaataacttgta

SEQ ID NO: 111660 - DNA, 25 bp, Artificial
  Probe
gttagttacactttgaggatttgct

SEQ ID NO: 111661 - DNA, 25 bp, Artificial
  Probe
atgaaacagttggcagaatataaga

SEQ ID NO: 111662 - DNA, 25 bp, Artificial
  Probe
acacgtcttaaccagaataacttgt

SEQ ID NO: 111663 - DNA, 25 bp, Artificial
  Probe
tgttagttacactttgaggatttgc

SEQ ID NO: 111664 - DNA, 25 bp, Artificial
  Probe
tatgtatgaatgaaacagttggcag

SEQ ID NO: 111665 - DNA, 25 bp, Artificial
  Probe
gtcttaaccagaataacttgtaact

SEQ ID NO: 111666 - DNA, 25 bp, Artificial
  Probe
acgtcttaaccagaataacttgtaa

SEQ ID NO: 111667 - DNA, 25 bp, Artificial
  Probe
atgtatgaatgaaacagttggcaga

SEQ ID NO: 111668 - DNA, 25 bp, Artificial
  Probe
aatgaaacagttggcagaatataag

SEQ ID NO: 111669 - DNA, 25 bp, Artificial
  Probe
gaatgaaacagttggcagaatataa

SEQ ID NO: 111670 - DNA, 25 bp, Artificial
  Probe
tgtatgaatgaaacagttggcagaa

SEQ ID NO: 111671 - DNA, 25 bp, Artificial
  Probe
gtgaggataaataccattagcctga

SEQ ID NO: 111672 - DNA, 25 bp, Artificial
  Probe
tgtgaggataaataccattagcctg

SEQ ID NO: 111673 - DNA, 25 bp, Artificial
  Probe
gtgtgaggataaataccattagcct

SEQ ID NO: 111674 - DNA, 25 bp, Artificial
  Probe
gaaacagttggcagaatataagaaa

SEQ ID NO: 111675 - DNA, 25 bp, Artificial
  Probe
tgaggataaataccattagcctgaa

SEQ ID NO: 111676 - DNA, 25 bp, Artificial
  Probe
acttattgtgtgaggataaatacca

SEQ ID NO: 111677 - DNA, 25 bp, Artificial
  Probe
gaggataaataccattagcctgaat

SEQ ID NO: 111678 - DNA, 25 bp, Artificial
  Probe
atgttagttacactttgaggatttg

SEQ ID NO: 111679 - DNA, 25 bp, Artificial
  Probe
aaacacgtcttaaccagaataactt

SEQ ID NO: 111680 - DNA, 25 bp, Artificial
  Probe
attgtgtgaggataaataccattag

SEQ ID NO: 111681 - DNA, 25 bp, Artificial
  Probe
acagttggcagaatataagaaaacc

SEQ ID NO: 111682 - DNA, 25 bp, Artificial
  Probe
cttattgtgtgaggataaataccat

SEQ ID NO: 111683 - DNA, 25 bp, Artificial
  Probe
tgttttgtacttattgtgtgaggat

SEQ ID NO: 111684 - DNA, 25 bp, Artificial
  Probe
atgttttgtacttattgtgtgagga

SEQ ID NO: 111685 - DNA, 25 bp, Artificial
  Probe
aggatgttttgtacttattgtgtga

SEQ ID NO: 111686 - DNA, 25 bp, Artificial
  Probe
ttattgtgtgaggataaataccatt

SEQ ID NO: 111687 - DNA, 25 bp, Artificial
  Probe
aacagttggcagaatataagaaaac

SEQ ID NO: 111688 - DNA, 25 bp, Artificial
  Probe
gatgttttgtacttattgtgtgagg

SEQ ID NO: 111689 - DNA, 25 bp, Artificial
  Probe
ggatgttttgtacttattgtgtgag

SEQ ID NO: 111690 - DNA, 25 bp, Artificial
  Probe
tacttattgtgtgaggataaatacc

SEQ ID NO: 111691 - DNA, 25 bp, Artificial
  Probe
tttgtacttattgtgtgaggataaa

SEQ ID NO: 111692 - DNA, 25 bp, Artificial
  Probe
aaacagttggcagaatataagaaaa

SEQ ID NO: 111693 - DNA, 25 bp, Artificial
  Probe
ttgtacttattgtgtgaggataaat

SEQ ID NO: 111694 - DNA, 25 bp, Artificial
  Probe
cagttggcagaatataagaaaacca

SEQ ID NO: 111695 - DNA, 25 bp, Artificial
  Probe
gtctgtctctgctctgttgtaataa

SEQ ID NO: 111696 - DNA, 25 bp, Artificial
  Probe
ttgttattggtcctcgtactacttg

SEQ ID NO: 111697 - DNA, 25 bp, Artificial
  Probe
gttgttattggtcctcgtactactt

SEQ ID NO: 111698 - DNA, 25 bp, Artificial
  Probe
ggtctgtctctgctctgttgtaata

SEQ ID NO: 111699 - DNA, 25 bp, Artificial
  Probe
ctgttgttattggtcctcgtactac

SEQ ID NO: 111700 - DNA, 25 bp, Artificial
  Probe
tgttgttattggtcctcgtactact

SEQ ID NO: 111701 - DNA, 25 bp, Artificial
  Probe
ttattggtcctcgtactacttggtg

SEQ ID NO: 111702 - DNA, 25 bp, Artificial
  Probe
gttattggtcctcgtactacttggt

SEQ ID NO: 111703 - DNA, 25 bp, Artificial
  Probe
tgttattggtcctcgtactacttgg

SEQ ID NO: 111704 - DNA, 25 bp, Artificial
  Probe
cctgttgttattggtcctcgtacta

SEQ ID NO: 111705 - DNA, 25 bp, Artificial
  Probe
tctgtctctgctctgttgtaataaa

SEQ ID NO: 111706 - DNA, 25 bp, Artificial
  Probe
ttaaagtggaacctctgtctgaatc

SEQ ID NO: 111707 - DNA, 25 bp, Artificial
  Probe
cttaaagtggaacctctgtctgaat

SEQ ID NO: 111708 - DNA, 25 bp, Artificial
  Probe
tgttgtaataaatgtgaggtcttgg

SEQ ID NO: 111709 - DNA, 25 bp, Artificial
  Probe
ctctgctctgttgtaataaatgtga

SEQ ID NO: 111710 - DNA, 25 bp, Artificial
  Probe
tctctgctctgttgtaataaatgtg

SEQ ID NO: 111711 - DNA, 25 bp, Artificial
  Probe
gtctctgctctgttgtaataaatgt

SEQ ID NO: 111712 - DNA, 25 bp, Artificial
  Probe
tgtctctgctctgttgtaataaatg

SEQ ID NO: 111713 - DNA, 25 bp, Artificial
  Probe
gttgtaataaatgtgaggtcttgga

SEQ ID NO: 111714 - DNA, 25 bp, Artificial
  Probe
ctgtctctgctctgttgtaataaat

SEQ ID NO: 111715 - DNA, 25 bp, Artificial
  Probe
taaagtggaacctctgtctgaatct

SEQ ID NO: 111716 - DNA, 25 bp, Artificial
  Probe
ttgtaataaatgtgaggtcttggaa

SEQ ID NO: 111717 - DNA, 25 bp, Artificial
  Probe
ctcctgttgttattggtcctcgtac

SEQ ID NO: 111718 - DNA, 25 bp, Artificial
  Probe
gctctgttgtaataaatgtgaggtc

SEQ ID NO: 111719 - DNA, 25 bp, Artificial
  Probe
ctgctctgttgtaataaatgtgagg

SEQ ID NO: 111720 - DNA, 25 bp, Artificial
  Probe
tgctctgttgtaataaatgtgaggt

SEQ ID NO: 111721 - DNA, 25 bp, Artificial
  Probe
ctgttgtaataaatgtgaggtcttg

SEQ ID NO: 111722 - DNA, 25 bp, Artificial
  Probe
tctgttgtaataaatgtgaggtctt

SEQ ID NO: 111723 - DNA, 25 bp, Artificial
  Probe
tctgctctgttgtaataaatgtgag

SEQ ID NO: 111724 - DNA, 25 bp, Artificial
  Probe
tggtctgtctctgctctgttgtaat

SEQ ID NO: 111725 - DNA, 25 bp, Artificial
  Probe
tcctgttgttattggtcctcgtact

SEQ ID NO: 111726 - DNA, 25 bp, Artificial
  Probe
ctcagttctaggacttaaagtggaa

SEQ ID NO: 111727 - DNA, 25 bp, Artificial
  Probe
ctctgttgtaataaatgtgaggtct

SEQ ID NO: 111728 - DNA, 25 bp, Artificial
  Probe
aaagtggaacctctgtctgaatctc

SEQ ID NO: 111729 - DNA, 25 bp, Artificial
  Probe
gaagccaatgggacacaattaaact

SEQ ID NO: 111730 - DNA, 25 bp, Artificial
  Probe
ctgctcagttctaggacttaaagtg

SEQ ID NO: 111731 - DNA, 25 bp, Artificial
  Probe
cctcctgttgttattggtcctcgta

SEQ ID NO: 111732 - DNA, 25 bp, Artificial
  Probe
aagccaatgggacacaattaaactg

SEQ ID NO: 111733 - DNA, 25 bp, Artificial
  Probe
acttaaagtggaacctctgtctgaa

SEQ ID NO: 111734 - DNA, 25 bp, Artificial
  Probe
ttctaggacttaaagtggaacctct

SEQ ID NO: 111735 - DNA, 25 bp, Artificial
  Probe
gctcagttctaggacttaaagtgga

SEQ ID NO: 111736 - DNA, 25 bp, Artificial
  Probe
tgctcagttctaggacttaaagtgg

SEQ ID NO: 111737 - DNA, 25 bp, Artificial
  Probe
tctaggacttaaagtggaacctctg

SEQ ID NO: 111738 - DNA, 25 bp, Artificial
  Probe
taggacttaaagtggaacctctgtc

SEQ ID NO: 111739 - DNA, 25 bp, Artificial
  Probe
ctaggacttaaagtggaacctctgt

SEQ ID NO: 111740 - DNA, 25 bp, Artificial
  Probe
tattgttgttatttaaaggcgagcg

SEQ ID NO: 111741 - DNA, 25 bp, Artificial
  Probe
ttattgttgttatttaaaggcgagc

SEQ ID NO: 111742 - DNA, 25 bp, Artificial
  Probe
attgttgttatttaaaggcgagcgg

SEQ ID NO: 111743 - DNA, 25 bp, Artificial
  Probe
cggcccttgtaattattgttgttat

SEQ ID NO: 111744 - DNA, 25 bp, Artificial
  Probe
aaatctccggcccttgtaattattg

SEQ ID NO: 111745 - DNA, 25 bp, Artificial
  Probe
gaagtccattctcatgaagcagcta

SEQ ID NO: 111746 - DNA, 25 bp, Artificial
  Probe
ccggcccttgtaattattgttgtta

SEQ ID NO: 111747 - DNA, 25 bp, Artificial
  Probe
gcccttgtaattattgttgttattt

SEQ ID NO: 111748 - DNA, 25 bp, Artificial
  Probe
acaagaagaagtccattctcatgaa

SEQ ID NO: 111749 - DNA, 25 bp, Artificial
  Probe
caagaagaagtccattctcatgaag

SEQ ID NO: 111750 - DNA, 25 bp, Artificial
  Probe
gacaagaagaagtccattctcatga

SEQ ID NO: 111751 - DNA, 25 bp, Artificial
  Probe
aagtccattctcatgaagcagctac

SEQ ID NO: 111752 - DNA, 25 bp, Artificial
  Probe
ggcccttgtaattattgttgttatt

SEQ ID NO: 111753 - DNA, 25 bp, Artificial
  Probe
aagaagaagtccattctcatgaagc

SEQ ID NO: 111754 - DNA, 25 bp, Artificial
  Probe
attattgttgttatttaaaggcgag

SEQ ID NO: 111755 - DNA, 25 bp, Artificial
  Probe
atctccggcccttgtaattattgtt

SEQ ID NO: 111756 - DNA, 25 bp, Artificial
  Probe
aatctccggcccttgtaattattgt

SEQ ID NO: 111757 - DNA, 25 bp, Artificial
  Probe
gaagaagtccattctcatgaagcag

SEQ ID NO: 111758 - DNA, 25 bp, Artificial
  Probe
agaagaagtccattctcatgaagca

SEQ ID NO: 111759 - DNA, 25 bp, Artificial
  Probe
gtccattctcatgaagcagctacag

SEQ ID NO: 111760 - DNA, 25 bp, Artificial
  Probe
aattattgttgttatttaaaggcga

SEQ ID NO: 111761 - DNA, 25 bp, Artificial
  Probe
tccggcccttgtaattattgttgtt

SEQ ID NO: 111762 - DNA, 25 bp, Artificial
  Probe
tctccggcccttgtaattattgttg

SEQ ID NO: 111763 - DNA, 25 bp, Artificial
  Probe
agtccattctcatgaagcagctaca

SEQ ID NO: 111764 - DNA, 25 bp, Artificial
  Probe
cattctcatgaagcagctacagcag

SEQ ID NO: 111765 - DNA, 25 bp, Artificial
  Probe
ctccggcccttgtaattattgttgt

SEQ ID NO: 111766 - DNA, 25 bp, Artificial
  Probe
aaaatctccggcccttgtaattatt

SEQ ID NO: 111767 - DNA, 25 bp, Artificial
  Probe
ttgttgttatttaaaggcgagcggg

SEQ ID NO: 111768 - DNA, 25 bp, Artificial
  Probe
caaggacaagaagaagtccattctc

SEQ ID NO: 111769 - DNA, 25 bp, Artificial
  Probe
ggacaagaagaagtccattctcatg

SEQ ID NO: 111770 - DNA, 25 bp, Artificial
  Probe
aggacaagaagaagtccattctcat

SEQ ID NO: 111771 - DNA, 25 bp, Artificial
  Probe
aaggacaagaagaagtccattctca

SEQ ID NO: 111772 - DNA, 25 bp, Artificial
  Probe
aagaagtccattctcatgaagcagc

SEQ ID NO: 111773 - DNA, 25 bp, Artificial
  Probe
agaagtccattctcatgaagcagct

SEQ ID NO: 111774 - DNA, 25 bp, Artificial
  Probe
tccattctcatgaagcagctacagc

SEQ ID NO: 111775 - DNA, 25 bp, Artificial
  Probe
gcaaggacaagaagaagtccattct

SEQ ID NO: 111776 - DNA, 25 bp, Artificial
  Probe
tgcaaggacaagaagaagtccattc

SEQ ID NO: 111777 - DNA, 25 bp, Artificial
  Probe
caacagtatggtacctagtccggtg

SEQ ID NO: 111778 - DNA, 25 bp, Artificial
  Probe
caagcgttgcaaggacaagaagaag

SEQ ID NO: 111779 - DNA, 25 bp, Artificial
  Probe
aacagtatggtacctagtccggtgg

SEQ ID NO: 111780 - DNA, 25 bp, Artificial
  Probe
ccaacagtatggtacctagtccggt

SEQ ID NO: 111781 - DNA, 25 bp, Artificial
  Probe
ttgcaaggacaagaagaagtccatt

SEQ ID NO: 111782 - DNA, 25 bp, Artificial
  Probe
gttgcaaggacaagaagaagtccat

SEQ ID NO: 111783 - DNA, 25 bp, Artificial
  Probe
tactgtttacctggctaactttacc

SEQ ID NO: 111784 - DNA, 25 bp, Artificial
  Probe
ggatactgtttacctggctaacttt

SEQ ID NO: 111785 - DNA, 25 bp, Artificial
  Probe
atactgtttacctggctaactttac

SEQ ID NO: 111786 - DNA, 25 bp, Artificial
  Probe
gatactgtttacctggctaacttta

SEQ ID NO: 111787 - DNA, 25 bp, Artificial
  Probe
gggatactgtttacctggctaactt

SEQ ID NO: 111788 - DNA, 25 bp, Artificial
  Probe
actgtttacctggctaactttaccc

SEQ ID NO: 111789 - DNA, 25 bp, Artificial
  Probe
ctgtttacctggctaactttaccca

SEQ ID NO: 111790 - DNA, 25 bp, Artificial
  Probe
tttccataaggttttcaagccagaa

SEQ ID NO: 111791 - DNA, 25 bp, Artificial
  Probe
ttccataaggttttcaagccagaag

SEQ ID NO: 111792 - DNA, 25 bp, Artificial
  Probe
ctttccataaggttttcaagccaga

SEQ ID NO: 111793 - DNA, 25 bp, Artificial
  Probe
ttagggtttctgcggctctgataaa

SEQ ID NO: 111794 - DNA, 25 bp, Artificial
  Probe
cataaggttttcaagccagaagcag

SEQ ID NO: 111795 - DNA, 25 bp, Artificial
  Probe
gttagggtttctgcggctctgataa

SEQ ID NO: 111796 - DNA, 25 bp, Artificial
  Probe
atgcccacactgttagccatcatag

SEQ ID NO: 111797 - DNA, 25 bp, Artificial
  Probe
tccataaggttttcaagccagaagc

SEQ ID NO: 111798 - DNA, 25 bp, Artificial
  Probe
ctttggtatctgggctgcctatctc

SEQ ID NO: 111799 - DNA, 25 bp, Artificial
  Probe
ggggatactgtttacctggctaact

SEQ ID NO: 111800 - DNA, 25 bp, Artificial
  Probe
gtggggatactgtttacctggctaa

SEQ ID NO: 111801 - DNA, 25 bp, Artificial
  Probe
ccataaggttttcaagccagaagca

SEQ ID NO: 111802 - DNA, 25 bp, Artificial
  Probe
tggggatactgtttacctggctaac

SEQ ID NO: 111803 - DNA, 25 bp, Artificial
  Probe
tagggtttctgcggctctgataaaa

SEQ ID NO: 111804 - DNA, 25 bp, Artificial
  Probe
catgcccacactgttagccatcata

SEQ ID NO: 111805 - DNA, 25 bp, Artificial
  Probe
ataaggttttcaagccagaagcagc

SEQ ID NO: 111806 - DNA, 25 bp, Artificial
  Probe
tttggtatctgggctgcctatctca

SEQ ID NO: 111807 - DNA, 25 bp, Artificial
  Probe
ttctgcggctctgataaaacaccat

SEQ ID NO: 111808 - DNA, 25 bp, Artificial
  Probe
ctcccctttccataaggttttcaag

SEQ ID NO: 111809 - DNA, 25 bp, Artificial
  Probe
gaggccagtgtgtagttagggtttc

SEQ ID NO: 111810 - DNA, 25 bp, Artificial
  Probe
tgtttacctggctaactttacccag

SEQ ID NO: 111811 - DNA, 25 bp, Artificial
  Probe
tttctgcggctctgataaaacacca

SEQ ID NO: 111812 - DNA, 25 bp, Artificial
  Probe
cctttccataaggttttcaagccag

SEQ ID NO: 111813 - DNA, 25 bp, Artificial
  Probe
aggccagtgtgtagttagggtttct

SEQ ID NO: 111814 - DNA, 25 bp, Artificial
  Probe
atctcacaggtggggatactgttta

SEQ ID NO: 111815 - DNA, 25 bp, Artificial
  Probe
tatctcacaggtggggatactgttt

SEQ ID NO: 111816 - DNA, 25 bp, Artificial
  Probe
tacctttggtatctgggctgcctat

SEQ ID NO: 111817 - DNA, 25 bp, Artificial
  Probe
tttcaagccagaagcagcttatctg

SEQ ID NO: 111818 - DNA, 25 bp, Artificial
  Probe
ggccagtgtgtagttagggtttctg

SEQ ID NO: 111819 - DNA, 25 bp, Artificial
  Probe
tcccctttccataaggttttcaagc

SEQ ID NO: 111820 - DNA, 25 bp, Artificial
  Probe
gctcccctttccataaggttttcaa

SEQ ID NO: 111821 - DNA, 25 bp, Artificial
  Probe
gtttacctggctaactttacccagc

SEQ ID NO: 111822 - DNA, 25 bp, Artificial
  Probe
ctatctcacaggtggggatactgtt

SEQ ID NO: 111823 - DNA, 25 bp, Artificial
  Probe
gtttctgcggctctgataaaacacc

SEQ ID NO: 111824 - DNA, 25 bp, Artificial
  Probe
ggtttctgcggctctgataaaacac

SEQ ID NO: 111825 - DNA, 25 bp, Artificial
  Probe
ccctttccataaggttttcaagcca

SEQ ID NO: 111826 - DNA, 25 bp, Artificial
  Probe
catcaccttgggtacctttggtatc

SEQ ID NO: 111827 - DNA, 25 bp, Artificial
  Probe
atcaccttgggtacctttggtatct

SEQ ID NO: 111828 - DNA, 25 bp, Artificial
  Probe
ttgctattacgcttctattcttcct

SEQ ID NO: 111829 - DNA, 25 bp, Artificial
  Probe
tgctattacgcttctattcttcctc

SEQ ID NO: 111830 - DNA, 25 bp, Artificial
  Probe
tattacgcttctattcttcctcctc

SEQ ID NO: 111831 - DNA, 25 bp, Artificial
  Probe
ctattacgcttctattcttcctcct

SEQ ID NO: 111832 - DNA, 25 bp, Artificial
  Probe
attacgcttctattcttcctcctct

SEQ ID NO: 111833 - DNA, 25 bp, Artificial
  Probe
gctattacgcttctattcttcctcc

SEQ ID NO: 111834 - DNA, 25 bp, Artificial
  Probe
tccaagatgttctattcaccaatca

SEQ ID NO: 111835 - DNA, 25 bp, Artificial
  Probe
ccaagatgttctattcaccaatcag

SEQ ID NO: 111836 - DNA, 25 bp, Artificial
  Probe
caagatgttctattcaccaatcagt

SEQ ID NO: 111837 - DNA, 25 bp, Artificial
  Probe
ttccaagatgttctattcaccaatc

SEQ ID NO: 111838 - DNA, 25 bp, Artificial
  Probe
ttacgcttctattcttcctcctctg

SEQ ID NO: 111839 - DNA, 25 bp, Artificial
  Probe
gatgttctattcaccaatcagtgtg

SEQ ID NO: 111840 - DNA, 25 bp, Artificial
  Probe
agatgttctattcaccaatcagtgt

SEQ ID NO: 111841 - DNA, 25 bp, Artificial
  Probe
aagatgttctattcaccaatcagtg

SEQ ID NO: 111842 - DNA, 25 bp, Artificial
  Probe
tcttagcttctattcctgccttatg

SEQ ID NO: 111843 - DNA, 25 bp, Artificial
  Probe
catcttagcttctattcctgcctta

SEQ ID NO: 111844 - DNA, 25 bp, Artificial
  Probe
atcttagcttctattcctgccttat

SEQ ID NO: 111845 - DNA, 25 bp, Artificial
  Probe
caacaagtgatggatctgtagttat

SEQ ID NO: 111846 - DNA, 25 bp, Artificial
  Probe
cttagcttctattcctgccttatgc

SEQ ID NO: 111847 - DNA, 25 bp, Artificial
  Probe
tctgactgtatttgtttctgctttc

SEQ ID NO: 111848 - DNA, 25 bp, Artificial
  Probe
gtgatggatctgtagttattaacct

SEQ ID NO: 111849 - DNA, 25 bp, Artificial
  Probe
agtgatggatctgtagttattaacc

SEQ ID NO: 111850 - DNA, 25 bp, Artificial
  Probe
tgagatgaataaacaaagtgggaca

SEQ ID NO: 111851 - DNA, 25 bp, Artificial
  Probe
actttacctttctggattgactaca

SEQ ID NO: 111852 - DNA, 25 bp, Artificial
  Probe
tttcgtgtttatcattggagtggta

SEQ ID NO: 111853 - DNA, 25 bp, Artificial
  Probe
ccaacaagtgatggatctgtagtta

SEQ ID NO: 111854 - DNA, 25 bp, Artificial
  Probe
ctgactgtatttgtttctgctttcc

SEQ ID NO: 111855 - DNA, 25 bp, Artificial
  Probe
cactttacctttctggattgactac

SEQ ID NO: 111856 - DNA, 25 bp, Artificial
  Probe
atgagatgaataaacaaagtgggac

SEQ ID NO: 111857 - DNA, 25 bp, Artificial
  Probe
tttgctattacgcttctattcttcc

SEQ ID NO: 111858 - DNA, 25 bp, Artificial
  Probe
ggtacaagtcacctattcaatggtt

SEQ ID NO: 111859 - DNA, 25 bp, Artificial
  Probe
atctgactgtatttgtttctgcttt

SEQ ID NO: 111860 - DNA, 25 bp, Artificial
  Probe
aatctgactgtatttgtttctgctt

SEQ ID NO: 111861 - DNA, 25 bp, Artificial
  Probe
ttcgtgtttatcattggagtggtag

SEQ ID NO: 111862 - DNA, 25 bp, Artificial
  Probe
gtctgatatttgctattacgcttct

SEQ ID NO: 111863 - DNA, 25 bp, Artificial
  Probe
tatcattggagtggtaggcaatatc

SEQ ID NO: 111864 - DNA, 25 bp, Artificial
  Probe
ccactgttgtgtcaatccaatcatt

SEQ ID NO: 111865 - DNA, 25 bp, Artificial
  Probe
tgactgtatttgtttctgctttcca

SEQ ID NO: 111866 - DNA, 25 bp, Artificial
  Probe
ctgctttccaagatgttctattcac

SEQ ID NO: 111867 - DNA, 25 bp, Artificial
  Probe
tctgctttccaagatgttctattca

SEQ ID NO: 111868 - DNA, 25 bp, Artificial
  Probe
gagatgaataaacaaagtgggacat

SEQ ID NO: 111869 - DNA, 25 bp, Artificial
  Probe
ttatcattggagtggtaggcaatat

SEQ ID NO: 111870 - DNA, 25 bp, Artificial
  Probe
ggtttccttgaacttctctctgtta

SEQ ID NO: 111871 - DNA, 25 bp, Artificial
  Probe
gtttctgctttccaagatgttctat

SEQ ID NO: 111872 - DNA, 25 bp, Artificial
  Probe
tgtttctgctttccaagatgttcta

SEQ ID NO: 111873 - DNA, 25 bp, Artificial
  Probe
ttggagttgcttggatgtatagtct

SEQ ID NO: 111874 - DNA, 25 bp, Artificial
  Probe
gttggagttgcttggatgtatagtc

SEQ ID NO: 111875 - DNA, 25 bp, Artificial
  Probe
cagttggagttgcttggatgtatag

SEQ ID NO: 111876 - DNA, 25 bp, Artificial
  Probe
agttggagttgcttggatgtatagt

SEQ ID NO: 111877 - DNA, 25 bp, Artificial
  Probe
aatgcttattgactcaagttcactg

SEQ ID NO: 111878 - DNA, 25 bp, Artificial
  Probe
ctgttgtgtgtgtactgatgactac

SEQ ID NO: 111879 - DNA, 25 bp, Artificial
  Probe
atgcttattgactcaagttcactgt

SEQ ID NO: 111880 - DNA, 25 bp, Artificial
  Probe
aattcttgatgctcagccagtaatc

SEQ ID NO: 111881 - DNA, 25 bp, Artificial
  Probe
attgactcaagttcactgtctgtat

SEQ ID NO: 111882 - DNA, 25 bp, Artificial
  Probe
ttattgactcaagttcactgtctgt

SEQ ID NO: 111883 - DNA, 25 bp, Artificial
  Probe
tggagttgcttggatgtatagtctc

SEQ ID NO: 111884 - DNA, 25 bp, Artificial
  Probe
cttattgactcaagttcactgtctg

SEQ ID NO: 111885 - DNA, 25 bp, Artificial
  Probe
tacacattgccagacaaggaactta

SEQ ID NO: 111886 - DNA, 25 bp, Artificial
  Probe
ttgactcaagttcactgtctgtata

SEQ ID NO: 111887 - DNA, 25 bp, Artificial
  Probe
tattgactcaagttcactgtctgta

SEQ ID NO: 111888 - DNA, 25 bp, Artificial
  Probe
ttgcttggatgtatagtctcctctt

SEQ ID NO: 111889 - DNA, 25 bp, Artificial
  Probe
gcttattgactcaagttcactgtct

SEQ ID NO: 111890 - DNA, 25 bp, Artificial
  Probe
cctgttgtgtgtgtactgatgacta

SEQ ID NO: 111891 - DNA, 25 bp, Artificial
  Probe
tgcttattgactcaagttcactgtc

SEQ ID NO: 111892 - DNA, 25 bp, Artificial
  Probe
attcttgatgctcagccagtaatct

SEQ ID NO: 111893 - DNA, 25 bp, Artificial
  Probe
aagcactaatacattgggaaatacg

SEQ ID NO: 111894 - DNA, 25 bp, Artificial
  Probe
actacagcgattatcaatgggaaat

SEQ ID NO: 111895 - DNA, 25 bp, Artificial
  Probe
tggtttaagcactaatacattggga

SEQ ID NO: 111896 - DNA, 25 bp, Artificial
  Probe
tggactctttgaaacactatgaatg

SEQ ID NO: 111897 - DNA, 25 bp, Artificial
  Probe
gttgcttggatgtatagtctcctct

SEQ ID NO: 111898 - DNA, 25 bp, Artificial
  Probe
agttgcttggatgtatagtctcctc

SEQ ID NO: 111899 - DNA, 25 bp, Artificial
  Probe
gagttgcttggatgtatagtctcct

SEQ ID NO: 111900 - DNA, 25 bp, Artificial
  Probe
ggataaattctgaggtagcgtaagt

SEQ ID NO: 111901 - DNA, 25 bp, Artificial
  Probe
tggataaattctgaggtagcgtaag

SEQ ID NO: 111902 - DNA, 25 bp, Artificial
  Probe
gatggataaattctgaggtagcgta

SEQ ID NO: 111903 - DNA, 25 bp, Artificial
  Probe
aaaggtgatggataaattctgaggt

SEQ ID NO: 111904 - DNA, 25 bp, Artificial
  Probe
ggtttaagcactaatacattgggaa

SEQ ID NO: 111905 - DNA, 25 bp, Artificial
  Probe
ataaattctgaggtagcgtaagtga

SEQ ID NO: 111906 - DNA, 25 bp, Artificial
  Probe
atggataaattctgaggtagcgtaa

SEQ ID NO: 111907 - DNA, 25 bp, Artificial
  Probe
aggtgatggataaattctgaggtag

SEQ ID NO: 111908 - DNA, 25 bp, Artificial
  Probe
gactacagcgattatcaatgggaaa

SEQ ID NO: 111909 - DNA, 25 bp, Artificial
  Probe
tacagcgattatcaatgggaaattc

SEQ ID NO: 111910 - DNA, 25 bp, Artificial
  Probe
ctacagcgattatcaatgggaaatt

SEQ ID NO: 111911 - DNA, 25 bp, Artificial
  Probe
gataaattctgaggtagcgtaagtg

SEQ ID NO: 111912 - DNA, 25 bp, Artificial
  Probe
atgaaatgtgttactgaactaccca

SEQ ID NO: 111913 - DNA, 25 bp, Artificial
  Probe
aaggtgatggataaattctgaggta

SEQ ID NO: 111914 - DNA, 25 bp, Artificial
  Probe
cagcgattatcaatgggaaattcac

SEQ ID NO: 111915 - DNA, 25 bp, Artificial
  Probe
aattctgaggtagcgtaagtgaagc

SEQ ID NO: 111916 - DNA, 25 bp, Artificial
  Probe
taaattctgaggtagcgtaagtgaa

SEQ ID NO: 111917 - DNA, 25 bp, Artificial
  Probe
atggtttaagcactaatacattggg

SEQ ID NO: 111918 - DNA, 25 bp, Artificial
  Probe
ctaacttgggcatctaatcttgtca

SEQ ID NO: 111919 - DNA, 25 bp, Artificial
  Probe
ctattattcctttggctaacttggg

SEQ ID NO: 111920 - DNA, 25 bp, Artificial
  Probe
taacttgggcatctaatcttgtcac

SEQ ID NO: 111921 - DNA, 25 bp, Artificial
  Probe
tattattcctttggctaacttgggc

SEQ ID NO: 111922 - DNA, 25 bp, Artificial
  Probe
ggctcacaaacatctataatgggat

SEQ ID NO: 111923 - DNA, 25 bp, Artificial
  Probe
cttccagaggtcctgagttcaatac

SEQ ID NO: 111924 - DNA, 25 bp, Artificial
  Probe
catctaatcttgtcaccaaagtagc

SEQ ID NO: 111925 - DNA, 25 bp, Artificial
  Probe
gcatctaatcttgtcaccaaagtag

SEQ ID NO: 111926 - DNA, 25 bp, Artificial
  Probe
atctaatcttgtcaccaaagtagcc

SEQ ID NO: 111927 - DNA, 25 bp, Artificial
  Probe
tcttccagaggtcctgagttcaata

SEQ ID NO: 111928 - DNA, 25 bp, Artificial
  Probe
ggcatctaatcttgtcaccaaagta

SEQ ID NO: 111929 - DNA, 25 bp, Artificial
  Probe
gtctgaagacagctatagtgtactt

SEQ ID NO: 111930 - DNA, 25 bp, Artificial
  Probe
gctaacttgggcatctaatcttgtc

SEQ ID NO: 111931 - DNA, 25 bp, Artificial
  Probe
gctcacaaacatctataatgggatc

SEQ ID NO: 111932 - DNA, 25 bp, Artificial
  Probe
ctttggctaacttgggcatctaatc

SEQ ID NO: 111933 - DNA, 25 bp, Artificial
  Probe
ctaatcttgtcaccaaagtagccag

SEQ ID NO: 111934 - DNA, 25 bp, Artificial
  Probe
tggctcacaaacatctataatggga

SEQ ID NO: 111935 - DNA, 25 bp, Artificial
  Probe
cacagacacacctaaacgcataatt

SEQ ID NO: 111936 - DNA, 25 bp, Artificial
  Probe
gacacacctaaacgcataattaagt

SEQ ID NO: 111937 - DNA, 25 bp, Artificial
  Probe
cagacacacctaaacgcataattaa

SEQ ID NO: 111938 - DNA, 25 bp, Artificial
  Probe
acagacacacctaaacgcataatta

SEQ ID NO: 111939 - DNA, 25 bp, Artificial
  Probe
tctaatcttgtcaccaaagtagcca

SEQ ID NO: 111940 - DNA, 25 bp, Artificial
  Probe
agacacacctaaacgcataattaag

SEQ ID NO: 111941 - DNA, 25 bp, Artificial
  Probe
taactcacagttgccaataacattg

SEQ ID NO: 111942 - DNA, 25 bp, Artificial
  Probe
cataactcacagttgccaataacat

SEQ ID NO: 111943 - DNA, 25 bp, Artificial
  Probe
ttggctaacttgggcatctaatctt

SEQ ID NO: 111944 - DNA, 25 bp, Artificial
  Probe
tttggctaacttgggcatctaatct

SEQ ID NO: 111945 - DNA, 25 bp, Artificial
  Probe
actcacagttgccaataacattgtt

SEQ ID NO: 111946 - DNA, 25 bp, Artificial
  Probe
atggtggctcacaaacatctataat

SEQ ID NO: 111947 - DNA, 25 bp, Artificial
  Probe
ataactcacagttgccaataacatt

SEQ ID NO: 111948 - DNA, 25 bp, Artificial
  Probe
tctgaagacagctatagtgtactta

SEQ ID NO: 111949 - DNA, 25 bp, Artificial
  Probe
acacacctaaacgcataattaagta

SEQ ID NO: 111950 - DNA, 25 bp, Artificial
  Probe
tggtggctcacaaacatctataatg

SEQ ID NO: 111951 - DNA, 25 bp, Artificial
  Probe
taaataagtctatgggcataccacc

SEQ ID NO: 111952 - DNA, 25 bp, Artificial
  Probe
ccataactcacagttgccaataaca

SEQ ID NO: 111953 - DNA, 25 bp, Artificial
  Probe
gaagacagctatagtgtacttatgt

SEQ ID NO: 111954 - DNA, 25 bp, Artificial
  Probe
tgaagacagctatagtgtacttatg

SEQ ID NO: 111955 - DNA, 25 bp, Artificial
  Probe
aactcacagttgccaataacattgt

SEQ ID NO: 111956 - DNA, 25 bp, Artificial
  Probe
ttattcctttggctaacttgggcat

SEQ ID NO: 111957 - DNA, 25 bp, Artificial
  Probe
attattcctttggctaacttgggca

SEQ ID NO: 111958 - DNA, 25 bp, Artificial
  Probe
gtggctcacaaacatctataatggg

SEQ ID NO: 111959 - DNA, 25 bp, Artificial
  Probe
ggtggctcacaaacatctataatgg

SEQ ID NO: 111960 - DNA, 25 bp, Artificial
  Probe
ggctaacttgggcatctaatcttgt

SEQ ID NO: 111961 - DNA, 25 bp, Artificial
  Probe
tggctaacttgggcatctaatcttg

SEQ ID NO: 111962 - DNA, 25 bp, Artificial
  Probe
taatcttgtcaccaaagtagccagg

SEQ ID NO: 111963 - DNA, 25 bp, Artificial
  Probe
agaagaggaataacgagtctgagaa

SEQ ID NO: 111964 - DNA, 25 bp, Artificial
  Probe
aagaagaggaataacgagtctgaga

SEQ ID NO: 111965 - DNA, 25 bp, Artificial
  Probe
atgtgaatgagtgtgaagacctgaa

SEQ ID NO: 111966 - DNA, 25 bp, Artificial
  Probe
gatgtgaatgagtgtgaagacctga

SEQ ID NO: 111967 - DNA, 25 bp, Artificial
  Probe
ttaacaatataaaggcagagcaagc

SEQ ID NO: 111968 - DNA, 25 bp, Artificial
  Probe
tgtgaatgagtgtgaagacctgaac

SEQ ID NO: 111969 - DNA, 25 bp, Artificial
  Probe
tgtggatgtgaatgagtgtgaagac

SEQ ID NO: 111970 - DNA, 25 bp, Artificial
  Probe
gtgtggatgtgaatgagtgtgaaga

SEQ ID NO: 111971 - DNA, 25 bp, Artificial
  Probe
gaggaataacgagtctgagaaagtg

SEQ ID NO: 111972 - DNA, 25 bp, Artificial
  Probe
aagaggaataacgagtctgagaaag

SEQ ID NO: 111973 - DNA, 25 bp, Artificial
  Probe
gaagaggaataacgagtctgagaaa

SEQ ID NO: 111974 - DNA, 25 bp, Artificial
  Probe
aaagaagaggaataacgagtctgag

SEQ ID NO: 111975 - DNA, 25 bp, Artificial
  Probe
gaaagaagaggaataacgagtctga

SEQ ID NO: 111976 - DNA, 25 bp, Artificial
  Probe
tttcaaagttgtttctctcctccac

SEQ ID NO: 111977 - DNA, 25 bp, Artificial
  Probe
agaggaataacgagtctgagaaagt

SEQ ID NO: 111978 - DNA, 25 bp, Artificial
  Probe
gaataacgagtctgagaaagtgtgg

SEQ ID NO: 111979 - DNA, 25 bp, Artificial
  Probe
ggaataacgagtctgagaaagtgtg

SEQ ID NO: 111980 - DNA, 25 bp, Artificial
  Probe
aggaataacgagtctgagaaagtgt

SEQ ID NO: 111981 - DNA, 25 bp, Artificial
  Probe
tgtgtggatgtgaatgagtgtgaag

SEQ ID NO: 111982 - DNA, 25 bp, Artificial
  Probe
ctgtgtggatgtgaatgagtgtgaa

SEQ ID NO: 111983 - DNA, 25 bp, Artificial
  Probe
ctcacctcagaggatgaagactaat

SEQ ID NO: 111984 - DNA, 25 bp, Artificial
  Probe
cgaaagaagaggaataacgagtctg

SEQ ID NO: 111985 - DNA, 25 bp, Artificial
  Probe
ggatgtgaatgagtgtgaagacctg

SEQ ID NO: 111986 - DNA, 25 bp, Artificial
  Probe
cttaacaatataaaggcagagcaag

SEQ ID NO: 111987 - DNA, 25 bp, Artificial
  Probe
gtggatgtgaatgagtgtgaagacc

SEQ ID NO: 111988 - DNA, 25 bp, Artificial
  Probe
caaacacctttattaggctcatctg

SEQ ID NO: 111989 - DNA, 25 bp, Artificial
  Probe
aaacacctttattaggctcatctgt

SEQ ID NO: 111990 - DNA, 25 bp, Artificial
  Probe
tggatgtgaatgagtgtgaagacct

SEQ ID NO: 111991 - DNA, 25 bp, Artificial
  Probe
gagaaagtgtggcaagagagtgata

SEQ ID NO: 111992 - DNA, 25 bp, Artificial
  Probe
acacctttattaggctcatctgttc

SEQ ID NO: 111993 - DNA, 25 bp, Artificial
  Probe
ttcaaagttgtttctctcctccact

SEQ ID NO: 111994 - DNA, 25 bp, Artificial
  Probe
agaaagtgtggcaagagagtgatac

SEQ ID NO: 111995 - DNA, 25 bp, Artificial
  Probe
cacctttattaggctcatctgttcc

SEQ ID NO: 111996 - DNA, 25 bp, Artificial
  Probe
gtgaatgagtgtgaagacctgaacg

SEQ ID NO: 111997 - DNA, 25 bp, Artificial
  Probe
gcaaacacctttattaggctcatct

SEQ ID NO: 111998 - DNA, 25 bp, Artificial
  Probe
tactcctccatcccatagacagttc

SEQ ID NO: 111999 - DNA, 25 bp, Artificial
  Probe
ctactcctccatcccatagacagtt

SEQ ID NO: 112000 - DNA, 25 bp, Artificial
  Probe
acctttattaggctcatctgttccc

SEQ ID NO: 112001 - DNA, 25 bp, Artificial
  Probe
aataacgagtctgagaaagtgtggc

SEQ ID NO: 112002 - DNA, 25 bp, Artificial
  Probe
gatctacacatcatctcgatggttc

SEQ ID NO: 112003 - DNA, 25 bp, Artificial
  Probe
caaatcagtccaagcctccttagag

SEQ ID NO: 112004 - DNA, 25 bp, Artificial
  Probe
tacacatcatctcgatggttctgta

SEQ ID NO: 112005 - DNA, 25 bp, Artificial
  Probe
atctacacatcatctcgatggttct

SEQ ID NO: 112006 - DNA, 25 bp, Artificial
  Probe
tttgctactcctccatcccatagac

SEQ ID NO: 112007 - DNA, 25 bp, Artificial
  Probe
agttgtttctctcctccacttcaga

SEQ ID NO: 112008 - DNA, 25 bp, Artificial
  Probe
ttagcatttattagcactgtgttgt

SEQ ID NO: 112009 - DNA, 25 bp, Artificial
  Probe
cttagcatttattagcactgtgttg

SEQ ID NO: 112010 - DNA, 25 bp, Artificial
  Probe
tcttagcatttattagcactgtgtt

SEQ ID NO: 112011 - DNA, 25 bp, Artificial
  Probe
ttcttagcatttattagcactgtgt

SEQ ID NO: 112012 - DNA, 25 bp, Artificial
  Probe
ggagtttcttagcatttattagcac

SEQ ID NO: 112013 - DNA, 25 bp, Artificial
  Probe
aggagtttcttagcatttattagca

SEQ ID NO: 112014 - DNA, 25 bp, Artificial
  Probe
tttcttcagcgataatctcaagtgc

SEQ ID NO: 112015 - DNA, 25 bp, Artificial
  Probe
atggaggagtttcttagcatttatt

SEQ ID NO: 112016 - DNA, 25 bp, Artificial
  Probe
gtttcttagcatttattagcactgt

SEQ ID NO: 112017 - DNA, 25 bp, Artificial
  Probe
gaggagtttcttagcatttattagc

SEQ ID NO: 112018 - DNA, 25 bp, Artificial
  Probe
gcatttattagcactgtgttgtgta

SEQ ID NO: 112019 - DNA, 25 bp, Artificial
  Probe
tagcatttattagcactgtgttgtg

SEQ ID NO: 112020 - DNA, 25 bp, Artificial
  Probe
tggaggagtttcttagcatttatta

SEQ ID NO: 112021 - DNA, 25 bp, Artificial
  Probe
tttcttagcatttattagcactgtg

SEQ ID NO: 112022 - DNA, 25 bp, Artificial
  Probe
tattagcactgtgttgtgtaaagtc

SEQ ID NO: 112023 - DNA, 25 bp, Artificial
  Probe
attagcactgtgttgtgtaaagtca

SEQ ID NO: 112024 - DNA, 25 bp, Artificial
  Probe
ttagcactgtgttgtgtaaagtcaa

SEQ ID NO: 112025 - DNA, 25 bp, Artificial
  Probe
ttattagcactgtgttgtgtaaagt

SEQ ID NO: 112026 - DNA, 25 bp, Artificial
  Probe
tcttcagcgataatctcaagtgcaa

SEQ ID NO: 112027 - DNA, 25 bp, Artificial
  Probe
ttcttcagcgataatctcaagtgca

SEQ ID NO: 112028 - DNA, 25 bp, Artificial
  Probe
agcatttattagcactgtgttgtgt

SEQ ID NO: 112029 - DNA, 25 bp, Artificial
  Probe
ggaggagtttcttagcatttattag

SEQ ID NO: 112030 - DNA, 25 bp, Artificial
  Probe
agtttcttagcatttattagcactg

SEQ ID NO: 112031 - DNA, 25 bp, Artificial
  Probe
cgataatctcaagtgcaaacatctt

SEQ ID NO: 112032 - DNA, 25 bp, Artificial
  Probe
tttattagcactgtgttgtgtaaag

SEQ ID NO: 112033 - DNA, 25 bp, Artificial
  Probe
catttattagcactgtgttgtgtaa

SEQ ID NO: 112034 - DNA, 25 bp, Artificial
  Probe
gagtttcttagcatttattagcact

SEQ ID NO: 112035 - DNA, 25 bp, Artificial
  Probe
ggaaatggaggagtttcttagcatt

SEQ ID NO: 112036 - DNA, 25 bp, Artificial
  Probe
atttattagcactgtgttgtgtaaa

SEQ ID NO: 112037 - DNA, 25 bp, Artificial
  Probe
gcgataatctcaagtgcaaacatct

SEQ ID NO: 112038 - DNA, 25 bp, Artificial
  Probe
agcgataatctcaagtgcaaacatc

SEQ ID NO: 112039 - DNA, 25 bp, Artificial
  Probe
gataatctcaagtgcaaacatcttt

SEQ ID NO: 112040 - DNA, 25 bp, Artificial
  Probe
cttcagcgataatctcaagtgcaaa

SEQ ID NO: 112041 - DNA, 25 bp, Artificial
  Probe
ttttcttcagcgataatctcaagtg

SEQ ID NO: 112042 - DNA, 25 bp, Artificial
  Probe
ttcagcgataatctcaagtgcaaac

SEQ ID NO: 112043 - DNA, 25 bp, Artificial
  Probe
aatggaggagtttcttagcatttat

SEQ ID NO: 112044 - DNA, 25 bp, Artificial
  Probe
taaaattcaatggaaaagaggcagg

SEQ ID NO: 112045 - DNA, 25 bp, Artificial
  Probe
cagcgataatctcaagtgcaaacat

SEQ ID NO: 112046 - DNA, 25 bp, Artificial
  Probe
tggaaatggaggagtttcttagcat

SEQ ID NO: 112047 - DNA, 25 bp, Artificial
  Probe
tgtaaaattcaatggaaaagaggca

SEQ ID NO: 112048 - DNA, 25 bp, Artificial
  Probe
gtaaaattcaatggaaaagaggcag

SEQ ID NO: 112049 - DNA, 25 bp, Artificial
  Probe
aaattcaatggaaaagaggcaggat

SEQ ID NO: 112050 - DNA, 25 bp, Artificial
  Probe
aaaattcaatggaaaagaggcagga

SEQ ID NO: 112051 - DNA, 25 bp, Artificial
  Probe
atgtaaaattcaatggaaaagaggc

SEQ ID NO: 112052 - DNA, 25 bp, Artificial
  Probe
tacttgggtggaaatggaggagttt

SEQ ID NO: 112053 - DNA, 25 bp, Artificial
  Probe
gacatctacagcacagactactacc

SEQ ID NO: 112054 - DNA, 25 bp, Artificial
  Probe
ggacatctacagcacagactactac

SEQ ID NO: 112055 - DNA, 25 bp, Artificial
  Probe
tatcacactcaagtcttaccctcag

SEQ ID NO: 112056 - DNA, 25 bp, Artificial
  Probe
ctatcacactcaagtcttaccctca

SEQ ID NO: 112057 - DNA, 25 bp, Artificial
  Probe
agcagctatcacactcaagtcttac

SEQ ID NO: 112058 - DNA, 25 bp, Artificial
  Probe
cagcagctatcacactcaagtctta

SEQ ID NO: 112059 - DNA, 25 bp, Artificial
  Probe
catctacagcacagactactaccgt

SEQ ID NO: 112060 - DNA, 25 bp, Artificial
  Probe
acatctacagcacagactactaccg

SEQ ID NO: 112061 - DNA, 25 bp, Artificial
  Probe
gctatcacactcaagtcttaccctc

SEQ ID NO: 112062 - DNA, 25 bp, Artificial
  Probe
gcagctatcacactcaagtcttacc

SEQ ID NO: 112063 - DNA, 25 bp, Artificial
  Probe
atctacagcacagactactaccgtg

SEQ ID NO: 112064 - DNA, 25 bp, Artificial
  Probe
gggacatctacagcacagactacta

SEQ ID NO: 112065 - DNA, 25 bp, Artificial
  Probe
cagctatcacactcaagtcttaccc

SEQ ID NO: 112066 - DNA, 25 bp, Artificial
  Probe
agctatcacactcaagtcttaccct

SEQ ID NO: 112067 - DNA, 25 bp, Artificial
  Probe
atcttcacctatggaaagcaaccct

SEQ ID NO: 112068 - DNA, 25 bp, Artificial
  Probe
gatcttcacctatggaaagcaaccc

SEQ ID NO: 112069 - DNA, 25 bp, Artificial
  Probe
gagatcttcacctatggaaagcaac

SEQ ID NO: 112070 - DNA, 25 bp, Artificial
  Probe
atcacactcaagtcttaccctcagc

SEQ ID NO: 112071 - DNA, 25 bp, Artificial
  Probe
tctacagcacagactactaccgtgt

SEQ ID NO: 112072 - DNA, 25 bp, Artificial
  Probe
ctgggagatcttcacctatggaaag

SEQ ID NO: 112073 - DNA, 25 bp, Artificial
  Probe
cacactcaagtcttaccctcagcat

SEQ ID NO: 112074 - DNA, 25 bp, Artificial
  Probe
cagggacatctacagcacagactac

SEQ ID NO: 112075 - DNA, 25 bp, Artificial
  Probe
ccagcagctatcacactcaagtctt

SEQ ID NO: 112076 - DNA, 25 bp, Artificial
  Probe
ggagatcttcacctatggaaagcaa

SEQ ID NO: 112077 - DNA, 25 bp, Artificial
  Probe
agggacatctacagcacagactact

SEQ ID NO: 112078 - DNA, 25 bp, Artificial
  Probe
tctgggagatcttcacctatggaaa

SEQ ID NO: 112079 - DNA, 25 bp, Artificial
  Probe
agatcttcacctatggaaagcaacc

SEQ ID NO: 112080 - DNA, 25 bp, Artificial
  Probe
tcttcacctatggaaagcaaccctg

SEQ ID NO: 112081 - DNA, 25 bp, Artificial
  Probe
actcaagtcttaccctcagcatgtg

SEQ ID NO: 112082 - DNA, 25 bp, Artificial
  Probe
cactcaagtcttaccctcagcatgt

SEQ ID NO: 112083 - DNA, 25 bp, Artificial
  Probe
acactcaagtcttaccctcagcatg

SEQ ID NO: 112084 - DNA, 25 bp, Artificial
  Probe
ctctgggagatcttcacctatggaa

SEQ ID NO: 112085 - DNA, 25 bp, Artificial
  Probe
tcacactcaagtcttaccctcagca

SEQ ID NO: 112086 - DNA, 25 bp, Artificial
  Probe
ctcaagtcttaccctcagcatgtgg

SEQ ID NO: 112087 - DNA, 25 bp, Artificial
  Probe
gggagatcttcacctatggaaagca

SEQ ID NO: 112088 - DNA, 25 bp, Artificial
  Probe
tgggagatcttcacctatggaaagc

SEQ ID NO: 112089 - DNA, 25 bp, Artificial
  Probe
caagtcttaccctcagcatgtggag

SEQ ID NO: 112090 - DNA, 25 bp, Artificial
  Probe
cacctatggaaagcaaccctggtac

SEQ ID NO: 112091 - DNA, 25 bp, Artificial
  Probe
gtgctctgggagatcttcacctatg

SEQ ID NO: 112092 - DNA, 25 bp, Artificial
  Probe
ctacagcacagactactaccgtgtg

SEQ ID NO: 112093 - DNA, 25 bp, Artificial
  Probe
gctctgggagatcttcacctatgga

SEQ ID NO: 112094 - DNA, 25 bp, Artificial
  Probe
tgctctgggagatcttcacctatgg

SEQ ID NO: 112095 - DNA, 25 bp, Artificial
  Probe
caagctctccaagatcaagactctg

SEQ ID NO: 112096 - DNA, 25 bp, Artificial
  Probe
gagaagaggattaaaggacgcactg

SEQ ID NO: 112097 - DNA, 25 bp, Artificial
  Probe
ccaagcgagaagaggattaaaggac

SEQ ID NO: 112098 - DNA, 25 bp, Artificial
  Probe
caagcgagaagaggattaaaggacg

SEQ ID NO: 112099 - DNA, 25 bp, Artificial
  Probe
ccaagctctccaagatcaagactct

SEQ ID NO: 112100 - DNA, 25 bp, Artificial
  Probe
accaagctctccaagatcaagactc

SEQ ID NO: 112101 - DNA, 25 bp, Artificial
  Probe
caccaagctctccaagatcaagact

SEQ ID NO: 112102 - DNA, 25 bp, Artificial
  Probe
gacaccaagctctccaagatcaaga

SEQ ID NO: 112103 - DNA, 25 bp, Artificial
  Probe
aagctctccaagatcaagactctgc

SEQ ID NO: 112104 - DNA, 25 bp, Artificial
  Probe
agaagaggattaaaggacgcactgg

SEQ ID NO: 112105 - DNA, 25 bp, Artificial
  Probe
acaccaagctctccaagatcaagac

SEQ ID NO: 112106 - DNA, 25 bp, Artificial
  Probe
cgagaagaggattaaaggacgcact

SEQ ID NO: 112107 - DNA, 25 bp, Artificial
  Probe
gccaagcgagaagaggattaaagga

SEQ ID NO: 112108 - DNA, 25 bp, Artificial
  Probe
cacagagagcattaacagtgcgttc

SEQ ID NO: 112109 - DNA, 25 bp, Artificial
  Probe
ggacaccaagctctccaagatcaag

SEQ ID NO: 112110 - DNA, 25 bp, Artificial
  Probe
cagctacatcgcctacttgatggac

SEQ ID NO: 112111 - DNA, 25 bp, Artificial
  Probe
ctacatcgcctacttgatggacgtg

SEQ ID NO: 112112 - DNA, 25 bp, Artificial
  Probe
aagcgagaagaggattaaaggacgc

SEQ ID NO: 112113 - DNA, 25 bp, Artificial
  Probe
cactagcagccatagaacatcagat

SEQ ID NO: 112114 - DNA, 25 bp, Artificial
  Probe
actagcagccatagaacatcagatg

SEQ ID NO: 112115 - DNA, 25 bp, Artificial
  Probe
taagtgtgctgtgaactctctgatc

SEQ ID NO: 112116 - DNA, 25 bp, Artificial
  Probe
cactcctagttccactgtttatgat

SEQ ID NO: 112117 - DNA, 25 bp, Artificial
  Probe
ctcactcctagttccactgtttatg

SEQ ID NO: 112118 - DNA, 25 bp, Artificial
  Probe
tcactcctagttccactgtttatga

SEQ ID NO: 112119 - DNA, 25 bp, Artificial
  Probe
actcctagttccactgtttatgatc

SEQ ID NO: 112120 - DNA, 25 bp, Artificial
  Probe
ctcctagttccactgtttatgatcc

SEQ ID NO: 112121 - DNA, 25 bp, Artificial
  Probe
tcctagttccactgtttatgatcct

SEQ ID NO: 112122 - DNA, 25 bp, Artificial
  Probe
cctagttccactgtttatgatccta

SEQ ID NO: 112123 - DNA, 25 bp, Artificial
  Probe
cctcactcctagttccactgtttat

SEQ ID NO: 112124 - DNA, 25 bp, Artificial
  Probe
gaataccctgagccttagtgatgac

SEQ ID NO: 112125 - DNA, 25 bp, Artificial
  Probe
ctagttccactgtttatgatcctaa

SEQ ID NO: 112126 - DNA, 25 bp, Artificial
  Probe
gtcttgtttccctcactcctagttc

SEQ ID NO: 112127 - DNA, 25 bp, Artificial
  Probe
gatcagtgtgctgtgtaagagtgtg

SEQ ID NO: 112128 - DNA, 25 bp, Artificial
  Probe
ggaataccctgagccttagtgatga

SEQ ID NO: 112129 - DNA, 25 bp, Artificial
  Probe
ctggaataccctgagccttagtgat

SEQ ID NO: 112130 - DNA, 25 bp, Artificial
  Probe
tagttccactgtttatgatcctaaa

SEQ ID NO: 112131 - DNA, 25 bp, Artificial
  Probe
aataccctgagccttagtgatgacc

SEQ ID NO: 112132 - DNA, 25 bp, Artificial
  Probe
tggaataccctgagccttagtgatg

SEQ ID NO: 112133 - DNA, 25 bp, Artificial
  Probe
tgtcttgtttccctcactcctagtt

SEQ ID NO: 112134 - DNA, 25 bp, Artificial
  Probe
ttctggaataccctgagccttagtg

SEQ ID NO: 112135 - DNA, 25 bp, Artificial
  Probe
gttctggaataccctgagccttagt

SEQ ID NO: 112136 - DNA, 25 bp, Artificial
  Probe
cctaaaataaacgggactccatcat

SEQ ID NO: 112137 - DNA, 25 bp, Artificial
  Probe
ccctcactcctagttccactgttta

SEQ ID NO: 112138 - DNA, 25 bp, Artificial
  Probe
gcactagcagccatagaacatcaga

SEQ ID NO: 112139 - DNA, 25 bp, Artificial
  Probe
cagtctgatttcgagtgtaacacag

SEQ ID NO: 112140 - DNA, 25 bp, Artificial
  Probe
aaataaacgggactccatcataaaa

SEQ ID NO: 112141 - DNA, 25 bp, Artificial
  Probe
aaaataaacgggactccatcataaa

SEQ ID NO: 112142 - DNA, 25 bp, Artificial
  Probe
gtgtgctgtgaactctctgatcctt

SEQ ID NO: 112143 - DNA, 25 bp, Artificial
  Probe
gagcagtctgatttcgagtgtaaca

SEQ ID NO: 112144 - DNA, 25 bp, Artificial
  Probe
ctaaaataaacgggactccatcata

SEQ ID NO: 112145 - DNA, 25 bp, Artificial
  Probe
tcttgtttccctcactcctagttcc

SEQ ID NO: 112146 - DNA, 25 bp, Artificial
  Probe
tctttccagaatgtgaccctaccag

SEQ ID NO: 112147 - DNA, 25 bp, Artificial
  Probe
atcttcatcattttcatgttggtgg

SEQ ID NO: 112148 - DNA, 25 bp, Artificial
  Probe
catcttcatcattttcatgttggtg

SEQ ID NO: 112149 - DNA, 25 bp, Artificial
  Probe
aagtgtgctgtgaactctctgatcc

SEQ ID NO: 112150 - DNA, 25 bp, Artificial
  Probe
gaccatcttcatcattttcatgttg

SEQ ID NO: 112151 - DNA, 25 bp, Artificial
  Probe
taaaataaacgggactccatcataa

SEQ ID NO: 112152 - DNA, 25 bp, Artificial
  Probe
cttgtttccctcactcctagttcca

SEQ ID NO: 112153 - DNA, 25 bp, Artificial
  Probe
agaccatcttcatcattttcatgtt

SEQ ID NO: 112154 - DNA, 25 bp, Artificial
  Probe
atcctaaaataaacgggactccatc

SEQ ID NO: 112155 - DNA, 25 bp, Artificial
  Probe
tgtgctgtgaactctctgatccttt

SEQ ID NO: 112156 - DNA, 25 bp, Artificial
  Probe
tctggaataccctgagccttagtga

SEQ ID NO: 112157 - DNA, 25 bp, Artificial
  Probe
ttgtttccctcactcctagttccac

SEQ ID NO: 112158 - DNA, 25 bp, Artificial
  Probe
cacaactcataacttggaggagaac

SEQ ID NO: 112159 - DNA, 25 bp, Artificial
  Probe
acacaactcataacttggaggagaa

SEQ ID NO: 112160 - DNA, 25 bp, Artificial
  Probe
gttacgagaactcttgttgtgtgag

SEQ ID NO: 112161 - DNA, 25 bp, Artificial
  Probe
gacacaactcataacttggaggaga

SEQ ID NO: 112162 - DNA, 25 bp, Artificial
  Probe
acaactcataacttggaggagaacc

SEQ ID NO: 112163 - DNA, 25 bp, Artificial
  Probe
tgacacaactcataacttggaggag

SEQ ID NO: 112164 - DNA, 25 bp, Artificial
  Probe
tagaaacacactactgactcctgaa

SEQ ID NO: 112165 - DNA, 25 bp, Artificial
  Probe
aactcataacttggaggagaacctg

SEQ ID NO: 112166 - DNA, 25 bp, Artificial
  Probe
caactcataacttggaggagaacct

SEQ ID NO: 112167 - DNA, 25 bp, Artificial
  Probe
gaactgtagtaggttgggttatgac

SEQ ID NO: 112168 - DNA, 25 bp, Artificial
  Probe
cctatgttcctaattctgaaatccg

SEQ ID NO: 112169 - DNA, 25 bp, Artificial
  Probe
tgaactgtagtaggttgggttatga

SEQ ID NO: 112170 - DNA, 25 bp, Artificial
  Probe
gtgaactgtagtaggttgggttatg

SEQ ID NO: 112171 - DNA, 25 bp, Artificial
  Probe
agtgaactgtagtaggttgggttat

SEQ ID NO: 112172 - DNA, 25 bp, Artificial
  Probe
tactgactcctgaaggtgttcgtta

SEQ ID NO: 112173 - DNA, 25 bp, Artificial
  Probe
aagtgaactgtagtaggttgggtta

SEQ ID NO: 112174 - DNA, 25 bp, Artificial
  Probe
atgttcctaattctgaaatccgtca

SEQ ID NO: 112175 - DNA, 25 bp, Artificial
  Probe
gaaatccgtcagtagaaacacacta

SEQ ID NO: 112176 - DNA, 25 bp, Artificial
  Probe
ccctatgttcctaattctgaaatcc

SEQ ID NO: 112177 - DNA, 25 bp, Artificial
  Probe
tatgttcctaattctgaaatccgtc

SEQ ID NO: 112178 - DNA, 25 bp, Artificial
  Probe
ctatgttcctaattctgaaatccgt

SEQ ID NO: 112179 - DNA, 25 bp, Artificial
  Probe
caaccctatgttcctaattctgaaa

SEQ ID NO: 112180 - DNA, 25 bp, Artificial
  Probe
gcagatacaaccctatgttcctaat

SEQ ID NO: 112181 - DNA, 25 bp, Artificial
  Probe
agaaacacactactgactcctgaag

SEQ ID NO: 112182 - DNA, 25 bp, Artificial
  Probe
acaaccctatgttcctaattctgaa

SEQ ID NO: 112183 - DNA, 25 bp, Artificial
  Probe
accctatgttcctaattctgaaatc

SEQ ID NO: 112184 - DNA, 25 bp, Artificial
  Probe
tacaaccctatgttcctaattctga

SEQ ID NO: 112185 - DNA, 25 bp, Artificial
  Probe
aactgtagtaggttgggttatgaca

SEQ ID NO: 112186 - DNA, 25 bp, Artificial
  Probe
tgtagtaggttgggttatgacacaa

SEQ ID NO: 112187 - DNA, 25 bp, Artificial
  Probe
ttacgagaactcttgttgtgtgagc

SEQ ID NO: 112188 - DNA, 25 bp, Artificial
  Probe
gaagtgaactgtagtaggttgggtt

SEQ ID NO: 112189 - DNA, 25 bp, Artificial
  Probe
cgttacgagaactcttgttgtgtga

SEQ ID NO: 112190 - DNA, 25 bp, Artificial
  Probe
atgacacaactcataacttggagga

SEQ ID NO: 112191 - DNA, 25 bp, Artificial
  Probe
aaccctatgttcctaattctgaaat

SEQ ID NO: 112192 - DNA, 25 bp, Artificial
  Probe
ctgtagtaggttgggttatgacaca

SEQ ID NO: 112193 - DNA, 25 bp, Artificial
  Probe
actgtagtaggttgggttatgacac

SEQ ID NO: 112194 - DNA, 25 bp, Artificial
  Probe
tgaaatccgtcagtagaaacacact

SEQ ID NO: 112195 - DNA, 25 bp, Artificial
  Probe
ggcagatacaaccctatgttcctaa

SEQ ID NO: 112196 - DNA, 25 bp, Artificial
  Probe
atacaaccctatgttcctaattctg

SEQ ID NO: 112197 - DNA, 25 bp, Artificial
  Probe
cagatacaaccctatgttcctaatt

SEQ ID NO: 112198 - DNA, 25 bp, Artificial
  Probe
tcataacttggaggagaacctggag

SEQ ID NO: 112199 - DNA, 25 bp, Artificial
  Probe
ctcataacttggaggagaacctgga

SEQ ID NO: 112200 - DNA, 25 bp, Artificial
  Probe
gtccctctcaacagttccttagttc

SEQ ID NO: 112201 - DNA, 25 bp, Artificial
  Probe
gaaacacactactgactcctgaagg

SEQ ID NO: 112202 - DNA, 25 bp, Artificial
  Probe
gatacaaccctatgttcctaattct

SEQ ID NO: 112203 - DNA, 25 bp, Artificial
  Probe
ctctgagagaacagttgattgagaa

SEQ ID NO: 112204 - DNA, 25 bp, Artificial
  Probe
actgtaatgtgtatttctttgtggg

SEQ ID NO: 112205 - DNA, 25 bp, Artificial
  Probe
cttaaagtgtttgtagtcttggcat

SEQ ID NO: 112206 - DNA, 25 bp, Artificial
  Probe
taaagtgtttgtagtcttggcatag

SEQ ID NO: 112207 - DNA, 25 bp, Artificial
  Probe
aaagtgtttgtagtcttggcatagg

SEQ ID NO: 112208 - DNA, 25 bp, Artificial
  Probe
accagccacacatccagagttatat

SEQ ID NO: 112209 - DNA, 25 bp, Artificial
  Probe
tgagagaacagttgattgagaaatt

SEQ ID NO: 112210 - DNA, 25 bp, Artificial
  Probe
ttaaagtgtttgtagtcttggcata

SEQ ID NO: 112211 - DNA, 25 bp, Artificial
  Probe
agttgccgttgctaaatgatttaat

SEQ ID NO: 112212 - DNA, 25 bp, Artificial
  Probe
ctagttgccgttgctaaatgattta

SEQ ID NO: 112213 - DNA, 25 bp, Artificial
  Probe
tagttgccgttgctaaatgatttaa

SEQ ID NO: 112214 - DNA, 25 bp, Artificial
  Probe
tctgagagaacagttgattgagaaa

SEQ ID NO: 112215 - DNA, 25 bp, Artificial
  Probe
gcttaaagtgtttgtagtcttggca

SEQ ID NO: 112216 - DNA, 25 bp, Artificial
  Probe
gttgccgttgctaaatgatttaata

SEQ ID NO: 112217 - DNA, 25 bp, Artificial
  Probe
ctgagagaacagttgattgagaaat

SEQ ID NO: 112218 - DNA, 25 bp, Artificial
  Probe
gaccagccacacatccagagttata

SEQ ID NO: 112219 - DNA, 25 bp, Artificial
  Probe
ttgccgttgctaaatgatttaataa

SEQ ID NO: 112220 - DNA, 25 bp, Artificial
  Probe
atagctcagtgttacataatgaagc

SEQ ID NO: 112221 - DNA, 25 bp, Artificial
  Probe
tactgtaatgtgtatttctttgtgg

SEQ ID NO: 112222 - DNA, 25 bp, Artificial
  Probe
tgccgttgctaaatgatttaataat

SEQ ID NO: 112223 - DNA, 25 bp, Artificial
  Probe
aagtgtttgtagtcttggcataggg

SEQ ID NO: 112224 - DNA, 25 bp, Artificial
  Probe
gctagttgccgttgctaaatgattt

SEQ ID NO: 112225 - DNA, 25 bp, Artificial
  Probe
aatagctcagtgttacataatgaag

SEQ ID NO: 112226 - DNA, 25 bp, Artificial
  Probe
agcttaaagtgtttgtagtcttggc

SEQ ID NO: 112227 - DNA, 25 bp, Artificial
  Probe
tgtaatgtgtatttctttgtgggga

SEQ ID NO: 112228 - DNA, 25 bp, Artificial
  Probe
ctgtaatgtgtatttctttgtgggg

SEQ ID NO: 112229 - DNA, 25 bp, Artificial
  Probe
agtgtttgtagtcttggcataggga

SEQ ID NO: 112230 - DNA, 25 bp, Artificial
  Probe
gagagaacagttgattgagaaattt

SEQ ID NO: 112231 - DNA, 25 bp, Artificial
  Probe
gtaatgtgtatttctttgtggggaa

SEQ ID NO: 112232 - DNA, 25 bp, Artificial
  Probe
agacatttgtagaatatggagacta

SEQ ID NO: 112233 - DNA, 25 bp, Artificial
  Probe
tagacatttgtagaatatggagact

SEQ ID NO: 112234 - DNA, 25 bp, Artificial
  Probe
cactgggactcactaattttctctg

SEQ ID NO: 112235 - DNA, 25 bp, Artificial
  Probe
tcactgggactcactaattttctct

SEQ ID NO: 112236 - DNA, 25 bp, Artificial
  Probe
tagaccagccacacatccagagtta

SEQ ID NO: 112237 - DNA, 25 bp, Artificial
  Probe
acatttgtagaatatggagactaac

SEQ ID NO: 112238 - DNA, 25 bp, Artificial
  Probe
tctctgagagaacagttgattgaga

SEQ ID NO: 112239 - DNA, 25 bp, Artificial
  Probe
actgggactcactaattttctctga

SEQ ID NO: 112240 - DNA, 25 bp, Artificial
  Probe
gtttgtagtcttggcatagggacac

SEQ ID NO: 112241 - DNA, 25 bp, Artificial
  Probe
gtgtttgtagtcttggcatagggac

SEQ ID NO: 112242 - DNA, 25 bp, Artificial
  Probe
gacatttgtagaatatggagactaa

SEQ ID NO: 112243 - DNA, 25 bp, Artificial
  Probe
catttgtagaatatggagactaact

SEQ ID NO: 112244 - DNA, 25 bp, Artificial
  Probe
gtcactgggactcactaattttctc

SEQ ID NO: 112245 - DNA, 25 bp, Artificial
  Probe
gccgttgctaaatgatttaataata

SEQ ID NO: 112246 - DNA, 25 bp, Artificial
  Probe
tgtttgtagtcttggcatagggaca

SEQ ID NO: 112247 - DNA, 25 bp, Artificial
  Probe
atagacatttgtagaatatggagac

SEQ ID NO: 112248 - DNA, 25 bp, Artificial
  Probe
ctcagaagcagatatagaacctcag

SEQ ID NO: 112249 - DNA, 25 bp, Artificial
  Probe
tcagaagcagatatagaacctcaga

SEQ ID NO: 112250 - DNA, 25 bp, Artificial
  Probe
gaagcagatatagaacctcagagtc

SEQ ID NO: 112251 - DNA, 25 bp, Artificial
  Probe
cagaagcagatatagaacctcagag

SEQ ID NO: 112252 - DNA, 25 bp, Artificial
  Probe
agaagcagatatagaacctcagagt

SEQ ID NO: 112253 - DNA, 25 bp, Artificial
  Probe
aagcagatatagaacctcagagtca

SEQ ID NO: 112254 - DNA, 25 bp, Artificial
  Probe
tcctcagaagcagatatagaacctc

SEQ ID NO: 112255 - DNA, 25 bp, Artificial
  Probe
attcctcagaagcagatatagaacc

SEQ ID NO: 112256 - DNA, 25 bp, Artificial
  Probe
cagatatagaacctcagagtcagac

SEQ ID NO: 112257 - DNA, 25 bp, Artificial
  Probe
ttcctcagaagcagatatagaacct

SEQ ID NO: 112258 - DNA, 25 bp, Artificial
  Probe
cctcagaagcagatatagaacctca

SEQ ID NO: 112259 - DNA, 25 bp, Artificial
  Probe
gcagatatagaacctcagagtcaga

SEQ ID NO: 112260 - DNA, 25 bp, Artificial
  Probe
agcagatatagaacctcagagtcag

SEQ ID NO: 112261 - DNA, 25 bp, Artificial
  Probe
agaacatcctgtatagcaacaagtt

SEQ ID NO: 112262 - DNA, 25 bp, Artificial
  Probe
gagaacatcctgtatagcaacaagt

SEQ ID NO: 112263 - DNA, 25 bp, Artificial
  Probe
cgttaattcctcagaagcagatata

SEQ ID NO: 112264 - DNA, 25 bp, Artificial
  Probe
aattcctcagaagcagatatagaac

SEQ ID NO: 112265 - DNA, 25 bp, Artificial
  Probe
agatatagaacctcagagtcagact

SEQ ID NO: 112266 - DNA, 25 bp, Artificial
  Probe
ggagaacatcctgtatagcaacaag

SEQ ID NO: 112267 - DNA, 25 bp, Artificial
  Probe
atggagaacatcctgtatagcaaca

SEQ ID NO: 112268 - DNA, 25 bp, Artificial
  Probe
acgttaattcctcagaagcagatat

SEQ ID NO: 112269 - DNA, 25 bp, Artificial
  Probe
atcaataggaagatgcaagaaccat

SEQ ID NO: 112270 - DNA, 25 bp, Artificial
  Probe
tggagaacatcctgtatagcaacaa

SEQ ID NO: 112271 - DNA, 25 bp, Artificial
  Probe
catggagaacatcctgtatagcaac

SEQ ID NO: 112272 - DNA, 25 bp, Artificial
  Probe
tcatggagaacatcctgtatagcaa

SEQ ID NO: 112273 - DNA, 25 bp, Artificial
  Probe
ctcatggagaacatcctgtatagca

SEQ ID NO: 112274 - DNA, 25 bp, Artificial
  Probe
gttaattcctcagaagcagatatag

SEQ ID NO: 112275 - DNA, 25 bp, Artificial
  Probe
aacatcctgtatagcaacaagtttg

SEQ ID NO: 112276 - DNA, 25 bp, Artificial
  Probe
gaacatcctgtatagcaacaagttt

SEQ ID NO: 112277 - DNA, 25 bp, Artificial
  Probe
taattcctcagaagcagatatagaa

SEQ ID NO: 112278 - DNA, 25 bp, Artificial
  Probe
ttaattcctcagaagcagatataga

SEQ ID NO: 112279 - DNA, 25 bp, Artificial
  Probe
taggtcatttgtcacacagatgttc

SEQ ID NO: 112280 - DNA, 25 bp, Artificial
  Probe
ctaggtcatttgtcacacagatgtt

SEQ ID NO: 112281 - DNA, 25 bp, Artificial
  Probe
acatcctgtatagcaacaagtttgt

SEQ ID NO: 112282 - DNA, 25 bp, Artificial
  Probe
tatagcaacaagtttgtagcaggag

SEQ ID NO: 112283 - DNA, 25 bp, Artificial
  Probe
ctgtatagcaacaagtttgtagcag

SEQ ID NO: 112284 - DNA, 25 bp, Artificial
  Probe
catcctgtatagcaacaagtttgta

SEQ ID NO: 112285 - DNA, 25 bp, Artificial
  Probe
gtatagcaacaagtttgtagcagga

SEQ ID NO: 112286 - DNA, 25 bp, Artificial
  Probe
tcctgtatagcaacaagtttgtagc

SEQ ID NO: 112287 - DNA, 25 bp, Artificial
  Probe
atcctgtatagcaacaagtttgtag

SEQ ID NO: 112288 - DNA, 25 bp, Artificial
  Probe
tgtatagcaacaagtttgtagcagg

SEQ ID NO: 112289 - DNA, 25 bp, Artificial
  Probe
cctgtatagcaacaagtttgtagca

SEQ ID NO: 112290 - DNA, 25 bp, Artificial
  Probe
gtcatttgtcacacagatgttctcc

SEQ ID NO: 112291 - DNA, 25 bp, Artificial
  Probe
ggtcatttgtcacacagatgttctc

SEQ ID NO: 112292 - DNA, 25 bp, Artificial
  Probe
aggtcatttgtcacacagatgttct

SEQ ID NO: 112293 - DNA, 25 bp, Artificial
  Probe
ttcctcctaagcaagaactcacatc

SEQ ID NO: 112294 - DNA, 25 bp, Artificial
  Probe
ctaacaagtaaccactgacaggact

SEQ ID NO: 112295 - DNA, 25 bp, Artificial
  Probe
taacaagtaaccactgacaggactg

SEQ ID NO: 112296 - DNA, 25 bp, Artificial
  Probe
actctcctgctgacttacaaataaa

SEQ ID NO: 112297 - DNA, 25 bp, Artificial
  Probe
ctcctaagcaagaactcacatccag

SEQ ID NO: 112298 - DNA, 25 bp, Artificial
  Probe
cactctcctgctgacttacaaataa

SEQ ID NO: 112299 - DNA, 25 bp, Artificial
  Probe
tctcctgctgacttacaaataaatg

SEQ ID NO: 112300 - DNA, 25 bp, Artificial
  Probe
ctctcctgctgacttacaaataaat

SEQ ID NO: 112301 - DNA, 25 bp, Artificial
  Probe
tactttcctcctaagcaagaactca

SEQ ID NO: 112302 - DNA, 25 bp, Artificial
  Probe
gtactttcctcctaagcaagaactc

SEQ ID NO: 112303 - DNA, 25 bp, Artificial
  Probe
ctcctgctgacttacaaataaatgt

SEQ ID NO: 112304 - DNA, 25 bp, Artificial
  Probe
ctgtactttcctcctaagcaagaac

SEQ ID NO: 112305 - DNA, 25 bp, Artificial
  Probe
tttcctcctaagcaagaactcacat

SEQ ID NO: 112306 - DNA, 25 bp, Artificial
  Probe
tcctgctgacttacaaataaatgtt

SEQ ID NO: 112307 - DNA, 25 bp, Artificial
  Probe
tgtactttcctcctaagcaagaact

SEQ ID NO: 112308 - DNA, 25 bp, Artificial
  Probe
gctaacaagtaaccactgacaggac

SEQ ID NO: 112309 - DNA, 25 bp, Artificial
  Probe
cctgctgacttacaaataaatgttc

SEQ ID NO: 112310 - DNA, 25 bp, Artificial
  Probe
tcctcctaagcaagaactcacatcc

SEQ ID NO: 112311 - DNA, 25 bp, Artificial
  Probe
ctttcctcctaagcaagaactcaca

SEQ ID NO: 112312 - DNA, 25 bp, Artificial
  Probe
actttcctcctaagcaagaactcac

SEQ ID NO: 112313 - DNA, 25 bp, Artificial
  Probe
cctgtactttcctcctaagcaagaa

SEQ ID NO: 112314 - DNA, 25 bp, Artificial
  Probe
ctgctgacttacaaataaatgttca

SEQ ID NO: 112315 - DNA, 25 bp, Artificial
  Probe
cctcctaagcaagaactcacatcca

SEQ ID NO: 112316 - DNA, 25 bp, Artificial
  Probe
tgctgacttacaaataaatgttcaa

SEQ ID NO: 112317 - DNA, 25 bp, Artificial
  Probe
agctaacaagtaaccactgacagga

SEQ ID NO: 112318 - DNA, 25 bp, Artificial
  Probe
ctgacttacaaataaatgttcaagc

SEQ ID NO: 112319 - DNA, 25 bp, Artificial
  Probe
gctgacttacaaataaatgttcaag

SEQ ID NO: 112320 - DNA, 25 bp, Artificial
  Probe
cagctaacaagtaaccactgacagg

SEQ ID NO: 112321 - DNA, 25 bp, Artificial
  Probe
ccagctaacaagtaaccactgacag

SEQ ID NO: 112322 - DNA, 25 bp, Artificial
  Probe
ccagcagagaaaggaatccaagaag

SEQ ID NO: 112323 - DNA, 25 bp, Artificial
  Probe
tcctaagcaagaactcacatccagc

SEQ ID NO: 112324 - DNA, 25 bp, Artificial
  Probe
cagagaaaggaatccaagaagccac

SEQ ID NO: 112325 - DNA, 25 bp, Artificial
  Probe
acttacaaataaatgttcaagctgt

SEQ ID NO: 112326 - DNA, 25 bp, Artificial
  Probe
ccctgtactttcctcctaagcaaga

SEQ ID NO: 112327 - DNA, 25 bp, Artificial
  Probe
tccctgtactttcctcctaagcaag

SEQ ID NO: 112328 - DNA, 25 bp, Artificial
  Probe
tgacttacaaataaatgttcaagct

SEQ ID NO: 112329 - DNA, 25 bp, Artificial
  Probe
ctggtccctgtactttcctcctaag

SEQ ID NO: 112330 - DNA, 25 bp, Artificial
  Probe
cagcagagaaaggaatccaagaagc

SEQ ID NO: 112331 - DNA, 25 bp, Artificial
  Probe
gacttacaaataaatgttcaagctg

SEQ ID NO: 112332 - DNA, 25 bp, Artificial
  Probe
gtccctgtactttcctcctaagcaa

SEQ ID NO: 112333 - DNA, 25 bp, Artificial
  Probe
aacaagtaaccactgacaggactgg

SEQ ID NO: 112334 - DNA, 25 bp, Artificial
  Probe
actggtccctgtactttcctcctaa

SEQ ID NO: 112335 - DNA, 25 bp, Artificial
  Probe
gcactctcctgctgacttacaaata

SEQ ID NO: 112336 - DNA, 25 bp, Artificial
  Probe
ggaaatcaggttcaatgctcccttc

SEQ ID NO: 112337 - DNA, 25 bp, Artificial
  Probe
agagaaaggaatccaagaagccacc

SEQ ID NO: 112338 - DNA, 25 bp, Artificial
  Probe
gatgttgccttcttgctactctatt

SEQ ID NO: 112339 - DNA, 25 bp, Artificial
  Probe
tcctatgagtatccttctgattgag

SEQ ID NO: 112340 - DNA, 25 bp, Artificial
  Probe
ttcctatgagtatccttctgattga

SEQ ID NO: 112341 - DNA, 25 bp, Artificial
  Probe
aaggaatctgtactggagtattacc

SEQ ID NO: 112342 - DNA, 25 bp, Artificial
  Probe
cttcctatgagtatccttctgattg

SEQ ID NO: 112343 - DNA, 25 bp, Artificial
  Probe
tcttcctatgagtatccttctgatt

SEQ ID NO: 112344 - DNA, 25 bp, Artificial
  Probe
ttcttcctatgagtatccttctgat

SEQ ID NO: 112345 - DNA, 25 bp, Artificial
  Probe
catacagagccttgtcaatgaacta

SEQ ID NO: 112346 - DNA, 25 bp, Artificial
  Probe
atacagagccttgtcaatgaactag

SEQ ID NO: 112347 - DNA, 25 bp, Artificial
  Probe
ctatgagtatccttctgattgaggc

SEQ ID NO: 112348 - DNA, 25 bp, Artificial
  Probe
cctatgagtatccttctgattgagg

SEQ ID NO: 112349 - DNA, 25 bp, Artificial
  Probe
atgtagataacagtgaacttgtagc

SEQ ID NO: 112350 - DNA, 25 bp, Artificial
  Probe
ggatgttgccttcttgctactctat

SEQ ID NO: 112351 - DNA, 25 bp, Artificial
  Probe
tatgagtatccttctgattgaggca

SEQ ID NO: 112352 - DNA, 25 bp, Artificial
  Probe
atgagtatccttctgattgaggcaa

SEQ ID NO: 112353 - DNA, 25 bp, Artificial
  Probe
atgttgccttcttgctactctattt

SEQ ID NO: 112354 - DNA, 25 bp, Artificial
  Probe
cttacaaggtcagcttccatcaatt

SEQ ID NO: 112355 - DNA, 25 bp, Artificial
  Probe
tgtagataacagtgaacttgtagct

SEQ ID NO: 112356 - DNA, 25 bp, Artificial
  Probe
tgttgccttcttgctactctatttc

SEQ ID NO: 112357 - DNA, 25 bp, Artificial
  Probe
tacaaggagtatgagggtatgattg

SEQ ID NO: 112358 - DNA, 25 bp, Artificial
  Probe
gtttcttcctatgagtatccttctg

SEQ ID NO: 112359 - DNA, 25 bp, Artificial
  Probe
cccaaattactgtaaaggaatctgt

SEQ ID NO: 112360 - DNA, 25 bp, Artificial
  Probe
gtaaataaccagtgttccctccatc

SEQ ID NO: 112361 - DNA, 25 bp, Artificial
  Probe
tttcttcctatgagtatccttctga

SEQ ID NO: 112362 - DNA, 25 bp, Artificial
  Probe
agtttcttcctatgagtatccttct

SEQ ID NO: 112363 - DNA, 25 bp, Artificial
  Probe
tctgtactggagtattaccctatgg

SEQ ID NO: 112364 - DNA, 25 bp, Artificial
  Probe
gtacaaggagtatgagggtatgatt

SEQ ID NO: 112365 - DNA, 25 bp, Artificial
  Probe
ctgtaaaggaatctgtactggagta

SEQ ID NO: 112366 - DNA, 25 bp, Artificial
  Probe
tactgtaaaggaatctgtactggag

SEQ ID NO: 112367 - DNA, 25 bp, Artificial
  Probe
ggaatctgtactggagtattaccct

SEQ ID NO: 112368 - DNA, 25 bp, Artificial
  Probe
aggaatctgtactggagtattaccc

SEQ ID NO: 112369 - DNA, 25 bp, Artificial
  Probe
tgtaaataaccagtgttccctccat

SEQ ID NO: 112370 - DNA, 25 bp, Artificial
  Probe
tggatgttgccttcttgctactcta

SEQ ID NO: 112371 - DNA, 25 bp, Artificial
  Probe
ttactgtaaaggaatctgtactgga

SEQ ID NO: 112372 - DNA, 25 bp, Artificial
  Probe
gttgccttcttgctactctatttcg

SEQ ID NO: 112373 - DNA, 25 bp, Artificial
  Probe
tgtaaaggaatctgtactggagtat

SEQ ID NO: 112374 - DNA, 25 bp, Artificial
  Probe
ttgaggcaaatgggagtatcttgta

SEQ ID NO: 112375 - DNA, 25 bp, Artificial
  Probe
gattgaggcaaatgggagtatcttg

SEQ ID NO: 112376 - DNA, 25 bp, Artificial
  Probe
atctgtactggagtattaccctatg

SEQ ID NO: 112377 - DNA, 25 bp, Artificial
  Probe
gaatctgtactggagtattacccta

SEQ ID NO: 112378 - DNA, 25 bp, Artificial
  Probe
atcatacagagccttgtcaatgaac

SEQ ID NO: 112379 - DNA, 25 bp, Artificial
  Probe
catcatacagagccttgtcaatgaa

SEQ ID NO: 112380 - DNA, 25 bp, Artificial
  Probe
actgtaaaggaatctgtactggagt

SEQ ID NO: 112381 - DNA, 25 bp, Artificial
  Probe
taaataaccagtgttccctccatcc

SEQ ID NO: 112382 - DNA, 25 bp, Artificial
  Probe
aaggagtatgagggtatgattgctc

SEQ ID NO: 112383 - DNA, 25 bp, Artificial
  Probe
ttattagcataggtcttgagtggaa

SEQ ID NO: 112384 - DNA, 25 bp, Artificial
  Probe
tcttgctatacactctgaacaactc

SEQ ID NO: 112385 - DNA, 25 bp, Artificial
  Probe
cacttacagcatccttcaatctcag

SEQ ID NO: 112386 - DNA, 25 bp, Artificial
  Probe
gtcttgctatacactctgaacaact

SEQ ID NO: 112387 - DNA, 25 bp, Artificial
  Probe
aatcggtcttgctatacactctgaa

SEQ ID NO: 112388 - DNA, 25 bp, Artificial
  Probe
cttgctatacactctgaacaactcc

SEQ ID NO: 112389 - DNA, 25 bp, Artificial
  Probe
ggtcttgctatacactctgaacaac

SEQ ID NO: 112390 - DNA, 25 bp, Artificial
  Probe
atcttgtatctcaatgacacgagta

SEQ ID NO: 112391 - DNA, 25 bp, Artificial
  Probe
catcttgtatctcaatgacacgagt

SEQ ID NO: 112392 - DNA, 25 bp, Artificial
  Probe
atcggtcttgctatacactctgaac

SEQ ID NO: 112393 - DNA, 25 bp, Artificial
  Probe
tcttgtatctcaatgacacgagtac

SEQ ID NO: 112394 - DNA, 25 bp, Artificial
  Probe
gtccagaatatcatctatgagaagc

SEQ ID NO: 112395 - DNA, 25 bp, Artificial
  Probe
ccacttacagcatccttcaatctca

SEQ ID NO: 112396 - DNA, 25 bp, Artificial
  Probe
tggtccagaatatcatctatgagaa

SEQ ID NO: 112397 - DNA, 25 bp, Artificial
  Probe
cttgtatctcaatgacacgagtacc

SEQ ID NO: 112398 - DNA, 25 bp, Artificial
  Probe
atggtccagaatatcatctatgaga

SEQ ID NO: 112399 - DNA, 25 bp, Artificial
  Probe
cagaagtcacctctacaataccgtc

SEQ ID NO: 112400 - DNA, 25 bp, Artificial
  Probe
ggtccagaatatcatctatgagaag

SEQ ID NO: 112401 - DNA, 25 bp, Artificial
  Probe
catggtccagaatatcatctatgag

SEQ ID NO: 112402 - DNA, 25 bp, Artificial
  Probe
attagcataggtcttgagtggaaat

SEQ ID NO: 112403 - DNA, 25 bp, Artificial
  Probe
aggagcattcacctatctgtcaatt

SEQ ID NO: 112404 - DNA, 25 bp, Artificial
  Probe
cagcagaagtcacctctacaatacc

SEQ ID NO: 112405 - DNA, 25 bp, Artificial
  Probe
ccagcagaagtcacctctacaatac

SEQ ID NO: 112406 - DNA, 25 bp, Artificial
  Probe
tattagcataggtcttgagtggaaa

SEQ ID NO: 112407 - DNA, 25 bp, Artificial
  Probe
tttattagcataggtcttgagtgga

SEQ ID NO: 112408 - DNA, 25 bp, Artificial
  Probe
ctatacactctgaacaactccgctg

SEQ ID NO: 112409 - DNA, 25 bp, Artificial
  Probe
ttgctatacactctgaacaactccg

SEQ ID NO: 112410 - DNA, 25 bp, Artificial
  Probe
cggtcttgctatacactctgaacaa

SEQ ID NO: 112411 - DNA, 25 bp, Artificial
  Probe
ttagcataggtcttgagtggaaatg

SEQ ID NO: 112412 - DNA, 25 bp, Artificial
  Probe
gaggagcattcacctatctgtcaat

SEQ ID NO: 112413 - DNA, 25 bp, Artificial
  Probe
tccagaatatcatctatgagaagct

SEQ ID NO: 112414 - DNA, 25 bp, Artificial
  Probe
ttactcaaatcggtcttgctataca

SEQ ID NO: 112415 - DNA, 25 bp, Artificial
  Probe
ggagcattcacctatctgtcaattt

SEQ ID NO: 112416 - DNA, 25 bp, Artificial
  Probe
tactcaaatcggtcttgctatacac

SEQ ID NO: 112417 - DNA, 25 bp, Artificial
  Probe
acttactcaaatcggtcttgctata

SEQ ID NO: 112418 - DNA, 25 bp, Artificial
  Probe
cttactcaaatcggtcttgctatac

SEQ ID NO: 112419 - DNA, 25 bp, Artificial
  Probe
cataggtcttgagtggaaatgtagc

SEQ ID NO: 112420 - DNA, 25 bp, Artificial
  Probe
gcataggtcttgagtggaaatgtag

SEQ ID NO: 112421 - DNA, 25 bp, Artificial
  Probe
aaatcggtcttgctatacactctga

SEQ ID NO: 112422 - DNA, 25 bp, Artificial
  Probe
tcggtcttgctatacactctgaaca

SEQ ID NO: 112423 - DNA, 25 bp, Artificial
  Probe
atttattagcataggtcttgagtgg

SEQ ID NO: 112424 - DNA, 25 bp, Artificial
  Probe
cacttactcaaatcggtcttgctat

SEQ ID NO: 112425 - DNA, 25 bp, Artificial
  Probe
agcataggtcttgagtggaaatgta

SEQ ID NO: 112426 - DNA, 25 bp, Artificial
  Probe
tagcataggtcttgagtggaaatgt

SEQ ID NO: 112427 - DNA, 25 bp, Artificial
  Probe
tcagaaacaaagaagccacttacag

SEQ ID NO: 112428 - DNA, 25 bp, Artificial
  Probe
gtctgcgtctatattgccttctata

SEQ ID NO: 112429 - DNA, 25 bp, Artificial
  Probe
agattacaactaccacagtgatacc

SEQ ID NO: 112430 - DNA, 25 bp, Artificial
  Probe
ccagattacaactaccacagtgata

SEQ ID NO: 112431 - DNA, 25 bp, Artificial
  Probe
cagattacaactaccacagtgatac

SEQ ID NO: 112432 - DNA, 25 bp, Artificial
  Probe
cgtctgcgtctatattgccttctat

SEQ ID NO: 112433 - DNA, 25 bp, Artificial
  Probe
aatcgtctgcgtctatattgccttc

SEQ ID NO: 112434 - DNA, 25 bp, Artificial
  Probe
gatttctactccaacatcaagacag

SEQ ID NO: 112435 - DNA, 25 bp, Artificial
  Probe
atttctactccaacatcaagacagt

SEQ ID NO: 112436 - DNA, 25 bp, Artificial
  Probe
tcgtctgcgtctatattgccttcta

SEQ ID NO: 112437 - DNA, 25 bp, Artificial
  Probe
tttctactccaacatcaagacagtg

SEQ ID NO: 112438 - DNA, 25 bp, Artificial
  Probe
gattacaactaccacagtgataccc

SEQ ID NO: 112439 - DNA, 25 bp, Artificial
  Probe
ttctactccaacatcaagacagtgg

SEQ ID NO: 112440 - DNA, 25 bp, Artificial
  Probe
gtaacatctccatcagccttgtacc

SEQ ID NO: 112441 - DNA, 25 bp, Artificial
  Probe
ggtaacatctccatcagccttgtac

SEQ ID NO: 112442 - DNA, 25 bp, Artificial
  Probe
atcgtctgcgtctatattgccttct

SEQ ID NO: 112443 - DNA, 25 bp, Artificial
  Probe
cttctatagcacggactatcgactg

SEQ ID NO: 112444 - DNA, 25 bp, Artificial
  Probe
tctgcgtctatattgccttctatag

SEQ ID NO: 112445 - DNA, 25 bp, Artificial
  Probe
cccagattacaactaccacagtgat

SEQ ID NO: 112446 - DNA, 25 bp, Artificial
  Probe
ctgcgtctatattgccttctatagc

SEQ ID NO: 112447 - DNA, 25 bp, Artificial
  Probe
aaatcgtctgcgtctatattgcctt

SEQ ID NO: 112448 - DNA, 25 bp, Artificial
  Probe
ctatattgccttctatagcacggac

SEQ ID NO: 112449 - DNA, 25 bp, Artificial
  Probe
tctatattgccttctatagcacgga

SEQ ID NO: 112450 - DNA, 25 bp, Artificial
  Probe
gtctatattgccttctatagcacgg

SEQ ID NO: 112451 - DNA, 25 bp, Artificial
  Probe
tattgccttctatagcacggactat

SEQ ID NO: 112452 - DNA, 25 bp, Artificial
  Probe
atattgccttctatagcacggacta

SEQ ID NO: 112453 - DNA, 25 bp, Artificial
  Probe
tatattgccttctatagcacggact

SEQ ID NO: 112454 - DNA, 25 bp, Artificial
  Probe
cgtctatattgccttctatagcacg

SEQ ID NO: 112455 - DNA, 25 bp, Artificial
  Probe
gcgtctatattgccttctatagcac

SEQ ID NO: 112456 - DNA, 25 bp, Artificial
  Probe
ccttctatagcacggactatcgact

SEQ ID NO: 112457 - DNA, 25 bp, Artificial
  Probe
cttcaaaatcgtctgcgtctatatt

SEQ ID NO: 112458 - DNA, 25 bp, Artificial
  Probe
tgatttctactccaacatcaagaca

SEQ ID NO: 112459 - DNA, 25 bp, Artificial
  Probe
gtgatttctactccaacatcaagac

SEQ ID NO: 112460 - DNA, 25 bp, Artificial
  Probe
ggtgatttctactccaacatcaaga

SEQ ID NO: 112461 - DNA, 25 bp, Artificial
  Probe
tgcgtctatattgccttctatagca

SEQ ID NO: 112462 - DNA, 25 bp, Artificial
  Probe
ccttcaaaatcgtctgcgtctatat

SEQ ID NO: 112463 - DNA, 25 bp, Artificial
  Probe
ttctatagcacggactatcgactgg

SEQ ID NO: 112464 - DNA, 25 bp, Artificial
  Probe
ttcaaaatcgtctgcgtctatattg

SEQ ID NO: 112465 - DNA, 25 bp, Artificial
  Probe
attgccttctatagcacggactatc

SEQ ID NO: 112466 - DNA, 25 bp, Artificial
  Probe
gaaggtgtgcccagattacaactac

SEQ ID NO: 112467 - DNA, 25 bp, Artificial
  Probe
agaaggtgtgcccagattacaacta

SEQ ID NO: 112468 - DNA, 25 bp, Artificial
  Probe
tcaaaatcgtctgcgtctatattgc

SEQ ID NO: 112469 - DNA, 25 bp, Artificial
  Probe
attacaactaccacagtgatacccc

SEQ ID NO: 112470 - DNA, 25 bp, Artificial
  Probe
tctactccaacatcaagacagtggc

SEQ ID NO: 112471 - DNA, 25 bp, Artificial
  Probe
gggtaacatctccatcagccttgta

SEQ ID NO: 112472 - DNA, 25 bp, Artificial
  Probe
cccttcaaaatcgtctgcgtctata

SEQ ID NO: 112473 - DNA, 25 bp, Artificial
  Probe
cagactataacttccagagtgagca

SEQ ID NO: 112474 - DNA, 25 bp, Artificial
  Probe
agactataacttccagagtgagcac

SEQ ID NO: 112475 - DNA, 25 bp, Artificial
  Probe
ccagactataacttccagagtgagc

SEQ ID NO: 112476 - DNA, 25 bp, Artificial
  Probe
aattgccacgtagaatatgagaaga

SEQ ID NO: 112477 - DNA, 25 bp, Artificial
  Probe
attgccacgtagaatatgagaagac

SEQ ID NO: 112478 - DNA, 25 bp, Artificial
  Probe
gactataacttccagagtgagcacc

SEQ ID NO: 112479 - DNA, 25 bp, Artificial
  Probe
taattgccacgtagaatatgagaag

SEQ ID NO: 112480 - DNA, 25 bp, Artificial
  Probe
ttaattgccacgtagaatatgagaa

SEQ ID NO: 112481 - DNA, 25 bp, Artificial
  Probe
caagcccttcaaagtcatctgtatc

SEQ ID NO: 112482 - DNA, 25 bp, Artificial
  Probe
tgccacgtagaatatgagaagacaa

SEQ ID NO: 112483 - DNA, 25 bp, Artificial
  Probe
ttgccacgtagaatatgagaagaca

SEQ ID NO: 112484 - DNA, 25 bp, Artificial
  Probe
cgtagaatatgagaagacaaaccgc

SEQ ID NO: 112485 - DNA, 25 bp, Artificial
  Probe
cccagactataacttccagagtgag

SEQ ID NO: 112486 - DNA, 25 bp, Artificial
  Probe
ccaagcccttcaaagtcatctgtat

SEQ ID NO: 112487 - DNA, 25 bp, Artificial
  Probe
cacgtagaatatgagaagacaaacc

SEQ ID NO: 112488 - DNA, 25 bp, Artificial
  Probe
ccacgtagaatatgagaagacaaac

SEQ ID NO: 112489 - DNA, 25 bp, Artificial
  Probe
acgtagaatatgagaagacaaaccg

SEQ ID NO: 112490 - DNA, 25 bp, Artificial
  Probe
gccacgtagaatatgagaagacaaa

SEQ ID NO: 112491 - DNA, 25 bp, Artificial
  Probe
tttaattgccacgtagaatatgaga

SEQ ID NO: 112492 - DNA, 25 bp, Artificial
  Probe
agaaggtgtgcccagactataactt

SEQ ID NO: 112493 - DNA, 25 bp, Artificial
  Probe
tgtgcccagactataacttccagag

SEQ ID NO: 112494 - DNA, 25 bp, Artificial
  Probe
catttccttgtggtactgagtgtcc

SEQ ID NO: 112495 - DNA, 25 bp, Artificial
  Probe
cttgtggtactgagtgtccctaaga

SEQ ID NO: 112496 - DNA, 25 bp, Artificial
  Probe
gcccagactataacttccagagtga

SEQ ID NO: 112497 - DNA, 25 bp, Artificial
  Probe
gtgtgcccagactataacttccaga

SEQ ID NO: 112498 - DNA, 25 bp, Artificial
  Probe
cagaaggtgtgcccagactataact

SEQ ID NO: 112499 - DNA, 25 bp, Artificial
  Probe
tgcccagactataacttccagagtg

SEQ ID NO: 112500 - DNA, 25 bp, Artificial
  Probe
gtgcccagactataacttccagagt

SEQ ID NO: 112501 - DNA, 25 bp, Artificial
  Probe
actataacttccagagtgagcaccc

SEQ ID NO: 112502 - DNA, 25 bp, Artificial
  Probe
ctccatttccttgtggtactgagtg

SEQ ID NO: 112503 - DNA, 25 bp, Artificial
  Probe
aaggtgtgcccagactataacttcc

SEQ ID NO: 112504 - DNA, 25 bp, Artificial
  Probe
ttgtggtactgagtgtccctaagac

SEQ ID NO: 112505 - DNA, 25 bp, Artificial
  Probe
ccatttccttgtggtactgagtgtc

SEQ ID NO: 112506 - DNA, 25 bp, Artificial
  Probe
cgcttttaattgccacgtagaatat

SEQ ID NO: 112507 - DNA, 25 bp, Artificial
  Probe
ccttgtggtactgagtgtccctaag

SEQ ID NO: 112508 - DNA, 25 bp, Artificial
  Probe
gcttttaattgccacgtagaatatg

SEQ ID NO: 112509 - DNA, 25 bp, Artificial
  Probe
atttccttgtggtactgagtgtccc

SEQ ID NO: 112510 - DNA, 25 bp, Artificial
  Probe
tccatttccttgtggtactgagtgt

SEQ ID NO: 112511 - DNA, 25 bp, Artificial
  Probe
ctatgggtgaggtggagaacaacag

SEQ ID NO: 112512 - DNA, 25 bp, Artificial
  Probe
ggtgtgcccagactataacttccag

SEQ ID NO: 112513 - DNA, 25 bp, Artificial
  Probe
tccttgtggtactgagtgtccctaa

SEQ ID NO: 112514 - DNA, 25 bp, Artificial
  Probe
ttccttgtggtactgagtgtcccta

SEQ ID NO: 112515 - DNA, 25 bp, Artificial
  Probe
gtagaatatgagaagacaaaccgcg

SEQ ID NO: 112516 - DNA, 25 bp, Artificial
  Probe
gaaggtgtgcccagactataacttc

SEQ ID NO: 112517 - DNA, 25 bp, Artificial
  Probe
tgtggtactgagtgtccctaagact

SEQ ID NO: 112518 - DNA, 25 bp, Artificial
  Probe
caatagagcgaagactttagtgact

SEQ ID NO: 112519 - DNA, 25 bp, Artificial
  Probe
tttccaatagagcgaagactttagt

SEQ ID NO: 112520 - DNA, 25 bp, Artificial
  Probe
ttccaatagagcgaagactttagtg

SEQ ID NO: 112521 - DNA, 25 bp, Artificial
  Probe
ccaatagagcgaagactttagtgac

SEQ ID NO: 112522 - DNA, 25 bp, Artificial
  Probe
tccaatagagcgaagactttagtga

SEQ ID NO: 112523 - DNA, 25 bp, Artificial
  Probe
atttctaggtatatggaagggcaag

SEQ ID NO: 112524 - DNA, 25 bp, Artificial
  Probe
gaatttctaggtatatggaagggca

SEQ ID NO: 112525 - DNA, 25 bp, Artificial
  Probe
ggaatttctaggtatatggaagggc

SEQ ID NO: 112526 - DNA, 25 bp, Artificial
  Probe
aatttctaggtatatggaagggcaa

SEQ ID NO: 112527 - DNA, 25 bp, Artificial
  Probe
aatagagcgaagactttagtgactc

SEQ ID NO: 112528 - DNA, 25 bp, Artificial
  Probe
tttctaggtatatggaagggcaagt

SEQ ID NO: 112529 - DNA, 25 bp, Artificial
  Probe
gagatcaatggcttcagacagtctt

SEQ ID NO: 112530 - DNA, 25 bp, Artificial
  Probe
aggaatttctaggtatatggaaggg

SEQ ID NO: 112531 - DNA, 25 bp, Artificial
  Probe
acgaaggaatttctaggtatatgga

SEQ ID NO: 112532 - DNA, 25 bp, Artificial
  Probe
ttctaggtatatggaagggcaagtc

SEQ ID NO: 112533 - DNA, 25 bp, Artificial
  Probe
tgatgagagttaatattctggacaa

SEQ ID NO: 112534 - DNA, 25 bp, Artificial
  Probe
ttgatgagagttaatattctggaca

SEQ ID NO: 112535 - DNA, 25 bp, Artificial
  Probe
cctccatcttcagaagcaaatagaa

SEQ ID NO: 112536 - DNA, 25 bp, Artificial
  Probe
gagcatgagtaaggaatggtggtac

SEQ ID NO: 112537 - DNA, 25 bp, Artificial
  Probe
gtcctccatcttcagaagcaaatag

SEQ ID NO: 112538 - DNA, 25 bp, Artificial
  Probe
agatcaatggcttcagacagtcttg

SEQ ID NO: 112539 - DNA, 25 bp, Artificial
  Probe
tgagagttaatattctggacaatcc

SEQ ID NO: 112540 - DNA, 25 bp, Artificial
  Probe
gatggcctatgtctgtatactgatg

SEQ ID NO: 112541 - DNA, 25 bp, Artificial
  Probe
tcctccatcttcagaagcaaataga

SEQ ID NO: 112542 - DNA, 25 bp, Artificial
  Probe
tgatggcctatgtctgtatactgat

SEQ ID NO: 112543 - DNA, 25 bp, Artificial
  Probe
agtcctccatcttcagaagcaaata

SEQ ID NO: 112544 - DNA, 25 bp, Artificial
  Probe
ttgatggcctatgtctgtatactga

SEQ ID NO: 112545 - DNA, 25 bp, Artificial
  Probe
ctttactacgaaggaatttctaggt

SEQ ID NO: 112546 - DNA, 25 bp, Artificial
  Probe
gagagttaatattctggacaatcct

SEQ ID NO: 112547 - DNA, 25 bp, Artificial
  Probe
acagttgtgacttcttcctaaacac

SEQ ID NO: 112548 - DNA, 25 bp, Artificial
  Probe
cttgatgagagttaatattctggac

SEQ ID NO: 112549 - DNA, 25 bp, Artificial
  Probe
tgagcatgagtaaggaatggtggta

SEQ ID NO: 112550 - DNA, 25 bp, Artificial
  Probe
cgaaggaatttctaggtatatggaa

SEQ ID NO: 112551 - DNA, 25 bp, Artificial
  Probe
tcttgatgagagttaatattctgga

SEQ ID NO: 112552 - DNA, 25 bp, Artificial
  Probe
atggcctatgtctgtatactgatgg

SEQ ID NO: 112553 - DNA, 25 bp, Artificial
  Probe
aagtcctccatcttcagaagcaaat

SEQ ID NO: 112554 - DNA, 25 bp, Artificial
  Probe
gaagactttagtgactcgaagaacc

SEQ ID NO: 112555 - DNA, 25 bp, Artificial
  Probe
agagttaatattctggacaatcctt

SEQ ID NO: 112556 - DNA, 25 bp, Artificial
  Probe
tgacttcttcctaaacacagccttg

SEQ ID NO: 112557 - DNA, 25 bp, Artificial
  Probe
aaggaatttctaggtatatggaagg

SEQ ID NO: 112558 - DNA, 25 bp, Artificial
  Probe
tacgaaggaatttctaggtatatgg

SEQ ID NO: 112559 - DNA, 25 bp, Artificial
  Probe
cagacttcaggaatgggacaacttt

SEQ ID NO: 112560 - DNA, 25 bp, Artificial
  Probe
cctatgtctgtatactgatgggaga

SEQ ID NO: 112561 - DNA, 25 bp, Artificial
  Probe
gaaatgttggctgagcatgagtaag

SEQ ID NO: 112562 - DNA, 25 bp, Artificial
  Probe
cacagttgtgacttcttcctaaaca

SEQ ID NO: 112563 - DNA, 25 bp, Artificial
  Probe
ttagataatccagagtatcacagcg

SEQ ID NO: 112564 - DNA, 25 bp, Artificial
  Probe
atatctgaatcctgtggaagagaac

SEQ ID NO: 112565 - DNA, 25 bp, Artificial
  Probe
acaagaatatctgaatcctgtggaa

SEQ ID NO: 112566 - DNA, 25 bp, Artificial
  Probe
aacaagaatatctgaatcctgtgga

SEQ ID NO: 112567 - DNA, 25 bp, Artificial
  Probe
gaatatctgaatcctgtggaagaga

SEQ ID NO: 112568 - DNA, 25 bp, Artificial
  Probe
agaatatctgaatcctgtggaagag

SEQ ID NO: 112569 - DNA, 25 bp, Artificial
  Probe
aatatctgaatcctgtggaagagaa

SEQ ID NO: 112570 - DNA, 25 bp, Artificial
  Probe
aagaatatctgaatcctgtggaaga

SEQ ID NO: 112571 - DNA, 25 bp, Artificial
  Probe
caagaatatctgaatcctgtggaag

SEQ ID NO: 112572 - DNA, 25 bp, Artificial
  Probe
ctattgtggcagagaatcctgagta

SEQ ID NO: 112573 - DNA, 25 bp, Artificial
  Probe
cagaactggatgaagaaggctacat

SEQ ID NO: 112574 - DNA, 25 bp, Artificial
  Probe
tatctgaatcctgtggaagagaacc

SEQ ID NO: 112575 - DNA, 25 bp, Artificial
  Probe
tattgtggcagagaatcctgagtac

SEQ ID NO: 112576 - DNA, 25 bp, Artificial
  Probe
gaactggatgaagaaggctacatga

SEQ ID NO: 112577 - DNA, 25 bp, Artificial
  Probe
agaactggatgaagaaggctacatg

SEQ ID NO: 112578 - DNA, 25 bp, Artificial
  Probe
aactggatgaagaaggctacatgac

SEQ ID NO: 112579 - DNA, 25 bp, Artificial
  Probe
cctttatctcaacaccttcaccaac

SEQ ID NO: 112580 - DNA, 25 bp, Artificial
  Probe
ctggatgaagaaggctacatgactc

SEQ ID NO: 112581 - DNA, 25 bp, Artificial
  Probe
ctttatctcaacaccttcaccaacg

SEQ ID NO: 112582 - DNA, 25 bp, Artificial
  Probe
aaacaagaatatctgaatcctgtgg

SEQ ID NO: 112583 - DNA, 25 bp, Artificial
  Probe
gaaagccaagaaagcatttgacaac

SEQ ID NO: 112584 - DNA, 25 bp, Artificial
  Probe
agaaagccaagaaagcatttgacaa

SEQ ID NO: 112585 - DNA, 25 bp, Artificial
  Probe
agagaaagccaagaaagcatttgac

SEQ ID NO: 112586 - DNA, 25 bp, Artificial
  Probe
cagagaaagccaagaaagcatttga

SEQ ID NO: 112587 - DNA, 25 bp, Artificial
  Probe
actggatgaagaaggctacatgact

SEQ ID NO: 112588 - DNA, 25 bp, Artificial
  Probe
ccctttatctcaacaccttcaccaa

SEQ ID NO: 112589 - DNA, 25 bp, Artificial
  Probe
ctttctctggcagtcttccttctac

SEQ ID NO: 112590 - DNA, 25 bp, Artificial
  Probe
gagaaagccaagaaagcatttgaca

SEQ ID NO: 112591 - DNA, 25 bp, Artificial
  Probe
tttagataatccagagtatcacagc

SEQ ID NO: 112592 - DNA, 25 bp, Artificial
  Probe
gctttagataatccagagtatcaca

SEQ ID NO: 112593 - DNA, 25 bp, Artificial
  Probe
tctttctctggcagtcttccttcta

SEQ ID NO: 112594 - DNA, 25 bp, Artificial
  Probe
cttgggaaatgcagagtacatgaaa

SEQ ID NO: 112595 - DNA, 25 bp, Artificial
  Probe
ccagagaaagccaagaaagcatttg

SEQ ID NO: 112596 - DNA, 25 bp, Artificial
  Probe
cctattgtggcagagaatcctgagt

SEQ ID NO: 112597 - DNA, 25 bp, Artificial
  Probe
aaagccaagaaagcatttgacaacc

SEQ ID NO: 112598 - DNA, 25 bp, Artificial
  Probe
gacaagccaaaacaagaatatctga

SEQ ID NO: 112599 - DNA, 25 bp, Artificial
  Probe
tgacaagccaaaacaagaatatctg

SEQ ID NO: 112600 - DNA, 25 bp, Artificial
  Probe
gccaaaacaagaatatctgaatcct

SEQ ID NO: 112601 - DNA, 25 bp, Artificial
  Probe
agccaaaacaagaatatctgaatcc

SEQ ID NO: 112602 - DNA, 25 bp, Artificial
  Probe
acaagccaaaacaagaatatctgaa

SEQ ID NO: 112603 - DNA, 25 bp, Artificial
  Probe
atgacaagccaaaacaagaatatct

SEQ ID NO: 112604 - DNA, 25 bp, Artificial
  Probe
tttatctcaacaccttcaccaacgc

SEQ ID NO: 112605 - DNA, 25 bp, Artificial
  Probe
agctttagataatccagagtatcac

SEQ ID NO: 112606 - DNA, 25 bp, Artificial
  Probe
attgtggcagagaatcctgagtacc

SEQ ID NO: 112607 - DNA, 25 bp, Artificial
  Probe
atgaagaaggctacatgactcccat

SEQ ID NO: 112608 - DNA, 25 bp, Artificial
  Probe
tatcacaatacctggcttcttaacc

SEQ ID NO: 112609 - DNA, 25 bp, Artificial
  Probe
gctatcacaatacctggcttcttaa

SEQ ID NO: 112610 - DNA, 25 bp, Artificial
  Probe
ctatcacaatacctggcttcttaac

SEQ ID NO: 112611 - DNA, 25 bp, Artificial
  Probe
atcacaatacctggcttcttaacca

SEQ ID NO: 112612 - DNA, 25 bp, Artificial
  Probe
agctatcacaatacctggcttctta

SEQ ID NO: 112613 - DNA, 25 bp, Artificial
  Probe
gagctatcacaatacctggcttctt

SEQ ID NO: 112614 - DNA, 25 bp, Artificial
  Probe
cgcagctagtagcaacatttatatt

SEQ ID NO: 112615 - DNA, 25 bp, Artificial
  Probe
ccgcagctagtagcaacatttatat

SEQ ID NO: 112616 - DNA, 25 bp, Artificial
  Probe
gtggccctagacaaattaaatgtta

SEQ ID NO: 112617 - DNA, 25 bp, Artificial
  Probe
ctctgggtttgcattccaatcattt

SEQ ID NO: 112618 - DNA, 25 bp, Artificial
  Probe
tggccctagacaaattaaatgttat

SEQ ID NO: 112619 - DNA, 25 bp, Artificial
  Probe
cgtggccctagacaaattaaatgtt

SEQ ID NO: 112620 - DNA, 25 bp, Artificial
  Probe
ggagctatcacaatacctggcttct

SEQ ID NO: 112621 - DNA, 25 bp, Artificial
  Probe
gatattatcacctggcatcctgcac

SEQ ID NO: 112622 - DNA, 25 bp, Artificial
  Probe
tgtaactcacaggcgatgtcatcac

SEQ ID NO: 112623 - DNA, 25 bp, Artificial
  Probe
atacctggcttcttaaccagataag

SEQ ID NO: 112624 - DNA, 25 bp, Artificial
  Probe
caatacctggcttcttaaccagata

SEQ ID NO: 112625 - DNA, 25 bp, Artificial
  Probe
aatacctggcttcttaaccagataa

SEQ ID NO: 112626 - DNA, 25 bp, Artificial
  Probe
tacctggcttcttaaccagataaga

SEQ ID NO: 112627 - DNA, 25 bp, Artificial
  Probe
gcagctagtagcaacatttatatta

SEQ ID NO: 112628 - DNA, 25 bp, Artificial
  Probe
actctgggtttgcattccaatcatt

SEQ ID NO: 112629 - DNA, 25 bp, Artificial
  Probe
gggtcccgctttgatgtcctatatc

SEQ ID NO: 112630 - DNA, 25 bp, Artificial
  Probe
ttaaatgttatattctggcctaggg

SEQ ID NO: 112631 - DNA, 25 bp, Artificial
  Probe
ctgtaactcacaggtgatgtcatca

SEQ ID NO: 112632 - DNA, 25 bp, Artificial
  Probe
gccgcagctagtagcaacatttata

SEQ ID NO: 112633 - DNA, 25 bp, Artificial
  Probe
acaatacctggcttcttaaccagat

SEQ ID NO: 112634 - DNA, 25 bp, Artificial
  Probe
ggccctagacaaattaaatgttata

SEQ ID NO: 112635 - DNA, 25 bp, Artificial
  Probe
gacaaattaaatgttatattctggc

SEQ ID NO: 112636 - DNA, 25 bp, Artificial
  Probe
ccgtggccctagacaaattaaatgt

SEQ ID NO: 112637 - DNA, 25 bp, Artificial
  Probe
ggtcccgctttgatgtcctatatca

SEQ ID NO: 112638 - DNA, 25 bp, Artificial
  Probe
ctgggtttgcattccaatcattttg

SEQ ID NO: 112639 - DNA, 25 bp, Artificial
  Probe
gccctagacaaattaaatgttatat

SEQ ID NO: 112640 - DNA, 25 bp, Artificial
  Probe
tctgggtttgcattccaatcatttt

SEQ ID NO: 112641 - DNA, 25 bp, Artificial
  Probe
cacaatacctggcttcttaaccaga

SEQ ID NO: 112642 - DNA, 25 bp, Artificial
  Probe
tcacaatacctggcttcttaaccag

SEQ ID NO: 112643 - DNA, 25 bp, Artificial
  Probe
cccgtggccctagacaaattaaatg

SEQ ID NO: 112644 - DNA, 25 bp, Artificial
  Probe
tcccgtggccctagacaaattaaat

SEQ ID NO: 112645 - DNA, 25 bp, Artificial
  Probe
atcccgtggccctagacaaattaaa

SEQ ID NO: 112646 - DNA, 25 bp, Artificial
  Probe
aatcccgtggccctagacaaattaa

SEQ ID NO: 112647 - DNA, 25 bp, Artificial
  Probe
atgtcatcacctgggcattacacac

SEQ ID NO: 112648 - DNA, 25 bp, Artificial
  Probe
gatgtcatcacctgggcattacaca

SEQ ID NO: 112649 - DNA, 25 bp, Artificial
  Probe
atattatcacctggcatcctgcacc

SEQ ID NO: 112650 - DNA, 25 bp, Artificial
  Probe
caaattaaatgttatattctggcct

SEQ ID NO: 112651 - DNA, 25 bp, Artificial
  Probe
agggtcccgctttgatgtcctatat

SEQ ID NO: 112652 - DNA, 25 bp, Artificial
  Probe
acaaattaaatgttatattctggcc

SEQ ID NO: 112653 - DNA, 25 bp, Artificial
  Probe
ttctgctattctcaccacacatctg

SEQ ID NO: 112654 - DNA, 25 bp, Artificial
  Probe
gttctgctattctcaccacacatct

SEQ ID NO: 112655 - DNA, 25 bp, Artificial
  Probe
agttctgctattctcaccacacatc

SEQ ID NO: 112656 - DNA, 25 bp, Artificial
  Probe
gagttctgctattctcaccacacat

SEQ ID NO: 112657 - DNA, 25 bp, Artificial
  Probe
tctgctattctcaccacacatctga

SEQ ID NO: 112658 - DNA, 25 bp, Artificial
  Probe
tgtggagttgtattgttcccataaa

SEQ ID NO: 112659 - DNA, 25 bp, Artificial
  Probe
gtggagttgtattgttcccataaat

SEQ ID NO: 112660 - DNA, 25 bp, Artificial
  Probe
ctgtggagttgtattgttcccataa

SEQ ID NO: 112661 - DNA, 25 bp, Artificial
  Probe
tggagttgtattgttcccataaatt

SEQ ID NO: 112662 - DNA, 25 bp, Artificial
  Probe
cctgtggagttgtattgttcccata

SEQ ID NO: 112663 - DNA, 25 bp, Artificial
  Probe
ggagttctgctattctcaccacaca

SEQ ID NO: 112664 - DNA, 25 bp, Artificial
  Probe
tcaccacacatctgagataaacagc

SEQ ID NO: 112665 - DNA, 25 bp, Artificial
  Probe
ggagttgtattgttcccataaatta

SEQ ID NO: 112666 - DNA, 25 bp, Artificial
  Probe
caccacacatctgagataaacagct

SEQ ID NO: 112667 - DNA, 25 bp, Artificial
  Probe
ctgctattctcaccacacatctgag

SEQ ID NO: 112668 - DNA, 25 bp, Artificial
  Probe
agttgtattgttcccataaattaac

SEQ ID NO: 112669 - DNA, 25 bp, Artificial
  Probe
ctcaccacacatctgagataaacag

SEQ ID NO: 112670 - DNA, 25 bp, Artificial
  Probe
gagttgtattgttcccataaattaa

SEQ ID NO: 112671 - DNA, 25 bp, Artificial
  Probe
gggagttctgctattctcaccacac

SEQ ID NO: 112672 - DNA, 25 bp, Artificial
  Probe
ccctgtggagttgtattgttcccat

SEQ ID NO: 112673 - DNA, 25 bp, Artificial
  Probe
gtccctgtggagttgtattgttccc

SEQ ID NO: 112674 - DNA, 25 bp, Artificial
  Probe
ggtccctgtggagttgtattgttcc

SEQ ID NO: 112675 - DNA, 25 bp, Artificial
  Probe
gttgtattgttcccataaattaaca

SEQ ID NO: 112676 - DNA, 25 bp, Artificial
  Probe
tgcaggactctggttcagtagagag

SEQ ID NO: 112677 - DNA, 25 bp, Artificial
  Probe
atctttgatgttcacggccaaggaa

SEQ ID NO: 112678 - DNA, 25 bp, Artificial
  Probe
tttgatgttcacggccaaggaaaag

SEQ ID NO: 112679 - DNA, 25 bp, Artificial
  Probe
ctttgatgttcacggccaaggaaaa

SEQ ID NO: 112680 - DNA, 25 bp, Artificial
  Probe
gtacatagacttcctctaccaggtc

SEQ ID NO: 112681 - DNA, 25 bp, Artificial
  Probe
attgtatttccctctaagtgccttt

SEQ ID NO: 112682 - DNA, 25 bp, Artificial
  Probe
gattgtatttccctctaagtgcctt

SEQ ID NO: 112683 - DNA, 25 bp, Artificial
  Probe
cgacgagatggacaataagatgacc

SEQ ID NO: 112684 - DNA, 25 bp, Artificial
  Probe
aagcgacgagatggacaataagatg

SEQ ID NO: 112685 - DNA, 25 bp, Artificial
  Probe
aggttcacatccttctcagagatac

SEQ ID NO: 112686 - DNA, 25 bp, Artificial
  Probe
caggttcacatccttctcagagata

SEQ ID NO: 112687 - DNA, 25 bp, Artificial
  Probe
tacatagacttcctctaccaggtcc

SEQ ID NO: 112688 - DNA, 25 bp, Artificial
  Probe
acgagatggacaataagatgaccag

SEQ ID NO: 112689 - DNA, 25 bp, Artificial
  Probe
gacgagatggacaataagatgacca

SEQ ID NO: 112690 - DNA, 25 bp, Artificial
  Probe
gtccttatctgctcaccattggatt

SEQ ID NO: 112691 - DNA, 25 bp, Artificial
  Probe
gcgacgagatggacaataagatgac

SEQ ID NO: 112692 - DNA, 25 bp, Artificial
  Probe
agcgacgagatggacaataagatga

SEQ ID NO: 112693 - DNA, 25 bp, Artificial
  Probe
ggttcacatccttctcagagatacc

SEQ ID NO: 112694 - DNA, 25 bp, Artificial
  Probe
aaagcgacgagatggacaataagat

SEQ ID NO: 112695 - DNA, 25 bp, Artificial
  Probe
ttggattgtatttccctctaagtgc

SEQ ID NO: 112696 - DNA, 25 bp, Artificial
  Probe
gagatggacaataagatgaccagct

SEQ ID NO: 112697 - DNA, 25 bp, Artificial
  Probe
attggattgtatttccctctaagtg

SEQ ID NO: 112698 - DNA, 25 bp, Artificial
  Probe
gttcacatccttctcagagataccc

SEQ ID NO: 112699 - DNA, 25 bp, Artificial
  Probe
caggtacatagacttcctctaccag

SEQ ID NO: 112700 - DNA, 25 bp, Artificial
  Probe
cgagatggacaataagatgaccagc

SEQ ID NO: 112701 - DNA, 25 bp, Artificial
  Probe
caaagcgacgagatggacaataaga

SEQ ID NO: 112702 - DNA, 25 bp, Artificial
  Probe
tccttatctgctcaccattggattt

SEQ ID NO: 112703 - DNA, 25 bp, Artificial
  Probe
acatagacttcctctaccaggtcct

SEQ ID NO: 112704 - DNA, 25 bp, Artificial
  Probe
ggattgtatttccctctaagtgcct

SEQ ID NO: 112705 - DNA, 25 bp, Artificial
  Probe
tggattgtatttccctctaagtgcc

SEQ ID NO: 112706 - DNA, 25 bp, Artificial
  Probe
aggtacatagacttcctctaccagg

SEQ ID NO: 112707 - DNA, 25 bp, Artificial
  Probe
ccaggttcacatccttctcagagat

SEQ ID NO: 112708 - DNA, 25 bp, Artificial
  Probe
ttgtatttccctctaagtgcctttt

SEQ ID NO: 112709 - DNA, 25 bp, Artificial
  Probe
catagacttcctctaccaggtcctg

SEQ ID NO: 112710 - DNA, 25 bp, Artificial
  Probe
ggtacatagacttcctctaccaggt

SEQ ID NO: 112711 - DNA, 25 bp, Artificial
  Probe
tcagtgacttctgcgtccttatctg

SEQ ID NO: 112712 - DNA, 25 bp, Artificial
  Probe
cttatctgctcaccattggattttc

SEQ ID NO: 112713 - DNA, 25 bp, Artificial
  Probe
ccaggtacatagacttcctctacca

SEQ ID NO: 112714 - DNA, 25 bp, Artificial
  Probe
ggaaagttctagattcaggaatgca

SEQ ID NO: 112715 - DNA, 25 bp, Artificial
  Probe
tggaaagttctagattcaggaatgc

SEQ ID NO: 112716 - DNA, 25 bp, Artificial
  Probe
cgccaggtacatagacttcctctac

SEQ ID NO: 112717 - DNA, 25 bp, Artificial
  Probe
ccttatctgctcaccattggatttt

SEQ ID NO: 112718 - DNA, 25 bp, Artificial
  Probe
tattggattgtatttccctctaagt

SEQ ID NO: 112719 - DNA, 25 bp, Artificial
  Probe
ttcacatccttctcagagatacccg

SEQ ID NO: 112720 - DNA, 25 bp, Artificial
  Probe
ttctggaaagttctagattcaggaa

SEQ ID NO: 112721 - DNA, 25 bp, Artificial
  Probe
tttctggaaagttctagattcagga

SEQ ID NO: 112722 - DNA, 25 bp, Artificial
  Probe
ctggaaagttctagattcaggaatg

SEQ ID NO: 112723 - DNA, 25 bp, Artificial
  Probe
tctggaaagttctagattcaggaat

SEQ ID NO: 112724 - DNA, 25 bp, Artificial
  Probe
gtcagtgacttctgcgtccttatct

SEQ ID NO: 112725 - DNA, 25 bp, Artificial
  Probe
tgtattcgtgttcattgtgattaac

SEQ ID NO: 112726 - DNA, 25 bp, Artificial
  Probe
gtattcgtgttcattgtgattaact

SEQ ID NO: 112727 - DNA, 25 bp, Artificial
  Probe
ttgtattcgtgttcattgtgattaa

SEQ ID NO: 112728 - DNA, 25 bp, Artificial
  Probe
tttgtttgtattcgtgttcattgtg

SEQ ID NO: 112729 - DNA, 25 bp, Artificial
  Probe
tattcgtgttcattgtgattaactt

SEQ ID NO: 112730 - DNA, 25 bp, Artificial
  Probe
ttgtttgtattcgtgttcattgtga

SEQ ID NO: 112731 - DNA, 25 bp, Artificial
  Probe
atttgtttgtattcgtgttcattgt

SEQ ID NO: 112732 - DNA, 25 bp, Artificial
  Probe
tgtttgtattcgtgttcattgtgat

SEQ ID NO: 112733 - DNA, 25 bp, Artificial
  Probe
tcgtgttcattgtgattaactttca

SEQ ID NO: 112734 - DNA, 25 bp, Artificial
  Probe
catttgtttgtattcgtgttcattg

SEQ ID NO: 112735 - DNA, 25 bp, Artificial
  Probe
cgtgttcattgtgattaactttcaa

SEQ ID NO: 112736 - DNA, 25 bp, Artificial
  Probe
gtttgtattcgtgttcattgtgatt

SEQ ID NO: 112737 - DNA, 25 bp, Artificial
  Probe
ttcgtgttcattgtgattaactttc

SEQ ID NO: 112738 - DNA, 25 bp, Artificial
  Probe
acatttgtttgtattcgtgttcatt

SEQ ID NO: 112739 - DNA, 25 bp, Artificial
  Probe
attcgtgttcattgtgattaacttt

SEQ ID NO: 112740 - DNA, 25 bp, Artificial
  Probe
tttgtattcgtgttcattgtgatta

SEQ ID NO: 112741 - DNA, 25 bp, Artificial
  Probe
tttaacaatcaggagtttgctcagc

SEQ ID NO: 112742 - DNA, 25 bp, Artificial
  Probe
ttagaggaatttccagcacagatac

SEQ ID NO: 112743 - DNA, 25 bp, Artificial
  Probe
tttagaggaatttccagcacagata

SEQ ID NO: 112744 - DNA, 25 bp, Artificial
  Probe
cttagtgacagcagcatctttgttc

SEQ ID NO: 112745 - DNA, 25 bp, Artificial
  Probe
tagaggaatttccagcacagatact

SEQ ID NO: 112746 - DNA, 25 bp, Artificial
  Probe
cccatttcttctgtttcatagtgca

SEQ ID NO: 112747 - DNA, 25 bp, Artificial
  Probe
tcttagtgacagcagcatctttgtt

SEQ ID NO: 112748 - DNA, 25 bp, Artificial
  Probe
gcagcatctttgttcagagtaggaa

SEQ ID NO: 112749 - DNA, 25 bp, Artificial
  Probe
ccatttcttctgtttcatagtgcag

SEQ ID NO: 112750 - DNA, 25 bp, Artificial
  Probe
gtgttcattgtgattaactttcaaa

SEQ ID NO: 112751 - DNA, 25 bp, Artificial
  Probe
accccatttcttctgtttcatagtg

SEQ ID NO: 112752 - DNA, 25 bp, Artificial
  Probe
ttagtgacagcagcatctttgttca

SEQ ID NO: 112753 - DNA, 25 bp, Artificial
  Probe
gaaccccatttcttctgtttcatag

SEQ ID NO: 112754 - DNA, 25 bp, Artificial
  Probe
aaccccatttcttctgtttcatagt

SEQ ID NO: 112755 - DNA, 25 bp, Artificial
  Probe
acagcagcatctttgttcagagtag

SEQ ID NO: 112756 - DNA, 25 bp, Artificial
  Probe
gacagcagcatctttgttcagagta

SEQ ID NO: 112757 - DNA, 25 bp, Artificial
  Probe
ttacatttgtttgtattcgtgttca

SEQ ID NO: 112758 - DNA, 25 bp, Artificial
  Probe
gaggtgtatgccgagtgtcttagtg

SEQ ID NO: 112759 - DNA, 25 bp, Artificial
  Probe
tagtgacagcagcatctttgttcag

SEQ ID NO: 112760 - DNA, 25 bp, Artificial
  Probe
tacatttgtttgtattcgtgttcat

SEQ ID NO: 112761 - DNA, 25 bp, Artificial
  Probe
ttttaacaatcaggagtttgctcag

SEQ ID NO: 112762 - DNA, 25 bp, Artificial
  Probe
agaggaatttccagcacagatactg

SEQ ID NO: 112763 - DNA, 25 bp, Artificial
  Probe
cagcagcatctttgttcagagtagg

SEQ ID NO: 112764 - DNA, 25 bp, Artificial
  Probe
gtcttagtgacagcagcatctttgt

SEQ ID NO: 112765 - DNA, 25 bp, Artificial
  Probe
taacaatcaggagtttgctcagctt

SEQ ID NO: 112766 - DNA, 25 bp, Artificial
  Probe
ttaacaatcaggagtttgctcagct

SEQ ID NO: 112767 - DNA, 25 bp, Artificial
  Probe
agcagcatctttgttcagagtagga

SEQ ID NO: 112768 - DNA, 25 bp, Artificial
  Probe
taccaccgacaggatgtaaccagta

SEQ ID NO: 112769 - DNA, 25 bp, Artificial
  Probe
ccccatttcttctgtttcatagtgc

SEQ ID NO: 112770 - DNA, 25 bp, Artificial
  Probe
ttccttctgcttcaagtaacacatc

SEQ ID NO: 112771 - DNA, 25 bp, Artificial
  Probe
cttccttctgcttcaagtaacacat

SEQ ID NO: 112772 - DNA, 25 bp, Artificial
  Probe
aaccttccttctgcttcaagtaaca

SEQ ID NO: 112773 - DNA, 25 bp, Artificial
  Probe
tccttctgcttcaagtaacacatcc

SEQ ID NO: 112774 - DNA, 25 bp, Artificial
  Probe
ccttccttctgcttcaagtaacaca

SEQ ID NO: 112775 - DNA, 25 bp, Artificial
  Probe
accttccttctgcttcaagtaacac

SEQ ID NO: 112776 - DNA, 25 bp, Artificial
  Probe
gaaaccttccttctgcttcaagtaa

SEQ ID NO: 112777 - DNA, 25 bp, Artificial
  Probe
aaaccttccttctgcttcaagtaac

SEQ ID NO: 112778 - DNA, 25 bp, Artificial
  Probe
cttctgcttcaagtaacacatccca

SEQ ID NO: 112779 - DNA, 25 bp, Artificial
  Probe
agagagaagatgtggcaggatctag

SEQ ID NO: 112780 - DNA, 25 bp, Artificial
  Probe
cagagagaagatgtggcaggatcta

SEQ ID NO: 112781 - DNA, 25 bp, Artificial
  Probe
ttctgcttcaagtaacacatcccag

SEQ ID NO: 112782 - DNA, 25 bp, Artificial
  Probe
ccttctgcttcaagtaacacatccc

SEQ ID NO: 112783 - DNA, 25 bp, Artificial
  Probe
ctatctgccagagaatggagtcctg

SEQ ID NO: 112784 - DNA, 25 bp, Artificial
  Probe
tctgcttcaagtaacacatcccagt

SEQ ID NO: 112785 - DNA, 25 bp, Artificial
  Probe
gagagaagatgtggcaggatctagc

SEQ ID NO: 112786 - DNA, 25 bp, Artificial
  Probe
ctgcttcaagtaacacatcccagtg

SEQ ID NO: 112787 - DNA, 25 bp, Artificial
  Probe
gagaagatgtggcaggatctagctc

SEQ ID NO: 112788 - DNA, 25 bp, Artificial
  Probe
agagaagatgtggcaggatctagct

SEQ ID NO: 112789 - DNA, 25 bp, Artificial
  Probe
cttcaagtaacacatcccagtgcct

SEQ ID NO: 112790 - DNA, 25 bp, Artificial
  Probe
ggaaaccttccttctgcttcaagta

SEQ ID NO: 112791 - DNA, 25 bp, Artificial
  Probe
agaagatgtggcaggatctagctca

SEQ ID NO: 112792 - DNA, 25 bp, Artificial
  Probe
ttcaagtaacacatcccagtgcctg

SEQ ID NO: 112793 - DNA, 25 bp, Artificial
  Probe
gtggaaaccttccttctgcttcaag

SEQ ID NO: 112794 - DNA, 25 bp, Artificial
  Probe
tggaaaccttccttctgcttcaagt

SEQ ID NO: 112795 - DNA, 25 bp, Artificial
  Probe
tgtggaaaccttccttctgcttcaa

SEQ ID NO: 112796 - DNA, 25 bp, Artificial
  Probe
atggtcctggtgaatactatctact

SEQ ID NO: 112797 - DNA, 25 bp, Artificial
  Probe
tggtcctggtgaatactatctactt

SEQ ID NO: 112798 - DNA, 25 bp, Artificial
  Probe
cacaacagaatacttagcaatcctt

SEQ ID NO: 112799 - DNA, 25 bp, Artificial
  Probe
aatggtcctggtgaatactatctac

SEQ ID NO: 112800 - DNA, 25 bp, Artificial
  Probe
acatcatacttccttactcaatgct

SEQ ID NO: 112801 - DNA, 25 bp, Artificial
  Probe
ggtcctggtgaatactatctacttc

SEQ ID NO: 112802 - DNA, 25 bp, Artificial
  Probe
gcacaacagaatacttagcaatcct

SEQ ID NO: 112803 - DNA, 25 bp, Artificial
  Probe
acaacagaatacttagcaatccttg

SEQ ID NO: 112804 - DNA, 25 bp, Artificial
  Probe
actcagatcctagaacttccgtata

SEQ ID NO: 112805 - DNA, 25 bp, Artificial
  Probe
agatcctagaacttccgtatattgg

SEQ ID NO: 112806 - DNA, 25 bp, Artificial
  Probe
gactcagatcctagaacttccgtat

SEQ ID NO: 112807 - DNA, 25 bp, Artificial
  Probe
tacatcatacttccttactcaatgc

SEQ ID NO: 112808 - DNA, 25 bp, Artificial
  Probe
caacagaatacttagcaatccttgt

SEQ ID NO: 112809 - DNA, 25 bp, Artificial
  Probe
catcatacttccttactcaatgcta

SEQ ID NO: 112810 - DNA, 25 bp, Artificial
  Probe
ctcagatcctagaacttccgtatat

SEQ ID NO: 112811 - DNA, 25 bp, Artificial
  Probe
cagatcctagaacttccgtatattg

SEQ ID NO: 112812 - DNA, 25 bp, Artificial
  Probe
agagacactggatgaagatgatgtt

SEQ ID NO: 112813 - DNA, 25 bp, Artificial
  Probe
aagagacactggatgaagatgatgt

SEQ ID NO: 112814 - DNA, 25 bp, Artificial
  Probe
tcagatcctagaacttccgtatatt

SEQ ID NO: 112815 - DNA, 25 bp, Artificial
  Probe
agactcagatcctagaacttccgta

SEQ ID NO: 112816 - DNA, 25 bp, Artificial
  Probe
tatgttcctgttgcttcctgatgag

SEQ ID NO: 112817 - DNA, 25 bp, Artificial
  Probe
tcatacttccttactcaatgctatt

SEQ ID NO: 112818 - DNA, 25 bp, Artificial
  Probe
tgcttacagtataactccgttaatg

SEQ ID NO: 112819 - DNA, 25 bp, Artificial
  Probe
gtatgttcctgttgcttcctgatga

SEQ ID NO: 112820 - DNA, 25 bp, Artificial
  Probe
agtatgttcctgttgcttcctgatg

SEQ ID NO: 112821 - DNA, 25 bp, Artificial
  Probe
gatcctagaacttccgtatattgga

SEQ ID NO: 112822 - DNA, 25 bp, Artificial
  Probe
gctgaacattggatacataaaggac

SEQ ID NO: 112823 - DNA, 25 bp, Artificial
  Probe
atttgttgttctctgttaggtatgc

SEQ ID NO: 112824 - DNA, 25 bp, Artificial
  Probe
tgctatttgttgttctctgttaggt

SEQ ID NO: 112825 - DNA, 25 bp, Artificial
  Probe
atactatctacttcaaaggacggtg

SEQ ID NO: 112826 - DNA, 25 bp, Artificial
  Probe
atcatacttccttactcaatgctat

SEQ ID NO: 112827 - DNA, 25 bp, Artificial
  Probe
gcttacagtataactccgttaatga

SEQ ID NO: 112828 - DNA, 25 bp, Artificial
  Probe
ctgcttacagtataactccgttaat

SEQ ID NO: 112829 - DNA, 25 bp, Artificial
  Probe
aaagagacactggatgaagatgatg

SEQ ID NO: 112830 - DNA, 25 bp, Artificial
  Probe
caaagagacactggatgaagatgat

SEQ ID NO: 112831 - DNA, 25 bp, Artificial
  Probe
ctgaacattggatacataaaggacc

SEQ ID NO: 112832 - DNA, 25 bp, Artificial
  Probe
atgctatttgttgttctctgttagg

SEQ ID NO: 112833 - DNA, 25 bp, Artificial
  Probe
gttcatccttattactgctttgtca

SEQ ID NO: 112834 - DNA, 25 bp, Artificial
  Probe
agagacttaatgggctttatccttt

SEQ ID NO: 112835 - DNA, 25 bp, Artificial
  Probe
agacttaatgggctttatcctttcc

SEQ ID NO: 112836 - DNA, 25 bp, Artificial
  Probe
actacagaagcagataatcagataa

SEQ ID NO: 112837 - DNA, 25 bp, Artificial
  Probe
aatactacagaagcagataatcaga

SEQ ID NO: 112838 - DNA, 25 bp, Artificial
  Probe
gagacttaatgggctttatcctttc

SEQ ID NO: 112839 - DNA, 25 bp, Artificial
  Probe
actatttgttggtagattctcctca

SEQ ID NO: 112840 - DNA, 25 bp, Artificial
  Probe
gatgctggaaagggaaataaacttc

SEQ ID NO: 112841 - DNA, 25 bp, Artificial
  Probe
aagactaagacagattccagcatag

SEQ ID NO: 112842 - DNA, 25 bp, Artificial
  Probe
gactaagacagattccagcatagag

SEQ ID NO: 112843 - DNA, 25 bp, Artificial
  Probe
actaagacagattccagcatagaga

SEQ ID NO: 112844 - DNA, 25 bp, Artificial
  Probe
agactaagacagattccagcataga

SEQ ID NO: 112845 - DNA, 25 bp, Artificial
  Probe
ctaagacagattccagcatagagat

SEQ ID NO: 112846 - DNA, 25 bp, Artificial
  Probe
gaagactaagacagattccagcata

SEQ ID NO: 112847 - DNA, 25 bp, Artificial
  Probe
taagacagattccagcatagagatg

SEQ ID NO: 112848 - DNA, 25 bp, Artificial
  Probe
tgaagactaagacagattccagcat

SEQ ID NO: 112849 - DNA, 25 bp, Artificial
  Probe
gtgtgaagactaagacagattccag

SEQ ID NO: 112850 - DNA, 25 bp, Artificial
  Probe
gtgaagactaagacagattccagca

SEQ ID NO: 112851 - DNA, 25 bp, Artificial
  Probe
ggtgtgaagactaagacagattcca

SEQ ID NO: 112852 - DNA, 25 bp, Artificial
  Probe
gagttagatttgagttgttccacct

SEQ ID NO: 112853 - DNA, 25 bp, Artificial
  Probe
tatttcatagacacgcctttccaaa

SEQ ID NO: 112854 - DNA, 25 bp, Artificial
  Probe
tgtgaagactaagacagattccagc

SEQ ID NO: 112855 - DNA, 25 bp, Artificial
  Probe
gaagacgacctactgtataaatgcc

SEQ ID NO: 112856 - DNA, 25 bp, Artificial
  Probe
gctttaatttgggtgtgaagactaa

SEQ ID NO: 112857 - DNA, 25 bp, Artificial
  Probe
ttaatttgggtgtgaagactaagac

SEQ ID NO: 112858 - DNA, 25 bp, Artificial
  Probe
tgctttaatttgggtgtgaagacta

SEQ ID NO: 112859 - DNA, 25 bp, Artificial
  Probe
gtatttcatagacacgcctttccaa

SEQ ID NO: 112860 - DNA, 25 bp, Artificial
  Probe
cgaagacgacctactgtataaatgc

SEQ ID NO: 112861 - DNA, 25 bp, Artificial
  Probe
ctcttgctttaatttgggtgtgaag

SEQ ID NO: 112862 - DNA, 25 bp, Artificial
  Probe
cttgctttaatttgggtgtgaagac

SEQ ID NO: 112863 - DNA, 25 bp, Artificial
  Probe
ttgctttaatttgggtgtgaagact

SEQ ID NO: 112864 - DNA, 25 bp, Artificial
  Probe
agttagatttgagttgttccacctc

SEQ ID NO: 112865 - DNA, 25 bp, Artificial
  Probe
taatttgggtgtgaagactaagaca

SEQ ID NO: 112866 - DNA, 25 bp, Artificial
  Probe
tttaatttgggtgtgaagactaaga

SEQ ID NO: 112867 - DNA, 25 bp, Artificial
  Probe
ccaggaattaagcccaacatcattt

SEQ ID NO: 112868 - DNA, 25 bp, Artificial
  Probe
atttcatagacacgcctttccaaac

SEQ ID NO: 112869 - DNA, 25 bp, Artificial
  Probe
aatttgggtgtgaagactaagacag

SEQ ID NO: 112870 - DNA, 25 bp, Artificial
  Probe
aagacgacctactgtataaatgccc

SEQ ID NO: 112871 - DNA, 25 bp, Artificial
  Probe
atgtatttcatagacacgcctttcc

SEQ ID NO: 112872 - DNA, 25 bp, Artificial
  Probe
ctttaatttgggtgtgaagactaag

SEQ ID NO: 112873 - DNA, 25 bp, Artificial
  Probe
gttagatttgagttgttccacctcc

SEQ ID NO: 112874 - DNA, 25 bp, Artificial
  Probe
tatgtatttcatagacacgcctttc

SEQ ID NO: 112875 - DNA, 25 bp, Artificial
  Probe
tagatttgagttgttccacctccaa

SEQ ID NO: 112876 - DNA, 25 bp, Artificial
  Probe
ttagatttgagttgttccacctcca

SEQ ID NO: 112877 - DNA, 25 bp, Artificial
  Probe
ttgggtgtgaagactaagacagatt

SEQ ID NO: 112878 - DNA, 25 bp, Artificial
  Probe
tttgggtgtgaagactaagacagat

SEQ ID NO: 112879 - DNA, 25 bp, Artificial
  Probe
atttgggtgtgaagactaagacaga

SEQ ID NO: 112880 - DNA, 25 bp, Artificial
  Probe
gctcttgctttaatttgggtgtgaa

SEQ ID NO: 112881 - DNA, 25 bp, Artificial
  Probe
tccaggaattaagcccaacatcatt

SEQ ID NO: 112882 - DNA, 25 bp, Artificial
  Probe
tgggtgtgaagactaagacagattc

SEQ ID NO: 112883 - DNA, 25 bp, Artificial
  Probe
taagccttcatagctcataagatga

SEQ ID NO: 112884 - DNA, 25 bp, Artificial
  Probe
gaaagccatcatttatcactgcaaa

SEQ ID NO: 112885 - DNA, 25 bp, Artificial
  Probe
ggagttagatttgagttgttccacc

SEQ ID NO: 112886 - DNA, 25 bp, Artificial
  Probe
cagagtatttcgcctaaaccaagaa

SEQ ID NO: 112887 - DNA, 25 bp, Artificial
  Probe
acagagtatttcgcctaaaccaaga

SEQ ID NO: 112888 - DNA, 25 bp, Artificial
  Probe
cacagagtatttcgcctaaaccaag

SEQ ID NO: 112889 - DNA, 25 bp, Artificial
  Probe
agagtatttcgcctaaaccaagaaa

SEQ ID NO: 112890 - DNA, 25 bp, Artificial
  Probe
gcacagagtatttcgcctaaaccaa

SEQ ID NO: 112891 - DNA, 25 bp, Artificial
  Probe
gttgcacagagtatttcgcctaaac

SEQ ID NO: 112892 - DNA, 25 bp, Artificial
  Probe
gtctctcaacggtgttcggtttaag

SEQ ID NO: 112893 - DNA, 25 bp, Artificial
  Probe
aaaacattgcctccaaaatagccaa

SEQ ID NO: 112894 - DNA, 25 bp, Artificial
  Probe
gagtatttcgcctaaaccaagaaaa

SEQ ID NO: 112895 - DNA, 25 bp, Artificial
  Probe
ttgcacagagtatttcgcctaaacc

SEQ ID NO: 112896 - DNA, 25 bp, Artificial
  Probe
ggttgcacagagtatttcgcctaaa

SEQ ID NO: 112897 - DNA, 25 bp, Artificial
  Probe
tgtctctcaacggtgttcggtttaa

SEQ ID NO: 112898 - DNA, 25 bp, Artificial
  Probe
agtatttcgcctaaaccaagaaaat

SEQ ID NO: 112899 - DNA, 25 bp, Artificial
  Probe
gtatttcgcctaaaccaagaaaatt

SEQ ID NO: 112900 - DNA, 25 bp, Artificial
  Probe
ctgtctctcaacggtgttcggttta

SEQ ID NO: 112901 - DNA, 25 bp, Artificial
  Probe
aaacattgcctccaaaatagccaat

SEQ ID NO: 112902 - DNA, 25 bp, Artificial
  Probe
aacggtgttcggtttaagcggatat

SEQ ID NO: 112903 - DNA, 25 bp, Artificial
  Probe
tgcacagagtatttcgcctaaacca

SEQ ID NO: 112904 - DNA, 25 bp, Artificial
  Probe
aatagccaatgagctgaagctttaa

SEQ ID NO: 112905 - DNA, 25 bp, Artificial
  Probe
aaatagccaatgagctgaagcttta

SEQ ID NO: 112906 - DNA, 25 bp, Artificial
  Probe
atagccaatgagctgaagctttaac

SEQ ID NO: 112907 - DNA, 25 bp, Artificial
  Probe
tatttcgcctaaaccaagaaaattt

SEQ ID NO: 112908 - DNA, 25 bp, Artificial
  Probe
ctccaaaatagccaatgagctgaag

SEQ ID NO: 112909 - DNA, 25 bp, Artificial
  Probe
tagccaatgagctgaagctttaaca

SEQ ID NO: 112910 - DNA, 25 bp, Artificial
  Probe
gtactgcggttgcacagagtatttc

SEQ ID NO: 112911 - DNA, 25 bp, Artificial
  Probe
cctccaaaatagccaatgagctgaa

SEQ ID NO: 112912 - DNA, 25 bp, Artificial
  Probe
attgcctccaaaatagccaatgagc

SEQ ID NO: 112913 - DNA, 25 bp, Artificial
  Probe
ccaaaatagccaatgagctgaagct

SEQ ID NO: 112914 - DNA, 25 bp, Artificial
  Probe
tccaaaatagccaatgagctgaagc

SEQ ID NO: 112915 - DNA, 25 bp, Artificial
  Probe
aatgagctgaagctttaacaggctg

SEQ ID NO: 112916 - DNA, 25 bp, Artificial
  Probe
caatgagctgaagctttaacaggct

SEQ ID NO: 112917 - DNA, 25 bp, Artificial
  Probe
agccaatgagctgaagctttaacag

SEQ ID NO: 112918 - DNA, 25 bp, Artificial
  Probe
atttcgcctaaaccaagaaaatttt

SEQ ID NO: 112919 - DNA, 25 bp, Artificial
  Probe
aaaatagccaatgagctgaagcttt

SEQ ID NO: 112920 - DNA, 25 bp, Artificial
  Probe
caaaatagccaatgagctgaagctt

SEQ ID NO: 112921 - DNA, 25 bp, Artificial
  Probe
ccaatgagctgaagctttaacaggc

SEQ ID NO: 112922 - DNA, 25 bp, Artificial
  Probe
gccaatgagctgaagctttaacagg

SEQ ID NO: 112923 - DNA, 25 bp, Artificial
  Probe
atgagctgaagctttaacaggctgt

SEQ ID NO: 112924 - DNA, 25 bp, Artificial
  Probe
cagaagtctctcccttcccctctac

SEQ ID NO: 112925 - DNA, 25 bp, Artificial
  Probe
tgaagctttaacaggctgtcaggag

SEQ ID NO: 112926 - DNA, 25 bp, Artificial
  Probe
ttgcctccaaaatagccaatgagct

SEQ ID NO: 112927 - DNA, 25 bp, Artificial
  Probe
ctgaagctttaacaggctgtcagga

SEQ ID NO: 112928 - DNA, 25 bp, Artificial
  Probe
ctaatccagtgttgcgtcttacctc

SEQ ID NO: 112929 - DNA, 25 bp, Artificial
  Probe
ttctccagagtgacctaatccagtg

SEQ ID NO: 112930 - DNA, 25 bp, Artificial
  Probe
ctggtgttctcagacttcttgtgaa

SEQ ID NO: 112931 - DNA, 25 bp, Artificial
  Probe
gtagcactaaatagttgggagactc

SEQ ID NO: 112932 - DNA, 25 bp, Artificial
  Probe
ctccagagtgacctaatccagtgtt

SEQ ID NO: 112933 - DNA, 25 bp, Artificial
  Probe
ctttctccagagtgacctaatccag

SEQ ID NO: 112934 - DNA, 25 bp, Artificial
  Probe
taatccagtgttgcgtcttacctca

SEQ ID NO: 112935 - DNA, 25 bp, Artificial
  Probe
tccagagtgacctaatccagtgttg

SEQ ID NO: 112936 - DNA, 25 bp, Artificial
  Probe
ctgtctgaaatggaaggtagtggag

SEQ ID NO: 112937 - DNA, 25 bp, Artificial
  Probe
cgtagcactaaatagttgggagact

SEQ ID NO: 112938 - DNA, 25 bp, Artificial
  Probe
gatttaaccaggattcgcacagttc

SEQ ID NO: 112939 - DNA, 25 bp, Artificial
  Probe
tttctccagagtgacctaatccagt

SEQ ID NO: 112940 - DNA, 25 bp, Artificial
  Probe
gacctaatccagtgttgcgtcttac

SEQ ID NO: 112941 - DNA, 25 bp, Artificial
  Probe
ttacctcactggctcttgttccata

SEQ ID NO: 112942 - DNA, 25 bp, Artificial
  Probe
tctccagagtgacctaatccagtgt

SEQ ID NO: 112943 - DNA, 25 bp, Artificial
  Probe
tgatttaaccaggattcgcacagtt

SEQ ID NO: 112944 - DNA, 25 bp, Artificial
  Probe
tgacctaatccagtgttgcgtctta

SEQ ID NO: 112945 - DNA, 25 bp, Artificial
  Probe
agaggagagccgtagcactaaatag

SEQ ID NO: 112946 - DNA, 25 bp, Artificial
  Probe
ccgtagcactaaatagttgggagac

SEQ ID NO: 112947 - DNA, 25 bp, Artificial
  Probe
cctaatccagtgttgcgtcttacct

SEQ ID NO: 112948 - DNA, 25 bp, Artificial
  Probe
cagaggagagccgtagcactaaata

SEQ ID NO: 112949 - DNA, 25 bp, Artificial
  Probe
tagcactaaatagttgggagactcc

SEQ ID NO: 112950 - DNA, 25 bp, Artificial
  Probe
gagagccgtagcactaaatagttgg

SEQ ID NO: 112951 - DNA, 25 bp, Artificial
  Probe
ggagagccgtagcactaaatagttg

SEQ ID NO: 112952 - DNA, 25 bp, Artificial
  Probe
aggagagccgtagcactaaatagtt

SEQ ID NO: 112953 - DNA, 25 bp, Artificial
  Probe
acctaatccagtgttgcgtcttacc

SEQ ID NO: 112954 - DNA, 25 bp, Artificial
  Probe
tggtgttctcagacttcttgtgaag

SEQ ID NO: 112955 - DNA, 25 bp, Artificial
  Probe
cctggtgttctcagacttcttgtga

SEQ ID NO: 112956 - DNA, 25 bp, Artificial
  Probe
gatctcctcttaaccctcctcagtg

SEQ ID NO: 112957 - DNA, 25 bp, Artificial
  Probe
tgtctgaaatggaaggtagtggagg

SEQ ID NO: 112958 - DNA, 25 bp, Artificial
  Probe
cttctggctttcattagtcaggtcc

SEQ ID NO: 112959 - DNA, 25 bp, Artificial
  Probe
gtcttacctcactggctcttgttcc

SEQ ID NO: 112960 - DNA, 25 bp, Artificial
  Probe
gctttctccagagtgacctaatcca

SEQ ID NO: 112961 - DNA, 25 bp, Artificial
  Probe
ccttctggctttcattagtcaggtc

SEQ ID NO: 112962 - DNA, 25 bp, Artificial
  Probe
gaggagagccgtagcactaaatagt

SEQ ID NO: 112963 - DNA, 25 bp, Artificial
  Probe
ctgatttaaccaggattcgcacagt

SEQ ID NO: 112964 - DNA, 25 bp, Artificial
  Probe
cattgcaggctgatctcctcttaac

SEQ ID NO: 112965 - DNA, 25 bp, Artificial
  Probe
gagctgtctgaaatggaaggtagtg

SEQ ID NO: 112966 - DNA, 25 bp, Artificial
  Probe
atctcctcttaaccctcctcagtgt

SEQ ID NO: 112967 - DNA, 25 bp, Artificial
  Probe
ggtgttctcagacttcttgtgaagg

SEQ ID NO: 112968 - DNA, 25 bp, Artificial
  Probe
agagctgtctgaaatggaaggtagt

SEQ ID NO: 112969 - DNA, 25 bp, Artificial
  Probe
cttacctcactggctcttgttccat

SEQ ID NO: 112970 - DNA, 25 bp, Artificial
  Probe
cgtcttacctcactggctcttgttc

SEQ ID NO: 112971 - DNA, 25 bp, Artificial
  Probe
ccagagtgacctaatccagtgttgc

SEQ ID NO: 112972 - DNA, 25 bp, Artificial
  Probe
tgatctcctcttaaccctcctcagt

SEQ ID NO: 112973 - DNA, 25 bp, Artificial
  Probe
tctatgacatggataatgatggctt

SEQ ID NO: 112974 - DNA, 25 bp, Artificial
  Probe
ctatgacatggataatgatggcttc

SEQ ID NO: 112975 - DNA, 25 bp, Artificial
  Probe
atctatgacatggataatgatggct

SEQ ID NO: 112976 - DNA, 25 bp, Artificial
  Probe
tatgacatggataatgatggcttca

SEQ ID NO: 112977 - DNA, 25 bp, Artificial
  Probe
gccttcagaatctatgacatggata

SEQ ID NO: 112978 - DNA, 25 bp, Artificial
  Probe
aatctatgacatggataatgatggc

SEQ ID NO: 112979 - DNA, 25 bp, Artificial
  Probe
tgtagatcacggtcaagaagactaa

SEQ ID NO: 112980 - DNA, 25 bp, Artificial
  Probe
ttgtagatcacggtcaagaagacta

SEQ ID NO: 112981 - DNA, 25 bp, Artificial
  Probe
gaagacaacaattctcatggagtat

SEQ ID NO: 112982 - DNA, 25 bp, Artificial
  Probe
acaacaattctcatggagtattagg

SEQ ID NO: 112983 - DNA, 25 bp, Artificial
  Probe
aagacaacaattctcatggagtatt

SEQ ID NO: 112984 - DNA, 25 bp, Artificial
  Probe
gttcgccttcagaatctatgacatg

SEQ ID NO: 112985 - DNA, 25 bp, Artificial
  Probe
acaattctcatggagtattaggaac

SEQ ID NO: 112986 - DNA, 25 bp, Artificial
  Probe
caacaattctcatggagtattagga

SEQ ID NO: 112987 - DNA, 25 bp, Artificial
  Probe
atatcctttgaagagttccgtgatg

SEQ ID NO: 112988 - DNA, 25 bp, Artificial
  Probe
caattctcatggagtattaggaact

SEQ ID NO: 112989 - DNA, 25 bp, Artificial
  Probe
ccttcagaatctatgacatggataa

SEQ ID NO: 112990 - DNA, 25 bp, Artificial
  Probe
ggttcgccttcagaatctatgacat

SEQ ID NO: 112991 - DNA, 25 bp, Artificial
  Probe
caagaaattggtcgtgtttgtagat

SEQ ID NO: 112992 - DNA, 25 bp, Artificial
  Probe
aagaaattggtcgtgtttgtagatc

SEQ ID NO: 112993 - DNA, 25 bp, Artificial
  Probe
agaaattggtcgtgtttgtagatca

SEQ ID NO: 112994 - DNA, 25 bp, Artificial
  Probe
aacaattctcatggagtattaggaa

SEQ ID NO: 112995 - DNA, 25 bp, Artificial
  Probe
agacaacaattctcatggagtatta

SEQ ID NO: 112996 - DNA, 25 bp, Artificial
  Probe
cgccttcagaatctatgacatggat

SEQ ID NO: 112997 - DNA, 25 bp, Artificial
  Probe
agaagacaacaattctcatggagta

SEQ ID NO: 112998 - DNA, 25 bp, Artificial
  Probe
tatcctttgaagagttccgtgatgt

SEQ ID NO: 112999 - DNA, 25 bp, Artificial
  Probe
gacaacaattctcatggagtattag

SEQ ID NO: 113000 - DNA, 25 bp, Artificial
  Probe
gaatctatgacatggataatgatgg

SEQ ID NO: 113001 - DNA, 25 bp, Artificial
  Probe
ttcgccttcagaatctatgacatgg

SEQ ID NO: 113002 - DNA, 25 bp, Artificial
  Probe
atgacatggataatgatggcttcat

SEQ ID NO: 113003 - DNA, 25 bp, Artificial
  Probe
tcagaatctatgacatggataatga

SEQ ID NO: 113004 - DNA, 25 bp, Artificial
  Probe
gtagatcacggtcaagaagactaaa

SEQ ID NO: 113005 - DNA, 25 bp, Artificial
  Probe
gaaattggtcgtgtttgtagatcac

SEQ ID NO: 113006 - DNA, 25 bp, Artificial
  Probe
acatggataatgatggcttcatctc

SEQ ID NO: 113007 - DNA, 25 bp, Artificial
  Probe
gacatggataatgatggcttcatct

SEQ ID NO: 113008 - DNA, 25 bp, Artificial
  Probe
tgtttgtagatcacggtcaagaaga

SEQ ID NO: 113009 - DNA, 25 bp, Artificial
  Probe
tgacatggataatgatggcttcatc

SEQ ID NO: 113010 - DNA, 25 bp, Artificial
  Probe
tcgccttcagaatctatgacatgga

SEQ ID NO: 113011 - DNA, 25 bp, Artificial
  Probe
ggataatgatggcttcatctccaac

SEQ ID NO: 113012 - DNA, 25 bp, Artificial
  Probe
catggataatgatggcttcatctcc

SEQ ID NO: 113013 - DNA, 25 bp, Artificial
  Probe
gtttgtagatcacggtcaagaagac

SEQ ID NO: 113014 - DNA, 25 bp, Artificial
  Probe
attaggaactcctttcgtttacctg

SEQ ID NO: 113015 - DNA, 25 bp, Artificial
  Probe
tttgtagatcacggtcaagaagact

SEQ ID NO: 113016 - DNA, 25 bp, Artificial
  Probe
tattaggaactcctttcgtttacct

SEQ ID NO: 113017 - DNA, 25 bp, Artificial
  Probe
gtattaggaactcctttcgtttacc

SEQ ID NO: 113018 - DNA, 25 bp, Artificial
  Probe
atattgctctactgatgtgtgttct

SEQ ID NO: 113019 - DNA, 25 bp, Artificial
  Probe
ggtatattgctctactgatgtgtgt

SEQ ID NO: 113020 - DNA, 25 bp, Artificial
  Probe
tggtatattgctctactgatgtgtg

SEQ ID NO: 113021 - DNA, 25 bp, Artificial
  Probe
tattgctctactgatgtgtgttctg

SEQ ID NO: 113022 - DNA, 25 bp, Artificial
  Probe
atggtatattgctctactgatgtgt

SEQ ID NO: 113023 - DNA, 25 bp, Artificial
  Probe
gtatattgctctactgatgtgtgtt

SEQ ID NO: 113024 - DNA, 25 bp, Artificial
  Probe
tatattgctctactgatgtgtgttc

SEQ ID NO: 113025 - DNA, 25 bp, Artificial
  Probe
catggtatattgctctactgatgtg

SEQ ID NO: 113026 - DNA, 25 bp, Artificial
  Probe
ctttctcttggataggatggattgt

SEQ ID NO: 113027 - DNA, 25 bp, Artificial
  Probe
ttctcttggataggatggattgttt

SEQ ID NO: 113028 - DNA, 25 bp, Artificial
  Probe
tttctcttggataggatggattgtt

SEQ ID NO: 113029 - DNA, 25 bp, Artificial
  Probe
gctttctcttggataggatggattg

SEQ ID NO: 113030 - DNA, 25 bp, Artificial
  Probe
attgctctactgatgtgtgttctgc

SEQ ID NO: 113031 - DNA, 25 bp, Artificial
  Probe
tttgtgccaattacagtttctcttt

SEQ ID NO: 113032 - DNA, 25 bp, Artificial
  Probe
cattgaccctttcctttaccctttg

SEQ ID NO: 113033 - DNA, 25 bp, Artificial
  Probe
attgaccctttcctttaccctttga

SEQ ID NO: 113034 - DNA, 25 bp, Artificial
  Probe
ttgaccctttcctttaccctttgaa

SEQ ID NO: 113035 - DNA, 25 bp, Artificial
  Probe
aatagctttctcttggataggatgg

SEQ ID NO: 113036 - DNA, 25 bp, Artificial
  Probe
gcatggtatattgctctactgatgt

SEQ ID NO: 113037 - DNA, 25 bp, Artificial
  Probe
tagctttctcttggataggatggat

SEQ ID NO: 113038 - DNA, 25 bp, Artificial
  Probe
atagctttctcttggataggatgga

SEQ ID NO: 113039 - DNA, 25 bp, Artificial
  Probe
attacactttccgcacactcagatt

SEQ ID NO: 113040 - DNA, 25 bp, Artificial
  Probe
agctttctcttggataggatggatt

SEQ ID NO: 113041 - DNA, 25 bp, Artificial
  Probe
aaatagctttctcttggataggatg

SEQ ID NO: 113042 - DNA, 25 bp, Artificial
  Probe
cattacactttccgcacactcagat

SEQ ID NO: 113043 - DNA, 25 bp, Artificial
  Probe
tggataggatggattgttttgtttg

SEQ ID NO: 113044 - DNA, 25 bp, Artificial
  Probe
tcttggataggatggattgttttgt

SEQ ID NO: 113045 - DNA, 25 bp, Artificial
  Probe
ctcttggataggatggattgttttg

SEQ ID NO: 113046 - DNA, 25 bp, Artificial
  Probe
ggataggatggattgttttgtttgg

SEQ ID NO: 113047 - DNA, 25 bp, Artificial
  Probe
tctcttggataggatggattgtttt

SEQ ID NO: 113048 - DNA, 25 bp, Artificial
  Probe
cttggataggatggattgttttgtt

SEQ ID NO: 113049 - DNA, 25 bp, Artificial
  Probe
gcattgaccctttcctttacccttt

SEQ ID NO: 113050 - DNA, 25 bp, Artificial
  Probe
gataggatggattgttttgtttggc

SEQ ID NO: 113051 - DNA, 25 bp, Artificial
  Probe
ttggataggatggattgttttgttt

SEQ ID NO: 113052 - DNA, 25 bp, Artificial
  Probe
ataggatggattgttttgtttggct

SEQ ID NO: 113053 - DNA, 25 bp, Artificial
  Probe
ttacactttccgcacactcagattg

SEQ ID NO: 113054 - DNA, 25 bp, Artificial
  Probe
tttcttagccattttgtgccaatta

SEQ ID NO: 113055 - DNA, 25 bp, Artificial
  Probe
ttcttagccattttgtgccaattac

SEQ ID NO: 113056 - DNA, 25 bp, Artificial
  Probe
ttttcttagccattttgtgccaatt

SEQ ID NO: 113057 - DNA, 25 bp, Artificial
  Probe
tgaaatagctttctcttggatagga

SEQ ID NO: 113058 - DNA, 25 bp, Artificial
  Probe
tgaccctttcctttaccctttgaaa

SEQ ID NO: 113059 - DNA, 25 bp, Artificial
  Probe
ttgtgccaattacagtttctctttt

SEQ ID NO: 113060 - DNA, 25 bp, Artificial
  Probe
ttttgtgccaattacagtttctctt

SEQ ID NO: 113061 - DNA, 25 bp, Artificial
  Probe
cattttgtgccaattacagtttctc

SEQ ID NO: 113062 - DNA, 25 bp, Artificial
  Probe
attttgtgccaattacagtttctct

SEQ ID NO: 113063 - DNA, 25 bp, Artificial
  Probe
caacacaaccatagaggacgaagat

SEQ ID NO: 113064 - DNA, 25 bp, Artificial
  Probe
aacacaaccatagaggacgaagatg

SEQ ID NO: 113065 - DNA, 25 bp, Artificial
  Probe
ggatttccacagattctactttgag

SEQ ID NO: 113066 - DNA, 25 bp, Artificial
  Probe
gatttccacagattctactttgaga

SEQ ID NO: 113067 - DNA, 25 bp, Artificial
  Probe
ccaacacaaccatagaggacgaaga

SEQ ID NO: 113068 - DNA, 25 bp, Artificial
  Probe
ttccacagattctactttgagaacc

SEQ ID NO: 113069 - DNA, 25 bp, Artificial
  Probe
aagcaggaaatcatcaagaccacag

SEQ ID NO: 113070 - DNA, 25 bp, Artificial
  Probe
gaagcaggaaatcatcaagaccaca

SEQ ID NO: 113071 - DNA, 25 bp, Artificial
  Probe
tggatttccacagattctactttga

SEQ ID NO: 113072 - DNA, 25 bp, Artificial
  Probe
ggatggatttccacagattctactt

SEQ ID NO: 113073 - DNA, 25 bp, Artificial
  Probe
tttccacagattctactttgagaac

SEQ ID NO: 113074 - DNA, 25 bp, Artificial
  Probe
ccacagattctactttgagaacctg

SEQ ID NO: 113075 - DNA, 25 bp, Artificial
  Probe
tccacagattctactttgagaacct

SEQ ID NO: 113076 - DNA, 25 bp, Artificial
  Probe
atggatttccacagattctactttg

SEQ ID NO: 113077 - DNA, 25 bp, Artificial
  Probe
accaacacaaccatagaggacgaag

SEQ ID NO: 113078 - DNA, 25 bp, Artificial
  Probe
gatggatttccacagattctacttt

SEQ ID NO: 113079 - DNA, 25 bp, Artificial
  Probe
aagggatggatttccacagattcta

SEQ ID NO: 113080 - DNA, 25 bp, Artificial
  Probe
cagattctactttgagaacctgctg

SEQ ID NO: 113081 - DNA, 25 bp, Artificial
  Probe
acagattctactttgagaacctgct

SEQ ID NO: 113082 - DNA, 25 bp, Artificial
  Probe
cacagattctactttgagaacctgc

SEQ ID NO: 113083 - DNA, 25 bp, Artificial
  Probe
ggaaatcatcaagaccacagagcag

SEQ ID NO: 113084 - DNA, 25 bp, Artificial
  Probe
caggaaatcatcaagaccacagagc

SEQ ID NO: 113085 - DNA, 25 bp, Artificial
  Probe
gcaggaaatcatcaagaccacagag

SEQ ID NO: 113086 - DNA, 25 bp, Artificial
  Probe
ttacatccgcctcacacagtacatc

SEQ ID NO: 113087 - DNA, 25 bp, Artificial
  Probe
cttacatccgcctcacacagtacat

SEQ ID NO: 113088 - DNA, 25 bp, Artificial
  Probe
caaccatagaggacgaagatgccaa

SEQ ID NO: 113089 - DNA, 25 bp, Artificial
  Probe
acacaaccatagaggacgaagatgc

SEQ ID NO: 113090 - DNA, 25 bp, Artificial
  Probe
atttccacagattctactttgagaa

SEQ ID NO: 113091 - DNA, 25 bp, Artificial
  Probe
gggatggatttccacagattctact

SEQ ID NO: 113092 - DNA, 25 bp, Artificial
  Probe
agggatggatttccacagattctac

SEQ ID NO: 113093 - DNA, 25 bp, Artificial
  Probe
caccaacacaaccatagaggacgaa

SEQ ID NO: 113094 - DNA, 25 bp, Artificial
  Probe
ggaagcaggaaatcatcaagaccac

SEQ ID NO: 113095 - DNA, 25 bp, Artificial
  Probe
agattctactttgagaacctgctgg

SEQ ID NO: 113096 - DNA, 25 bp, Artificial
  Probe
aggaaatcatcaagaccacagagca

SEQ ID NO: 113097 - DNA, 25 bp, Artificial
  Probe
agcaggaaatcatcaagaccacaga

SEQ ID NO: 113098 - DNA, 25 bp, Artificial
  Probe
gaagggatggatttccacagattct

SEQ ID NO: 113099 - DNA, 25 bp, Artificial
  Probe
gaaatcatcaagaccacagagcagc

SEQ ID NO: 113100 - DNA, 25 bp, Artificial
  Probe
aaccatagaggacgaagatgccaaa

SEQ ID NO: 113101 - DNA, 25 bp, Artificial
  Probe
accatagaggacgaagatgccaaag

SEQ ID NO: 113102 - DNA, 25 bp, Artificial
  Probe
cgaagggatggatttccacagattc

SEQ ID NO: 113103 - DNA, 25 bp, Artificial
  Probe
gattctactttgagaacctgctggc

SEQ ID NO: 113104 - DNA, 25 bp, Artificial
  Probe
cggaagcaggaaatcatcaagacca

SEQ ID NO: 113105 - DNA, 25 bp, Artificial
  Probe
aatcatcaagaccacagagcagctc

SEQ ID NO: 113106 - DNA, 25 bp, Artificial
  Probe
aaatcatcaagaccacagagcagct

SEQ ID NO: 113107 - DNA, 25 bp, Artificial
  Probe
tcgaagggatggatttccacagatt

SEQ ID NO: 113108 - DNA, 25 bp, Artificial
  Probe
agaagactacctgtactacaagcac

SEQ ID NO: 113109 - DNA, 25 bp, Artificial
  Probe
cagaagactacctgtactacaagca

SEQ ID NO: 113110 - DNA, 25 bp, Artificial
  Probe
aactacccacaacaaactgagaaat

SEQ ID NO: 113111 - DNA, 25 bp, Artificial
  Probe
actacccacaacaaactgagaaatt

SEQ ID NO: 113112 - DNA, 25 bp, Artificial
  Probe
ggcagaagactacctgtactacaag

SEQ ID NO: 113113 - DNA, 25 bp, Artificial
  Probe
caactacccacaacaaactgagaaa

SEQ ID NO: 113114 - DNA, 25 bp, Artificial
  Probe
aataaccttctcattgaaatgctgc

SEQ ID NO: 113115 - DNA, 25 bp, Artificial
  Probe
gaaggaagacaaacaatgctctgaa

SEQ ID NO: 113116 - DNA, 25 bp, Artificial
  Probe
gaagactacctgtactacaagcacg

SEQ ID NO: 113117 - DNA, 25 bp, Artificial
  Probe
ctgttcagctcagatgtcaagaatc

SEQ ID NO: 113118 - DNA, 25 bp, Artificial
  Probe
aggcagaagactacctgtactacaa

SEQ ID NO: 113119 - DNA, 25 bp, Artificial
  Probe
gcagaagactacctgtactacaagc

SEQ ID NO: 113120 - DNA, 25 bp, Artificial
  Probe
aaggaagacaaacaatgctctgaac

SEQ ID NO: 113121 - DNA, 25 bp, Artificial
  Probe
gactactccagcatcatctcaaaca

SEQ ID NO: 113122 - DNA, 25 bp, Artificial
  Probe
cagcatcatctcaaacacagaagtc

SEQ ID NO: 113123 - DNA, 25 bp, Artificial
  Probe
tactccagcatcatctcaaacacag

SEQ ID NO: 113124 - DNA, 25 bp, Artificial
  Probe
ctactccagcatcatctcaaacaca

SEQ ID NO: 113125 - DNA, 25 bp, Artificial
  Probe
actactccagcatcatctcaaacac

SEQ ID NO: 113126 - DNA, 25 bp, Artificial
  Probe
atgtgccctacaataaccttctcat

SEQ ID NO: 113127 - DNA, 25 bp, Artificial
  Probe
gttcagctcagatgtcaagaatctt

SEQ ID NO: 113128 - DNA, 25 bp, Artificial
  Probe
tgtgccctacaataaccttctcatt

SEQ ID NO: 113129 - DNA, 25 bp, Artificial
  Probe
ctacccacaacaaactgagaaattt

SEQ ID NO: 113130 - DNA, 25 bp, Artificial
  Probe
ggaagacaaacaatgctctgaactg

SEQ ID NO: 113131 - DNA, 25 bp, Artificial
  Probe
aggaagacaaacaatgctctgaact

SEQ ID NO: 113132 - DNA, 25 bp, Artificial
  Probe
catctcaaacacagaagtcgcattc

SEQ ID NO: 113133 - DNA, 25 bp, Artificial
  Probe
gatgtgccctacaataaccttctca

SEQ ID NO: 113134 - DNA, 25 bp, Artificial
  Probe
tgttcagctcagatgtcaagaatct

SEQ ID NO: 113135 - DNA, 25 bp, Artificial
  Probe
atcatctcaaacacagaagtcgcat

SEQ ID NO: 113136 - DNA, 25 bp, Artificial
  Probe
aactgagaaatttggacaactgctt

SEQ ID NO: 113137 - DNA, 25 bp, Artificial
  Probe
aaacacagaagtcgcattcaacaac

SEQ ID NO: 113138 - DNA, 25 bp, Artificial
  Probe
caaacacagaagtcgcattcaacaa

SEQ ID NO: 113139 - DNA, 25 bp, Artificial
  Probe
aaactgagaaatttggacaactgct

SEQ ID NO: 113140 - DNA, 25 bp, Artificial
  Probe
acaataaccttctcattgaaatgct

SEQ ID NO: 113141 - DNA, 25 bp, Artificial
  Probe
gccctacaataaccttctcattgaa

SEQ ID NO: 113142 - DNA, 25 bp, Artificial
  Probe
ataaccttctcattgaaatgctgca

SEQ ID NO: 113143 - DNA, 25 bp, Artificial
  Probe
atctcaaacacagaagtcgcattca

SEQ ID NO: 113144 - DNA, 25 bp, Artificial
  Probe
tcatctcaaacacagaagtcgcatt

SEQ ID NO: 113145 - DNA, 25 bp, Artificial
  Probe
caataaccttctcattgaaatgctg

SEQ ID NO: 113146 - DNA, 25 bp, Artificial
  Probe
ggaggaggaaggaagacaaacaatg

SEQ ID NO: 113147 - DNA, 25 bp, Artificial
  Probe
aatcagcaaacaggcagaagactac

SEQ ID NO: 113148 - DNA, 25 bp, Artificial
  Probe
caatcagcaaacaggcagaagacta

SEQ ID NO: 113149 - DNA, 25 bp, Artificial
  Probe
gaagacaaacaatgctctgaactgc

SEQ ID NO: 113150 - DNA, 25 bp, Artificial
  Probe
tccagcatcatctcaaacacagaag

SEQ ID NO: 113151 - DNA, 25 bp, Artificial
  Probe
ctccagcatcatctcaaacacagaa

SEQ ID NO: 113152 - DNA, 25 bp, Artificial
  Probe
ctcaaacacagaagtcgcattcaac

SEQ ID NO: 113153 - DNA, 25 bp, Artificial
  Probe
aggatggattcagaggatgtatatg

SEQ ID NO: 113154 - DNA, 25 bp, Artificial
  Probe
caggatggattcagaggatgtatat

SEQ ID NO: 113155 - DNA, 25 bp, Artificial
  Probe
gcaggatggattcagaggatgtata

SEQ ID NO: 113156 - DNA, 25 bp, Artificial
  Probe
gttgacttagtgatgctgtagaagg

SEQ ID NO: 113157 - DNA, 25 bp, Artificial
  Probe
ggttgacttagtgatgctgtagaag

SEQ ID NO: 113158 - DNA, 25 bp, Artificial
  Probe
ggatggattcagaggatgtatatga

SEQ ID NO: 113159 - DNA, 25 bp, Artificial
  Probe
tactcacgaatgattctcttctgtt

SEQ ID NO: 113160 - DNA, 25 bp, Artificial
  Probe
ctactcacgaatgattctcttctgt

SEQ ID NO: 113161 - DNA, 25 bp, Artificial
  Probe
attgctactcacgaatgattctctt

SEQ ID NO: 113162 - DNA, 25 bp, Artificial
  Probe
aattcagaatgaggaaccttgagag

SEQ ID NO: 113163 - DNA, 25 bp, Artificial
  Probe
tatggtgttcacaatcctgttatga

SEQ ID NO: 113164 - DNA, 25 bp, Artificial
  Probe
ttgctactcacgaatgattctcttc

SEQ ID NO: 113165 - DNA, 25 bp, Artificial
  Probe
gtgttcacaatcctgttatgacaag

SEQ ID NO: 113166 - DNA, 25 bp, Artificial
  Probe
ggatgtatatgatgatgttgagact

SEQ ID NO: 113167 - DNA, 25 bp, Artificial
  Probe
aggatgtatatgatgatgttgagac

SEQ ID NO: 113168 - DNA, 25 bp, Artificial
  Probe
cagaggatgtatatgatgatgttga

SEQ ID NO: 113169 - DNA, 25 bp, Artificial
  Probe
tggattcagaggatgtatatgatga

SEQ ID NO: 113170 - DNA, 25 bp, Artificial
  Probe
attcagaatgaggaaccttgagaga

SEQ ID NO: 113171 - DNA, 25 bp, Artificial
  Probe
ttcagaatgaggaaccttgagagaa

SEQ ID NO: 113172 - DNA, 25 bp, Artificial
  Probe
atatggtgttcacaatcctgttatg

SEQ ID NO: 113173 - DNA, 25 bp, Artificial
  Probe
ctgtaatcatcgctatcaagttggc

SEQ ID NO: 113174 - DNA, 25 bp, Artificial
  Probe
gctgtaatcatcgctatcaagttgg

SEQ ID NO: 113175 - DNA, 25 bp, Artificial
  Probe
ggctgtaatcatcgctatcaagttg

SEQ ID NO: 113176 - DNA, 25 bp, Artificial
  Probe
gctactcacgaatgattctcttctg

SEQ ID NO: 113177 - DNA, 25 bp, Artificial
  Probe
gaggatgtatatgatgatgttgaga

SEQ ID NO: 113178 - DNA, 25 bp, Artificial
  Probe
agaggatgtatatgatgatgttgag

SEQ ID NO: 113179 - DNA, 25 bp, Artificial
  Probe
atggtgttcacaatcctgttatgac

SEQ ID NO: 113180 - DNA, 25 bp, Artificial
  Probe
tcagaatgaggaaccttgagagaag

SEQ ID NO: 113181 - DNA, 25 bp, Artificial
  Probe
tgctactcacgaatgattctcttct

SEQ ID NO: 113182 - DNA, 25 bp, Artificial
  Probe
ggtgttcacaatcctgttatgacaa

SEQ ID NO: 113183 - DNA, 25 bp, Artificial
  Probe
atgtatatgatgatgttgagactgt

SEQ ID NO: 113184 - DNA, 25 bp, Artificial
  Probe
tcagaggatgtatatgatgatgttg

SEQ ID NO: 113185 - DNA, 25 bp, Artificial
  Probe
tgttcacaatcctgttatgacaagc

SEQ ID NO: 113186 - DNA, 25 bp, Artificial
  Probe
atggattcagaggatgtatatgatg

SEQ ID NO: 113187 - DNA, 25 bp, Artificial
  Probe
attacgttcggtgttatctggttat

SEQ ID NO: 113188 - DNA, 25 bp, Artificial
  Probe
tatatgatgatgttgagactgtacc

SEQ ID NO: 113189 - DNA, 25 bp, Artificial
  Probe
gatgtatatgatgatgttgagactg

SEQ ID NO: 113190 - DNA, 25 bp, Artificial
  Probe
ttacgttcggtgttatctggttatc

SEQ ID NO: 113191 - DNA, 25 bp, Artificial
  Probe
gtactatcgcaggatggattcagag

SEQ ID NO: 113192 - DNA, 25 bp, Artificial
  Probe
tgggagaacaataataggctacttt

SEQ ID NO: 113193 - DNA, 25 bp, Artificial
  Probe
ttatatggtgttcacaatcctgtta

SEQ ID NO: 113194 - DNA, 25 bp, Artificial
  Probe
cattacgttcggtgttatctggtta

SEQ ID NO: 113195 - DNA, 25 bp, Artificial
  Probe
ggattcagaggatgtatatgatgat

SEQ ID NO: 113196 - DNA, 25 bp, Artificial
  Probe
gatggattcagaggatgtatatgat

SEQ ID NO: 113197 - DNA, 25 bp, Artificial
  Probe
agtaacctctcctccatcgttattg

SEQ ID NO: 113198 - DNA, 25 bp, Artificial
  Probe
atataagtctggtaggcttgtgaag

SEQ ID NO: 113199 - DNA, 25 bp, Artificial
  Probe
gatataagtctggtaggcttgtgaa

SEQ ID NO: 113200 - DNA, 25 bp, Artificial
  Probe
agatataagtctggtaggcttgtga

SEQ ID NO: 113201 - DNA, 25 bp, Artificial
  Probe
gttaggaaccagacagtgataagta

SEQ ID NO: 113202 - DNA, 25 bp, Artificial
  Probe
tagatataagtctggtaggcttgtg

SEQ ID NO: 113203 - DNA, 25 bp, Artificial
  Probe
ttaggaaccagacagtgataagtac

SEQ ID NO: 113204 - DNA, 25 bp, Artificial
  Probe
tataagtctggtaggcttgtgaagg

SEQ ID NO: 113205 - DNA, 25 bp, Artificial
  Probe
ctagatataagtctggtaggcttgt

SEQ ID NO: 113206 - DNA, 25 bp, Artificial
  Probe
cctgtcctagatataagtctggtag

SEQ ID NO: 113207 - DNA, 25 bp, Artificial
  Probe
tgacctgtcctagatataagtctgg

SEQ ID NO: 113208 - DNA, 25 bp, Artificial
  Probe
atgacctgtcctagatataagtctg

SEQ ID NO: 113209 - DNA, 25 bp, Artificial
  Probe
gacctgtcctagatataagtctggt

SEQ ID NO: 113210 - DNA, 25 bp, Artificial
  Probe
cttattatgatgagtagaagctgcc

SEQ ID NO: 113211 - DNA, 25 bp, Artificial
  Probe
acctgtcctagatataagtctggta

SEQ ID NO: 113212 - DNA, 25 bp, Artificial
  Probe
tggagcgtttcttattatgatgagt

SEQ ID NO: 113213 - DNA, 25 bp, Artificial
  Probe
ctggagcgtttcttattatgatgag

SEQ ID NO: 113214 - DNA, 25 bp, Artificial
  Probe
tataagatggtcatagcctgctgga

SEQ ID NO: 113215 - DNA, 25 bp, Artificial
  Probe
cttgtgaaggtttgaagtgtcttta

SEQ ID NO: 113216 - DNA, 25 bp, Artificial
  Probe
ttgtgaaggtttgaagtgtctttaa

SEQ ID NO: 113217 - DNA, 25 bp, Artificial
  Probe
tcttattatgatgagtagaagctgc

SEQ ID NO: 113218 - DNA, 25 bp, Artificial
  Probe
ggagcgtttcttattatgatgagta

SEQ ID NO: 113219 - DNA, 25 bp, Artificial
  Probe
ctataagatggtcatagcctgctgg

SEQ ID NO: 113220 - DNA, 25 bp, Artificial
  Probe
ataagtctggtaggcttgtgaaggt

SEQ ID NO: 113221 - DNA, 25 bp, Artificial
  Probe
ctgctggagcgtttcttattatgat

SEQ ID NO: 113222 - DNA, 25 bp, Artificial
  Probe
gctggagcgtttcttattatgatga

SEQ ID NO: 113223 - DNA, 25 bp, Artificial
  Probe
taagtctggtaggcttgtgaaggtt

SEQ ID NO: 113224 - DNA, 25 bp, Artificial
  Probe
tgctggagcgtttcttattatgatg

SEQ ID NO: 113225 - DNA, 25 bp, Artificial
  Probe
tatgacctgtcctagatataagtct

SEQ ID NO: 113226 - DNA, 25 bp, Artificial
  Probe
gtcctagatataagtctggtaggct

SEQ ID NO: 113227 - DNA, 25 bp, Artificial
  Probe
tgtcctagatataagtctggtaggc

SEQ ID NO: 113228 - DNA, 25 bp, Artificial
  Probe
cctagatataagtctggtaggcttg

SEQ ID NO: 113229 - DNA, 25 bp, Artificial
  Probe
tcctagatataagtctggtaggctt

SEQ ID NO: 113230 - DNA, 25 bp, Artificial
  Probe
ttattatgatgagtagaagctgccc

SEQ ID NO: 113231 - DNA, 25 bp, Artificial
  Probe
gcttgtgaaggtttgaagtgtcttt

SEQ ID NO: 113232 - DNA, 25 bp, Artificial
  Probe
gagcgtttcttattatgatgagtag

SEQ ID NO: 113233 - DNA, 25 bp, Artificial
  Probe
ctgtcctagatataagtctggtagg

SEQ ID NO: 113234 - DNA, 25 bp, Artificial
  Probe
agcgtttcttattatgatgagtaga

SEQ ID NO: 113235 - DNA, 25 bp, Artificial
  Probe
taggaaccagacagtgataagtact

SEQ ID NO: 113236 - DNA, 25 bp, Artificial
  Probe
tattatgatgagtagaagctgccca

SEQ ID NO: 113237 - DNA, 25 bp, Artificial
  Probe
tgtgaaggtttgaagtgtctttaaa

SEQ ID NO: 113238 - DNA, 25 bp, Artificial
  Probe
cagtttacttgcctgttgagtgtag

SEQ ID NO: 113239 - DNA, 25 bp, Artificial
  Probe
ataagatggtcatagcctgctggag

SEQ ID NO: 113240 - DNA, 25 bp, Artificial
  Probe
tctgagaaagctataagatggtcat

SEQ ID NO: 113241 - DNA, 25 bp, Artificial
  Probe
attatgatgagtagaagctgcccat

SEQ ID NO: 113242 - DNA, 25 bp, Artificial
  Probe
atatgacctgtcctagatataagtc

SEQ ID NO: 113243 - DNA, 25 bp, Artificial
  Probe
ccagacctccatacagtatagactt

SEQ ID NO: 113244 - DNA, 25 bp, Artificial
  Probe
cagacctccatacagtatagactta

SEQ ID NO: 113245 - DNA, 25 bp, Artificial
  Probe
ggatatgatgagagattccagaagg

SEQ ID NO: 113246 - DNA, 25 bp, Artificial
  Probe
atagttaagcactggatacctcctg

SEQ ID NO: 113247 - DNA, 25 bp, Artificial
  Probe
catagttaagcactggatacctcct

SEQ ID NO: 113248 - DNA, 25 bp, Artificial
  Probe
ctcaagaataaaccaaggaactgtg

SEQ ID NO: 113249 - DNA, 25 bp, Artificial
  Probe
cctttccctctcattcctattcttt

SEQ ID NO: 113250 - DNA, 25 bp, Artificial
  Probe
ggaatgaatggtttgtggtctattt

SEQ ID NO: 113251 - DNA, 25 bp, Artificial
  Probe
gatatgatgagagattccagaaggg

SEQ ID NO: 113252 - DNA, 25 bp, Artificial
  Probe
tctcaagaataaaccaaggaactgt

SEQ ID NO: 113253 - DNA, 25 bp, Artificial
  Probe
ccatctcaagaataaaccaaggaac

SEQ ID NO: 113254 - DNA, 25 bp, Artificial
  Probe
tgtggtctatttaatctgcttcctt

SEQ ID NO: 113255 - DNA, 25 bp, Artificial
  Probe
ttgtggtctatttaatctgcttcct

SEQ ID NO: 113256 - DNA, 25 bp, Artificial
  Probe
ctcgtaactgggaactgtatgaaat

SEQ ID NO: 113257 - DNA, 25 bp, Artificial
  Probe
atatgatgagagattccagaagggt

SEQ ID NO: 113258 - DNA, 25 bp, Artificial
  Probe
tggtttgtggtctatttaatctgct

SEQ ID NO: 113259 - DNA, 25 bp, Artificial
  Probe
atggtttgtggtctatttaatctgc

SEQ ID NO: 113260 - DNA, 25 bp, Artificial
  Probe
gtggtctatttaatctgcttccttc

SEQ ID NO: 113261 - DNA, 25 bp, Artificial
  Probe
ggtttgtggtctatttaatctgctt

SEQ ID NO: 113262 - DNA, 25 bp, Artificial
  Probe
tcgtaactgggaactgtatgaaatg

SEQ ID NO: 113263 - DNA, 25 bp, Artificial
  Probe
acctttccctctcattcctattctt

SEQ ID NO: 113264 - DNA, 25 bp, Artificial
  Probe
tggtctatttaatctgcttccttct

SEQ ID NO: 113265 - DNA, 25 bp, Artificial
  Probe
ccctctcattcctattctttctttg

SEQ ID NO: 113266 - DNA, 25 bp, Artificial
  Probe
tccctctcattcctattctttcttt

SEQ ID NO: 113267 - DNA, 25 bp, Artificial
  Probe
ttccctctcattcctattctttctt

SEQ ID NO: 113268 - DNA, 25 bp, Artificial
  Probe
tttccctctcattcctattctttct

SEQ ID NO: 113269 - DNA, 25 bp, Artificial
  Probe
agacttataactcagagctgatgaa

SEQ ID NO: 113270 - DNA, 25 bp, Artificial
  Probe
tttgtggtctatttaatctgcttcc

SEQ ID NO: 113271 - DNA, 25 bp, Artificial
  Probe
ggtctatttaatctgcttccttctg

SEQ ID NO: 113272 - DNA, 25 bp, Artificial
  Probe
aactgccatctcaagaataaaccaa

SEQ ID NO: 113273 - DNA, 25 bp, Artificial
  Probe
aaactgccatctcaagaataaacca

SEQ ID NO: 113274 - DNA, 25 bp, Artificial
  Probe
ctttccctctcattcctattctttc

SEQ ID NO: 113275 - DNA, 25 bp, Artificial
  Probe
agacctccatacagtatagacttat

SEQ ID NO: 113276 - DNA, 25 bp, Artificial
  Probe
atctcaagaataaaccaaggaactg

SEQ ID NO: 113277 - DNA, 25 bp, Artificial
  Probe
catctcaagaataaaccaaggaact

SEQ ID NO: 113278 - DNA, 25 bp, Artificial
  Probe
gacttataactcagagctgatgaag

SEQ ID NO: 113279 - DNA, 25 bp, Artificial
  Probe
ttctgaaggaagtctgggatatgat

SEQ ID NO: 113280 - DNA, 25 bp, Artificial
  Probe
tatgatgagagattccagaagggtc

SEQ ID NO: 113281 - DNA, 25 bp, Artificial
  Probe
gggaatgaatggtttgtggtctatt

SEQ ID NO: 113282 - DNA, 25 bp, Artificial
  Probe
gacctttccctctcattcctattct

SEQ ID NO: 113283 - DNA, 25 bp, Artificial
  Probe
aagtctgggatatgatgagagattc

SEQ ID NO: 113284 - DNA, 25 bp, Artificial
  Probe
gaagtctgggatatgatgagagatt

SEQ ID NO: 113285 - DNA, 25 bp, Artificial
  Probe
gccatctcaagaataaaccaaggaa

SEQ ID NO: 113286 - DNA, 25 bp, Artificial
  Probe
gtaactgggaactgtatgaaatggg

SEQ ID NO: 113287 - DNA, 25 bp, Artificial
  Probe
tgaaggaagtctgggatatgatgag

SEQ ID NO: 113288 - DNA, 25 bp, Artificial
  Probe
aacaagaagaacaaggataaggagt

SEQ ID NO: 113289 - DNA, 25 bp, Artificial
  Probe
acaagaagaacaaggataaggagta

SEQ ID NO: 113290 - DNA, 25 bp, Artificial
  Probe
caagaagaacaaggataaggagtat

SEQ ID NO: 113291 - DNA, 25 bp, Artificial
  Probe
aactacatcagtaactcagcacagt

SEQ ID NO: 113292 - DNA, 25 bp, Artificial
  Probe
actacatcagtaactcagcacagtc

SEQ ID NO: 113293 - DNA, 25 bp, Artificial
  Probe
aagaagaacaaggataaggagtatt

SEQ ID NO: 113294 - DNA, 25 bp, Artificial
  Probe
aaacaagaagaacaaggataaggag

SEQ ID NO: 113295 - DNA, 25 bp, Artificial
  Probe
ctacatcagtaactcagcacagtcc

SEQ ID NO: 113296 - DNA, 25 bp, Artificial
  Probe
atcagtaactcagcacagtccaatg

SEQ ID NO: 113297 - DNA, 25 bp, Artificial
  Probe
catcagtaactcagcacagtccaat

SEQ ID NO: 113298 - DNA, 25 bp, Artificial
  Probe
aaactacatcagtaactcagcacag

SEQ ID NO: 113299 - DNA, 25 bp, Artificial
  Probe
gaaactacatcagtaactcagcaca

SEQ ID NO: 113300 - DNA, 25 bp, Artificial
  Probe
tacatcagtaactcagcacagtcca

SEQ ID NO: 113301 - DNA, 25 bp, Artificial
  Probe
aagtatgtcatgctcttgtttctca

SEQ ID NO: 113302 - DNA, 25 bp, Artificial
  Probe
gtatgtcatgctcttgtttctcaaa

SEQ ID NO: 113303 - DNA, 25 bp, Artificial
  Probe
agtatgtcatgctcttgtttctcaa

SEQ ID NO: 113304 - DNA, 25 bp, Artificial
  Probe
cgaaactacatcagtaactcagcac

SEQ ID NO: 113305 - DNA, 25 bp, Artificial
  Probe
agtcgaaactacatcagtaactcag

SEQ ID NO: 113306 - DNA, 25 bp, Artificial
  Probe
gagagtcgaaactacatcagtaact

SEQ ID NO: 113307 - DNA, 25 bp, Artificial
  Probe
tgagagtcgaaactacatcagtaac

SEQ ID NO: 113308 - DNA, 25 bp, Artificial
  Probe
atgagagtcgaaactacatcagtaa

SEQ ID NO: 113309 - DNA, 25 bp, Artificial
  Probe
acatcagtaactcagcacagtccaa

SEQ ID NO: 113310 - DNA, 25 bp, Artificial
  Probe
cctcatcctcctctatgccatgtac

SEQ ID NO: 113311 - DNA, 25 bp, Artificial
  Probe
gtcgaaactacatcagtaactcagc

SEQ ID NO: 113312 - DNA, 25 bp, Artificial
  Probe
tcctcatcctcctctatgccatgta

SEQ ID NO: 113313 - DNA, 25 bp, Artificial
  Probe
tcgaaactacatcagtaactcagca

SEQ ID NO: 113314 - DNA, 25 bp, Artificial
  Probe
catcctcatcctcctctatgccatg

SEQ ID NO: 113315 - DNA, 25 bp, Artificial
  Probe
tcctcctctatgccatgtacaagta

SEQ ID NO: 113316 - DNA, 25 bp, Artificial
  Probe
cctcctctatgccatgtacaagtac

SEQ ID NO: 113317 - DNA, 25 bp, Artificial
  Probe
aaaacaagaagaacaaggataagga

SEQ ID NO: 113318 - DNA, 25 bp, Artificial
  Probe
aggacacttgtatagaaatagtctt

SEQ ID NO: 113319 - DNA, 25 bp, Artificial
  Probe
aaggacacttgtatagaaatagtct

SEQ ID NO: 113320 - DNA, 25 bp, Artificial
  Probe
ggacacttgtatagaaatagtcttc

SEQ ID NO: 113321 - DNA, 25 bp, Artificial
  Probe
catcctcctctatgccatgtacaag

SEQ ID NO: 113322 - DNA, 25 bp, Artificial
  Probe
ctctatgccatgtacaagtacagaa

SEQ ID NO: 113323 - DNA, 25 bp, Artificial
  Probe
tcagtaactcagcacagtccaatgg

SEQ ID NO: 113324 - DNA, 25 bp, Artificial
  Probe
atcctcatcctcctctatgccatgt

SEQ ID NO: 113325 - DNA, 25 bp, Artificial
  Probe
atcctcctctatgccatgtacaagt

SEQ ID NO: 113326 - DNA, 25 bp, Artificial
  Probe
tctgtgcatcctcatcctcctctat

SEQ ID NO: 113327 - DNA, 25 bp, Artificial
  Probe
tcatcctcctctatgccatgtacaa

SEQ ID NO: 113328 - DNA, 25 bp, Artificial
  Probe
tatgtcatgctcttgtttctcaaaa

SEQ ID NO: 113329 - DNA, 25 bp, Artificial
  Probe
ctgtgcatcctcatcctcctctatg

SEQ ID NO: 113330 - DNA, 25 bp, Artificial
  Probe
caagtatgtcatgctcttgtttctc

SEQ ID NO: 113331 - DNA, 25 bp, Artificial
  Probe
tacaaaagaagacagggaatgcgat

SEQ ID NO: 113332 - DNA, 25 bp, Artificial
  Probe
atacaaaagaagacagggaatgcga

SEQ ID NO: 113333 - DNA, 25 bp, Artificial
  Probe
ttctgtaatctctcttcttggttgg

SEQ ID NO: 113334 - DNA, 25 bp, Artificial
  Probe
actctaattcaatgtcatctgtggt

SEQ ID NO: 113335 - DNA, 25 bp, Artificial
  Probe
tgtaatctctcttcttggttggcta

SEQ ID NO: 113336 - DNA, 25 bp, Artificial
  Probe
ctctaattcaatgtcatctgtggtt

SEQ ID NO: 113337 - DNA, 25 bp, Artificial
  Probe
aactctaattcaatgtcatctgtgg

SEQ ID NO: 113338 - DNA, 25 bp, Artificial
  Probe
tggtgttgatagaatgttattggtt

SEQ ID NO: 113339 - DNA, 25 bp, Artificial
  Probe
gtaatctctcttcttggttggctag

SEQ ID NO: 113340 - DNA, 25 bp, Artificial
  Probe
atggtgttgatagaatgttattggt

SEQ ID NO: 113341 - DNA, 25 bp, Artificial
  Probe
taatctctcttcttggttggctagt

SEQ ID NO: 113342 - DNA, 25 bp, Artificial
  Probe
tctaattcaatgtcatctgtggtta

SEQ ID NO: 113343 - DNA, 25 bp, Artificial
  Probe
ctgtaatctctcttcttggttggct

SEQ ID NO: 113344 - DNA, 25 bp, Artificial
  Probe
tctgtaatctctcttcttggttggc

SEQ ID NO: 113345 - DNA, 25 bp, Artificial
  Probe
aatctctcttcttggttggctagtc

SEQ ID NO: 113346 - DNA, 25 bp, Artificial
  Probe
ttactgattctattgttcgctatct

SEQ ID NO: 113347 - DNA, 25 bp, Artificial
  Probe
catggtgttgatagaatgttattgg

SEQ ID NO: 113348 - DNA, 25 bp, Artificial
  Probe
ctctcttcttggttggctagtcatc

SEQ ID NO: 113349 - DNA, 25 bp, Artificial
  Probe
ctaattcaatgtcatctgtggttat

SEQ ID NO: 113350 - DNA, 25 bp, Artificial
  Probe
gaattaaccattcctgagtagacaa

SEQ ID NO: 113351 - DNA, 25 bp, Artificial
  Probe
tcagtcactaatagcttcctgtcta

SEQ ID NO: 113352 - DNA, 25 bp, Artificial
  Probe
ttcttggttggctagtcatcacatc

SEQ ID NO: 113353 - DNA, 25 bp, Artificial
  Probe
cttcttggttggctagtcatcacat

SEQ ID NO: 113354 - DNA, 25 bp, Artificial
  Probe
cagtcactaatagcttcctgtctaa

SEQ ID NO: 113355 - DNA, 25 bp, Artificial
  Probe
gcagtgcaactcagactatattact

SEQ ID NO: 113356 - DNA, 25 bp, Artificial
  Probe
agcagtgcaactcagactatattac

SEQ ID NO: 113357 - DNA, 25 bp, Artificial
  Probe
cagcagtgcaactcagactatatta

SEQ ID NO: 113358 - DNA, 25 bp, Artificial
  Probe
tttctgtaatctctcttcttggttg

SEQ ID NO: 113359 - DNA, 25 bp, Artificial
  Probe
ctagtcatcacatcaggctcattgg

SEQ ID NO: 113360 - DNA, 25 bp, Artificial
  Probe
tctctcttcttggttggctagtcat

SEQ ID NO: 113361 - DNA, 25 bp, Artificial
  Probe
atctctcttcttggttggctagtca

SEQ ID NO: 113362 - DNA, 25 bp, Artificial
  Probe
attactgattctattgttcgctatc

SEQ ID NO: 113363 - DNA, 25 bp, Artificial
  Probe
ttcagtcactaatagcttcctgtct

SEQ ID NO: 113364 - DNA, 25 bp, Artificial
  Probe
gaaatgctctgtaggtttgttctag

SEQ ID NO: 113365 - DNA, 25 bp, Artificial
  Probe
taactctaattcaatgtcatctgtg

SEQ ID NO: 113366 - DNA, 25 bp, Artificial
  Probe
acgctttaatgttgccaaattattt

SEQ ID NO: 113367 - DNA, 25 bp, Artificial
  Probe
ctcttcttggttggctagtcatcac

SEQ ID NO: 113368 - DNA, 25 bp, Artificial
  Probe
tctcttcttggttggctagtcatca

SEQ ID NO: 113369 - DNA, 25 bp, Artificial
  Probe
taaccattcctgagtagacaaatac

SEQ ID NO: 113370 - DNA, 25 bp, Artificial
  Probe
taattcaatgtcatctgtggttatt

SEQ ID NO: 113371 - DNA, 25 bp, Artificial
  Probe
tcatggtgttgatagaatgttattg

SEQ ID NO: 113372 - DNA, 25 bp, Artificial
  Probe
aattaaccattcctgagtagacaaa

SEQ ID NO: 113373 - DNA, 25 bp, Artificial
  Probe
tacgctttaatgttgccaaattatt

SEQ ID NO: 113374 - DNA, 25 bp, Artificial
  Probe
ttacgctttaatgttgccaaattat

SEQ ID NO: 113375 - DNA, 25 bp, Artificial
  Probe
attacgctttaatgttgccaaatta

SEQ ID NO: 113376 - DNA, 25 bp, Artificial
  Probe
tattacgctttaatgttgccaaatt

SEQ ID NO: 113377 - DNA, 25 bp, Artificial
  Probe
atttctgtaatctctcttcttggtt

SEQ ID NO: 113378 - DNA, 25 bp, Artificial
  Probe
tatacaatgtaactatggtggtcgt

SEQ ID NO: 113379 - DNA, 25 bp, Artificial
  Probe
cattctcaatcagccaacacgatat

SEQ ID NO: 113380 - DNA, 25 bp, Artificial
  Probe
atacaatgtaactatggtggtcgtt

SEQ ID NO: 113381 - DNA, 25 bp, Artificial
  Probe
tacaatgtaactatggtggtcgttc

SEQ ID NO: 113382 - DNA, 25 bp, Artificial
  Probe
caatgtaactatggtggtcgttctg

SEQ ID NO: 113383 - DNA, 25 bp, Artificial
  Probe
ttaacagcattctcaatcagccaac

SEQ ID NO: 113384 - DNA, 25 bp, Artificial
  Probe
aacatgctgattgctatgattaaca

SEQ ID NO: 113385 - DNA, 25 bp, Artificial
  Probe
atatacaatgtaactatggtggtcg

SEQ ID NO: 113386 - DNA, 25 bp, Artificial
  Probe
acaatgtaactatggtggtcgttct

SEQ ID NO: 113387 - DNA, 25 bp, Artificial
  Probe
atgacagtgatgtagagtggaagtt

SEQ ID NO: 113388 - DNA, 25 bp, Artificial
  Probe
ctcaacatgctgattgctatgatta

SEQ ID NO: 113389 - DNA, 25 bp, Artificial
  Probe
caacatgctgattgctatgattaac

SEQ ID NO: 113390 - DNA, 25 bp, Artificial
  Probe
tcaacatgctgattgctatgattaa

SEQ ID NO: 113391 - DNA, 25 bp, Artificial
  Probe
aactctagtgttaataccttcacca

SEQ ID NO: 113392 - DNA, 25 bp, Artificial
  Probe
gatgacagtgatgtagagtggaagt

SEQ ID NO: 113393 - DNA, 25 bp, Artificial
  Probe
agtgacatgctgttgtacttagaag

SEQ ID NO: 113394 - DNA, 25 bp, Artificial
  Probe
actctagtgttaataccttcaccat

SEQ ID NO: 113395 - DNA, 25 bp, Artificial
  Probe
acatgctgattgctatgattaacag

SEQ ID NO: 113396 - DNA, 25 bp, Artificial
  Probe
tctagtgttaataccttcaccatgc

SEQ ID NO: 113397 - DNA, 25 bp, Artificial
  Probe
cagtgacatgctgttgtacttagaa

SEQ ID NO: 113398 - DNA, 25 bp, Artificial
  Probe
tttctctttgtatctgtggtgtcat

SEQ ID NO: 113399 - DNA, 25 bp, Artificial
  Probe
ttgtgtcctttctctttgtatctgt

SEQ ID NO: 113400 - DNA, 25 bp, Artificial
  Probe
tatgcttgtgtcctttctctttgta

SEQ ID NO: 113401 - DNA, 25 bp, Artificial
  Probe
gggaccacatcaatctcatctttat

SEQ ID NO: 113402 - DNA, 25 bp, Artificial
  Probe
cttgtgtcctttctctttgtatctg

SEQ ID NO: 113403 - DNA, 25 bp, Artificial
  Probe
atgcttgtgtcctttctctttgtat

SEQ ID NO: 113404 - DNA, 25 bp, Artificial
  Probe
gaacgaaggtgaactgaaagaaatc

SEQ ID NO: 113405 - DNA, 25 bp, Artificial
  Probe
ctttctctttgtatctgtggtgtca

SEQ ID NO: 113406 - DNA, 25 bp, Artificial
  Probe
tgtgtcctttctctttgtatctgtg

SEQ ID NO: 113407 - DNA, 25 bp, Artificial
  Probe
atatgcttgtgtcctttctctttgt

SEQ ID NO: 113408 - DNA, 25 bp, Artificial
  Probe
gaaatgccaggtttaacagtgaaat

SEQ ID NO: 113409 - DNA, 25 bp, Artificial
  Probe
taacagcattctcaatcagccaaca

SEQ ID NO: 113410 - DNA, 25 bp, Artificial
  Probe
aaatgccaggtttaacagtgaaatg

SEQ ID NO: 113411 - DNA, 25 bp, Artificial
  Probe
tatatgcttgtgtcctttctctttg

SEQ ID NO: 113412 - DNA, 25 bp, Artificial
  Probe
gcttgtgtcctttctctttgtatct

SEQ ID NO: 113413 - DNA, 25 bp, Artificial
  Probe
ggaccacatcaatctcatctttatg

SEQ ID NO: 113414 - DNA, 25 bp, Artificial
  Probe
tgaacgaaggtgaactgaaagaaat

SEQ ID NO: 113415 - DNA, 25 bp, Artificial
  Probe
ctctagtgttaataccttcaccatg

SEQ ID NO: 113416 - DNA, 25 bp, Artificial
  Probe
tgcttgtgtcctttctctttgtatc

SEQ ID NO: 113417 - DNA, 25 bp, Artificial
  Probe
agggaccacatcaatctcatcttta

SEQ ID NO: 113418 - DNA, 25 bp, Artificial
  Probe
ggatgacagtgatgtagagtggaag

SEQ ID NO: 113419 - DNA, 25 bp, Artificial
  Probe
cctttctctttgtatctgtggtgtc

SEQ ID NO: 113420 - DNA, 25 bp, Artificial
  Probe
gtcctttctctttgtatctgtggtg

SEQ ID NO: 113421 - DNA, 25 bp, Artificial
  Probe
gtgtcctttctctttgtatctgtgg

SEQ ID NO: 113422 - DNA, 25 bp, Artificial
  Probe
ctagtgttaataccttcaccatgcg

SEQ ID NO: 113423 - DNA, 25 bp, Artificial
  Probe
gtgagaggaggcttgattaagtaag

SEQ ID NO: 113424 - DNA, 25 bp, Artificial
  Probe
agtgagaggaggcttgattaagtaa

SEQ ID NO: 113425 - DNA, 25 bp, Artificial
  Probe
tagagtgagaggaggcttgattaag

SEQ ID NO: 113426 - DNA, 25 bp, Artificial
  Probe
gagtgagaggaggcttgattaagta

SEQ ID NO: 113427 - DNA, 25 bp, Artificial
  Probe
ctagagtgagaggaggcttgattaa

SEQ ID NO: 113428 - DNA, 25 bp, Artificial
  Probe
tgagaggaggcttgattaagtaagg

SEQ ID NO: 113429 - DNA, 25 bp, Artificial
  Probe
gaagaagacagagagtgaaggtgaa

SEQ ID NO: 113430 - DNA, 25 bp, Artificial
  Probe
aagaagacagagagtgaaggtgaac

SEQ ID NO: 113431 - DNA, 25 bp, Artificial
  Probe
cctatcaacctgacaagcagtaatt

SEQ ID NO: 113432 - DNA, 25 bp, Artificial
  Probe
ataatgccacctatcaacctgacaa

SEQ ID NO: 113433 - DNA, 25 bp, Artificial
  Probe
acctatcaacctgacaagcagtaat

SEQ ID NO: 113434 - DNA, 25 bp, Artificial
  Probe
tcaagttcgagtcaagtagtaacag

SEQ ID NO: 113435 - DNA, 25 bp, Artificial
  Probe
tgaagaagacagagagtgaaggtga

SEQ ID NO: 113436 - DNA, 25 bp, Artificial
  Probe
tgggaatgttatgtgagaagtgttt

SEQ ID NO: 113437 - DNA, 25 bp, Artificial
  Probe
ttgggaatgttatgtgagaagtgtt

SEQ ID NO: 113438 - DNA, 25 bp, Artificial
  Probe
gagaggaggcttgattaagtaaggc

SEQ ID NO: 113439 - DNA, 25 bp, Artificial
  Probe
agagtgagaggaggcttgattaagt

SEQ ID NO: 113440 - DNA, 25 bp, Artificial
  Probe
caagttcgagtcaagtagtaacagg

SEQ ID NO: 113441 - DNA, 25 bp, Artificial
  Probe
taatgccacctatcaacctgacaag

SEQ ID NO: 113442 - DNA, 25 bp, Artificial
  Probe
tctcaagttcgagtcaagtagtaac

SEQ ID NO: 113443 - DNA, 25 bp, Artificial
  Probe
cttctcaagttcgagtcaagtagta

SEQ ID NO: 113444 - DNA, 25 bp, Artificial
  Probe
atcttctcaagttcgagtcaagtag

SEQ ID NO: 113445 - DNA, 25 bp, Artificial
  Probe
gatcttctcaagttcgagtcaagta

SEQ ID NO: 113446 - DNA, 25 bp, Artificial
  Probe
ctcaagttcgagtcaagtagtaaca

SEQ ID NO: 113447 - DNA, 25 bp, Artificial
  Probe
gataatgccacctatcaacctgaca

SEQ ID NO: 113448 - DNA, 25 bp, Artificial
  Probe
ttctcaagttcgagtcaagtagtaa

SEQ ID NO: 113449 - DNA, 25 bp, Artificial
  Probe
agaagacagagagtgaaggtgaaca

SEQ ID NO: 113450 - DNA, 25 bp, Artificial
  Probe
gagttcttgggaatgttatgtgaga

SEQ ID NO: 113451 - DNA, 25 bp, Artificial
  Probe
gacctgaagaagacagagagtgaag

SEQ ID NO: 113452 - DNA, 25 bp, Artificial
  Probe
tcttgggaatgttatgtgagaagtg

SEQ ID NO: 113453 - DNA, 25 bp, Artificial
  Probe
tttatggaaaggaagtggacagaga

SEQ ID NO: 113454 - DNA, 25 bp, Artificial
  Probe
cttgggaatgttatgtgagaagtgt

SEQ ID NO: 113455 - DNA, 25 bp, Artificial
  Probe
ctgaggagttcttgggaatgttatg

SEQ ID NO: 113456 - DNA, 25 bp, Artificial
  Probe
tcttctcaagttcgagtcaagtagt

SEQ ID NO: 113457 - DNA, 25 bp, Artificial
  Probe
ggagttcttgggaatgttatgtgag

SEQ ID NO: 113458 - DNA, 25 bp, Artificial
  Probe
gaggagttcttgggaatgttatgtg

SEQ ID NO: 113459 - DNA, 25 bp, Artificial
  Probe
cacctatcaacctgacaagcagtaa

SEQ ID NO: 113460 - DNA, 25 bp, Artificial
  Probe
ctgaagaagacagagagtgaaggtg

SEQ ID NO: 113461 - DNA, 25 bp, Artificial
  Probe
agacctgaagaagacagagagtgaa

SEQ ID NO: 113462 - DNA, 25 bp, Artificial
  Probe
gctagagtgagaggaggcttgatta

SEQ ID NO: 113463 - DNA, 25 bp, Artificial
  Probe
aggagttcttgggaatgttatgtga

SEQ ID NO: 113464 - DNA, 25 bp, Artificial
  Probe
tgaggagttcttgggaatgttatgt

SEQ ID NO: 113465 - DNA, 25 bp, Artificial
  Probe
aaggatcttctcaagttcgagtcaa

SEQ ID NO: 113466 - DNA, 25 bp, Artificial
  Probe
ttatggaaaggaagtggacagagac

SEQ ID NO: 113467 - DNA, 25 bp, Artificial
  Probe
tatcaacctgacaagcagtaatttg

SEQ ID NO: 113468 - DNA, 25 bp, Artificial
  Probe
attctgtgtagcataggagagagtt

SEQ ID NO: 113469 - DNA, 25 bp, Artificial
  Probe
aattggttgttgtgcttctgatact

SEQ ID NO: 113470 - DNA, 25 bp, Artificial
  Probe
aattctgtgtagcataggagagagt

SEQ ID NO: 113471 - DNA, 25 bp, Artificial
  Probe
attggttgttgtgcttctgatactg

SEQ ID NO: 113472 - DNA, 25 bp, Artificial
  Probe
ttctgtgtagcataggagagagttc

SEQ ID NO: 113473 - DNA, 25 bp, Artificial
  Probe
agacctatcatagcaatagccagta

SEQ ID NO: 113474 - DNA, 25 bp, Artificial
  Probe
gttgttgtgcttctgatactggatg

SEQ ID NO: 113475 - DNA, 25 bp, Artificial
  Probe
ttgtgcttctgatactggatggaat

SEQ ID NO: 113476 - DNA, 25 bp, Artificial
  Probe
tctgtgtagcataggagagagttct

SEQ ID NO: 113477 - DNA, 25 bp, Artificial
  Probe
tgtgcttctgatactggatggaatt

SEQ ID NO: 113478 - DNA, 25 bp, Artificial
  Probe
gacctatcatagcaatagccagtac

SEQ ID NO: 113479 - DNA, 25 bp, Artificial
  Probe
ctatcatagcaatagccagtacctg

SEQ ID NO: 113480 - DNA, 25 bp, Artificial
  Probe
cagacctatcatagcaatagccagt

SEQ ID NO: 113481 - DNA, 25 bp, Artificial
  Probe
agttcttaattcttgaggtattgga

SEQ ID NO: 113482 - DNA, 25 bp, Artificial
  Probe
aataagcacaggcagacctatcata

SEQ ID NO: 113483 - DNA, 25 bp, Artificial
  Probe
cctatcatagcaatagccagtacct

SEQ ID NO: 113484 - DNA, 25 bp, Artificial
  Probe
gttcttaattcttgaggtattggag

SEQ ID NO: 113485 - DNA, 25 bp, Artificial
  Probe
acctatcatagcaatagccagtacc

SEQ ID NO: 113486 - DNA, 25 bp, Artificial
  Probe
ccgtttactgctgagattgtttatt

SEQ ID NO: 113487 - DNA, 25 bp, Artificial
  Probe
acaggcagacctatcatagcaatag

SEQ ID NO: 113488 - DNA, 25 bp, Artificial
  Probe
ataagcacaggcagacctatcatag

SEQ ID NO: 113489 - DNA, 25 bp, Artificial
  Probe
ttcttaattcttgaggtattggaga

SEQ ID NO: 113490 - DNA, 25 bp, Artificial
  Probe
taggctatctggtaaattggttgtt

SEQ ID NO: 113491 - DNA, 25 bp, Artificial
  Probe
cacaggcagacctatcatagcaata

SEQ ID NO: 113492 - DNA, 25 bp, Artificial
  Probe
gttgtgcttctgatactggatggaa

SEQ ID NO: 113493 - DNA, 25 bp, Artificial
  Probe
aaattggttgttgtgcttctgatac

SEQ ID NO: 113494 - DNA, 25 bp, Artificial
  Probe
gtaaattggttgttgtgcttctgat

SEQ ID NO: 113495 - DNA, 25 bp, Artificial
  Probe
ctatctggtaaattggttgttgtgc

SEQ ID NO: 113496 - DNA, 25 bp, Artificial
  Probe
gctatctggtaaattggttgttgtg

SEQ ID NO: 113497 - DNA, 25 bp, Artificial
  Probe
cattcttccataaataagcacaggc

SEQ ID NO: 113498 - DNA, 25 bp, Artificial
  Probe
ttgttgtgcttctgatactggatgg

SEQ ID NO: 113499 - DNA, 25 bp, Artificial
  Probe
ggttgttgtgcttctgatactggat

SEQ ID NO: 113500 - DNA, 25 bp, Artificial
  Probe
attcttccataaataagcacaggca

SEQ ID NO: 113501 - DNA, 25 bp, Artificial
  Probe
acattcttccataaataagcacagg

SEQ ID NO: 113502 - DNA, 25 bp, Artificial
  Probe
taaattggttgttgtgcttctgata

SEQ ID NO: 113503 - DNA, 25 bp, Artificial
  Probe
cttcccacatatcaacattcagttt

SEQ ID NO: 113504 - DNA, 25 bp, Artificial
  Probe
tatctggtaaattggttgttgtgct

SEQ ID NO: 113505 - DNA, 25 bp, Artificial
  Probe
ccattctagttcttaattcttgagg

SEQ ID NO: 113506 - DNA, 25 bp, Artificial
  Probe
tctaggctatctggtaaattggttg

SEQ ID NO: 113507 - DNA, 25 bp, Artificial
  Probe
tctcactttctaggctatctggtaa

SEQ ID NO: 113508 - DNA, 25 bp, Artificial
  Probe
ctaggctatctggtaaattggttgt

SEQ ID NO: 113509 - DNA, 25 bp, Artificial
  Probe
aaattctgtgtagcataggagagag

SEQ ID NO: 113510 - DNA, 25 bp, Artificial
  Probe
tcttaattcttgaggtattggagat

SEQ ID NO: 113511 - DNA, 25 bp, Artificial
  Probe
ctcactttctaggctatctggtaaa

SEQ ID NO: 113512 - DNA, 25 bp, Artificial
  Probe
tttctctcactttctaggctatctg

SEQ ID NO: 113513 - DNA, 25 bp, Artificial
  Probe
agcagcaacaaacagaaataaagaa

SEQ ID NO: 113514 - DNA, 25 bp, Artificial
  Probe
aagcagcaacaaacagaaataaaga

SEQ ID NO: 113515 - DNA, 25 bp, Artificial
  Probe
gcagcaacaaacagaaataaagaaa

SEQ ID NO: 113516 - DNA, 25 bp, Artificial
  Probe
aaagcagcaacaaacagaaataaag

SEQ ID NO: 113517 - DNA, 25 bp, Artificial
  Probe
agttccctctcactttcagtaaata

SEQ ID NO: 113518 - DNA, 25 bp, Artificial
  Probe
gttccctctcactttcagtaaataa

SEQ ID NO: 113519 - DNA, 25 bp, Artificial
  Probe
ttccctctcactttcagtaaataaa

SEQ ID NO: 113520 - DNA, 25 bp, Artificial
  Probe
cagcaacaaacagaaataaagaaat

SEQ ID NO: 113521 - DNA, 25 bp, Artificial
  Probe
gaaataaatattgtgttgtgcagca

SEQ ID NO: 113522 - DNA, 25 bp, Artificial
  Probe
tgaaataaatattgtgttgtgcagc

SEQ ID NO: 113523 - DNA, 25 bp, Artificial
  Probe
tcagcttgcttagatgttccaaatt

SEQ ID NO: 113524 - DNA, 25 bp, Artificial
  Probe
ttcagcttgcttagatgttccaaat

SEQ ID NO: 113525 - DNA, 25 bp, Artificial
  Probe
cagcttgcttagatgttccaaattt

SEQ ID NO: 113526 - DNA, 25 bp, Artificial
  Probe
aaatattgtgttgtgcagcattaaa

SEQ ID NO: 113527 - DNA, 25 bp, Artificial
  Probe
agcttgcttagatgttccaaattta

SEQ ID NO: 113528 - DNA, 25 bp, Artificial
  Probe
aataaatattgtgttgtgcagcatt

SEQ ID NO: 113529 - DNA, 25 bp, Artificial
  Probe
aaataaatattgtgttgtgcagcat

SEQ ID NO: 113530 - DNA, 25 bp, Artificial
  Probe
gcttgcttagatgttccaaatttag

SEQ ID NO: 113531 - DNA, 25 bp, Artificial
  Probe
ccttcagcttgcttagatgttccaa

SEQ ID NO: 113532 - DNA, 25 bp, Artificial
  Probe
cttcagcttgcttagatgttccaaa

SEQ ID NO: 113533 - DNA, 25 bp, Artificial
  Probe
taaatattgtgttgtgcagcattaa

SEQ ID NO: 113534 - DNA, 25 bp, Artificial
  Probe
caccattgtgaagcagatgaggatc

SEQ ID NO: 113535 - DNA, 25 bp, Artificial
  Probe
aaaagcagcaacaaacagaaataaa

SEQ ID NO: 113536 - DNA, 25 bp, Artificial
  Probe
aaataaaagcagcaacaaacagaaa

SEQ ID NO: 113537 - DNA, 25 bp, Artificial
  Probe
aaaataaaagcagcaacaaacagaa

SEQ ID NO: 113538 - DNA, 25 bp, Artificial
  Probe
ataaatattgtgttgtgcagcatta

SEQ ID NO: 113539 - DNA, 25 bp, Artificial
  Probe
aataaaagcagcaacaaacagaaat

SEQ ID NO: 113540 - DNA, 25 bp, Artificial
  Probe
aagttccctctcactttcagtaaat

SEQ ID NO: 113541 - DNA, 25 bp, Artificial
  Probe
aattaagagtgaaacgcaatcgtac

SEQ ID NO: 113542 - DNA, 25 bp, Artificial
  Probe
cttgcttagatgttccaaatttagt

SEQ ID NO: 113543 - DNA, 25 bp, Artificial
  Probe
taaaagcagcaacaaacagaaataa

SEQ ID NO: 113544 - DNA, 25 bp, Artificial
  Probe
taaaataaaagcagcaacaaacaga

SEQ ID NO: 113545 - DNA, 25 bp, Artificial
  Probe
attaagagtgaaacgcaatcgtaca

SEQ ID NO: 113546 - DNA, 25 bp, Artificial
  Probe
ataaaagcagcaacaaacagaaata

SEQ ID NO: 113547 - DNA, 25 bp, Artificial
  Probe
ttaagagtgaaacgcaatcgtacaa

SEQ ID NO: 113548 - DNA, 25 bp, Artificial
  Probe
ttcccttcagcttgcttagatgttc

SEQ ID NO: 113549 - DNA, 25 bp, Artificial
  Probe
cttcccttcagcttgcttagatgtt

SEQ ID NO: 113550 - DNA, 25 bp, Artificial
  Probe
taagagtgaaacgcaatcgtacaag

SEQ ID NO: 113551 - DNA, 25 bp, Artificial
  Probe
taattaagagtgaaacgcaatcgta

SEQ ID NO: 113552 - DNA, 25 bp, Artificial
  Probe
ctcttcccttcagcttgcttagatg

SEQ ID NO: 113553 - DNA, 25 bp, Artificial
  Probe
atgaaataaatattgtgttgtgcag

SEQ ID NO: 113554 - DNA, 25 bp, Artificial
  Probe
ataaaataaaagcagcaacaaacag

SEQ ID NO: 113555 - DNA, 25 bp, Artificial
  Probe
attaattaagagtgaaacgcaatcg

SEQ ID NO: 113556 - DNA, 25 bp, Artificial
  Probe
agcaacaaacagaaataaagaaata

SEQ ID NO: 113557 - DNA, 25 bp, Artificial
  Probe
tccctctcactttcagtaaataaaa

SEQ ID NO: 113558 - DNA, 25 bp, Artificial
  Probe
ggtctggcatatctaataaggtagc

SEQ ID NO: 113559 - DNA, 25 bp, Artificial
  Probe
tggtctggcatatctaataaggtag

SEQ ID NO: 113560 - DNA, 25 bp, Artificial
  Probe
ctggtctggcatatctaataaggta

SEQ ID NO: 113561 - DNA, 25 bp, Artificial
  Probe
gctggtctggcatatctaataaggt

SEQ ID NO: 113562 - DNA, 25 bp, Artificial
  Probe
gtctggcatatctaataaggtagct

SEQ ID NO: 113563 - DNA, 25 bp, Artificial
  Probe
ggctggtctggcatatctaataagg

SEQ ID NO: 113564 - DNA, 25 bp, Artificial
  Probe
atctaataaggtagcttgtgagtgc

SEQ ID NO: 113565 - DNA, 25 bp, Artificial
  Probe
tggcatatctaataaggtagcttgt

SEQ ID NO: 113566 - DNA, 25 bp, Artificial
  Probe
ggcatatctaataaggtagcttgtg

SEQ ID NO: 113567 - DNA, 25 bp, Artificial
  Probe
ctggcatatctaataaggtagcttg

SEQ ID NO: 113568 - DNA, 25 bp, Artificial
  Probe
tctggcatatctaataaggtagctt

SEQ ID NO: 113569 - DNA, 25 bp, Artificial
  Probe
gcaggattgtgactcttatttcttt

SEQ ID NO: 113570 - DNA, 25 bp, Artificial
  Probe
ccaaacacttaaagagcataaacca

SEQ ID NO: 113571 - DNA, 25 bp, Artificial
  Probe
aaatgtgtttatgaaggtgctcttg

SEQ ID NO: 113572 - DNA, 25 bp, Artificial
  Probe
caaatgtgtttatgaaggtgctctt

SEQ ID NO: 113573 - DNA, 25 bp, Artificial
  Probe
ggcaggattgtgactcttatttctt

SEQ ID NO: 113574 - DNA, 25 bp, Artificial
  Probe
aataaggtagcttgtgagtgcaata

SEQ ID NO: 113575 - DNA, 25 bp, Artificial
  Probe
taataaggtagcttgtgagtgcaat

SEQ ID NO: 113576 - DNA, 25 bp, Artificial
  Probe
ataaggtagcttgtgagtgcaatag

SEQ ID NO: 113577 - DNA, 25 bp, Artificial
  Probe
gccaaacacttaaagagcataaacc

SEQ ID NO: 113578 - DNA, 25 bp, Artificial
  Probe
atgtgtttatgaaggtgctcttgaa

SEQ ID NO: 113579 - DNA, 25 bp, Artificial
  Probe
aatgtgtttatgaaggtgctcttga

SEQ ID NO: 113580 - DNA, 25 bp, Artificial
  Probe
gcatatctaataaggtagcttgtga

SEQ ID NO: 113581 - DNA, 25 bp, Artificial
  Probe
ctaataaggtagcttgtgagtgcaa

SEQ ID NO: 113582 - DNA, 25 bp, Artificial
  Probe
aacacttaaagagcataaaccaaga

SEQ ID NO: 113583 - DNA, 25 bp, Artificial
  Probe
caaacacttaaagagcataaaccaa

SEQ ID NO: 113584 - DNA, 25 bp, Artificial
  Probe
tctaataaggtagcttgtgagtgca

SEQ ID NO: 113585 - DNA, 25 bp, Artificial
  Probe
aagtatcacagacgttcttgtaagg

SEQ ID NO: 113586 - DNA, 25 bp, Artificial
  Probe
tgtgtttatgaaggtgctcttgaag

SEQ ID NO: 113587 - DNA, 25 bp, Artificial
  Probe
cagaaagaaagtggctacaggattg

SEQ ID NO: 113588 - DNA, 25 bp, Artificial
  Probe
gtatcacagacgttcttgtaaggac

SEQ ID NO: 113589 - DNA, 25 bp, Artificial
  Probe
agtatcacagacgttcttgtaagga

SEQ ID NO: 113590 - DNA, 25 bp, Artificial
  Probe
tatctaataaggtagcttgtgagtg

SEQ ID NO: 113591 - DNA, 25 bp, Artificial
  Probe
aaacacttaaagagcataaaccaag

SEQ ID NO: 113592 - DNA, 25 bp, Artificial
  Probe
acaaatgtgtttatgaaggtgctct

SEQ ID NO: 113593 - DNA, 25 bp, Artificial
  Probe
gggcaggattgtgactcttatttct

SEQ ID NO: 113594 - DNA, 25 bp, Artificial
  Probe
gggctggtctggcatatctaataag

SEQ ID NO: 113595 - DNA, 25 bp, Artificial
  Probe
taaggtagcttgtgagtgcaatagg

SEQ ID NO: 113596 - DNA, 25 bp, Artificial
  Probe
gaaagaaagtggctacaggattgtg

SEQ ID NO: 113597 - DNA, 25 bp, Artificial
  Probe
agaaagaaagtggctacaggattgt

SEQ ID NO: 113598 - DNA, 25 bp, Artificial
  Probe
tttagcagaaagtatcacagacgtt

SEQ ID NO: 113599 - DNA, 25 bp, Artificial
  Probe
catgcttcggaaactggacattaaa

SEQ ID NO: 113600 - DNA, 25 bp, Artificial
  Probe
caactacatgcttccgtgagaacaa

SEQ ID NO: 113601 - DNA, 25 bp, Artificial
  Probe
atatctaataaggtagcttgtgagt

SEQ ID NO: 113602 - DNA, 25 bp, Artificial
  Probe
ttagcagaaagtatcacagacgttc

SEQ ID NO: 113603 - DNA, 25 bp, Artificial
  Probe
aatacgatggaggagattctggaag

SEQ ID NO: 113604 - DNA, 25 bp, Artificial
  Probe
caatacgatggaggagattctggaa

SEQ ID NO: 113605 - DNA, 25 bp, Artificial
  Probe
aggagattctggaagagagtgagat

SEQ ID NO: 113606 - DNA, 25 bp, Artificial
  Probe
atcagatgtgcttcagagactacaa

SEQ ID NO: 113607 - DNA, 25 bp, Artificial
  Probe
ggagattctggaagagagtgagatc

SEQ ID NO: 113608 - DNA, 25 bp, Artificial
  Probe
atacgatggaggagattctggaaga

SEQ ID NO: 113609 - DNA, 25 bp, Artificial
  Probe
tcatcagatgtgcttcagagactac

SEQ ID NO: 113610 - DNA, 25 bp, Artificial
  Probe
gaggagattctggaagagagtgaga

SEQ ID NO: 113611 - DNA, 25 bp, Artificial
  Probe
ctcatcagatgtgcttcagagacta

SEQ ID NO: 113612 - DNA, 25 bp, Artificial
  Probe
gtgcttcagagactacaaatacaga

SEQ ID NO: 113613 - DNA, 25 bp, Artificial
  Probe
tgcttcagagactacaaatacagat

SEQ ID NO: 113614 - DNA, 25 bp, Artificial
  Probe
gatggaggagattctggaagagagt

SEQ ID NO: 113615 - DNA, 25 bp, Artificial
  Probe
tacgatggaggagattctggaagag

SEQ ID NO: 113616 - DNA, 25 bp, Artificial
  Probe
gactacaaatacagattggcgaaat

SEQ ID NO: 113617 - DNA, 25 bp, Artificial
  Probe
tcagagactacaaatacagattggc

SEQ ID NO: 113618 - DNA, 25 bp, Artificial
  Probe
agactacaaatacagattggcgaaa

SEQ ID NO: 113619 - DNA, 25 bp, Artificial
  Probe
gcttcagagactacaaatacagatt

SEQ ID NO: 113620 - DNA, 25 bp, Artificial
  Probe
catcagatgtgcttcagagactaca

SEQ ID NO: 113621 - DNA, 25 bp, Artificial
  Probe
atggaggagattctggaagagagtg

SEQ ID NO: 113622 - DNA, 25 bp, Artificial
  Probe
gagactacaaatacagattggcgaa

SEQ ID NO: 113623 - DNA, 25 bp, Artificial
  Probe
atgtgcttcagagactacaaataca

SEQ ID NO: 113624 - DNA, 25 bp, Artificial
  Probe
gatgtgcttcagagactacaaatac

SEQ ID NO: 113625 - DNA, 25 bp, Artificial
  Probe
agatgtgcttcagagactacaaata

SEQ ID NO: 113626 - DNA, 25 bp, Artificial
  Probe
tgtgcttcagagactacaaatacag

SEQ ID NO: 113627 - DNA, 25 bp, Artificial
  Probe
agagactacaaatacagattggcga

SEQ ID NO: 113628 - DNA, 25 bp, Artificial
  Probe
cagagactacaaatacagattggcg

SEQ ID NO: 113629 - DNA, 25 bp, Artificial
  Probe
cagatgtgcttcagagactacaaat

SEQ ID NO: 113630 - DNA, 25 bp, Artificial
  Probe
ggaggagattctggaagagagtgag

SEQ ID NO: 113631 - DNA, 25 bp, Artificial
  Probe
acagttaatttcttcatcttcctca

SEQ ID NO: 113632 - DNA, 25 bp, Artificial
  Probe
ttcagagactacaaatacagattgg

SEQ ID NO: 113633 - DNA, 25 bp, Artificial
  Probe
tcagatgtgcttcagagactacaaa

SEQ ID NO: 113634 - DNA, 25 bp, Artificial
  Probe
gattctggaagagagtgagatctaa

SEQ ID NO: 113635 - DNA, 25 bp, Artificial
  Probe
ctacaaatacagattggcgaaatca

SEQ ID NO: 113636 - DNA, 25 bp, Artificial
  Probe
actacaaatacagattggcgaaatc

SEQ ID NO: 113637 - DNA, 25 bp, Artificial
  Probe
cgatggaggagattctggaagagag

SEQ ID NO: 113638 - DNA, 25 bp, Artificial
  Probe
acaaatacagattggcgaaatcaac

SEQ ID NO: 113639 - DNA, 25 bp, Artificial
  Probe
tacaaatacagattggcgaaatcaa

SEQ ID NO: 113640 - DNA, 25 bp, Artificial
  Probe
cagttaatttcttcatcttcctcaa

SEQ ID NO: 113641 - DNA, 25 bp, Artificial
  Probe
tggaggagattctggaagagagtga

SEQ ID NO: 113642 - DNA, 25 bp, Artificial
  Probe
cttcagagactacaaatacagattg

SEQ ID NO: 113643 - DNA, 25 bp, Artificial
  Probe
caaatacagattggcgaaatcaacg

SEQ ID NO: 113644 - DNA, 25 bp, Artificial
  Probe
agttaatttcttcatcttcctcaag

SEQ ID NO: 113645 - DNA, 25 bp, Artificial
  Probe
ccaatacgatggaggagattctgga

SEQ ID NO: 113646 - DNA, 25 bp, Artificial
  Probe
acgatggaggagattctggaagaga

SEQ ID NO: 113647 - DNA, 25 bp, Artificial
  Probe
cctcaagattctcaagcttctcatt

SEQ ID NO: 113648 - DNA, 25 bp, Artificial
  Probe
cttctcttccaaccaggacatctac

SEQ ID NO: 113649 - DNA, 25 bp, Artificial
  Probe
aagttcatagagtctggacggaaat

SEQ ID NO: 113650 - DNA, 25 bp, Artificial
  Probe
agttcatagagtctggacggaaatg

SEQ ID NO: 113651 - DNA, 25 bp, Artificial
  Probe
aacacagtgaaattctggtttgcta

SEQ ID NO: 113652 - DNA, 25 bp, Artificial
  Probe
gtgaaattctggtttgctactggtg

SEQ ID NO: 113653 - DNA, 25 bp, Artificial
  Probe
cacagtgaaattctggtttgctact

SEQ ID NO: 113654 - DNA, 25 bp, Artificial
  Probe
cctcaaacacagtgaaattctggtt

SEQ ID NO: 113655 - DNA, 25 bp, Artificial
  Probe
acacagtgaaattctggtttgctac

SEQ ID NO: 113656 - DNA, 25 bp, Artificial
  Probe
ccttctcttccaaccaggacatcta

SEQ ID NO: 113657 - DNA, 25 bp, Artificial
  Probe
agtgaaattctggtttgctactggt

SEQ ID NO: 113658 - DNA, 25 bp, Artificial
  Probe
ttctcttccaaccaggacatctacc

SEQ ID NO: 113659 - DNA, 25 bp, Artificial
  Probe
catagagtctggacggaaatggttc

SEQ ID NO: 113660 - DNA, 25 bp, Artificial
  Probe
gttcatagagtctggacggaaatgg

SEQ ID NO: 113661 - DNA, 25 bp, Artificial
  Probe
ctcaaacacagtgaaattctggttt

SEQ ID NO: 113662 - DNA, 25 bp, Artificial
  Probe
atagagtctggacggaaatggttct

SEQ ID NO: 113663 - DNA, 25 bp, Artificial
  Probe
cacctcaaacacagtgaaattctgg

SEQ ID NO: 113664 - DNA, 25 bp, Artificial
  Probe
tcatagagtctggacggaaatggtt

SEQ ID NO: 113665 - DNA, 25 bp, Artificial
  Probe
ttcatagagtctggacggaaatggt

SEQ ID NO: 113666 - DNA, 25 bp, Artificial
  Probe
tgaaattctggtttgctactggtgg

SEQ ID NO: 113667 - DNA, 25 bp, Artificial
  Probe
gtggatgatgacaactacgtgaacc

SEQ ID NO: 113668 - DNA, 25 bp, Artificial
  Probe
gcacctcaaacacagtgaaattctg

SEQ ID NO: 113669 - DNA, 25 bp, Artificial
  Probe
aaacacagtgaaattctggtttgct

SEQ ID NO: 113670 - DNA, 25 bp, Artificial
  Probe
acctcaaacacagtgaaattctggt

SEQ ID NO: 113671 - DNA, 25 bp, Artificial
  Probe
tctcttccaaccaggacatctacct

SEQ ID NO: 113672 - DNA, 25 bp, Artificial
  Probe
tagagtctggacggaaatggttctg

SEQ ID NO: 113673 - DNA, 25 bp, Artificial
  Probe
gaaattctggtttgctactggtggg

SEQ ID NO: 113674 - DNA, 25 bp, Artificial
  Probe
caccttctcttccaaccaggacatc

SEQ ID NO: 113675 - DNA, 25 bp, Artificial
  Probe
ggcacctcaaacacagtgaaattct

SEQ ID NO: 113676 - DNA, 25 bp, Artificial
  Probe
accttctcttccaaccaggacatct

SEQ ID NO: 113677 - DNA, 25 bp, Artificial
  Probe
tggcacctcaaacacagtgaaattc

SEQ ID NO: 113678 - DNA, 25 bp, Artificial
  Probe
aacgtggtgaatgtagctggaagtt

SEQ ID NO: 113679 - DNA, 25 bp, Artificial
  Probe
cgtggtgaatgtagctggaagtttc

SEQ ID NO: 113680 - DNA, 25 bp, Artificial
  Probe
gtggcacctcaaacacagtgaaatt

SEQ ID NO: 113681 - DNA, 25 bp, Artificial
  Probe
tggtgaatgtagctggaagtttcag

SEQ ID NO: 113682 - DNA, 25 bp, Artificial
  Probe
acagtgaaattctggtttgctactg

SEQ ID NO: 113683 - DNA, 25 bp, Artificial
  Probe
cgtggatgatgacaactacgtgaac

SEQ ID NO: 113684 - DNA, 25 bp, Artificial
  Probe
gtggtgaatgtagctggaagtttca

SEQ ID NO: 113685 - DNA, 25 bp, Artificial
  Probe
cagtgaaattctggtttgctactgg

SEQ ID NO: 113686 - DNA, 25 bp, Artificial
  Probe
tggatgatgacaactacgtgaaccc

SEQ ID NO: 113687 - DNA, 25 bp, Artificial
  Probe
acgtggtgaatgtagctggaagttt

SEQ ID NO: 113688 - DNA, 25 bp, Artificial
  Probe
ctttccaccttctcttccaaccagg

SEQ ID NO: 113689 - DNA, 25 bp, Artificial
  Probe
atgacaactacgtgaaccccaaaag

SEQ ID NO: 113690 - DNA, 25 bp, Artificial
  Probe
gatgacaactacgtgaaccccaaaa

SEQ ID NO: 113691 - DNA, 25 bp, Artificial
  Probe
ctggaagtttcagcattcgacagga

SEQ ID NO: 113692 - DNA, 25 bp, Artificial
  Probe
atgatgacaactacgtgaaccccaa

SEQ ID NO: 113693 - DNA, 25 bp, Artificial
  Probe
atgaccgatgtgtatatctgatgct

SEQ ID NO: 113694 - DNA, 25 bp, Artificial
  Probe
tgaccgatgtgtatatctgatgctt

SEQ ID NO: 113695 - DNA, 25 bp, Artificial
  Probe
atagcatgaccgatgtgtatatctg

SEQ ID NO: 113696 - DNA, 25 bp, Artificial
  Probe
gtagatagcatgaccgatgtgtata

SEQ ID NO: 113697 - DNA, 25 bp, Artificial
  Probe
agtagatagcatgaccgatgtgtat

SEQ ID NO: 113698 - DNA, 25 bp, Artificial
  Probe
tagcatgaccgatgtgtatatctga

SEQ ID NO: 113699 - DNA, 25 bp, Artificial
  Probe
tagatagcatgaccgatgtgtatat

SEQ ID NO: 113700 - DNA, 25 bp, Artificial
  Probe
gatagcatgaccgatgtgtatatct

SEQ ID NO: 113701 - DNA, 25 bp, Artificial
  Probe
agatagcatgaccgatgtgtatatc

SEQ ID NO: 113702 - DNA, 25 bp, Artificial
  Probe
catgaccgatgtgtatatctgatgc

SEQ ID NO: 113703 - DNA, 25 bp, Artificial
  Probe
gcatgaccgatgtgtatatctgatg

SEQ ID NO: 113704 - DNA, 25 bp, Artificial
  Probe
agcatgaccgatgtgtatatctgat

SEQ ID NO: 113705 - DNA, 25 bp, Artificial
  Probe
cagtagatagcatgaccgatgtgta

SEQ ID NO: 113706 - DNA, 25 bp, Artificial
  Probe
gaccgatgtgtatatctgatgcttt

SEQ ID NO: 113707 - DNA, 25 bp, Artificial
  Probe
caaccagtagatagcatgaccgatg

SEQ ID NO: 113708 - DNA, 25 bp, Artificial
  Probe
ttgtagaagaggcttcatattctcc

SEQ ID NO: 113709 - DNA, 25 bp, Artificial
  Probe
tcttgtagaagaggcttcatattct

SEQ ID NO: 113710 - DNA, 25 bp, Artificial
  Probe
aaccagtagatagcatgaccgatgt

SEQ ID NO: 113711 - DNA, 25 bp, Artificial
  Probe
cttgtagaagaggcttcatattctc

SEQ ID NO: 113712 - DNA, 25 bp, Artificial
  Probe
atcttgtagaagaggcttcatattc

SEQ ID NO: 113713 - DNA, 25 bp, Artificial
  Probe
gatcttgtagaagaggcttcatatt

SEQ ID NO: 113714 - DNA, 25 bp, Artificial
  Probe
attagagtttaacccctttaccacc

SEQ ID NO: 113715 - DNA, 25 bp, Artificial
  Probe
ccattagagtttaacccctttacca

SEQ ID NO: 113716 - DNA, 25 bp, Artificial
  Probe
tccattagagtttaacccctttacc

SEQ ID NO: 113717 - DNA, 25 bp, Artificial
  Probe
tagagtttaacccctttaccaccta

SEQ ID NO: 113718 - DNA, 25 bp, Artificial
  Probe
ctggaaattcacctacaatcccatg

SEQ ID NO: 113719 - DNA, 25 bp, Artificial
  Probe
ccagtagatagcatgaccgatgtgt

SEQ ID NO: 113720 - DNA, 25 bp, Artificial
  Probe
accagtagatagcatgaccgatgtg

SEQ ID NO: 113721 - DNA, 25 bp, Artificial
  Probe
cattagagtttaacccctttaccac

SEQ ID NO: 113722 - DNA, 25 bp, Artificial
  Probe
accctcagctccattagagtttaac

SEQ ID NO: 113723 - DNA, 25 bp, Artificial
  Probe
caccctcagctccattagagtttaa

SEQ ID NO: 113724 - DNA, 25 bp, Artificial
  Probe
ttagagtttaacccctttaccacct

SEQ ID NO: 113725 - DNA, 25 bp, Artificial
  Probe
cctggaaattcacctacaatcccat

SEQ ID NO: 113726 - DNA, 25 bp, Artificial
  Probe
cagtccagcagcaaccagtagatag

SEQ ID NO: 113727 - DNA, 25 bp, Artificial
  Probe
aagaggcttcatattctcccttcca

SEQ ID NO: 113728 - DNA, 25 bp, Artificial
  Probe
ctacaaagatcagagtgcctggaag

SEQ ID NO: 113729 - DNA, 25 bp, Artificial
  Probe
gctccattagagtttaaccccttta

SEQ ID NO: 113730 - DNA, 25 bp, Artificial
  Probe
atggaccctctggactacaaagatc

SEQ ID NO: 113731 - DNA, 25 bp, Artificial
  Probe
agagtttaacccctttaccacctac

SEQ ID NO: 113732 - DNA, 25 bp, Artificial
  Probe
tagaagaggcttcatattctccctt

SEQ ID NO: 113733 - DNA, 25 bp, Artificial
  Probe
aaagatcagagtgcctggaagtttc

SEQ ID NO: 113734 - DNA, 25 bp, Artificial
  Probe
cctcagctccattagagtttaaccc

SEQ ID NO: 113735 - DNA, 25 bp, Artificial
  Probe
ccctcagctccattagagtttaacc

SEQ ID NO: 113736 - DNA, 25 bp, Artificial
  Probe
gcaaccagtagatagcatgaccgat

SEQ ID NO: 113737 - DNA, 25 bp, Artificial
  Probe
gtagaagaggcttcatattctccct

SEQ ID NO: 113738 - DNA, 25 bp, Artificial
  Probe
aggaattggttgttaatatctgtga

SEQ ID NO: 113739 - DNA, 25 bp, Artificial
  Probe
ggaattggttgttaatatctgtgaa

SEQ ID NO: 113740 - DNA, 25 bp, Artificial
  Probe
aaggaattggttgttaatatctgtg

SEQ ID NO: 113741 - DNA, 25 bp, Artificial
  Probe
atttgtaatatgttggttgcccttt

SEQ ID NO: 113742 - DNA, 25 bp, Artificial
  Probe
catttgtaatatgttggttgccctt

SEQ ID NO: 113743 - DNA, 25 bp, Artificial
  Probe
taaagggtagaggctgtatttcttg

SEQ ID NO: 113744 - DNA, 25 bp, Artificial
  Probe
ttaaagggtagaggctgtatttctt

SEQ ID NO: 113745 - DNA, 25 bp, Artificial
  Probe
aaacccactgatttataccatcttt

SEQ ID NO: 113746 - DNA, 25 bp, Artificial
  Probe
gggagggataactaaatgaatgtaa

SEQ ID NO: 113747 - DNA, 25 bp, Artificial
  Probe
ggcttggttacctgaattctcttat

SEQ ID NO: 113748 - DNA, 25 bp, Artificial
  Probe
aaagggtagaggctgtatttcttgg

SEQ ID NO: 113749 - DNA, 25 bp, Artificial
  Probe
aacccactgatttataccatcttta

SEQ ID NO: 113750 - DNA, 25 bp, Artificial
  Probe
acttgtacgatgtcgaaattaggat

SEQ ID NO: 113751 - DNA, 25 bp, Artificial
  Probe
aacttgtacgatgtcgaaattagga

SEQ ID NO: 113752 - DNA, 25 bp, Artificial
  Probe
aaacttgtacgatgtcgaaattagg

SEQ ID NO: 113753 - DNA, 25 bp, Artificial
  Probe
acccactgatttataccatctttaa

SEQ ID NO: 113754 - DNA, 25 bp, Artificial
  Probe
gcttggttacctgaattctcttata

SEQ ID NO: 113755 - DNA, 25 bp, Artificial
  Probe
tggcttggttacctgaattctctta

SEQ ID NO: 113756 - DNA, 25 bp, Artificial
  Probe
taggaaataatttaggcagctcagc

SEQ ID NO: 113757 - DNA, 25 bp, Artificial
  Probe
cttgtacgatgtcgaaattaggatt

SEQ ID NO: 113758 - DNA, 25 bp, Artificial
  Probe
ttaggaaataatttaggcagctcag

SEQ ID NO: 113759 - DNA, 25 bp, Artificial
  Probe
tttaaagggtagaggctgtatttct

SEQ ID NO: 113760 - DNA, 25 bp, Artificial
  Probe
taaacccactgatttataccatctt

SEQ ID NO: 113761 - DNA, 25 bp, Artificial
  Probe
atggcttggttacctgaattctctt

SEQ ID NO: 113762 - DNA, 25 bp, Artificial
  Probe
attaggaaataatttaggcagctca

SEQ ID NO: 113763 - DNA, 25 bp, Artificial
  Probe
ttgtacgatgtcgaaattaggattt

SEQ ID NO: 113764 - DNA, 25 bp, Artificial
  Probe
aaaggaattggttgttaatatctgt

SEQ ID NO: 113765 - DNA, 25 bp, Artificial
  Probe
tgaagcacgagaaatcttggagaag

SEQ ID NO: 113766 - DNA, 25 bp, Artificial
  Probe
ctgaagcacgagaaatcttggagaa

SEQ ID NO: 113767 - DNA, 25 bp, Artificial
  Probe
cgagaaatcttggagaagacagaaa

SEQ ID NO: 113768 - DNA, 25 bp, Artificial
  Probe
tttgtaatatgttggttgccctttt

SEQ ID NO: 113769 - DNA, 25 bp, Artificial
  Probe
ggggagggataactaaatgaatgta

SEQ ID NO: 113770 - DNA, 25 bp, Artificial
  Probe
catggcttggttacctgaattctct

SEQ ID NO: 113771 - DNA, 25 bp, Artificial
  Probe
ggagggataactaaatgaatgtaaa

SEQ ID NO: 113772 - DNA, 25 bp, Artificial
  Probe
cccactgatttataccatctttaat

SEQ ID NO: 113773 - DNA, 25 bp, Artificial
  Probe
acctgaattctcttataaacccact

SEQ ID NO: 113774 - DNA, 25 bp, Artificial
  Probe
tgtacgatgtcgaaattaggattta

SEQ ID NO: 113775 - DNA, 25 bp, Artificial
  Probe
cctgaattctcttataaacccactg

SEQ ID NO: 113776 - DNA, 25 bp, Artificial
  Probe
acgagaaatcttggagaagacagaa

SEQ ID NO: 113777 - DNA, 25 bp, Artificial
  Probe
cagactttgatagaattcacagcac

SEQ ID NO: 113778 - DNA, 25 bp, Artificial
  Probe
acagactttgatagaattcacagca

SEQ ID NO: 113779 - DNA, 25 bp, Artificial
  Probe
aacagactttgatagaattcacagc

SEQ ID NO: 113780 - DNA, 25 bp, Artificial
  Probe
ttaggcagctcagctcataatattt

SEQ ID NO: 113781 - DNA, 25 bp, Artificial
  Probe
tttaggcagctcagctcataatatt

SEQ ID NO: 113782 - DNA, 25 bp, Artificial
  Probe
atttaggcagctcagctcataatat

SEQ ID NO: 113783 - DNA, 25 bp, Artificial
  Probe
gctactgtgggaagtcttctcatat

SEQ ID NO: 113784 - DNA, 25 bp, Artificial
  Probe
aagatgtcgctaaaggaggtttcag

SEQ ID NO: 113785 - DNA, 25 bp, Artificial
  Probe
caagatgtcgctaaaggaggtttca

SEQ ID NO: 113786 - DNA, 25 bp, Artificial
  Probe
gatgtcgctaaaggaggtttcagag

SEQ ID NO: 113787 - DNA, 25 bp, Artificial
  Probe
agatgtcgctaaaggaggtttcaga

SEQ ID NO: 113788 - DNA, 25 bp, Artificial
  Probe
ctactgtgggaagtcttctcatatg

SEQ ID NO: 113789 - DNA, 25 bp, Artificial
  Probe
tgctactgtgggaagtcttctcata

SEQ ID NO: 113790 - DNA, 25 bp, Artificial
  Probe
gaaagcaagaggacacagatgtagg

SEQ ID NO: 113791 - DNA, 25 bp, Artificial
  Probe
ggaaagcaagaggacacagatgtag

SEQ ID NO: 113792 - DNA, 25 bp, Artificial
  Probe
ccaagatgtcgctaaaggaggtttc

SEQ ID NO: 113793 - DNA, 25 bp, Artificial
  Probe
tactgtgggaagtcttctcatatgg

SEQ ID NO: 113794 - DNA, 25 bp, Artificial
  Probe
ctgtgggaagtcttctcatatggaa

SEQ ID NO: 113795 - DNA, 25 bp, Artificial
  Probe
tggaaagcaagaggacacagatgta

SEQ ID NO: 113796 - DNA, 25 bp, Artificial
  Probe
actgtgggaagtcttctcatatgga

SEQ ID NO: 113797 - DNA, 25 bp, Artificial
  Probe
gtgctactgtgggaagtcttctcat

SEQ ID NO: 113798 - DNA, 25 bp, Artificial
  Probe
aaagcaagaggacacagatgtaggg

SEQ ID NO: 113799 - DNA, 25 bp, Artificial
  Probe
aactggaaagcaagaggacacagat

SEQ ID NO: 113800 - DNA, 25 bp, Artificial
  Probe
cccaagatgtcgctaaaggaggttt

SEQ ID NO: 113801 - DNA, 25 bp, Artificial
  Probe
caagaggacacagatgtagggtcac

SEQ ID NO: 113802 - DNA, 25 bp, Artificial
  Probe
tgtgggaagtcttctcatatggaag

SEQ ID NO: 113803 - DNA, 25 bp, Artificial
  Probe
aagaggacacagatgtagggtcaca

SEQ ID NO: 113804 - DNA, 25 bp, Artificial
  Probe
gaactggaaagcaagaggacacaga

SEQ ID NO: 113805 - DNA, 25 bp, Artificial
  Probe
ataccccaagatgtcgctaaaggag

SEQ ID NO: 113806 - DNA, 25 bp, Artificial
  Probe
ctggaaagcaagaggacacagatgt

SEQ ID NO: 113807 - DNA, 25 bp, Artificial
  Probe
actggaaagcaagaggacacagatg

SEQ ID NO: 113808 - DNA, 25 bp, Artificial
  Probe
tgaactggaaagcaagaggacacag

SEQ ID NO: 113809 - DNA, 25 bp, Artificial
  Probe
agaggacacagatgtagggtcacag

SEQ ID NO: 113810 - DNA, 25 bp, Artificial
  Probe
cataccccaagatgtcgctaaagga

SEQ ID NO: 113811 - DNA, 25 bp, Artificial
  Probe
ccataccccaagatgtcgctaaagg

SEQ ID NO: 113812 - DNA, 25 bp, Artificial
  Probe
cccataccccaagatgtcgctaaag

SEQ ID NO: 113813 - DNA, 25 bp, Artificial
  Probe
ctagcaaaggcagagcttaggaagg

SEQ ID NO: 113814 - DNA, 25 bp, Artificial
  Probe
cctagcaaaggcagagcttaggaag

SEQ ID NO: 113815 - DNA, 25 bp, Artificial
  Probe
aaaatgggaggttctccagcaagtc

SEQ ID NO: 113816 - DNA, 25 bp, Artificial
  Probe
agttccgaaggtatctctccatatt

SEQ ID NO: 113817 - DNA, 25 bp, Artificial
  Probe
aagttccgaaggtatctctccatat

SEQ ID NO: 113818 - DNA, 25 bp, Artificial
  Probe
gaagttccgaaggtatctctccata

SEQ ID NO: 113819 - DNA, 25 bp, Artificial
  Probe
atattgttctcttcctgaccacctt

SEQ ID NO: 113820 - DNA, 25 bp, Artificial
  Probe
tattgttctcttcctgaccaccttc

SEQ ID NO: 113821 - DNA, 25 bp, Artificial
  Probe
gaatgagtaactgtgtggttgacat

SEQ ID NO: 113822 - DNA, 25 bp, Artificial
  Probe
ttgcctctctaccaggaatcatatt

SEQ ID NO: 113823 - DNA, 25 bp, Artificial
  Probe
aatattgttctcttcctgaccacct

SEQ ID NO: 113824 - DNA, 25 bp, Artificial
  Probe
acactgctgcgttaatcctatcatt

SEQ ID NO: 113825 - DNA, 25 bp, Artificial
  Probe
agaagttccgaaggtatctctccat

SEQ ID NO: 113826 - DNA, 25 bp, Artificial
  Probe
aagtctcagttgggttgtaaagtaa

SEQ ID NO: 113827 - DNA, 25 bp, Artificial
  Probe
agtctcagttgggttgtaaagtaag

SEQ ID NO: 113828 - DNA, 25 bp, Artificial
  Probe
gaagtctcagttgggttgtaaagta

SEQ ID NO: 113829 - DNA, 25 bp, Artificial
  Probe
gttccgaaggtatctctccatattt

SEQ ID NO: 113830 - DNA, 25 bp, Artificial
  Probe
gtctcagttgggttgtaaagtaagt

SEQ ID NO: 113831 - DNA, 25 bp, Artificial
  Probe
cctatcatttatgcctttgttggtg

SEQ ID NO: 113832 - DNA, 25 bp, Artificial
  Probe
tcctatcatttatgcctttgttggt

SEQ ID NO: 113833 - DNA, 25 bp, Artificial
  Probe
ctgcgttaatcctatcatttatgcc

SEQ ID NO: 113834 - DNA, 25 bp, Artificial
  Probe
ttgggttgtaaagtaagtagcagtc

SEQ ID NO: 113835 - DNA, 25 bp, Artificial
  Probe
agttgggttgtaaagtaagtagcag

SEQ ID NO: 113836 - DNA, 25 bp, Artificial
  Probe
tcagttgggttgtaaagtaagtagc

SEQ ID NO: 113837 - DNA, 25 bp, Artificial
  Probe
tctcagttgggttgtaaagtaagta

SEQ ID NO: 113838 - DNA, 25 bp, Artificial
  Probe
gcgttaatcctatcatttatgcctt

SEQ ID NO: 113839 - DNA, 25 bp, Artificial
  Probe
tgcgttaatcctatcatttatgcct

SEQ ID NO: 113840 - DNA, 25 bp, Artificial
  Probe
tgctgcgttaatcctatcatttatg

SEQ ID NO: 113841 - DNA, 25 bp, Artificial
  Probe
actgctgcgttaatcctatcattta

SEQ ID NO: 113842 - DNA, 25 bp, Artificial
  Probe
atcctatcatttatgcctttgttgg

SEQ ID NO: 113843 - DNA, 25 bp, Artificial
  Probe
aatgagtaactgtgtggttgacatg

SEQ ID NO: 113844 - DNA, 25 bp, Artificial
  Probe
ctgctgcgttaatcctatcatttat

SEQ ID NO: 113845 - DNA, 25 bp, Artificial
  Probe
gttgggttgtaaagtaagtagcagt

SEQ ID NO: 113846 - DNA, 25 bp, Artificial
  Probe
cagttgggttgtaaagtaagtagca

SEQ ID NO: 113847 - DNA, 25 bp, Artificial
  Probe
ctcagttgggttgtaaagtaagtag

SEQ ID NO: 113848 - DNA, 25 bp, Artificial
  Probe
gctgcgttaatcctatcatttatgc

SEQ ID NO: 113849 - DNA, 25 bp, Artificial
  Probe
aagaagtctcagttgggttgtaaag

SEQ ID NO: 113850 - DNA, 25 bp, Artificial
  Probe
catttatgcctttgttggtgagaag

SEQ ID NO: 113851 - DNA, 25 bp, Artificial
  Probe
gttggtgagaagttccgaaggtatc

SEQ ID NO: 113852 - DNA, 25 bp, Artificial
  Probe
atttatgcctttgttggtgagaagt

SEQ ID NO: 113853 - DNA, 25 bp, Artificial
  Probe
tatcatttatgcctttgttggtgag

SEQ ID NO: 113854 - DNA, 25 bp, Artificial
  Probe
ctatcatttatgcctttgttggtga

SEQ ID NO: 113855 - DNA, 25 bp, Artificial
  Probe
tttatgcctttgttggtgagaagtt

SEQ ID NO: 113856 - DNA, 25 bp, Artificial
  Probe
cacactgctgcgttaatcctatcat

SEQ ID NO: 113857 - DNA, 25 bp, Artificial
  Probe
caagaagtctcagttgggttgtaaa

SEQ ID NO: 113858 - DNA, 25 bp, Artificial
  Probe
ttggtgagaagttccgaaggtatct

SEQ ID NO: 113859 - DNA, 25 bp, Artificial
  Probe
atcatttatgcctttgttggtgaga

SEQ ID NO: 113860 - DNA, 25 bp, Artificial
  Probe
agaagtctcagttgggttgtaaagt

SEQ ID NO: 113861 - DNA, 25 bp, Artificial
  Probe
gactcggagagacagtattatgtgg

SEQ ID NO: 113862 - DNA, 25 bp, Artificial
  Probe
ggactcggagagacagtattatgtg

SEQ ID NO: 113863 - DNA, 25 bp, Artificial
  Probe
ctcggactcggagagacagtattat

SEQ ID NO: 113864 - DNA, 25 bp, Artificial
  Probe
ctaaacgacaccagaaattcactca

SEQ ID NO: 113865 - DNA, 25 bp, Artificial
  Probe
actaaacgacaccagaaattcactc

SEQ ID NO: 113866 - DNA, 25 bp, Artificial
  Probe
gactaaacgacaccagaaattcact

SEQ ID NO: 113867 - DNA, 25 bp, Artificial
  Probe
tacaggactaaacgacaccagaaat

SEQ ID NO: 113868 - DNA, 25 bp, Artificial
  Probe
atacaggactaaacgacaccagaaa

SEQ ID NO: 113869 - DNA, 25 bp, Artificial
  Probe
taaacgacaccagaaattcactcac

SEQ ID NO: 113870 - DNA, 25 bp, Artificial
  Probe
tcggactcggagagacagtattatg

SEQ ID NO: 113871 - DNA, 25 bp, Artificial
  Probe
caggactaaacgacaccagaaattc

SEQ ID NO: 113872 - DNA, 25 bp, Artificial
  Probe
gatacaggactaaacgacaccagaa

SEQ ID NO: 113873 - DNA, 25 bp, Artificial
  Probe
ggactaaacgacaccagaaattcac

SEQ ID NO: 113874 - DNA, 25 bp, Artificial
  Probe
aggactaaacgacaccagaaattca

SEQ ID NO: 113875 - DNA, 25 bp, Artificial
  Probe
cggactcggagagacagtattatgt

SEQ ID NO: 113876 - DNA, 25 bp, Artificial
  Probe
acaggactaaacgacaccagaaatt

SEQ ID NO: 113877 - DNA, 25 bp, Artificial
  Probe
acgacaccagaaattcactcacttt

SEQ ID NO: 113878 - DNA, 25 bp, Artificial
  Probe
aacgacaccagaaattcactcactt

SEQ ID NO: 113879 - DNA, 25 bp, Artificial
  Probe
aaacgacaccagaaattcactcact

SEQ ID NO: 113880 - DNA, 25 bp, Artificial
  Probe
actcggagagacagtattatgtggc

SEQ ID NO: 113881 - DNA, 25 bp, Artificial
  Probe
actcggactcggagagacagtatta

SEQ ID NO: 113882 - DNA, 25 bp, Artificial
  Probe
cagtagatccttctaagttgccctc

SEQ ID NO: 113883 - DNA, 25 bp, Artificial
  Probe
ctatacctaggaatgaatgagcgag

SEQ ID NO: 113884 - DNA, 25 bp, Artificial
  Probe
ggagtagactctggcctatacctag

SEQ ID NO: 113885 - DNA, 25 bp, Artificial
  Probe
ggatacaggactaaacgacaccaga

SEQ ID NO: 113886 - DNA, 25 bp, Artificial
  Probe
tagatccttctaagttgccctccat

SEQ ID NO: 113887 - DNA, 25 bp, Artificial
  Probe
ctaggaatgaatgagcgaggagagc

SEQ ID NO: 113888 - DNA, 25 bp, Artificial
  Probe
gtattatgtggccctgaataaagac

SEQ ID NO: 113889 - DNA, 25 bp, Artificial
  Probe
agtattatgtggccctgaataaaga

SEQ ID NO: 113890 - DNA, 25 bp, Artificial
  Probe
tattatgtggccctgaataaagacg

SEQ ID NO: 113891 - DNA, 25 bp, Artificial
  Probe
aattctggaatttatcagcttggct

SEQ ID NO: 113892 - DNA, 25 bp, Artificial
  Probe
ggaattctggaatttatcagcttgg

SEQ ID NO: 113893 - DNA, 25 bp, Artificial
  Probe
cttcggaattctggaatttatcagc

SEQ ID NO: 113894 - DNA, 25 bp, Artificial
  Probe
gcttcggaattctggaatttatcag

SEQ ID NO: 113895 - DNA, 25 bp, Artificial
  Probe
cgacaccagaaattcactcactttt

SEQ ID NO: 113896 - DNA, 25 bp, Artificial
  Probe
cggaattctggaatttatcagcttg

SEQ ID NO: 113897 - DNA, 25 bp, Artificial
  Probe
tcggaattctggaatttatcagctt

SEQ ID NO: 113898 - DNA, 25 bp, Artificial
  Probe
ttcggaattctggaatttatcagct

SEQ ID NO: 113899 - DNA, 25 bp, Artificial
  Probe
atgtccagagacctcttccgctata

SEQ ID NO: 113900 - DNA, 25 bp, Artificial
  Probe
caggccagtagatccttctaagttg

SEQ ID NO: 113901 - DNA, 25 bp, Artificial
  Probe
gaattctggaatttatcagcttggc

SEQ ID NO: 113902 - DNA, 25 bp, Artificial
  Probe
agtagatccttctaagttgccctcc

SEQ ID NO: 113903 - DNA, 25 bp, Artificial
  Probe
acagtattatgtggccctgaataaa

SEQ ID NO: 113904 - DNA, 25 bp, Artificial
  Probe
gacagtattatgtggccctgaataa

SEQ ID NO: 113905 - DNA, 25 bp, Artificial
  Probe
cagtattatgtggccctgaataaag

SEQ ID NO: 113906 - DNA, 25 bp, Artificial
  Probe
acaaggagatgttattgacagcata

SEQ ID NO: 113907 - DNA, 25 bp, Artificial
  Probe
gagatgttattgacagcatagaagc

SEQ ID NO: 113908 - DNA, 25 bp, Artificial
  Probe
aggagatgttattgacagcatagaa

SEQ ID NO: 113909 - DNA, 25 bp, Artificial
  Probe
aaggagatgttattgacagcataga

SEQ ID NO: 113910 - DNA, 25 bp, Artificial
  Probe
caaggagatgttattgacagcatag

SEQ ID NO: 113911 - DNA, 25 bp, Artificial
  Probe
ggagatgttattgacagcatagaag

SEQ ID NO: 113912 - DNA, 25 bp, Artificial
  Probe
atgttattgacagcatagaagccaa

SEQ ID NO: 113913 - DNA, 25 bp, Artificial
  Probe
agatgttattgacagcatagaagcc

SEQ ID NO: 113914 - DNA, 25 bp, Artificial
  Probe
gatgttattgacagcatagaagcca

SEQ ID NO: 113915 - DNA, 25 bp, Artificial
  Probe
ggaagctgacattatggacattaac

SEQ ID NO: 113916 - DNA, 25 bp, Artificial
  Probe
tggaagctgacattatggacattaa

SEQ ID NO: 113917 - DNA, 25 bp, Artificial
  Probe
gaagctgacattatggacattaacg

SEQ ID NO: 113918 - DNA, 25 bp, Artificial
  Probe
agctgacattatggacattaacgaa

SEQ ID NO: 113919 - DNA, 25 bp, Artificial
  Probe
aagctgacattatggacattaacga

SEQ ID NO: 113920 - DNA, 25 bp, Artificial
  Probe
ctggaagctgacattatggacatta

SEQ ID NO: 113921 - DNA, 25 bp, Artificial
  Probe
tgacagcatagaagccaatgtagaa

SEQ ID NO: 113922 - DNA, 25 bp, Artificial
  Probe
ttgacagcatagaagccaatgtaga

SEQ ID NO: 113923 - DNA, 25 bp, Artificial
  Probe
aaaggaagatacagaaagaccgatt

SEQ ID NO: 113924 - DNA, 25 bp, Artificial
  Probe
gctgacattatggacattaacgaaa

SEQ ID NO: 113925 - DNA, 25 bp, Artificial
  Probe
aaggaagatacagaaagaccgattg

SEQ ID NO: 113926 - DNA, 25 bp, Artificial
  Probe
caaaggaagatacagaaagaccgat

SEQ ID NO: 113927 - DNA, 25 bp, Artificial
  Probe
tattgacagcatagaagccaatgta

SEQ ID NO: 113928 - DNA, 25 bp, Artificial
  Probe
gttattgacagcatagaagccaatg

SEQ ID NO: 113929 - DNA, 25 bp, Artificial
  Probe
ttattgacagcatagaagccaatgt

SEQ ID NO: 113930 - DNA, 25 bp, Artificial
  Probe
tgttattgacagcatagaagccaat

SEQ ID NO: 113931 - DNA, 25 bp, Artificial
  Probe
tcaaaggaagatacagaaagaccga

SEQ ID NO: 113932 - DNA, 25 bp, Artificial
  Probe
agcatagaagccaatgtagaaagtg

SEQ ID NO: 113933 - DNA, 25 bp, Artificial
  Probe
cagcatagaagccaatgtagaaagt

SEQ ID NO: 113934 - DNA, 25 bp, Artificial
  Probe
aagtccaagatgaagaaatcacaga

SEQ ID NO: 113935 - DNA, 25 bp, Artificial
  Probe
caagtccaagatgaagaaatcacag

SEQ ID NO: 113936 - DNA, 25 bp, Artificial
  Probe
agatgaagaaatcacagaggatgac

SEQ ID NO: 113937 - DNA, 25 bp, Artificial
  Probe
aagatgaagaaatcacagaggatga

SEQ ID NO: 113938 - DNA, 25 bp, Artificial
  Probe
caagatgaagaaatcacagaggatg

SEQ ID NO: 113939 - DNA, 25 bp, Artificial
  Probe
ccaagatgaagaaatcacagaggat

SEQ ID NO: 113940 - DNA, 25 bp, Artificial
  Probe
agtccaagatgaagaaatcacagag

SEQ ID NO: 113941 - DNA, 25 bp, Artificial
  Probe
attgacagcatagaagccaatgtag

SEQ ID NO: 113942 - DNA, 25 bp, Artificial
  Probe
gtacattaaggagtttggctttctg

SEQ ID NO: 113943 - DNA, 25 bp, Artificial
  Probe
agtacattaaggagtttggctttct

SEQ ID NO: 113944 - DNA, 25 bp, Artificial
  Probe
tacattaaggagtttggctttctgc

SEQ ID NO: 113945 - DNA, 25 bp, Artificial
  Probe
aagtacattaaggagtttggctttc

SEQ ID NO: 113946 - DNA, 25 bp, Artificial
  Probe
agcgtcaaaggaagatacagaaaga

SEQ ID NO: 113947 - DNA, 25 bp, Artificial
  Probe
cagcgtcaaaggaagatacagaaag

SEQ ID NO: 113948 - DNA, 25 bp, Artificial
  Probe
gatgaagaaatcacagaggatgacc

SEQ ID NO: 113949 - DNA, 25 bp, Artificial
  Probe
gtccaagatgaagaaatcacagagg

SEQ ID NO: 113950 - DNA, 25 bp, Artificial
  Probe
aggaagatacagaaagaccgattgg

SEQ ID NO: 113951 - DNA, 25 bp, Artificial
  Probe
aaggttgttataagactgtgtagcc

SEQ ID NO: 113952 - DNA, 25 bp, Artificial
  Probe
gaaggttgttataagactgtgtagc

SEQ ID NO: 113953 - DNA, 25 bp, Artificial
  Probe
cttgaaggttgttataagactgtgt

SEQ ID NO: 113954 - DNA, 25 bp, Artificial
  Probe
tgaaggttgttataagactgtgtag

SEQ ID NO: 113955 - DNA, 25 bp, Artificial
  Probe
gcttcatatttcttccttcctctct

SEQ ID NO: 113956 - DNA, 25 bp, Artificial
  Probe
tgtttctggcttcatatttcttcct

SEQ ID NO: 113957 - DNA, 25 bp, Artificial
  Probe
gtgtttctggcttcatatttcttcc

SEQ ID NO: 113958 - DNA, 25 bp, Artificial
  Probe
gtttctggcttcatatttcttcctt

SEQ ID NO: 113959 - DNA, 25 bp, Artificial
  Probe
atatttcttccttcctctctcttcc

SEQ ID NO: 113960 - DNA, 25 bp, Artificial
  Probe
tttctggcttcatatttcttccttc

SEQ ID NO: 113961 - DNA, 25 bp, Artificial
  Probe
cgtgtttctggcttcatatttcttc

SEQ ID NO: 113962 - DNA, 25 bp, Artificial
  Probe
ttgaaggttgttataagactgtgta

SEQ ID NO: 113963 - DNA, 25 bp, Artificial
  Probe
ttctggcttcatatttcttccttcc

SEQ ID NO: 113964 - DNA, 25 bp, Artificial
  Probe
ggcttcatatttcttccttcctctc

SEQ ID NO: 113965 - DNA, 25 bp, Artificial
  Probe
tatttcttccttcctctctcttccc

SEQ ID NO: 113966 - DNA, 25 bp, Artificial
  Probe
aggttgttataagactgtgtagccg

SEQ ID NO: 113967 - DNA, 25 bp, Artificial
  Probe
ctggcttcatatttcttccttcctc

SEQ ID NO: 113968 - DNA, 25 bp, Artificial
  Probe
gcagaaactcttgaaggttgttata

SEQ ID NO: 113969 - DNA, 25 bp, Artificial
  Probe
tcatatttcttccttcctctctctt

SEQ ID NO: 113970 - DNA, 25 bp, Artificial
  Probe
ttcatatttcttccttcctctctct

SEQ ID NO: 113971 - DNA, 25 bp, Artificial
  Probe
tggcttcatatttcttccttcctct

SEQ ID NO: 113972 - DNA, 25 bp, Artificial
  Probe
tctggcttcatatttcttccttcct

SEQ ID NO: 113973 - DNA, 25 bp, Artificial
  Probe
catatttcttccttcctctctcttc

SEQ ID NO: 113974 - DNA, 25 bp, Artificial
  Probe
cttcatatttcttccttcctctctc

SEQ ID NO: 113975 - DNA, 25 bp, Artificial
  Probe
ccgtgtttctggcttcatatttctt

SEQ ID NO: 113976 - DNA, 25 bp, Artificial
  Probe
gtcctcgtaatcactctcaaggttc

SEQ ID NO: 113977 - DNA, 25 bp, Artificial
  Probe
tcttgaaggttgttataagactgtg

SEQ ID NO: 113978 - DNA, 25 bp, Artificial
  Probe
ctcttgaaggttgttataagactgt

SEQ ID NO: 113979 - DNA, 25 bp, Artificial
  Probe
actcttgaaggttgttataagactg

SEQ ID NO: 113980 - DNA, 25 bp, Artificial
  Probe
tgtcctcgtaatcactctcaaggtt

SEQ ID NO: 113981 - DNA, 25 bp, Artificial
  Probe
aactcttgaaggttgttataagact

SEQ ID NO: 113982 - DNA, 25 bp, Artificial
  Probe
tgcagaaactcttgaaggttgttat

SEQ ID NO: 113983 - DNA, 25 bp, Artificial
  Probe
tcctcgtaatcactctcaaggttcc

SEQ ID NO: 113984 - DNA, 25 bp, Artificial
  Probe
ctgtcctcgtaatcactctcaaggt

SEQ ID NO: 113985 - DNA, 25 bp, Artificial
  Probe
cgtaatcactctcaaggttcccaag

SEQ ID NO: 113986 - DNA, 25 bp, Artificial
  Probe
ttgcagaaactcttgaaggttgtta

SEQ ID NO: 113987 - DNA, 25 bp, Artificial
  Probe
gtaatcactctcaaggttcccaagc

SEQ ID NO: 113988 - DNA, 25 bp, Artificial
  Probe
tttgcagaaactcttgaaggttgtt

SEQ ID NO: 113989 - DNA, 25 bp, Artificial
  Probe
tcgtaatcactctcaaggttcccaa

SEQ ID NO: 113990 - DNA, 25 bp, Artificial
  Probe
cagaaactcttgaaggttgttataa

SEQ ID NO: 113991 - DNA, 25 bp, Artificial
  Probe
ctccaaccagtgtttcatttgccta

SEQ ID NO: 113992 - DNA, 25 bp, Artificial
  Probe
ggctgtcctcgtaatcactctcaag

SEQ ID NO: 113993 - DNA, 25 bp, Artificial
  Probe
cttggctgtcctcgtaatcactctc

SEQ ID NO: 113994 - DNA, 25 bp, Artificial
  Probe
ctcgtaatcactctcaaggttccca

SEQ ID NO: 113995 - DNA, 25 bp, Artificial
  Probe
agaaactcttgaaggttgttataag

SEQ ID NO: 113996 - DNA, 25 bp, Artificial
  Probe
tcacagattaggaattaacagccaa

SEQ ID NO: 113997 - DNA, 25 bp, Artificial
  Probe
ctcacagattaggaattaacagcca

SEQ ID NO: 113998 - DNA, 25 bp, Artificial
  Probe
cagctcacagattaggaattaacag

SEQ ID NO: 113999 - DNA, 25 bp, Artificial
  Probe
gcagctcacagattaggaattaaca

SEQ ID NO: 114000 - DNA, 25 bp, Artificial
  Probe
gtgacaggtatggtaagtccttagg

SEQ ID NO: 114001 - DNA, 25 bp, Artificial
  Probe
ggtgacaggtatggtaagtccttag

SEQ ID NO: 114002 - DNA, 25 bp, Artificial
  Probe
cagattaggaattaacagccaaagg

SEQ ID NO: 114003 - DNA, 25 bp, Artificial
  Probe
cacagattaggaattaacagccaaa

SEQ ID NO: 114004 - DNA, 25 bp, Artificial
  Probe
ggcagctcacagattaggaattaac

SEQ ID NO: 114005 - DNA, 25 bp, Artificial
  Probe
acagattaggaattaacagccaaag

SEQ ID NO: 114006 - DNA, 25 bp, Artificial
  Probe
caggtatggtaagtccttaggattg

SEQ ID NO: 114007 - DNA, 25 bp, Artificial
  Probe
acaggtatggtaagtccttaggatt

SEQ ID NO: 114008 - DNA, 25 bp, Artificial
  Probe
gacaggtatggtaagtccttaggat

SEQ ID NO: 114009 - DNA, 25 bp, Artificial
  Probe
aggtatggtaagtccttaggattgg

SEQ ID NO: 114010 - DNA, 25 bp, Artificial
  Probe
tgacaggtatggtaagtccttagga

SEQ ID NO: 114011 - DNA, 25 bp, Artificial
  Probe
gctcacagattaggaattaacagcc

SEQ ID NO: 114012 - DNA, 25 bp, Artificial
  Probe
agctcacagattaggaattaacagc

SEQ ID NO: 114013 - DNA, 25 bp, Artificial
  Probe
ggtatggtaagtccttaggattggc

SEQ ID NO: 114014 - DNA, 25 bp, Artificial
  Probe
ctagagcctagaattgacgctttag

SEQ ID NO: 114015 - DNA, 25 bp, Artificial
  Probe
tagagcctagaattgacgctttagt

SEQ ID NO: 114016 - DNA, 25 bp, Artificial
  Probe
ttgtccttagggagaagctgaatta

SEQ ID NO: 114017 - DNA, 25 bp, Artificial
  Probe
gggcagctcacagattaggaattaa

SEQ ID NO: 114018 - DNA, 25 bp, Artificial
  Probe
tgtccttagggagaagctgaattag

SEQ ID NO: 114019 - DNA, 25 bp, Artificial
  Probe
gtatatcgctctttccagcacaatc

SEQ ID NO: 114020 - DNA, 25 bp, Artificial
  Probe
cctagagcctagaattgacgcttta

SEQ ID NO: 114021 - DNA, 25 bp, Artificial
  Probe
gggtgacaggtatggtaagtcctta

SEQ ID NO: 114022 - DNA, 25 bp, Artificial
  Probe
agtatatcgctctttccagcacaat

SEQ ID NO: 114023 - DNA, 25 bp, Artificial
  Probe
cttgtccttagggagaagctgaatt

SEQ ID NO: 114024 - DNA, 25 bp, Artificial
  Probe
gtatggtaagtccttaggattggcc

SEQ ID NO: 114025 - DNA, 25 bp, Artificial
  Probe
ttaacaacagcagcctagagcctag

SEQ ID NO: 114026 - DNA, 25 bp, Artificial
  Probe
agagcctagaattgacgctttagtg

SEQ ID NO: 114027 - DNA, 25 bp, Artificial
  Probe
cagtatatcgctctttccagcacaa

SEQ ID NO: 114028 - DNA, 25 bp, Artificial
  Probe
aacagcagcctagagcctagaattg

SEQ ID NO: 114029 - DNA, 25 bp, Artificial
  Probe
caacagcagcctagagcctagaatt

SEQ ID NO: 114030 - DNA, 25 bp, Artificial
  Probe
tcttgtccttagggagaagctgaat

SEQ ID NO: 114031 - DNA, 25 bp, Artificial
  Probe
tatatcgctctttccagcacaatcg

SEQ ID NO: 114032 - DNA, 25 bp, Artificial
  Probe
ctctgtgagcaccattagacaccag

SEQ ID NO: 114033 - DNA, 25 bp, Artificial
  Probe
ccttagggagaagctgaattagcag

SEQ ID NO: 114034 - DNA, 25 bp, Artificial
  Probe
gtccttagggagaagctgaattagc

SEQ ID NO: 114035 - DNA, 25 bp, Artificial
  Probe
cacagagggtcctgcttctatcttc

SEQ ID NO: 114036 - DNA, 25 bp, Artificial
  Probe
agattaggaattaacagccaaaggc

SEQ ID NO: 114037 - DNA, 25 bp, Artificial
  Probe
gagcctagaattgacgctttagtgg

SEQ ID NO: 114038 - DNA, 25 bp, Artificial
  Probe
cagcagcctagagcctagaattgac

SEQ ID NO: 114039 - DNA, 25 bp, Artificial
  Probe
taacaacagcagcctagagcctaga

SEQ ID NO: 114040 - DNA, 25 bp, Artificial
  Probe
ctcttgtccttagggagaagctgaa

SEQ ID NO: 114041 - DNA, 25 bp, Artificial
  Probe
gtgacaagaatctaatgaacagtgg

SEQ ID NO: 114042 - DNA, 25 bp, Artificial
  Probe
cgtgacaagaatctaatgaacagtg

SEQ ID NO: 114043 - DNA, 25 bp, Artificial
  Probe
gctacgtgacaagaatctaatgaac

SEQ ID NO: 114044 - DNA, 25 bp, Artificial
  Probe
aatggctacgtgacaagaatctaat

SEQ ID NO: 114045 - DNA, 25 bp, Artificial
  Probe
tttcatttatccgcactatacaggt

SEQ ID NO: 114046 - DNA, 25 bp, Artificial
  Probe
gtttcatttatccgcactatacagg

SEQ ID NO: 114047 - DNA, 25 bp, Artificial
  Probe
tctctgtttcatttatccgcactat

SEQ ID NO: 114048 - DNA, 25 bp, Artificial
  Probe
acgtgacaagaatctaatgaacagt

SEQ ID NO: 114049 - DNA, 25 bp, Artificial
  Probe
ggctacgtgacaagaatctaatgaa

SEQ ID NO: 114050 - DNA, 25 bp, Artificial
  Probe
gaatggctacgtgacaagaatctaa

SEQ ID NO: 114051 - DNA, 25 bp, Artificial
  Probe
tgacaagaatctaatgaacagtggg

SEQ ID NO: 114052 - DNA, 25 bp, Artificial
  Probe
atggctacgtgacaagaatctaatg

SEQ ID NO: 114053 - DNA, 25 bp, Artificial
  Probe
gtctctgtttcatttatccgcacta

SEQ ID NO: 114054 - DNA, 25 bp, Artificial
  Probe
gttaatgagtttgaggaaagggtct

SEQ ID NO: 114055 - DNA, 25 bp, Artificial
  Probe
tacgtgacaagaatctaatgaacag

SEQ ID NO: 114056 - DNA, 25 bp, Artificial
  Probe
ctacgtgacaagaatctaatgaaca

SEQ ID NO: 114057 - DNA, 25 bp, Artificial
  Probe
tctgtttcatttatccgcactatac

SEQ ID NO: 114058 - DNA, 25 bp, Artificial
  Probe
aaagggtctctgtttcatttatccg

SEQ ID NO: 114059 - DNA, 25 bp, Artificial
  Probe
ctctgtttcatttatccgcactata

SEQ ID NO: 114060 - DNA, 25 bp, Artificial
  Probe
ttaatgagtttgaggaaagggtctc

SEQ ID NO: 114061 - DNA, 25 bp, Artificial
  Probe
tggctacgtgacaagaatctaatga

SEQ ID NO: 114062 - DNA, 25 bp, Artificial
  Probe
agaatggctacgtgacaagaatcta

SEQ ID NO: 114063 - DNA, 25 bp, Artificial
  Probe
cgttaatgagtttgaggaaagggtc

SEQ ID NO: 114064 - DNA, 25 bp, Artificial
  Probe
gaagaatggctacgtgacaagaatc

SEQ ID NO: 114065 - DNA, 25 bp, Artificial
  Probe
tgtttcatttatccgcactatacag

SEQ ID NO: 114066 - DNA, 25 bp, Artificial
  Probe
ctgtttcatttatccgcactataca

SEQ ID NO: 114067 - DNA, 25 bp, Artificial
  Probe
taatgagtttgaggaaagggtctct

SEQ ID NO: 114068 - DNA, 25 bp, Artificial
  Probe
cacccgttaatgagtttgaggaaag

SEQ ID NO: 114069 - DNA, 25 bp, Artificial
  Probe
ttcatttatccgcactatacaggtg

SEQ ID NO: 114070 - DNA, 25 bp, Artificial
  Probe
aagaatggctacgtgacaagaatct

SEQ ID NO: 114071 - DNA, 25 bp, Artificial
  Probe
aaacacatctttcctgtcactttcc

SEQ ID NO: 114072 - DNA, 25 bp, Artificial
  Probe
gtacacacccgttaatgagtttgag

SEQ ID NO: 114073 - DNA, 25 bp, Artificial
  Probe
acacccgttaatgagtttgaggaaa

SEQ ID NO: 114074 - DNA, 25 bp, Artificial
  Probe
tacacacccgttaatgagtttgagg

SEQ ID NO: 114075 - DNA, 25 bp, Artificial
  Probe
aatgagtttgaggaaagggtctctg

SEQ ID NO: 114076 - DNA, 25 bp, Artificial
  Probe
ccgttaatgagtttgaggaaagggt

SEQ ID NO: 114077 - DNA, 25 bp, Artificial
  Probe
acccgttaatgagtttgaggaaagg

SEQ ID NO: 114078 - DNA, 25 bp, Artificial
  Probe
aggaaagggtctctgtttcatttat

SEQ ID NO: 114079 - DNA, 25 bp, Artificial
  Probe
aagggtctctgtttcatttatccgc

SEQ ID NO: 114080 - DNA, 25 bp, Artificial
  Probe
gaaagggtctctgtttcatttatcc

SEQ ID NO: 114081 - DNA, 25 bp, Artificial
  Probe
ggaaagggtctctgtttcatttatc

SEQ ID NO: 114082 - DNA, 25 bp, Artificial
  Probe
gaggaaagggtctctgtttcattta

SEQ ID NO: 114083 - DNA, 25 bp, Artificial
  Probe
gtcagtcaattggaagaatggctac

SEQ ID NO: 114084 - DNA, 25 bp, Artificial
  Probe
ggaagaatggctacgtgacaagaat

SEQ ID NO: 114085 - DNA, 25 bp, Artificial
  Probe
aattggaagaatggctacgtgacaa

SEQ ID NO: 114086 - DNA, 25 bp, Artificial
  Probe
cttaaccagtcttggagttctcttc

SEQ ID NO: 114087 - DNA, 25 bp, Artificial
  Probe
acttaaccagtcttggagttctctt

SEQ ID NO: 114088 - DNA, 25 bp, Artificial
  Probe
tgtgaaccaataaagactgtttgtg

SEQ ID NO: 114089 - DNA, 25 bp, Artificial
  Probe
gtgtgaaccaataaagactgtttgt

SEQ ID NO: 114090 - DNA, 25 bp, Artificial
  Probe
ttaaccagtcttggagttctcttcc

SEQ ID NO: 114091 - DNA, 25 bp, Artificial
  Probe
cacttaaccagtcttggagttctct

SEQ ID NO: 114092 - DNA, 25 bp, Artificial
  Probe
ggacatctttaagaccaagtttctc

SEQ ID NO: 114093 - DNA, 25 bp, Artificial
  Probe
atctttaagaccaagtttctctccg

SEQ ID NO: 114094 - DNA, 25 bp, Artificial
  Probe
gtgaaccaataaagactgtttgtgc

SEQ ID NO: 114095 - DNA, 25 bp, Artificial
  Probe
catctttaagaccaagtttctctcc

SEQ ID NO: 114096 - DNA, 25 bp, Artificial
  Probe
gggacatctttaagaccaagtttct

SEQ ID NO: 114097 - DNA, 25 bp, Artificial
  Probe
agggacatctttaagaccaagtttc

SEQ ID NO: 114098 - DNA, 25 bp, Artificial
  Probe
cagggacatctttaagaccaagttt

SEQ ID NO: 114099 - DNA, 25 bp, Artificial
  Probe
ctttaagaccaagtttctctccgag

SEQ ID NO: 114100 - DNA, 25 bp, Artificial
  Probe
acatctttaagaccaagtttctctc

SEQ ID NO: 114101 - DNA, 25 bp, Artificial
  Probe
gacatctttaagaccaagtttctct

SEQ ID NO: 114102 - DNA, 25 bp, Artificial
  Probe
tctttaagaccaagtttctctccga

SEQ ID NO: 114103 - DNA, 25 bp, Artificial
  Probe
gaaccaataaagactgtttgtgcct

SEQ ID NO: 114104 - DNA, 25 bp, Artificial
  Probe
cttcagaccagggacatctttaaga

SEQ ID NO: 114105 - DNA, 25 bp, Artificial
  Probe
tgaaccaataaagactgtttgtgcc

SEQ ID NO: 114106 - DNA, 25 bp, Artificial
  Probe
gtctgatgatgccttgatggtccta

SEQ ID NO: 114107 - DNA, 25 bp, Artificial
  Probe
ttcagaccagggacatctttaagac

SEQ ID NO: 114108 - DNA, 25 bp, Artificial
  Probe
tgatgatgccttgatggtcctagag

SEQ ID NO: 114109 - DNA, 25 bp, Artificial
  Probe
ctgatgatgccttgatggtcctaga

SEQ ID NO: 114110 - DNA, 25 bp, Artificial
  Probe
tctgatgatgccttgatggtcctag

SEQ ID NO: 114111 - DNA, 25 bp, Artificial
  Probe
ccagggacatctttaagaccaagtt

SEQ ID NO: 114112 - DNA, 25 bp, Artificial
  Probe
gcacttaaccagtcttggagttctc

SEQ ID NO: 114113 - DNA, 25 bp, Artificial
  Probe
atatcctcctgcacttaaccagtct

SEQ ID NO: 114114 - DNA, 25 bp, Artificial
  Probe
catatcctcctgcacttaaccagtc

SEQ ID NO: 114115 - DNA, 25 bp, Artificial
  Probe
gaccagggacatctttaagaccaag

SEQ ID NO: 114116 - DNA, 25 bp, Artificial
  Probe
ccttcagaccagggacatctttaag

SEQ ID NO: 114117 - DNA, 25 bp, Artificial
  Probe
tatcctcctgcacttaaccagtctt

SEQ ID NO: 114118 - DNA, 25 bp, Artificial
  Probe
agaccagggacatctttaagaccaa

SEQ ID NO: 114119 - DNA, 25 bp, Artificial
  Probe
taaccagtcttggagttctcttccg

SEQ ID NO: 114120 - DNA, 25 bp, Artificial
  Probe
accagggacatctttaagaccaagt

SEQ ID NO: 114121 - DNA, 25 bp, Artificial
  Probe
tcagaccagggacatctttaagacc

SEQ ID NO: 114122 - DNA, 25 bp, Artificial
  Probe
gatgatgccttgatggtcctagagg

SEQ ID NO: 114123 - DNA, 25 bp, Artificial
  Probe
cagaccagggacatctttaagacca

SEQ ID NO: 114124 - DNA, 25 bp, Artificial
  Probe
ctgcacttaaccagtcttggagttc

SEQ ID NO: 114125 - DNA, 25 bp, Artificial
  Probe
tgaggaaaatctccaaagagcaatt

SEQ ID NO: 114126 - DNA, 25 bp, Artificial
  Probe
ttgaggaaaatctccaaagagcaat

SEQ ID NO: 114127 - DNA, 25 bp, Artificial
  Probe
ccatatcctcctgcacttaaccagt

SEQ ID NO: 114128 - DNA, 25 bp, Artificial
  Probe
taagaccaagtttctctccgagatt

SEQ ID NO: 114129 - DNA, 25 bp, Artificial
  Probe
ttaagaccaagtttctctccgagat

SEQ ID NO: 114130 - DNA, 25 bp, Artificial
  Probe
ggatctccctggactaaggattcag

SEQ ID NO: 114131 - DNA, 25 bp, Artificial
  Probe
tcatatcttccctcaacttcttcac

SEQ ID NO: 114132 - DNA, 25 bp, Artificial
  Probe
ctcatatcttccctcaacttcttca

SEQ ID NO: 114133 - DNA, 25 bp, Artificial
  Probe
cctcatatcttccctcaacttcttc

SEQ ID NO: 114134 - DNA, 25 bp, Artificial
  Probe
catatcttccctcaacttcttcacc

SEQ ID NO: 114135 - DNA, 25 bp, Artificial
  Probe
ccctcatatcttccctcaacttctt

SEQ ID NO: 114136 - DNA, 25 bp, Artificial
  Probe
atatcttccctcaacttcttcaccc

SEQ ID NO: 114137 - DNA, 25 bp, Artificial
  Probe
taacttagtcacggcaaagaggatg

SEQ ID NO: 114138 - DNA, 25 bp, Artificial
  Probe
gtaacttagtcacggcaaagaggat

SEQ ID NO: 114139 - DNA, 25 bp, Artificial
  Probe
gtcttcatcttcccctcatatcttc

SEQ ID NO: 114140 - DNA, 25 bp, Artificial
  Probe
cagatgttgcaggaccttgtttaaa

SEQ ID NO: 114141 - DNA, 25 bp, Artificial
  Probe
tcttcatcttcccctcatatcttcc

SEQ ID NO: 114142 - DNA, 25 bp, Artificial
  Probe
cgtcttcatcttcccctcatatctt

SEQ ID NO: 114143 - DNA, 25 bp, Artificial
  Probe
tgtaacttagtcacggcaaagagga

SEQ ID NO: 114144 - DNA, 25 bp, Artificial
  Probe
cttcatcttcccctcatatcttccc

SEQ ID NO: 114145 - DNA, 25 bp, Artificial
  Probe
atcttcccctcatatcttccctcaa

SEQ ID NO: 114146 - DNA, 25 bp, Artificial
  Probe
ttcatcttcccctcatatcttccct

SEQ ID NO: 114147 - DNA, 25 bp, Artificial
  Probe
ctctggatctgaatcctacaagctc

SEQ ID NO: 114148 - DNA, 25 bp, Artificial
  Probe
gtgtaacttagtcacggcaaagagg

SEQ ID NO: 114149 - DNA, 25 bp, Artificial
  Probe
ggtgtaacttagtcacggcaaagag

SEQ ID NO: 114150 - DNA, 25 bp, Artificial
  Probe
ttcccctcatatcttccctcaactt

SEQ ID NO: 114151 - DNA, 25 bp, Artificial
  Probe
tcatcttcccctcatatcttccctc

SEQ ID NO: 114152 - DNA, 25 bp, Artificial
  Probe
aacttagtcacggcaaagaggatgt

SEQ ID NO: 114153 - DNA, 25 bp, Artificial
  Probe
catcttcccctcatatcttccctca

SEQ ID NO: 114154 - DNA, 25 bp, Artificial
  Probe
gatcaccaagcaggaagccatctag

SEQ ID NO: 114155 - DNA, 25 bp, Artificial
  Probe
aacttcttcacccctaaaggacaac

SEQ ID NO: 114156 - DNA, 25 bp, Artificial
  Probe
caacttcttcacccctaaaggacaa

SEQ ID NO: 114157 - DNA, 25 bp, Artificial
  Probe
ctcaacttcttcacccctaaaggac

SEQ ID NO: 114158 - DNA, 25 bp, Artificial
  Probe
cccctcatatcttccctcaacttct

SEQ ID NO: 114159 - DNA, 25 bp, Artificial
  Probe
tcccctcatatcttccctcaacttc

SEQ ID NO: 114160 - DNA, 25 bp, Artificial
  Probe
cttcccctcatatcttccctcaact

SEQ ID NO: 114161 - DNA, 25 bp, Artificial
  Probe
tcttcccctcatatcttccctcaac

SEQ ID NO: 114162 - DNA, 25 bp, Artificial
  Probe
agatgttgcaggaccttgtttaaaa

SEQ ID NO: 114163 - DNA, 25 bp, Artificial
  Probe
gatctgaatcctacaagctcctgcc

SEQ ID NO: 114164 - DNA, 25 bp, Artificial
  Probe
ccgtcttcatcttcccctcatatct

SEQ ID NO: 114165 - DNA, 25 bp, Artificial
  Probe
ttccctcaacttcttcacccctaaa

SEQ ID NO: 114166 - DNA, 25 bp, Artificial
  Probe
tggctctggatctgaatcctacaag

SEQ ID NO: 114167 - DNA, 25 bp, Artificial
  Probe
aagtggctctggatctgaatcctac

SEQ ID NO: 114168 - DNA, 25 bp, Artificial
  Probe
caagtggctctggatctgaatccta

SEQ ID NO: 114169 - DNA, 25 bp, Artificial
  Probe
ctggatctgaatcctacaagctcct

SEQ ID NO: 114170 - DNA, 25 bp, Artificial
  Probe
tctggatctgaatcctacaagctcc

SEQ ID NO: 114171 - DNA, 25 bp, Artificial
  Probe
tatcttccctcaacttcttcacccc

SEQ ID NO: 114172 - DNA, 25 bp, Artificial
  Probe
caaagaggatgtgacaagagggacc

SEQ ID NO: 114173 - DNA, 25 bp, Artificial
  Probe
tcaacttcttcacccctaaaggaca

SEQ ID NO: 114174 - DNA, 25 bp, Artificial
  Probe
gtggctctggatctgaatcctacaa

SEQ ID NO: 114175 - DNA, 25 bp, Artificial
  Probe
tggatctgaatcctacaagctcctg

SEQ ID NO: 114176 - DNA, 25 bp, Artificial
  Probe
gaatcaagaatgagactgaggacca

SEQ ID NO: 114177 - DNA, 25 bp, Artificial
  Probe
gtattcactgatggaggatgaggac

SEQ ID NO: 114178 - DNA, 25 bp, Artificial
  Probe
agtattcactgatggaggatgagga

SEQ ID NO: 114179 - DNA, 25 bp, Artificial
  Probe
aatcaagaatgagactgaggaccag

SEQ ID NO: 114180 - DNA, 25 bp, Artificial
  Probe
ggaatcaagaatgagactgaggacc

SEQ ID NO: 114181 - DNA, 25 bp, Artificial
  Probe
cctgtccatgtctgtcttctaatcc

SEQ ID NO: 114182 - DNA, 25 bp, Artificial
  Probe
tccatgtctgtcttctaatcccttc

SEQ ID NO: 114183 - DNA, 25 bp, Artificial
  Probe
tattcactgatggaggatgaggacg

SEQ ID NO: 114184 - DNA, 25 bp, Artificial
  Probe
gtccatgtctgtcttctaatccctt

SEQ ID NO: 114185 - DNA, 25 bp, Artificial
  Probe
catgtctgtcttctaatcccttccc

SEQ ID NO: 114186 - DNA, 25 bp, Artificial
  Probe
ccatgtctgtcttctaatcccttcc

SEQ ID NO: 114187 - DNA, 25 bp, Artificial
  Probe
gggaatcaagaatgagactgaggac

SEQ ID NO: 114188 - DNA, 25 bp, Artificial
  Probe
ctgggaatcaagaatgagactgagg

SEQ ID NO: 114189 - DNA, 25 bp, Artificial
  Probe
ctgtccatgtctgtcttctaatccc

SEQ ID NO: 114190 - DNA, 25 bp, Artificial
  Probe
ccctgtccatgtctgtcttctaatc

SEQ ID NO: 114191 - DNA, 25 bp, Artificial
  Probe
tgtccatgtctgtcttctaatccct

SEQ ID NO: 114192 - DNA, 25 bp, Artificial
  Probe
tccctgtccatgtctgtcttctaat

SEQ ID NO: 114193 - DNA, 25 bp, Artificial
  Probe
tgggaatcaagaatgagactgagga

SEQ ID NO: 114194 - DNA, 25 bp, Artificial
  Probe
gctgggaatcaagaatgagactgag

SEQ ID NO: 114195 - DNA, 25 bp, Artificial
  Probe
ctccctgtccatgtctgtcttctaa

SEQ ID NO: 114196 - DNA, 25 bp, Artificial
  Probe
aagaatgagactgaggaccagtatt

SEQ ID NO: 114197 - DNA, 25 bp, Artificial
  Probe
agaatgagactgaggaccagtattc

SEQ ID NO: 114198 - DNA, 25 bp, Artificial
  Probe
gaatgagactgaggaccagtattca

SEQ ID NO: 114199 - DNA, 25 bp, Artificial
  Probe
caagaatgagactgaggaccagtat

SEQ ID NO: 114200 - DNA, 25 bp, Artificial
  Probe
aatgagactgaggaccagtattcac

SEQ ID NO: 114201 - DNA, 25 bp, Artificial
  Probe
cagtattcactgatggaggatgagg

SEQ ID NO: 114202 - DNA, 25 bp, Artificial
  Probe
ccagtattcactgatggaggatgag

SEQ ID NO: 114203 - DNA, 25 bp, Artificial
  Probe
cagagccctataacctgtacggatc

SEQ ID NO: 114204 - DNA, 25 bp, Artificial
  Probe
gaccagtattcactgatggaggatg

SEQ ID NO: 114205 - DNA, 25 bp, Artificial
  Probe
gactgaggaccagtattcactgatg

SEQ ID NO: 114206 - DNA, 25 bp, Artificial
  Probe
agactgaggaccagtattcactgat

SEQ ID NO: 114207 - DNA, 25 bp, Artificial
  Probe
atgagactgaggaccagtattcact

SEQ ID NO: 114208 - DNA, 25 bp, Artificial
  Probe
tcaagaatgagactgaggaccagta

SEQ ID NO: 114209 - DNA, 25 bp, Artificial
  Probe
ggctgggaatcaagaatgagactga

SEQ ID NO: 114210 - DNA, 25 bp, Artificial
  Probe
gagtggctgggaatcaagaatgaga

SEQ ID NO: 114211 - DNA, 25 bp, Artificial
  Probe
atgtctgtcttctaatcccttcccc

SEQ ID NO: 114212 - DNA, 25 bp, Artificial
  Probe
accagtattcactgatggaggatga

SEQ ID NO: 114213 - DNA, 25 bp, Artificial
  Probe
atcaagaatgagactgaggaccagt

SEQ ID NO: 114214 - DNA, 25 bp, Artificial
  Probe
tggctgggaatcaagaatgagactg

SEQ ID NO: 114215 - DNA, 25 bp, Artificial
  Probe
gtggctgggaatcaagaatgagact

SEQ ID NO: 114216 - DNA, 25 bp, Artificial
  Probe
agtggctgggaatcaagaatgagac

SEQ ID NO: 114217 - DNA, 25 bp, Artificial
  Probe
cctgaaggagctggtattgcactac

SEQ ID NO: 114218 - DNA, 25 bp, Artificial
  Probe
gagactgaggaccagtattcactga

SEQ ID NO: 114219 - DNA, 25 bp, Artificial
  Probe
tgagactgaggaccagtattcactg

SEQ ID NO: 114220 - DNA, 25 bp, Artificial
  Probe
ggaccagtattcactgatggaggat

SEQ ID NO: 114221 - DNA, 25 bp, Artificial
  Probe
aactcttcctctcgttctgaatgat

SEQ ID NO: 114222 - DNA, 25 bp, Artificial
  Probe
gcactactcgtaacataatgataac

SEQ ID NO: 114223 - DNA, 25 bp, Artificial
  Probe
actcttcctctcgttctgaatgatg

SEQ ID NO: 114224 - DNA, 25 bp, Artificial
  Probe
gataacctcaagactatcaggagaa

SEQ ID NO: 114225 - DNA, 25 bp, Artificial
  Probe
actcgtaacataatgataacctcaa

SEQ ID NO: 114226 - DNA, 25 bp, Artificial
  Probe
cgtaacataatgataacctcaagac

SEQ ID NO: 114227 - DNA, 25 bp, Artificial
  Probe
gtcgctttcttatgatacaaaccaa

SEQ ID NO: 114228 - DNA, 25 bp, Artificial
  Probe
gaggtcgctttcttatgatacaaac

SEQ ID NO: 114229 - DNA, 25 bp, Artificial
  Probe
tcgtaacataatgataacctcaaga

SEQ ID NO: 114230 - DNA, 25 bp, Artificial
  Probe
cactactcgtaacataatgataacc

SEQ ID NO: 114231 - DNA, 25 bp, Artificial
  Probe
tttgtttgtttgagatatggtgtgt

SEQ ID NO: 114232 - DNA, 25 bp, Artificial
  Probe
tcgctttcttatgatacaaaccaaa

SEQ ID NO: 114233 - DNA, 25 bp, Artificial
  Probe
actactcgtaacataatgataacct

SEQ ID NO: 114234 - DNA, 25 bp, Artificial
  Probe
ggaggtcgctttcttatgatacaaa

SEQ ID NO: 114235 - DNA, 25 bp, Artificial
  Probe
ctcgtaacataatgataacctcaag

SEQ ID NO: 114236 - DNA, 25 bp, Artificial
  Probe
tgtttgtttgagatatggtgtgtaa

SEQ ID NO: 114237 - DNA, 25 bp, Artificial
  Probe
ttgtttgtttgagatatggtgtgta

SEQ ID NO: 114238 - DNA, 25 bp, Artificial
  Probe
tatgatacaaaccaaatggctacct

SEQ ID NO: 114239 - DNA, 25 bp, Artificial
  Probe
ccagtttatgaagaaaggaaccaaa

SEQ ID NO: 114240 - DNA, 25 bp, Artificial
  Probe
cttggaggtcgctttcttatgatac

SEQ ID NO: 114241 - DNA, 25 bp, Artificial
  Probe
tcttggaggtcgctttcttatgata

SEQ ID NO: 114242 - DNA, 25 bp, Artificial
  Probe
ttatgatacaaaccaaatggctacc

SEQ ID NO: 114243 - DNA, 25 bp, Artificial
  Probe
cgctttcttatgatacaaaccaaat

SEQ ID NO: 114244 - DNA, 25 bp, Artificial
  Probe
ttcttatgatacaaaccaaatggct

SEQ ID NO: 114245 - DNA, 25 bp, Artificial
  Probe
tttgtttgagatatggtgtgtaaga

SEQ ID NO: 114246 - DNA, 25 bp, Artificial
  Probe
gtttgtttgagatatggtgtgtaag

SEQ ID NO: 114247 - DNA, 25 bp, Artificial
  Probe
tactcgtaacataatgataacctca

SEQ ID NO: 114248 - DNA, 25 bp, Artificial
  Probe
atgatacaaaccaaatggctacctg

SEQ ID NO: 114249 - DNA, 25 bp, Artificial
  Probe
ctcttcctctcgttctgaatgatgc

SEQ ID NO: 114250 - DNA, 25 bp, Artificial
  Probe
ctactcgtaacataatgataacctc

SEQ ID NO: 114251 - DNA, 25 bp, Artificial
  Probe
tggaggtcgctttcttatgatacaa

SEQ ID NO: 114252 - DNA, 25 bp, Artificial
  Probe
ttggaggtcgctttcttatgataca

SEQ ID NO: 114253 - DNA, 25 bp, Artificial
  Probe
aggaaccaaattattagttacgctt

SEQ ID NO: 114254 - DNA, 25 bp, Artificial
  Probe
aaggaaccaaattattagttacgct

SEQ ID NO: 114255 - DNA, 25 bp, Artificial
  Probe
ttgtttgagatatggtgtgtaagat

SEQ ID NO: 114256 - DNA, 25 bp, Artificial
  Probe
tgcactactcgtaacataatgataa

SEQ ID NO: 114257 - DNA, 25 bp, Artificial
  Probe
ttgcactactcgtaacataatgata

SEQ ID NO: 114258 - DNA, 25 bp, Artificial
  Probe
cttatgatacaaaccaaatggctac

SEQ ID NO: 114259 - DNA, 25 bp, Artificial
  Probe
tttcttatgatacaaaccaaatggc

SEQ ID NO: 114260 - DNA, 25 bp, Artificial
  Probe
tcttatgatacaaaccaaatggcta

SEQ ID NO: 114261 - DNA, 25 bp, Artificial
  Probe
ctttctatcatgcgttgactgtatg

SEQ ID NO: 114262 - DNA, 25 bp, Artificial
  Probe
cagtttatgaagaaaggaaccaaat

SEQ ID NO: 114263 - DNA, 25 bp, Artificial
  Probe
ggaaccaaattattagttacgcttt

SEQ ID NO: 114264 - DNA, 25 bp, Artificial
  Probe
aaaggaaccaaattattagttacgc

SEQ ID NO: 114265 - DNA, 25 bp, Artificial
  Probe
tccagtttatgaagaaaggaaccaa

SEQ ID NO: 114266 - DNA, 25 bp, Artificial
  Probe
agttcttcaagctcaatgtcatcaa

SEQ ID NO: 114267 - DNA, 25 bp, Artificial
  Probe
gttcttcaagctcaatgtcatcaag

SEQ ID NO: 114268 - DNA, 25 bp, Artificial
  Probe
aagaggagatgagaataatgaagaa

SEQ ID NO: 114269 - DNA, 25 bp, Artificial
  Probe
gggatttgaaagaggagatgagaat

SEQ ID NO: 114270 - DNA, 25 bp, Artificial
  Probe
cagttcttcaagctcaatgtcatca

SEQ ID NO: 114271 - DNA, 25 bp, Artificial
  Probe
gagagcagacagatcatcagacaga

SEQ ID NO: 114272 - DNA, 25 bp, Artificial
  Probe
tgaagaattagaggaaactgaaagc

SEQ ID NO: 114273 - DNA, 25 bp, Artificial
  Probe
agaggagatgagaataatgaagaat

SEQ ID NO: 114274 - DNA, 25 bp, Artificial
  Probe
tatagaagcgagagcagacagatca

SEQ ID NO: 114275 - DNA, 25 bp, Artificial
  Probe
ccagttcttcaagctcaatgtcatc

SEQ ID NO: 114276 - DNA, 25 bp, Artificial
  Probe
ggatttgaaagaggagatgagaata

SEQ ID NO: 114277 - DNA, 25 bp, Artificial
  Probe
caatgtcatcaagaggctcaggaag

SEQ ID NO: 114278 - DNA, 25 bp, Artificial
  Probe
agagcagacagatcatcagacagaa

SEQ ID NO: 114279 - DNA, 25 bp, Artificial
  Probe
ctatagaagcgagagcagacagatc

SEQ ID NO: 114280 - DNA, 25 bp, Artificial
  Probe
cttcaagctcaatgtcatcaagagg

SEQ ID NO: 114281 - DNA, 25 bp, Artificial
  Probe
atagaagcgagagcagacagatcat

SEQ ID NO: 114282 - DNA, 25 bp, Artificial
  Probe
agaattagaggaaactgaaagctga

SEQ ID NO: 114283 - DNA, 25 bp, Artificial
  Probe
gaggagatgagaataatgaagaatt

SEQ ID NO: 114284 - DNA, 25 bp, Artificial
  Probe
tgaaagaggagatgagaataatgaa

SEQ ID NO: 114285 - DNA, 25 bp, Artificial
  Probe
ttgaaagaggagatgagaataatga

SEQ ID NO: 114286 - DNA, 25 bp, Artificial
  Probe
aagaattagaggaaactgaaagctg

SEQ ID NO: 114287 - DNA, 25 bp, Artificial
  Probe
tcaatgtcatcaagaggctcaggaa

SEQ ID NO: 114288 - DNA, 25 bp, Artificial
  Probe
ttcttcaagctcaatgtcatcaaga

SEQ ID NO: 114289 - DNA, 25 bp, Artificial
  Probe
gaagaattagaggaaactgaaagct

SEQ ID NO: 114290 - DNA, 25 bp, Artificial
  Probe
tcttcaagctcaatgtcatcaagag

SEQ ID NO: 114291 - DNA, 25 bp, Artificial
  Probe
gagcagacagatcatcagacagaaa

SEQ ID NO: 114292 - DNA, 25 bp, Artificial
  Probe
aaagaggagatgagaataatgaaga

SEQ ID NO: 114293 - DNA, 25 bp, Artificial
  Probe
tacacagatgatcttccaccacctc

SEQ ID NO: 114294 - DNA, 25 bp, Artificial
  Probe
ctacacagatgatcttccaccacct

SEQ ID NO: 114295 - DNA, 25 bp, Artificial
  Probe
tagaagcgagagcagacagatcatc

SEQ ID NO: 114296 - DNA, 25 bp, Artificial
  Probe
gaaagaggagatgagaataatgaag

SEQ ID NO: 114297 - DNA, 25 bp, Artificial
  Probe
cgagagcagacagatcatcagacag

SEQ ID NO: 114298 - DNA, 25 bp, Artificial
  Probe
tttgaaagaggagatgagaataatg

SEQ ID NO: 114299 - DNA, 25 bp, Artificial
  Probe
atgaagaattagaggaaactgaaag

SEQ ID NO: 114300 - DNA, 25 bp, Artificial
  Probe
ctcaatgtcatcaagaggctcagga

SEQ ID NO: 114301 - DNA, 25 bp, Artificial
  Probe
gatttgaaagaggagatgagaataa

SEQ ID NO: 114302 - DNA, 25 bp, Artificial
  Probe
aatgaagaattagaggaaactgaaa

SEQ ID NO: 114303 - DNA, 25 bp, Artificial
  Probe
ttcaagctcaatgtcatcaagaggc

SEQ ID NO: 114304 - DNA, 25 bp, Artificial
  Probe
cctacacagatgatcttccaccacc

SEQ ID NO: 114305 - DNA, 25 bp, Artificial
  Probe
cagacagatcatcagacagaaaagg

SEQ ID NO: 114306 - DNA, 25 bp, Artificial
  Probe
atcccagttcttcaagctcaatgtc

SEQ ID NO: 114307 - DNA, 25 bp, Artificial
  Probe
gatcccagttcttcaagctcaatgt

SEQ ID NO: 114308 - DNA, 25 bp, Artificial
  Probe
ggggatttgaaagaggagatgagaa

SEQ ID NO: 114309 - DNA, 25 bp, Artificial
  Probe
tgagaataatgaagaattagaggaa

SEQ ID NO: 114310 - DNA, 25 bp, Artificial
  Probe
atttgaaagaggagatgagaataat

SEQ ID NO: 114311 - DNA, 25 bp, Artificial
  Probe
ctgatgccaatgagtctagattgta

SEQ ID NO: 114312 - DNA, 25 bp, Artificial
  Probe
tgatgccaatgagtctagattgtac

SEQ ID NO: 114313 - DNA, 25 bp, Artificial
  Probe
gatgccaatgagtctagattgtacc

SEQ ID NO: 114314 - DNA, 25 bp, Artificial
  Probe
ctctgatgccaatgagtctagattg

SEQ ID NO: 114315 - DNA, 25 bp, Artificial
  Probe
atgccaatgagtctagattgtacct

SEQ ID NO: 114316 - DNA, 25 bp, Artificial
  Probe
tctgatgccaatgagtctagattgt

SEQ ID NO: 114317 - DNA, 25 bp, Artificial
  Probe
tgccaatgagtctagattgtacctc

SEQ ID NO: 114318 - DNA, 25 bp, Artificial
  Probe
ccaatgagtctagattgtacctcag

SEQ ID NO: 114319 - DNA, 25 bp, Artificial
  Probe
caatgagtctagattgtacctcaga

SEQ ID NO: 114320 - DNA, 25 bp, Artificial
  Probe
aatgagtctagattgtacctcagag

SEQ ID NO: 114321 - DNA, 25 bp, Artificial
  Probe
atgagtctagattgtacctcagagc

SEQ ID NO: 114322 - DNA, 25 bp, Artificial
  Probe
actctgatgccaatgagtctagatt

SEQ ID NO: 114323 - DNA, 25 bp, Artificial
  Probe
ctagattgtacctcagagctccatg

SEQ ID NO: 114324 - DNA, 25 bp, Artificial
  Probe
gagtctagattgtacctcagagctc

SEQ ID NO: 114325 - DNA, 25 bp, Artificial
  Probe
gccaatgagtctagattgtacctca

SEQ ID NO: 114326 - DNA, 25 bp, Artificial
  Probe
tctagattgtacctcagagctccat

SEQ ID NO: 114327 - DNA, 25 bp, Artificial
  Probe
tgagtctagattgtacctcagagct

SEQ ID NO: 114328 - DNA, 25 bp, Artificial
  Probe
tagattgtacctcagagctccatgt

SEQ ID NO: 114329 - DNA, 25 bp, Artificial
  Probe
agtctagattgtacctcagagctcc

SEQ ID NO: 114330 - DNA, 25 bp, Artificial
  Probe
gtctagattgtacctcagagctcca

SEQ ID NO: 114331 - DNA, 25 bp, Artificial
  Probe
agattgtacctcagagctccatgtg

SEQ ID NO: 114332 - DNA, 25 bp, Artificial
  Probe
ggacagggtgagaagagttaaatta

SEQ ID NO: 114333 - DNA, 25 bp, Artificial
  Probe
atctaatttatccaccaccatcacc

SEQ ID NO: 114334 - DNA, 25 bp, Artificial
  Probe
catctaatttatccaccaccatcac

SEQ ID NO: 114335 - DNA, 25 bp, Artificial
  Probe
gcatctaatttatccaccaccatca

SEQ ID NO: 114336 - DNA, 25 bp, Artificial
  Probe
tggactgagtttagagacatttctt

SEQ ID NO: 114337 - DNA, 25 bp, Artificial
  Probe
atggactgagtttagagacatttct

SEQ ID NO: 114338 - DNA, 25 bp, Artificial
  Probe
tagagacatttctttcatttcccac

SEQ ID NO: 114339 - DNA, 25 bp, Artificial
  Probe
agagacatttctttcatttcccacc

SEQ ID NO: 114340 - DNA, 25 bp, Artificial
  Probe
gacagggtgagaagagttaaattaa

SEQ ID NO: 114341 - DNA, 25 bp, Artificial
  Probe
ggactgagtttagagacatttcttt

SEQ ID NO: 114342 - DNA, 25 bp, Artificial
  Probe
ttagagacatttctttcatttccca

SEQ ID NO: 114343 - DNA, 25 bp, Artificial
  Probe
catggactgagtttagagacatttc

SEQ ID NO: 114344 - DNA, 25 bp, Artificial
  Probe
acagggtgagaagagttaaattaaa

SEQ ID NO: 114345 - DNA, 25 bp, Artificial
  Probe
gggacagggtgagaagagttaaatt

SEQ ID NO: 114346 - DNA, 25 bp, Artificial
  Probe
caaagcaaattcactgtaacccatg

SEQ ID NO: 114347 - DNA, 25 bp, Artificial
  Probe
ccaaagcaaattcactgtaacccat

SEQ ID NO: 114348 - DNA, 25 bp, Artificial
  Probe
actgagtttagagacatttctttca

SEQ ID NO: 114349 - DNA, 25 bp, Artificial
  Probe
tctaatttatccaccaccatcaccg

SEQ ID NO: 114350 - DNA, 25 bp, Artificial
  Probe
gagacatttctttcatttcccaccg

SEQ ID NO: 114351 - DNA, 25 bp, Artificial
  Probe
gactgagtttagagacatttctttc

SEQ ID NO: 114352 - DNA, 25 bp, Artificial
  Probe
tttagagacatttctttcatttccc

SEQ ID NO: 114353 - DNA, 25 bp, Artificial
  Probe
ccaaactgcatctaatttatccacc

SEQ ID NO: 114354 - DNA, 25 bp, Artificial
  Probe
cccaaactgcatctaatttatccac

SEQ ID NO: 114355 - DNA, 25 bp, Artificial
  Probe
cacccaaactgcatctaatttatcc

SEQ ID NO: 114356 - DNA, 25 bp, Artificial
  Probe
aaactgcatctaatttatccaccac

SEQ ID NO: 114357 - DNA, 25 bp, Artificial
  Probe
caaactgcatctaatttatccacca

SEQ ID NO: 114358 - DNA, 25 bp, Artificial
  Probe
acccaaactgcatctaatttatcca

SEQ ID NO: 114359 - DNA, 25 bp, Artificial
  Probe
catatcacccaaactgcatctaatt

SEQ ID NO: 114360 - DNA, 25 bp, Artificial
  Probe
tcacccaaactgcatctaatttatc

SEQ ID NO: 114361 - DNA, 25 bp, Artificial
  Probe
agggacagggtgagaagagttaaat

SEQ ID NO: 114362 - DNA, 25 bp, Artificial
  Probe
tgcatctaatttatccaccaccatc

SEQ ID NO: 114363 - DNA, 25 bp, Artificial
  Probe
ctgcatctaatttatccaccaccat

SEQ ID NO: 114364 - DNA, 25 bp, Artificial
  Probe
ccatatcacccaaactgcatctaat

SEQ ID NO: 114365 - DNA, 25 bp, Artificial
  Probe
aactgcatctaatttatccaccacc

SEQ ID NO: 114366 - DNA, 25 bp, Artificial
  Probe
gacatttctttcatttcccaccgtg

SEQ ID NO: 114367 - DNA, 25 bp, Artificial
  Probe
atcacccaaactgcatctaatttat

SEQ ID NO: 114368 - DNA, 25 bp, Artificial
  Probe
atatcacccaaactgcatctaattt

SEQ ID NO: 114369 - DNA, 25 bp, Artificial
  Probe
cagggtgagaagagttaaattaaat

SEQ ID NO: 114370 - DNA, 25 bp, Artificial
  Probe
agacatttctttcatttcccaccgt

SEQ ID NO: 114371 - DNA, 25 bp, Artificial
  Probe
ctgagtttagagacatttctttcat

SEQ ID NO: 114372 - DNA, 25 bp, Artificial
  Probe
tatcacccaaactgcatctaattta

SEQ ID NO: 114373 - DNA, 25 bp, Artificial
  Probe
actgcatctaatttatccaccacca

SEQ ID NO: 114374 - DNA, 25 bp, Artificial
  Probe
gtttagagacatttctttcatttcc

SEQ ID NO: 114375 - DNA, 25 bp, Artificial
  Probe
cagggacagggtgagaagagttaaa

SEQ ID NO: 114376 - DNA, 25 bp, Artificial
  Probe
tgagtttagagacatttctttcatt

SEQ ID NO: 114377 - DNA, 25 bp, Artificial
  Probe
tatatgatgaggaaggacacagatg

SEQ ID NO: 114378 - DNA, 25 bp, Artificial
  Probe
ggtatatatgatgaggaaggacaca

SEQ ID NO: 114379 - DNA, 25 bp, Artificial
  Probe
tggtatatatgatgaggaaggacac

SEQ ID NO: 114380 - DNA, 25 bp, Artificial
  Probe
atatatgatgaggaaggacacagat

SEQ ID NO: 114381 - DNA, 25 bp, Artificial
  Probe
tatagttcagttggtagactcctgg

SEQ ID NO: 114382 - DNA, 25 bp, Artificial
  Probe
atatgatgaggaaggacacagatgc

SEQ ID NO: 114383 - DNA, 25 bp, Artificial
  Probe
atggtatatatgatgaggaaggaca

SEQ ID NO: 114384 - DNA, 25 bp, Artificial
  Probe
gtatatatgatgaggaaggacacag

SEQ ID NO: 114385 - DNA, 25 bp, Artificial
  Probe
tatatatgatgaggaaggacacaga

SEQ ID NO: 114386 - DNA, 25 bp, Artificial
  Probe
acatggtatatatgatgaggaagga

SEQ ID NO: 114387 - DNA, 25 bp, Artificial
  Probe
ggatgctatagttcagttggtagac

SEQ ID NO: 114388 - DNA, 25 bp, Artificial
  Probe
catggtatatatgatgaggaaggac

SEQ ID NO: 114389 - DNA, 25 bp, Artificial
  Probe
ttcaaagtttaaggtcattctcagc

SEQ ID NO: 114390 - DNA, 25 bp, Artificial
  Probe
gcaggaagattcaaagtttaaggtc

SEQ ID NO: 114391 - DNA, 25 bp, Artificial
  Probe
caggaagattcaaagtttaaggtca

SEQ ID NO: 114392 - DNA, 25 bp, Artificial
  Probe
gagcatccagtgtataacatggtat

SEQ ID NO: 114393 - DNA, 25 bp, Artificial
  Probe
tatgatgaggaaggacacagatgct

SEQ ID NO: 114394 - DNA, 25 bp, Artificial
  Probe
atgctatagttcagttggtagactc

SEQ ID NO: 114395 - DNA, 25 bp, Artificial
  Probe
gatgctatagttcagttggtagact

SEQ ID NO: 114396 - DNA, 25 bp, Artificial
  Probe
aacatggtatatatgatgaggaagg

SEQ ID NO: 114397 - DNA, 25 bp, Artificial
  Probe
ttggcaggaagattcaaagtttaag

SEQ ID NO: 114398 - DNA, 25 bp, Artificial
  Probe
cttggcaggaagattcaaagtttaa

SEQ ID NO: 114399 - DNA, 25 bp, Artificial
  Probe
agcatccagtgtataacatggtata

SEQ ID NO: 114400 - DNA, 25 bp, Artificial
  Probe
atagttcagttggtagactcctggt

SEQ ID NO: 114401 - DNA, 25 bp, Artificial
  Probe
ggcaggaagattcaaagtttaaggt

SEQ ID NO: 114402 - DNA, 25 bp, Artificial
  Probe
tggcaggaagattcaaagtttaagg

SEQ ID NO: 114403 - DNA, 25 bp, Artificial
  Probe
gctatagttcagttggtagactcct

SEQ ID NO: 114404 - DNA, 25 bp, Artificial
  Probe
aggaagaaagaaagaaaggaagaaa

SEQ ID NO: 114405 - DNA, 25 bp, Artificial
  Probe
aaggaagaaagaaagaaaggaagaa

SEQ ID NO: 114406 - DNA, 25 bp, Artificial
  Probe
aaaggaagaaagaaagaaaggaaga

SEQ ID NO: 114407 - DNA, 25 bp, Artificial
  Probe
agaaaggaagaaagaaagaaaggaa

SEQ ID NO: 114408 - DNA, 25 bp, Artificial
  Probe
aagaaaggaagaaagaaagaaagga

SEQ ID NO: 114409 - DNA, 25 bp, Artificial
  Probe
ctatagttcagttggtagactcctg

SEQ ID NO: 114410 - DNA, 25 bp, Artificial
  Probe
tgctatagttcagttggtagactcc

SEQ ID NO: 114411 - DNA, 25 bp, Artificial
  Probe
ggaagaaagaaagaaaggaagaaag

SEQ ID NO: 114412 - DNA, 25 bp, Artificial
  Probe
gaaaggaagaaagaaagaaaggaag

SEQ ID NO: 114413 - DNA, 25 bp, Artificial
  Probe
aggaagattcaaagtttaaggtcat

SEQ ID NO: 114414 - DNA, 25 bp, Artificial
  Probe
gcatccagtgtataacatggtatat

SEQ ID NO: 114415 - DNA, 25 bp, Artificial
  Probe
agagaaagaaagaaggaagaaagaa

SEQ ID NO: 114416 - DNA, 25 bp, Artificial
  Probe
aagagaaagaaagaaggaagaaaga

SEQ ID NO: 114417 - DNA, 25 bp, Artificial
  Probe
agaaagagaaagaaagaaggaagaa

SEQ ID NO: 114418 - DNA, 25 bp, Artificial
  Probe
aagaaagagaaagaaagaaggaaga

SEQ ID NO: 114419 - DNA, 25 bp, Artificial
  Probe
agaaagaaagagaaagaaagaagga

SEQ ID NO: 114420 - DNA, 25 bp, Artificial
  Probe
aggaagaaagaaagaaagagaaaga

SEQ ID NO: 114421 - DNA, 25 bp, Artificial
  Probe
agaaaggaagaaagaaagaaagaga

SEQ ID NO: 114422 - DNA, 25 bp, Artificial
  Probe
gtacagtagaaggagacagaagagt

SEQ ID NO: 114423 - DNA, 25 bp, Artificial
  Probe
agacagaagagtcctgatgatagat

SEQ ID NO: 114424 - DNA, 25 bp, Artificial
  Probe
tacagtagaaggagacagaagagtc

SEQ ID NO: 114425 - DNA, 25 bp, Artificial
  Probe
gagacagaagagtcctgatgataga

SEQ ID NO: 114426 - DNA, 25 bp, Artificial
  Probe
acatcactgatctgaacaagaacaa

SEQ ID NO: 114427 - DNA, 25 bp, Artificial
  Probe
aacatcactgatctgaacaagaaca

SEQ ID NO: 114428 - DNA, 25 bp, Artificial
  Probe
taacatcactgatctgaacaagaac

SEQ ID NO: 114429 - DNA, 25 bp, Artificial
  Probe
gacagaagagtcctgatgatagatc

SEQ ID NO: 114430 - DNA, 25 bp, Artificial
  Probe
ttaacatcactgatctgaacaagaa

SEQ ID NO: 114431 - DNA, 25 bp, Artificial
  Probe
ggagacagaagagtcctgatgatag

SEQ ID NO: 114432 - DNA, 25 bp, Artificial
  Probe
agatagacatggtgcctattgactt

SEQ ID NO: 114433 - DNA, 25 bp, Artificial
  Probe
aagatagacatggtgcctattgact

SEQ ID NO: 114434 - DNA, 25 bp, Artificial
  Probe
aacaagaacaaagaagaagacaagc

SEQ ID NO: 114435 - DNA, 25 bp, Artificial
  Probe
ctgaacaagaacaaagaagaagaca

SEQ ID NO: 114436 - DNA, 25 bp, Artificial
  Probe
acttacaaggaccaaataccaaact

SEQ ID NO: 114437 - DNA, 25 bp, Artificial
  Probe
tgaacaagaacaaagaagaagacaa

SEQ ID NO: 114438 - DNA, 25 bp, Artificial
  Probe
tattgactttcggaatgtgttcttg

SEQ ID NO: 114439 - DNA, 25 bp, Artificial
  Probe
ctattgactttcggaatgtgttctt

SEQ ID NO: 114440 - DNA, 25 bp, Artificial
  Probe
gaacaagaacaaagaagaagacaag

SEQ ID NO: 114441 - DNA, 25 bp, Artificial
  Probe
tacttacaaggaccaaataccaaac

SEQ ID NO: 114442 - DNA, 25 bp, Artificial
  Probe
tctgaacaagaacaaagaagaagac

SEQ ID NO: 114443 - DNA, 25 bp, Artificial
  Probe
acaaggaccaaataccaaactagaa

SEQ ID NO: 114444 - DNA, 25 bp, Artificial
  Probe
caaggaccaaataccaaactagaag

SEQ ID NO: 114445 - DNA, 25 bp, Artificial
  Probe
aggaccaaataccaaactagaagaa

SEQ ID NO: 114446 - DNA, 25 bp, Artificial
  Probe
aaggaccaaataccaaactagaaga

SEQ ID NO: 114447 - DNA, 25 bp, Artificial
  Probe
cttacaaggaccaaataccaaacta

SEQ ID NO: 114448 - DNA, 25 bp, Artificial
  Probe
cctattgactttcggaatgtgttct

SEQ ID NO: 114449 - DNA, 25 bp, Artificial
  Probe
tacaaggaccaaataccaaactaga

SEQ ID NO: 114450 - DNA, 25 bp, Artificial
  Probe
ggaccaaataccaaactagaagaaa

SEQ ID NO: 114451 - DNA, 25 bp, Artificial
  Probe
atctgaacaagaacaaagaagaaga

SEQ ID NO: 114452 - DNA, 25 bp, Artificial
  Probe
ttacaaggaccaaataccaaactag

SEQ ID NO: 114453 - DNA, 25 bp, Artificial
  Probe
cactgatctgaacaagaacaaagaa

SEQ ID NO: 114454 - DNA, 25 bp, Artificial
  Probe
actgatctgaacaagaacaaagaag

SEQ ID NO: 114455 - DNA, 25 bp, Artificial
  Probe
gtacttacaaggaccaaataccaaa

SEQ ID NO: 114456 - DNA, 25 bp, Artificial
  Probe
ctgatctgaacaagaacaaagaaga

SEQ ID NO: 114457 - DNA, 25 bp, Artificial
  Probe
catcactgatctgaacaagaacaaa

SEQ ID NO: 114458 - DNA, 25 bp, Artificial
  Probe
tcactgatctgaacaagaacaaaga

SEQ ID NO: 114459 - DNA, 25 bp, Artificial
  Probe
atcactgatctgaacaagaacaaag

SEQ ID NO: 114460 - DNA, 25 bp, Artificial
  Probe
acaagaacaaagaagaagacaagcg

SEQ ID NO: 114461 - DNA, 25 bp, Artificial
  Probe
attgactttcggaatgtgttcttgg

SEQ ID NO: 114462 - DNA, 25 bp, Artificial
  Probe
tgatctgaacaagaacaaagaagaa

SEQ ID NO: 114463 - DNA, 25 bp, Artificial
  Probe
acagtagaaggagacagaagagtcc

SEQ ID NO: 114464 - DNA, 25 bp, Artificial
  Probe
ggttaacatcactgatctgaacaag

SEQ ID NO: 114465 - DNA, 25 bp, Artificial
  Probe
aggttaacatcactgatctgaacaa

SEQ ID NO: 114466 - DNA, 25 bp, Artificial
  Probe
gaggttaacatcactgatctgaaca

SEQ ID NO: 114467 - DNA, 25 bp, Artificial
  Probe
gaacaacagatagagtatgaaggct

SEQ ID NO: 114468 - DNA, 25 bp, Artificial
  Probe
gcaggaacaacagatagagtatgaa

SEQ ID NO: 114469 - DNA, 25 bp, Artificial
  Probe
caacagatagagtatgaaggctacc

SEQ ID NO: 114470 - DNA, 25 bp, Artificial
  Probe
aggaacaacagatagagtatgaagg

SEQ ID NO: 114471 - DNA, 25 bp, Artificial
  Probe
acaacagatagagtatgaaggctac

SEQ ID NO: 114472 - DNA, 25 bp, Artificial
  Probe
acagatagagtatgaaggctaccaa

SEQ ID NO: 114473 - DNA, 25 bp, Artificial
  Probe
aacagatagagtatgaaggctacca

SEQ ID NO: 114474 - DNA, 25 bp, Artificial
  Probe
aacaacagatagagtatgaaggcta

SEQ ID NO: 114475 - DNA, 25 bp, Artificial
  Probe
ggaacaacagatagagtatgaaggc

SEQ ID NO: 114476 - DNA, 25 bp, Artificial
  Probe
agcaggaacaacagatagagtatga

SEQ ID NO: 114477 - DNA, 25 bp, Artificial
  Probe
cagcaggaacaacagatagagtatg

SEQ ID NO: 114478 - DNA, 25 bp, Artificial
  Probe
caggaacaacagatagagtatgaag

SEQ ID NO: 114479 - DNA, 25 bp, Artificial
  Probe
gcagcaggaacaacagatagagtat

SEQ ID NO: 114480 - DNA, 25 bp, Artificial
  Probe
caattagtaccaagcactgacagag

SEQ ID NO: 114481 - DNA, 25 bp, Artificial
  Probe
aattagtaccaagcactgacagagt

SEQ ID NO: 114482 - DNA, 25 bp, Artificial
  Probe
gttacatgagcctgatatgacagag

SEQ ID NO: 114483 - DNA, 25 bp, Artificial
  Probe
gagttacatgagcctgatatgacag

SEQ ID NO: 114484 - DNA, 25 bp, Artificial
  Probe
agttacatgagcctgatatgacaga

SEQ ID NO: 114485 - DNA, 25 bp, Artificial
  Probe
ggagttacatgagcctgatatgaca

SEQ ID NO: 114486 - DNA, 25 bp, Artificial
  Probe
ataaggatgagcaactggaaagaaa

SEQ ID NO: 114487 - DNA, 25 bp, Artificial
  Probe
aataaggatgagcaactggaaagaa

SEQ ID NO: 114488 - DNA, 25 bp, Artificial
  Probe
aaataaggatgagcaactggaaaga

SEQ ID NO: 114489 - DNA, 25 bp, Artificial
  Probe
cagatagagtatgaaggctaccaaa

SEQ ID NO: 114490 - DNA, 25 bp, Artificial
  Probe
ctgacacagaaggagaagcagataa

SEQ ID NO: 114491 - DNA, 25 bp, Artificial
  Probe
caactggaaagaaagaagcacaaat

SEQ ID NO: 114492 - DNA, 25 bp, Artificial
  Probe
gtaaataaggatgagcaactggaaa

SEQ ID NO: 114493 - DNA, 25 bp, Artificial
  Probe
gatagagtatgaaggctaccaaaga

SEQ ID NO: 114494 - DNA, 25 bp, Artificial
  Probe
agatagagtatgaaggctaccaaag

SEQ ID NO: 114495 - DNA, 25 bp, Artificial
  Probe
aggagaagcagataaagcaattagt

SEQ ID NO: 114496 - DNA, 25 bp, Artificial
  Probe
aaagaaagaagcacaaattggagaa

SEQ ID NO: 114497 - DNA, 25 bp, Artificial
  Probe
gaaagaaagaagcacaaattggaga

SEQ ID NO: 114498 - DNA, 25 bp, Artificial
  Probe
aactggaaagaaagaagcacaaatt

SEQ ID NO: 114499 - DNA, 25 bp, Artificial
  Probe
taaataaggatgagcaactggaaag

SEQ ID NO: 114500 - DNA, 25 bp, Artificial
  Probe
aagaaagaagcacaaattggagaac

SEQ ID NO: 114501 - DNA, 25 bp, Artificial
  Probe
agaaggagaagcagataaagcaatt

SEQ ID NO: 114502 - DNA, 25 bp, Artificial
  Probe
taaggatgagcaactggaaagaaag

SEQ ID NO: 114503 - DNA, 25 bp, Artificial
  Probe
cagaaggagaagcagataaagcaat

SEQ ID NO: 114504 - DNA, 25 bp, Artificial
  Probe
gacacagaaggagaagcagataaag

SEQ ID NO: 114505 - DNA, 25 bp, Artificial
  Probe
actggaaagaaagaagcacaaattg

SEQ ID NO: 114506 - DNA, 25 bp, Artificial
  Probe
agaagactctctcactacaaagaag

SEQ ID NO: 114507 - DNA, 25 bp, Artificial
  Probe
aaggagaagcagataaagcaattag

SEQ ID NO: 114508 - DNA, 25 bp, Artificial
  Probe
gaaggagaagcagataaagcaatta

SEQ ID NO: 114509 - DNA, 25 bp, Artificial
  Probe
atagagtatgaaggctaccaaagat

SEQ ID NO: 114510 - DNA, 25 bp, Artificial
  Probe
ggaaagaaagaagcacaaattggag

SEQ ID NO: 114511 - DNA, 25 bp, Artificial
  Probe
gaagcagagtctttatgaaccagaa

SEQ ID NO: 114512 - DNA, 25 bp, Artificial
  Probe
tgccctctttatttcctattacaca

SEQ ID NO: 114513 - DNA, 25 bp, Artificial
  Probe
ccctctttatttcctattacacagc

SEQ ID NO: 114514 - DNA, 25 bp, Artificial
  Probe
gccctctttatttcctattacacag

SEQ ID NO: 114515 - DNA, 25 bp, Artificial
  Probe
catgaaccagatcaagagtcaactg

SEQ ID NO: 114516 - DNA, 25 bp, Artificial
  Probe
gccaatgccctctttatttcctatt

SEQ ID NO: 114517 - DNA, 25 bp, Artificial
  Probe
atgccctctttatttcctattacac

SEQ ID NO: 114518 - DNA, 25 bp, Artificial
  Probe
ccaatgccctctttatttcctatta

SEQ ID NO: 114519 - DNA, 25 bp, Artificial
  Probe
aatgccctctttatttcctattaca

SEQ ID NO: 114520 - DNA, 25 bp, Artificial
  Probe
caatgccctctttatttcctattac

SEQ ID NO: 114521 - DNA, 25 bp, Artificial
  Probe
tgccaatgccctctttatttcctat

SEQ ID NO: 114522 - DNA, 25 bp, Artificial
  Probe
gatcaaactcaatgcgactacagac

SEQ ID NO: 114523 - DNA, 25 bp, Artificial
  Probe
agatcaaactcaatgcgactacaga

SEQ ID NO: 114524 - DNA, 25 bp, Artificial
  Probe
cagatcaaactcaatgcgactacag

SEQ ID NO: 114525 - DNA, 25 bp, Artificial
  Probe
cctctttatttcctattacacagct

SEQ ID NO: 114526 - DNA, 25 bp, Artificial
  Probe
gtgccaatgccctctttatttccta

SEQ ID NO: 114527 - DNA, 25 bp, Artificial
  Probe
ctccagatcaaactcaatgcgacta

SEQ ID NO: 114528 - DNA, 25 bp, Artificial
  Probe
tatttcctattacacagctcaaggg

SEQ ID NO: 114529 - DNA, 25 bp, Artificial
  Probe
agatcaagagtcaactggctcaact

SEQ ID NO: 114530 - DNA, 25 bp, Artificial
  Probe
cagatcaagagtcaactggctcaac

SEQ ID NO: 114531 - DNA, 25 bp, Artificial
  Probe
tccagatcaaactcaatgcgactac

SEQ ID NO: 114532 - DNA, 25 bp, Artificial
  Probe
aactctagcaaagaagccttccaaa

SEQ ID NO: 114533 - DNA, 25 bp, Artificial
  Probe
tctttatttcctattacacagctca

SEQ ID NO: 114534 - DNA, 25 bp, Artificial
  Probe
atcaaactcaatgcgactacagacg

SEQ ID NO: 114535 - DNA, 25 bp, Artificial
  Probe
ctcatgaaccagatcaagagtcaac

SEQ ID NO: 114536 - DNA, 25 bp, Artificial
  Probe
ttatttcctattacacagctcaagg

SEQ ID NO: 114537 - DNA, 25 bp, Artificial
  Probe
tcatgaaccagatcaagagtcaact

SEQ ID NO: 114538 - DNA, 25 bp, Artificial
  Probe
ccagatcaaactcaatgcgactaca

SEQ ID NO: 114539 - DNA, 25 bp, Artificial
  Probe
actctagcaaagaagccttccaaag

SEQ ID NO: 114540 - DNA, 25 bp, Artificial
  Probe
ctctttatttcctattacacagctc

SEQ ID NO: 114541 - DNA, 25 bp, Artificial
  Probe
caactctagcaaagaagccttccaa

SEQ ID NO: 114542 - DNA, 25 bp, Artificial
  Probe
tttatttcctattacacagctcaag

SEQ ID NO: 114543 - DNA, 25 bp, Artificial
  Probe
ctttatttcctattacacagctcaa

SEQ ID NO: 114544 - DNA, 25 bp, Artificial
  Probe
cctcatgaaccagatcaagagtcaa

SEQ ID NO: 114545 - DNA, 25 bp, Artificial
  Probe
aacctcatgaaccagatcaagagtc

SEQ ID NO: 114546 - DNA, 25 bp, Artificial
  Probe
gacaactctagcaaagaagccttcc

SEQ ID NO: 114547 - DNA, 25 bp, Artificial
  Probe
caacctcatgaaccagatcaagagt

SEQ ID NO: 114548 - DNA, 25 bp, Artificial
  Probe
cgacaactctagcaaagaagccttc

SEQ ID NO: 114549 - DNA, 25 bp, Artificial
  Probe
cagtgccaatgccctctttatttcc

SEQ ID NO: 114550 - DNA, 25 bp, Artificial
  Probe
caatgggacagagaagaccaagttg

SEQ ID NO: 114551 - DNA, 25 bp, Artificial
  Probe
tttcccaacaacgtggataagctat

SEQ ID NO: 114552 - DNA, 25 bp, Artificial
  Probe
atttcccaacaacgtggataagcta

SEQ ID NO: 114553 - DNA, 25 bp, Artificial
  Probe
agtgccaatgccctctttatttcct

SEQ ID NO: 114554 - DNA, 25 bp, Artificial
  Probe
acctcatgaaccagatcaagagtca

SEQ ID NO: 114555 - DNA, 25 bp, Artificial
  Probe
acaactctagcaaagaagccttcca

SEQ ID NO: 114556 - DNA, 25 bp, Artificial
  Probe
gatcaagagtcaactggctcaactc

SEQ ID NO: 114557 - DNA, 25 bp, Artificial
  Probe
caattccatcatgtacttcacagag

SEQ ID NO: 114558 - DNA, 25 bp, Artificial
  Probe
aattccatcatgtacttcacagagg

SEQ ID NO: 114559 - DNA, 25 bp, Artificial
  Probe
gcaattccatcatgtacttcacaga

SEQ ID NO: 114560 - DNA, 25 bp, Artificial
  Probe
agcaattccatcatgtacttcacag

SEQ ID NO: 114561 - DNA, 25 bp, Artificial
  Probe
gagcaattccatcatgtacttcaca

SEQ ID NO: 114562 - DNA, 25 bp, Artificial
  Probe
aaagagacagactacaatgggtttc

SEQ ID NO: 114563 - DNA, 25 bp, Artificial
  Probe
tttgggaaagaagggatttatgaag

SEQ ID NO: 114564 - DNA, 25 bp, Artificial
  Probe
catttcttgatgtgaaggatgagtt

SEQ ID NO: 114565 - DNA, 25 bp, Artificial
  Probe
atttcttgatgtgaaggatgagttc

SEQ ID NO: 114566 - DNA, 25 bp, Artificial
  Probe
tacccatttcttgatgtgaaggatg

SEQ ID NO: 114567 - DNA, 25 bp, Artificial
  Probe
ttgggaaagaagggatttatgaagc

SEQ ID NO: 114568 - DNA, 25 bp, Artificial
  Probe
attccatcatgtacttcacagagga

SEQ ID NO: 114569 - DNA, 25 bp, Artificial
  Probe
ccatttcttgatgtgaaggatgagt

SEQ ID NO: 114570 - DNA, 25 bp, Artificial
  Probe
ttccatcatgtacttcacagaggag

SEQ ID NO: 114571 - DNA, 25 bp, Artificial
  Probe
cccatttcttgatgtgaaggatgag

SEQ ID NO: 114572 - DNA, 25 bp, Artificial
  Probe
gatttatgaagcccacatccatctg

SEQ ID NO: 114573 - DNA, 25 bp, Artificial
  Probe
gtacccatttcttgatgtgaaggat

SEQ ID NO: 114574 - DNA, 25 bp, Artificial
  Probe
aagagacagactacaatgggtttcc

SEQ ID NO: 114575 - DNA, 25 bp, Artificial
  Probe
ttatgaagcccacatccatctgaat

SEQ ID NO: 114576 - DNA, 25 bp, Artificial
  Probe
atttatgaagcccacatccatctga

SEQ ID NO: 114577 - DNA, 25 bp, Artificial
  Probe
acccatttcttgatgtgaaggatga

SEQ ID NO: 114578 - DNA, 25 bp, Artificial
  Probe
tttatgaagcccacatccatctgaa

SEQ ID NO: 114579 - DNA, 25 bp, Artificial
  Probe
gtggaggatgtggagactctcataa

SEQ ID NO: 114580 - DNA, 25 bp, Artificial
  Probe
tgggaaagaagggatttatgaagcc

SEQ ID NO: 114581 - DNA, 25 bp, Artificial
  Probe
tatgaagcccacatccatctgaatg

SEQ ID NO: 114582 - DNA, 25 bp, Artificial
  Probe
agagacagactacaatgggtttcct

SEQ ID NO: 114583 - DNA, 25 bp, Artificial
  Probe
ctttgggaaagaagggatttatgaa

SEQ ID NO: 114584 - DNA, 25 bp, Artificial
  Probe
aaaagagacagactacaatgggttt

SEQ ID NO: 114585 - DNA, 25 bp, Artificial
  Probe
taaaagagacagactacaatgggtt

SEQ ID NO: 114586 - DNA, 25 bp, Artificial
  Probe
ataaaagagacagactacaatgggt

SEQ ID NO: 114587 - DNA, 25 bp, Artificial
  Probe
tggaggatgtggagactctcataaa

SEQ ID NO: 114588 - DNA, 25 bp, Artificial
  Probe
gagacagactacaatgggtttcctg

SEQ ID NO: 114589 - DNA, 25 bp, Artificial
  Probe
cataaaagagacagactacaatggg

SEQ ID NO: 114590 - DNA, 25 bp, Artificial
  Probe
tttcttgatgtgaaggatgagttca

SEQ ID NO: 114591 - DNA, 25 bp, Artificial
  Probe
tgtggaggatgtggagactctcata

SEQ ID NO: 114592 - DNA, 25 bp, Artificial
  Probe
gagaaccacctttgtcagtactaac

SEQ ID NO: 114593 - DNA, 25 bp, Artificial
  Probe
tccatcatgtacttcacagaggagc

SEQ ID NO: 114594 - DNA, 25 bp, Artificial
  Probe
tcataaaagagacagactacaatgg

SEQ ID NO: 114595 - DNA, 25 bp, Artificial
  Probe
gaaagaagggatttatgaagcccac

SEQ ID NO: 114596 - DNA, 25 bp, Artificial
  Probe
ggagaaccacctttgtcagtactaa

SEQ ID NO: 114597 - DNA, 25 bp, Artificial
  Probe
gaggatgtggagactctcataaaag

SEQ ID NO: 114598 - DNA, 25 bp, Artificial
  Probe
aggatgtggagactctcataaaaga

SEQ ID NO: 114599 - DNA, 25 bp, Artificial
  Probe
agaaccacctttgtcagtactaacc

SEQ ID NO: 114600 - DNA, 25 bp, Artificial
  Probe
aagaagggatttatgaagcccacat

SEQ ID NO: 114601 - DNA, 25 bp, Artificial
  Probe
aaagaagggatttatgaagcccaca

SEQ ID NO: 114602 - DNA, 25 bp, Artificial
  Probe
ttctaccaagacaacatacatcagc

SEQ ID NO: 114603 - DNA, 25 bp, Artificial
  Probe
cttctaccaagacaacatacatcag

SEQ ID NO: 114604 - DNA, 25 bp, Artificial
  Probe
ctaccaagacaacatacatcagcta

SEQ ID NO: 114605 - DNA, 25 bp, Artificial
  Probe
taccaagacaacatacatcagctac

SEQ ID NO: 114606 - DNA, 25 bp, Artificial
  Probe
agacaacatacatcagctacagtaa

SEQ ID NO: 114607 - DNA, 25 bp, Artificial
  Probe
aagacaacatacatcagctacagta

SEQ ID NO: 114608 - DNA, 25 bp, Artificial
  Probe
caagacaacatacatcagctacagt

SEQ ID NO: 114609 - DNA, 25 bp, Artificial
  Probe
acatcagctacagtaatcattcgat

SEQ ID NO: 114610 - DNA, 25 bp, Artificial
  Probe
atcagctacagtaatcattcgatct

SEQ ID NO: 114611 - DNA, 25 bp, Artificial
  Probe
catcagctacagtaatcattcgatc

SEQ ID NO: 114612 - DNA, 25 bp, Artificial
  Probe
tacatcagctacagtaatcattcga

SEQ ID NO: 114613 - DNA, 25 bp, Artificial
  Probe
caacatacatcagctacagtaatca

SEQ ID NO: 114614 - DNA, 25 bp, Artificial
  Probe
acaacatacatcagctacagtaatc

SEQ ID NO: 114615 - DNA, 25 bp, Artificial
  Probe
gacaacatacatcagctacagtaat

SEQ ID NO: 114616 - DNA, 25 bp, Artificial
  Probe
ccaagacaacatacatcagctacag

SEQ ID NO: 114617 - DNA, 25 bp, Artificial
  Probe
atacatcagctacagtaatcattcg

SEQ ID NO: 114618 - DNA, 25 bp, Artificial
  Probe
gtacatccagacaacgacacttact

SEQ ID NO: 114619 - DNA, 25 bp, Artificial
  Probe
gaatgctctatatgcccaaagttta

SEQ ID NO: 114620 - DNA, 25 bp, Artificial
  Probe
tctaccaagacaacatacatcagct

SEQ ID NO: 114621 - DNA, 25 bp, Artificial
  Probe
accaagacaacatacatcagctaca

SEQ ID NO: 114622 - DNA, 25 bp, Artificial
  Probe
tacatccagacaacgacacttactg

SEQ ID NO: 114623 - DNA, 25 bp, Artificial
  Probe
cagctacagtaatcattcgatctga

SEQ ID NO: 114624 - DNA, 25 bp, Artificial
  Probe
tcagctacagtaatcattcgatctg

SEQ ID NO: 114625 - DNA, 25 bp, Artificial
  Probe
tttcatccagagcagaatgttcaaa

SEQ ID NO: 114626 - DNA, 25 bp, Artificial
  Probe
aatgctctatatgcccaaagtttat

SEQ ID NO: 114627 - DNA, 25 bp, Artificial
  Probe
ggaatgctctatatgcccaaagttt

SEQ ID NO: 114628 - DNA, 25 bp, Artificial
  Probe
agtgtctctgggaatgctctatatg

SEQ ID NO: 114629 - DNA, 25 bp, Artificial
  Probe
acatacatcagctacagtaatcatt

SEQ ID NO: 114630 - DNA, 25 bp, Artificial
  Probe
aacatacatcagctacagtaatcat

SEQ ID NO: 114631 - DNA, 25 bp, Artificial
  Probe
tcacctgtactgtttatgccattaa

SEQ ID NO: 114632 - DNA, 25 bp, Artificial
  Probe
tcttctaccaagacaacatacatca

SEQ ID NO: 114633 - DNA, 25 bp, Artificial
  Probe
tatttcggatctgtcactcatttgt

SEQ ID NO: 114634 - DNA, 25 bp, Artificial
  Probe
gtcacctgtactgtttatgccatta

SEQ ID NO: 114635 - DNA, 25 bp, Artificial
  Probe
atatttcggatctgtcactcatttg

SEQ ID NO: 114636 - DNA, 25 bp, Artificial
  Probe
gatacagtatcctcctgatggtcac

SEQ ID NO: 114637 - DNA, 25 bp, Artificial
  Probe
atttcggatctgtcactcatttgtt

SEQ ID NO: 114638 - DNA, 25 bp, Artificial
  Probe
ctgtttccatgagtttaagtgcttc

SEQ ID NO: 114639 - DNA, 25 bp, Artificial
  Probe
atgagtttaagtgcttcagtgtctc

SEQ ID NO: 114640 - DNA, 25 bp, Artificial
  Probe
gatatttcggatctgtcactcattt

SEQ ID NO: 114641 - DNA, 25 bp, Artificial
  Probe
cacctgtactgtttatgccattaaa

SEQ ID NO: 114642 - DNA, 25 bp, Artificial
  Probe
tgatatttcggatctgtcactcatt

SEQ ID NO: 114643 - DNA, 25 bp, Artificial
  Probe
catacatcagctacagtaatcattc

SEQ ID NO: 114644 - DNA, 25 bp, Artificial
  Probe
atgctctatatgcccaaagtttata

SEQ ID NO: 114645 - DNA, 25 bp, Artificial
  Probe
atacagtatcctcctgatggtcacc

SEQ ID NO: 114646 - DNA, 25 bp, Artificial
  Probe
tttcggatctgtcactcatttgttc

SEQ ID NO: 114647 - DNA, 25 bp, Artificial
  Probe
gtgtgctgtcgttgcctactatatc

SEQ ID NO: 114648 - DNA, 25 bp, Artificial
  Probe
tgtgtgctgtcgttgcctactatat

SEQ ID NO: 114649 - DNA, 25 bp, Artificial
  Probe
atgtggagaaggtcagaacgaactt

SEQ ID NO: 114650 - DNA, 25 bp, Artificial
  Probe
tgctgtcgttgcctactatatcctg

SEQ ID NO: 114651 - DNA, 25 bp, Artificial
  Probe
gtgctgtcgttgcctactatatcct

SEQ ID NO: 114652 - DNA, 25 bp, Artificial
  Probe
tgtgctgtcgttgcctactatatcc

SEQ ID NO: 114653 - DNA, 25 bp, Artificial
  Probe
gatgtggagaaggtcagaacgaact

SEQ ID NO: 114654 - DNA, 25 bp, Artificial
  Probe
attttctactgcttctcaacgactc

SEQ ID NO: 114655 - DNA, 25 bp, Artificial
  Probe
gattttctactgcttctcaacgact

SEQ ID NO: 114656 - DNA, 25 bp, Artificial
  Probe
gaagatcaaccagtccctttccatc

SEQ ID NO: 114657 - DNA, 25 bp, Artificial
  Probe
atcggattttctactgcttctcaac

SEQ ID NO: 114658 - DNA, 25 bp, Artificial
  Probe
catcggattttctactgcttctcaa

SEQ ID NO: 114659 - DNA, 25 bp, Artificial
  Probe
gtgtgtgctgtcgttgcctactata

SEQ ID NO: 114660 - DNA, 25 bp, Artificial
  Probe
gctgtcgttgcctactatatcctgg

SEQ ID NO: 114661 - DNA, 25 bp, Artificial
  Probe
gagaatgagaccactgtcctgtacc

SEQ ID NO: 114662 - DNA, 25 bp, Artificial
  Probe
ggattttctactgcttctcaacgac

SEQ ID NO: 114663 - DNA, 25 bp, Artificial
  Probe
ggagaatgagaccactgtcctgtac

SEQ ID NO: 114664 - DNA, 25 bp, Artificial
  Probe
ctgtcgttgcctactatatcctggg

SEQ ID NO: 114665 - DNA, 25 bp, Artificial
  Probe
cagaaccaacagtgctcctacatcc

SEQ ID NO: 114666 - DNA, 25 bp, Artificial
  Probe
ccagaaccaacagtgctcctacatc

SEQ ID NO: 114667 - DNA, 25 bp, Artificial
  Probe
tgaagatcaaccagtccctttccat

SEQ ID NO: 114668 - DNA, 25 bp, Artificial
  Probe
cggattttctactgcttctcaacga

SEQ ID NO: 114669 - DNA, 25 bp, Artificial
  Probe
tcggattttctactgcttctcaacg

SEQ ID NO: 114670 - DNA, 25 bp, Artificial
  Probe
aagatcaaccagtccctttccatcc

SEQ ID NO: 114671 - DNA, 25 bp, Artificial
  Probe
ttttctactgcttctcaacgactcg

SEQ ID NO: 114672 - DNA, 25 bp, Artificial
  Probe
tttctactgcttctcaacgactcgg

SEQ ID NO: 114673 - DNA, 25 bp, Artificial
  Probe
agaccctgctcttctctctcttctg

SEQ ID NO: 114674 - DNA, 25 bp, Artificial
  Probe
gtgaagatcaaccagtccctttcca

SEQ ID NO: 114675 - DNA, 25 bp, Artificial
  Probe
cattatcgccatggtgaagatcaac

SEQ ID NO: 114676 - DNA, 25 bp, Artificial
  Probe
tcattatcgccatggtgaagatcaa

SEQ ID NO: 114677 - DNA, 25 bp, Artificial
  Probe
ctactatatcctgggcacgaccatg

SEQ ID NO: 114678 - DNA, 25 bp, Artificial
  Probe
tgtggagaaggtcagaacgaacttc

SEQ ID NO: 114679 - DNA, 25 bp, Artificial
  Probe
ctcattatcgccatggtgaagatca

SEQ ID NO: 114680 - DNA, 25 bp, Artificial
  Probe
cagaccctgctcttctctctcttct

SEQ ID NO: 114681 - DNA, 25 bp, Artificial
  Probe
agatcaaccagtccctttccatcct

SEQ ID NO: 114682 - DNA, 25 bp, Artificial
  Probe
gatcaaccagtccctttccatcctg

SEQ ID NO: 114683 - DNA, 25 bp, Artificial
  Probe
cctcattatcgccatggtgaagatc

SEQ ID NO: 114684 - DNA, 25 bp, Artificial
  Probe
gggagaatgagaccactgtcctgta

SEQ ID NO: 114685 - DNA, 25 bp, Artificial
  Probe
ggagaaggtcagaacgaacttccac

SEQ ID NO: 114686 - DNA, 25 bp, Artificial
  Probe
gtggagaaggtcagaacgaacttcc

SEQ ID NO: 114687 - DNA, 25 bp, Artificial
  Probe
cctactatatcctgggcacgaccat

SEQ ID NO: 114688 - DNA, 25 bp, Artificial
  Probe
tcctcattatcgccatggtgaagat

SEQ ID NO: 114689 - DNA, 25 bp, Artificial
  Probe
ggtgaagatcaaccagtccctttcc

SEQ ID NO: 114690 - DNA, 25 bp, Artificial
  Probe
attatcgccatggtgaagatcaacc

SEQ ID NO: 114691 - DNA, 25 bp, Artificial
  Probe
gcatcggattttctactgcttctca

SEQ ID NO: 114692 - DNA, 25 bp, Artificial
  Probe
cagaatgtgtggtaaatcggataaa

SEQ ID NO: 114693 - DNA, 25 bp, Artificial
  Probe
agaatgtgtggtaaatcggataaag

SEQ ID NO: 114694 - DNA, 25 bp, Artificial
  Probe
gtgtgtgtgaggtttgacttaattt

SEQ ID NO: 114695 - DNA, 25 bp, Artificial
  Probe
gctaacacttacgcaaagacatata

SEQ ID NO: 114696 - DNA, 25 bp, Artificial
  Probe
tgtgtgtgtgaggtttgacttaatt

SEQ ID NO: 114697 - DNA, 25 bp, Artificial
  Probe
taggactgtagagctgtagaggaag

SEQ ID NO: 114698 - DNA, 25 bp, Artificial
  Probe
tgtgtgtgaggtttgacttaattta

SEQ ID NO: 114699 - DNA, 25 bp, Artificial
  Probe
tagagctgtagaggaaggaactgaa

SEQ ID NO: 114700 - DNA, 25 bp, Artificial
  Probe
gtgtgtgtgtgaggtttgacttaat

SEQ ID NO: 114701 - DNA, 25 bp, Artificial
  Probe
gtaggactgtagagctgtagaggaa

SEQ ID NO: 114702 - DNA, 25 bp, Artificial
  Probe
tgtgtaggactgtagagctgtagag

SEQ ID NO: 114703 - DNA, 25 bp, Artificial
  Probe
gtagagctgtagaggaaggaactga

SEQ ID NO: 114704 - DNA, 25 bp, Artificial
  Probe
ctgtagagctgtagaggaaggaact

SEQ ID NO: 114705 - DNA, 25 bp, Artificial
  Probe
gactgtagagctgtagaggaaggaa

SEQ ID NO: 114706 - DNA, 25 bp, Artificial
  Probe
gtgtgtgaggtttgacttaatttat

SEQ ID NO: 114707 - DNA, 25 bp, Artificial
  Probe
gtgtgtaggactgtagagctgtaga

SEQ ID NO: 114708 - DNA, 25 bp, Artificial
  Probe
cctgactatccctgacatcatcttc

SEQ ID NO: 114709 - DNA, 25 bp, Artificial
  Probe
tgtgtctgtgtgtaggactgtagag

SEQ ID NO: 114710 - DNA, 25 bp, Artificial
  Probe
caagttcttagtcgctgtgtgtctg

SEQ ID NO: 114711 - DNA, 25 bp, Artificial
  Probe
agctaacacttacgcaaagacatat

SEQ ID NO: 114712 - DNA, 25 bp, Artificial
  Probe
tgtagagctgtagaggaaggaactg

SEQ ID NO: 114713 - DNA, 25 bp, Artificial
  Probe
actgtagagctgtagaggaaggaac

SEQ ID NO: 114714 - DNA, 25 bp, Artificial
  Probe
tgtgtgtaggactgtagagctgtag

SEQ ID NO: 114715 - DNA, 25 bp, Artificial
  Probe
ctgtgtgtaggactgtagagctgta

SEQ ID NO: 114716 - DNA, 25 bp, Artificial
  Probe
tcctgactatccctgacatcatctt

SEQ ID NO: 114717 - DNA, 25 bp, Artificial
  Probe
ctgactatccctgacatcatcttcg

SEQ ID NO: 114718 - DNA, 25 bp, Artificial
  Probe
ccagaatgtgtggtaaatcggataa

SEQ ID NO: 114719 - DNA, 25 bp, Artificial
  Probe
gtgtaggactgtagagctgtagagg

SEQ ID NO: 114720 - DNA, 25 bp, Artificial
  Probe
tgtgtgtgtgtgaggtttgacttaa

SEQ ID NO: 114721 - DNA, 25 bp, Artificial
  Probe
gtgtgtctgtgtgtaggactgtaga

SEQ ID NO: 114722 - DNA, 25 bp, Artificial
  Probe
tgtaggactgtagagctgtagagga

SEQ ID NO: 114723 - DNA, 25 bp, Artificial
  Probe
cagctaacacttacgcaaagacata

SEQ ID NO: 114724 - DNA, 25 bp, Artificial
  Probe
tccagaatgtgtggtaaatcggata

SEQ ID NO: 114725 - DNA, 25 bp, Artificial
  Probe
ctcctgactatccctgacatcatct

SEQ ID NO: 114726 - DNA, 25 bp, Artificial
  Probe
aagttcttagtcgctgtgtgtctgt

SEQ ID NO: 114727 - DNA, 25 bp, Artificial
  Probe
tgtgtgtctgtgtgtaggactgtag

SEQ ID NO: 114728 - DNA, 25 bp, Artificial
  Probe
agagctgtagaggaaggaactgaac

SEQ ID NO: 114729 - DNA, 25 bp, Artificial
  Probe
ttctctgtagaagatggcacttaaa

SEQ ID NO: 114730 - DNA, 25 bp, Artificial
  Probe
tttctctgtagaagatggcacttaa

SEQ ID NO: 114731 - DNA, 25 bp, Artificial
  Probe
gtttctctgtagaagatggcactta

SEQ ID NO: 114732 - DNA, 25 bp, Artificial
  Probe
gtgtgtgtgtgtgaggtttgactta

SEQ ID NO: 114733 - DNA, 25 bp, Artificial
  Probe
tcggataaagctagaagtgacccta

SEQ ID NO: 114734 - DNA, 25 bp, Artificial
  Probe
ctgtgtggtttctctgtagaagatg

SEQ ID NO: 114735 - DNA, 25 bp, Artificial
  Probe
cttagtcgctgtgtgtctgtgtgta

SEQ ID NO: 114736 - DNA, 25 bp, Artificial
  Probe
ctaacacttacgcaaagacatatat

SEQ ID NO: 114737 - DNA, 25 bp, Artificial
  Probe
agagtatatccagtatatgcgaagg

SEQ ID NO: 114738 - DNA, 25 bp, Artificial
  Probe
caacagagtatatccagtatatgcg

SEQ ID NO: 114739 - DNA, 25 bp, Artificial
  Probe
acagagtatatccagtatatgcgaa

SEQ ID NO: 114740 - DNA, 25 bp, Artificial
  Probe
aacagagtatatccagtatatgcga

SEQ ID NO: 114741 - DNA, 25 bp, Artificial
  Probe
cagagtatatccagtatatgcgaag

SEQ ID NO: 114742 - DNA, 25 bp, Artificial
  Probe
gagtatatccagtatatgcgaagga

SEQ ID NO: 114743 - DNA, 25 bp, Artificial
  Probe
agcaacagagtatatccagtatatg

SEQ ID NO: 114744 - DNA, 25 bp, Artificial
  Probe
agtatatccagtatatgcgaaggaa

SEQ ID NO: 114745 - DNA, 25 bp, Artificial
  Probe
agacaaagcaacagagtatatccag

SEQ ID NO: 114746 - DNA, 25 bp, Artificial
  Probe
acaaagcaacagagtatatccagta

SEQ ID NO: 114747 - DNA, 25 bp, Artificial
  Probe
gacaaagcaacagagtatatccagt

SEQ ID NO: 114748 - DNA, 25 bp, Artificial
  Probe
tagacaaagcaacagagtatatcca

SEQ ID NO: 114749 - DNA, 25 bp, Artificial
  Probe
aaatcctagacaaagcaacagagta

SEQ ID NO: 114750 - DNA, 25 bp, Artificial
  Probe
aatcctagacaaagcaacagagtat

SEQ ID NO: 114751 - DNA, 25 bp, Artificial
  Probe
tcctagacaaagcaacagagtatat

SEQ ID NO: 114752 - DNA, 25 bp, Artificial
  Probe
atcctagacaaagcaacagagtata

SEQ ID NO: 114753 - DNA, 25 bp, Artificial
  Probe
caaagcaacagagtatatccagtat

SEQ ID NO: 114754 - DNA, 25 bp, Artificial
  Probe
aagcaacagagtatatccagtatat

SEQ ID NO: 114755 - DNA, 25 bp, Artificial
  Probe
ctagacaaagcaacagagtatatcc

SEQ ID NO: 114756 - DNA, 25 bp, Artificial
  Probe
cctagacaaagcaacagagtatatc

SEQ ID NO: 114757 - DNA, 25 bp, Artificial
  Probe
caaatcctagacaaagcaacagagt

SEQ ID NO: 114758 - DNA, 25 bp, Artificial
  Probe
ccaaatcctagacaaagcaacagag

SEQ ID NO: 114759 - DNA, 25 bp, Artificial
  Probe
gcaacagagtatatccagtatatgc

SEQ ID NO: 114760 - DNA, 25 bp, Artificial
  Probe
aaagcaacagagtatatccagtata

SEQ ID NO: 114761 - DNA, 25 bp, Artificial
  Probe
gtatatccagtatatgcgaaggaaa

SEQ ID NO: 114762 - DNA, 25 bp, Artificial
  Probe
cccaaatcctagacaaagcaacaga

SEQ ID NO: 114763 - DNA, 25 bp, Artificial
  Probe
acatcaaagacagctttcacagttt

SEQ ID NO: 114764 - DNA, 25 bp, Artificial
  Probe
catacgcaccagcaagacattgatg

SEQ ID NO: 114765 - DNA, 25 bp, Artificial
  Probe
catcaaagacagctttcacagtttg

SEQ ID NO: 114766 - DNA, 25 bp, Artificial
  Probe
atacgcaccagcaagacattgatga

SEQ ID NO: 114767 - DNA, 25 bp, Artificial
  Probe
ctcagacaacagcctctacaccaac

SEQ ID NO: 114768 - DNA, 25 bp, Artificial
  Probe
cacatcaaagacagctttcacagtt

SEQ ID NO: 114769 - DNA, 25 bp, Artificial
  Probe
caccagcaagacattgatgacctca

SEQ ID NO: 114770 - DNA, 25 bp, Artificial
  Probe
ccagcaagacattgatgacctcaag

SEQ ID NO: 114771 - DNA, 25 bp, Artificial
  Probe
gcccaaatcctagacaaagcaacag

SEQ ID NO: 114772 - DNA, 25 bp, Artificial
  Probe
catcactccaaggagagaaggcatc

SEQ ID NO: 114773 - DNA, 25 bp, Artificial
  Probe
atcaaagacagctttcacagtttgc

SEQ ID NO: 114774 - DNA, 25 bp, Artificial
  Probe
cagcaagacattgatgacctcaagc

SEQ ID NO: 114775 - DNA, 25 bp, Artificial
  Probe
tatatccagtatatgcgaaggaaaa

SEQ ID NO: 114776 - DNA, 25 bp, Artificial
  Probe
accagcaagacattgatgacctcaa

SEQ ID NO: 114777 - DNA, 25 bp, Artificial
  Probe
aaacgtagggaccacatcaaagaca

SEQ ID NO: 114778 - DNA, 25 bp, Artificial
  Probe
ctcaccataatgcactggaacgaaa

SEQ ID NO: 114779 - DNA, 25 bp, Artificial
  Probe
gtagggaccacatcaaagacagctt

SEQ ID NO: 114780 - DNA, 25 bp, Artificial
  Probe
ccacatcaaagacagctttcacagt

SEQ ID NO: 114781 - DNA, 25 bp, Artificial
  Probe
accacatcaaagacagctttcacag

SEQ ID NO: 114782 - DNA, 25 bp, Artificial
  Probe
tataatacctatgcgtcagcgattc

SEQ ID NO: 114783 - DNA, 25 bp, Artificial
  Probe
ctataatacctatgcgtcagcgatt

SEQ ID NO: 114784 - DNA, 25 bp, Artificial
  Probe
ataatacctatgcgtcagcgattca

SEQ ID NO: 114785 - DNA, 25 bp, Artificial
  Probe
aacagctataatacctatgcgtcag

SEQ ID NO: 114786 - DNA, 25 bp, Artificial
  Probe
taatacctatgcgtcagcgattcac

SEQ ID NO: 114787 - DNA, 25 bp, Artificial
  Probe
gggattgtaggaatacgaggagttt

SEQ ID NO: 114788 - DNA, 25 bp, Artificial
  Probe
atgactgtaagttcagggagagatt

SEQ ID NO: 114789 - DNA, 25 bp, Artificial
  Probe
aaacagctataatacctatgcgtca

SEQ ID NO: 114790 - DNA, 25 bp, Artificial
  Probe
gatgactgtaagttcagggagagat

SEQ ID NO: 114791 - DNA, 25 bp, Artificial
  Probe
tgactgtaagttcagggagagattc

SEQ ID NO: 114792 - DNA, 25 bp, Artificial
  Probe
taagttcagggagagattccaagaa

SEQ ID NO: 114793 - DNA, 25 bp, Artificial
  Probe
aagttcagggagagattccaagaaa

SEQ ID NO: 114794 - DNA, 25 bp, Artificial
  Probe
gtaagttcagggagagattccaaga

SEQ ID NO: 114795 - DNA, 25 bp, Artificial
  Probe
gctataatacctatgcgtcagcgat

SEQ ID NO: 114796 - DNA, 25 bp, Artificial
  Probe
agatgactgtaagttcagggagaga

SEQ ID NO: 114797 - DNA, 25 bp, Artificial
  Probe
cagatgactgtaagttcagggagag

SEQ ID NO: 114798 - DNA, 25 bp, Artificial
  Probe
tgtaagttcagggagagattccaag

SEQ ID NO: 114799 - DNA, 25 bp, Artificial
  Probe
ctgtaagttcagggagagattccaa

SEQ ID NO: 114800 - DNA, 25 bp, Artificial
  Probe
tgaagtacagactgaagtttcgctt

SEQ ID NO: 114801 - DNA, 25 bp, Artificial
  Probe
gactgtaagttcagggagagattcc

SEQ ID NO: 114802 - DNA, 25 bp, Artificial
  Probe
atgcaagtgccaaatttacagatga

SEQ ID NO: 114803 - DNA, 25 bp, Artificial
  Probe
catgcaagtgccaaatttacagatg

SEQ ID NO: 114804 - DNA, 25 bp, Artificial
  Probe
ggattgtaggaatacgaggagtttt

SEQ ID NO: 114805 - DNA, 25 bp, Artificial
  Probe
caagtgccaaatttacagatgactg

SEQ ID NO: 114806 - DNA, 25 bp, Artificial
  Probe
acagctataatacctatgcgtcagc

SEQ ID NO: 114807 - DNA, 25 bp, Artificial
  Probe
aatacctatgcgtcagcgattcaca

SEQ ID NO: 114808 - DNA, 25 bp, Artificial
  Probe
ttgtaggaatacgaggagttttcag

SEQ ID NO: 114809 - DNA, 25 bp, Artificial
  Probe
attgtaggaatacgaggagttttca

SEQ ID NO: 114810 - DNA, 25 bp, Artificial
  Probe
gattgtaggaatacgaggagttttc

SEQ ID NO: 114811 - DNA, 25 bp, Artificial
  Probe
actgtaagttcagggagagattcca

SEQ ID NO: 114812 - DNA, 25 bp, Artificial
  Probe
gtgaagtacagactgaagtttcgct

SEQ ID NO: 114813 - DNA, 25 bp, Artificial
  Probe
agtgaagtacagactgaagtttcgc

SEQ ID NO: 114814 - DNA, 25 bp, Artificial
  Probe
atacgaggagttttcagcaacaaat

SEQ ID NO: 114815 - DNA, 25 bp, Artificial
  Probe
tgcaagtgccaaatttacagatgac

SEQ ID NO: 114816 - DNA, 25 bp, Artificial
  Probe
ccatgcaagtgccaaatttacagat

SEQ ID NO: 114817 - DNA, 25 bp, Artificial
  Probe
aaactccatgcaagtgccaaattta

SEQ ID NO: 114818 - DNA, 25 bp, Artificial
  Probe
gcaagtgccaaatttacagatgact

SEQ ID NO: 114819 - DNA, 25 bp, Artificial
  Probe
aatacgaggagttttcagcaacaaa

SEQ ID NO: 114820 - DNA, 25 bp, Artificial
  Probe
atacctatgcgtcagcgattcacag

SEQ ID NO: 114821 - DNA, 25 bp, Artificial
  Probe
tacgaggagttttcagcaacaaatt

SEQ ID NO: 114822 - DNA, 25 bp, Artificial
  Probe
taggaatacgaggagttttcagcaa

SEQ ID NO: 114823 - DNA, 25 bp, Artificial
  Probe
gaatacgaggagttttcagcaacaa

SEQ ID NO: 114824 - DNA, 25 bp, Artificial
  Probe
gtgtctcaggggattgtaggaatac

SEQ ID NO: 114825 - DNA, 25 bp, Artificial
  Probe
cagctataatacctatgcgtcagcg

SEQ ID NO: 114826 - DNA, 25 bp, Artificial
  Probe
aactccatgcaagtgccaaatttac

SEQ ID NO: 114827 - DNA, 25 bp, Artificial
  Probe
ctgctccactcctatctttctcatc

SEQ ID NO: 114828 - DNA, 25 bp, Artificial
  Probe
tgctccactcctatctttctcatcc

SEQ ID NO: 114829 - DNA, 25 bp, Artificial
  Probe
ttttcaagaacctcaaactaatccg

SEQ ID NO: 114830 - DNA, 25 bp, Artificial
  Probe
ctatctttctcatccccagacaatc

SEQ ID NO: 114831 - DNA, 25 bp, Artificial
  Probe
tatctttctcatccccagacaatct

SEQ ID NO: 114832 - DNA, 25 bp, Artificial
  Probe
aaggctgtcagtattcttcctggtc

SEQ ID NO: 114833 - DNA, 25 bp, Artificial
  Probe
tttcaagaacctcaaactaatccgg

SEQ ID NO: 114834 - DNA, 25 bp, Artificial
  Probe
cctatctttctcatccccagacaat

SEQ ID NO: 114835 - DNA, 25 bp, Artificial
  Probe
gctgctccactcctatctttctcat

SEQ ID NO: 114836 - DNA, 25 bp, Artificial
  Probe
caaggctgtcagtattcttcctggt

SEQ ID NO: 114837 - DNA, 25 bp, Artificial
  Probe
acaaggctgtcagtattcttcctgg

SEQ ID NO: 114838 - DNA, 25 bp, Artificial
  Probe
gctccactcctatctttctcatccc

SEQ ID NO: 114839 - DNA, 25 bp, Artificial
  Probe
cttcctcaaaatcaagcactctttt

SEQ ID NO: 114840 - DNA, 25 bp, Artificial
  Probe
tcctatctttctcatccccagacaa

SEQ ID NO: 114841 - DNA, 25 bp, Artificial
  Probe
ggctgtcagtattcttcctggtcac

SEQ ID NO: 114842 - DNA, 25 bp, Artificial
  Probe
ttcaagaacctcaaactaatccggg

SEQ ID NO: 114843 - DNA, 25 bp, Artificial
  Probe
ctcctatctttctcatccccagaca

SEQ ID NO: 114844 - DNA, 25 bp, Artificial
  Probe
actcctatctttctcatccccagac

SEQ ID NO: 114845 - DNA, 25 bp, Artificial
  Probe
cactcctatctttctcatccccaga

SEQ ID NO: 114846 - DNA, 25 bp, Artificial
  Probe
aggctgtcagtattcttcctggtca

SEQ ID NO: 114847 - DNA, 25 bp, Artificial
  Probe
ctccactcctatctttctcatcccc

SEQ ID NO: 114848 - DNA, 25 bp, Artificial
  Probe
gacaaggctgtcagtattcttcctg

SEQ ID NO: 114849 - DNA, 25 bp, Artificial
  Probe
ttcgacaaggctgtcagtattcttc

SEQ ID NO: 114850 - DNA, 25 bp, Artificial
  Probe
cttcgacaaggctgtcagtattctt

SEQ ID NO: 114851 - DNA, 25 bp, Artificial
  Probe
ccactcctatctttctcatccccag

SEQ ID NO: 114852 - DNA, 25 bp, Artificial
  Probe
tccactcctatctttctcatcccca

SEQ ID NO: 114853 - DNA, 25 bp, Artificial
  Probe
acaaagaccatcgactctgtccaag

SEQ ID NO: 114854 - DNA, 25 bp, Artificial
  Probe
caaagagtgcaaggttgggacaaag

SEQ ID NO: 114855 - DNA, 25 bp, Artificial
  Probe
cagcattttctgccataagtgtgag

SEQ ID NO: 114856 - DNA, 25 bp, Artificial
  Probe
aaagagtgcaaggttgggacaaaga

SEQ ID NO: 114857 - DNA, 25 bp, Artificial
  Probe
cgacaaggctgtcagtattcttcct

SEQ ID NO: 114858 - DNA, 25 bp, Artificial
  Probe
aaccttcgacaaggctgtcagtatt

SEQ ID NO: 114859 - DNA, 25 bp, Artificial
  Probe
atctttctcatccccagacaatctg

SEQ ID NO: 114860 - DNA, 25 bp, Artificial
  Probe
tcgacaaggctgtcagtattcttcc

SEQ ID NO: 114861 - DNA, 25 bp, Artificial
  Probe
ccttcgacaaggctgtcagtattct

SEQ ID NO: 114862 - DNA, 25 bp, Artificial
  Probe
agcattttctgccataagtgtgagg

SEQ ID NO: 114863 - DNA, 25 bp, Artificial
  Probe
accttcgacaaggctgtcagtattc

SEQ ID NO: 114864 - DNA, 25 bp, Artificial
  Probe
aaaatcaagcactcttttgcactcg

SEQ ID NO: 114865 - DNA, 25 bp, Artificial
  Probe
caaccttcgacaaggctgtcagtat

SEQ ID NO: 114866 - DNA, 25 bp, Artificial
  Probe
caaactaatccggggagattccatg

SEQ ID NO: 114867 - DNA, 25 bp, Artificial
  Probe
tcaaactaatccggggagattccat

SEQ ID NO: 114868 - DNA, 25 bp, Artificial
  Probe
gaacctcaaactaatccggggagat

SEQ ID NO: 114869 - DNA, 25 bp, Artificial
  Probe
aacctcaaactaatccggggagatt

SEQ ID NO: 114870 - DNA, 25 bp, Artificial
  Probe
ttcctcaaaatcaagcactcttttg

SEQ ID NO: 114871 - DNA, 25 bp, Artificial
  Probe
caagaacctcaaactaatccgggga

SEQ ID NO: 114872 - DNA, 25 bp, Artificial
  Probe
cattcttaattcgtgagagtagcaa

SEQ ID NO: 114873 - DNA, 25 bp, Artificial
  Probe
attcttaattcgtgagagtagcaag

SEQ ID NO: 114874 - DNA, 25 bp, Artificial
  Probe
gcattcttaattcgtgagagtagca

SEQ ID NO: 114875 - DNA, 25 bp, Artificial
  Probe
gtgagagtagcaagaaaggatgtta

SEQ ID NO: 114876 - DNA, 25 bp, Artificial
  Probe
tgagagtagcaagaaaggatgttac

SEQ ID NO: 114877 - DNA, 25 bp, Artificial
  Probe
gtgcattcttaattcgtgagagtag

SEQ ID NO: 114878 - DNA, 25 bp, Artificial
  Probe
attatgatgagaagacctggtttgt

SEQ ID NO: 114879 - DNA, 25 bp, Artificial
  Probe
gagagtagcaagaaaggatgttacg

SEQ ID NO: 114880 - DNA, 25 bp, Artificial
  Probe
ggtgcattcttaattcgtgagagta

SEQ ID NO: 114881 - DNA, 25 bp, Artificial
  Probe
taattcgtgagagtagcaagaaagg

SEQ ID NO: 114882 - DNA, 25 bp, Artificial
  Probe
ttatgatgagaagacctggtttgtg

SEQ ID NO: 114883 - DNA, 25 bp, Artificial
  Probe
ttaattcgtgagagtagcaagaaag

SEQ ID NO: 114884 - DNA, 25 bp, Artificial
  Probe
cttaattcgtgagagtagcaagaaa

SEQ ID NO: 114885 - DNA, 25 bp, Artificial
  Probe
cattatgatgagaagacctggtttg

SEQ ID NO: 114886 - DNA, 25 bp, Artificial
  Probe
tgcattcttaattcgtgagagtagc

SEQ ID NO: 114887 - DNA, 25 bp, Artificial
  Probe
tcttaattcgtgagagtagcaagaa

SEQ ID NO: 114888 - DNA, 25 bp, Artificial
  Probe
ttcttaattcgtgagagtagcaaga

SEQ ID NO: 114889 - DNA, 25 bp, Artificial
  Probe
cgcattatgatgagaagacctggtt

SEQ ID NO: 114890 - DNA, 25 bp, Artificial
  Probe
gcattatgatgagaagacctggttt

SEQ ID NO: 114891 - DNA, 25 bp, Artificial
  Probe
aatgaatagcatcaagcctgacctg

SEQ ID NO: 114892 - DNA, 25 bp, Artificial
  Probe
attcgtgagagtagcaagaaaggat

SEQ ID NO: 114893 - DNA, 25 bp, Artificial
  Probe
atcaagagtgaggacacagatgaga

SEQ ID NO: 114894 - DNA, 25 bp, Artificial
  Probe
gatcaagagtgaggacacagatgag

SEQ ID NO: 114895 - DNA, 25 bp, Artificial
  Probe
aattcgtgagagtagcaagaaagga

SEQ ID NO: 114896 - DNA, 25 bp, Artificial
  Probe
tatgatgagaagacctggtttgtgg

SEQ ID NO: 114897 - DNA, 25 bp, Artificial
  Probe
ttatcaatgaggacgatgagagcct

SEQ ID NO: 114898 - DNA, 25 bp, Artificial
  Probe
tcaagagtgaggacacagatgagag

SEQ ID NO: 114899 - DNA, 25 bp, Artificial
  Probe
gaaaggatgttacgcttgttctgtg

SEQ ID NO: 114900 - DNA, 25 bp, Artificial
  Probe
ttcgtgagagtagcaagaaaggatg

SEQ ID NO: 114901 - DNA, 25 bp, Artificial
  Probe
cgtgagagtagcaagaaaggatgtt

SEQ ID NO: 114902 - DNA, 25 bp, Artificial
  Probe
agagtagcaagaaaggatgttacgc

SEQ ID NO: 114903 - DNA, 25 bp, Artificial
  Probe
tttatcaatgaggacgatgagagcc

SEQ ID NO: 114904 - DNA, 25 bp, Artificial
  Probe
aaatgaatagcatcaagcctgacct

SEQ ID NO: 114905 - DNA, 25 bp, Artificial
  Probe
atgaatagcatcaagcctgacctga

SEQ ID NO: 114906 - DNA, 25 bp, Artificial
  Probe
agtgaggacacagatgagagctatt

SEQ ID NO: 114907 - DNA, 25 bp, Artificial
  Probe
ggatcaagagtgaggacacagatga

SEQ ID NO: 114908 - DNA, 25 bp, Artificial
  Probe
tcgtgagagtagcaagaaaggatgt

SEQ ID NO: 114909 - DNA, 25 bp, Artificial
  Probe
gagtgaggacacagatgagagctat

SEQ ID NO: 114910 - DNA, 25 bp, Artificial
  Probe
cggtgcattcttaattcgtgagagt

SEQ ID NO: 114911 - DNA, 25 bp, Artificial
  Probe
ggatgttacgcttgttctgtggttg

SEQ ID NO: 114912 - DNA, 25 bp, Artificial
  Probe
tttggacaaccgggaaatagataaa

SEQ ID NO: 114913 - DNA, 25 bp, Artificial
  Probe
ctttggacaaccgggaaatagataa

SEQ ID NO: 114914 - DNA, 25 bp, Artificial
  Probe
aagaaaggatgttacgcttgttctg

SEQ ID NO: 114915 - DNA, 25 bp, Artificial
  Probe
aggatgttacgcttgttctgtggtt

SEQ ID NO: 114916 - DNA, 25 bp, Artificial
  Probe
ccgcattatgatgagaagacctggt

SEQ ID NO: 114917 - DNA, 25 bp, Artificial
  Probe
agttgaagaaccagaaggataatgt

SEQ ID NO: 114918 - DNA, 25 bp, Artificial
  Probe
gctaagttgaagaaccagaaggata

SEQ ID NO: 114919 - DNA, 25 bp, Artificial
  Probe
gttgaagaaccagaaggataatgtt

SEQ ID NO: 114920 - DNA, 25 bp, Artificial
  Probe
aagttgaagaaccagaaggataatg

SEQ ID NO: 114921 - DNA, 25 bp, Artificial
  Probe
ctaagttgaagaaccagaaggataa

SEQ ID NO: 114922 - DNA, 25 bp, Artificial
  Probe
taagttgaagaaccagaaggataat

SEQ ID NO: 114923 - DNA, 25 bp, Artificial
  Probe
ttaaccttagctccaagaattaacc

SEQ ID NO: 114924 - DNA, 25 bp, Artificial
  Probe
accagaaggataatgtttgtcttga

SEQ ID NO: 114925 - DNA, 25 bp, Artificial
  Probe
agaaccagaaggataatgtttgtct

SEQ ID NO: 114926 - DNA, 25 bp, Artificial
  Probe
aaccagaaggataatgtttgtcttg

SEQ ID NO: 114927 - DNA, 25 bp, Artificial
  Probe
agctaagttgaagaaccagaaggat

SEQ ID NO: 114928 - DNA, 25 bp, Artificial
  Probe
cagaaggataatgtttgtcttgacc

SEQ ID NO: 114929 - DNA, 25 bp, Artificial
  Probe
ccagaaggataatgtttgtcttgac

SEQ ID NO: 114930 - DNA, 25 bp, Artificial
  Probe
gaaccagaaggataatgtttgtctt

SEQ ID NO: 114931 - DNA, 25 bp, Artificial
  Probe
aagaaccagaaggataatgtttgtc

SEQ ID NO: 114932 - DNA, 25 bp, Artificial
  Probe
gaagaaccagaaggataatgtttgt

SEQ ID NO: 114933 - DNA, 25 bp, Artificial
  Probe
tgaagaaccagaaggataatgtttg

SEQ ID NO: 114934 - DNA, 25 bp, Artificial
  Probe
agaaggataatgtttgtcttgaccc

SEQ ID NO: 114935 - DNA, 25 bp, Artificial
  Probe
gctccgttgataaagaaagtcattc

SEQ ID NO: 114936 - DNA, 25 bp, Artificial
  Probe
gaaggataatgtttgtcttgaccca

SEQ ID NO: 114937 - DNA, 25 bp, Artificial
  Probe
ccgttgataaagaaagtcattcaga

SEQ ID NO: 114938 - DNA, 25 bp, Artificial
  Probe
tccgttgataaagaaagtcattcag

SEQ ID NO: 114939 - DNA, 25 bp, Artificial
  Probe
ctccgttgataaagaaagtcattca

SEQ ID NO: 114940 - DNA, 25 bp, Artificial
  Probe
aaggataatgtttgtcttgacccac

SEQ ID NO: 114941 - DNA, 25 bp, Artificial
  Probe
ttgaagaaccagaaggataatgttt

SEQ ID NO: 114942 - DNA, 25 bp, Artificial
  Probe
cttaaccttagctccaagaattaac

SEQ ID NO: 114943 - DNA, 25 bp, Artificial
  Probe
aaatgatcgctaatttggaggtgat

SEQ ID NO: 114944 - DNA, 25 bp, Artificial
  Probe
tgcttaaccttagctccaagaatta

SEQ ID NO: 114945 - DNA, 25 bp, Artificial
  Probe
atagctaagttgaagaaccagaagg

SEQ ID NO: 114946 - DNA, 25 bp, Artificial
  Probe
ctacgctgtgtttgcttaaccttag

SEQ ID NO: 114947 - DNA, 25 bp, Artificial
  Probe
catagctaagttgaagaaccagaag

SEQ ID NO: 114948 - DNA, 25 bp, Artificial
  Probe
ttgcttaaccttagctccaagaatt

SEQ ID NO: 114949 - DNA, 25 bp, Artificial
  Probe
cgttgataaagaaagtcattcagaa

SEQ ID NO: 114950 - DNA, 25 bp, Artificial
  Probe
taaccttagctccaagaattaaccc

SEQ ID NO: 114951 - DNA, 25 bp, Artificial
  Probe
aagtcatagctaagttgaagaacca

SEQ ID NO: 114952 - DNA, 25 bp, Artificial
  Probe
tcatagctaagttgaagaaccagaa

SEQ ID NO: 114953 - DNA, 25 bp, Artificial
  Probe
gtcatagctaagttgaagaaccaga

SEQ ID NO: 114954 - DNA, 25 bp, Artificial
  Probe
agtcatagctaagttgaagaaccag

SEQ ID NO: 114955 - DNA, 25 bp, Artificial
  Probe
tggaagtcatagctaagttgaagaa

SEQ ID NO: 114956 - DNA, 25 bp, Artificial
  Probe
gtggaagtcatagctaagttgaaga

SEQ ID NO: 114957 - DNA, 25 bp, Artificial
  Probe
gcttaaccttagctccaagaattaa

SEQ ID NO: 114958 - DNA, 25 bp, Artificial
  Probe
gaagtcatagctaagttgaagaacc

SEQ ID NO: 114959 - DNA, 25 bp, Artificial
  Probe
ggaagtcatagctaagttgaagaac

SEQ ID NO: 114960 - DNA, 25 bp, Artificial
  Probe
tagctaagttgaagaaccagaagga

SEQ ID NO: 114961 - DNA, 25 bp, Artificial
  Probe
ggtggaagtcatagctaagttgaag

SEQ ID NO: 114962 - DNA, 25 bp, Artificial
  Probe
tcctgggacagcagttaatttctat

SEQ ID NO: 114963 - DNA, 25 bp, Artificial
  Probe
cagcactatggatatggtcagcatg

SEQ ID NO: 114964 - DNA, 25 bp, Artificial
  Probe
aattcaagcccagcactatggatat

SEQ ID NO: 114965 - DNA, 25 bp, Artificial
  Probe
gaaggtcaaggctctgaaaggttac

SEQ ID NO: 114966 - DNA, 25 bp, Artificial
  Probe
attcaagcccagcactatggatatg

SEQ ID NO: 114967 - DNA, 25 bp, Artificial
  Probe
gtcctgggacagcagttaatttcta

SEQ ID NO: 114968 - DNA, 25 bp, Artificial
  Probe
gtcatcttcctggtctgtttcacac

SEQ ID NO: 114969 - DNA, 25 bp, Artificial
  Probe
cccatcgtctactgttttatcacca

SEQ ID NO: 114970 - DNA, 25 bp, Artificial
  Probe
accccatcgtctactgttttatcac

SEQ ID NO: 114971 - DNA, 25 bp, Artificial
  Probe
ccagcactatggatatggtcagcat

SEQ ID NO: 114972 - DNA, 25 bp, Artificial
  Probe
ccatcgtctactgttttatcaccag

SEQ ID NO: 114973 - DNA, 25 bp, Artificial
  Probe
gtcaaggctctgaaaggttaccaac

SEQ ID NO: 114974 - DNA, 25 bp, Artificial
  Probe
ctggtcatcttcctggtctgtttca

SEQ ID NO: 114975 - DNA, 25 bp, Artificial
  Probe
aaggttaccaaccagacatatcctg

SEQ ID NO: 114976 - DNA, 25 bp, Artificial
  Probe
aatgtgccttaccataccagccttg

SEQ ID NO: 114977 - DNA, 25 bp, Artificial
  Probe
caatgtgccttaccataccagcctt

SEQ ID NO: 114978 - DNA, 25 bp, Artificial
  Probe
ccccatcgtctactgttttatcacc

SEQ ID NO: 114979 - DNA, 25 bp, Artificial
  Probe
tggtcatcttcctggtctgtttcac

SEQ ID NO: 114980 - DNA, 25 bp, Artificial
  Probe
gaccccatcgtctactgttttatca

SEQ ID NO: 114981 - DNA, 25 bp, Artificial
  Probe
gagaagaattcaagcccagcactat

SEQ ID NO: 114982 - DNA, 25 bp, Artificial
  Probe
ctaccagcgtggagaagaattcaag

SEQ ID NO: 114983 - DNA, 25 bp, Artificial
  Probe
agaagaattcaagcccagcactatg

SEQ ID NO: 114984 - DNA, 25 bp, Artificial
  Probe
cgaaggtcaaggctctgaaaggtta

SEQ ID NO: 114985 - DNA, 25 bp, Artificial
  Probe
tgaaaggttaccaaccagacatatc

SEQ ID NO: 114986 - DNA, 25 bp, Artificial
  Probe
ctgaaaggttaccaaccagacatat

SEQ ID NO: 114987 - DNA, 25 bp, Artificial
  Probe
ggaccccatcgtctactgttttatc

SEQ ID NO: 114988 - DNA, 25 bp, Artificial
  Probe
gaaaggttaccaaccagacatatcc

SEQ ID NO: 114989 - DNA, 25 bp, Artificial
  Probe
ggtcatcttcctggtctgtttcaca

SEQ ID NO: 114990 - DNA, 25 bp, Artificial
  Probe
tctaccagcgtggagaagaattcaa

SEQ ID NO: 114991 - DNA, 25 bp, Artificial
  Probe
aaaggttaccaaccagacatatcct

SEQ ID NO: 114992 - DNA, 25 bp, Artificial
  Probe
tctgaaaggttaccaaccagacata

SEQ ID NO: 114993 - DNA, 25 bp, Artificial
  Probe
ctgagcataggtagcagtactccac

SEQ ID NO: 114994 - DNA, 25 bp, Artificial
  Probe
gaattcaagcccagcactatggata

SEQ ID NO: 114995 - DNA, 25 bp, Artificial
  Probe
cataggtagcagtactccaccaagg

SEQ ID NO: 114996 - DNA, 25 bp, Artificial
  Probe
ttctaccagcgtggagaagaattca

SEQ ID NO: 114997 - DNA, 25 bp, Artificial
  Probe
ctgttttatcaccagtggtttccag

SEQ ID NO: 114998 - DNA, 25 bp, Artificial
  Probe
aaggtcaaggctctgaaaggttacc

SEQ ID NO: 114999 - DNA, 25 bp, Artificial
  Probe
ttcaagcccagcactatggatatgg

SEQ ID NO: 115000 - DNA, 25 bp, Artificial
  Probe
tcatcttcctggtctgtttcacacc

SEQ ID NO: 115001 - DNA, 25 bp, Artificial
  Probe
ctctgaaaggttaccaaccagacat

SEQ ID NO: 115002 - DNA, 25 bp, Artificial
  Probe
ggtcaaggctctgaaaggttaccaa

SEQ ID NO: 115003 - DNA, 25 bp, Artificial
  Probe
tggaccccatcgtctactgttttat

SEQ ID NO: 115004 - DNA, 25 bp, Artificial
  Probe
ggtcctgggacagcagttaatttct

SEQ ID NO: 115005 - DNA, 25 bp, Artificial
  Probe
gcataggtagcagtactccaccaag

SEQ ID NO: 115006 - DNA, 25 bp, Artificial
  Probe
tggtcctgggacagcagttaatttc

SEQ ID NO: 115007 - DNA, 25 bp, Artificial
  Probe
gctactacactcttaatgactgaca

SEQ ID NO: 115008 - DNA, 25 bp, Artificial
  Probe
tgctactacactcttaatgactgac

SEQ ID NO: 115009 - DNA, 25 bp, Artificial
  Probe
ttgctactacactcttaatgactga

SEQ ID NO: 115010 - DNA, 25 bp, Artificial
  Probe
ctacactcttaatgactgacagaca

SEQ ID NO: 115011 - DNA, 25 bp, Artificial
  Probe
actacactcttaatgactgacagac

SEQ ID NO: 115012 - DNA, 25 bp, Artificial
  Probe
tgtgatgagttatcctgtagtaaga

SEQ ID NO: 115013 - DNA, 25 bp, Artificial
  Probe
gtgatgagttatcctgtagtaagac

SEQ ID NO: 115014 - DNA, 25 bp, Artificial
  Probe
agatgtgatgagttatcctgtagta

SEQ ID NO: 115015 - DNA, 25 bp, Artificial
  Probe
gaagaccgatcaatagagcatgtat

SEQ ID NO: 115016 - DNA, 25 bp, Artificial
  Probe
aagaccgatcaatagagcatgtatg

SEQ ID NO: 115017 - DNA, 25 bp, Artificial
  Probe
ctactacactcttaatgactgacag

SEQ ID NO: 115018 - DNA, 25 bp, Artificial
  Probe
tacactcttaatgactgacagacag

SEQ ID NO: 115019 - DNA, 25 bp, Artificial
  Probe
cagatgtgatgagttatcctgtagt

SEQ ID NO: 115020 - DNA, 25 bp, Artificial
  Probe
tactacactcttaatgactgacaga

SEQ ID NO: 115021 - DNA, 25 bp, Artificial
  Probe
agaagaccgatcaatagagcatgta

SEQ ID NO: 115022 - DNA, 25 bp, Artificial
  Probe
gcagatgtgatgagttatcctgtag

SEQ ID NO: 115023 - DNA, 25 bp, Artificial
  Probe
atgtgatgagttatcctgtagtaag

SEQ ID NO: 115024 - DNA, 25 bp, Artificial
  Probe
gatgtgatgagttatcctgtagtaa

SEQ ID NO: 115025 - DNA, 25 bp, Artificial
  Probe
tgatgagttatcctgtagtaagaca

SEQ ID NO: 115026 - DNA, 25 bp, Artificial
  Probe
gagaagaccgatcaatagagcatgt

SEQ ID NO: 115027 - DNA, 25 bp, Artificial
  Probe
actcttaatgactgacagacaggtg

SEQ ID NO: 115028 - DNA, 25 bp, Artificial
  Probe
cactcttaatgactgacagacaggt

SEQ ID NO: 115029 - DNA, 25 bp, Artificial
  Probe
acactcttaatgactgacagacagg

SEQ ID NO: 115030 - DNA, 25 bp, Artificial
  Probe
ttcctttcaagtttactgcgattaa

SEQ ID NO: 115031 - DNA, 25 bp, Artificial
  Probe
tttcctttcaagtttactgcgatta

SEQ ID NO: 115032 - DNA, 25 bp, Artificial
  Probe
agaccagactttgacttctttgtat

SEQ ID NO: 115033 - DNA, 25 bp, Artificial
  Probe
gaccagactttgacttctttgtatc

SEQ ID NO: 115034 - DNA, 25 bp, Artificial
  Probe
cagaccagactttgacttctttgta

SEQ ID NO: 115035 - DNA, 25 bp, Artificial
  Probe
tgagaagaccgatcaatagagcatg

SEQ ID NO: 115036 - DNA, 25 bp, Artificial
  Probe
accagactttgacttctttgtatca

SEQ ID NO: 115037 - DNA, 25 bp, Artificial
  Probe
tttgctactacactcttaatgactg

SEQ ID NO: 115038 - DNA, 25 bp, Artificial
  Probe
tcctttcaagtttactgcgattaaa

SEQ ID NO: 115039 - DNA, 25 bp, Artificial
  Probe
gatgagttatcctgtagtaagacat

SEQ ID NO: 115040 - DNA, 25 bp, Artificial
  Probe
ttctttgtatcaagtgtgtggtgtt

SEQ ID NO: 115041 - DNA, 25 bp, Artificial
  Probe
cttctttgtatcaagtgtgtggtgt

SEQ ID NO: 115042 - DNA, 25 bp, Artificial
  Probe
tctttgtatcaagtgtgtggtgttg

SEQ ID NO: 115043 - DNA, 25 bp, Artificial
  Probe
atgagttatcctgtagtaagacatt

SEQ ID NO: 115044 - DNA, 25 bp, Artificial
  Probe
tgcagatgtgatgagttatcctgta

SEQ ID NO: 115045 - DNA, 25 bp, Artificial
  Probe
gtctgtttgtgctttgtctaaccat

SEQ ID NO: 115046 - DNA, 25 bp, Artificial
  Probe
ctcttaatgactgacagacaggtgc

SEQ ID NO: 115047 - DNA, 25 bp, Artificial
  Probe
gaggtctgtttgtgctttgtctaac

SEQ ID NO: 115048 - DNA, 25 bp, Artificial
  Probe
ctccagaccagactttgacttcttt

SEQ ID NO: 115049 - DNA, 25 bp, Artificial
  Probe
ctttctccagaccagactttgactt

SEQ ID NO: 115050 - DNA, 25 bp, Artificial
  Probe
agaggtctgtttgtgctttgtctaa

SEQ ID NO: 115051 - DNA, 25 bp, Artificial
  Probe
tttctccagaccagactttgacttc

SEQ ID NO: 115052 - DNA, 25 bp, Artificial
  Probe
aagataacctgcttcaacaacttca

SEQ ID NO: 115053 - DNA, 25 bp, Artificial
  Probe
catcaccatcatcatcaccttcttc

SEQ ID NO: 115054 - DNA, 25 bp, Artificial
  Probe
atcatcaccatcatcatcaccttct

SEQ ID NO: 115055 - DNA, 25 bp, Artificial
  Probe
catcatcaccatcatcatcaccttc

SEQ ID NO: 115056 - DNA, 25 bp, Artificial
  Probe
atcatcatcaccatcatcatcacct

SEQ ID NO: 115057 - DNA, 25 bp, Artificial
  Probe
aagatcatcatcaccatcatcatca

SEQ ID NO: 115058 - DNA, 25 bp, Artificial
  Probe
tcaagatcatcatcaccatcatcat

SEQ ID NO: 115059 - DNA, 25 bp, Artificial
  Probe
ttcaagatcatcatcaccatcatca

SEQ ID NO: 115060 - DNA, 25 bp, Artificial
  Probe
tcatcaccatcatcatcaccttctt

SEQ ID NO: 115061 - DNA, 25 bp, Artificial
  Probe
caagatcatcatcaccatcatcatc

SEQ ID NO: 115062 - DNA, 25 bp, Artificial
  Probe
cttcaagatcatcatcaccatcatc

SEQ ID NO: 115063 - DNA, 25 bp, Artificial
  Probe
agatcatcatcaccatcatcatcac

SEQ ID NO: 115064 - DNA, 25 bp, Artificial
  Probe
cttcaccaagatgtcctcattgatt

SEQ ID NO: 115065 - DNA, 25 bp, Artificial
  Probe
tcatcatcaccatcatcatcacctt

SEQ ID NO: 115066 - DNA, 25 bp, Artificial
  Probe
ccttcaagatcatcatcaccatcat

SEQ ID NO: 115067 - DNA, 25 bp, Artificial
  Probe
ttcaccaagatgtcctcattgattg

SEQ ID NO: 115068 - DNA, 25 bp, Artificial
  Probe
gatcatcatcaccatcatcatcacc

SEQ ID NO: 115069 - DNA, 25 bp, Artificial
  Probe
attgattgagaaggcttcagtgaat

SEQ ID NO: 115070 - DNA, 25 bp, Artificial
  Probe
atcaccatcatcatcaccttcttcc

SEQ ID NO: 115071 - DNA, 25 bp, Artificial
  Probe
agataacctgcttcaacaacttcag

SEQ ID NO: 115072 - DNA, 25 bp, Artificial
  Probe
tcaccaagatgtcctcattgattga

SEQ ID NO: 115073 - DNA, 25 bp, Artificial
  Probe
ccatcatcatcaccttcttcctctg

SEQ ID NO: 115074 - DNA, 25 bp, Artificial
  Probe
ttgattgagaaggcttcagtgaatg

SEQ ID NO: 115075 - DNA, 25 bp, Artificial
  Probe
cattgattgagaaggcttcagtgaa

SEQ ID NO: 115076 - DNA, 25 bp, Artificial
  Probe
gattgagaaggcttcagtgaatgag

SEQ ID NO: 115077 - DNA, 25 bp, Artificial
  Probe
gttacctcaccatcgtcttcaagtt

SEQ ID NO: 115078 - DNA, 25 bp, Artificial
  Probe
ttacctcaccatcgtcttcaagttg

SEQ ID NO: 115079 - DNA, 25 bp, Artificial
  Probe
attgagaaggcttcagtgaatgaga

SEQ ID NO: 115080 - DNA, 25 bp, Artificial
  Probe
accatcatcatcaccttcttcctct

SEQ ID NO: 115081 - DNA, 25 bp, Artificial
  Probe
caccatcatcatcaccttcttcctc

SEQ ID NO: 115082 - DNA, 25 bp, Artificial
  Probe
ttgagaaggcttcagtgaatgagaa

SEQ ID NO: 115083 - DNA, 25 bp, Artificial
  Probe
tgattgagaaggcttcagtgaatga

SEQ ID NO: 115084 - DNA, 25 bp, Artificial
  Probe
tcattgattgagaaggcttcagtga

SEQ ID NO: 115085 - DNA, 25 bp, Artificial
  Probe
ctgttacctcaccatcgtcttcaag

SEQ ID NO: 115086 - DNA, 25 bp, Artificial
  Probe
atcatcatcaccttcttcctctgct

SEQ ID NO: 115087 - DNA, 25 bp, Artificial
  Probe
catcatcatcaccttcttcctctgc

SEQ ID NO: 115088 - DNA, 25 bp, Artificial
  Probe
tcaccatcatcatcaccttcttcct

SEQ ID NO: 115089 - DNA, 25 bp, Artificial
  Probe
gcttcaccaagatgtcctcattgat

SEQ ID NO: 115090 - DNA, 25 bp, Artificial
  Probe
tgttacctcaccatcgtcttcaagt

SEQ ID NO: 115091 - DNA, 25 bp, Artificial
  Probe
cttcagtgaatgagaaagagaccag

SEQ ID NO: 115092 - DNA, 25 bp, Artificial
  Probe
gaagataacctgcttcaacaacttc

SEQ ID NO: 115093 - DNA, 25 bp, Artificial
  Probe
caagaagcccttcaagatcatcatc

SEQ ID NO: 115094 - DNA, 25 bp, Artificial
  Probe
gaaggcttcagtgaatgagaaagag

SEQ ID NO: 115095 - DNA, 25 bp, Artificial
  Probe
gagaaggcttcagtgaatgagaaag

SEQ ID NO: 115096 - DNA, 25 bp, Artificial
  Probe
aagaagcccttcaagatcatcatca

SEQ ID NO: 115097 - DNA, 25 bp, Artificial
  Probe
gattccttcttcctcttcttcagtg

SEQ ID NO: 115098 - DNA, 25 bp, Artificial
  Probe
ctcaagactccaagaattacaacct

SEQ ID NO: 115099 - DNA, 25 bp, Artificial
  Probe
gactcaagactccaagaattacaac

SEQ ID NO: 115100 - DNA, 25 bp, Artificial
  Probe
tcaagactccaagaattacaacctg

SEQ ID NO: 115101 - DNA, 25 bp, Artificial
  Probe
actcaagactccaagaattacaacc

SEQ ID NO: 115102 - DNA, 25 bp, Artificial
  Probe
attcagacaatctatggaccttcag

SEQ ID NO: 115103 - DNA, 25 bp, Artificial
  Probe
attctaccacttaccaagcaatcag

SEQ ID NO: 115104 - DNA, 25 bp, Artificial
  Probe
aattctaccacttaccaagcaatca

SEQ ID NO: 115105 - DNA, 25 bp, Artificial
  Probe
aattcagacaatctatggaccttca

SEQ ID NO: 115106 - DNA, 25 bp, Artificial
  Probe
ttcagacaatctatggaccttcaga

SEQ ID NO: 115107 - DNA, 25 bp, Artificial
  Probe
cacctattcactacctcaagatgat

SEQ ID NO: 115108 - DNA, 25 bp, Artificial
  Probe
gacaatctatggaccttcagacaac

SEQ ID NO: 115109 - DNA, 25 bp, Artificial
  Probe
agacaatctatggaccttcagacaa

SEQ ID NO: 115110 - DNA, 25 bp, Artificial
  Probe
agcacctattcactacctcaagatg

SEQ ID NO: 115111 - DNA, 25 bp, Artificial
  Probe
cagcacctattcactacctcaagat

SEQ ID NO: 115112 - DNA, 25 bp, Artificial
  Probe
tcagacaatctatggaccttcagac

SEQ ID NO: 115113 - DNA, 25 bp, Artificial
  Probe
aagactccaagaattacaacctgtt

SEQ ID NO: 115114 - DNA, 25 bp, Artificial
  Probe
attccttcttcctcttcttcagtgg

SEQ ID NO: 115115 - DNA, 25 bp, Artificial
  Probe
caagactccaagaattacaacctgt

SEQ ID NO: 115116 - DNA, 25 bp, Artificial
  Probe
cagacaatctatggaccttcagaca

SEQ ID NO: 115117 - DNA, 25 bp, Artificial
  Probe
ctaccacttaccaagcaatcagttc

SEQ ID NO: 115118 - DNA, 25 bp, Artificial
  Probe
acctattcactacctcaagatgata

SEQ ID NO: 115119 - DNA, 25 bp, Artificial
  Probe
gcacctattcactacctcaagatga

SEQ ID NO: 115120 - DNA, 25 bp, Artificial
  Probe
tctaccacttaccaagcaatcagtt

SEQ ID NO: 115121 - DNA, 25 bp, Artificial
  Probe
ttctaccacttaccaagcaatcagt

SEQ ID NO: 115122 - DNA, 25 bp, Artificial
  Probe
ggactcaagactccaagaattacaa

SEQ ID NO: 115123 - DNA, 25 bp, Artificial
  Probe
acaatctatggaccttcagacaacc

SEQ ID NO: 115124 - DNA, 25 bp, Artificial
  Probe
ccagatgcagctacaatagagataa

SEQ ID NO: 115125 - DNA, 25 bp, Artificial
  Probe
tgcagctacaatagagataatggaa

SEQ ID NO: 115126 - DNA, 25 bp, Artificial
  Probe
ctaatggtcttcaggctgcttatga

SEQ ID NO: 115127 - DNA, 25 bp, Artificial
  Probe
tacccaaactatgcttacagagaac

SEQ ID NO: 115128 - DNA, 25 bp, Artificial
  Probe
atgcagctacaatagagataatgga

SEQ ID NO: 115129 - DNA, 25 bp, Artificial
  Probe
atacttcttcgtaaacaaccaatgc

SEQ ID NO: 115130 - DNA, 25 bp, Artificial
  Probe
tggagatacgacaatcaaagaagat

SEQ ID NO: 115131 - DNA, 25 bp, Artificial
  Probe
gacatacttcttcgtaaacaaccaa

SEQ ID NO: 115132 - DNA, 25 bp, Artificial
  Probe
gatgcagctacaatagagataatgg

SEQ ID NO: 115133 - DNA, 25 bp, Artificial
  Probe
ctggagatacgacaatcaaagaaga

SEQ ID NO: 115134 - DNA, 25 bp, Artificial
  Probe
ctcaatttcatatctctgttctggc

SEQ ID NO: 115135 - DNA, 25 bp, Artificial
  Probe
ggattccttcttcctcttcttcagt

SEQ ID NO: 115136 - DNA, 25 bp, Artificial
  Probe
tacttcttcgtaaacaaccaatgct

SEQ ID NO: 115137 - DNA, 25 bp, Artificial
  Probe
aaactgctgagaattacctacgaaa

SEQ ID NO: 115138 - DNA, 25 bp, Artificial
  Probe
gctgcttatgaagactttgatagag

SEQ ID NO: 115139 - DNA, 25 bp, Artificial
  Probe
acatacttcttcgtaaacaaccaat

SEQ ID NO: 115140 - DNA, 25 bp, Artificial
  Probe
acttccatttctgttcttcttccac

SEQ ID NO: 115141 - DNA, 25 bp, Artificial
  Probe
cacttccatttctgttcttcttcca

SEQ ID NO: 115142 - DNA, 25 bp, Artificial
  Probe
caccaagttctctcagcgtggataa

SEQ ID NO: 115143 - DNA, 25 bp, Artificial
  Probe
gatatcaatcctgcctggtacacgg

SEQ ID NO: 115144 - DNA, 25 bp, Artificial
  Probe
catggagacaagaacccctgatatc

SEQ ID NO: 115145 - DNA, 25 bp, Artificial
  Probe
ccatggagacaagaacccctgatat

SEQ ID NO: 115146 - DNA, 25 bp, Artificial
  Probe
catagcaatgaatggagaaggttac

SEQ ID NO: 115147 - DNA, 25 bp, Artificial
  Probe
acatagcaatgaatggagaaggtta

SEQ ID NO: 115148 - DNA, 25 bp, Artificial
  Probe
tacatagcaatgaatggagaaggtt

SEQ ID NO: 115149 - DNA, 25 bp, Artificial
  Probe
atagcaatgaatggagaaggttacc

SEQ ID NO: 115150 - DNA, 25 bp, Artificial
  Probe
tgtaatctactcatccatgctgtac

SEQ ID NO: 115151 - DNA, 25 bp, Artificial
  Probe
gtacatagcaatgaatggagaaggt

SEQ ID NO: 115152 - DNA, 25 bp, Artificial
  Probe
caattccactctgttcaacctcatc

SEQ ID NO: 115153 - DNA, 25 bp, Artificial
  Probe
atgtaatctactcatccatgctgta

SEQ ID NO: 115154 - DNA, 25 bp, Artificial
  Probe
tatgtaatctactcatccatgctgt

SEQ ID NO: 115155 - DNA, 25 bp, Artificial
  Probe
gaactaaggatgacagcaccaattc

SEQ ID NO: 115156 - DNA, 25 bp, Artificial
  Probe
ttatgtaatctactcatccatgctg

SEQ ID NO: 115157 - DNA, 25 bp, Artificial
  Probe
aattccactctgttcaacctcatcc

SEQ ID NO: 115158 - DNA, 25 bp, Artificial
  Probe
catagtgaccaggttatattgcagg

SEQ ID NO: 115159 - DNA, 25 bp, Artificial
  Probe
tatattgcaggcaaggttactactt

SEQ ID NO: 115160 - DNA, 25 bp, Artificial
  Probe
ttatattgcaggcaaggttactact

SEQ ID NO: 115161 - DNA, 25 bp, Artificial
  Probe
gttatattgcaggcaaggttactac

SEQ ID NO: 115162 - DNA, 25 bp, Artificial
  Probe
aatgaatggagaaggttacctctac

SEQ ID NO: 115163 - DNA, 25 bp, Artificial
  Probe
caatgaatggagaaggttacctcta

SEQ ID NO: 115164 - DNA, 25 bp, Artificial
  Probe
ccaattccactctgttcaacctcat

SEQ ID NO: 115165 - DNA, 25 bp, Artificial
  Probe
gggattaaataaggaagggcaagtt

SEQ ID NO: 115166 - DNA, 25 bp, Artificial
  Probe
ggttatattgcaggcaaggttacta

SEQ ID NO: 115167 - DNA, 25 bp, Artificial
  Probe
gcaagttatgaaaggaaacagagta

SEQ ID NO: 115168 - DNA, 25 bp, Artificial
  Probe
ataaggaagggcaagttatgaaagg

SEQ ID NO: 115169 - DNA, 25 bp, Artificial
  Probe
aataaggaagggcaagttatgaaag

SEQ ID NO: 115170 - DNA, 25 bp, Artificial
  Probe
ggattaaataaggaagggcaagtta

SEQ ID NO: 115171 - DNA, 25 bp, Artificial
  Probe
ggaactaaggatgacagcaccaatt

SEQ ID NO: 115172 - DNA, 25 bp, Artificial
  Probe
tttgggattaaataaggaagggcaa

SEQ ID NO: 115173 - DNA, 25 bp, Artificial
  Probe
taaggaagggcaagttatgaaagga

SEQ ID NO: 115174 - DNA, 25 bp, Artificial
  Probe
aaataaggaagggcaagttatgaaa

SEQ ID NO: 115175 - DNA, 25 bp, Artificial
  Probe
ttgggattaaataaggaagggcaag

SEQ ID NO: 115176 - DNA, 25 bp, Artificial
  Probe
aagggcatagtgaccaggttatatt

SEQ ID NO: 115177 - DNA, 25 bp, Artificial
  Probe
attatgtaatctactcatccatgct

SEQ ID NO: 115178 - DNA, 25 bp, Artificial
  Probe
ggcaagttatgaaaggaaacagagt

SEQ ID NO: 115179 - DNA, 25 bp, Artificial
  Probe
tagcaatgaatggagaaggttacct

SEQ ID NO: 115180 - DNA, 25 bp, Artificial
  Probe
ctctcgatggaactaaggatgacag

SEQ ID NO: 115181 - DNA, 25 bp, Artificial
  Probe
tgggattaaataaggaagggcaagt

SEQ ID NO: 115182 - DNA, 25 bp, Artificial
  Probe
aagggcaagttatgaaaggaaacag

SEQ ID NO: 115183 - DNA, 25 bp, Artificial
  Probe
gaagggcaagttatgaaaggaaaca

SEQ ID NO: 115184 - DNA, 25 bp, Artificial
  Probe
atgaatggagaaggttacctctacc

SEQ ID NO: 115185 - DNA, 25 bp, Artificial
  Probe
caggttatattgcaggcaaggttac

SEQ ID NO: 115186 - DNA, 25 bp, Artificial
  Probe
taaataaggaagggcaagttatgaa

SEQ ID NO: 115187 - DNA, 25 bp, Artificial
  Probe
ttaaataaggaagggcaagttatga

SEQ ID NO: 115188 - DNA, 25 bp, Artificial
  Probe
agggcatagtgaccaggttatattg

SEQ ID NO: 115189 - DNA, 25 bp, Artificial
  Probe
caagggcatagtgaccaggttatat

SEQ ID NO: 115190 - DNA, 25 bp, Artificial
  Probe
aggttatattgcaggcaaggttact

SEQ ID NO: 115191 - DNA, 25 bp, Artificial
  Probe
aggctatcttaactctctcatcaac

SEQ ID NO: 115192 - DNA, 25 bp, Artificial
  Probe
ggctatcttaactctctcatcaacc

SEQ ID NO: 115193 - DNA, 25 bp, Artificial
  Probe
gctaggctatcttaactctctcatc

SEQ ID NO: 115194 - DNA, 25 bp, Artificial
  Probe
aattggctaggctatcttaactctc

SEQ ID NO: 115195 - DNA, 25 bp, Artificial
  Probe
attggctaggctatcttaactctct

SEQ ID NO: 115196 - DNA, 25 bp, Artificial
  Probe
ggctaggctatcttaactctctcat

SEQ ID NO: 115197 - DNA, 25 bp, Artificial
  Probe
ttggctaggctatcttaactctctc

SEQ ID NO: 115198 - DNA, 25 bp, Artificial
  Probe
taggctatcttaactctctcatcaa

SEQ ID NO: 115199 - DNA, 25 bp, Artificial
  Probe
ctaggctatcttaactctctcatca

SEQ ID NO: 115200 - DNA, 25 bp, Artificial
  Probe
tggctaggctatcttaactctctca

SEQ ID NO: 115201 - DNA, 25 bp, Artificial
  Probe
ggaatgtgaactgaagcaaactatt

SEQ ID NO: 115202 - DNA, 25 bp, Artificial
  Probe
ttcacaggtaggtcaaatcttcttt

SEQ ID NO: 115203 - DNA, 25 bp, Artificial
  Probe
tttcacaggtaggtcaaatcttctt

SEQ ID NO: 115204 - DNA, 25 bp, Artificial
  Probe
aacaagcattccataaactgatacg

SEQ ID NO: 115205 - DNA, 25 bp, Artificial
  Probe
gctatcttaactctctcatcaaccc

SEQ ID NO: 115206 - DNA, 25 bp, Artificial
  Probe
tggaatgtgaactgaagcaaactat

SEQ ID NO: 115207 - DNA, 25 bp, Artificial
  Probe
acttcaaacaagcattccataaact

SEQ ID NO: 115208 - DNA, 25 bp, Artificial
  Probe
cttcaaacaagcattccataaactg

SEQ ID NO: 115209 - DNA, 25 bp, Artificial
  Probe
gacttcaaacaagcattccataaac

SEQ ID NO: 115210 - DNA, 25 bp, Artificial
  Probe
gcattccataaactgatacgcttta

SEQ ID NO: 115211 - DNA, 25 bp, Artificial
  Probe
aatgtgaactgaagcaaactattgt

SEQ ID NO: 115212 - DNA, 25 bp, Artificial
  Probe
ctggaatgtgaactgaagcaaacta

SEQ ID NO: 115213 - DNA, 25 bp, Artificial
  Probe
gaactgaagcaaactattgtaaagc

SEQ ID NO: 115214 - DNA, 25 bp, Artificial
  Probe
gaatgtgaactgaagcaaactattg

SEQ ID NO: 115215 - DNA, 25 bp, Artificial
  Probe
ttcaaacaagcattccataaactga

SEQ ID NO: 115216 - DNA, 25 bp, Artificial
  Probe
tgtgaactgaagcaaactattgtaa

SEQ ID NO: 115217 - DNA, 25 bp, Artificial
  Probe
ccataaactgatacgctttaagtgc

SEQ ID NO: 115218 - DNA, 25 bp, Artificial
  Probe
tcaaacaagcattccataaactgat

SEQ ID NO: 115219 - DNA, 25 bp, Artificial
  Probe
tccataaactgatacgctttaagtg

SEQ ID NO: 115220 - DNA, 25 bp, Artificial
  Probe
atgtgaactgaagcaaactattgta

SEQ ID NO: 115221 - DNA, 25 bp, Artificial
  Probe
acaagcattccataaactgatacgc

SEQ ID NO: 115222 - DNA, 25 bp, Artificial
  Probe
aaacaagcattccataaactgatac

SEQ ID NO: 115223 - DNA, 25 bp, Artificial
  Probe
caaacaagcattccataaactgata

SEQ ID NO: 115224 - DNA, 25 bp, Artificial
  Probe
ttccataaactgatacgctttaagt

SEQ ID NO: 115225 - DNA, 25 bp, Artificial
  Probe
gtgaactgaagcaaactattgtaaa

SEQ ID NO: 115226 - DNA, 25 bp, Artificial
  Probe
tgaactgaagcaaactattgtaaag

SEQ ID NO: 115227 - DNA, 25 bp, Artificial
  Probe
caattggctaggctatcttaactct

SEQ ID NO: 115228 - DNA, 25 bp, Artificial
  Probe
tcaattggctaggctatcttaactc

SEQ ID NO: 115229 - DNA, 25 bp, Artificial
  Probe
ttcaattggctaggctatcttaact

SEQ ID NO: 115230 - DNA, 25 bp, Artificial
  Probe
ggacttcaaacaagcattccataaa

SEQ ID NO: 115231 - DNA, 25 bp, Artificial
  Probe
catcatctacaccatgtccaatgag

SEQ ID NO: 115232 - DNA, 25 bp, Artificial
  Probe
ctctggaatgtgaactgaagcaaac

SEQ ID NO: 115233 - DNA, 25 bp, Artificial
  Probe
aaatcttctttgcctgttactgggt

SEQ ID NO: 115234 - DNA, 25 bp, Artificial
  Probe
cattccataaactgatacgctttaa

SEQ ID NO: 115235 - DNA, 25 bp, Artificial
  Probe
aggacttcaaacaagcattccataa

SEQ ID NO: 115236 - DNA, 25 bp, Artificial
  Probe
ctgaggatacctgcttactaagaag

SEQ ID NO: 115237 - DNA, 25 bp, Artificial
  Probe
tctgaggatacctgcttactaagaa

SEQ ID NO: 115238 - DNA, 25 bp, Artificial
  Probe
ttctgaggatacctgcttactaaga

SEQ ID NO: 115239 - DNA, 25 bp, Artificial
  Probe
ttagtcactactgaacagctctctt

SEQ ID NO: 115240 - DNA, 25 bp, Artificial
  Probe
taagtgaagtgagacatttgttcct

SEQ ID NO: 115241 - DNA, 25 bp, Artificial
  Probe
tagtcactactgaacagctctcttc

SEQ ID NO: 115242 - DNA, 25 bp, Artificial
  Probe
cttagtcactactgaacagctctct

SEQ ID NO: 115243 - DNA, 25 bp, Artificial
  Probe
ataagtgaagtgagacatttgttcc

SEQ ID NO: 115244 - DNA, 25 bp, Artificial
  Probe
gtgagaagccatatccgattgacag

SEQ ID NO: 115245 - DNA, 25 bp, Artificial
  Probe
ctgtgagaagccatatccgattgac

SEQ ID NO: 115246 - DNA, 25 bp, Artificial
  Probe
aagtgaagtgagacatttgttcctg

SEQ ID NO: 115247 - DNA, 25 bp, Artificial
  Probe
ctctgtgagaagccatatccgattg

SEQ ID NO: 115248 - DNA, 25 bp, Artificial
  Probe
tctgtgagaagccatatccgattga

SEQ ID NO: 115249 - DNA, 25 bp, Artificial
  Probe
tttctgaggatacctgcttactaag

SEQ ID NO: 115250 - DNA, 25 bp, Artificial
  Probe
ctttctgaggatacctgcttactaa

SEQ ID NO: 115251 - DNA, 25 bp, Artificial
  Probe
gcaagtccctactggagaattattt

SEQ ID NO: 115252 - DNA, 25 bp, Artificial
  Probe
aataagtgaagtgagacatttgttc

SEQ ID NO: 115253 - DNA, 25 bp, Artificial
  Probe
gaagtgagacatttgttcctggaaa

SEQ ID NO: 115254 - DNA, 25 bp, Artificial
  Probe
aaacaaataagtgaagtgagacatt

SEQ ID NO: 115255 - DNA, 25 bp, Artificial
  Probe
tttgttgtccattagctttcaagag

SEQ ID NO: 115256 - DNA, 25 bp, Artificial
  Probe
agcaagtccctactggagaattatt

SEQ ID NO: 115257 - DNA, 25 bp, Artificial
  Probe
gctttctgaggatacctgcttacta

SEQ ID NO: 115258 - DNA, 25 bp, Artificial
  Probe
tgagaagccatatccgattgacagg

SEQ ID NO: 115259 - DNA, 25 bp, Artificial
  Probe
gaaattctcgaagctgaaacctctt

SEQ ID NO: 115260 - DNA, 25 bp, Artificial
  Probe
agtgaagtgagacatttgttcctgg

SEQ ID NO: 115261 - DNA, 25 bp, Artificial
  Probe
tgaagtgagacatttgttcctggaa

SEQ ID NO: 115262 - DNA, 25 bp, Artificial
  Probe
tgtgagaagccatatccgattgaca

SEQ ID NO: 115263 - DNA, 25 bp, Artificial
  Probe
aaataagtgaagtgagacatttgtt

SEQ ID NO: 115264 - DNA, 25 bp, Artificial
  Probe
aacaaataagtgaagtgagacattt

SEQ ID NO: 115265 - DNA, 25 bp, Artificial
  Probe
aaattctcgaagctgaaacctcttg

SEQ ID NO: 115266 - DNA, 25 bp, Artificial
  Probe
cctctgtgagaagccatatccgatt

SEQ ID NO: 115267 - DNA, 25 bp, Artificial
  Probe
gtgaagtgagacatttgttcctgga

SEQ ID NO: 115268 - DNA, 25 bp, Artificial
  Probe
cttgctttctgaggatacctgctta

SEQ ID NO: 115269 - DNA, 25 bp, Artificial
  Probe
ttgctttctgaggatacctgcttac

SEQ ID NO: 115270 - DNA, 25 bp, Artificial
  Probe
agtcactactgaacagctctcttcc

SEQ ID NO: 115271 - DNA, 25 bp, Artificial
  Probe
acagtacactggaatgtgaaccaac

SEQ ID NO: 115272 - DNA, 25 bp, Artificial
  Probe
cttactaagaagccagtttgggtct

SEQ ID NO: 115273 - DNA, 25 bp, Artificial
  Probe
agaaattctcgaagctgaaacctct

SEQ ID NO: 115274 - DNA, 25 bp, Artificial
  Probe
ttactaagaagccagtttgggtctg

SEQ ID NO: 115275 - DNA, 25 bp, Artificial
  Probe
gagaagccatatccgattgacagga

SEQ ID NO: 115276 - DNA, 25 bp, Artificial
  Probe
aggaacttttgcttcttaggaattt

SEQ ID NO: 115277 - DNA, 25 bp, Artificial
  Probe
aaggaacttttgcttcttaggaatt

SEQ ID NO: 115278 - DNA, 25 bp, Artificial
  Probe
aattctcgaagctgaaacctcttgt

SEQ ID NO: 115279 - DNA, 25 bp, Artificial
  Probe
attagctttcaagagcagattcact

SEQ ID NO: 115280 - DNA, 25 bp, Artificial
  Probe
cattagctttcaagagcagattcac

SEQ ID NO: 115281 - DNA, 25 bp, Artificial
  Probe
attggtaagagagttaggtcatcac

SEQ ID NO: 115282 - DNA, 25 bp, Artificial
  Probe
aattggtaagagagttaggtcatca

SEQ ID NO: 115283 - DNA, 25 bp, Artificial
  Probe
caatggaagattatgatgtctgagg

SEQ ID NO: 115284 - DNA, 25 bp, Artificial
  Probe
tggaagattatgatgtctgaggatt

SEQ ID NO: 115285 - DNA, 25 bp, Artificial
  Probe
aatggaagattatgatgtctgagga

SEQ ID NO: 115286 - DNA, 25 bp, Artificial
  Probe
agattatgatgtctgaggattgtct

SEQ ID NO: 115287 - DNA, 25 bp, Artificial
  Probe
ggaagattatgatgtctgaggattg

SEQ ID NO: 115288 - DNA, 25 bp, Artificial
  Probe
atggaagattatgatgtctgaggat

SEQ ID NO: 115289 - DNA, 25 bp, Artificial
  Probe
ttggtaagagagttaggtcatcact

SEQ ID NO: 115290 - DNA, 25 bp, Artificial
  Probe
gattatgatgtctgaggattgtctt

SEQ ID NO: 115291 - DNA, 25 bp, Artificial
  Probe
tggtaagagagttaggtcatcactg

SEQ ID NO: 115292 - DNA, 25 bp, Artificial
  Probe
aagattatgatgtctgaggattgtc

SEQ ID NO: 115293 - DNA, 25 bp, Artificial
  Probe
gaagattatgatgtctgaggattgt

SEQ ID NO: 115294 - DNA, 25 bp, Artificial
  Probe
ggtaagagagttaggtcatcactgg

SEQ ID NO: 115295 - DNA, 25 bp, Artificial
  Probe
tgtgtctatgatctgatgtgaggtg

SEQ ID NO: 115296 - DNA, 25 bp, Artificial
  Probe
gtgtgtctatgatctgatgtgaggt

SEQ ID NO: 115297 - DNA, 25 bp, Artificial
  Probe
gacaaccaacaagtaggagaggaag

SEQ ID NO: 115298 - DNA, 25 bp, Artificial
  Probe
aagtatggacaaccaacaagtagga

SEQ ID NO: 115299 - DNA, 25 bp, Artificial
  Probe
aaccgtgtgtctatgatctgatgtg

SEQ ID NO: 115300 - DNA, 25 bp, Artificial
  Probe
tatggacaaccaacaagtaggagag

SEQ ID NO: 115301 - DNA, 25 bp, Artificial
  Probe
cgtgtgtctatgatctgatgtgagg

SEQ ID NO: 115302 - DNA, 25 bp, Artificial
  Probe
ccgtgtgtctatgatctgatgtgag

SEQ ID NO: 115303 - DNA, 25 bp, Artificial
  Probe
gtatggacaaccaacaagtaggaga

SEQ ID NO: 115304 - DNA, 25 bp, Artificial
  Probe
agtatggacaaccaacaagtaggag

SEQ ID NO: 115305 - DNA, 25 bp, Artificial
  Probe
aaattggtaagagagttaggtcatc

SEQ ID NO: 115306 - DNA, 25 bp, Artificial
  Probe
gaaattggtaagagagttaggtcat

SEQ ID NO: 115307 - DNA, 25 bp, Artificial
  Probe
gtgtctatgatctgatgtgaggtgc

SEQ ID NO: 115308 - DNA, 25 bp, Artificial
  Probe
gtaagagagttaggtcatcactggg

SEQ ID NO: 115309 - DNA, 25 bp, Artificial
  Probe
accgtgtgtctatgatctgatgtga

SEQ ID NO: 115310 - DNA, 25 bp, Artificial
  Probe
taagagagttaggtcatcactggga

SEQ ID NO: 115311 - DNA, 25 bp, Artificial
  Probe
aaaccgtgtgtctatgatctgatgt

SEQ ID NO: 115312 - DNA, 25 bp, Artificial
  Probe
ggacaaccaacaagtaggagaggaa

SEQ ID NO: 115313 - DNA, 25 bp, Artificial
  Probe
aaagtatggacaaccaacaagtagg

SEQ ID NO: 115314 - DNA, 25 bp, Artificial
  Probe
tatgatctgatgtgaggtgcctgag

SEQ ID NO: 115315 - DNA, 25 bp, Artificial
  Probe
ctatgatctgatgtgaggtgcctga

SEQ ID NO: 115316 - DNA, 25 bp, Artificial
  Probe
tctatgatctgatgtgaggtgcctg

SEQ ID NO: 115317 - DNA, 25 bp, Artificial
  Probe
gtctatgatctgatgtgaggtgcct

SEQ ID NO: 115318 - DNA, 25 bp, Artificial
  Probe
tgtctatgatctgatgtgaggtgcc

SEQ ID NO: 115319 - DNA, 25 bp, Artificial
  Probe
acaaccaacaagtaggagaggaagc

SEQ ID NO: 115320 - DNA, 25 bp, Artificial
  Probe
atggacaaccaacaagtaggagagg

SEQ ID NO: 115321 - DNA, 25 bp, Artificial
  Probe
aagagagttaggtcatcactgggac

SEQ ID NO: 115322 - DNA, 25 bp, Artificial
  Probe
aaaaccgtgtgtctatgatctgatg

SEQ ID NO: 115323 - DNA, 25 bp, Artificial
  Probe
aaccaacaagtaggagaggaagctg

SEQ ID NO: 115324 - DNA, 25 bp, Artificial
  Probe
caaccaacaagtaggagaggaagct

SEQ ID NO: 115325 - DNA, 25 bp, Artificial
  Probe
cgtgagcacacatataaaagtatgg

SEQ ID NO: 115326 - DNA, 25 bp, Artificial
  Probe
gttacagtccacaggtgatagagaa

SEQ ID NO: 115327 - DNA, 25 bp, Artificial
  Probe
tcttgtaggtaacttgagttcgtag

SEQ ID NO: 115328 - DNA, 25 bp, Artificial
  Probe
cttcttgtaggtaacttgagttcgt

SEQ ID NO: 115329 - DNA, 25 bp, Artificial
  Probe
ttcttgtaggtaacttgagttcgta

SEQ ID NO: 115330 - DNA, 25 bp, Artificial
  Probe
cttgtaggtaacttgagttcgtagc

SEQ ID NO: 115331 - DNA, 25 bp, Artificial
  Probe
taatgaaggttacagtccacaggtg

SEQ ID NO: 115332 - DNA, 25 bp, Artificial
  Probe
gaaggttacagtccacaggtgatag

SEQ ID NO: 115333 - DNA, 25 bp, Artificial
  Probe
ccttcttgtaggtaacttgagttcg

SEQ ID NO: 115334 - DNA, 25 bp, Artificial
  Probe
aaggttacagtccacaggtgataga

SEQ ID NO: 115335 - DNA, 25 bp, Artificial
  Probe
tgaaggttacagtccacaggtgata

SEQ ID NO: 115336 - DNA, 25 bp, Artificial
  Probe
ttgtaggtaacttgagttcgtagcc

SEQ ID NO: 115337 - DNA, 25 bp, Artificial
  Probe
tacagtccacaggtgatagagaaat

SEQ ID NO: 115338 - DNA, 25 bp, Artificial
  Probe
cagtccacaggtgatagagaaattc

SEQ ID NO: 115339 - DNA, 25 bp, Artificial
  Probe
ttacagtccacaggtgatagagaaa

SEQ ID NO: 115340 - DNA, 25 bp, Artificial
  Probe
ggttacagtccacaggtgatagaga

SEQ ID NO: 115341 - DNA, 25 bp, Artificial
  Probe
aggttacagtccacaggtgatagag

SEQ ID NO: 115342 - DNA, 25 bp, Artificial
  Probe
tccacaggtgatagagaaattcaag

SEQ ID NO: 115343 - DNA, 25 bp, Artificial
  Probe
gtaatgaaggttacagtccacaggt

SEQ ID NO: 115344 - DNA, 25 bp, Artificial
  Probe
acagtccacaggtgatagagaaatt

SEQ ID NO: 115345 - DNA, 25 bp, Artificial
  Probe
gtccacaggtgatagagaaattcaa

SEQ ID NO: 115346 - DNA, 25 bp, Artificial
  Probe
cacctcaaaccatgtcaaagaatta

SEQ ID NO: 115347 - DNA, 25 bp, Artificial
  Probe
agtccacaggtgatagagaaattca

SEQ ID NO: 115348 - DNA, 25 bp, Artificial
  Probe
acctcaaaccatgtcaaagaattaa

SEQ ID NO: 115349 - DNA, 25 bp, Artificial
  Probe
tcacctcaaaccatgtcaaagaatt

SEQ ID NO: 115350 - DNA, 25 bp, Artificial
  Probe
atgaaggttacagtccacaggtgat

SEQ ID NO: 115351 - DNA, 25 bp, Artificial
  Probe
ctcacctcaaaccatgtcaaagaat

SEQ ID NO: 115352 - DNA, 25 bp, Artificial
  Probe
ccacaggtgatagagaaattcaagc

SEQ ID NO: 115353 - DNA, 25 bp, Artificial
  Probe
aatgaaggttacagtccacaggtga

SEQ ID NO: 115354 - DNA, 25 bp, Artificial
  Probe
gtaggtaacttgagttcgtagcctg

SEQ ID NO: 115355 - DNA, 25 bp, Artificial
  Probe
aagtgtgttcattcagtttacctgg

SEQ ID NO: 115356 - DNA, 25 bp, Artificial
  Probe
cctcaaaccatgtcaaagaattaaa

SEQ ID NO: 115357 - DNA, 25 bp, Artificial
  Probe
tgtaggtaacttgagttcgtagcct

SEQ ID NO: 115358 - DNA, 25 bp, Artificial
  Probe
aggtgatagagaaattcaagctgta

SEQ ID NO: 115359 - DNA, 25 bp, Artificial
  Probe
cacaggtgatagagaaattcaagct

SEQ ID NO: 115360 - DNA, 25 bp, Artificial
  Probe
ggtgatagagaaattcaagctgtaa

SEQ ID NO: 115361 - DNA, 25 bp, Artificial
  Probe
caggtgatagagaaattcaagctgt

SEQ ID NO: 115362 - DNA, 25 bp, Artificial
  Probe
acaggtgatagagaaattcaagctg

SEQ ID NO: 115363 - DNA, 25 bp, Artificial
  Probe
gttcttacctgcatccttccatgag

SEQ ID NO: 115364 - DNA, 25 bp, Artificial
  Probe
tgatagagaaattcaagctgtaagt

SEQ ID NO: 115365 - DNA, 25 bp, Artificial
  Probe
ccaaacccttcacacaaagaaaata

SEQ ID NO: 115366 - DNA, 25 bp, Artificial
  Probe
cacaaagaaaataaaagtaaggcgt

SEQ ID NO: 115367 - DNA, 25 bp, Artificial
  Probe
acacaaagaaaataaaagtaaggcg

SEQ ID NO: 115368 - DNA, 25 bp, Artificial
  Probe
gtgatagagaaattcaagctgtaag

SEQ ID NO: 115369 - DNA, 25 bp, Artificial
  Probe
agtgtgttcattcagtttacctggg

SEQ ID NO: 115370 - DNA, 25 bp, Artificial
  Probe
caaacccttcacacaaagaaaataa

SEQ ID NO: 115371 - DNA, 25 bp, Artificial
  Probe
taagatgtattctcagattggtgga

SEQ ID NO: 115372 - DNA, 25 bp, Artificial
  Probe
gtaagatgtattctcagattggtgg

SEQ ID NO: 115373 - DNA, 25 bp, Artificial
  Probe
aagatgtattctcagattggtggag

SEQ ID NO: 115374 - DNA, 25 bp, Artificial
  Probe
tgtaagatgtattctcagattggtg

SEQ ID NO: 115375 - DNA, 25 bp, Artificial
  Probe
agatgtattctcagattggtggagg

SEQ ID NO: 115376 - DNA, 25 bp, Artificial
  Probe
ttgtaagatgtattctcagattggt

SEQ ID NO: 115377 - DNA, 25 bp, Artificial
  Probe
ctccatcacagacaacatctcctac

SEQ ID NO: 115378 - DNA, 25 bp, Artificial
  Probe
ctccagtcaactcctagatttcaaa

SEQ ID NO: 115379 - DNA, 25 bp, Artificial
  Probe
agaggaaccttgtttgtaagatgta

SEQ ID NO: 115380 - DNA, 25 bp, Artificial
  Probe
cagaggaaccttgtttgtaagatgt

SEQ ID NO: 115381 - DNA, 25 bp, Artificial
  Probe
actccagtcaactcctagatttcaa

SEQ ID NO: 115382 - DNA, 25 bp, Artificial
  Probe
gaggaaccttgtttgtaagatgtat

SEQ ID NO: 115383 - DNA, 25 bp, Artificial
  Probe
ctggctttgtcctggtttaagattt

SEQ ID NO: 115384 - DNA, 25 bp, Artificial
  Probe
gagaactgggtcaataaagtgtact

SEQ ID NO: 115385 - DNA, 25 bp, Artificial
  Probe
ggaaccttgtttgtaagatgtattc

SEQ ID NO: 115386 - DNA, 25 bp, Artificial
  Probe
ggaagatgtctgggagagaactaag

SEQ ID NO: 115387 - DNA, 25 bp, Artificial
  Probe
cactccagtcaactcctagatttca

SEQ ID NO: 115388 - DNA, 25 bp, Artificial
  Probe
accttgtttgtaagatgtattctca

SEQ ID NO: 115389 - DNA, 25 bp, Artificial
  Probe
aggaaccttgtttgtaagatgtatt

SEQ ID NO: 115390 - DNA, 25 bp, Artificial
  Probe
gaactgggtcaataaagtgtactac

SEQ ID NO: 115391 - DNA, 25 bp, Artificial
  Probe
agaactgggtcaataaagtgtacta

SEQ ID NO: 115392 - DNA, 25 bp, Artificial
  Probe
ggagaactgggtcaataaagtgtac

SEQ ID NO: 115393 - DNA, 25 bp, Artificial
  Probe
gggagaactgggtcaataaagtgta

SEQ ID NO: 115394 - DNA, 25 bp, Artificial
  Probe
ctttctaactgcctggaagatgtct

SEQ ID NO: 115395 - DNA, 25 bp, Artificial
  Probe
tttgggagaactgggtcaataaagt

SEQ ID NO: 115396 - DNA, 25 bp, Artificial
  Probe
gcagaggaaccttgtttgtaagatg

SEQ ID NO: 115397 - DNA, 25 bp, Artificial
  Probe
ccttgtttgtaagatgtattctcag

SEQ ID NO: 115398 - DNA, 25 bp, Artificial
  Probe
tctggctttgtcctggtttaagatt

SEQ ID NO: 115399 - DNA, 25 bp, Artificial
  Probe
atgtctgggagagaactaagcacta

SEQ ID NO: 115400 - DNA, 25 bp, Artificial
  Probe
gaagatgtctgggagagaactaagc

SEQ ID NO: 115401 - DNA, 25 bp, Artificial
  Probe
tggaagatgtctgggagagaactaa

SEQ ID NO: 115402 - DNA, 25 bp, Artificial
  Probe
ggagagaactaagcactaccctttg

SEQ ID NO: 115403 - DNA, 25 bp, Artificial
  Probe
tttctaactgcctggaagatgtctg

SEQ ID NO: 115404 - DNA, 25 bp, Artificial
  Probe
tccatcacagacaacatctcctacg

SEQ ID NO: 115405 - DNA, 25 bp, Artificial
  Probe
gctccatcacagacaacatctccta

SEQ ID NO: 115406 - DNA, 25 bp, Artificial
  Probe
aactgggtcaataaagtgtactacc

SEQ ID NO: 115407 - DNA, 25 bp, Artificial
  Probe
gacgcagagagtgaatacctgattc

SEQ ID NO: 115408 - DNA, 25 bp, Artificial
  Probe
gggtcaataaagtgtactacctctg

SEQ ID NO: 115409 - DNA, 25 bp, Artificial
  Probe
ctgggtcaataaagtgtactacctc

SEQ ID NO: 115410 - DNA, 25 bp, Artificial
  Probe
ggtcaataaagtgtactacctctga

SEQ ID NO: 115411 - DNA, 25 bp, Artificial
  Probe
tgggtcaataaagtgtactacctct

SEQ ID NO: 115412 - DNA, 25 bp, Artificial
  Probe
actgggtcaataaagtgtactacct

SEQ ID NO: 115413 - DNA, 25 bp, Artificial
  Probe
gatgtattctcagattggtggaggg

SEQ ID NO: 115414 - DNA, 25 bp, Artificial
  Probe
aaccttgtttgtaagatgtattctc

SEQ ID NO: 115415 - DNA, 25 bp, Artificial
  Probe
gaaccttgtttgtaagatgtattct

SEQ ID NO: 115416 - DNA, 25 bp, Artificial
  Probe
ttaccaccagaacaagaactacaat

SEQ ID NO: 115417 - DNA, 25 bp, Artificial
  Probe
attaccaccagaacaagaactacaa

SEQ ID NO: 115418 - DNA, 25 bp, Artificial
  Probe
agattaccaccagaacaagaactac

SEQ ID NO: 115419 - DNA, 25 bp, Artificial
  Probe
gattaccaccagaacaagaactaca

SEQ ID NO: 115420 - DNA, 25 bp, Artificial
  Probe
taccaccagaacaagaactacaatt

SEQ ID NO: 115421 - DNA, 25 bp, Artificial
  Probe
cctgtattgtaacattctctgccat

SEQ ID NO: 115422 - DNA, 25 bp, Artificial
  Probe
gcatgagagaagaatgaagagatac

SEQ ID NO: 115423 - DNA, 25 bp, Artificial
  Probe
ctgtattgtaacattctctgccatg

SEQ ID NO: 115424 - DNA, 25 bp, Artificial
  Probe
atgagagaagaatgaagagatacaa

SEQ ID NO: 115425 - DNA, 25 bp, Artificial
  Probe
gatacaaagtgaatgaataccaggg

SEQ ID NO: 115426 - DNA, 25 bp, Artificial
  Probe
catgagagaagaatgaagagataca

SEQ ID NO: 115427 - DNA, 25 bp, Artificial
  Probe
ctgcatgagagaagaatgaagagat

SEQ ID NO: 115428 - DNA, 25 bp, Artificial
  Probe
actgagaaagataatgctaagaggt

SEQ ID NO: 115429 - DNA, 25 bp, Artificial
  Probe
tgcatgagagaagaatgaagagata

SEQ ID NO: 115430 - DNA, 25 bp, Artificial
  Probe
aactgcatgagagaagaatgaagag

SEQ ID NO: 115431 - DNA, 25 bp, Artificial
  Probe
ggaagaggtcaacaagtttcattta

SEQ ID NO: 115432 - DNA, 25 bp, Artificial
  Probe
atacaaagtgaatgaataccagggt

SEQ ID NO: 115433 - DNA, 25 bp, Artificial
  Probe
tacaaagtgaatgaataccagggtc

SEQ ID NO: 115434 - DNA, 25 bp, Artificial
  Probe
caactgcatgagagaagaatgaaga

SEQ ID NO: 115435 - DNA, 25 bp, Artificial
  Probe
tattcaaagacacagaagttgggaa

SEQ ID NO: 115436 - DNA, 25 bp, Artificial
  Probe
ttattcaaagacacagaagttggga

SEQ ID NO: 115437 - DNA, 25 bp, Artificial
  Probe
agatacaaagtgaatgaataccagg

SEQ ID NO: 115438 - DNA, 25 bp, Artificial
  Probe
attattcaaagacacagaagttggg

SEQ ID NO: 115439 - DNA, 25 bp, Artificial
  Probe
aagttgggaaattcaaatgttgtgt

SEQ ID NO: 115440 - DNA, 25 bp, Artificial
  Probe
gaagttgggaaattcaaatgttgtg

SEQ ID NO: 115441 - DNA, 25 bp, Artificial
  Probe
agaagttgggaaattcaaatgttgt

SEQ ID NO: 115442 - DNA, 25 bp, Artificial
  Probe
gacacagaagttgggaaattcaaat

SEQ ID NO: 115443 - DNA, 25 bp, Artificial
  Probe
cagaagttgggaaattcaaatgttg

SEQ ID NO: 115444 - DNA, 25 bp, Artificial
  Probe
acacagaagttgggaaattcaaatg

SEQ ID NO: 115445 - DNA, 25 bp, Artificial
  Probe
aaagacacagaagttgggaaattca

SEQ ID NO: 115446 - DNA, 25 bp, Artificial
  Probe
agttgggaaattcaaatgttgtgtc

SEQ ID NO: 115447 - DNA, 25 bp, Artificial
  Probe
ctgagaaagataatgctaagaggtt

SEQ ID NO: 115448 - DNA, 25 bp, Artificial
  Probe
aactgagaaagataatgctaagagg

SEQ ID NO: 115449 - DNA, 25 bp, Artificial
  Probe
actgcatgagagaagaatgaagaga

SEQ ID NO: 115450 - DNA, 25 bp, Artificial
  Probe
tcaactgcatgagagaagaatgaag

SEQ ID NO: 115451 - DNA, 25 bp, Artificial
  Probe
aaattcaaatgttgtgtcgtctgtc

SEQ ID NO: 115452 - DNA, 25 bp, Artificial
  Probe
gaaattcaaatgttgtgtcgtctgt

SEQ ID NO: 115453 - DNA, 25 bp, Artificial
  Probe
caaagacacagaagttgggaaattc

SEQ ID NO: 115454 - DNA, 25 bp, Artificial
  Probe
ttcaaagacacagaagttgggaaat

SEQ ID NO: 115455 - DNA, 25 bp, Artificial
  Probe
attcaaagacacagaagttgggaaa

SEQ ID NO: 115456 - DNA, 25 bp, Artificial
  Probe
agacacagaagttgggaaattcaaa

SEQ ID NO: 115457 - DNA, 25 bp, Artificial
  Probe
aagacacagaagttgggaaattcaa

SEQ ID NO: 115458 - DNA, 25 bp, Artificial
  Probe
tcaaagacacagaagttgggaaatt

SEQ ID NO: 115459 - DNA, 25 bp, Artificial
  Probe
cattattcaaagacacagaagttgg

SEQ ID NO: 115460 - DNA, 25 bp, Artificial
  Probe
tgagaaagataatgctaagaggttc

SEQ ID NO: 115461 - DNA, 25 bp, Artificial
  Probe
cttattatgtcacacacacacacac

SEQ ID NO: 115462 - DNA, 25 bp, Artificial
  Probe
acaagaacagagtggatgaagtgaa

SEQ ID NO: 115463 - DNA, 25 bp, Artificial
  Probe
ttattatgtcacacacacacacaca

SEQ ID NO: 115464 - DNA, 25 bp, Artificial
  Probe
tattatgtcacacacacacacacac

SEQ ID NO: 115465 - DNA, 25 bp, Artificial
  Probe
gcttattatgtcacacacacacaca

SEQ ID NO: 115466 - DNA, 25 bp, Artificial
  Probe
ggatgtccaaggataattactgact

SEQ ID NO: 115467 - DNA, 25 bp, Artificial
  Probe
atgtccaaggataattactgactgt

SEQ ID NO: 115468 - DNA, 25 bp, Artificial
  Probe
gatgtccaaggataattactgactg

SEQ ID NO: 115469 - DNA, 25 bp, Artificial
  Probe
tgtccaaggataattactgactgta

SEQ ID NO: 115470 - DNA, 25 bp, Artificial
  Probe
ggcttattatgtcacacacacacac

SEQ ID NO: 115471 - DNA, 25 bp, Artificial
  Probe
caagaacagagtggatgaagtgaaa

SEQ ID NO: 115472 - DNA, 25 bp, Artificial
  Probe
tacatcttacttcatcgaacctgtg

SEQ ID NO: 115473 - DNA, 25 bp, Artificial
  Probe
gtacatcttacttcatcgaacctgt

SEQ ID NO: 115474 - DNA, 25 bp, Artificial
  Probe
tggcttattatgtcacacacacaca

SEQ ID NO: 115475 - DNA, 25 bp, Artificial
  Probe
tggatgtccaaggataattactgac

SEQ ID NO: 115476 - DNA, 25 bp, Artificial
  Probe
ctttccaaatccacaagaacagagt

SEQ ID NO: 115477 - DNA, 25 bp, Artificial
  Probe
gtggcttattatgtcacacacacac

SEQ ID NO: 115478 - DNA, 25 bp, Artificial
  Probe
aaggataattactgactgtaacagc

SEQ ID NO: 115479 - DNA, 25 bp, Artificial
  Probe
aggataattactgactgtaacagct

SEQ ID NO: 115480 - DNA, 25 bp, Artificial
  Probe
ccaaggataattactgactgtaaca

SEQ ID NO: 115481 - DNA, 25 bp, Artificial
  Probe
caaagaaaccatgaacttaggactc

SEQ ID NO: 115482 - DNA, 25 bp, Artificial
  Probe
acaaagaaaccatgaacttaggact

SEQ ID NO: 115483 - DNA, 25 bp, Artificial
  Probe
aacaaagaaaccatgaacttaggac

SEQ ID NO: 115484 - DNA, 25 bp, Artificial
  Probe
tccaaggataattactgactgtaac

SEQ ID NO: 115485 - DNA, 25 bp, Artificial
  Probe
gtccaaggataattactgactgtaa

SEQ ID NO: 115486 - DNA, 25 bp, Artificial
  Probe
cacaagaacagagtggatgaagtga

SEQ ID NO: 115487 - DNA, 25 bp, Artificial
  Probe
ttcctttaactggtatggtgaacag

SEQ ID NO: 115488 - DNA, 25 bp, Artificial
  Probe
aaacaaagaaaccatgaacttagga

SEQ ID NO: 115489 - DNA, 25 bp, Artificial
  Probe
caaacaaagaaaccatgaacttagg

SEQ ID NO: 115490 - DNA, 25 bp, Artificial
  Probe
aaagaaaccatgaacttaggactca

SEQ ID NO: 115491 - DNA, 25 bp, Artificial
  Probe
tcacaaacaaagaaaccatgaactt

SEQ ID NO: 115492 - DNA, 25 bp, Artificial
  Probe
atcacaaacaaagaaaccatgaact

SEQ ID NO: 115493 - DNA, 25 bp, Artificial
  Probe
attatgtcacacacacacacacaca

SEQ ID NO: 115494 - DNA, 25 bp, Artificial
  Probe
aagaaaccatgaacttaggactcag

SEQ ID NO: 115495 - DNA, 25 bp, Artificial
  Probe
gatcacaaacaaagaaaccatgaac

SEQ ID NO: 115496 - DNA, 25 bp, Artificial
  Probe
ggatcacaaacaaagaaaccatgaa

SEQ ID NO: 115497 - DNA, 25 bp, Artificial
  Probe
cacaaacaaagaaaccatgaactta

SEQ ID NO: 115498 - DNA, 25 bp, Artificial
  Probe
acaaacaaagaaaccatgaacttag

SEQ ID NO: 115499 - DNA, 25 bp, Artificial
  Probe
aaccatgaacttaggactcagcttg

SEQ ID NO: 115500 - DNA, 25 bp, Artificial
  Probe
gctttccaaatccacaagaacagag

SEQ ID NO: 115501 - DNA, 25 bp, Artificial
  Probe
gggttcctttaactggtatggtgaa

SEQ ID NO: 115502 - DNA, 25 bp, Artificial
  Probe
ggtggcttattatgtcacacacaca

SEQ ID NO: 115503 - DNA, 25 bp, Artificial
  Probe
tggtggcttattatgtcacacacac

SEQ ID NO: 115504 - DNA, 25 bp, Artificial
  Probe
gtggtggcttattatgtcacacaca

SEQ ID NO: 115505 - DNA, 25 bp, Artificial
  Probe
tttccaaatccacaagaacagagtg

SEQ ID NO: 115506 - DNA, 25 bp, Artificial
  Probe
gctctggatggttattatgtggaat

SEQ ID NO: 115507 - DNA, 25 bp, Artificial
  Probe
gaatccattgtctgtgttctcattg

SEQ ID NO: 115508 - DNA, 25 bp, Artificial
  Probe
ctctggatggttattatgtggaatc

SEQ ID NO: 115509 - DNA, 25 bp, Artificial
  Probe
cagattgttgcttggattagagtac

SEQ ID NO: 115510 - DNA, 25 bp, Artificial
  Probe
agattgttgcttggattagagtacg

SEQ ID NO: 115511 - DNA, 25 bp, Artificial
  Probe
tcttattggaggaacatacatgacc

SEQ ID NO: 115512 - DNA, 25 bp, Artificial
  Probe
acagattgttgcttggattagagta

SEQ ID NO: 115513 - DNA, 25 bp, Artificial
  Probe
tacagattgttgcttggattagagt

SEQ ID NO: 115514 - DNA, 25 bp, Artificial
  Probe
ggaatccattgtctgtgttctcatt

SEQ ID NO: 115515 - DNA, 25 bp, Artificial
  Probe
ctacagattgttgcttggattagag

SEQ ID NO: 115516 - DNA, 25 bp, Artificial
  Probe
cctacagattgttgcttggattaga

SEQ ID NO: 115517 - DNA, 25 bp, Artificial
  Probe
cgttacagctctggatggttattat

SEQ ID NO: 115518 - DNA, 25 bp, Artificial
  Probe
gttacagctctggatggttattatg

SEQ ID NO: 115519 - DNA, 25 bp, Artificial
  Probe
ctcttattggaggaacatacatgac

SEQ ID NO: 115520 - DNA, 25 bp, Artificial
  Probe
acatacaagctgctcttctcaatta

SEQ ID NO: 115521 - DNA, 25 bp, Artificial
  Probe
attactacatcatagtgctgctgag

SEQ ID NO: 115522 - DNA, 25 bp, Artificial
  Probe
catacaagctgctcttctcaattat

SEQ ID NO: 115523 - DNA, 25 bp, Artificial
  Probe
tattactacatcatagtgctgctga

SEQ ID NO: 115524 - DNA, 25 bp, Artificial
  Probe
gattgttgcttggattagagtacgc

SEQ ID NO: 115525 - DNA, 25 bp, Artificial
  Probe
attgtctgtgttctcattggatttg

SEQ ID NO: 115526 - DNA, 25 bp, Artificial
  Probe
cattgtctgtgttctcattggattt

SEQ ID NO: 115527 - DNA, 25 bp, Artificial
  Probe
taacaacaacattagtagcccttct

SEQ ID NO: 115528 - DNA, 25 bp, Artificial
  Probe
agctctggatggttattatgtggaa

SEQ ID NO: 115529 - DNA, 25 bp, Artificial
  Probe
aacaacattagtagcccttctgaaa

SEQ ID NO: 115530 - DNA, 25 bp, Artificial
  Probe
taaagtagagcatcaaggaggattc

SEQ ID NO: 115531 - DNA, 25 bp, Artificial
  Probe
ctaaagtagagcatcaaggaggatt

SEQ ID NO: 115532 - DNA, 25 bp, Artificial
  Probe
tgtatgtgtcaataatggctttcaa

SEQ ID NO: 115533 - DNA, 25 bp, Artificial
  Probe
atgtgtcaataatggctttcaatgc

SEQ ID NO: 115534 - DNA, 25 bp, Artificial
  Probe
ataacaacaacattagtagcccttc

SEQ ID NO: 115535 - DNA, 25 bp, Artificial
  Probe
tacagctctggatggttattatgtg

SEQ ID NO: 115536 - DNA, 25 bp, Artificial
  Probe
ttacagctctggatggttattatgt

SEQ ID NO: 115537 - DNA, 25 bp, Artificial
  Probe
atgtatgtgtcaataatggctttca

SEQ ID NO: 115538 - DNA, 25 bp, Artificial
  Probe
caacaacattagtagcccttctgaa

SEQ ID NO: 115539 - DNA, 25 bp, Artificial
  Probe
ccattgtctgtgttctcattggatt

SEQ ID NO: 115540 - DNA, 25 bp, Artificial
  Probe
aatccattgtctgtgttctcattgg

SEQ ID NO: 115541 - DNA, 25 bp, Artificial
  Probe
cacatacaagctgctcttctcaatt

SEQ ID NO: 115542 - DNA, 25 bp, Artificial
  Probe
aacaacaacattagtagcccttctg

SEQ ID NO: 115543 - DNA, 25 bp, Artificial
  Probe
ttgatgccgtctactttaagaactt

SEQ ID NO: 115544 - DNA, 25 bp, Artificial
  Probe
aaggtcagtgatcctcttattggag

SEQ ID NO: 115545 - DNA, 25 bp, Artificial
  Probe
atattactacatcatagtgctgctg

SEQ ID NO: 115546 - DNA, 25 bp, Artificial
  Probe
acagcatgtatgtgtcaataatggc

SEQ ID NO: 115547 - DNA, 25 bp, Artificial
  Probe
aataacaacaacattagtagccctt

SEQ ID NO: 115548 - DNA, 25 bp, Artificial
  Probe
tgatgccgtctactttaagaacttc

SEQ ID NO: 115549 - DNA, 25 bp, Artificial
  Probe
tgccttctgattctaacttcaaaga

SEQ ID NO: 115550 - DNA, 25 bp, Artificial
  Probe
caaggtcagtgatcctcttattgga

SEQ ID NO: 115551 - DNA, 25 bp, Artificial
  Probe
atcatcttcctgtaacgacctctat

SEQ ID NO: 115552 - DNA, 25 bp, Artificial
  Probe
catcatcttcctgtaacgacctcta

SEQ ID NO: 115553 - DNA, 25 bp, Artificial
  Probe
atctcagcaatgtattcttcagtga

SEQ ID NO: 115554 - DNA, 25 bp, Artificial
  Probe
gatctcagcaatgtattcttcagtg

SEQ ID NO: 115555 - DNA, 25 bp, Artificial
  Probe
tcatcttcctgtaacgacctctatg

SEQ ID NO: 115556 - DNA, 25 bp, Artificial
  Probe
tctcagcaatgtattcttcagtgaa

SEQ ID NO: 115557 - DNA, 25 bp, Artificial
  Probe
ccaaggagaatgactatgagagcat

SEQ ID NO: 115558 - DNA, 25 bp, Artificial
  Probe
tgactatgaagccatacagactcta

SEQ ID NO: 115559 - DNA, 25 bp, Artificial
  Probe
gactatgaagccatacagactctaa

SEQ ID NO: 115560 - DNA, 25 bp, Artificial
  Probe
ctcagaggtcatcatcttcctgtaa

SEQ ID NO: 115561 - DNA, 25 bp, Artificial
  Probe
ctgactatgaagccatacagactct

SEQ ID NO: 115562 - DNA, 25 bp, Artificial
  Probe
tcagaggtcatcatcttcctgtaac

SEQ ID NO: 115563 - DNA, 25 bp, Artificial
  Probe
tcatcatcttcctgtaacgacctct

SEQ ID NO: 115564 - DNA, 25 bp, Artificial
  Probe
catcttcctgtaacgacctctatgc

SEQ ID NO: 115565 - DNA, 25 bp, Artificial
  Probe
ctcagcaatgtattcttcagtgaat

SEQ ID NO: 115566 - DNA, 25 bp, Artificial
  Probe
cttcagtgaataagcctggacaatc

SEQ ID NO: 115567 - DNA, 25 bp, Artificial
  Probe
atgaagccatacagactctaaacag

SEQ ID NO: 115568 - DNA, 25 bp, Artificial
  Probe
aaggagaatgactatgagagcattg

SEQ ID NO: 115569 - DNA, 25 bp, Artificial
  Probe
caaggagaatgactatgagagcatt

SEQ ID NO: 115570 - DNA, 25 bp, Artificial
  Probe
tcttcagtgaataagcctggacaat

SEQ ID NO: 115571 - DNA, 25 bp, Artificial
  Probe
gacacagcaagagatttagttcctt

SEQ ID NO: 115572 - DNA, 25 bp, Artificial
  Probe
cctgactatgaagccatacagactc

SEQ ID NO: 115573 - DNA, 25 bp, Artificial
  Probe
ttcttcagtgaataagcctggacaa

SEQ ID NO: 115574 - DNA, 25 bp, Artificial
  Probe
tgaagccatacagactctaaacaga

SEQ ID NO: 115575 - DNA, 25 bp, Artificial
  Probe
gtcatcatcttcctgtaacgacctc

SEQ ID NO: 115576 - DNA, 25 bp, Artificial
  Probe
attcttcagtgaataagcctggaca

SEQ ID NO: 115577 - DNA, 25 bp, Artificial
  Probe
gtggacacagcaagagatttagttc

SEQ ID NO: 115578 - DNA, 25 bp, Artificial
  Probe
gaggtcatcatcttcctgtaacgac

SEQ ID NO: 115579 - DNA, 25 bp, Artificial
  Probe
agaggtcatcatcttcctgtaacga

SEQ ID NO: 115580 - DNA, 25 bp, Artificial
  Probe
cagaggtcatcatcttcctgtaacg

SEQ ID NO: 115581 - DNA, 25 bp, Artificial
  Probe
aggagaatgactatgagagcattgg

SEQ ID NO: 115582 - DNA, 25 bp, Artificial
  Probe
atcttcctgtaacgacctctatgcc

SEQ ID NO: 115583 - DNA, 25 bp, Artificial
  Probe
agtggacacagcaagagatttagtt

SEQ ID NO: 115584 - DNA, 25 bp, Artificial
  Probe
tatgaagccatacagactctaaaca

SEQ ID NO: 115585 - DNA, 25 bp, Artificial
  Probe
actatgaagccatacagactctaaa

SEQ ID NO: 115586 - DNA, 25 bp, Artificial
  Probe
agatctcagcaatgtattcttcagt

SEQ ID NO: 115587 - DNA, 25 bp, Artificial
  Probe
ctatgaagccatacagactctaaac

SEQ ID NO: 115588 - DNA, 25 bp, Artificial
  Probe
tattcttcagtgaataagcctggac

SEQ ID NO: 115589 - DNA, 25 bp, Artificial
  Probe
gtattcttcagtgaataagcctgga

SEQ ID NO: 115590 - DNA, 25 bp, Artificial
  Probe
ttcagtgaataagcctggacaatcg

SEQ ID NO: 115591 - DNA, 25 bp, Artificial
  Probe
tgtattcttcagtgaataagcctgg

SEQ ID NO: 115592 - DNA, 25 bp, Artificial
  Probe
cagtggacacagcaagagatttagt

SEQ ID NO: 115593 - DNA, 25 bp, Artificial
  Probe
atgagaatgccaaccttccagagaa

SEQ ID NO: 115594 - DNA, 25 bp, Artificial
  Probe
atgtattcttcagtgaataagcctg

SEQ ID NO: 115595 - DNA, 25 bp, Artificial
  Probe
gcaatgtattcttcagtgaataagc

SEQ ID NO: 115596 - DNA, 25 bp, Artificial
  Probe
aagtgaagatattcaagagaccaat

SEQ ID NO: 115597 - DNA, 25 bp, Artificial
  Probe
caatacaagcattactgcatccatg

SEQ ID NO: 115598 - DNA, 25 bp, Artificial
  Probe
tgctgttcatcattttagtcattgg

SEQ ID NO: 115599 - DNA, 25 bp, Artificial
  Probe
ggtgctgttcatcattttagtcatt

SEQ ID NO: 115600 - DNA, 25 bp, Artificial
  Probe
gtgctgttcatcattttagtcattg

SEQ ID NO: 115601 - DNA, 25 bp, Artificial
  Probe
taagtgaagatattcaagagaccaa

SEQ ID NO: 115602 - DNA, 25 bp, Artificial
  Probe
caagcaatacaagcattactgcatc

SEQ ID NO: 115603 - DNA, 25 bp, Artificial
  Probe
gaagaaggaagagaaaatggaaact

SEQ ID NO: 115604 - DNA, 25 bp, Artificial
  Probe
agaagaaggaagagaaaatggaaac

SEQ ID NO: 115605 - DNA, 25 bp, Artificial
  Probe
ttcatcattttagtcattggcgtct

SEQ ID NO: 115606 - DNA, 25 bp, Artificial
  Probe
gttcatcattttagtcattggcgtc

SEQ ID NO: 115607 - DNA, 25 bp, Artificial
  Probe
ctgttcatcattttagtcattggcg

SEQ ID NO: 115608 - DNA, 25 bp, Artificial
  Probe
tggtgctgttcatcattttagtcat

SEQ ID NO: 115609 - DNA, 25 bp, Artificial
  Probe
tgattataaagttaccacaagctgg

SEQ ID NO: 115610 - DNA, 25 bp, Artificial
  Probe
aggaagagaaaatggaaactttgag

SEQ ID NO: 115611 - DNA, 25 bp, Artificial
  Probe
gctgttcatcattttagtcattggc

SEQ ID NO: 115612 - DNA, 25 bp, Artificial
  Probe
agtgaagatattcaagagaccaata

SEQ ID NO: 115613 - DNA, 25 bp, Artificial
  Probe
ataagtgaagatattcaagagacca

SEQ ID NO: 115614 - DNA, 25 bp, Artificial
  Probe
atgattataaagttaccacaagctg

SEQ ID NO: 115615 - DNA, 25 bp, Artificial
  Probe
aaggaagagaaaatggaaactttga

SEQ ID NO: 115616 - DNA, 25 bp, Artificial
  Probe
atggtgctgttcatcattttagtca

SEQ ID NO: 115617 - DNA, 25 bp, Artificial
  Probe
cataagtgaagatattcaagagacc

SEQ ID NO: 115618 - DNA, 25 bp, Artificial
  Probe
ccataagtgaagatattcaagagac

SEQ ID NO: 115619 - DNA, 25 bp, Artificial
  Probe
aagaagaaggaagagaaaatggaaa

SEQ ID NO: 115620 - DNA, 25 bp, Artificial
  Probe
aaagaagaaggaagagaaaatggaa

SEQ ID NO: 115621 - DNA, 25 bp, Artificial
  Probe
aaaagaagaaggaagagaaaatgga

SEQ ID NO: 115622 - DNA, 25 bp, Artificial
  Probe
tgttcatcattttagtcattggcgt

SEQ ID NO: 115623 - DNA, 25 bp, Artificial
  Probe
gaaggaagagaaaatggaaactttg

SEQ ID NO: 115624 - DNA, 25 bp, Artificial
  Probe
ggaagagaaaatggaaactttgagt

SEQ ID NO: 115625 - DNA, 25 bp, Artificial
  Probe
agaaggaagagaaaatggaaacttt

SEQ ID NO: 115626 - DNA, 25 bp, Artificial
  Probe
aagaaggaagagaaaatggaaactt

SEQ ID NO: 115627 - DNA, 25 bp, Artificial
  Probe
tcatcattttagtcattggcgtctg

SEQ ID NO: 115628 - DNA, 25 bp, Artificial
  Probe
aagcaatacaagcattactgcatcc

SEQ ID NO: 115629 - DNA, 25 bp, Artificial
  Probe
gcaatacaagcattactgcatccat

SEQ ID NO: 115630 - DNA, 25 bp, Artificial
  Probe
catggtgctgttcatcattttagtc

SEQ ID NO: 115631 - DNA, 25 bp, Artificial
  Probe
gtcatggtgctgttcatcattttag

SEQ ID NO: 115632 - DNA, 25 bp, Artificial
  Probe
ccaagcaatacaagcattactgcat

SEQ ID NO: 115633 - DNA, 25 bp, Artificial
  Probe
tcatggtgctgttcatcattttagt

SEQ ID NO: 115634 - DNA, 25 bp, Artificial
  Probe
actcccataagtgaagatattcaag

SEQ ID NO: 115635 - DNA, 25 bp, Artificial
  Probe
aatgattataaagttaccacaagct

SEQ ID NO: 115636 - DNA, 25 bp, Artificial
  Probe
cccataagtgaagatattcaagaga

SEQ ID NO: 115637 - DNA, 25 bp, Artificial
  Probe
tcccataagtgaagatattcaagag

SEQ ID NO: 115638 - DNA, 25 bp, Artificial
  Probe
ctcccataagtgaagatattcaaga

SEQ ID NO: 115639 - DNA, 25 bp, Artificial
  Probe
gtgaagatattcaagagaccaatat

SEQ ID NO: 115640 - DNA, 25 bp, Artificial
  Probe
aactcccataagtgaagatattcaa

SEQ ID NO: 115641 - DNA, 25 bp, Artificial
  Probe
ttcaatgagaagaagcagattccat

SEQ ID NO: 115642 - DNA, 25 bp, Artificial
  Probe
atgagaagaagcagattccatgtat

SEQ ID NO: 115643 - DNA, 25 bp, Artificial
  Probe
aatgagaagaagcagattccatgta

SEQ ID NO: 115644 - DNA, 25 bp, Artificial
  Probe
tgagaagaagcagattccatgtatg

SEQ ID NO: 115645 - DNA, 25 bp, Artificial
  Probe
tcaatgagaagaagcagattccatg

SEQ ID NO: 115646 - DNA, 25 bp, Artificial
  Probe
caatgagaagaagcagattccatgt

SEQ ID NO: 115647 - DNA, 25 bp, Artificial
  Probe
tatattgattcagggagggagttct

SEQ ID NO: 115648 - DNA, 25 bp, Artificial
  Probe
gtatattgattcagggagggagttc

SEQ ID NO: 115649 - DNA, 25 bp, Artificial
  Probe
agtatattgattcagggagggagtt

SEQ ID NO: 115650 - DNA, 25 bp, Artificial
  Probe
aagtatattgattcagggagggagt

SEQ ID NO: 115651 - DNA, 25 bp, Artificial
  Probe
aaagtatattgattcagggagggag

SEQ ID NO: 115652 - DNA, 25 bp, Artificial
  Probe
tactccacggttccaggctattatt

SEQ ID NO: 115653 - DNA, 25 bp, Artificial
  Probe
ttactccacggttccaggctattat

SEQ ID NO: 115654 - DNA, 25 bp, Artificial
  Probe
gaaagtatattgattcagggaggga

SEQ ID NO: 115655 - DNA, 25 bp, Artificial
  Probe
ggaaagtatattgattcagggaggg

SEQ ID NO: 115656 - DNA, 25 bp, Artificial
  Probe
aggaaagtatattgattcagggagg

SEQ ID NO: 115657 - DNA, 25 bp, Artificial
  Probe
ctgactttctctttgcttactccac

SEQ ID NO: 115658 - DNA, 25 bp, Artificial
  Probe
caggaaagtatattgattcagggag

SEQ ID NO: 115659 - DNA, 25 bp, Artificial
  Probe
gagaagaagcagattccatgtatgg

SEQ ID NO: 115660 - DNA, 25 bp, Artificial
  Probe
tcaggaaagtatattgattcaggga

SEQ ID NO: 115661 - DNA, 25 bp, Artificial
  Probe
atattgattcagggagggagttctc

SEQ ID NO: 115662 - DNA, 25 bp, Artificial
  Probe
gaagaagcagattccatgtatggtg

SEQ ID NO: 115663 - DNA, 25 bp, Artificial
  Probe
agaagaagcagattccatgtatggt

SEQ ID NO: 115664 - DNA, 25 bp, Artificial
  Probe
ttcaggaaagtatattgattcaggg

SEQ ID NO: 115665 - DNA, 25 bp, Artificial
  Probe
cttactccacggttccaggctatta

SEQ ID NO: 115666 - DNA, 25 bp, Artificial
  Probe
aagaagcagattccatgtatggtgt

SEQ ID NO: 115667 - DNA, 25 bp, Artificial
  Probe
cttcaatgagaagaagcagattcca

SEQ ID NO: 115668 - DNA, 25 bp, Artificial
  Probe
gagaacctgctgtcattcactgatg

SEQ ID NO: 115669 - DNA, 25 bp, Artificial
  Probe
tattgattcagggagggagttctct

SEQ ID NO: 115670 - DNA, 25 bp, Artificial
  Probe
agaagcagattccatgtatggtgtc

SEQ ID NO: 115671 - DNA, 25 bp, Artificial
  Probe
gctgactttctctttgcttactcca

SEQ ID NO: 115672 - DNA, 25 bp, Artificial
  Probe
cgataaaggatctgacagctcattt

SEQ ID NO: 115673 - DNA, 25 bp, Artificial
  Probe
actccacggttccaggctattattc

SEQ ID NO: 115674 - DNA, 25 bp, Artificial
  Probe
tgactttctctttgcttactccacg

SEQ ID NO: 115675 - DNA, 25 bp, Artificial
  Probe
tgagaacctgctgtcattcactgat

SEQ ID NO: 115676 - DNA, 25 bp, Artificial
  Probe
tttctctttgcttactccacggttc

SEQ ID NO: 115677 - DNA, 25 bp, Artificial
  Probe
ctttctctttgcttactccacggtt

SEQ ID NO: 115678 - DNA, 25 bp, Artificial
  Probe
caactgagaacctgctgtcattcac

SEQ ID NO: 115679 - DNA, 25 bp, Artificial
  Probe
aactgagaacctgctgtcattcact

SEQ ID NO: 115680 - DNA, 25 bp, Artificial
  Probe
gtgacaccgataaaggatctgacag

SEQ ID NO: 115681 - DNA, 25 bp, Artificial
  Probe
gactttctctttgcttactccacgg

SEQ ID NO: 115682 - DNA, 25 bp, Artificial
  Probe
tgctctcaaaatatccagaaatgtt

SEQ ID NO: 115683 - DNA, 25 bp, Artificial
  Probe
gaagcagattccatgtatggtgtcc

SEQ ID NO: 115684 - DNA, 25 bp, Artificial
  Probe
ccgataaaggatctgacagctcatt

SEQ ID NO: 115685 - DNA, 25 bp, Artificial
  Probe
atgctctcaaaatatccagaaatgt

SEQ ID NO: 115686 - DNA, 25 bp, Artificial
  Probe
gaccattattagaacagaggacaca

SEQ ID NO: 115687 - DNA, 25 bp, Artificial
  Probe
agaccattattagaacagaggacac

SEQ ID NO: 115688 - DNA, 25 bp, Artificial
  Probe
accattattagaacagaggacacat

SEQ ID NO: 115689 - DNA, 25 bp, Artificial
  Probe
ttaggtctgctgtgtgtaagaatag

SEQ ID NO: 115690 - DNA, 25 bp, Artificial
  Probe
attaggtctgctgtgtgtaagaata

SEQ ID NO: 115691 - DNA, 25 bp, Artificial
  Probe
ggtctgctgtgtgtaagaatagatt

SEQ ID NO: 115692 - DNA, 25 bp, Artificial
  Probe
gattaggtctgctgtgtgtaagaat

SEQ ID NO: 115693 - DNA, 25 bp, Artificial
  Probe
gcagatgtatgtagcaagactagaa

SEQ ID NO: 115694 - DNA, 25 bp, Artificial
  Probe
taggtctgctgtgtgtaagaataga

SEQ ID NO: 115695 - DNA, 25 bp, Artificial
  Probe
tagaccattattagaacagaggaca

SEQ ID NO: 115696 - DNA, 25 bp, Artificial
  Probe
aggtctgctgtgtgtaagaatagat

SEQ ID NO: 115697 - DNA, 25 bp, Artificial
  Probe
gtagaccattattagaacagaggac

SEQ ID NO: 115698 - DNA, 25 bp, Artificial
  Probe
agtagaccattattagaacagagga

SEQ ID NO: 115699 - DNA, 25 bp, Artificial
  Probe
attagaacagaggacacatgagaac

SEQ ID NO: 115700 - DNA, 25 bp, Artificial
  Probe
ggcagatgtatgtagcaagactaga

SEQ ID NO: 115701 - DNA, 25 bp, Artificial
  Probe
tattagaacagaggacacatgagaa

SEQ ID NO: 115702 - DNA, 25 bp, Artificial
  Probe
ttattagaacagaggacacatgaga

SEQ ID NO: 115703 - DNA, 25 bp, Artificial
  Probe
ccattattagaacagaggacacatg

SEQ ID NO: 115704 - DNA, 25 bp, Artificial
  Probe
ttagaacagaggacacatgagaaca

SEQ ID NO: 115705 - DNA, 25 bp, Artificial
  Probe
tagaacagaggacacatgagaacat

SEQ ID NO: 115706 - DNA, 25 bp, Artificial
  Probe
aagtagaccattattagaacagagg

SEQ ID NO: 115707 - DNA, 25 bp, Artificial
  Probe
aacagaggacacatgagaacatcta

SEQ ID NO: 115708 - DNA, 25 bp, Artificial
  Probe
ggattaggtctgctgtgtgtaagaa

SEQ ID NO: 115709 - DNA, 25 bp, Artificial
  Probe
acagaggacacatgagaacatctag

SEQ ID NO: 115710 - DNA, 25 bp, Artificial
  Probe
cattattagaacagaggacacatga

SEQ ID NO: 115711 - DNA, 25 bp, Artificial
  Probe
attattagaacagaggacacatgag

SEQ ID NO: 115712 - DNA, 25 bp, Artificial
  Probe
gaagagtttagaagtagtcccgttt

SEQ ID NO: 115713 - DNA, 25 bp, Artificial
  Probe
tttgaagagtttagaagtagtcccg

SEQ ID NO: 115714 - DNA, 25 bp, Artificial
  Probe
cagaggacacatgagaacatctagg

SEQ ID NO: 115715 - DNA, 25 bp, Artificial
  Probe
agaacagaggacacatgagaacatc

SEQ ID NO: 115716 - DNA, 25 bp, Artificial
  Probe
tgaagagtttagaagtagtcccgtt

SEQ ID NO: 115717 - DNA, 25 bp, Artificial
  Probe
ttgaagagtttagaagtagtcccgt

SEQ ID NO: 115718 - DNA, 25 bp, Artificial
  Probe
ctaagaagtctggtcatgctgagaa

SEQ ID NO: 115719 - DNA, 25 bp, Artificial
  Probe
gaacagaggacacatgagaacatct

SEQ ID NO: 115720 - DNA, 25 bp, Artificial
  Probe
atgtagcaagactagaaaggaaacc

SEQ ID NO: 115721 - DNA, 25 bp, Artificial
  Probe
gtctgctgtgtgtaagaatagattt

SEQ ID NO: 115722 - DNA, 25 bp, Artificial
  Probe
tgtatgtagcaagactagaaaggaa

SEQ ID NO: 115723 - DNA, 25 bp, Artificial
  Probe
atgtatgtagcaagactagaaagga

SEQ ID NO: 115724 - DNA, 25 bp, Artificial
  Probe
taagaagtctggtcatgctgagaac

SEQ ID NO: 115725 - DNA, 25 bp, Artificial
  Probe
gatgtatgtagcaagactagaaagg

SEQ ID NO: 115726 - DNA, 25 bp, Artificial
  Probe
atttgaagagtttagaagtagtccc

SEQ ID NO: 115727 - DNA, 25 bp, Artificial
  Probe
gccagtagttcatttgaagagttta

SEQ ID NO: 115728 - DNA, 25 bp, Artificial
  Probe
tagcaagactagaaaggaaacccaa

SEQ ID NO: 115729 - DNA, 25 bp, Artificial
  Probe
atatactcactgtacgttgtatgcg

SEQ ID NO: 115730 - DNA, 25 bp, Artificial
  Probe
tatgtagcaagactagaaaggaaac

SEQ ID NO: 115731 - DNA, 25 bp, Artificial
  Probe
ttggtggatacaagaagtcaggatt

SEQ ID NO: 115732 - DNA, 25 bp, Artificial
  Probe
ctaattgcacagatgacatgacttg

SEQ ID NO: 115733 - DNA, 25 bp, Artificial
  Probe
taactaattgcacagatgacatgac

SEQ ID NO: 115734 - DNA, 25 bp, Artificial
  Probe
actaattgcacagatgacatgactt

SEQ ID NO: 115735 - DNA, 25 bp, Artificial
  Probe
aactaattgcacagatgacatgact

SEQ ID NO: 115736 - DNA, 25 bp, Artificial
  Probe
atggatattacatgacaccttgcat

SEQ ID NO: 115737 - DNA, 25 bp, Artificial
  Probe
tacattaacaactataacgtcagcc

SEQ ID NO: 115738 - DNA, 25 bp, Artificial
  Probe
ggaacgtgctacattaacaactata

SEQ ID NO: 115739 - DNA, 25 bp, Artificial
  Probe
tggatattacatgacaccttgcatt

SEQ ID NO: 115740 - DNA, 25 bp, Artificial
  Probe
ttaactaattgcacagatgacatga

SEQ ID NO: 115741 - DNA, 25 bp, Artificial
  Probe
cattctaacatttgagactgaagcc

SEQ ID NO: 115742 - DNA, 25 bp, Artificial
  Probe
ccattctaacatttgagactgaagc

SEQ ID NO: 115743 - DNA, 25 bp, Artificial
  Probe
cggaacgtgctacattaacaactat

SEQ ID NO: 115744 - DNA, 25 bp, Artificial
  Probe
tgctacattaacaactataacgtca

SEQ ID NO: 115745 - DNA, 25 bp, Artificial
  Probe
tggtggatacaagaagtcaggattt

SEQ ID NO: 115746 - DNA, 25 bp, Artificial
  Probe
tccattctaacatttgagactgaag

SEQ ID NO: 115747 - DNA, 25 bp, Artificial
  Probe
gtgctacattaacaactataacgtc

SEQ ID NO: 115748 - DNA, 25 bp, Artificial
  Probe
attctaacatttgagactgaagccg

SEQ ID NO: 115749 - DNA, 25 bp, Artificial
  Probe
gtggatacaagaagtcaggatttgg

SEQ ID NO: 115750 - DNA, 25 bp, Artificial
  Probe
ggtggatacaagaagtcaggatttg

SEQ ID NO: 115751 - DNA, 25 bp, Artificial
  Probe
taattgcacagatgacatgacttgt

SEQ ID NO: 115752 - DNA, 25 bp, Artificial
  Probe
aggcagactcagaggataaagattg

SEQ ID NO: 115753 - DNA, 25 bp, Artificial
  Probe
ctacattaacaactataacgtcagc

SEQ ID NO: 115754 - DNA, 25 bp, Artificial
  Probe
gctacattaacaactataacgtcag

SEQ ID NO: 115755 - DNA, 25 bp, Artificial
  Probe
tgtccattctaacatttgagactga

SEQ ID NO: 115756 - DNA, 25 bp, Artificial
  Probe
gatacaagaagtcaggatttggcag

SEQ ID NO: 115757 - DNA, 25 bp, Artificial
  Probe
tttggtggatacaagaagtcaggat

SEQ ID NO: 115758 - DNA, 25 bp, Artificial
  Probe
aacgtgctacattaacaactataac

SEQ ID NO: 115759 - DNA, 25 bp, Artificial
  Probe
gtccattctaacatttgagactgaa

SEQ ID NO: 115760 - DNA, 25 bp, Artificial
  Probe
atacaagaagtcaggatttggcaga

SEQ ID NO: 115761 - DNA, 25 bp, Artificial
  Probe
gaggcagactcagaggataaagatt

SEQ ID NO: 115762 - DNA, 25 bp, Artificial
  Probe
gaacgtgctacattaacaactataa

SEQ ID NO: 115763 - DNA, 25 bp, Artificial
  Probe
ttctaacatttgagactgaagccga

SEQ ID NO: 115764 - DNA, 25 bp, Artificial
  Probe
ctttggtggatacaagaagtcagga

SEQ ID NO: 115765 - DNA, 25 bp, Artificial
  Probe
ccacttctggaagatacaaggatgg

SEQ ID NO: 115766 - DNA, 25 bp, Artificial
  Probe
gcagactcagaggataaagattggg

SEQ ID NO: 115767 - DNA, 25 bp, Artificial
  Probe
ggcagactcagaggataaagattgg

SEQ ID NO: 115768 - DNA, 25 bp, Artificial
  Probe
tacaagaagtcaggatttggcagag

SEQ ID NO: 115769 - DNA, 25 bp, Artificial
  Probe
tctaacatttgagactgaagccgag

SEQ ID NO: 115770 - DNA, 25 bp, Artificial
  Probe
ggatattacatgacaccttgcattt

SEQ ID NO: 115771 - DNA, 25 bp, Artificial
  Probe
acattaacaactataacgtcagccc

SEQ ID NO: 115772 - DNA, 25 bp, Artificial
  Probe
ggatacaagaagtcaggatttggca

SEQ ID NO: 115773 - DNA, 25 bp, Artificial
  Probe
tggatacaagaagtcaggatttggc

SEQ ID NO: 115774 - DNA, 25 bp, Artificial
  Probe
tgacgattgagtactattcacagct

SEQ ID NO: 115775 - DNA, 25 bp, Artificial
  Probe
aacatggatattacatgacaccttg

SEQ ID NO: 115776 - DNA, 25 bp, Artificial
  Probe
attcttcttctgtccttctgatgag

SEQ ID NO: 115777 - DNA, 25 bp, Artificial
  Probe
tgctgataattcttcttctgtcctt

SEQ ID NO: 115778 - DNA, 25 bp, Artificial
  Probe
aattcttcttctgtccttctgatga

SEQ ID NO: 115779 - DNA, 25 bp, Artificial
  Probe
gctgataattcttcttctgtccttc

SEQ ID NO: 115780 - DNA, 25 bp, Artificial
  Probe
gtgctgataattcttcttctgtcct

SEQ ID NO: 115781 - DNA, 25 bp, Artificial
  Probe
ttgtgctgataattcttcttctgtc

SEQ ID NO: 115782 - DNA, 25 bp, Artificial
  Probe
ttcttcttctgtccttctgatgagt

SEQ ID NO: 115783 - DNA, 25 bp, Artificial
  Probe
tgtgctgataattcttcttctgtcc

SEQ ID NO: 115784 - DNA, 25 bp, Artificial
  Probe
tcttcttctgtccttctgatgagtc

SEQ ID NO: 115785 - DNA, 25 bp, Artificial
  Probe
ttgctctattgtgacctggacttaa

SEQ ID NO: 115786 - DNA, 25 bp, Artificial
  Probe
taattcttcttctgtccttctgatg

SEQ ID NO: 115787 - DNA, 25 bp, Artificial
  Probe
tgataattcttcttctgtccttctg

SEQ ID NO: 115788 - DNA, 25 bp, Artificial
  Probe
gataattcttcttctgtccttctga

SEQ ID NO: 115789 - DNA, 25 bp, Artificial
  Probe
ctgataattcttcttctgtccttct

SEQ ID NO: 115790 - DNA, 25 bp, Artificial
  Probe
cttcttctgtccttctgatgagtcc

SEQ ID NO: 115791 - DNA, 25 bp, Artificial
  Probe
gacaggattctctgacaggatctat

SEQ ID NO: 115792 - DNA, 25 bp, Artificial
  Probe
ttcttctgtccttctgatgagtcct

SEQ ID NO: 115793 - DNA, 25 bp, Artificial
  Probe
acaggattctctgacaggatctatg

SEQ ID NO: 115794 - DNA, 25 bp, Artificial
  Probe
ataattcttcttctgtccttctgat

SEQ ID NO: 115795 - DNA, 25 bp, Artificial
  Probe
caggattctctgacaggatctatgg

SEQ ID NO: 115796 - DNA, 25 bp, Artificial
  Probe
tcttctgtccttctgatgagtcctc

SEQ ID NO: 115797 - DNA, 25 bp, Artificial
  Probe
tttgtgctgataattcttcttctgt

SEQ ID NO: 115798 - DNA, 25 bp, Artificial
  Probe
tgtttgtgctgataattcttcttct

SEQ ID NO: 115799 - DNA, 25 bp, Artificial
  Probe
aaaggagaccaacaacaaacagaaa

SEQ ID NO: 115800 - DNA, 25 bp, Artificial
  Probe
gaccaacaacaaacagaaagagttc

SEQ ID NO: 115801 - DNA, 25 bp, Artificial
  Probe
gtttgtgctgataattcttcttctg

SEQ ID NO: 115802 - DNA, 25 bp, Artificial
  Probe
tttgctctattgtgacctggactta

SEQ ID NO: 115803 - DNA, 25 bp, Artificial
  Probe
gagaccaacaacaaacagaaagagt

SEQ ID NO: 115804 - DNA, 25 bp, Artificial
  Probe
agaccaacaacaaacagaaagagtt

SEQ ID NO: 115805 - DNA, 25 bp, Artificial
  Probe
aaggagaccaacaacaaacagaaag

SEQ ID NO: 115806 - DNA, 25 bp, Artificial
  Probe
ctgtccttctgatgagtcctcctac

SEQ ID NO: 115807 - DNA, 25 bp, Artificial
  Probe
ggtgttggtttatatatgtttgtgc

SEQ ID NO: 115808 - DNA, 25 bp, Artificial
  Probe
caaaggagaccaacaacaaacagaa

SEQ ID NO: 115809 - DNA, 25 bp, Artificial
  Probe
tctgtccttctgatgagtcctccta

SEQ ID NO: 115810 - DNA, 25 bp, Artificial
  Probe
atgtttgtgctgataattcttcttc

SEQ ID NO: 115811 - DNA, 25 bp, Artificial
  Probe
ctatagaggagcataggaagcactc

SEQ ID NO: 115812 - DNA, 25 bp, Artificial
  Probe
ggacaggattctctgacaggatcta

SEQ ID NO: 115813 - DNA, 25 bp, Artificial
  Probe
ggagaccaacaacaaacagaaagag

SEQ ID NO: 115814 - DNA, 25 bp, Artificial
  Probe
aggagaccaacaacaaacagaaaga

SEQ ID NO: 115815 - DNA, 25 bp, Artificial
  Probe
ctctattgtgacctggacttaagca

SEQ ID NO: 115816 - DNA, 25 bp, Artificial
  Probe
tgctctattgtgacctggacttaag

SEQ ID NO: 115817 - DNA, 25 bp, Artificial
  Probe
ggacaaacaaagagccaagaacaaa

SEQ ID NO: 115818 - DNA, 25 bp, Artificial
  Probe
tgttggtttatatatgtttgtgctg

SEQ ID NO: 115819 - DNA, 25 bp, Artificial
  Probe
gtgttggtttatatatgtttgtgct

SEQ ID NO: 115820 - DNA, 25 bp, Artificial
  Probe
accaacaacaaacagaaagagttcg

SEQ ID NO: 115821 - DNA, 25 bp, Artificial
  Probe
cattatctataacctcctgtctcgg

SEQ ID NO: 115822 - DNA, 25 bp, Artificial
  Probe
ccattatctataacctcctgtctcg

SEQ ID NO: 115823 - DNA, 25 bp, Artificial
  Probe
attatctataacctcctgtctcggc

SEQ ID NO: 115824 - DNA, 25 bp, Artificial
  Probe
cccattatctataacctcctgtctc

SEQ ID NO: 115825 - DNA, 25 bp, Artificial
  Probe
ttatctataacctcctgtctcggcg

SEQ ID NO: 115826 - DNA, 25 bp, Artificial
  Probe
atccatgtggtatcaggtgtcttct

SEQ ID NO: 115827 - DNA, 25 bp, Artificial
  Probe
catccatgtggtatcaggtgtcttc

SEQ ID NO: 115828 - DNA, 25 bp, Artificial
  Probe
tccatgtggtatcaggtgtcttctt

SEQ ID NO: 115829 - DNA, 25 bp, Artificial
  Probe
cttcctcttctacatcctcccaatg

SEQ ID NO: 115830 - DNA, 25 bp, Artificial
  Probe
tcatccatgtggtatcaggtgtctt

SEQ ID NO: 115831 - DNA, 25 bp, Artificial
  Probe
catccatccacaacaccaaccttac

SEQ ID NO: 115832 - DNA, 25 bp, Artificial
  Probe
taccagcttcctcttctacatcctc

SEQ ID NO: 115833 - DNA, 25 bp, Artificial
  Probe
ctaccagcttcctcttctacatcct

SEQ ID NO: 115834 - DNA, 25 bp, Artificial
  Probe
ctgaagagagatgaatcccttgagg

SEQ ID NO: 115835 - DNA, 25 bp, Artificial
  Probe
ttcaacctcatccatgtggtatcag

SEQ ID NO: 115836 - DNA, 25 bp, Artificial
  Probe
ctagaaagtcagtcaccaagatgct

SEQ ID NO: 115837 - DNA, 25 bp, Artificial
  Probe
tcatccatccacaacaccaacctta

SEQ ID NO: 115838 - DNA, 25 bp, Artificial
  Probe
ttcctcttctacatcctcccaatga

SEQ ID NO: 115839 - DNA, 25 bp, Artificial
  Probe
gttcaacctcatccatgtggtatca

SEQ ID NO: 115840 - DNA, 25 bp, Artificial
  Probe
tgttcaacctcatccatgtggtatc

SEQ ID NO: 115841 - DNA, 25 bp, Artificial
  Probe
ctcatccatgtggtatcaggtgtct

SEQ ID NO: 115842 - DNA, 25 bp, Artificial
  Probe
gctgaagagagatgaatcccttgag

SEQ ID NO: 115843 - DNA, 25 bp, Artificial
  Probe
gtgttcaacctcatccatgtggtat

SEQ ID NO: 115844 - DNA, 25 bp, Artificial
  Probe
tcatcagcgtcctctactacctcat

SEQ ID NO: 115845 - DNA, 25 bp, Artificial
  Probe
ccatgtggtatcaggtgtcttcttt

SEQ ID NO: 115846 - DNA, 25 bp, Artificial
  Probe
tcctcttctacatcctcccaatgac

SEQ ID NO: 115847 - DNA, 25 bp, Artificial
  Probe
tagaaagtcagtcaccaagatgctg

SEQ ID NO: 115848 - DNA, 25 bp, Artificial
  Probe
tgtggtatcaggtgtcttcttttat

SEQ ID NO: 115849 - DNA, 25 bp, Artificial
  Probe
atgtggtatcaggtgtcttctttta

SEQ ID NO: 115850 - DNA, 25 bp, Artificial
  Probe
caaccccattatctataacctcctg

SEQ ID NO: 115851 - DNA, 25 bp, Artificial
  Probe
tcaaccccattatctataacctcct

SEQ ID NO: 115852 - DNA, 25 bp, Artificial
  Probe
gtcaaccccattatctataacctcc

SEQ ID NO: 115853 - DNA, 25 bp, Artificial
  Probe
aaccccattatctataacctcctgt

SEQ ID NO: 115854 - DNA, 25 bp, Artificial
  Probe
ccccattatctataacctcctgtct

SEQ ID NO: 115855 - DNA, 25 bp, Artificial
  Probe
gtggtatcaggtgtcttcttttatc

SEQ ID NO: 115856 - DNA, 25 bp, Artificial
  Probe
accccattatctataacctcctgtc

SEQ ID NO: 115857 - DNA, 25 bp, Artificial
  Probe
tggtatcaggtgtcttcttttatct

SEQ ID NO: 115858 - DNA, 25 bp, Artificial
  Probe
catcagcgtcctctactacctcatg

SEQ ID NO: 115859 - DNA, 25 bp, Artificial
  Probe
gcttcctcttctacatcctcccaat

SEQ ID NO: 115860 - DNA, 25 bp, Artificial
  Probe
ctctagaaagtcagtcaccaagatg

SEQ ID NO: 115861 - DNA, 25 bp, Artificial
  Probe
aaagtcagtcaccaagatgctgttt

SEQ ID NO: 115862 - DNA, 25 bp, Artificial
  Probe
atccatccacaacaccaaccttacc

SEQ ID NO: 115863 - DNA, 25 bp, Artificial
  Probe
ctcatcagcgtcctctactacctca

SEQ ID NO: 115864 - DNA, 25 bp, Artificial
  Probe
aatattcacagaccctctagaaagt

SEQ ID NO: 115865 - DNA, 25 bp, Artificial
  Probe
cctctagaaagtcagtcaccaagat

SEQ ID NO: 115866 - DNA, 25 bp, Artificial
  Probe
gcgtgaactatgatgtgagcaataa

SEQ ID NO: 115867 - DNA, 25 bp, Artificial
  Probe
ctcctaactgatgtgtgctctctac

SEQ ID NO: 115868 - DNA, 25 bp, Artificial
  Probe
gaggattcatcatcttacaagaact

SEQ ID NO: 115869 - DNA, 25 bp, Artificial
  Probe
agaggattcatcatcttacaagaac

SEQ ID NO: 115870 - DNA, 25 bp, Artificial
  Probe
gtcctaactgatgtgtgctctctac

SEQ ID NO: 115871 - DNA, 25 bp, Artificial
  Probe
aatcttcctatgtaatcttccagtt

SEQ ID NO: 115872 - DNA, 25 bp, Artificial
  Probe
tgtcctaactgatgtgtgctctcta

SEQ ID NO: 115873 - DNA, 25 bp, Artificial
  Probe
cgtgaactatgatgtgagcaataaa

SEQ ID NO: 115874 - DNA, 25 bp, Artificial
  Probe
cctcctaactgatgtgtgctctcta

SEQ ID NO: 115875 - DNA, 25 bp, Artificial
  Probe
tacaagaactatatcccagatgagg

SEQ ID NO: 115876 - DNA, 25 bp, Artificial
  Probe
tatatcccagatgaggcagactttc

SEQ ID NO: 115877 - DNA, 25 bp, Artificial
  Probe
ctatatcccagatgaggcagacttt

SEQ ID NO: 115878 - DNA, 25 bp, Artificial
  Probe
aagaactatatcccagatgaggcag

SEQ ID NO: 115879 - DNA, 25 bp, Artificial
  Probe
ggcgtgaactatgatgtgagcaata

SEQ ID NO: 115880 - DNA, 25 bp, Artificial
  Probe
cttcctatgtaatcttccagtttca

SEQ ID NO: 115881 - DNA, 25 bp, Artificial
  Probe
tgaactatgatgtgagcaataaaga

SEQ ID NO: 115882 - DNA, 25 bp, Artificial
  Probe
gtgaactatgatgtgagcaataaag

SEQ ID NO: 115883 - DNA, 25 bp, Artificial
  Probe
caagaactatatcccagatgaggca

SEQ ID NO: 115884 - DNA, 25 bp, Artificial
  Probe
acaagaactatatcccagatgaggc

SEQ ID NO: 115885 - DNA, 25 bp, Artificial
  Probe
aggattcatcatcttacaagaacta

SEQ ID NO: 115886 - DNA, 25 bp, Artificial
  Probe
gaactatgatgtgagcaataaagac

SEQ ID NO: 115887 - DNA, 25 bp, Artificial
  Probe
tatgatgtgagcaataaagacaacc

SEQ ID NO: 115888 - DNA, 25 bp, Artificial
  Probe
tcttcctatgtaatcttccagtttc

SEQ ID NO: 115889 - DNA, 25 bp, Artificial
  Probe
tcctatgtaatcttccagtttcaaa

SEQ ID NO: 115890 - DNA, 25 bp, Artificial
  Probe
ttcctatgtaatcttccagtttcaa

SEQ ID NO: 115891 - DNA, 25 bp, Artificial
  Probe
ctcttcttccctcctaactgatgtg

SEQ ID NO: 115892 - DNA, 25 bp, Artificial
  Probe
gaactatatcccagatgaggcagac

SEQ ID NO: 115893 - DNA, 25 bp, Artificial
  Probe
agaactatatcccagatgaggcaga

SEQ ID NO: 115894 - DNA, 25 bp, Artificial
  Probe
tgatgagacaggcttagaacaggag

SEQ ID NO: 115895 - DNA, 25 bp, Artificial
  Probe
ttgtgtgaaggagagaatcttattt

SEQ ID NO: 115896 - DNA, 25 bp, Artificial
  Probe
tttgtgtgaaggagagaatcttatt

SEQ ID NO: 115897 - DNA, 25 bp, Artificial
  Probe
tccagtttcaaatacatgacctctt

SEQ ID NO: 115898 - DNA, 25 bp, Artificial
  Probe
ttccagtttcaaatacatgacctct

SEQ ID NO: 115899 - DNA, 25 bp, Artificial
  Probe
cttccagtttcaaatacatgacctc

SEQ ID NO: 115900 - DNA, 25 bp, Artificial
  Probe
tcttccagtttcaaatacatgacct

SEQ ID NO: 115901 - DNA, 25 bp, Artificial
  Probe
ccagtttcaaatacatgacctcttt

SEQ ID NO: 115902 - DNA, 25 bp, Artificial
  Probe
atcttccagtttcaaatacatgacc

SEQ ID NO: 115903 - DNA, 25 bp, Artificial
  Probe
actatgatgtgagcaataaagacaa

SEQ ID NO: 115904 - DNA, 25 bp, Artificial
  Probe
aactatgatgtgagcaataaagaca

SEQ ID NO: 115905 - DNA, 25 bp, Artificial
  Probe
actatatcccagatgaggcagactt

SEQ ID NO: 115906 - DNA, 25 bp, Artificial
  Probe
aactatatcccagatgaggcagact

SEQ ID NO: 115907 - DNA, 25 bp, Artificial
  Probe
tttctctcttcaaatcttcctatgt

SEQ ID NO: 115908 - DNA, 25 bp, Artificial
  Probe
gaagaggattcatcatcttacaaga

SEQ ID NO: 115909 - DNA, 25 bp, Artificial
  Probe
agaagaggattcatcatcttacaag

SEQ ID NO: 115910 - DNA, 25 bp, Artificial
  Probe
atgatgtgagcaataaagacaaccc

SEQ ID NO: 115911 - DNA, 25 bp, Artificial
  Probe
ctgatggagatgaataagcgtctaa

SEQ ID NO: 115912 - DNA, 25 bp, Artificial
  Probe
tgatggagatgaataagcgtctaac

SEQ ID NO: 115913 - DNA, 25 bp, Artificial
  Probe
tctgatggagatgaataagcgtcta

SEQ ID NO: 115914 - DNA, 25 bp, Artificial
  Probe
gcagtcaatgtgaatccttatgaat

SEQ ID NO: 115915 - DNA, 25 bp, Artificial
  Probe
ggaacctctgatggagatgaataag

SEQ ID NO: 115916 - DNA, 25 bp, Artificial
  Probe
tggaacctctgatggagatgaataa

SEQ ID NO: 115917 - DNA, 25 bp, Artificial
  Probe
gaacctctgatggagatgaataagc

SEQ ID NO: 115918 - DNA, 25 bp, Artificial
  Probe
agtcaatgtgaatccttatgaatgt

SEQ ID NO: 115919 - DNA, 25 bp, Artificial
  Probe
ctggaacctctgatggagatgaata

SEQ ID NO: 115920 - DNA, 25 bp, Artificial
  Probe
cagtcaatgtgaatccttatgaatg

SEQ ID NO: 115921 - DNA, 25 bp, Artificial
  Probe
ctctgatggagatgaataagcgtct

SEQ ID NO: 115922 - DNA, 25 bp, Artificial
  Probe
gctctatcccattgctatcttcata

SEQ ID NO: 115923 - DNA, 25 bp, Artificial
  Probe
acttgatgtatcgggaaatgctatt

SEQ ID NO: 115924 - DNA, 25 bp, Artificial
  Probe
tacttgatgtatcgggaaatgctat

SEQ ID NO: 115925 - DNA, 25 bp, Artificial
  Probe
aacctctgatggagatgaataagcg

SEQ ID NO: 115926 - DNA, 25 bp, Artificial
  Probe
tatcttcataaagcccaagtctctg

SEQ ID NO: 115927 - DNA, 25 bp, Artificial
  Probe
ctatcttcataaagcccaagtctct

SEQ ID NO: 115928 - DNA, 25 bp, Artificial
  Probe
cttgatgtatcgggaaatgctatta

SEQ ID NO: 115929 - DNA, 25 bp, Artificial
  Probe
tgatgtatcgggaaatgctattaag

SEQ ID NO: 115930 - DNA, 25 bp, Artificial
  Probe
tgcagtcaatgtgaatccttatgaa

SEQ ID NO: 115931 - DNA, 25 bp, Artificial
  Probe
ttgcagtcaatgtgaatccttatga

SEQ ID NO: 115932 - DNA, 25 bp, Artificial
  Probe
gtcaatgtgaatccttatgaatgta

SEQ ID NO: 115933 - DNA, 25 bp, Artificial
  Probe
tctggaacctctgatggagatgaat

SEQ ID NO: 115934 - DNA, 25 bp, Artificial
  Probe
aatgctattaagcggttacaagttg

SEQ ID NO: 115935 - DNA, 25 bp, Artificial
  Probe
cctctgatggagatgaataagcgtc

SEQ ID NO: 115936 - DNA, 25 bp, Artificial
  Probe
ttgatgtatcgggaaatgctattaa

SEQ ID NO: 115937 - DNA, 25 bp, Artificial
  Probe
tcaatgtgaatccttatgaatgtac

SEQ ID NO: 115938 - DNA, 25 bp, Artificial
  Probe
gacaatttatatggaaccagtgtgc

SEQ ID NO: 115939 - DNA, 25 bp, Artificial
  Probe
tgacaatttatatggaaccagtgtg

SEQ ID NO: 115940 - DNA, 25 bp, Artificial
  Probe
atacttgatgtatcgggaaatgcta

SEQ ID NO: 115941 - DNA, 25 bp, Artificial
  Probe
tatacttgatgtatcgggaaatgct

SEQ ID NO: 115942 - DNA, 25 bp, Artificial
  Probe
ctctatcccattgctatcttcataa

SEQ ID NO: 115943 - DNA, 25 bp, Artificial
  Probe
acctctgatggagatgaataagcgt

SEQ ID NO: 115944 - DNA, 25 bp, Artificial
  Probe
ctctggaacctctgatggagatgaa

SEQ ID NO: 115945 - DNA, 25 bp, Artificial
  Probe
atgacaatttatatggaaccagtgt

SEQ ID NO: 115946 - DNA, 25 bp, Artificial
  Probe
gatggagatgaataagcgtctaacg

SEQ ID NO: 115947 - DNA, 25 bp, Artificial
  Probe
atgctattaagcggttacaagttgc

SEQ ID NO: 115948 - DNA, 25 bp, Artificial
  Probe
aatgacaatttatatggaaccagtg

SEQ ID NO: 115949 - DNA, 25 bp, Artificial
  Probe
caatgacaatttatatggaaccagt

SEQ ID NO: 115950 - DNA, 25 bp, Artificial
  Probe
acaatgacaatttatatggaaccag

SEQ ID NO: 115951 - DNA, 25 bp, Artificial
  Probe
tctatcccattgctatcttcataaa

SEQ ID NO: 115952 - DNA, 25 bp, Artificial
  Probe
caatttatatggaaccagtgtgcag

SEQ ID NO: 115953 - DNA, 25 bp, Artificial
  Probe
aatttatatggaaccagtgtgcagt

SEQ ID NO: 115954 - DNA, 25 bp, Artificial
  Probe
atttatatggaaccagtgtgcagtc

SEQ ID NO: 115955 - DNA, 25 bp, Artificial
  Probe
aaactgtgtgaagccatgaagaaac

SEQ ID NO: 115956 - DNA, 25 bp, Artificial
  Probe
aggatgatagacaacggacaactaa

SEQ ID NO: 115957 - DNA, 25 bp, Artificial
  Probe
aaggatgatagacaacggacaacta

SEQ ID NO: 115958 - DNA, 25 bp, Artificial
  Probe
caaggactcaaggctgatacattaa

SEQ ID NO: 115959 - DNA, 25 bp, Artificial
  Probe
gaagacggtgttaatgatagccatc

SEQ ID NO: 115960 - DNA, 25 bp, Artificial
  Probe
aacacataccttacagagagcacaa

SEQ ID NO: 115961 - DNA, 25 bp, Artificial
  Probe
ccagtaggatcagttcatgtagatt

SEQ ID NO: 115962 - DNA, 25 bp, Artificial
  Probe
ggtgttaatgatagccatccagttg

SEQ ID NO: 115963 - DNA, 25 bp, Artificial
  Probe
cgatatgtcaggagattagacttct

SEQ ID NO: 115964 - DNA, 25 bp, Artificial
  Probe
ggaacatggaccattctaatagaga

SEQ ID NO: 115965 - DNA, 25 bp, Artificial
  Probe
aggaacatggaccattctaatagag

SEQ ID NO: 115966 - DNA, 25 bp, Artificial
  Probe
ttgaagacggtgttaatgatagcca

SEQ ID NO: 115967 - DNA, 25 bp, Artificial
  Probe
tgaagacggtgttaatgatagccat

SEQ ID NO: 115968 - DNA, 25 bp, Artificial
  Probe
cagtaggatcagttcatgtagattc

SEQ ID NO: 115969 - DNA, 25 bp, Artificial
  Probe
agtaggatcagttcatgtagattct

SEQ ID NO: 115970 - DNA, 25 bp, Artificial
  Probe
gtgttaatgatagccatccagttgc

SEQ ID NO: 115971 - DNA, 25 bp, Artificial
  Probe
gagatgatgacctaccttcgatatg

SEQ ID NO: 115972 - DNA, 25 bp, Artificial
  Probe
agatgatgacctaccttcgatatgt

SEQ ID NO: 115973 - DNA, 25 bp, Artificial
  Probe
gtgtaggaacatggaccattctaat

SEQ ID NO: 115974 - DNA, 25 bp, Artificial
  Probe
gtaggaacatggaccattctaatag

SEQ ID NO: 115975 - DNA, 25 bp, Artificial
  Probe
taggatcagttcatgtagattctgg

SEQ ID NO: 115976 - DNA, 25 bp, Artificial
  Probe
ggagatgatgacctaccttcgatat

SEQ ID NO: 115977 - DNA, 25 bp, Artificial
  Probe
tgtctatcaacacacatctaggcaa

SEQ ID NO: 115978 - DNA, 25 bp, Artificial
  Probe
ggatcagttcatgtagattctggtg

SEQ ID NO: 115979 - DNA, 25 bp, Artificial
  Probe
taggaacatggaccattctaataga

SEQ ID NO: 115980 - DNA, 25 bp, Artificial
  Probe
aggatcagttcatgtagattctggt

SEQ ID NO: 115981 - DNA, 25 bp, Artificial
  Probe
aagacggtgttaatgatagccatcc

SEQ ID NO: 115982 - DNA, 25 bp, Artificial
  Probe
tgtaggaacatggaccattctaata

SEQ ID NO: 115983 - DNA, 25 bp, Artificial
  Probe
tccagtaggatcagttcatgtagat

SEQ ID NO: 115984 - DNA, 25 bp, Artificial
  Probe
tactccagtaggatcagttcatgta

SEQ ID NO: 115985 - DNA, 25 bp, Artificial
  Probe
acactcaaagaatctcatttaccga

SEQ ID NO: 115986 - DNA, 25 bp, Artificial
  Probe
ggatgatagacaacggacaactaaa

SEQ ID NO: 115987 - DNA, 25 bp, Artificial
  Probe
ctttgaagacggtgttaatgatagc

SEQ ID NO: 115988 - DNA, 25 bp, Artificial
  Probe
atcacaacaacagcctcttagaaat

SEQ ID NO: 115989 - DNA, 25 bp, Artificial
  Probe
ccatcacaacaacagcctcttagaa

SEQ ID NO: 115990 - DNA, 25 bp, Artificial
  Probe
gtaggatcagttcatgtagattctg

SEQ ID NO: 115991 - DNA, 25 bp, Artificial
  Probe
ctccagtaggatcagttcatgtaga

SEQ ID NO: 115992 - DNA, 25 bp, Artificial
  Probe
cctgattatgagtatttacggaacc

SEQ ID NO: 115993 - DNA, 25 bp, Artificial
  Probe
gatcagttcatgtagattctggtgc

SEQ ID NO: 115994 - DNA, 25 bp, Artificial
  Probe
tttgactatgcctatgattgggttg

SEQ ID NO: 115995 - DNA, 25 bp, Artificial
  Probe
gcaaggactcaaggctgatacatta

SEQ ID NO: 115996 - DNA, 25 bp, Artificial
  Probe
actttgaagacggtgttaatgatag

SEQ ID NO: 115997 - DNA, 25 bp, Artificial
  Probe
gtttactttgaagacggtgttaatg

SEQ ID NO: 115998 - DNA, 25 bp, Artificial
  Probe
gtatttacggaacctcttcacagat

SEQ ID NO: 115999 - DNA, 25 bp, Artificial
  Probe
actccagtaggatcagttcatgtag

SEQ ID NO: 116000 - DNA, 25 bp, Artificial
  Probe
atctgtttgaacggaaaggctatac

SEQ ID NO: 116001 - DNA, 25 bp, Artificial
  Probe
catcctgttcttcaacctctttctg

SEQ ID NO: 116002 - DNA, 25 bp, Artificial
  Probe
atcctgttcttcaacctctttctgg

SEQ ID NO: 116003 - DNA, 25 bp, Artificial
  Probe
ccatcctgttcttcaacctctttct

SEQ ID NO: 116004 - DNA, 25 bp, Artificial
  Probe
accatcctgttcttcaacctctttc

SEQ ID NO: 116005 - DNA, 25 bp, Artificial
  Probe
gaccatcctgttcttcaacctcttt

SEQ ID NO: 116006 - DNA, 25 bp, Artificial
  Probe
ctctacttctgcttcgtcaccttca

SEQ ID NO: 116007 - DNA, 25 bp, Artificial
  Probe
cttcaacgtcatctccatcctcatc

SEQ ID NO: 116008 - DNA, 25 bp, Artificial
  Probe
caacgtcatctccatcctcatcaag

SEQ ID NO: 116009 - DNA, 25 bp, Artificial
  Probe
tcttcaacgtcatctccatcctcat

SEQ ID NO: 116010 - DNA, 25 bp, Artificial
  Probe
atctactcgctcttcaacgtcatct

SEQ ID NO: 116011 - DNA, 25 bp, Artificial
  Probe
catctactcgctcttcaacgtcatc

SEQ ID NO: 116012 - DNA, 25 bp, Artificial
  Probe
cctgttcttcaacctctttctggag

SEQ ID NO: 116013 - DNA, 25 bp, Artificial
  Probe
tcaacgtcatctccatcctcatcaa

SEQ ID NO: 116014 - DNA, 25 bp, Artificial
  Probe
ttcaacgtcatctccatcctcatca

SEQ ID NO: 116015 - DNA, 25 bp, Artificial
  Probe
tctacttctgcttcgtcaccttcag

SEQ ID NO: 116016 - DNA, 25 bp, Artificial
  Probe
ctcttcaacgtcatctccatcctca

SEQ ID NO: 116017 - DNA, 25 bp, Artificial
  Probe
ggaccatcctgttcttcaacctctt

SEQ ID NO: 116018 - DNA, 25 bp, Artificial
  Probe
tctactcgctcttcaacgtcatctc

SEQ ID NO: 116019 - DNA, 25 bp, Artificial
  Probe
ctgttcttcaacctctttctggagc

SEQ ID NO: 116020 - DNA, 25 bp, Artificial
  Probe
tcctgttcttcaacctctttctgga

SEQ ID NO: 116021 - DNA, 25 bp, Artificial
  Probe
cgtcatctccatcctcatcaagcag

SEQ ID NO: 116022 - DNA, 25 bp, Artificial
  Probe
ggcgctttcttaatctttatccaat

SEQ ID NO: 116023 - DNA, 25 bp, Artificial
  Probe
gatggcgctttcttaatctttatcc

SEQ ID NO: 116024 - DNA, 25 bp, Artificial
  Probe
cgctttcttaatctttatccaataa

SEQ ID NO: 116025 - DNA, 25 bp, Artificial
  Probe
gtcatctccatcctcatcaagcagg

SEQ ID NO: 116026 - DNA, 25 bp, Artificial
  Probe
aacgtcatctccatcctcatcaagc

SEQ ID NO: 116027 - DNA, 25 bp, Artificial
  Probe
atctttatccaataaaactcgtgcc

SEQ ID NO: 116028 - DNA, 25 bp, Artificial
  Probe
catctccatcctcatcaagcaggtg

SEQ ID NO: 116029 - DNA, 25 bp, Artificial
  Probe
ctactcgctcttcaacgtcatctcc

SEQ ID NO: 116030 - DNA, 25 bp, Artificial
  Probe
tcatctccatcctcatcaagcaggt

SEQ ID NO: 116031 - DNA, 25 bp, Artificial
  Probe
gcgctttcttaatctttatccaata

SEQ ID NO: 116032 - DNA, 25 bp, Artificial
  Probe
gctcttcaacgtcatctccatcctc

SEQ ID NO: 116033 - DNA, 25 bp, Artificial
  Probe
gcatctactcgctcttcaacgtcat

SEQ ID NO: 116034 - DNA, 25 bp, Artificial
  Probe
aatctttatccaataaaactcgtgc

SEQ ID NO: 116035 - DNA, 25 bp, Artificial
  Probe
atggcgctttcttaatctttatcca

SEQ ID NO: 116036 - DNA, 25 bp, Artificial
  Probe
tggcgctttcttaatctttatccaa

SEQ ID NO: 116037 - DNA, 25 bp, Artificial
  Probe
agatggcgctttcttaatctttatc

SEQ ID NO: 116038 - DNA, 25 bp, Artificial
  Probe
gagatggcgctttcttaatctttat

SEQ ID NO: 116039 - DNA, 25 bp, Artificial
  Probe
tgttcttcaacctctttctggagcg

SEQ ID NO: 116040 - DNA, 25 bp, Artificial
  Probe
cgagatggcgctttcttaatcttta

SEQ ID NO: 116041 - DNA, 25 bp, Artificial
  Probe
gtttgcttcacttctctccgagatg

SEQ ID NO: 116042 - DNA, 25 bp, Artificial
  Probe
tctgggcaacttccttttcatcctg

SEQ ID NO: 116043 - DNA, 25 bp, Artificial
  Probe
gtctgggcaacttccttttcatcct

SEQ ID NO: 116044 - DNA, 25 bp, Artificial
  Probe
tttgcttcacttctctccgagatgg

SEQ ID NO: 116045 - DNA, 25 bp, Artificial
  Probe
ggtttgcttcacttctctccgagat

SEQ ID NO: 116046 - DNA, 25 bp, Artificial
  Probe
taatgaataacaggttggcagagac

SEQ ID NO: 116047 - DNA, 25 bp, Artificial
  Probe
gtaatgaataacaggttggcagaga

SEQ ID NO: 116048 - DNA, 25 bp, Artificial
  Probe
agtaatgaataacaggttggcagag

SEQ ID NO: 116049 - DNA, 25 bp, Artificial
  Probe
cagtaatgaataacaggttggcaga

SEQ ID NO: 116050 - DNA, 25 bp, Artificial
  Probe
aacctctaagttgtagcaagatgaa

SEQ ID NO: 116051 - DNA, 25 bp, Artificial
  Probe
acctctaagttgtagcaagatgaag

SEQ ID NO: 116052 - DNA, 25 bp, Artificial
  Probe
gccttgttctattattggttccact

SEQ ID NO: 116053 - DNA, 25 bp, Artificial
  Probe
tgaatggttacacggattatgtcat

SEQ ID NO: 116054 - DNA, 25 bp, Artificial
  Probe
ttctgaatggttacacggattatgt

SEQ ID NO: 116055 - DNA, 25 bp, Artificial
  Probe
ctctaagttgtagcaagatgaaggc

SEQ ID NO: 116056 - DNA, 25 bp, Artificial
  Probe
tctgaatggttacacggattatgtc

SEQ ID NO: 116057 - DNA, 25 bp, Artificial
  Probe
ctgaatggttacacggattatgtca

SEQ ID NO: 116058 - DNA, 25 bp, Artificial
  Probe
ccttgttctattattggttccacta

SEQ ID NO: 116059 - DNA, 25 bp, Artificial
  Probe
ctaagttgtagcaagatgaaggcag

SEQ ID NO: 116060 - DNA, 25 bp, Artificial
  Probe
tctaagttgtagcaagatgaaggca

SEQ ID NO: 116061 - DNA, 25 bp, Artificial
  Probe
cctctaagttgtagcaagatgaagg

SEQ ID NO: 116062 - DNA, 25 bp, Artificial
  Probe
gcagtaatgaataacaggttggcag

SEQ ID NO: 116063 - DNA, 25 bp, Artificial
  Probe
taagttgtagcaagatgaaggcagt

SEQ ID NO: 116064 - DNA, 25 bp, Artificial
  Probe
ggcaaccgactatttattagaactg

SEQ ID NO: 116065 - DNA, 25 bp, Artificial
  Probe
aggcaaccgactatttattagaact

SEQ ID NO: 116066 - DNA, 25 bp, Artificial
  Probe
cctgactcttactttacccttgaat

SEQ ID NO: 116067 - DNA, 25 bp, Artificial
  Probe
catcttccctgactcttactttacc

SEQ ID NO: 116068 - DNA, 25 bp, Artificial
  Probe
ccatcttccctgactcttactttac

SEQ ID NO: 116069 - DNA, 25 bp, Artificial
  Probe
tctttctgaatggttacacggatta

SEQ ID NO: 116070 - DNA, 25 bp, Artificial
  Probe
tttatatctgcttctctgtttggga

SEQ ID NO: 116071 - DNA, 25 bp, Artificial
  Probe
ctttatatctgcttctctgtttggg

SEQ ID NO: 116072 - DNA, 25 bp, Artificial
  Probe
tttctgaatggttacacggattatg

SEQ ID NO: 116073 - DNA, 25 bp, Artificial
  Probe
aaggcaaccgactatttattagaac

SEQ ID NO: 116074 - DNA, 25 bp, Artificial
  Probe
gctttgtcaatttcttcttcatcct

SEQ ID NO: 116075 - DNA, 25 bp, Artificial
  Probe
ctttctgaatggttacacggattat

SEQ ID NO: 116076 - DNA, 25 bp, Artificial
  Probe
gcaaccgactatttattagaactga

SEQ ID NO: 116077 - DNA, 25 bp, Artificial
  Probe
ctaccgctttgtcaatttcttcttc

SEQ ID NO: 116078 - DNA, 25 bp, Artificial
  Probe
cttactgtgttctttctgaatggtt

SEQ ID NO: 116079 - DNA, 25 bp, Artificial
  Probe
ctcccatcttgtaactaaagcctac

SEQ ID NO: 116080 - DNA, 25 bp, Artificial
  Probe
gaatggttacacggattatgtcatt

SEQ ID NO: 116081 - DNA, 25 bp, Artificial
  Probe
ttctttctgaatggttacacggatt

SEQ ID NO: 116082 - DNA, 25 bp, Artificial
  Probe
atcttccctgactcttactttaccc

SEQ ID NO: 116083 - DNA, 25 bp, Artificial
  Probe
tctaccgctttgtcaatttcttctt

SEQ ID NO: 116084 - DNA, 25 bp, Artificial
  Probe
aaacctctaagttgtagcaagatga

SEQ ID NO: 116085 - DNA, 25 bp, Artificial
  Probe
caaacctctaagttgtagcaagatg

SEQ ID NO: 116086 - DNA, 25 bp, Artificial
  Probe
tcaaacctctaagttgtagcaagat

SEQ ID NO: 116087 - DNA, 25 bp, Artificial
  Probe
ttcaaacctctaagttgtagcaaga

SEQ ID NO: 116088 - DNA, 25 bp, Artificial
  Probe
cttcaaacctctaagttgtagcaag

SEQ ID NO: 116089 - DNA, 25 bp, Artificial
  Probe
taccttcaaacctctaagttgtagc

SEQ ID NO: 116090 - DNA, 25 bp, Artificial
  Probe
tactgtgttctttctgaatggttac

SEQ ID NO: 116091 - DNA, 25 bp, Artificial
  Probe
ctgagcgtctgtgtaattgtgaagg

SEQ ID NO: 116092 - DNA, 25 bp, Artificial
  Probe
tctgtgtaattgtgaagggatgctg

SEQ ID NO: 116093 - DNA, 25 bp, Artificial
  Probe
gtctgtgtaattgtgaagggatgct

SEQ ID NO: 116094 - DNA, 25 bp, Artificial
  Probe
ctacacaggaatagcccatacatcc

SEQ ID NO: 116095 - DNA, 25 bp, Artificial
  Probe
tactgtacgctacacatacgttgta

SEQ ID NO: 116096 - DNA, 25 bp, Artificial
  Probe
gctgagcgtctgtgtaattgtgaag

SEQ ID NO: 116097 - DNA, 25 bp, Artificial
  Probe
tacacaggaatagcccatacatcca

SEQ ID NO: 116098 - DNA, 25 bp, Artificial
  Probe
aggagggtaagctacacaggaatag

SEQ ID NO: 116099 - DNA, 25 bp, Artificial
  Probe
ttactgtacgctacacatacgttgt

SEQ ID NO: 116100 - DNA, 25 bp, Artificial
  Probe
tggttctgaacaagaagcatctttc

SEQ ID NO: 116101 - DNA, 25 bp, Artificial
  Probe
caggagggtaagctacacaggaata

SEQ ID NO: 116102 - DNA, 25 bp, Artificial
  Probe
gtggttctgaacaagaagcatcttt

SEQ ID NO: 116103 - DNA, 25 bp, Artificial
  Probe
cttcatcaaggagctgagggtaaag

SEQ ID NO: 116104 - DNA, 25 bp, Artificial
  Probe
cctaataaaatgacctctgagctga

SEQ ID NO: 116105 - DNA, 25 bp, Artificial
  Probe
actgtacgctacacatacgttgtac

SEQ ID NO: 116106 - DNA, 25 bp, Artificial
  Probe
cgtggttctgaacaagaagcatctt

SEQ ID NO: 116107 - DNA, 25 bp, Artificial
  Probe
ttcgtggttctgaacaagaagcatc

SEQ ID NO: 116108 - DNA, 25 bp, Artificial
  Probe
cagcctaataaaatgacctctgagc

SEQ ID NO: 116109 - DNA, 25 bp, Artificial
  Probe
gcagcctaataaaatgacctctgag

SEQ ID NO: 116110 - DNA, 25 bp, Artificial
  Probe
cgtctgtgtaattgtgaagggatgc

SEQ ID NO: 116111 - DNA, 25 bp, Artificial
  Probe
gcgtctgtgtaattgtgaagggatg

SEQ ID NO: 116112 - DNA, 25 bp, Artificial
  Probe
ctcaaggagagcttcgagaactacc

SEQ ID NO: 116113 - DNA, 25 bp, Artificial
  Probe
cctcaaggagagcttcgagaactac

SEQ ID NO: 116114 - DNA, 25 bp, Artificial
  Probe
ttcaggacaaagataagctgcgaaa

SEQ ID NO: 116115 - DNA, 25 bp, Artificial
  Probe
tttcaggacaaagataagctgcgaa

SEQ ID NO: 116116 - DNA, 25 bp, Artificial
  Probe
aataaaatgacctctgagctgaaaa

SEQ ID NO: 116117 - DNA, 25 bp, Artificial
  Probe
ggttctgaacaagaagcatctttcg

SEQ ID NO: 116118 - DNA, 25 bp, Artificial
  Probe
agcgtctgtgtaattgtgaagggat

SEQ ID NO: 116119 - DNA, 25 bp, Artificial
  Probe
aaatgcagcctaataaaatgacctc

SEQ ID NO: 116120 - DNA, 25 bp, Artificial
  Probe
ctaataaaatgacctctgagctgaa

SEQ ID NO: 116121 - DNA, 25 bp, Artificial
  Probe
aatgcagcctaataaaatgacctct

SEQ ID NO: 116122 - DNA, 25 bp, Artificial
  Probe
aaaatgcagcctaataaaatgacct

SEQ ID NO: 116123 - DNA, 25 bp, Artificial
  Probe
gcctaataaaatgacctctgagctg

SEQ ID NO: 116124 - DNA, 25 bp, Artificial
  Probe
tttactgtacgctacacatacgttg

SEQ ID NO: 116125 - DNA, 25 bp, Artificial
  Probe
ctgtgtaattgtgaagggatgctgc

SEQ ID NO: 116126 - DNA, 25 bp, Artificial
  Probe
acttcatcaaggagctgagggtaaa

SEQ ID NO: 116127 - DNA, 25 bp, Artificial
  Probe
taataaaatgacctctgagctgaaa

SEQ ID NO: 116128 - DNA, 25 bp, Artificial
  Probe
tcaggacaaagataagctgcgaaag

SEQ ID NO: 116129 - DNA, 25 bp, Artificial
  Probe
cttcgtggttctgaacaagaagcat

SEQ ID NO: 116130 - DNA, 25 bp, Artificial
  Probe
acacaggaatagcccatacatccag

SEQ ID NO: 116131 - DNA, 25 bp, Artificial
  Probe
caaggatgccaagatgtacaaggac

SEQ ID NO: 116132 - DNA, 25 bp, Artificial
  Probe
gttctgaacaagaagcatctttcgc

SEQ ID NO: 116133 - DNA, 25 bp, Artificial
  Probe
catcttctccctacgaaaggacctc

SEQ ID NO: 116134 - DNA, 25 bp, Artificial
  Probe
gacttcatcaaggagctgagggtaa

SEQ ID NO: 116135 - DNA, 25 bp, Artificial
  Probe
ttctgaacaagaagcatctttcgca

SEQ ID NO: 116136 - DNA, 25 bp, Artificial
  Probe
gaatcgcttctctttggaaacaata

SEQ ID NO: 116137 - DNA, 25 bp, Artificial
  Probe
aatcgcttctctttggaaacaatat

SEQ ID NO: 116138 - DNA, 25 bp, Artificial
  Probe
tgaatcgcttctctttggaaacaat

SEQ ID NO: 116139 - DNA, 25 bp, Artificial
  Probe
atgaatcgcttctctttggaaacaa

SEQ ID NO: 116140 - DNA, 25 bp, Artificial
  Probe
gcttctctttggaaacaatattcgt

SEQ ID NO: 116141 - DNA, 25 bp, Artificial
  Probe
tcgcttctctttggaaacaatattc

SEQ ID NO: 116142 - DNA, 25 bp, Artificial
  Probe
atcgcttctctttggaaacaatatt

SEQ ID NO: 116143 - DNA, 25 bp, Artificial
  Probe
cgcttctctttggaaacaatattcg

SEQ ID NO: 116144 - DNA, 25 bp, Artificial
  Probe
tattctaagtactacacaccagtcc

SEQ ID NO: 116145 - DNA, 25 bp, Artificial
  Probe
catgaatcgcttctctttggaaaca

SEQ ID NO: 116146 - DNA, 25 bp, Artificial
  Probe
taattccatgaatcgcttctctttg

SEQ ID NO: 116147 - DNA, 25 bp, Artificial
  Probe
ttaattccatgaatcgcttctcttt

SEQ ID NO: 116148 - DNA, 25 bp, Artificial
  Probe
tttaattccatgaatcgcttctctt

SEQ ID NO: 116149 - DNA, 25 bp, Artificial
  Probe
aattccatgaatcgcttctctttgg

SEQ ID NO: 116150 - DNA, 25 bp, Artificial
  Probe
cttctctttggaaacaatattcgta

SEQ ID NO: 116151 - DNA, 25 bp, Artificial
  Probe
atattctaagtactacacaccagtc

SEQ ID NO: 116152 - DNA, 25 bp, Artificial
  Probe
cctcaggctcactataacatgtacc

SEQ ID NO: 116153 - DNA, 25 bp, Artificial
  Probe
ttctctttggaaacaatattcgtaa

SEQ ID NO: 116154 - DNA, 25 bp, Artificial
  Probe
ccatgaatcgcttctctttggaaac

SEQ ID NO: 116155 - DNA, 25 bp, Artificial
  Probe
attctaagtactacacaccagtccc

SEQ ID NO: 116156 - DNA, 25 bp, Artificial
  Probe
tctctttggaaacaatattcgtaat

SEQ ID NO: 116157 - DNA, 25 bp, Artificial
  Probe
acccttcctgtggatgttttaattc

SEQ ID NO: 116158 - DNA, 25 bp, Artificial
  Probe
gacccttcctgtggatgttttaatt

SEQ ID NO: 116159 - DNA, 25 bp, Artificial
  Probe
ggatgttttaattccatgaatcgct

SEQ ID NO: 116160 - DNA, 25 bp, Artificial
  Probe
tgttttaattccatgaatcgcttct

SEQ ID NO: 116161 - DNA, 25 bp, Artificial
  Probe
cccttcctgtggatgttttaattcc

SEQ ID NO: 116162 - DNA, 25 bp, Artificial
  Probe
actataacatgtacccacagaatcc

SEQ ID NO: 116163 - DNA, 25 bp, Artificial
  Probe
ctcactataacatgtacccacagaa

SEQ ID NO: 116164 - DNA, 25 bp, Artificial
  Probe
ctataacatgtacccacagaatccc

SEQ ID NO: 116165 - DNA, 25 bp, Artificial
  Probe
gtatattctaagtactacacaccag

SEQ ID NO: 116166 - DNA, 25 bp, Artificial
  Probe
ttttaattccatgaatcgcttctct

SEQ ID NO: 116167 - DNA, 25 bp, Artificial
  Probe
gttttaattccatgaatcgcttctc

SEQ ID NO: 116168 - DNA, 25 bp, Artificial
  Probe
tcactataacatgtacccacagaat

SEQ ID NO: 116169 - DNA, 25 bp, Artificial
  Probe
cactataacatgtacccacagaatc

SEQ ID NO: 116170 - DNA, 25 bp, Artificial
  Probe
tatattctaagtactacacaccagt

SEQ ID NO: 116171 - DNA, 25 bp, Artificial
  Probe
atgttttaattccatgaatcgcttc

SEQ ID NO: 116172 - DNA, 25 bp, Artificial
  Probe
gatgttttaattccatgaatcgctt

SEQ ID NO: 116173 - DNA, 25 bp, Artificial
  Probe
ctcaggctcactataacatgtaccc

SEQ ID NO: 116174 - DNA, 25 bp, Artificial
  Probe
ccctcaggctcactataacatgtac

SEQ ID NO: 116175 - DNA, 25 bp, Artificial
  Probe
gctcactataacatgtacccacaga

SEQ ID NO: 116176 - DNA, 25 bp, Artificial
  Probe
tataacatgtacccacagaatcccg

SEQ ID NO: 116177 - DNA, 25 bp, Artificial
  Probe
ggacccttcctgtggatgttttaat

SEQ ID NO: 116178 - DNA, 25 bp, Artificial
  Probe
caggctcactataacatgtacccac

SEQ ID NO: 116179 - DNA, 25 bp, Artificial
  Probe
tcaggctcactataacatgtaccca

SEQ ID NO: 116180 - DNA, 25 bp, Artificial
  Probe
ttctaagtactacacaccagtcccg

SEQ ID NO: 116181 - DNA, 25 bp, Artificial
  Probe
gtctcctacagtaacactcagtatg

SEQ ID NO: 116182 - DNA, 25 bp, Artificial
  Probe
tcctacagtaacactcagtatgtct

SEQ ID NO: 116183 - DNA, 25 bp, Artificial
  Probe
ctcctacagtaacactcagtatgtc

SEQ ID NO: 116184 - DNA, 25 bp, Artificial
  Probe
tctcctacagtaacactcagtatgt

SEQ ID NO: 116185 - DNA, 25 bp, Artificial
  Probe
tgtctcctacagtaacactcagtat

SEQ ID NO: 116186 - DNA, 25 bp, Artificial
  Probe
cctacagtaacactcagtatgtctg

SEQ ID NO: 116187 - DNA, 25 bp, Artificial
  Probe
tccatagagatgaatgagccagttc

SEQ ID NO: 116188 - DNA, 25 bp, Artificial
  Probe
ctacagtaacactcagtatgtctgc

SEQ ID NO: 116189 - DNA, 25 bp, Artificial
  Probe
gtccatagagatgaatgagccagtt

SEQ ID NO: 116190 - DNA, 25 bp, Artificial
  Probe
gtgtccatagagatgaatgagccag

SEQ ID NO: 116191 - DNA, 25 bp, Artificial
  Probe
ctgtgtccatagagatgaatgagcc

SEQ ID NO: 116192 - DNA, 25 bp, Artificial
  Probe
gaagctgtgtccatagagatgaatg

SEQ ID NO: 116193 - DNA, 25 bp, Artificial
  Probe
gcaatgttgataaagaagaggaagc

SEQ ID NO: 116194 - DNA, 25 bp, Artificial
  Probe
agcaatgttgataaagaagaggaag

SEQ ID NO: 116195 - DNA, 25 bp, Artificial
  Probe
aagctgtgtccatagagatgaatga

SEQ ID NO: 116196 - DNA, 25 bp, Artificial
  Probe
attgagaaactaaacctttgacgat

SEQ ID NO: 116197 - DNA, 25 bp, Artificial
  Probe
aattgagaaactaaacctttgacga

SEQ ID NO: 116198 - DNA, 25 bp, Artificial
  Probe
aagcaatgttgataaagaagaggaa

SEQ ID NO: 116199 - DNA, 25 bp, Artificial
  Probe
caagcaatgttgataaagaagagga

SEQ ID NO: 116200 - DNA, 25 bp, Artificial
  Probe
tgtccatagagatgaatgagccagt

SEQ ID NO: 116201 - DNA, 25 bp, Artificial
  Probe
agctgtgtccatagagatgaatgag

SEQ ID NO: 116202 - DNA, 25 bp, Artificial
  Probe
ttaggcgttgctagaaattgagaaa

SEQ ID NO: 116203 - DNA, 25 bp, Artificial
  Probe
gcgttgctagaaattgagaaactaa

SEQ ID NO: 116204 - DNA, 25 bp, Artificial
  Probe
ttgagaaactaaacctttgacgatc

SEQ ID NO: 116205 - DNA, 25 bp, Artificial
  Probe
aaattgagaaactaaacctttgacg

SEQ ID NO: 116206 - DNA, 25 bp, Artificial
  Probe
tgtgtccatagagatgaatgagcca

SEQ ID NO: 116207 - DNA, 25 bp, Artificial
  Probe
ccagacaagcaatgttgataaagaa

SEQ ID NO: 116208 - DNA, 25 bp, Artificial
  Probe
cttaggcgttgctagaaattgagaa

SEQ ID NO: 116209 - DNA, 25 bp, Artificial
  Probe
acaagcaatgttgataaagaagagg

SEQ ID NO: 116210 - DNA, 25 bp, Artificial
  Probe
cataaatgatcttgacgctaaatgc

SEQ ID NO: 116211 - DNA, 25 bp, Artificial
  Probe
atcttaggcgttgctagaaattgag

SEQ ID NO: 116212 - DNA, 25 bp, Artificial
  Probe
tgctagaaattgagaaactaaacct

SEQ ID NO: 116213 - DNA, 25 bp, Artificial
  Probe
cagacaagcaatgttgataaagaag

SEQ ID NO: 116214 - DNA, 25 bp, Artificial
  Probe
tacagtaacactcagtatgtctgca

SEQ ID NO: 116215 - DNA, 25 bp, Artificial
  Probe
agacaagcaatgttgataaagaaga

SEQ ID NO: 116216 - DNA, 25 bp, Artificial
  Probe
tgggacacttaaagtattatttggc

SEQ ID NO: 116217 - DNA, 25 bp, Artificial
  Probe
gatcttaggcgttgctagaaattga

SEQ ID NO: 116218 - DNA, 25 bp, Artificial
  Probe
aaattgctgacatgggacacttaaa

SEQ ID NO: 116219 - DNA, 25 bp, Artificial
  Probe
ggcgttgctagaaattgagaaacta

SEQ ID NO: 116220 - DNA, 25 bp, Artificial
  Probe
taggcgttgctagaaattgagaaac

SEQ ID NO: 116221 - DNA, 25 bp, Artificial
  Probe
gacaagcaatgttgataaagaagag

SEQ ID NO: 116222 - DNA, 25 bp, Artificial
  Probe
acacttaaagtattatttggctccc

SEQ ID NO: 116223 - DNA, 25 bp, Artificial
  Probe
gggacacttaaagtattatttggct

SEQ ID NO: 116224 - DNA, 25 bp, Artificial
  Probe
catagagatgaatgagccagttcag

SEQ ID NO: 116225 - DNA, 25 bp, Artificial
  Probe
cccagacaagcaatgttgataaaga

SEQ ID NO: 116226 - DNA, 25 bp, Artificial
  Probe
ccaggacttagattcaatgttctca

SEQ ID NO: 116227 - DNA, 25 bp, Artificial
  Probe
accaggacttagattcaatgttctc

SEQ ID NO: 116228 - DNA, 25 bp, Artificial
  Probe
acttagattcaatgttctcagcaac

SEQ ID NO: 116229 - DNA, 25 bp, Artificial
  Probe
caccaggacttagattcaatgttct

SEQ ID NO: 116230 - DNA, 25 bp, Artificial
  Probe
gacttagattcaatgttctcagcaa

SEQ ID NO: 116231 - DNA, 25 bp, Artificial
  Probe
aggacttagattcaatgttctcagc

SEQ ID NO: 116232 - DNA, 25 bp, Artificial
  Probe
ggacttagattcaatgttctcagca

SEQ ID NO: 116233 - DNA, 25 bp, Artificial
  Probe
caggacttagattcaatgttctcag

SEQ ID NO: 116234 - DNA, 25 bp, Artificial
  Probe
ctactccaacgacttgaactctatg

SEQ ID NO: 116235 - DNA, 25 bp, Artificial
  Probe
actactccaacgacttgaactctat

SEQ ID NO: 116236 - DNA, 25 bp, Artificial
  Probe
aactactccaacgacttgaactcta

SEQ ID NO: 116237 - DNA, 25 bp, Artificial
  Probe
gcaccaggacttagattcaatgttc

SEQ ID NO: 116238 - DNA, 25 bp, Artificial
  Probe
caactactccaacgacttgaactct

SEQ ID NO: 116239 - DNA, 25 bp, Artificial
  Probe
ggcaccaggacttagattcaatgtt

SEQ ID NO: 116240 - DNA, 25 bp, Artificial
  Probe
tactccaacgacttgaactctatgg

SEQ ID NO: 116241 - DNA, 25 bp, Artificial
  Probe
ccaactactccaacgacttgaactc

SEQ ID NO: 116242 - DNA, 25 bp, Artificial
  Probe
aaagaaacaaacaaaccagacaccc

SEQ ID NO: 116243 - DNA, 25 bp, Artificial
  Probe
ttagattcaatgttctcagcaacag

SEQ ID NO: 116244 - DNA, 25 bp, Artificial
  Probe
cttagattcaatgttctcagcaaca

SEQ ID NO: 116245 - DNA, 25 bp, Artificial
  Probe
atcctgtgtcttcagtgtttcttga

SEQ ID NO: 116246 - DNA, 25 bp, Artificial
  Probe
tagattcaatgttctcagcaacagg

SEQ ID NO: 116247 - DNA, 25 bp, Artificial
  Probe
gatcctgtgtcttcagtgtttcttg

SEQ ID NO: 116248 - DNA, 25 bp, Artificial
  Probe
agatcctgtgtcttcagtgtttctt

SEQ ID NO: 116249 - DNA, 25 bp, Artificial
  Probe
gtcttcagtgtttcttgacaacgac

SEQ ID NO: 116250 - DNA, 25 bp, Artificial
  Probe
gagatcctgtgtcttcagtgtttct

SEQ ID NO: 116251 - DNA, 25 bp, Artificial
  Probe
gaaaagaaacaaacaaaccagacac

SEQ ID NO: 116252 - DNA, 25 bp, Artificial
  Probe
gaggaaaagaaacaaacaaaccaga

SEQ ID NO: 116253 - DNA, 25 bp, Artificial
  Probe
agaggaaaagaaacaaacaaaccag

SEQ ID NO: 116254 - DNA, 25 bp, Artificial
  Probe
aagaggaaaagaaacaaacaaacca

SEQ ID NO: 116255 - DNA, 25 bp, Artificial
  Probe
gggaagaggaaaagaaacaaacaaa

SEQ ID NO: 116256 - DNA, 25 bp, Artificial
  Probe
aaaacaagggaagaggaaaagaaac

SEQ ID NO: 116257 - DNA, 25 bp, Artificial
  Probe
aggaaaagaaacaaacaaaccagac

SEQ ID NO: 116258 - DNA, 25 bp, Artificial
  Probe
gaagaggaaaagaaacaaacaaacc

SEQ ID NO: 116259 - DNA, 25 bp, Artificial
  Probe
ggaagaggaaaagaaacaaacaaac

SEQ ID NO: 116260 - DNA, 25 bp, Artificial
  Probe
caagggaagaggaaaagaaacaaac

SEQ ID NO: 116261 - DNA, 25 bp, Artificial
  Probe
aagaaacaaacaaaccagacaccca

SEQ ID NO: 116262 - DNA, 25 bp, Artificial
  Probe
ggaaaagaaacaaacaaaccagaca

SEQ ID NO: 116263 - DNA, 25 bp, Artificial
  Probe
agggaagaggaaaagaaacaaacaa

SEQ ID NO: 116264 - DNA, 25 bp, Artificial
  Probe
aagggaagaggaaaagaaacaaaca

SEQ ID NO: 116265 - DNA, 25 bp, Artificial
  Probe
acaagggaagaggaaaagaaacaaa

SEQ ID NO: 116266 - DNA, 25 bp, Artificial
  Probe
aacaagggaagaggaaaagaaacaa

SEQ ID NO: 116267 - DNA, 25 bp, Artificial
  Probe
aaacaagggaagaggaaaagaaaca

SEQ ID NO: 116268 - DNA, 25 bp, Artificial
  Probe
aaaagaaacaaacaaaccagacacc

SEQ ID NO: 116269 - DNA, 25 bp, Artificial
  Probe
tcctgtgtcttcagtgtttcttgac

SEQ ID NO: 116270 - DNA, 25 bp, Artificial
  Probe
agaaacaaacaaaccagacacccag

SEQ ID NO: 116271 - DNA, 25 bp, Artificial
  Probe
atgctcaagttgttacggatattca

SEQ ID NO: 116272 - DNA, 25 bp, Artificial
  Probe
tgctcaagttgttacggatattcaa

SEQ ID NO: 116273 - DNA, 25 bp, Artificial
  Probe
catgctcaagttgttacggatattc

SEQ ID NO: 116274 - DNA, 25 bp, Artificial
  Probe
tcatgctcaagttgttacggatatt

SEQ ID NO: 116275 - DNA, 25 bp, Artificial
  Probe
ttcatgctcaagttgttacggatat

SEQ ID NO: 116276 - DNA, 25 bp, Artificial
  Probe
attcatgctcaagttgttacggata

SEQ ID NO: 116277 - DNA, 25 bp, Artificial
  Probe
ttgaggagttcaccacacaatacaa

SEQ ID NO: 116278 - DNA, 25 bp, Artificial
  Probe
gctcaagttgttacggatattcaaa

SEQ ID NO: 116279 - DNA, 25 bp, Artificial
  Probe
tcaagttgttacggatattcaaagt

SEQ ID NO: 116280 - DNA, 25 bp, Artificial
  Probe
ctcaagttgttacggatattcaaag

SEQ ID NO: 116281 - DNA, 25 bp, Artificial
  Probe
cttagcagactcactttactgactc

SEQ ID NO: 116282 - DNA, 25 bp, Artificial
  Probe
ttagcagactcactttactgactca

SEQ ID NO: 116283 - DNA, 25 bp, Artificial
  Probe
gtttgaggagttcaccacacaatac

SEQ ID NO: 116284 - DNA, 25 bp, Artificial
  Probe
tagcagactcactttactgactcac

SEQ ID NO: 116285 - DNA, 25 bp, Artificial
  Probe
tgaggagttcaccacacaatacaaa

SEQ ID NO: 116286 - DNA, 25 bp, Artificial
  Probe
tttgaggagttcaccacacaataca

SEQ ID NO: 116287 - DNA, 25 bp, Artificial
  Probe
caagttgttacggatattcaaagta

SEQ ID NO: 116288 - DNA, 25 bp, Artificial
  Probe
tgtttgaggagttcaccacacaata

SEQ ID NO: 116289 - DNA, 25 bp, Artificial
  Probe
gcagactcactttactgactcacat

SEQ ID NO: 116290 - DNA, 25 bp, Artificial
  Probe
gcttagcagactcactttactgact

SEQ ID NO: 116291 - DNA, 25 bp, Artificial
  Probe
gaggagttcaccacacaatacaaaa

SEQ ID NO: 116292 - DNA, 25 bp, Artificial
  Probe
ctgtttgaggagttcaccacacaat

SEQ ID NO: 116293 - DNA, 25 bp, Artificial
  Probe
agcagactcactttactgactcaca

SEQ ID NO: 116294 - DNA, 25 bp, Artificial
  Probe
tgttacggatattcaaagtaatgtt

SEQ ID NO: 116295 - DNA, 25 bp, Artificial
  Probe
ttgttacggatattcaaagtaatgt

SEQ ID NO: 116296 - DNA, 25 bp, Artificial
  Probe
aagttgttacggatattcaaagtaa

SEQ ID NO: 116297 - DNA, 25 bp, Artificial
  Probe
gttgttacggatattcaaagtaatg

SEQ ID NO: 116298 - DNA, 25 bp, Artificial
  Probe
atttgcttagcagactcactttact

SEQ ID NO: 116299 - DNA, 25 bp, Artificial
  Probe
catttgcttagcagactcactttac

SEQ ID NO: 116300 - DNA, 25 bp, Artificial
  Probe
tcatttgcttagcagactcacttta

SEQ ID NO: 116301 - DNA, 25 bp, Artificial
  Probe
agttgttacggatattcaaagtaat

SEQ ID NO: 116302 - DNA, 25 bp, Artificial
  Probe
tttgcttagcagactcactttactg

SEQ ID NO: 116303 - DNA, 25 bp, Artificial
  Probe
tgctagtaaaatgatacagaaggat

SEQ ID NO: 116304 - DNA, 25 bp, Artificial
  Probe
gtcatttgcttagcagactcacttt

SEQ ID NO: 116305 - DNA, 25 bp, Artificial
  Probe
ttgcttagcagactcactttactga

SEQ ID NO: 116306 - DNA, 25 bp, Artificial
  Probe
acggatattcaaagtaatgtttgta

SEQ ID NO: 116307 - DNA, 25 bp, Artificial
  Probe
tacggatattcaaagtaatgtttgt

SEQ ID NO: 116308 - DNA, 25 bp, Artificial
  Probe
gttacggatattcaaagtaatgttt

SEQ ID NO: 116309 - DNA, 25 bp, Artificial
  Probe
gctagtaaaatgatacagaaggatc

SEQ ID NO: 116310 - DNA, 25 bp, Artificial
  Probe
tcaaagtaatgtttgtatgaactct

SEQ ID NO: 116311 - DNA, 25 bp, Artificial
  Probe
tgcttagcagactcactttactgac

SEQ ID NO: 116312 - DNA, 25 bp, Artificial
  Probe
aatgatacagaaggatcccaaatgg

SEQ ID NO: 116313 - DNA, 25 bp, Artificial
  Probe
aaatgatacagaaggatcccaaatg

SEQ ID NO: 116314 - DNA, 25 bp, Artificial
  Probe
tatggtcgtcatttgcttagcagac

SEQ ID NO: 116315 - DNA, 25 bp, Artificial
  Probe
gtatggtcgtcatttgcttagcaga

SEQ ID NO: 116316 - DNA, 25 bp, Artificial
  Probe
tagagactggagagatcaagagaga

SEQ ID NO: 116317 - DNA, 25 bp, Artificial
  Probe
gtagagactggagagatcaagagag

SEQ ID NO: 116318 - DNA, 25 bp, Artificial
  Probe
ctggagagatcaagagagagtatgg

SEQ ID NO: 116319 - DNA, 25 bp, Artificial
  Probe
gagagatcaagagagagtatggtgg

SEQ ID NO: 116320 - DNA, 25 bp, Artificial
  Probe
ggagagatcaagagagagtatggtg

SEQ ID NO: 116321 - DNA, 25 bp, Artificial
  Probe
gactggagagatcaagagagagtat

SEQ ID NO: 116322 - DNA, 25 bp, Artificial
  Probe
tgtagagactggagagatcaagaga

SEQ ID NO: 116323 - DNA, 25 bp, Artificial
  Probe
gtgtagagactggagagatcaagag

SEQ ID NO: 116324 - DNA, 25 bp, Artificial
  Probe
actggagagatcaagagagagtatg

SEQ ID NO: 116325 - DNA, 25 bp, Artificial
  Probe
tggagagatcaagagagagtatggt

SEQ ID NO: 116326 - DNA, 25 bp, Artificial
  Probe
agactggagagatcaagagagagta

SEQ ID NO: 116327 - DNA, 25 bp, Artificial
  Probe
tgtgtagagactggagagatcaaga

SEQ ID NO: 116328 - DNA, 25 bp, Artificial
  Probe
gtgtgtagagactggagagatcaag

SEQ ID NO: 116329 - DNA, 25 bp, Artificial
  Probe
agagactggagagatcaagagagag

SEQ ID NO: 116330 - DNA, 25 bp, Artificial
  Probe
taagaggatgtacctgaacaatacc

SEQ ID NO: 116331 - DNA, 25 bp, Artificial
  Probe
agtatatcgtcacagcttcttcaga

SEQ ID NO: 116332 - DNA, 25 bp, Artificial
  Probe
cagtatatcgtcacagcttcttcag

SEQ ID NO: 116333 - DNA, 25 bp, Artificial
  Probe
ctctaagaggatgtacctgaacaat

SEQ ID NO: 116334 - DNA, 25 bp, Artificial
  Probe
gtctagtggctctaagaggatgtac

SEQ ID NO: 116335 - DNA, 25 bp, Artificial
  Probe
agctagacacaggaaccatcaataa

SEQ ID NO: 116336 - DNA, 25 bp, Artificial
  Probe
ctaagaggatgtacctgaacaatac

SEQ ID NO: 116337 - DNA, 25 bp, Artificial
  Probe
gagctagacacaggaaccatcaata

SEQ ID NO: 116338 - DNA, 25 bp, Artificial
  Probe
tctaagaggatgtacctgaacaata

SEQ ID NO: 116339 - DNA, 25 bp, Artificial
  Probe
gagactggagagatcaagagagagt

SEQ ID NO: 116340 - DNA, 25 bp, Artificial
  Probe
gctagacacaggaaccatcaataaa

SEQ ID NO: 116341 - DNA, 25 bp, Artificial
  Probe
gctctaagaggatgtacctgaacaa

SEQ ID NO: 116342 - DNA, 25 bp, Artificial
  Probe
gtatatcgtcacagcttcttcagac

SEQ ID NO: 116343 - DNA, 25 bp, Artificial
  Probe
ctttagagagaccagacctagagtg

SEQ ID NO: 116344 - DNA, 25 bp, Artificial
  Probe
tctagtggctctaagaggatgtacc

SEQ ID NO: 116345 - DNA, 25 bp, Artificial
  Probe
ggtctagtggctctaagaggatgta

SEQ ID NO: 116346 - DNA, 25 bp, Artificial
  Probe
ccagtatatcgtcacagcttcttca

SEQ ID NO: 116347 - DNA, 25 bp, Artificial
  Probe
tatatcgtcacagcttcttcagaca

SEQ ID NO: 116348 - DNA, 25 bp, Artificial
  Probe
ggtgtgtagagactggagagatcaa

SEQ ID NO: 116349 - DNA, 25 bp, Artificial
  Probe
gtagagacttacctcaacaggcttg

SEQ ID NO: 116350 - DNA, 25 bp, Artificial
  Probe
agagatcaagagagagtatggtggc

SEQ ID NO: 116351 - DNA, 25 bp, Artificial
  Probe
ctagtggctctaagaggatgtacct

SEQ ID NO: 116352 - DNA, 25 bp, Artificial
  Probe
tagagagaccagacctagagtgctt

SEQ ID NO: 116353 - DNA, 25 bp, Artificial
  Probe
ttagagagaccagacctagagtgct

SEQ ID NO: 116354 - DNA, 25 bp, Artificial
  Probe
atatcgtcacagcttcttcagacaa

SEQ ID NO: 116355 - DNA, 25 bp, Artificial
  Probe
cctttagagagaccagacctagagt

SEQ ID NO: 116356 - DNA, 25 bp, Artificial
  Probe
ctggtgtgtagagactggagagatc

SEQ ID NO: 116357 - DNA, 25 bp, Artificial
  Probe
tagtggctctaagaggatgtacctg

SEQ ID NO: 116358 - DNA, 25 bp, Artificial
  Probe
tctggtgtgtagagactggagagat

SEQ ID NO: 116359 - DNA, 25 bp, Artificial
  Probe
ctttgatgaatcgaactgtatcctc

SEQ ID NO: 116360 - DNA, 25 bp, Artificial
  Probe
tttgatgaatcgaactgtatcctcc

SEQ ID NO: 116361 - DNA, 25 bp, Artificial
  Probe
tatctcagaagaactcctaagaagc

SEQ ID NO: 116362 - DNA, 25 bp, Artificial
  Probe
atctcagaagaactcctaagaagca

SEQ ID NO: 116363 - DNA, 25 bp, Artificial
  Probe
ctcagaagaactcctaagaagcaga

SEQ ID NO: 116364 - DNA, 25 bp, Artificial
  Probe
tctcagaagaactcctaagaagcag

SEQ ID NO: 116365 - DNA, 25 bp, Artificial
  Probe
agattgacaaggagcaacatgataa

SEQ ID NO: 116366 - DNA, 25 bp, Artificial
  Probe
ctcctaagaagcagagtgaagagaa

SEQ ID NO: 116367 - DNA, 25 bp, Artificial
  Probe
tcagaagaactcctaagaagcagag

SEQ ID NO: 116368 - DNA, 25 bp, Artificial
  Probe
cagattgacaaggagcaacatgata

SEQ ID NO: 116369 - DNA, 25 bp, Artificial
  Probe
aacaatactacctatggtctagcag

SEQ ID NO: 116370 - DNA, 25 bp, Artificial
  Probe
taatatgtgactccagtccttatcc

SEQ ID NO: 116371 - DNA, 25 bp, Artificial
  Probe
agagagcaaacaatactacctatgg

SEQ ID NO: 116372 - DNA, 25 bp, Artificial
  Probe
atcaagagagcaaacaatactacct

SEQ ID NO: 116373 - DNA, 25 bp, Artificial
  Probe
gatgagtttgtgagaaagagtgttg

SEQ ID NO: 116374 - DNA, 25 bp, Artificial
  Probe
atgatgagtttgtgagaaagagtgt

SEQ ID NO: 116375 - DNA, 25 bp, Artificial
  Probe
atgagtttgtgagaaagagtgttga

SEQ ID NO: 116376 - DNA, 25 bp, Artificial
  Probe
tgatgagtttgtgagaaagagtgtt

SEQ ID NO: 116377 - DNA, 25 bp, Artificial
  Probe
aatactacctatggtctagcagcag

SEQ ID NO: 116378 - DNA, 25 bp, Artificial
  Probe
tcaagagagcaaacaatactaccta

SEQ ID NO: 116379 - DNA, 25 bp, Artificial
  Probe
cctaagaagcagagtgaagagaaac

SEQ ID NO: 116380 - DNA, 25 bp, Artificial
  Probe
tcctaagaagcagagtgaagagaaa

SEQ ID NO: 116381 - DNA, 25 bp, Artificial
  Probe
caatactacctatggtctagcagca

SEQ ID NO: 116382 - DNA, 25 bp, Artificial
  Probe
acaatactacctatggtctagcagc

SEQ ID NO: 116383 - DNA, 25 bp, Artificial
  Probe
tgagtttgtgagaaagagtgttgag

SEQ ID NO: 116384 - DNA, 25 bp, Artificial
  Probe
tatgatgagtttgtgagaaagagtg

SEQ ID NO: 116385 - DNA, 25 bp, Artificial
  Probe
ggaatcaactaggattatggcaata

SEQ ID NO: 116386 - DNA, 25 bp, Artificial
  Probe
actccagtccttatcccagaataaa

SEQ ID NO: 116387 - DNA, 25 bp, Artificial
  Probe
atatctcagaagaactcctaagaag

SEQ ID NO: 116388 - DNA, 25 bp, Artificial
  Probe
ggagtcagtttatgatgagtttgtg

SEQ ID NO: 116389 - DNA, 25 bp, Artificial
  Probe
aggagtcagtttatgatgagtttgt

SEQ ID NO: 116390 - DNA, 25 bp, Artificial
  Probe
ctaagaagcagagtgaagagaaact

SEQ ID NO: 116391 - DNA, 25 bp, Artificial
  Probe
gttgaggagtcagtttatgatgagt

SEQ ID NO: 116392 - DNA, 25 bp, Artificial
  Probe
tttcgttgaggagtcagtttatgat

SEQ ID NO: 116393 - DNA, 25 bp, Artificial
  Probe
tgaggagtcagtttatgatgagttt

SEQ ID NO: 116394 - DNA, 25 bp, Artificial
  Probe
ttgaggagtcagtttatgatgagtt

SEQ ID NO: 116395 - DNA, 25 bp, Artificial
  Probe
aagagagcaaacaatactacctatg

SEQ ID NO: 116396 - DNA, 25 bp, Artificial
  Probe
caagagagcaaacaatactacctat

SEQ ID NO: 116397 - DNA, 25 bp, Artificial
  Probe
gaggagtcagtttatgatgagtttg

SEQ ID NO: 116398 - DNA, 25 bp, Artificial
  Probe
taactgctatatgatcttgtcagcc

SEQ ID NO: 116399 - DNA, 25 bp, Artificial
  Probe
gatcaagagagcaaacaatactacc

SEQ ID NO: 116400 - DNA, 25 bp, Artificial
  Probe
ttcgttgaggagtcagtttatgatg

SEQ ID NO: 116401 - DNA, 25 bp, Artificial
  Probe
gtcagtttatgatgagtttgtgaga

SEQ ID NO: 116402 - DNA, 25 bp, Artificial
  Probe
agtcagtttatgatgagtttgtgag

SEQ ID NO: 116403 - DNA, 25 bp, Artificial
  Probe
gagtcagtttatgatgagtttgtga

SEQ ID NO: 116404 - DNA, 25 bp, Artificial
  Probe
tcagattgacaaggagcaacatgat

SEQ ID NO: 116405 - DNA, 25 bp, Artificial
  Probe
ttatgatgagtttgtgagaaagagt

SEQ ID NO: 116406 - DNA, 25 bp, Artificial
  Probe
caggcacatagtaggtcctcaataa

SEQ ID NO: 116407 - DNA, 25 bp, Artificial
  Probe
ggcacatagtaggtcctcaataaac

SEQ ID NO: 116408 - DNA, 25 bp, Artificial
  Probe
acaggcacatagtaggtcctcaata

SEQ ID NO: 116409 - DNA, 25 bp, Artificial
  Probe
aggcacatagtaggtcctcaataaa

SEQ ID NO: 116410 - DNA, 25 bp, Artificial
  Probe
cacatagtaggtcctcaataaacca

SEQ ID NO: 116411 - DNA, 25 bp, Artificial
  Probe
gcacatagtaggtcctcaataaacc

SEQ ID NO: 116412 - DNA, 25 bp, Artificial
  Probe
acatagtaggtcctcaataaaccat

SEQ ID NO: 116413 - DNA, 25 bp, Artificial
  Probe
gacaggcacatagtaggtcctcaat

SEQ ID NO: 116414 - DNA, 25 bp, Artificial
  Probe
tagtaggtcctcaataaaccatgtt

SEQ ID NO: 116415 - DNA, 25 bp, Artificial
  Probe
atagtaggtcctcaataaaccatgt

SEQ ID NO: 116416 - DNA, 25 bp, Artificial
  Probe
catagtaggtcctcaataaaccatg

SEQ ID NO: 116417 - DNA, 25 bp, Artificial
  Probe
gagatggaaaacagaaagtaaacgg

SEQ ID NO: 116418 - DNA, 25 bp, Artificial
  Probe
gtaggtcctcaataaaccatgtttg

SEQ ID NO: 116419 - DNA, 25 bp, Artificial
  Probe
agtaggtcctcaataaaccatgttt

SEQ ID NO: 116420 - DNA, 25 bp, Artificial
  Probe
cgagatggaaaacagaaagtaaacg

SEQ ID NO: 116421 - DNA, 25 bp, Artificial
  Probe
ctcaagactacctttcagcagtgtg

SEQ ID NO: 116422 - DNA, 25 bp, Artificial
  Probe
agatggaaaacagaaagtaaacggg

SEQ ID NO: 116423 - DNA, 25 bp, Artificial
  Probe
gatggaaaacagaaagtaaacggga

SEQ ID NO: 116424 - DNA, 25 bp, Artificial
  Probe
taggtcctcaataaaccatgtttga

SEQ ID NO: 116425 - DNA, 25 bp, Artificial
  Probe
atggaaaacagaaagtaaacgggac

SEQ ID NO: 116426 - DNA, 25 bp, Artificial
  Probe
tggacttgggaacaaattcatcctc

SEQ ID NO: 116427 - DNA, 25 bp, Artificial
  Probe
aggtcctcaataaaccatgtttgac

SEQ ID NO: 116428 - DNA, 25 bp, Artificial
  Probe
gtcctcaataaaccatgtttgaccc

SEQ ID NO: 116429 - DNA, 25 bp, Artificial
  Probe
tgacaggcacatagtaggtcctcaa

SEQ ID NO: 116430 - DNA, 25 bp, Artificial
  Probe
ctttgaagggtgaaacaacggagac

SEQ ID NO: 116431 - DNA, 25 bp, Artificial
  Probe
tggaaaacagaaagtaaacgggact

SEQ ID NO: 116432 - DNA, 25 bp, Artificial
  Probe
gaaacaacggagacagttcatcctg

SEQ ID NO: 116433 - DNA, 25 bp, Artificial
  Probe
tttgaagggtgaaacaacggagaca

SEQ ID NO: 116434 - DNA, 25 bp, Artificial
  Probe
ggaaaacagaaagtaaacgggactt

SEQ ID NO: 116435 - DNA, 25 bp, Artificial
  Probe
gtgaaacaacggagacagttcatcc

SEQ ID NO: 116436 - DNA, 25 bp, Artificial
  Probe
ggtgaaacaacggagacagttcatc

SEQ ID NO: 116437 - DNA, 25 bp, Artificial
  Probe
tgaaacaacggagacagttcatcct

SEQ ID NO: 116438 - DNA, 25 bp, Artificial
  Probe
tcctcaataaaccatgtttgacccc

SEQ ID NO: 116439 - DNA, 25 bp, Artificial
  Probe
ggtcctcaataaaccatgtttgacc

SEQ ID NO: 116440 - DNA, 25 bp, Artificial
  Probe
tcaagactacctttcagcagtgtgc

SEQ ID NO: 116441 - DNA, 25 bp, Artificial
  Probe
aagactacctttcagcagtgtgcaa

SEQ ID NO: 116442 - DNA, 25 bp, Artificial
  Probe
cttggcctttgaagggtgaaacaac

SEQ ID NO: 116443 - DNA, 25 bp, Artificial
  Probe
agactacctttcagcagtgtgcaag

SEQ ID NO: 116444 - DNA, 25 bp, Artificial
  Probe
aaaacagaaagtaaacgggactttt

SEQ ID NO: 116445 - DNA, 25 bp, Artificial
  Probe
gaaaacagaaagtaaacgggacttt

SEQ ID NO: 116446 - DNA, 25 bp, Artificial
  Probe
caacaagagagtgtacttcgctgag

SEQ ID NO: 116447 - DNA, 25 bp, Artificial
  Probe
ggttcctacatctacgagaagcctc

SEQ ID NO: 116448 - DNA, 25 bp, Artificial
  Probe
ctggttcctacatctacgagaagcc

SEQ ID NO: 116449 - DNA, 25 bp, Artificial
  Probe
tcgatgcaacaagagagtgtacttc

SEQ ID NO: 116450 - DNA, 25 bp, Artificial
  Probe
ctcgatgcaacaagagagtgtactt

SEQ ID NO: 116451 - DNA, 25 bp, Artificial
  Probe
cgctggttcctacatctacgagaag

SEQ ID NO: 116452 - DNA, 25 bp, Artificial
  Probe
tggttcctacatctacgagaagcct

SEQ ID NO: 116453 - DNA, 25 bp, Artificial
  Probe
caagtgtgacaagaccgtgtacttc

SEQ ID NO: 116454 - DNA, 25 bp, Artificial
  Probe
gatgcaacaagagagtgtacttcgc

SEQ ID NO: 116455 - DNA, 25 bp, Artificial
  Probe
cctcgatgcaacaagagagtgtact

SEQ ID NO: 116456 - DNA, 25 bp, Artificial
  Probe
gcaacaagagagtgtacttcgctga

SEQ ID NO: 116457 - DNA, 25 bp, Artificial
  Probe
atgcaacaagagagtgtacttcgct

SEQ ID NO: 116458 - DNA, 25 bp, Artificial
  Probe
cgatgcaacaagagagtgtacttcg

SEQ ID NO: 116459 - DNA, 25 bp, Artificial
  Probe
gctggttcctacatctacgagaagc

SEQ ID NO: 116460 - DNA, 25 bp, Artificial
  Probe
ccaagtgtgacaagaccgtgtactt

SEQ ID NO: 116461 - DNA, 25 bp, Artificial
  Probe
aagtgtgacaagaccgtgtacttcg

SEQ ID NO: 116462 - DNA, 25 bp, Artificial
  Probe
caagaattgttacagattcggaacg

SEQ ID NO: 116463 - DNA, 25 bp, Artificial
  Probe
cacatcttccacagagacagaactc

SEQ ID NO: 116464 - DNA, 25 bp, Artificial
  Probe
ggaaattggatcacggagattctaa

SEQ ID NO: 116465 - DNA, 25 bp, Artificial
  Probe
gaaattggatcacggagattctaaa

SEQ ID NO: 116466 - DNA, 25 bp, Artificial
  Probe
aagaattgttacagattcggaacgt

SEQ ID NO: 116467 - DNA, 25 bp, Artificial
  Probe
acaagaattgttacagattcggaac

SEQ ID NO: 116468 - DNA, 25 bp, Artificial
  Probe
gggaaattggatcacggagattcta

SEQ ID NO: 116469 - DNA, 25 bp, Artificial
  Probe
atcttccacagagacagaactcgat

SEQ ID NO: 116470 - DNA, 25 bp, Artificial
  Probe
acatcttccacagagacagaactcg

SEQ ID NO: 116471 - DNA, 25 bp, Artificial
  Probe
atcacggagattctaaaacattgct

SEQ ID NO: 116472 - DNA, 25 bp, Artificial
  Probe
tcccggtaagttctgttgttaatat

SEQ ID NO: 116473 - DNA, 25 bp, Artificial
  Probe
atcccggtaagttctgttgttaata

SEQ ID NO: 116474 - DNA, 25 bp, Artificial
  Probe
taaatcccggtaagttctgttgtta

SEQ ID NO: 116475 - DNA, 25 bp, Artificial
  Probe
tttctaaatcccggtaagttctgtt

SEQ ID NO: 116476 - DNA, 25 bp, Artificial
  Probe
aatcccggtaagttctgttgttaat

SEQ ID NO: 116477 - DNA, 25 bp, Artificial
  Probe
aaatcccggtaagttctgttgttaa

SEQ ID NO: 116478 - DNA, 25 bp, Artificial
  Probe
gcacatcttccacagagacagaact

SEQ ID NO: 116479 - DNA, 25 bp, Artificial
  Probe
ttctaaatcccggtaagttctgttg

SEQ ID NO: 116480 - DNA, 25 bp, Artificial
  Probe
cccggtaagttctgttgttaatatt

SEQ ID NO: 116481 - DNA, 25 bp, Artificial
  Probe
ctaaatcccggtaagttctgttgtt

SEQ ID NO: 116482 - DNA, 25 bp, Artificial
  Probe
ggatcacggagattctaaaacattg

SEQ ID NO: 116483 - DNA, 25 bp, Artificial
  Probe
tggatcacggagattctaaaacatt

SEQ ID NO: 116484 - DNA, 25 bp, Artificial
  Probe
ttggatcacggagattctaaaacat

SEQ ID NO: 116485 - DNA, 25 bp, Artificial
  Probe
attggatcacggagattctaaaaca

SEQ ID NO: 116486 - DNA, 25 bp, Artificial
  Probe
gatcacggagattctaaaacattgc

SEQ ID NO: 116487 - DNA, 25 bp, Artificial
  Probe
aattggatcacggagattctaaaac

SEQ ID NO: 116488 - DNA, 25 bp, Artificial
  Probe
tcttccacagagacagaactcgatg

SEQ ID NO: 116489 - DNA, 25 bp, Artificial
  Probe
catcttccacagagacagaactcga

SEQ ID NO: 116490 - DNA, 25 bp, Artificial
  Probe
tctaaatcccggtaagttctgttgt

SEQ ID NO: 116491 - DNA, 25 bp, Artificial
  Probe
aaattggatcacggagattctaaaa

SEQ ID NO: 116492 - DNA, 25 bp, Artificial
  Probe
tcacggagattctaaaacattgctc

SEQ ID NO: 116493 - DNA, 25 bp, Artificial
  Probe
ctccaggaaaagttagcgtgtaatg

SEQ ID NO: 116494 - DNA, 25 bp, Artificial
  Probe
acggagattctaaaacattgctcac

SEQ ID NO: 116495 - DNA, 25 bp, Artificial
  Probe
cacggagattctaaaacattgctca

SEQ ID NO: 116496 - DNA, 25 bp, Artificial
  Probe
cttctagacagagcaatctcttgtg

SEQ ID NO: 116497 - DNA, 25 bp, Artificial
  Probe
cacttctagacagagcaatctcttg

SEQ ID NO: 116498 - DNA, 25 bp, Artificial
  Probe
acttctagacagagcaatctcttgt

SEQ ID NO: 116499 - DNA, 25 bp, Artificial
  Probe
ccggtaagttctgttgttaatattt

SEQ ID NO: 116500 - DNA, 25 bp, Artificial
  Probe
ttctagacagagcaatctcttgtgt

SEQ ID NO: 116501 - DNA, 25 bp, Artificial
  Probe
cggagattctaaaacattgctcacc

SEQ ID NO: 116502 - DNA, 25 bp, Artificial
  Probe
agaattgttacagattcggaacgtt

SEQ ID NO: 116503 - DNA, 25 bp, Artificial
  Probe
agagacagaactcgatgcactgatc

SEQ ID NO: 116504 - DNA, 25 bp, Artificial
  Probe
aacaggcacttctagacagagcaat

SEQ ID NO: 116505 - DNA, 25 bp, Artificial
  Probe
aggcacttctagacagagcaatctc

SEQ ID NO: 116506 - DNA, 25 bp, Artificial
  Probe
ctagacagagcaatctcttgtgtcc

SEQ ID NO: 116507 - DNA, 25 bp, Artificial
  Probe
tagacaagaccttggatgaacatac

SEQ ID NO: 116508 - DNA, 25 bp, Artificial
  Probe
ctagacaagaccttggatgaacata

SEQ ID NO: 116509 - DNA, 25 bp, Artificial
  Probe
gaccttggatgaacataccttggaa

SEQ ID NO: 116510 - DNA, 25 bp, Artificial
  Probe
aagaccttggatgaacataccttgg

SEQ ID NO: 116511 - DNA, 25 bp, Artificial
  Probe
acaagaccttggatgaacatacctt

SEQ ID NO: 116512 - DNA, 25 bp, Artificial
  Probe
gaacccgaagaaagaaatcaagaag

SEQ ID NO: 116513 - DNA, 25 bp, Artificial
  Probe
aacccgaagaaagaaatcaagaaga

SEQ ID NO: 116514 - DNA, 25 bp, Artificial
  Probe
agaacccgaagaaagaaatcaagaa

SEQ ID NO: 116515 - DNA, 25 bp, Artificial
  Probe
aagaacccgaagaaagaaatcaaga

SEQ ID NO: 116516 - DNA, 25 bp, Artificial
  Probe
acccgaagaaagaaatcaagaagat

SEQ ID NO: 116517 - DNA, 25 bp, Artificial
  Probe
tcttgaaatagtagtttgacaggga

SEQ ID NO: 116518 - DNA, 25 bp, Artificial
  Probe
tgtgagggagaaataaatgtgcttt

SEQ ID NO: 116519 - DNA, 25 bp, Artificial
  Probe
ttcaaagggtatgtcttcagattcc

SEQ ID NO: 116520 - DNA, 25 bp, Artificial
  Probe
aacacttgagttctgcacagatatt

SEQ ID NO: 116521 - DNA, 25 bp, Artificial
  Probe
caaagggtatgtcttcagattccaa

SEQ ID NO: 116522 - DNA, 25 bp, Artificial
  Probe
cttgaaatagtagtttgacagggaa

SEQ ID NO: 116523 - DNA, 25 bp, Artificial
  Probe
gacaagaccttggatgaacatacct

SEQ ID NO: 116524 - DNA, 25 bp, Artificial
  Probe
agacaagaccttggatgaacatacc

SEQ ID NO: 116525 - DNA, 25 bp, Artificial
  Probe
ttcttgaaatagtagtttgacaggg

SEQ ID NO: 116526 - DNA, 25 bp, Artificial
  Probe
tttcaaagggtatgtcttcagattc

SEQ ID NO: 116527 - DNA, 25 bp, Artificial
  Probe
acacttgagttctgcacagatattc

SEQ ID NO: 116528 - DNA, 25 bp, Artificial
  Probe
agaccttggatgaacataccttgga

SEQ ID NO: 116529 - DNA, 25 bp, Artificial
  Probe
tattcagagtgcctaaacttcaact

SEQ ID NO: 116530 - DNA, 25 bp, Artificial
  Probe
acagatattcagagtgcctaaactt

SEQ ID NO: 116531 - DNA, 25 bp, Artificial
  Probe
agtagtttgacagggaaatcagatg

SEQ ID NO: 116532 - DNA, 25 bp, Artificial
  Probe
agatattcagagtgcctaaacttca

SEQ ID NO: 116533 - DNA, 25 bp, Artificial
  Probe
cagaaataatggatcacagcaagtc

SEQ ID NO: 116534 - DNA, 25 bp, Artificial
  Probe
attcagagtgcctaaacttcaactt

SEQ ID NO: 116535 - DNA, 25 bp, Artificial
  Probe
cagatattcagagtgcctaaacttc

SEQ ID NO: 116536 - DNA, 25 bp, Artificial
  Probe
cacttgagttctgcacagatattca

SEQ ID NO: 116537 - DNA, 25 bp, Artificial
  Probe
caacacttgagttctgcacagatat

SEQ ID NO: 116538 - DNA, 25 bp, Artificial
  Probe
cacagaaataatggatcacagcaag

SEQ ID NO: 116539 - DNA, 25 bp, Artificial
  Probe
tcaaagggtatgtcttcagattcca

SEQ ID NO: 116540 - DNA, 25 bp, Artificial
  Probe
ttgaaatagtagtttgacagggaaa

SEQ ID NO: 116541 - DNA, 25 bp, Artificial
  Probe
tagtagtttgacagggaaatcagat

SEQ ID NO: 116542 - DNA, 25 bp, Artificial
  Probe
atagtagtttgacagggaaatcaga

SEQ ID NO: 116543 - DNA, 25 bp, Artificial
  Probe
atattcagagtgcctaaacttcaac

SEQ ID NO: 116544 - DNA, 25 bp, Artificial
  Probe
acagaaataatggatcacagcaagt

SEQ ID NO: 116545 - DNA, 25 bp, Artificial
  Probe
gatattcagagtgcctaaacttcaa

SEQ ID NO: 116546 - DNA, 25 bp, Artificial
  Probe
ccttggatgaacataccttggaaag

SEQ ID NO: 116547 - DNA, 25 bp, Artificial
  Probe
tgaaatagtagtttgacagggaaat

SEQ ID NO: 116548 - DNA, 25 bp, Artificial
  Probe
acttgagttctgcacagatattcag

SEQ ID NO: 116549 - DNA, 25 bp, Artificial
  Probe
gtagtttgacagggaaatcagatgg

SEQ ID NO: 116550 - DNA, 25 bp, Artificial
  Probe
tagtttgacagggaaatcagatgga

SEQ ID NO: 116551 - DNA, 25 bp, Artificial
  Probe
ttcagagtgcctaaacttcaacttg

SEQ ID NO: 116552 - DNA, 25 bp, Artificial
  Probe
cttgtgtgaccttgtattctattcc

SEQ ID NO: 116553 - DNA, 25 bp, Artificial
  Probe
ccttgtgtgaccttgtattctattc

SEQ ID NO: 116554 - DNA, 25 bp, Artificial
  Probe
ttgtgtgaccttgtattctattccg

SEQ ID NO: 116555 - DNA, 25 bp, Artificial
  Probe
gccttgtgtgaccttgtattctatt

SEQ ID NO: 116556 - DNA, 25 bp, Artificial
  Probe
gtgtgaccttgtattctattccgtg

SEQ ID NO: 116557 - DNA, 25 bp, Artificial
  Probe
tgtgtgaccttgtattctattccgt

SEQ ID NO: 116558 - DNA, 25 bp, Artificial
  Probe
agccttgtgtgaccttgtattctat

SEQ ID NO: 116559 - DNA, 25 bp, Artificial
  Probe
gaagtgaccttacagaccagagatt

SEQ ID NO: 116560 - DNA, 25 bp, Artificial
  Probe
gagccttgtgtgaccttgtattcta

SEQ ID NO: 116561 - DNA, 25 bp, Artificial
  Probe
tgtgaccttgtattctattccgtgg

SEQ ID NO: 116562 - DNA, 25 bp, Artificial
  Probe
tgaagtgaccttacagaccagagat

SEQ ID NO: 116563 - DNA, 25 bp, Artificial
  Probe
taacgactacaggctcagtattgtc

SEQ ID NO: 116564 - DNA, 25 bp, Artificial
  Probe
gtgaccttacagaccagagatttat

SEQ ID NO: 116565 - DNA, 25 bp, Artificial
  Probe
gtaacgactacaggctcagtattgt

SEQ ID NO: 116566 - DNA, 25 bp, Artificial
  Probe
agtgaccttacagaccagagattta

SEQ ID NO: 116567 - DNA, 25 bp, Artificial
  Probe
tgaccttacagaccagagatttatt

SEQ ID NO: 116568 - DNA, 25 bp, Artificial
  Probe
ggtaacgactacaggctcagtattg

SEQ ID NO: 116569 - DNA, 25 bp, Artificial
  Probe
agaactttcagaacatctttcctcc

SEQ ID NO: 116570 - DNA, 25 bp, Artificial
  Probe
aatctttccacttgaccaaataccc

SEQ ID NO: 116571 - DNA, 25 bp, Artificial
  Probe
caatctttccacttgaccaaatacc

SEQ ID NO: 116572 - DNA, 25 bp, Artificial
  Probe
gcaatctttccacttgaccaaatac

SEQ ID NO: 116573 - DNA, 25 bp, Artificial
  Probe
agcaatctttccacttgaccaaata

SEQ ID NO: 116574 - DNA, 25 bp, Artificial
  Probe
tagcaatctttccacttgaccaaat

SEQ ID NO: 116575 - DNA, 25 bp, Artificial
  Probe
aagtgaccttacagaccagagattt

SEQ ID NO: 116576 - DNA, 25 bp, Artificial
  Probe
gaccttacagaccagagatttattt

SEQ ID NO: 116577 - DNA, 25 bp, Artificial
  Probe
tggtaacgactacaggctcagtatt

SEQ ID NO: 116578 - DNA, 25 bp, Artificial
  Probe
ttggtaacgactacaggctcagtat

SEQ ID NO: 116579 - DNA, 25 bp, Artificial
  Probe
gaactttcagaacatctttcctccc

SEQ ID NO: 116580 - DNA, 25 bp, Artificial
  Probe
aactttcagaacatctttcctccct

SEQ ID NO: 116581 - DNA, 25 bp, Artificial
  Probe
ctagcaatctttccacttgaccaaa

SEQ ID NO: 116582 - DNA, 25 bp, Artificial
  Probe
tgtgaaagtcatggaagagtgtaaa

SEQ ID NO: 116583 - DNA, 25 bp, Artificial
  Probe
gtgaaagtcatggaagagtgtaaat

SEQ ID NO: 116584 - DNA, 25 bp, Artificial
  Probe
ctgtgaaagtcatggaagagtgtaa

SEQ ID NO: 116585 - DNA, 25 bp, Artificial
  Probe
aaattaaatctagcccactttgccg

SEQ ID NO: 116586 - DNA, 25 bp, Artificial
  Probe
tttcagaacatctttcctccctcag

SEQ ID NO: 116587 - DNA, 25 bp, Artificial
  Probe
ctttcagaacatctttcctccctca

SEQ ID NO: 116588 - DNA, 25 bp, Artificial
  Probe
actttcagaacatctttcctccctc

SEQ ID NO: 116589 - DNA, 25 bp, Artificial
  Probe
ctgaagtgaccttacagaccagaga

SEQ ID NO: 116590 - DNA, 25 bp, Artificial
  Probe
tctgtgaaagtcatggaagagtgta

SEQ ID NO: 116591 - DNA, 25 bp, Artificial
  Probe
caattgtatgtgtgtactctaagct

SEQ ID NO: 116592 - DNA, 25 bp, Artificial
  Probe
gtgaccttgtattctattccgtggg

SEQ ID NO: 116593 - DNA, 25 bp, Artificial
  Probe
gggactttccattaaagcagtttat

SEQ ID NO: 116594 - DNA, 25 bp, Artificial
  Probe
ttctgtgaaagtcatggaagagtgt

SEQ ID NO: 116595 - DNA, 25 bp, Artificial
  Probe
atctttccacttgaccaaatacccg

SEQ ID NO: 116596 - DNA, 25 bp, Artificial
  Probe
tgaaagtcatggaagagtgtaaata

SEQ ID NO: 116597 - DNA, 25 bp, Artificial
  Probe
aagagaatcaactcactgtcagtac

SEQ ID NO: 116598 - DNA, 25 bp, Artificial
  Probe
gagaatcaactcactgtcagtacct

SEQ ID NO: 116599 - DNA, 25 bp, Artificial
  Probe
agagaatcaactcactgtcagtacc

SEQ ID NO: 116600 - DNA, 25 bp, Artificial
  Probe
agaatcaactcactgtcagtacctg

SEQ ID NO: 116601 - DNA, 25 bp, Artificial
  Probe
aaagagaatcaactcactgtcagta

SEQ ID NO: 116602 - DNA, 25 bp, Artificial
  Probe
cgtgaagagcttatgaggatgctag

SEQ ID NO: 116603 - DNA, 25 bp, Artificial
  Probe
acaggaactggtacattcaggctac

SEQ ID NO: 116604 - DNA, 25 bp, Artificial
  Probe
cacaggaactggtacattcaggcta

SEQ ID NO: 116605 - DNA, 25 bp, Artificial
  Probe
aatcaactcactgtcagtacctgag

SEQ ID NO: 116606 - DNA, 25 bp, Artificial
  Probe
gaatcaactcactgtcagtacctga

SEQ ID NO: 116607 - DNA, 25 bp, Artificial
  Probe
caactcactgtcagtacctgagaag

SEQ ID NO: 116608 - DNA, 25 bp, Artificial
  Probe
aaaagagaatcaactcactgtcagt

SEQ ID NO: 116609 - DNA, 25 bp, Artificial
  Probe
atcaactcactgtcagtacctgaga

SEQ ID NO: 116610 - DNA, 25 bp, Artificial
  Probe
tcaactcactgtcagtacctgagaa

SEQ ID NO: 116611 - DNA, 25 bp, Artificial
  Probe
ccgtgaagagcttatgaggatgcta

SEQ ID NO: 116612 - DNA, 25 bp, Artificial
  Probe
aactcactgtcagtacctgagaagg

SEQ ID NO: 116613 - DNA, 25 bp, Artificial
  Probe
caggaactggtacattcaggctacc

SEQ ID NO: 116614 - DNA, 25 bp, Artificial
  Probe
aggaactggtacattcaggctacct

SEQ ID NO: 116615 - DNA, 25 bp, Artificial
  Probe
tcactgtcagtacctgagaagggat

SEQ ID NO: 116616 - DNA, 25 bp, Artificial
  Probe
gaactggtacattcaggctacctgt

SEQ ID NO: 116617 - DNA, 25 bp, Artificial
  Probe
ctcactgtcagtacctgagaaggga

SEQ ID NO: 116618 - DNA, 25 bp, Artificial
  Probe
ggaactggtacattcaggctacctg

SEQ ID NO: 116619 - DNA, 25 bp, Artificial
  Probe
actcactgtcagtacctgagaaggg

SEQ ID NO: 116620 - DNA, 25 bp, Artificial
  Probe
gcaaggaggaattaatgaagatgag

SEQ ID NO: 116621 - DNA, 25 bp, Artificial
  Probe
ggcaaggaggaattaatgaagatga

SEQ ID NO: 116622 - DNA, 25 bp, Artificial
  Probe
ctggcaaggaggaattaatgaagat

SEQ ID NO: 116623 - DNA, 25 bp, Artificial
  Probe
aggaggaattaatgaagatgagact

SEQ ID NO: 116624 - DNA, 25 bp, Artificial
  Probe
tggcaaggaggaattaatgaagatg

SEQ ID NO: 116625 - DNA, 25 bp, Artificial
  Probe
acaatgctaactgtccaagtctaca

SEQ ID NO: 116626 - DNA, 25 bp, Artificial
  Probe
cttcctactcgctcagacatgatat

SEQ ID NO: 116627 - DNA, 25 bp, Artificial
  Probe
aaggaggaattaatgaagatgagac

SEQ ID NO: 116628 - DNA, 25 bp, Artificial
  Probe
caaggaggaattaatgaagatgaga

SEQ ID NO: 116629 - DNA, 25 bp, Artificial
  Probe
ttcctactcgctcagacatgatatg

SEQ ID NO: 116630 - DNA, 25 bp, Artificial
  Probe
ggaggaattaatgaagatgagactt

SEQ ID NO: 116631 - DNA, 25 bp, Artificial
  Probe
gtccaagtctacagaacaaaccaaa

SEQ ID NO: 116632 - DNA, 25 bp, Artificial
  Probe
acttcctactcgctcagacatgata

SEQ ID NO: 116633 - DNA, 25 bp, Artificial
  Probe
atgctggcaaggaggaattaatgaa

SEQ ID NO: 116634 - DNA, 25 bp, Artificial
  Probe
aaggagatgtctgagtactgtagta

SEQ ID NO: 116635 - DNA, 25 bp, Artificial
  Probe
gctggcaaggaggaattaatgaaga

SEQ ID NO: 116636 - DNA, 25 bp, Artificial
  Probe
caaggagatgtctgagtactgtagt

SEQ ID NO: 116637 - DNA, 25 bp, Artificial
  Probe
taatgaagatgagacttcctactcg

SEQ ID NO: 116638 - DNA, 25 bp, Artificial
  Probe
gatgctggcaaggaggaattaatga

SEQ ID NO: 116639 - DNA, 25 bp, Artificial
  Probe
aatgttcttcatccaagcatgtcgt

SEQ ID NO: 116640 - DNA, 25 bp, Artificial
  Probe
tgctggcaaggaggaattaatgaag

SEQ ID NO: 116641 - DNA, 25 bp, Artificial
  Probe
tgatgctggcaaggaggaattaatg

SEQ ID NO: 116642 - DNA, 25 bp, Artificial
  Probe
gtgatgctggcaaggaggaattaat

SEQ ID NO: 116643 - DNA, 25 bp, Artificial
  Probe
tgtccaagtctacagaacaaaccaa

SEQ ID NO: 116644 - DNA, 25 bp, Artificial
  Probe
cagacatgatatgtggctatgcttg

SEQ ID NO: 116645 - DNA, 25 bp, Artificial
  Probe
tctcttgctctatgagacagataga

SEQ ID NO: 116646 - DNA, 25 bp, Artificial
  Probe
ctctcttgctctatgagacagatag

SEQ ID NO: 116647 - DNA, 25 bp, Artificial
  Probe
tcagacatgatatgtggctatgctt

SEQ ID NO: 116648 - DNA, 25 bp, Artificial
  Probe
aaatgttcttcatccaagcatgtcg

SEQ ID NO: 116649 - DNA, 25 bp, Artificial
  Probe
cctctcttgctctatgagacagata

SEQ ID NO: 116650 - DNA, 25 bp, Artificial
  Probe
gcaaggagatgtctgagtactgtag

SEQ ID NO: 116651 - DNA, 25 bp, Artificial
  Probe
gacttcctactcgctcagacatgat

SEQ ID NO: 116652 - DNA, 25 bp, Artificial
  Probe
ctcagacatgatatgtggctatgct

SEQ ID NO: 116653 - DNA, 25 bp, Artificial
  Probe
aatgaagatgagacttcctactcgc

SEQ ID NO: 116654 - DNA, 25 bp, Artificial
  Probe
atgttcttcatccaagcatgtcgtg

SEQ ID NO: 116655 - DNA, 25 bp, Artificial
  Probe
tccaagtctacagaacaaaccaaaa

SEQ ID NO: 116656 - DNA, 25 bp, Artificial
  Probe
ttaatgaagatgagacttcctactc

SEQ ID NO: 116657 - DNA, 25 bp, Artificial
  Probe
tgcaaggagatgtctgagtactgta

SEQ ID NO: 116658 - DNA, 25 bp, Artificial
  Probe
gatgcaaggagatgtctgagtactg

SEQ ID NO: 116659 - DNA, 25 bp, Artificial
  Probe
ctactcgctcagacatgatatgtgg

SEQ ID NO: 116660 - DNA, 25 bp, Artificial
  Probe
cctactcgctcagacatgatatgtg

SEQ ID NO: 116661 - DNA, 25 bp, Artificial
  Probe
tcctactcgctcagacatgatatgt

SEQ ID NO: 116662 - DNA, 25 bp, Artificial
  Probe
agtgatgctggcaaggaggaattaa

SEQ ID NO: 116663 - DNA, 25 bp, Artificial
  Probe
cttatcaaggagcgtgaaggctatg

SEQ ID NO: 116664 - DNA, 25 bp, Artificial
  Probe
atgaagatgagacttcctactcgct

SEQ ID NO: 116665 - DNA, 25 bp, Artificial
  Probe
taagaacatctctgaggctgaagaa

SEQ ID NO: 116666 - DNA, 25 bp, Artificial
  Probe
ctaagaacatctctgaggctgaaga

SEQ ID NO: 116667 - DNA, 25 bp, Artificial
  Probe
aggagatacagaaggagagaggatg

SEQ ID NO: 116668 - DNA, 25 bp, Artificial
  Probe
caggagatacagaaggagagaggat

SEQ ID NO: 116669 - DNA, 25 bp, Artificial
  Probe
aagaacatctctgaggctgaagaat

SEQ ID NO: 116670 - DNA, 25 bp, Artificial
  Probe
agaacatctctgaggctgaagaatg

SEQ ID NO: 116671 - DNA, 25 bp, Artificial
  Probe
ggagatacagaaggagagaggatgg

SEQ ID NO: 116672 - DNA, 25 bp, Artificial
  Probe
aagttggagaggaaagaagagagag

SEQ ID NO: 116673 - DNA, 25 bp, Artificial
  Probe
gaagttggagaggaaagaagagaga

SEQ ID NO: 116674 - DNA, 25 bp, Artificial
  Probe
agaagttggagaggaaagaagagag

SEQ ID NO: 116675 - DNA, 25 bp, Artificial
  Probe
gagaagttggagaggaaagaagaga

SEQ ID NO: 116676 - DNA, 25 bp, Artificial
  Probe
gctaagaacatctctgaggctgaag

SEQ ID NO: 116677 - DNA, 25 bp, Artificial
  Probe
gagcaggagatacagaaggagagag

SEQ ID NO: 116678 - DNA, 25 bp, Artificial
  Probe
tgagaagttggagaggaaagaagag

SEQ ID NO: 116679 - DNA, 25 bp, Artificial
  Probe
acatctctgaggctgaagaatggta

SEQ ID NO: 116680 - DNA, 25 bp, Artificial
  Probe
catctctgaggctgaagaatggtac

SEQ ID NO: 116681 - DNA, 25 bp, Artificial
  Probe
gaacatctctgaggctgaagaatgg

SEQ ID NO: 116682 - DNA, 25 bp, Artificial
  Probe
ctctgaggctgaagaatggtacaag

SEQ ID NO: 116683 - DNA, 25 bp, Artificial
  Probe
gtgagaagttggagaggaaagaaga

SEQ ID NO: 116684 - DNA, 25 bp, Artificial
  Probe
tgaagaatggtacaagtccaaggtt

SEQ ID NO: 116685 - DNA, 25 bp, Artificial
  Probe
ctgaggctgaagaatggtacaagtc

SEQ ID NO: 116686 - DNA, 25 bp, Artificial
  Probe
atctctgaggctgaagaatggtaca

SEQ ID NO: 116687 - DNA, 25 bp, Artificial
  Probe
tctctgaggctgaagaatggtacaa

SEQ ID NO: 116688 - DNA, 25 bp, Artificial
  Probe
ctgtaagagagaactggaaggtgct

SEQ ID NO: 116689 - DNA, 25 bp, Artificial
  Probe
ctgaagaatggtacaagtccaaggt

SEQ ID NO: 116690 - DNA, 25 bp, Artificial
  Probe
atctttgtgacctctggcttagaag

SEQ ID NO: 116691 - DNA, 25 bp, Artificial
  Probe
gtatgagaccattgcggctaagaac

SEQ ID NO: 116692 - DNA, 25 bp, Artificial
  Probe
tctgaggctgaagaatggtacaagt

SEQ ID NO: 116693 - DNA, 25 bp, Artificial
  Probe
ggtgagaagttggagaggaaagaag

SEQ ID NO: 116694 - DNA, 25 bp, Artificial
  Probe
tgtaagagagaactggaaggtgctg

SEQ ID NO: 116695 - DNA, 25 bp, Artificial
  Probe
aacatctctgaggctgaagaatggt

SEQ ID NO: 116696 - DNA, 25 bp, Artificial
  Probe
cattgcggctaagaacatctctgag

SEQ ID NO: 116697 - DNA, 25 bp, Artificial
  Probe
catctttgtgacctctggcttagaa

SEQ ID NO: 116698 - DNA, 25 bp, Artificial
  Probe
agtatgagaccattgcggctaagaa

SEQ ID NO: 116699 - DNA, 25 bp, Artificial
  Probe
gtaccaggatctgctcaatgtgaag

SEQ ID NO: 116700 - DNA, 25 bp, Artificial
  Probe
gatgatggaataccgacaccagatc

SEQ ID NO: 116701 - DNA, 25 bp, Artificial
  Probe
taccaggatctgctcaatgtgaaga

SEQ ID NO: 116702 - DNA, 25 bp, Artificial
  Probe
agttggagaggaaagaagagagagg

SEQ ID NO: 116703 - DNA, 25 bp, Artificial
  Probe
gagatacagaaggagagaggatggg

SEQ ID NO: 116704 - DNA, 25 bp, Artificial
  Probe
agatgatggaataccgacaccagat

SEQ ID NO: 116705 - DNA, 25 bp, Artificial
  Probe
aagcaggagatgatggaataccgac

SEQ ID NO: 116706 - DNA, 25 bp, Artificial
  Probe
caagcaggagatgatggaataccga

SEQ ID NO: 116707 - DNA, 25 bp, Artificial
  Probe
tatgagaccattgcggctaagaaca

SEQ ID NO: 116708 - DNA, 25 bp, Artificial
  Probe
aagaatggtacaagtccaaggtttc

SEQ ID NO: 116709 - DNA, 25 bp, Artificial
  Probe
gaagaatggtacaagtccaaggttt

SEQ ID NO: 116710 - DNA, 25 bp, Artificial
  Probe
ataatttggtctcctcttggctttg

SEQ ID NO: 116711 - DNA, 25 bp, Artificial
  Probe
cataatttggtctcctcttggcttt

SEQ ID NO: 116712 - DNA, 25 bp, Artificial
  Probe
ctaccagccaatcattgttctgtct

SEQ ID NO: 116713 - DNA, 25 bp, Artificial
  Probe
taccagccaatcattgttctgtctg

SEQ ID NO: 116714 - DNA, 25 bp, Artificial
  Probe
ttcctaccagccaatcattgttctg

SEQ ID NO: 116715 - DNA, 25 bp, Artificial
  Probe
ggatagttctaatttggagagctgt

SEQ ID NO: 116716 - DNA, 25 bp, Artificial
  Probe
gggatagttctaatttggagagctg

SEQ ID NO: 116717 - DNA, 25 bp, Artificial
  Probe
gatagttctaatttggagagctgtt

SEQ ID NO: 116718 - DNA, 25 bp, Artificial
  Probe
taatttggtctcctcttggctttgg

SEQ ID NO: 116719 - DNA, 25 bp, Artificial
  Probe
atagttctaatttggagagctgttt

SEQ ID NO: 116720 - DNA, 25 bp, Artificial
  Probe
cctaccagccaatcattgttctgtc

SEQ ID NO: 116721 - DNA, 25 bp, Artificial
  Probe
cctctttaccaagaagcacagaatt

SEQ ID NO: 116722 - DNA, 25 bp, Artificial
  Probe
ttggctttggggatagttctaattt

SEQ ID NO: 116723 - DNA, 25 bp, Artificial
  Probe
cttggctttggggatagttctaatt

SEQ ID NO: 116724 - DNA, 25 bp, Artificial
  Probe
gctttggggatagttctaatttgga

SEQ ID NO: 116725 - DNA, 25 bp, Artificial
  Probe
ctttggggatagttctaatttggag

SEQ ID NO: 116726 - DNA, 25 bp, Artificial
  Probe
tcctaccagccaatcattgttctgt

SEQ ID NO: 116727 - DNA, 25 bp, Artificial
  Probe
tggctttggggatagttctaatttg

SEQ ID NO: 116728 - DNA, 25 bp, Artificial
  Probe
ttggggatagttctaatttggagag

SEQ ID NO: 116729 - DNA, 25 bp, Artificial
  Probe
tcttggctttggggatagttctaat

SEQ ID NO: 116730 - DNA, 25 bp, Artificial
  Probe
cattgttctgtctgtgccctgatac

SEQ ID NO: 116731 - DNA, 25 bp, Artificial
  Probe
tttggggatagttctaatttggaga

SEQ ID NO: 116732 - DNA, 25 bp, Artificial
  Probe
tgatactgcctcaggattccctatc

SEQ ID NO: 116733 - DNA, 25 bp, Artificial
  Probe
tcctctttaccaagaagcacagaat

SEQ ID NO: 116734 - DNA, 25 bp, Artificial
  Probe
attgttctgtctgtgccctgatact

SEQ ID NO: 116735 - DNA, 25 bp, Artificial
  Probe
ccataatttggtctcctcttggctt

SEQ ID NO: 116736 - DNA, 25 bp, Artificial
  Probe
ggctttggggatagttctaatttgg

SEQ ID NO: 116737 - DNA, 25 bp, Artificial
  Probe
ctcttggctttggggatagttctaa

SEQ ID NO: 116738 - DNA, 25 bp, Artificial
  Probe
ctcctctttaccaagaagcacagaa

SEQ ID NO: 116739 - DNA, 25 bp, Artificial
  Probe
ccagccaatcattgttctgtctgtg

SEQ ID NO: 116740 - DNA, 25 bp, Artificial
  Probe
tggggatagttctaatttggagagc

SEQ ID NO: 116741 - DNA, 25 bp, Artificial
  Probe
tcattgttctgtctgtgccctgata

SEQ ID NO: 116742 - DNA, 25 bp, Artificial
  Probe
tctaatttggagagctgttttacct

SEQ ID NO: 116743 - DNA, 25 bp, Artificial
  Probe
ctctcctctttaccaagaagcacag

SEQ ID NO: 116744 - DNA, 25 bp, Artificial
  Probe
gactctcctctttaccaagaagcac

SEQ ID NO: 116745 - DNA, 25 bp, Artificial
  Probe
ttctaatttggagagctgttttacc

SEQ ID NO: 116746 - DNA, 25 bp, Artificial
  Probe
accagccaatcattgttctgtctgt

SEQ ID NO: 116747 - DNA, 25 bp, Artificial
  Probe
ctaatttggagagctgttttacctc

SEQ ID NO: 116748 - DNA, 25 bp, Artificial
  Probe
ttgttctgtctgtgccctgatactg

SEQ ID NO: 116749 - DNA, 25 bp, Artificial
  Probe
tctcctctttaccaagaagcacaga

SEQ ID NO: 116750 - DNA, 25 bp, Artificial
  Probe
ctctttaccaagaagcacagaattc

SEQ ID NO: 116751 - DNA, 25 bp, Artificial
  Probe
gattccactcggaacctctttataa

SEQ ID NO: 116752 - DNA, 25 bp, Artificial
  Probe
gttctaatttggagagctgttttac

SEQ ID NO: 116753 - DNA, 25 bp, Artificial
  Probe
agttctaatttggagagctgtttta

SEQ ID NO: 116754 - DNA, 25 bp, Artificial
  Probe
tagttctaatttggagagctgtttt

SEQ ID NO: 116755 - DNA, 25 bp, Artificial
  Probe
gtatgttacatgccttctcagaatg

SEQ ID NO: 116756 - DNA, 25 bp, Artificial
  Probe
tgttacatgccttctcagaatgata

SEQ ID NO: 116757 - DNA, 25 bp, Artificial
  Probe
atgttacatgccttctcagaatgat

SEQ ID NO: 116758 - DNA, 25 bp, Artificial
  Probe
tatgttacatgccttctcagaatga

SEQ ID NO: 116759 - DNA, 25 bp, Artificial
  Probe
gttacatgccttctcagaatgatat

SEQ ID NO: 116760 - DNA, 25 bp, Artificial
  Probe
ttacatgccttctcagaatgatatt

SEQ ID NO: 116761 - DNA, 25 bp, Artificial
  Probe
tgtatgttacatgccttctcagaat

SEQ ID NO: 116762 - DNA, 25 bp, Artificial
  Probe
gtgtatgttacatgccttctcagaa

SEQ ID NO: 116763 - DNA, 25 bp, Artificial
  Probe
acatgccttctcagaatgatatttg

SEQ ID NO: 116764 - DNA, 25 bp, Artificial
  Probe
tgtgtatgttacatgccttctcaga

SEQ ID NO: 116765 - DNA, 25 bp, Artificial
  Probe
catgccttctcagaatgatatttga

SEQ ID NO: 116766 - DNA, 25 bp, Artificial
  Probe
aatgtgtatgttacatgccttctca

SEQ ID NO: 116767 - DNA, 25 bp, Artificial
  Probe
tgccttctcagaatgatatttgatt

SEQ ID NO: 116768 - DNA, 25 bp, Artificial
  Probe
atgtgtatgttacatgccttctcag

SEQ ID NO: 116769 - DNA, 25 bp, Artificial
  Probe
atgccttctcagaatgatatttgat

SEQ ID NO: 116770 - DNA, 25 bp, Artificial
  Probe
ttgggcttgttgctttatccatata

SEQ ID NO: 116771 - DNA, 25 bp, Artificial
  Probe
tacagtttgggcttgttgctttatc

SEQ ID NO: 116772 - DNA, 25 bp, Artificial
  Probe
ctcttggatgcccactttatctatg

SEQ ID NO: 116773 - DNA, 25 bp, Artificial
  Probe
tatacctcttggatgcccactttat

SEQ ID NO: 116774 - DNA, 25 bp, Artificial
  Probe
tttgggcttgttgctttatccatat

SEQ ID NO: 116775 - DNA, 25 bp, Artificial
  Probe
tgggcttgttgctttatccatatat

SEQ ID NO: 116776 - DNA, 25 bp, Artificial
  Probe
tacatgccttctcagaatgatattt

SEQ ID NO: 116777 - DNA, 25 bp, Artificial
  Probe
gccttctcagaatgatatttgattt

SEQ ID NO: 116778 - DNA, 25 bp, Artificial
  Probe
cctcttggatgcccactttatctat

SEQ ID NO: 116779 - DNA, 25 bp, Artificial
  Probe
gtttgggcttgttgctttatccata

SEQ ID NO: 116780 - DNA, 25 bp, Artificial
  Probe
atacctcttggatgcccactttatc

SEQ ID NO: 116781 - DNA, 25 bp, Artificial
  Probe
caaatgtgtatgttacatgccttct

SEQ ID NO: 116782 - DNA, 25 bp, Artificial
  Probe
acaaatgtgtatgttacatgccttc

SEQ ID NO: 116783 - DNA, 25 bp, Artificial
  Probe
aaatgtgtatgttacatgccttctc

SEQ ID NO: 116784 - DNA, 25 bp, Artificial
  Probe
acctcttggatgcccactttatcta

SEQ ID NO: 116785 - DNA, 25 bp, Artificial
  Probe
tacctcttggatgcccactttatct

SEQ ID NO: 116786 - DNA, 25 bp, Artificial
  Probe
agtttgggcttgttgctttatccat

SEQ ID NO: 116787 - DNA, 25 bp, Artificial
  Probe
gggcttgttgctttatccatatatg

SEQ ID NO: 116788 - DNA, 25 bp, Artificial
  Probe
acagtttgggcttgttgctttatcc

SEQ ID NO: 116789 - DNA, 25 bp, Artificial
  Probe
ggcttgttgctttatccatatatgt

SEQ ID NO: 116790 - DNA, 25 bp, Artificial
  Probe
aacagacagagctacgcaaggaatc

SEQ ID NO: 116791 - DNA, 25 bp, Artificial
  Probe
tacacgaaaccaccaacagacagag

SEQ ID NO: 116792 - DNA, 25 bp, Artificial
  Probe
gcttgttgctttatccatatatgtg

SEQ ID NO: 116793 - DNA, 25 bp, Artificial
  Probe
caacagacagagctacgcaaggaat

SEQ ID NO: 116794 - DNA, 25 bp, Artificial
  Probe
cagtttgggcttgttgctttatcca

SEQ ID NO: 116795 - DNA, 25 bp, Artificial
  Probe
ctttatccatatatgtgggcctgtc

SEQ ID NO: 116796 - DNA, 25 bp, Artificial
  Probe
ttgttgctttatccatatatgtggg

SEQ ID NO: 116797 - DNA, 25 bp, Artificial
  Probe
tttatccatatatgtgggcctgtct

SEQ ID NO: 116798 - DNA, 25 bp, Artificial
  Probe
tgttgctttatccatatatgtgggc

SEQ ID NO: 116799 - DNA, 25 bp, Artificial
  Probe
ttatccatatatgtgggcctgtctc

SEQ ID NO: 116800 - DNA, 25 bp, Artificial
  Probe
cttgtatgctgtaacctcatctact

SEQ ID NO: 116801 - DNA, 25 bp, Artificial
  Probe
acttgtatgctgtaacctcatctac

SEQ ID NO: 116802 - DNA, 25 bp, Artificial
  Probe
cacttgtatgctgtaacctcatcta

SEQ ID NO: 116803 - DNA, 25 bp, Artificial
  Probe
ttgtatgctgtaacctcatctactt

SEQ ID NO: 116804 - DNA, 25 bp, Artificial
  Probe
acacttgtatgctgtaacctcatct

SEQ ID NO: 116805 - DNA, 25 bp, Artificial
  Probe
cacacttgtatgctgtaacctcatc

SEQ ID NO: 116806 - DNA, 25 bp, Artificial
  Probe
acaagacaagtctcttcatctatgt

SEQ ID NO: 116807 - DNA, 25 bp, Artificial
  Probe
cccagtggtacttctactaaattgt

SEQ ID NO: 116808 - DNA, 25 bp, Artificial
  Probe
aagacaagtctcttcatctatgtga

SEQ ID NO: 116809 - DNA, 25 bp, Artificial
  Probe
caagacaagtctcttcatctatgtg

SEQ ID NO: 116810 - DNA, 25 bp, Artificial
  Probe
cacaagacaagtctcttcatctatg

SEQ ID NO: 116811 - DNA, 25 bp, Artificial
  Probe
ccagtggtacttctactaaattgtc

SEQ ID NO: 116812 - DNA, 25 bp, Artificial
  Probe
gcccagtggtacttctactaaattg

SEQ ID NO: 116813 - DNA, 25 bp, Artificial
  Probe
agcccagtggtacttctactaaatt

SEQ ID NO: 116814 - DNA, 25 bp, Artificial
  Probe
acaaactatgatgactttaaggaga

SEQ ID NO: 116815 - DNA, 25 bp, Artificial
  Probe
agacaagtctcttcatctatgtgaa

SEQ ID NO: 116816 - DNA, 25 bp, Artificial
  Probe
cagcccagtggtacttctactaaat

SEQ ID NO: 116817 - DNA, 25 bp, Artificial
  Probe
cagtggtacttctactaaattgtct

SEQ ID NO: 116818 - DNA, 25 bp, Artificial
  Probe
aacaaactatgatgactttaaggag

SEQ ID NO: 116819 - DNA, 25 bp, Artificial
  Probe
caaactatgatgactttaaggagat

SEQ ID NO: 116820 - DNA, 25 bp, Artificial
  Probe
aaacaaactatgatgactttaagga

SEQ ID NO: 116821 - DNA, 25 bp, Artificial
  Probe
gacaagtctcttcatctatgtgaaa

SEQ ID NO: 116822 - DNA, 25 bp, Artificial
  Probe
atgatgactttaaggagattacaaa

SEQ ID NO: 116823 - DNA, 25 bp, Artificial
  Probe
agtggtacttctactaaattgtcta

SEQ ID NO: 116824 - DNA, 25 bp, Artificial
  Probe
acaagtctcttcatctatgtgaaat

SEQ ID NO: 116825 - DNA, 25 bp, Artificial
  Probe
ctatgatgactttaaggagattaca

SEQ ID NO: 116826 - DNA, 25 bp, Artificial
  Probe
actatgatgactttaaggagattac

SEQ ID NO: 116827 - DNA, 25 bp, Artificial
  Probe
aaactatgatgactttaaggagatt

SEQ ID NO: 116828 - DNA, 25 bp, Artificial
  Probe
gtggtacttctactaaattgtctat

SEQ ID NO: 116829 - DNA, 25 bp, Artificial
  Probe
ccagcccagtggtacttctactaaa

SEQ ID NO: 116830 - DNA, 25 bp, Artificial
  Probe
tatgatgactttaaggagattacaa

SEQ ID NO: 116831 - DNA, 25 bp, Artificial
  Probe
caagtctcttcatctatgtgaaatt

SEQ ID NO: 116832 - DNA, 25 bp, Artificial
  Probe
aactatgatgactttaaggagatta

SEQ ID NO: 116833 - DNA, 25 bp, Artificial
  Probe
tgatgactttaaggagattacaaaa

SEQ ID NO: 116834 - DNA, 25 bp, Artificial
  Probe
tggtacttctactaaattgtctatt

SEQ ID NO: 116835 - DNA, 25 bp, Artificial
  Probe
ggtacttctactaaattgtctattg

SEQ ID NO: 116836 - DNA, 25 bp, Artificial
  Probe
aagtctcttcatctatgtgaaattt

SEQ ID NO: 116837 - DNA, 25 bp, Artificial
  Probe
cccagcccagtggtacttctactaa

SEQ ID NO: 116838 - DNA, 25 bp, Artificial
  Probe
tcttccttattcccctccttcccag

SEQ ID NO: 116839 - DNA, 25 bp, Artificial
  Probe
aattgtcccattgtttgacacccag

SEQ ID NO: 116840 - DNA, 25 bp, Artificial
  Probe
agtctcttcatctatgtgaaatttt

SEQ ID NO: 116841 - DNA, 25 bp, Artificial
  Probe
ctcttcatctatgtgaaattttctg

SEQ ID NO: 116842 - DNA, 25 bp, Artificial
  Probe
gtctcttcatctatgtgaaattttc

SEQ ID NO: 116843 - DNA, 25 bp, Artificial
  Probe
tctcttcatctatgtgaaattttct

SEQ ID NO: 116844 - DNA, 25 bp, Artificial
  Probe
attgtcccattgtttgacacccagt

SEQ ID NO: 116845 - DNA, 25 bp, Artificial
  Probe
taacgattaaacaaacatcactggt

SEQ ID NO: 116846 - DNA, 25 bp, Artificial
  Probe
aacgattaaacaaacatcactggtg

SEQ ID NO: 116847 - DNA, 25 bp, Artificial
  Probe
ccgtagaaaccatgctcacttaata

SEQ ID NO: 116848 - DNA, 25 bp, Artificial
  Probe
cgtagaaaccatgctcacttaataa

SEQ ID NO: 116849 - DNA, 25 bp, Artificial
  Probe
ttaacgattaaacaaacatcactgg

SEQ ID NO: 116850 - DNA, 25 bp, Artificial
  Probe
accttaacgattaaacaaacatcac

SEQ ID NO: 116851 - DNA, 25 bp, Artificial
  Probe
ccttaacgattaaacaaacatcact

SEQ ID NO: 116852 - DNA, 25 bp, Artificial
  Probe
gattaaacaaacatcactggtgaca

SEQ ID NO: 116853 - DNA, 25 bp, Artificial
  Probe
aagagcaaagtcctatgacagagtt

SEQ ID NO: 116854 - DNA, 25 bp, Artificial
  Probe
cgattaaacaaacatcactggtgac

SEQ ID NO: 116855 - DNA, 25 bp, Artificial
  Probe
aaccttaacgattaaacaaacatca

SEQ ID NO: 116856 - DNA, 25 bp, Artificial
  Probe
acgattaaacaaacatcactggtga

SEQ ID NO: 116857 - DNA, 25 bp, Artificial
  Probe
attaaacaaacatcactggtgacag

SEQ ID NO: 116858 - DNA, 25 bp, Artificial
  Probe
gaagagcaaagtcctatgacagagt

SEQ ID NO: 116859 - DNA, 25 bp, Artificial
  Probe
ttaaacaaacatcactggtgacaga

SEQ ID NO: 116860 - DNA, 25 bp, Artificial
  Probe
cttaacgattaaacaaacatcactg

SEQ ID NO: 116861 - DNA, 25 bp, Artificial
  Probe
gcaagccctatgtgaagagtgtaaa

SEQ ID NO: 116862 - DNA, 25 bp, Artificial
  Probe
agagcaaagtcctatgacagagttg

SEQ ID NO: 116863 - DNA, 25 bp, Artificial
  Probe
taaacaaacatcactggtgacagag

SEQ ID NO: 116864 - DNA, 25 bp, Artificial
  Probe
gggacctgttggtagaagttataaa

SEQ ID NO: 116865 - DNA, 25 bp, Artificial
  Probe
agggacctgttggtagaagttataa

SEQ ID NO: 116866 - DNA, 25 bp, Artificial
  Probe
gtagaaaccatgctcacttaataaa

SEQ ID NO: 116867 - DNA, 25 bp, Artificial
  Probe
aatgagtaccttcagcggcttattt

SEQ ID NO: 116868 - DNA, 25 bp, Artificial
  Probe
aaatgagtaccttcagcggcttatt

SEQ ID NO: 116869 - DNA, 25 bp, Artificial
  Probe
aagccctatgtgaagagtgtaaaat

SEQ ID NO: 116870 - DNA, 25 bp, Artificial
  Probe
caatatacacggaaagtcaaaacct

SEQ ID NO: 116871 - DNA, 25 bp, Artificial
  Probe
ccaatatacacggaaagtcaaaacc

SEQ ID NO: 116872 - DNA, 25 bp, Artificial
  Probe
cccaatatacacggaaagtcaaaac

SEQ ID NO: 116873 - DNA, 25 bp, Artificial
  Probe
atggaagagcaaagtcctatgacag

SEQ ID NO: 116874 - DNA, 25 bp, Artificial
  Probe
gatggaagagcaaagtcctatgaca

SEQ ID NO: 116875 - DNA, 25 bp, Artificial
  Probe
aaaccttaacgattaaacaaacatc

SEQ ID NO: 116876 - DNA, 25 bp, Artificial
  Probe
agccctatgtgaagagtgtaaaatt

SEQ ID NO: 116877 - DNA, 25 bp, Artificial
  Probe
caagccctatgtgaagagtgtaaaa

SEQ ID NO: 116878 - DNA, 25 bp, Artificial
  Probe
tatacacggaaagtcaaaaccttca

SEQ ID NO: 116879 - DNA, 25 bp, Artificial
  Probe
cagataaatgctgtgctatagggtg

SEQ ID NO: 116880 - DNA, 25 bp, Artificial
  Probe
atatacacggaaagtcaaaaccttc

SEQ ID NO: 116881 - DNA, 25 bp, Artificial
  Probe
ggaagagcaaagtcctatgacagag

SEQ ID NO: 116882 - DNA, 25 bp, Artificial
  Probe
ccccaatatacacggaaagtcaaaa

SEQ ID NO: 116883 - DNA, 25 bp, Artificial
  Probe
cagggacctgttggtagaagttata

SEQ ID NO: 116884 - DNA, 25 bp, Artificial
  Probe
aacaaacatcactggtgacagagat

SEQ ID NO: 116885 - DNA, 25 bp, Artificial
  Probe
atacacggaaagtcaaaaccttcaa

SEQ ID NO: 116886 - DNA, 25 bp, Artificial
  Probe
aatatacacggaaagtcaaaacctt

SEQ ID NO: 116887 - DNA, 25 bp, Artificial
  Probe
tttcgcagataaatgctgtgctata

SEQ ID NO: 116888 - DNA, 25 bp, Artificial
  Probe
aaacaaacatcactggtgacagaga

SEQ ID NO: 116889 - DNA, 25 bp, Artificial
  Probe
aagaaagcaacacacacttgggaat

SEQ ID NO: 116890 - DNA, 25 bp, Artificial
  Probe
gaagaagtaacatcatctgctgtga

SEQ ID NO: 116891 - DNA, 25 bp, Artificial
  Probe
ggaagaagtaacatcatctgctgtg

SEQ ID NO: 116892 - DNA, 25 bp, Artificial
  Probe
aagaagtaacatcatctgctgtgat

SEQ ID NO: 116893 - DNA, 25 bp, Artificial
  Probe
agaagtaacatcatctgctgtgata

SEQ ID NO: 116894 - DNA, 25 bp, Artificial
  Probe
gaagtaacatcatctgctgtgatat

SEQ ID NO: 116895 - DNA, 25 bp, Artificial
  Probe
tgggaagaagtaacatcatctgctg

SEQ ID NO: 116896 - DNA, 25 bp, Artificial
  Probe
gggaagaagtaacatcatctgctgt

SEQ ID NO: 116897 - DNA, 25 bp, Artificial
  Probe
caaaatcacttccccacattccatg

SEQ ID NO: 116898 - DNA, 25 bp, Artificial
  Probe
gcaaaatcacttccccacattccat

SEQ ID NO: 116899 - DNA, 25 bp, Artificial
  Probe
catgcaaaatcacttccccacattc

SEQ ID NO: 116900 - DNA, 25 bp, Artificial
  Probe
aaaatcacttccccacattccatgt

SEQ ID NO: 116901 - DNA, 25 bp, Artificial
  Probe
atgcaaaatcacttccccacattcc

SEQ ID NO: 116902 - DNA, 25 bp, Artificial
  Probe
taagtccccaggctagagagttctg

SEQ ID NO: 116903 - DNA, 25 bp, Artificial
  Probe
tgcaaaatcacttccccacattcca

SEQ ID NO: 116904 - DNA, 25 bp, Artificial
  Probe
gagattccatttgtccagtagattg

SEQ ID NO: 116905 - DNA, 25 bp, Artificial
  Probe
agattccatttgtccagtagattgc

SEQ ID NO: 116906 - DNA, 25 bp, Artificial
  Probe
cttcatcttggcacagaaattgttc

SEQ ID NO: 116907 - DNA, 25 bp, Artificial
  Probe
tcttcatcttggcacagaaattgtt

SEQ ID NO: 116908 - DNA, 25 bp, Artificial
  Probe
taaggagattccatttgtccagtag

SEQ ID NO: 116909 - DNA, 25 bp, Artificial
  Probe
gtaaggagattccatttgtccagta

SEQ ID NO: 116910 - DNA, 25 bp, Artificial
  Probe
ggagattccatttgtccagtagatt

SEQ ID NO: 116911 - DNA, 25 bp, Artificial
  Probe
ttcatcttggcacagaaattgttca

SEQ ID NO: 116912 - DNA, 25 bp, Artificial
  Probe
ctcttcatcttggcacagaaattgt

SEQ ID NO: 116913 - DNA, 25 bp, Artificial
  Probe
aggagattccatttgtccagtagat

SEQ ID NO: 116914 - DNA, 25 bp, Artificial
  Probe
cctcttcatcttggcacagaaattg

SEQ ID NO: 116915 - DNA, 25 bp, Artificial
  Probe
aaggagattccatttgtccagtaga

SEQ ID NO: 116916 - DNA, 25 bp, Artificial
  Probe
tcctcttcatcttggcacagaaatt

SEQ ID NO: 116917 - DNA, 25 bp, Artificial
  Probe
tcatcttggcacagaaattgttcag

SEQ ID NO: 116918 - DNA, 25 bp, Artificial
  Probe
ctcctcttcatcttggcacagaaat

SEQ ID NO: 116919 - DNA, 25 bp, Artificial
  Probe
gattccatttgtccagtagattgca

SEQ ID NO: 116920 - DNA, 25 bp, Artificial
  Probe
atttgtccagtagattgcacgttag

SEQ ID NO: 116921 - DNA, 25 bp, Artificial
  Probe
catttgtccagtagattgcacgtta

SEQ ID NO: 116922 - DNA, 25 bp, Artificial
  Probe
attccatttgtccagtagattgcac

SEQ ID NO: 116923 - DNA, 25 bp, Artificial
  Probe
tgtatatttggcagattaaacaaca

SEQ ID NO: 116924 - DNA, 25 bp, Artificial
  Probe
catcttggcacagaaattgttcagg

SEQ ID NO: 116925 - DNA, 25 bp, Artificial
  Probe
cgtaaggagattccatttgtccagt

SEQ ID NO: 116926 - DNA, 25 bp, Artificial
  Probe
ttgtccagtagattgcacgttagtg

SEQ ID NO: 116927 - DNA, 25 bp, Artificial
  Probe
tttgtccagtagattgcacgttagt

SEQ ID NO: 116928 - DNA, 25 bp, Artificial
  Probe
gacagcatttcatacgtaaccattt

SEQ ID NO: 116929 - DNA, 25 bp, Artificial
  Probe
acagcatttcatacgtaaccatttg

SEQ ID NO: 116930 - DNA, 25 bp, Artificial
  Probe
gaagtggcgtaaggagattccattt

SEQ ID NO: 116931 - DNA, 25 bp, Artificial
  Probe
tttgagacagaaagatgcaggacag

SEQ ID NO: 116932 - DNA, 25 bp, Artificial
  Probe
gtatatttggcagattaaacaacat

SEQ ID NO: 116933 - DNA, 25 bp, Artificial
  Probe
cagcatttcatacgtaaccatttga

SEQ ID NO: 116934 - DNA, 25 bp, Artificial
  Probe
gtccagtagattgcacgttagtgtg

SEQ ID NO: 116935 - DNA, 25 bp, Artificial
  Probe
atcttggcacagaaattgttcaggg

SEQ ID NO: 116936 - DNA, 25 bp, Artificial
  Probe
ggacagcatttcatacgtaaccatt

SEQ ID NO: 116937 - DNA, 25 bp, Artificial
  Probe
aagtggcgtaaggagattccatttg

SEQ ID NO: 116938 - DNA, 25 bp, Artificial
  Probe
gcgtaaggagattccatttgtccag

SEQ ID NO: 116939 - DNA, 25 bp, Artificial
  Probe
tgtccagtagattgcacgttagtgt

SEQ ID NO: 116940 - DNA, 25 bp, Artificial
  Probe
ttccatttgtccagtagattgcacg

SEQ ID NO: 116941 - DNA, 25 bp, Artificial
  Probe
aggacagcatttcatacgtaaccat

SEQ ID NO: 116942 - DNA, 25 bp, Artificial
  Probe
cctcctcttcatcttggcacagaaa

SEQ ID NO: 116943 - DNA, 25 bp, Artificial
  Probe
ccatttgtccagtagattgcacgtt

SEQ ID NO: 116944 - DNA, 25 bp, Artificial
  Probe
tatttggcagattaaacaacattat

SEQ ID NO: 116945 - DNA, 25 bp, Artificial
  Probe
atatttggcagattaaacaacatta

SEQ ID NO: 116946 - DNA, 25 bp, Artificial
  Probe
tatatttggcagattaaacaacatt

SEQ ID NO: 116947 - DNA, 25 bp, Artificial
  Probe
gtggcgtaaggagattccatttgtc

SEQ ID NO: 116948 - DNA, 25 bp, Artificial
  Probe
ctttgagacagaaagatgcaggaca

SEQ ID NO: 116949 - DNA, 25 bp, Artificial
  Probe
acaattctcatataggctgcttacc

SEQ ID NO: 116950 - DNA, 25 bp, Artificial
  Probe
tacaattctcatataggctgcttac

SEQ ID NO: 116951 - DNA, 25 bp, Artificial
  Probe
aatgaacaccaactacatgatgaga

SEQ ID NO: 116952 - DNA, 25 bp, Artificial
  Probe
gaatgaacaccaactacatgatgag

SEQ ID NO: 116953 - DNA, 25 bp, Artificial
  Probe
aaggaatgaacaccaactacatgat

SEQ ID NO: 116954 - DNA, 25 bp, Artificial
  Probe
atgaacaccaactacatgatgagag

SEQ ID NO: 116955 - DNA, 25 bp, Artificial
  Probe
caactacatgatgagaggacagatg

SEQ ID NO: 116956 - DNA, 25 bp, Artificial
  Probe
ggaatgaacaccaactacatgatga

SEQ ID NO: 116957 - DNA, 25 bp, Artificial
  Probe
aggaatgaacaccaactacatgatg

SEQ ID NO: 116958 - DNA, 25 bp, Artificial
  Probe
ccaactacatgatgagaggacagat

SEQ ID NO: 116959 - DNA, 25 bp, Artificial
  Probe
gaacaccaactacatgatgagagga

SEQ ID NO: 116960 - DNA, 25 bp, Artificial
  Probe
atacaattctcatataggctgctta

SEQ ID NO: 116961 - DNA, 25 bp, Artificial
  Probe
tatacaattctcatataggctgctt

SEQ ID NO: 116962 - DNA, 25 bp, Artificial
  Probe
aacaccaactacatgatgagaggac

SEQ ID NO: 116963 - DNA, 25 bp, Artificial
  Probe
tgaacaccaactacatgatgagagg

SEQ ID NO: 116964 - DNA, 25 bp, Artificial
  Probe
aactacatgatgagaggacagatgc

SEQ ID NO: 116965 - DNA, 25 bp, Artificial
  Probe
tgaagatgagtaaagagaaccttgg

SEQ ID NO: 116966 - DNA, 25 bp, Artificial
  Probe
gcagataggagtctttgattctttg

SEQ ID NO: 116967 - DNA, 25 bp, Artificial
  Probe
ggcagataggagtctttgattcttt

SEQ ID NO: 116968 - DNA, 25 bp, Artificial
  Probe
caattctcatataggctgcttaccc

SEQ ID NO: 116969 - DNA, 25 bp, Artificial
  Probe
gagtctttgattctttgagttcacc

SEQ ID NO: 116970 - DNA, 25 bp, Artificial
  Probe
ggagtctttgattctttgagttcac

SEQ ID NO: 116971 - DNA, 25 bp, Artificial
  Probe
aggagtctttgattctttgagttca

SEQ ID NO: 116972 - DNA, 25 bp, Artificial
  Probe
taggagtctttgattctttgagttc

SEQ ID NO: 116973 - DNA, 25 bp, Artificial
  Probe
caccaactacatgatgagaggacag

SEQ ID NO: 116974 - DNA, 25 bp, Artificial
  Probe
agtctttgattctttgagttcacct

SEQ ID NO: 116975 - DNA, 25 bp, Artificial
  Probe
ttgaagatgagtaaagagaaccttg

SEQ ID NO: 116976 - DNA, 25 bp, Artificial
  Probe
aggcagataggagtctttgattctt

SEQ ID NO: 116977 - DNA, 25 bp, Artificial
  Probe
accaactacatgatgagaggacaga

SEQ ID NO: 116978 - DNA, 25 bp, Artificial
  Probe
gataggagtctttgattctttgagt

SEQ ID NO: 116979 - DNA, 25 bp, Artificial
  Probe
gtctttgattctttgagttcaccta

SEQ ID NO: 116980 - DNA, 25 bp, Artificial
  Probe
ttctggtggagtatacaattctcat

SEQ ID NO: 116981 - DNA, 25 bp, Artificial
  Probe
tttgattctttgagttcacctaaca

SEQ ID NO: 116982 - DNA, 25 bp, Artificial
  Probe
gaggcagataggagtctttgattct

SEQ ID NO: 116983 - DNA, 25 bp, Artificial
  Probe
cagataggagtctttgattctttga

SEQ ID NO: 116984 - DNA, 25 bp, Artificial
  Probe
gtatacaattctcatataggctgct

SEQ ID NO: 116985 - DNA, 25 bp, Artificial
  Probe
agtatacaattctcatataggctgc

SEQ ID NO: 116986 - DNA, 25 bp, Artificial
  Probe
aaaggaatgaacaccaactacatga

SEQ ID NO: 116987 - DNA, 25 bp, Artificial
  Probe
caaaggaatgaacaccaactacatg

SEQ ID NO: 116988 - DNA, 25 bp, Artificial
  Probe
ataggagtctttgattctttgagtt

SEQ ID NO: 116989 - DNA, 25 bp, Artificial
  Probe
tttgaagatgagtaaagagaacctt

SEQ ID NO: 116990 - DNA, 25 bp, Artificial
  Probe
tgaggcagataggagtctttgattc

SEQ ID NO: 116991 - DNA, 25 bp, Artificial
  Probe
ctttgattctttgagttcacctaac

SEQ ID NO: 116992 - DNA, 25 bp, Artificial
  Probe
agataggagtctttgattctttgag

SEQ ID NO: 116993 - DNA, 25 bp, Artificial
  Probe
tctttgattctttgagttcacctaa

SEQ ID NO: 116994 - DNA, 25 bp, Artificial
  Probe
tggtagaggtgttatgtataatgct

SEQ ID NO: 116995 - DNA, 25 bp, Artificial
  Probe
ttggtagaggtgttatgtataatgc

SEQ ID NO: 116996 - DNA, 25 bp, Artificial
  Probe
ggtagaggtgttatgtataatgctt

SEQ ID NO: 116997 - DNA, 25 bp, Artificial
  Probe
caagacaagtgaagtcaactgttac

SEQ ID NO: 116998 - DNA, 25 bp, Artificial
  Probe
aagacaagtgaagtcaactgttacc

SEQ ID NO: 116999 - DNA, 25 bp, Artificial
  Probe
tcgtctcttcctgacatctgttatc

SEQ ID NO: 117000 - DNA, 25 bp, Artificial
  Probe
ctcgtctcttcctgacatctgttat

SEQ ID NO: 117001 - DNA, 25 bp, Artificial
  Probe
gcaagacaagtgaagtcaactgtta

SEQ ID NO: 117002 - DNA, 25 bp, Artificial
  Probe
aactgtgtttcatttgctgtaatca

SEQ ID NO: 117003 - DNA, 25 bp, Artificial
  Probe
catcttgccaaggattgtgatcttc

SEQ ID NO: 117004 - DNA, 25 bp, Artificial
  Probe
caactgtgtttcatttgctgtaatc

SEQ ID NO: 117005 - DNA, 25 bp, Artificial
  Probe
ctcttcctgacatctgttatcgctg

SEQ ID NO: 117006 - DNA, 25 bp, Artificial
  Probe
tctcttcctgacatctgttatcgct

SEQ ID NO: 117007 - DNA, 25 bp, Artificial
  Probe
atcttgccaaggattgtgatcttca

SEQ ID NO: 117008 - DNA, 25 bp, Artificial
  Probe
tcatcttgccaaggattgtgatctt

SEQ ID NO: 117009 - DNA, 25 bp, Artificial
  Probe
aagacaaatgtgttgaaggatatgc

SEQ ID NO: 117010 - DNA, 25 bp, Artificial
  Probe
agaggtgttatgtataatgctttgt

SEQ ID NO: 117011 - DNA, 25 bp, Artificial
  Probe
tgtgtttcatttgctgtaatcagtt

SEQ ID NO: 117012 - DNA, 25 bp, Artificial
  Probe
cgtctcttcctgacatctgttatcg

SEQ ID NO: 117013 - DNA, 25 bp, Artificial
  Probe
ctgtgtttcatttgctgtaatcagt

SEQ ID NO: 117014 - DNA, 25 bp, Artificial
  Probe
actgtgtttcatttgctgtaatcag

SEQ ID NO: 117015 - DNA, 25 bp, Artificial
  Probe
agacaagtgaagtcaactgttaccg

SEQ ID NO: 117016 - DNA, 25 bp, Artificial
  Probe
gtgtttcatttgctgtaatcagttt

SEQ ID NO: 117017 - DNA, 25 bp, Artificial
  Probe
gtaaacatccgatgctcagagttag

SEQ ID NO: 117018 - DNA, 25 bp, Artificial
  Probe
agcaagacaagtgaagtcaactgtt

SEQ ID NO: 117019 - DNA, 25 bp, Artificial
  Probe
gtctcttcctgacatctgttatcgc

SEQ ID NO: 117020 - DNA, 25 bp, Artificial
  Probe
gaggtgttatgtataatgctttgtt

SEQ ID NO: 117021 - DNA, 25 bp, Artificial
  Probe
agtaaacatccgatgctcagagtta

SEQ ID NO: 117022 - DNA, 25 bp, Artificial
  Probe
agacaaatgtgttgaaggatatgcc

SEQ ID NO: 117023 - DNA, 25 bp, Artificial
  Probe
gtcatcttgccaaggattgtgatct

SEQ ID NO: 117024 - DNA, 25 bp, Artificial
  Probe
acaaatgtgttgaaggatatgccag

SEQ ID NO: 117025 - DNA, 25 bp, Artificial
  Probe
gacaaatgtgttgaaggatatgcca

SEQ ID NO: 117026 - DNA, 25 bp, Artificial
  Probe
aaagacaaatgtgttgaaggatatg

SEQ ID NO: 117027 - DNA, 25 bp, Artificial
  Probe
cttcctgacatctgttatcgctgtg

SEQ ID NO: 117028 - DNA, 25 bp, Artificial
  Probe
tttagtttggtagaggtgttatgta

SEQ ID NO: 117029 - DNA, 25 bp, Artificial
  Probe
cctcgtctcttcctgacatctgtta

SEQ ID NO: 117030 - DNA, 25 bp, Artificial
  Probe
caaatgtgttgaaggatatgccagg

SEQ ID NO: 117031 - DNA, 25 bp, Artificial
  Probe
tcttcctgacatctgttatcgctgt

SEQ ID NO: 117032 - DNA, 25 bp, Artificial
  Probe
ttagtttggtagaggtgttatgtat

SEQ ID NO: 117033 - DNA, 25 bp, Artificial
  Probe
ttccagtttgtttcctcgtctcttc

SEQ ID NO: 117034 - DNA, 25 bp, Artificial
  Probe
agtttggtagaggtgttatgtataa

SEQ ID NO: 117035 - DNA, 25 bp, Artificial
  Probe
gattgtctgacctcagtagctatta

SEQ ID NO: 117036 - DNA, 25 bp, Artificial
  Probe
cagcaagacaagtgaagtcaactgt

SEQ ID NO: 117037 - DNA, 25 bp, Artificial
  Probe
attgtctgacctcagtagctattaa

SEQ ID NO: 117038 - DNA, 25 bp, Artificial
  Probe
gatagagggttccagtttgtttcct

SEQ ID NO: 117039 - DNA, 25 bp, Artificial
  Probe
aagaatatctgtgagaactccaaga

SEQ ID NO: 117040 - DNA, 25 bp, Artificial
  Probe
agaagaatatctgtgagaactccaa

SEQ ID NO: 117041 - DNA, 25 bp, Artificial
  Probe
gaagaatatctgtgagaactccaag

SEQ ID NO: 117042 - DNA, 25 bp, Artificial
  Probe
agaatatctgtgagaactccaagag

SEQ ID NO: 117043 - DNA, 25 bp, Artificial
  Probe
atcatgctaacgaagtcagagagag

SEQ ID NO: 117044 - DNA, 25 bp, Artificial
  Probe
taagacacaaacatttccaatacgg

SEQ ID NO: 117045 - DNA, 25 bp, Artificial
  Probe
ccactaagacacaaacatttccaat

SEQ ID NO: 117046 - DNA, 25 bp, Artificial
  Probe
taaatacgacaaagaccagacctac

SEQ ID NO: 117047 - DNA, 25 bp, Artificial
  Probe
ctaggttcatataagcagtggatat

SEQ ID NO: 117048 - DNA, 25 bp, Artificial
  Probe
catcatgctaacgaagtcagagaga

SEQ ID NO: 117049 - DNA, 25 bp, Artificial
  Probe
ttaaatacgacaaagaccagaccta

SEQ ID NO: 117050 - DNA, 25 bp, Artificial
  Probe
gataataaagttctgggcattctca

SEQ ID NO: 117051 - DNA, 25 bp, Artificial
  Probe
cttaaatacgacaaagaccagacct

SEQ ID NO: 117052 - DNA, 25 bp, Artificial
  Probe
acatcatgctaacgaagtcagagag

SEQ ID NO: 117053 - DNA, 25 bp, Artificial
  Probe
ctaagacacaaacatttccaatacg

SEQ ID NO: 117054 - DNA, 25 bp, Artificial
  Probe
gttcccactaagacacaaacatttc

SEQ ID NO: 117055 - DNA, 25 bp, Artificial
  Probe
catgctaacgaagtcagagagagag

SEQ ID NO: 117056 - DNA, 25 bp, Artificial
  Probe
atccaagtgataatgtccatgcaag

SEQ ID NO: 117057 - DNA, 25 bp, Artificial
  Probe
ttcccactaagacacaaacatttcc

SEQ ID NO: 117058 - DNA, 25 bp, Artificial
  Probe
aaatacgacaaagaccagacctact

SEQ ID NO: 117059 - DNA, 25 bp, Artificial
  Probe
cacatcatgctaacgaagtcagaga

SEQ ID NO: 117060 - DNA, 25 bp, Artificial
  Probe
caaggaattgttggctgtatttacc

SEQ ID NO: 117061 - DNA, 25 bp, Artificial
  Probe
cccactaagacacaaacatttccaa

SEQ ID NO: 117062 - DNA, 25 bp, Artificial
  Probe
catccaagtgataatgtccatgcaa

SEQ ID NO: 117063 - DNA, 25 bp, Artificial
  Probe
ccttaaatacgacaaagaccagacc

SEQ ID NO: 117064 - DNA, 25 bp, Artificial
  Probe
agataataaagttctgggcattctc

SEQ ID NO: 117065 - DNA, 25 bp, Artificial
  Probe
tcatgctaacgaagtcagagagaga

SEQ ID NO: 117066 - DNA, 25 bp, Artificial
  Probe
gcaaggaattgttggctgtatttac

SEQ ID NO: 117067 - DNA, 25 bp, Artificial
  Probe
ggttcccactaagacacaaacattt

SEQ ID NO: 117068 - DNA, 25 bp, Artificial
  Probe
aagacacaaacatttccaatacggg

SEQ ID NO: 117069 - DNA, 25 bp, Artificial
  Probe
caagataataaagttctgggcattc

SEQ ID NO: 117070 - DNA, 25 bp, Artificial
  Probe
aagataataaagttctgggcattct

SEQ ID NO: 117071 - DNA, 25 bp, Artificial
  Probe
gataatgtccatgcaaggaattgtt

SEQ ID NO: 117072 - DNA, 25 bp, Artificial
  Probe
ataatgtccatgcaaggaattgttg

SEQ ID NO: 117073 - DNA, 25 bp, Artificial
  Probe
gccttaaatacgacaaagaccagac

SEQ ID NO: 117074 - DNA, 25 bp, Artificial
  Probe
actaagacacaaacatttccaatac

SEQ ID NO: 117075 - DNA, 25 bp, Artificial
  Probe
cactaagacacaaacatttccaata

SEQ ID NO: 117076 - DNA, 25 bp, Artificial
  Probe
gtgataatgtccatgcaaggaattg

SEQ ID NO: 117077 - DNA, 25 bp, Artificial
  Probe
agtgataatgtccatgcaaggaatt

SEQ ID NO: 117078 - DNA, 25 bp, Artificial
  Probe
aagtgataatgtccatgcaaggaat

SEQ ID NO: 117079 - DNA, 25 bp, Artificial
  Probe
tcccactaagacacaaacatttcca

SEQ ID NO: 117080 - DNA, 25 bp, Artificial
  Probe
ataataaagttctgggcattctcag

SEQ ID NO: 117081 - DNA, 25 bp, Artificial
  Probe
tgataatgtccatgcaaggaattgt

SEQ ID NO: 117082 - DNA, 25 bp, Artificial
  Probe
cttctgcacattcttcctcaacatg

SEQ ID NO: 117083 - DNA, 25 bp, Artificial
  Probe
tgccttaaatacgacaaagaccaga

SEQ ID NO: 117084 - DNA, 25 bp, Artificial
  Probe
gtgtaatcctccatcatctctcatt

SEQ ID NO: 117085 - DNA, 25 bp, Artificial
  Probe
agtgtaatcctccatcatctctcat

SEQ ID NO: 117086 - DNA, 25 bp, Artificial
  Probe
aatcctccatcatctctcattactc

SEQ ID NO: 117087 - DNA, 25 bp, Artificial
  Probe
gagatgtaatcagtgtggagaagac

SEQ ID NO: 117088 - DNA, 25 bp, Artificial
  Probe
atcctccatcatctctcattactcg

SEQ ID NO: 117089 - DNA, 25 bp, Artificial
  Probe
aaggagatgtaatcagtgtggagaa

SEQ ID NO: 117090 - DNA, 25 bp, Artificial
  Probe
ggagatgtaatcagtgtggagaaga

SEQ ID NO: 117091 - DNA, 25 bp, Artificial
  Probe
aggagatgtaatcagtgtggagaag

SEQ ID NO: 117092 - DNA, 25 bp, Artificial
  Probe
agatgtaatcagtgtggagaagact

SEQ ID NO: 117093 - DNA, 25 bp, Artificial
  Probe
tgtaatcctccatcatctctcatta

SEQ ID NO: 117094 - DNA, 25 bp, Artificial
  Probe
gagtgtaatcctccatcatctctca

SEQ ID NO: 117095 - DNA, 25 bp, Artificial
  Probe
taatcctccatcatctctcattact

SEQ ID NO: 117096 - DNA, 25 bp, Artificial
  Probe
cacaatccaactcagtatgaagagc

SEQ ID NO: 117097 - DNA, 25 bp, Artificial
  Probe
gcacaatccaactcagtatgaagag

SEQ ID NO: 117098 - DNA, 25 bp, Artificial
  Probe
gagcacaatccaactcagtatgaag

SEQ ID NO: 117099 - DNA, 25 bp, Artificial
  Probe
agcacaatccaactcagtatgaaga

SEQ ID NO: 117100 - DNA, 25 bp, Artificial
  Probe
agagcacaatccaactcagtatgaa

SEQ ID NO: 117101 - DNA, 25 bp, Artificial
  Probe
aagagcacaatccaactcagtatga

SEQ ID NO: 117102 - DNA, 25 bp, Artificial
  Probe
ctctcattactcgggtttcatactt

SEQ ID NO: 117103 - DNA, 25 bp, Artificial
  Probe
atctctcattactcgggtttcatac

SEQ ID NO: 117104 - DNA, 25 bp, Artificial
  Probe
catctctcattactcgggtttcata

SEQ ID NO: 117105 - DNA, 25 bp, Artificial
  Probe
ctcattactcgggtttcatactttg

SEQ ID NO: 117106 - DNA, 25 bp, Artificial
  Probe
tctcattactcgggtttcatacttt

SEQ ID NO: 117107 - DNA, 25 bp, Artificial
  Probe
taaaggagatgtaatcagtgtggag

SEQ ID NO: 117108 - DNA, 25 bp, Artificial
  Probe
ctaaaggagatgtaatcagtgtgga

SEQ ID NO: 117109 - DNA, 25 bp, Artificial
  Probe
tctctcattactcgggtttcatact

SEQ ID NO: 117110 - DNA, 25 bp, Artificial
  Probe
tcctccatcatctctcattactcgg

SEQ ID NO: 117111 - DNA, 25 bp, Artificial
  Probe
catcatctctcattactcgggtttc

SEQ ID NO: 117112 - DNA, 25 bp, Artificial
  Probe
aaaggagatgtaatcagtgtggaga

SEQ ID NO: 117113 - DNA, 25 bp, Artificial
  Probe
cctaaaggagatgtaatcagtgtgg

SEQ ID NO: 117114 - DNA, 25 bp, Artificial
  Probe
attactcgggtttcatactttgctg

SEQ ID NO: 117115 - DNA, 25 bp, Artificial
  Probe
cattactcgggtttcatactttgct

SEQ ID NO: 117116 - DNA, 25 bp, Artificial
  Probe
tcatctctcattactcgggtttcat

SEQ ID NO: 117117 - DNA, 25 bp, Artificial
  Probe
atcatctctcattactcgggtttca

SEQ ID NO: 117118 - DNA, 25 bp, Artificial
  Probe
tcattactcgggtttcatactttgc

SEQ ID NO: 117119 - DNA, 25 bp, Artificial
  Probe
acaatccaactcagtatgaagagcg

SEQ ID NO: 117120 - DNA, 25 bp, Artificial
  Probe
aattcaggttctcttgccacatcag

SEQ ID NO: 117121 - DNA, 25 bp, Artificial
  Probe
aacatcctgtatatcgccaaccttg

SEQ ID NO: 117122 - DNA, 25 bp, Artificial
  Probe
caacatcctgtatatcgccaacctt

SEQ ID NO: 117123 - DNA, 25 bp, Artificial
  Probe
tatatcgccaaccttggagatagtc

SEQ ID NO: 117124 - DNA, 25 bp, Artificial
  Probe
ccatcatctctcattactcgggttt

SEQ ID NO: 117125 - DNA, 25 bp, Artificial
  Probe
aaagagcacaatccaactcagtatg

SEQ ID NO: 117126 - DNA, 25 bp, Artificial
  Probe
caaagagcacaatccaactcagtat

SEQ ID NO: 117127 - DNA, 25 bp, Artificial
  Probe
gtatatcgccaaccttggagatagt

SEQ ID NO: 117128 - DNA, 25 bp, Artificial
  Probe
tgtatatcgccaaccttggagatag

SEQ ID NO: 117129 - DNA, 25 bp, Artificial
  Probe
tgagttagttggtagtattctgacg

SEQ ID NO: 117130 - DNA, 25 bp, Artificial
  Probe
atgagttagttggtagtattctgac

SEQ ID NO: 117131 - DNA, 25 bp, Artificial
  Probe
taggatctaggaagaattacagagg

SEQ ID NO: 117132 - DNA, 25 bp, Artificial
  Probe
acatgagttagttggtagtattctg

SEQ ID NO: 117133 - DNA, 25 bp, Artificial
  Probe
agttagttggtagtattctgacgtg

SEQ ID NO: 117134 - DNA, 25 bp, Artificial
  Probe
gagttagttggtagtattctgacgt

SEQ ID NO: 117135 - DNA, 25 bp, Artificial
  Probe
gttagttggtagtattctgacgtgt

SEQ ID NO: 117136 - DNA, 25 bp, Artificial
  Probe
catgagttagttggtagtattctga

SEQ ID NO: 117137 - DNA, 25 bp, Artificial
  Probe
tagttggtagtattctgacgtgtaa

SEQ ID NO: 117138 - DNA, 25 bp, Artificial
  Probe
ttagttggtagtattctgacgtgta

SEQ ID NO: 117139 - DNA, 25 bp, Artificial
  Probe
gaatgaattgtctatttagcccgaa

SEQ ID NO: 117140 - DNA, 25 bp, Artificial
  Probe
aatgaattgtctatttagcccgaaa

SEQ ID NO: 117141 - DNA, 25 bp, Artificial
  Probe
agaatgaattgtctatttagcccga

SEQ ID NO: 117142 - DNA, 25 bp, Artificial
  Probe
aacatgagttagttggtagtattct

SEQ ID NO: 117143 - DNA, 25 bp, Artificial
  Probe
agaacatgagttagttggtagtatt

SEQ ID NO: 117144 - DNA, 25 bp, Artificial
  Probe
gctttggtctttaggatctaggaag

SEQ ID NO: 117145 - DNA, 25 bp, Artificial
  Probe
tgctttggtctttaggatctaggaa

SEQ ID NO: 117146 - DNA, 25 bp, Artificial
  Probe
aggatctaggaagaattacagaggg

SEQ ID NO: 117147 - DNA, 25 bp, Artificial
  Probe
gaacatgagttagttggtagtattc

SEQ ID NO: 117148 - DNA, 25 bp, Artificial
  Probe
agccttctttagaacatgagttagt

SEQ ID NO: 117149 - DNA, 25 bp, Artificial
  Probe
ctgctttggtctttaggatctagga

SEQ ID NO: 117150 - DNA, 25 bp, Artificial
  Probe
agatagccttctttagaacatgagt

SEQ ID NO: 117151 - DNA, 25 bp, Artificial
  Probe
gccttctttagaacatgagttagtt

SEQ ID NO: 117152 - DNA, 25 bp, Artificial
  Probe
ttaggatctaggaagaattacagag

SEQ ID NO: 117153 - DNA, 25 bp, Artificial
  Probe
ttagaacatgagttagttggtagta

SEQ ID NO: 117154 - DNA, 25 bp, Artificial
  Probe
atggtgctattactcacaagtttag

SEQ ID NO: 117155 - DNA, 25 bp, Artificial
  Probe
gatagccttctttagaacatgagtt

SEQ ID NO: 117156 - DNA, 25 bp, Artificial
  Probe
tttctaccattatcttgggtttcca

SEQ ID NO: 117157 - DNA, 25 bp, Artificial
  Probe
ttctaccattatcttgggtttccat

SEQ ID NO: 117158 - DNA, 25 bp, Artificial
  Probe
tagaacatgagttagttggtagtat

SEQ ID NO: 117159 - DNA, 25 bp, Artificial
  Probe
ctctggctttgacaggttgaaatag

SEQ ID NO: 117160 - DNA, 25 bp, Artificial
  Probe
ttggtagtattctgacgtgtaaaca

SEQ ID NO: 117161 - DNA, 25 bp, Artificial
  Probe
tagaatgaattgtctatttagcccg

SEQ ID NO: 117162 - DNA, 25 bp, Artificial
  Probe
agttggtagtattctgacgtgtaaa

SEQ ID NO: 117163 - DNA, 25 bp, Artificial
  Probe
tgctgctttggtctttaggatctag

SEQ ID NO: 117164 - DNA, 25 bp, Artificial
  Probe
ctgctgctttggtctttaggatcta

SEQ ID NO: 117165 - DNA, 25 bp, Artificial
  Probe
gacttctagagcagccaacgtatat

SEQ ID NO: 117166 - DNA, 25 bp, Artificial
  Probe
ttctttagaacatgagttagttggt

SEQ ID NO: 117167 - DNA, 25 bp, Artificial
  Probe
tagccttctttagaacatgagttag

SEQ ID NO: 117168 - DNA, 25 bp, Artificial
  Probe
catggtgctattactcacaagttta

SEQ ID NO: 117169 - DNA, 25 bp, Artificial
  Probe
gccaacgtatatgcaacattaaaga

SEQ ID NO: 117170 - DNA, 25 bp, Artificial
  Probe
agccaacgtatatgcaacattaaag

SEQ ID NO: 117171 - DNA, 25 bp, Artificial
  Probe
cagccaacgtatatgcaacattaaa

SEQ ID NO: 117172 - DNA, 25 bp, Artificial
  Probe
gttggtagtattctgacgtgtaaac

SEQ ID NO: 117173 - DNA, 25 bp, Artificial
  Probe
ctggctttgacaggttgaaatagtc

SEQ ID NO: 117174 - DNA, 25 bp, Artificial
  Probe
aacattgtcaagacggatatacctg

SEQ ID NO: 117175 - DNA, 25 bp, Artificial
  Probe
caacattgtcaagacggatatacct

SEQ ID NO: 117176 - DNA, 25 bp, Artificial
  Probe
agcaacattgtcaagacggatatac

SEQ ID NO: 117177 - DNA, 25 bp, Artificial
  Probe
cagcaacattgtcaagacggatata

SEQ ID NO: 117178 - DNA, 25 bp, Artificial
  Probe
acattgtcaagacggatatacctga

SEQ ID NO: 117179 - DNA, 25 bp, Artificial
  Probe
gcaacattgtcaagacggatatacc

SEQ ID NO: 117180 - DNA, 25 bp, Artificial
  Probe
acagcaacattgtcaagacggatat

SEQ ID NO: 117181 - DNA, 25 bp, Artificial
  Probe
ctttgctctactatgacagggacag

SEQ ID NO: 117182 - DNA, 25 bp, Artificial
  Probe
ctactatgacagggacagcaacatt

SEQ ID NO: 117183 - DNA, 25 bp, Artificial
  Probe
tactatgacagggacagcaacattg

SEQ ID NO: 117184 - DNA, 25 bp, Artificial
  Probe
tctttgctctactatgacagggaca

SEQ ID NO: 117185 - DNA, 25 bp, Artificial
  Probe
atatgacaccaacctcaccttgaca

SEQ ID NO: 117186 - DNA, 25 bp, Artificial
  Probe
caagacggatatacctgacatggtg

SEQ ID NO: 117187 - DNA, 25 bp, Artificial
  Probe
ccctctgtctttgctctactatgac

SEQ ID NO: 117188 - DNA, 25 bp, Artificial
  Probe
tcaagacggatatacctgacatggt

SEQ ID NO: 117189 - DNA, 25 bp, Artificial
  Probe
tatgacaccaacctcaccttgacaa

SEQ ID NO: 117190 - DNA, 25 bp, Artificial
  Probe
tctactatgacagggacagcaacat

SEQ ID NO: 117191 - DNA, 25 bp, Artificial
  Probe
gtctttgctctactatgacagggac

SEQ ID NO: 117192 - DNA, 25 bp, Artificial
  Probe
gatatacctgacatggtggtagagg

SEQ ID NO: 117193 - DNA, 25 bp, Artificial
  Probe
ggatatacctgacatggtggtagag

SEQ ID NO: 117194 - DNA, 25 bp, Artificial
  Probe
ctctactatgacagggacagcaaca

SEQ ID NO: 117195 - DNA, 25 bp, Artificial
  Probe
ttctttgtggacttccgtgagattg

SEQ ID NO: 117196 - DNA, 25 bp, Artificial
  Probe
gttctttgtggacttccgtgagatt

SEQ ID NO: 117197 - DNA, 25 bp, Artificial
  Probe
gccctctgtctttgctctactatga

SEQ ID NO: 117198 - DNA, 25 bp, Artificial
  Probe
aagacggatatacctgacatggtgg

SEQ ID NO: 117199 - DNA, 25 bp, Artificial
  Probe
catatgacaccaacctcaccttgac

SEQ ID NO: 117200 - DNA, 25 bp, Artificial
  Probe
cattgtcaagacggatatacctgac

SEQ ID NO: 117201 - DNA, 25 bp, Artificial
  Probe
cggatatacctgacatggtggtaga

SEQ ID NO: 117202 - DNA, 25 bp, Artificial
  Probe
atatacctgacatggtggtagaggc

SEQ ID NO: 117203 - DNA, 25 bp, Artificial
  Probe
acggatatacctgacatggtggtag

SEQ ID NO: 117204 - DNA, 25 bp, Artificial
  Probe
gacggatatacctgacatggtggta

SEQ ID NO: 117205 - DNA, 25 bp, Artificial
  Probe
agttctttgtggacttccgtgagat

SEQ ID NO: 117206 - DNA, 25 bp, Artificial
  Probe
caagagttctttgtggacttccgtg

SEQ ID NO: 117207 - DNA, 25 bp, Artificial
  Probe
aagagttctttgtggacttccgtga

SEQ ID NO: 117208 - DNA, 25 bp, Artificial
  Probe
gtcaagacggatatacctgacatgg

SEQ ID NO: 117209 - DNA, 25 bp, Artificial
  Probe
actatgacagggacagcaacattgt

SEQ ID NO: 117210 - DNA, 25 bp, Artificial
  Probe
atgacaccaacctcaccttgacaag

SEQ ID NO: 117211 - DNA, 25 bp, Artificial
  Probe
agacggatatacctgacatggtggt

SEQ ID NO: 117212 - DNA, 25 bp, Artificial
  Probe
ccatatgacaccaacctcaccttga

SEQ ID NO: 117213 - DNA, 25 bp, Artificial
  Probe
cgccctctgtctttgctctactatg

SEQ ID NO: 117214 - DNA, 25 bp, Artificial
  Probe
gagttctttgtggacttccgtgaga

SEQ ID NO: 117215 - DNA, 25 bp, Artificial
  Probe
agagttctttgtggacttccgtgag

SEQ ID NO: 117216 - DNA, 25 bp, Artificial
  Probe
cctctgtctttgctctactatgaca

SEQ ID NO: 117217 - DNA, 25 bp, Artificial
  Probe
tctttgtggacttccgtgagattgg

SEQ ID NO: 117218 - DNA, 25 bp, Artificial
  Probe
gacagcaacattgtcaagacggata

SEQ ID NO: 117219 - DNA, 25 bp, Artificial
  Probe
ggcttgagtattctaaccacgtatg

SEQ ID NO: 117220 - DNA, 25 bp, Artificial
  Probe
caacatttacttgatggtccagtta

SEQ ID NO: 117221 - DNA, 25 bp, Artificial
  Probe
acatttacttgatggtccagttaag

SEQ ID NO: 117222 - DNA, 25 bp, Artificial
  Probe
aaatgaccatcaccaaagaaacctc

SEQ ID NO: 117223 - DNA, 25 bp, Artificial
  Probe
gctttctgatctatttcgcctatgg

SEQ ID NO: 117224 - DNA, 25 bp, Artificial
  Probe
aacatttacttgatggtccagttaa

SEQ ID NO: 117225 - DNA, 25 bp, Artificial
  Probe
aagcaaatgaccatcaccaaagaaa

SEQ ID NO: 117226 - DNA, 25 bp, Artificial
  Probe
tcatcctgggcttgagtattctaac

SEQ ID NO: 117227 - DNA, 25 bp, Artificial
  Probe
aacatcaatgtagcaacagaagaaa

SEQ ID NO: 117228 - DNA, 25 bp, Artificial
  Probe
aaacatcaatgtagcaacagaagaa

SEQ ID NO: 117229 - DNA, 25 bp, Artificial
  Probe
aaacctcagcttacctttcatactt

SEQ ID NO: 117230 - DNA, 25 bp, Artificial
  Probe
caaatgaccatcaccaaagaaacct

SEQ ID NO: 117231 - DNA, 25 bp, Artificial
  Probe
cctcagcttacctttcatacttcat

SEQ ID NO: 117232 - DNA, 25 bp, Artificial
  Probe
aacctcagcttacctttcatacttc

SEQ ID NO: 117233 - DNA, 25 bp, Artificial
  Probe
ggacacttggatcagattcagcatc

SEQ ID NO: 117234 - DNA, 25 bp, Artificial
  Probe
ctcagcttacctttcatacttcatg

SEQ ID NO: 117235 - DNA, 25 bp, Artificial
  Probe
catcctgggcttgagtattctaacc

SEQ ID NO: 117236 - DNA, 25 bp, Artificial
  Probe
cttgagtattctaaccacgtatggc

SEQ ID NO: 117237 - DNA, 25 bp, Artificial
  Probe
gcttgagtattctaaccacgtatgg

SEQ ID NO: 117238 - DNA, 25 bp, Artificial
  Probe
acctcagcttacctttcatacttca

SEQ ID NO: 117239 - DNA, 25 bp, Artificial
  Probe
agcaaatgaccatcaccaaagaaac

SEQ ID NO: 117240 - DNA, 25 bp, Artificial
  Probe
caagcaaatgaccatcaccaaagaa

SEQ ID NO: 117241 - DNA, 25 bp, Artificial
  Probe
ctatggcattagacacagcttggag

SEQ ID NO: 117242 - DNA, 25 bp, Artificial
  Probe
aatgaccatcaccaaagaaacctca

SEQ ID NO: 117243 - DNA, 25 bp, Artificial
  Probe
gacacttggatcagattcagcatct

SEQ ID NO: 117244 - DNA, 25 bp, Artificial
  Probe
cttcagcatcctggtcaacatttac

SEQ ID NO: 117245 - DNA, 25 bp, Artificial
  Probe
cagcatcctggtcaacatttacttg

SEQ ID NO: 117246 - DNA, 25 bp, Artificial
  Probe
tcagcatcctggtcaacatttactt

SEQ ID NO: 117247 - DNA, 25 bp, Artificial
  Probe
ttcagcatcctggtcaacatttact

SEQ ID NO: 117248 - DNA, 25 bp, Artificial
  Probe
atgaccatcaccaaagaaacctcag

SEQ ID NO: 117249 - DNA, 25 bp, Artificial
  Probe
catcaccaaagaaacctcagcttac

SEQ ID NO: 117250 - DNA, 25 bp, Artificial
  Probe
gggcttgagtattctaaccacgtat

SEQ ID NO: 117251 - DNA, 25 bp, Artificial
  Probe
gcaaatgaccatcaccaaagaaacc

SEQ ID NO: 117252 - DNA, 25 bp, Artificial
  Probe
ttgagtattctaaccacgtatggcg

SEQ ID NO: 117253 - DNA, 25 bp, Artificial
  Probe
aagaaacctcagcttacctttcata

SEQ ID NO: 117254 - DNA, 25 bp, Artificial
  Probe
tcaacatttacttgatggtccagtt

SEQ ID NO: 117255 - DNA, 25 bp, Artificial
  Probe
gaaacctcagcttacctttcatact

SEQ ID NO: 117256 - DNA, 25 bp, Artificial
  Probe
agaaacctcagcttacctttcatac

SEQ ID NO: 117257 - DNA, 25 bp, Artificial
  Probe
ccttcagcatcctggtcaacattta

SEQ ID NO: 117258 - DNA, 25 bp, Artificial
  Probe
aaagaaacctcagcttacctttcat

SEQ ID NO: 117259 - DNA, 25 bp, Artificial
  Probe
atttacttgatggtccagttaagtg

SEQ ID NO: 117260 - DNA, 25 bp, Artificial
  Probe
catttacttgatggtccagttaagt

SEQ ID NO: 117261 - DNA, 25 bp, Artificial
  Probe
atcctggtcaacatttacttgatgg

SEQ ID NO: 117262 - DNA, 25 bp, Artificial
  Probe
ttacttgatggtccagttaagtgcg

SEQ ID NO: 117263 - DNA, 25 bp, Artificial
  Probe
tttacttgatggtccagttaagtgc

SEQ ID NO: 117264 - DNA, 25 bp, Artificial
  Probe
gtgattggaactctattcattgctg

SEQ ID NO: 117265 - DNA, 25 bp, Artificial
  Probe
ttggtgattggaactctattcattg

SEQ ID NO: 117266 - DNA, 25 bp, Artificial
  Probe
ggtgattggaactctattcattgct

SEQ ID NO: 117267 - DNA, 25 bp, Artificial
  Probe
tggtgattggaactctattcattgc

SEQ ID NO: 117268 - DNA, 25 bp, Artificial
  Probe
tgattggaactctattcattgctgc

SEQ ID NO: 117269 - DNA, 25 bp, Artificial
  Probe
tgtgtgattgcctgttatttctatg

SEQ ID NO: 117270 - DNA, 25 bp, Artificial
  Probe
gtgtgattgcctgttatttctatga

SEQ ID NO: 117271 - DNA, 25 bp, Artificial
  Probe
ctgtgtgattgcctgttatttctat

SEQ ID NO: 117272 - DNA, 25 bp, Artificial
  Probe
cctgtgtgattgcctgttatttcta

SEQ ID NO: 117273 - DNA, 25 bp, Artificial
  Probe
aattctgggaaggtaaagagagaga

SEQ ID NO: 117274 - DNA, 25 bp, Artificial
  Probe
ctgggaaggtaaagagagagaagag

SEQ ID NO: 117275 - DNA, 25 bp, Artificial
  Probe
cctatttggtgattggaactctatt

SEQ ID NO: 117276 - DNA, 25 bp, Artificial
  Probe
tgtgattgcctgttatttctatgaa

SEQ ID NO: 117277 - DNA, 25 bp, Artificial
  Probe
gattggaactctattcattgctgca

SEQ ID NO: 117278 - DNA, 25 bp, Artificial
  Probe
ttctatgaaatctcaaactgggcac

SEQ ID NO: 117279 - DNA, 25 bp, Artificial
  Probe
tttggtgattggaactctattcatt

SEQ ID NO: 117280 - DNA, 25 bp, Artificial
  Probe
tctgggaaggtaaagagagagaaga

SEQ ID NO: 117281 - DNA, 25 bp, Artificial
  Probe
gacagacaagttggaaaggctaatg

SEQ ID NO: 117282 - DNA, 25 bp, Artificial
  Probe
agacagacaagttggaaaggctaat

SEQ ID NO: 117283 - DNA, 25 bp, Artificial
  Probe
ctatgaaatctcaaactgggcactc

SEQ ID NO: 117284 - DNA, 25 bp, Artificial
  Probe
atttggtgattggaactctattcat

SEQ ID NO: 117285 - DNA, 25 bp, Artificial
  Probe
gacctgtgtgattgcctgttatttc

SEQ ID NO: 117286 - DNA, 25 bp, Artificial
  Probe
aagacagacaagttggaaaggctaa

SEQ ID NO: 117287 - DNA, 25 bp, Artificial
  Probe
tatgaaatctcaaactgggcactct

SEQ ID NO: 117288 - DNA, 25 bp, Artificial
  Probe
tctatgaaatctcaaactgggcact

SEQ ID NO: 117289 - DNA, 25 bp, Artificial
  Probe
agttggaaaggctaatggtcaagat

SEQ ID NO: 117290 - DNA, 25 bp, Artificial
  Probe
tatttggtgattggaactctattca

SEQ ID NO: 117291 - DNA, 25 bp, Artificial
  Probe
acctgtgtgattgcctgttatttct

SEQ ID NO: 117292 - DNA, 25 bp, Artificial
  Probe
aagttggaaaggctaatggtcaaga

SEQ ID NO: 117293 - DNA, 25 bp, Artificial
  Probe
caagttggaaaggctaatggtcaag

SEQ ID NO: 117294 - DNA, 25 bp, Artificial
  Probe
ttacctatttggtgattggaactct

SEQ ID NO: 117295 - DNA, 25 bp, Artificial
  Probe
aaatgttctaaccgattggtgaatt

SEQ ID NO: 117296 - DNA, 25 bp, Artificial
  Probe
ctatttggtgattggaactctattc

SEQ ID NO: 117297 - DNA, 25 bp, Artificial
  Probe
acctatttggtgattggaactctat

SEQ ID NO: 117298 - DNA, 25 bp, Artificial
  Probe
tctctttacctatttggtgattgga

SEQ ID NO: 117299 - DNA, 25 bp, Artificial
  Probe
tgggaaggtaaagagagagaagagg

SEQ ID NO: 117300 - DNA, 25 bp, Artificial
  Probe
acctctctttacctatttggtgatt

SEQ ID NO: 117301 - DNA, 25 bp, Artificial
  Probe
gttggaaaggctaatggtcaagatc

SEQ ID NO: 117302 - DNA, 25 bp, Artificial
  Probe
ctctctttacctatttggtgattgg

SEQ ID NO: 117303 - DNA, 25 bp, Artificial
  Probe
cctctctttacctatttggtgattg

SEQ ID NO: 117304 - DNA, 25 bp, Artificial
  Probe
tttacctatttggtgattggaactc

SEQ ID NO: 117305 - DNA, 25 bp, Artificial
  Probe
ctttacctatttggtgattggaact

SEQ ID NO: 117306 - DNA, 25 bp, Artificial
  Probe
tctttacctatttggtgattggaac

SEQ ID NO: 117307 - DNA, 25 bp, Artificial
  Probe
tacctatttggtgattggaactcta

SEQ ID NO: 117308 - DNA, 25 bp, Artificial
  Probe
gattatgagactagtggatgccgat

SEQ ID NO: 117309 - DNA, 25 bp, Artificial
  Probe
atctggcatctgtactcttctgtat

SEQ ID NO: 117310 - DNA, 25 bp, Artificial
  Probe
catattgccaatgacttgttccttc

SEQ ID NO: 117311 - DNA, 25 bp, Artificial
  Probe
atattgccaatgacttgttccttca

SEQ ID NO: 117312 - DNA, 25 bp, Artificial
  Probe
catctggcatctgtactcttctgta

SEQ ID NO: 117313 - DNA, 25 bp, Artificial
  Probe
aggagaagactagatggagcactaa

SEQ ID NO: 117314 - DNA, 25 bp, Artificial
  Probe
ctggcatctgtactcttctgtatga

SEQ ID NO: 117315 - DNA, 25 bp, Artificial
  Probe
tctggcatctgtactcttctgtatg

SEQ ID NO: 117316 - DNA, 25 bp, Artificial
  Probe
tattgccaatgacttgttccttcag

SEQ ID NO: 117317 - DNA, 25 bp, Artificial
  Probe
tggcatctgtactcttctgtatgac

SEQ ID NO: 117318 - DNA, 25 bp, Artificial
  Probe
caggagaagactagatggagcacta

SEQ ID NO: 117319 - DNA, 25 bp, Artificial
  Probe
ggcagatattgaaatccatagcatt

SEQ ID NO: 117320 - DNA, 25 bp, Artificial
  Probe
ggcatctgtactcttctgtatgaca

SEQ ID NO: 117321 - DNA, 25 bp, Artificial
  Probe
gagaagactagatggagcactaaat

SEQ ID NO: 117322 - DNA, 25 bp, Artificial
  Probe
gcagatattgaaatccatagcattg

SEQ ID NO: 117323 - DNA, 25 bp, Artificial
  Probe
agactagatggagcactaaatagag

SEQ ID NO: 117324 - DNA, 25 bp, Artificial
  Probe
tgagccacagacatctaaagatagt

SEQ ID NO: 117325 - DNA, 25 bp, Artificial
  Probe
ggagaagactagatggagcactaaa

SEQ ID NO: 117326 - DNA, 25 bp, Artificial
  Probe
agttcatattgccaatgacttgttc

SEQ ID NO: 117327 - DNA, 25 bp, Artificial
  Probe
aagactagatggagcactaaataga

SEQ ID NO: 117328 - DNA, 25 bp, Artificial
  Probe
agaagactagatggagcactaaata

SEQ ID NO: 117329 - DNA, 25 bp, Artificial
  Probe
gactagatggagcactaaatagagt

SEQ ID NO: 117330 - DNA, 25 bp, Artificial
  Probe
tcatattgccaatgacttgttcctt

SEQ ID NO: 117331 - DNA, 25 bp, Artificial
  Probe
ttcatattgccaatgacttgttcct

SEQ ID NO: 117332 - DNA, 25 bp, Artificial
  Probe
gttcatattgccaatgacttgttcc

SEQ ID NO: 117333 - DNA, 25 bp, Artificial
  Probe
tagttcatattgccaatgacttgtt

SEQ ID NO: 117334 - DNA, 25 bp, Artificial
  Probe
gaagactagatggagcactaaatag

SEQ ID NO: 117335 - DNA, 25 bp, Artificial
  Probe
atagttcatattgccaatgacttgt

SEQ ID NO: 117336 - DNA, 25 bp, Artificial
  Probe
cacagacatctaaagatagtcgtca

SEQ ID NO: 117337 - DNA, 25 bp, Artificial
  Probe
agacatctaaagatagtcgtcaagg

SEQ ID NO: 117338 - DNA, 25 bp, Artificial
  Probe
ccacagacatctaaagatagtcgtc

SEQ ID NO: 117339 - DNA, 25 bp, Artificial
  Probe
gagccacagacatctaaagatagtc

SEQ ID NO: 117340 - DNA, 25 bp, Artificial
  Probe
tagatggagcactaaatagagtacc

SEQ ID NO: 117341 - DNA, 25 bp, Artificial
  Probe
acagacatctaaagatagtcgtcaa

SEQ ID NO: 117342 - DNA, 25 bp, Artificial
  Probe
tttgttcttccctcttcaagcacta

SEQ ID NO: 117343 - DNA, 25 bp, Artificial
  Probe
gtgagccacagacatctaaagatag

SEQ ID NO: 117344 - DNA, 25 bp, Artificial
  Probe
gacatctaaagatagtcgtcaaggc

SEQ ID NO: 117345 - DNA, 25 bp, Artificial
  Probe
cagacatctaaagatagtcgtcaag

SEQ ID NO: 117346 - DNA, 25 bp, Artificial
  Probe
tggcagatattgaaatccatagcat

SEQ ID NO: 117347 - DNA, 25 bp, Artificial
  Probe
actagatggagcactaaatagagta

SEQ ID NO: 117348 - DNA, 25 bp, Artificial
  Probe
gatattgaaatccatagcattggga

SEQ ID NO: 117349 - DNA, 25 bp, Artificial
  Probe
ctggcagatattgaaatccatagca

SEQ ID NO: 117350 - DNA, 25 bp, Artificial
  Probe
aatagttcatattgccaatgacttg

SEQ ID NO: 117351 - DNA, 25 bp, Artificial
  Probe
atattgaaatccatagcattgggag

SEQ ID NO: 117352 - DNA, 25 bp, Artificial
  Probe
agatattgaaatccatagcattggg

SEQ ID NO: 117353 - DNA, 25 bp, Artificial
  Probe
gatggagcactaaatagagtaccaa

SEQ ID NO: 117354 - DNA, 25 bp, Artificial
  Probe
aaaccttccatatctttcatccctg

SEQ ID NO: 117355 - DNA, 25 bp, Artificial
  Probe
taatgggctattaaagaaccttggg

SEQ ID NO: 117356 - DNA, 25 bp, Artificial
  Probe
tttatgtaccctgtggaatgacttc

SEQ ID NO: 117357 - DNA, 25 bp, Artificial
  Probe
aaccttccatatctttcatccctga

SEQ ID NO: 117358 - DNA, 25 bp, Artificial
  Probe
gatctcatacatgacccagtaatgc

SEQ ID NO: 117359 - DNA, 25 bp, Artificial
  Probe
gaaaccttccatatctttcatccct

SEQ ID NO: 117360 - DNA, 25 bp, Artificial
  Probe
ctcatacatgacccagtaatgcaaa

SEQ ID NO: 117361 - DNA, 25 bp, Artificial
  Probe
ttaatgggctattaaagaaccttgg

SEQ ID NO: 117362 - DNA, 25 bp, Artificial
  Probe
aatgggctattaaagaaccttgggc

SEQ ID NO: 117363 - DNA, 25 bp, Artificial
  Probe
atctcatacatgacccagtaatgca

SEQ ID NO: 117364 - DNA, 25 bp, Artificial
  Probe
tctcatacatgacccagtaatgcaa

SEQ ID NO: 117365 - DNA, 25 bp, Artificial
  Probe
ttccttgcatgggttgattctgtat

SEQ ID NO: 117366 - DNA, 25 bp, Artificial
  Probe
ttttatgtaccctgtggaatgactt

SEQ ID NO: 117367 - DNA, 25 bp, Artificial
  Probe
attttatgtaccctgtggaatgact

SEQ ID NO: 117368 - DNA, 25 bp, Artificial
  Probe
tccacaagaaccctcctcattttat

SEQ ID NO: 117369 - DNA, 25 bp, Artificial
  Probe
tattaaagaaccttgggccttgaaa

SEQ ID NO: 117370 - DNA, 25 bp, Artificial
  Probe
accttccatatctttcatccctgaa

SEQ ID NO: 117371 - DNA, 25 bp, Artificial
  Probe
aagaaccctcctcattttatgtacc

SEQ ID NO: 117372 - DNA, 25 bp, Artificial
  Probe
ctattaaagaaccttgggccttgaa

SEQ ID NO: 117373 - DNA, 25 bp, Artificial
  Probe
tttccttgcatgggttgattctgta

SEQ ID NO: 117374 - DNA, 25 bp, Artificial
  Probe
cctcattttatgtaccctgtggaat

SEQ ID NO: 117375 - DNA, 25 bp, Artificial
  Probe
ccacaagaaccctcctcattttatg

SEQ ID NO: 117376 - DNA, 25 bp, Artificial
  Probe
caagaaccctcctcattttatgtac

SEQ ID NO: 117377 - DNA, 25 bp, Artificial
  Probe
acaagaaccctcctcattttatgta

SEQ ID NO: 117378 - DNA, 25 bp, Artificial
  Probe
agatctcatacatgacccagtaatg

SEQ ID NO: 117379 - DNA, 25 bp, Artificial
  Probe
cagatctcatacatgacccagtaat

SEQ ID NO: 117380 - DNA, 25 bp, Artificial
  Probe
tcagatctcatacatgacccagtaa

SEQ ID NO: 117381 - DNA, 25 bp, Artificial
  Probe
ctttatcagagcactcagcttgtag

SEQ ID NO: 117382 - DNA, 25 bp, Artificial
  Probe
cacaagaaccctcctcattttatgt

SEQ ID NO: 117383 - DNA, 25 bp, Artificial
  Probe
ctccacaagaaccctcctcatttta

SEQ ID NO: 117384 - DNA, 25 bp, Artificial
  Probe
ctcagatctcatacatgacccagta

SEQ ID NO: 117385 - DNA, 25 bp, Artificial
  Probe
tttctttatcagagcactcagcttg

SEQ ID NO: 117386 - DNA, 25 bp, Artificial
  Probe
gacacaatccaccgtggtttatatg

SEQ ID NO: 117387 - DNA, 25 bp, Artificial
  Probe
tccttgcatgggttgattctgtatc

SEQ ID NO: 117388 - DNA, 25 bp, Artificial
  Probe
ccttttgaagagtttgtgggatgag

SEQ ID NO: 117389 - DNA, 25 bp, Artificial
  Probe
gacttccctcagatctcatacatga

SEQ ID NO: 117390 - DNA, 25 bp, Artificial
  Probe
tctttatcagagcactcagcttgta

SEQ ID NO: 117391 - DNA, 25 bp, Artificial
  Probe
cggttttctttatcagagcactcag

SEQ ID NO: 117392 - DNA, 25 bp, Artificial
  Probe
acttccctcagatctcatacatgac

SEQ ID NO: 117393 - DNA, 25 bp, Artificial
  Probe
tgacttccctcagatctcatacatg

SEQ ID NO: 117394 - DNA, 25 bp, Artificial
  Probe
gttgattctgtatcccacactgtgt

SEQ ID NO: 117395 - DNA, 25 bp, Artificial
  Probe
ggttttctttatcagagcactcagc

SEQ ID NO: 117396 - DNA, 25 bp, Artificial
  Probe
tgacacaatccaccgtggtttatat

SEQ ID NO: 117397 - DNA, 25 bp, Artificial
  Probe
gaaccctcctcattttatgtaccct

SEQ ID NO: 117398 - DNA, 25 bp, Artificial
  Probe
agaaccctcctcattttatgtaccc

SEQ ID NO: 117399 - DNA, 25 bp, Artificial
  Probe
tctgttaccatctaagaactctgtg

SEQ ID NO: 117400 - DNA, 25 bp, Artificial
  Probe
ctgttaccatctaagaactctgtgg

SEQ ID NO: 117401 - DNA, 25 bp, Artificial
  Probe
cccaggacccacatatttatagaaa

SEQ ID NO: 117402 - DNA, 25 bp, Artificial
  Probe
tagactttcacatcctcataagcag

SEQ ID NO: 117403 - DNA, 25 bp, Artificial
  Probe
tcccaggacccacatatttatagaa

SEQ ID NO: 117404 - DNA, 25 bp, Artificial
  Probe
ccaggacccacatatttatagaaag

SEQ ID NO: 117405 - DNA, 25 bp, Artificial
  Probe
ctcccaggacccacatatttataga

SEQ ID NO: 117406 - DNA, 25 bp, Artificial
  Probe
ctagactttcacatcctcataagca

SEQ ID NO: 117407 - DNA, 25 bp, Artificial
  Probe
actcccaggacccacatatttatag

SEQ ID NO: 117408 - DNA, 25 bp, Artificial
  Probe
ccttctgttaccatctaagaactct

SEQ ID NO: 117409 - DNA, 25 bp, Artificial
  Probe
tccttctgttaccatctaagaactc

SEQ ID NO: 117410 - DNA, 25 bp, Artificial
  Probe
cactcccaggacccacatatttata

SEQ ID NO: 117411 - DNA, 25 bp, Artificial
  Probe
ttctgttaccatctaagaactctgt

SEQ ID NO: 117412 - DNA, 25 bp, Artificial
  Probe
ttccttctgttaccatctaagaact

SEQ ID NO: 117413 - DNA, 25 bp, Artificial
  Probe
aggtgctctggtataagacaaatca

SEQ ID NO: 117414 - DNA, 25 bp, Artificial
  Probe
tttcttctcaaacagagtcctatga

SEQ ID NO: 117415 - DNA, 25 bp, Artificial
  Probe
cttccttctgttaccatctaagaac

SEQ ID NO: 117416 - DNA, 25 bp, Artificial
  Probe
tcttccttctgttaccatctaagaa

SEQ ID NO: 117417 - DNA, 25 bp, Artificial
  Probe
ttcttccttctgttaccatctaaga

SEQ ID NO: 117418 - DNA, 25 bp, Artificial
  Probe
caggacccacatatttatagaaagt

SEQ ID NO: 117419 - DNA, 25 bp, Artificial
  Probe
cttctgttaccatctaagaactctg

SEQ ID NO: 117420 - DNA, 25 bp, Artificial
  Probe
tttcttccttctgttaccatctaag

SEQ ID NO: 117421 - DNA, 25 bp, Artificial
  Probe
ttcttctgatgctacaggataaagg

SEQ ID NO: 117422 - DNA, 25 bp, Artificial
  Probe
cttctttcttctgatgctacaggat

SEQ ID NO: 117423 - DNA, 25 bp, Artificial
  Probe
aaacttctttcttctgatgctacag

SEQ ID NO: 117424 - DNA, 25 bp, Artificial
  Probe
tctttcttctgatgctacaggataa

SEQ ID NO: 117425 - DNA, 25 bp, Artificial
  Probe
ttctttcttctgatgctacaggata

SEQ ID NO: 117426 - DNA, 25 bp, Artificial
  Probe
aacttctttcttctgatgctacagg

SEQ ID NO: 117427 - DNA, 25 bp, Artificial
  Probe
ggttcacatctagaaggcataagaa

SEQ ID NO: 117428 - DNA, 25 bp, Artificial
  Probe
ttcacatctagaaggcataagaact

SEQ ID NO: 117429 - DNA, 25 bp, Artificial
  Probe
caggtgctctggtataagacaaatc

SEQ ID NO: 117430 - DNA, 25 bp, Artificial
  Probe
agagtcctatgagatgggtggtatc

SEQ ID NO: 117431 - DNA, 25 bp, Artificial
  Probe
tttcttctgatgctacaggataaag

SEQ ID NO: 117432 - DNA, 25 bp, Artificial
  Probe
ctttcttctgatgctacaggataaa

SEQ ID NO: 117433 - DNA, 25 bp, Artificial
  Probe
acttctttcttctgatgctacagga

SEQ ID NO: 117434 - DNA, 25 bp, Artificial
  Probe
tcacatctagaaggcataagaacta

SEQ ID NO: 117435 - DNA, 25 bp, Artificial
  Probe
agctagactttcacatcctcataag

SEQ ID NO: 117436 - DNA, 25 bp, Artificial
  Probe
tttagaaggtacgagctagactttc

SEQ ID NO: 117437 - DNA, 25 bp, Artificial
  Probe
cagagtcctatgagatgggtggtat

SEQ ID NO: 117438 - DNA, 25 bp, Artificial
  Probe
caaacagagtcctatgagatgggtg

SEQ ID NO: 117439 - DNA, 25 bp, Artificial
  Probe
tcttctgatgctacaggataaaggg

SEQ ID NO: 117440 - DNA, 25 bp, Artificial
  Probe
ggtgctctggtataagacaaatcac

SEQ ID NO: 117441 - DNA, 25 bp, Artificial
  Probe
ttagaaggtacgagctagactttca

SEQ ID NO: 117442 - DNA, 25 bp, Artificial
  Probe
gctctggtataagacaaatcacctt

SEQ ID NO: 117443 - DNA, 25 bp, Artificial
  Probe
gagctagactttcacatcctcataa

SEQ ID NO: 117444 - DNA, 25 bp, Artificial
  Probe
ctgaagcagagtaagtaaccagtaa

SEQ ID NO: 117445 - DNA, 25 bp, Artificial
  Probe
gatgtgttgagtttgagtcttatgg

SEQ ID NO: 117446 - DNA, 25 bp, Artificial
  Probe
tgaagcagagtaagtaaccagtaaa

SEQ ID NO: 117447 - DNA, 25 bp, Artificial
  Probe
ggtgggagataatgagcaaagatat

SEQ ID NO: 117448 - DNA, 25 bp, Artificial
  Probe
gttgagtttgagtcttatggcattc

SEQ ID NO: 117449 - DNA, 25 bp, Artificial
  Probe
tgggagataatgagcaaagatatga

SEQ ID NO: 117450 - DNA, 25 bp, Artificial
  Probe
gtgggagataatgagcaaagatatg

SEQ ID NO: 117451 - DNA, 25 bp, Artificial
  Probe
gtgatgaaatgaacaagtaatgagc

SEQ ID NO: 117452 - DNA, 25 bp, Artificial
  Probe
gtggtgatgaaatgaacaagtaatg

SEQ ID NO: 117453 - DNA, 25 bp, Artificial
  Probe
tgttgagtttgagtcttatggcatt

SEQ ID NO: 117454 - DNA, 25 bp, Artificial
  Probe
cttagtggtgatgaaatgaacaagt

SEQ ID NO: 117455 - DNA, 25 bp, Artificial
  Probe
tggtgatgaaatgaacaagtaatga

SEQ ID NO: 117456 - DNA, 25 bp, Artificial
  Probe
agtggtgatgaaatgaacaagtaat

SEQ ID NO: 117457 - DNA, 25 bp, Artificial
  Probe
gcttagtggtgatgaaatgaacaag

SEQ ID NO: 117458 - DNA, 25 bp, Artificial
  Probe
atgaagatgtgttgagtttgagtct

SEQ ID NO: 117459 - DNA, 25 bp, Artificial
  Probe
agatgtgttgagtttgagtcttatg

SEQ ID NO: 117460 - DNA, 25 bp, Artificial
  Probe
ggtgatgaaatgaacaagtaatgag

SEQ ID NO: 117461 - DNA, 25 bp, Artificial
  Probe
atgtgttgagtttgagtcttatggc

SEQ ID NO: 117462 - DNA, 25 bp, Artificial
  Probe
gggagataatgagcaaagatatgaa

SEQ ID NO: 117463 - DNA, 25 bp, Artificial
  Probe
tgagtttgagtcttatggcattcat

SEQ ID NO: 117464 - DNA, 25 bp, Artificial
  Probe
gtgttgagtttgagtcttatggcat

SEQ ID NO: 117465 - DNA, 25 bp, Artificial
  Probe
tagtggtgatgaaatgaacaagtaa

SEQ ID NO: 117466 - DNA, 25 bp, Artificial
  Probe
ttagtggtgatgaaatgaacaagta

SEQ ID NO: 117467 - DNA, 25 bp, Artificial
  Probe
ttgagtttgagtcttatggcattca

SEQ ID NO: 117468 - DNA, 25 bp, Artificial
  Probe
gggtgggagataatgagcaaagata

SEQ ID NO: 117469 - DNA, 25 bp, Artificial
  Probe
catgaagatgtgttgagtttgagtc

SEQ ID NO: 117470 - DNA, 25 bp, Artificial
  Probe
ctttggtataatttggctgttagag

SEQ ID NO: 117471 - DNA, 25 bp, Artificial
  Probe
tctttggtataatttggctgttaga

SEQ ID NO: 117472 - DNA, 25 bp, Artificial
  Probe
gagtttgagtcttatggcattcatg

SEQ ID NO: 117473 - DNA, 25 bp, Artificial
  Probe
aacacctgtactagatgagagtata

SEQ ID NO: 117474 - DNA, 25 bp, Artificial
  Probe
atgaaatgaacaagtaatgagctgg

SEQ ID NO: 117475 - DNA, 25 bp, Artificial
  Probe
gataatgagcaaagatatgaaacga

SEQ ID NO: 117476 - DNA, 25 bp, Artificial
  Probe
agataatgagcaaagatatgaaacg

SEQ ID NO: 117477 - DNA, 25 bp, Artificial
  Probe
aaatgaacaagtaatgagctgggta

SEQ ID NO: 117478 - DNA, 25 bp, Artificial
  Probe
acacctgtactagatgagagtatat

SEQ ID NO: 117479 - DNA, 25 bp, Artificial
  Probe
aatgaacaagtaatgagctgggtag

SEQ ID NO: 117480 - DNA, 25 bp, Artificial
  Probe
ttctttggtataatttggctgttag

SEQ ID NO: 117481 - DNA, 25 bp, Artificial
  Probe
agcttagtggtgatgaaatgaacaa

SEQ ID NO: 117482 - DNA, 25 bp, Artificial
  Probe
tgtgttgagtttgagtcttatggca

SEQ ID NO: 117483 - DNA, 25 bp, Artificial
  Probe
tgatgaaatgaacaagtaatgagct

SEQ ID NO: 117484 - DNA, 25 bp, Artificial
  Probe
taatgagcaaagatatgaaacgaaa

SEQ ID NO: 117485 - DNA, 25 bp, Artificial
  Probe
ccgtagtagaattactttgctgtga

SEQ ID NO: 117486 - DNA, 25 bp, Artificial
  Probe
gatgaaatgaacaagtaatgagctg

SEQ ID NO: 117487 - DNA, 25 bp, Artificial
  Probe
cgtagtagaattactttgctgtgaa

SEQ ID NO: 117488 - DNA, 25 bp, Artificial
  Probe
accgtagtagaattactttgctgtg

SEQ ID NO: 117489 - DNA, 25 bp, Artificial
  Probe
cctacagcagactagaacaacagaa

SEQ ID NO: 117490 - DNA, 25 bp, Artificial
  Probe
tacagcagactagaacaacagaaag

SEQ ID NO: 117491 - DNA, 25 bp, Artificial
  Probe
ctacagcagactagaacaacagaaa

SEQ ID NO: 117492 - DNA, 25 bp, Artificial
  Probe
agcagactagaacaacagaaagtag

SEQ ID NO: 117493 - DNA, 25 bp, Artificial
  Probe
cagcagactagaacaacagaaagta

SEQ ID NO: 117494 - DNA, 25 bp, Artificial
  Probe
gactagaacaacagaaagtaggcag

SEQ ID NO: 117495 - DNA, 25 bp, Artificial
  Probe
cagactagaacaacagaaagtaggc

SEQ ID NO: 117496 - DNA, 25 bp, Artificial
  Probe
gcagactagaacaacagaaagtagg

SEQ ID NO: 117497 - DNA, 25 bp, Artificial
  Probe
agactagaacaacagaaagtaggca

SEQ ID NO: 117498 - DNA, 25 bp, Artificial
  Probe
aagtgacaagaaagctgacatttaa

SEQ ID NO: 117499 - DNA, 25 bp, Artificial
  Probe
aaagtgacaagaaagctgacattta

SEQ ID NO: 117500 - DNA, 25 bp, Artificial
  Probe
caaagtgacaagaaagctgacattt

SEQ ID NO: 117501 - DNA, 25 bp, Artificial
  Probe
acagcagactagaacaacagaaagt

SEQ ID NO: 117502 - DNA, 25 bp, Artificial
  Probe
ccaaagtgacaagaaagctgacatt

SEQ ID NO: 117503 - DNA, 25 bp, Artificial
  Probe
actagaacaacagaaagtaggcagc

SEQ ID NO: 117504 - DNA, 25 bp, Artificial
  Probe
gctgtatcgtttggagatggagttc

SEQ ID NO: 117505 - DNA, 25 bp, Artificial
  Probe
ccctacagcagactagaacaacaga

SEQ ID NO: 117506 - DNA, 25 bp, Artificial
  Probe
ctgtatcgtttggagatggagttcc

SEQ ID NO: 117507 - DNA, 25 bp, Artificial
  Probe
ctagaacaacagaaagtaggcagcc

SEQ ID NO: 117508 - DNA, 25 bp, Artificial
  Probe
tttgagccctacagcagactagaac

SEQ ID NO: 117509 - DNA, 25 bp, Artificial
  Probe
agctgtatcgtttggagatggagtt

SEQ ID NO: 117510 - DNA, 25 bp, Artificial
  Probe
gagccctacagcagactagaacaac

SEQ ID NO: 117511 - DNA, 25 bp, Artificial
  Probe
gccaaagtgacaagaaagctgacat

SEQ ID NO: 117512 - DNA, 25 bp, Artificial
  Probe
tagaacaacagaaagtaggcagccc

SEQ ID NO: 117513 - DNA, 25 bp, Artificial
  Probe
ttttgagccctacagcagactagaa

SEQ ID NO: 117514 - DNA, 25 bp, Artificial
  Probe
gccctacagcagactagaacaacag

SEQ ID NO: 117515 - DNA, 25 bp, Artificial
  Probe
tgagccctacagcagactagaacaa

SEQ ID NO: 117516 - DNA, 25 bp, Artificial
  Probe
ttgagccctacagcagactagaaca

SEQ ID NO: 117517 - DNA, 25 bp, Artificial
  Probe
cttttgagccctacagcagactaga

SEQ ID NO: 117518 - DNA, 25 bp, Artificial
  Probe
gtatcgtttggagatggagttccag

SEQ ID NO: 117519 - DNA, 25 bp, Artificial
  Probe
gaacctctctgagactcaggtgaag

SEQ ID NO: 117520 - DNA, 25 bp, Artificial
  Probe
ctctctgagactcaggtgaaggtct

SEQ ID NO: 117521 - DNA, 25 bp, Artificial
  Probe
tgtatcgtttggagatggagttcca

SEQ ID NO: 117522 - DNA, 25 bp, Artificial
  Probe
tctctgagactcaggtgaaggtctg

SEQ ID NO: 117523 - DNA, 25 bp, Artificial
  Probe
tgaacctctctgagactcaggtgaa

SEQ ID NO: 117524 - DNA, 25 bp, Artificial
  Probe
ctgaacctctctgagactcaggtga

SEQ ID NO: 117525 - DNA, 25 bp, Artificial
  Probe
tatcgtttggagatggagttccagc

SEQ ID NO: 117526 - DNA, 25 bp, Artificial
  Probe
aacctctctgagactcaggtgaagg

SEQ ID NO: 117527 - DNA, 25 bp, Artificial
  Probe
gtctcactatgtagtccttgctatc

SEQ ID NO: 117528 - DNA, 25 bp, Artificial
  Probe
agtctcactatgtagtccttgctat

SEQ ID NO: 117529 - DNA, 25 bp, Artificial
  Probe
ctggctagagtgtaggttactaatt

SEQ ID NO: 117530 - DNA, 25 bp, Artificial
  Probe
ctcactatgtagtccttgctatcct

SEQ ID NO: 117531 - DNA, 25 bp, Artificial
  Probe
tctcactatgtagtccttgctatcc

SEQ ID NO: 117532 - DNA, 25 bp, Artificial
  Probe
gagtctcactatgtagtccttgcta

SEQ ID NO: 117533 - DNA, 25 bp, Artificial
  Probe
tcactatgtagtccttgctatcctg

SEQ ID NO: 117534 - DNA, 25 bp, Artificial
  Probe
acagagtctcactatgtagtccttg

SEQ ID NO: 117535 - DNA, 25 bp, Artificial
  Probe
gacagagtctcactatgtagtcctt

SEQ ID NO: 117536 - DNA, 25 bp, Artificial
  Probe
ccacctctaattccaacatgattaa

SEQ ID NO: 117537 - DNA, 25 bp, Artificial
  Probe
cctggctagagtgtaggttactaat

SEQ ID NO: 117538 - DNA, 25 bp, Artificial
  Probe
gaggataagactcaatgccagatga

SEQ ID NO: 117539 - DNA, 25 bp, Artificial
  Probe
tactcagatgtactagccagtctct

SEQ ID NO: 117540 - DNA, 25 bp, Artificial
  Probe
ctatgtagtccttgctatcctggaa

SEQ ID NO: 117541 - DNA, 25 bp, Artificial
  Probe
cactatgtagtccttgctatcctgg

SEQ ID NO: 117542 - DNA, 25 bp, Artificial
  Probe
ttctacatcatatagcttccattgc

SEQ ID NO: 117543 - DNA, 25 bp, Artificial
  Probe
tatgtagtccttgctatcctggaac

SEQ ID NO: 117544 - DNA, 25 bp, Artificial
  Probe
agagtctcactatgtagtccttgct

SEQ ID NO: 117545 - DNA, 25 bp, Artificial
  Probe
cagagtctcactatgtagtccttgc

SEQ ID NO: 117546 - DNA, 25 bp, Artificial
  Probe
tggctagagtgtaggttactaatta

SEQ ID NO: 117547 - DNA, 25 bp, Artificial
  Probe
aacttggaggataagactcaatgcc

SEQ ID NO: 117548 - DNA, 25 bp, Artificial
  Probe
tctaattccaacatgattaaggtca

SEQ ID NO: 117549 - DNA, 25 bp, Artificial
  Probe
cctctaattccaacatgattaaggt

SEQ ID NO: 117550 - DNA, 25 bp, Artificial
  Probe
acctctaattccaacatgattaagg

SEQ ID NO: 117551 - DNA, 25 bp, Artificial
  Probe
cacctctaattccaacatgattaag

SEQ ID NO: 117552 - DNA, 25 bp, Artificial
  Probe
ccttctacatcatatagcttccatt

SEQ ID NO: 117553 - DNA, 25 bp, Artificial
  Probe
gacccagaacttcaatccataataa

SEQ ID NO: 117554 - DNA, 25 bp, Artificial
  Probe
actatgtagtccttgctatcctgga

SEQ ID NO: 117555 - DNA, 25 bp, Artificial
  Probe
ggaggataagactcaatgccagatg

SEQ ID NO: 117556 - DNA, 25 bp, Artificial
  Probe
attaccttaagttctgtagcctgag

SEQ ID NO: 117557 - DNA, 25 bp, Artificial
  Probe
gattaccttaagttctgtagcctga

SEQ ID NO: 117558 - DNA, 25 bp, Artificial
  Probe
cattgtctatacttggaatcatagc

SEQ ID NO: 117559 - DNA, 25 bp, Artificial
  Probe
tgacccagaacttcaatccataata

SEQ ID NO: 117560 - DNA, 25 bp, Artificial
  Probe
atctaaagcccacctctaattccaa

SEQ ID NO: 117561 - DNA, 25 bp, Artificial
  Probe
ggattaccttaagttctgtagcctg

SEQ ID NO: 117562 - DNA, 25 bp, Artificial
  Probe
ctctaattccaacatgattaaggtc

SEQ ID NO: 117563 - DNA, 25 bp, Artificial
  Probe
acaaacttggaggataagactcaat

SEQ ID NO: 117564 - DNA, 25 bp, Artificial
  Probe
caaacttggaggataagactcaatg

SEQ ID NO: 117565 - DNA, 25 bp, Artificial
  Probe
actcagatgtactagccagtctctc

SEQ ID NO: 117566 - DNA, 25 bp, Artificial
  Probe
tacaaacttggaggataagactcaa

SEQ ID NO: 117567 - DNA, 25 bp, Artificial
  Probe
aataaatgagagtattcccagcaaa

SEQ ID NO: 117568 - DNA, 25 bp, Artificial
  Probe
gctttgaactcacatagatccacat

SEQ ID NO: 117569 - DNA, 25 bp, Artificial
  Probe
acccagaacttcaatccataataaa

SEQ ID NO: 117570 - DNA, 25 bp, Artificial
  Probe
aaacttggaggataagactcaatgc

SEQ ID NO: 117571 - DNA, 25 bp, Artificial
  Probe
tactaattaaagggacaaagccaca

SEQ ID NO: 117572 - DNA, 25 bp, Artificial
  Probe
caaagtctacatcatcctcttccac

SEQ ID NO: 117573 - DNA, 25 bp, Artificial
  Probe
aaagtctacatcatcctcttccacc

SEQ ID NO: 117574 - DNA, 25 bp, Artificial
  Probe
catgtccaacaagttcacacagaag

SEQ ID NO: 117575 - DNA, 25 bp, Artificial
  Probe
atgtccaacaagttcacacagaagg

SEQ ID NO: 117576 - DNA, 25 bp, Artificial
  Probe
aagtctacatcatcctcttccaccc

SEQ ID NO: 117577 - DNA, 25 bp, Artificial
  Probe
ccatgtccaacaagttcacacagaa

SEQ ID NO: 117578 - DNA, 25 bp, Artificial
  Probe
caccatgtccaacaagttcacacag

SEQ ID NO: 117579 - DNA, 25 bp, Artificial
  Probe
ttatgccacacacaggtcttccttc

SEQ ID NO: 117580 - DNA, 25 bp, Artificial
  Probe
cacctacaccaaccatgccatctag

SEQ ID NO: 117581 - DNA, 25 bp, Artificial
  Probe
accatgtccaacaagttcacacaga

SEQ ID NO: 117582 - DNA, 25 bp, Artificial
  Probe
tctttacgtttctcttccgtctttg

SEQ ID NO: 117583 - DNA, 25 bp, Artificial
  Probe
gtctttacgtttctcttccgtcttt

SEQ ID NO: 117584 - DNA, 25 bp, Artificial
  Probe
gttatgccacacacaggtcttcctt

SEQ ID NO: 117585 - DNA, 25 bp, Artificial
  Probe
ctaccaaacagacctacgtcaccta

SEQ ID NO: 117586 - DNA, 25 bp, Artificial
  Probe
taccaaacagacctacgtcacctac

SEQ ID NO: 117587 - DNA, 25 bp, Artificial
  Probe
caaatcagagctgtgtgagaacctg

SEQ ID NO: 117588 - DNA, 25 bp, Artificial
  Probe
ctttacgtttctcttccgtctttgc

SEQ ID NO: 117589 - DNA, 25 bp, Artificial
  Probe
caacaagttcacacagaagggcaac

SEQ ID NO: 117590 - DNA, 25 bp, Artificial
  Probe
agtctacatcatcctcttccacccg

SEQ ID NO: 117591 - DNA, 25 bp, Artificial
  Probe
tttacgtttctcttccgtctttgct

SEQ ID NO: 117592 - DNA, 25 bp, Artificial
  Probe
cgtctttacgtttctcttccgtctt

SEQ ID NO: 117593 - DNA, 25 bp, Artificial
  Probe
aacagacctacgtcacctacaccaa

SEQ ID NO: 117594 - DNA, 25 bp, Artificial
  Probe
ttacgtttctcttccgtctttgctc

SEQ ID NO: 117595 - DNA, 25 bp, Artificial
  Probe
tgtccaacaagttcacacagaaggg

SEQ ID NO: 117596 - DNA, 25 bp, Artificial
  Probe
ccaaatcagagctgtgtgagaacct

SEQ ID NO: 117597 - DNA, 25 bp, Artificial
  Probe
ataaagataaacacatggttttgca

SEQ ID NO: 117598 - DNA, 25 bp, Artificial
  Probe
aaatcagagctgtgtgagaacctgg

SEQ ID NO: 117599 - DNA, 25 bp, Artificial
  Probe
tacgtttctcttccgtctttgctct

SEQ ID NO: 117600 - DNA, 25 bp, Artificial
  Probe
caaacagacctacgtcacctacacc

SEQ ID NO: 117601 - DNA, 25 bp, Artificial
  Probe
ccaaacagacctacgtcacctacac

SEQ ID NO: 117602 - DNA, 25 bp, Artificial
  Probe
tttgctctgcatgtgttgtctgttt

SEQ ID NO: 117603 - DNA, 25 bp, Artificial
  Probe
aagccaaatcagagctgtgtgagaa

SEQ ID NO: 117604 - DNA, 25 bp, Artificial
  Probe
aaacagacctacgtcacctacacca

SEQ ID NO: 117605 - DNA, 25 bp, Artificial
  Probe
accaaacagacctacgtcacctaca

SEQ ID NO: 117606 - DNA, 25 bp, Artificial
  Probe
aacaagttcacacagaagggcaact

SEQ ID NO: 117607 - DNA, 25 bp, Artificial
  Probe
ctttgctctgcatgtgttgtctgtt

SEQ ID NO: 117608 - DNA, 25 bp, Artificial
  Probe
ccgtctttacgtttctcttccgtct

SEQ ID NO: 117609 - DNA, 25 bp, Artificial
  Probe
gaagccaaatcagagctgtgtgaga

SEQ ID NO: 117610 - DNA, 25 bp, Artificial
  Probe
ttgctctgcatgtgttgtctgtttg

SEQ ID NO: 117611 - DNA, 25 bp, Artificial
  Probe
gtctttgctctgcatgtgttgtctg

SEQ ID NO: 117612 - DNA, 25 bp, Artificial
  Probe
tttctcttccgtctttgctctgcat

SEQ ID NO: 117613 - DNA, 25 bp, Artificial
  Probe
taaagataaacacatggttttgcaa

SEQ ID NO: 117614 - DNA, 25 bp, Artificial
  Probe
caagttcacacagaagggcaacttc

SEQ ID NO: 117615 - DNA, 25 bp, Artificial
  Probe
aagttcacacagaagggcaacttca

SEQ ID NO: 117616 - DNA, 25 bp, Artificial
  Probe
acaagttcacacagaagggcaactt

SEQ ID NO: 117617 - DNA, 25 bp, Artificial
  Probe
ccttcatcatccactcttctccttg

SEQ ID NO: 117618 - DNA, 25 bp, Artificial
  Probe
ctcttcctggattcccttactttaa

SEQ ID NO: 117619 - DNA, 25 bp, Artificial
  Probe
tctcttcctggattcccttacttta

SEQ ID NO: 117620 - DNA, 25 bp, Artificial
  Probe
tcagaactatcactgcttatgcgtt

SEQ ID NO: 117621 - DNA, 25 bp, Artificial
  Probe
ttcagaactatcactgcttatgcgt

SEQ ID NO: 117622 - DNA, 25 bp, Artificial
  Probe
cttcatcatccactcttctccttgc

SEQ ID NO: 117623 - DNA, 25 bp, Artificial
  Probe
ttctcttcctggattcccttacttt

SEQ ID NO: 117624 - DNA, 25 bp, Artificial
  Probe
aattgtatttatgctgtgaggtggg

SEQ ID NO: 117625 - DNA, 25 bp, Artificial
  Probe
catttactgagcctgattggtcttc

SEQ ID NO: 117626 - DNA, 25 bp, Artificial
  Probe
cttctcttcctggattcccttactt

SEQ ID NO: 117627 - DNA, 25 bp, Artificial
  Probe
agaactatcactgcttatgcgtttc

SEQ ID NO: 117628 - DNA, 25 bp, Artificial
  Probe
aaattgtatttatgctgtgaggtgg

SEQ ID NO: 117629 - DNA, 25 bp, Artificial
  Probe
ttcatcatccactcttctccttgct

SEQ ID NO: 117630 - DNA, 25 bp, Artificial
  Probe
atcatccactcttctccttgctcaa

SEQ ID NO: 117631 - DNA, 25 bp, Artificial
  Probe
gtttcagaactatcactgcttatgc

SEQ ID NO: 117632 - DNA, 25 bp, Artificial
  Probe
cctatcttatttgagtacccactgt

SEQ ID NO: 117633 - DNA, 25 bp, Artificial
  Probe
tcctatcttatttgagtacccactg

SEQ ID NO: 117634 - DNA, 25 bp, Artificial
  Probe
tgtttcagaactatcactgcttatg

SEQ ID NO: 117635 - DNA, 25 bp, Artificial
  Probe
atcttatttgagtacccactgtttg

SEQ ID NO: 117636 - DNA, 25 bp, Artificial
  Probe
ctgtttcagaactatcactgcttat

SEQ ID NO: 117637 - DNA, 25 bp, Artificial
  Probe
tcttctcttcctggattcccttact

SEQ ID NO: 117638 - DNA, 25 bp, Artificial
  Probe
gtcttctcttcctggattcccttac

SEQ ID NO: 117639 - DNA, 25 bp, Artificial
  Probe
ctcctatcttatttgagtacccact

SEQ ID NO: 117640 - DNA, 25 bp, Artificial
  Probe
tttcagaactatcactgcttatgcg

SEQ ID NO: 117641 - DNA, 25 bp, Artificial
  Probe
tcttcctggattcccttactttaaa

SEQ ID NO: 117642 - DNA, 25 bp, Artificial
  Probe
tatttcccaagggttcacgatgata

SEQ ID NO: 117643 - DNA, 25 bp, Artificial
  Probe
gaactatcactgcttatgcgtttcc

SEQ ID NO: 117644 - DNA, 25 bp, Artificial
  Probe
tcatcatccactcttctccttgctc

SEQ ID NO: 117645 - DNA, 25 bp, Artificial
  Probe
cagaactatcactgcttatgcgttt

SEQ ID NO: 117646 - DNA, 25 bp, Artificial
  Probe
atttactgagcctgattggtcttcg

SEQ ID NO: 117647 - DNA, 25 bp, Artificial
  Probe
catcatccactcttctccttgctca

SEQ ID NO: 117648 - DNA, 25 bp, Artificial
  Probe
tatttgagtacccactgtttggttt

SEQ ID NO: 117649 - DNA, 25 bp, Artificial
  Probe
ttatttgagtacccactgtttggtt

SEQ ID NO: 117650 - DNA, 25 bp, Artificial
  Probe
atatttcccaagggttcacgatgat

SEQ ID NO: 117651 - DNA, 25 bp, Artificial
  Probe
ctatcttatttgagtacccactgtt

SEQ ID NO: 117652 - DNA, 25 bp, Artificial
  Probe
tcttatttgagtacccactgtttgg

SEQ ID NO: 117653 - DNA, 25 bp, Artificial
  Probe
cttatttgagtacccactgtttggt

SEQ ID NO: 117654 - DNA, 25 bp, Artificial
  Probe
tatcttatttgagtacccactgttt

SEQ ID NO: 117655 - DNA, 25 bp, Artificial
  Probe
gttcacgatgatagccaagcagatg

SEQ ID NO: 117656 - DNA, 25 bp, Artificial
  Probe
gcatttactgagcctgattggtctt

SEQ ID NO: 117657 - DNA, 25 bp, Artificial
  Probe
atttcccaagggttcacgatgatag

SEQ ID NO: 117658 - DNA, 25 bp, Artificial
  Probe
ttcacgatgatagccaagcagatga

SEQ ID NO: 117659 - DNA, 25 bp, Artificial
  Probe
aatatttcccaagggttcacgatga

SEQ ID NO: 117660 - DNA, 25 bp, Artificial
  Probe
cgtcttctcttcctggattccctta

SEQ ID NO: 117661 - DNA, 25 bp, Artificial
  Probe
tcatccactcttctccttgctcaag

SEQ ID NO: 117662 - DNA, 25 bp, Artificial
  Probe
ctgttatgttgtgtatggatgtgta

SEQ ID NO: 117663 - DNA, 25 bp, Artificial
  Probe
gctgttatgttgtgtatggatgtgt

SEQ ID NO: 117664 - DNA, 25 bp, Artificial
  Probe
tgttatgttgtgtatggatgtgtat

SEQ ID NO: 117665 - DNA, 25 bp, Artificial
  Probe
agtgttgactaatgtatccaatggt

SEQ ID NO: 117666 - DNA, 25 bp, Artificial
  Probe
tacaagcagatgactccagatagtt

SEQ ID NO: 117667 - DNA, 25 bp, Artificial
  Probe
gtgttgactaatgtatccaatggtc

SEQ ID NO: 117668 - DNA, 25 bp, Artificial
  Probe
tcatggtattgacaatgctcacata

SEQ ID NO: 117669 - DNA, 25 bp, Artificial
  Probe
catggtattgacaatgctcacatat

SEQ ID NO: 117670 - DNA, 25 bp, Artificial
  Probe
attctgagctgttatgttgtgtatg

SEQ ID NO: 117671 - DNA, 25 bp, Artificial
  Probe
cttattctgagctgttatgttgtgt

SEQ ID NO: 117672 - DNA, 25 bp, Artificial
  Probe
acttattctgagctgttatgttgtg

SEQ ID NO: 117673 - DNA, 25 bp, Artificial
  Probe
ctgagctgttatgttgtgtatggat

SEQ ID NO: 117674 - DNA, 25 bp, Artificial
  Probe
gtacaagcagatgactccagatagt

SEQ ID NO: 117675 - DNA, 25 bp, Artificial
  Probe
gagctgttatgttgtgtatggatgt

SEQ ID NO: 117676 - DNA, 25 bp, Artificial
  Probe
tgagctgttatgttgtgtatggatg

SEQ ID NO: 117677 - DNA, 25 bp, Artificial
  Probe
ttctgagctgttatgttgtgtatgg

SEQ ID NO: 117678 - DNA, 25 bp, Artificial
  Probe
tagacagtacctggatgaagatatg

SEQ ID NO: 117679 - DNA, 25 bp, Artificial
  Probe
agctgttatgttgtgtatggatgtg

SEQ ID NO: 117680 - DNA, 25 bp, Artificial
  Probe
aagtgtgttaatctctatcctgtta

SEQ ID NO: 117681 - DNA, 25 bp, Artificial
  Probe
taagtgtgttaatctctatcctgtt

SEQ ID NO: 117682 - DNA, 25 bp, Artificial
  Probe
acagtacctggatgaagatatgctc

SEQ ID NO: 117683 - DNA, 25 bp, Artificial
  Probe
gacagtacctggatgaagatatgct

SEQ ID NO: 117684 - DNA, 25 bp, Artificial
  Probe
agacagtacctggatgaagatatgc

SEQ ID NO: 117685 - DNA, 25 bp, Artificial
  Probe
ctttaatgcccaatttcccttcttt

SEQ ID NO: 117686 - DNA, 25 bp, Artificial
  Probe
tctgagctgttatgttgtgtatgga

SEQ ID NO: 117687 - DNA, 25 bp, Artificial
  Probe
gactaatgtatccaatggtcatggt

SEQ ID NO: 117688 - DNA, 25 bp, Artificial
  Probe
ttattctgagctgttatgttgtgta

SEQ ID NO: 117689 - DNA, 25 bp, Artificial
  Probe
aatagacagtacctggatgaagata

SEQ ID NO: 117690 - DNA, 25 bp, Artificial
  Probe
tagtgttgactaatgtatccaatgg

SEQ ID NO: 117691 - DNA, 25 bp, Artificial
  Probe
actaatgtatccaatggtcatggta

SEQ ID NO: 117692 - DNA, 25 bp, Artificial
  Probe
tattctgagctgttatgttgtgtat

SEQ ID NO: 117693 - DNA, 25 bp, Artificial
  Probe
agtgtgttaatctctatcctgttaa

SEQ ID NO: 117694 - DNA, 25 bp, Artificial
  Probe
ttaagtgtgttaatctctatcctgt

SEQ ID NO: 117695 - DNA, 25 bp, Artificial
  Probe
tacttattctgagctgttatgttgt

SEQ ID NO: 117696 - DNA, 25 bp, Artificial
  Probe
atagacagtacctggatgaagatat

SEQ ID NO: 117697 - DNA, 25 bp, Artificial
  Probe
tgaagatatgctcctgaaagtgcta

SEQ ID NO: 117698 - DNA, 25 bp, Artificial
  Probe
gaagatatgctcctgaaagtgctag

SEQ ID NO: 117699 - DNA, 25 bp, Artificial
  Probe
atgtatccaatggtcatggtattga

SEQ ID NO: 117700 - DNA, 25 bp, Artificial
  Probe
gttatgttgtgtatggatgtgtata

SEQ ID NO: 117701 - DNA, 25 bp, Artificial
  Probe
aagatatgctcctgaaagtgctaga

SEQ ID NO: 117702 - DNA, 25 bp, Artificial
  Probe
gatgaagatatgctcctgaaagtgc

SEQ ID NO: 117703 - DNA, 25 bp, Artificial
  Probe
tacctggatgaagatatgctcctga

SEQ ID NO: 117704 - DNA, 25 bp, Artificial
  Probe
aatgtatccaatggtcatggtattg

SEQ ID NO: 117705 - DNA, 25 bp, Artificial
  Probe
tgacaatgctcacatatgatgaaga

SEQ ID NO: 117706 - DNA, 25 bp, Artificial
  Probe
ttgacaatgctcacatatgatgaag

SEQ ID NO: 117707 - DNA, 25 bp, Artificial
  Probe
tgttgtctcttctccttatgggtag

SEQ ID NO: 117708 - DNA, 25 bp, Artificial
  Probe
ctgttgtctcttctccttatgggta

SEQ ID NO: 117709 - DNA, 25 bp, Artificial
  Probe
caaagacattgtttcatcctccatg

SEQ ID NO: 117710 - DNA, 25 bp, Artificial
  Probe
gcaaagacattgtttcatcctccat

SEQ ID NO: 117711 - DNA, 25 bp, Artificial
  Probe
cgagagagttagctgactttacata

SEQ ID NO: 117712 - DNA, 25 bp, Artificial
  Probe
aaagacattgtttcatcctccatgc

SEQ ID NO: 117713 - DNA, 25 bp, Artificial
  Probe
ctaagaaggagcaccatcatcacca

SEQ ID NO: 117714 - DNA, 25 bp, Artificial
  Probe
gttgtctcttctccttatgggtagg

SEQ ID NO: 117715 - DNA, 25 bp, Artificial
  Probe
taagaaggagcaccatcatcaccac

SEQ ID NO: 117716 - DNA, 25 bp, Artificial
  Probe
agagagttagctgactttacataga

SEQ ID NO: 117717 - DNA, 25 bp, Artificial
  Probe
gagagttagctgactttacatagag

SEQ ID NO: 117718 - DNA, 25 bp, Artificial
  Probe
gagagagttagctgactttacatag

SEQ ID NO: 117719 - DNA, 25 bp, Artificial
  Probe
ccgagagagttagctgactttacat

SEQ ID NO: 117720 - DNA, 25 bp, Artificial
  Probe
ttgtctcttctccttatgggtaggg

SEQ ID NO: 117721 - DNA, 25 bp, Artificial
  Probe
acctaagaaggagcaccatcatcac

SEQ ID NO: 117722 - DNA, 25 bp, Artificial
  Probe
cacctaagaaggagcaccatcatca

SEQ ID NO: 117723 - DNA, 25 bp, Artificial
  Probe
gaccgagagagttagctgactttac

SEQ ID NO: 117724 - DNA, 25 bp, Artificial
  Probe
agagttagctgactttacatagagc

SEQ ID NO: 117725 - DNA, 25 bp, Artificial
  Probe
tgaccgagagagttagctgacttta

SEQ ID NO: 117726 - DNA, 25 bp, Artificial
  Probe
gagttagctgactttacatagagcg

SEQ ID NO: 117727 - DNA, 25 bp, Artificial
  Probe
tagctgactttacatagagcggatt

SEQ ID NO: 117728 - DNA, 25 bp, Artificial
  Probe
ttagctgactttacatagagcggat

SEQ ID NO: 117729 - DNA, 25 bp, Artificial
  Probe
ctgactttacatagagcggattgca

SEQ ID NO: 117730 - DNA, 25 bp, Artificial
  Probe
gctgttgtctcttctccttatgggt

SEQ ID NO: 117731 - DNA, 25 bp, Artificial
  Probe
accgagagagttagctgactttaca

SEQ ID NO: 117732 - DNA, 25 bp, Artificial
  Probe
aagacattgtttcatcctccatgcc

SEQ ID NO: 117733 - DNA, 25 bp, Artificial
  Probe
cgcaaagacattgtttcatcctcca

SEQ ID NO: 117734 - DNA, 25 bp, Artificial
  Probe
cctaagaaggagcaccatcatcacc

SEQ ID NO: 117735 - DNA, 25 bp, Artificial
  Probe
ccacctaagaaggagcaccatcatc

SEQ ID NO: 117736 - DNA, 25 bp, Artificial
  Probe
agcttcccgattaactgaaataaaa

SEQ ID NO: 117737 - DNA, 25 bp, Artificial
  Probe
gttagctgactttacatagagcgga

SEQ ID NO: 117738 - DNA, 25 bp, Artificial
  Probe
agttagctgactttacatagagcgg

SEQ ID NO: 117739 - DNA, 25 bp, Artificial
  Probe
caaagcttcccgattaactgaaata

SEQ ID NO: 117740 - DNA, 25 bp, Artificial
  Probe
agctgttgtctcttctccttatggg

SEQ ID NO: 117741 - DNA, 25 bp, Artificial
  Probe
aagcttcccgattaactgaaataaa

SEQ ID NO: 117742 - DNA, 25 bp, Artificial
  Probe
aaagcttcccgattaactgaaataa

SEQ ID NO: 117743 - DNA, 25 bp, Artificial
  Probe
acaaagcttcccgattaactgaaat

SEQ ID NO: 117744 - DNA, 25 bp, Artificial
  Probe
agctgactttacatagagcggattg

SEQ ID NO: 117745 - DNA, 25 bp, Artificial
  Probe
gacaaagcttcccgattaactgaaa

SEQ ID NO: 117746 - DNA, 25 bp, Artificial
  Probe
cacagttgcagaaaagtacaaacac

SEQ ID NO: 117747 - DNA, 25 bp, Artificial
  Probe
ccttatgggtagggctctgacaaag

SEQ ID NO: 117748 - DNA, 25 bp, Artificial
  Probe
ctcttctccttatgggtagggctct

SEQ ID NO: 117749 - DNA, 25 bp, Artificial
  Probe
tctcttctccttatgggtagggctc

SEQ ID NO: 117750 - DNA, 25 bp, Artificial
  Probe
gtgaccgagagagttagctgacttt

SEQ ID NO: 117751 - DNA, 25 bp, Artificial
  Probe
gactttacatagagcggattgcaaa

SEQ ID NO: 117752 - DNA, 25 bp, Artificial
  Probe
cactggatgtttcttaatctcttgt

SEQ ID NO: 117753 - DNA, 25 bp, Artificial
  Probe
actggatgtttcttaatctcttgtt

SEQ ID NO: 117754 - DNA, 25 bp, Artificial
  Probe
atggacactggatgtttcttaatct

SEQ ID NO: 117755 - DNA, 25 bp, Artificial
  Probe
ggacactggatgtttcttaatctct

SEQ ID NO: 117756 - DNA, 25 bp, Artificial
  Probe
tggacactggatgtttcttaatctc

SEQ ID NO: 117757 - DNA, 25 bp, Artificial
  Probe
acactggatgtttcttaatctcttg

SEQ ID NO: 117758 - DNA, 25 bp, Artificial
  Probe
gacactggatgtttcttaatctctt

SEQ ID NO: 117759 - DNA, 25 bp, Artificial
  Probe
catggacactggatgtttcttaatc

SEQ ID NO: 117760 - DNA, 25 bp, Artificial
  Probe
tcatggacactggatgtttcttaat

SEQ ID NO: 117761 - DNA, 25 bp, Artificial
  Probe
ttcatggacactggatgtttcttaa

SEQ ID NO: 117762 - DNA, 25 bp, Artificial
  Probe
ctggatgtttcttaatctcttgttt

SEQ ID NO: 117763 - DNA, 25 bp, Artificial
  Probe
gttcatggacactggatgtttctta

SEQ ID NO: 117764 - DNA, 25 bp, Artificial
  Probe
gaagttcatggacactggatgtttc

SEQ ID NO: 117765 - DNA, 25 bp, Artificial
  Probe
agttcatggacactggatgtttctt

SEQ ID NO: 117766 - DNA, 25 bp, Artificial
  Probe
aagttcatggacactggatgtttct

SEQ ID NO: 117767 - DNA, 25 bp, Artificial
  Probe
tggaagttcatggacactggatgtt

SEQ ID NO: 117768 - DNA, 25 bp, Artificial
  Probe
ggaagttcatggacactggatgttt

SEQ ID NO: 117769 - DNA, 25 bp, Artificial
  Probe
cagtgagtgtggaagttcatggaca

SEQ ID NO: 117770 - DNA, 25 bp, Artificial
  Probe
tggatgtttcttaatctcttgtttt

SEQ ID NO: 117771 - DNA, 25 bp, Artificial
  Probe
gtggaagttcatggacactggatgt

SEQ ID NO: 117772 - DNA, 25 bp, Artificial
  Probe
tgtggaagttcatggacactggatg

SEQ ID NO: 117773 - DNA, 25 bp, Artificial
  Probe
gtgtggaagttcatggacactggat

SEQ ID NO: 117774 - DNA, 25 bp, Artificial
  Probe
agtgagtgtggaagttcatggacac

SEQ ID NO: 117775 - DNA, 25 bp, Artificial
  Probe
aagcccttcaaagccaaatacaaac

SEQ ID NO: 117776 - DNA, 25 bp, Artificial
  Probe
caagcccttcaaagccaaatacaaa

SEQ ID NO: 117777 - DNA, 25 bp, Artificial
  Probe
cttcaaagccaaatacaaactggtc

SEQ ID NO: 117778 - DNA, 25 bp, Artificial
  Probe
ttcagagaacctcaagatccacaaa

SEQ ID NO: 117779 - DNA, 25 bp, Artificial
  Probe
caaagccaaatacaaactggtcaac

SEQ ID NO: 117780 - DNA, 25 bp, Artificial
  Probe
tcaaagccaaatacaaactggtcaa

SEQ ID NO: 117781 - DNA, 25 bp, Artificial
  Probe
ttcaaagccaaatacaaactggtca

SEQ ID NO: 117782 - DNA, 25 bp, Artificial
  Probe
caagatgtgcgataagtcctacacg

SEQ ID NO: 117783 - DNA, 25 bp, Artificial
  Probe
gcccttcaaagccaaatacaaactg

SEQ ID NO: 117784 - DNA, 25 bp, Artificial
  Probe
agcccttcaaagccaaatacaaact

SEQ ID NO: 117785 - DNA, 25 bp, Artificial
  Probe
ccttcaaagccaaatacaaactggt

SEQ ID NO: 117786 - DNA, 25 bp, Artificial
  Probe
caaatacaaactggtcaaccacatc

SEQ ID NO: 117787 - DNA, 25 bp, Artificial
  Probe
aaagccaaatacaaactggtcaacc

SEQ ID NO: 117788 - DNA, 25 bp, Artificial
  Probe
cgctctcttccaattttaacgaatg

SEQ ID NO: 117789 - DNA, 25 bp, Artificial
  Probe
aaatacaaactggtcaaccacatcc

SEQ ID NO: 117790 - DNA, 25 bp, Artificial
  Probe
cccttcaaagccaaatacaaactgg

SEQ ID NO: 117791 - DNA, 25 bp, Artificial
  Probe
ccaaatacaaactggtcaaccacat

SEQ ID NO: 117792 - DNA, 25 bp, Artificial
  Probe
gttcagagaacctcaagatccacaa

SEQ ID NO: 117793 - DNA, 25 bp, Artificial
  Probe
atgaaggtccatgagtcctcttctc

SEQ ID NO: 117794 - DNA, 25 bp, Artificial
  Probe
ctctcttccaattttaacgaatggt

SEQ ID NO: 117795 - DNA, 25 bp, Artificial
  Probe
cagagaacctcaagatccacaaaag

SEQ ID NO: 117796 - DNA, 25 bp, Artificial
  Probe
gctctcttccaattttaacgaatgg

SEQ ID NO: 117797 - DNA, 25 bp, Artificial
  Probe
gcaagatgtgcgataagtcctacac

SEQ ID NO: 117798 - DNA, 25 bp, Artificial
  Probe
tcttccaattttaacgaatggtacg

SEQ ID NO: 117799 - DNA, 25 bp, Artificial
  Probe
tcagagaacctcaagatccacaaaa

SEQ ID NO: 117800 - DNA, 25 bp, Artificial
  Probe
tctcttccaattttaacgaatggta

SEQ ID NO: 117801 - DNA, 25 bp, Artificial
  Probe
ctcttccaattttaacgaatggtac

SEQ ID NO: 117802 - DNA, 25 bp, Artificial
  Probe
catgaaggtccatgagtcctcttct

SEQ ID NO: 117803 - DNA, 25 bp, Artificial
  Probe
aagccaaatacaaactggtcaacca

SEQ ID NO: 117804 - DNA, 25 bp, Artificial
  Probe
gcaagcccttcaaagccaaatacaa

SEQ ID NO: 117805 - DNA, 25 bp, Artificial
  Probe
acatgaaggtccatgagtcctcttc

SEQ ID NO: 117806 - DNA, 25 bp, Artificial
  Probe
aatacaaactggtcaaccacatccg

SEQ ID NO: 117807 - DNA, 25 bp, Artificial
  Probe
agagaacctcaagatccacaaaagg

SEQ ID NO: 117808 - DNA, 25 bp, Artificial
  Probe
gagaacctcaagatccacaaaagga

SEQ ID NO: 117809 - DNA, 25 bp, Artificial
  Probe
gaaggtccatgagtcctcttctcag

SEQ ID NO: 117810 - DNA, 25 bp, Artificial
  Probe
cacatgaaggtccatgagtcctctt

SEQ ID NO: 117811 - DNA, 25 bp, Artificial
  Probe
agaacctcaagatccacaaaaggac

SEQ ID NO: 117812 - DNA, 25 bp, Artificial
  Probe
tgcaagatgtgcgataagtcctaca

SEQ ID NO: 117813 - DNA, 25 bp, Artificial
  Probe
agccaaatacaaactggtcaaccac

SEQ ID NO: 117814 - DNA, 25 bp, Artificial
  Probe
aacacatgaaggtccatgagtcctc

SEQ ID NO: 117815 - DNA, 25 bp, Artificial
  Probe
cgttcagagaacctcaagatccaca

SEQ ID NO: 117816 - DNA, 25 bp, Artificial
  Probe
gccaaatacaaactggtcaaccaca

SEQ ID NO: 117817 - DNA, 25 bp, Artificial
  Probe
cttccaattttaacgaatggtacgt

SEQ ID NO: 117818 - DNA, 25 bp, Artificial
  Probe
tgaaggtccatgagtcctcttctca

SEQ ID NO: 117819 - DNA, 25 bp, Artificial
  Probe
caaacacatgaaggtccatgagtcc

SEQ ID NO: 117820 - DNA, 25 bp, Artificial
  Probe
tcagagactggaccttagaagatag

SEQ ID NO: 117821 - DNA, 25 bp, Artificial
  Probe
gtcagagactggaccttagaagata

SEQ ID NO: 117822 - DNA, 25 bp, Artificial
  Probe
accttagaagatagctctcaagaac

SEQ ID NO: 117823 - DNA, 25 bp, Artificial
  Probe
cagagactggaccttagaagatagc

SEQ ID NO: 117824 - DNA, 25 bp, Artificial
  Probe
ccttagaagatagctctcaagaact

SEQ ID NO: 117825 - DNA, 25 bp, Artificial
  Probe
gaccttagaagatagctctcaagaa

SEQ ID NO: 117826 - DNA, 25 bp, Artificial
  Probe
ggaccttagaagatagctctcaaga

SEQ ID NO: 117827 - DNA, 25 bp, Artificial
  Probe
tggaccttagaagatagctctcaag

SEQ ID NO: 117828 - DNA, 25 bp, Artificial
  Probe
ctggaccttagaagatagctctcaa

SEQ ID NO: 117829 - DNA, 25 bp, Artificial
  Probe
cttccctatgtctccaatatcctga

SEQ ID NO: 117830 - DNA, 25 bp, Artificial
  Probe
tgtcagagactggaccttagaagat

SEQ ID NO: 117831 - DNA, 25 bp, Artificial
  Probe
agagactggaccttagaagatagct

SEQ ID NO: 117832 - DNA, 25 bp, Artificial
  Probe
gactggaccttagaagatagctctc

SEQ ID NO: 117833 - DNA, 25 bp, Artificial
  Probe
agactggaccttagaagatagctct

SEQ ID NO: 117834 - DNA, 25 bp, Artificial
  Probe
tctgcttccctatgtctccaatatc

SEQ ID NO: 117835 - DNA, 25 bp, Artificial
  Probe
gagactggaccttagaagatagctc

SEQ ID NO: 117836 - DNA, 25 bp, Artificial
  Probe
actggaccttagaagatagctctca

SEQ ID NO: 117837 - DNA, 25 bp, Artificial
  Probe
gtctgcttccctatgtctccaatat

SEQ ID NO: 117838 - DNA, 25 bp, Artificial
  Probe
cttagaagatagctctcaagaactt

SEQ ID NO: 117839 - DNA, 25 bp, Artificial
  Probe
ttccctatgtctccaatatcctgag

SEQ ID NO: 117840 - DNA, 25 bp, Artificial
  Probe
ctgtcagagactggaccttagaaga

SEQ ID NO: 117841 - DNA, 25 bp, Artificial
  Probe
actgtcagagactggaccttagaag

SEQ ID NO: 117842 - DNA, 25 bp, Artificial
  Probe
gcttccctatgtctccaatatcctg

SEQ ID NO: 117843 - DNA, 25 bp, Artificial
  Probe
ctgcttccctatgtctccaatatcc

SEQ ID NO: 117844 - DNA, 25 bp, Artificial
  Probe
agtctgcttccctatgtctccaata

SEQ ID NO: 117845 - DNA, 25 bp, Artificial
  Probe
tgcttccctatgtctccaatatcct

SEQ ID NO: 117846 - DNA, 25 bp, Artificial
  Probe
cactgtcagagactggaccttagaa

SEQ ID NO: 117847 - DNA, 25 bp, Artificial
  Probe
gaagatagctctcaagaactttgga

SEQ ID NO: 117848 - DNA, 25 bp, Artificial
  Probe
agaagatagctctcaagaactttgg

SEQ ID NO: 117849 - DNA, 25 bp, Artificial
  Probe
aagatagctctcaagaactttggag

SEQ ID NO: 117850 - DNA, 25 bp, Artificial
  Probe
tagaagatagctctcaagaactttg

SEQ ID NO: 117851 - DNA, 25 bp, Artificial
  Probe
tccctatgtctccaatatcctgagc

SEQ ID NO: 117852 - DNA, 25 bp, Artificial
  Probe
ttagaagatagctctcaagaacttt

SEQ ID NO: 117853 - DNA, 25 bp, Artificial
  Probe
cagtctgcttccctatgtctccaat

SEQ ID NO: 117854 - DNA, 25 bp, Artificial
  Probe
cctatgtctccaatatcctgagccc

SEQ ID NO: 117855 - DNA, 25 bp, Artificial
  Probe
ccctatgtctccaatatcctgagcc

SEQ ID NO: 117856 - DNA, 25 bp, Artificial
  Probe
gatagctctcaagaactttggagat

SEQ ID NO: 117857 - DNA, 25 bp, Artificial
  Probe
tagctctcaagaactttggagataa

SEQ ID NO: 117858 - DNA, 25 bp, Artificial
  Probe
agatagctctcaagaactttggaga

SEQ ID NO: 117859 - DNA, 25 bp, Artificial
  Probe
ccactgtcagagactggaccttaga

SEQ ID NO: 117860 - DNA, 25 bp, Artificial
  Probe
atagctctcaagaactttggagata

SEQ ID NO: 117861 - DNA, 25 bp, Artificial
  Probe
gctctctgtgtgggaagactttctc

SEQ ID NO: 117862 - DNA, 25 bp, Artificial
  Probe
ctctctgtgtgggaagactttctcc

SEQ ID NO: 117863 - DNA, 25 bp, Artificial
  Probe
aactccttgtcggtcaaaagtgaag

SEQ ID NO: 117864 - DNA, 25 bp, Artificial
  Probe
gaactccttgtcggtcaaaagtgaa

SEQ ID NO: 117865 - DNA, 25 bp, Artificial
  Probe
atttagattcaagccctaacctctg

SEQ ID NO: 117866 - DNA, 25 bp, Artificial
  Probe
aatttagattcaagccctaacctct

SEQ ID NO: 117867 - DNA, 25 bp, Artificial
  Probe
agaatttagattcaagccctaacct

SEQ ID NO: 117868 - DNA, 25 bp, Artificial
  Probe
gcaagaatttagattcaagccctaa

SEQ ID NO: 117869 - DNA, 25 bp, Artificial
  Probe
gaatttagattcaagccctaacctc

SEQ ID NO: 117870 - DNA, 25 bp, Artificial
  Probe
aagaatttagattcaagccctaacc

SEQ ID NO: 117871 - DNA, 25 bp, Artificial
  Probe
caagaatttagattcaagccctaac

SEQ ID NO: 117872 - DNA, 25 bp, Artificial
  Probe
tttagattcaagccctaacctctgc

SEQ ID NO: 117873 - DNA, 25 bp, Artificial
  Probe
ctaggcaagaatttagattcaagcc

SEQ ID NO: 117874 - DNA, 25 bp, Artificial
  Probe
ttagattcaagccctaacctctgcc

SEQ ID NO: 117875 - DNA, 25 bp, Artificial
  Probe
ggcaagaatttagattcaagcccta

SEQ ID NO: 117876 - DNA, 25 bp, Artificial
  Probe
taggcaagaatttagattcaagccc

SEQ ID NO: 117877 - DNA, 25 bp, Artificial
  Probe
caacttttcacctcccgttcttagt

SEQ ID NO: 117878 - DNA, 25 bp, Artificial
  Probe
gttcttagtgaagatgggagggaac

SEQ ID NO: 117879 - DNA, 25 bp, Artificial
  Probe
ttcttagtgaagatgggagggaacg

SEQ ID NO: 117880 - DNA, 25 bp, Artificial
  Probe
cgttcttagtgaagatgggagggaa

SEQ ID NO: 117881 - DNA, 25 bp, Artificial
  Probe
aacttttcacctcccgttcttagtg

SEQ ID NO: 117882 - DNA, 25 bp, Artificial
  Probe
ccaacttttcacctcccgttcttag

SEQ ID NO: 117883 - DNA, 25 bp, Artificial
  Probe
cctaggcaagaatttagattcaagc

SEQ ID NO: 117884 - DNA, 25 bp, Artificial
  Probe
cttatcacctcgccgtctagtttgg

SEQ ID NO: 117885 - DNA, 25 bp, Artificial
  Probe
ccttatcacctcgccgtctagtttg

SEQ ID NO: 117886 - DNA, 25 bp, Artificial
  Probe
aggcaagaatttagattcaagccct

SEQ ID NO: 117887 - DNA, 25 bp, Artificial
  Probe
aaatacacggagccatttgctgaag

SEQ ID NO: 117888 - DNA, 25 bp, Artificial
  Probe
gaaatacacggagccatttgctgaa

SEQ ID NO: 117889 - DNA, 25 bp, Artificial
  Probe
accaacttttcacctcccgttctta

SEQ ID NO: 117890 - DNA, 25 bp, Artificial
  Probe
cacctcccgttcttagtgaagatgg

SEQ ID NO: 117891 - DNA, 25 bp, Artificial
  Probe
ctctccagccaaaccaacttttcac

SEQ ID NO: 117892 - DNA, 25 bp, Artificial
  Probe
caaaccaacttttcacctcccgttc

SEQ ID NO: 117893 - DNA, 25 bp, Artificial
  Probe
aaccaacttttcacctcccgttctt

SEQ ID NO: 117894 - DNA, 25 bp, Artificial
  Probe
aaaccaacttttcacctcccgttct

SEQ ID NO: 117895 - DNA, 25 bp, Artificial
  Probe
tcacctcccgttcttagtgaagatg

SEQ ID NO: 117896 - DNA, 25 bp, Artificial
  Probe
acttttcacctcccgttcttagtga

SEQ ID NO: 117897 - DNA, 25 bp, Artificial
  Probe
caggagtcagtgttgtagtaactaa

SEQ ID NO: 117898 - DNA, 25 bp, Artificial
  Probe
atcatagcctagcaccaatgtacta

SEQ ID NO: 117899 - DNA, 25 bp, Artificial
  Probe
tatcatagcctagcaccaatgtact

SEQ ID NO: 117900 - DNA, 25 bp, Artificial
  Probe
gtatcatagcctagcaccaatgtac

SEQ ID NO: 117901 - DNA, 25 bp, Artificial
  Probe
ccaggagtcagtgttgtagtaacta

SEQ ID NO: 117902 - DNA, 25 bp, Artificial
  Probe
ccgccatagttgtgtatgatattac

SEQ ID NO: 117903 - DNA, 25 bp, Artificial
  Probe
gccgccatagttgtgtatgatatta

SEQ ID NO: 117904 - DNA, 25 bp, Artificial
  Probe
tcatagcctagcaccaatgtactac

SEQ ID NO: 117905 - DNA, 25 bp, Artificial
  Probe
ttatggagacatcagctaagacatc

SEQ ID NO: 117906 - DNA, 25 bp, Artificial
  Probe
gcaagcaagtcctaatattgtgata

SEQ ID NO: 117907 - DNA, 25 bp, Artificial
  Probe
aagcaagtcctaatattgtgatagc

SEQ ID NO: 117908 - DNA, 25 bp, Artificial
  Probe
tatggagacatcagctaagacatca

SEQ ID NO: 117909 - DNA, 25 bp, Artificial
  Probe
agacatcagctaagacatcaatgaa

SEQ ID NO: 117910 - DNA, 25 bp, Artificial
  Probe
gagacatcagctaagacatcaatga

SEQ ID NO: 117911 - DNA, 25 bp, Artificial
  Probe
acatcagctaagacatcaatgaatg

SEQ ID NO: 117912 - DNA, 25 bp, Artificial
  Probe
ggcaagcaagtcctaatattgtgat

SEQ ID NO: 117913 - DNA, 25 bp, Artificial
  Probe
tggagacatcagctaagacatcaat

SEQ ID NO: 117914 - DNA, 25 bp, Artificial
  Probe
ggagacatcagctaagacatcaatg

SEQ ID NO: 117915 - DNA, 25 bp, Artificial
  Probe
gcaagtcctaatattgtgatagctt

SEQ ID NO: 117916 - DNA, 25 bp, Artificial
  Probe
gacatcagctaagacatcaatgaat

SEQ ID NO: 117917 - DNA, 25 bp, Artificial
  Probe
atgcagatgacaacagcttattatt

SEQ ID NO: 117918 - DNA, 25 bp, Artificial
  Probe
ctatgcagatgacaacagcttatta

SEQ ID NO: 117919 - DNA, 25 bp, Artificial
  Probe
atggagacatcagctaagacatcaa

SEQ ID NO: 117920 - DNA, 25 bp, Artificial
  Probe
cctatgcagatgacaacagcttatt

SEQ ID NO: 117921 - DNA, 25 bp, Artificial
  Probe
aaactgggttaaagaacttcaaagg

SEQ ID NO: 117922 - DNA, 25 bp, Artificial
  Probe
ttaaagaacttcaaaggcaagcaag

SEQ ID NO: 117923 - DNA, 25 bp, Artificial
  Probe
gttcttctaggagagtctgctgttg

SEQ ID NO: 117924 - DNA, 25 bp, Artificial
  Probe
catagcctagcaccaatgtactacc

SEQ ID NO: 117925 - DNA, 25 bp, Artificial
  Probe
ctttctaacccaaactgtgtgtctt

SEQ ID NO: 117926 - DNA, 25 bp, Artificial
  Probe
agccgccatagttgtgtatgatatt

SEQ ID NO: 117927 - DNA, 25 bp, Artificial
  Probe
aagccgccatagttgtgtatgatat

SEQ ID NO: 117928 - DNA, 25 bp, Artificial
  Probe
ggtatcatagcctagcaccaatgta

SEQ ID NO: 117929 - DNA, 25 bp, Artificial
  Probe
gttaaagaacttcaaaggcaagcaa

SEQ ID NO: 117930 - DNA, 25 bp, Artificial
  Probe
tatgcagatgacaacagcttattat

SEQ ID NO: 117931 - DNA, 25 bp, Artificial
  Probe
cgccatagttgtgtatgatattaca

SEQ ID NO: 117932 - DNA, 25 bp, Artificial
  Probe
caagaacggtatcatagcctagcac

SEQ ID NO: 117933 - DNA, 25 bp, Artificial
  Probe
aggaagaggagtagaccttactgag

SEQ ID NO: 117934 - DNA, 25 bp, Artificial
  Probe
gaggaagaggagtagaccttactga

SEQ ID NO: 117935 - DNA, 25 bp, Artificial
  Probe
agaggaagaggagtagaccttactg

SEQ ID NO: 117936 - DNA, 25 bp, Artificial
  Probe
cagaggaagaggagtagaccttact

SEQ ID NO: 117937 - DNA, 25 bp, Artificial
  Probe
tcctatgcagatgacaacagcttat

SEQ ID NO: 117938 - DNA, 25 bp, Artificial
  Probe
gttcaaactggttcttctaggagag

SEQ ID NO: 117939 - DNA, 25 bp, Artificial
  Probe
aaggcaagcaagtcctaatattgtg

SEQ ID NO: 117940 - DNA, 25 bp, Artificial
  Probe
caagcaagtcctaatattgtgatag

SEQ ID NO: 117941 - DNA, 25 bp, Artificial
  Probe
tttctaacccaaactgtgtgtcttg

SEQ ID NO: 117942 - DNA, 25 bp, Artificial
  Probe
ctacatcgactatggcaatagagag

SEQ ID NO: 117943 - DNA, 25 bp, Artificial
  Probe
tcttctacatcgactatggcaatag

SEQ ID NO: 117944 - DNA, 25 bp, Artificial
  Probe
tacatcgactatggcaatagagaga

SEQ ID NO: 117945 - DNA, 25 bp, Artificial
  Probe
catcgactatggcaatagagagatc

SEQ ID NO: 117946 - DNA, 25 bp, Artificial
  Probe
ggtaatgcctgtactggaagagaag

SEQ ID NO: 117947 - DNA, 25 bp, Artificial
  Probe
gtcttctacatcgactatggcaata

SEQ ID NO: 117948 - DNA, 25 bp, Artificial
  Probe
cgactatggcaatagagagatcctg

SEQ ID NO: 117949 - DNA, 25 bp, Artificial
  Probe
acatcgactatggcaatagagagat

SEQ ID NO: 117950 - DNA, 25 bp, Artificial
  Probe
atcgactatggcaatagagagatcc

SEQ ID NO: 117951 - DNA, 25 bp, Artificial
  Probe
atgaaagactgtgtgttagtgaagg

SEQ ID NO: 117952 - DNA, 25 bp, Artificial
  Probe
catggtagaagttcggaaggagaag

SEQ ID NO: 117953 - DNA, 25 bp, Artificial
  Probe
ttctacatcgactatggcaatagag

SEQ ID NO: 117954 - DNA, 25 bp, Artificial
  Probe
cttctacatcgactatggcaataga

SEQ ID NO: 117955 - DNA, 25 bp, Artificial
  Probe
tctacatcgactatggcaatagaga

SEQ ID NO: 117956 - DNA, 25 bp, Artificial
  Probe
aagactgtgtgttagtgaagggtat

SEQ ID NO: 117957 - DNA, 25 bp, Artificial
  Probe
gaaggactcgtcatggtagaagttc

SEQ ID NO: 117958 - DNA, 25 bp, Artificial
  Probe
tgtcttctacatcgactatggcaat

SEQ ID NO: 117959 - DNA, 25 bp, Artificial
  Probe
aaagactgtgtgttagtgaagggta

SEQ ID NO: 117960 - DNA, 25 bp, Artificial
  Probe
tagaagttcggaaggagaagcagtt

SEQ ID NO: 117961 - DNA, 25 bp, Artificial
  Probe
tcatggtagaagttcggaaggagaa

SEQ ID NO: 117962 - DNA, 25 bp, Artificial
  Probe
catgaaagactgtgtgttagtgaag

SEQ ID NO: 117963 - DNA, 25 bp, Artificial
  Probe
gtaatgcctgtactggaagagaagg

SEQ ID NO: 117964 - DNA, 25 bp, Artificial
  Probe
tcgactatggcaatagagagatcct

SEQ ID NO: 117965 - DNA, 25 bp, Artificial
  Probe
taatgcctgtactggaagagaagga

SEQ ID NO: 117966 - DNA, 25 bp, Artificial
  Probe
ccatgaaagactgtgtgttagtgaa

SEQ ID NO: 117967 - DNA, 25 bp, Artificial
  Probe
ttctatgtgcaagatgtggagactg

SEQ ID NO: 117968 - DNA, 25 bp, Artificial
  Probe
aggtaatgcctgtactggaagagaa

SEQ ID NO: 117969 - DNA, 25 bp, Artificial
  Probe
gtcatggtagaagttcggaaggaga

SEQ ID NO: 117970 - DNA, 25 bp, Artificial
  Probe
aaggaaggactcgtcatggtagaag

SEQ ID NO: 117971 - DNA, 25 bp, Artificial
  Probe
gaaggaaggactcgtcatggtagaa

SEQ ID NO: 117972 - DNA, 25 bp, Artificial
  Probe
gaaagactgtgtgttagtgaagggt

SEQ ID NO: 117973 - DNA, 25 bp, Artificial
  Probe
tgaaagactgtgtgttagtgaaggg

SEQ ID NO: 117974 - DNA, 25 bp, Artificial
  Probe
gtagaagttcggaaggagaagcagt

SEQ ID NO: 117975 - DNA, 25 bp, Artificial
  Probe
atggtagaagttcggaaggagaagc

SEQ ID NO: 117976 - DNA, 25 bp, Artificial
  Probe
ctactataagcctctcctgtctgct

SEQ ID NO: 117977 - DNA, 25 bp, Artificial
  Probe
gaggtaatgcctgtactggaagaga

SEQ ID NO: 117978 - DNA, 25 bp, Artificial
  Probe
atttctatgtgcaagatgtggagac

SEQ ID NO: 117979 - DNA, 25 bp, Artificial
  Probe
catttctatgtgcaagatgtggaga

SEQ ID NO: 117980 - DNA, 25 bp, Artificial
  Probe
gactatggcaatagagagatcctgc

SEQ ID NO: 117981 - DNA, 25 bp, Artificial
  Probe
tactataagcctctcctgtctgctg

SEQ ID NO: 117982 - DNA, 25 bp, Artificial
  Probe
ggaaggactcgtcatggtagaagtt

SEQ ID NO: 117983 - DNA, 25 bp, Artificial
  Probe
atgtcttctacatcgactatggcaa

SEQ ID NO: 117984 - DNA, 25 bp, Artificial
  Probe
gatcacagatgacctgcatttctat

SEQ ID NO: 117985 - DNA, 25 bp, Artificial
  Probe
gatgagtttggctacagtcgctaag

SEQ ID NO: 117986 - DNA, 25 bp, Artificial
  Probe
gtgcatgtcttctacatcgactatg

SEQ ID NO: 117987 - DNA, 25 bp, Artificial
  Probe
gaaagaggagaagaggaagaaagag

SEQ ID NO: 117988 - DNA, 25 bp, Artificial
  Probe
tgaaagaggagaagaggaagaaaga

SEQ ID NO: 117989 - DNA, 25 bp, Artificial
  Probe
gtgaaagaggagaagaggaagaaag

SEQ ID NO: 117990 - DNA, 25 bp, Artificial
  Probe
aaagaggagaagaggaagaaagagc

SEQ ID NO: 117991 - DNA, 25 bp, Artificial
  Probe
cgtgaaagaggagaagaggaagaaa

SEQ ID NO: 117992 - DNA, 25 bp, Artificial
  Probe
ttggtctctgttctgaggacttctt

SEQ ID NO: 117993 - DNA, 25 bp, Artificial
  Probe
gaggaagaaagagctgaatgaaatc

SEQ ID NO: 117994 - DNA, 25 bp, Artificial
  Probe
agaggaagaaagagctgaatgaaat

SEQ ID NO: 117995 - DNA, 25 bp, Artificial
  Probe
aagaggaagaaagagctgaatgaaa

SEQ ID NO: 117996 - DNA, 25 bp, Artificial
  Probe
gaagaggaagaaagagctgaatgaa

SEQ ID NO: 117997 - DNA, 25 bp, Artificial
  Probe
aggaagaaagagctgaatgaaatct

SEQ ID NO: 117998 - DNA, 25 bp, Artificial
  Probe
gagaagaggaagaaagagctgaatg

SEQ ID NO: 117999 - DNA, 25 bp, Artificial
  Probe
agaagaggaagaaagagctgaatga

SEQ ID NO: 118000 - DNA, 25 bp, Artificial
  Probe
cttggtctctgttctgaggacttct

SEQ ID NO: 118001 - DNA, 25 bp, Artificial
  Probe
cggtttatttatgtgcaatttcctt

SEQ ID NO: 118002 - DNA, 25 bp, Artificial
  Probe
tggtctctgttctgaggacttcttg

SEQ ID NO: 118003 - DNA, 25 bp, Artificial
  Probe
ggagaagaggaagaaagagctgaat

SEQ ID NO: 118004 - DNA, 25 bp, Artificial
  Probe
ccggtttatttatgtgcaatttcct

SEQ ID NO: 118005 - DNA, 25 bp, Artificial
  Probe
tccggtttatttatgtgcaatttcc

SEQ ID NO: 118006 - DNA, 25 bp, Artificial
  Probe
aagaggagaagaggaagaaagagct

SEQ ID NO: 118007 - DNA, 25 bp, Artificial
  Probe
gatcatccggtttatttatgtgcaa

SEQ ID NO: 118008 - DNA, 25 bp, Artificial
  Probe
tcatccggtttatttatgtgcaatt

SEQ ID NO: 118009 - DNA, 25 bp, Artificial
  Probe
gaggacttcttgcagttggatcatc

SEQ ID NO: 118010 - DNA, 25 bp, Artificial
  Probe
atcatccggtttatttatgtgcaat

SEQ ID NO: 118011 - DNA, 25 bp, Artificial
  Probe
aggagaagaggaagaaagagctgaa

SEQ ID NO: 118012 - DNA, 25 bp, Artificial
  Probe
atccggtttatttatgtgcaatttc

SEQ ID NO: 118013 - DNA, 25 bp, Artificial
  Probe
catccggtttatttatgtgcaattt

SEQ ID NO: 118014 - DNA, 25 bp, Artificial
  Probe
ggaagaaagagctgaatgaaatctt

SEQ ID NO: 118015 - DNA, 25 bp, Artificial
  Probe
aaatcttgaaaagtacagtgagcag

SEQ ID NO: 118016 - DNA, 25 bp, Artificial
  Probe
gaaatcttgaaaagtacagtgagca

SEQ ID NO: 118017 - DNA, 25 bp, Artificial
  Probe
tgaaatcttgaaaagtacagtgagc

SEQ ID NO: 118018 - DNA, 25 bp, Artificial
  Probe
ccttggtctctgttctgaggacttc

SEQ ID NO: 118019 - DNA, 25 bp, Artificial
  Probe
agaaagagctgaatgaaatcttgaa

SEQ ID NO: 118020 - DNA, 25 bp, Artificial
  Probe
aagaaagagctgaatgaaatcttga

SEQ ID NO: 118021 - DNA, 25 bp, Artificial
  Probe
gaagaaagagctgaatgaaatcttg

SEQ ID NO: 118022 - DNA, 25 bp, Artificial
  Probe
ggtttatttatgtgcaatttccttt

SEQ ID NO: 118023 - DNA, 25 bp, Artificial
  Probe
gaggagaagaggaagaaagagctga

SEQ ID NO: 118024 - DNA, 25 bp, Artificial
  Probe
agaggagaagaggaagaaagagctg

SEQ ID NO: 118025 - DNA, 25 bp, Artificial
  Probe
tgaggacttcttgcagttggatcat

SEQ ID NO: 118026 - DNA, 25 bp, Artificial
  Probe
ctgttctgaggacttcttgcagttg

SEQ ID NO: 118027 - DNA, 25 bp, Artificial
  Probe
gaaagagctgaatgaaatcttgaaa

SEQ ID NO: 118028 - DNA, 25 bp, Artificial
  Probe
gctgaatgaaatcttgaaaagtaca

SEQ ID NO: 118029 - DNA, 25 bp, Artificial
  Probe
acgtgaaagaggagaagaggaagaa

SEQ ID NO: 118030 - DNA, 25 bp, Artificial
  Probe
ttggatcatccggtttatttatgtg

SEQ ID NO: 118031 - DNA, 25 bp, Artificial
  Probe
gttggatcatccggtttatttatgt

SEQ ID NO: 118032 - DNA, 25 bp, Artificial
  Probe
tatgttccagatcccagagtttgag

SEQ ID NO: 118033 - DNA, 25 bp, Artificial
  Probe
gagtatgttccagatcccagagttt

SEQ ID NO: 118034 - DNA, 25 bp, Artificial
  Probe
gtatgttccagatcccagagtttga

SEQ ID NO: 118035 - DNA, 25 bp, Artificial
  Probe
agtatgttccagatcccagagtttg

SEQ ID NO: 118036 - DNA, 25 bp, Artificial
  Probe
agagtatgttccagatcccagagtt

SEQ ID NO: 118037 - DNA, 25 bp, Artificial
  Probe
cagagtatgttccagatcccagagt

SEQ ID NO: 118038 - DNA, 25 bp, Artificial
  Probe
gagttttcaaagttttccacacacc

SEQ ID NO: 118039 - DNA, 25 bp, Artificial
  Probe
gactgaggaagatgaagggatggag

SEQ ID NO: 118040 - DNA, 25 bp, Artificial
  Probe
aggaagacgctagtactacagatag

SEQ ID NO: 118041 - DNA, 25 bp, Artificial
  Probe
caggaagacgctagtactacagata

SEQ ID NO: 118042 - DNA, 25 bp, Artificial
  Probe
ccagagtatgttccagatcccagag

SEQ ID NO: 118043 - DNA, 25 bp, Artificial
  Probe
ggaagacgctagtactacagatagg

SEQ ID NO: 118044 - DNA, 25 bp, Artificial
  Probe
cgatgaatttgagggttccttcaag

SEQ ID NO: 118045 - DNA, 25 bp, Artificial
  Probe
gatgaatttgagggttccttcaagg

SEQ ID NO: 118046 - DNA, 25 bp, Artificial
  Probe
ggagttttcaaagttttccacacac

SEQ ID NO: 118047 - DNA, 25 bp, Artificial
  Probe
gagcgatgaatttgagggttccttc

SEQ ID NO: 118048 - DNA, 25 bp, Artificial
  Probe
atgaatttgagggttccttcaaggg

SEQ ID NO: 118049 - DNA, 25 bp, Artificial
  Probe
atgagcgatgaatttgagggttcct

SEQ ID NO: 118050 - DNA, 25 bp, Artificial
  Probe
atgttccagatcccagagtttgagc

SEQ ID NO: 118051 - DNA, 25 bp, Artificial
  Probe
tgaggaagatgaagggatggaggag

SEQ ID NO: 118052 - DNA, 25 bp, Artificial
  Probe
ctgaggaagatgaagggatggagga

SEQ ID NO: 118053 - DNA, 25 bp, Artificial
  Probe
gaagacgctagtactacagataggg

SEQ ID NO: 118054 - DNA, 25 bp, Artificial
  Probe
tgagcgatgaatttgagggttcctt

SEQ ID NO: 118055 - DNA, 25 bp, Artificial
  Probe
actgggtgctgtcctatcatcctag

SEQ ID NO: 118056 - DNA, 25 bp, Artificial
  Probe
actgaggaagatgaagggatggagg

SEQ ID NO: 118057 - DNA, 25 bp, Artificial
  Probe
ggactgaggaagatgaagggatgga

SEQ ID NO: 118058 - DNA, 25 bp, Artificial
  Probe
tatgttccctctccgttactggaca

SEQ ID NO: 118059 - DNA, 25 bp, Artificial
  Probe
gaatttgagggttccttcaagggac

SEQ ID NO: 118060 - DNA, 25 bp, Artificial
  Probe
cccagagtatgttccagatcccaga

SEQ ID NO: 118061 - DNA, 25 bp, Artificial
  Probe
gcgatgaatttgagggttccttcaa

SEQ ID NO: 118062 - DNA, 25 bp, Artificial
  Probe
gcaggaagacgctagtactacagat

SEQ ID NO: 118063 - DNA, 25 bp, Artificial
  Probe
gactgggtgctgtcctatcatccta

SEQ ID NO: 118064 - DNA, 25 bp, Artificial
  Probe
atttgagggttccttcaagggactt

SEQ ID NO: 118065 - DNA, 25 bp, Artificial
  Probe
aatttgagggttccttcaagggact

SEQ ID NO: 118066 - DNA, 25 bp, Artificial
  Probe
tgaatttgagggttccttcaaggga

SEQ ID NO: 118067 - DNA, 25 bp, Artificial
  Probe
atgaagggatggaggaggagcttag

SEQ ID NO: 118068 - DNA, 25 bp, Artificial
  Probe
gatgaagggatggaggaggagctta

SEQ ID NO: 118069 - DNA, 25 bp, Artificial
  Probe
tgctgtcctatcatcctagctggag

SEQ ID NO: 118070 - DNA, 25 bp, Artificial
  Probe
agcgatgaatttgagggttccttca

SEQ ID NO: 118071 - DNA, 25 bp, Artificial
  Probe
tttgagggttccttcaagggacttc

SEQ ID NO: 118072 - DNA, 25 bp, Artificial
  Probe
gagcaggaagacgctagtactacag

SEQ ID NO: 118073 - DNA, 25 bp, Artificial
  Probe
tggagttttcaaagttttccacaca

SEQ ID NO: 118074 - DNA, 25 bp, Artificial
  Probe
aagacgctagtactacagatagggg

SEQ ID NO: 118075 - DNA, 25 bp, Artificial
  Probe
agcaggaagacgctagtactacaga

SEQ ID NO: 118076 - DNA, 25 bp, Artificial
  Probe
gtgagcaggaagacgctagtactac

SEQ ID NO: 118077 - DNA, 25 bp, Artificial
  Probe
aatgtcaacgcaaagaagaagtaag

SEQ ID NO: 118078 - DNA, 25 bp, Artificial
  Probe
gaatgtcaacgcaaagaagaagtaa

SEQ ID NO: 118079 - DNA, 25 bp, Artificial
  Probe
tgtcaacgcaaagaagaagtaagat

SEQ ID NO: 118080 - DNA, 25 bp, Artificial
  Probe
atgtcaacgcaaagaagaagtaaga

SEQ ID NO: 118081 - DNA, 25 bp, Artificial
  Probe
agaatgtcaacgcaaagaagaagta

SEQ ID NO: 118082 - DNA, 25 bp, Artificial
  Probe
caagaatgtcaacgcaaagaagaag

SEQ ID NO: 118083 - DNA, 25 bp, Artificial
  Probe
aagaatgtcaacgcaaagaagaagt

SEQ ID NO: 118084 - DNA, 25 bp, Artificial
  Probe
atcagaccatactggagaagctatt

SEQ ID NO: 118085 - DNA, 25 bp, Artificial
  Probe
aatcagaccatactggagaagctat

SEQ ID NO: 118086 - DNA, 25 bp, Artificial
  Probe
acctacacagggatttaacatcaaa

SEQ ID NO: 118087 - DNA, 25 bp, Artificial
  Probe
cacctacacagggatttaacatcaa

SEQ ID NO: 118088 - DNA, 25 bp, Artificial
  Probe
tgatctcagaggttcagtatcgttt

SEQ ID NO: 118089 - DNA, 25 bp, Artificial
  Probe
cacacctacacagggatttaacatc

SEQ ID NO: 118090 - DNA, 25 bp, Artificial
  Probe
catcacacctacacagggatttaac

SEQ ID NO: 118091 - DNA, 25 bp, Artificial
  Probe
atatacgtaattgacagtgcagaca

SEQ ID NO: 118092 - DNA, 25 bp, Artificial
  Probe
tatacgtaattgacagtgcagacag

SEQ ID NO: 118093 - DNA, 25 bp, Artificial
  Probe
acacctacacagggatttaacatca

SEQ ID NO: 118094 - DNA, 25 bp, Artificial
  Probe
tcacacctacacagggatttaacat

SEQ ID NO: 118095 - DNA, 25 bp, Artificial
  Probe
atcacacctacacagggatttaaca

SEQ ID NO: 118096 - DNA, 25 bp, Artificial
  Probe
acatcacacctacacagggatttaa

SEQ ID NO: 118097 - DNA, 25 bp, Artificial
  Probe
tatatacgtaattgacagtgcagac

SEQ ID NO: 118098 - DNA, 25 bp, Artificial
  Probe
gcaagaatgtcaacgcaaagaagaa

SEQ ID NO: 118099 - DNA, 25 bp, Artificial
  Probe
cacatcacacctacacagggattta

SEQ ID NO: 118100 - DNA, 25 bp, Artificial
  Probe
gaagacatcagccacatcacaccta

SEQ ID NO: 118101 - DNA, 25 bp, Artificial
  Probe
atacgtaattgacagtgcagacaga

SEQ ID NO: 118102 - DNA, 25 bp, Artificial
  Probe
ttatatacgtaattgacagtgcaga

SEQ ID NO: 118103 - DNA, 25 bp, Artificial
  Probe
tcttatatacgtaattgacagtgca

SEQ ID NO: 118104 - DNA, 25 bp, Artificial
  Probe
tacgtaattgacagtgcagacagaa

SEQ ID NO: 118105 - DNA, 25 bp, Artificial
  Probe
cttatatacgtaattgacagtgcag

SEQ ID NO: 118106 - DNA, 25 bp, Artificial
  Probe
tcagaccatactggagaagctattt

SEQ ID NO: 118107 - DNA, 25 bp, Artificial
  Probe
aaatcagaccatactggagaagcta

SEQ ID NO: 118108 - DNA, 25 bp, Artificial
  Probe
aagacatcagccacatcacacctac

SEQ ID NO: 118109 - DNA, 25 bp, Artificial
  Probe
ctgatctcagaggttcagtatcgtt

SEQ ID NO: 118110 - DNA, 25 bp, Artificial
  Probe
tacacagggatttaacatcaaaagt

SEQ ID NO: 118111 - DNA, 25 bp, Artificial
  Probe
cccattccagcagtagattttaact

SEQ ID NO: 118112 - DNA, 25 bp, Artificial
  Probe
gatctcagaggttcagtatcgtttt

SEQ ID NO: 118113 - DNA, 25 bp, Artificial
  Probe
ccccattccagcagtagattttaac

SEQ ID NO: 118114 - DNA, 25 bp, Artificial
  Probe
ggacagaggaaaatcagaccatact

SEQ ID NO: 118115 - DNA, 25 bp, Artificial
  Probe
ctacacagggatttaacatcaaaag

SEQ ID NO: 118116 - DNA, 25 bp, Artificial
  Probe
ttcttatatacgtaattgacagtgc

SEQ ID NO: 118117 - DNA, 25 bp, Artificial
  Probe
gaagggctaaacctacacaccattc

SEQ ID NO: 118118 - DNA, 25 bp, Artificial
  Probe
acgtaattgacagtgcagacagaaa

SEQ ID NO: 118119 - DNA, 25 bp, Artificial
  Probe
gacagaggaaaatcagaccatactg

SEQ ID NO: 118120 - DNA, 25 bp, Artificial
  Probe
cacagggatttaacatcaaaagtgt

SEQ ID NO: 118121 - DNA, 25 bp, Artificial
  Probe
acacagggatttaacatcaaaagtg

SEQ ID NO: 118122 - DNA, 25 bp, Artificial
  Probe
ggagtgttagacggctaagtattaa

SEQ ID NO: 118123 - DNA, 25 bp, Artificial
  Probe
tgttgacattgacaagaggaagtac

SEQ ID NO: 118124 - DNA, 25 bp, Artificial
  Probe
cggagtgttagacggctaagtatta

SEQ ID NO: 118125 - DNA, 25 bp, Artificial
  Probe
ttcctgcttgtgtatcctgtaaata

SEQ ID NO: 118126 - DNA, 25 bp, Artificial
  Probe
ctcagttcatgtggatcatcaggaa

SEQ ID NO: 118127 - DNA, 25 bp, Artificial
  Probe
atgaagtggatgtttaaggaggacc

SEQ ID NO: 118128 - DNA, 25 bp, Artificial
  Probe
catgaagtggatgtttaaggaggac

SEQ ID NO: 118129 - DNA, 25 bp, Artificial
  Probe
gagtgttagacggctaagtattaaa

SEQ ID NO: 118130 - DNA, 25 bp, Artificial
  Probe
gttgacattgacaagaggaagtact

SEQ ID NO: 118131 - DNA, 25 bp, Artificial
  Probe
taactatgggacagctttacgagaa

SEQ ID NO: 118132 - DNA, 25 bp, Artificial
  Probe
ttgttgacattgacaagaggaagta

SEQ ID NO: 118133 - DNA, 25 bp, Artificial
  Probe
tcagttcatgtggatcatcaggaaa

SEQ ID NO: 118134 - DNA, 25 bp, Artificial
  Probe
gattgttgacattgacaagaggaag

SEQ ID NO: 118135 - DNA, 25 bp, Artificial
  Probe
agattgttgacattgacaagaggaa

SEQ ID NO: 118136 - DNA, 25 bp, Artificial
  Probe
attgttgacattgacaagaggaagt

SEQ ID NO: 118137 - DNA, 25 bp, Artificial
  Probe
ctaactatgggacagctttacgaga

SEQ ID NO: 118138 - DNA, 25 bp, Artificial
  Probe
cagattgttgacattgacaagagga

SEQ ID NO: 118139 - DNA, 25 bp, Artificial
  Probe
gcatttgtaactggatttatttctt

SEQ ID NO: 118140 - DNA, 25 bp, Artificial
  Probe
cctaactatgggacagctttacgag

SEQ ID NO: 118141 - DNA, 25 bp, Artificial
  Probe
aactatgggacagctttacgagaag

SEQ ID NO: 118142 - DNA, 25 bp, Artificial
  Probe
ccatgaagtggatgtttaaggagga

SEQ ID NO: 118143 - DNA, 25 bp, Artificial
  Probe
tgcatttgtaactggatttatttct

SEQ ID NO: 118144 - DNA, 25 bp, Artificial
  Probe
gtgcatttgtaactggatttatttc

SEQ ID NO: 118145 - DNA, 25 bp, Artificial
  Probe
agtgcatttgtaactggatttattt

SEQ ID NO: 118146 - DNA, 25 bp, Artificial
  Probe
cctactagtgcatttgtaactggat

SEQ ID NO: 118147 - DNA, 25 bp, Artificial
  Probe
agacctactagtgcatttgtaactg

SEQ ID NO: 118148 - DNA, 25 bp, Artificial
  Probe
cagacctactagtgcatttgtaact

SEQ ID NO: 118149 - DNA, 25 bp, Artificial
  Probe
gctcagttcatgtggatcatcagga

SEQ ID NO: 118150 - DNA, 25 bp, Artificial
  Probe
ctactagtgcatttgtaactggatt

SEQ ID NO: 118151 - DNA, 25 bp, Artificial
  Probe
gacctactagtgcatttgtaactgg

SEQ ID NO: 118152 - DNA, 25 bp, Artificial
  Probe
acagacctactagtgcatttgtaac

SEQ ID NO: 118153 - DNA, 25 bp, Artificial
  Probe
agttcatgtggatcatcaggaaaag

SEQ ID NO: 118154 - DNA, 25 bp, Artificial
  Probe
ctagtgcatttgtaactggatttat

SEQ ID NO: 118155 - DNA, 25 bp, Artificial
  Probe
tggctcagttcatgtggatcatcag

SEQ ID NO: 118156 - DNA, 25 bp, Artificial
  Probe
acctactagtgcatttgtaactgga

SEQ ID NO: 118157 - DNA, 25 bp, Artificial
  Probe
cagttcatgtggatcatcaggaaaa

SEQ ID NO: 118158 - DNA, 25 bp, Artificial
  Probe
tatgggacagctttacgagaaggaa

SEQ ID NO: 118159 - DNA, 25 bp, Artificial
  Probe
actagtgcatttgtaactggattta

SEQ ID NO: 118160 - DNA, 25 bp, Artificial
  Probe
tactagtgcatttgtaactggattt

SEQ ID NO: 118161 - DNA, 25 bp, Artificial
  Probe
cacagacctactagtgcatttgtaa

SEQ ID NO: 118162 - DNA, 25 bp, Artificial
  Probe
tgaagtggatgtttaaggaggacca

SEQ ID NO: 118163 - DNA, 25 bp, Artificial
  Probe
tcatgtggatcatcaggaaaaggat

SEQ ID NO: 118164 - DNA, 25 bp, Artificial
  Probe
tagtgcatttgtaactggatttatt

SEQ ID NO: 118165 - DNA, 25 bp, Artificial
  Probe
tacttggtcccatctgacatcactg

SEQ ID NO: 118166 - DNA, 25 bp, Artificial
  Probe
ttcatgtggatcatcaggaaaagga

SEQ ID NO: 118167 - DNA, 25 bp, Artificial
  Probe
acaacaaccagactcagattcagat

SEQ ID NO: 118168 - DNA, 25 bp, Artificial
  Probe
aacaacaaccagactcagattcaga

SEQ ID NO: 118169 - DNA, 25 bp, Artificial
  Probe
caacaaccagactcagattcagatc

SEQ ID NO: 118170 - DNA, 25 bp, Artificial
  Probe
atgtaaatccagggaatgttcaaga

SEQ ID NO: 118171 - DNA, 25 bp, Artificial
  Probe
tgtaaatccagggaatgttcaagat

SEQ ID NO: 118172 - DNA, 25 bp, Artificial
  Probe
gatgtaaatccagggaatgttcaag

SEQ ID NO: 118173 - DNA, 25 bp, Artificial
  Probe
gatgatgtaaatccagggaatgttc

SEQ ID NO: 118174 - DNA, 25 bp, Artificial
  Probe
tgatgatgtaaatccagggaatgtt

SEQ ID NO: 118175 - DNA, 25 bp, Artificial
  Probe
aaacaacaaccagactcagattcag

SEQ ID NO: 118176 - DNA, 25 bp, Artificial
  Probe
tcaaacaacaaccagactcagattc

SEQ ID NO: 118177 - DNA, 25 bp, Artificial
  Probe
caaacaacaaccagactcagattca

SEQ ID NO: 118178 - DNA, 25 bp, Artificial
  Probe
taaatccagggaatgttcaagatca

SEQ ID NO: 118179 - DNA, 25 bp, Artificial
  Probe
gtaaatccagggaatgttcaagatc

SEQ ID NO: 118180 - DNA, 25 bp, Artificial
  Probe
atgatgtaaatccagggaatgttca

SEQ ID NO: 118181 - DNA, 25 bp, Artificial
  Probe
tgatgtaaatccagggaatgttcaa

SEQ ID NO: 118182 - DNA, 25 bp, Artificial
  Probe
cactgttgatcgtctatactctttc

SEQ ID NO: 118183 - DNA, 25 bp, Artificial
  Probe
aaatccagggaatgttcaagatcat

SEQ ID NO: 118184 - DNA, 25 bp, Artificial
  Probe
gatctcccgtctgatgatgtaaatc

SEQ ID NO: 118185 - DNA, 25 bp, Artificial
  Probe
tagagaatcaagagccttctgacaa

SEQ ID NO: 118186 - DNA, 25 bp, Artificial
  Probe
atctcccgtctgatgatgtaaatcc

SEQ ID NO: 118187 - DNA, 25 bp, Artificial
  Probe
tgaatcactgttgatcgtctatact

SEQ ID NO: 118188 - DNA, 25 bp, Artificial
  Probe
caatgaatcactgttgatcgtctat

SEQ ID NO: 118189 - DNA, 25 bp, Artificial
  Probe
atatatcgtcagtttggaataaggc

SEQ ID NO: 118190 - DNA, 25 bp, Artificial
  Probe
atatctgatgtcaaacaacaaccag

SEQ ID NO: 118191 - DNA, 25 bp, Artificial
  Probe
atcactgttgatcgtctatactctt

SEQ ID NO: 118192 - DNA, 25 bp, Artificial
  Probe
aatcactgttgatcgtctatactct

SEQ ID NO: 118193 - DNA, 25 bp, Artificial
  Probe
agtagagaatcaagagccttctgac

SEQ ID NO: 118194 - DNA, 25 bp, Artificial
  Probe
cagtagagaatcaagagccttctga

SEQ ID NO: 118195 - DNA, 25 bp, Artificial
  Probe
gtctgatgatgtaaatccagggaat

SEQ ID NO: 118196 - DNA, 25 bp, Artificial
  Probe
aacacagatgaagaggtcagcaatg

SEQ ID NO: 118197 - DNA, 25 bp, Artificial
  Probe
tcaatgaatcactgttgatcgtcta

SEQ ID NO: 118198 - DNA, 25 bp, Artificial
  Probe
tctgatgatgtaaatccagggaatg

SEQ ID NO: 118199 - DNA, 25 bp, Artificial
  Probe
tgttgatcgtctatactctttcagt

SEQ ID NO: 118200 - DNA, 25 bp, Artificial
  Probe
actgttgatcgtctatactctttca

SEQ ID NO: 118201 - DNA, 25 bp, Artificial
  Probe
tcactgttgatcgtctatactcttt

SEQ ID NO: 118202 - DNA, 25 bp, Artificial
  Probe
gaatcactgttgatcgtctatactc

SEQ ID NO: 118203 - DNA, 25 bp, Artificial
  Probe
ctgatgatgtaaatccagggaatgt

SEQ ID NO: 118204 - DNA, 25 bp, Artificial
  Probe
aatccagggaatgttcaagatcatg

SEQ ID NO: 118205 - DNA, 25 bp, Artificial
  Probe
gtagagaatcaagagccttctgaca

SEQ ID NO: 118206 - DNA, 25 bp, Artificial
  Probe
atgaatcactgttgatcgtctatac

SEQ ID NO: 118207 - DNA, 25 bp, Artificial
  Probe
ctcctcctgagactctacatcacag

SEQ ID NO: 118208 - DNA, 25 bp, Artificial
  Probe
aaagaaagacatcgaaagcagaaac

SEQ ID NO: 118209 - DNA, 25 bp, Artificial
  Probe
caaagaaagacatcgaaagcagaaa

SEQ ID NO: 118210 - DNA, 25 bp, Artificial
  Probe
gtcaatgaatcactgttgatcgtct

SEQ ID NO: 118211 - DNA, 25 bp, Artificial
  Probe
gtcaaacaacaaccagactcagatt

SEQ ID NO: 118212 - DNA, 25 bp, Artificial
  Probe
tgacagatgatgattccaagtctaa

SEQ ID NO: 118213 - DNA, 25 bp, Artificial
  Probe
ttgacagatgatgattccaagtcta

SEQ ID NO: 118214 - DNA, 25 bp, Artificial
  Probe
atgtcattagcactatccatcagga

SEQ ID NO: 118215 - DNA, 25 bp, Artificial
  Probe
cttcgatgtcattagcactatccat

SEQ ID NO: 118216 - DNA, 25 bp, Artificial
  Probe
gtcttcgatgtcattagcactatcc

SEQ ID NO: 118217 - DNA, 25 bp, Artificial
  Probe
gagaataaacagaagtggaaggaac

SEQ ID NO: 118218 - DNA, 25 bp, Artificial
  Probe
agagaataaacagaagtggaaggaa

SEQ ID NO: 118219 - DNA, 25 bp, Artificial
  Probe
aagagaataaacagaagtggaagga

SEQ ID NO: 118220 - DNA, 25 bp, Artificial
  Probe
caagagaataaacagaagtggaagg

SEQ ID NO: 118221 - DNA, 25 bp, Artificial
  Probe
aagtcttcgatgtcattagcactat

SEQ ID NO: 118222 - DNA, 25 bp, Artificial
  Probe
cctggaccaagtacattcaagagaa

SEQ ID NO: 118223 - DNA, 25 bp, Artificial
  Probe
agtcttcgatgtcattagcactatc

SEQ ID NO: 118224 - DNA, 25 bp, Artificial
  Probe
ctggaccaagtacattcaagagaat

SEQ ID NO: 118225 - DNA, 25 bp, Artificial
  Probe
tggaccaagtacattcaagagaata

SEQ ID NO: 118226 - DNA, 25 bp, Artificial
  Probe
tcattagcactatccatcaggactg

SEQ ID NO: 118227 - DNA, 25 bp, Artificial
  Probe
gtcattagcactatccatcaggact

SEQ ID NO: 118228 - DNA, 25 bp, Artificial
  Probe
tcttcgatgtcattagcactatcca

SEQ ID NO: 118229 - DNA, 25 bp, Artificial
  Probe
caaccagatgtccattgatgaactg

SEQ ID NO: 118230 - DNA, 25 bp, Artificial
  Probe
agaataaacagaagtggaaggaacg

SEQ ID NO: 118231 - DNA, 25 bp, Artificial
  Probe
ggagtgtgttggttgtgatagagac

SEQ ID NO: 118232 - DNA, 25 bp, Artificial
  Probe
agtgtgttggttgtgatagagacag

SEQ ID NO: 118233 - DNA, 25 bp, Artificial
  Probe
gagtgtgttggttgtgatagagaca

SEQ ID NO: 118234 - DNA, 25 bp, Artificial
  Probe
tgtcattagcactatccatcaggac

SEQ ID NO: 118235 - DNA, 25 bp, Artificial
  Probe
tcaagagaataaacagaagtggaag

SEQ ID NO: 118236 - DNA, 25 bp, Artificial
  Probe
aaccagatgtccattgatgaactgt

SEQ ID NO: 118237 - DNA, 25 bp, Artificial
  Probe
ggaccaagtacattcaagagaataa

SEQ ID NO: 118238 - DNA, 25 bp, Artificial
  Probe
ccaaccagatgtccattgatgaact

SEQ ID NO: 118239 - DNA, 25 bp, Artificial
  Probe
gaataaacagaagtggaaggaacgg

SEQ ID NO: 118240 - DNA, 25 bp, Artificial
  Probe
cacctggaccaagtacattcaagag

SEQ ID NO: 118241 - DNA, 25 bp, Artificial
  Probe
ttcaagagaataaacagaagtggaa

SEQ ID NO: 118242 - DNA, 25 bp, Artificial
  Probe
accaaccagatgtccattgatgaac

SEQ ID NO: 118243 - DNA, 25 bp, Artificial
  Probe
caccaaccagatgtccattgatgaa

SEQ ID NO: 118244 - DNA, 25 bp, Artificial
  Probe
accagatgtccattgatgaactgtc

SEQ ID NO: 118245 - DNA, 25 bp, Artificial
  Probe
acctggaccaagtacattcaagaga

SEQ ID NO: 118246 - DNA, 25 bp, Artificial
  Probe
gaatgggaatctggattagggaact

SEQ ID NO: 118247 - DNA, 25 bp, Artificial
  Probe
cattagcactatccatcaggactgg

SEQ ID NO: 118248 - DNA, 25 bp, Artificial
  Probe
aatgggaatctggattagggaactg

SEQ ID NO: 118249 - DNA, 25 bp, Artificial
  Probe
agaatgggaatctggattagggaac

SEQ ID NO: 118250 - DNA, 25 bp, Artificial
  Probe
gacagatgatgattccaagtctaaa

SEQ ID NO: 118251 - DNA, 25 bp, Artificial
  Probe
agtccaaagtcttcgatgtcattag

SEQ ID NO: 118252 - DNA, 25 bp, Artificial
  Probe
gagtccaaagtcttcgatgtcatta

SEQ ID NO: 118253 - DNA, 25 bp, Artificial
  Probe
gatgtcattagcactatccatcagg

SEQ ID NO: 118254 - DNA, 25 bp, Artificial
  Probe
attagcactatccatcaggactggt

SEQ ID NO: 118255 - DNA, 25 bp, Artificial
  Probe
ccagatgtccattgatgaactgtcc

SEQ ID NO: 118256 - DNA, 25 bp, Artificial
  Probe
ttagcactatccatcaggactggtt

SEQ ID NO: 118257 - DNA, 25 bp, Artificial
  Probe
gattgtgttcatctacttcaactct

SEQ ID NO: 118258 - DNA, 25 bp, Artificial
  Probe
attgtgttcatctacttcaactctt

SEQ ID NO: 118259 - DNA, 25 bp, Artificial
  Probe
ttctactgcttcttcaatggagagg

SEQ ID NO: 118260 - DNA, 25 bp, Artificial
  Probe
ttcatctacttcaactctttcctgc

SEQ ID NO: 118261 - DNA, 25 bp, Artificial
  Probe
aaactatgaaatggaggctctgaaa

SEQ ID NO: 118262 - DNA, 25 bp, Artificial
  Probe
aactatgaaatggaggctctgaaag

SEQ ID NO: 118263 - DNA, 25 bp, Artificial
  Probe
ctactgcttcttcaatggagaggtg

SEQ ID NO: 118264 - DNA, 25 bp, Artificial
  Probe
tgttcatctacttcaactctttcct

SEQ ID NO: 118265 - DNA, 25 bp, Artificial
  Probe
gtgttcatctacttcaactctttcc

SEQ ID NO: 118266 - DNA, 25 bp, Artificial
  Probe
tttctactgcttcttcaatggagag

SEQ ID NO: 118267 - DNA, 25 bp, Artificial
  Probe
gttcatctacttcaactctttcctg

SEQ ID NO: 118268 - DNA, 25 bp, Artificial
  Probe
acagattgtgttcatctacttcaac

SEQ ID NO: 118269 - DNA, 25 bp, Artificial
  Probe
tctactgcttcttcaatggagaggt

SEQ ID NO: 118270 - DNA, 25 bp, Artificial
  Probe
cagattgtgttcatctacttcaact

SEQ ID NO: 118271 - DNA, 25 bp, Artificial
  Probe
tgtgttcatctacttcaactctttc

SEQ ID NO: 118272 - DNA, 25 bp, Artificial
  Probe
agattgtgttcatctacttcaactc

SEQ ID NO: 118273 - DNA, 25 bp, Artificial
  Probe
ctatgaaatggaggctctgaaagac

SEQ ID NO: 118274 - DNA, 25 bp, Artificial
  Probe
actatgaaatggaggctctgaaaga

SEQ ID NO: 118275 - DNA, 25 bp, Artificial
  Probe
ttgtgttcatctacttcaactcttt

SEQ ID NO: 118276 - DNA, 25 bp, Artificial
  Probe
ctacatgctcttctttgtcaatcct

SEQ ID NO: 118277 - DNA, 25 bp, Artificial
  Probe
tatgaaatggaggctctgaaagacc

SEQ ID NO: 118278 - DNA, 25 bp, Artificial
  Probe
tacatgctcttctttgtcaatcctg

SEQ ID NO: 118279 - DNA, 25 bp, Artificial
  Probe
acctacatgctcttctttgtcaatc

SEQ ID NO: 118280 - DNA, 25 bp, Artificial
  Probe
atcatcctcgtgctcctcatcaatt

SEQ ID NO: 118281 - DNA, 25 bp, Artificial
  Probe
cacctacatgctcttctttgtcaat

SEQ ID NO: 118282 - DNA, 25 bp, Artificial
  Probe
cctacatgctcttctttgtcaatcc

SEQ ID NO: 118283 - DNA, 25 bp, Artificial
  Probe
catcacctacatgctcttctttgtc

SEQ ID NO: 118284 - DNA, 25 bp, Artificial
  Probe
atcacctacatgctcttctttgtca

SEQ ID NO: 118285 - DNA, 25 bp, Artificial
  Probe
tcatctacttcaactctttcctgca

SEQ ID NO: 118286 - DNA, 25 bp, Artificial
  Probe
tcacctacatgctcttctttgtcaa

SEQ ID NO: 118287 - DNA, 25 bp, Artificial
  Probe
atgctcttctttgtcaatcctggag

SEQ ID NO: 118288 - DNA, 25 bp, Artificial
  Probe
gtttctgttcaacatcgtcaggatc

SEQ ID NO: 118289 - DNA, 25 bp, Artificial
  Probe
gttttctactgcttcttcaatggag

SEQ ID NO: 118290 - DNA, 25 bp, Artificial
  Probe
gaaaggaaaactatgaaatggaggc

SEQ ID NO: 118291 - DNA, 25 bp, Artificial
  Probe
aaaggaaaactatgaaatggaggct

SEQ ID NO: 118292 - DNA, 25 bp, Artificial
  Probe
gtttctttgtgtccgttttctactg

SEQ ID NO: 118293 - DNA, 25 bp, Artificial
  Probe
tttcagggtttctttgtgtccgttt

SEQ ID NO: 118294 - DNA, 25 bp, Artificial
  Probe
ctcctcatcaattttgtgtttctgt

SEQ ID NO: 118295 - DNA, 25 bp, Artificial
  Probe
catcatcctcgtgctcctcatcaat

SEQ ID NO: 118296 - DNA, 25 bp, Artificial
  Probe
aaaactatgaaatggaggctctgaa

SEQ ID NO: 118297 - DNA, 25 bp, Artificial
  Probe
tcctcatcaattttgtgtttctgtt

SEQ ID NO: 118298 - DNA, 25 bp, Artificial
  Probe
agaaaggaaaactatgaaatggagg

SEQ ID NO: 118299 - DNA, 25 bp, Artificial
  Probe
cctcatcaattttgtgtttctgttc

SEQ ID NO: 118300 - DNA, 25 bp, Artificial
  Probe
gaaaactatgaaatggaggctctga

SEQ ID NO: 118301 - DNA, 25 bp, Artificial
  Probe
ttttctactgcttcttcaatggaga

SEQ ID NO: 118302 - DNA, 25 bp, Artificial
  Probe
ccatcaatcacatcttcaagtccag

SEQ ID NO: 118303 - DNA, 25 bp, Artificial
  Probe
atgccatcaatcacatcttcaagtc

SEQ ID NO: 118304 - DNA, 25 bp, Artificial
  Probe
catcaatcacatcttcaagtccagc

SEQ ID NO: 118305 - DNA, 25 bp, Artificial
  Probe
atcaatcacatcttcaagtccagcc

SEQ ID NO: 118306 - DNA, 25 bp, Artificial
  Probe
tagatccttgttggctctgacctat

SEQ ID NO: 118307 - DNA, 25 bp, Artificial
  Probe
ttatttgtgacccttcagtgatgat

SEQ ID NO: 118308 - DNA, 25 bp, Artificial
  Probe
cttatttgtgacccttcagtgatga

SEQ ID NO: 118309 - DNA, 25 bp, Artificial
  Probe
ttagatccttgttggctctgaccta

SEQ ID NO: 118310 - DNA, 25 bp, Artificial
  Probe
gccatcaatcacatcttcaagtcca

SEQ ID NO: 118311 - DNA, 25 bp, Artificial
  Probe
tgccatcaatcacatcttcaagtcc

SEQ ID NO: 118312 - DNA, 25 bp, Artificial
  Probe
tatttgtgacccttcagtgatgatc

SEQ ID NO: 118313 - DNA, 25 bp, Artificial
  Probe
ccttatttgtgacccttcagtgatg

SEQ ID NO: 118314 - DNA, 25 bp, Artificial
  Probe
taacctttcattcatcaggactcaa

SEQ ID NO: 118315 - DNA, 25 bp, Artificial
  Probe
ttaacctttcattcatcaggactca

SEQ ID NO: 118316 - DNA, 25 bp, Artificial
  Probe
acatcttcaagtccagcccttattt

SEQ ID NO: 118317 - DNA, 25 bp, Artificial
  Probe
catcttcaagtccagcccttatttg

SEQ ID NO: 118318 - DNA, 25 bp, Artificial
  Probe
aacctttcattcatcaggactcaaa

SEQ ID NO: 118319 - DNA, 25 bp, Artificial
  Probe
tttaacctttcattcatcaggactc

SEQ ID NO: 118320 - DNA, 25 bp, Artificial
  Probe
atcttcaagtccagcccttatttgt

SEQ ID NO: 118321 - DNA, 25 bp, Artificial
  Probe
cccttatttgtgacccttcagtgat

SEQ ID NO: 118322 - DNA, 25 bp, Artificial
  Probe
cacatcttcaagtccagcccttatt

SEQ ID NO: 118323 - DNA, 25 bp, Artificial
  Probe
atccttgttggctctgacctatgac

SEQ ID NO: 118324 - DNA, 25 bp, Artificial
  Probe
gatgccatcaatcacatcttcaagt

SEQ ID NO: 118325 - DNA, 25 bp, Artificial
  Probe
gatccttgttggctctgacctatga

SEQ ID NO: 118326 - DNA, 25 bp, Artificial
  Probe
tcttcaagtccagcccttatttgtg

SEQ ID NO: 118327 - DNA, 25 bp, Artificial
  Probe
agatccttgttggctctgacctatg

SEQ ID NO: 118328 - DNA, 25 bp, Artificial
  Probe
cttcaagtccagcccttatttgtga

SEQ ID NO: 118329 - DNA, 25 bp, Artificial
  Probe
ctttcattcatcaggactcaaaact

SEQ ID NO: 118330 - DNA, 25 bp, Artificial
  Probe
atttgtgacccttcagtgatgatcc

SEQ ID NO: 118331 - DNA, 25 bp, Artificial
  Probe
cagactgtgacttccaacacctaaa

SEQ ID NO: 118332 - DNA, 25 bp, Artificial
  Probe
tcacatcttcaagtccagcccttat

SEQ ID NO: 118333 - DNA, 25 bp, Artificial
  Probe
atcacatcttcaagtccagccctta

SEQ ID NO: 118334 - DNA, 25 bp, Artificial
  Probe
cttgttggctctgacctatgacctc

SEQ ID NO: 118335 - DNA, 25 bp, Artificial
  Probe
ccagactgtgacttccaacacctaa

SEQ ID NO: 118336 - DNA, 25 bp, Artificial
  Probe
ttcaagtccagcccttatttgtgac

SEQ ID NO: 118337 - DNA, 25 bp, Artificial
  Probe
cttcttttagatccttgttggctct

SEQ ID NO: 118338 - DNA, 25 bp, Artificial
  Probe
tttagatccttgttggctctgacct

SEQ ID NO: 118339 - DNA, 25 bp, Artificial
  Probe
gatgaccccttcttttagatccttg

SEQ ID NO: 118340 - DNA, 25 bp, Artificial
  Probe
tttcattcatcaggactcaaaactg

SEQ ID NO: 118341 - DNA, 25 bp, Artificial
  Probe
ttcttttagatccttgttggctctg

SEQ ID NO: 118342 - DNA, 25 bp, Artificial
  Probe
ttcattcatcaggactcaaaactgt

SEQ ID NO: 118343 - DNA, 25 bp, Artificial
  Probe
cctttcattcatcaggactcaaaac

SEQ ID NO: 118344 - DNA, 25 bp, Artificial
  Probe
gaccccttcttttagatccttgttg

SEQ ID NO: 118345 - DNA, 25 bp, Artificial
  Probe
atgaccccttcttttagatccttgt

SEQ ID NO: 118346 - DNA, 25 bp, Artificial
  Probe
ttgttggctctgacctatgacctct

SEQ ID NO: 118347 - DNA, 25 bp, Artificial
  Probe
tcacaacgcttctatcaacttacaa

SEQ ID NO: 118348 - DNA, 25 bp, Artificial
  Probe
ttcacaacgcttctatcaacttaca

SEQ ID NO: 118349 - DNA, 25 bp, Artificial
  Probe
gttcacaacgcttctatcaacttac

SEQ ID NO: 118350 - DNA, 25 bp, Artificial
  Probe
aatgatgtctgaagttattgctgcc

SEQ ID NO: 118351 - DNA, 25 bp, Artificial
  Probe
aagagatgaggtcaagctatattcg

SEQ ID NO: 118352 - DNA, 25 bp, Artificial
  Probe
cacaacgcttctatcaacttacaaa

SEQ ID NO: 118353 - DNA, 25 bp, Artificial
  Probe
aaatgatgtctgaagttattgctgc

SEQ ID NO: 118354 - DNA, 25 bp, Artificial
  Probe
ggaaatgatgtctgaagttattgct

SEQ ID NO: 118355 - DNA, 25 bp, Artificial
  Probe
agagatgaggtcaagctatattcgg

SEQ ID NO: 118356 - DNA, 25 bp, Artificial
  Probe
cggaaatgatgtctgaagttattgc

SEQ ID NO: 118357 - DNA, 25 bp, Artificial
  Probe
gaagagatgaggtcaagctatattc

SEQ ID NO: 118358 - DNA, 25 bp, Artificial
  Probe
tgaagagatgaggtcaagctatatt

SEQ ID NO: 118359 - DNA, 25 bp, Artificial
  Probe
gaaatgatgtctgaagttattgctg

SEQ ID NO: 118360 - DNA, 25 bp, Artificial
  Probe
ataatgtccttctgaaagccttacg

SEQ ID NO: 118361 - DNA, 25 bp, Artificial
  Probe
aagtaaactatatctcacccgtgtt

SEQ ID NO: 118362 - DNA, 25 bp, Artificial
  Probe
taagtaaactatatctcacccgtgt

SEQ ID NO: 118363 - DNA, 25 bp, Artificial
  Probe
agtaaactatatctcacccgtgtta

SEQ ID NO: 118364 - DNA, 25 bp, Artificial
  Probe
tataatgtccttctgaaagccttac

SEQ ID NO: 118365 - DNA, 25 bp, Artificial
  Probe
gctctgtgtctttataatgtccttc

SEQ ID NO: 118366 - DNA, 25 bp, Artificial
  Probe
agttcacaacgcttctatcaactta

SEQ ID NO: 118367 - DNA, 25 bp, Artificial
  Probe
catatcacactgtaaacttaggaga

SEQ ID NO: 118368 - DNA, 25 bp, Artificial
  Probe
aaactatatctcacccgtgttattt

SEQ ID NO: 118369 - DNA, 25 bp, Artificial
  Probe
gtaaactatatctcacccgtgttat

SEQ ID NO: 118370 - DNA, 25 bp, Artificial
  Probe
agctctgtgtctttataatgtcctt

SEQ ID NO: 118371 - DNA, 25 bp, Artificial
  Probe
cagctctgtgtctttataatgtcct

SEQ ID NO: 118372 - DNA, 25 bp, Artificial
  Probe
tcagctctgtgtctttataatgtcc

SEQ ID NO: 118373 - DNA, 25 bp, Artificial
  Probe
agtcagctctgtgtctttataatgt

SEQ ID NO: 118374 - DNA, 25 bp, Artificial
  Probe
gtcagctctgtgtctttataatgtc

SEQ ID NO: 118375 - DNA, 25 bp, Artificial
  Probe
ataagtaaactatatctcacccgtg

SEQ ID NO: 118376 - DNA, 25 bp, Artificial
  Probe
cttcttgacagcttgcatgatcttg

SEQ ID NO: 118377 - DNA, 25 bp, Artificial
  Probe
ctgtgtctttataatgtccttctga

SEQ ID NO: 118378 - DNA, 25 bp, Artificial
  Probe
tctgtgtctttataatgtccttctg

SEQ ID NO: 118379 - DNA, 25 bp, Artificial
  Probe
tttcctttgtgatgtctaagtagaa

SEQ ID NO: 118380 - DNA, 25 bp, Artificial
  Probe
acatatcacactgtaaacttaggag

SEQ ID NO: 118381 - DNA, 25 bp, Artificial
  Probe
tttataatgtccttctgaaagcctt

SEQ ID NO: 118382 - DNA, 25 bp, Artificial
  Probe
tatcacactgtaaacttaggagaaa

SEQ ID NO: 118383 - DNA, 25 bp, Artificial
  Probe
ctctgtgtctttataatgtccttct

SEQ ID NO: 118384 - DNA, 25 bp, Artificial
  Probe
atgaggtcaagctatattcgggaat

SEQ ID NO: 118385 - DNA, 25 bp, Artificial
  Probe
tcctttgtgatgtctaagtagaatt

SEQ ID NO: 118386 - DNA, 25 bp, Artificial
  Probe
ttcctttgtgatgtctaagtagaat

SEQ ID NO: 118387 - DNA, 25 bp, Artificial
  Probe
cagttcacaacgcttctatcaactt

SEQ ID NO: 118388 - DNA, 25 bp, Artificial
  Probe
acttcttgacagcttgcatgatctt

SEQ ID NO: 118389 - DNA, 25 bp, Artificial
  Probe
aacttcttgacagcttgcatgatct

SEQ ID NO: 118390 - DNA, 25 bp, Artificial
  Probe
tgaggtcaagctatattcgggaatt

SEQ ID NO: 118391 - DNA, 25 bp, Artificial
  Probe
tgtgtctttataatgtccttctgaa

SEQ ID NO: 118392 - DNA, 25 bp, Artificial
  Probe
gccaattacagcttacagatatacc

SEQ ID NO: 118393 - DNA, 25 bp, Artificial
  Probe
tgaaggagcagtacattgacaagac

SEQ ID NO: 118394 - DNA, 25 bp, Artificial
  Probe
gataacggacttcaaactctatgcc

SEQ ID NO: 118395 - DNA, 25 bp, Artificial
  Probe
acagatatacccagatgaaagtcac

SEQ ID NO: 118396 - DNA, 25 bp, Artificial
  Probe
gcttacagatatacccagatgaaag

SEQ ID NO: 118397 - DNA, 25 bp, Artificial
  Probe
cagatatacccagatgaaagtcact

SEQ ID NO: 118398 - DNA, 25 bp, Artificial
  Probe
gaaggagcagtacattgacaagact

SEQ ID NO: 118399 - DNA, 25 bp, Artificial
  Probe
aaggagcagtacattgacaagactc

SEQ ID NO: 118400 - DNA, 25 bp, Artificial
  Probe
ataacggacttcaaactctatgcct

SEQ ID NO: 118401 - DNA, 25 bp, Artificial
  Probe
cgataacggacttcaaactctatgc

SEQ ID NO: 118402 - DNA, 25 bp, Artificial
  Probe
caacagagcgtatgagatgaccaag

SEQ ID NO: 118403 - DNA, 25 bp, Artificial
  Probe
ctgaaggagcagtacattgacaaga

SEQ ID NO: 118404 - DNA, 25 bp, Artificial
  Probe
atatacccagatgaaagtcactact

SEQ ID NO: 118405 - DNA, 25 bp, Artificial
  Probe
tacagatatacccagatgaaagtca

SEQ ID NO: 118406 - DNA, 25 bp, Artificial
  Probe
ctaaacacagacatggctctttcta

SEQ ID NO: 118407 - DNA, 25 bp, Artificial
  Probe
taaacacagacatggctctttctac

SEQ ID NO: 118408 - DNA, 25 bp, Artificial
  Probe
gatatacccagatgaaagtcactac

SEQ ID NO: 118409 - DNA, 25 bp, Artificial
  Probe
taacggacttcaaactctatgcctc

SEQ ID NO: 118410 - DNA, 25 bp, Artificial
  Probe
agatatacccagatgaaagtcacta

SEQ ID NO: 118411 - DNA, 25 bp, Artificial
  Probe
ggccaattacagcttacagatatac

SEQ ID NO: 118412 - DNA, 25 bp, Artificial
  Probe
aggccaattacagcttacagatata

SEQ ID NO: 118413 - DNA, 25 bp, Artificial
  Probe
aaggccaattacagcttacagatat

SEQ ID NO: 118414 - DNA, 25 bp, Artificial
  Probe
ttacagatatacccagatgaaagtc

SEQ ID NO: 118415 - DNA, 25 bp, Artificial
  Probe
cagcttacagatatacccagatgaa

SEQ ID NO: 118416 - DNA, 25 bp, Artificial
  Probe
acagcttacagatatacccagatga

SEQ ID NO: 118417 - DNA, 25 bp, Artificial
  Probe
tacagcttacagatatacccagatg

SEQ ID NO: 118418 - DNA, 25 bp, Artificial
  Probe
cttacagatatacccagatgaaagt

SEQ ID NO: 118419 - DNA, 25 bp, Artificial
  Probe
gattctttgtggaatgtttcaggat

SEQ ID NO: 118420 - DNA, 25 bp, Artificial
  Probe
agcttacagatatacccagatgaaa

SEQ ID NO: 118421 - DNA, 25 bp, Artificial
  Probe
ccaattacagcttacagatataccc

SEQ ID NO: 118422 - DNA, 25 bp, Artificial
  Probe
catcggattctttgtggaatgtttc

SEQ ID NO: 118423 - DNA, 25 bp, Artificial
  Probe
atcatcggattctttgtggaatgtt

SEQ ID NO: 118424 - DNA, 25 bp, Artificial
  Probe
attctttgtggaatgtttcaggatc

SEQ ID NO: 118425 - DNA, 25 bp, Artificial
  Probe
ttacagcttacagatatacccagat

SEQ ID NO: 118426 - DNA, 25 bp, Artificial
  Probe
attacagcttacagatatacccaga

SEQ ID NO: 118427 - DNA, 25 bp, Artificial
  Probe
acaacagagcgtatgagatgaccaa

SEQ ID NO: 118428 - DNA, 25 bp, Artificial
  Probe
atcggattctttgtggaatgtttca

SEQ ID NO: 118429 - DNA, 25 bp, Artificial
  Probe
tcatcggattctttgtggaatgttt

SEQ ID NO: 118430 - DNA, 25 bp, Artificial
  Probe
gtagctgtgtttgggaaggattatg

SEQ ID NO: 118431 - DNA, 25 bp, Artificial
  Probe
ggattctttgtggaatgtttcagga

SEQ ID NO: 118432 - DNA, 25 bp, Artificial
  Probe
caattacagcttacagatataccca

SEQ ID NO: 118433 - DNA, 25 bp, Artificial
  Probe
catcatcggattctttgtggaatgt

SEQ ID NO: 118434 - DNA, 25 bp, Artificial
  Probe
aacacagacatggctctttctacaa

SEQ ID NO: 118435 - DNA, 25 bp, Artificial
  Probe
aaacacagacatggctctttctaca

SEQ ID NO: 118436 - DNA, 25 bp, Artificial
  Probe
tcggattctttgtggaatgtttcag

SEQ ID NO: 118437 - DNA, 25 bp, Artificial
  Probe
aaggaagaaggcaatatgtcagtta

SEQ ID NO: 118438 - DNA, 25 bp, Artificial
  Probe
ttactactctgttctccacttctga

SEQ ID NO: 118439 - DNA, 25 bp, Artificial
  Probe
gttactactctgttctccacttctg

SEQ ID NO: 118440 - DNA, 25 bp, Artificial
  Probe
aggaagaaggcaatatgtcagttat

SEQ ID NO: 118441 - DNA, 25 bp, Artificial
  Probe
caaggaagaaggcaatatgtcagtt

SEQ ID NO: 118442 - DNA, 25 bp, Artificial
  Probe
tctgttaggattgtaattgctaggc

SEQ ID NO: 118443 - DNA, 25 bp, Artificial
  Probe
aagactggtattagcaacattgagc

SEQ ID NO: 118444 - DNA, 25 bp, Artificial
  Probe
ggaagaaggcaatatgtcagttatt

SEQ ID NO: 118445 - DNA, 25 bp, Artificial
  Probe
agttactactctgttctccacttct

SEQ ID NO: 118446 - DNA, 25 bp, Artificial
  Probe
agaaggcaatatgtcagttattacc

SEQ ID NO: 118447 - DNA, 25 bp, Artificial
  Probe
tactactctgttctccacttctgag

SEQ ID NO: 118448 - DNA, 25 bp, Artificial
  Probe
gaagagcaaggaagaaggcaatatg

SEQ ID NO: 118449 - DNA, 25 bp, Artificial
  Probe
agaagagcaaggaagaaggcaatat

SEQ ID NO: 118450 - DNA, 25 bp, Artificial
  Probe
tagttactactctgttctccacttc

SEQ ID NO: 118451 - DNA, 25 bp, Artificial
  Probe
atctgttaggattgtaattgctagg

SEQ ID NO: 118452 - DNA, 25 bp, Artificial
  Probe
acctgtcagatggattgaatacctt

SEQ ID NO: 118453 - DNA, 25 bp, Artificial
  Probe
tgagatcataagcctagcataattg

SEQ ID NO: 118454 - DNA, 25 bp, Artificial
  Probe
ttagttactactctgttctccactt

SEQ ID NO: 118455 - DNA, 25 bp, Artificial
  Probe
ggtaattcacaagatgagttagagt

SEQ ID NO: 118456 - DNA, 25 bp, Artificial
  Probe
tgaggtaattcacaagatgagttag

SEQ ID NO: 118457 - DNA, 25 bp, Artificial
  Probe
attagttactactctgttctccact

SEQ ID NO: 118458 - DNA, 25 bp, Artificial
  Probe
gacctgtcagatggattgaatacct

SEQ ID NO: 118459 - DNA, 25 bp, Artificial
  Probe
aagagcaaggaagaaggcaatatgt

SEQ ID NO: 118460 - DNA, 25 bp, Artificial
  Probe
acgagattagttactactctgttct

SEQ ID NO: 118461 - DNA, 25 bp, Artificial
  Probe
ctctgttctccacttctgagtagtc

SEQ ID NO: 118462 - DNA, 25 bp, Artificial
  Probe
aggtaattcacaagatgagttagag

SEQ ID NO: 118463 - DNA, 25 bp, Artificial
  Probe
gaggtaattcacaagatgagttaga

SEQ ID NO: 118464 - DNA, 25 bp, Artificial
  Probe
gagaagagcaaggaagaaggcaata

SEQ ID NO: 118465 - DNA, 25 bp, Artificial
  Probe
gattagttactactctgttctccac

SEQ ID NO: 118466 - DNA, 25 bp, Artificial
  Probe
agattagttactactctgttctcca

SEQ ID NO: 118467 - DNA, 25 bp, Artificial
  Probe
ttgagatcataagcctagcataatt

SEQ ID NO: 118468 - DNA, 25 bp, Artificial
  Probe
gaaggcaatatgtcagttattacct

SEQ ID NO: 118469 - DNA, 25 bp, Artificial
  Probe
gtgacctgtcagatggattgaatac

SEQ ID NO: 118470 - DNA, 25 bp, Artificial
  Probe
agtgacctgtcagatggattgaata

SEQ ID NO: 118471 - DNA, 25 bp, Artificial
  Probe
tagtgacctgtcagatggattgaat

SEQ ID NO: 118472 - DNA, 25 bp, Artificial
  Probe
atagtgacctgtcagatggattgaa

SEQ ID NO: 118473 - DNA, 25 bp, Artificial
  Probe
atgactattagcaggaaacgagatt

SEQ ID NO: 118474 - DNA, 25 bp, Artificial
  Probe
agagcaaggaagaaggcaatatgtc

SEQ ID NO: 118475 - DNA, 25 bp, Artificial
  Probe
aacgagattagttactactctgttc

SEQ ID NO: 118476 - DNA, 25 bp, Artificial
  Probe
tgactattagcaggaaacgagatta

SEQ ID NO: 118477 - DNA, 25 bp, Artificial
  Probe
aaagactggtattagcaacattgag

SEQ ID NO: 118478 - DNA, 25 bp, Artificial
  Probe
ttcaaagactggtattagcaacatt

SEQ ID NO: 118479 - DNA, 25 bp, Artificial
  Probe
tttcaaagactggtattagcaacat

SEQ ID NO: 118480 - DNA, 25 bp, Artificial
  Probe
gactattagcaggaaacgagattag

SEQ ID NO: 118481 - DNA, 25 bp, Artificial
  Probe
aagaaggcaatatgtcagttattac

SEQ ID NO: 118482 - DNA, 25 bp, Artificial
  Probe
ctctccatcaaatgtgctaagtaag

SEQ ID NO: 118483 - DNA, 25 bp, Artificial
  Probe
agtccagaatagttcctttgtcttt

SEQ ID NO: 118484 - DNA, 25 bp, Artificial
  Probe
ttcaactctccatcaaatgtgctaa

SEQ ID NO: 118485 - DNA, 25 bp, Artificial
  Probe
tttcaactctccatcaaatgtgcta

SEQ ID NO: 118486 - DNA, 25 bp, Artificial
  Probe
tcaactctccatcaaatgtgctaag

SEQ ID NO: 118487 - DNA, 25 bp, Artificial
  Probe
tagtccagaatagttcctttgtctt

SEQ ID NO: 118488 - DNA, 25 bp, Artificial
  Probe
ttagtccagaatagttcctttgtct

SEQ ID NO: 118489 - DNA, 25 bp, Artificial
  Probe
cttagtccagaatagttcctttgtc

SEQ ID NO: 118490 - DNA, 25 bp, Artificial
  Probe
actctccatcaaatgtgctaagtaa

SEQ ID NO: 118491 - DNA, 25 bp, Artificial
  Probe
aactctccatcaaatgtgctaagta

SEQ ID NO: 118492 - DNA, 25 bp, Artificial
  Probe
taagtaagcatttgtcccaagtgtt

SEQ ID NO: 118493 - DNA, 25 bp, Artificial
  Probe
acttagtccagaatagttcctttgt

SEQ ID NO: 118494 - DNA, 25 bp, Artificial
  Probe
ctaagtaagcatttgtcccaagtgt

SEQ ID NO: 118495 - DNA, 25 bp, Artificial
  Probe
aagtaagcatttgtcccaagtgttt

SEQ ID NO: 118496 - DNA, 25 bp, Artificial
  Probe
caactctccatcaaatgtgctaagt

SEQ ID NO: 118497 - DNA, 25 bp, Artificial
  Probe
ctttcctctccctcctattgtgttg

SEQ ID NO: 118498 - DNA, 25 bp, Artificial
  Probe
ttctaactttacagaggatcaaagc

SEQ ID NO: 118499 - DNA, 25 bp, Artificial
  Probe
tctccatcaaatgtgctaagtaagc

SEQ ID NO: 118500 - DNA, 25 bp, Artificial
  Probe
gtaagcatttgtcccaagtgtttta

SEQ ID NO: 118501 - DNA, 25 bp, Artificial
  Probe
gtccagaatagttcctttgtctttt

SEQ ID NO: 118502 - DNA, 25 bp, Artificial
  Probe
taagcatttgtcccaagtgttttaa

SEQ ID NO: 118503 - DNA, 25 bp, Artificial
  Probe
ttaacttagtccagaatagttcctt

SEQ ID NO: 118504 - DNA, 25 bp, Artificial
  Probe
ctaactttacagaggatcaaagctg

SEQ ID NO: 118505 - DNA, 25 bp, Artificial
  Probe
tctaactttacagaggatcaaagct

SEQ ID NO: 118506 - DNA, 25 bp, Artificial
  Probe
tccagaatagttcctttgtcttttc

SEQ ID NO: 118507 - DNA, 25 bp, Artificial
  Probe
aagcatttgtcccaagtgttttaac

SEQ ID NO: 118508 - DNA, 25 bp, Artificial
  Probe
ttttcaactctccatcaaatgtgct

SEQ ID NO: 118509 - DNA, 25 bp, Artificial
  Probe
aacttagtccagaatagttcctttg

SEQ ID NO: 118510 - DNA, 25 bp, Artificial
  Probe
agtaagcatttgtcccaagtgtttt

SEQ ID NO: 118511 - DNA, 25 bp, Artificial
  Probe
gctttcctctccctcctattgtgtt

SEQ ID NO: 118512 - DNA, 25 bp, Artificial
  Probe
agcatttgtcccaagtgttttaact

SEQ ID NO: 118513 - DNA, 25 bp, Artificial
  Probe
gctaagtaagcatttgtcccaagtg

SEQ ID NO: 118514 - DNA, 25 bp, Artificial
  Probe
tttcctctccctcctattgtgttgc

SEQ ID NO: 118515 - DNA, 25 bp, Artificial
  Probe
aagctgttcttttctatttcatggc

SEQ ID NO: 118516 - DNA, 25 bp, Artificial
  Probe
ttgtcttttctaactttacagagga

SEQ ID NO: 118517 - DNA, 25 bp, Artificial
  Probe
tttctaactttacagaggatcaaag

SEQ ID NO: 118518 - DNA, 25 bp, Artificial
  Probe
tgtcttttctaactttacagaggat

SEQ ID NO: 118519 - DNA, 25 bp, Artificial
  Probe
taacttagtccagaatagttccttt

SEQ ID NO: 118520 - DNA, 25 bp, Artificial
  Probe
tttaacttagtccagaatagttcct

SEQ ID NO: 118521 - DNA, 25 bp, Artificial
  Probe
tcttttctaactttacagaggatca

SEQ ID NO: 118522 - DNA, 25 bp, Artificial
  Probe
ccagaatagttcctttgtcttttct

SEQ ID NO: 118523 - DNA, 25 bp, Artificial
  Probe
gtcttttctaactttacagaggatc

SEQ ID NO: 118524 - DNA, 25 bp, Artificial
  Probe
tttgtcttttctaactttacagagg

SEQ ID NO: 118525 - DNA, 25 bp, Artificial
  Probe
cctttgtcttttctaactttacaga

SEQ ID NO: 118526 - DNA, 25 bp, Artificial
  Probe
tcctttgtcttttctaactttacag

SEQ ID NO: 118527 - DNA, 25 bp, Artificial
  Probe
agcctctggtgtctgcaaaatacag

SEQ ID NO: 118528 - DNA, 25 bp, Artificial
  Probe
ataagaagaggaagttcacaaccaa

SEQ ID NO: 118529 - DNA, 25 bp, Artificial
  Probe
gataagaagaggaagttcacaacca

SEQ ID NO: 118530 - DNA, 25 bp, Artificial
  Probe
taaggatgactaaggagaatcttgg

SEQ ID NO: 118531 - DNA, 25 bp, Artificial
  Probe
taagaagaggaagttcacaaccaag

SEQ ID NO: 118532 - DNA, 25 bp, Artificial
  Probe
ccagttaaggatgactaaggagaat

SEQ ID NO: 118533 - DNA, 25 bp, Artificial
  Probe
cgataagaagaggaagttcacaacc

SEQ ID NO: 118534 - DNA, 25 bp, Artificial
  Probe
agaggaagttcacaaccaagtctaa

SEQ ID NO: 118535 - DNA, 25 bp, Artificial
  Probe
aagaggaagttcacaaccaagtcta

SEQ ID NO: 118536 - DNA, 25 bp, Artificial
  Probe
cagttaaggatgactaaggagaatc

SEQ ID NO: 118537 - DNA, 25 bp, Artificial
  Probe
agcgataagaagaggaagttcacaa

SEQ ID NO: 118538 - DNA, 25 bp, Artificial
  Probe
aagcgataagaagaggaagttcaca

SEQ ID NO: 118539 - DNA, 25 bp, Artificial
  Probe
agttaaggatgactaaggagaatct

SEQ ID NO: 118540 - DNA, 25 bp, Artificial
  Probe
gcgataagaagaggaagttcacaac

SEQ ID NO: 118541 - DNA, 25 bp, Artificial
  Probe
agatatgcgtgaaggattactgctt

SEQ ID NO: 118542 - DNA, 25 bp, Artificial
  Probe
ttaaggatgactaaggagaatcttg

SEQ ID NO: 118543 - DNA, 25 bp, Artificial
  Probe
gttaaggatgactaaggagaatctt

SEQ ID NO: 118544 - DNA, 25 bp, Artificial
  Probe
aagaagaggaagttcacaaccaagt

SEQ ID NO: 118545 - DNA, 25 bp, Artificial
  Probe
gaagaggaagttcacaaccaagtct

SEQ ID NO: 118546 - DNA, 25 bp, Artificial
  Probe
agaagaggaagttcacaaccaagtc

SEQ ID NO: 118547 - DNA, 25 bp, Artificial
  Probe
gaggaagttcacaaccaagtctaaa

SEQ ID NO: 118548 - DNA, 25 bp, Artificial
  Probe
aaagcgataagaagaggaagttcac

SEQ ID NO: 118549 - DNA, 25 bp, Artificial
  Probe
caaagcgataagaagaggaagttca

SEQ ID NO: 118550 - DNA, 25 bp, Artificial
  Probe
gatatgcgtgaaggattactgcttt

SEQ ID NO: 118551 - DNA, 25 bp, Artificial
  Probe
aaggatgactaaggagaatcttggg

SEQ ID NO: 118552 - DNA, 25 bp, Artificial
  Probe
tcaagtcagagtctcgatccataga

SEQ ID NO: 118553 - DNA, 25 bp, Artificial
  Probe
cccagttaaggatgactaaggagaa

SEQ ID NO: 118554 - DNA, 25 bp, Artificial
  Probe
cagatatgcgtgaaggattactgct

SEQ ID NO: 118555 - DNA, 25 bp, Artificial
  Probe
atatgcgtgaaggattactgctttg

SEQ ID NO: 118556 - DNA, 25 bp, Artificial
  Probe
ccaaagcgataagaagaggaagttc

SEQ ID NO: 118557 - DNA, 25 bp, Artificial
  Probe
caagtcagagtctcgatccatagag

SEQ ID NO: 118558 - DNA, 25 bp, Artificial
  Probe
ctcaagtcagagtctcgatccatag

SEQ ID NO: 118559 - DNA, 25 bp, Artificial
  Probe
accaaagcgataagaagaggaagtt

SEQ ID NO: 118560 - DNA, 25 bp, Artificial
  Probe
actctcccagttaaggatgactaag

SEQ ID NO: 118561 - DNA, 25 bp, Artificial
  Probe
gactctcccagttaaggatgactaa

SEQ ID NO: 118562 - DNA, 25 bp, Artificial
  Probe
aagtcagagtctcgatccatagagg

SEQ ID NO: 118563 - DNA, 25 bp, Artificial
  Probe
caccaaagcgataagaagaggaagt

SEQ ID NO: 118564 - DNA, 25 bp, Artificial
  Probe
acaccaaagcgataagaagaggaag

SEQ ID NO: 118565 - DNA, 25 bp, Artificial
  Probe
ctctcccagttaaggatgactaagg

SEQ ID NO: 118566 - DNA, 25 bp, Artificial
  Probe
tcagagtctcgatccatagaggaag

SEQ ID NO: 118567 - DNA, 25 bp, Artificial
  Probe
cacaccaaagcgataagaagaggaa

SEQ ID NO: 118568 - DNA, 25 bp, Artificial
  Probe
tcccagttaaggatgactaaggaga

SEQ ID NO: 118569 - DNA, 25 bp, Artificial
  Probe
tctcccagttaaggatgactaagga

SEQ ID NO: 118570 - DNA, 25 bp, Artificial
  Probe
tgactctcccagttaaggatgacta

SEQ ID NO: 118571 - DNA, 25 bp, Artificial
  Probe
gtcagagtctcgatccatagaggaa

SEQ ID NO: 118572 - DNA, 25 bp, Artificial
  Probe
ctatgaattgcagatatgcgtgaag

SEQ ID NO: 118573 - DNA, 25 bp, Artificial
  Probe
ttaagttcaccattcctacagagcc

SEQ ID NO: 118574 - DNA, 25 bp, Artificial
  Probe
taagttcaccattcctacagagcct

SEQ ID NO: 118575 - DNA, 25 bp, Artificial
  Probe
accaatcttaagttcaccattccta

SEQ ID NO: 118576 - DNA, 25 bp, Artificial
  Probe
taccaatcttaagttcaccattcct

SEQ ID NO: 118577 - DNA, 25 bp, Artificial
  Probe
ccaatcttaagttcaccattcctac

SEQ ID NO: 118578 - DNA, 25 bp, Artificial
  Probe
ctaccaatcttaagttcaccattcc

SEQ ID NO: 118579 - DNA, 25 bp, Artificial
  Probe
cctaccaatcttaagttcaccattc

SEQ ID NO: 118580 - DNA, 25 bp, Artificial
  Probe
tcttaagttcaccattcctacagag

SEQ ID NO: 118581 - DNA, 25 bp, Artificial
  Probe
cttaagttcaccattcctacagagc

SEQ ID NO: 118582 - DNA, 25 bp, Artificial
  Probe
caatcttaagttcaccattcctaca

SEQ ID NO: 118583 - DNA, 25 bp, Artificial
  Probe
atcttaagttcaccattcctacaga

SEQ ID NO: 118584 - DNA, 25 bp, Artificial
  Probe
aatcttaagttcaccattcctacag

SEQ ID NO: 118585 - DNA, 25 bp, Artificial
  Probe
ccctaccaatcttaagttcaccatt

SEQ ID NO: 118586 - DNA, 25 bp, Artificial
  Probe
tccctaccaatcttaagttcaccat

SEQ ID NO: 118587 - DNA, 25 bp, Artificial
  Probe
ctccctaccaatcttaagttcacca

SEQ ID NO: 118588 - DNA, 25 bp, Artificial
  Probe
aagttcaccattcctacagagcctg

SEQ ID NO: 118589 - DNA, 25 bp, Artificial
  Probe
atttgctctgtcttcctgtctgtga

SEQ ID NO: 118590 - DNA, 25 bp, Artificial
  Probe
catttgctctgtcttcctgtctgtg

SEQ ID NO: 118591 - DNA, 25 bp, Artificial
  Probe
cctccctaccaatcttaagttcacc

SEQ ID NO: 118592 - DNA, 25 bp, Artificial
  Probe
ccctccctaccaatcttaagttcac

SEQ ID NO: 118593 - DNA, 25 bp, Artificial
  Probe
ctctgcaaggtttggcttaagaatt

SEQ ID NO: 118594 - DNA, 25 bp, Artificial
  Probe
ctctgtcttcctgtctgtgagctac

SEQ ID NO: 118595 - DNA, 25 bp, Artificial
  Probe
tctgcaaggtttggcttaagaattc

SEQ ID NO: 118596 - DNA, 25 bp, Artificial
  Probe
aagccatagtcctagatctatcctg

SEQ ID NO: 118597 - DNA, 25 bp, Artificial
  Probe
ctaaactcaggagcacagccatagt

SEQ ID NO: 118598 - DNA, 25 bp, Artificial
  Probe
taagccatagtcctagatctatcct

SEQ ID NO: 118599 - DNA, 25 bp, Artificial
  Probe
aaggtttggcttaagaattccacag

SEQ ID NO: 118600 - DNA, 25 bp, Artificial
  Probe
agccagaggaaacacagcaatagag

SEQ ID NO: 118601 - DNA, 25 bp, Artificial
  Probe
caaggtttggcttaagaattccaca

SEQ ID NO: 118602 - DNA, 25 bp, Artificial
  Probe
ctgcaaggtttggcttaagaattcc

SEQ ID NO: 118603 - DNA, 25 bp, Artificial
  Probe
ataagccatagtcctagatctatcc

SEQ ID NO: 118604 - DNA, 25 bp, Artificial
  Probe
cagccagaggaaacacagcaataga

SEQ ID NO: 118605 - DNA, 25 bp, Artificial
  Probe
tttgctctgtcttcctgtctgtgag

SEQ ID NO: 118606 - DNA, 25 bp, Artificial
  Probe
ccatttgctctgtcttcctgtctgt

SEQ ID NO: 118607 - DNA, 25 bp, Artificial
  Probe
accatttgctctgtcttcctgtctg

SEQ ID NO: 118608 - DNA, 25 bp, Artificial
  Probe
taaactcaggagcacagccatagtg

SEQ ID NO: 118609 - DNA, 25 bp, Artificial
  Probe
gaccatttgctctgtcttcctgtct

SEQ ID NO: 118610 - DNA, 25 bp, Artificial
  Probe
agccatagtcctagatctatcctgc

SEQ ID NO: 118611 - DNA, 25 bp, Artificial
  Probe
acagccagaggaaacacagcaatag

SEQ ID NO: 118612 - DNA, 25 bp, Artificial
  Probe
cttaagaattccacagccagaggaa

SEQ ID NO: 118613 - DNA, 25 bp, Artificial
  Probe
gcaaggtttggcttaagaattccac

SEQ ID NO: 118614 - DNA, 25 bp, Artificial
  Probe
cctaaactcaggagcacagccatag

SEQ ID NO: 118615 - DNA, 25 bp, Artificial
  Probe
atagtcctagatctatcctgcccat

SEQ ID NO: 118616 - DNA, 25 bp, Artificial
  Probe
gctctgcaaggtttggcttaagaat

SEQ ID NO: 118617 - DNA, 25 bp, Artificial
  Probe
tagtcctagatctatcctgcccatg

SEQ ID NO: 118618 - DNA, 25 bp, Artificial
  Probe
gtgaagtaggtacggtggatagatc

SEQ ID NO: 118619 - DNA, 25 bp, Artificial
  Probe
ataaagccgtaagatttgaccattg

SEQ ID NO: 118620 - DNA, 25 bp, Artificial
  Probe
taccattcaaggacagagtgtgatc

SEQ ID NO: 118621 - DNA, 25 bp, Artificial
  Probe
tataaagccgtaagatttgaccatt

SEQ ID NO: 118622 - DNA, 25 bp, Artificial
  Probe
tggtcaaagttctgtgtcttactac

SEQ ID NO: 118623 - DNA, 25 bp, Artificial
  Probe
atggtcaaagttctgtgtcttacta

SEQ ID NO: 118624 - DNA, 25 bp, Artificial
  Probe
ggtgaagtaggtacggtggatagat

SEQ ID NO: 118625 - DNA, 25 bp, Artificial
  Probe
ggtcaaagttctgtgtcttactaca

SEQ ID NO: 118626 - DNA, 25 bp, Artificial
  Probe
taaagccgtaagatttgaccattgg

SEQ ID NO: 118627 - DNA, 25 bp, Artificial
  Probe
gtcaaagttctgtgtcttactacaa

SEQ ID NO: 118628 - DNA, 25 bp, Artificial
  Probe
ccaagggagtaaattataaagccgt

SEQ ID NO: 118629 - DNA, 25 bp, Artificial
  Probe
ccattcaaggacagagtgtgatctc

SEQ ID NO: 118630 - DNA, 25 bp, Artificial
  Probe
caagggagtaaattataaagccgta

SEQ ID NO: 118631 - DNA, 25 bp, Artificial
  Probe
catggtcaaagttctgtgtcttact

SEQ ID NO: 118632 - DNA, 25 bp, Artificial
  Probe
ttataaagccgtaagatttgaccat

SEQ ID NO: 118633 - DNA, 25 bp, Artificial
  Probe
attataaagccgtaagatttgacca

SEQ ID NO: 118634 - DNA, 25 bp, Artificial
  Probe
gaagtaggtacggtggatagatcct

SEQ ID NO: 118635 - DNA, 25 bp, Artificial
  Probe
tcaaagttctgtgtcttactacaaa

SEQ ID NO: 118636 - DNA, 25 bp, Artificial
  Probe
gggagtaaattataaagccgtaaga

SEQ ID NO: 118637 - DNA, 25 bp, Artificial
  Probe
agggagtaaattataaagccgtaag

SEQ ID NO: 118638 - DNA, 25 bp, Artificial
  Probe
aagtaggtacggtggatagatcctg

SEQ ID NO: 118639 - DNA, 25 bp, Artificial
  Probe
tgaagtaggtacggtggatagatcc

SEQ ID NO: 118640 - DNA, 25 bp, Artificial
  Probe
cattcaaggacagagtgtgatctcc

SEQ ID NO: 118641 - DNA, 25 bp, Artificial
  Probe
aagggagtaaattataaagccgtaa

SEQ ID NO: 118642 - DNA, 25 bp, Artificial
  Probe
ttcaaggacagagtgtgatctccat

SEQ ID NO: 118643 - DNA, 25 bp, Artificial
  Probe
attcaaggacagagtgtgatctcca

SEQ ID NO: 118644 - DNA, 25 bp, Artificial
  Probe
accattcaaggacagagtgtgatct

SEQ ID NO: 118645 - DNA, 25 bp, Artificial
  Probe
gcatggtcaaagttctgtgtcttac

SEQ ID NO: 118646 - DNA, 25 bp, Artificial
  Probe
aattataaagccgtaagatttgacc

SEQ ID NO: 118647 - DNA, 25 bp, Artificial
  Probe
tcaaggacagagtgtgatctccatc

SEQ ID NO: 118648 - DNA, 25 bp, Artificial
  Probe
atctccatcaaggcaggaagtgaat

SEQ ID NO: 118649 - DNA, 25 bp, Artificial
  Probe
aaggacagagtgtgatctccatcaa

SEQ ID NO: 118650 - DNA, 25 bp, Artificial
  Probe
ggagtaaattataaagccgtaagat

SEQ ID NO: 118651 - DNA, 25 bp, Artificial
  Probe
aactatatgatgttactgatacagg

SEQ ID NO: 118652 - DNA, 25 bp, Artificial
  Probe
tgcatggtcaaagttctgtgtctta

SEQ ID NO: 118653 - DNA, 25 bp, Artificial
  Probe
aggacagagtgtgatctccatcaag

SEQ ID NO: 118654 - DNA, 25 bp, Artificial
  Probe
ccgtaagatttgaccattggcagag

SEQ ID NO: 118655 - DNA, 25 bp, Artificial
  Probe
agttctgtgtcttactacaaaacaa

SEQ ID NO: 118656 - DNA, 25 bp, Artificial
  Probe
aagttctgtgtcttactacaaaaca

SEQ ID NO: 118657 - DNA, 25 bp, Artificial
  Probe
gtaagatttgaccattggcagagct

SEQ ID NO: 118658 - DNA, 25 bp, Artificial
  Probe
aaaacaataaaatggatggtccctg

SEQ ID NO: 118659 - DNA, 25 bp, Artificial
  Probe
caaaacaataaaatggatggtccct

SEQ ID NO: 118660 - DNA, 25 bp, Artificial
  Probe
acaaaacaataaaatggatggtccc

SEQ ID NO: 118661 - DNA, 25 bp, Artificial
  Probe
gatctccatcaaggcaggaagtgaa

SEQ ID NO: 118662 - DNA, 25 bp, Artificial
  Probe
agtaggtacggtggatagatcctgg

SEQ ID NO: 118663 - DNA, 25 bp, Artificial
  Probe
cagacaagcagacagtaaccagttt

SEQ ID NO: 118664 - DNA, 25 bp, Artificial
  Probe
agacaagcagacagtaaccagtttg

SEQ ID NO: 118665 - DNA, 25 bp, Artificial
  Probe
caaaatcacagaaaccagttcaaaa

SEQ ID NO: 118666 - DNA, 25 bp, Artificial
  Probe
gcaaaatcacagaaaccagttcaaa

SEQ ID NO: 118667 - DNA, 25 bp, Artificial
  Probe
ccagacaagcagacagtaaccagtt

SEQ ID NO: 118668 - DNA, 25 bp, Artificial
  Probe
aaaatcacagaaaccagttcaaaat

SEQ ID NO: 118669 - DNA, 25 bp, Artificial
  Probe
aaggtggatgcagaaagtcattgat

SEQ ID NO: 118670 - DNA, 25 bp, Artificial
  Probe
aaaggtggatgcagaaagtcattga

SEQ ID NO: 118671 - DNA, 25 bp, Artificial
  Probe
aggtggatgcagaaagtcattgatc

SEQ ID NO: 118672 - DNA, 25 bp, Artificial
  Probe
aaatcacagaaaccagttcaaaata

SEQ ID NO: 118673 - DNA, 25 bp, Artificial
  Probe
aatcacagaaaccagttcaaaatat

SEQ ID NO: 118674 - DNA, 25 bp, Artificial
  Probe
ttgtttctgttctcaataaaagtga

SEQ ID NO: 118675 - DNA, 25 bp, Artificial
  Probe
gaggagatgcttgtgaaggtgacag

SEQ ID NO: 118676 - DNA, 25 bp, Artificial
  Probe
tgtttctgttctcaataaaagtgat

SEQ ID NO: 118677 - DNA, 25 bp, Artificial
  Probe
cagtgcccttcagtgactacattca

SEQ ID NO: 118678 - DNA, 25 bp, Artificial
  Probe
atcacagaaaccagttcaaaatatt

SEQ ID NO: 118679 - DNA, 25 bp, Artificial
  Probe
gtaccaaatgggtattgtctcctgg

SEQ ID NO: 118680 - DNA, 25 bp, Artificial
  Probe
tgcaaaatcacagaaaccagttcaa

SEQ ID NO: 118681 - DNA, 25 bp, Artificial
  Probe
gaaaaggtggatgcagaaagtcatt

SEQ ID NO: 118682 - DNA, 25 bp, Artificial
  Probe
aaaaggtggatgcagaaagtcattg

SEQ ID NO: 118683 - DNA, 25 bp, Artificial
  Probe
tctgttctcaataaaagtgattgtc

SEQ ID NO: 118684 - DNA, 25 bp, Artificial
  Probe
gtttctgttctcaataaaagtgatt

SEQ ID NO: 118685 - DNA, 25 bp, Artificial
  Probe
ccagtgcccttcagtgactacattc

SEQ ID NO: 118686 - DNA, 25 bp, Artificial
  Probe
tgaaaaggtggatgcagaaagtcat

SEQ ID NO: 118687 - DNA, 25 bp, Artificial
  Probe
ttctgttctcaataaaagtgattgt

SEQ ID NO: 118688 - DNA, 25 bp, Artificial
  Probe
taccaaatgggtattgtctcctggg

SEQ ID NO: 118689 - DNA, 25 bp, Artificial
  Probe
gacaagcagacagtaaccagtttgc

SEQ ID NO: 118690 - DNA, 25 bp, Artificial
  Probe
atcctcattgcaaaatcacagaaac

SEQ ID NO: 118691 - DNA, 25 bp, Artificial
  Probe
gatcctcattgcaaaatcacagaaa

SEQ ID NO: 118692 - DNA, 25 bp, Artificial
  Probe
cacagtatgggatcctcattgcaaa

SEQ ID NO: 118693 - DNA, 25 bp, Artificial
  Probe
tcacagaaaccagttcaaaatattt

SEQ ID NO: 118694 - DNA, 25 bp, Artificial
  Probe
cattgcaaaatcacagaaaccagtt

SEQ ID NO: 118695 - DNA, 25 bp, Artificial
  Probe
tttctgttctcaataaaagtgattg

SEQ ID NO: 118696 - DNA, 25 bp, Artificial
  Probe
attgcaaaatcacagaaaccagttc

SEQ ID NO: 118697 - DNA, 25 bp, Artificial
  Probe
ctcattgcaaaatcacagaaaccag

SEQ ID NO: 118698 - DNA, 25 bp, Artificial
  Probe
tcattgcaaaatcacagaaaccagt

SEQ ID NO: 118699 - DNA, 25 bp, Artificial
  Probe
agtatgggatcctcattgcaaaatc

SEQ ID NO: 118700 - DNA, 25 bp, Artificial
  Probe
tatgggatcctcattgcaaaatcac

SEQ ID NO: 118701 - DNA, 25 bp, Artificial
  Probe
gtatgggatcctcattgcaaaatca

SEQ ID NO: 118702 - DNA, 25 bp, Artificial
  Probe
cagtatgggatcctcattgcaaaat

SEQ ID NO: 118703 - DNA, 25 bp, Artificial
  Probe
ttgcaaaatcacagaaaccagttca

SEQ ID NO: 118704 - DNA, 25 bp, Artificial
  Probe
tcctcattgcaaaatcacagaaacc

SEQ ID NO: 118705 - DNA, 25 bp, Artificial
  Probe
ggatcctcattgcaaaatcacagaa

SEQ ID NO: 118706 - DNA, 25 bp, Artificial
  Probe
caaatgggtattgtctcctggggtg

SEQ ID NO: 118707 - DNA, 25 bp, Artificial
  Probe
cctcattgcaaaatcacagaaacca

SEQ ID NO: 118708 - DNA, 25 bp, Artificial
  Probe
taactactccacacttcagaagatg

SEQ ID NO: 118709 - DNA, 25 bp, Artificial
  Probe
ttaactactccacacttcagaagat

SEQ ID NO: 118710 - DNA, 25 bp, Artificial
  Probe
aagattacaacaggaggatagaatt

SEQ ID NO: 118711 - DNA, 25 bp, Artificial
  Probe
cacagtacatcttcttacaccagtg

SEQ ID NO: 118712 - DNA, 25 bp, Artificial
  Probe
ccaaagattacaacaggaggataga

SEQ ID NO: 118713 - DNA, 25 bp, Artificial
  Probe
accaaagattacaacaggaggatag

SEQ ID NO: 118714 - DNA, 25 bp, Artificial
  Probe
gaccaaagattacaacaggaggata

SEQ ID NO: 118715 - DNA, 25 bp, Artificial
  Probe
aacattatccctcttgcttctgaat

SEQ ID NO: 118716 - DNA, 25 bp, Artificial
  Probe
tatcaaataaaggaggtcatcagcc

SEQ ID NO: 118717 - DNA, 25 bp, Artificial
  Probe
tacatcttcttacaccagtgcattc

SEQ ID NO: 118718 - DNA, 25 bp, Artificial
  Probe
cattatccctcttgcttctgaattg

SEQ ID NO: 118719 - DNA, 25 bp, Artificial
  Probe
acattatccctcttgcttctgaatt

SEQ ID NO: 118720 - DNA, 25 bp, Artificial
  Probe
gaccacttaacacagcacataaata

SEQ ID NO: 118721 - DNA, 25 bp, Artificial
  Probe
acagtacatcttcttacaccagtgc

SEQ ID NO: 118722 - DNA, 25 bp, Artificial
  Probe
gcacagtacatcttcttacaccagt

SEQ ID NO: 118723 - DNA, 25 bp, Artificial
  Probe
gtacatcttcttacaccagtgcatt

SEQ ID NO: 118724 - DNA, 25 bp, Artificial
  Probe
attatccctcttgcttctgaattgg

SEQ ID NO: 118725 - DNA, 25 bp, Artificial
  Probe
acttaacacagcacataaataacca

SEQ ID NO: 118726 - DNA, 25 bp, Artificial
  Probe
accacttaacacagcacataaataa

SEQ ID NO: 118727 - DNA, 25 bp, Artificial
  Probe
cacttaacacagcacataaataacc

SEQ ID NO: 118728 - DNA, 25 bp, Artificial
  Probe
ccacttaacacagcacataaataac

SEQ ID NO: 118729 - DNA, 25 bp, Artificial
  Probe
ttatcaaataaaggaggtcatcagc

SEQ ID NO: 118730 - DNA, 25 bp, Artificial
  Probe
ggaccacttaacacagcacataaat

SEQ ID NO: 118731 - DNA, 25 bp, Artificial
  Probe
caacattatccctcttgcttctgaa

SEQ ID NO: 118732 - DNA, 25 bp, Artificial
  Probe
agtacatcttcttacaccagtgcat

SEQ ID NO: 118733 - DNA, 25 bp, Artificial
  Probe
caaagattacaacaggaggatagaa

SEQ ID NO: 118734 - DNA, 25 bp, Artificial
  Probe
gaacctggcacagtacatcttctta

SEQ ID NO: 118735 - DNA, 25 bp, Artificial
  Probe
tttatggacggatggttgtaggaaa

SEQ ID NO: 118736 - DNA, 25 bp, Artificial
  Probe
ttcattgctctggaccacttaacac

SEQ ID NO: 118737 - DNA, 25 bp, Artificial
  Probe
aactactccacacttcagaagatgg

SEQ ID NO: 118738 - DNA, 25 bp, Artificial
  Probe
cacagcacataaataaccatgactt

SEQ ID NO: 118739 - DNA, 25 bp, Artificial
  Probe
aacacagcacataaataaccatgac

SEQ ID NO: 118740 - DNA, 25 bp, Artificial
  Probe
aacctggcacagtacatcttcttac

SEQ ID NO: 118741 - DNA, 25 bp, Artificial
  Probe
ggcacagtacatcttcttacaccag

SEQ ID NO: 118742 - DNA, 25 bp, Artificial
  Probe
gttaactactccacacttcagaaga

SEQ ID NO: 118743 - DNA, 25 bp, Artificial
  Probe
acatcttcttacaccagtgcattct

SEQ ID NO: 118744 - DNA, 25 bp, Artificial
  Probe
acacagcacataaataaccatgact

SEQ ID NO: 118745 - DNA, 25 bp, Artificial
  Probe
acagcacataaataaccatgacttt

SEQ ID NO: 118746 - DNA, 25 bp, Artificial
  Probe
cttaacacagcacataaataaccat

SEQ ID NO: 118747 - DNA, 25 bp, Artificial
  Probe
ggaccaaagattacaacaggaggat

SEQ ID NO: 118748 - DNA, 25 bp, Artificial
  Probe
cagcacataaataaccatgactttg

SEQ ID NO: 118749 - DNA, 25 bp, Artificial
  Probe
ctggaccacttaacacagcacataa

SEQ ID NO: 118750 - DNA, 25 bp, Artificial
  Probe
taacacagcacataaataaccatga

SEQ ID NO: 118751 - DNA, 25 bp, Artificial
  Probe
atggaaggtgatgttgagcttgaat

SEQ ID NO: 118752 - DNA, 25 bp, Artificial
  Probe
cagtacatcttcttacaccagtgca

SEQ ID NO: 118753 - DNA, 25 bp, Artificial
  Probe
agaacacattcagacaatacagagt

SEQ ID NO: 118754 - DNA, 25 bp, Artificial
  Probe
aagaacacattcagacaatacagag

SEQ ID NO: 118755 - DNA, 25 bp, Artificial
  Probe
gaacacattcagacaatacagagtt

SEQ ID NO: 118756 - DNA, 25 bp, Artificial
  Probe
gttaagaaggaatctgtcacatacc

SEQ ID NO: 118757 - DNA, 25 bp, Artificial
  Probe
accagagaatatcctccttgatgat

SEQ ID NO: 118758 - DNA, 25 bp, Artificial
  Probe
aaccagagaatatcctccttgatga

SEQ ID NO: 118759 - DNA, 25 bp, Artificial
  Probe
ccagagaatatcctccttgatgatc

SEQ ID NO: 118760 - DNA, 25 bp, Artificial
  Probe
tgttaagaaggaatctgtcacatac

SEQ ID NO: 118761 - DNA, 25 bp, Artificial
  Probe
ggtgttaagaaggaatctgtcacat

SEQ ID NO: 118762 - DNA, 25 bp, Artificial
  Probe
gatatgttcctgtattcttagacca

SEQ ID NO: 118763 - DNA, 25 bp, Artificial
  Probe
ctggtgttaagaaggaatctgtcac

SEQ ID NO: 118764 - DNA, 25 bp, Artificial
  Probe
gtgttaagaaggaatctgtcacata

SEQ ID NO: 118765 - DNA, 25 bp, Artificial
  Probe
tatacatttagtcctgattggtggg

SEQ ID NO: 118766 - DNA, 25 bp, Artificial
  Probe
gaataaagaagaggaaaggtgaagc

SEQ ID NO: 118767 - DNA, 25 bp, Artificial
  Probe
ttggaagatttacagagggaaagaa

SEQ ID NO: 118768 - DNA, 25 bp, Artificial
  Probe
agatatgttcctgtattcttagacc

SEQ ID NO: 118769 - DNA, 25 bp, Artificial
  Probe
gaggaaatggaaagaagagtgaaga

SEQ ID NO: 118770 - DNA, 25 bp, Artificial
  Probe
tggaagatttacagagggaaagaat

SEQ ID NO: 118771 - DNA, 25 bp, Artificial
  Probe
atatgttcctgtattcttagaccaa

SEQ ID NO: 118772 - DNA, 25 bp, Artificial
  Probe
tggtgttaagaaggaatctgtcaca

SEQ ID NO: 118773 - DNA, 25 bp, Artificial
  Probe
aggaaatggaaagaagagtgaagac

SEQ ID NO: 118774 - DNA, 25 bp, Artificial
  Probe
tgaagaataccaagagagtacatac

SEQ ID NO: 118775 - DNA, 25 bp, Artificial
  Probe
gtgtcttgtcctttccataaattgt

SEQ ID NO: 118776 - DNA, 25 bp, Artificial
  Probe
aataaagaagaggaaaggtgaagcc

SEQ ID NO: 118777 - DNA, 25 bp, Artificial
  Probe
ccagtgtcttgtcctttccataaat

SEQ ID NO: 118778 - DNA, 25 bp, Artificial
  Probe
agtgtcttgtcctttccataaattg

SEQ ID NO: 118779 - DNA, 25 bp, Artificial
  Probe
cagtgtcttgtcctttccataaatt

SEQ ID NO: 118780 - DNA, 25 bp, Artificial
  Probe
cttggaagatttacagagggaaaga

SEQ ID NO: 118781 - DNA, 25 bp, Artificial
  Probe
cagtaacaaagaacacattcagaca

SEQ ID NO: 118782 - DNA, 25 bp, Artificial
  Probe
ccagtaacaaagaacacattcagac

SEQ ID NO: 118783 - DNA, 25 bp, Artificial
  Probe
tccagtaacaaagaacacattcaga

SEQ ID NO: 118784 - DNA, 25 bp, Artificial
  Probe
gtccagtaacaaagaacacattcag

SEQ ID NO: 118785 - DNA, 25 bp, Artificial
  Probe
tacacttatgaaaccaaggatgctt

SEQ ID NO: 118786 - DNA, 25 bp, Artificial
  Probe
ctacacttatgaaaccaaggatgct

SEQ ID NO: 118787 - DNA, 25 bp, Artificial
  Probe
ggaggaaatggaaagaagagtgaag

SEQ ID NO: 118788 - DNA, 25 bp, Artificial
  Probe
acaaagaacacattcagacaataca

SEQ ID NO: 118789 - DNA, 25 bp, Artificial
  Probe
agtaacaaagaacacattcagacaa

SEQ ID NO: 118790 - DNA, 25 bp, Artificial
  Probe
ttaagaaggaatctgtcacataccc

SEQ ID NO: 118791 - DNA, 25 bp, Artificial
  Probe
accatttgaagaataccaagagagt

SEQ ID NO: 118792 - DNA, 25 bp, Artificial
  Probe
tttacaatggaaatggctagaaagg

SEQ ID NO: 118793 - DNA, 25 bp, Artificial
  Probe
tttagcctacacttatgaaaccaag

SEQ ID NO: 118794 - DNA, 25 bp, Artificial
  Probe
cctggtgttaagaaggaatctgtca

SEQ ID NO: 118795 - DNA, 25 bp, Artificial
  Probe
aaacttcttccatagactcttcaga

SEQ ID NO: 118796 - DNA, 25 bp, Artificial
  Probe
acacttatgaaaccaaggatgcttt

SEQ ID NO: 118797 - DNA, 25 bp, Artificial
  Probe
aaagaagagtgaagactgaaactga

SEQ ID NO: 118798 - DNA, 25 bp, Artificial
  Probe
gcagattatcaagttcaccaaggat

SEQ ID NO: 118799 - DNA, 25 bp, Artificial
  Probe
gattatcaagttcaccaaggatctg

SEQ ID NO: 118800 - DNA, 25 bp, Artificial
  Probe
cagattatcaagttcaccaaggatc

SEQ ID NO: 118801 - DNA, 25 bp, Artificial
  Probe
agcagattatcaagttcaccaagga

SEQ ID NO: 118802 - DNA, 25 bp, Artificial
  Probe
cagcagattatcaagttcaccaagg

SEQ ID NO: 118803 - DNA, 25 bp, Artificial
  Probe
attatcaagttcaccaaggatctgc

SEQ ID NO: 118804 - DNA, 25 bp, Artificial
  Probe
cacattatggagcaacagtcaagac

SEQ ID NO: 118805 - DNA, 25 bp, Artificial
  Probe
gcagcagattatcaagttcaccaag

SEQ ID NO: 118806 - DNA, 25 bp, Artificial
  Probe
atatctcactcaacactacgttctg

SEQ ID NO: 118807 - DNA, 25 bp, Artificial
  Probe
catatctcactcaacactacgttct

SEQ ID NO: 118808 - DNA, 25 bp, Artificial
  Probe
cattatggagcaacagtcaagactc

SEQ ID NO: 118809 - DNA, 25 bp, Artificial
  Probe
aatcttgcatatctcactcaacact

SEQ ID NO: 118810 - DNA, 25 bp, Artificial
  Probe
tcttgcatatctcactcaacactac

SEQ ID NO: 118811 - DNA, 25 bp, Artificial
  Probe
atcttgcatatctcactcaacacta

SEQ ID NO: 118812 - DNA, 25 bp, Artificial
  Probe
agattatcaagttcaccaaggatct

SEQ ID NO: 118813 - DNA, 25 bp, Artificial
  Probe
ttatcaagttcaccaaggatctgcc

SEQ ID NO: 118814 - DNA, 25 bp, Artificial
  Probe
acattatggagcaacagtcaagact

SEQ ID NO: 118815 - DNA, 25 bp, Artificial
  Probe
ggttacccaaagagaagagattgat

SEQ ID NO: 118816 - DNA, 25 bp, Artificial
  Probe
gcatatctcactcaacactacgttc

SEQ ID NO: 118817 - DNA, 25 bp, Artificial
  Probe
cttgcatatctcactcaacactacg

SEQ ID NO: 118818 - DNA, 25 bp, Artificial
  Probe
gttacccaaagagaagagattgatc

SEQ ID NO: 118819 - DNA, 25 bp, Artificial
  Probe
tgcatatctcactcaacactacgtt

SEQ ID NO: 118820 - DNA, 25 bp, Artificial
  Probe
ttgcatatctcactcaacactacgt

SEQ ID NO: 118821 - DNA, 25 bp, Artificial
  Probe
catggtgcagcagattatcaagttc

SEQ ID NO: 118822 - DNA, 25 bp, Artificial
  Probe
tatctcactcaacactacgttctgc

SEQ ID NO: 118823 - DNA, 25 bp, Artificial
  Probe
ctgccttcaaacacagaatttcttc

SEQ ID NO: 118824 - DNA, 25 bp, Artificial
  Probe
atggtgcagcagattatcaagttca

SEQ ID NO: 118825 - DNA, 25 bp, Artificial
  Probe
tcatggtgcagcagattatcaagtt

SEQ ID NO: 118826 - DNA, 25 bp, Artificial
  Probe
ttcatggtgcagcagattatcaagt

SEQ ID NO: 118827 - DNA, 25 bp, Artificial
  Probe
aaccacattatggagcaacagtcaa

SEQ ID NO: 118828 - DNA, 25 bp, Artificial
  Probe
atactttcatggtgcagcagattat

SEQ ID NO: 118829 - DNA, 25 bp, Artificial
  Probe
ccacattatggagcaacagtcaaga

SEQ ID NO: 118830 - DNA, 25 bp, Artificial
  Probe
tgcagcagattatcaagttcaccaa

SEQ ID NO: 118831 - DNA, 25 bp, Artificial
  Probe
aatactttcatggtgcagcagatta

SEQ ID NO: 118832 - DNA, 25 bp, Artificial
  Probe
atatcaatactttcatggtgcagca

SEQ ID NO: 118833 - DNA, 25 bp, Artificial
  Probe
gatatcaatactttcatggtgcagc

SEQ ID NO: 118834 - DNA, 25 bp, Artificial
  Probe
ggaaatcttgcatatctcactcaac

SEQ ID NO: 118835 - DNA, 25 bp, Artificial
  Probe
tggaaatcttgcatatctcactcaa

SEQ ID NO: 118836 - DNA, 25 bp, Artificial
  Probe
tactttcatggtgcagcagattatc

SEQ ID NO: 118837 - DNA, 25 bp, Artificial
  Probe
aaatcttgcatatctcactcaacac

SEQ ID NO: 118838 - DNA, 25 bp, Artificial
  Probe
cagatatcaatactttcatggtgca

SEQ ID NO: 118839 - DNA, 25 bp, Artificial
  Probe
tgcagatatcaatactttcatggtg

SEQ ID NO: 118840 - DNA, 25 bp, Artificial
  Probe
accacattatggagcaacagtcaag

SEQ ID NO: 118841 - DNA, 25 bp, Artificial
  Probe
gaaatcttgcatatctcactcaaca

SEQ ID NO: 118842 - DNA, 25 bp, Artificial
  Probe
tatcaatactttcatggtgcagcag

SEQ ID NO: 118843 - DNA, 25 bp, Artificial
  Probe
cttaaaatgccagtttgcctagttc

SEQ ID NO: 118844 - DNA, 25 bp, Artificial
  Probe
ttaaaatgccagtttgcctagttct

SEQ ID NO: 118845 - DNA, 25 bp, Artificial
  Probe
ctagttctggctgttcctctggttc

SEQ ID NO: 118846 - DNA, 25 bp, Artificial
  Probe
gaccgggctggatttatttaagttt

SEQ ID NO: 118847 - DNA, 25 bp, Artificial
  Probe
cggcttgatgtcttcaataaattaa

SEQ ID NO: 118848 - DNA, 25 bp, Artificial
  Probe
ccttaaaatgccagtttgcctagtt

SEQ ID NO: 118849 - DNA, 25 bp, Artificial
  Probe
cctttagtgagggttaattttaggt

SEQ ID NO: 118850 - DNA, 25 bp, Artificial
  Probe
taaaatgccagtttgcctagttctg

SEQ ID NO: 118851 - DNA, 25 bp, Artificial
  Probe
gaagggagggcacgttaattttatt

SEQ ID NO: 118852 - DNA, 25 bp, Artificial
  Probe
ggaccgggctggatttatttaagtt

SEQ ID NO: 118853 - DNA, 25 bp, Artificial
  Probe
aagggagggcacgttaattttattg

SEQ ID NO: 118854 - DNA, 25 bp, Artificial
  Probe
ccggcttgatgtcttcaataaatta

SEQ ID NO: 118855 - DNA, 25 bp, Artificial
  Probe
ggcttgatgtcttcaataaattaag

SEQ ID NO: 118856 - DNA, 25 bp, Artificial
  Probe
accgggctggatttatttaagtttt

SEQ ID NO: 118857 - DNA, 25 bp, Artificial
  Probe
aggaccgggctggatttatttaagt

SEQ ID NO: 118858 - DNA, 25 bp, Artificial
  Probe
gcttgatgtcttcaataaattaagt

SEQ ID NO: 118859 - DNA, 25 bp, Artificial
  Probe
caggaccgggctggatttatttaag

SEQ ID NO: 118860 - DNA, 25 bp, Artificial
  Probe
ggaagggagggcacgttaattttat

SEQ ID NO: 118861 - DNA, 25 bp, Artificial
  Probe
gttaattttattggggtggggcagg

SEQ ID NO: 118862 - DNA, 25 bp, Artificial
  Probe
aattaagttttatttggattgagca

SEQ ID NO: 118863 - DNA, 25 bp, Artificial
  Probe
ttaattttattggggtggggcagga

SEQ ID NO: 118864 - DNA, 25 bp, Artificial
  Probe
gccttaaaatgccagtttgcctagt

SEQ ID NO: 118865 - DNA, 25 bp, Artificial
  Probe
ttttatttggattgagcaaaatcac

SEQ ID NO: 118866 - DNA, 25 bp, Artificial
  Probe
gttttatttggattgagcaaaatca

SEQ ID NO: 118867 - DNA, 25 bp, Artificial
  Probe
attaagttttatttggattgagcaa

SEQ ID NO: 118868 - DNA, 25 bp, Artificial
  Probe
agggagggcacgttaattttattgg

SEQ ID NO: 118869 - DNA, 25 bp, Artificial
  Probe
gaagacagtgcttttgcagtttatc

SEQ ID NO: 118870 - DNA, 25 bp, Artificial
  Probe
cgttaattttattggggtggggcag

SEQ ID NO: 118871 - DNA, 25 bp, Artificial
  Probe
agaagacagtgcttttgcagtttat

SEQ ID NO: 118872 - DNA, 25 bp, Artificial
  Probe
agttttatttggattgagcaaaatc

SEQ ID NO: 118873 - DNA, 25 bp, Artificial
  Probe
gagggcacgttaattttattggggt

SEQ ID NO: 118874 - DNA, 25 bp, Artificial
  Probe
gcttttgcagtttatcccatcttgg

SEQ ID NO: 118875 - DNA, 25 bp, Artificial
  Probe
aagacagtgcttttgcagtttatcc

SEQ ID NO: 118876 - DNA, 25 bp, Artificial
  Probe
cagaagacagtgcttttgcagttta

SEQ ID NO: 118877 - DNA, 25 bp, Artificial
  Probe
aagttttatttggattgagcaaaat

SEQ ID NO: 118878 - DNA, 25 bp, Artificial
  Probe
tgcttttgcagtttatcccatcttg

SEQ ID NO: 118879 - DNA, 25 bp, Artificial
  Probe
gtgcttttgcagtttatcccatctt

SEQ ID NO: 118880 - DNA, 25 bp, Artificial
  Probe
taattttattggggtggggcaggac

SEQ ID NO: 118881 - DNA, 25 bp, Artificial
  Probe
ggagggcacgttaattttattgggg

SEQ ID NO: 118882 - DNA, 25 bp, Artificial
  Probe
gggagggcacgttaattttattggg

SEQ ID NO: 118883 - DNA, 25 bp, Artificial
  Probe
agggcacgttaattttattggggtg

SEQ ID NO: 118884 - DNA, 25 bp, Artificial
  Probe
agtgcttttgcagtttatcccatct

SEQ ID NO: 118885 - DNA, 25 bp, Artificial
  Probe
cagtgcttttgcagtttatcccatc

SEQ ID NO: 118886 - DNA, 25 bp, Artificial
  Probe
taagttttatttggattgagcaaaa

SEQ ID NO: 118887 - DNA, 25 bp, Artificial
  Probe
ttaagttttatttggattgagcaaa

SEQ ID NO: 118888 - DNA, 25 bp, Artificial
  Probe
ttcagtgatggcacattcatatctg

SEQ ID NO: 118889 - DNA, 25 bp, Artificial
  Probe
gttcagtgatggcacattcatatct

SEQ ID NO: 118890 - DNA, 25 bp, Artificial
  Probe
taggttcagtgatggcacattcata

SEQ ID NO: 118891 - DNA, 25 bp, Artificial
  Probe
tcagtgatggcacattcatatctgt

SEQ ID NO: 118892 - DNA, 25 bp, Artificial
  Probe
ggttcagtgatggcacattcatatc

SEQ ID NO: 118893 - DNA, 25 bp, Artificial
  Probe
aggttcagtgatggcacattcatat

SEQ ID NO: 118894 - DNA, 25 bp, Artificial
  Probe
tatctgtgtccagtggaagttgtat

SEQ ID NO: 118895 - DNA, 25 bp, Artificial
  Probe
atatctgtgtccagtggaagttgta

SEQ ID NO: 118896 - DNA, 25 bp, Artificial
  Probe
cattcatatctgtgtccagtggaag

SEQ ID NO: 118897 - DNA, 25 bp, Artificial
  Probe
ctatgagaacaactgtgccttctac

SEQ ID NO: 118898 - DNA, 25 bp, Artificial
  Probe
attcatatctgtgtccagtggaagt

SEQ ID NO: 118899 - DNA, 25 bp, Artificial
  Probe
ttcatatctgtgtccagtggaagtt

SEQ ID NO: 118900 - DNA, 25 bp, Artificial
  Probe
acattcatatctgtgtccagtggaa

SEQ ID NO: 118901 - DNA, 25 bp, Artificial
  Probe
ttctcaagaaggactgcaactgtta

SEQ ID NO: 118902 - DNA, 25 bp, Artificial
  Probe
tcaagaaggactgcaactgttactt

SEQ ID NO: 118903 - DNA, 25 bp, Artificial
  Probe
caagctaagctcattatcttcacag

SEQ ID NO: 118904 - DNA, 25 bp, Artificial
  Probe
aagctaagctcattatcttcacagg

SEQ ID NO: 118905 - DNA, 25 bp, Artificial
  Probe
tccaagctaagctcattatcttcac

SEQ ID NO: 118906 - DNA, 25 bp, Artificial
  Probe
gtccaagctaagctcattatcttca

SEQ ID NO: 118907 - DNA, 25 bp, Artificial
  Probe
atctgtgtccagtggaagttgtatc

SEQ ID NO: 118908 - DNA, 25 bp, Artificial
  Probe
tcatatctgtgtccagtggaagttg

SEQ ID NO: 118909 - DNA, 25 bp, Artificial
  Probe
ccaagctaagctcattatcttcaca

SEQ ID NO: 118910 - DNA, 25 bp, Artificial
  Probe
ctcaagaaggactgcaactgttact

SEQ ID NO: 118911 - DNA, 25 bp, Artificial
  Probe
tctcaagaaggactgcaactgttac

SEQ ID NO: 118912 - DNA, 25 bp, Artificial
  Probe
tatgagaacaactgtgccttctacc

SEQ ID NO: 118913 - DNA, 25 bp, Artificial
  Probe
catatctgtgtccagtggaagttgt

SEQ ID NO: 118914 - DNA, 25 bp, Artificial
  Probe
gctatgagaacaactgtgccttcta

SEQ ID NO: 118915 - DNA, 25 bp, Artificial
  Probe
cgtccaagctaagctcattatcttc

SEQ ID NO: 118916 - DNA, 25 bp, Artificial
  Probe
ctgattcctggtgtgcattgatgta

SEQ ID NO: 118917 - DNA, 25 bp, Artificial
  Probe
ctaagctcattatcttcacagggtg

SEQ ID NO: 118918 - DNA, 25 bp, Artificial
  Probe
tgattcctggtgtgcattgatgtac

SEQ ID NO: 118919 - DNA, 25 bp, Artificial
  Probe
ctgtgtccagtggaagttgtatctg

SEQ ID NO: 118920 - DNA, 25 bp, Artificial
  Probe
ggttagaaccaatggatttgaggag

SEQ ID NO: 118921 - DNA, 25 bp, Artificial
  Probe
tctgtgtccagtggaagttgtatct

SEQ ID NO: 118922 - DNA, 25 bp, Artificial
  Probe
gctaagctcattatcttcacagggt

SEQ ID NO: 118923 - DNA, 25 bp, Artificial
  Probe
ttctgattcctggtgtgcattgatg

SEQ ID NO: 118924 - DNA, 25 bp, Artificial
  Probe
cttccacttggttatggcttctgtg

SEQ ID NO: 118925 - DNA, 25 bp, Artificial
  Probe
gtaccatatatcccactgcactgag

SEQ ID NO: 118926 - DNA, 25 bp, Artificial
  Probe
ccgtccaagctaagctcattatctt

SEQ ID NO: 118927 - DNA, 25 bp, Artificial
  Probe
aaccgtccaagctaagctcattatc

SEQ ID NO: 118928 - DNA, 25 bp, Artificial
  Probe
caagaaggactgcaactgttacttc

SEQ ID NO: 118929 - DNA, 25 bp, Artificial
  Probe
gggttagaaccaatggatttgagga

SEQ ID NO: 118930 - DNA, 25 bp, Artificial
  Probe
tttctcaagaaggactgcaactgtt

SEQ ID NO: 118931 - DNA, 25 bp, Artificial
  Probe
ttccacttggttatggcttctgtga

SEQ ID NO: 118932 - DNA, 25 bp, Artificial
  Probe
tttctgattcctggtgtgcattgat

SEQ ID NO: 118933 - DNA, 25 bp, Artificial
  Probe
cggaatctatacatcaacaacgaac

SEQ ID NO: 118934 - DNA, 25 bp, Artificial
  Probe
aatctatacatcaacaacgaactgc

SEQ ID NO: 118935 - DNA, 25 bp, Artificial
  Probe
ggaatctatacatcaacaacgaact

SEQ ID NO: 118936 - DNA, 25 bp, Artificial
  Probe
gaatctatacatcaacaacgaactg

SEQ ID NO: 118937 - DNA, 25 bp, Artificial
  Probe
atctatacatcaacaacgaactgca

SEQ ID NO: 118938 - DNA, 25 bp, Artificial
  Probe
tgctatctacagtgctgaaacaatc

SEQ ID NO: 118939 - DNA, 25 bp, Artificial
  Probe
tatctacagtgctgaaacaatcaac

SEQ ID NO: 118940 - DNA, 25 bp, Artificial
  Probe
aaactctactgtctacatggcattt

SEQ ID NO: 118941 - DNA, 25 bp, Artificial
  Probe
ctatctacagtgctgaaacaatcaa

SEQ ID NO: 118942 - DNA, 25 bp, Artificial
  Probe
gctatctacagtgctgaaacaatca

SEQ ID NO: 118943 - DNA, 25 bp, Artificial
  Probe
aactctactgtctacatggcatttg

SEQ ID NO: 118944 - DNA, 25 bp, Artificial
  Probe
ccggaatctatacatcaacaacgaa

SEQ ID NO: 118945 - DNA, 25 bp, Artificial
  Probe
ctgctatctacagtgctgaaacaat

SEQ ID NO: 118946 - DNA, 25 bp, Artificial
  Probe
ctacagtgctgaaacaatcaacgat

SEQ ID NO: 118947 - DNA, 25 bp, Artificial
  Probe
atctacagtgctgaaacaatcaacg

SEQ ID NO: 118948 - DNA, 25 bp, Artificial
  Probe
tacagtgctgaaacaatcaacgatg

SEQ ID NO: 118949 - DNA, 25 bp, Artificial
  Probe
aacatcactcttcaggtctccacag

SEQ ID NO: 118950 - DNA, 25 bp, Artificial
  Probe
tctgctatctacagtgctgaaacaa

SEQ ID NO: 118951 - DNA, 25 bp, Artificial
  Probe
caacatcactcttcaggtctccaca

SEQ ID NO: 118952 - DNA, 25 bp, Artificial
  Probe
ctctgctatctacagtgctgaaaca

SEQ ID NO: 118953 - DNA, 25 bp, Artificial
  Probe
gacaactttggaaagcactacacac

SEQ ID NO: 118954 - DNA, 25 bp, Artificial
  Probe
tctacagtgctgaaacaatcaacga

SEQ ID NO: 118955 - DNA, 25 bp, Artificial
  Probe
atggacaactttggaaagcactaca

SEQ ID NO: 118956 - DNA, 25 bp, Artificial
  Probe
catggacaactttggaaagcactac

SEQ ID NO: 118957 - DNA, 25 bp, Artificial
  Probe
actctactgtctacatggcatttgc

SEQ ID NO: 118958 - DNA, 25 bp, Artificial
  Probe
caggacttcaccaagacacagatga

SEQ ID NO: 118959 - DNA, 25 bp, Artificial
  Probe
acaactttggaaagcactacacact

SEQ ID NO: 118960 - DNA, 25 bp, Artificial
  Probe
ggataatgaccacattgcagttgag

SEQ ID NO: 118961 - DNA, 25 bp, Artificial
  Probe
gataatgaccacattgcagttgagc

SEQ ID NO: 118962 - DNA, 25 bp, Artificial
  Probe
aaaactctactgtctacatggcatt

SEQ ID NO: 118963 - DNA, 25 bp, Artificial
  Probe
ccaacatcactcttcaggtctccac

SEQ ID NO: 118964 - DNA, 25 bp, Artificial
  Probe
gaaaactctactgtctacatggcat

SEQ ID NO: 118965 - DNA, 25 bp, Artificial
  Probe
ggacaactttggaaagcactacaca

SEQ ID NO: 118966 - DNA, 25 bp, Artificial
  Probe
tggacaactttggaaagcactacac

SEQ ID NO: 118967 - DNA, 25 bp, Artificial
  Probe
gctctgctatctacagtgctgaaac

SEQ ID NO: 118968 - DNA, 25 bp, Artificial
  Probe
ataatgaccacattgcagttgagct

SEQ ID NO: 118969 - DNA, 25 bp, Artificial
  Probe
ctgccgaaaactctactgtctacat

SEQ ID NO: 118970 - DNA, 25 bp, Artificial
  Probe
aggacttcaccaagacacagatgaa

SEQ ID NO: 118971 - DNA, 25 bp, Artificial
  Probe
aatgtgagaagttgctcagtgtcaa

SEQ ID NO: 118972 - DNA, 25 bp, Artificial
  Probe
tctacaatggggataatgaccacat

SEQ ID NO: 118973 - DNA, 25 bp, Artificial
  Probe
tgaaacaatcaacgatgggcagttc

SEQ ID NO: 118974 - DNA, 25 bp, Artificial
  Probe
acagtgctgaaacaatcaacgatgg

SEQ ID NO: 118975 - DNA, 25 bp, Artificial
  Probe
ctacaatggggataatgaccacatt

SEQ ID NO: 118976 - DNA, 25 bp, Artificial
  Probe
ctcctctacaatggggataatgacc

SEQ ID NO: 118977 - DNA, 25 bp, Artificial
  Probe
cctcctctacaatggggataatgac

SEQ ID NO: 118978 - DNA, 25 bp, Artificial
  Probe
aacaggaatagaggcagacgagtaa

SEQ ID NO: 118979 - DNA, 25 bp, Artificial
  Probe
gatgtttccgtcgccttatttctac

SEQ ID NO: 118980 - DNA, 25 bp, Artificial
  Probe
caacaggaatagaggcagacgagta

SEQ ID NO: 118981 - DNA, 25 bp, Artificial
  Probe
caggaatagaggcagacgagtaaag

SEQ ID NO: 118982 - DNA, 25 bp, Artificial
  Probe
acaggaatagaggcagacgagtaaa

SEQ ID NO: 118983 - DNA, 25 bp, Artificial
  Probe
atgtttccgtcgccttatttctacc

SEQ ID NO: 118984 - DNA, 25 bp, Artificial
  Probe
aggaatagaggcagacgagtaaagg

SEQ ID NO: 118985 - DNA, 25 bp, Artificial
  Probe
caaaccaacaggaatagaggcagac

SEQ ID NO: 118986 - DNA, 25 bp, Artificial
  Probe
gagaaaatactgaccccactgaaag

SEQ ID NO: 118987 - DNA, 25 bp, Artificial
  Probe
ggatgtttccgtcgccttatttcta

SEQ ID NO: 118988 - DNA, 25 bp, Artificial
  Probe
ctgaaagtgcaaccagtaagtgaaa

SEQ ID NO: 118989 - DNA, 25 bp, Artificial
  Probe
gtttccgtcgccttatttctaccac

SEQ ID NO: 118990 - DNA, 25 bp, Artificial
  Probe
agaaaatactgaccccactgaaagt

SEQ ID NO: 118991 - DNA, 25 bp, Artificial
  Probe
ggagaaaatactgaccccactgaaa

SEQ ID NO: 118992 - DNA, 25 bp, Artificial
  Probe
ggaatagaggcagacgagtaaaggg

SEQ ID NO: 118993 - DNA, 25 bp, Artificial
  Probe
tgtttccgtcgccttatttctacca

SEQ ID NO: 118994 - DNA, 25 bp, Artificial
  Probe
agtgtgactggagaaaatactgacc

SEQ ID NO: 118995 - DNA, 25 bp, Artificial
  Probe
ccaaaccaacaggaatagaggcaga

SEQ ID NO: 118996 - DNA, 25 bp, Artificial
  Probe
gaaagtgcaaccagtaagtgaaaac

SEQ ID NO: 118997 - DNA, 25 bp, Artificial
  Probe
gtgtgactggagaaaatactgaccc

SEQ ID NO: 118998 - DNA, 25 bp, Artificial
  Probe
tgaaagtgcaaccagtaagtgaaaa

SEQ ID NO: 118999 - DNA, 25 bp, Artificial
  Probe
gaggatgtttccgtcgccttatttc

SEQ ID NO: 119000 - DNA, 25 bp, Artificial
  Probe
accaaaccaacaggaatagaggcag

SEQ ID NO: 119001 - DNA, 25 bp, Artificial
  Probe
aaagtgcaaccagtaagtgaaaaca

SEQ ID NO: 119002 - DNA, 25 bp, Artificial
  Probe
aaaccaacaggaatagaggcagacg

SEQ ID NO: 119003 - DNA, 25 bp, Artificial
  Probe
cttatttctaccacccaagcctgct

SEQ ID NO: 119004 - DNA, 25 bp, Artificial
  Probe
tttccgtcgccttatttctaccacc

SEQ ID NO: 119005 - DNA, 25 bp, Artificial
  Probe
aggatgtttccgtcgccttatttct

SEQ ID NO: 119006 - DNA, 25 bp, Artificial
  Probe
agaggatgtttccgtcgccttattt

SEQ ID NO: 119007 - DNA, 25 bp, Artificial
  Probe
caccaaaccaacaggaatagaggca

SEQ ID NO: 119008 - DNA, 25 bp, Artificial
  Probe
ttatttctaccacccaagcctgctg

SEQ ID NO: 119009 - DNA, 25 bp, Artificial
  Probe
cctcgagttctttctttctttcttt

SEQ ID NO: 119010 - DNA, 25 bp, Artificial
  Probe
ccctcgagttctttctttctttctt

SEQ ID NO: 119011 - DNA, 25 bp, Artificial
  Probe
tgtgactggagaaaatactgacccc

SEQ ID NO: 119012 - DNA, 25 bp, Artificial
  Probe
acacacacacacaaaatgaaccctc

SEQ ID NO: 119013 - DNA, 25 bp, Artificial
  Probe
aaccctcgagttctttctttctttc

SEQ ID NO: 119014 - DNA, 25 bp, Artificial
  Probe
aagtgcaaccagtaagtgaaaacac

SEQ ID NO: 119015 - DNA, 25 bp, Artificial
  Probe
gaatagaggcagacgagtaaagggg

SEQ ID NO: 119016 - DNA, 25 bp, Artificial
  Probe
accctcgagttctttctttctttct

SEQ ID NO: 119017 - DNA, 25 bp, Artificial
  Probe
tggagaaaatactgaccccactgaa

SEQ ID NO: 119018 - DNA, 25 bp, Artificial
  Probe
cagaggatgtttccgtcgccttatt

SEQ ID NO: 119019 - DNA, 25 bp, Artificial
  Probe
cacacacacacacaaaatgaaccct

SEQ ID NO: 119020 - DNA, 25 bp, Artificial
  Probe
acccacacacacacacaaaatgaac

SEQ ID NO: 119021 - DNA, 25 bp, Artificial
  Probe
cacccacacacacacacaaaatgaa

SEQ ID NO: 119022 - DNA, 25 bp, Artificial
  Probe
ctggagaaaatactgaccccactga

SEQ ID NO: 119023 - DNA, 25 bp, Artificial
  Probe
gcatattctacagactatccacctc

SEQ ID NO: 119024 - DNA, 25 bp, Artificial
  Probe
caggcatattctacagactatccac

SEQ ID NO: 119025 - DNA, 25 bp, Artificial
  Probe
gttggatgttagaggtctgttgtaa

SEQ ID NO: 119026 - DNA, 25 bp, Artificial
  Probe
agttggatgttagaggtctgttgta

SEQ ID NO: 119027 - DNA, 25 bp, Artificial
  Probe
ggcatattctacagactatccacct

SEQ ID NO: 119028 - DNA, 25 bp, Artificial
  Probe
aggcatattctacagactatccacc

SEQ ID NO: 119029 - DNA, 25 bp, Artificial
  Probe
ccaggcatattctacagactatcca

SEQ ID NO: 119030 - DNA, 25 bp, Artificial
  Probe
tattctacagactatccacctcttg

SEQ ID NO: 119031 - DNA, 25 bp, Artificial
  Probe
ttaatagcatacttgagcaatcagg

SEQ ID NO: 119032 - DNA, 25 bp, Artificial
  Probe
catattctacagactatccacctct

SEQ ID NO: 119033 - DNA, 25 bp, Artificial
  Probe
aagtgagaagatcaatatcctggtg

SEQ ID NO: 119034 - DNA, 25 bp, Artificial
  Probe
aggtgttgtaagtgagaagatcaat

SEQ ID NO: 119035 - DNA, 25 bp, Artificial
  Probe
aaggtgttgtaagtgagaagatcaa

SEQ ID NO: 119036 - DNA, 25 bp, Artificial
  Probe
aataaggtgttgtaagtgagaagat

SEQ ID NO: 119037 - DNA, 25 bp, Artificial
  Probe
taaggtgttgtaagtgagaagatca

SEQ ID NO: 119038 - DNA, 25 bp, Artificial
  Probe
tgactaataaggtgttgtaagtgag

SEQ ID NO: 119039 - DNA, 25 bp, Artificial
  Probe
atattctacagactatccacctctt

SEQ ID NO: 119040 - DNA, 25 bp, Artificial
  Probe
gccttactgaccacaccaatattaa

SEQ ID NO: 119041 - DNA, 25 bp, Artificial
  Probe
ataaggtgttgtaagtgagaagatc

SEQ ID NO: 119042 - DNA, 25 bp, Artificial
  Probe
attaagttgtctgagatggtacaca

SEQ ID NO: 119043 - DNA, 25 bp, Artificial
  Probe
taagtgagaagatcaatatcctggt

SEQ ID NO: 119044 - DNA, 25 bp, Artificial
  Probe
ggtgttgtaagtgagaagatcaata

SEQ ID NO: 119045 - DNA, 25 bp, Artificial
  Probe
gactaataaggtgttgtaagtgaga

SEQ ID NO: 119046 - DNA, 25 bp, Artificial
  Probe
agccaggcatattctacagactatc

SEQ ID NO: 119047 - DNA, 25 bp, Artificial
  Probe
gagccaggcatattctacagactat

SEQ ID NO: 119048 - DNA, 25 bp, Artificial
  Probe
gtaagtgagaagatcaatatcctgg

SEQ ID NO: 119049 - DNA, 25 bp, Artificial
  Probe
ttgactaataaggtgttgtaagtga

SEQ ID NO: 119050 - DNA, 25 bp, Artificial
  Probe
taataaggtgttgtaagtgagaaga

SEQ ID NO: 119051 - DNA, 25 bp, Artificial
  Probe
agtgagaagatcaatatcctggtgg

SEQ ID NO: 119052 - DNA, 25 bp, Artificial
  Probe
ctatacagaaggagccaggcatatt

SEQ ID NO: 119053 - DNA, 25 bp, Artificial
  Probe
ttctggtggtcattatggatggtac

SEQ ID NO: 119054 - DNA, 25 bp, Artificial
  Probe
gagaagatcaatatcctggtggaag

SEQ ID NO: 119055 - DNA, 25 bp, Artificial
  Probe
accacaccaatattaagttgtctga

SEQ ID NO: 119056 - DNA, 25 bp, Artificial
  Probe
gtagaacatagattgcagactgact

SEQ ID NO: 119057 - DNA, 25 bp, Artificial
  Probe
actgaccacaccaatattaagttgt

SEQ ID NO: 119058 - DNA, 25 bp, Artificial
  Probe
atagattgcagactgacttgttgat

SEQ ID NO: 119059 - DNA, 25 bp, Artificial
  Probe
tatacagaaggagccaggcatattc

SEQ ID NO: 119060 - DNA, 25 bp, Artificial
  Probe
ccacaccaatattaagttgtctgag

SEQ ID NO: 119061 - DNA, 25 bp, Artificial
  Probe
tagattgcagactgacttgttgatt

SEQ ID NO: 119062 - DNA, 25 bp, Artificial
  Probe
tagaacatagattgcagactgactt

SEQ ID NO: 119063 - DNA, 25 bp, Artificial
  Probe
ctaataaggtgttgtaagtgagaag

SEQ ID NO: 119064 - DNA, 25 bp, Artificial
  Probe
attctacagactatccacctcttgg

SEQ ID NO: 119065 - DNA, 25 bp, Artificial
  Probe
tactgaccacaccaatattaagttg

SEQ ID NO: 119066 - DNA, 25 bp, Artificial
  Probe
tgagaagatcaatatcctggtggaa

SEQ ID NO: 119067 - DNA, 25 bp, Artificial
  Probe
actaataaggtgttgtaagtgagaa

SEQ ID NO: 119068 - DNA, 25 bp, Artificial
  Probe
acattagagaaagaaccaggaagag

SEQ ID NO: 119069 - DNA, 25 bp, Artificial
  Probe
gacattagagaaagaaccaggaaga

SEQ ID NO: 119070 - DNA, 25 bp, Artificial
  Probe
ttagagaaagaaccaggaagagaag

SEQ ID NO: 119071 - DNA, 25 bp, Artificial
  Probe
cattagagaaagaaccaggaagaga

SEQ ID NO: 119072 - DNA, 25 bp, Artificial
  Probe
tactgaggacattagagaaagaacc

SEQ ID NO: 119073 - DNA, 25 bp, Artificial
  Probe
ggacattagagaaagaaccaggaag

SEQ ID NO: 119074 - DNA, 25 bp, Artificial
  Probe
gctgtgtactgaggacattagagaa

SEQ ID NO: 119075 - DNA, 25 bp, Artificial
  Probe
attagagaaagaaccaggaagagaa

SEQ ID NO: 119076 - DNA, 25 bp, Artificial
  Probe
aggacattagagaaagaaccaggaa

SEQ ID NO: 119077 - DNA, 25 bp, Artificial
  Probe
actgaggacattagagaaagaacca

SEQ ID NO: 119078 - DNA, 25 bp, Artificial
  Probe
tagagaaagaaccaggaagagaagg

SEQ ID NO: 119079 - DNA, 25 bp, Artificial
  Probe
gaggacattagagaaagaaccagga

SEQ ID NO: 119080 - DNA, 25 bp, Artificial
  Probe
tgaggacattagagaaagaaccagg

SEQ ID NO: 119081 - DNA, 25 bp, Artificial
  Probe
ctgctgtgtactgaggacattagag

SEQ ID NO: 119082 - DNA, 25 bp, Artificial
  Probe
gtactgaggacattagagaaagaac

SEQ ID NO: 119083 - DNA, 25 bp, Artificial
  Probe
ctgaggacattagagaaagaaccag

SEQ ID NO: 119084 - DNA, 25 bp, Artificial
  Probe
tgctgtgtactgaggacattagaga

SEQ ID NO: 119085 - DNA, 25 bp, Artificial
  Probe
tgtgtactgaggacattagagaaag

SEQ ID NO: 119086 - DNA, 25 bp, Artificial
  Probe
ctgtgtactgaggacattagagaaa

SEQ ID NO: 119087 - DNA, 25 bp, Artificial
  Probe
gtgtactgaggacattagagaaaga

SEQ ID NO: 119088 - DNA, 25 bp, Artificial
  Probe
actgctgtgtactgaggacattaga

SEQ ID NO: 119089 - DNA, 25 bp, Artificial
  Probe
tgtactgaggacattagagaaagaa

SEQ ID NO: 119090 - DNA, 25 bp, Artificial
  Probe
cactgctgtgtactgaggacattag

SEQ ID NO: 119091 - DNA, 25 bp, Artificial
  Probe
aaatgaaagtggatttgacccatcg

SEQ ID NO: 119092 - DNA, 25 bp, Artificial
  Probe
gaagagaaggtgtccaggagttacg

SEQ ID NO: 119093 - DNA, 25 bp, Artificial
  Probe
aaaggttcaggataagttccgtctg

SEQ ID NO: 119094 - DNA, 25 bp, Artificial
  Probe
ggaagagaaggtgtccaggagttac

SEQ ID NO: 119095 - DNA, 25 bp, Artificial
  Probe
aggaagagaaggtgtccaggagtta

SEQ ID NO: 119096 - DNA, 25 bp, Artificial
  Probe
gagaaagaaccaggaagagaaggtg

SEQ ID NO: 119097 - DNA, 25 bp, Artificial
  Probe
aaggttcaggataagttccgtctgg

SEQ ID NO: 119098 - DNA, 25 bp, Artificial
  Probe
taagaaaacacatgagaaaccactg

SEQ ID NO: 119099 - DNA, 25 bp, Artificial
  Probe
gtaagaaaacacatgagaaaccact

SEQ ID NO: 119100 - DNA, 25 bp, Artificial
  Probe
agtaagaaaacacatgagaaaccac

SEQ ID NO: 119101 - DNA, 25 bp, Artificial
  Probe
tggagaaaatgaaagtggatttgac

SEQ ID NO: 119102 - DNA, 25 bp, Artificial
  Probe
actggagaaaatgaaagtggatttg

SEQ ID NO: 119103 - DNA, 25 bp, Artificial
  Probe
ctggagaaaatgaaagtggatttga

SEQ ID NO: 119104 - DNA, 25 bp, Artificial
  Probe
agagaaagaaccaggaagagaaggt

SEQ ID NO: 119105 - DNA, 25 bp, Artificial
  Probe
ccactgctgtgtactgaggacatta

SEQ ID NO: 119106 - DNA, 25 bp, Artificial
  Probe
gagaaaatgaaagtggatttgaccc

SEQ ID NO: 119107 - DNA, 25 bp, Artificial
  Probe
ggagaaaatgaaagtggatttgacc

SEQ ID NO: 119108 - DNA, 25 bp, Artificial
  Probe
gcctgacttagtaagaaaacacatg

SEQ ID NO: 119109 - DNA, 25 bp, Artificial
  Probe
gaaagaaccaggaagagaaggtgtc

SEQ ID NO: 119110 - DNA, 25 bp, Artificial
  Probe
aatgaaagtggatttgacccatcgt

SEQ ID NO: 119111 - DNA, 25 bp, Artificial
  Probe
gtactggagaaaatgaaagtggatt

SEQ ID NO: 119112 - DNA, 25 bp, Artificial
  Probe
tactggagaaaatgaaagtggattt

SEQ ID NO: 119113 - DNA, 25 bp, Artificial
  Probe
gaacggaaggcttattcttagacag

SEQ ID NO: 119114 - DNA, 25 bp, Artificial
  Probe
aacggaaggcttattcttagacagg

SEQ ID NO: 119115 - DNA, 25 bp, Artificial
  Probe
ggaacggaaggcttattcttagaca

SEQ ID NO: 119116 - DNA, 25 bp, Artificial
  Probe
tctgactgtactcatcttcacactc

SEQ ID NO: 119117 - DNA, 25 bp, Artificial
  Probe
ctctgactgtactcatcttcacact

SEQ ID NO: 119118 - DNA, 25 bp, Artificial
  Probe
aggtgaagtttctgtggttaatagt

SEQ ID NO: 119119 - DNA, 25 bp, Artificial
  Probe
aagtttctgtggttaatagtttccc

SEQ ID NO: 119120 - DNA, 25 bp, Artificial
  Probe
ggtgaagtttctgtggttaatagtt

SEQ ID NO: 119121 - DNA, 25 bp, Artificial
  Probe
taaagtggtggtgtctacattatgc

SEQ ID NO: 119122 - DNA, 25 bp, Artificial
  Probe
gtttgaggactattctgctacactg

SEQ ID NO: 119123 - DNA, 25 bp, Artificial
  Probe
gcttattcttagacagggtggattg

SEQ ID NO: 119124 - DNA, 25 bp, Artificial
  Probe
tgttctgagtttgaggactattctg

SEQ ID NO: 119125 - DNA, 25 bp, Artificial
  Probe
acttgttctgagtttgaggactatt

SEQ ID NO: 119126 - DNA, 25 bp, Artificial
  Probe
gacttgttctgagtttgaggactat

SEQ ID NO: 119127 - DNA, 25 bp, Artificial
  Probe
ttgttctgagtttgaggactattct

SEQ ID NO: 119128 - DNA, 25 bp, Artificial
  Probe
cttgttctgagtttgaggactattc

SEQ ID NO: 119129 - DNA, 25 bp, Artificial
  Probe
caatataaagtggtggtgtctacat

SEQ ID NO: 119130 - DNA, 25 bp, Artificial
  Probe
ctgagtttgaggactattctgctac

SEQ ID NO: 119131 - DNA, 25 bp, Artificial
  Probe
tctgagtttgaggactattctgcta

SEQ ID NO: 119132 - DNA, 25 bp, Artificial
  Probe
ctgactgtactcatcttcacactcc

SEQ ID NO: 119133 - DNA, 25 bp, Artificial
  Probe
cctctgactgtactcatcttcacac

SEQ ID NO: 119134 - DNA, 25 bp, Artificial
  Probe
ggctgtcccaattaaagatcctatt

SEQ ID NO: 119135 - DNA, 25 bp, Artificial
  Probe
ttccacatctgaaggagttaagagc

SEQ ID NO: 119136 - DNA, 25 bp, Artificial
  Probe
gagtttgaggactattctgctacac

SEQ ID NO: 119137 - DNA, 25 bp, Artificial
  Probe
gctgtcccaattaaagatcctattt

SEQ ID NO: 119138 - DNA, 25 bp, Artificial
  Probe
cttattcttagacagggtggattgt

SEQ ID NO: 119139 - DNA, 25 bp, Artificial
  Probe
ttcttagacagggtggattgtttac

SEQ ID NO: 119140 - DNA, 25 bp, Artificial
  Probe
attcttagacagggtggattgttta

SEQ ID NO: 119141 - DNA, 25 bp, Artificial
  Probe
tattcttagacagggtggattgttt

SEQ ID NO: 119142 - DNA, 25 bp, Artificial
  Probe
ttattcttagacagggtggattgtt

SEQ ID NO: 119143 - DNA, 25 bp, Artificial
  Probe
ataaagtggtggtgtctacattatg

SEQ ID NO: 119144 - DNA, 25 bp, Artificial
  Probe
agtttgaggactattctgctacact

SEQ ID NO: 119145 - DNA, 25 bp, Artificial
  Probe
tgagtttgaggactattctgctaca

SEQ ID NO: 119146 - DNA, 25 bp, Artificial
  Probe
tttgaggactattctgctacactgg

SEQ ID NO: 119147 - DNA, 25 bp, Artificial
  Probe
ttctgagtttgaggactattctgct

SEQ ID NO: 119148 - DNA, 25 bp, Artificial
  Probe
gttctgagtttgaggactattctgc

SEQ ID NO: 119149 - DNA, 25 bp, Artificial
  Probe
ggcttattcttagacagggtggatt

SEQ ID NO: 119150 - DNA, 25 bp, Artificial
  Probe
caggtgaagtttctgtggttaatag

SEQ ID NO: 119151 - DNA, 25 bp, Artificial
  Probe
gaagtttctgtggttaatagtttcc

SEQ ID NO: 119152 - DNA, 25 bp, Artificial
  Probe
aatataaagtggtggtgtctacatt

SEQ ID NO: 119153 - DNA, 25 bp, Artificial
  Probe
gtgaagtttctgtggttaatagttt

SEQ ID NO: 119154 - DNA, 25 bp, Artificial
  Probe
ggacttgttctgagtttgaggacta

SEQ ID NO: 119155 - DNA, 25 bp, Artificial
  Probe
tttccacatctgaaggagttaagag

SEQ ID NO: 119156 - DNA, 25 bp, Artificial
  Probe
tcatttccacatctgaaggagttaa

SEQ ID NO: 119157 - DNA, 25 bp, Artificial
  Probe
atcatttccacatctgaaggagtta

SEQ ID NO: 119158 - DNA, 25 bp, Artificial
  Probe
gttaatggtggaactttctctgaag

SEQ ID NO: 119159 - DNA, 25 bp, Artificial
  Probe
ggttaatggtggaactttctctgaa

SEQ ID NO: 119160 - DNA, 25 bp, Artificial
  Probe
ttaatggtggaactttctctgaagc

SEQ ID NO: 119161 - DNA, 25 bp, Artificial
  Probe
tggttaatggtggaactttctctga

SEQ ID NO: 119162 - DNA, 25 bp, Artificial
  Probe
gtggttaatggtggaactttctctg

SEQ ID NO: 119163 - DNA, 25 bp, Artificial
  Probe
ctacagttccttgcttcttggagac

SEQ ID NO: 119164 - DNA, 25 bp, Artificial
  Probe
ggtggttaatggtggaactttctct

SEQ ID NO: 119165 - DNA, 25 bp, Artificial
  Probe
gaactttctctgaagctcctttctc

SEQ ID NO: 119166 - DNA, 25 bp, Artificial
  Probe
tttctcccttgctattggtccctat

SEQ ID NO: 119167 - DNA, 25 bp, Artificial
  Probe
tacagttccttgcttcttggagact

SEQ ID NO: 119168 - DNA, 25 bp, Artificial
  Probe
tatctgctgctcactcttcttcgtc

SEQ ID NO: 119169 - DNA, 25 bp, Artificial
  Probe
ctatctgctgctcactcttcttcgt

SEQ ID NO: 119170 - DNA, 25 bp, Artificial
  Probe
tggtggttaatggtggaactttctc

SEQ ID NO: 119171 - DNA, 25 bp, Artificial
  Probe
ctggtggttaatggtggaactttct

SEQ ID NO: 119172 - DNA, 25 bp, Artificial
  Probe
cttccatgctacagttccttgcttc

SEQ ID NO: 119173 - DNA, 25 bp, Artificial
  Probe
taatggtggaactttctctgaagct

SEQ ID NO: 119174 - DNA, 25 bp, Artificial
  Probe
ttctcccttgctattggtccctatc

SEQ ID NO: 119175 - DNA, 25 bp, Artificial
  Probe
catgctacagttccttgcttcttgg

SEQ ID NO: 119176 - DNA, 25 bp, Artificial
  Probe
ccatgctacagttccttgcttcttg

SEQ ID NO: 119177 - DNA, 25 bp, Artificial
  Probe
ctttctcccttgctattggtcccta

SEQ ID NO: 119178 - DNA, 25 bp, Artificial
  Probe
aactttctctgaagctcctttctcc

SEQ ID NO: 119179 - DNA, 25 bp, Artificial
  Probe
tccatgctacagttccttgcttctt

SEQ ID NO: 119180 - DNA, 25 bp, Artificial
  Probe
ttccatgctacagttccttgcttct

SEQ ID NO: 119181 - DNA, 25 bp, Artificial
  Probe
ctcccttgctattggtccctatctc

SEQ ID NO: 119182 - DNA, 25 bp, Artificial
  Probe
ctcttcctcccctattgctgtaaat

SEQ ID NO: 119183 - DNA, 25 bp, Artificial
  Probe
cctatctgctgctcactcttcttcg

SEQ ID NO: 119184 - DNA, 25 bp, Artificial
  Probe
tttggagggagaaagcaagggataa

SEQ ID NO: 119185 - DNA, 25 bp, Artificial
  Probe
atgctacagttccttgcttcttgga

SEQ ID NO: 119186 - DNA, 25 bp, Artificial
  Probe
aatggtggaactttctctgaagctc

SEQ ID NO: 119187 - DNA, 25 bp, Artificial
  Probe
tctcccttgctattggtccctatct

SEQ ID NO: 119188 - DNA, 25 bp, Artificial
  Probe
ggaactttctctgaagctcctttct

SEQ ID NO: 119189 - DNA, 25 bp, Artificial
  Probe
ttggagggagaaagcaagggataag

SEQ ID NO: 119190 - DNA, 25 bp, Artificial
  Probe
tggaactttctctgaagctcctttc

SEQ ID NO: 119191 - DNA, 25 bp, Artificial
  Probe
gctacagttccttgcttcttggaga

SEQ ID NO: 119192 - DNA, 25 bp, Artificial
  Probe
tttctctgaagctcctttctccctt

SEQ ID NO: 119193 - DNA, 25 bp, Artificial
  Probe
tctcttcctcccctattgctgtaaa

SEQ ID NO: 119194 - DNA, 25 bp, Artificial
  Probe
ttctcttcctcccctattgctgtaa

SEQ ID NO: 119195 - DNA, 25 bp, Artificial
  Probe
gtggaactttctctgaagctccttt

SEQ ID NO: 119196 - DNA, 25 bp, Artificial
  Probe
gctggtggttaatggtggaactttc

SEQ ID NO: 119197 - DNA, 25 bp, Artificial
  Probe
ccctatctgctgctcactcttcttc

SEQ ID NO: 119198 - DNA, 25 bp, Artificial
  Probe
ccttccatgctacagttccttgctt

SEQ ID NO: 119199 - DNA, 25 bp, Artificial
  Probe
cttctcttcctcccctattgctgta

SEQ ID NO: 119200 - DNA, 25 bp, Artificial
  Probe
tgctacagttccttgcttcttggag

SEQ ID NO: 119201 - DNA, 25 bp, Artificial
  Probe
ctcctttctcccttgctattggtcc

SEQ ID NO: 119202 - DNA, 25 bp, Artificial
  Probe
ctttctctgaagctcctttctccct

SEQ ID NO: 119203 - DNA, 25 bp, Artificial
  Probe
agaagaatcaggctatgtaccgaag

SEQ ID NO: 119204 - DNA, 25 bp, Artificial
  Probe
cagaagaatcaggctatgtaccgaa

SEQ ID NO: 119205 - DNA, 25 bp, Artificial
  Probe
gaagaatcaggctatgtaccgaagg

SEQ ID NO: 119206 - DNA, 25 bp, Artificial
  Probe
atgaataaatcacctcaagatgcca

SEQ ID NO: 119207 - DNA, 25 bp, Artificial
  Probe
tgaataaatcacctcaagatgccag

SEQ ID NO: 119208 - DNA, 25 bp, Artificial
  Probe
aagaatcaggctatgtaccgaagga

SEQ ID NO: 119209 - DNA, 25 bp, Artificial
  Probe
ccacagaagaatcaggctatgtacc

SEQ ID NO: 119210 - DNA, 25 bp, Artificial
  Probe
atctacattctactcaggacccaca

SEQ ID NO: 119211 - DNA, 25 bp, Artificial
  Probe
catgaataaatcacctcaagatgcc

SEQ ID NO: 119212 - DNA, 25 bp, Artificial
  Probe
ccatgaataaatcacctcaagatgc

SEQ ID NO: 119213 - DNA, 25 bp, Artificial
  Probe
cccatgaataaatcacctcaagatg

SEQ ID NO: 119214 - DNA, 25 bp, Artificial
  Probe
gatctacattctactcaggacccac

SEQ ID NO: 119215 - DNA, 25 bp, Artificial
  Probe
acagaagaatcaggctatgtaccga

SEQ ID NO: 119216 - DNA, 25 bp, Artificial
  Probe
cacagaagaatcaggctatgtaccg

SEQ ID NO: 119217 - DNA, 25 bp, Artificial
  Probe
tctacattctactcaggacccacag

SEQ ID NO: 119218 - DNA, 25 bp, Artificial
  Probe
gaatcaggctatgtaccgaaggact

SEQ ID NO: 119219 - DNA, 25 bp, Artificial
  Probe
agaatcaggctatgtaccgaaggac

SEQ ID NO: 119220 - DNA, 25 bp, Artificial
  Probe
gaataaatcacctcaagatgccagg

SEQ ID NO: 119221 - DNA, 25 bp, Artificial
  Probe
ctacattctactcaggacccacaga

SEQ ID NO: 119222 - DNA, 25 bp, Artificial
  Probe
atcgatctacattctactcaggacc

SEQ ID NO: 119223 - DNA, 25 bp, Artificial
  Probe
tactcaggacccacagaagaatcag

SEQ ID NO: 119224 - DNA, 25 bp, Artificial
  Probe
ctactcaggacccacagaagaatca

SEQ ID NO: 119225 - DNA, 25 bp, Artificial
  Probe
tctactcaggacccacagaagaatc

SEQ ID NO: 119226 - DNA, 25 bp, Artificial
  Probe
tatcgatctacattctactcaggac

SEQ ID NO: 119227 - DNA, 25 bp, Artificial
  Probe
cgatctacattctactcaggaccca

SEQ ID NO: 119228 - DNA, 25 bp, Artificial
  Probe
tgcctgttatcgatctacattctac

SEQ ID NO: 119229 - DNA, 25 bp, Artificial
  Probe
gcctgttatcgatctacattctact

SEQ ID NO: 119230 - DNA, 25 bp, Artificial
  Probe
ctgcctgttatcgatctacattcta

SEQ ID NO: 119231 - DNA, 25 bp, Artificial
  Probe
acccacagaagaatcaggctatgta

SEQ ID NO: 119232 - DNA, 25 bp, Artificial
  Probe
gttatcgatctacattctactcagg

SEQ ID NO: 119233 - DNA, 25 bp, Artificial
  Probe
aatcaggctatgtaccgaaggactg

SEQ ID NO: 119234 - DNA, 25 bp, Artificial
  Probe
ttatcgatctacattctactcagga

SEQ ID NO: 119235 - DNA, 25 bp, Artificial
  Probe
cccacagaagaatcaggctatgtac

SEQ ID NO: 119236 - DNA, 25 bp, Artificial
  Probe
tcgatctacattctactcaggaccc

SEQ ID NO: 119237 - DNA, 25 bp, Artificial
  Probe
atagctgcctgttatcgatctacat

SEQ ID NO: 119238 - DNA, 25 bp, Artificial
  Probe
tagctgcctgttatcgatctacatt

SEQ ID NO: 119239 - DNA, 25 bp, Artificial
  Probe
cctgttatcgatctacattctactc

SEQ ID NO: 119240 - DNA, 25 bp, Artificial
  Probe
atcatcaaaagtcctttctgctgtg

SEQ ID NO: 119241 - DNA, 25 bp, Artificial
  Probe
catcatcaaaagtcctttctgctgt

SEQ ID NO: 119242 - DNA, 25 bp, Artificial
  Probe
catagctgcctgttatcgatctaca

SEQ ID NO: 119243 - DNA, 25 bp, Artificial
  Probe
acatagctgcctgttatcgatctac

SEQ ID NO: 119244 - DNA, 25 bp, Artificial
  Probe
cacatagctgcctgttatcgatcta

SEQ ID NO: 119245 - DNA, 25 bp, Artificial
  Probe
tacattctactcaggacccacagaa

SEQ ID NO: 119246 - DNA, 25 bp, Artificial
  Probe
ccccatgaataaatcacctcaagat

SEQ ID NO: 119247 - DNA, 25 bp, Artificial
  Probe
ttctactcaggacccacagaagaat

SEQ ID NO: 119248 - DNA, 25 bp, Artificial
  Probe
gttaggaggacaatggtgattcttc

SEQ ID NO: 119249 - DNA, 25 bp, Artificial
  Probe
agttaggaggacaatggtgattctt

SEQ ID NO: 119250 - DNA, 25 bp, Artificial
  Probe
aagttaggaggacaatggtgattct

SEQ ID NO: 119251 - DNA, 25 bp, Artificial
  Probe
aaagttaggaggacaatggtgattc

SEQ ID NO: 119252 - DNA, 25 bp, Artificial
  Probe
ttaggaggacaatggtgattcttcc

SEQ ID NO: 119253 - DNA, 25 bp, Artificial
  Probe
tggacagtttaagaagagagaatct

SEQ ID NO: 119254 - DNA, 25 bp, Artificial
  Probe
attgaagcaaactcctagaatgatg

SEQ ID NO: 119255 - DNA, 25 bp, Artificial
  Probe
ttgaagcaaactcctagaatgatgg

SEQ ID NO: 119256 - DNA, 25 bp, Artificial
  Probe
aaattgaagcaaactcctagaatga

SEQ ID NO: 119257 - DNA, 25 bp, Artificial
  Probe
aattgaagcaaactcctagaatgat

SEQ ID NO: 119258 - DNA, 25 bp, Artificial
  Probe
gaatgaatgtgattcgagcaatatt

SEQ ID NO: 119259 - DNA, 25 bp, Artificial
  Probe
ggacaatggtgattcttcctataaa

SEQ ID NO: 119260 - DNA, 25 bp, Artificial
  Probe
ctcctagaatgatggcctcttgatt

SEQ ID NO: 119261 - DNA, 25 bp, Artificial
  Probe
atctgtgctgtccctagagaatgat

SEQ ID NO: 119262 - DNA, 25 bp, Artificial
  Probe
tgaagcaaactcctagaatgatggc

SEQ ID NO: 119263 - DNA, 25 bp, Artificial
  Probe
aaaagttaggaggacaatggtgatt

SEQ ID NO: 119264 - DNA, 25 bp, Artificial
  Probe
taaaagttaggaggacaatggtgat

SEQ ID NO: 119265 - DNA, 25 bp, Artificial
  Probe
caatgagaagctgagcctgaagttc

SEQ ID NO: 119266 - DNA, 25 bp, Artificial
  Probe
ggacagtttaagaagagagaatctt

SEQ ID NO: 119267 - DNA, 25 bp, Artificial
  Probe
acttagaaaattgaagcaaactcct

SEQ ID NO: 119268 - DNA, 25 bp, Artificial
  Probe
actcctagaatgatggcctcttgat

SEQ ID NO: 119269 - DNA, 25 bp, Artificial
  Probe
gaggacaatggtgattcttcctata

SEQ ID NO: 119270 - DNA, 25 bp, Artificial
  Probe
gacttagaaaattgaagcaaactcc

SEQ ID NO: 119271 - DNA, 25 bp, Artificial
  Probe
aactcctagaatgatggcctcttga

SEQ ID NO: 119272 - DNA, 25 bp, Artificial
  Probe
aggacaatggtgattcttcctataa

SEQ ID NO: 119273 - DNA, 25 bp, Artificial
  Probe
ctaaaagttaggaggacaatggtga

SEQ ID NO: 119274 - DNA, 25 bp, Artificial
  Probe
tctaaaagttaggaggacaatggtg

SEQ ID NO: 119275 - DNA, 25 bp, Artificial
  Probe
gcatctaaaagttaggaggacaatg

SEQ ID NO: 119276 - DNA, 25 bp, Artificial
  Probe
agaaaattgaagcaaactcctagaa

SEQ ID NO: 119277 - DNA, 25 bp, Artificial
  Probe
tctgtgctgtccctagagaatgatg

SEQ ID NO: 119278 - DNA, 25 bp, Artificial
  Probe
catctgtgctgtccctagagaatga

SEQ ID NO: 119279 - DNA, 25 bp, Artificial
  Probe
atctaaaagttaggaggacaatggt

SEQ ID NO: 119280 - DNA, 25 bp, Artificial
  Probe
ctagaatgatggcctcttgatttgg

SEQ ID NO: 119281 - DNA, 25 bp, Artificial
  Probe
cctagaatgatggcctcttgatttg

SEQ ID NO: 119282 - DNA, 25 bp, Artificial
  Probe
catctaaaagttaggaggacaatgg

SEQ ID NO: 119283 - DNA, 25 bp, Artificial
  Probe
tgacttagaaaattgaagcaaactc

SEQ ID NO: 119284 - DNA, 25 bp, Artificial
  Probe
tccctagagaatgatgctggagaag

SEQ ID NO: 119285 - DNA, 25 bp, Artificial
  Probe
tcctagaatgatggcctcttgattt

SEQ ID NO: 119286 - DNA, 25 bp, Artificial
  Probe
aatgagaagctgagcctgaagttca

SEQ ID NO: 119287 - DNA, 25 bp, Artificial
  Probe
aaaattgaagcaaactcctagaatg

SEQ ID NO: 119288 - DNA, 25 bp, Artificial
  Probe
ggaggacaatggtgattcttcctat

SEQ ID NO: 119289 - DNA, 25 bp, Artificial
  Probe
gtccctagagaatgatgctggagaa

SEQ ID NO: 119290 - DNA, 25 bp, Artificial
  Probe
ttgacttagaaaattgaagcaaact

SEQ ID NO: 119291 - DNA, 25 bp, Artificial
  Probe
tagaatgatggcctcttgatttggt

SEQ ID NO: 119292 - DNA, 25 bp, Artificial
  Probe
gaaaattgaagcaaactcctagaat

SEQ ID NO: 119293 - DNA, 25 bp, Artificial
  Probe
aatgattacatccacagtacacacg

SEQ ID NO: 119294 - DNA, 25 bp, Artificial
  Probe
taatgattacatccacagtacacac

SEQ ID NO: 119295 - DNA, 25 bp, Artificial
  Probe
ttaatgattacatccacagtacaca

SEQ ID NO: 119296 - DNA, 25 bp, Artificial
  Probe
aacaaagagtggaagaagaaatacg

SEQ ID NO: 119297 - DNA, 25 bp, Artificial
  Probe
cttgaacaaagagtggaagaagaaa

SEQ ID NO: 119298 - DNA, 25 bp, Artificial
  Probe
ttgaacaaagagtggaagaagaaat

SEQ ID NO: 119299 - DNA, 25 bp, Artificial
  Probe
atgattacatccacagtacacacgg

SEQ ID NO: 119300 - DNA, 25 bp, Artificial
  Probe
ccttgaacaaagagtggaagaagaa

SEQ ID NO: 119301 - DNA, 25 bp, Artificial
  Probe
tgaacaaagagtggaagaagaaata

SEQ ID NO: 119302 - DNA, 25 bp, Artificial
  Probe
gaacaaagagtggaagaagaaatac

SEQ ID NO: 119303 - DNA, 25 bp, Artificial
  Probe
aagtggcaattccttgaacaaagag

SEQ ID NO: 119304 - DNA, 25 bp, Artificial
  Probe
gaagtggcaattccttgaacaaaga

SEQ ID NO: 119305 - DNA, 25 bp, Artificial
  Probe
atcaatgggttggtcaggatatgag

SEQ ID NO: 119306 - DNA, 25 bp, Artificial
  Probe
attaatgattacatccacagtacac

SEQ ID NO: 119307 - DNA, 25 bp, Artificial
  Probe
ctactcttcttccctcccatcttca

SEQ ID NO: 119308 - DNA, 25 bp, Artificial
  Probe
actactcttcttccctcccatcttc

SEQ ID NO: 119309 - DNA, 25 bp, Artificial
  Probe
gactactcttcttccctcccatctt

SEQ ID NO: 119310 - DNA, 25 bp, Artificial
  Probe
gcaaagagatggacttgttacgaac

SEQ ID NO: 119311 - DNA, 25 bp, Artificial
  Probe
catcaatgggttggtcaggatatga

SEQ ID NO: 119312 - DNA, 25 bp, Artificial
  Probe
aaagagtggaagaagaaatacgtga

SEQ ID NO: 119313 - DNA, 25 bp, Artificial
  Probe
caaagagtggaagaagaaatacgtg

SEQ ID NO: 119314 - DNA, 25 bp, Artificial
  Probe
acaaagagtggaagaagaaatacgt

SEQ ID NO: 119315 - DNA, 25 bp, Artificial
  Probe
aagagtggaagaagaaatacgtgac

SEQ ID NO: 119316 - DNA, 25 bp, Artificial
  Probe
tccttgaacaaagagtggaagaaga

SEQ ID NO: 119317 - DNA, 25 bp, Artificial
  Probe
tactcttcttccctcccatcttcac

SEQ ID NO: 119318 - DNA, 25 bp, Artificial
  Probe
ttacgaacaacagtcaaagtcccag

SEQ ID NO: 119319 - DNA, 25 bp, Artificial
  Probe
ccacactagcgactactcttcttcc

SEQ ID NO: 119320 - DNA, 25 bp, Artificial
  Probe
gtggcaattccttgaacaaagagtg

SEQ ID NO: 119321 - DNA, 25 bp, Artificial
  Probe
agtggcaattccttgaacaaagagt

SEQ ID NO: 119322 - DNA, 25 bp, Artificial
  Probe
gtggaagaagaaatacgtgaccttg

SEQ ID NO: 119323 - DNA, 25 bp, Artificial
  Probe
agtgattctgagaaacggagcttag

SEQ ID NO: 119324 - DNA, 25 bp, Artificial
  Probe
ggcaaagagatggacttgttacgaa

SEQ ID NO: 119325 - DNA, 25 bp, Artificial
  Probe
agtggaagaagaaatacgtgacctt

SEQ ID NO: 119326 - DNA, 25 bp, Artificial
  Probe
gattctgagaaacggagcttagaca

SEQ ID NO: 119327 - DNA, 25 bp, Artificial
  Probe
tgattctgagaaacggagcttagac

SEQ ID NO: 119328 - DNA, 25 bp, Artificial
  Probe
gtgattctgagaaacggagcttaga

SEQ ID NO: 119329 - DNA, 25 bp, Artificial
  Probe
tggaagaagaaatacgtgaccttgt

SEQ ID NO: 119330 - DNA, 25 bp, Artificial
  Probe
gttacgaacaacagtcaaagtccca

SEQ ID NO: 119331 - DNA, 25 bp, Artificial
  Probe
gagtggaagaagaaatacgtgacct

SEQ ID NO: 119332 - DNA, 25 bp, Artificial
  Probe
agagtggaagaagaaatacgtgacc

SEQ ID NO: 119333 - DNA, 25 bp, Artificial
  Probe
cgaagtggcaattccttgaacaaag

SEQ ID NO: 119334 - DNA, 25 bp, Artificial
  Probe
gaagaagaaatacgtgaccttgtcc

SEQ ID NO: 119335 - DNA, 25 bp, Artificial
  Probe
ggaagaagaaatacgtgaccttgtc

SEQ ID NO: 119336 - DNA, 25 bp, Artificial
  Probe
taaagcgaagtggcaattccttgaa

SEQ ID NO: 119337 - DNA, 25 bp, Artificial
  Probe
attacatccacagtacacacggcaa

SEQ ID NO: 119338 - DNA, 25 bp, Artificial
  Probe
tctccaaagttctaccaatttccaa

SEQ ID NO: 119339 - DNA, 25 bp, Artificial
  Probe
ttctccaaagttctaccaatttcca

SEQ ID NO: 119340 - DNA, 25 bp, Artificial
  Probe
cttctccaaagttctaccaatttcc

SEQ ID NO: 119341 - DNA, 25 bp, Artificial
  Probe
gcttctccaaagttctaccaatttc

SEQ ID NO: 119342 - DNA, 25 bp, Artificial
  Probe
caaagttctaccaatttccaaccaa

SEQ ID NO: 119343 - DNA, 25 bp, Artificial
  Probe
ctccaaagttctaccaatttccaac

SEQ ID NO: 119344 - DNA, 25 bp, Artificial
  Probe
gttctaccaatttccaaccaatagc

SEQ ID NO: 119345 - DNA, 25 bp, Artificial
  Probe
ttctaccaatttccaaccaatagcc

SEQ ID NO: 119346 - DNA, 25 bp, Artificial
  Probe
aaagttctaccaatttccaaccaat

SEQ ID NO: 119347 - DNA, 25 bp, Artificial
  Probe
agttctaccaatttccaaccaatag

SEQ ID NO: 119348 - DNA, 25 bp, Artificial
  Probe
ggcttctccaaagttctaccaattt

SEQ ID NO: 119349 - DNA, 25 bp, Artificial
  Probe
aagttctaccaatttccaaccaata

SEQ ID NO: 119350 - DNA, 25 bp, Artificial
  Probe
tccaaagttctaccaatttccaacc

SEQ ID NO: 119351 - DNA, 25 bp, Artificial
  Probe
ccaaagttctaccaatttccaacca

SEQ ID NO: 119352 - DNA, 25 bp, Artificial
  Probe
aggcttctccaaagttctaccaatt

SEQ ID NO: 119353 - DNA, 25 bp, Artificial
  Probe
caggcttctccaaagttctaccaat

SEQ ID NO: 119354 - DNA, 25 bp, Artificial
  Probe
tctaccaatttccaaccaatagccg

SEQ ID NO: 119355 - DNA, 25 bp, Artificial
  Probe
ctaccaatttccaaccaatagccgt

SEQ ID NO: 119356 - DNA, 25 bp, Artificial
  Probe
taccaatttccaaccaatagccgtg

SEQ ID NO: 119357 - DNA, 25 bp, Artificial
  Probe
atttccaaccaatagccgtgctaat

SEQ ID NO: 119358 - DNA, 25 bp, Artificial
  Probe
aatttccaaccaatagccgtgctaa

SEQ ID NO: 119359 - DNA, 25 bp, Artificial
  Probe
caatttccaaccaatagccgtgcta

SEQ ID NO: 119360 - DNA, 25 bp, Artificial
  Probe
agaagatgtgtaactcagacaactc

SEQ ID NO: 119361 - DNA, 25 bp, Artificial
  Probe
gagaagatgtgtaactcagacaact

SEQ ID NO: 119362 - DNA, 25 bp, Artificial
  Probe
agagaagatgtgtaactcagacaac

SEQ ID NO: 119363 - DNA, 25 bp, Artificial
  Probe
cagagaagatgtgtaactcagacaa

SEQ ID NO: 119364 - DNA, 25 bp, Artificial
  Probe
gagacagagaagatgtgtaactcag

SEQ ID NO: 119365 - DNA, 25 bp, Artificial
  Probe
ttctgaggacaacatcatcaacaag

SEQ ID NO: 119366 - DNA, 25 bp, Artificial
  Probe
cttctgaggacaacatcatcaacaa

SEQ ID NO: 119367 - DNA, 25 bp, Artificial
  Probe
agacagagaagatgtgtaactcaga

SEQ ID NO: 119368 - DNA, 25 bp, Artificial
  Probe
gacagagaagatgtgtaactcagac

SEQ ID NO: 119369 - DNA, 25 bp, Artificial
  Probe
ctgaggacaacatcatcaacaagtt

SEQ ID NO: 119370 - DNA, 25 bp, Artificial
  Probe
gaagatgtgtaactcagacaactcc

SEQ ID NO: 119371 - DNA, 25 bp, Artificial
  Probe
acagagaagatgtgtaactcagaca

SEQ ID NO: 119372 - DNA, 25 bp, Artificial
  Probe
aagatgtgtaactcagacaactcca

SEQ ID NO: 119373 - DNA, 25 bp, Artificial
  Probe
tctgaggacaacatcatcaacaagt

SEQ ID NO: 119374 - DNA, 25 bp, Artificial
  Probe
cgagacagagaagatgtgtaactca

SEQ ID NO: 119375 - DNA, 25 bp, Artificial
  Probe
acgagacagagaagatgtgtaactc

SEQ ID NO: 119376 - DNA, 25 bp, Artificial
  Probe
gacgagacagagaagatgtgtaact

SEQ ID NO: 119377 - DNA, 25 bp, Artificial
  Probe
agatgtgtaactcagacaactccag

SEQ ID NO: 119378 - DNA, 25 bp, Artificial
  Probe
gagagtatcaacaacagacccaata

SEQ ID NO: 119379 - DNA, 25 bp, Artificial
  Probe
gagtatcaacaacagacccaataac

SEQ ID NO: 119380 - DNA, 25 bp, Artificial
  Probe
agagtatcaacaacagacccaataa

SEQ ID NO: 119381 - DNA, 25 bp, Artificial
  Probe
tatcaacaacagacccaataaccta

SEQ ID NO: 119382 - DNA, 25 bp, Artificial
  Probe
atcaacaacagacccaataacctac

SEQ ID NO: 119383 - DNA, 25 bp, Artificial
  Probe
gtatcaacaacagacccaataacct

SEQ ID NO: 119384 - DNA, 25 bp, Artificial
  Probe
agtatcaacaacagacccaataacc

SEQ ID NO: 119385 - DNA, 25 bp, Artificial
  Probe
gaggacaacatcatcaacaagtttg

SEQ ID NO: 119386 - DNA, 25 bp, Artificial
  Probe
ggacgagacagagaagatgtgtaac

SEQ ID NO: 119387 - DNA, 25 bp, Artificial
  Probe
gatgaagagaagaaagaggacgaga

SEQ ID NO: 119388 - DNA, 25 bp, Artificial
  Probe
aggacgagacagagaagatgtgtaa

SEQ ID NO: 119389 - DNA, 25 bp, Artificial
  Probe
gctgagatggagaatggaatggtac

SEQ ID NO: 119390 - DNA, 25 bp, Artificial
  Probe
atgaagagaagaaagaggacgagac

SEQ ID NO: 119391 - DNA, 25 bp, Artificial
  Probe
tgaggacaacatcatcaacaagttt

SEQ ID NO: 119392 - DNA, 25 bp, Artificial
  Probe
tctggatgaagagaagaaagaggac

SEQ ID NO: 119393 - DNA, 25 bp, Artificial
  Probe
aactaaatgttaaagacactggagc

SEQ ID NO: 119394 - DNA, 25 bp, Artificial
  Probe
gcttctgaggacaacatcatcaaca

SEQ ID NO: 119395 - DNA, 25 bp, Artificial
  Probe
ggagagtatcaacaacagacccaat

SEQ ID NO: 119396 - DNA, 25 bp, Artificial
  Probe
gaggacgagacagagaagatgtgta

SEQ ID NO: 119397 - DNA, 25 bp, Artificial
  Probe
gaagaaagaggacgagacagagaag

SEQ ID NO: 119398 - DNA, 25 bp, Artificial
  Probe
gaagagaagaaagaggacgagacag

SEQ ID NO: 119399 - DNA, 25 bp, Artificial
  Probe
aggacaacatcatcaacaagtttgg

SEQ ID NO: 119400 - DNA, 25 bp, Artificial
  Probe
gaaagaggacgagacagagaagatg

SEQ ID NO: 119401 - DNA, 25 bp, Artificial
  Probe
agaaagaggacgagacagagaagat

SEQ ID NO: 119402 - DNA, 25 bp, Artificial
  Probe
ggatgaagagaagaaagaggacgag

SEQ ID NO: 119403 - DNA, 25 bp, Artificial
  Probe
acaacatcatcaacaagtttgggtc

SEQ ID NO: 119404 - DNA, 25 bp, Artificial
  Probe
gacaacatcatcaacaagtttgggt

SEQ ID NO: 119405 - DNA, 25 bp, Artificial
  Probe
gaagaggctgtgcaagatgttctac

SEQ ID NO: 119406 - DNA, 25 bp, Artificial
  Probe
aattcaagacggagaagaggctgtg

SEQ ID NO: 119407 - DNA, 25 bp, Artificial
  Probe
tggaggaattcaagacggagaagag

SEQ ID NO: 119408 - DNA, 25 bp, Artificial
  Probe
ctggaggaattcaagacggagaaga

SEQ ID NO: 119409 - DNA, 25 bp, Artificial
  Probe
agaagaggctgtgcaagatgttcta

SEQ ID NO: 119410 - DNA, 25 bp, Artificial
  Probe
ggaggaattcaagacggagaagagg

SEQ ID NO: 119411 - DNA, 25 bp, Artificial
  Probe
acctgaaaggcattggtttgtgaag

SEQ ID NO: 119412 - DNA, 25 bp, Artificial
  Probe
gacctgaaaggcattggtttgtgaa

SEQ ID NO: 119413 - DNA, 25 bp, Artificial
  Probe
gaattcaagacggagaagaggctgt

SEQ ID NO: 119414 - DNA, 25 bp, Artificial
  Probe
aagaggctgtgcaagatgttctacg

SEQ ID NO: 119415 - DNA, 25 bp, Artificial
  Probe
gaggaattcaagacggagaagaggc

SEQ ID NO: 119416 - DNA, 25 bp, Artificial
  Probe
gagaagaggctgtgcaagatgttct

SEQ ID NO: 119417 - DNA, 25 bp, Artificial
  Probe
tctacaagttggtaatacagacgac

SEQ ID NO: 119418 - DNA, 25 bp, Artificial
  Probe
ttctacaagttggtaatacagacga

SEQ ID NO: 119419 - DNA, 25 bp, Artificial
  Probe
agatgctaattgctctggttatagt

SEQ ID NO: 119420 - DNA, 25 bp, Artificial
  Probe
caagatgctaattgctctggttata

SEQ ID NO: 119421 - DNA, 25 bp, Artificial
  Probe
aagatgctaattgctctggttatag

SEQ ID NO: 119422 - DNA, 25 bp, Artificial
  Probe
gatgctaattgctctggttatagta

SEQ ID NO: 119423 - DNA, 25 bp, Artificial
  Probe
taatacagacgaccatactgctctt

SEQ ID NO: 119424 - DNA, 25 bp, Artificial
  Probe
tgctaattgctctggttatagtatt

SEQ ID NO: 119425 - DNA, 25 bp, Artificial
  Probe
atgctaattgctctggttatagtat

SEQ ID NO: 119426 - DNA, 25 bp, Artificial
  Probe
gtaatacagacgaccatactgctct

SEQ ID NO: 119427 - DNA, 25 bp, Artificial
  Probe
ctacaagttggtaatacagacgacc

SEQ ID NO: 119428 - DNA, 25 bp, Artificial
  Probe
ccaagatgctaattgctctggttat

SEQ ID NO: 119429 - DNA, 25 bp, Artificial
  Probe
aattgctctggttatagtatttggc

SEQ ID NO: 119430 - DNA, 25 bp, Artificial
  Probe
aatacagacgaccatactgctcttc

SEQ ID NO: 119431 - DNA, 25 bp, Artificial
  Probe
cagacaggtgaccaagatgctaatt

SEQ ID NO: 119432 - DNA, 25 bp, Artificial
  Probe
agacaggtgaccaagatgctaattg

SEQ ID NO: 119433 - DNA, 25 bp, Artificial
  Probe
gaccatactgctcttcttctgtctg

SEQ ID NO: 119434 - DNA, 25 bp, Artificial
  Probe
atacagacgaccatactgctcttct

SEQ ID NO: 119435 - DNA, 25 bp, Artificial
  Probe
ggtaatacagacgaccatactgctc

SEQ ID NO: 119436 - DNA, 25 bp, Artificial
  Probe
tacagacgaccatactgctcttctt

SEQ ID NO: 119437 - DNA, 25 bp, Artificial
  Probe
ccttgcttctggtgtcttcttgtac

SEQ ID NO: 119438 - DNA, 25 bp, Artificial
  Probe
ctctggttatagtatttggcacctg

SEQ ID NO: 119439 - DNA, 25 bp, Artificial
  Probe
agacgaccatactgctcttcttctg

SEQ ID NO: 119440 - DNA, 25 bp, Artificial
  Probe
aagtattcagcttcgagatagggaa

SEQ ID NO: 119441 - DNA, 25 bp, Artificial
  Probe
gacgaccatactgctcttcttctgt

SEQ ID NO: 119442 - DNA, 25 bp, Artificial
  Probe
acagaagtattcagcttcgagatag

SEQ ID NO: 119443 - DNA, 25 bp, Artificial
  Probe
cacagaagtattcagcttcgagata

SEQ ID NO: 119444 - DNA, 25 bp, Artificial
  Probe
gctaattgctctggttatagtattt

SEQ ID NO: 119445 - DNA, 25 bp, Artificial
  Probe
agtattcagcttcgagatagggaac

SEQ ID NO: 119446 - DNA, 25 bp, Artificial
  Probe
cagaagtattcagcttcgagatagg

SEQ ID NO: 119447 - DNA, 25 bp, Artificial
  Probe
ggtgaccaagatgctaattgctctg

SEQ ID NO: 119448 - DNA, 25 bp, Artificial
  Probe
aggtgaccaagatgctaattgctct

SEQ ID NO: 119449 - DNA, 25 bp, Artificial
  Probe
caggtgaccaagatgctaattgctc

SEQ ID NO: 119450 - DNA, 25 bp, Artificial
  Probe
accatactgctcttcttctgtctgc

SEQ ID NO: 119451 - DNA, 25 bp, Artificial
  Probe
cgaccatactgctcttcttctgtct

SEQ ID NO: 119452 - DNA, 25 bp, Artificial
  Probe
cagacgaccatactgctcttcttct

SEQ ID NO: 119453 - DNA, 25 bp, Artificial
  Probe
taattgctctggttatagtatttgg

SEQ ID NO: 119454 - DNA, 25 bp, Artificial
  Probe
gacaggtgaccaagatgctaattgc

SEQ ID NO: 119455 - DNA, 25 bp, Artificial
  Probe
gctctggttatagtatttggcacct

SEQ ID NO: 119456 - DNA, 25 bp, Artificial
  Probe
cttgcttctggtgtcttcttgtacc

SEQ ID NO: 119457 - DNA, 25 bp, Artificial
  Probe
acgaccatactgctcttcttctgtc

SEQ ID NO: 119458 - DNA, 25 bp, Artificial
  Probe
acagacgaccatactgctcttcttc

SEQ ID NO: 119459 - DNA, 25 bp, Artificial
  Probe
attgctctggttatagtatttggca

SEQ ID NO: 119460 - DNA, 25 bp, Artificial
  Probe
accttgcttctggtgtcttcttgta

SEQ ID NO: 119461 - DNA, 25 bp, Artificial
  Probe
ttgctctggttatagtatttggcac

SEQ ID NO: 119462 - DNA, 25 bp, Artificial
  Probe
ctttgagaagccagactacgactac

SEQ ID NO: 119463 - DNA, 25 bp, Artificial
  Probe
tctttgagaagccagactacgacta

SEQ ID NO: 119464 - DNA, 25 bp, Artificial
  Probe
gtgtttgactacgagtatgactggg

SEQ ID NO: 119465 - DNA, 25 bp, Artificial
  Probe
ttgagaagccagactacgactacct

SEQ ID NO: 119466 - DNA, 25 bp, Artificial
  Probe
ctacgactacctgaggaagctcttc

SEQ ID NO: 119467 - DNA, 25 bp, Artificial
  Probe
tttgagaagccagactacgactacc

SEQ ID NO: 119468 - DNA, 25 bp, Artificial
  Probe
actatttaaaaccaggagagaagcc

SEQ ID NO: 119469 - DNA, 25 bp, Artificial
  Probe
aactatttaaaaccaggagagaagc

SEQ ID NO: 119470 - DNA, 25 bp, Artificial
  Probe
tacgactacctgaggaagctcttca

SEQ ID NO: 119471 - DNA, 25 bp, Artificial
  Probe
actacgactacctgaggaagctctt

SEQ ID NO: 119472 - DNA, 25 bp, Artificial
  Probe
ctatttaaaaccaggagagaagccg

SEQ ID NO: 119473 - DNA, 25 bp, Artificial
  Probe
ctacgtgtttgactacgagtatgac

SEQ ID NO: 119474 - DNA, 25 bp, Artificial
  Probe
tacgtgtttgactacgagtatgact

SEQ ID NO: 119475 - DNA, 25 bp, Artificial
  Probe
agaagccagactacgactacctgag

SEQ ID NO: 119476 - DNA, 25 bp, Artificial
  Probe
gagaagccagactacgactacctga

SEQ ID NO: 119477 - DNA, 25 bp, Artificial
  Probe
ttcaagaggaggaagagaaaatcgc

SEQ ID NO: 119478 - DNA, 25 bp, Artificial
  Probe
tatttaaaaccaggagagaagccgt

SEQ ID NO: 119479 - DNA, 25 bp, Artificial
  Probe
gactacgactacctgaggaagctct

SEQ ID NO: 119480 - DNA, 25 bp, Artificial
  Probe
agactacgactacctgaggaagctc

SEQ ID NO: 119481 - DNA, 25 bp, Artificial
  Probe
tgtttgactacgagtatgactgggc

SEQ ID NO: 119482 - DNA, 25 bp, Artificial
  Probe
tgagaagccagactacgactacctg

SEQ ID NO: 119483 - DNA, 25 bp, Artificial
  Probe
ttctttgagaagccagactacgact

SEQ ID NO: 119484 - DNA, 25 bp, Artificial
  Probe
caagaggaggaagagaaaatcgctg

SEQ ID NO: 119485 - DNA, 25 bp, Artificial
  Probe
tcaagaggaggaagagaaaatcgct

SEQ ID NO: 119486 - DNA, 25 bp, Artificial
  Probe
cgtgtttgactacgagtatgactgg

SEQ ID NO: 119487 - DNA, 25 bp, Artificial
  Probe
gctacgtgtttgactacgagtatga

SEQ ID NO: 119488 - DNA, 25 bp, Artificial
  Probe
acgtgtttgactacgagtatgactg

SEQ ID NO: 119489 - DNA, 25 bp, Artificial
  Probe
cagactacgactacctgaggaagct

SEQ ID NO: 119490 - DNA, 25 bp, Artificial
  Probe
gaacgctaccagaagattggtgata

SEQ ID NO: 119491 - DNA, 25 bp, Artificial
  Probe
gagggactttggcggaaatctctac

SEQ ID NO: 119492 - DNA, 25 bp, Artificial
  Probe
cttcaagaggaggaagagaaaatcg

SEQ ID NO: 119493 - DNA, 25 bp, Artificial
  Probe
aacgctaccagaagattggtgatac

SEQ ID NO: 119494 - DNA, 25 bp, Artificial
  Probe
atttaaaaccaggagagaagccgtg

SEQ ID NO: 119495 - DNA, 25 bp, Artificial
  Probe
ggctacgtgtttgactacgagtatg

SEQ ID NO: 119496 - DNA, 25 bp, Artificial
  Probe
ataagtgagggactttggcggaaat

SEQ ID NO: 119497 - DNA, 25 bp, Artificial
  Probe
ctgctgcttcttcaagaggaggaag

SEQ ID NO: 119498 - DNA, 25 bp, Artificial
  Probe
taactatttaaaaccaggagagaag

SEQ ID NO: 119499 - DNA, 25 bp, Artificial
  Probe
aagaggaggaagagaaaatcgctgc

SEQ ID NO: 119500 - DNA, 25 bp, Artificial
  Probe
taagtgagggactttggcggaaatc

SEQ ID NO: 119501 - DNA, 25 bp, Artificial
  Probe
tgttagctctaaagtccagcttgtc

SEQ ID NO: 119502 - DNA, 25 bp, Artificial
  Probe
ctgttagctctaaagtccagcttgt

SEQ ID NO: 119503 - DNA, 25 bp, Artificial
  Probe
cgctaccagaagattggtgatacca

SEQ ID NO: 119504 - DNA, 25 bp, Artificial
  Probe
acgctaccagaagattggtgatacc

SEQ ID NO: 119505 - DNA, 25 bp, Artificial
  Probe
cataagtgagggactttggcggaaa

SEQ ID NO: 119506 - DNA, 25 bp, Artificial
  Probe
cggctacgtgtttgactacgagtat

SEQ ID NO: 119507 - DNA, 25 bp, Artificial
  Probe
ccattatgacttatgctcctcacaa

SEQ ID NO: 119508 - DNA, 25 bp, Artificial
  Probe
aaccattatgacttatgctcctcac

SEQ ID NO: 119509 - DNA, 25 bp, Artificial
  Probe
accattatgacttatgctcctcaca

SEQ ID NO: 119510 - DNA, 25 bp, Artificial
  Probe
taatcaacatcaaagaccagaggac

SEQ ID NO: 119511 - DNA, 25 bp, Artificial
  Probe
ttaatcaacatcaaagaccagagga

SEQ ID NO: 119512 - DNA, 25 bp, Artificial
  Probe
caaaccattatgacttatgctcctc

SEQ ID NO: 119513 - DNA, 25 bp, Artificial
  Probe
acaaaccattatgacttatgctcct

SEQ ID NO: 119514 - DNA, 25 bp, Artificial
  Probe
tttaatcaacatcaaagaccagagg

SEQ ID NO: 119515 - DNA, 25 bp, Artificial
  Probe
tacaaaccattatgacttatgctcc

SEQ ID NO: 119516 - DNA, 25 bp, Artificial
  Probe
aaaccattatgacttatgctcctca

SEQ ID NO: 119517 - DNA, 25 bp, Artificial
  Probe
cattatgacttatgctcctcacaaa

SEQ ID NO: 119518 - DNA, 25 bp, Artificial
  Probe
cccttggaaagttacagtctattat

SEQ ID NO: 119519 - DNA, 25 bp, Artificial
  Probe
attatgacttatgctcctcacaaat

SEQ ID NO: 119520 - DNA, 25 bp, Artificial
  Probe
ttatgacttatgctcctcacaaata

SEQ ID NO: 119521 - DNA, 25 bp, Artificial
  Probe
tcccttggaaagttacagtctatta

SEQ ID NO: 119522 - DNA, 25 bp, Artificial
  Probe
ctctatggagtgactgtttgggaaa

SEQ ID NO: 119523 - DNA, 25 bp, Artificial
  Probe
tatgacttatgctcctcacaaatat

SEQ ID NO: 119524 - DNA, 25 bp, Artificial
  Probe
atacaaaccattatgacttatgctc

SEQ ID NO: 119525 - DNA, 25 bp, Artificial
  Probe
aatcaacatcaaagaccagaggacg

SEQ ID NO: 119526 - DNA, 25 bp, Artificial
  Probe
atgacttatgctcctcacaaatatt

SEQ ID NO: 119527 - DNA, 25 bp, Artificial
  Probe
atgaagaaacgcaagttctcttaac

SEQ ID NO: 119528 - DNA, 25 bp, Artificial
  Probe
tgacttatgctcctcacaaatatta

SEQ ID NO: 119529 - DNA, 25 bp, Artificial
  Probe
catgaagaaacgcaagttctcttaa

SEQ ID NO: 119530 - DNA, 25 bp, Artificial
  Probe
ttagctctatggagtgactgtttgg

SEQ ID NO: 119531 - DNA, 25 bp, Artificial
  Probe
ccttggaaagttacagtctattatt

SEQ ID NO: 119532 - DNA, 25 bp, Artificial
  Probe
ccatgaagaaacgcaagttctctta

SEQ ID NO: 119533 - DNA, 25 bp, Artificial
  Probe
tgaagaaacgcaagttctcttaacg

SEQ ID NO: 119534 - DNA, 25 bp, Artificial
  Probe
gacttatgctcctcacaaatattaa

SEQ ID NO: 119535 - DNA, 25 bp, Artificial
  Probe
gccattcacttgctattttaatcaa

SEQ ID NO: 119536 - DNA, 25 bp, Artificial
  Probe
tctatggagtgactgtttgggaaac

SEQ ID NO: 119537 - DNA, 25 bp, Artificial
  Probe
tatacaaaccattatgacttatgct

SEQ ID NO: 119538 - DNA, 25 bp, Artificial
  Probe
ttttaatcaacatcaaagaccagag

SEQ ID NO: 119539 - DNA, 25 bp, Artificial
  Probe
gaagaaacgcaagttctcttaacgg

SEQ ID NO: 119540 - DNA, 25 bp, Artificial
  Probe
acttatgctcctcacaaatattaaa

SEQ ID NO: 119541 - DNA, 25 bp, Artificial
  Probe
tgctcctcacaaatattaaaagaca

SEQ ID NO: 119542 - DNA, 25 bp, Artificial
  Probe
tgtttgggaaaccctctaagaagtc

SEQ ID NO: 119543 - DNA, 25 bp, Artificial
  Probe
ctgtttgggaaaccctctaagaagt

SEQ ID NO: 119544 - DNA, 25 bp, Artificial
  Probe
actgtttgggaaaccctctaagaag

SEQ ID NO: 119545 - DNA, 25 bp, Artificial
  Probe
gactgtttgggaaaccctctaagaa

SEQ ID NO: 119546 - DNA, 25 bp, Artificial
  Probe
tggaaagttacagtctattatttgt

SEQ ID NO: 119547 - DNA, 25 bp, Artificial
  Probe
gctcctcacaaatattaaaagacag

SEQ ID NO: 119548 - DNA, 25 bp, Artificial
  Probe
attttaatcaacatcaaagaccaga

SEQ ID NO: 119549 - DNA, 25 bp, Artificial
  Probe
ctctaagaagtcggtttcccttgga

SEQ ID NO: 119550 - DNA, 25 bp, Artificial
  Probe
gctattttaatcaacatcaaagacc

SEQ ID NO: 119551 - DNA, 25 bp, Artificial
  Probe
tcacttgctattttaatcaacatca

SEQ ID NO: 119552 - DNA, 25 bp, Artificial
  Probe
agagagtcccagagttatacaaaga

SEQ ID NO: 119553 - DNA, 25 bp, Artificial
  Probe
gagagagtcccagagttatacaaag

SEQ ID NO: 119554 - DNA, 25 bp, Artificial
  Probe
agagagagtcccagagttatacaaa

SEQ ID NO: 119555 - DNA, 25 bp, Artificial
  Probe
attcatccaacatatacaaacacgg

SEQ ID NO: 119556 - DNA, 25 bp, Artificial
  Probe
cagagagagtcccagagttatacaa

SEQ ID NO: 119557 - DNA, 25 bp, Artificial
  Probe
aacatatacaaacacggagacacag

SEQ ID NO: 119558 - DNA, 25 bp, Artificial
  Probe
ggaacaatttgaagagaactggtat

SEQ ID NO: 119559 - DNA, 25 bp, Artificial
  Probe
gggaacaatttgaagagaactggta

SEQ ID NO: 119560 - DNA, 25 bp, Artificial
  Probe
caacatatacaaacacggagacaca

SEQ ID NO: 119561 - DNA, 25 bp, Artificial
  Probe
tcccagagttatacaaagacctact

SEQ ID NO: 119562 - DNA, 25 bp, Artificial
  Probe
tttatggctcagagaaattgacttc

SEQ ID NO: 119563 - DNA, 25 bp, Artificial
  Probe
ctttatggctcagagaaattgactt

SEQ ID NO: 119564 - DNA, 25 bp, Artificial
  Probe
ccaacatatacaaacacggagacac

SEQ ID NO: 119565 - DNA, 25 bp, Artificial
  Probe
gctttatggctcagagaaattgact

SEQ ID NO: 119566 - DNA, 25 bp, Artificial
  Probe
cccagagttatacaaagacctactg

SEQ ID NO: 119567 - DNA, 25 bp, Artificial
  Probe
gtcccagagttatacaaagacctac

SEQ ID NO: 119568 - DNA, 25 bp, Artificial
  Probe
agtcccagagttatacaaagaccta

SEQ ID NO: 119569 - DNA, 25 bp, Artificial
  Probe
gagagtcccagagttatacaaagac

SEQ ID NO: 119570 - DNA, 25 bp, Artificial
  Probe
ccagagagagtcccagagttataca

SEQ ID NO: 119571 - DNA, 25 bp, Artificial
  Probe
tcagggaacaatttgaagagaactg

SEQ ID NO: 119572 - DNA, 25 bp, Artificial
  Probe
agggaacaatttgaagagaactggt

SEQ ID NO: 119573 - DNA, 25 bp, Artificial
  Probe
gagtcccagagttatacaaagacct

SEQ ID NO: 119574 - DNA, 25 bp, Artificial
  Probe
agagtcccagagttatacaaagacc

SEQ ID NO: 119575 - DNA, 25 bp, Artificial
  Probe
ttcatccaacatatacaaacacgga

SEQ ID NO: 119576 - DNA, 25 bp, Artificial
  Probe
catatacaaacacggagacacaggt

SEQ ID NO: 119577 - DNA, 25 bp, Artificial
  Probe
acatatacaaacacggagacacagg

SEQ ID NO: 119578 - DNA, 25 bp, Artificial
  Probe
tattcatccaacatatacaaacacg

SEQ ID NO: 119579 - DNA, 25 bp, Artificial
  Probe
atccaacatatacaaacacggagac

SEQ ID NO: 119580 - DNA, 25 bp, Artificial
  Probe
catccaacatatacaaacacggaga

SEQ ID NO: 119581 - DNA, 25 bp, Artificial
  Probe
tcatccaacatatacaaacacggag

SEQ ID NO: 119582 - DNA, 25 bp, Artificial
  Probe
gagttatacaaagacctactggtgt

SEQ ID NO: 119583 - DNA, 25 bp, Artificial
  Probe
agagttatacaaagacctactggtg

SEQ ID NO: 119584 - DNA, 25 bp, Artificial
  Probe
cagagttatacaaagacctactggt

SEQ ID NO: 119585 - DNA, 25 bp, Artificial
  Probe
cagggaacaatttgaagagaactgg

SEQ ID NO: 119586 - DNA, 25 bp, Artificial
  Probe
ctcttcggtatcctggaattcatca

SEQ ID NO: 119587 - DNA, 25 bp, Artificial
  Probe
cccagagagagtcccagagttatac

SEQ ID NO: 119588 - DNA, 25 bp, Artificial
  Probe
gaacaatttgaagagaactggtata

SEQ ID NO: 119589 - DNA, 25 bp, Artificial
  Probe
atatacaaacacggagacacaggtc

SEQ ID NO: 119590 - DNA, 25 bp, Artificial
  Probe
tccaacatatacaaacacggagaca

SEQ ID NO: 119591 - DNA, 25 bp, Artificial
  Probe
cctattcatccaacatatacaaaca

SEQ ID NO: 119592 - DNA, 25 bp, Artificial
  Probe
acctattcatccaacatatacaaac

SEQ ID NO: 119593 - DNA, 25 bp, Artificial
  Probe
ttatggctcagagaaattgacttct

SEQ ID NO: 119594 - DNA, 25 bp, Artificial
  Probe
acccagagagagtcccagagttata

SEQ ID NO: 119595 - DNA, 25 bp, Artificial
  Probe
tcttcggtatcctggaattcatcag

SEQ ID NO: 119596 - DNA, 25 bp, Artificial
  Probe
cctcttcggtatcctggaattcatc

SEQ ID NO: 119597 - DNA, 25 bp, Artificial
  Probe
tgtaggctgaatgtatgtctgtgtc

SEQ ID NO: 119598 - DNA, 25 bp, Artificial
  Probe
ctgtaggctgaatgtatgtctgtgt

SEQ ID NO: 119599 - DNA, 25 bp, Artificial
  Probe
ggctgaatgtatgtctgtgtcgtaa

SEQ ID NO: 119600 - DNA, 25 bp, Artificial
  Probe
tgaatgtatgtctgtgtcgtaaatg

SEQ ID NO: 119601 - DNA, 25 bp, Artificial
  Probe
gaatgtatgtctgtgtcgtaaatgc

SEQ ID NO: 119602 - DNA, 25 bp, Artificial
  Probe
ctgaatgtatgtctgtgtcgtaaat

SEQ ID NO: 119603 - DNA, 25 bp, Artificial
  Probe
gctgaatgtatgtctgtgtcgtaaa

SEQ ID NO: 119604 - DNA, 25 bp, Artificial
  Probe
gtaggctgaatgtatgtctgtgtcg

SEQ ID NO: 119605 - DNA, 25 bp, Artificial
  Probe
ctgctgtaggctgaatgtatgtctg

SEQ ID NO: 119606 - DNA, 25 bp, Artificial
  Probe
aatgtatgtctgtgtcgtaaatgcc

SEQ ID NO: 119607 - DNA, 25 bp, Artificial
  Probe
gagagagagtgagagacgttgtatg

SEQ ID NO: 119608 - DNA, 25 bp, Artificial
  Probe
agagagagagtgagagacgttgtat

SEQ ID NO: 119609 - DNA, 25 bp, Artificial
  Probe
gctgtaggctgaatgtatgtctgtg

SEQ ID NO: 119610 - DNA, 25 bp, Artificial
  Probe
aggctgaatgtatgtctgtgtcgta

SEQ ID NO: 119611 - DNA, 25 bp, Artificial
  Probe
taggctgaatgtatgtctgtgtcgt

SEQ ID NO: 119612 - DNA, 25 bp, Artificial
  Probe
tagagagagagagtgagagacgttg

SEQ ID NO: 119613 - DNA, 25 bp, Artificial
  Probe
gtagagagagagagtgagagacgtt

SEQ ID NO: 119614 - DNA, 25 bp, Artificial
  Probe
tgctgtaggctgaatgtatgtctgt

SEQ ID NO: 119615 - DNA, 25 bp, Artificial
  Probe
atgtatgtctgtgtcgtaaatgcca

SEQ ID NO: 119616 - DNA, 25 bp, Artificial
  Probe
cagggactgttgaaacttacttgag

SEQ ID NO: 119617 - DNA, 25 bp, Artificial
  Probe
gagagagagagtgagagacgttgta

SEQ ID NO: 119618 - DNA, 25 bp, Artificial
  Probe
atgggtagagagagagagtgagaga

SEQ ID NO: 119619 - DNA, 25 bp, Artificial
  Probe
ctgttgaaacttacttgagccagag

SEQ ID NO: 119620 - DNA, 25 bp, Artificial
  Probe
gagtgagagacgttgtatggtgaag

SEQ ID NO: 119621 - DNA, 25 bp, Artificial
  Probe
gactgttgaaacttacttgagccag

SEQ ID NO: 119622 - DNA, 25 bp, Artificial
  Probe
gagctttacagatttcagatcctaa

SEQ ID NO: 119623 - DNA, 25 bp, Artificial
  Probe
tgttgaaacttacttgagccagagg

SEQ ID NO: 119624 - DNA, 25 bp, Artificial
  Probe
agggactgttgaaacttacttgagc

SEQ ID NO: 119625 - DNA, 25 bp, Artificial
  Probe
agagagagtgagagacgttgtatgg

SEQ ID NO: 119626 - DNA, 25 bp, Artificial
  Probe
actgttgaaacttacttgagccaga

SEQ ID NO: 119627 - DNA, 25 bp, Artificial
  Probe
ggactgttgaaacttacttgagcca

SEQ ID NO: 119628 - DNA, 25 bp, Artificial
  Probe
agagtgagagacgttgtatggtgaa

SEQ ID NO: 119629 - DNA, 25 bp, Artificial
  Probe
catgggtagagagagagagtgagag

SEQ ID NO: 119630 - DNA, 25 bp, Artificial
  Probe
ggagctttacagatttcagatccta

SEQ ID NO: 119631 - DNA, 25 bp, Artificial
  Probe
gagagagtgagagacgttgtatggt

SEQ ID NO: 119632 - DNA, 25 bp, Artificial
  Probe
aaggagctttacagatttcagatcc

SEQ ID NO: 119633 - DNA, 25 bp, Artificial
  Probe
agctttacagatttcagatcctaaa

SEQ ID NO: 119634 - DNA, 25 bp, Artificial
  Probe
gagagtgagagacgttgtatggtga

SEQ ID NO: 119635 - DNA, 25 bp, Artificial
  Probe
agagagtgagagacgttgtatggtg

SEQ ID NO: 119636 - DNA, 25 bp, Artificial
  Probe
tgggtagagagagagagtgagagac

SEQ ID NO: 119637 - DNA, 25 bp, Artificial
  Probe
gggatatctgaacacagttgacttt

SEQ ID NO: 119638 - DNA, 25 bp, Artificial
  Probe
ttgtttagaaagcctgtcaccagag

SEQ ID NO: 119639 - DNA, 25 bp, Artificial
  Probe
cttgtttagaaagcctgtcaccaga

SEQ ID NO: 119640 - DNA, 25 bp, Artificial
  Probe
gtaacaagccaaacaagccttttaa

SEQ ID NO: 119641 - DNA, 25 bp, Artificial
  Probe
gctgctgtaggctgaatgtatgtct

SEQ ID NO: 119642 - DNA, 25 bp, Artificial
  Probe
ctacaacatctaccttactggctgg

SEQ ID NO: 119643 - DNA, 25 bp, Artificial
  Probe
ttcctcagctacaacatctacctta

SEQ ID NO: 119644 - DNA, 25 bp, Artificial
  Probe
caacttcctcagctacaacatctac

SEQ ID NO: 119645 - DNA, 25 bp, Artificial
  Probe
cctcagctacaacatctaccttact

SEQ ID NO: 119646 - DNA, 25 bp, Artificial
  Probe
tcctcagctacaacatctaccttac

SEQ ID NO: 119647 - DNA, 25 bp, Artificial
  Probe
gatgcctggaaactacctaagatag

SEQ ID NO: 119648 - DNA, 25 bp, Artificial
  Probe
acgatgaggagaaagatgtgattac

SEQ ID NO: 119649 - DNA, 25 bp, Artificial
  Probe
agatgcctggaaactacctaagata

SEQ ID NO: 119650 - DNA, 25 bp, Artificial
  Probe
gctacaacatctaccttactggctg

SEQ ID NO: 119651 - DNA, 25 bp, Artificial
  Probe
cttcctcagctacaacatctacctt

SEQ ID NO: 119652 - DNA, 25 bp, Artificial
  Probe
ctcagctacaacatctaccttactg

SEQ ID NO: 119653 - DNA, 25 bp, Artificial
  Probe
agtccacttcatcttcaacaaggaa

SEQ ID NO: 119654 - DNA, 25 bp, Artificial
  Probe
aacttcctcagctacaacatctacc

SEQ ID NO: 119655 - DNA, 25 bp, Artificial
  Probe
ccaacttcctcagctacaacatcta

SEQ ID NO: 119656 - DNA, 25 bp, Artificial
  Probe
aagaaagaaacaatgccaacttcct

SEQ ID NO: 119657 - DNA, 25 bp, Artificial
  Probe
caagaaagaaacaatgccaacttcc

SEQ ID NO: 119658 - DNA, 25 bp, Artificial
  Probe
atgaggagaaagatgtgattacagg

SEQ ID NO: 119659 - DNA, 25 bp, Artificial
  Probe
cgatgaggagaaagatgtgattaca

SEQ ID NO: 119660 - DNA, 25 bp, Artificial
  Probe
tcagctacaacatctaccttactgg

SEQ ID NO: 119661 - DNA, 25 bp, Artificial
  Probe
atgcctggaaactacctaagatagc

SEQ ID NO: 119662 - DNA, 25 bp, Artificial
  Probe
gagtccacttcatcttcaacaagga

SEQ ID NO: 119663 - DNA, 25 bp, Artificial
  Probe
actacctaagatagcagttgatggg

SEQ ID NO: 119664 - DNA, 25 bp, Artificial
  Probe
ttcagctatgaggtggtgatgttag

SEQ ID NO: 119665 - DNA, 25 bp, Artificial
  Probe
ggagtccacttcatcttcaacaagg

SEQ ID NO: 119666 - DNA, 25 bp, Artificial
  Probe
gatgaggagaaagatgtgattacag

SEQ ID NO: 119667 - DNA, 25 bp, Artificial
  Probe
agaaagaaacaatgccaacttcctc

SEQ ID NO: 119668 - DNA, 25 bp, Artificial
  Probe
aactacctaagatagcagttgatgg

SEQ ID NO: 119669 - DNA, 25 bp, Artificial
  Probe
ccattctcaagtctgtctggtacaa

SEQ ID NO: 119670 - DNA, 25 bp, Artificial
  Probe
gttcagctatgaggtggtgatgtta

SEQ ID NO: 119671 - DNA, 25 bp, Artificial
  Probe
cacgatgaggagaaagatgtgatta

SEQ ID NO: 119672 - DNA, 25 bp, Artificial
  Probe
aaagaaacaatgccaacttcctcag

SEQ ID NO: 119673 - DNA, 25 bp, Artificial
  Probe
gaaagaaacaatgccaacttcctca

SEQ ID NO: 119674 - DNA, 25 bp, Artificial
  Probe
acttcctcagctacaacatctacct

SEQ ID NO: 119675 - DNA, 25 bp, Artificial
  Probe
attctcaagtctgtctggtacaaat

SEQ ID NO: 119676 - DNA, 25 bp, Artificial
  Probe
ctccattctcaagtctgtctggtac

SEQ ID NO: 119677 - DNA, 25 bp, Artificial
  Probe
ttctcaagtctgtctggtacaaata

SEQ ID NO: 119678 - DNA, 25 bp, Artificial
  Probe
cattctcaagtctgtctggtacaaa

SEQ ID NO: 119679 - DNA, 25 bp, Artificial
  Probe
cctggaaactacctaagatagcagt

SEQ ID NO: 119680 - DNA, 25 bp, Artificial
  Probe
tctcaagtctgtctggtacaaatat

SEQ ID NO: 119681 - DNA, 25 bp, Artificial
  Probe
ctacctaagatagcagttgatgggc

SEQ ID NO: 119682 - DNA, 25 bp, Artificial
  Probe
cagctatgaggtggtgatgttagtg

SEQ ID NO: 119683 - DNA, 25 bp, Artificial
  Probe
atctaccttactggctgggatgaat

SEQ ID NO: 119684 - DNA, 25 bp, Artificial
  Probe
ctcagtaaacagagcatctccaact

SEQ ID NO: 119685 - DNA, 25 bp, Artificial
  Probe
gtccacttcatcttcaacaaggaaa

SEQ ID NO: 119686 - DNA, 25 bp, Artificial
  Probe
tccattctcaagtctgtctggtaca

SEQ ID NO: 119687 - DNA, 25 bp, Artificial
  Probe
ttagacgactctctacattagttgg

SEQ ID NO: 119688 - DNA, 25 bp, Artificial
  Probe
gaggctgatgagaatcttccgaatt

SEQ ID NO: 119689 - DNA, 25 bp, Artificial
  Probe
atgctcataaagttaagtccctcat

SEQ ID NO: 119690 - DNA, 25 bp, Artificial
  Probe
tcaatttaagggactactatgctca

SEQ ID NO: 119691 - DNA, 25 bp, Artificial
  Probe
tatgctcataaagttaagtccctca

SEQ ID NO: 119692 - DNA, 25 bp, Artificial
  Probe
tgacaaatatgagtaggagttcacc

SEQ ID NO: 119693 - DNA, 25 bp, Artificial
  Probe
ctatgctcataaagttaagtccctc

SEQ ID NO: 119694 - DNA, 25 bp, Artificial
  Probe
caaatatgagtaggagttcacccag

SEQ ID NO: 119695 - DNA, 25 bp, Artificial
  Probe
gacaaatatgagtaggagttcaccc

SEQ ID NO: 119696 - DNA, 25 bp, Artificial
  Probe
aaatatgagtaggagttcacccagt

SEQ ID NO: 119697 - DNA, 25 bp, Artificial
  Probe
ctgacaaatatgagtaggagttcac

SEQ ID NO: 119698 - DNA, 25 bp, Artificial
  Probe
caatttaagggactactatgctcat

SEQ ID NO: 119699 - DNA, 25 bp, Artificial
  Probe
acaaatatgagtaggagttcaccca

SEQ ID NO: 119700 - DNA, 25 bp, Artificial
  Probe
actatgctcataaagttaagtccct

SEQ ID NO: 119701 - DNA, 25 bp, Artificial
  Probe
aagggactactatgctcataaagtt

SEQ ID NO: 119702 - DNA, 25 bp, Artificial
  Probe
ataaagttaagtccctcatggcaag

SEQ ID NO: 119703 - DNA, 25 bp, Artificial
  Probe
aagtcctgaggctgatgagaatctt

SEQ ID NO: 119704 - DNA, 25 bp, Artificial
  Probe
tgctcataaagttaagtccctcatg

SEQ ID NO: 119705 - DNA, 25 bp, Artificial
  Probe
cgtcaatttaagggactactatgct

SEQ ID NO: 119706 - DNA, 25 bp, Artificial
  Probe
tgaggctgatgagaatcttccgaat

SEQ ID NO: 119707 - DNA, 25 bp, Artificial
  Probe
agggactactatgctcataaagtta

SEQ ID NO: 119708 - DNA, 25 bp, Artificial
  Probe
taagggactactatgctcataaagt

SEQ ID NO: 119709 - DNA, 25 bp, Artificial
  Probe
cctgacaaatatgagtaggagttca

SEQ ID NO: 119710 - DNA, 25 bp, Artificial
  Probe
cataaagttaagtccctcatggcaa

SEQ ID NO: 119711 - DNA, 25 bp, Artificial
  Probe
gtcaatttaagggactactatgctc

SEQ ID NO: 119712 - DNA, 25 bp, Artificial
  Probe
ctcataaagttaagtccctcatggc

SEQ ID NO: 119713 - DNA, 25 bp, Artificial
  Probe
gctcataaagttaagtccctcatgg

SEQ ID NO: 119714 - DNA, 25 bp, Artificial
  Probe
caagcctgacaaatatgagtaggag

SEQ ID NO: 119715 - DNA, 25 bp, Artificial
  Probe
ccgtcaatttaagggactactatgc

SEQ ID NO: 119716 - DNA, 25 bp, Artificial
  Probe
tccgtcaatttaagggactactatg

SEQ ID NO: 119717 - DNA, 25 bp, Artificial
  Probe
gcctgacaaatatgagtaggagttc

SEQ ID NO: 119718 - DNA, 25 bp, Artificial
  Probe
ctccgtcaatttaagggactactat

SEQ ID NO: 119719 - DNA, 25 bp, Artificial
  Probe
agcctgacaaatatgagtaggagtt

SEQ ID NO: 119720 - DNA, 25 bp, Artificial
  Probe
aagcctgacaaatatgagtaggagt

SEQ ID NO: 119721 - DNA, 25 bp, Artificial
  Probe
agtcctgaggctgatgagaatcttc

SEQ ID NO: 119722 - DNA, 25 bp, Artificial
  Probe
tagacgactctctacattagttggg

SEQ ID NO: 119723 - DNA, 25 bp, Artificial
  Probe
ttaagggactactatgctcataaag

SEQ ID NO: 119724 - DNA, 25 bp, Artificial
  Probe
tcataaagttaagtccctcatggca

SEQ ID NO: 119725 - DNA, 25 bp, Artificial
  Probe
gacgactctctacattagttgggac

SEQ ID NO: 119726 - DNA, 25 bp, Artificial
  Probe
agacgactctctacattagttggga

SEQ ID NO: 119727 - DNA, 25 bp, Artificial
  Probe
aatatgagtaggagttcacccagtg

SEQ ID NO: 119728 - DNA, 25 bp, Artificial
  Probe
tactatgctcataaagttaagtccc

SEQ ID NO: 119729 - DNA, 25 bp, Artificial
  Probe
gggactactatgctcataaagttaa

SEQ ID NO: 119730 - DNA, 25 bp, Artificial
  Probe
cctccgtcaatttaagggactacta

SEQ ID NO: 119731 - DNA, 25 bp, Artificial
  Probe
caagtcctgaggctgatgagaatct

SEQ ID NO: 119732 - DNA, 25 bp, Artificial
  Probe
cactgattgagattattcctgactt

SEQ ID NO: 119733 - DNA, 25 bp, Artificial
  Probe
tcactgattgagattattcctgact

SEQ ID NO: 119734 - DNA, 25 bp, Artificial
  Probe
ttgagattgtagcctgtactgagaa

SEQ ID NO: 119735 - DNA, 25 bp, Artificial
  Probe
atcttcaccgtgttccacattattg

SEQ ID NO: 119736 - DNA, 25 bp, Artificial
  Probe
catcttcaccgtgttccacattatt

SEQ ID NO: 119737 - DNA, 25 bp, Artificial
  Probe
tattcctgactttgagattgtagcc

SEQ ID NO: 119738 - DNA, 25 bp, Artificial
  Probe
ttattcctgactttgagattgtagc

SEQ ID NO: 119739 - DNA, 25 bp, Artificial
  Probe
ctctgggcatcatatctttctccta

SEQ ID NO: 119740 - DNA, 25 bp, Artificial
  Probe
tcatcttcaccgtgttccacattat

SEQ ID NO: 119741 - DNA, 25 bp, Artificial
  Probe
tctgggcatcatatctttctcctac

SEQ ID NO: 119742 - DNA, 25 bp, Artificial
  Probe
gagattgtagcctgtactgagaaat

SEQ ID NO: 119743 - DNA, 25 bp, Artificial
  Probe
ctgggcatcatatctttctcctaca

SEQ ID NO: 119744 - DNA, 25 bp, Artificial
  Probe
agattgtagcctgtactgagaaatg

SEQ ID NO: 119745 - DNA, 25 bp, Artificial
  Probe
attcctgactttgagattgtagcct

SEQ ID NO: 119746 - DNA, 25 bp, Artificial
  Probe
ctttgagattgtagcctgtactgag

SEQ ID NO: 119747 - DNA, 25 bp, Artificial
  Probe
tgggcatcatatctttctcctacac

SEQ ID NO: 119748 - DNA, 25 bp, Artificial
  Probe
gattgtagcctgtactgagaaatgg

SEQ ID NO: 119749 - DNA, 25 bp, Artificial
  Probe
tgagattgtagcctgtactgagaaa

SEQ ID NO: 119750 - DNA, 25 bp, Artificial
  Probe
tttgagattgtagcctgtactgaga

SEQ ID NO: 119751 - DNA, 25 bp, Artificial
  Probe
gactttgagattgtagcctgtactg

SEQ ID NO: 119752 - DNA, 25 bp, Artificial
  Probe
ctgactttgagattgtagcctgtac

SEQ ID NO: 119753 - DNA, 25 bp, Artificial
  Probe
cctgactttgagattgtagcctgta

SEQ ID NO: 119754 - DNA, 25 bp, Artificial
  Probe
agattattcctgactttgagattgt

SEQ ID NO: 119755 - DNA, 25 bp, Artificial
  Probe
tgattgagattattcctgactttga

SEQ ID NO: 119756 - DNA, 25 bp, Artificial
  Probe
actgattgagattattcctgacttt

SEQ ID NO: 119757 - DNA, 25 bp, Artificial
  Probe
actttgagattgtagcctgtactga

SEQ ID NO: 119758 - DNA, 25 bp, Artificial
  Probe
tgactttgagattgtagcctgtact

SEQ ID NO: 119759 - DNA, 25 bp, Artificial
  Probe
ctgattgagattattcctgactttg

SEQ ID NO: 119760 - DNA, 25 bp, Artificial
  Probe
ctcatcttcaccgtgttccacatta

SEQ ID NO: 119761 - DNA, 25 bp, Artificial
  Probe
tgagattattcctgactttgagatt

SEQ ID NO: 119762 - DNA, 25 bp, Artificial
  Probe
ttgagattattcctgactttgagat

SEQ ID NO: 119763 - DNA, 25 bp, Artificial
  Probe
attgagattattcctgactttgaga

SEQ ID NO: 119764 - DNA, 25 bp, Artificial
  Probe
ttcctgactttgagattgtagcctg

SEQ ID NO: 119765 - DNA, 25 bp, Artificial
  Probe
gagattattcctgactttgagattg

SEQ ID NO: 119766 - DNA, 25 bp, Artificial
  Probe
gattgagattattcctgactttgag

SEQ ID NO: 119767 - DNA, 25 bp, Artificial
  Probe
ggcatcatatctttctcctacaccc

SEQ ID NO: 119768 - DNA, 25 bp, Artificial
  Probe
gggcatcatatctttctcctacacc

SEQ ID NO: 119769 - DNA, 25 bp, Artificial
  Probe
gcatcatatctttctcctacacccg

SEQ ID NO: 119770 - DNA, 25 bp, Artificial
  Probe
gtacaaactcatcttcaccgtgttc

SEQ ID NO: 119771 - DNA, 25 bp, Artificial
  Probe
agtacaaactcatcttcaccgtgtt

SEQ ID NO: 119772 - DNA, 25 bp, Artificial
  Probe
actcactgattgagattattcctga

SEQ ID NO: 119773 - DNA, 25 bp, Artificial
  Probe
agtaagctaaagaaccacgttagtc

SEQ ID NO: 119774 - DNA, 25 bp, Artificial
  Probe
gagtaagctaaagaaccacgttagt

SEQ ID NO: 119775 - DNA, 25 bp, Artificial
  Probe
gaagagtgtgtacggtacagtctac

SEQ ID NO: 119776 - DNA, 25 bp, Artificial
  Probe
tcttcaccgtgttccacattattgc

SEQ ID NO: 119777 - DNA, 25 bp, Artificial
  Probe
agagtaagtgatgatattgaccagc

SEQ ID NO: 119778 - DNA, 25 bp, Artificial
  Probe
agcagagtaagtgatgatattgacc

SEQ ID NO: 119779 - DNA, 25 bp, Artificial
  Probe
agtaagtgatgatattgaccagcag

SEQ ID NO: 119780 - DNA, 25 bp, Artificial
  Probe
gagtaagtgatgatattgaccagca

SEQ ID NO: 119781 - DNA, 25 bp, Artificial
  Probe
gcagagtaagtgatgatattgacca

SEQ ID NO: 119782 - DNA, 25 bp, Artificial
  Probe
acagcagagtaagtgatgatattga

SEQ ID NO: 119783 - DNA, 25 bp, Artificial
  Probe
cagcagagtaagtgatgatattgac

SEQ ID NO: 119784 - DNA, 25 bp, Artificial
  Probe
atgttctctctctctctctctctct

SEQ ID NO: 119785 - DNA, 25 bp, Artificial
  Probe
gtaagtgatgatattgaccagcagg

SEQ ID NO: 119786 - DNA, 25 bp, Artificial
  Probe
cagagtaagtgatgatattgaccag

SEQ ID NO: 119787 - DNA, 25 bp, Artificial
  Probe
attgtcaaggaagataagatactgc

SEQ ID NO: 119788 - DNA, 25 bp, Artificial
  Probe
aataacttcaaggcaggtactatgg

SEQ ID NO: 119789 - DNA, 25 bp, Artificial
  Probe
taacttcaaggcaggtactatggta

SEQ ID NO: 119790 - DNA, 25 bp, Artificial
  Probe
tacagcagagtaagtgatgatattg

SEQ ID NO: 119791 - DNA, 25 bp, Artificial
  Probe
aagaataacttcaaggcaggtacta

SEQ ID NO: 119792 - DNA, 25 bp, Artificial
  Probe
gaataacttcaaggcaggtactatg

SEQ ID NO: 119793 - DNA, 25 bp, Artificial
  Probe
agaataacttcaaggcaggtactat

SEQ ID NO: 119794 - DNA, 25 bp, Artificial
  Probe
ataacttcaaggcaggtactatggt

SEQ ID NO: 119795 - DNA, 25 bp, Artificial
  Probe
ctctctctctgctgttgtgatgtaa

SEQ ID NO: 119796 - DNA, 25 bp, Artificial
  Probe
acttcaaggcaggtactatggtatt

SEQ ID NO: 119797 - DNA, 25 bp, Artificial
  Probe
aacttcaaggcaggtactatggtat

SEQ ID NO: 119798 - DNA, 25 bp, Artificial
  Probe
catgttctctctctctctctctctc

SEQ ID NO: 119799 - DNA, 25 bp, Artificial
  Probe
tccacctctacttatacaattcaac

SEQ ID NO: 119800 - DNA, 25 bp, Artificial
  Probe
ccacctctacttatacaattcaact

SEQ ID NO: 119801 - DNA, 25 bp, Artificial
  Probe
catccacctctacttatacaattca

SEQ ID NO: 119802 - DNA, 25 bp, Artificial
  Probe
acatccacctctacttatacaattc

SEQ ID NO: 119803 - DNA, 25 bp, Artificial
  Probe
ttcatacacataggctactgaccag

SEQ ID NO: 119804 - DNA, 25 bp, Artificial
  Probe
gtacagcagagtaagtgatgatatt

SEQ ID NO: 119805 - DNA, 25 bp, Artificial
  Probe
ctctctctctctctctctctctgct

SEQ ID NO: 119806 - DNA, 25 bp, Artificial
  Probe
tctctctctgctgttgtgatgtaac

SEQ ID NO: 119807 - DNA, 25 bp, Artificial
  Probe
taagtgatgatattgaccagcaggc

SEQ ID NO: 119808 - DNA, 25 bp, Artificial
  Probe
tctctctctctgctgttgtgatgta

SEQ ID NO: 119809 - DNA, 25 bp, Artificial
  Probe
ttgtcaaggaagataagatactgca

SEQ ID NO: 119810 - DNA, 25 bp, Artificial
  Probe
cattgtcaaggaagataagatactg

SEQ ID NO: 119811 - DNA, 25 bp, Artificial
  Probe
tgtcaaggaagataagatactgcat

SEQ ID NO: 119812 - DNA, 25 bp, Artificial
  Probe
tcattgtcaaggaagataagatact

SEQ ID NO: 119813 - DNA, 25 bp, Artificial
  Probe
tctctctctctctctctctctgctg

SEQ ID NO: 119814 - DNA, 25 bp, Artificial
  Probe
atccacctctacttatacaattcaa

SEQ ID NO: 119815 - DNA, 25 bp, Artificial
  Probe
tagtggctttagagattgtctttgt

SEQ ID NO: 119816 - DNA, 25 bp, Artificial
  Probe
ggctttagagattgtctttgtgttc

SEQ ID NO: 119817 - DNA, 25 bp, Artificial
  Probe
gtcaaggaagataagatactgcatt

SEQ ID NO: 119818 - DNA, 25 bp, Artificial
  Probe
gctttagagattgtctttgtgttct

SEQ ID NO: 119819 - DNA, 25 bp, Artificial
  Probe
gtacatccacctctacttatacaat

SEQ ID NO: 119820 - DNA, 25 bp, Artificial
  Probe
tggctttagagattgtctttgtgtt

SEQ ID NO: 119821 - DNA, 25 bp, Artificial
  Probe
ctctctctctctctctctctgctgt

SEQ ID NO: 119822 - DNA, 25 bp, Artificial
  Probe
catagcttagaagacatcatggaga

SEQ ID NO: 119823 - DNA, 25 bp, Artificial
  Probe
tagcttagaagacatcatggagaag

SEQ ID NO: 119824 - DNA, 25 bp, Artificial
  Probe
atagcttagaagacatcatggagaa

SEQ ID NO: 119825 - DNA, 25 bp, Artificial
  Probe
ttgaagaccacaacaagcagttaga

SEQ ID NO: 119826 - DNA, 25 bp, Artificial
  Probe
cttagaagacatcatggagaagctc

SEQ ID NO: 119827 - DNA, 25 bp, Artificial
  Probe
gaagaccacaacaagcagttagagt

SEQ ID NO: 119828 - DNA, 25 bp, Artificial
  Probe
tgaagaccacaacaagcagttagag

SEQ ID NO: 119829 - DNA, 25 bp, Artificial
  Probe
ccacaacaagcagttagagtctcag

SEQ ID NO: 119830 - DNA, 25 bp, Artificial
  Probe
aagaccacaacaagcagttagagtc

SEQ ID NO: 119831 - DNA, 25 bp, Artificial
  Probe
gaccacaacaagcagttagagtctc

SEQ ID NO: 119832 - DNA, 25 bp, Artificial
  Probe
cagccatagcttagaagacatcatg

SEQ ID NO: 119833 - DNA, 25 bp, Artificial
  Probe
tcagccatagcttagaagacatcat

SEQ ID NO: 119834 - DNA, 25 bp, Artificial
  Probe
cacaacaagcagttagagtctcagc

SEQ ID NO: 119835 - DNA, 25 bp, Artificial
  Probe
accacaacaagcagttagagtctca

SEQ ID NO: 119836 - DNA, 25 bp, Artificial
  Probe
agatgatgtgggttcaaagagtcag

SEQ ID NO: 119837 - DNA, 25 bp, Artificial
  Probe
caaagagtcaggatgtcagccatag

SEQ ID NO: 119838 - DNA, 25 bp, Artificial
  Probe
cagatgatgtgggttcaaagagtca

SEQ ID NO: 119839 - DNA, 25 bp, Artificial
  Probe
gtcagccatagcttagaagacatca

SEQ ID NO: 119840 - DNA, 25 bp, Artificial
  Probe
gatgtgggttcaaagagtcaggatg

SEQ ID NO: 119841 - DNA, 25 bp, Artificial
  Probe
tcaaagagtcaggatgtcagccata

SEQ ID NO: 119842 - DNA, 25 bp, Artificial
  Probe
gatgatgtgggttcaaagagtcagg

SEQ ID NO: 119843 - DNA, 25 bp, Artificial
  Probe
catttagaagatgagaaccggattc

SEQ ID NO: 119844 - DNA, 25 bp, Artificial
  Probe
ggatgtcagccatagcttagaagac

SEQ ID NO: 119845 - DNA, 25 bp, Artificial
  Probe
caggatgtcagccatagcttagaag

SEQ ID NO: 119846 - DNA, 25 bp, Artificial
  Probe
ccatttagaagatgagaaccggatt

SEQ ID NO: 119847 - DNA, 25 bp, Artificial
  Probe
aggatgtcagccatagcttagaaga

SEQ ID NO: 119848 - DNA, 25 bp, Artificial
  Probe
cttgaagaccacaacaagcagttag

SEQ ID NO: 119849 - DNA, 25 bp, Artificial
  Probe
ccatagcttagaagacatcatggag

SEQ ID NO: 119850 - DNA, 25 bp, Artificial
  Probe
atgtgggttcaaagagtcaggatgt

SEQ ID NO: 119851 - DNA, 25 bp, Artificial
  Probe
tcaggatgtcagccatagcttagaa

SEQ ID NO: 119852 - DNA, 25 bp, Artificial
  Probe
tgatgtgggttcaaagagtcaggat

SEQ ID NO: 119853 - DNA, 25 bp, Artificial
  Probe
atgatgtgggttcaaagagtcagga

SEQ ID NO: 119854 - DNA, 25 bp, Artificial
  Probe
ttcaaagagtcaggatgtcagccat

SEQ ID NO: 119855 - DNA, 25 bp, Artificial
  Probe
gcagatgatgtgggttcaaagagtc

SEQ ID NO: 119856 - DNA, 25 bp, Artificial
  Probe
tgggttcaaagagtcaggatgtcag

SEQ ID NO: 119857 - DNA, 25 bp, Artificial
  Probe
catgcagatccttgaagaccacaac

SEQ ID NO: 119858 - DNA, 25 bp, Artificial
  Probe
cccatttagaagatgagaaccggat

SEQ ID NO: 119859 - DNA, 25 bp, Artificial
  Probe
gccatagcttagaagacatcatgga

SEQ ID NO: 119860 - DNA, 25 bp, Artificial
  Probe
agccatagcttagaagacatcatgg

SEQ ID NO: 119861 - DNA, 25 bp, Artificial
  Probe
gtcaggatgtcagccatagcttaga

SEQ ID NO: 119862 - DNA, 25 bp, Artificial
  Probe
agtcaggatgtcagccatagcttag

SEQ ID NO: 119863 - DNA, 25 bp, Artificial
  Probe
gagtcaggatgtcagccatagctta

SEQ ID NO: 119864 - DNA, 25 bp, Artificial
  Probe
tctggcccatttagaagatgagaac

SEQ ID NO: 119865 - DNA, 25 bp, Artificial
  Probe
aaagagtcaggatgtcagccatagc

SEQ ID NO: 119866 - DNA, 25 bp, Artificial
  Probe
gtgggttcaaagagtcaggatgtca

SEQ ID NO: 119867 - DNA, 25 bp, Artificial
  Probe
ctattatgagcggagtcacagaatt

SEQ ID NO: 119868 - DNA, 25 bp, Artificial
  Probe
tattatgagcggagtcacagaattg

SEQ ID NO: 119869 - DNA, 25 bp, Artificial
  Probe
caggttctacatggtcagctattat

SEQ ID NO: 119870 - DNA, 25 bp, Artificial
  Probe
aggttctacatggtcagctattatg

SEQ ID NO: 119871 - DNA, 25 bp, Artificial
  Probe
ggttctacatggtcagctattatga

SEQ ID NO: 119872 - DNA, 25 bp, Artificial
  Probe
gttctacatggtcagctattatgag

SEQ ID NO: 119873 - DNA, 25 bp, Artificial
  Probe
ctacggatgttgtggatcttcttgt

SEQ ID NO: 119874 - DNA, 25 bp, Artificial
  Probe
gcaggttctacatggtcagctatta

SEQ ID NO: 119875 - DNA, 25 bp, Artificial
  Probe
cgaaatcctgagagtcattgaaatt

SEQ ID NO: 119876 - DNA, 25 bp, Artificial
  Probe
tacggatgttgtggatcttcttgtg

SEQ ID NO: 119877 - DNA, 25 bp, Artificial
  Probe
cctacggatgttgtggatcttcttg

SEQ ID NO: 119878 - DNA, 25 bp, Artificial
  Probe
gcgaaatcctgagagtcattgaaat

SEQ ID NO: 119879 - DNA, 25 bp, Artificial
  Probe
aatcctgagagtcattgaaattctt

SEQ ID NO: 119880 - DNA, 25 bp, Artificial
  Probe
aaatcctgagagtcattgaaattct

SEQ ID NO: 119881 - DNA, 25 bp, Artificial
  Probe
gaaatcctgagagtcattgaaattc

SEQ ID NO: 119882 - DNA, 25 bp, Artificial
  Probe
gatgttgtggatcttcttgtggagg

SEQ ID NO: 119883 - DNA, 25 bp, Artificial
  Probe
ggatgttgtggatcttcttgtggag

SEQ ID NO: 119884 - DNA, 25 bp, Artificial
  Probe
ttctacatggtcagctattatgagc

SEQ ID NO: 119885 - DNA, 25 bp, Artificial
  Probe
attatgagcggagtcacagaattgc

SEQ ID NO: 119886 - DNA, 25 bp, Artificial
  Probe
aaacactgacagccacatttctttc

SEQ ID NO: 119887 - DNA, 25 bp, Artificial
  Probe
ctgagagtcattgaaattcttatcg

SEQ ID NO: 119888 - DNA, 25 bp, Artificial
  Probe
tactgcctggaaggatctttagtta

SEQ ID NO: 119889 - DNA, 25 bp, Artificial
  Probe
ctgcctggaaggatctttagttaag

SEQ ID NO: 119890 - DNA, 25 bp, Artificial
  Probe
caaacactgacagccacatttcttt

SEQ ID NO: 119891 - DNA, 25 bp, Artificial
  Probe
ttgtggatcttcttgtggaggtcat

SEQ ID NO: 119892 - DNA, 25 bp, Artificial
  Probe
tcctgagagtcattgaaattcttat

SEQ ID NO: 119893 - DNA, 25 bp, Artificial
  Probe
atcctgagagtcattgaaattctta

SEQ ID NO: 119894 - DNA, 25 bp, Artificial
  Probe
gctattatgagcggagtcacagaat

SEQ ID NO: 119895 - DNA, 25 bp, Artificial
  Probe
actgcctggaaggatctttagttaa

SEQ ID NO: 119896 - DNA, 25 bp, Artificial
  Probe
acatttctttctggcagatgaacac

SEQ ID NO: 119897 - DNA, 25 bp, Artificial
  Probe
cacatttctttctggcagatgaaca

SEQ ID NO: 119898 - DNA, 25 bp, Artificial
  Probe
cctgagagtcattgaaattcttatc

SEQ ID NO: 119899 - DNA, 25 bp, Artificial
  Probe
taaaggcgaaatcctgagagtcatt

SEQ ID NO: 119900 - DNA, 25 bp, Artificial
  Probe
atgttgtggatcttcttgtggaggt

SEQ ID NO: 119901 - DNA, 25 bp, Artificial
  Probe
atgtactgcctggaaggatctttag

SEQ ID NO: 119902 - DNA, 25 bp, Artificial
  Probe
aacactgacagccacatttctttct

SEQ ID NO: 119903 - DNA, 25 bp, Artificial
  Probe
atcatgtactgcctggaaggatctt

SEQ ID NO: 119904 - DNA, 25 bp, Artificial
  Probe
tctacatggtcagctattatgagcg

SEQ ID NO: 119905 - DNA, 25 bp, Artificial
  Probe
atcatcatgtactgcctggaaggat

SEQ ID NO: 119906 - DNA, 25 bp, Artificial
  Probe
tactcaaacactgacagccacattt

SEQ ID NO: 119907 - DNA, 25 bp, Artificial
  Probe
gtactgcctggaaggatctttagtt

SEQ ID NO: 119908 - DNA, 25 bp, Artificial
  Probe
atcttcttgtggaggtcatggacat

SEQ ID NO: 119909 - DNA, 25 bp, Artificial
  Probe
gcctggaaggatctttagttaagaa

SEQ ID NO: 119910 - DNA, 25 bp, Artificial
  Probe
ctaaaggcgaaatcctgagagtcat

SEQ ID NO: 119911 - DNA, 25 bp, Artificial
  Probe
atttctttctggcagatgaacacct

SEQ ID NO: 119912 - DNA, 25 bp, Artificial
  Probe
aagaagaaacagaaggtcatcaaga

SEQ ID NO: 119913 - DNA, 25 bp, Artificial
  Probe
caagaagaaacagaaggtcatcaag

SEQ ID NO: 119914 - DNA, 25 bp, Artificial
  Probe
agaagaaacagaaggtcatcaagat

SEQ ID NO: 119915 - DNA, 25 bp, Artificial
  Probe
tatccaagaagaaacagaaggtcat

SEQ ID NO: 119916 - DNA, 25 bp, Artificial
  Probe
gtatccaagaagaaacagaaggtca

SEQ ID NO: 119917 - DNA, 25 bp, Artificial
  Probe
atccaagaagaaacagaaggtcatc

SEQ ID NO: 119918 - DNA, 25 bp, Artificial
  Probe
ccaagaagaaacagaaggtcatcaa

SEQ ID NO: 119919 - DNA, 25 bp, Artificial
  Probe
ttgttatcatgtatgcaaggattgg

SEQ ID NO: 119920 - DNA, 25 bp, Artificial
  Probe
ctcattgttatcatgtatgcaagga

SEQ ID NO: 119921 - DNA, 25 bp, Artificial
  Probe
ctccactctccctcattgttatcat

SEQ ID NO: 119922 - DNA, 25 bp, Artificial
  Probe
tcattgttatcatgtatgcaaggat

SEQ ID NO: 119923 - DNA, 25 bp, Artificial
  Probe
tccaagaagaaacagaaggtcatca

SEQ ID NO: 119924 - DNA, 25 bp, Artificial
  Probe
gaagaaacagaaggtcatcaagatg

SEQ ID NO: 119925 - DNA, 25 bp, Artificial
  Probe
atgtatccaagaagaaacagaaggt

SEQ ID NO: 119926 - DNA, 25 bp, Artificial
  Probe
tgtatccaagaagaaacagaaggtc

SEQ ID NO: 119927 - DNA, 25 bp, Artificial
  Probe
cctcattgttatcatgtatgcaagg

SEQ ID NO: 119928 - DNA, 25 bp, Artificial
  Probe
cactctccctcattgttatcatgta

SEQ ID NO: 119929 - DNA, 25 bp, Artificial
  Probe
tctccctcattgttatcatgtatgc

SEQ ID NO: 119930 - DNA, 25 bp, Artificial
  Probe
attgttatcatgtatgcaaggattg

SEQ ID NO: 119931 - DNA, 25 bp, Artificial
  Probe
cattgttatcatgtatgcaaggatt

SEQ ID NO: 119932 - DNA, 25 bp, Artificial
  Probe
actctccctcattgttatcatgtat

SEQ ID NO: 119933 - DNA, 25 bp, Artificial
  Probe
ctctccctcattgttatcatgtatg

SEQ ID NO: 119934 - DNA, 25 bp, Artificial
  Probe
aagaaacagaaggtcatcaagatgc

SEQ ID NO: 119935 - DNA, 25 bp, Artificial
  Probe
gcatgtatccaagaagaaacagaag

SEQ ID NO: 119936 - DNA, 25 bp, Artificial
  Probe
catgtatccaagaagaaacagaagg

SEQ ID NO: 119937 - DNA, 25 bp, Artificial
  Probe
ctaaacgcaacctggacataaacac

SEQ ID NO: 119938 - DNA, 25 bp, Artificial
  Probe
tccactctccctcattgttatcatg

SEQ ID NO: 119939 - DNA, 25 bp, Artificial
  Probe
ggcatgtatccaagaagaaacagaa

SEQ ID NO: 119940 - DNA, 25 bp, Artificial
  Probe
gtttccaagatgctttccagttctg

SEQ ID NO: 119941 - DNA, 25 bp, Artificial
  Probe
ccactctccctcattgttatcatgt

SEQ ID NO: 119942 - DNA, 25 bp, Artificial
  Probe
agaaacagaaggtcatcaagatgct

SEQ ID NO: 119943 - DNA, 25 bp, Artificial
  Probe
ctccctcattgttatcatgtatgca

SEQ ID NO: 119944 - DNA, 25 bp, Artificial
  Probe
ccctcattgttatcatgtatgcaag

SEQ ID NO: 119945 - DNA, 25 bp, Artificial
  Probe
tccctcattgttatcatgtatgcaa

SEQ ID NO: 119946 - DNA, 25 bp, Artificial
  Probe
taaacgcaacctggacataaacaca

SEQ ID NO: 119947 - DNA, 25 bp, Artificial
  Probe
tgttatcatgtatgcaaggattggg

SEQ ID NO: 119948 - DNA, 25 bp, Artificial
  Probe
acctaacaaactacgtgtcatcaat

SEQ ID NO: 119949 - DNA, 25 bp, Artificial
  Probe
gaaacagaaggtcatcaagatgctg

SEQ ID NO: 119950 - DNA, 25 bp, Artificial
  Probe
cgtgtcatcaatatttatgtctacc

SEQ ID NO: 119951 - DNA, 25 bp, Artificial
  Probe
actatgctgacctgtcacctaacaa

SEQ ID NO: 119952 - DNA, 25 bp, Artificial
  Probe
atatttatgtctacccttttgccca

SEQ ID NO: 119953 - DNA, 25 bp, Artificial
  Probe
tatttatgtctacccttttgcccac

SEQ ID NO: 119954 - DNA, 25 bp, Artificial
  Probe
cctaacaaactacgtgtcatcaata

SEQ ID NO: 119955 - DNA, 25 bp, Artificial
  Probe
agactatgctgacctgtcacctaac

SEQ ID NO: 119956 - DNA, 25 bp, Artificial
  Probe
cagactatgctgacctgtcacctaa

SEQ ID NO: 119957 - DNA, 25 bp, Artificial
  Probe
agttcagtgtctcttcctctgttag

SEQ ID NO: 119958 - DNA, 25 bp, Artificial
  Probe
cagttcagtgtctcttcctctgtta

SEQ ID NO: 119959 - DNA, 25 bp, Artificial
  Probe
gttcagtgtctcttcctctgttagc

SEQ ID NO: 119960 - DNA, 25 bp, Artificial
  Probe
agaggaggaggcttatgtgtgattg

SEQ ID NO: 119961 - DNA, 25 bp, Artificial
  Probe
cagaggaggaggcttatgtgtgatt

SEQ ID NO: 119962 - DNA, 25 bp, Artificial
  Probe
cagtccagttcagtgtctcttcctc

SEQ ID NO: 119963 - DNA, 25 bp, Artificial
  Probe
ttcagtgtctcttcctctgttagcc

SEQ ID NO: 119964 - DNA, 25 bp, Artificial
  Probe
agtccagttcagtgtctcttcctct

SEQ ID NO: 119965 - DNA, 25 bp, Artificial
  Probe
ccagttcagtgtctcttcctctgtt

SEQ ID NO: 119966 - DNA, 25 bp, Artificial
  Probe
gaccatagcatccagacaaccagag

SEQ ID NO: 119967 - DNA, 25 bp, Artificial
  Probe
gtccagttcagtgtctcttcctctg

SEQ ID NO: 119968 - DNA, 25 bp, Artificial
  Probe
atgtcagaggaggaggcttatgtgt

SEQ ID NO: 119969 - DNA, 25 bp, Artificial
  Probe
tcagaggaggaggcttatgtgtgat

SEQ ID NO: 119970 - DNA, 25 bp, Artificial
  Probe
catgtcagaggaggaggcttatgtg

SEQ ID NO: 119971 - DNA, 25 bp, Artificial
  Probe
tccagttcagtgtctcttcctctgt

SEQ ID NO: 119972 - DNA, 25 bp, Artificial
  Probe
ctcttcctctgttagcccaagtctc

SEQ ID NO: 119973 - DNA, 25 bp, Artificial
  Probe
ccatagcatccagacaaccagagtc

SEQ ID NO: 119974 - DNA, 25 bp, Artificial
  Probe
acagtccagttcagtgtctcttcct

SEQ ID NO: 119975 - DNA, 25 bp, Artificial
  Probe
tctcttcctctgttagcccaagtct

SEQ ID NO: 119976 - DNA, 25 bp, Artificial
  Probe
gtctcttcctctgttagcccaagtc

SEQ ID NO: 119977 - DNA, 25 bp, Artificial
  Probe
agatggacagactactccctctctc

SEQ ID NO: 119978 - DNA, 25 bp, Artificial
  Probe
gtgtctcttcctctgttagcccaag

SEQ ID NO: 119979 - DNA, 25 bp, Artificial
  Probe
cagatggacagactactccctctct

SEQ ID NO: 119980 - DNA, 25 bp, Artificial
  Probe
agtgtctcttcctctgttagcccaa

SEQ ID NO: 119981 - DNA, 25 bp, Artificial
  Probe
ttcctctgttagcccaagtctccat

SEQ ID NO: 119982 - DNA, 25 bp, Artificial
  Probe
tgtctcttcctctgttagcccaagt

SEQ ID NO: 119983 - DNA, 25 bp, Artificial
  Probe
catagcatccagacaaccagagtct

SEQ ID NO: 119984 - DNA, 25 bp, Artificial
  Probe
gatcttccataccatcgagcagctc

SEQ ID NO: 119985 - DNA, 25 bp, Artificial
  Probe
gatggacagactactccctctctcc

SEQ ID NO: 119986 - DNA, 25 bp, Artificial
  Probe
ccagatggacagactactccctctc

SEQ ID NO: 119987 - DNA, 25 bp, Artificial
  Probe
atggacagactactccctctctcct

SEQ ID NO: 119988 - DNA, 25 bp, Artificial
  Probe
ctcaccatcaagcttcacagactga

SEQ ID NO: 119989 - DNA, 25 bp, Artificial
  Probe
gacagtccagttcagtgtctcttcc

SEQ ID NO: 119990 - DNA, 25 bp, Artificial
  Probe
cttttgtctcctgagcatgttgacc

SEQ ID NO: 119991 - DNA, 25 bp, Artificial
  Probe
tcaccatcaagcttcacagactgaa

SEQ ID NO: 119992 - DNA, 25 bp, Artificial
  Probe
ttttgtctcctgagcatgttgacca

SEQ ID NO: 119993 - DNA, 25 bp, Artificial
  Probe
ctctgattcccaaaatggtcaggag

SEQ ID NO: 119994 - DNA, 25 bp, Artificial
  Probe
tcaagtcccttggaggagagtcatc

SEQ ID NO: 119995 - DNA, 25 bp, Artificial
  Probe
ctcaagtcccttggaggagagtcat

SEQ ID NO: 119996 - DNA, 25 bp, Artificial
  Probe
tgattcccaaaatggtcaggagcag

SEQ ID NO: 119997 - DNA, 25 bp, Artificial
  Probe
gcttttgtctcctgagcatgttgac

SEQ ID NO: 119998 - DNA, 25 bp, Artificial
  Probe
atggcttttgtctcctgagcatgtt

SEQ ID NO: 119999 - DNA, 25 bp, Artificial
  Probe
cctctgattcccaaaatggtcagga

SEQ ID NO: 120000 - DNA, 25 bp, Artificial
  Probe
tctgattcccaaaatggtcaggagc

SEQ ID NO: 120001 - DNA, 25 bp, Artificial
  Probe
ctgattcccaaaatggtcaggagca

SEQ ID NO: 120002 - DNA, 25 bp, Artificial
  Probe
gtcatcgtggctgtgatagtatgta

SEQ ID NO: 120003 - DNA, 25 bp, Artificial
  Probe
gttgaagttaagtcagataagctcc

SEQ ID NO: 120004 - DNA, 25 bp, Artificial
  Probe
tcatcgtggctgtgatagtatgtac

SEQ ID NO: 120005 - DNA, 25 bp, Artificial
  Probe
gtagttgaagttaagtcagataagc

SEQ ID NO: 120006 - DNA, 25 bp, Artificial
  Probe
cgctaccctctattacttctacaag

SEQ ID NO: 120007 - DNA, 25 bp, Artificial
  Probe
agttgaagttaagtcagataagctc

SEQ ID NO: 120008 - DNA, 25 bp, Artificial
  Probe
atacaccacggtcatcattctgaag

SEQ ID NO: 120009 - DNA, 25 bp, Artificial
  Probe
gctaccctctattacttctacaaga

SEQ ID NO: 120010 - DNA, 25 bp, Artificial
  Probe
tcgtaagagtgaatttgtagttgaa

SEQ ID NO: 120011 - DNA, 25 bp, Artificial
  Probe
catacaccacggtcatcattctgaa

SEQ ID NO: 120012 - DNA, 25 bp, Artificial
  Probe
cgtaagagtgaatttgtagttgaag

SEQ ID NO: 120013 - DNA, 25 bp, Artificial
  Probe
ctcatacaccacggtcatcattctg

SEQ ID NO: 120014 - DNA, 25 bp, Artificial
  Probe
ctcgtaagagtgaatttgtagttga

SEQ ID NO: 120015 - DNA, 25 bp, Artificial
  Probe
ttaagtcagataagctcccagaaga

SEQ ID NO: 120016 - DNA, 25 bp, Artificial
  Probe
gttaagtcagataagctcccagaag

SEQ ID NO: 120017 - DNA, 25 bp, Artificial
  Probe
gaagttaagtcagataagctcccag

SEQ ID NO: 120018 - DNA, 25 bp, Artificial
  Probe
tagttgaagttaagtcagataagct

SEQ ID NO: 120019 - DNA, 25 bp, Artificial
  Probe
agttaagtcagataagctcccagaa

SEQ ID NO: 120020 - DNA, 25 bp, Artificial
  Probe
aagttaagtcagataagctcccaga

SEQ ID NO: 120021 - DNA, 25 bp, Artificial
  Probe
gtgatagtatgtacgctggtgcttg

SEQ ID NO: 120022 - DNA, 25 bp, Artificial
  Probe
tcatacaccacggtcatcattctga

SEQ ID NO: 120023 - DNA, 25 bp, Artificial
  Probe
ttgaagttaagtcagataagctccc

SEQ ID NO: 120024 - DNA, 25 bp, Artificial
  Probe
aggagaccagggagagaaatacatc

SEQ ID NO: 120025 - DNA, 25 bp, Artificial
  Probe
atcattctgaagctcgtcactttaa

SEQ ID NO: 120026 - DNA, 25 bp, Artificial
  Probe
gtaagagtgaatttgtagttgaagt

SEQ ID NO: 120027 - DNA, 25 bp, Artificial
  Probe
tgtagttgaagttaagtcagataag

SEQ ID NO: 120028 - DNA, 25 bp, Artificial
  Probe
tgaagttaagtcagataagctccca

SEQ ID NO: 120029 - DNA, 25 bp, Artificial
  Probe
caggagaccagggagagaaatacat

SEQ ID NO: 120030 - DNA, 25 bp, Artificial
  Probe
catcattctgaagctcgtcacttta

SEQ ID NO: 120031 - DNA, 25 bp, Artificial
  Probe
tgtgatagtatgtacgctggtgctt

SEQ ID NO: 120032 - DNA, 25 bp, Artificial
  Probe
taagtcagataagctcccagaagag

SEQ ID NO: 120033 - DNA, 25 bp, Artificial
  Probe
tcattctgaagctcgtcactttaac

SEQ ID NO: 120034 - DNA, 25 bp, Artificial
  Probe
gtcatcattctgaagctcgtcactt

SEQ ID NO: 120035 - DNA, 25 bp, Artificial
  Probe
agtgaatttgtagttgaagttaagt

SEQ ID NO: 120036 - DNA, 25 bp, Artificial
  Probe
ttgtagttgaagttaagtcagataa

SEQ ID NO: 120037 - DNA, 25 bp, Artificial
  Probe
ggtcatcgtggctgtgatagtatgt

SEQ ID NO: 120038 - DNA, 25 bp, Artificial
  Probe
tggtcatcgtggctgtgatagtatg

SEQ ID NO: 120039 - DNA, 25 bp, Artificial
  Probe
gtggtcatcgtggctgtgatagtat

SEQ ID NO: 120040 - DNA, 25 bp, Artificial
  Probe
ctgtgatagtatgtacgctggtgct

SEQ ID NO: 120041 - DNA, 25 bp, Artificial
  Probe
aagatccttactcaactgccctgta

SEQ ID NO: 120042 - DNA, 25 bp, Artificial
  Probe
gtgaatttgtagttgaagttaagtc

SEQ ID NO: 120043 - DNA, 25 bp, Artificial
  Probe
cattctgaagctcgtcactttaacc

SEQ ID NO: 120044 - DNA, 25 bp, Artificial
  Probe
tgaatttgtagttgaagttaagtca

SEQ ID NO: 120045 - DNA, 25 bp, Artificial
  Probe
agagtgaatttgtagttgaagttaa

SEQ ID NO: 120046 - DNA, 25 bp, Artificial
  Probe
aagagtgaatttgtagttgaagtta

SEQ ID NO: 120047 - DNA, 25 bp, Artificial
  Probe
gtgctatttattcccaactcagaga

SEQ ID NO: 120048 - DNA, 25 bp, Artificial
  Probe
tgctatttattcccaactcagagaa

SEQ ID NO: 120049 - DNA, 25 bp, Artificial
  Probe
gctatttattcccaactcagagaac

SEQ ID NO: 120050 - DNA, 25 bp, Artificial
  Probe
aagtgctatttattcccaactcaga

SEQ ID NO: 120051 - DNA, 25 bp, Artificial
  Probe
agtgctatttattcccaactcagag

SEQ ID NO: 120052 - DNA, 25 bp, Artificial
  Probe
aaagtgctatttattcccaactcag

SEQ ID NO: 120053 - DNA, 25 bp, Artificial
  Probe
atatttgtgcgacagaacattagga

SEQ ID NO: 120054 - DNA, 25 bp, Artificial
  Probe
tatatttgtgcgacagaacattagg

SEQ ID NO: 120055 - DNA, 25 bp, Artificial
  Probe
ttattcccaactcagagaactgttt

SEQ ID NO: 120056 - DNA, 25 bp, Artificial
  Probe
tttattcccaactcagagaactgtt

SEQ ID NO: 120057 - DNA, 25 bp, Artificial
  Probe
atttattcccaactcagagaactgt

SEQ ID NO: 120058 - DNA, 25 bp, Artificial
  Probe
tatttgtgcgacagaacattaggag

SEQ ID NO: 120059 - DNA, 25 bp, Artificial
  Probe
ctatttattcccaactcagagaact

SEQ ID NO: 120060 - DNA, 25 bp, Artificial
  Probe
agagatatatttgtgcgacagaaca

SEQ ID NO: 120061 - DNA, 25 bp, Artificial
  Probe
cagagatatatttgtgcgacagaac

SEQ ID NO: 120062 - DNA, 25 bp, Artificial
  Probe
acagagatatatttgtgcgacagaa

SEQ ID NO: 120063 - DNA, 25 bp, Artificial
  Probe
gaggagcagaagttcaatgtcactc

SEQ ID NO: 120064 - DNA, 25 bp, Artificial
  Probe
tacagagatatatttgtgcgacaga

SEQ ID NO: 120065 - DNA, 25 bp, Artificial
  Probe
gtacagagatatatttgtgcgacag

SEQ ID NO: 120066 - DNA, 25 bp, Artificial
  Probe
gagatatatttgtgcgacagaacat

SEQ ID NO: 120067 - DNA, 25 bp, Artificial
  Probe
gacatgagacactgcctctaaatag

SEQ ID NO: 120068 - DNA, 25 bp, Artificial
  Probe
agatatatttgtgcgacagaacatt

SEQ ID NO: 120069 - DNA, 25 bp, Artificial
  Probe
tatttattcccaactcagagaactg

SEQ ID NO: 120070 - DNA, 25 bp, Artificial
  Probe
acatgagacactgcctctaaatagt

SEQ ID NO: 120071 - DNA, 25 bp, Artificial
  Probe
tgacatgagacactgcctctaaata

SEQ ID NO: 120072 - DNA, 25 bp, Artificial
  Probe
gtgcgacagaacattaggagtcttc

SEQ ID NO: 120073 - DNA, 25 bp, Artificial
  Probe
gtgtaaagtgtgtatggaccgagag

SEQ ID NO: 120074 - DNA, 25 bp, Artificial
  Probe
atgacatgagacactgcctctaaat

SEQ ID NO: 120075 - DNA, 25 bp, Artificial
  Probe
gaacattaggagtcttcccacagat

SEQ ID NO: 120076 - DNA, 25 bp, Artificial
  Probe
gagagaacgtgtaaagtgtgtatgg

SEQ ID NO: 120077 - DNA, 25 bp, Artificial
  Probe
tgtctaaactcaaagaatggattac

SEQ ID NO: 120078 - DNA, 25 bp, Artificial
  Probe
aacattaggagtcttcccacagatg

SEQ ID NO: 120079 - DNA, 25 bp, Artificial
  Probe
gagaacgtgtaaagtgtgtatggac

SEQ ID NO: 120080 - DNA, 25 bp, Artificial
  Probe
agagaacgtgtaaagtgtgtatgga

SEQ ID NO: 120081 - DNA, 25 bp, Artificial
  Probe
atttgtgcgacagaacattaggagt

SEQ ID NO: 120082 - DNA, 25 bp, Artificial
  Probe
gatgacatgagacactgcctctaaa

SEQ ID NO: 120083 - DNA, 25 bp, Artificial
  Probe
atatatttgtgcgacagaacattag

SEQ ID NO: 120084 - DNA, 25 bp, Artificial
  Probe
gatatatttgtgcgacagaacatta

SEQ ID NO: 120085 - DNA, 25 bp, Artificial
  Probe
gtctaaactcaaagaatggattact

SEQ ID NO: 120086 - DNA, 25 bp, Artificial
  Probe
cattaggagtcttcccacagatgac

SEQ ID NO: 120087 - DNA, 25 bp, Artificial
  Probe
tgtgcgacagaacattaggagtctt

SEQ ID NO: 120088 - DNA, 25 bp, Artificial
  Probe
ttgtgcgacagaacattaggagtct

SEQ ID NO: 120089 - DNA, 25 bp, Artificial
  Probe
aggaggagcagaagttcaatgtcac

SEQ ID NO: 120090 - DNA, 25 bp, Artificial
  Probe
caggaggagcagaagttcaatgtca

SEQ ID NO: 120091 - DNA, 25 bp, Artificial
  Probe
cagaacattaggagtcttcccacag

SEQ ID NO: 120092 - DNA, 25 bp, Artificial
  Probe
ccttcagccagtattcattcctaac

SEQ ID NO: 120093 - DNA, 25 bp, Artificial
  Probe
cttcaaccagtattcctccttcaac

SEQ ID NO: 120094 - DNA, 25 bp, Artificial
  Probe
ctatcagtgtaatcagtgtggcaag

SEQ ID NO: 120095 - DNA, 25 bp, Artificial
  Probe
cttcagccagtattcattcctaacg

SEQ ID NO: 120096 - DNA, 25 bp, Artificial
  Probe
cagtattcctccttcaacgaacatc

SEQ ID NO: 120097 - DNA, 25 bp, Artificial
  Probe
ctggtatgtatcacacttcagagaa

SEQ ID NO: 120098 - DNA, 25 bp, Artificial
  Probe
ccttcaaccagtattcctccttcaa

SEQ ID NO: 120099 - DNA, 25 bp, Artificial
  Probe
cctggtatgtatcacacttcagaga

SEQ ID NO: 120100 - DNA, 25 bp, Artificial
  Probe
gatctactaagtgtgcttactggaa

SEQ ID NO: 120101 - DNA, 25 bp, Artificial
  Probe
tatcagtgtaatcagtgtggcaagg

SEQ ID NO: 120102 - DNA, 25 bp, Artificial
  Probe
cctatcagtgtaatcagtgtggcaa

SEQ ID NO: 120103 - DNA, 25 bp, Artificial
  Probe
gaccttcaaccagtattcctccttc

SEQ ID NO: 120104 - DNA, 25 bp, Artificial
  Probe
ttcagccagtattcattcctaacgg

SEQ ID NO: 120105 - DNA, 25 bp, Artificial
  Probe
gccttcagccagtattcattcctaa

SEQ ID NO: 120106 - DNA, 25 bp, Artificial
  Probe
agaagcctgaggaccttaattcatc

SEQ ID NO: 120107 - DNA, 25 bp, Artificial
  Probe
gagaagcctgaggaccttaattcat

SEQ ID NO: 120108 - DNA, 25 bp, Artificial
  Probe
ccagtattcctccttcaacgaacat

SEQ ID NO: 120109 - DNA, 25 bp, Artificial
  Probe
ttcaaccagtattcctccttcaacg

SEQ ID NO: 120110 - DNA, 25 bp, Artificial
  Probe
agaaaccctatcagtgtaatcagtg

SEQ ID NO: 120111 - DNA, 25 bp, Artificial
  Probe
gagaaaccctatcagtgtaatcagt

SEQ ID NO: 120112 - DNA, 25 bp, Artificial
  Probe
agaccttcaaccagtattcctcctt

SEQ ID NO: 120113 - DNA, 25 bp, Artificial
  Probe
gaaaccctatcagtgtaatcagtgt

SEQ ID NO: 120114 - DNA, 25 bp, Artificial
  Probe
aagaccttcaaccagtattcctcct

SEQ ID NO: 120115 - DNA, 25 bp, Artificial
  Probe
tcagagaaagatttaccacaggatt

SEQ ID NO: 120116 - DNA, 25 bp, Artificial
  Probe
tataaatggaaagaatacggcacac

SEQ ID NO: 120117 - DNA, 25 bp, Artificial
  Probe
aaaccctatcagtgtaatcagtgtg

SEQ ID NO: 120118 - DNA, 25 bp, Artificial
  Probe
aaccagtattcctccttcaacgaac

SEQ ID NO: 120119 - DNA, 25 bp, Artificial
  Probe
caaccagtattcctccttcaacgaa

SEQ ID NO: 120120 - DNA, 25 bp, Artificial
  Probe
ctataaatggaaagaatacggcaca

SEQ ID NO: 120121 - DNA, 25 bp, Artificial
  Probe
acacttcagagaaagatttaccaca

SEQ ID NO: 120122 - DNA, 25 bp, Artificial
  Probe
cttcagagaaagatttaccacagga

SEQ ID NO: 120123 - DNA, 25 bp, Artificial
  Probe
cacacttcagagaaagatttaccac

SEQ ID NO: 120124 - DNA, 25 bp, Artificial
  Probe
tcacacttcagagaaagatttacca

SEQ ID NO: 120125 - DNA, 25 bp, Artificial
  Probe
aaatcaaacctttatcggcatcaga

SEQ ID NO: 120126 - DNA, 25 bp, Artificial
  Probe
tataaatgtgctgagtgtgggaaag

SEQ ID NO: 120127 - DNA, 25 bp, Artificial
  Probe
cagagaaagatttaccacaggattt

SEQ ID NO: 120128 - DNA, 25 bp, Artificial
  Probe
ttcagagaaagatttaccacaggat

SEQ ID NO: 120129 - DNA, 25 bp, Artificial
  Probe
acttcagagaaagatttaccacagg

SEQ ID NO: 120130 - DNA, 25 bp, Artificial
  Probe
cacttcagagaaagatttaccacag

SEQ ID NO: 120131 - DNA, 25 bp, Artificial
  Probe
gctctataaatggaaagaatacggc

SEQ ID NO: 120132 - DNA, 25 bp, Artificial
  Probe
ggctctataaatggaaagaatacgg

SEQ ID NO: 120133 - DNA, 25 bp, Artificial
  Probe
ctagagcacaagaggattcacactg

SEQ ID NO: 120134 - DNA, 25 bp, Artificial
  Probe
ttgtgaaatatgagaggctagagac

SEQ ID NO: 120135 - DNA, 25 bp, Artificial
  Probe
acaagaaagtccacctgaaagaaag

SEQ ID NO: 120136 - DNA, 25 bp, Artificial
  Probe
gtgaaatatgagaggctagagacag

SEQ ID NO: 120137 - DNA, 25 bp, Artificial
  Probe
gactcggaatgtgatgtatgatagc

SEQ ID NO: 120138 - DNA, 25 bp, Artificial
  Probe
ggaatgtgatgtatgatagccaagg

SEQ ID NO: 120139 - DNA, 25 bp, Artificial
  Probe
cggaatgtgatgtatgatagccaag

SEQ ID NO: 120140 - DNA, 25 bp, Artificial
  Probe
cgactcggaatgtgatgtatgatag

SEQ ID NO: 120141 - DNA, 25 bp, Artificial
  Probe
tcggaatgtgatgtatgatagccaa

SEQ ID NO: 120142 - DNA, 25 bp, Artificial
  Probe
ctcggaatgtgatgtatgatagcca

SEQ ID NO: 120143 - DNA, 25 bp, Artificial
  Probe
actcggaatgtgatgtatgatagcc

SEQ ID NO: 120144 - DNA, 25 bp, Artificial
  Probe
gaatgtgatgtatgatagccaaggc

SEQ ID NO: 120145 - DNA, 25 bp, Artificial
  Probe
tagaacaaaccgaaatcaggataca

SEQ ID NO: 120146 - DNA, 25 bp, Artificial
  Probe
ctcttcctcctcttctactccatcc

SEQ ID NO: 120147 - DNA, 25 bp, Artificial
  Probe
cctcttcctcctcttctactccatc

SEQ ID NO: 120148 - DNA, 25 bp, Artificial
  Probe
gcgactcggaatgtgatgtatgata

SEQ ID NO: 120149 - DNA, 25 bp, Artificial
  Probe
agaacaaaccgaaatcaggatacac

SEQ ID NO: 120150 - DNA, 25 bp, Artificial
  Probe
ctagaacaaaccgaaatcaggatac

SEQ ID NO: 120151 - DNA, 25 bp, Artificial
  Probe
aacaaaccgaaatcaggatacacag

SEQ ID NO: 120152 - DNA, 25 bp, Artificial
  Probe
gaacaaaccgaaatcaggatacaca

SEQ ID NO: 120153 - DNA, 25 bp, Artificial
  Probe
tcctcttcctcctcttctactccat

SEQ ID NO: 120154 - DNA, 25 bp, Artificial
  Probe
cttctatcctctcggtaacctccag

SEQ ID NO: 120155 - DNA, 25 bp, Artificial
  Probe
acaagtaggcaactggtttaagaac

SEQ ID NO: 120156 - DNA, 25 bp, Artificial
  Probe
cacaagtaggcaactggtttaagaa

SEQ ID NO: 120157 - DNA, 25 bp, Artificial
  Probe
catccctagaacaaaccgaaatcag

SEQ ID NO: 120158 - DNA, 25 bp, Artificial
  Probe
cacttctatcctctcggtaacctcc

SEQ ID NO: 120159 - DNA, 25 bp, Artificial
  Probe
cctagaacaaaccgaaatcaggata

SEQ ID NO: 120160 - DNA, 25 bp, Artificial
  Probe
ctcctcttcctcctcttctactcca

SEQ ID NO: 120161 - DNA, 25 bp, Artificial
  Probe
cacacaagtaggcaactggtttaag

SEQ ID NO: 120162 - DNA, 25 bp, Artificial
  Probe
acttctatcctctcggtaacctcca

SEQ ID NO: 120163 - DNA, 25 bp, Artificial
  Probe
acacaagtaggcaactggtttaaga

SEQ ID NO: 120164 - DNA, 25 bp, Artificial
  Probe
tccatccctagaacaaaccgaaatc

SEQ ID NO: 120165 - DNA, 25 bp, Artificial
  Probe
ctccatccctagaacaaaccgaaat

SEQ ID NO: 120166 - DNA, 25 bp, Artificial
  Probe
cacacacacaagtccatacacactc

SEQ ID NO: 120167 - DNA, 25 bp, Artificial
  Probe
ttcctcctcttctactccatcccta

SEQ ID NO: 120168 - DNA, 25 bp, Artificial
  Probe
gcacttctatcctctcggtaacctc

SEQ ID NO: 120169 - DNA, 25 bp, Artificial
  Probe
ctggcacttctatcctctcggtaac

SEQ ID NO: 120170 - DNA, 25 bp, Artificial
  Probe
ccatccctagaacaaaccgaaatca

SEQ ID NO: 120171 - DNA, 25 bp, Artificial
  Probe
agcgactcggaatgtgatgtatgat

SEQ ID NO: 120172 - DNA, 25 bp, Artificial
  Probe
cacacacacacaagtccatacacac

SEQ ID NO: 120173 - DNA, 25 bp, Artificial
  Probe
cacacacacacacaagtccatacac

SEQ ID NO: 120174 - DNA, 25 bp, Artificial
  Probe
cacacacacacacacaagtccatac

SEQ ID NO: 120175 - DNA, 25 bp, Artificial
  Probe
tgctcctcttcctcctcttctactc

SEQ ID NO: 120176 - DNA, 25 bp, Artificial
  Probe
ctgctcctcttcctcctcttctact

SEQ ID NO: 120177 - DNA, 25 bp, Artificial
  Probe
tactccatccctagaacaaaccgaa

SEQ ID NO: 120178 - DNA, 25 bp, Artificial
  Probe
ccctagaacaaaccgaaatcaggat

SEQ ID NO: 120179 - DNA, 25 bp, Artificial
  Probe
atccctagaacaaaccgaaatcagg

SEQ ID NO: 120180 - DNA, 25 bp, Artificial
  Probe
acacacacacaagtccatacacact

SEQ ID NO: 120181 - DNA, 25 bp, Artificial
  Probe
acaaaccgaaatcaggatacacagc

SEQ ID NO: 120182 - DNA, 25 bp, Artificial
  Probe
ctcactgcatgtcctacagcaattc

SEQ ID NO: 120183 - DNA, 25 bp, Artificial
  Probe
cactgcatgtcctacagcaattctg

SEQ ID NO: 120184 - DNA, 25 bp, Artificial
  Probe
tcactgcatgtcctacagcaattct

SEQ ID NO: 120185 - DNA, 25 bp, Artificial
  Probe
ctgactttggatttatgcgagattt

SEQ ID NO: 120186 - DNA, 25 bp, Artificial
  Probe
cctgactttggatttatgcgagatt

SEQ ID NO: 120187 - DNA, 25 bp, Artificial
  Probe
gccctgagtaatcacttaaagatgt

SEQ ID NO: 120188 - DNA, 25 bp, Artificial
  Probe
ccctgagtaatcacttaaagatgtt

SEQ ID NO: 120189 - DNA, 25 bp, Artificial
  Probe
gtttcgagcattaaagtgaagacat

SEQ ID NO: 120190 - DNA, 25 bp, Artificial
  Probe
cttccctcctgactttggatttatg

SEQ ID NO: 120191 - DNA, 25 bp, Artificial
  Probe
tcttccctcctgactttggatttat

SEQ ID NO: 120192 - DNA, 25 bp, Artificial
  Probe
ttcgagcattaaagtgaagacattt

SEQ ID NO: 120193 - DNA, 25 bp, Artificial
  Probe
tttcgagcattaaagtgaagacatt

SEQ ID NO: 120194 - DNA, 25 bp, Artificial
  Probe
ttcttccctcctgactttggattta

SEQ ID NO: 120195 - DNA, 25 bp, Artificial
  Probe
tgagtaatcacttaaagatgttcct

SEQ ID NO: 120196 - DNA, 25 bp, Artificial
  Probe
gagtaatcacttaaagatgttcctg

SEQ ID NO: 120197 - DNA, 25 bp, Artificial
  Probe
ctgagtaatcacttaaagatgttcc

SEQ ID NO: 120198 - DNA, 25 bp, Artificial
  Probe
cctgagtaatcacttaaagatgttc

SEQ ID NO: 120199 - DNA, 25 bp, Artificial
  Probe
tttccgtttcgagcattaaagtgaa

SEQ ID NO: 120200 - DNA, 25 bp, Artificial
  Probe
tcctgactttggatttatgcgagat

SEQ ID NO: 120201 - DNA, 25 bp, Artificial
  Probe
tttcttccctcctgactttggattt

SEQ ID NO: 120202 - DNA, 25 bp, Artificial
  Probe
actttggatttatgcgagattttgt

SEQ ID NO: 120203 - DNA, 25 bp, Artificial
  Probe
tgactttggatttatgcgagatttt

SEQ ID NO: 120204 - DNA, 25 bp, Artificial
  Probe
gactttggatttatgcgagattttg

SEQ ID NO: 120205 - DNA, 25 bp, Artificial
  Probe
cgtttcgagcattaaagtgaagaca

SEQ ID NO: 120206 - DNA, 25 bp, Artificial
  Probe
ttccgtttcgagcattaaagtgaag

SEQ ID NO: 120207 - DNA, 25 bp, Artificial
  Probe
ctttggatttatgcgagattttgtt

SEQ ID NO: 120208 - DNA, 25 bp, Artificial
  Probe
tattttgagaaccttttccgtttcg

SEQ ID NO: 120209 - DNA, 25 bp, Artificial
  Probe
ctcctgactttggatttatgcgaga

SEQ ID NO: 120210 - DNA, 25 bp, Artificial
  Probe
ttggatttatgcgagattttgtttt

SEQ ID NO: 120211 - DNA, 25 bp, Artificial
  Probe
tttggatttatgcgagattttgttt

SEQ ID NO: 120212 - DNA, 25 bp, Artificial
  Probe
ttccctcctgactttggatttatgc

SEQ ID NO: 120213 - DNA, 25 bp, Artificial
  Probe
tgtatattttgagaaccttttccgt

SEQ ID NO: 120214 - DNA, 25 bp, Artificial
  Probe
ccgtttcgagcattaaagtgaagac

SEQ ID NO: 120215 - DNA, 25 bp, Artificial
  Probe
tccgtttcgagcattaaagtgaaga

SEQ ID NO: 120216 - DNA, 25 bp, Artificial
  Probe
atattttgagaaccttttccgtttc

SEQ ID NO: 120217 - DNA, 25 bp, Artificial
  Probe
cgagcattaaagtgaagacatttta

SEQ ID NO: 120218 - DNA, 25 bp, Artificial
  Probe
ggccctgagtaatcacttaaagatg

SEQ ID NO: 120219 - DNA, 25 bp, Artificial
  Probe
gtatattttgagaaccttttccgtt

SEQ ID NO: 120220 - DNA, 25 bp, Artificial
  Probe
atgtatattttgagaaccttttccg

SEQ ID NO: 120221 - DNA, 25 bp, Artificial
  Probe
cctcctgactttggatttatgcgag

SEQ ID NO: 120222 - DNA, 25 bp, Artificial
  Probe
tcgagcattaaagtgaagacatttt

SEQ ID NO: 120223 - DNA, 25 bp, Artificial
  Probe
tatattttgagaaccttttccgttt

SEQ ID NO: 120224 - DNA, 25 bp, Artificial
  Probe
ttttccgtttcgagcattaaagtga

SEQ ID NO: 120225 - DNA, 25 bp, Artificial
  Probe
attttgagaaccttttccgtttcga

SEQ ID NO: 120226 - DNA, 25 bp, Artificial
  Probe
ttttcttccctcctgactttggatt

SEQ ID NO: 120227 - DNA, 25 bp, Artificial
  Probe
aaccttttccgtttcgagcattaaa

SEQ ID NO: 120228 - DNA, 25 bp, Artificial
  Probe
ttttgagaaccttttccgtttcgag

SEQ ID NO: 120229 - DNA, 25 bp, Artificial
  Probe
gaaccttttccgtttcgagcattaa

SEQ ID NO: 120230 - DNA, 25 bp, Artificial
  Probe
cgaacccacattcatcacaatggaa

SEQ ID NO: 120231 - DNA, 25 bp, Artificial
  Probe
tgacgaacccacattcatcacaatg

SEQ ID NO: 120232 - DNA, 25 bp, Artificial
  Probe
gacgaacccacattcatcacaatgg

SEQ ID NO: 120233 - DNA, 25 bp, Artificial
  Probe
acgaacccacattcatcacaatgga

SEQ ID NO: 120234 - DNA, 25 bp, Artificial
  Probe
gtgacgaacccacattcatcacaat

SEQ ID NO: 120235 - DNA, 25 bp, Artificial
  Probe
tgggaaataaagaccttgtgagata

SEQ ID NO: 120236 - DNA, 25 bp, Artificial
  Probe
aatgtgggaaataaagaccttgtga

SEQ ID NO: 120237 - DNA, 25 bp, Artificial
  Probe
gtgggaaataaagaccttgtgagat

SEQ ID NO: 120238 - DNA, 25 bp, Artificial
  Probe
atgtgggaaataaagaccttgtgag

SEQ ID NO: 120239 - DNA, 25 bp, Artificial
  Probe
ttgtattgatgtatgtgccaatgtg

SEQ ID NO: 120240 - DNA, 25 bp, Artificial
  Probe
cgatttgtattgatgtatgtgccaa

SEQ ID NO: 120241 - DNA, 25 bp, Artificial
  Probe
caatgtgggaaataaagaccttgtg

SEQ ID NO: 120242 - DNA, 25 bp, Artificial
  Probe
gggaaataaagaccttgtgagataa

SEQ ID NO: 120243 - DNA, 25 bp, Artificial
  Probe
tagcattggatctctttctgtgtta

SEQ ID NO: 120244 - DNA, 25 bp, Artificial
  Probe
ttagcattggatctctttctgtgtt

SEQ ID NO: 120245 - DNA, 25 bp, Artificial
  Probe
tttagcattggatctctttctgtgt

SEQ ID NO: 120246 - DNA, 25 bp, Artificial
  Probe
atttagcattggatctctttctgtg

SEQ ID NO: 120247 - DNA, 25 bp, Artificial
  Probe
agcattggatctctttctgtgttag

SEQ ID NO: 120248 - DNA, 25 bp, Artificial
  Probe
gcaccatttattagaagaggaatct

SEQ ID NO: 120249 - DNA, 25 bp, Artificial
  Probe
tgtgggaaataaagaccttgtgaga

SEQ ID NO: 120250 - DNA, 25 bp, Artificial
  Probe
gatttagcattggatctctttctgt

SEQ ID NO: 120251 - DNA, 25 bp, Artificial
  Probe
tgatttagcattggatctctttctg

SEQ ID NO: 120252 - DNA, 25 bp, Artificial
  Probe
tgtattgatgtatgtgccaatgtgg

SEQ ID NO: 120253 - DNA, 25 bp, Artificial
  Probe
agttctccctctgtcttgatagatc

SEQ ID NO: 120254 - DNA, 25 bp, Artificial
  Probe
cagttctccctctgtcttgatagat

SEQ ID NO: 120255 - DNA, 25 bp, Artificial
  Probe
tattagaagaggaatctgaagttca

SEQ ID NO: 120256 - DNA, 25 bp, Artificial
  Probe
atctctttctgtgttagctcctttc

SEQ ID NO: 120257 - DNA, 25 bp, Artificial
  Probe
gatctctttctgtgttagctccttt

SEQ ID NO: 120258 - DNA, 25 bp, Artificial
  Probe
atgatttagcattggatctctttct

SEQ ID NO: 120259 - DNA, 25 bp, Artificial
  Probe
attggatctctttctgtgttagctc

SEQ ID NO: 120260 - DNA, 25 bp, Artificial
  Probe
cattggatctctttctgtgttagct

SEQ ID NO: 120261 - DNA, 25 bp, Artificial
  Probe
gatgatttagcattggatctctttc

SEQ ID NO: 120262 - DNA, 25 bp, Artificial
  Probe
tcgatttgtattgatgtatgtgcca

SEQ ID NO: 120263 - DNA, 25 bp, Artificial
  Probe
tatgtgccaatgtgggaaataaaga

SEQ ID NO: 120264 - DNA, 25 bp, Artificial
  Probe
gtatgtgccaatgtgggaaataaag

SEQ ID NO: 120265 - DNA, 25 bp, Artificial
  Probe
gcattggatctctttctgtgttagc

SEQ ID NO: 120266 - DNA, 25 bp, Artificial
  Probe
atgtatgtgccaatgtgggaaataa

SEQ ID NO: 120267 - DNA, 25 bp, Artificial
  Probe
tgtatgtgccaatgtgggaaataaa

SEQ ID NO: 120268 - DNA, 25 bp, Artificial
  Probe
caccatttattagaagaggaatctg

SEQ ID NO: 120269 - DNA, 25 bp, Artificial
  Probe
ttattagaagaggaatctgaagttc

SEQ ID NO: 120270 - DNA, 25 bp, Artificial
  Probe
ccaatgtgggaaataaagaccttgt

SEQ ID NO: 120271 - DNA, 25 bp, Artificial
  Probe
gatgtatgtgccaatgtgggaaata

SEQ ID NO: 120272 - DNA, 25 bp, Artificial
  Probe
tgcaccatttattagaagaggaatc

SEQ ID NO: 120273 - DNA, 25 bp, Artificial
  Probe
tttgtattgatgtatgtgccaatgt

SEQ ID NO: 120274 - DNA, 25 bp, Artificial
  Probe
accatttattagaagaggaatctga

SEQ ID NO: 120275 - DNA, 25 bp, Artificial
  Probe
ggaaataaagaccttgtgagataaa

SEQ ID NO: 120276 - DNA, 25 bp, Artificial
  Probe
tcagatgatttagcattggatctct

SEQ ID NO: 120277 - DNA, 25 bp, Artificial
  Probe
atgtgccaatgtgggaaataaagac

SEQ ID NO: 120278 - DNA, 25 bp, Artificial
  Probe
cagatgatttagcattggatctctt

SEQ ID NO: 120279 - DNA, 25 bp, Artificial
  Probe
accctttctatcccttgaacctctc

SEQ ID NO: 120280 - DNA, 25 bp, Artificial
  Probe
aggacttgaagcgatagtatgagtt

SEQ ID NO: 120281 - DNA, 25 bp, Artificial
  Probe
caggacttgaagcgatagtatgagt

SEQ ID NO: 120282 - DNA, 25 bp, Artificial
  Probe
gtcccaaactgagatatgaagagag

SEQ ID NO: 120283 - DNA, 25 bp, Artificial
  Probe
atgaattatgggatgggaagtcttt

SEQ ID NO: 120284 - DNA, 25 bp, Artificial
  Probe
tagacaagatgaattatgggatggg

SEQ ID NO: 120285 - DNA, 25 bp, Artificial
  Probe
gatgaattatgggatgggaagtctt

SEQ ID NO: 120286 - DNA, 25 bp, Artificial
  Probe
aagatgaattatgggatgggaagtc

SEQ ID NO: 120287 - DNA, 25 bp, Artificial
  Probe
caagatgaattatgggatgggaagt

SEQ ID NO: 120288 - DNA, 25 bp, Artificial
  Probe
acaagatgaattatgggatgggaag

SEQ ID NO: 120289 - DNA, 25 bp, Artificial
  Probe
gacaagatgaattatgggatgggaa

SEQ ID NO: 120290 - DNA, 25 bp, Artificial
  Probe
tgaattatgggatgggaagtctttg

SEQ ID NO: 120291 - DNA, 25 bp, Artificial
  Probe
cctaacaatagatgggttctggatg

SEQ ID NO: 120292 - DNA, 25 bp, Artificial
  Probe
gctcacatcatatttaacacattgg

SEQ ID NO: 120293 - DNA, 25 bp, Artificial
  Probe
gcctagtttctgtctgtaaatccaa

SEQ ID NO: 120294 - DNA, 25 bp, Artificial
  Probe
agacaagatgaattatgggatggga

SEQ ID NO: 120295 - DNA, 25 bp, Artificial
  Probe
gagtcccaaactgagatatgaagag

SEQ ID NO: 120296 - DNA, 25 bp, Artificial
  Probe
gacttgaagcgatagtatgagtttc

SEQ ID NO: 120297 - DNA, 25 bp, Artificial
  Probe
gaattatgggatgggaagtctttgg

SEQ ID NO: 120298 - DNA, 25 bp, Artificial
  Probe
tcacatcatatttaacacattggga

SEQ ID NO: 120299 - DNA, 25 bp, Artificial
  Probe
agatgaattatgggatgggaagtct

SEQ ID NO: 120300 - DNA, 25 bp, Artificial
  Probe
agtcccaaactgagatatgaagaga

SEQ ID NO: 120301 - DNA, 25 bp, Artificial
  Probe
ctaacaatagatgggttctggatgc

SEQ ID NO: 120302 - DNA, 25 bp, Artificial
  Probe
ggacttgaagcgatagtatgagttt

SEQ ID NO: 120303 - DNA, 25 bp, Artificial
  Probe
tgaggcagactaaataaattaagca

SEQ ID NO: 120304 - DNA, 25 bp, Artificial
  Probe
cctagtttctgtctgtaaatccaac

SEQ ID NO: 120305 - DNA, 25 bp, Artificial
  Probe
tgagtcccaaactgagatatgaaga

SEQ ID NO: 120306 - DNA, 25 bp, Artificial
  Probe
ctcacatcatatttaacacattggg

SEQ ID NO: 120307 - DNA, 25 bp, Artificial
  Probe
tcccaaactgagatatgaagagagc

SEQ ID NO: 120308 - DNA, 25 bp, Artificial
  Probe
gcaggacttgaagcgatagtatgag

SEQ ID NO: 120309 - DNA, 25 bp, Artificial
  Probe
gtttctgtctgtaaatccaacactc

SEQ ID NO: 120310 - DNA, 25 bp, Artificial
  Probe
tttctgtctgtaaatccaacactca

SEQ ID NO: 120311 - DNA, 25 bp, Artificial
  Probe
agtttctgtctgtaaatccaacact

SEQ ID NO: 120312 - DNA, 25 bp, Artificial
  Probe
atagacaagatgaattatgggatgg

SEQ ID NO: 120313 - DNA, 25 bp, Artificial
  Probe
gggaatgggtttggttataaatacg

SEQ ID NO: 120314 - DNA, 25 bp, Artificial
  Probe
gaggcagactaaataaattaagcag

SEQ ID NO: 120315 - DNA, 25 bp, Artificial
  Probe
gttgcctaacaatagatgggttctg

SEQ ID NO: 120316 - DNA, 25 bp, Artificial
  Probe
ttctgtctgtaaatccaacactcac

SEQ ID NO: 120317 - DNA, 25 bp, Artificial
  Probe
tagtttctgtctgtaaatccaacac

SEQ ID NO: 120318 - DNA, 25 bp, Artificial
  Probe
gaagcgatagtatgagtttcagaaa

SEQ ID NO: 120319 - DNA, 25 bp, Artificial
  Probe
aggcagactaaataaattaagcagt

SEQ ID NO: 120320 - DNA, 25 bp, Artificial
  Probe
cacatcatatttaacacattgggaa

SEQ ID NO: 120321 - DNA, 25 bp, Artificial
  Probe
tgtaaatccaacactcacctgaaag

SEQ ID NO: 120322 - DNA, 25 bp, Artificial
  Probe
ctgtaaatccaacactcacctgaaa

SEQ ID NO: 120323 - DNA, 25 bp, Artificial
  Probe
tgggaatgggtttggttataaatac

SEQ ID NO: 120324 - DNA, 25 bp, Artificial
  Probe
attgggaatgggtttggttataaat

SEQ ID NO: 120325 - DNA, 25 bp, Artificial
  Probe
aaccagaacacatcagagcaattag

SEQ ID NO: 120326 - DNA, 25 bp, Artificial
  Probe
cagaacacatcagagcaattaggag

SEQ ID NO: 120327 - DNA, 25 bp, Artificial
  Probe
atcagagcaattaggagccaagaat

SEQ ID NO: 120328 - DNA, 25 bp, Artificial
  Probe
ccagaacacatcagagcaattagga

SEQ ID NO: 120329 - DNA, 25 bp, Artificial
  Probe
tcagagcaattaggagccaagaatg

SEQ ID NO: 120330 - DNA, 25 bp, Artificial
  Probe
catcagagcaattaggagccaagaa

SEQ ID NO: 120331 - DNA, 25 bp, Artificial
  Probe
agaacacatcagagcaattaggagc

SEQ ID NO: 120332 - DNA, 25 bp, Artificial
  Probe
accagaacacatcagagcaattagg

SEQ ID NO: 120333 - DNA, 25 bp, Artificial
  Probe
gatgtagaggcaggaagatcagaac

SEQ ID NO: 120334 - DNA, 25 bp, Artificial
  Probe
gagagaggaaaggacatacattctg

SEQ ID NO: 120335 - DNA, 25 bp, Artificial
  Probe
aaaccagaacacatcagagcaatta

SEQ ID NO: 120336 - DNA, 25 bp, Artificial
  Probe
gaggagagaggaaaggacatacatt

SEQ ID NO: 120337 - DNA, 25 bp, Artificial
  Probe
aatctcagtgtgctctctcatgttc

SEQ ID NO: 120338 - DNA, 25 bp, Artificial
  Probe
atgtagaggcaggaagatcagaact

SEQ ID NO: 120339 - DNA, 25 bp, Artificial
  Probe
aggagagaggaaaggacatacattc

SEQ ID NO: 120340 - DNA, 25 bp, Artificial
  Probe
ggagagaggaaaggacatacattct

SEQ ID NO: 120341 - DNA, 25 bp, Artificial
  Probe
agagaggaaaggacatacattctgg

SEQ ID NO: 120342 - DNA, 25 bp, Artificial
  Probe
tgtagaggcaggaagatcagaactt

SEQ ID NO: 120343 - DNA, 25 bp, Artificial
  Probe
tctcaaagacagaaatctcagtgtg

SEQ ID NO: 120344 - DNA, 25 bp, Artificial
  Probe
gaaaccagaacacatcagagcaatt

SEQ ID NO: 120345 - DNA, 25 bp, Artificial
  Probe
ttagggaaaccagaacacatcagag

SEQ ID NO: 120346 - DNA, 25 bp, Artificial
  Probe
cttagggaaaccagaacacatcaga

SEQ ID NO: 120347 - DNA, 25 bp, Artificial
  Probe
tgaggagagaggaaaggacatacat

SEQ ID NO: 120348 - DNA, 25 bp, Artificial
  Probe
tcagtgtgctctctcatgttcctaa

SEQ ID NO: 120349 - DNA, 25 bp, Artificial
  Probe
cacatcagagcaattaggagccaag

SEQ ID NO: 120350 - DNA, 25 bp, Artificial
  Probe
gaacacatcagagcaattaggagcc

SEQ ID NO: 120351 - DNA, 25 bp, Artificial
  Probe
ggatgtagaggcaggaagatcagaa

SEQ ID NO: 120352 - DNA, 25 bp, Artificial
  Probe
cagtgtgctctctcatgttcctaac

SEQ ID NO: 120353 - DNA, 25 bp, Artificial
  Probe
cagaaatctcagtgtgctctctcat

SEQ ID NO: 120354 - DNA, 25 bp, Artificial
  Probe
gagaggaaaggacatacattctggg

SEQ ID NO: 120355 - DNA, 25 bp, Artificial
  Probe
acatcagagcaattaggagccaaga

SEQ ID NO: 120356 - DNA, 25 bp, Artificial
  Probe
agtgaggagagaggaaaggacatac

SEQ ID NO: 120357 - DNA, 25 bp, Artificial
  Probe
cagtgaggagagaggaaaggacata

SEQ ID NO: 120358 - DNA, 25 bp, Artificial
  Probe
ctcagtgtgctctctcatgttccta

SEQ ID NO: 120359 - DNA, 25 bp, Artificial
  Probe
aaagacagaaatctcagtgtgctct

SEQ ID NO: 120360 - DNA, 25 bp, Artificial
  Probe
caaagacagaaatctcagtgtgctc

SEQ ID NO: 120361 - DNA, 25 bp, Artificial
  Probe
ctcaaagacagaaatctcagtgtgc

SEQ ID NO: 120362 - DNA, 25 bp, Artificial
  Probe
aaatctcagtgtgctctctcatgtt

SEQ ID NO: 120363 - DNA, 25 bp, Artificial
  Probe
tcaaagacagaaatctcagtgtgct

SEQ ID NO: 120364 - DNA, 25 bp, Artificial
  Probe
gtgaggagagaggaaaggacataca

SEQ ID NO: 120365 - DNA, 25 bp, Artificial
  Probe
gaaatctcagtgtgctctctcatgt

SEQ ID NO: 120366 - DNA, 25 bp, Artificial
  Probe
agaaatctcagtgtgctctctcatg

SEQ ID NO: 120367 - DNA, 25 bp, Artificial
  Probe
aagacagaaatctcagtgtgctctc

SEQ ID NO: 120368 - DNA, 25 bp, Artificial
  Probe
acacatcagagcaattaggagccaa

SEQ ID NO: 120369 - DNA, 25 bp, Artificial
  Probe
aacacatcagagcaattaggagcca

SEQ ID NO: 120370 - DNA, 25 bp, Artificial
  Probe
ccacaatactaacgactactcagaa

SEQ ID NO: 120371 - DNA, 25 bp, Artificial
  Probe
tccacaatactaacgactactcaga

SEQ ID NO: 120372 - DNA, 25 bp, Artificial
  Probe
cagaagatacagagaaccaacagag

SEQ ID NO: 120373 - DNA, 25 bp, Artificial
  Probe
actaacgactactcagaagatacag

SEQ ID NO: 120374 - DNA, 25 bp, Artificial
  Probe
ttccaacagatgtccacaatactaa

SEQ ID NO: 120375 - DNA, 25 bp, Artificial
  Probe
tcagaagatacagagaaccaacaga

SEQ ID NO: 120376 - DNA, 25 bp, Artificial
  Probe
attccaacagatgtccacaatacta

SEQ ID NO: 120377 - DNA, 25 bp, Artificial
  Probe
aattccaacagatgtccacaatact

SEQ ID NO: 120378 - DNA, 25 bp, Artificial
  Probe
tccaacagatgtccacaatactaac

SEQ ID NO: 120379 - DNA, 25 bp, Artificial
  Probe
cagtcttctcacagtcttggtaatg

SEQ ID NO: 120380 - DNA, 25 bp, Artificial
  Probe
ctaacgactactcagaagatacaga

SEQ ID NO: 120381 - DNA, 25 bp, Artificial
  Probe
acaatactaacgactactcagaaga

SEQ ID NO: 120382 - DNA, 25 bp, Artificial
  Probe
cacaatactaacgactactcagaag

SEQ ID NO: 120383 - DNA, 25 bp, Artificial
  Probe
caacagatgtccacaatactaacga

SEQ ID NO: 120384 - DNA, 25 bp, Artificial
  Probe
taattccaacagatgtccacaatac

SEQ ID NO: 120385 - DNA, 25 bp, Artificial
  Probe
gtaattccaacagatgtccacaata

SEQ ID NO: 120386 - DNA, 25 bp, Artificial
  Probe
gttctaagcgtaattccaacagatg

SEQ ID NO: 120387 - DNA, 25 bp, Artificial
  Probe
ttctaagcgtaattccaacagatgt

SEQ ID NO: 120388 - DNA, 25 bp, Artificial
  Probe
agaagatacagagaaccaacagagg

SEQ ID NO: 120389 - DNA, 25 bp, Artificial
  Probe
tctaagcgtaattccaacagatgtc

SEQ ID NO: 120390 - DNA, 25 bp, Artificial
  Probe
actactcagaagatacagagaacca

SEQ ID NO: 120391 - DNA, 25 bp, Artificial
  Probe
cgactactcagaagatacagagaac

SEQ ID NO: 120392 - DNA, 25 bp, Artificial
  Probe
gactactcagaagatacagagaacc

SEQ ID NO: 120393 - DNA, 25 bp, Artificial
  Probe
acgactactcagaagatacagagaa

SEQ ID NO: 120394 - DNA, 25 bp, Artificial
  Probe
aacgactactcagaagatacagaga

SEQ ID NO: 120395 - DNA, 25 bp, Artificial
  Probe
agagtgttctaagcgtaattccaac

SEQ ID NO: 120396 - DNA, 25 bp, Artificial
  Probe
cagagtgttctaagcgtaattccaa

SEQ ID NO: 120397 - DNA, 25 bp, Artificial
  Probe
tactcagaagatacagagaaccaac

SEQ ID NO: 120398 - DNA, 25 bp, Artificial
  Probe
ctcagagtgttctaagcgtaattcc

SEQ ID NO: 120399 - DNA, 25 bp, Artificial
  Probe
cctcagagtgttctaagcgtaattc

SEQ ID NO: 120400 - DNA, 25 bp, Artificial
  Probe
ctcagaagatacagagaaccaacag

SEQ ID NO: 120401 - DNA, 25 bp, Artificial
  Probe
cgtaattccaacagatgtccacaat

SEQ ID NO: 120402 - DNA, 25 bp, Artificial
  Probe
ctactcagaagatacagagaaccaa

SEQ ID NO: 120403 - DNA, 25 bp, Artificial
  Probe
agtcttctcacagtcttggtaatga

SEQ ID NO: 120404 - DNA, 25 bp, Artificial
  Probe
ccaacagatgtccacaatactaacg

SEQ ID NO: 120405 - DNA, 25 bp, Artificial
  Probe
ctaagcgtaattccaacagatgtcc

SEQ ID NO: 120406 - DNA, 25 bp, Artificial
  Probe
tactaacgactactcagaagataca

SEQ ID NO: 120407 - DNA, 25 bp, Artificial
  Probe
actcagaagatacagagaaccaaca

SEQ ID NO: 120408 - DNA, 25 bp, Artificial
  Probe
taacgactactcagaagatacagag

SEQ ID NO: 120409 - DNA, 25 bp, Artificial
  Probe
atgtccacaatactaacgactactc

SEQ ID NO: 120410 - DNA, 25 bp, Artificial
  Probe
gatgtccacaatactaacgactact

SEQ ID NO: 120411 - DNA, 25 bp, Artificial
  Probe
agatgtccacaatactaacgactac

SEQ ID NO: 120412 - DNA, 25 bp, Artificial
  Probe
cagatgtccacaatactaacgacta

SEQ ID NO: 120413 - DNA, 25 bp, Artificial
  Probe
gtccacaatactaacgactactcag

SEQ ID NO: 120414 - DNA, 25 bp, Artificial
  Probe
aacctcagagtgttctaagcgtaat

SEQ ID NO: 120415 - DNA, 25 bp, Artificial
  Probe
tagaaattcatctcttaccttcgct

SEQ ID NO: 120416 - DNA, 25 bp, Artificial
  Probe
gaagactatttcacctccacagaac

SEQ ID NO: 120417 - DNA, 25 bp, Artificial
  Probe
agaaattcatctcttaccttcgctg

SEQ ID NO: 120418 - DNA, 25 bp, Artificial
  Probe
ctctgagactatgtactaacccttg

SEQ ID NO: 120419 - DNA, 25 bp, Artificial
  Probe
cctctgagactatgtactaaccctt

SEQ ID NO: 120420 - DNA, 25 bp, Artificial
  Probe
tgaccctctgagactatgtactaac

SEQ ID NO: 120421 - DNA, 25 bp, Artificial
  Probe
gtgaccctctgagactatgtactaa

SEQ ID NO: 120422 - DNA, 25 bp, Artificial
  Probe
ctagaaattcatctcttaccttcgc

SEQ ID NO: 120423 - DNA, 25 bp, Artificial
  Probe
gagtaaatggatgctcagagttcat

SEQ ID NO: 120424 - DNA, 25 bp, Artificial
  Probe
gactatgtactaacccttgccaatc

SEQ ID NO: 120425 - DNA, 25 bp, Artificial
  Probe
gcaaatggagactagaaattcatct

SEQ ID NO: 120426 - DNA, 25 bp, Artificial
  Probe
gaccctctgagactatgtactaacc

SEQ ID NO: 120427 - DNA, 25 bp, Artificial
  Probe
agactatgtactaacccttgccaat

SEQ ID NO: 120428 - DNA, 25 bp, Artificial
  Probe
tctgagactatgtactaacccttgc

SEQ ID NO: 120429 - DNA, 25 bp, Artificial
  Probe
gaaattcatctcttaccttcgctgg

SEQ ID NO: 120430 - DNA, 25 bp, Artificial
  Probe
atttcacagacggagtaaatggatg

SEQ ID NO: 120431 - DNA, 25 bp, Artificial
  Probe
ctttcctggaagactatttcacctc

SEQ ID NO: 120432 - DNA, 25 bp, Artificial
  Probe
cagtcatttcacagacggagtaaat

SEQ ID NO: 120433 - DNA, 25 bp, Artificial
  Probe
agtgaccctctgagactatgtacta

SEQ ID NO: 120434 - DNA, 25 bp, Artificial
  Probe
aagactatttcacctccacagaacc

SEQ ID NO: 120435 - DNA, 25 bp, Artificial
  Probe
actagaaattcatctcttaccttcg

SEQ ID NO: 120436 - DNA, 25 bp, Artificial
  Probe
gagactatgtactaacccttgccaa

SEQ ID NO: 120437 - DNA, 25 bp, Artificial
  Probe
ccctctgagactatgtactaaccct

SEQ ID NO: 120438 - DNA, 25 bp, Artificial
  Probe
ctgagactatgtactaacccttgcc

SEQ ID NO: 120439 - DNA, 25 bp, Artificial
  Probe
agttcatctctcgtacactctgacc

SEQ ID NO: 120440 - DNA, 25 bp, Artificial
  Probe
accctctgagactatgtactaaccc

SEQ ID NO: 120441 - DNA, 25 bp, Artificial
  Probe
ggagtaaatggatgctcagagttca

SEQ ID NO: 120442 - DNA, 25 bp, Artificial
  Probe
ttatagagggtgcaaatggagacta

SEQ ID NO: 120443 - DNA, 25 bp, Artificial
  Probe
ttcacctccacagaaccacagtatc

SEQ ID NO: 120444 - DNA, 25 bp, Artificial
  Probe
gtgcaaatggagactagaaattcat

SEQ ID NO: 120445 - DNA, 25 bp, Artificial
  Probe
tgcaaatggagactagaaattcatc

SEQ ID NO: 120446 - DNA, 25 bp, Artificial
  Probe
tatagagggtgcaaatggagactag

SEQ ID NO: 120447 - DNA, 25 bp, Artificial
  Probe
ggtgcaaatggagactagaaattca

SEQ ID NO: 120448 - DNA, 25 bp, Artificial
  Probe
tttatagagggtgcaaatggagact

SEQ ID NO: 120449 - DNA, 25 bp, Artificial
  Probe
ggaagactatttcacctccacagaa

SEQ ID NO: 120450 - DNA, 25 bp, Artificial
  Probe
tgagactatgtactaacccttgcca

SEQ ID NO: 120451 - DNA, 25 bp, Artificial
  Probe
ctatttcacctccacagaaccacag

SEQ ID NO: 120452 - DNA, 25 bp, Artificial
  Probe
gactatttcacctccacagaaccac

SEQ ID NO: 120453 - DNA, 25 bp, Artificial
  Probe
agactatttcacctccacagaacca

SEQ ID NO: 120454 - DNA, 25 bp, Artificial
  Probe
tttcacagacggagtaaatggatgc

SEQ ID NO: 120455 - DNA, 25 bp, Artificial
  Probe
gggtgcaaatggagactagaaattc

SEQ ID NO: 120456 - DNA, 25 bp, Artificial
  Probe
ccagtcatttcacagacggagtaaa

SEQ ID NO: 120457 - DNA, 25 bp, Artificial
  Probe
aaattcatctcttaccttcgctggc

SEQ ID NO: 120458 - DNA, 25 bp, Artificial
  Probe
aatggatgctcagagttcatctctc

SEQ ID NO: 120459 - DNA, 25 bp, Artificial
  Probe
agggtgcaaatggagactagaaatt

SEQ ID NO: 120460 - DNA, 25 bp, Artificial
  Probe
atgtctgtgagtgtgtgtatgtata

SEQ ID NO: 120461 - DNA, 25 bp, Artificial
  Probe
tatgtctgtgagtgtgtgtatgtat

SEQ ID NO: 120462 - DNA, 25 bp, Artificial
  Probe
atatgtctgtgagtgtgtgtatgta

SEQ ID NO: 120463 - DNA, 25 bp, Artificial
  Probe
ctggtcatctgtcttggagttatag

SEQ ID NO: 120464 - DNA, 25 bp, Artificial
  Probe
aatatgtctgtgagtgtgtgtatgt

SEQ ID NO: 120465 - DNA, 25 bp, Artificial
  Probe
gtcatctgtcttggagttataggtg

SEQ ID NO: 120466 - DNA, 25 bp, Artificial
  Probe
tctggtcatctgtcttggagttata

SEQ ID NO: 120467 - DNA, 25 bp, Artificial
  Probe
tatctggtcatctgtcttggagtta

SEQ ID NO: 120468 - DNA, 25 bp, Artificial
  Probe
atggactgaacctctgaacctataa

SEQ ID NO: 120469 - DNA, 25 bp, Artificial
  Probe
aatggactgaacctctgaacctata

SEQ ID NO: 120470 - DNA, 25 bp, Artificial
  Probe
taatggactgaacctctgaacctat

SEQ ID NO: 120471 - DNA, 25 bp, Artificial
  Probe
ataatggactgaacctctgaaccta

SEQ ID NO: 120472 - DNA, 25 bp, Artificial
  Probe
tataatggactgaacctctgaacct

SEQ ID NO: 120473 - DNA, 25 bp, Artificial
  Probe
tactggctaactgtatgtcaacttg

SEQ ID NO: 120474 - DNA, 25 bp, Artificial
  Probe
atctgtcttggagttataggtggtt

SEQ ID NO: 120475 - DNA, 25 bp, Artificial
  Probe
atctggtcatctgtcttggagttat

SEQ ID NO: 120476 - DNA, 25 bp, Artificial
  Probe
tggactgaacctctgaacctataag

SEQ ID NO: 120477 - DNA, 25 bp, Artificial
  Probe
tcatctgtcttggagttataggtgg

SEQ ID NO: 120478 - DNA, 25 bp, Artificial
  Probe
ggtcatctgtcttggagttataggt

SEQ ID NO: 120479 - DNA, 25 bp, Artificial
  Probe
tggtcatctgtcttggagttatagg

SEQ ID NO: 120480 - DNA, 25 bp, Artificial
  Probe
gaagagagtatctggtcatctgtct

SEQ ID NO: 120481 - DNA, 25 bp, Artificial
  Probe
agaagagagtatctggtcatctgtc

SEQ ID NO: 120482 - DNA, 25 bp, Artificial
  Probe
catctgtcttggagttataggtggt

SEQ ID NO: 120483 - DNA, 25 bp, Artificial
  Probe
caggattgatgaatggctaatggag

SEQ ID NO: 120484 - DNA, 25 bp, Artificial
  Probe
agagagtatctggtcatctgtcttg

SEQ ID NO: 120485 - DNA, 25 bp, Artificial
  Probe
tctgtcttggagttataggtggttg

SEQ ID NO: 120486 - DNA, 25 bp, Artificial
  Probe
gtactggctaactgtatgtcaactt

SEQ ID NO: 120487 - DNA, 25 bp, Artificial
  Probe
ggattgatgaatggctaatggagtg

SEQ ID NO: 120488 - DNA, 25 bp, Artificial
  Probe
gtatctggtcatctgtcttggagtt

SEQ ID NO: 120489 - DNA, 25 bp, Artificial
  Probe
aggattgatgaatggctaatggagt

SEQ ID NO: 120490 - DNA, 25 bp, Artificial
  Probe
tcttggagttataggtggttgtgac

SEQ ID NO: 120491 - DNA, 25 bp, Artificial
  Probe
gtcttggagttataggtggttgtga

SEQ ID NO: 120492 - DNA, 25 bp, Artificial
  Probe
ctgtcttggagttataggtggttgt

SEQ ID NO: 120493 - DNA, 25 bp, Artificial
  Probe
gagtatctggtcatctgtcttggag

SEQ ID NO: 120494 - DNA, 25 bp, Artificial
  Probe
tgtctgtgagtgtgtgtatgtatac

SEQ ID NO: 120495 - DNA, 25 bp, Artificial
  Probe
ttataatggactgaacctctgaacc

SEQ ID NO: 120496 - DNA, 25 bp, Artificial
  Probe
ctgtactggctaactgtatgtcaac

SEQ ID NO: 120497 - DNA, 25 bp, Artificial
  Probe
tgtactggctaactgtatgtcaact

SEQ ID NO: 120498 - DNA, 25 bp, Artificial
  Probe
actgtactggctaactgtatgtcaa

SEQ ID NO: 120499 - DNA, 25 bp, Artificial
  Probe
tgtcttggagttataggtggttgtg

SEQ ID NO: 120500 - DNA, 25 bp, Artificial
  Probe
gagagtatctggtcatctgtcttgg

SEQ ID NO: 120501 - DNA, 25 bp, Artificial
  Probe
ttattgtataggtgtctcactgtgg

SEQ ID NO: 120502 - DNA, 25 bp, Artificial
  Probe
gaggtgtagccttattgtataggtg

SEQ ID NO: 120503 - DNA, 25 bp, Artificial
  Probe
ccttattgtataggtgtctcactgt

SEQ ID NO: 120504 - DNA, 25 bp, Artificial
  Probe
gtgtagccttattgtataggtgtct

SEQ ID NO: 120505 - DNA, 25 bp, Artificial
  Probe
gtggaaacagtggaatataagaaca

SEQ ID NO: 120506 - DNA, 25 bp, Artificial
  Probe
gatgtgggactggatattgagtaat

SEQ ID NO: 120507 - DNA, 25 bp, Artificial
  Probe
atgatgtgggactggatattgagta

SEQ ID NO: 120508 - DNA, 25 bp, Artificial
  Probe
tatgatgtgggactggatattgagt

SEQ ID NO: 120509 - DNA, 25 bp, Artificial
  Probe
tgatgtgggactggatattgagtaa

SEQ ID NO: 120510 - DNA, 25 bp, Artificial
  Probe
tggaaacagtggaatataagaacat

SEQ ID NO: 120511 - DNA, 25 bp, Artificial
  Probe
tgtgggactggatattgagtaataa

SEQ ID NO: 120512 - DNA, 25 bp, Artificial
  Probe
cttcaatgtggaaacagtggaatat

SEQ ID NO: 120513 - DNA, 25 bp, Artificial
  Probe
atgtgggactggatattgagtaata

SEQ ID NO: 120514 - DNA, 25 bp, Artificial
  Probe
tgtggaaacagtggaatataagaac

SEQ ID NO: 120515 - DNA, 25 bp, Artificial
  Probe
ggaaacagtggaatataagaacatc

SEQ ID NO: 120516 - DNA, 25 bp, Artificial
  Probe
gtgggactggatattgagtaataaa

SEQ ID NO: 120517 - DNA, 25 bp, Artificial
  Probe
tcaatgtggaaacagtggaatataa

SEQ ID NO: 120518 - DNA, 25 bp, Artificial
  Probe
ttcaatgtggaaacagtggaatata

SEQ ID NO: 120519 - DNA, 25 bp, Artificial
  Probe
gcttcaatgtggaaacagtggaata

SEQ ID NO: 120520 - DNA, 25 bp, Artificial
  Probe
atgtggaaacagtggaatataagaa

SEQ ID NO: 120521 - DNA, 25 bp, Artificial
  Probe
aatgtggaaacagtggaatataaga

SEQ ID NO: 120522 - DNA, 25 bp, Artificial
  Probe
caatgtggaaacagtggaatataag

SEQ ID NO: 120523 - DNA, 25 bp, Artificial
  Probe
cataggcttcaatgtggaaacagtg

SEQ ID NO: 120524 - DNA, 25 bp, Artificial
  Probe
tgagtaataaatttgctgtggtttg

SEQ ID NO: 120525 - DNA, 25 bp, Artificial
  Probe
tgggactggatattgagtaataaat

SEQ ID NO: 120526 - DNA, 25 bp, Artificial
  Probe
gaaacagtggaatataagaacatct

SEQ ID NO: 120527 - DNA, 25 bp, Artificial
  Probe
ttgagtaataaatttgctgtggttt

SEQ ID NO: 120528 - DNA, 25 bp, Artificial
  Probe
attgagtaataaatttgctgtggtt

SEQ ID NO: 120529 - DNA, 25 bp, Artificial
  Probe
tggaatataagaacatctgtttcac

SEQ ID NO: 120530 - DNA, 25 bp, Artificial
  Probe
gtggaatataagaacatctgtttca

SEQ ID NO: 120531 - DNA, 25 bp, Artificial
  Probe
aaacagtggaatataagaacatctg

SEQ ID NO: 120532 - DNA, 25 bp, Artificial
  Probe
agtggaatataagaacatctgtttc

SEQ ID NO: 120533 - DNA, 25 bp, Artificial
  Probe
ataggcttcaatgtggaaacagtgg

SEQ ID NO: 120534 - DNA, 25 bp, Artificial
  Probe
ggatttaatttcgttttggttttgg

SEQ ID NO: 120535 - DNA, 25 bp, Artificial
  Probe
ggaatataagaacatctgtttcaca

SEQ ID NO: 120536 - DNA, 25 bp, Artificial
  Probe
cagtggaatataagaacatctgttt

SEQ ID NO: 120537 - DNA, 25 bp, Artificial
  Probe
tctggatttaatttcgttttggttt

SEQ ID NO: 120538 - DNA, 25 bp, Artificial
  Probe
gggactggatattgagtaataaatt

SEQ ID NO: 120539 - DNA, 25 bp, Artificial
  Probe
atctggatttaatttcgttttggtt

SEQ ID NO: 120540 - DNA, 25 bp, Artificial
  Probe
gactaccatcctgtacaaactgaag

SEQ ID NO: 120541 - DNA, 25 bp, Artificial
  Probe
gatttaatttcgttttggttttggt

SEQ ID NO: 120542 - DNA, 25 bp, Artificial
  Probe
tggatttaatttcgttttggttttg

SEQ ID NO: 120543 - DNA, 25 bp, Artificial
  Probe
ctaccatcctgtacaaactgaagtt

SEQ ID NO: 120544 - DNA, 25 bp, Artificial
  Probe
ctgctgatgaactccagaagatgct

SEQ ID NO: 120545 - DNA, 25 bp, Artificial
  Probe
agactaccatcctgtacaaactgaa

SEQ ID NO: 120546 - DNA, 25 bp, Artificial
  Probe
aagactaccatcctgtacaaactga

SEQ ID NO: 120547 - DNA, 25 bp, Artificial
  Probe
caagactaccatcctgtacaaactg

SEQ ID NO: 120548 - DNA, 25 bp, Artificial
  Probe
ccataggcttcaatgtggaaacagt

SEQ ID NO: 120549 - DNA, 25 bp, Artificial
  Probe
accataggcttcaatgtggaaacag

SEQ ID NO: 120550 - DNA, 25 bp, Artificial
  Probe
aaggtctgatattcgtggttgatag

SEQ ID NO: 120551 - DNA, 25 bp, Artificial
  Probe
ggtctgatattcgtggttgatagta

SEQ ID NO: 120552 - DNA, 25 bp, Artificial
  Probe
aggtctgatattcgtggttgatagt

SEQ ID NO: 120553 - DNA, 25 bp, Artificial
  Probe
caaggtctgatattcgtggttgata

SEQ ID NO: 120554 - DNA, 25 bp, Artificial
  Probe
gtctgatattcgtggttgatagtaa

SEQ ID NO: 120555 - DNA, 25 bp, Artificial
  Probe
tctgatattcgtggttgatagtaac

SEQ ID NO: 120556 - DNA, 25 bp, Artificial
  Probe
gtgtgatagccagaatatctctagg

SEQ ID NO: 120557 - DNA, 25 bp, Artificial
  Probe
ggtgtgatagccagaatatctctag

SEQ ID NO: 120558 - DNA, 25 bp, Artificial
  Probe
cggtgtgatagccagaatatctcta

SEQ ID NO: 120559 - DNA, 25 bp, Artificial
  Probe
agaaggatacgttattaccacagtg

SEQ ID NO: 120560 - DNA, 25 bp, Artificial
  Probe
aaccaactcaagaaccagaagtgat

SEQ ID NO: 120561 - DNA, 25 bp, Artificial
  Probe
gaaggatacgttattaccacagtgt

SEQ ID NO: 120562 - DNA, 25 bp, Artificial
  Probe
aagaaggatacgttattaccacagt

SEQ ID NO: 120563 - DNA, 25 bp, Artificial
  Probe
agaagaaggatacgttattaccaca

SEQ ID NO: 120564 - DNA, 25 bp, Artificial
  Probe
gctgtcaagaagaaggatacgttat

SEQ ID NO: 120565 - DNA, 25 bp, Artificial
  Probe
actcaaggtctgatattcgtggttg

SEQ ID NO: 120566 - DNA, 25 bp, Artificial
  Probe
gaagaaggatacgttattaccacag

SEQ ID NO: 120567 - DNA, 25 bp, Artificial
  Probe
tatccacgctatacgaacaccagta

SEQ ID NO: 120568 - DNA, 25 bp, Artificial
  Probe
aatttagaagatgaaggtcccagtg

SEQ ID NO: 120569 - DNA, 25 bp, Artificial
  Probe
cttatccacgctatacgaacaccag

SEQ ID NO: 120570 - DNA, 25 bp, Artificial
  Probe
ctgtcaagaagaaggatacgttatt

SEQ ID NO: 120571 - DNA, 25 bp, Artificial
  Probe
taatttagaagatgaaggtcccagt

SEQ ID NO: 120572 - DNA, 25 bp, Artificial
  Probe
ggttaatttagaagatgaaggtccc

SEQ ID NO: 120573 - DNA, 25 bp, Artificial
  Probe
gtggttgatagtaacgacagagagc

SEQ ID NO: 120574 - DNA, 25 bp, Artificial
  Probe
agctgtcaagaagaaggatacgtta

SEQ ID NO: 120575 - DNA, 25 bp, Artificial
  Probe
acgcagtcttattggtgtttgtaaa

SEQ ID NO: 120576 - DNA, 25 bp, Artificial
  Probe
aagaagaaggatacgttattaccac

SEQ ID NO: 120577 - DNA, 25 bp, Artificial
  Probe
caagaagaaggatacgttattacca

SEQ ID NO: 120578 - DNA, 25 bp, Artificial
  Probe
tgtgagaaagtcaggaggttaattt

SEQ ID NO: 120579 - DNA, 25 bp, Artificial
  Probe
gttaatttagaagatgaaggtccca

SEQ ID NO: 120580 - DNA, 25 bp, Artificial
  Probe
gtgtgagaaagtcaggaggttaatt

SEQ ID NO: 120581 - DNA, 25 bp, Artificial
  Probe
tcaagaagaaggatacgttattacc

SEQ ID NO: 120582 - DNA, 25 bp, Artificial
  Probe
accaactcaagaaccagaagtgatc

SEQ ID NO: 120583 - DNA, 25 bp, Artificial
  Probe
cactcaaggtctgatattcgtggtt

SEQ ID NO: 120584 - DNA, 25 bp, Artificial
  Probe
aacactcaaggtctgatattcgtgg

SEQ ID NO: 120585 - DNA, 25 bp, Artificial
  Probe
atacgttattaccacagtgtgagag

SEQ ID NO: 120586 - DNA, 25 bp, Artificial
  Probe
gatacgttattaccacagtgtgaga

SEQ ID NO: 120587 - DNA, 25 bp, Artificial
  Probe
ctccaaccaactcaagaaccagaag

SEQ ID NO: 120588 - DNA, 25 bp, Artificial
  Probe
gttattaccacagtgtgagaggttc

SEQ ID NO: 120589 - DNA, 25 bp, Artificial
  Probe
ttaatttagaagatgaaggtcccag

SEQ ID NO: 120590 - DNA, 25 bp, Artificial
  Probe
aggttaatttagaagatgaaggtcc

SEQ ID NO: 120591 - DNA, 25 bp, Artificial
  Probe
ggaggttaatttagaagatgaaggt

SEQ ID NO: 120592 - DNA, 25 bp, Artificial
  Probe
caaccaactcaagaaccagaagtga

SEQ ID NO: 120593 - DNA, 25 bp, Artificial
  Probe
aaggatacgttattaccacagtgtg

SEQ ID NO: 120594 - DNA, 25 bp, Artificial
  Probe
tgttagttcaaactgacgcatttag

SEQ ID NO: 120595 - DNA, 25 bp, Artificial
  Probe
acattattgactcctggcttctatc

SEQ ID NO: 120596 - DNA, 25 bp, Artificial
  Probe
cacattattgactcctggcttctat

SEQ ID NO: 120597 - DNA, 25 bp, Artificial
  Probe
cattattgactcctggcttctatca

SEQ ID NO: 120598 - DNA, 25 bp, Artificial
  Probe
atcagtgagatgacagacaagttag

SEQ ID NO: 120599 - DNA, 25 bp, Artificial
  Probe
gatagtcaccaccattcctaccatt

SEQ ID NO: 120600 - DNA, 25 bp, Artificial
  Probe
tcacattattgactcctggcttcta

SEQ ID NO: 120601 - DNA, 25 bp, Artificial
  Probe
cagtgagatgacagacaagttaggt

SEQ ID NO: 120602 - DNA, 25 bp, Artificial
  Probe
atagtcaccaccattcctaccattg

SEQ ID NO: 120603 - DNA, 25 bp, Artificial
  Probe
tcagtgagatgacagacaagttagg

SEQ ID NO: 120604 - DNA, 25 bp, Artificial
  Probe
agatagtcaccaccattcctaccat

SEQ ID NO: 120605 - DNA, 25 bp, Artificial
  Probe
agtgagatgacagacaagttaggtc

SEQ ID NO: 120606 - DNA, 25 bp, Artificial
  Probe
ctcacattattgactcctggcttct

SEQ ID NO: 120607 - DNA, 25 bp, Artificial
  Probe
gagatagtcaccaccattcctacca

SEQ ID NO: 120608 - DNA, 25 bp, Artificial
  Probe
ggctggtttcaaagagttcatattg

SEQ ID NO: 120609 - DNA, 25 bp, Artificial
  Probe
cgtggtagatagcaatgatcgtgaa

SEQ ID NO: 120610 - DNA, 25 bp, Artificial
  Probe
ttcgtggtagatagcaatgatcgtg

SEQ ID NO: 120611 - DNA, 25 bp, Artificial
  Probe
gggctggtttcaaagagttcatatt

SEQ ID NO: 120612 - DNA, 25 bp, Artificial
  Probe
ggtagatagcaatgatcgtgaaaga

SEQ ID NO: 120613 - DNA, 25 bp, Artificial
  Probe
tggtagatagcaatgatcgtgaaag

SEQ ID NO: 120614 - DNA, 25 bp, Artificial
  Probe
agcattccatttgtatttatttccc

SEQ ID NO: 120615 - DNA, 25 bp, Artificial
  Probe
gtagatagcaatgatcgtgaaagaa

SEQ ID NO: 120616 - DNA, 25 bp, Artificial
  Probe
gtggtagatagcaatgatcgtgaaa

SEQ ID NO: 120617 - DNA, 25 bp, Artificial
  Probe
agatagcaatgatcgtgaaagaatt

SEQ ID NO: 120618 - DNA, 25 bp, Artificial
  Probe
cctcacattattgactcctggcttc

SEQ ID NO: 120619 - DNA, 25 bp, Artificial
  Probe
ctgatttccttacataacaaagtgg

SEQ ID NO: 120620 - DNA, 25 bp, Artificial
  Probe
atttgtttcacagtttgggatgttg

SEQ ID NO: 120621 - DNA, 25 bp, Artificial
  Probe
catttgtttcacagtttgggatgtt

SEQ ID NO: 120622 - DNA, 25 bp, Artificial
  Probe
tagatagcaatgatcgtgaaagaat

SEQ ID NO: 120623 - DNA, 25 bp, Artificial
  Probe
aactggatatctaaccaaggacatg

SEQ ID NO: 120624 - DNA, 25 bp, Artificial
  Probe
catcagtgagatgacagacaagtta

SEQ ID NO: 120625 - DNA, 25 bp, Artificial
  Probe
gaacatttgtttcacagtttgggat

SEQ ID NO: 120626 - DNA, 25 bp, Artificial
  Probe
tcgtggtagatagcaatgatcgtga

SEQ ID NO: 120627 - DNA, 25 bp, Artificial
  Probe
aagaacatttgtttcacagtttggg

SEQ ID NO: 120628 - DNA, 25 bp, Artificial
  Probe
aacatttgtttcacagtttgggatg

SEQ ID NO: 120629 - DNA, 25 bp, Artificial
  Probe
gaggcattacttccagaatacccag

SEQ ID NO: 120630 - DNA, 25 bp, Artificial
  Probe
ttgggatgttggtggtcaagataaa

SEQ ID NO: 120631 - DNA, 25 bp, Artificial
  Probe
tttgggatgttggtggtcaagataa

SEQ ID NO: 120632 - DNA, 25 bp, Artificial
  Probe
tttcgtggtagatagcaatgatcgt

SEQ ID NO: 120633 - DNA, 25 bp, Artificial
  Probe
taagaacatttgtttcacagtttgg

SEQ ID NO: 120634 - DNA, 25 bp, Artificial
  Probe
agaacatttgtttcacagtttggga

SEQ ID NO: 120635 - DNA, 25 bp, Artificial
  Probe
tgatttccttacataacaaagtgga

SEQ ID NO: 120636 - DNA, 25 bp, Artificial
  Probe
actgatttccttacataacaaagtg

SEQ ID NO: 120637 - DNA, 25 bp, Artificial
  Probe
ttaaaggatatctgagacggtttgg

SEQ ID NO: 120638 - DNA, 25 bp, Artificial
  Probe
agtttgcatcttggttattaaagga

SEQ ID NO: 120639 - DNA, 25 bp, Artificial
  Probe
tttgtttcacagtttgggatgttgg

SEQ ID NO: 120640 - DNA, 25 bp, Artificial
  Probe
cattcataggattatcgccaccatc

SEQ ID NO: 120641 - DNA, 25 bp, Artificial
  Probe
ttcataggattatcgccaccatcat

SEQ ID NO: 120642 - DNA, 25 bp, Artificial
  Probe
attcataggattatcgccaccatca

SEQ ID NO: 120643 - DNA, 25 bp, Artificial
  Probe
tcataggattatcgccaccatcatc

SEQ ID NO: 120644 - DNA, 25 bp, Artificial
  Probe
ataggattatcgccaccatcatcac

SEQ ID NO: 120645 - DNA, 25 bp, Artificial
  Probe
cataggattatcgccaccatcatca

SEQ ID NO: 120646 - DNA, 25 bp, Artificial
  Probe
ccattcataggattatcgccaccat

SEQ ID NO: 120647 - DNA, 25 bp, Artificial
  Probe
aatagcaactcttggtaaagtcctt

SEQ ID NO: 120648 - DNA, 25 bp, Artificial
  Probe
gggtaatagcaactcttggtaaagt

SEQ ID NO: 120649 - DNA, 25 bp, Artificial
  Probe
taatagcaactcttggtaaagtcct

SEQ ID NO: 120650 - DNA, 25 bp, Artificial
  Probe
gtaatagcaactcttggtaaagtcc

SEQ ID NO: 120651 - DNA, 25 bp, Artificial
  Probe
ggtaatagcaactcttggtaaagtc

SEQ ID NO: 120652 - DNA, 25 bp, Artificial
  Probe
atagcaactcttggtaaagtccttt

SEQ ID NO: 120653 - DNA, 25 bp, Artificial
  Probe
aaacccattcataggattatcgcca

SEQ ID NO: 120654 - DNA, 25 bp, Artificial
  Probe
agcaactcttggtaaagtcctttat

SEQ ID NO: 120655 - DNA, 25 bp, Artificial
  Probe
tagcaactcttggtaaagtccttta

SEQ ID NO: 120656 - DNA, 25 bp, Artificial
  Probe
gcaactcttggtaaagtcctttata

SEQ ID NO: 120657 - DNA, 25 bp, Artificial
  Probe
attatcgccaccatcatcacctctt

SEQ ID NO: 120658 - DNA, 25 bp, Artificial
  Probe
aacccattcataggattatcgccac

SEQ ID NO: 120659 - DNA, 25 bp, Artificial
  Probe
taggattatcgccaccatcatcacc

SEQ ID NO: 120660 - DNA, 25 bp, Artificial
  Probe
gattatcgccaccatcatcacctct

SEQ ID NO: 120661 - DNA, 25 bp, Artificial
  Probe
ccaagtctgtttcatctagtaaact

SEQ ID NO: 120662 - DNA, 25 bp, Artificial
  Probe
aaaacccattcataggattatcgcc

SEQ ID NO: 120663 - DNA, 25 bp, Artificial
  Probe
ggggtaatagcaactcttggtaaag

SEQ ID NO: 120664 - DNA, 25 bp, Artificial
  Probe
tggggtaatagcaactcttggtaaa

SEQ ID NO: 120665 - DNA, 25 bp, Artificial
  Probe
caagtctgtttcatctagtaaactg

SEQ ID NO: 120666 - DNA, 25 bp, Artificial
  Probe
aagtctgtttcatctagtaaactga

SEQ ID NO: 120667 - DNA, 25 bp, Artificial
  Probe
ttatcgccaccatcatcacctcttt

SEQ ID NO: 120668 - DNA, 25 bp, Artificial
  Probe
caactcttggtaaagtcctttataa

SEQ ID NO: 120669 - DNA, 25 bp, Artificial
  Probe
gtggggtaatagcaactcttggtaa

SEQ ID NO: 120670 - DNA, 25 bp, Artificial
  Probe
ggattatcgccaccatcatcacctc

SEQ ID NO: 120671 - DNA, 25 bp, Artificial
  Probe
cccattcataggattatcgccacca

SEQ ID NO: 120672 - DNA, 25 bp, Artificial
  Probe
acccattcataggattatcgccacc

SEQ ID NO: 120673 - DNA, 25 bp, Artificial
  Probe
agtctgtttcatctagtaaactgaa

SEQ ID NO: 120674 - DNA, 25 bp, Artificial
  Probe
aactcttggtaaagtcctttataat

SEQ ID NO: 120675 - DNA, 25 bp, Artificial
  Probe
tggtaaagtcctttataataatggt

SEQ ID NO: 120676 - DNA, 25 bp, Artificial
  Probe
ggtggggtaatagcaactcttggta

SEQ ID NO: 120677 - DNA, 25 bp, Artificial
  Probe
gattcgggacaggaactggtatgtg

SEQ ID NO: 120678 - DNA, 25 bp, Artificial
  Probe
actcttggtaaagtcctttataata

SEQ ID NO: 120679 - DNA, 25 bp, Artificial
  Probe
gtctgtttcatctagtaaactgaaa

SEQ ID NO: 120680 - DNA, 25 bp, Artificial
  Probe
ctctatgaggggctcacatggttaa

SEQ ID NO: 120681 - DNA, 25 bp, Artificial
  Probe
actctatgaggggctcacatggtta

SEQ ID NO: 120682 - DNA, 25 bp, Artificial
  Probe
tctatgaggggctcacatggttaac

SEQ ID NO: 120683 - DNA, 25 bp, Artificial
  Probe
tctgtttcatctagtaaactgaaaa

SEQ ID NO: 120684 - DNA, 25 bp, Artificial
  Probe
ctgtttcatctagtaaactgaaaat

SEQ ID NO: 120685 - DNA, 25 bp, Artificial
  Probe
tgtttcatctagtaaactgaaaatt

SEQ ID NO: 120686 - DNA, 25 bp, Artificial
  Probe
ctaatcttgctcaagtgatggtcaa

SEQ ID NO: 120687 - DNA, 25 bp, Artificial
  Probe
gcacatcaaacaagttcaatttcaa

SEQ ID NO: 120688 - DNA, 25 bp, Artificial
  Probe
catcaaacaagttcaatttcaagcg

SEQ ID NO: 120689 - DNA, 25 bp, Artificial
  Probe
aagtcagtcatttctttatgtggga

SEQ ID NO: 120690 - DNA, 25 bp, Artificial
  Probe
gaagtcagtcatttctttatgtggg

SEQ ID NO: 120691 - DNA, 25 bp, Artificial
  Probe
ggaagtcagtcatttctttatgtgg

SEQ ID NO: 120692 - DNA, 25 bp, Artificial
  Probe
gggaagtcagtcatttctttatgtg

SEQ ID NO: 120693 - DNA, 25 bp, Artificial
  Probe
tgggaagtcagtcatttctttatgt

SEQ ID NO: 120694 - DNA, 25 bp, Artificial
  Probe
acatcaaacaagttcaatttcaagc

SEQ ID NO: 120695 - DNA, 25 bp, Artificial
  Probe
atcaaacaagttcaatttcaagcgt

SEQ ID NO: 120696 - DNA, 25 bp, Artificial
  Probe
tttctactcgtgaggtgtaacaaag

SEQ ID NO: 120697 - DNA, 25 bp, Artificial
  Probe
tcatttctttatgtgggaccatcag

SEQ ID NO: 120698 - DNA, 25 bp, Artificial
  Probe
tcaaacaagttcaatttcaagcgtg

SEQ ID NO: 120699 - DNA, 25 bp, Artificial
  Probe
cctaatcttgctcaagtgatggtca

SEQ ID NO: 120700 - DNA, 25 bp, Artificial
  Probe
cacatcaaacaagttcaatttcaag

SEQ ID NO: 120701 - DNA, 25 bp, Artificial
  Probe
ctgggaagtcagtcatttctttatg

SEQ ID NO: 120702 - DNA, 25 bp, Artificial
  Probe
cctgggaagtcagtcatttctttat

SEQ ID NO: 120703 - DNA, 25 bp, Artificial
  Probe
catgtaatcctcaagtttggtttgt

SEQ ID NO: 120704 - DNA, 25 bp, Artificial
  Probe
agtcagtcatttctttatgtgggac

SEQ ID NO: 120705 - DNA, 25 bp, Artificial
  Probe
ttacaacagatccaaagttctcatg

SEQ ID NO: 120706 - DNA, 25 bp, Artificial
  Probe
ctaccctaatcttgctcaagtgatg

SEQ ID NO: 120707 - DNA, 25 bp, Artificial
  Probe
ttctactcgtgaggtgtaacaaagt

SEQ ID NO: 120708 - DNA, 25 bp, Artificial
  Probe
ttactaccctaatcttgctcaagtg

SEQ ID NO: 120709 - DNA, 25 bp, Artificial
  Probe
gttactaccctaatcttgctcaagt

SEQ ID NO: 120710 - DNA, 25 bp, Artificial
  Probe
agtcatttctttatgtgggaccatc

SEQ ID NO: 120711 - DNA, 25 bp, Artificial
  Probe
tttacaacagatccaaagttctcat

SEQ ID NO: 120712 - DNA, 25 bp, Artificial
  Probe
tactaccctaatcttgctcaagtga

SEQ ID NO: 120713 - DNA, 25 bp, Artificial
  Probe
gtcatttctttatgtgggaccatca

SEQ ID NO: 120714 - DNA, 25 bp, Artificial
  Probe
cagtcatttctttatgtgggaccat

SEQ ID NO: 120715 - DNA, 25 bp, Artificial
  Probe
gcatgtaatcctcaagtttggtttg

SEQ ID NO: 120716 - DNA, 25 bp, Artificial
  Probe
caaacaagttcaatttcaagcgtgg

SEQ ID NO: 120717 - DNA, 25 bp, Artificial
  Probe
catttctttatgtgggaccatcagc

SEQ ID NO: 120718 - DNA, 25 bp, Artificial
  Probe
actaccctaatcttgctcaagtgat

SEQ ID NO: 120719 - DNA, 25 bp, Artificial
  Probe
gtcagtcatttctttatgtgggacc

SEQ ID NO: 120720 - DNA, 25 bp, Artificial
  Probe
ctactcgtgaggtgtaacaaagtaa

SEQ ID NO: 120721 - DNA, 25 bp, Artificial
  Probe
tactcgtgaggtgtaacaaagtaac

SEQ ID NO: 120722 - DNA, 25 bp, Artificial
  Probe
tctactcgtgaggtgtaacaaagta

SEQ ID NO: 120723 - DNA, 25 bp, Artificial
  Probe
tcagtcatttctttatgtgggacca

SEQ ID NO: 120724 - DNA, 25 bp, Artificial
  Probe
taccctaatcttgctcaagtgatgg

SEQ ID NO: 120725 - DNA, 25 bp, Artificial
  Probe
ggttactaccctaatcttgctcaag

SEQ ID NO: 120726 - DNA, 25 bp, Artificial
  Probe
tgcatgtaatcctcaagtttggttt

SEQ ID NO: 120727 - DNA, 25 bp, Artificial
  Probe
taatcttgctcaagtgatggtcaag

SEQ ID NO: 120728 - DNA, 25 bp, Artificial
  Probe
ccctgggaagtcagtcatttcttta

SEQ ID NO: 120729 - DNA, 25 bp, Artificial
  Probe
ttgcatgtaatcctcaagtttggtt

SEQ ID NO: 120730 - DNA, 25 bp, Artificial
  Probe
attttctactcgtgaggtgtaacaa

SEQ ID NO: 120731 - DNA, 25 bp, Artificial
  Probe
ttcagagactaaggaagaagtgagg

SEQ ID NO: 120732 - DNA, 25 bp, Artificial
  Probe
cctacaaggaggattatcacaagtc

SEQ ID NO: 120733 - DNA, 25 bp, Artificial
  Probe
ctacaaggaggattatcacaagtcc

SEQ ID NO: 120734 - DNA, 25 bp, Artificial
  Probe
cagagtcttccaggagttcatcaag

SEQ ID NO: 120735 - DNA, 25 bp, Artificial
  Probe
gcctacaaggaggattatcacaagt

SEQ ID NO: 120736 - DNA, 25 bp, Artificial
  Probe
aaatatgacaagtctccacaccaag

SEQ ID NO: 120737 - DNA, 25 bp, Artificial
  Probe
gaaatatgacaagtctccacaccaa

SEQ ID NO: 120738 - DNA, 25 bp, Artificial
  Probe
aatatgacaagtctccacaccaagc

SEQ ID NO: 120739 - DNA, 25 bp, Artificial
  Probe
ggcaaagtttagaacagagggaatt

SEQ ID NO: 120740 - DNA, 25 bp, Artificial
  Probe
agaaatatgacaagtctccacacca

SEQ ID NO: 120741 - DNA, 25 bp, Artificial
  Probe
ctttgtcacatctctaaacacctcc

SEQ ID NO: 120742 - DNA, 25 bp, Artificial
  Probe
cacatctctaaacacctccttggat

SEQ ID NO: 120743 - DNA, 25 bp, Artificial
  Probe
gagtcttccaggagttcatcaagaa

SEQ ID NO: 120744 - DNA, 25 bp, Artificial
  Probe
ttgtcacatctctaaacacctcctt

SEQ ID NO: 120745 - DNA, 25 bp, Artificial
  Probe
tttgtcacatctctaaacacctcct

SEQ ID NO: 120746 - DNA, 25 bp, Artificial
  Probe
cttcagagactaaggaagaagtgag

SEQ ID NO: 120747 - DNA, 25 bp, Artificial
  Probe
gctttgtcacatctctaaacacctc

SEQ ID NO: 120748 - DNA, 25 bp, Artificial
  Probe
gtcacatctctaaacacctccttgg

SEQ ID NO: 120749 - DNA, 25 bp, Artificial
  Probe
tacaaggaggattatcacaagtccc

SEQ ID NO: 120750 - DNA, 25 bp, Artificial
  Probe
tgtcacatctctaaacacctccttg

SEQ ID NO: 120751 - DNA, 25 bp, Artificial
  Probe
gcttcagagactaaggaagaagtga

SEQ ID NO: 120752 - DNA, 25 bp, Artificial
  Probe
tcacatctctaaacacctccttgga

SEQ ID NO: 120753 - DNA, 25 bp, Artificial
  Probe
agagtcttccaggagttcatcaaga

SEQ ID NO: 120754 - DNA, 25 bp, Artificial
  Probe
tcagagactaaggaagaagtgaggg

SEQ ID NO: 120755 - DNA, 25 bp, Artificial
  Probe
gggcaaagtttagaacagagggaat

SEQ ID NO: 120756 - DNA, 25 bp, Artificial
  Probe
cattgctccagcttcagagactaag

SEQ ID NO: 120757 - DNA, 25 bp, Artificial
  Probe
gcagagtcttccaggagttcatcaa

SEQ ID NO: 120758 - DNA, 25 bp, Artificial
  Probe
gattatcacaagtccctggaggatg

SEQ ID NO: 120759 - DNA, 25 bp, Artificial
  Probe
agcttcagagactaaggaagaagtg

SEQ ID NO: 120760 - DNA, 25 bp, Artificial
  Probe
cagcttcagagactaaggaagaagt

SEQ ID NO: 120761 - DNA, 25 bp, Artificial
  Probe
gcacagatgaaaaggctcttataga

SEQ ID NO: 120762 - DNA, 25 bp, Artificial
  Probe
atctctaaacacctccttggatgga

SEQ ID NO: 120763 - DNA, 25 bp, Artificial
  Probe
agtcttccaggagttcatcaagaaa

SEQ ID NO: 120764 - DNA, 25 bp, Artificial
  Probe
caaggaggattatcacaagtccctg

SEQ ID NO: 120765 - DNA, 25 bp, Artificial
  Probe
gcaaagtttagaacagagggaattc

SEQ ID NO: 120766 - DNA, 25 bp, Artificial
  Probe
gtctctgcttgtcttttccaataaa

SEQ ID NO: 120767 - DNA, 25 bp, Artificial
  Probe
agtctctgcttgtcttttccaataa

SEQ ID NO: 120768 - DNA, 25 bp, Artificial
  Probe
aagtctctgcttgtcttttccaata

SEQ ID NO: 120769 - DNA, 25 bp, Artificial
  Probe
agctttgtcacatctctaaacacct

SEQ ID NO: 120770 - DNA, 25 bp, Artificial
  Probe
ctgcttgtcttttccaataaattcg

SEQ ID NO: 120771 - DNA, 25 bp, Artificial
  Probe
atatgacaagtctccacaccaagcc

SEQ ID NO: 120772 - DNA, 25 bp, Artificial
  Probe
tgcttgtcttttccaataaattcgg

SEQ ID NO: 120773 - DNA, 25 bp, Artificial
  Probe
tctctgcttgtcttttccaataaat

SEQ ID NO: 120774 - DNA, 25 bp, Artificial
  Probe
cacagatgaaaaggctcttatagaa

SEQ ID NO: 120775 - DNA, 25 bp, Artificial
  Probe
acaaggaggattatcacaagtccct

SEQ ID NO: 120776 - DNA, 25 bp, Artificial
  Probe
gtaccttcaagaacacagagatcag

SEQ ID NO: 120777 - DNA, 25 bp, Artificial
  Probe
cagtaccttcaagaacacagagatc

SEQ ID NO: 120778 - DNA, 25 bp, Artificial
  Probe
agtaccttcaagaacacagagatca

SEQ ID NO: 120779 - DNA, 25 bp, Artificial
  Probe
acagtaccttcaagaacacagagat

SEQ ID NO: 120780 - DNA, 25 bp, Artificial
  Probe
cacagtaccttcaagaacacagaga

SEQ ID NO: 120781 - DNA, 25 bp, Artificial
  Probe
taccttcaagaacacagagatcagc

SEQ ID NO: 120782 - DNA, 25 bp, Artificial
  Probe
acacagtaccttcaagaacacagag

SEQ ID NO: 120783 - DNA, 25 bp, Artificial
  Probe
cacacagtaccttcaagaacacaga

SEQ ID NO: 120784 - DNA, 25 bp, Artificial
  Probe
acacacagtaccttcaagaacacag

SEQ ID NO: 120785 - DNA, 25 bp, Artificial
  Probe
gacacacagtaccttcaagaacaca

SEQ ID NO: 120786 - DNA, 25 bp, Artificial
  Probe
cgaccacaatcattgagaagaatgg

SEQ ID NO: 120787 - DNA, 25 bp, Artificial
  Probe
ccgaccacaatcattgagaagaatg

SEQ ID NO: 120788 - DNA, 25 bp, Artificial
  Probe
ccttcaagaacacagagatcagctt

SEQ ID NO: 120789 - DNA, 25 bp, Artificial
  Probe
ttcaagaacacagagatcagctttc

SEQ ID NO: 120790 - DNA, 25 bp, Artificial
  Probe
cttcaagaacacagagatcagcttt

SEQ ID NO: 120791 - DNA, 25 bp, Artificial
  Probe
gccgaccacaatcattgagaagaat

SEQ ID NO: 120792 - DNA, 25 bp, Artificial
  Probe
caagaacacagagatcagctttcag

SEQ ID NO: 120793 - DNA, 25 bp, Artificial
  Probe
tcaagaacacagagatcagctttca

SEQ ID NO: 120794 - DNA, 25 bp, Artificial
  Probe
accttcaagaacacagagatcagct

SEQ ID NO: 120795 - DNA, 25 bp, Artificial
  Probe
gaccacaatcattgagaagaatggg

SEQ ID NO: 120796 - DNA, 25 bp, Artificial
  Probe
caagccgaccacaatcattgagaag

SEQ ID NO: 120797 - DNA, 25 bp, Artificial
  Probe
agccgaccacaatcattgagaagaa

SEQ ID NO: 120798 - DNA, 25 bp, Artificial
  Probe
aagccgaccacaatcattgagaaga

SEQ ID NO: 120799 - DNA, 25 bp, Artificial
  Probe
aactaagtgatgggaaactcatcct

SEQ ID NO: 120800 - DNA, 25 bp, Artificial
  Probe
gaaactcatcctgactctcacccat

SEQ ID NO: 120801 - DNA, 25 bp, Artificial
  Probe
ccaaggtcaataaagcagagccaag

SEQ ID NO: 120802 - DNA, 25 bp, Artificial
  Probe
ctaagtgatgggaaactcatcctga

SEQ ID NO: 120803 - DNA, 25 bp, Artificial
  Probe
taagtgatgggaaactcatcctgac

SEQ ID NO: 120804 - DNA, 25 bp, Artificial
  Probe
actaagtgatgggaaactcatcctg

SEQ ID NO: 120805 - DNA, 25 bp, Artificial
  Probe
gtttctcccctctgacgttttatat

SEQ ID NO: 120806 - DNA, 25 bp, Artificial
  Probe
tttctcccctctgacgttttatata

SEQ ID NO: 120807 - DNA, 25 bp, Artificial
  Probe
atgggaaactcatcctgactctcac

SEQ ID NO: 120808 - DNA, 25 bp, Artificial
  Probe
tgtttctcccctctgacgttttata

SEQ ID NO: 120809 - DNA, 25 bp, Artificial
  Probe
cacaatcattgagaagaatggggat

SEQ ID NO: 120810 - DNA, 25 bp, Artificial
  Probe
atgtttctcccctctgacgttttat

SEQ ID NO: 120811 - DNA, 25 bp, Artificial
  Probe
ttctcccctctgacgttttatataa

SEQ ID NO: 120812 - DNA, 25 bp, Artificial
  Probe
aagaacacagagatcagctttcagc

SEQ ID NO: 120813 - DNA, 25 bp, Artificial
  Probe
aagtgatgggaaactcatcctgact

SEQ ID NO: 120814 - DNA, 25 bp, Artificial
  Probe
catgtttctcccctctgacgtttta

SEQ ID NO: 120815 - DNA, 25 bp, Artificial
  Probe
gatgggaaactcatcctgactctca

SEQ ID NO: 120816 - DNA, 25 bp, Artificial
  Probe
tgatgggaaactcatcctgactctc

SEQ ID NO: 120817 - DNA, 25 bp, Artificial
  Probe
ccacaatcattgagaagaatgggga

SEQ ID NO: 120818 - DNA, 25 bp, Artificial
  Probe
gtgatgggaaactcatcctgactct

SEQ ID NO: 120819 - DNA, 25 bp, Artificial
  Probe
agtgatgggaaactcatcctgactc

SEQ ID NO: 120820 - DNA, 25 bp, Artificial
  Probe
accacaatcattgagaagaatgggg

SEQ ID NO: 120821 - DNA, 25 bp, Artificial
  Probe
aattctgaagttctgaacactgagg

SEQ ID NO: 120822 - DNA, 25 bp, Artificial
  Probe
attctgaagttctgaacactgagga

SEQ ID NO: 120823 - DNA, 25 bp, Artificial
  Probe
ttctgaagttctgaacactgaggag

SEQ ID NO: 120824 - DNA, 25 bp, Artificial
  Probe
ccgttagaactgtatttcacattcc

SEQ ID NO: 120825 - DNA, 25 bp, Artificial
  Probe
gtccgttagaactgtatttcacatt

SEQ ID NO: 120826 - DNA, 25 bp, Artificial
  Probe
cgttagaactgtatttcacattcct

SEQ ID NO: 120827 - DNA, 25 bp, Artificial
  Probe
tccgttagaactgtatttcacattc

SEQ ID NO: 120828 - DNA, 25 bp, Artificial
  Probe
cgtccgttagaactgtatttcacat

SEQ ID NO: 120829 - DNA, 25 bp, Artificial
  Probe
gaattctgaagttctgaacactgag

SEQ ID NO: 120830 - DNA, 25 bp, Artificial
  Probe
ggaattctgaagttctgaacactga

SEQ ID NO: 120831 - DNA, 25 bp, Artificial
  Probe
tctgaagttctgaacactgaggagg

SEQ ID NO: 120832 - DNA, 25 bp, Artificial
  Probe
atgccgtccgttagaactgtatttc

SEQ ID NO: 120833 - DNA, 25 bp, Artificial
  Probe
gttagaactgtatttcacattcctt

SEQ ID NO: 120834 - DNA, 25 bp, Artificial
  Probe
ccgtccgttagaactgtatttcaca

SEQ ID NO: 120835 - DNA, 25 bp, Artificial
  Probe
agttcctcctgaccctgttactaac

SEQ ID NO: 120836 - DNA, 25 bp, Artificial
  Probe
aacaagggaattctgaagttctgaa

SEQ ID NO: 120837 - DNA, 25 bp, Artificial
  Probe
ctgcaaaccctacccagaatatttc

SEQ ID NO: 120838 - DNA, 25 bp, Artificial
  Probe
cagttcctcctgaccctgttactaa

SEQ ID NO: 120839 - DNA, 25 bp, Artificial
  Probe
aagggaattctgaagttctgaacac

SEQ ID NO: 120840 - DNA, 25 bp, Artificial
  Probe
caagggaattctgaagttctgaaca

SEQ ID NO: 120841 - DNA, 25 bp, Artificial
  Probe
acaagggaattctgaagttctgaac

SEQ ID NO: 120842 - DNA, 25 bp, Artificial
  Probe
caacaagggaattctgaagttctga

SEQ ID NO: 120843 - DNA, 25 bp, Artificial
  Probe
tgaagtgagcatcccctgttttata

SEQ ID NO: 120844 - DNA, 25 bp, Artificial
  Probe
catgccgtccgttagaactgtattt

SEQ ID NO: 120845 - DNA, 25 bp, Artificial
  Probe
agcatcccctgttttataagtgaag

SEQ ID NO: 120846 - DNA, 25 bp, Artificial
  Probe
gagcatcccctgttttataagtgaa

SEQ ID NO: 120847 - DNA, 25 bp, Artificial
  Probe
aagtgagcatcccctgttttataag

SEQ ID NO: 120848 - DNA, 25 bp, Artificial
  Probe
gaagtgagcatcccctgttttataa

SEQ ID NO: 120849 - DNA, 25 bp, Artificial
  Probe
tgcaaaccctacccagaatatttcc

SEQ ID NO: 120850 - DNA, 25 bp, Artificial
  Probe
gccgtccgttagaactgtatttcac

SEQ ID NO: 120851 - DNA, 25 bp, Artificial
  Probe
agaactgtatttcacattccttaat

SEQ ID NO: 120852 - DNA, 25 bp, Artificial
  Probe
gggaattctgaagttctgaacactg

SEQ ID NO: 120853 - DNA, 25 bp, Artificial
  Probe
agggaattctgaagttctgaacact

SEQ ID NO: 120854 - DNA, 25 bp, Artificial
  Probe
tcccctgttttataagtgaagctat

SEQ ID NO: 120855 - DNA, 25 bp, Artificial
  Probe
atcccctgttttataagtgaagcta

SEQ ID NO: 120856 - DNA, 25 bp, Artificial
  Probe
catcccctgttttataagtgaagct

SEQ ID NO: 120857 - DNA, 25 bp, Artificial
  Probe
gtgagcatcccctgttttataagtg

SEQ ID NO: 120858 - DNA, 25 bp, Artificial
  Probe
tgagcatcccctgttttataagtga

SEQ ID NO: 120859 - DNA, 25 bp, Artificial
  Probe
agtgagcatcccctgttttataagt

SEQ ID NO: 120860 - DNA, 25 bp, Artificial
  Probe
cccctgttttataagtgaagctatt

SEQ ID NO: 120861 - DNA, 25 bp, Artificial
  Probe
ctgaagtgagcatcccctgttttat

SEQ ID NO: 120862 - DNA, 25 bp, Artificial
  Probe
caaaccctacccagaatatttccgc

SEQ ID NO: 120863 - DNA, 25 bp, Artificial
  Probe
gcaaaccctacccagaatatttccg

SEQ ID NO: 120864 - DNA, 25 bp, Artificial
  Probe
tgccgtccgttagaactgtatttca

SEQ ID NO: 120865 - DNA, 25 bp, Artificial
  Probe
gcaacaagggaattctgaagttctg

SEQ ID NO: 120866 - DNA, 25 bp, Artificial
  Probe
ataacgaggagaccatcaagaagag

SEQ ID NO: 120867 - DNA, 25 bp, Artificial
  Probe
gataacgaggagaccatcaagaaga

SEQ ID NO: 120868 - DNA, 25 bp, Artificial
  Probe
cgataacgaggagaccatcaagaag

SEQ ID NO: 120869 - DNA, 25 bp, Artificial
  Probe
ctatcttgactccctgaagtaactg

SEQ ID NO: 120870 - DNA, 25 bp, Artificial
  Probe
taacgaggagaccatcaagaagagg

SEQ ID NO: 120871 - DNA, 25 bp, Artificial
  Probe
cctatcttgactccctgaagtaact

SEQ ID NO: 120872 - DNA, 25 bp, Artificial
  Probe
catggacatttgagcactaaagaaa

SEQ ID NO: 120873 - DNA, 25 bp, Artificial
  Probe
acgataacgaggagaccatcaagaa

SEQ ID NO: 120874 - DNA, 25 bp, Artificial
  Probe
tatcttgactccctgaagtaactgg

SEQ ID NO: 120875 - DNA, 25 bp, Artificial
  Probe
acctatcttgactccctgaagtaac

SEQ ID NO: 120876 - DNA, 25 bp, Artificial
  Probe
tggacatttgagcactaaagaaatt

SEQ ID NO: 120877 - DNA, 25 bp, Artificial
  Probe
ggacatttgagcactaaagaaattg

SEQ ID NO: 120878 - DNA, 25 bp, Artificial
  Probe
atggacatttgagcactaaagaaat

SEQ ID NO: 120879 - DNA, 25 bp, Artificial
  Probe
gacgataacgaggagaccatcaaga

SEQ ID NO: 120880 - DNA, 25 bp, Artificial
  Probe
ggacgataacgaggagaccatcaag

SEQ ID NO: 120881 - DNA, 25 bp, Artificial
  Probe
cttgactccctgaagtaactggatc

SEQ ID NO: 120882 - DNA, 25 bp, Artificial
  Probe
atttgagcactaaagaaattgccaa

SEQ ID NO: 120883 - DNA, 25 bp, Artificial
  Probe
gacatttgagcactaaagaaattgc

SEQ ID NO: 120884 - DNA, 25 bp, Artificial
  Probe
tcttgactccctgaagtaactggat

SEQ ID NO: 120885 - DNA, 25 bp, Artificial
  Probe
atcttgactccctgaagtaactgga

SEQ ID NO: 120886 - DNA, 25 bp, Artificial
  Probe
tttgagcactaaagaaattgccaag

SEQ ID NO: 120887 - DNA, 25 bp, Artificial
  Probe
catttgagcactaaagaaattgcca

SEQ ID NO: 120888 - DNA, 25 bp, Artificial
  Probe
acatttgagcactaaagaaattgcc

SEQ ID NO: 120889 - DNA, 25 bp, Artificial
  Probe
ttgagcactaaagaaattgccaagg

SEQ ID NO: 120890 - DNA, 25 bp, Artificial
  Probe
tggacgataacgaggagaccatcaa

SEQ ID NO: 120891 - DNA, 25 bp, Artificial
  Probe
ccatggacatttgagcactaaagaa

SEQ ID NO: 120892 - DNA, 25 bp, Artificial
  Probe
cccatggacatttgagcactaaaga

SEQ ID NO: 120893 - DNA, 25 bp, Artificial
  Probe
tcccatggacatttgagcactaaag

SEQ ID NO: 120894 - DNA, 25 bp, Artificial
  Probe
ttgactccctgaagtaactggatcc

SEQ ID NO: 120895 - DNA, 25 bp, Artificial
  Probe
actccctgaagtaactggatccctc

SEQ ID NO: 120896 - DNA, 25 bp, Artificial
  Probe
gactccctgaagtaactggatccct

SEQ ID NO: 120897 - DNA, 25 bp, Artificial
  Probe
tgactccctgaagtaactggatccc

SEQ ID NO: 120898 - DNA, 25 bp, Artificial
  Probe
gtcccatggacatttgagcactaaa

SEQ ID NO: 120899 - DNA, 25 bp, Artificial
  Probe
caccattgaagaggtcgattaagtc

SEQ ID NO: 120900 - DNA, 25 bp, Artificial
  Probe
agaggtcgattaagtcaaagtagag

SEQ ID NO: 120901 - DNA, 25 bp, Artificial
  Probe
gaggtcgattaagtcaaagtagagg

SEQ ID NO: 120902 - DNA, 25 bp, Artificial
  Probe
accattgaagaggtcgattaagtca

SEQ ID NO: 120903 - DNA, 25 bp, Artificial
  Probe
aagaggtcgattaagtcaaagtaga

SEQ ID NO: 120904 - DNA, 25 bp, Artificial
  Probe
gaagaggtcgattaagtcaaagtag

SEQ ID NO: 120905 - DNA, 25 bp, Artificial
  Probe
tgaagaggtcgattaagtcaaagta

SEQ ID NO: 120906 - DNA, 25 bp, Artificial
  Probe
aggtcgattaagtcaaagtagaggg

SEQ ID NO: 120907 - DNA, 25 bp, Artificial
  Probe
ccattgaagaggtcgattaagtcaa

SEQ ID NO: 120908 - DNA, 25 bp, Artificial
  Probe
ggtcgattaagtcaaagtagagggt

SEQ ID NO: 120909 - DNA, 25 bp, Artificial
  Probe
ccaccattgaagaggtcgattaagt

SEQ ID NO: 120910 - DNA, 25 bp, Artificial
  Probe
ttgaagaggtcgattaagtcaaagt

SEQ ID NO: 120911 - DNA, 25 bp, Artificial
  Probe
cattgaagaggtcgattaagtcaaa

SEQ ID NO: 120912 - DNA, 25 bp, Artificial
  Probe
attgaagaggtcgattaagtcaaag

SEQ ID NO: 120913 - DNA, 25 bp, Artificial
  Probe
cgaaagtgaggcgttaaaatactgg

SEQ ID NO: 120914 - DNA, 25 bp, Artificial
  Probe
gaaagtgaggcgttaaaatactggc

SEQ ID NO: 120915 - DNA, 25 bp, Artificial
  Probe
cccaccattgaagaggtcgattaag

SEQ ID NO: 120916 - DNA, 25 bp, Artificial
  Probe
gcgaaagtgaggcgttaaaatactg

SEQ ID NO: 120917 - DNA, 25 bp, Artificial
  Probe
gttaaaatactggcggcgtgtaaac

SEQ ID NO: 120918 - DNA, 25 bp, Artificial
  Probe
ttcccaagtaacgctggagaaactc

SEQ ID NO: 120919 - DNA, 25 bp, Artificial
  Probe
aaagtgaggcgttaaaatactggcg

SEQ ID NO: 120920 - DNA, 25 bp, Artificial
  Probe
cgttaaaatactggcggcgtgtaaa

SEQ ID NO: 120921 - DNA, 25 bp, Artificial
  Probe
gaaagaaaagccgaaatagctccag

SEQ ID NO: 120922 - DNA, 25 bp, Artificial
  Probe
gttcccaagtaacgctggagaaact

SEQ ID NO: 120923 - DNA, 25 bp, Artificial
  Probe
ggaaagaaaagccgaaatagctcca

SEQ ID NO: 120924 - DNA, 25 bp, Artificial
  Probe
ccaaaacaagtaacatggaataata

SEQ ID NO: 120925 - DNA, 25 bp, Artificial
  Probe
ccccaccattgaagaggtcgattaa

SEQ ID NO: 120926 - DNA, 25 bp, Artificial
  Probe
aagtaacgctggagaaactccctag

SEQ ID NO: 120927 - DNA, 25 bp, Artificial
  Probe
gggaaagaaaagccgaaatagctcc

SEQ ID NO: 120928 - DNA, 25 bp, Artificial
  Probe
ggggaaagaaaagccgaaatagctc

SEQ ID NO: 120929 - DNA, 25 bp, Artificial
  Probe
ttaaaatactggcggcgtgtaaacg

SEQ ID NO: 120930 - DNA, 25 bp, Artificial
  Probe
caagtaacgctggagaaactcccta

SEQ ID NO: 120931 - DNA, 25 bp, Artificial
  Probe
cgcgaaagtgaggcgttaaaatact

SEQ ID NO: 120932 - DNA, 25 bp, Artificial
  Probe
cttagagatgacaaggctgcttatc

SEQ ID NO: 120933 - DNA, 25 bp, Artificial
  Probe
ccagtcaggaatgtaatgtgaagta

SEQ ID NO: 120934 - DNA, 25 bp, Artificial
  Probe
gacgagtacaagagagtgagatatg

SEQ ID NO: 120935 - DNA, 25 bp, Artificial
  Probe
agacgagtacaagagagtgagatat

SEQ ID NO: 120936 - DNA, 25 bp, Artificial
  Probe
tcttagagatgacaaggctgcttat

SEQ ID NO: 120937 - DNA, 25 bp, Artificial
  Probe
gagacgagtacaagagagtgagata

SEQ ID NO: 120938 - DNA, 25 bp, Artificial
  Probe
agtcaggaatgtaatgtgaagtacc

SEQ ID NO: 120939 - DNA, 25 bp, Artificial
  Probe
tagagatgacaaggctgcttatcaa

SEQ ID NO: 120940 - DNA, 25 bp, Artificial
  Probe
ttagagatgacaaggctgcttatca

SEQ ID NO: 120941 - DNA, 25 bp, Artificial
  Probe
cagtcaggaatgtaatgtgaagtac

SEQ ID NO: 120942 - DNA, 25 bp, Artificial
  Probe
acgagtacaagagagtgagatatgc

SEQ ID NO: 120943 - DNA, 25 bp, Artificial
  Probe
tacaagcaatagcacagtccttcat

SEQ ID NO: 120944 - DNA, 25 bp, Artificial
  Probe
gtcaggaatgtaatgtgaagtaccg

SEQ ID NO: 120945 - DNA, 25 bp, Artificial
  Probe
gtcatctccagtcaggaatgtaatg

SEQ ID NO: 120946 - DNA, 25 bp, Artificial
  Probe
ctccagtcaggaatgtaatgtgaag

SEQ ID NO: 120947 - DNA, 25 bp, Artificial
  Probe
atctccagtcaggaatgtaatgtga

SEQ ID NO: 120948 - DNA, 25 bp, Artificial
  Probe
catctccagtcaggaatgtaatgtg

SEQ ID NO: 120949 - DNA, 25 bp, Artificial
  Probe
tcatctccagtcaggaatgtaatgt

SEQ ID NO: 120950 - DNA, 25 bp, Artificial
  Probe
tctccagtcaggaatgtaatgtgaa

SEQ ID NO: 120951 - DNA, 25 bp, Artificial
  Probe
tccagtcaggaatgtaatgtgaagt

SEQ ID NO: 120952 - DNA, 25 bp, Artificial
  Probe
ctcttagagatgacaaggctgctta

SEQ ID NO: 120953 - DNA, 25 bp, Artificial
  Probe
gacaaggctgcttatcaaactaaag

SEQ ID NO: 120954 - DNA, 25 bp, Artificial
  Probe
ggtcatctccagtcaggaatgtaat

SEQ ID NO: 120955 - DNA, 25 bp, Artificial
  Probe
ggagacgagtacaagagagtgagat

SEQ ID NO: 120956 - DNA, 25 bp, Artificial
  Probe
gtgaatccaaaggtacaagcaatag

SEQ ID NO: 120957 - DNA, 25 bp, Artificial
  Probe
cgagtacaagagagtgagatatgca

SEQ ID NO: 120958 - DNA, 25 bp, Artificial
  Probe
atgacaaggctgcttatcaaactaa

SEQ ID NO: 120959 - DNA, 25 bp, Artificial
  Probe
tgacaaggctgcttatcaaactaaa

SEQ ID NO: 120960 - DNA, 25 bp, Artificial
  Probe
gatgacaaggctgcttatcaaacta

SEQ ID NO: 120961 - DNA, 25 bp, Artificial
  Probe
gagtacaagagagtgagatatgcac

SEQ ID NO: 120962 - DNA, 25 bp, Artificial
  Probe
ggtgaatccaaaggtacaagcaata

SEQ ID NO: 120963 - DNA, 25 bp, Artificial
  Probe
gtacaagcaatagcacagtccttca

SEQ ID NO: 120964 - DNA, 25 bp, Artificial
  Probe
aggtcatctccagtcaggaatgtaa

SEQ ID NO: 120965 - DNA, 25 bp, Artificial
  Probe
aaggtcatctccagtcaggaatgta

SEQ ID NO: 120966 - DNA, 25 bp, Artificial
  Probe
gatttgcctacctcctgaacagtat

SEQ ID NO: 120967 - DNA, 25 bp, Artificial
  Probe
gaatccaaaggtacaagcaatagca

SEQ ID NO: 120968 - DNA, 25 bp, Artificial
  Probe
tgaatccaaaggtacaagcaatagc

SEQ ID NO: 120969 - DNA, 25 bp, Artificial
  Probe
aatccaaaggtacaagcaatagcac

SEQ ID NO: 120970 - DNA, 25 bp, Artificial
  Probe
gaatgtaatgtgaagtaccggagac

SEQ ID NO: 120971 - DNA, 25 bp, Artificial
  Probe
atttgcctacctcctgaacagtatg

SEQ ID NO: 120972 - DNA, 25 bp, Artificial
  Probe
agtacaagagagtgagatatgcacc

SEQ ID NO: 120973 - DNA, 25 bp, Artificial
  Probe
gagatgacaaggctgcttatcaaac

SEQ ID NO: 120974 - DNA, 25 bp, Artificial
  Probe
agagatgacaaggctgcttatcaaa

SEQ ID NO: 120975 - DNA, 25 bp, Artificial
  Probe
agatgacaaggctgcttatcaaact

SEQ ID NO: 120976 - DNA, 25 bp, Artificial
  Probe
gtctgtgtttgtggactggattaac

SEQ ID NO: 120977 - DNA, 25 bp, Artificial
  Probe
gcacaagcaccaattatgactaacc

SEQ ID NO: 120978 - DNA, 25 bp, Artificial
  Probe
aagcaccaattatgactaacccatt

SEQ ID NO: 120979 - DNA, 25 bp, Artificial
  Probe
caagcaccaattatgactaacccat

SEQ ID NO: 120980 - DNA, 25 bp, Artificial
  Probe
tgtgtatatgaattatgtgggcatt

SEQ ID NO: 120981 - DNA, 25 bp, Artificial
  Probe
atgtgtatatgaattatgtgggcat

SEQ ID NO: 120982 - DNA, 25 bp, Artificial
  Probe
tatgtgtatatgaattatgtgggca

SEQ ID NO: 120983 - DNA, 25 bp, Artificial
  Probe
cacaagcaccaattatgactaaccc

SEQ ID NO: 120984 - DNA, 25 bp, Artificial
  Probe
acaagcaccaattatgactaaccca

SEQ ID NO: 120985 - DNA, 25 bp, Artificial
  Probe
tgaattatgtgggcattcttgatac

SEQ ID NO: 120986 - DNA, 25 bp, Artificial
  Probe
gaattatgtgggcattcttgatact

SEQ ID NO: 120987 - DNA, 25 bp, Artificial
  Probe
atgaattatgtgggcattcttgata

SEQ ID NO: 120988 - DNA, 25 bp, Artificial
  Probe
tatgaattatgtgggcattcttgat

SEQ ID NO: 120989 - DNA, 25 bp, Artificial
  Probe
atatgaattatgtgggcattcttga

SEQ ID NO: 120990 - DNA, 25 bp, Artificial
  Probe
caccaattatgactaacccattgag

SEQ ID NO: 120991 - DNA, 25 bp, Artificial
  Probe
gtgtatatgaattatgtgggcattc

SEQ ID NO: 120992 - DNA, 25 bp, Artificial
  Probe
tgtatatgaattatgtgggcattct

SEQ ID NO: 120993 - DNA, 25 bp, Artificial
  Probe
gcaccaattatgactaacccattga

SEQ ID NO: 120994 - DNA, 25 bp, Artificial
  Probe
agcaccaattatgactaacccattg

SEQ ID NO: 120995 - DNA, 25 bp, Artificial
  Probe
atgcacaagcaccaattatgactaa

SEQ ID NO: 120996 - DNA, 25 bp, Artificial
  Probe
atatgtgtatatgaattatgtgggc

SEQ ID NO: 120997 - DNA, 25 bp, Artificial
  Probe
gatgcacaagcaccaattatgacta

SEQ ID NO: 120998 - DNA, 25 bp, Artificial
  Probe
tgcacaagcaccaattatgactaac

SEQ ID NO: 120999 - DNA, 25 bp, Artificial
  Probe
tatatgaattatgtgggcattcttg

SEQ ID NO: 121000 - DNA, 25 bp, Artificial
  Probe
gtatatgaattatgtgggcattctt

SEQ ID NO: 121001 - DNA, 25 bp, Artificial
  Probe
atgatgcacaagcaccaattatgac

SEQ ID NO: 121002 - DNA, 25 bp, Artificial
  Probe
catgatgcacaagcaccaattatga

SEQ ID NO: 121003 - DNA, 25 bp, Artificial
  Probe
acttaattgttgtatatggttgtac

SEQ ID NO: 121004 - DNA, 25 bp, Artificial
  Probe
tgatgcacaagcaccaattatgact

SEQ ID NO: 121005 - DNA, 25 bp, Artificial
  Probe
ccaacttaattgttgtatatggttg

SEQ ID NO: 121006 - DNA, 25 bp, Artificial
  Probe
gcatgatgcacaagcaccaattatg

SEQ ID NO: 121007 - DNA, 25 bp, Artificial
  Probe
caacttaattgttgtatatggttgt

SEQ ID NO: 121008 - DNA, 25 bp, Artificial
  Probe
ggagtcagattcctgattttaggat

SEQ ID NO: 121009 - DNA, 25 bp, Artificial
  Probe
agtcagattcctgattttaggatgc

SEQ ID NO: 121010 - DNA, 25 bp, Artificial
  Probe
aggagtcagattcctgattttagga

SEQ ID NO: 121011 - DNA, 25 bp, Artificial
  Probe
taggagtcagattcctgattttagg

SEQ ID NO: 121012 - DNA, 25 bp, Artificial
  Probe
tagcctaggagtcagattcctgatt

SEQ ID NO: 121013 - DNA, 25 bp, Artificial
  Probe
gagtcagattcctgattttaggatg

SEQ ID NO: 121014 - DNA, 25 bp, Artificial
  Probe
ctaggagtcagattcctgattttag

SEQ ID NO: 121015 - DNA, 25 bp, Artificial
  Probe
gtagcctaggagtcagattcctgat

SEQ ID NO: 121016 - DNA, 25 bp, Artificial
  Probe
gaatcatagatgttttgcatgatgc

SEQ ID NO: 121017 - DNA, 25 bp, Artificial
  Probe
ggaatcatagatgttttgcatgatg

SEQ ID NO: 121018 - DNA, 25 bp, Artificial
  Probe
agcctaggagtcagattcctgattt

SEQ ID NO: 121019 - DNA, 25 bp, Artificial
  Probe
ggtagcctaggagtcagattcctga

SEQ ID NO: 121020 - DNA, 25 bp, Artificial
  Probe
cctaggagtcagattcctgatttta

SEQ ID NO: 121021 - DNA, 25 bp, Artificial
  Probe
gcctaggagtcagattcctgatttt

SEQ ID NO: 121022 - DNA, 25 bp, Artificial
  Probe
ctaggagagagatgatgcttcttgg

SEQ ID NO: 121023 - DNA, 25 bp, Artificial
  Probe
aatcttcctctggatgttcatcatt

SEQ ID NO: 121024 - DNA, 25 bp, Artificial
  Probe
gaatcttcctctggatgttcatcat

SEQ ID NO: 121025 - DNA, 25 bp, Artificial
  Probe
atcttcctctggatgttcatcattg

SEQ ID NO: 121026 - DNA, 25 bp, Artificial
  Probe
gatgttcatcattgtctgccttctg

SEQ ID NO: 121027 - DNA, 25 bp, Artificial
  Probe
cattaaagtttctccagagcaagtg

SEQ ID NO: 121028 - DNA, 25 bp, Artificial
  Probe
cttcctctggatgttcatcattgtc

SEQ ID NO: 121029 - DNA, 25 bp, Artificial
  Probe
ccattaaagtttctccagagcaagt

SEQ ID NO: 121030 - DNA, 25 bp, Artificial
  Probe
ttcctctggatgttcatcattgtct

SEQ ID NO: 121031 - DNA, 25 bp, Artificial
  Probe
tcttcctctggatgttcatcattgt

SEQ ID NO: 121032 - DNA, 25 bp, Artificial
  Probe
cccattaaagtttctccagagcaag

SEQ ID NO: 121033 - DNA, 25 bp, Artificial
  Probe
atgttcatcattgtctgccttctgg

SEQ ID NO: 121034 - DNA, 25 bp, Artificial
  Probe
ggatgttcatcattgtctgccttct

SEQ ID NO: 121035 - DNA, 25 bp, Artificial
  Probe
tcctctggatgttcatcattgtctg

SEQ ID NO: 121036 - DNA, 25 bp, Artificial
  Probe
cgaatcttcctctggatgttcatca

SEQ ID NO: 121037 - DNA, 25 bp, Artificial
  Probe
tggatgttcatcattgtctgccttc

SEQ ID NO: 121038 - DNA, 25 bp, Artificial
  Probe
ctggatgttcatcattgtctgcctt

SEQ ID NO: 121039 - DNA, 25 bp, Artificial
  Probe
attaaagtttctccagagcaagtgg

SEQ ID NO: 121040 - DNA, 25 bp, Artificial
  Probe
cattgaccgaatcttcctctggatg

SEQ ID NO: 121041 - DNA, 25 bp, Artificial
  Probe
tcattgaccgaatcttcctctggat

SEQ ID NO: 121042 - DNA, 25 bp, Artificial
  Probe
gttggagagaaatgagggctgatac

SEQ ID NO: 121043 - DNA, 25 bp, Artificial
  Probe
gagagatgatgcttcttgggagatg

SEQ ID NO: 121044 - DNA, 25 bp, Artificial
  Probe
gagagaaatgagggctgatacagtt

SEQ ID NO: 121045 - DNA, 25 bp, Artificial
  Probe
ctctggatgttcatcattgtctgcc

SEQ ID NO: 121046 - DNA, 25 bp, Artificial
  Probe
cctctggatgttcatcattgtctgc

SEQ ID NO: 121047 - DNA, 25 bp, Artificial
  Probe
ccgaatcttcctctggatgttcatc

SEQ ID NO: 121048 - DNA, 25 bp, Artificial
  Probe
ctctcatgctgtgggatcaataaga

SEQ ID NO: 121049 - DNA, 25 bp, Artificial
  Probe
atcaataagaccaggaatctcccac

SEQ ID NO: 121050 - DNA, 25 bp, Artificial
  Probe
agagagatgatgcttcttgggagat

SEQ ID NO: 121051 - DNA, 25 bp, Artificial
  Probe
agagaaatgagggctgatacagttg

SEQ ID NO: 121052 - DNA, 25 bp, Artificial
  Probe
tctcatgctgtgggatcaataagac

SEQ ID NO: 121053 - DNA, 25 bp, Artificial
  Probe
gatcaataagaccaggaatctccca

SEQ ID NO: 121054 - DNA, 25 bp, Artificial
  Probe
ttggagagaaatgagggctgataca

SEQ ID NO: 121055 - DNA, 25 bp, Artificial
  Probe
accgaatcttcctctggatgttcat

SEQ ID NO: 121056 - DNA, 25 bp, Artificial
  Probe
attgaccgaatcttcctctggatgt

SEQ ID NO: 121057 - DNA, 25 bp, Artificial
  Probe
tgggatcaataagaccaggaatctc

SEQ ID NO: 121058 - DNA, 25 bp, Artificial
  Probe
taggagagagatgatgcttcttggg

SEQ ID NO: 121059 - DNA, 25 bp, Artificial
  Probe
tctggatgttcatcattgtctgcct

SEQ ID NO: 121060 - DNA, 25 bp, Artificial
  Probe
aattcatccaccttgaggaaccaga

SEQ ID NO: 121061 - DNA, 25 bp, Artificial
  Probe
gtgggatcaataagaccaggaatct

SEQ ID NO: 121062 - DNA, 25 bp, Artificial
  Probe
cctctcatgctgtgggatcaataag

SEQ ID NO: 121063 - DNA, 25 bp, Artificial
  Probe
ttgaccgaatcttcctctggatgtt

SEQ ID NO: 121064 - DNA, 25 bp, Artificial
  Probe
ggatcaataagaccaggaatctccc

SEQ ID NO: 121065 - DNA, 25 bp, Artificial
  Probe
gggatcaataagaccaggaatctcc

SEQ ID NO: 121066 - DNA, 25 bp, Artificial
  Probe
tgtgggatcaataagaccaggaatc

SEQ ID NO: 121067 - DNA, 25 bp, Artificial
  Probe
taaacctggaaatgagagagagaag

SEQ ID NO: 121068 - DNA, 25 bp, Artificial
  Probe
aaatgagagagagaagtttggtttg

SEQ ID NO: 121069 - DNA, 25 bp, Artificial
  Probe
ggaaatgagagagagaagtttggtt

SEQ ID NO: 121070 - DNA, 25 bp, Artificial
  Probe
gaaatgagagagagaagtttggttt

SEQ ID NO: 121071 - DNA, 25 bp, Artificial
  Probe
gaaaccaattaagaagacaaagcct

SEQ ID NO: 121072 - DNA, 25 bp, Artificial
  Probe
tgaaaccaattaagaagacaaagcc

SEQ ID NO: 121073 - DNA, 25 bp, Artificial
  Probe
ttaaacctggaaatgagagagagaa

SEQ ID NO: 121074 - DNA, 25 bp, Artificial
  Probe
ctggaaatgagagagagaagtttgg

SEQ ID NO: 121075 - DNA, 25 bp, Artificial
  Probe
cctggaaatgagagagagaagtttg

SEQ ID NO: 121076 - DNA, 25 bp, Artificial
  Probe
agtttggtttgctgtctatgcttaa

SEQ ID NO: 121077 - DNA, 25 bp, Artificial
  Probe
aaacctggaaatgagagagagaagt

SEQ ID NO: 121078 - DNA, 25 bp, Artificial
  Probe
acctggaaatgagagagagaagttt

SEQ ID NO: 121079 - DNA, 25 bp, Artificial
  Probe
aagtttggtttgctgtctatgctta

SEQ ID NO: 121080 - DNA, 25 bp, Artificial
  Probe
aaaccaattaagaagacaaagccta

SEQ ID NO: 121081 - DNA, 25 bp, Artificial
  Probe
gagagaagtttggtttgctgtctat

SEQ ID NO: 121082 - DNA, 25 bp, Artificial
  Probe
aatgagagagagaagtttggtttgc

SEQ ID NO: 121083 - DNA, 25 bp, Artificial
  Probe
aaccaattaagaagacaaagcctag

SEQ ID NO: 121084 - DNA, 25 bp, Artificial
  Probe
tggaaatgagagagagaagtttggt

SEQ ID NO: 121085 - DNA, 25 bp, Artificial
  Probe
agagaagtttggtttgctgtctatg

SEQ ID NO: 121086 - DNA, 25 bp, Artificial
  Probe
aacctggaaatgagagagagaagtt

SEQ ID NO: 121087 - DNA, 25 bp, Artificial
  Probe
atgaaaccaattaagaagacaaagc

SEQ ID NO: 121088 - DNA, 25 bp, Artificial
  Probe
ccgaacaggagtccttactgatatt

SEQ ID NO: 121089 - DNA, 25 bp, Artificial
  Probe
atgagagagagaagtttggtttgct

SEQ ID NO: 121090 - DNA, 25 bp, Artificial
  Probe
agagagaagtttggtttgctgtcta

SEQ ID NO: 121091 - DNA, 25 bp, Artificial
  Probe
gaagtttggtttgctgtctatgctt

SEQ ID NO: 121092 - DNA, 25 bp, Artificial
  Probe
ttatgctgctttaaacctggaaatg

SEQ ID NO: 121093 - DNA, 25 bp, Artificial
  Probe
tttaaacctggaaatgagagagaga

SEQ ID NO: 121094 - DNA, 25 bp, Artificial
  Probe
gctttaaacctggaaatgagagaga

SEQ ID NO: 121095 - DNA, 25 bp, Artificial
  Probe
ctttaaacctggaaatgagagagag

SEQ ID NO: 121096 - DNA, 25 bp, Artificial
  Probe
tatgctgctttaaacctggaaatga

SEQ ID NO: 121097 - DNA, 25 bp, Artificial
  Probe
tgctttaaacctggaaatgagagag

SEQ ID NO: 121098 - DNA, 25 bp, Artificial
  Probe
ctgctttaaacctggaaatgagaga

SEQ ID NO: 121099 - DNA, 25 bp, Artificial
  Probe
tttatgctgctttaaacctggaaat

SEQ ID NO: 121100 - DNA, 25 bp, Artificial
  Probe
gagaagtttggtttgctgtctatgc

SEQ ID NO: 121101 - DNA, 25 bp, Artificial
  Probe
gcctacacaacagccatgaaatatt

SEQ ID NO: 121102 - DNA, 25 bp, Artificial
  Probe
cgaacaggagtccttactgatattt

SEQ ID NO: 121103 - DNA, 25 bp, Artificial
  Probe
agagagagaagtttggtttgctgtc

SEQ ID NO: 121104 - DNA, 25 bp, Artificial
  Probe
gagagagagaagtttggtttgctgt

SEQ ID NO: 121105 - DNA, 25 bp, Artificial
  Probe
tgagagagagaagtttggtttgctg

SEQ ID NO: 121106 - DNA, 25 bp, Artificial
  Probe
agaagtttggtttgctgtctatgct

SEQ ID NO: 121107 - DNA, 25 bp, Artificial
  Probe
gagagagaagtttggtttgctgtct

SEQ ID NO: 121108 - DNA, 25 bp, Artificial
  Probe
atgctgctttaaacctggaaatgag

SEQ ID NO: 121109 - DNA, 25 bp, Artificial
  Probe
gtttggtttgctgtctatgcttaag

SEQ ID NO: 121110 - DNA, 25 bp, Artificial
  Probe
tctgaaatccatagactaagagaaa

SEQ ID NO: 121111 - DNA, 25 bp, Artificial
  Probe
gctgctttaaacctggaaatgagag

SEQ ID NO: 121112 - DNA, 25 bp, Artificial
  Probe
agtgaaggttatccaagagaaatga

SEQ ID NO: 121113 - DNA, 25 bp, Artificial
  Probe
gagtgaaggttatccaagagaaatg

SEQ ID NO: 121114 - DNA, 25 bp, Artificial
  Probe
cgagtgaaggttatccaagagaaat

SEQ ID NO: 121115 - DNA, 25 bp, Artificial
  Probe
gttatccaagagaaatgaagagacc

SEQ ID NO: 121116 - DNA, 25 bp, Artificial
  Probe
ggttatccaagagaaatgaagagac

SEQ ID NO: 121117 - DNA, 25 bp, Artificial
  Probe
ttatccaagagaaatgaagagacct

SEQ ID NO: 121118 - DNA, 25 bp, Artificial
  Probe
aggttatccaagagaaatgaagaga

SEQ ID NO: 121119 - DNA, 25 bp, Artificial
  Probe
gtgaaggttatccaagagaaatgaa

SEQ ID NO: 121120 - DNA, 25 bp, Artificial
  Probe
tgaaggttatccaagagaaatgaag

SEQ ID NO: 121121 - DNA, 25 bp, Artificial
  Probe
tcttcttggagagtacgatgaatgc

SEQ ID NO: 121122 - DNA, 25 bp, Artificial
  Probe
atccttgcagcttgtaacatatcaa

SEQ ID NO: 121123 - DNA, 25 bp, Artificial
  Probe
catccttgcagcttgtaacatatca

SEQ ID NO: 121124 - DNA, 25 bp, Artificial
  Probe
aaggttatccaagagaaatgaagag

SEQ ID NO: 121125 - DNA, 25 bp, Artificial
  Probe
gaaggttatccaagagaaatgaaga

SEQ ID NO: 121126 - DNA, 25 bp, Artificial
  Probe
tatccaagagaaatgaagagacctc

SEQ ID NO: 121127 - DNA, 25 bp, Artificial
  Probe
acatccttgcagcttgtaacatatc

SEQ ID NO: 121128 - DNA, 25 bp, Artificial
  Probe
gacatccttgcagcttgtaacatat

SEQ ID NO: 121129 - DNA, 25 bp, Artificial
  Probe
ccgagtgaaggttatccaagagaaa

SEQ ID NO: 121130 - DNA, 25 bp, Artificial
  Probe
gagaaatgaagagacctctaaccag

SEQ ID NO: 121131 - DNA, 25 bp, Artificial
  Probe
tttcatcttcactgagtatctgtgc

SEQ ID NO: 121132 - DNA, 25 bp, Artificial
  Probe
cttcttggagagtacgatgaatgcc

SEQ ID NO: 121133 - DNA, 25 bp, Artificial
  Probe
gagagtacgatgaatgcctgttgtc

SEQ ID NO: 121134 - DNA, 25 bp, Artificial
  Probe
ttcatcttcactgagtatctgtgca

SEQ ID NO: 121135 - DNA, 25 bp, Artificial
  Probe
ttcttggagagtacgatgaatgcct

SEQ ID NO: 121136 - DNA, 25 bp, Artificial
  Probe
agaaatgaagagacctctaaccagc

SEQ ID NO: 121137 - DNA, 25 bp, Artificial
  Probe
ctcttcttggagagtacgatgaatg

SEQ ID NO: 121138 - DNA, 25 bp, Artificial
  Probe
tcatcttcactgagtatctgtgcag

SEQ ID NO: 121139 - DNA, 25 bp, Artificial
  Probe
tctcttcttggagagtacgatgaat

SEQ ID NO: 121140 - DNA, 25 bp, Artificial
  Probe
tcacacaagcatgagcagcattatt

SEQ ID NO: 121141 - DNA, 25 bp, Artificial
  Probe
ttcacacaagcatgagcagcattat

SEQ ID NO: 121142 - DNA, 25 bp, Artificial
  Probe
aatgaagagacctctaaccagcctc

SEQ ID NO: 121143 - DNA, 25 bp, Artificial
  Probe
ttggagagtacgatgaatgcctgtt

SEQ ID NO: 121144 - DNA, 25 bp, Artificial
  Probe
gccgagtgaaggttatccaagagaa

SEQ ID NO: 121145 - DNA, 25 bp, Artificial
  Probe
gagcagcattattttcatcttcact

SEQ ID NO: 121146 - DNA, 25 bp, Artificial
  Probe
cacacaagcatgagcagcattattt

SEQ ID NO: 121147 - DNA, 25 bp, Artificial
  Probe
gaaatgaagagacctctaaccagcc

SEQ ID NO: 121148 - DNA, 25 bp, Artificial
  Probe
ggacatccttgcagcttgtaacata

SEQ ID NO: 121149 - DNA, 25 bp, Artificial
  Probe
tcttggagagtacgatgaatgcctg

SEQ ID NO: 121150 - DNA, 25 bp, Artificial
  Probe
cttggagagtacgatgaatgcctgt

SEQ ID NO: 121151 - DNA, 25 bp, Artificial
  Probe
tgagcagcattattttcatcttcac

SEQ ID NO: 121152 - DNA, 25 bp, Artificial
  Probe
cttcacacaagcatgagcagcatta

SEQ ID NO: 121153 - DNA, 25 bp, Artificial
  Probe
aaatgaagagacctctaaccagcct

SEQ ID NO: 121154 - DNA, 25 bp, Artificial
  Probe
tccttgcagcttgtaacatatcaag

SEQ ID NO: 121155 - DNA, 25 bp, Artificial
  Probe
agcattattttcatcttcactgagt

SEQ ID NO: 121156 - DNA, 25 bp, Artificial
  Probe
ggagagtacgatgaatgcctgttgt

SEQ ID NO: 121157 - DNA, 25 bp, Artificial
  Probe
acagaaagtcatcaaagcctatcat

SEQ ID NO: 121158 - DNA, 25 bp, Artificial
  Probe
aagacataataaaccctcaactgct

SEQ ID NO: 121159 - DNA, 25 bp, Artificial
  Probe
gccctaagacataataaaccctcaa

SEQ ID NO: 121160 - DNA, 25 bp, Artificial
  Probe
gtagccctaagacataataaaccct

SEQ ID NO: 121161 - DNA, 25 bp, Artificial
  Probe
agtagccctaagacataataaaccc

SEQ ID NO: 121162 - DNA, 25 bp, Artificial
  Probe
ctctcttctgacggacactaaatac

SEQ ID NO: 121163 - DNA, 25 bp, Artificial
  Probe
tctctcttctgacggacactaaata

SEQ ID NO: 121164 - DNA, 25 bp, Artificial
  Probe
agacataataaaccctcaactgctc

SEQ ID NO: 121165 - DNA, 25 bp, Artificial
  Probe
tcacaaagtagccctaagacataat

SEQ ID NO: 121166 - DNA, 25 bp, Artificial
  Probe
atcacaaagtagccctaagacataa

SEQ ID NO: 121167 - DNA, 25 bp, Artificial
  Probe
tagccctaagacataataaaccctc

SEQ ID NO: 121168 - DNA, 25 bp, Artificial
  Probe
agccctaagacataataaaccctca

SEQ ID NO: 121169 - DNA, 25 bp, Artificial
  Probe
cacagaaagtcatcaaagcctatca

SEQ ID NO: 121170 - DNA, 25 bp, Artificial
  Probe
ccctaagacataataaaccctcaac

SEQ ID NO: 121171 - DNA, 25 bp, Artificial
  Probe
taagacataataaaccctcaactgc

SEQ ID NO: 121172 - DNA, 25 bp, Artificial
  Probe
gcaagaataaatgaaagtttgagcc

SEQ ID NO: 121173 - DNA, 25 bp, Artificial
  Probe
ggcaagaataaatgaaagtttgagc

SEQ ID NO: 121174 - DNA, 25 bp, Artificial
  Probe
gacataataaaccctcaactgctcc

SEQ ID NO: 121175 - DNA, 25 bp, Artificial
  Probe
cgggcaagaataaatgaaagtttga

SEQ ID NO: 121176 - DNA, 25 bp, Artificial
  Probe
ataataaaccctcaactgctccgta

SEQ ID NO: 121177 - DNA, 25 bp, Artificial
  Probe
gggcaagaataaatgaaagtttgag

SEQ ID NO: 121178 - DNA, 25 bp, Artificial
  Probe
ctctctcttctgacggacactaaat

SEQ ID NO: 121179 - DNA, 25 bp, Artificial
  Probe
gatcacaaagtagccctaagacata

SEQ ID NO: 121180 - DNA, 25 bp, Artificial
  Probe
tctgacggacactaaatacgaactt

SEQ ID NO: 121181 - DNA, 25 bp, Artificial
  Probe
cttctgacggacactaaatacgaac

SEQ ID NO: 121182 - DNA, 25 bp, Artificial
  Probe
tcttctgacggacactaaatacgaa

SEQ ID NO: 121183 - DNA, 25 bp, Artificial
  Probe
ctcttctgacggacactaaatacga

SEQ ID NO: 121184 - DNA, 25 bp, Artificial
  Probe
tctcttctgacggacactaaatacg

SEQ ID NO: 121185 - DNA, 25 bp, Artificial
  Probe
aagtagccctaagacataataaacc

SEQ ID NO: 121186 - DNA, 25 bp, Artificial
  Probe
cacaaagtagccctaagacataata

SEQ ID NO: 121187 - DNA, 25 bp, Artificial
  Probe
ttctgacggacactaaatacgaact

SEQ ID NO: 121188 - DNA, 25 bp, Artificial
  Probe
agaataaatgaaagtttgagccaac

SEQ ID NO: 121189 - DNA, 25 bp, Artificial
  Probe
caagaataaatgaaagtttgagcca

SEQ ID NO: 121190 - DNA, 25 bp, Artificial
  Probe
cagaaagtcatcaaagcctatcatg

SEQ ID NO: 121191 - DNA, 25 bp, Artificial
  Probe
cctaagacataataaaccctcaact

SEQ ID NO: 121192 - DNA, 25 bp, Artificial
  Probe
taataaaccctcaactgctccgtag

SEQ ID NO: 121193 - DNA, 25 bp, Artificial
  Probe
aaagtcatcaaagcctatcatggag

SEQ ID NO: 121194 - DNA, 25 bp, Artificial
  Probe
gaaagtcatcaaagcctatcatgga

SEQ ID NO: 121195 - DNA, 25 bp, Artificial
  Probe
agaaagtcatcaaagcctatcatgg

SEQ ID NO: 121196 - DNA, 25 bp, Artificial
  Probe
gcacagaaagtcatcaaagcctatc

SEQ ID NO: 121197 - DNA, 25 bp, Artificial
  Probe
catcaaagcctatcatggagaagag

SEQ ID NO: 121198 - DNA, 25 bp, Artificial
  Probe
gtcatcaaagcctatcatggagaag

SEQ ID NO: 121199 - DNA, 25 bp, Artificial
  Probe
tcatcaaagcctatcatggagaaga

SEQ ID NO: 121200 - DNA, 25 bp, Artificial
  Probe
agcacagaaagtcatcaaagcctat

SEQ ID NO: 121201 - DNA, 25 bp, Artificial
  Probe
aagaataaatgaaagtttgagccaa

SEQ ID NO: 121202 - DNA, 25 bp, Artificial
  Probe
cctattgtatccacctagtgctcat

SEQ ID NO: 121203 - DNA, 25 bp, Artificial
  Probe
ctattgtatccacctagtgctcatg

SEQ ID NO: 121204 - DNA, 25 bp, Artificial
  Probe
ccagatgcactcatagattgaatgt

SEQ ID NO: 121205 - DNA, 25 bp, Artificial
  Probe
acgactcagtatttgggttattagt

SEQ ID NO: 121206 - DNA, 25 bp, Artificial
  Probe
tattgtatccacctagtgctcatgg

SEQ ID NO: 121207 - DNA, 25 bp, Artificial
  Probe
agatgcactcatagattgaatgtga

SEQ ID NO: 121208 - DNA, 25 bp, Artificial
  Probe
cagatgcactcatagattgaatgtg

SEQ ID NO: 121209 - DNA, 25 bp, Artificial
  Probe
aaagactctctggtccctattgtat

SEQ ID NO: 121210 - DNA, 25 bp, Artificial
  Probe
aagactctctggtccctattgtatc

SEQ ID NO: 121211 - DNA, 25 bp, Artificial
  Probe
tacgactcagtatttgggttattag

SEQ ID NO: 121212 - DNA, 25 bp, Artificial
  Probe
gacatacgactcagtatttgggtta

SEQ ID NO: 121213 - DNA, 25 bp, Artificial
  Probe
gaaagactctctggtccctattgta

SEQ ID NO: 121214 - DNA, 25 bp, Artificial
  Probe
ggttattagtatcaatctcatctcc

SEQ ID NO: 121215 - DNA, 25 bp, Artificial
  Probe
acatacgactcagtatttgggttat

SEQ ID NO: 121216 - DNA, 25 bp, Artificial
  Probe
gagaggacatacgactcagtatttg

SEQ ID NO: 121217 - DNA, 25 bp, Artificial
  Probe
ttagctgtcatatttctctgtcctc

SEQ ID NO: 121218 - DNA, 25 bp, Artificial
  Probe
attagctgtcatatttctctgtcct

SEQ ID NO: 121219 - DNA, 25 bp, Artificial
  Probe
cgactcagtatttgggttattagta

SEQ ID NO: 121220 - DNA, 25 bp, Artificial
  Probe
catacgactcagtatttgggttatt

SEQ ID NO: 121221 - DNA, 25 bp, Artificial
  Probe
agaggacatacgactcagtatttgg

SEQ ID NO: 121222 - DNA, 25 bp, Artificial
  Probe
tagctgtcatatttctctgtcctcc

SEQ ID NO: 121223 - DNA, 25 bp, Artificial
  Probe
agactctctggtccctattgtatcc

SEQ ID NO: 121224 - DNA, 25 bp, Artificial
  Probe
tattagctgtcatatttctctgtcc

SEQ ID NO: 121225 - DNA, 25 bp, Artificial
  Probe
ggacatacgactcagtatttgggtt

SEQ ID NO: 121226 - DNA, 25 bp, Artificial
  Probe
ccctcagtattagctgtcatatttc

SEQ ID NO: 121227 - DNA, 25 bp, Artificial
  Probe
gaggacatacgactcagtatttggg

SEQ ID NO: 121228 - DNA, 25 bp, Artificial
  Probe
tgggttattagtatcaatctcatct

SEQ ID NO: 121229 - DNA, 25 bp, Artificial
  Probe
attgtatccacctagtgctcatggt

SEQ ID NO: 121230 - DNA, 25 bp, Artificial
  Probe
ttgagaggacatacgactcagtatt

SEQ ID NO: 121231 - DNA, 25 bp, Artificial
  Probe
caactagagagaaagactgggcatg

SEQ ID NO: 121232 - DNA, 25 bp, Artificial
  Probe
gctgtcatatttctctgtcctccag

SEQ ID NO: 121233 - DNA, 25 bp, Artificial
  Probe
cccagatgcactcatagattgaatg

SEQ ID NO: 121234 - DNA, 25 bp, Artificial
  Probe
cttgagaggacatacgactcagtat

SEQ ID NO: 121235 - DNA, 25 bp, Artificial
  Probe
ctctggtccctattgtatccaccta

SEQ ID NO: 121236 - DNA, 25 bp, Artificial
  Probe
tctggtccctattgtatccacctag

SEQ ID NO: 121237 - DNA, 25 bp, Artificial
  Probe
atacgactcagtatttgggttatta

SEQ ID NO: 121238 - DNA, 25 bp, Artificial
  Probe
ttagtatcaatctcatctccccttt

SEQ ID NO: 121239 - DNA, 25 bp, Artificial
  Probe
acccagatgcactcatagattgaat

SEQ ID NO: 121240 - DNA, 25 bp, Artificial
  Probe
gttattagtatcaatctcatctccc

SEQ ID NO: 121241 - DNA, 25 bp, Artificial
  Probe
gggttattagtatcaatctcatctc

SEQ ID NO: 121242 - DNA, 25 bp, Artificial
  Probe
aactagagagaaagactgggcatgt

SEQ ID NO: 121243 - DNA, 25 bp, Artificial
  Probe
gactctctggtccctattgtatcca

SEQ ID NO: 121244 - DNA, 25 bp, Artificial
  Probe
tagtatcaatctcatctcccctttg

SEQ ID NO: 121245 - DNA, 25 bp, Artificial
  Probe
attagtatcaatctcatctcccctt

SEQ ID NO: 121246 - DNA, 25 bp, Artificial
  Probe
agtattagctgtcatatttctctgt

SEQ ID NO: 121247 - DNA, 25 bp, Artificial
  Probe
tgagagtgtgctgaattgaggtatc

SEQ ID NO: 121248 - DNA, 25 bp, Artificial
  Probe
ctgagagtgtgctgaattgaggtat

SEQ ID NO: 121249 - DNA, 25 bp, Artificial
  Probe
gagagtgtgctgaattgaggtatcc

SEQ ID NO: 121250 - DNA, 25 bp, Artificial
  Probe
catttggttcaggtcagtaggaaag

SEQ ID NO: 121251 - DNA, 25 bp, Artificial
  Probe
caatctgtcctcatccctttctctc

SEQ ID NO: 121252 - DNA, 25 bp, Artificial
  Probe
atctgtcctcatccctttctctcat

SEQ ID NO: 121253 - DNA, 25 bp, Artificial
  Probe
aatctgtcctcatccctttctctca

SEQ ID NO: 121254 - DNA, 25 bp, Artificial
  Probe
gttcaggtcagtaggaaagcaatct

SEQ ID NO: 121255 - DNA, 25 bp, Artificial
  Probe
agagtgtgctgaattgaggtatcct

SEQ ID NO: 121256 - DNA, 25 bp, Artificial
  Probe
ccatttggttcaggtcagtaggaaa

SEQ ID NO: 121257 - DNA, 25 bp, Artificial
  Probe
atttggttcaggtcagtaggaaagc

SEQ ID NO: 121258 - DNA, 25 bp, Artificial
  Probe
gtcaacttctttgtcacagactctg

SEQ ID NO: 121259 - DNA, 25 bp, Artificial
  Probe
ttcaggtcagtaggaaagcaatctg

SEQ ID NO: 121260 - DNA, 25 bp, Artificial
  Probe
aactcagattcagactccgcttcag

SEQ ID NO: 121261 - DNA, 25 bp, Artificial
  Probe
ggtcaacttctttgtcacagactct

SEQ ID NO: 121262 - DNA, 25 bp, Artificial
  Probe
ggttcaggtcagtaggaaagcaatc

SEQ ID NO: 121263 - DNA, 25 bp, Artificial
  Probe
tggtcaacttctttgtcacagactc

SEQ ID NO: 121264 - DNA, 25 bp, Artificial
  Probe
caaactcagattcagactccgcttc

SEQ ID NO: 121265 - DNA, 25 bp, Artificial
  Probe
cctgagagtgtgctgaattgaggta

SEQ ID NO: 121266 - DNA, 25 bp, Artificial
  Probe
caggtcagtaggaaagcaatctgtc

SEQ ID NO: 121267 - DNA, 25 bp, Artificial
  Probe
tctcctgagagtgtgctgaattgag

SEQ ID NO: 121268 - DNA, 25 bp, Artificial
  Probe
aagcaatctgtcctcatccctttct

SEQ ID NO: 121269 - DNA, 25 bp, Artificial
  Probe
gtggtcaacttctttgtcacagact

SEQ ID NO: 121270 - DNA, 25 bp, Artificial
  Probe
tctgtcctcatccctttctctcatg

SEQ ID NO: 121271 - DNA, 25 bp, Artificial
  Probe
aaactcagattcagactccgcttca

SEQ ID NO: 121272 - DNA, 25 bp, Artificial
  Probe
tggttcaggtcagtaggaaagcaat

SEQ ID NO: 121273 - DNA, 25 bp, Artificial
  Probe
gtctcctgagagtgtgctgaattga

SEQ ID NO: 121274 - DNA, 25 bp, Artificial
  Probe
tcaggtcagtaggaaagcaatctgt

SEQ ID NO: 121275 - DNA, 25 bp, Artificial
  Probe
gcaatctgtcctcatccctttctct

SEQ ID NO: 121276 - DNA, 25 bp, Artificial
  Probe
agcaatctgtcctcatccctttctc

SEQ ID NO: 121277 - DNA, 25 bp, Artificial
  Probe
tttggttcaggtcagtaggaaagca

SEQ ID NO: 121278 - DNA, 25 bp, Artificial
  Probe
ttggttcaggtcagtaggaaagcaa

SEQ ID NO: 121279 - DNA, 25 bp, Artificial
  Probe
aaagcaatctgtcctcatccctttc

SEQ ID NO: 121280 - DNA, 25 bp, Artificial
  Probe
gaaagcaatctgtcctcatcccttt

SEQ ID NO: 121281 - DNA, 25 bp, Artificial
  Probe
caatgttgcttgtgtagtgtggctg

SEQ ID NO: 121282 - DNA, 25 bp, Artificial
  Probe
taggtctcctgagagtgtgctgaat

SEQ ID NO: 121283 - DNA, 25 bp, Artificial
  Probe
ctcctgagagtgtgctgaattgagg

SEQ ID NO: 121284 - DNA, 25 bp, Artificial
  Probe
ctgtcctcatccctttctctcatgg

SEQ ID NO: 121285 - DNA, 25 bp, Artificial
  Probe
aggtcagtaggaaagcaatctgtcc

SEQ ID NO: 121286 - DNA, 25 bp, Artificial
  Probe
ccaaactcagattcagactccgctt

SEQ ID NO: 121287 - DNA, 25 bp, Artificial
  Probe
gtcctcatccctttctctcatggtg

SEQ ID NO: 121288 - DNA, 25 bp, Artificial
  Probe
ggtctcctgagagtgtgctgaattg

SEQ ID NO: 121289 - DNA, 25 bp, Artificial
  Probe
gccatttggttcaggtcagtaggaa

SEQ ID NO: 121290 - DNA, 25 bp, Artificial
  Probe
tgtcctcatccctttctctcatggt

SEQ ID NO: 121291 - DNA, 25 bp, Artificial
  Probe
ggaaagcaatctgtcctcatccctt

SEQ ID NO: 121292 - DNA, 25 bp, Artificial
  Probe
gcacacagaatagagtatgaagtgg

SEQ ID NO: 121293 - DNA, 25 bp, Artificial
  Probe
ggcacacagaatagagtatgaagtg

SEQ ID NO: 121294 - DNA, 25 bp, Artificial
  Probe
ctctgcctccttgatgctaactaag

SEQ ID NO: 121295 - DNA, 25 bp, Artificial
  Probe
acagaatagagtatgaagtgggctt

SEQ ID NO: 121296 - DNA, 25 bp, Artificial
  Probe
ttctttctttctcagatactgtgct

SEQ ID NO: 121297 - DNA, 25 bp, Artificial
  Probe
tctttctttctcagatactgtgctc

SEQ ID NO: 121298 - DNA, 25 bp, Artificial
  Probe
gggcacacagaatagagtatgaagt

SEQ ID NO: 121299 - DNA, 25 bp, Artificial
  Probe
tttctttctttctcagatactgtgc

SEQ ID NO: 121300 - DNA, 25 bp, Artificial
  Probe
ctttctttctcagatactgtgctcc

SEQ ID NO: 121301 - DNA, 25 bp, Artificial
  Probe
cacacagaatagagtatgaagtggg

SEQ ID NO: 121302 - DNA, 25 bp, Artificial
  Probe
cctctgcctccttgatgctaactaa

SEQ ID NO: 121303 - DNA, 25 bp, Artificial
  Probe
cacagaatagagtatgaagtgggct

SEQ ID NO: 121304 - DNA, 25 bp, Artificial
  Probe
cgggcacacagaatagagtatgaag

SEQ ID NO: 121305 - DNA, 25 bp, Artificial
  Probe
acacagaatagagtatgaagtgggc

SEQ ID NO: 121306 - DNA, 25 bp, Artificial
  Probe
tcgggcacacagaatagagtatgaa

SEQ ID NO: 121307 - DNA, 25 bp, Artificial
  Probe
tttctttctcagatactgtgctccg

SEQ ID NO: 121308 - DNA, 25 bp, Artificial
  Probe
ctttctcagatactgtgctccgttt

SEQ ID NO: 121309 - DNA, 25 bp, Artificial
  Probe
ctgctaccttgtgtgtctgaaactc

SEQ ID NO: 121310 - DNA, 25 bp, Artificial
  Probe
gaatagagtatgaagtgggcttctc

SEQ ID NO: 121311 - DNA, 25 bp, Artificial
  Probe
ctcacctgcctctatctaccctttg

SEQ ID NO: 121312 - DNA, 25 bp, Artificial
  Probe
agaatagagtatgaagtgggcttct

SEQ ID NO: 121313 - DNA, 25 bp, Artificial
  Probe
cagaatagagtatgaagtgggcttc

SEQ ID NO: 121314 - DNA, 25 bp, Artificial
  Probe
taactaaggggctgggtaggtatag

SEQ ID NO: 121315 - DNA, 25 bp, Artificial
  Probe
ctaactaaggggctgggtaggtata

SEQ ID NO: 121316 - DNA, 25 bp, Artificial
  Probe
aactttactctgatgtttgcagcag

SEQ ID NO: 121317 - DNA, 25 bp, Artificial
  Probe
gtcgggcacacagaatagagtatga

SEQ ID NO: 121318 - DNA, 25 bp, Artificial
  Probe
aatagagtatgaagtgggcttctct

SEQ ID NO: 121319 - DNA, 25 bp, Artificial
  Probe
caactttactctgatgtttgcagca

SEQ ID NO: 121320 - DNA, 25 bp, Artificial
  Probe
tctttctcagatactgtgctccgtt

SEQ ID NO: 121321 - DNA, 25 bp, Artificial
  Probe
ttctttctcagatactgtgctccgt

SEQ ID NO: 121322 - DNA, 25 bp, Artificial
  Probe
ctaccttgtgtgtctgaaactccca

SEQ ID NO: 121323 - DNA, 25 bp, Artificial
  Probe
atagagtatgaagtgggcttctctg

SEQ ID NO: 121324 - DNA, 25 bp, Artificial
  Probe
tgtcgggcacacagaatagagtatg

SEQ ID NO: 121325 - DNA, 25 bp, Artificial
  Probe
tttctcagatactgtgctccgtttt

SEQ ID NO: 121326 - DNA, 25 bp, Artificial
  Probe
taccttgtgtgtctgaaactcccag

SEQ ID NO: 121327 - DNA, 25 bp, Artificial
  Probe
tgctaccttgtgtgtctgaaactcc

SEQ ID NO: 121328 - DNA, 25 bp, Artificial
  Probe
cctgctaccttgtgtgtctgaaact

SEQ ID NO: 121329 - DNA, 25 bp, Artificial
  Probe
ttttctttctttctcagatactgtg

SEQ ID NO: 121330 - DNA, 25 bp, Artificial
  Probe
tgatgtttgcagcagagaaaagatg

SEQ ID NO: 121331 - DNA, 25 bp, Artificial
  Probe
cttgtgtgtctgaaactcccaggat

SEQ ID NO: 121332 - DNA, 25 bp, Artificial
  Probe
tagagtatgaagtgggcttctctgg

SEQ ID NO: 121333 - DNA, 25 bp, Artificial
  Probe
ttgtgtgtctgaaactcccaggatg

SEQ ID NO: 121334 - DNA, 25 bp, Artificial
  Probe
ctgatgtttgcagcagagaaaagat

SEQ ID NO: 121335 - DNA, 25 bp, Artificial
  Probe
tctgcctccttgatgctaactaagg

SEQ ID NO: 121336 - DNA, 25 bp, Artificial
  Probe
gatgtttgcagcagagaaaagatgg

SEQ ID NO: 121337 - DNA, 25 bp, Artificial
  Probe
attgagagattgattcctgagttgg

SEQ ID NO: 121338 - DNA, 25 bp, Artificial
  Probe
ttacaccacatccacattctaagag

SEQ ID NO: 121339 - DNA, 25 bp, Artificial
  Probe
attacaccacatccacattctaaga

SEQ ID NO: 121340 - DNA, 25 bp, Artificial
  Probe
tgattacaccacatccacattctaa

SEQ ID NO: 121341 - DNA, 25 bp, Artificial
  Probe
ctgattacaccacatccacattcta

SEQ ID NO: 121342 - DNA, 25 bp, Artificial
  Probe
gattacaccacatccacattctaag

SEQ ID NO: 121343 - DNA, 25 bp, Artificial
  Probe
taaccaaggagaagacattcaacaa

SEQ ID NO: 121344 - DNA, 25 bp, Artificial
  Probe
ccaaggagaagacattcaacaacta

SEQ ID NO: 121345 - DNA, 25 bp, Artificial
  Probe
cacattctaagaggagagagacatt

SEQ ID NO: 121346 - DNA, 25 bp, Artificial
  Probe
aattgagagattgattcctgagttg

SEQ ID NO: 121347 - DNA, 25 bp, Artificial
  Probe
gtaaccaaggagaagacattcaaca

SEQ ID NO: 121348 - DNA, 25 bp, Artificial
  Probe
attctaagaggagagagacattcac

SEQ ID NO: 121349 - DNA, 25 bp, Artificial
  Probe
cattctaagaggagagagacattca

SEQ ID NO: 121350 - DNA, 25 bp, Artificial
  Probe
acattctaagaggagagagacattc

SEQ ID NO: 121351 - DNA, 25 bp, Artificial
  Probe
tctgaactgacttgaatctgaatca

SEQ ID NO: 121352 - DNA, 25 bp, Artificial
  Probe
ccacattctaagaggagagagacat

SEQ ID NO: 121353 - DNA, 25 bp, Artificial
  Probe
aaggagaagacattcaacaactagg

SEQ ID NO: 121354 - DNA, 25 bp, Artificial
  Probe
caaggagaagacattcaacaactag

SEQ ID NO: 121355 - DNA, 25 bp, Artificial
  Probe
ttgagagattgattcctgagttggt

SEQ ID NO: 121356 - DNA, 25 bp, Artificial
  Probe
tatagcaagcattgtctgtgttcaa

SEQ ID NO: 121357 - DNA, 25 bp, Artificial
  Probe
ttctaagaggagagagacattcacg

SEQ ID NO: 121358 - DNA, 25 bp, Artificial
  Probe
ctgaactgacttgaatctgaatcat

SEQ ID NO: 121359 - DNA, 25 bp, Artificial
  Probe
aaccaaggagaagacattcaacaac

SEQ ID NO: 121360 - DNA, 25 bp, Artificial
  Probe
aggtaatagcatgacacacaatagg

SEQ ID NO: 121361 - DNA, 25 bp, Artificial
  Probe
tacaccacatccacattctaagagg

SEQ ID NO: 121362 - DNA, 25 bp, Artificial
  Probe
gagaagacattcaacaactaggtgg

SEQ ID NO: 121363 - DNA, 25 bp, Artificial
  Probe
ggagaagacattcaacaactaggtg

SEQ ID NO: 121364 - DNA, 25 bp, Artificial
  Probe
aggagaagacattcaacaactaggt

SEQ ID NO: 121365 - DNA, 25 bp, Artificial
  Probe
tgtctgaactgacttgaatctgaat

SEQ ID NO: 121366 - DNA, 25 bp, Artificial
  Probe
atgtctgaactgacttgaatctgaa

SEQ ID NO: 121367 - DNA, 25 bp, Artificial
  Probe
tgtaaccaaggagaagacattcaac

SEQ ID NO: 121368 - DNA, 25 bp, Artificial
  Probe
gtctgaactgacttgaatctgaatc

SEQ ID NO: 121369 - DNA, 25 bp, Artificial
  Probe
tagccattagaccactaagactcaa

SEQ ID NO: 121370 - DNA, 25 bp, Artificial
  Probe
agagattgattcctgagttggtgtc

SEQ ID NO: 121371 - DNA, 25 bp, Artificial
  Probe
gagagattgattcctgagttggtgt

SEQ ID NO: 121372 - DNA, 25 bp, Artificial
  Probe
tgagagattgattcctgagttggtg

SEQ ID NO: 121373 - DNA, 25 bp, Artificial
  Probe
agacattcaacaactaggtggctaa

SEQ ID NO: 121374 - DNA, 25 bp, Artificial
  Probe
aagacattcaacaactaggtggcta

SEQ ID NO: 121375 - DNA, 25 bp, Artificial
  Probe
ctgacttgaatctgaatcatgtgtg

SEQ ID NO: 121376 - DNA, 25 bp, Artificial
  Probe
ttgaatctgaatcatgtgtgaagac

SEQ ID NO: 121377 - DNA, 25 bp, Artificial
  Probe
acttgaatctgaatcatgtgtgaag

SEQ ID NO: 121378 - DNA, 25 bp, Artificial
  Probe
gacttgaatctgaatcatgtgtgaa

SEQ ID NO: 121379 - DNA, 25 bp, Artificial
  Probe
tgacttgaatctgaatcatgtgtga

SEQ ID NO: 121380 - DNA, 25 bp, Artificial
  Probe
actgacttgaatctgaatcatgtgt

SEQ ID NO: 121381 - DNA, 25 bp, Artificial
  Probe
aactgacttgaatctgaatcatgtg

SEQ ID NO: 121382 - DNA, 25 bp, Artificial
  Probe
catacacacatacacacacacatac

SEQ ID NO: 121383 - DNA, 25 bp, Artificial
  Probe
catacacacacatacacacacatac

SEQ ID NO: 121384 - DNA, 25 bp, Artificial
  Probe
catacacacatacacacacatacac

SEQ ID NO: 121385 - DNA, 25 bp, Artificial
  Probe
cacatacacacatacacacacatac

SEQ ID NO: 121386 - DNA, 25 bp, Artificial
  Probe
catacacacacacatacacacatac

SEQ ID NO: 121387 - DNA, 25 bp, Artificial
  Probe
atacacacatacacacacacataca

SEQ ID NO: 121388 - DNA, 25 bp, Artificial
  Probe
acatacacacatacacacacacata

SEQ ID NO: 121389 - DNA, 25 bp, Artificial
  Probe
atacagacacacacatacacacata

SEQ ID NO: 121390 - DNA, 25 bp, Artificial
  Probe
atacacacacatacacacacataca

SEQ ID NO: 121391 - DNA, 25 bp, Artificial
  Probe
acatacacacacatacacacacata

SEQ ID NO: 121392 - DNA, 25 bp, Artificial
  Probe
atacacacatacacacacatacaca

SEQ ID NO: 121393 - DNA, 25 bp, Artificial
  Probe
acatacacacatacacacacataca

SEQ ID NO: 121394 - DNA, 25 bp, Artificial
  Probe
acacatacacacatacacacacata

SEQ ID NO: 121395 - DNA, 25 bp, Artificial
  Probe
atacacacacacatacacacataca

SEQ ID NO: 121396 - DNA, 25 bp, Artificial
  Probe
acatacacacacacatacacacata

SEQ ID NO: 121397 - DNA, 25 bp, Artificial
  Probe
tacagacacacacatacacacatac

SEQ ID NO: 121398 - DNA, 25 bp, Artificial
  Probe
tacacacatacacacacacatacac

SEQ ID NO: 121399 - DNA, 25 bp, Artificial
  Probe
tacacacacatacacacacatacac

SEQ ID NO: 121400 - DNA, 25 bp, Artificial
  Probe
tacacacatacacacacatacacac

SEQ ID NO: 121401 - DNA, 25 bp, Artificial
  Probe
tacacacacacatacacacatacac

SEQ ID NO: 121402 - DNA, 25 bp, Artificial
  Probe
catacagacacacacatacacacat

SEQ ID NO: 121403 - DNA, 25 bp, Artificial
  Probe
cacatacacacatacacacacacat

SEQ ID NO: 121404 - DNA, 25 bp, Artificial
  Probe
cacatacacacacatacacacacat

SEQ ID NO: 121405 - DNA, 25 bp, Artificial
  Probe
cacacatacacacatacacacacat

SEQ ID NO: 121406 - DNA, 25 bp, Artificial
  Probe
cacatacacacacacatacacacat

SEQ ID NO: 121407 - DNA, 25 bp, Artificial
  Probe
cagacacacacatacacacatacac

SEQ ID NO: 121408 - DNA, 25 bp, Artificial
  Probe
cacatacagacacacacatacacac

SEQ ID NO: 121409 - DNA, 25 bp, Artificial
  Probe
cacacatacagacacacacatacac

SEQ ID NO: 121410 - DNA, 25 bp, Artificial
  Probe
cacacacatacagacacacacatac

SEQ ID NO: 121411 - DNA, 25 bp, Artificial
  Probe
catacacacacacatacagacacac

SEQ ID NO: 121412 - DNA, 25 bp, Artificial
  Probe
cacatacacacacacatacagacac

SEQ ID NO: 121413 - DNA, 25 bp, Artificial
  Probe
cacacatacacacacacatacagac

SEQ ID NO: 121414 - DNA, 25 bp, Artificial
  Probe
gacacacacatacacacatacacac

SEQ ID NO: 121415 - DNA, 25 bp, Artificial
  Probe
agacacacacatacacacatacaca

SEQ ID NO: 121416 - DNA, 25 bp, Artificial
  Probe
acagacacacacatacacacataca

SEQ ID NO: 121417 - DNA, 25 bp, Artificial
  Probe
acatacagacacacacatacacaca

SEQ ID NO: 121418 - DNA, 25 bp, Artificial
  Probe
acacatacagacacacacatacaca

SEQ ID NO: 121419 - DNA, 25 bp, Artificial
  Probe
acacacatacagacacacacataca

SEQ ID NO: 121420 - DNA, 25 bp, Artificial
  Probe
acacacacatacagacacacacata

SEQ ID NO: 121421 - DNA, 25 bp, Artificial
  Probe
atacacacacacatacagacacaca

SEQ ID NO: 121422 - DNA, 25 bp, Artificial
  Probe
acatacacacacacatacagacaca

SEQ ID NO: 121423 - DNA, 25 bp, Artificial
  Probe
acacatacacacacacatacagaca

SEQ ID NO: 121424 - DNA, 25 bp, Artificial
  Probe
acacacatacacacacacatacaga

SEQ ID NO: 121425 - DNA, 25 bp, Artificial
  Probe
cacacacatacacacacacatacag

SEQ ID NO: 121426 - DNA, 25 bp, Artificial
  Probe
cacacatacacacatacacacacac

SEQ ID NO: 121427 - DNA, 25 bp, Artificial
  Probe
ttactgtgagaactgtgaatatgtg

SEQ ID NO: 121428 - DNA, 25 bp, Artificial
  Probe
gcctattcagactatatacagagcc

SEQ ID NO: 121429 - DNA, 25 bp, Artificial
  Probe
tgcctattcagactatatacagagc

SEQ ID NO: 121430 - DNA, 25 bp, Artificial
  Probe
attactgtgagaactgtgaatatgt

SEQ ID NO: 121431 - DNA, 25 bp, Artificial
  Probe
cctattcagactatatacagagcct

SEQ ID NO: 121432 - DNA, 25 bp, Artificial
  Probe
cgtacaattactgtgagaactgtga

SEQ ID NO: 121433 - DNA, 25 bp, Artificial
  Probe
tcgtacaattactgtgagaactgtg

SEQ ID NO: 121434 - DNA, 25 bp, Artificial
  Probe
gtcgtacaattactgtgagaactgt

SEQ ID NO: 121435 - DNA, 25 bp, Artificial
  Probe
gtacaattactgtgagaactgtgaa

SEQ ID NO: 121436 - DNA, 25 bp, Artificial
  Probe
acaattactgtgagaactgtgaata

SEQ ID NO: 121437 - DNA, 25 bp, Artificial
  Probe
tacaattactgtgagaactgtgaat

SEQ ID NO: 121438 - DNA, 25 bp, Artificial
  Probe
ggtcgtacaattactgtgagaactg

SEQ ID NO: 121439 - DNA, 25 bp, Artificial
  Probe
aacttaaccttatagagcacaacgt

SEQ ID NO: 121440 - DNA, 25 bp, Artificial
  Probe
tccacccaaacttaaccttatagag

SEQ ID NO: 121441 - DNA, 25 bp, Artificial
  Probe
tgatttccacccaaacttaacctta

SEQ ID NO: 121442 - DNA, 25 bp, Artificial
  Probe
cccaaacttaaccttatagagcaca

SEQ ID NO: 121443 - DNA, 25 bp, Artificial
  Probe
acccaaacttaaccttatagagcac

SEQ ID NO: 121444 - DNA, 25 bp, Artificial
  Probe
cacccaaacttaaccttatagagca

SEQ ID NO: 121445 - DNA, 25 bp, Artificial
  Probe
aaacttaaccttatagagcacaacg

SEQ ID NO: 121446 - DNA, 25 bp, Artificial
  Probe
ttccacccaaacttaaccttataga

SEQ ID NO: 121447 - DNA, 25 bp, Artificial
  Probe
gatttccacccaaacttaaccttat

SEQ ID NO: 121448 - DNA, 25 bp, Artificial
  Probe
aattactgtgagaactgtgaatatg

SEQ ID NO: 121449 - DNA, 25 bp, Artificial
  Probe
caattactgtgagaactgtgaatat

SEQ ID NO: 121450 - DNA, 25 bp, Artificial
  Probe
ccaaacttaaccttatagagcacaa

SEQ ID NO: 121451 - DNA, 25 bp, Artificial
  Probe
ccacccaaacttaaccttatagagc

SEQ ID NO: 121452 - DNA, 25 bp, Artificial
  Probe
tttccacccaaacttaaccttatag

SEQ ID NO: 121453 - DNA, 25 bp, Artificial
  Probe
ctgatttccacccaaacttaacctt

SEQ ID NO: 121454 - DNA, 25 bp, Artificial
  Probe
aggatttattctcagaacaccaagt

SEQ ID NO: 121455 - DNA, 25 bp, Artificial
  Probe
ctattcagactatatacagagcctg

SEQ ID NO: 121456 - DNA, 25 bp, Artificial
  Probe
atgcctattcagactatatacagag

SEQ ID NO: 121457 - DNA, 25 bp, Artificial
  Probe
caaacttaaccttatagagcacaac

SEQ ID NO: 121458 - DNA, 25 bp, Artificial
  Probe
aaggatttattctcagaacaccaag

SEQ ID NO: 121459 - DNA, 25 bp, Artificial
  Probe
cctacctgtctatgaagccctttag

SEQ ID NO: 121460 - DNA, 25 bp, Artificial
  Probe
ccagagggaagaagataattgtatt

SEQ ID NO: 121461 - DNA, 25 bp, Artificial
  Probe
atttccacccaaacttaaccttata

SEQ ID NO: 121462 - DNA, 25 bp, Artificial
  Probe
ggatttattctcagaacaccaagta

SEQ ID NO: 121463 - DNA, 25 bp, Artificial
  Probe
ttaagggtcgtacaattactgtgag

SEQ ID NO: 121464 - DNA, 25 bp, Artificial
  Probe
gttaagggtcgtacaattactgtga

SEQ ID NO: 121465 - DNA, 25 bp, Artificial
  Probe
ctctgagatgtttggcaagaaatcc

SEQ ID NO: 121466 - DNA, 25 bp, Artificial
  Probe
cctctgagatgtttggcaagaaatc

SEQ ID NO: 121467 - DNA, 25 bp, Artificial
  Probe
taagggtcgtacaattactgtgaga

SEQ ID NO: 121468 - DNA, 25 bp, Artificial
  Probe
taaggatttattctcagaacaccaa

SEQ ID NO: 121469 - DNA, 25 bp, Artificial
  Probe
aagggtcgtacaattactgtgagaa

SEQ ID NO: 121470 - DNA, 25 bp, Artificial
  Probe
cgttaagggtcgtacaattactgtg

SEQ ID NO: 121471 - DNA, 25 bp, Artificial
  Probe
cctgatttccacccaaacttaacct

SEQ ID NO: 121472 - DNA, 25 bp, Artificial
  Probe
tccacctcaccaagataattctgta

SEQ ID NO: 121473 - DNA, 25 bp, Artificial
  Probe
agagtccttgtattatactgtcagc

SEQ ID NO: 121474 - DNA, 25 bp, Artificial
  Probe
tatccacctcaccaagataattctg

SEQ ID NO: 121475 - DNA, 25 bp, Artificial
  Probe
atccacctcaccaagataattctgt

SEQ ID NO: 121476 - DNA, 25 bp, Artificial
  Probe
gcatatccacctcaccaagataatt

SEQ ID NO: 121477 - DNA, 25 bp, Artificial
  Probe
ccacctcaccaagataattctgtac

SEQ ID NO: 121478 - DNA, 25 bp, Artificial
  Probe
atatccacctcaccaagataattct

SEQ ID NO: 121479 - DNA, 25 bp, Artificial
  Probe
catatccacctcaccaagataattc

SEQ ID NO: 121480 - DNA, 25 bp, Artificial
  Probe
tccttgtattatactgtcagcttct

SEQ ID NO: 121481 - DNA, 25 bp, Artificial
  Probe
gtccttgtattatactgtcagcttc

SEQ ID NO: 121482 - DNA, 25 bp, Artificial
  Probe
gagtccttgtattatactgtcagct

SEQ ID NO: 121483 - DNA, 25 bp, Artificial
  Probe
ggcatatccacctcaccaagataat

SEQ ID NO: 121484 - DNA, 25 bp, Artificial
  Probe
agtccttgtattatactgtcagctt

SEQ ID NO: 121485 - DNA, 25 bp, Artificial
  Probe
cgagaaattacagaagttgacagtc

SEQ ID NO: 121486 - DNA, 25 bp, Artificial
  Probe
gtgtaaatgaatcctgaaccttgta

SEQ ID NO: 121487 - DNA, 25 bp, Artificial
  Probe
gagaaattacagaagttgacagtcc

SEQ ID NO: 121488 - DNA, 25 bp, Artificial
  Probe
agaaattacagaagttgacagtccc

SEQ ID NO: 121489 - DNA, 25 bp, Artificial
  Probe
ccgagaaattacagaagttgacagt

SEQ ID NO: 121490 - DNA, 25 bp, Artificial
  Probe
tgtattatactgtcagcttctgtgc

SEQ ID NO: 121491 - DNA, 25 bp, Artificial
  Probe
cgtgtaaatgaatcctgaaccttgt

SEQ ID NO: 121492 - DNA, 25 bp, Artificial
  Probe
ccttgtattatactgtcagcttctg

SEQ ID NO: 121493 - DNA, 25 bp, Artificial
  Probe
ttgtattatactgtcagcttctgtg

SEQ ID NO: 121494 - DNA, 25 bp, Artificial
  Probe
tgtaaatgaatcctgaaccttgtat

SEQ ID NO: 121495 - DNA, 25 bp, Artificial
  Probe
cccgagaaattacagaagttgacag

SEQ ID NO: 121496 - DNA, 25 bp, Artificial
  Probe
cttgtattatactgtcagcttctgt

SEQ ID NO: 121497 - DNA, 25 bp, Artificial
  Probe
tagagtccttgtattatactgtcag

SEQ ID NO: 121498 - DNA, 25 bp, Artificial
  Probe
gatggtgaccgttaatgactgtgag

SEQ ID NO: 121499 - DNA, 25 bp, Artificial
  Probe
ctagagtccttgtattatactgtca

SEQ ID NO: 121500 - DNA, 25 bp, Artificial
  Probe
gtattatactgtcagcttctgtgct

SEQ ID NO: 121501 - DNA, 25 bp, Artificial
  Probe
gcgtgtaaatgaatcctgaaccttg

SEQ ID NO: 121502 - DNA, 25 bp, Artificial
  Probe
gtaaatgaatcctgaaccttgtatt

SEQ ID NO: 121503 - DNA, 25 bp, Artificial
  Probe
gtctgcacaggatttattaacaagt

SEQ ID NO: 121504 - DNA, 25 bp, Artificial
  Probe
cgtctgcacaggatttattaacaag

SEQ ID NO: 121505 - DNA, 25 bp, Artificial
  Probe
tcgtctgcacaggatttattaacaa

SEQ ID NO: 121506 - DNA, 25 bp, Artificial
  Probe
aaatgaatcctgaaccttgtatttc

SEQ ID NO: 121507 - DNA, 25 bp, Artificial
  Probe
tgcgtgtaaatgaatcctgaacctt

SEQ ID NO: 121508 - DNA, 25 bp, Artificial
  Probe
cacctcaccaagataattctgtaca

SEQ ID NO: 121509 - DNA, 25 bp, Artificial
  Probe
tctgcacaggatttattaacaagtt

SEQ ID NO: 121510 - DNA, 25 bp, Artificial
  Probe
ctcgtctgcacaggatttattaaca

SEQ ID NO: 121511 - DNA, 25 bp, Artificial
  Probe
gaaccttgtatttcacctaatgtta

SEQ ID NO: 121512 - DNA, 25 bp, Artificial
  Probe
aaccttgtatttcacctaatgttag

SEQ ID NO: 121513 - DNA, 25 bp, Artificial
  Probe
ctgcgtgtaaatgaatcctgaacct

SEQ ID NO: 121514 - DNA, 25 bp, Artificial
  Probe
gcccgagaaattacagaagttgaca

SEQ ID NO: 121515 - DNA, 25 bp, Artificial
  Probe
tgcccgagaaattacagaagttgac

SEQ ID NO: 121516 - DNA, 25 bp, Artificial
  Probe
ctgtgctttctagagtccttgtatt

SEQ ID NO: 121517 - DNA, 25 bp, Artificial
  Probe
aaatcctttgatgcctactactgtg

SEQ ID NO: 121518 - DNA, 25 bp, Artificial
  Probe
agaagaaagaccaggatacattcac

SEQ ID NO: 121519 - DNA, 25 bp, Artificial
  Probe
aagaagaaagaccaggatacattca

SEQ ID NO: 121520 - DNA, 25 bp, Artificial
  Probe
gcaagaagaaagaccaggatacatt

SEQ ID NO: 121521 - DNA, 25 bp, Artificial
  Probe
caagaagaaagaccaggatacattc

SEQ ID NO: 121522 - DNA, 25 bp, Artificial
  Probe
gaagaaagaccaggatacattcacc

SEQ ID NO: 121523 - DNA, 25 bp, Artificial
  Probe
atttcaaagcaaagtggacagagtt

SEQ ID NO: 121524 - DNA, 25 bp, Artificial
  Probe
ggatgggtatttctcttacatttca

SEQ ID NO: 121525 - DNA, 25 bp, Artificial
  Probe
tggatgggtatttctcttacatttc

SEQ ID NO: 121526 - DNA, 25 bp, Artificial
  Probe
gatttcaaagcaaagtggacagagt

SEQ ID NO: 121527 - DNA, 25 bp, Artificial
  Probe
tctcttacatttcactacacatgct

SEQ ID NO: 121528 - DNA, 25 bp, Artificial
  Probe
tgatttcaaagcaaagtggacagag

SEQ ID NO: 121529 - DNA, 25 bp, Artificial
  Probe
ctcttacatttcactacacatgctt

SEQ ID NO: 121530 - DNA, 25 bp, Artificial
  Probe
ttctcttacatttcactacacatgc

SEQ ID NO: 121531 - DNA, 25 bp, Artificial
  Probe
gcatggatgggtatttctcttacat

SEQ ID NO: 121532 - DNA, 25 bp, Artificial
  Probe
atacagtgatatgctggaatactaa

SEQ ID NO: 121533 - DNA, 25 bp, Artificial
  Probe
aatacagtgatatgctggaatacta

SEQ ID NO: 121534 - DNA, 25 bp, Artificial
  Probe
taatacagtgatatgctggaatact

SEQ ID NO: 121535 - DNA, 25 bp, Artificial
  Probe
tcttacatttcactacacatgcttt

SEQ ID NO: 121536 - DNA, 25 bp, Artificial
  Probe
atgggtatttctcttacatttcact

SEQ ID NO: 121537 - DNA, 25 bp, Artificial
  Probe
atggatgggtatttctcttacattt

SEQ ID NO: 121538 - DNA, 25 bp, Artificial
  Probe
atggcatggatgggtatttctctta

SEQ ID NO: 121539 - DNA, 25 bp, Artificial
  Probe
aagaaagaccaggatacattcaccc

SEQ ID NO: 121540 - DNA, 25 bp, Artificial
  Probe
catggatgggtatttctcttacatt

SEQ ID NO: 121541 - DNA, 25 bp, Artificial
  Probe
ttgatttcaaagcaaagtggacaga

SEQ ID NO: 121542 - DNA, 25 bp, Artificial
  Probe
gatgggtatttctcttacatttcac

SEQ ID NO: 121543 - DNA, 25 bp, Artificial
  Probe
aatagcatgtgtccacagatgtcaa

SEQ ID NO: 121544 - DNA, 25 bp, Artificial
  Probe
atcggaatgtggttctgaaggtgta

SEQ ID NO: 121545 - DNA, 25 bp, Artificial
  Probe
tgggtatttctcttacatttcacta

SEQ ID NO: 121546 - DNA, 25 bp, Artificial
  Probe
tttcaaagcaaagtggacagagttg

SEQ ID NO: 121547 - DNA, 25 bp, Artificial
  Probe
gaatcggaatgtggttctgaaggtg

SEQ ID NO: 121548 - DNA, 25 bp, Artificial
  Probe
cgcaagaagaaagaccaggatacat

SEQ ID NO: 121549 - DNA, 25 bp, Artificial
  Probe
gggtatttctcttacatttcactac

SEQ ID NO: 121550 - DNA, 25 bp, Artificial
  Probe
ctagaaatagcatgtgtccacagat

SEQ ID NO: 121551 - DNA, 25 bp, Artificial
  Probe
tagaaatagcatgtgtccacagatg

SEQ ID NO: 121552 - DNA, 25 bp, Artificial
  Probe
aatcctttgatgcctactactgtgc

SEQ ID NO: 121553 - DNA, 25 bp, Artificial
  Probe
agaacctggaaagactatgcaaatc

SEQ ID NO: 121554 - DNA, 25 bp, Artificial
  Probe
cctctcagaacctggaaagactatg

SEQ ID NO: 121555 - DNA, 25 bp, Artificial
  Probe
ggcatggatgggtatttctcttaca

SEQ ID NO: 121556 - DNA, 25 bp, Artificial
  Probe
tggcatggatgggtatttctcttac

SEQ ID NO: 121557 - DNA, 25 bp, Artificial
  Probe
aacctggaaagactatgcaaatctc

SEQ ID NO: 121558 - DNA, 25 bp, Artificial
  Probe
gaacctggaaagactatgcaaatct

SEQ ID NO: 121559 - DNA, 25 bp, Artificial
  Probe
atagcatgtgtccacagatgtcaac

SEQ ID NO: 121560 - DNA, 25 bp, Artificial
  Probe
ataatacagtgatatgctggaatac

SEQ ID NO: 121561 - DNA, 25 bp, Artificial
  Probe
tttgatgagaagacgatgcagaaag

SEQ ID NO: 121562 - DNA, 25 bp, Artificial
  Probe
aaagcatttcaaatcaacaggtaga

SEQ ID NO: 121563 - DNA, 25 bp, Artificial
  Probe
aagcatttcaaatcaacaggtagaa

SEQ ID NO: 121564 - DNA, 25 bp, Artificial
  Probe
ccacagtctctccagatacctttat

SEQ ID NO: 121565 - DNA, 25 bp, Artificial
  Probe
cacagtctctccagatacctttata

SEQ ID NO: 121566 - DNA, 25 bp, Artificial
  Probe
tcaaatcaacaggtagaaagagaaa

SEQ ID NO: 121567 - DNA, 25 bp, Artificial
  Probe
ttcaaatcaacaggtagaaagagaa

SEQ ID NO: 121568 - DNA, 25 bp, Artificial
  Probe
atctagccacagtctctccagatac

SEQ ID NO: 121569 - DNA, 25 bp, Artificial
  Probe
catctagccacagtctctccagata

SEQ ID NO: 121570 - DNA, 25 bp, Artificial
  Probe
acagtctctccagatacctttataa

SEQ ID NO: 121571 - DNA, 25 bp, Artificial
  Probe
tagccacagtctctccagatacctt

SEQ ID NO: 121572 - DNA, 25 bp, Artificial
  Probe
agcatttcaaatcaacaggtagaaa

SEQ ID NO: 121573 - DNA, 25 bp, Artificial
  Probe
gcatttcaaatcaacaggtagaaag

SEQ ID NO: 121574 - DNA, 25 bp, Artificial
  Probe
caaaccaaaacaaaacagaaccaaa

SEQ ID NO: 121575 - DNA, 25 bp, Artificial
  Probe
aaaccaaaccaaaacaaaacagaac

SEQ ID NO: 121576 - DNA, 25 bp, Artificial
  Probe
caaaccaaaccaaaacaaaacagaa

SEQ ID NO: 121577 - DNA, 25 bp, Artificial
  Probe
aaaaccaaaccaaaccaaaacaaaa

SEQ ID NO: 121578 - DNA, 25 bp, Artificial
  Probe
cttagaaaccaaaaccaaaccaaac

SEQ ID NO: 121579 - DNA, 25 bp, Artificial
  Probe
aaaccaaaccaaaccaaaacaaaac

SEQ ID NO: 121580 - DNA, 25 bp, Artificial
  Probe
caaaaccaaaccaaaccaaaacaaa

SEQ ID NO: 121581 - DNA, 25 bp, Artificial
  Probe
ccttagaaaccaaaaccaaaccaaa

SEQ ID NO: 121582 - DNA, 25 bp, Artificial
  Probe
aaaccaaaacaaaacagaaccaaaa

SEQ ID NO: 121583 - DNA, 25 bp, Artificial
  Probe
ttaccccttagaaaccaaaaccaaa

SEQ ID NO: 121584 - DNA, 25 bp, Artificial
  Probe
tttaccccttagaaaccaaaaccaa

SEQ ID NO: 121585 - DNA, 25 bp, Artificial
  Probe
ttagaaaccaaaaccaaaccaaacc

SEQ ID NO: 121586 - DNA, 25 bp, Artificial
  Probe
tttcaaatcaacaggtagaaagaga

SEQ ID NO: 121587 - DNA, 25 bp, Artificial
  Probe
ctttaccccttagaaaccaaaacca

SEQ ID NO: 121588 - DNA, 25 bp, Artificial
  Probe
gccacagtctctccagataccttta

SEQ ID NO: 121589 - DNA, 25 bp, Artificial
  Probe
ctctttaccccttagaaaccaaaac

SEQ ID NO: 121590 - DNA, 25 bp, Artificial
  Probe
tctctttaccccttagaaaccaaaa

SEQ ID NO: 121591 - DNA, 25 bp, Artificial
  Probe
aaccaaaccaaaccaaaacaaaaca

SEQ ID NO: 121592 - DNA, 25 bp, Artificial
  Probe
aaaccaaaaccaaaccaaaccaaaa

SEQ ID NO: 121593 - DNA, 25 bp, Artificial
  Probe
taccccttagaaaccaaaaccaaac

SEQ ID NO: 121594 - DNA, 25 bp, Artificial
  Probe
tctttaccccttagaaaccaaaacc

SEQ ID NO: 121595 - DNA, 25 bp, Artificial
  Probe
aaaagcatttcaaatcaacaggtag

SEQ ID NO: 121596 - DNA, 25 bp, Artificial
  Probe
ccaaaccaaaacaaaacagaaccaa

SEQ ID NO: 121597 - DNA, 25 bp, Artificial
  Probe
aaccaaaccaaaacaaaacagaacc

SEQ ID NO: 121598 - DNA, 25 bp, Artificial
  Probe
ccaaaccaaaccaaaacaaaacaga

SEQ ID NO: 121599 - DNA, 25 bp, Artificial
  Probe
ctagccacagtctctccagatacct

SEQ ID NO: 121600 - DNA, 25 bp, Artificial
  Probe
tctagccacagtctctccagatacc

SEQ ID NO: 121601 - DNA, 25 bp, Artificial
  Probe
tagaaaccaaaaccaaaccaaacca

SEQ ID NO: 121602 - DNA, 25 bp, Artificial
  Probe
catttcaaatcaacaggtagaaaga

SEQ ID NO: 121603 - DNA, 25 bp, Artificial
  Probe
accaaaccaaaccaaaacaaaacag

SEQ ID NO: 121604 - DNA, 25 bp, Artificial
  Probe
gaaaccaaaaccaaaccaaaccaaa

SEQ ID NO: 121605 - DNA, 25 bp, Artificial
  Probe
ccaaaaccaaaccaaaccaaaacaa

SEQ ID NO: 121606 - DNA, 25 bp, Artificial
  Probe
aaccaaaaccaaaccaaaccaaaac

SEQ ID NO: 121607 - DNA, 25 bp, Artificial
  Probe
gtaaataatgacagaatggagtggg

SEQ ID NO: 121608 - DNA, 25 bp, Artificial
  Probe
cacacacacacagactctttcattt

SEQ ID NO: 121609 - DNA, 25 bp, Artificial
  Probe
cgtgtaaataatgacagaatggagt

SEQ ID NO: 121610 - DNA, 25 bp, Artificial
  Probe
tgtaaataatgacagaatggagtgg

SEQ ID NO: 121611 - DNA, 25 bp, Artificial
  Probe
gtgtaaataatgacagaatggagtg

SEQ ID NO: 121612 - DNA, 25 bp, Artificial
  Probe
acacacacacacagactctttcatt

SEQ ID NO: 121613 - DNA, 25 bp, Artificial
  Probe
taaataatgacagaatggagtgggg

SEQ ID NO: 121614 - DNA, 25 bp, Artificial
  Probe
acgtgtaaataatgacagaatggag

SEQ ID NO: 121615 - DNA, 25 bp, Artificial
  Probe
atacaagaaaatgacaacacagacc

SEQ ID NO: 121616 - DNA, 25 bp, Artificial
  Probe
tctattttatttctgtgagtggggt

SEQ ID NO: 121617 - DNA, 25 bp, Artificial
  Probe
aatggagtggggtaaaagtgtattt

SEQ ID NO: 121618 - DNA, 25 bp, Artificial
  Probe
attttatttctgtgagtggggtagg

SEQ ID NO: 121619 - DNA, 25 bp, Artificial
  Probe
gaatggagtggggtaaaagtgtatt

SEQ ID NO: 121620 - DNA, 25 bp, Artificial
  Probe
tacaagaaaatgacaacacagacca

SEQ ID NO: 121621 - DNA, 25 bp, Artificial
  Probe
aaaggcaaattacttgtgatctatt

SEQ ID NO: 121622 - DNA, 25 bp, Artificial
  Probe
cacacacacacacagactctttcat

SEQ ID NO: 121623 - DNA, 25 bp, Artificial
  Probe
ataatgacagaatggagtggggtaa

SEQ ID NO: 121624 - DNA, 25 bp, Artificial
  Probe
aataatgacagaatggagtggggta

SEQ ID NO: 121625 - DNA, 25 bp, Artificial
  Probe
agaatggagtggggtaaaagtgtat

SEQ ID NO: 121626 - DNA, 25 bp, Artificial
  Probe
taatgacagaatggagtggggtaaa

SEQ ID NO: 121627 - DNA, 25 bp, Artificial
  Probe
acacacacacagactctttcatttt

SEQ ID NO: 121628 - DNA, 25 bp, Artificial
  Probe
atctattttatttctgtgagtgggg

SEQ ID NO: 121629 - DNA, 25 bp, Artificial
  Probe
aaggcaaattacttgtgatctattt

SEQ ID NO: 121630 - DNA, 25 bp, Artificial
  Probe
tattttatttctgtgagtggggtag

SEQ ID NO: 121631 - DNA, 25 bp, Artificial
  Probe
ctattttatttctgtgagtggggta

SEQ ID NO: 121632 - DNA, 25 bp, Artificial
  Probe
aatacaagaaaatgacaacacagac

SEQ ID NO: 121633 - DNA, 25 bp, Artificial
  Probe
tacgtgtaaataatgacagaatgga

SEQ ID NO: 121634 - DNA, 25 bp, Artificial
  Probe
aaataatgacagaatggagtggggt

SEQ ID NO: 121635 - DNA, 25 bp, Artificial
  Probe
aatgacagaatggagtggggtaaaa

SEQ ID NO: 121636 - DNA, 25 bp, Artificial
  Probe
aagaaaatgacaacacagaccacac

SEQ ID NO: 121637 - DNA, 25 bp, Artificial
  Probe
caagaaaatgacaacacagaccaca

SEQ ID NO: 121638 - DNA, 25 bp, Artificial
  Probe
acaagaaaatgacaacacagaccac

SEQ ID NO: 121639 - DNA, 25 bp, Artificial
  Probe
cagaatggagtggggtaaaagtgta

SEQ ID NO: 121640 - DNA, 25 bp, Artificial
  Probe
atggagtggggtaaaagtgtatttt

SEQ ID NO: 121641 - DNA, 25 bp, Artificial
  Probe
aaatgacaacacagaccacacacac

SEQ ID NO: 121642 - DNA, 25 bp, Artificial
  Probe
gagtggggtaaaagtgtattttgaa

SEQ ID NO: 121643 - DNA, 25 bp, Artificial
  Probe
aatgacaacacagaccacacacaca

SEQ ID NO: 121644 - DNA, 25 bp, Artificial
  Probe
atgacagaatggagtggggtaaaag

SEQ ID NO: 121645 - DNA, 25 bp, Artificial
  Probe
ggagtggggtaaaagtgtattttga

SEQ ID NO: 121646 - DNA, 25 bp, Artificial
  Probe
cacacacacacacacagactctttc

SEQ ID NO: 121647 - DNA, 25 bp, Artificial
  Probe
tggagtggggtaaaagtgtattttg

SEQ ID NO: 121648 - DNA, 25 bp, Artificial
  Probe
agtggggtaaaagtgtattttgaat

SEQ ID NO: 121649 - DNA, 25 bp, Artificial
  Probe
atacgtgtaaataatgacagaatgg

SEQ ID NO: 121650 - DNA, 25 bp, Artificial
  Probe
ttttatttctgtgagtggggtaggc

SEQ ID NO: 121651 - DNA, 25 bp, Artificial
  Probe
gaaaatgacaacacagaccacacac

SEQ ID NO: 121652 - DNA, 25 bp, Artificial
  Probe
ccttcctgaagttgctgtgatatgg

SEQ ID NO: 121653 - DNA, 25 bp, Artificial
  Probe
caattctgcctccaaggattctgag

SEQ ID NO: 121654 - DNA, 25 bp, Artificial
  Probe
tttactgggaagtgaagctctactg

SEQ ID NO: 121655 - DNA, 25 bp, Artificial
  Probe
gtttactgggaagtgaagctctact

SEQ ID NO: 121656 - DNA, 25 bp, Artificial
  Probe
agtttactgggaagtgaagctctac

SEQ ID NO: 121657 - DNA, 25 bp, Artificial
  Probe
cagagagacgcaagaagctagagaa

SEQ ID NO: 121658 - DNA, 25 bp, Artificial
  Probe
cagtttactgggaagtgaagctcta

SEQ ID NO: 121659 - DNA, 25 bp, Artificial
  Probe
gagagacgcaagaagctagagaaag

SEQ ID NO: 121660 - DNA, 25 bp, Artificial
  Probe
cttcctgaagttgctgtgatatggg

SEQ ID NO: 121661 - DNA, 25 bp, Artificial
  Probe
cccttcctgaagttgctgtgatatg

SEQ ID NO: 121662 - DNA, 25 bp, Artificial
  Probe
agagagacgcaagaagctagagaaa

SEQ ID NO: 121663 - DNA, 25 bp, Artificial
  Probe
ccaattctgcctccaaggattctga

SEQ ID NO: 121664 - DNA, 25 bp, Artificial
  Probe
ctctactggggacaggattattctg

SEQ ID NO: 121665 - DNA, 25 bp, Artificial
  Probe
tccaattctgcctccaaggattctg

SEQ ID NO: 121666 - DNA, 25 bp, Artificial
  Probe
gtccaattctgcctccaaggattct

SEQ ID NO: 121667 - DNA, 25 bp, Artificial
  Probe
ttactgggaagtgaagctctactgg

SEQ ID NO: 121668 - DNA, 25 bp, Artificial
  Probe
aacatgagcactgttcggattcttc

SEQ ID NO: 121669 - DNA, 25 bp, Artificial
  Probe
tgtccaattctgcctccaaggattc

SEQ ID NO: 121670 - DNA, 25 bp, Artificial
  Probe
ctgtccaattctgcctccaaggatt

SEQ ID NO: 121671 - DNA, 25 bp, Artificial
  Probe
aattctgcctccaaggattctgagc

SEQ ID NO: 121672 - DNA, 25 bp, Artificial
  Probe
gtaaacatgagcactgttcggattc

SEQ ID NO: 121673 - DNA, 25 bp, Artificial
  Probe
tgccttatcgcatccatgtaaacat

SEQ ID NO: 121674 - DNA, 25 bp, Artificial
  Probe
taaacatgagcactgttcggattct

SEQ ID NO: 121675 - DNA, 25 bp, Artificial
  Probe
cttatcgcatccatgtaaacatgag

SEQ ID NO: 121676 - DNA, 25 bp, Artificial
  Probe
atgtaaacatgagcactgttcggat

SEQ ID NO: 121677 - DNA, 25 bp, Artificial
  Probe
gactgccttatcgcatccatgtaaa

SEQ ID NO: 121678 - DNA, 25 bp, Artificial
  Probe
ccttatcgcatccatgtaaacatga

SEQ ID NO: 121679 - DNA, 25 bp, Artificial
  Probe
tgtaaacatgagcactgttcggatt

SEQ ID NO: 121680 - DNA, 25 bp, Artificial
  Probe
gctctactggggacaggattattct

SEQ ID NO: 121681 - DNA, 25 bp, Artificial
  Probe
atccatgtaaacatgagcactgttc

SEQ ID NO: 121682 - DNA, 25 bp, Artificial
  Probe
ctgccttatcgcatccatgtaaaca

SEQ ID NO: 121683 - DNA, 25 bp, Artificial
  Probe
actgccttatcgcatccatgtaaac

SEQ ID NO: 121684 - DNA, 25 bp, Artificial
  Probe
catccatgtaaacatgagcactgtt

SEQ ID NO: 121685 - DNA, 25 bp, Artificial
  Probe
ttatcgcatccatgtaaacatgagc

SEQ ID NO: 121686 - DNA, 25 bp, Artificial
  Probe
aaacatgagcactgttcggattctt

SEQ ID NO: 121687 - DNA, 25 bp, Artificial
  Probe
tctactggggacaggattattctgc

SEQ ID NO: 121688 - DNA, 25 bp, Artificial
  Probe
gcccttcctgaagttgctgtgatat

SEQ ID NO: 121689 - DNA, 25 bp, Artificial
  Probe
aagctctactggggacaggattatt

SEQ ID NO: 121690 - DNA, 25 bp, Artificial
  Probe
ggactgccttatcgcatccatgtaa

SEQ ID NO: 121691 - DNA, 25 bp, Artificial
  Probe
tatcgcatccatgtaaacatgagca

SEQ ID NO: 121692 - DNA, 25 bp, Artificial
  Probe
gccttatcgcatccatgtaaacatg

SEQ ID NO: 121693 - DNA, 25 bp, Artificial
  Probe
agctctactggggacaggattattc

SEQ ID NO: 121694 - DNA, 25 bp, Artificial
  Probe
gaagctctactggggacaggattat

SEQ ID NO: 121695 - DNA, 25 bp, Artificial
  Probe
ttcctgaagttgctgtgatatgggg

SEQ ID NO: 121696 - DNA, 25 bp, Artificial
  Probe
tactgggaagtgaagctctactggg

SEQ ID NO: 121697 - DNA, 25 bp, Artificial
  Probe
tcagtaagttccgaattatctcagc

SEQ ID NO: 121698 - DNA, 25 bp, Artificial
  Probe
gcacattatattcagtaagttccga

SEQ ID NO: 121699 - DNA, 25 bp, Artificial
  Probe
agcacattatattcagtaagttccg

SEQ ID NO: 121700 - DNA, 25 bp, Artificial
  Probe
ttcagtaagttccgaattatctcag

SEQ ID NO: 121701 - DNA, 25 bp, Artificial
  Probe
gagcacattatattcagtaagttcc

SEQ ID NO: 121702 - DNA, 25 bp, Artificial
  Probe
cagtaagttccgaattatctcagct

SEQ ID NO: 121703 - DNA, 25 bp, Artificial
  Probe
atatttcttattctgattgtgcccg

SEQ ID NO: 121704 - DNA, 25 bp, Artificial
  Probe
agatggtcttaatttctgggatgaa

SEQ ID NO: 121705 - DNA, 25 bp, Artificial
  Probe
cacattatattcagtaagttccgaa

SEQ ID NO: 121706 - DNA, 25 bp, Artificial
  Probe
ccagtgaaaccaataacttctcaaa

SEQ ID NO: 121707 - DNA, 25 bp, Artificial
  Probe
agagcacattatattcagtaagttc

SEQ ID NO: 121708 - DNA, 25 bp, Artificial
  Probe
cccagtgaaaccaataacttctcaa

SEQ ID NO: 121709 - DNA, 25 bp, Artificial
  Probe
attcagtaagttccgaattatctca

SEQ ID NO: 121710 - DNA, 25 bp, Artificial
  Probe
ctcccagtgaaaccaataacttctc

SEQ ID NO: 121711 - DNA, 25 bp, Artificial
  Probe
tcccagtgaaaccaataacttctca

SEQ ID NO: 121712 - DNA, 25 bp, Artificial
  Probe
aagagcacattatattcagtaagtt

SEQ ID NO: 121713 - DNA, 25 bp, Artificial
  Probe
cagtgaaaccaataacttctcaaat

SEQ ID NO: 121714 - DNA, 25 bp, Artificial
  Probe
atctccactttatttcataactggc

SEQ ID NO: 121715 - DNA, 25 bp, Artificial
  Probe
aaatgcctcccagtgaaaccaataa

SEQ ID NO: 121716 - DNA, 25 bp, Artificial
  Probe
cctcccagtgaaaccaataacttct

SEQ ID NO: 121717 - DNA, 25 bp, Artificial
  Probe
tcactaacctagtttcctaacatca

SEQ ID NO: 121718 - DNA, 25 bp, Artificial
  Probe
actcactaacctagtttcctaacat

SEQ ID NO: 121719 - DNA, 25 bp, Artificial
  Probe
tatatttcttattctgattgtgccc

SEQ ID NO: 121720 - DNA, 25 bp, Artificial
  Probe
ggaggaaagtaactgtgggatgtta

SEQ ID NO: 121721 - DNA, 25 bp, Artificial
  Probe
ctcactaacctagtttcctaacatc

SEQ ID NO: 121722 - DNA, 25 bp, Artificial
  Probe
gatggtcttaatttctgggatgaaa

SEQ ID NO: 121723 - DNA, 25 bp, Artificial
  Probe
aagatggtcttaatttctgggatga

SEQ ID NO: 121724 - DNA, 25 bp, Artificial
  Probe
cactaacctagtttcctaacatcaa

SEQ ID NO: 121725 - DNA, 25 bp, Artificial
  Probe
aaagatggtcttaatttctgggatg

SEQ ID NO: 121726 - DNA, 25 bp, Artificial
  Probe
aatgcctcccagtgaaaccaataac

SEQ ID NO: 121727 - DNA, 25 bp, Artificial
  Probe
caaatgcctcccagtgaaaccaata

SEQ ID NO: 121728 - DNA, 25 bp, Artificial
  Probe
taagagcacattatattcagtaagt

SEQ ID NO: 121729 - DNA, 25 bp, Artificial
  Probe
gtaatcccaaccccaaactaagtag

SEQ ID NO: 121730 - DNA, 25 bp, Artificial
  Probe
attatgttttccaaaattgagcccc

SEQ ID NO: 121731 - DNA, 25 bp, Artificial
  Probe
tattcagtaagttccgaattatctc

SEQ ID NO: 121732 - DNA, 25 bp, Artificial
  Probe
aactcactaacctagtttcctaaca

SEQ ID NO: 121733 - DNA, 25 bp, Artificial
  Probe
actaacctagtttcctaacatcaat

SEQ ID NO: 121734 - DNA, 25 bp, Artificial
  Probe
agtgaaaccaataacttctcaaata

SEQ ID NO: 121735 - DNA, 25 bp, Artificial
  Probe
cactttatttcataactggcccaaa

SEQ ID NO: 121736 - DNA, 25 bp, Artificial
  Probe
agtaatcccaaccccaaactaagta

SEQ ID NO: 121737 - DNA, 25 bp, Artificial
  Probe
acattatattcagtaagttccgaat

SEQ ID NO: 121738 - DNA, 25 bp, Artificial
  Probe
taatcccaaccccaaactaagtagg

SEQ ID NO: 121739 - DNA, 25 bp, Artificial
  Probe
ctaacctagtttcctaacatcaatt

SEQ ID NO: 121740 - DNA, 25 bp, Artificial
  Probe
aatctccactttatttcataactgg

SEQ ID NO: 121741 - DNA, 25 bp, Artificial
  Probe
aattatgttttccaaaattgagccc

SEQ ID NO: 121742 - DNA, 25 bp, Artificial
  Probe
cggctgaatgagagagaagtagtaa

SEQ ID NO: 121743 - DNA, 25 bp, Artificial
  Probe
ttcaacaagaatggcaatatgtcag

SEQ ID NO: 121744 - DNA, 25 bp, Artificial
  Probe
cttcaacaagaatggcaatatgtca

SEQ ID NO: 121745 - DNA, 25 bp, Artificial
  Probe
ggtacacacttcagtcagttaatga

SEQ ID NO: 121746 - DNA, 25 bp, Artificial
  Probe
catgctaattgtaattccacggaag

SEQ ID NO: 121747 - DNA, 25 bp, Artificial
  Probe
cttgagaagaattacaacctggtgg

SEQ ID NO: 121748 - DNA, 25 bp, Artificial
  Probe
atatggatggtactgaggaactctc

SEQ ID NO: 121749 - DNA, 25 bp, Artificial
  Probe
ttgagaagaattacaacctggtgga

SEQ ID NO: 121750 - DNA, 25 bp, Artificial
  Probe
tcaacaagaatggcaatatgtcagg

SEQ ID NO: 121751 - DNA, 25 bp, Artificial
  Probe
tgagaagaattacaacctggtggag

SEQ ID NO: 121752 - DNA, 25 bp, Artificial
  Probe
gagtaccatcacagtgaatgaagag

SEQ ID NO: 121753 - DNA, 25 bp, Artificial
  Probe
caagaatggcaatatgtcaggcatc

SEQ ID NO: 121754 - DNA, 25 bp, Artificial
  Probe
gcttgagaagaattacaacctggtg

SEQ ID NO: 121755 - DNA, 25 bp, Artificial
  Probe
cagagtaccatcacagtgaatgaag

SEQ ID NO: 121756 - DNA, 25 bp, Artificial
  Probe
atctcagaccagaggatcatcattg

SEQ ID NO: 121757 - DNA, 25 bp, Artificial
  Probe
catctcagaccagaggatcatcatt

SEQ ID NO: 121758 - DNA, 25 bp, Artificial
  Probe
aagaatggcaatatgtcaggcatct

SEQ ID NO: 121759 - DNA, 25 bp, Artificial
  Probe
agagtaccatcacagtgaatgaaga

SEQ ID NO: 121760 - DNA, 25 bp, Artificial
  Probe
ttctcagatcctgccttcatatcaa

SEQ ID NO: 121761 - DNA, 25 bp, Artificial
  Probe
ggctgaatgagagagaagtagtaaa

SEQ ID NO: 121762 - DNA, 25 bp, Artificial
  Probe
aatatcatctgttctgctttgtgtc

SEQ ID NO: 121763 - DNA, 25 bp, Artificial
  Probe
atatcatctgttctgctttgtgtca

SEQ ID NO: 121764 - DNA, 25 bp, Artificial
  Probe
ctaattgtaattccacggaagctgt

SEQ ID NO: 121765 - DNA, 25 bp, Artificial
  Probe
cttctcagatcctgccttcatatca

SEQ ID NO: 121766 - DNA, 25 bp, Artificial
  Probe
acttctcagatcctgccttcatatc

SEQ ID NO: 121767 - DNA, 25 bp, Artificial
  Probe
gacttctcagatcctgccttcatat

SEQ ID NO: 121768 - DNA, 25 bp, Artificial
  Probe
taattgtaattccacggaagctgtc

SEQ ID NO: 121769 - DNA, 25 bp, Artificial
  Probe
aaatatcatctgttctgctttgtgt

SEQ ID NO: 121770 - DNA, 25 bp, Artificial
  Probe
cacagatgttaatgcaactaatggt

SEQ ID NO: 121771 - DNA, 25 bp, Artificial
  Probe
acagatgttaatgcaactaatggtc

SEQ ID NO: 121772 - DNA, 25 bp, Artificial
  Probe
ttggagaatacagactctgctactc

SEQ ID NO: 121773 - DNA, 25 bp, Artificial
  Probe
cctttatattcagaagcagtttccc

SEQ ID NO: 121774 - DNA, 25 bp, Artificial
  Probe
cagatgttaatgcaactaatggtcg

SEQ ID NO: 121775 - DNA, 25 bp, Artificial
  Probe
gatgttaatgcaactaatggtcgtg

SEQ ID NO: 121776 - DNA, 25 bp, Artificial
  Probe
agatgttaatgcaactaatggtcgt

SEQ ID NO: 121777 - DNA, 25 bp, Artificial
  Probe
aataaattcccagtagaaatgacgc

SEQ ID NO: 121778 - DNA, 25 bp, Artificial
  Probe
aattcccagtagaaatgacgcataa

SEQ ID NO: 121779 - DNA, 25 bp, Artificial
  Probe
aaattcccagtagaaatgacgcata

SEQ ID NO: 121780 - DNA, 25 bp, Artificial
  Probe
taaattcccagtagaaatgacgcat

SEQ ID NO: 121781 - DNA, 25 bp, Artificial
  Probe
ataaattcccagtagaaatgacgca

SEQ ID NO: 121782 - DNA, 25 bp, Artificial
  Probe
atattcagaagcagtttcccatacg

SEQ ID NO: 121783 - DNA, 25 bp, Artificial
  Probe
ctttatattcagaagcagtttccca

SEQ ID NO: 121784 - DNA, 25 bp, Artificial
  Probe
acctttatattcagaagcagtttcc

SEQ ID NO: 121785 - DNA, 25 bp, Artificial
  Probe
agaatggcaatatgtcaggcatctc

SEQ ID NO: 121786 - DNA, 25 bp, Artificial
  Probe
catctgttctgctttgtgtcaatag

SEQ ID NO: 121787 - DNA, 25 bp, Artificial
  Probe
agagttgtcatttggggataatcag

SEQ ID NO: 121788 - DNA, 25 bp, Artificial
  Probe
cagagttgtcatttggggataatca

SEQ ID NO: 121789 - DNA, 25 bp, Artificial
  Probe
gagttgtcatttggggataatcagg

SEQ ID NO: 121790 - DNA, 25 bp, Artificial
  Probe
gcagagttgtcatttggggataatc

SEQ ID NO: 121791 - DNA, 25 bp, Artificial
  Probe
cttagagaatgtgcgtgcagagttg

SEQ ID NO: 121792 - DNA, 25 bp, Artificial
  Probe
ttgtcatttggggataatcagggtc

SEQ ID NO: 121793 - DNA, 25 bp, Artificial
  Probe
agttgtcatttggggataatcaggg

SEQ ID NO: 121794 - DNA, 25 bp, Artificial
  Probe
gttgtcatttggggataatcagggt

SEQ ID NO: 121795 - DNA, 25 bp, Artificial
  Probe
tcttagagaatgtgcgtgcagagtt

SEQ ID NO: 121796 - DNA, 25 bp, Artificial
  Probe
ttagagaatgtgcgtgcagagttgt

SEQ ID NO: 121797 - DNA, 25 bp, Artificial
  Probe
tgcagagttgtcatttggggataat

SEQ ID NO: 121798 - DNA, 25 bp, Artificial
  Probe
tagagaatgtgcgtgcagagttgtc

SEQ ID NO: 121799 - DNA, 25 bp, Artificial
  Probe
ttcttagagaatgtgcgtgcagagt

SEQ ID NO: 121800 - DNA, 25 bp, Artificial
  Probe
gtgcagagttgtcatttggggataa

SEQ ID NO: 121801 - DNA, 25 bp, Artificial
  Probe
attcttagagaatgtgcgtgcagag

SEQ ID NO: 121802 - DNA, 25 bp, Artificial
  Probe
gatgaagctgctttaccacttccag

SEQ ID NO: 121803 - DNA, 25 bp, Artificial
  Probe
cagatgaagctgctttaccacttcc

SEQ ID NO: 121804 - DNA, 25 bp, Artificial
  Probe
tgtcatttggggataatcagggtcc

SEQ ID NO: 121805 - DNA, 25 bp, Artificial
  Probe
tcatttggggataatcagggtccac

SEQ ID NO: 121806 - DNA, 25 bp, Artificial
  Probe
gtcatttggggataatcagggtcca

SEQ ID NO: 121807 - DNA, 25 bp, Artificial
  Probe
agatgaagctgctttaccacttcca

SEQ ID NO: 121808 - DNA, 25 bp, Artificial
  Probe
gagatgctcagtcccaaggagaaaa

SEQ ID NO: 121809 - DNA, 25 bp, Artificial
  Probe
gaatgtgcgtgcagagttgtcattt

SEQ ID NO: 121810 - DNA, 25 bp, Artificial
  Probe
aatgtgcgtgcagagttgtcatttg

SEQ ID NO: 121811 - DNA, 25 bp, Artificial
  Probe
catttggggataatcagggtccacc

SEQ ID NO: 121812 - DNA, 25 bp, Artificial
  Probe
cgtgcagagttgtcatttggggata

SEQ ID NO: 121813 - DNA, 25 bp, Artificial
  Probe
gctaagactgatgtatctcctcatt

SEQ ID NO: 121814 - DNA, 25 bp, Artificial
  Probe
tgatgtatctcctcattccagaaga

SEQ ID NO: 121815 - DNA, 25 bp, Artificial
  Probe
aagactgatgtatctcctcattcca

SEQ ID NO: 121816 - DNA, 25 bp, Artificial
  Probe
taagactgatgtatctcctcattcc

SEQ ID NO: 121817 - DNA, 25 bp, Artificial
  Probe
aagatggacagagagagagagagag

SEQ ID NO: 121818 - DNA, 25 bp, Artificial
  Probe
gaagatggacagagagagagagaga

SEQ ID NO: 121819 - DNA, 25 bp, Artificial
  Probe
agaagatggacagagagagagagag

SEQ ID NO: 121820 - DNA, 25 bp, Artificial
  Probe
ctgatgtatctcctcattccagaag

SEQ ID NO: 121821 - DNA, 25 bp, Artificial
  Probe
actgatgtatctcctcattccagaa

SEQ ID NO: 121822 - DNA, 25 bp, Artificial
  Probe
cagaagatggacagagagagagaga

SEQ ID NO: 121823 - DNA, 25 bp, Artificial
  Probe
gactgatgtatctcctcattccaga

SEQ ID NO: 121824 - DNA, 25 bp, Artificial
  Probe
agactgatgtatctcctcattccag

SEQ ID NO: 121825 - DNA, 25 bp, Artificial
  Probe
ctaagactgatgtatctcctcattc

SEQ ID NO: 121826 - DNA, 25 bp, Artificial
  Probe
agctaagactgatgtatctcctcat

SEQ ID NO: 121827 - DNA, 25 bp, Artificial
  Probe
ttgagctaagactgatgtatctcct

SEQ ID NO: 121828 - DNA, 25 bp, Artificial
  Probe
gtaaatacagaaaggaagaggtcgg

SEQ ID NO: 121829 - DNA, 25 bp, Artificial
  Probe
gagctaagactgatgtatctcctca

SEQ ID NO: 121830 - DNA, 25 bp, Artificial
  Probe
tgagctaagactgatgtatctcctc

SEQ ID NO: 121831 - DNA, 25 bp, Artificial
  Probe
atgtatctcctcattccagaagatg

SEQ ID NO: 121832 - DNA, 25 bp, Artificial
  Probe
gatgtatctcctcattccagaagat

SEQ ID NO: 121833 - DNA, 25 bp, Artificial
  Probe
ccactatttctcttatccctcccag

SEQ ID NO: 121834 - DNA, 25 bp, Artificial
  Probe
tgtatctcctcattccagaagatgg

SEQ ID NO: 121835 - DNA, 25 bp, Artificial
  Probe
taaatacagaaaggaagaggtcggg

SEQ ID NO: 121836 - DNA, 25 bp, Artificial
  Probe
agaaggtgattgacagattctgatt

SEQ ID NO: 121837 - DNA, 25 bp, Artificial
  Probe
aagaaggtgattgacagattctgat

SEQ ID NO: 121838 - DNA, 25 bp, Artificial
  Probe
caagaaggtgattgacagattctga

SEQ ID NO: 121839 - DNA, 25 bp, Artificial
  Probe
tgtaaatacagaaaggaagaggtcg

SEQ ID NO: 121840 - DNA, 25 bp, Artificial
  Probe
gtacatagctgtcactcaagaaggt

SEQ ID NO: 121841 - DNA, 25 bp, Artificial
  Probe
cactatttctcttatccctcccagc

SEQ ID NO: 121842 - DNA, 25 bp, Artificial
  Probe
ctcaagaaggtgattgacagattct

SEQ ID NO: 121843 - DNA, 25 bp, Artificial
  Probe
actcaagaaggtgattgacagattc

SEQ ID NO: 121844 - DNA, 25 bp, Artificial
  Probe
cactcaagaaggtgattgacagatt

SEQ ID NO: 121845 - DNA, 25 bp, Artificial
  Probe
tacatagctgtcactcaagaaggtg

SEQ ID NO: 121846 - DNA, 25 bp, Artificial
  Probe
tcaagaaggtgattgacagattctg

SEQ ID NO: 121847 - DNA, 25 bp, Artificial
  Probe
gaaggtgattgacagattctgattt

SEQ ID NO: 121848 - DNA, 25 bp, Artificial
  Probe
cccactatttctcttatccctccca

SEQ ID NO: 121849 - DNA, 25 bp, Artificial
  Probe
tttgagctaagactgatgtatctcc

SEQ ID NO: 121850 - DNA, 25 bp, Artificial
  Probe
ccagaagatggacagagagagagag

SEQ ID NO: 121851 - DNA, 25 bp, Artificial
  Probe
ctatttctcttatccctcccagctc

SEQ ID NO: 121852 - DNA, 25 bp, Artificial
  Probe
agatggacagagagagagagagagc

SEQ ID NO: 121853 - DNA, 25 bp, Artificial
  Probe
aaggtgattgacagattctgattta

SEQ ID NO: 121854 - DNA, 25 bp, Artificial
  Probe
tatttctcttatccctcccagctca

SEQ ID NO: 121855 - DNA, 25 bp, Artificial
  Probe
actatttctcttatccctcccagct

SEQ ID NO: 121856 - DNA, 25 bp, Artificial
  Probe
aggtgattgacagattctgatttat

SEQ ID NO: 121857 - DNA, 25 bp, Artificial
  Probe
gtgtacatagctgtcactcaagaag

SEQ ID NO: 121858 - DNA, 25 bp, Artificial
  Probe
ttattaagacatcaagccctggttc

SEQ ID NO: 121859 - DNA, 25 bp, Artificial
  Probe
cctagatcaagaggaaccaagactc

SEQ ID NO: 121860 - DNA, 25 bp, Artificial
  Probe
cttattaagacatcaagccctggtt

SEQ ID NO: 121861 - DNA, 25 bp, Artificial
  Probe
aacttattaagacatcaagccctgg

SEQ ID NO: 121862 - DNA, 25 bp, Artificial
  Probe
ctagatcaagaggaaccaagactcc

SEQ ID NO: 121863 - DNA, 25 bp, Artificial
  Probe
taacttattaagacatcaagccctg

SEQ ID NO: 121864 - DNA, 25 bp, Artificial
  Probe
acttattaagacatcaagccctggt

SEQ ID NO: 121865 - DNA, 25 bp, Artificial
  Probe
tattaagacatcaagccctggttcc

SEQ ID NO: 121866 - DNA, 25 bp, Artificial
  Probe
gggaggggataataaaatgctatga

SEQ ID NO: 121867 - DNA, 25 bp, Artificial
  Probe
ggggaggggataataaaatgctatg

SEQ ID NO: 121868 - DNA, 25 bp, Artificial
  Probe
attaagacatcaagccctggttcct

SEQ ID NO: 121869 - DNA, 25 bp, Artificial
  Probe
tatcctagatcaagaggaaccaaga

SEQ ID NO: 121870 - DNA, 25 bp, Artificial
  Probe
ggaggggataataaaatgctatgat

SEQ ID NO: 121871 - DNA, 25 bp, Artificial
  Probe
taagacatcaagccctggttccttt

SEQ ID NO: 121872 - DNA, 25 bp, Artificial
  Probe
ttaagacatcaagccctggttcctt

SEQ ID NO: 121873 - DNA, 25 bp, Artificial
  Probe
atcctagatcaagaggaaccaagac

SEQ ID NO: 121874 - DNA, 25 bp, Artificial
  Probe
tagatcaagaggaaccaagactcct

SEQ ID NO: 121875 - DNA, 25 bp, Artificial
  Probe
tcctagatcaagaggaaccaagact

SEQ ID NO: 121876 - DNA, 25 bp, Artificial
  Probe
ccataattcctgttgaggtagtaac

SEQ ID NO: 121877 - DNA, 25 bp, Artificial
  Probe
accataattcctgttgaggtagtaa

SEQ ID NO: 121878 - DNA, 25 bp, Artificial
  Probe
aaccataattcctgttgaggtagta

SEQ ID NO: 121879 - DNA, 25 bp, Artificial
  Probe
taaccataattcctgttgaggtagt

SEQ ID NO: 121880 - DNA, 25 bp, Artificial
  Probe
agagtcagatagtaagcgtttatgg

SEQ ID NO: 121881 - DNA, 25 bp, Artificial
  Probe
tcgtctctgtgaaataactcttgat

SEQ ID NO: 121882 - DNA, 25 bp, Artificial
  Probe
ctcgtctctgtgaaataactcttga

SEQ ID NO: 121883 - DNA, 25 bp, Artificial
  Probe
atcattattcaaagtttctggctgc

SEQ ID NO: 121884 - DNA, 25 bp, Artificial
  Probe
tgtaaagagtcagatagtaagcgtt

SEQ ID NO: 121885 - DNA, 25 bp, Artificial
  Probe
cagatagtaagcgtttatggcattg

SEQ ID NO: 121886 - DNA, 25 bp, Artificial
  Probe
tcagatagtaagcgtttatggcatt

SEQ ID NO: 121887 - DNA, 25 bp, Artificial
  Probe
agatagtaagcgtttatggcattgt

SEQ ID NO: 121888 - DNA, 25 bp, Artificial
  Probe
cgtttatggcattgtaggctatatt

SEQ ID NO: 121889 - DNA, 25 bp, Artificial
  Probe
atagtaagcgtttatggcattgtag

SEQ ID NO: 121890 - DNA, 25 bp, Artificial
  Probe
gatagtaagcgtttatggcattgta

SEQ ID NO: 121891 - DNA, 25 bp, Artificial
  Probe
cgtctctgtgaaataactcttgatt

SEQ ID NO: 121892 - DNA, 25 bp, Artificial
  Probe
tagtaagcgtttatggcattgtagg

SEQ ID NO: 121893 - DNA, 25 bp, Artificial
  Probe
gtcagatagtaagcgtttatggcat

SEQ ID NO: 121894 - DNA, 25 bp, Artificial
  Probe
atttcttcttagaccatctccgttt

SEQ ID NO: 121895 - DNA, 25 bp, Artificial
  Probe
gatttcttcttagaccatctccgtt

SEQ ID NO: 121896 - DNA, 25 bp, Artificial
  Probe
ttgatttcttcttagaccatctccg

SEQ ID NO: 121897 - DNA, 25 bp, Artificial
  Probe
cctcgtctctgtgaaataactcttg

SEQ ID NO: 121898 - DNA, 25 bp, Artificial
  Probe
gtggttggcaaattactgtaaagag

SEQ ID NO: 121899 - DNA, 25 bp, Artificial
  Probe
ataagattgttactaacgtggttgg

SEQ ID NO: 121900 - DNA, 25 bp, Artificial
  Probe
gagtcagatagtaagcgtttatggc

SEQ ID NO: 121901 - DNA, 25 bp, Artificial
  Probe
gtaaagagtcagatagtaagcgttt

SEQ ID NO: 121902 - DNA, 25 bp, Artificial
  Probe
ttatggcattgtaggctatatttcc

SEQ ID NO: 121903 - DNA, 25 bp, Artificial
  Probe
gcgtttatggcattgtaggctatat

SEQ ID NO: 121904 - DNA, 25 bp, Artificial
  Probe
ttaaccataattcctgttgaggtag

SEQ ID NO: 121905 - DNA, 25 bp, Artificial
  Probe
gtgataagattgttactaacgtggt

SEQ ID NO: 121906 - DNA, 25 bp, Artificial
  Probe
aagagtcagatagtaagcgtttatg

SEQ ID NO: 121907 - DNA, 25 bp, Artificial
  Probe
atgaggaatagtagcatctgaaaga

SEQ ID NO: 121908 - DNA, 25 bp, Artificial
  Probe
cgttaaagataatccttgactcaca

SEQ ID NO: 121909 - DNA, 25 bp, Artificial
  Probe
taagattgttactaacgtggttggc

SEQ ID NO: 121910 - DNA, 25 bp, Artificial
  Probe
cttgatttcttcttagaccatctcc

SEQ ID NO: 121911 - DNA, 25 bp, Artificial
  Probe
tgatttcttcttagaccatctccgt

SEQ ID NO: 121912 - DNA, 25 bp, Artificial
  Probe
gttggcaaattactgtaaagagtca

SEQ ID NO: 121913 - DNA, 25 bp, Artificial
  Probe
ggagaagggtacaaacaagatcatt

SEQ ID NO: 121914 - DNA, 25 bp, Artificial
  Probe
ggttggcaaattactgtaaagagtc

SEQ ID NO: 121915 - DNA, 25 bp, Artificial
  Probe
agtgataagattgttactaacgtgg

SEQ ID NO: 121916 - DNA, 25 bp, Artificial
  Probe
agtcagatagtaagcgtttatggca

SEQ ID NO: 121917 - DNA, 25 bp, Artificial
  Probe
aatgaggaatagtagcatctgaaag

SEQ ID NO: 121918 - DNA, 25 bp, Artificial
  Probe
tggttggcaaattactgtaaagagt

SEQ ID NO: 121919 - DNA, 25 bp, Artificial
  Probe
tgataagattgttactaacgtggtt

SEQ ID NO: 121920 - DNA, 25 bp, Artificial
  Probe
gaaagcctcgtctctgtgaaataac

SEQ ID NO: 121921 - DNA, 25 bp, Artificial
  Probe
tgctatacactagatgccaactatt

SEQ ID NO: 121922 - DNA, 25 bp, Artificial
  Probe
ttgctatacactagatgccaactat

SEQ ID NO: 121923 - DNA, 25 bp, Artificial
  Probe
taggttgctatacactagatgccaa

SEQ ID NO: 121924 - DNA, 25 bp, Artificial
  Probe
tctaatgatgtctttctgctttgga

SEQ ID NO: 121925 - DNA, 25 bp, Artificial
  Probe
ctctaatgatgtctttctgctttgg

SEQ ID NO: 121926 - DNA, 25 bp, Artificial
  Probe
cacatttgctttgaactataccctg

SEQ ID NO: 121927 - DNA, 25 bp, Artificial
  Probe
gacccacatttgctttgaactatac

SEQ ID NO: 121928 - DNA, 25 bp, Artificial
  Probe
gaaggcataaaggtagagagaacta

SEQ ID NO: 121929 - DNA, 25 bp, Artificial
  Probe
actctaatgatgtctttctgctttg

SEQ ID NO: 121930 - DNA, 25 bp, Artificial
  Probe
caactctaatgatgtctttctgctt

SEQ ID NO: 121931 - DNA, 25 bp, Artificial
  Probe
ccacatttgctttgaactataccct

SEQ ID NO: 121932 - DNA, 25 bp, Artificial
  Probe
aggcataaaggtagagagaactaga

SEQ ID NO: 121933 - DNA, 25 bp, Artificial
  Probe
aactctaatgatgtctttctgcttt

SEQ ID NO: 121934 - DNA, 25 bp, Artificial
  Probe
ggacccacatttgctttgaactata

SEQ ID NO: 121935 - DNA, 25 bp, Artificial
  Probe
ctaggttgctatacactagatgcca

SEQ ID NO: 121936 - DNA, 25 bp, Artificial
  Probe
ggcataaaggtagagagaactagaa

SEQ ID NO: 121937 - DNA, 25 bp, Artificial
  Probe
aaggcataaaggtagagagaactag

SEQ ID NO: 121938 - DNA, 25 bp, Artificial
  Probe
tcaactctaatgatgtctttctgct

SEQ ID NO: 121939 - DNA, 25 bp, Artificial
  Probe
ccctcaactctaatgatgtctttct

SEQ ID NO: 121940 - DNA, 25 bp, Artificial
  Probe
tccctcaactctaatgatgtctttc

SEQ ID NO: 121941 - DNA, 25 bp, Artificial
  Probe
ctccctcaactctaatgatgtcttt

SEQ ID NO: 121942 - DNA, 25 bp, Artificial
  Probe
acccacatttgctttgaactatacc

SEQ ID NO: 121943 - DNA, 25 bp, Artificial
  Probe
ctcaactctaatgatgtctttctgc

SEQ ID NO: 121944 - DNA, 25 bp, Artificial
  Probe
aggtagagagaactagaaactaagc

SEQ ID NO: 121945 - DNA, 25 bp, Artificial
  Probe
cctcaactctaatgatgtctttctg

SEQ ID NO: 121946 - DNA, 25 bp, Artificial
  Probe
acatttgctttgaactataccctgc

SEQ ID NO: 121947 - DNA, 25 bp, Artificial
  Probe
caccatgttcagcctttcaaataaa

SEQ ID NO: 121948 - DNA, 25 bp, Artificial
  Probe
atacactagatgccaactatttgcc

SEQ ID NO: 121949 - DNA, 25 bp, Artificial
  Probe
gctatacactagatgccaactattt

SEQ ID NO: 121950 - DNA, 25 bp, Artificial
  Probe
ctaatgatgtctttctgctttggac

SEQ ID NO: 121951 - DNA, 25 bp, Artificial
  Probe
cccacatttgctttgaactataccc

SEQ ID NO: 121952 - DNA, 25 bp, Artificial
  Probe
taatgatgtctttctgctttggact

SEQ ID NO: 121953 - DNA, 25 bp, Artificial
  Probe
cctccctcaactctaatgatgtctt

SEQ ID NO: 121954 - DNA, 25 bp, Artificial
  Probe
ttcctccctcaactctaatgatgtc

SEQ ID NO: 121955 - DNA, 25 bp, Artificial
  Probe
cttcctccctcaactctaatgatgt

SEQ ID NO: 121956 - DNA, 25 bp, Artificial
  Probe
tatacactagatgccaactatttgc

SEQ ID NO: 121957 - DNA, 25 bp, Artificial
  Probe
aacgacaaatccaataccaaagcag

SEQ ID NO: 121958 - DNA, 25 bp, Artificial
  Probe
gaacgacaaatccaataccaaagca

SEQ ID NO: 121959 - DNA, 25 bp, Artificial
  Probe
cactagatgccaactatttgccttt

SEQ ID NO: 121960 - DNA, 25 bp, Artificial
  Probe
tacactagatgccaactatttgcct

SEQ ID NO: 121961 - DNA, 25 bp, Artificial
  Probe
gcataaaggtagagagaactagaaa

SEQ ID NO: 121962 - DNA, 25 bp, Artificial
  Probe
aatgatgtctttctgctttggactc

SEQ ID NO: 121963 - DNA, 25 bp, Artificial
  Probe
aggacccacatttgctttgaactat

SEQ ID NO: 121964 - DNA, 25 bp, Artificial
  Probe
ggtagagagaactagaaactaagct

SEQ ID NO: 121965 - DNA, 25 bp, Artificial
  Probe
tcctccctcaactctaatgatgtct

SEQ ID NO: 121966 - DNA, 25 bp, Artificial
  Probe
aagataccttcgagttaagcacatt

SEQ ID NO: 121967 - DNA, 25 bp, Artificial
  Probe
agataccttcgagttaagcacattc

SEQ ID NO: 121968 - DNA, 25 bp, Artificial
  Probe
cttaatagggtagtcaggtgctttg

SEQ ID NO: 121969 - DNA, 25 bp, Artificial
  Probe
gataccttcgagttaagcacattcc

SEQ ID NO: 121970 - DNA, 25 bp, Artificial
  Probe
gccatctcccagaaagtgtaataaa

SEQ ID NO: 121971 - DNA, 25 bp, Artificial
  Probe
ttaatagggtagtcaggtgctttgt

SEQ ID NO: 121972 - DNA, 25 bp, Artificial
  Probe
ataccttcgagttaagcacattcct

SEQ ID NO: 121973 - DNA, 25 bp, Artificial
  Probe
aaatggacctgaaagagtttgactt

SEQ ID NO: 121974 - DNA, 25 bp, Artificial
  Probe
cttccactccagatcattcctttag

SEQ ID NO: 121975 - DNA, 25 bp, Artificial
  Probe
gaagtgaggttgatatctctgaagg

SEQ ID NO: 121976 - DNA, 25 bp, Artificial
  Probe
ggaagtgaggttgatatctctgaag

SEQ ID NO: 121977 - DNA, 25 bp, Artificial
  Probe
ccagatcattcctttagtttagagc

SEQ ID NO: 121978 - DNA, 25 bp, Artificial
  Probe
aagtgaggttgatatctctgaagga

SEQ ID NO: 121979 - DNA, 25 bp, Artificial
  Probe
aatggacctgaaagagtttgacttc

SEQ ID NO: 121980 - DNA, 25 bp, Artificial
  Probe
agtgaggttgatatctctgaaggag

SEQ ID NO: 121981 - DNA, 25 bp, Artificial
  Probe
taatagggtagtcaggtgctttgtg

SEQ ID NO: 121982 - DNA, 25 bp, Artificial
  Probe
agttaagcacattcctcgataccag

SEQ ID NO: 121983 - DNA, 25 bp, Artificial
  Probe
tcttccactccagatcattccttta

SEQ ID NO: 121984 - DNA, 25 bp, Artificial
  Probe
ccactccagatcattcctttagttt

SEQ ID NO: 121985 - DNA, 25 bp, Artificial
  Probe
agagttccttaatagggtagtcagg

SEQ ID NO: 121986 - DNA, 25 bp, Artificial
  Probe
tgtcttccactccagatcattcctt

SEQ ID NO: 121987 - DNA, 25 bp, Artificial
  Probe
gagttccttaatagggtagtcaggt

SEQ ID NO: 121988 - DNA, 25 bp, Artificial
  Probe
tccactccagatcattcctttagtt

SEQ ID NO: 121989 - DNA, 25 bp, Artificial
  Probe
ttccactccagatcattcctttagt

SEQ ID NO: 121990 - DNA, 25 bp, Artificial
  Probe
agttccttaatagggtagtcaggtg

SEQ ID NO: 121991 - DNA, 25 bp, Artificial
  Probe
atcattcctttagtttagagctggg

SEQ ID NO: 121992 - DNA, 25 bp, Artificial
  Probe
taccttcgagttaagcacattcctc

SEQ ID NO: 121993 - DNA, 25 bp, Artificial
  Probe
gagttaagcacattcctcgatacca

SEQ ID NO: 121994 - DNA, 25 bp, Artificial
  Probe
gatcattcctttagtttagagctgg

SEQ ID NO: 121995 - DNA, 25 bp, Artificial
  Probe
gataccagcaaatccctacaacatg

SEQ ID NO: 121996 - DNA, 25 bp, Artificial
  Probe
aaagataccttcgagttaagcacat

SEQ ID NO: 121997 - DNA, 25 bp, Artificial
  Probe
ctttagtttagagctgggaagtgag

SEQ ID NO: 121998 - DNA, 25 bp, Artificial
  Probe
cactccagatcattcctttagttta

SEQ ID NO: 121999 - DNA, 25 bp, Artificial
  Probe
tccagatcattcctttagtttagag

SEQ ID NO: 122000 - DNA, 25 bp, Artificial
  Probe
ctccagatcattcctttagtttaga

SEQ ID NO: 122001 - DNA, 25 bp, Artificial
  Probe
ataccagcaaatccctacaacatga

SEQ ID NO: 122002 - DNA, 25 bp, Artificial
  Probe
gacaaagataccttcgagttaagca

SEQ ID NO: 122003 - DNA, 25 bp, Artificial
  Probe
ccttaatagggtagtcaggtgcttt

SEQ ID NO: 122004 - DNA, 25 bp, Artificial
  Probe
caaagataccttcgagttaagcaca

SEQ ID NO: 122005 - DNA, 25 bp, Artificial
  Probe
acaaagataccttcgagttaagcac

SEQ ID NO: 122006 - DNA, 25 bp, Artificial
  Probe
actccagatcattcctttagtttag

SEQ ID NO: 122007 - DNA, 25 bp, Artificial
  Probe
agatcattcctttagtttagagctg

SEQ ID NO: 122008 - DNA, 25 bp, Artificial
  Probe
cagatcattcctttagtttagagct

SEQ ID NO: 122009 - DNA, 25 bp, Artificial
  Probe
gtcttccactccagatcattccttt

SEQ ID NO: 122010 - DNA, 25 bp, Artificial
  Probe
cggacaaagataccttcgagttaag

SEQ ID NO: 122011 - DNA, 25 bp, Artificial
  Probe
gttatggaggatatgactacactgg

SEQ ID NO: 122012 - DNA, 25 bp, Artificial
  Probe
ggttatggaggatatgactacactg

SEQ ID NO: 122013 - DNA, 25 bp, Artificial
  Probe
atggaggatatgactacactggtta

SEQ ID NO: 122014 - DNA, 25 bp, Artificial
  Probe
tatggaggatatgactacactggtt

SEQ ID NO: 122015 - DNA, 25 bp, Artificial
  Probe
ttatggaggatatgactacactggt

SEQ ID NO: 122016 - DNA, 25 bp, Artificial
  Probe
tggttatggaggatatgactacact

SEQ ID NO: 122017 - DNA, 25 bp, Artificial
  Probe
tatagcaatcagcagagtggttatg

SEQ ID NO: 122018 - DNA, 25 bp, Artificial
  Probe
ggatatgactacactggttacaaca

SEQ ID NO: 122019 - DNA, 25 bp, Artificial
  Probe
aggatatgactacactggttacaac

SEQ ID NO: 122020 - DNA, 25 bp, Artificial
  Probe
gaggatatgactacactggttacaa

SEQ ID NO: 122021 - DNA, 25 bp, Artificial
  Probe
ggaggatatgactacactggttaca

SEQ ID NO: 122022 - DNA, 25 bp, Artificial
  Probe
tggaggatatgactacactggttac

SEQ ID NO: 122023 - DNA, 25 bp, Artificial
  Probe
ggtggttatggaggatatgactaca

SEQ ID NO: 122024 - DNA, 25 bp, Artificial
  Probe
cggtggttatggaggatatgactac

SEQ ID NO: 122025 - DNA, 25 bp, Artificial
  Probe
atatgactacactggttacaacagc

SEQ ID NO: 122026 - DNA, 25 bp, Artificial
  Probe
gtggttatggaggatatgactacac

SEQ ID NO: 122027 - DNA, 25 bp, Artificial
  Probe
gatatgactacactggttacaacag

SEQ ID NO: 122028 - DNA, 25 bp, Artificial
  Probe
acggtggttatggaggatatgacta

SEQ ID NO: 122029 - DNA, 25 bp, Artificial
  Probe
tacggtggttatggaggatatgact

SEQ ID NO: 122030 - DNA, 25 bp, Artificial
  Probe
agtaactattggaaccaaggctatg

SEQ ID NO: 122031 - DNA, 25 bp, Artificial
  Probe
acagctactatggatatggtgacta

SEQ ID NO: 122032 - DNA, 25 bp, Artificial
  Probe
tacaacagctactatggatatggtg

SEQ ID NO: 122033 - DNA, 25 bp, Artificial
  Probe
aacagctactatggatatggtgact

SEQ ID NO: 122034 - DNA, 25 bp, Artificial
  Probe
caacagctactatggatatggtgac

SEQ ID NO: 122035 - DNA, 25 bp, Artificial
  Probe
atagcaatcagcagagtggttatgg

SEQ ID NO: 122036 - DNA, 25 bp, Artificial
  Probe
cagctactatggatatggtgactat

SEQ ID NO: 122037 - DNA, 25 bp, Artificial
  Probe
acaacagctactatggatatggtga

SEQ ID NO: 122038 - DNA, 25 bp, Artificial
  Probe
ttacaacagctactatggatatggt

SEQ ID NO: 122039 - DNA, 25 bp, Artificial
  Probe
tggttacaacagctactatggatat

SEQ ID NO: 122040 - DNA, 25 bp, Artificial
  Probe
tagtaactattggaaccaaggctat

SEQ ID NO: 122041 - DNA, 25 bp, Artificial
  Probe
ctatagcaatcagcagagtggttat

SEQ ID NO: 122042 - DNA, 25 bp, Artificial
  Probe
gttacaacagctactatggatatgg

SEQ ID NO: 122043 - DNA, 25 bp, Artificial
  Probe
ggttacaacagctactatggatatg

SEQ ID NO: 122044 - DNA, 25 bp, Artificial
  Probe
gtacggtggttatggaggatatgac

SEQ ID NO: 122045 - DNA, 25 bp, Artificial
  Probe
atagtaactattggaaccaaggcta

SEQ ID NO: 122046 - DNA, 25 bp, Artificial
  Probe
tatagtaactattggaaccaaggct

SEQ ID NO: 122047 - DNA, 25 bp, Artificial
  Probe
atatggtgactatagcaatcagcag

SEQ ID NO: 122048 - DNA, 25 bp, Artificial
  Probe
gatatggtgactatagcaatcagca

SEQ ID NO: 122049 - DNA, 25 bp, Artificial
  Probe
tggatatggtgactatagcaatcag

SEQ ID NO: 122050 - DNA, 25 bp, Artificial
  Probe
tacactggttacaacagctactatg

SEQ ID NO: 122051 - DNA, 25 bp, Artificial
  Probe
ctacactggttacaacagctactat

SEQ ID NO: 122052 - DNA, 25 bp, Artificial
  Probe
ctggttacaacagctactatggata

SEQ ID NO: 122053 - DNA, 25 bp, Artificial
  Probe
ggatatggtgactatagcaatcagc

SEQ ID NO: 122054 - DNA, 25 bp, Artificial
  Probe
atggatatggtgactatagcaatca

SEQ ID NO: 122055 - DNA, 25 bp, Artificial
  Probe
actacactggttacaacagctacta

SEQ ID NO: 122056 - DNA, 25 bp, Artificial
  Probe
tgcgatgacttgttacaattattct

SEQ ID NO: 122057 - DNA, 25 bp, Artificial
  Probe
catgcgatgacttgttacaattatt

SEQ ID NO: 122058 - DNA, 25 bp, Artificial
  Probe
gcgatgacttgttacaattattctt

SEQ ID NO: 122059 - DNA, 25 bp, Artificial
  Probe
atgcgatgacttgttacaattattc

SEQ ID NO: 122060 - DNA, 25 bp, Artificial
  Probe
ttcatgcgatgacttgttacaatta

SEQ ID NO: 122061 - DNA, 25 bp, Artificial
  Probe
tcatgcgatgacttgttacaattat

SEQ ID NO: 122062 - DNA, 25 bp, Artificial
  Probe
tttcatgcgatgacttgttacaatt

SEQ ID NO: 122063 - DNA, 25 bp, Artificial
  Probe
tgtgaatctggcggctgaatatctc

SEQ ID NO: 122064 - DNA, 25 bp, Artificial
  Probe
ggtcatcctactgagtggttccatg

SEQ ID NO: 122065 - DNA, 25 bp, Artificial
  Probe
gtgtgaatctggcggctgaatatct

SEQ ID NO: 122066 - DNA, 25 bp, Artificial
  Probe
gtgaatctggcggctgaatatctca

SEQ ID NO: 122067 - DNA, 25 bp, Artificial
  Probe
cgatgacttgttacaattattcttt

SEQ ID NO: 122068 - DNA, 25 bp, Artificial
  Probe
tcaaaggtacttggataataatgaa

SEQ ID NO: 122069 - DNA, 25 bp, Artificial
  Probe
ttcaaaggtacttggataataatga

SEQ ID NO: 122070 - DNA, 25 bp, Artificial
  Probe
atgggtttctctgttttgctgttca

SEQ ID NO: 122071 - DNA, 25 bp, Artificial
  Probe
ttttcatgcgatgacttgttacaat

SEQ ID NO: 122072 - DNA, 25 bp, Artificial
  Probe
catgggtttctctgttttgctgttc

SEQ ID NO: 122073 - DNA, 25 bp, Artificial
  Probe
ccaagtgtccatgtaaatatgtaca

SEQ ID NO: 122074 - DNA, 25 bp, Artificial
  Probe
tgggtttctctgttttgctgttcaa

SEQ ID NO: 122075 - DNA, 25 bp, Artificial
  Probe
gtttctctgttttgctgttcaaagg

SEQ ID NO: 122076 - DNA, 25 bp, Artificial
  Probe
ggtttctctgttttgctgttcaaag

SEQ ID NO: 122077 - DNA, 25 bp, Artificial
  Probe
caaaggtacttggataataatgaaa

SEQ ID NO: 122078 - DNA, 25 bp, Artificial
  Probe
tttcaaaggtacttggataataatg

SEQ ID NO: 122079 - DNA, 25 bp, Artificial
  Probe
ttcttttcaaaggtacttggataat

SEQ ID NO: 122080 - DNA, 25 bp, Artificial
  Probe
attcttttcaaaggtacttggataa

SEQ ID NO: 122081 - DNA, 25 bp, Artificial
  Probe
ttattcttttcaaaggtacttggat

SEQ ID NO: 122082 - DNA, 25 bp, Artificial
  Probe
attattcttttcaaaggtacttgga

SEQ ID NO: 122083 - DNA, 25 bp, Artificial
  Probe
tctgttttgctgttcaaagggaaag

SEQ ID NO: 122084 - DNA, 25 bp, Artificial
  Probe
ctctgttttgctgttcaaagggaaa

SEQ ID NO: 122085 - DNA, 25 bp, Artificial
  Probe
tttctctgttttgctgttcaaaggg

SEQ ID NO: 122086 - DNA, 25 bp, Artificial
  Probe
gggtttctctgttttgctgttcaaa

SEQ ID NO: 122087 - DNA, 25 bp, Artificial
  Probe
tgaatctggcggctgaatatctcag

SEQ ID NO: 122088 - DNA, 25 bp, Artificial
  Probe
aattattcttttcaaaggtacttgg

SEQ ID NO: 122089 - DNA, 25 bp, Artificial
  Probe
tctctgttttgctgttcaaagggaa

SEQ ID NO: 122090 - DNA, 25 bp, Artificial
  Probe
ttctctgttttgctgttcaaaggga

SEQ ID NO: 122091 - DNA, 25 bp, Artificial
  Probe
tcttttcaaaggtacttggataata

SEQ ID NO: 122092 - DNA, 25 bp, Artificial
  Probe
tattcttttcaaaggtacttggata

SEQ ID NO: 122093 - DNA, 25 bp, Artificial
  Probe
tgttacaattattcttttcaaaggt

SEQ ID NO: 122094 - DNA, 25 bp, Artificial
  Probe
ctgttttgctgttcaaagggaaagc

SEQ ID NO: 122095 - DNA, 25 bp, Artificial
  Probe
gaatctggcggctgaatatctcagg

SEQ ID NO: 122096 - DNA, 25 bp, Artificial
  Probe
acaattattcttttcaaaggtactt

SEQ ID NO: 122097 - DNA, 25 bp, Artificial
  Probe
cttttcaaaggtacttggataataa

SEQ ID NO: 122098 - DNA, 25 bp, Artificial
  Probe
tgacttgttacaattattcttttca

SEQ ID NO: 122099 - DNA, 25 bp, Artificial
  Probe
gtcatcctactgagtggttccatgg

SEQ ID NO: 122100 - DNA, 25 bp, Artificial
  Probe
caattattcttttcaaaggtacttg

SEQ ID NO: 122101 - DNA, 25 bp, Artificial
  Probe
tagtcaactcctagtgtctaagcag

SEQ ID NO: 122102 - DNA, 25 bp, Artificial
  Probe
ttagtcaactcctagtgtctaagca

SEQ ID NO: 122103 - DNA, 25 bp, Artificial
  Probe
gtcaactcctagtgtctaagcagaa

SEQ ID NO: 122104 - DNA, 25 bp, Artificial
  Probe
ctacttagtcaactcctagtgtcta

SEQ ID NO: 122105 - DNA, 25 bp, Artificial
  Probe
actacttagtcaactcctagtgtct

SEQ ID NO: 122106 - DNA, 25 bp, Artificial
  Probe
tacatagttcattgtgcctgtctgt

SEQ ID NO: 122107 - DNA, 25 bp, Artificial
  Probe
aactacttagtcaactcctagtgtc

SEQ ID NO: 122108 - DNA, 25 bp, Artificial
  Probe
gtacatagttcattgtgcctgtctg

SEQ ID NO: 122109 - DNA, 25 bp, Artificial
  Probe
agtcaactcctagtgtctaagcaga

SEQ ID NO: 122110 - DNA, 25 bp, Artificial
  Probe
tacttagtcaactcctagtgtctaa

SEQ ID NO: 122111 - DNA, 25 bp, Artificial
  Probe
gaggaagaggaagaggtacaaattc

SEQ ID NO: 122112 - DNA, 25 bp, Artificial
  Probe
aggaagaggaagaggtacaaattct

SEQ ID NO: 122113 - DNA, 25 bp, Artificial
  Probe
tctcatccagtctaagaaactactt

SEQ ID NO: 122114 - DNA, 25 bp, Artificial
  Probe
ggaggaagaggaagaggtacaaatt

SEQ ID NO: 122115 - DNA, 25 bp, Artificial
  Probe
acatagttcattgtgcctgtctgtg

SEQ ID NO: 122116 - DNA, 25 bp, Artificial
  Probe
aaactacttagtcaactcctagtgt

SEQ ID NO: 122117 - DNA, 25 bp, Artificial
  Probe
aaagatccgtggacagtttctactc

SEQ ID NO: 122118 - DNA, 25 bp, Artificial
  Probe
gaaactacttagtcaactcctagtg

SEQ ID NO: 122119 - DNA, 25 bp, Artificial
  Probe
aagaaactacttagtcaactcctag

SEQ ID NO: 122120 - DNA, 25 bp, Artificial
  Probe
agaaactacttagtcaactcctagt

SEQ ID NO: 122121 - DNA, 25 bp, Artificial
  Probe
ccttctcatccagtctaagaaacta

SEQ ID NO: 122122 - DNA, 25 bp, Artificial
  Probe
ggaagaggaagaggtacaaattctt

SEQ ID NO: 122123 - DNA, 25 bp, Artificial
  Probe
catagttcattgtgcctgtctgtgc

SEQ ID NO: 122124 - DNA, 25 bp, Artificial
  Probe
ggggagagccttatttatcattttg

SEQ ID NO: 122125 - DNA, 25 bp, Artificial
  Probe
gaagaggaagaggtacaaattcttg

SEQ ID NO: 122126 - DNA, 25 bp, Artificial
  Probe
ctcatccagtctaagaaactactta

SEQ ID NO: 122127 - DNA, 25 bp, Artificial
  Probe
ttctcatccagtctaagaaactact

SEQ ID NO: 122128 - DNA, 25 bp, Artificial
  Probe
cccttctcatccagtctaagaaact

SEQ ID NO: 122129 - DNA, 25 bp, Artificial
  Probe
cttctcatccagtctaagaaactac

SEQ ID NO: 122130 - DNA, 25 bp, Artificial
  Probe
gggaggaagaggaagaggtacaaat

SEQ ID NO: 122131 - DNA, 25 bp, Artificial
  Probe
atccgtggacagtttctactcctta

SEQ ID NO: 122132 - DNA, 25 bp, Artificial
  Probe
ctgaaagggaaaggctacaggattc

SEQ ID NO: 122133 - DNA, 25 bp, Artificial
  Probe
acactgtgtacatagttcattgtgc

SEQ ID NO: 122134 - DNA, 25 bp, Artificial
  Probe
tgtacatagttcattgtgcctgtct

SEQ ID NO: 122135 - DNA, 25 bp, Artificial
  Probe
gtgtacatagttcattgtgcctgtc

SEQ ID NO: 122136 - DNA, 25 bp, Artificial
  Probe
ctgtgtacatagttcattgtgcctg

SEQ ID NO: 122137 - DNA, 25 bp, Artificial
  Probe
gggagagccttatttatcattttga

SEQ ID NO: 122138 - DNA, 25 bp, Artificial
  Probe
gattcgcccttctcatccagtctaa

SEQ ID NO: 122139 - DNA, 25 bp, Artificial
  Probe
actgtgtacatagttcattgtgcct

SEQ ID NO: 122140 - DNA, 25 bp, Artificial
  Probe
attcgcccttctcatccagtctaag

SEQ ID NO: 122141 - DNA, 25 bp, Artificial
  Probe
agaggaagaggtacaaattcttgtt

SEQ ID NO: 122142 - DNA, 25 bp, Artificial
  Probe
aagaggaagaggtacaaattcttgt

SEQ ID NO: 122143 - DNA, 25 bp, Artificial
  Probe
cttagtcaactcctagtgtctaagc

SEQ ID NO: 122144 - DNA, 25 bp, Artificial
  Probe
cactgtgtacatagttcattgtgcc

SEQ ID NO: 122145 - DNA, 25 bp, Artificial
  Probe
agtttctactccttactgccacctg

SEQ ID NO: 122146 - DNA, 25 bp, Artificial
  Probe
atggtatagtggaagattacaagcc

SEQ ID NO: 122147 - DNA, 25 bp, Artificial
  Probe
agcaatggtatagtggaagattaca

SEQ ID NO: 122148 - DNA, 25 bp, Artificial
  Probe
gtgagcaatggtatagtggaagatt

SEQ ID NO: 122149 - DNA, 25 bp, Artificial
  Probe
tgagcaatggtatagtggaagatta

SEQ ID NO: 122150 - DNA, 25 bp, Artificial
  Probe
gattacaagccaccattctatgatg

SEQ ID NO: 122151 - DNA, 25 bp, Artificial
  Probe
gagcaatggtatagtggaagattac

SEQ ID NO: 122152 - DNA, 25 bp, Artificial
  Probe
agattacaagccaccattctatgat

SEQ ID NO: 122153 - DNA, 25 bp, Artificial
  Probe
aagattacaagccaccattctatga

SEQ ID NO: 122154 - DNA, 25 bp, Artificial
  Probe
gaagattacaagccaccattctatg

SEQ ID NO: 122155 - DNA, 25 bp, Artificial
  Probe
gcaatggtatagtggaagattacaa

SEQ ID NO: 122156 - DNA, 25 bp, Artificial
  Probe
ggaagattacaagccaccattctat

SEQ ID NO: 122157 - DNA, 25 bp, Artificial
  Probe
aatggtatagtggaagattacaagc

SEQ ID NO: 122158 - DNA, 25 bp, Artificial
  Probe
aagccaccattctatgatgttgttc

SEQ ID NO: 122159 - DNA, 25 bp, Artificial
  Probe
attacaagccaccattctatgatgt

SEQ ID NO: 122160 - DNA, 25 bp, Artificial
  Probe
ttacaagccaccattctatgatgtt

SEQ ID NO: 122161 - DNA, 25 bp, Artificial
  Probe
ggtgagcaatggtatagtggaagat

SEQ ID NO: 122162 - DNA, 25 bp, Artificial
  Probe
tacaagccaccattctatgatgttg

SEQ ID NO: 122163 - DNA, 25 bp, Artificial
  Probe
caagccaccattctatgatgttgtt

SEQ ID NO: 122164 - DNA, 25 bp, Artificial
  Probe
atggtgagcaatggtatagtggaag

SEQ ID NO: 122165 - DNA, 25 bp, Artificial
  Probe
gatggtgagcaatggtatagtggaa

SEQ ID NO: 122166 - DNA, 25 bp, Artificial
  Probe
aacatacctaacagatggttctcag

SEQ ID NO: 122167 - DNA, 25 bp, Artificial
  Probe
catacctaacagatggttctcagac

SEQ ID NO: 122168 - DNA, 25 bp, Artificial
  Probe
acatacctaacagatggttctcaga

SEQ ID NO: 122169 - DNA, 25 bp, Artificial
  Probe
gaggatggtgagcaatggtatagtg

SEQ ID NO: 122170 - DNA, 25 bp, Artificial
  Probe
caatggtatagtggaagattacaag

SEQ ID NO: 122171 - DNA, 25 bp, Artificial
  Probe
tggtatagtggaagattacaagcca

SEQ ID NO: 122172 - DNA, 25 bp, Artificial
  Probe
atacctaacagatggttctcagacc

SEQ ID NO: 122173 - DNA, 25 bp, Artificial
  Probe
caagaaggagagtcaatgctgtcat

SEQ ID NO: 122174 - DNA, 25 bp, Artificial
  Probe
aagatatgaggaaagttgtctgtgt

SEQ ID NO: 122175 - DNA, 25 bp, Artificial
  Probe
tgaagatatgaggaaagttgtctgt

SEQ ID NO: 122176 - DNA, 25 bp, Artificial
  Probe
agatatgaggaaagttgtctgtgtg

SEQ ID NO: 122177 - DNA, 25 bp, Artificial
  Probe
gaagatatgaggaaagttgtctgtg

SEQ ID NO: 122178 - DNA, 25 bp, Artificial
  Probe
accattctatgatgttgttcccaat

SEQ ID NO: 122179 - DNA, 25 bp, Artificial
  Probe
tggaagattacaagccaccattcta

SEQ ID NO: 122180 - DNA, 25 bp, Artificial
  Probe
gatatgaggaaagttgtctgtgtgg

SEQ ID NO: 122181 - DNA, 25 bp, Artificial
  Probe
agccaccattctatgatgttgttcc

SEQ ID NO: 122182 - DNA, 25 bp, Artificial
  Probe
attctatgatgttgttcccaatgac

SEQ ID NO: 122183 - DNA, 25 bp, Artificial
  Probe
tggtgagcaatggtatagtggaaga

SEQ ID NO: 122184 - DNA, 25 bp, Artificial
  Probe
tatgaggaaagttgtctgtgtggat

SEQ ID NO: 122185 - DNA, 25 bp, Artificial
  Probe
atatgaggaaagttgtctgtgtgga

SEQ ID NO: 122186 - DNA, 25 bp, Artificial
  Probe
ttgaagatatgaggaaagttgtctg

SEQ ID NO: 122187 - DNA, 25 bp, Artificial
  Probe
ttctatgatgttgttcccaatgacc

SEQ ID NO: 122188 - DNA, 25 bp, Artificial
  Probe
ccaagtggattgctttgattcttat

SEQ ID NO: 122189 - DNA, 25 bp, Artificial
  Probe
gtcaagaaggagagtcaatgctgtc

SEQ ID NO: 122190 - DNA, 25 bp, Artificial
  Probe
caccattctatgatgttgttcccaa

SEQ ID NO: 122191 - DNA, 25 bp, Artificial
  Probe
ttctggactgtatgacactaaggtt

SEQ ID NO: 122192 - DNA, 25 bp, Artificial
  Probe
ctcagggacattaaggacattaagg

SEQ ID NO: 122193 - DNA, 25 bp, Artificial
  Probe
cagggacattaaggacattaaggac

SEQ ID NO: 122194 - DNA, 25 bp, Artificial
  Probe
tcagggacattaaggacattaagga

SEQ ID NO: 122195 - DNA, 25 bp, Artificial
  Probe
ctttctggactgtatgacactaagg

SEQ ID NO: 122196 - DNA, 25 bp, Artificial
  Probe
tctggactgtatgacactaaggttt

SEQ ID NO: 122197 - DNA, 25 bp, Artificial
  Probe
tttctggactgtatgacactaaggt

SEQ ID NO: 122198 - DNA, 25 bp, Artificial
  Probe
gctttctggactgtatgacactaag

SEQ ID NO: 122199 - DNA, 25 bp, Artificial
  Probe
cctcagggacattaaggacattaag

SEQ ID NO: 122200 - DNA, 25 bp, Artificial
  Probe
tgctttctggactgtatgacactaa

SEQ ID NO: 122201 - DNA, 25 bp, Artificial
  Probe
ctgctttctggactgtatgacacta

SEQ ID NO: 122202 - DNA, 25 bp, Artificial
  Probe
cttatggctagaagctgttggattc

SEQ ID NO: 122203 - DNA, 25 bp, Artificial
  Probe
ttatggctagaagctgttggattca

SEQ ID NO: 122204 - DNA, 25 bp, Artificial
  Probe
tatggctagaagctgttggattcag

SEQ ID NO: 122205 - DNA, 25 bp, Artificial
  Probe
ttggattcagtggctcctcacatag

SEQ ID NO: 122206 - DNA, 25 bp, Artificial
  Probe
ctggactgtatgacactaaggtttt

SEQ ID NO: 122207 - DNA, 25 bp, Artificial
  Probe
ggattcagtggctcctcacatagag

SEQ ID NO: 122208 - DNA, 25 bp, Artificial
  Probe
gatgatacctggaagagggtcctag

SEQ ID NO: 122209 - DNA, 25 bp, Artificial
  Probe
gttggattcagtggctcctcacata

SEQ ID NO: 122210 - DNA, 25 bp, Artificial
  Probe
ccctcagggacattaaggacattaa

SEQ ID NO: 122211 - DNA, 25 bp, Artificial
  Probe
tggattcagtggctcctcacataga

SEQ ID NO: 122212 - DNA, 25 bp, Artificial
  Probe
atggctagaagctgttggattcagt

SEQ ID NO: 122213 - DNA, 25 bp, Artificial
  Probe
ttcaataaataagcagtcagctaaa

SEQ ID NO: 122214 - DNA, 25 bp, Artificial
  Probe
tttcaataaataagcagtcagctaa

SEQ ID NO: 122215 - DNA, 25 bp, Artificial
  Probe
ggatgatacctggaagagggtccta

SEQ ID NO: 122216 - DNA, 25 bp, Artificial
  Probe
ctctggagcaagtacgtagcattct

SEQ ID NO: 122217 - DNA, 25 bp, Artificial
  Probe
tctggagcaagtacgtagcattctg

SEQ ID NO: 122218 - DNA, 25 bp, Artificial
  Probe
gctgctttctggactgtatgacact

SEQ ID NO: 122219 - DNA, 25 bp, Artificial
  Probe
tttgtccataggtacccgaaatagg

SEQ ID NO: 122220 - DNA, 25 bp, Artificial
  Probe
tagaagctgttggattcagtggctc

SEQ ID NO: 122221 - DNA, 25 bp, Artificial
  Probe
ctagaagctgttggattcagtggct

SEQ ID NO: 122222 - DNA, 25 bp, Artificial
  Probe
aagacataaggaagcaaggccagac

SEQ ID NO: 122223 - DNA, 25 bp, Artificial
  Probe
caagacataaggaagcaaggccaga

SEQ ID NO: 122224 - DNA, 25 bp, Artificial
  Probe
actctggagcaagtacgtagcattc

SEQ ID NO: 122225 - DNA, 25 bp, Artificial
  Probe
gacataaggaagcaaggccagactt

SEQ ID NO: 122226 - DNA, 25 bp, Artificial
  Probe
tggctagaagctgttggattcagtg

SEQ ID NO: 122227 - DNA, 25 bp, Artificial
  Probe
atgatacctggaagagggtcctagc

SEQ ID NO: 122228 - DNA, 25 bp, Artificial
  Probe
aaataggccccaagacataaggaag

SEQ ID NO: 122229 - DNA, 25 bp, Artificial
  Probe
cactctggagcaagtacgtagcatt

SEQ ID NO: 122230 - DNA, 25 bp, Artificial
  Probe
gaaataggccccaagacataaggaa

SEQ ID NO: 122231 - DNA, 25 bp, Artificial
  Probe
gcttatggctagaagctgttggatt

SEQ ID NO: 122232 - DNA, 25 bp, Artificial
  Probe
agctgctttctggactgtatgacac

SEQ ID NO: 122233 - DNA, 25 bp, Artificial
  Probe
attttcaataaataagcagtcagct

SEQ ID NO: 122234 - DNA, 25 bp, Artificial
  Probe
gccagacttttctgtcatttatttt

SEQ ID NO: 122235 - DNA, 25 bp, Artificial
  Probe
acataaggaagcaaggccagacttt

SEQ ID NO: 122236 - DNA, 25 bp, Artificial
  Probe
tgtgtatatcttggactgatgttgt

SEQ ID NO: 122237 - DNA, 25 bp, Artificial
  Probe
actgtgtatatcttggactgatgtt

SEQ ID NO: 122238 - DNA, 25 bp, Artificial
  Probe
ctgtgtatatcttggactgatgttg

SEQ ID NO: 122239 - DNA, 25 bp, Artificial
  Probe
cactgtgtatatcttggactgatgt

SEQ ID NO: 122240 - DNA, 25 bp, Artificial
  Probe
gcactgtgtatatcttggactgatg

SEQ ID NO: 122241 - DNA, 25 bp, Artificial
  Probe
ctgtgaacattactggacttgtgta

SEQ ID NO: 122242 - DNA, 25 bp, Artificial
  Probe
tatatcttggactgatgttgtctgg

SEQ ID NO: 122243 - DNA, 25 bp, Artificial
  Probe
gtgtatatcttggactgatgttgtc

SEQ ID NO: 122244 - DNA, 25 bp, Artificial
  Probe
tgtatatcttggactgatgttgtct

SEQ ID NO: 122245 - DNA, 25 bp, Artificial
  Probe
gtatatcttggactgatgttgtctg

SEQ ID NO: 122246 - DNA, 25 bp, Artificial
  Probe
atatcttggactgatgttgtctgga

SEQ ID NO: 122247 - DNA, 25 bp, Artificial
  Probe
ggcactgtgtatatcttggactgat

SEQ ID NO: 122248 - DNA, 25 bp, Artificial
  Probe
gatgctgtgaacattactggacttg

SEQ ID NO: 122249 - DNA, 25 bp, Artificial
  Probe
tgtgaacattactggacttgtgtaa

SEQ ID NO: 122250 - DNA, 25 bp, Artificial
  Probe
tgatgctgtgaacattactggactt

SEQ ID NO: 122251 - DNA, 25 bp, Artificial
  Probe
tatcttggactgatgttgtctggag

SEQ ID NO: 122252 - DNA, 25 bp, Artificial
  Probe
tactggacttgtgtaaactttggaa

SEQ ID NO: 122253 - DNA, 25 bp, Artificial
  Probe
tagggaacatttagacactcacttt

SEQ ID NO: 122254 - DNA, 25 bp, Artificial
  Probe
gacttgtgtaaactttggaaggatt

SEQ ID NO: 122255 - DNA, 25 bp, Artificial
  Probe
ctagggaacatttagacactcactt

SEQ ID NO: 122256 - DNA, 25 bp, Artificial
  Probe
taaactttggaaggattatcacacc

SEQ ID NO: 122257 - DNA, 25 bp, Artificial
  Probe
ggacttgtgtaaactttggaaggat

SEQ ID NO: 122258 - DNA, 25 bp, Artificial
  Probe
atgctgtgaacattactggacttgt

SEQ ID NO: 122259 - DNA, 25 bp, Artificial
  Probe
actggacttgtgtaaactttggaag

SEQ ID NO: 122260 - DNA, 25 bp, Artificial
  Probe
gtgatgctgtgaacattactggact

SEQ ID NO: 122261 - DNA, 25 bp, Artificial
  Probe
acttgtgtaaactttggaaggatta

SEQ ID NO: 122262 - DNA, 25 bp, Artificial
  Probe
ctcttgcttgacagaccttaaatca

SEQ ID NO: 122263 - DNA, 25 bp, Artificial
  Probe
tgtgtaaactttggaaggattatca

SEQ ID NO: 122264 - DNA, 25 bp, Artificial
  Probe
gtaaactttggaaggattatcacac

SEQ ID NO: 122265 - DNA, 25 bp, Artificial
  Probe
ctggacttgtgtaaactttggaagg

SEQ ID NO: 122266 - DNA, 25 bp, Artificial
  Probe
aaactttggaaggattatcacacct

SEQ ID NO: 122267 - DNA, 25 bp, Artificial
  Probe
aacctgattagtgagtgtgcagata

SEQ ID NO: 122268 - DNA, 25 bp, Artificial
  Probe
aactttggaaggattatcacacctc

SEQ ID NO: 122269 - DNA, 25 bp, Artificial
  Probe
aattatcacgggcactgtgtatatc

SEQ ID NO: 122270 - DNA, 25 bp, Artificial
  Probe
tggacttgtgtaaactttggaagga

SEQ ID NO: 122271 - DNA, 25 bp, Artificial
  Probe
gctcttgcttgacagaccttaaatc

SEQ ID NO: 122272 - DNA, 25 bp, Artificial
  Probe
ttactggacttgtgtaaactttgga

SEQ ID NO: 122273 - DNA, 25 bp, Artificial
  Probe
caattatcacgggcactgtgtatat

SEQ ID NO: 122274 - DNA, 25 bp, Artificial
  Probe
tgtaaactttggaaggattatcaca

SEQ ID NO: 122275 - DNA, 25 bp, Artificial
  Probe
tgaacattactggacttgtgtaaac

SEQ ID NO: 122276 - DNA, 25 bp, Artificial
  Probe
gtgaacattactggacttgtgtaaa

SEQ ID NO: 122277 - DNA, 25 bp, Artificial
  Probe
ctttggaaggattatcacacctctg

SEQ ID NO: 122278 - DNA, 25 bp, Artificial
  Probe
attactggacttgtgtaaactttgg

SEQ ID NO: 122279 - DNA, 25 bp, Artificial
  Probe
ctctctagggaacatttagacactc

SEQ ID NO: 122280 - DNA, 25 bp, Artificial
  Probe
acctgattagtgagtgtgcagatag

SEQ ID NO: 122281 - DNA, 25 bp, Artificial
  Probe
cattctctccatctccttcctcttc

SEQ ID NO: 122282 - DNA, 25 bp, Artificial
  Probe
ttctctccatctccttcctcttcat

SEQ ID NO: 122283 - DNA, 25 bp, Artificial
  Probe
attctctccatctccttcctcttca

SEQ ID NO: 122284 - DNA, 25 bp, Artificial
  Probe
ttacctatgtcatgctagtgatgct

SEQ ID NO: 122285 - DNA, 25 bp, Artificial
  Probe
tgtttgtttgtttgtttgtttggag

SEQ ID NO: 122286 - DNA, 25 bp, Artificial
  Probe
ggagttgtttgtttgtttgtttgtt

SEQ ID NO: 122287 - DNA, 25 bp, Artificial
  Probe
ggagttaggagttgtttgtttgttt

SEQ ID NO: 122288 - DNA, 25 bp, Artificial
  Probe
cagatttgtaagattgtgatgaggc

SEQ ID NO: 122289 - DNA, 25 bp, Artificial
  Probe
agttaggagttgtttgtttgtttgt

SEQ ID NO: 122290 - DNA, 25 bp, Artificial
  Probe
ccagatttgtaagattgtgatgagg

SEQ ID NO: 122291 - DNA, 25 bp, Artificial
  Probe
ttgtttgtttgtttgtttgtttgga

SEQ ID NO: 122292 - DNA, 25 bp, Artificial
  Probe
gttgtttgtttgtttgtttgtttgg

SEQ ID NO: 122293 - DNA, 25 bp, Artificial
  Probe
tacctatgtcatgctagtgatgctc

SEQ ID NO: 122294 - DNA, 25 bp, Artificial
  Probe
agatttgtaagattgtgatgaggca

SEQ ID NO: 122295 - DNA, 25 bp, Artificial
  Probe
gtttgtttgtttgtttgtttggagg

SEQ ID NO: 122296 - DNA, 25 bp, Artificial
  Probe
aggagttgtttgtttgtttgtttgt

SEQ ID NO: 122297 - DNA, 25 bp, Artificial
  Probe
gagttaggagttgtttgtttgtttg

SEQ ID NO: 122298 - DNA, 25 bp, Artificial
  Probe
attccatcatcaaccctgtcatata

SEQ ID NO: 122299 - DNA, 25 bp, Artificial
  Probe
aattccatcatcaaccctgtcatat

SEQ ID NO: 122300 - DNA, 25 bp, Artificial
  Probe
taggagttgtttgtttgtttgtttg

SEQ ID NO: 122301 - DNA, 25 bp, Artificial
  Probe
gttaggagttgtttgtttgtttgtt

SEQ ID NO: 122302 - DNA, 25 bp, Artificial
  Probe
tttgggagttaggagttgtttgttt

SEQ ID NO: 122303 - DNA, 25 bp, Artificial
  Probe
attctgttgtttggtttgggagtta

SEQ ID NO: 122304 - DNA, 25 bp, Artificial
  Probe
ccattctctccatctccttcctctt

SEQ ID NO: 122305 - DNA, 25 bp, Artificial
  Probe
caattccatcatcaaccctgtcata

SEQ ID NO: 122306 - DNA, 25 bp, Artificial
  Probe
agttgtttgtttgtttgtttgtttg

SEQ ID NO: 122307 - DNA, 25 bp, Artificial
  Probe
tccagatttgtaagattgtgatgag

SEQ ID NO: 122308 - DNA, 25 bp, Artificial
  Probe
cttagcattctgttgtttggtttgg

SEQ ID NO: 122309 - DNA, 25 bp, Artificial
  Probe
gagttgtttgtttgtttgtttgttt

SEQ ID NO: 122310 - DNA, 25 bp, Artificial
  Probe
ctccatctccttcctcttcatgttc

SEQ ID NO: 122311 - DNA, 25 bp, Artificial
  Probe
tttgtttgtttgtttgtttggaggg

SEQ ID NO: 122312 - DNA, 25 bp, Artificial
  Probe
gggagttaggagttgtttgtttgtt

SEQ ID NO: 122313 - DNA, 25 bp, Artificial
  Probe
ttgggagttaggagttgtttgtttg

SEQ ID NO: 122314 - DNA, 25 bp, Artificial
  Probe
gtttgggagttaggagttgtttgtt

SEQ ID NO: 122315 - DNA, 25 bp, Artificial
  Probe
ttctgttgtttggtttgggagttag

SEQ ID NO: 122316 - DNA, 25 bp, Artificial
  Probe
tttgtttgtttgtttggagggtgta

SEQ ID NO: 122317 - DNA, 25 bp, Artificial
  Probe
ttaggagttgtttgtttgtttgttt

SEQ ID NO: 122318 - DNA, 25 bp, Artificial
  Probe
ctctattccttgatcgccgattaca

SEQ ID NO: 122319 - DNA, 25 bp, Artificial
  Probe
tctccatctccttcctcttcatgtt

SEQ ID NO: 122320 - DNA, 25 bp, Artificial
  Probe
ttccatcatcaaccctgtcatatat

SEQ ID NO: 122321 - DNA, 25 bp, Artificial
  Probe
atccagatttgtaagattgtgatga

SEQ ID NO: 122322 - DNA, 25 bp, Artificial
  Probe
ttcagaaaccaagagatccagaaag

SEQ ID NO: 122323 - DNA, 25 bp, Artificial
  Probe
ctttcagaaaccaagagatccagaa

SEQ ID NO: 122324 - DNA, 25 bp, Artificial
  Probe
tctattccttgatcgccgattacac

SEQ ID NO: 122325 - DNA, 25 bp, Artificial
  Probe
tatgctttcagaaaccaagagatcc

SEQ ID NO: 122326 - DNA, 25 bp, Artificial
  Probe
cacattcaagaacacagagatcagt

SEQ ID NO: 122327 - DNA, 25 bp, Artificial
  Probe
acattcaagaacacagagatcagtt

SEQ ID NO: 122328 - DNA, 25 bp, Artificial
  Probe
gaactgtaagtctgtgattcggttg

SEQ ID NO: 122329 - DNA, 25 bp, Artificial
  Probe
ctgtaagtctgtgattcggttggat

SEQ ID NO: 122330 - DNA, 25 bp, Artificial
  Probe
gcacattcaagaacacagagatcag

SEQ ID NO: 122331 - DNA, 25 bp, Artificial
  Probe
tgtaagtctgtgattcggttggatg

SEQ ID NO: 122332 - DNA, 25 bp, Artificial
  Probe
tgtcagagaaattaaggatggcaaa

SEQ ID NO: 122333 - DNA, 25 bp, Artificial
  Probe
aatgcacattcaagaacacagagat

SEQ ID NO: 122334 - DNA, 25 bp, Artificial
  Probe
attgtgtcagagaaattaaggatgg

SEQ ID NO: 122335 - DNA, 25 bp, Artificial
  Probe
ggaactgtaagtctgtgattcggtt

SEQ ID NO: 122336 - DNA, 25 bp, Artificial
  Probe
atgcacattcaagaacacagagatc

SEQ ID NO: 122337 - DNA, 25 bp, Artificial
  Probe
gtgtcagagaaattaaggatggcaa

SEQ ID NO: 122338 - DNA, 25 bp, Artificial
  Probe
ttgtgtcagagaaattaaggatggc

SEQ ID NO: 122339 - DNA, 25 bp, Artificial
  Probe
aactgtaagtctgtgattcggttgg

SEQ ID NO: 122340 - DNA, 25 bp, Artificial
  Probe
taagtctgtgattcggttggatgga

SEQ ID NO: 122341 - DNA, 25 bp, Artificial
  Probe
gtaagtctgtgattcggttggatgg

SEQ ID NO: 122342 - DNA, 25 bp, Artificial
  Probe
cattcaagaacacagagatcagttt

SEQ ID NO: 122343 - DNA, 25 bp, Artificial
  Probe
caatgcacattcaagaacacagaga

SEQ ID NO: 122344 - DNA, 25 bp, Artificial
  Probe
attcaagaacacagagatcagtttc

SEQ ID NO: 122345 - DNA, 25 bp, Artificial
  Probe
ttcaagaacacagagatcagtttcc

SEQ ID NO: 122346 - DNA, 25 bp, Artificial
  Probe
acaatgcacattcaagaacacagag

SEQ ID NO: 122347 - DNA, 25 bp, Artificial
  Probe
tgtgtcagagaaattaaggatggca

SEQ ID NO: 122348 - DNA, 25 bp, Artificial
  Probe
caagaacacagagatcagtttccag

SEQ ID NO: 122349 - DNA, 25 bp, Artificial
  Probe
caacggtgattatcagtcaggaagg

SEQ ID NO: 122350 - DNA, 25 bp, Artificial
  Probe
ccaacggtgattatcagtcaggaag

SEQ ID NO: 122351 - DNA, 25 bp, Artificial
  Probe
aggaactgtaagtctgtgattcggt

SEQ ID NO: 122352 - DNA, 25 bp, Artificial
  Probe
caggaactgtaagtctgtgattcgg

SEQ ID NO: 122353 - DNA, 25 bp, Artificial
  Probe
cacaatgcacattcaagaacacaga

SEQ ID NO: 122354 - DNA, 25 bp, Artificial
  Probe
tgcacattcaagaacacagagatca

SEQ ID NO: 122355 - DNA, 25 bp, Artificial
  Probe
tcaagaacacagagatcagtttcca

SEQ ID NO: 122356 - DNA, 25 bp, Artificial
  Probe
acacaatgcacattcaagaacacag

SEQ ID NO: 122357 - DNA, 25 bp, Artificial
  Probe
gacacaatgcacattcaagaacaca

SEQ ID NO: 122358 - DNA, 25 bp, Artificial
  Probe
actgtaagtctgtgattcggttgga

SEQ ID NO: 122359 - DNA, 25 bp, Artificial
  Probe
caaagaaacaaattgtgtcagagaa

SEQ ID NO: 122360 - DNA, 25 bp, Artificial
  Probe
caaattgtgtcagagaaattaagga

SEQ ID NO: 122361 - DNA, 25 bp, Artificial
  Probe
aattgtgtcagagaaattaaggatg

SEQ ID NO: 122362 - DNA, 25 bp, Artificial
  Probe
acaaattgtgtcagagaaattaagg

SEQ ID NO: 122363 - DNA, 25 bp, Artificial
  Probe
aaagaaacaaattgtgtcagagaaa

SEQ ID NO: 122364 - DNA, 25 bp, Artificial
  Probe
agaaacaaattgtgtcagagaaatt

SEQ ID NO: 122365 - DNA, 25 bp, Artificial
  Probe
aagaaacaaattgtgtcagagaaat

SEQ ID NO: 122366 - DNA, 25 bp, Artificial
  Probe
ggacacaatgcacattcaagaacac

SEQ ID NO: 122367 - DNA, 25 bp, Artificial
  Probe
gagaaattaaggatggcaaaatggt

SEQ ID NO: 122368 - DNA, 25 bp, Artificial
  Probe
agagaaattaaggatggcaaaatgg

SEQ ID NO: 122369 - DNA, 25 bp, Artificial
  Probe
gtcagagaaattaaggatggcaaaa

SEQ ID NO: 122370 - DNA, 25 bp, Artificial
  Probe
agaaattaaggatggcaaaatggtt

SEQ ID NO: 122371 - DNA, 25 bp, Artificial
  Probe
cttgaccctttaccctatgtgtatg

SEQ ID NO: 122372 - DNA, 25 bp, Artificial
  Probe
gtagtctttcagtcgctttcacaaa

SEQ ID NO: 122373 - DNA, 25 bp, Artificial
  Probe
attgttccagagtcaataccatgag

SEQ ID NO: 122374 - DNA, 25 bp, Artificial
  Probe
gattgttccagagtcaataccatga

SEQ ID NO: 122375 - DNA, 25 bp, Artificial
  Probe
gcttgaccctttaccctatgtgtat

SEQ ID NO: 122376 - DNA, 25 bp, Artificial
  Probe
ttgttccagagtcaataccatgagc

SEQ ID NO: 122377 - DNA, 25 bp, Artificial
  Probe
ttgaccctttaccctatgtgtatgc

SEQ ID NO: 122378 - DNA, 25 bp, Artificial
  Probe
cgattgttccagagtcaataccatg

SEQ ID NO: 122379 - DNA, 25 bp, Artificial
  Probe
cctttaccctatgtgtatgcaaatg

SEQ ID NO: 122380 - DNA, 25 bp, Artificial
  Probe
cctatgtgtatgcaaatgttacctt

SEQ ID NO: 122381 - DNA, 25 bp, Artificial
  Probe
ctttaccctatgtgtatgcaaatgt

SEQ ID NO: 122382 - DNA, 25 bp, Artificial
  Probe
ccctatgtgtatgcaaatgttacct

SEQ ID NO: 122383 - DNA, 25 bp, Artificial
  Probe
ccctttaccctatgtgtatgcaaat

SEQ ID NO: 122384 - DNA, 25 bp, Artificial
  Probe
tttaccctatgtgtatgcaaatgtt

SEQ ID NO: 122385 - DNA, 25 bp, Artificial
  Probe
accctatgtgtatgcaaatgttacc

SEQ ID NO: 122386 - DNA, 25 bp, Artificial
  Probe
taccctatgtgtatgcaaatgttac

SEQ ID NO: 122387 - DNA, 25 bp, Artificial
  Probe
ggtagtctttcagtcgctttcacaa

SEQ ID NO: 122388 - DNA, 25 bp, Artificial
  Probe
gcgattgttccagagtcaataccat

SEQ ID NO: 122389 - DNA, 25 bp, Artificial
  Probe
ttaccctatgtgtatgcaaatgtta

SEQ ID NO: 122390 - DNA, 25 bp, Artificial
  Probe
tagtctttcagtcgctttcacaaag

SEQ ID NO: 122391 - DNA, 25 bp, Artificial
  Probe
accctttaccctatgtgtatgcaaa

SEQ ID NO: 122392 - DNA, 25 bp, Artificial
  Probe
gaccctttaccctatgtgtatgcaa

SEQ ID NO: 122393 - DNA, 25 bp, Artificial
  Probe
ggcttgaccctttaccctatgtgta

SEQ ID NO: 122394 - DNA, 25 bp, Artificial
  Probe
ttccagagtcaataccatgagccac

SEQ ID NO: 122395 - DNA, 25 bp, Artificial
  Probe
gttccagagtcaataccatgagcca

SEQ ID NO: 122396 - DNA, 25 bp, Artificial
  Probe
tgttccagagtcaataccatgagcc

SEQ ID NO: 122397 - DNA, 25 bp, Artificial
  Probe
gtgcgattgttccagagtcaatacc

SEQ ID NO: 122398 - DNA, 25 bp, Artificial
  Probe
ggtgcgattgttccagagtcaatac

SEQ ID NO: 122399 - DNA, 25 bp, Artificial
  Probe
ccagagtcaataccatgagccacaa

SEQ ID NO: 122400 - DNA, 25 bp, Artificial
  Probe
tgaccctttaccctatgtgtatgca

SEQ ID NO: 122401 - DNA, 25 bp, Artificial
  Probe
tgagacaatcaaagaggagtacggg

SEQ ID NO: 122402 - DNA, 25 bp, Artificial
  Probe
tgcgattgttccagagtcaatacca

SEQ ID NO: 122403 - DNA, 25 bp, Artificial
  Probe
ctttcagtcgctttcacaaagaacg

SEQ ID NO: 122404 - DNA, 25 bp, Artificial
  Probe
tctttcagtcgctttcacaaagaac

SEQ ID NO: 122405 - DNA, 25 bp, Artificial
  Probe
gtctttcagtcgctttcacaaagaa

SEQ ID NO: 122406 - DNA, 25 bp, Artificial
  Probe
gagacaatcaaagaggagtacgggg

SEQ ID NO: 122407 - DNA, 25 bp, Artificial
  Probe
tttcagtcgctttcacaaagaacgc

SEQ ID NO: 122408 - DNA, 25 bp, Artificial
  Probe
agtctttcagtcgctttcacaaaga

SEQ ID NO: 122409 - DNA, 25 bp, Artificial
  Probe
gacaatcaaagaggagtacggggtg

SEQ ID NO: 122410 - DNA, 25 bp, Artificial
  Probe
agacaatcaaagaggagtacggggt

SEQ ID NO: 122411 - DNA, 25 bp, Artificial
  Probe
atgatgcttccgagattagacttct

SEQ ID NO: 122412 - DNA, 25 bp, Artificial
  Probe
catgatgcttccgagattagacttc

SEQ ID NO: 122413 - DNA, 25 bp, Artificial
  Probe
attagacttctctctcatgtgccat

SEQ ID NO: 122414 - DNA, 25 bp, Artificial
  Probe
agattagacttctctctcatgtgcc

SEQ ID NO: 122415 - DNA, 25 bp, Artificial
  Probe
ttagacttctctctcatgtgccatc

SEQ ID NO: 122416 - DNA, 25 bp, Artificial
  Probe
gattagacttctctctcatgtgcca

SEQ ID NO: 122417 - DNA, 25 bp, Artificial
  Probe
agataaacaacaggaatgcttaact

SEQ ID NO: 122418 - DNA, 25 bp, Artificial
  Probe
tgagataaacaacaggaatgcttaa

SEQ ID NO: 122419 - DNA, 25 bp, Artificial
  Probe
atgagataaacaacaggaatgctta

SEQ ID NO: 122420 - DNA, 25 bp, Artificial
  Probe
gagataaacaacaggaatgcttaac

SEQ ID NO: 122421 - DNA, 25 bp, Artificial
  Probe
tagacttctctctcatgtgccatct

SEQ ID NO: 122422 - DNA, 25 bp, Artificial
  Probe
gataaacaacaggaatgcttaactt

SEQ ID NO: 122423 - DNA, 25 bp, Artificial
  Probe
catgagataaacaacaggaatgctt

SEQ ID NO: 122424 - DNA, 25 bp, Artificial
  Probe
aaacaacaggaatgcttaactttaa

SEQ ID NO: 122425 - DNA, 25 bp, Artificial
  Probe
ataaacaacaggaatgcttaacttt

SEQ ID NO: 122426 - DNA, 25 bp, Artificial
  Probe
acaggaatgcttaactttaagaacc

SEQ ID NO: 122427 - DNA, 25 bp, Artificial
  Probe
tctgttgaacttatgtttcgatgtg

SEQ ID NO: 122428 - DNA, 25 bp, Artificial
  Probe
agcctagtccttaaacactatttca

SEQ ID NO: 122429 - DNA, 25 bp, Artificial
  Probe
ggaatgcttaactttaagaacctca

SEQ ID NO: 122430 - DNA, 25 bp, Artificial
  Probe
tgcttaactttaagaacctcaacaa

SEQ ID NO: 122431 - DNA, 25 bp, Artificial
  Probe
ttagtcatgatgcttccgagattag

SEQ ID NO: 122432 - DNA, 25 bp, Artificial
  Probe
aagctgtctgcatacgtttatatct

SEQ ID NO: 122433 - DNA, 25 bp, Artificial
  Probe
caagctgtctgcatacgtttatatc

SEQ ID NO: 122434 - DNA, 25 bp, Artificial
  Probe
ctgttgaacttatgtttcgatgtgg

SEQ ID NO: 122435 - DNA, 25 bp, Artificial
  Probe
agctgtctgcatacgtttatatcta

SEQ ID NO: 122436 - DNA, 25 bp, Artificial
  Probe
ttctgttgaacttatgtttcgatgt

SEQ ID NO: 122437 - DNA, 25 bp, Artificial
  Probe
atgcttaactttaagaacctcaaca

SEQ ID NO: 122438 - DNA, 25 bp, Artificial
  Probe
caggaatgcttaactttaagaacct

SEQ ID NO: 122439 - DNA, 25 bp, Artificial
  Probe
acaacaggaatgcttaactttaaga

SEQ ID NO: 122440 - DNA, 25 bp, Artificial
  Probe
gctgtctgcatacgtttatatctag

SEQ ID NO: 122441 - DNA, 25 bp, Artificial
  Probe
aaacctattctttctatgcacaagc

SEQ ID NO: 122442 - DNA, 25 bp, Artificial
  Probe
tagtcatgatgcttccgagattaga

SEQ ID NO: 122443 - DNA, 25 bp, Artificial
  Probe
aggaatgcttaactttaagaacctc

SEQ ID NO: 122444 - DNA, 25 bp, Artificial
  Probe
aacctattctttctatgcacaagct

SEQ ID NO: 122445 - DNA, 25 bp, Artificial
  Probe
gcctagtccttaaacactatttcat

SEQ ID NO: 122446 - DNA, 25 bp, Artificial
  Probe
tcattctgttgaacttatgtttcga

SEQ ID NO: 122447 - DNA, 25 bp, Artificial
  Probe
cgagattagacttctctctcatgtg

SEQ ID NO: 122448 - DNA, 25 bp, Artificial
  Probe
ttccgagattagacttctctctcat

SEQ ID NO: 122449 - DNA, 25 bp, Artificial
  Probe
gagattagacttctctctcatgtgc

SEQ ID NO: 122450 - DNA, 25 bp, Artificial
  Probe
aagcctagtccttaaacactatttc

SEQ ID NO: 122451 - DNA, 25 bp, Artificial
  Probe
agacttctctctcatgtgccatctc

SEQ ID NO: 122452 - DNA, 25 bp, Artificial
  Probe
acctattctttctatgcacaagctg

SEQ ID NO: 122453 - DNA, 25 bp, Artificial
  Probe
taaggccatgaacagaatgctagaa

SEQ ID NO: 122454 - DNA, 25 bp, Artificial
  Probe
tccgagattagacttctctctcatg

SEQ ID NO: 122455 - DNA, 25 bp, Artificial
  Probe
cttccgagattagacttctctctca

SEQ ID NO: 122456 - DNA, 25 bp, Artificial
  Probe
gaggtctctaatgttcagtgttcat

SEQ ID NO: 122457 - DNA, 25 bp, Artificial
  Probe
aggtctctaatgttcagtgttcata

SEQ ID NO: 122458 - DNA, 25 bp, Artificial
  Probe
ttactcctgtactgtggtgaatatg

SEQ ID NO: 122459 - DNA, 25 bp, Artificial
  Probe
tactcctgtactgtggtgaatatgt

SEQ ID NO: 122460 - DNA, 25 bp, Artificial
  Probe
ggtctctaatgttcagtgttcatat

SEQ ID NO: 122461 - DNA, 25 bp, Artificial
  Probe
aggaggtctctaatgttcagtgttc

SEQ ID NO: 122462 - DNA, 25 bp, Artificial
  Probe
atattattcatgtgtcctcagagca

SEQ ID NO: 122463 - DNA, 25 bp, Artificial
  Probe
ggaggtctctaatgttcagtgttca

SEQ ID NO: 122464 - DNA, 25 bp, Artificial
  Probe
caggaggtctctaatgttcagtgtt

SEQ ID NO: 122465 - DNA, 25 bp, Artificial
  Probe
catattattcatgtgtcctcagagc

SEQ ID NO: 122466 - DNA, 25 bp, Artificial
  Probe
ctcaggaggtctctaatgttcagtg

SEQ ID NO: 122467 - DNA, 25 bp, Artificial
  Probe
ggctggatacagtgtaagatattct

SEQ ID NO: 122468 - DNA, 25 bp, Artificial
  Probe
actcctgtactgtggtgaatatgtc

SEQ ID NO: 122469 - DNA, 25 bp, Artificial
  Probe
gctggatacagtgtaagatattctc

SEQ ID NO: 122470 - DNA, 25 bp, Artificial
  Probe
tcaggaggtctctaatgttcagtgt

SEQ ID NO: 122471 - DNA, 25 bp, Artificial
  Probe
tattattcatgtgtcctcagagcac

SEQ ID NO: 122472 - DNA, 25 bp, Artificial
  Probe
cagtgttcatattattcatgtgtcc

SEQ ID NO: 122473 - DNA, 25 bp, Artificial
  Probe
tgttcatattattcatgtgtcctca

SEQ ID NO: 122474 - DNA, 25 bp, Artificial
  Probe
agtgttcatattattcatgtgtcct

SEQ ID NO: 122475 - DNA, 25 bp, Artificial
  Probe
tcatattattcatgtgtcctcagag

SEQ ID NO: 122476 - DNA, 25 bp, Artificial
  Probe
gtgttcatattattcatgtgtcctc

SEQ ID NO: 122477 - DNA, 25 bp, Artificial
  Probe
gttcatattattcatgtgtcctcag

SEQ ID NO: 122478 - DNA, 25 bp, Artificial
  Probe
acagtgtaagatattctccaaaggc

SEQ ID NO: 122479 - DNA, 25 bp, Artificial
  Probe
ctggatacagtgtaagatattctcc

SEQ ID NO: 122480 - DNA, 25 bp, Artificial
  Probe
ttcatattattcatgtgtcctcaga

SEQ ID NO: 122481 - DNA, 25 bp, Artificial
  Probe
ctttactcctgtactgtggtgaata

SEQ ID NO: 122482 - DNA, 25 bp, Artificial
  Probe
ttgatcttctccctttactcctgta

SEQ ID NO: 122483 - DNA, 25 bp, Artificial
  Probe
tttccagttgatcttctccctttac

SEQ ID NO: 122484 - DNA, 25 bp, Artificial
  Probe
gtctctaatgttcagtgttcatatt

SEQ ID NO: 122485 - DNA, 25 bp, Artificial
  Probe
gggacagttaaatatctcagtggag

SEQ ID NO: 122486 - DNA, 25 bp, Artificial
  Probe
gatcttctccctttactcctgtact

SEQ ID NO: 122487 - DNA, 25 bp, Artificial
  Probe
tttactcctgtactgtggtgaatat

SEQ ID NO: 122488 - DNA, 25 bp, Artificial
  Probe
atcttctccctttactcctgtactg

SEQ ID NO: 122489 - DNA, 25 bp, Artificial
  Probe
tgatcttctccctttactcctgtac

SEQ ID NO: 122490 - DNA, 25 bp, Artificial
  Probe
tcagtgttcatattattcatgtgtc

SEQ ID NO: 122491 - DNA, 25 bp, Artificial
  Probe
ggatacagtgtaagatattctccaa

SEQ ID NO: 122492 - DNA, 25 bp, Artificial
  Probe
tttgatctctgggaccaacatagta

SEQ ID NO: 122493 - DNA, 25 bp, Artificial
  Probe
tatatcagggctggatacagtgtaa

SEQ ID NO: 122494 - DNA, 25 bp, Artificial
  Probe
gttgatcttctccctttactcctgt

SEQ ID NO: 122495 - DNA, 25 bp, Artificial
  Probe
gggctggatacagtgtaagatattc

SEQ ID NO: 122496 - DNA, 25 bp, Artificial
  Probe
ttccagttgatcttctccctttact

SEQ ID NO: 122497 - DNA, 25 bp, Artificial
  Probe
ttgatctctgggaccaacatagtag

SEQ ID NO: 122498 - DNA, 25 bp, Artificial
  Probe
agggctggatacagtgtaagatatt

SEQ ID NO: 122499 - DNA, 25 bp, Artificial
  Probe
catcctcaggaggtctctaatgttc

SEQ ID NO: 122500 - DNA, 25 bp, Artificial
  Probe
atatatcagggctggatacagtgta

SEQ ID NO: 122501 - DNA, 25 bp, Artificial
  Probe
acaggatatgtgaggtccaatacag

SEQ ID NO: 122502 - DNA, 25 bp, Artificial
  Probe
gacaggatatgtgaggtccaataca

SEQ ID NO: 122503 - DNA, 25 bp, Artificial
  Probe
tgacaggatatgtgaggtccaatac

SEQ ID NO: 122504 - DNA, 25 bp, Artificial
  Probe
gtgacaggatatgtgaggtccaata

SEQ ID NO: 122505 - DNA, 25 bp, Artificial
  Probe
caatacaggctccagtacagaagtc

SEQ ID NO: 122506 - DNA, 25 bp, Artificial
  Probe
gatatgtgaggtccaatacaggctc

SEQ ID NO: 122507 - DNA, 25 bp, Artificial
  Probe
atacaggctccagtacagaagtcat

SEQ ID NO: 122508 - DNA, 25 bp, Artificial
  Probe
caggatatgtgaggtccaatacagg

SEQ ID NO: 122509 - DNA, 25 bp, Artificial
  Probe
aatacaggctccagtacagaagtca

SEQ ID NO: 122510 - DNA, 25 bp, Artificial
  Probe
agtaaacatggaggtgacaggatat

SEQ ID NO: 122511 - DNA, 25 bp, Artificial
  Probe
ctccagtacagaagtcatgctcttg

SEQ ID NO: 122512 - DNA, 25 bp, Artificial
  Probe
gtaaacatggaggtgacaggatatg

SEQ ID NO: 122513 - DNA, 25 bp, Artificial
  Probe
atgtctggaacctttaccttgtctg

SEQ ID NO: 122514 - DNA, 25 bp, Artificial
  Probe
cagtaaacatggaggtgacaggata

SEQ ID NO: 122515 - DNA, 25 bp, Artificial
  Probe
tgtctgtggtcacattgaagtaagg

SEQ ID NO: 122516 - DNA, 25 bp, Artificial
  Probe
tccaatacaggctccagtacagaag

SEQ ID NO: 122517 - DNA, 25 bp, Artificial
  Probe
aagacacggtggatacttcggttaa

SEQ ID NO: 122518 - DNA, 25 bp, Artificial
  Probe
tacaggctccagtacagaagtcatg

SEQ ID NO: 122519 - DNA, 25 bp, Artificial
  Probe
atgtctgtggtcacattgaagtaag

SEQ ID NO: 122520 - DNA, 25 bp, Artificial
  Probe
gatgtctgtggtcacattgaagtaa

SEQ ID NO: 122521 - DNA, 25 bp, Artificial
  Probe
ccaatacaggctccagtacagaagt

SEQ ID NO: 122522 - DNA, 25 bp, Artificial
  Probe
gtccaatacaggctccagtacagaa

SEQ ID NO: 122523 - DNA, 25 bp, Artificial
  Probe
atatgtgaggtccaatacaggctcc

SEQ ID NO: 122524 - DNA, 25 bp, Artificial
  Probe
catgtctggaacctttaccttgtct

SEQ ID NO: 122525 - DNA, 25 bp, Artificial
  Probe
tgatgtctgtggtcacattgaagta

SEQ ID NO: 122526 - DNA, 25 bp, Artificial
  Probe
ggatatgtgaggtccaatacaggct

SEQ ID NO: 122527 - DNA, 25 bp, Artificial
  Probe
aggatatgtgaggtccaatacaggc

SEQ ID NO: 122528 - DNA, 25 bp, Artificial
  Probe
ggtgacaggatatgtgaggtccaat

SEQ ID NO: 122529 - DNA, 25 bp, Artificial
  Probe
gacacggtggatacttcggttaaag

SEQ ID NO: 122530 - DNA, 25 bp, Artificial
  Probe
gtctgtggtcacattgaagtaaggc

SEQ ID NO: 122531 - DNA, 25 bp, Artificial
  Probe
agacacggtggatacttcggttaaa

SEQ ID NO: 122532 - DNA, 25 bp, Artificial
  Probe
taaacatggaggtgacaggatatgt

SEQ ID NO: 122533 - DNA, 25 bp, Artificial
  Probe
gctccagtacagaagtcatgctctt

SEQ ID NO: 122534 - DNA, 25 bp, Artificial
  Probe
ctgtggtcacattgaagtaaggcag

SEQ ID NO: 122535 - DNA, 25 bp, Artificial
  Probe
catggaggtgacaggatatgtgagg

SEQ ID NO: 122536 - DNA, 25 bp, Artificial
  Probe
aacatggaggtgacaggatatgtga

SEQ ID NO: 122537 - DNA, 25 bp, Artificial
  Probe
atggaggtgacaggatatgtgaggt

SEQ ID NO: 122538 - DNA, 25 bp, Artificial
  Probe
tctgtggtcacattgaagtaaggca

SEQ ID NO: 122539 - DNA, 25 bp, Artificial
  Probe
tccagtacagaagtcatgctcttgg

SEQ ID NO: 122540 - DNA, 25 bp, Artificial
  Probe
tatgtgaggtccaatacaggctcca

SEQ ID NO: 122541 - DNA, 25 bp, Artificial
  Probe
acatggaggtgacaggatatgtgag

SEQ ID NO: 122542 - DNA, 25 bp, Artificial
  Probe
ccatgtctggaacctttaccttgtc

SEQ ID NO: 122543 - DNA, 25 bp, Artificial
  Probe
aggtgacaggatatgtgaggtccaa

SEQ ID NO: 122544 - DNA, 25 bp, Artificial
  Probe
aaacatggaggtgacaggatatgtg

SEQ ID NO: 122545 - DNA, 25 bp, Artificial
  Probe
atctcagccatgtctggaaccttta

SEQ ID NO: 122546 - DNA, 25 bp, Artificial
  Probe
gaatgtgtgagaggctatgttgtat

SEQ ID NO: 122547 - DNA, 25 bp, Artificial
  Probe
aatgtgtgagaggctatgttgtatg

SEQ ID NO: 122548 - DNA, 25 bp, Artificial
  Probe
atgtgtgagaggctatgttgtatgt

SEQ ID NO: 122549 - DNA, 25 bp, Artificial
  Probe
tgtgtgagaggctatgttgtatgtt

SEQ ID NO: 122550 - DNA, 25 bp, Artificial
  Probe
ggaatgtgtgagaggctatgttgta

SEQ ID NO: 122551 - DNA, 25 bp, Artificial
  Probe
gtgtgagaggctatgttgtatgttt

SEQ ID NO: 122552 - DNA, 25 bp, Artificial
  Probe
gaggaatgtgtgagaggctatgttg

SEQ ID NO: 122553 - DNA, 25 bp, Artificial
  Probe
tgaggaatgtgtgagaggctatgtt

SEQ ID NO: 122554 - DNA, 25 bp, Artificial
  Probe
aggaatgtgtgagaggctatgttgt

SEQ ID NO: 122555 - DNA, 25 bp, Artificial
  Probe
gtgaggaatgtgtgagaggctatgt

SEQ ID NO: 122556 - DNA, 25 bp, Artificial
  Probe
tttgtgttagggtgaggaatgtgtg

SEQ ID NO: 122557 - DNA, 25 bp, Artificial
  Probe
tgagaggctatgttgtatgttttga

SEQ ID NO: 122558 - DNA, 25 bp, Artificial
  Probe
gtgagaggctatgttgtatgttttg

SEQ ID NO: 122559 - DNA, 25 bp, Artificial
  Probe
tgtgagaggctatgttgtatgtttt

SEQ ID NO: 122560 - DNA, 25 bp, Artificial
  Probe
gagaggctatgttgtatgttttgaa

SEQ ID NO: 122561 - DNA, 25 bp, Artificial
  Probe
aggctatgttgtatgttttgaaaga

SEQ ID NO: 122562 - DNA, 25 bp, Artificial
  Probe
agaggctatgttgtatgttttgaaa

SEQ ID NO: 122563 - DNA, 25 bp, Artificial
  Probe
gaggctatgttgtatgttttgaaag

SEQ ID NO: 122564 - DNA, 25 bp, Artificial
  Probe
ggtgaggaatgtgtgagaggctatg

SEQ ID NO: 122565 - DNA, 25 bp, Artificial
  Probe
tgttagggtgaggaatgtgtgagag

SEQ ID NO: 122566 - DNA, 25 bp, Artificial
  Probe
ggctatgttgtatgttttgaaagaa

SEQ ID NO: 122567 - DNA, 25 bp, Artificial
  Probe
ttgtgttagggtgaggaatgtgtga

SEQ ID NO: 122568 - DNA, 25 bp, Artificial
  Probe
gtgttagggtgaggaatgtgtgaga

SEQ ID NO: 122569 - DNA, 25 bp, Artificial
  Probe
gttttgtgttagggtgaggaatgtg

SEQ ID NO: 122570 - DNA, 25 bp, Artificial
  Probe
gtgttttgtgttagggtgaggaatg

SEQ ID NO: 122571 - DNA, 25 bp, Artificial
  Probe
tgtgttagggtgaggaatgtgtgag

SEQ ID NO: 122572 - DNA, 25 bp, Artificial
  Probe
ttttgtgttagggtgaggaatgtgt

SEQ ID NO: 122573 - DNA, 25 bp, Artificial
  Probe
tgttttgtgttagggtgaggaatgt

SEQ ID NO: 122574 - DNA, 25 bp, Artificial
  Probe
gttagggtgaggaatgtgtgagagg

SEQ ID NO: 122575 - DNA, 25 bp, Artificial
  Probe
gccttttatattctttaaccaatgc

SEQ ID NO: 122576 - DNA, 25 bp, Artificial
  Probe
gctatgttgtatgttttgaaagaat

SEQ ID NO: 122577 - DNA, 25 bp, Artificial
  Probe
cgtgttttgtgttagggtgaggaat

SEQ ID NO: 122578 - DNA, 25 bp, Artificial
  Probe
atgttgtatgttttgaaagaatgtt

SEQ ID NO: 122579 - DNA, 25 bp, Artificial
  Probe
tgccttttatattctttaaccaatg

SEQ ID NO: 122580 - DNA, 25 bp, Artificial
  Probe
caatgccttttatattctttaacca

SEQ ID NO: 122581 - DNA, 25 bp, Artificial
  Probe
acaatgccttttatattctttaacc

SEQ ID NO: 122582 - DNA, 25 bp, Artificial
  Probe
gagagatgagagtctgggatcgtgt

SEQ ID NO: 122583 - DNA, 25 bp, Artificial
  Probe
tgttgtatgttttgaaagaatgtta

SEQ ID NO: 122584 - DNA, 25 bp, Artificial
  Probe
tatgttgtatgttttgaaagaatgt

SEQ ID NO: 122585 - DNA, 25 bp, Artificial
  Probe
aatgccttttatattctttaaccaa

SEQ ID NO: 122586 - DNA, 25 bp, Artificial
  Probe
cacaatgccttttatattctttaac

SEQ ID NO: 122587 - DNA, 25 bp, Artificial
  Probe
ctatgttgtatgttttgaaagaatg

SEQ ID NO: 122588 - DNA, 25 bp, Artificial
  Probe
atgccttttatattctttaaccaat

SEQ ID NO: 122589 - DNA, 25 bp, Artificial
  Probe
gcacaatgccttttatattctttaa

SEQ ID NO: 122590 - DNA, 25 bp, Artificial
  Probe
cactgtcttgaaccatactttgaaa

SEQ ID NO: 122591 - DNA, 25 bp, Artificial
  Probe
ataatttctggtccctaacttgtga

SEQ ID NO: 122592 - DNA, 25 bp, Artificial
  Probe
taatttctggtccctaacttgtgaa

SEQ ID NO: 122593 - DNA, 25 bp, Artificial
  Probe
tcttcatagcctttattctagccat

SEQ ID NO: 122594 - DNA, 25 bp, Artificial
  Probe
atcttcatagcctttattctagcca

SEQ ID NO: 122595 - DNA, 25 bp, Artificial
  Probe
aatttctggtccctaacttgtgaag

SEQ ID NO: 122596 - DNA, 25 bp, Artificial
  Probe
tcactgtcttgaaccatactttgaa

SEQ ID NO: 122597 - DNA, 25 bp, Artificial
  Probe
aaccatactttgaaagaaatgcctc

SEQ ID NO: 122598 - DNA, 25 bp, Artificial
  Probe
gaaccatactttgaaagaaatgcct

SEQ ID NO: 122599 - DNA, 25 bp, Artificial
  Probe
tgaaccatactttgaaagaaatgcc

SEQ ID NO: 122600 - DNA, 25 bp, Artificial
  Probe
ctcactgtcttgaaccatactttga

SEQ ID NO: 122601 - DNA, 25 bp, Artificial
  Probe
actgtcttgaaccatactttgaaag

SEQ ID NO: 122602 - DNA, 25 bp, Artificial
  Probe
gaagtacccagtctaccacatttac

SEQ ID NO: 122603 - DNA, 25 bp, Artificial
  Probe
accatactttgaaagaaatgcctct

SEQ ID NO: 122604 - DNA, 25 bp, Artificial
  Probe
cttcatagcctttattctagccatt

SEQ ID NO: 122605 - DNA, 25 bp, Artificial
  Probe
atttctggtccctaacttgtgaaga

SEQ ID NO: 122606 - DNA, 25 bp, Artificial
  Probe
tataatttctggtccctaacttgtg

SEQ ID NO: 122607 - DNA, 25 bp, Artificial
  Probe
aagtacccagtctaccacatttaca

SEQ ID NO: 122608 - DNA, 25 bp, Artificial
  Probe
agaagtacccagtctaccacattta

SEQ ID NO: 122609 - DNA, 25 bp, Artificial
  Probe
ttgaaccatactttgaaagaaatgc

SEQ ID NO: 122610 - DNA, 25 bp, Artificial
  Probe
aatcttcatagcctttattctagcc

SEQ ID NO: 122611 - DNA, 25 bp, Artificial
  Probe
ttcatagcctttattctagccattt

SEQ ID NO: 122612 - DNA, 25 bp, Artificial
  Probe
agtacccagtctaccacatttacac

SEQ ID NO: 122613 - DNA, 25 bp, Artificial
  Probe
aattctggagtctttgttctcggta

SEQ ID NO: 122614 - DNA, 25 bp, Artificial
  Probe
tgatttaaagtagagctgtgtacga

SEQ ID NO: 122615 - DNA, 25 bp, Artificial
  Probe
aaagtagagctgtgtacgaatttca

SEQ ID NO: 122616 - DNA, 25 bp, Artificial
  Probe
acttcacactaacactttactaaga

SEQ ID NO: 122617 - DNA, 25 bp, Artificial
  Probe
gctcactgtcttgaaccatactttg

SEQ ID NO: 122618 - DNA, 25 bp, Artificial
  Probe
atgatttaaagtagagctgtgtacg

SEQ ID NO: 122619 - DNA, 25 bp, Artificial
  Probe
gtacccagtctaccacatttacact

SEQ ID NO: 122620 - DNA, 25 bp, Artificial
  Probe
cagaagtacccagtctaccacattt

SEQ ID NO: 122621 - DNA, 25 bp, Artificial
  Probe
taaagtagagctgtgtacgaatttc

SEQ ID NO: 122622 - DNA, 25 bp, Artificial
  Probe
gatttaaagtagagctgtgtacgaa

SEQ ID NO: 122623 - DNA, 25 bp, Artificial
  Probe
ttaaagtagagctgtgtacgaattt

SEQ ID NO: 122624 - DNA, 25 bp, Artificial
  Probe
tttaaagtagagctgtgtacgaatt

SEQ ID NO: 122625 - DNA, 25 bp, Artificial
  Probe
aaattctggagtctttgttctcggt

SEQ ID NO: 122626 - DNA, 25 bp, Artificial
  Probe
tggaaatgatttaaagtagagctgt

SEQ ID NO: 122627 - DNA, 25 bp, Artificial
  Probe
atttaaagtagagctgtgtacgaat

SEQ ID NO: 122628 - DNA, 25 bp, Artificial
  Probe
ggaaatgatttaaagtagagctgtg

SEQ ID NO: 122629 - DNA, 25 bp, Artificial
  Probe
gtggaaatgatttaaagtagagctg

SEQ ID NO: 122630 - DNA, 25 bp, Artificial
  Probe
agtggaaatgatttaaagtagagct

SEQ ID NO: 122631 - DNA, 25 bp, Artificial
  Probe
cagtggaaatgatttaaagtagagc

SEQ ID NO: 122632 - DNA, 25 bp, Artificial
  Probe
tagagctgtgtacgaatttcagaat

SEQ ID NO: 122633 - DNA, 25 bp, Artificial
  Probe
tttctggtccctaacttgtgaagac

SEQ ID NO: 122634 - DNA, 25 bp, Artificial
  Probe
ttataatttctggtccctaacttgt

SEQ ID NO: 122635 - DNA, 25 bp, Artificial
  Probe
atcttcttcaactatcacatcctgg

SEQ ID NO: 122636 - DNA, 25 bp, Artificial
  Probe
catcttcttcaactatcacatcctg

SEQ ID NO: 122637 - DNA, 25 bp, Artificial
  Probe
tcatcttcttcaactatcacatcct

SEQ ID NO: 122638 - DNA, 25 bp, Artificial
  Probe
gctatcatcttcttcaactatcaca

SEQ ID NO: 122639 - DNA, 25 bp, Artificial
  Probe
tgctatcatcttcttcaactatcac

SEQ ID NO: 122640 - DNA, 25 bp, Artificial
  Probe
atcatcttcttcaactatcacatcc

SEQ ID NO: 122641 - DNA, 25 bp, Artificial
  Probe
gtgactgctatcatcttcttcaact

SEQ ID NO: 122642 - DNA, 25 bp, Artificial
  Probe
tgactgctatcatcttcttcaacta

SEQ ID NO: 122643 - DNA, 25 bp, Artificial
  Probe
ctgctatcatcttcttcaactatca

SEQ ID NO: 122644 - DNA, 25 bp, Artificial
  Probe
actgctatcatcttcttcaactatc

SEQ ID NO: 122645 - DNA, 25 bp, Artificial
  Probe
gactgctatcatcttcttcaactat

SEQ ID NO: 122646 - DNA, 25 bp, Artificial
  Probe
tcttcttcaactatcacatcctggc

SEQ ID NO: 122647 - DNA, 25 bp, Artificial
  Probe
cgtgactgctatcatcttcttcaac

SEQ ID NO: 122648 - DNA, 25 bp, Artificial
  Probe
cttgaacccactgatttatgtcttc

SEQ ID NO: 122649 - DNA, 25 bp, Artificial
  Probe
ccgtgactgctatcatcttcttcaa

SEQ ID NO: 122650 - DNA, 25 bp, Artificial
  Probe
gcttgaacccactgatttatgtctt

SEQ ID NO: 122651 - DNA, 25 bp, Artificial
  Probe
ttgaacccactgatttatgtcttcg

SEQ ID NO: 122652 - DNA, 25 bp, Artificial
  Probe
ctgcttgaacccactgatttatgtc

SEQ ID NO: 122653 - DNA, 25 bp, Artificial
  Probe
tgcttgaacccactgatttatgtct

SEQ ID NO: 122654 - DNA, 25 bp, Artificial
  Probe
tatcatcttcttcaactatcacatc

SEQ ID NO: 122655 - DNA, 25 bp, Artificial
  Probe
ctatcatcttcttcaactatcacat

SEQ ID NO: 122656 - DNA, 25 bp, Artificial
  Probe
ttataaatgatgcaaccgagaagcc

SEQ ID NO: 122657 - DNA, 25 bp, Artificial
  Probe
ccaacttctttgcctttgtcaacag

SEQ ID NO: 122658 - DNA, 25 bp, Artificial
  Probe
gaacccactgatttatgtcttcgca

SEQ ID NO: 122659 - DNA, 25 bp, Artificial
  Probe
tgaacccactgatttatgtcttcgc

SEQ ID NO: 122660 - DNA, 25 bp, Artificial
  Probe
tataaatgatgcaaccgagaagcct

SEQ ID NO: 122661 - DNA, 25 bp, Artificial
  Probe
gctgcttgaacccactgatttatgt

SEQ ID NO: 122662 - DNA, 25 bp, Artificial
  Probe
cttcttcaactatcacatcctggcc

SEQ ID NO: 122663 - DNA, 25 bp, Artificial
  Probe
tttataaatgatgcaaccgagaagc

SEQ ID NO: 122664 - DNA, 25 bp, Artificial
  Probe
ggactttataaatgatgcaaccgag

SEQ ID NO: 122665 - DNA, 25 bp, Artificial
  Probe
gactttataaatgatgcaaccgaga

SEQ ID NO: 122666 - DNA, 25 bp, Artificial
  Probe
aacccactgatttatgtcttcgcag

SEQ ID NO: 122667 - DNA, 25 bp, Artificial
  Probe
actttataaatgatgcaaccgagaa

SEQ ID NO: 122668 - DNA, 25 bp, Artificial
  Probe
cttcttcgctttcctggatttcctg

SEQ ID NO: 122669 - DNA, 25 bp, Artificial
  Probe
caacttctttgcctttgtcaacagc

SEQ ID NO: 122670 - DNA, 25 bp, Artificial
  Probe
aagggactcttccaattatcctgct

SEQ ID NO: 122671 - DNA, 25 bp, Artificial
  Probe
ttcttcaactatcacatcctggcct

SEQ ID NO: 122672 - DNA, 25 bp, Artificial
  Probe
gggactttataaatgatgcaaccga

SEQ ID NO: 122673 - DNA, 25 bp, Artificial
  Probe
cacttcttcgctttcctggatttcc

SEQ ID NO: 122674 - DNA, 25 bp, Artificial
  Probe
ctttataaatgatgcaaccgagaag

SEQ ID NO: 122675 - DNA, 25 bp, Artificial
  Probe
agctgcttgaacccactgatttatg

SEQ ID NO: 122676 - DNA, 25 bp, Artificial
  Probe
acttcttcgctttcctggatttcct

SEQ ID NO: 122677 - DNA, 25 bp, Artificial
  Probe
cccgtgactgctatcatcttcttca

SEQ ID NO: 122678 - DNA, 25 bp, Artificial
  Probe
tcttcaactatcacatcctggcctc

SEQ ID NO: 122679 - DNA, 25 bp, Artificial
  Probe
tgaccaaccatctctggtatcataa

SEQ ID NO: 122680 - DNA, 25 bp, Artificial
  Probe
ccttggtattgtcatcttgtctgtt

SEQ ID NO: 122681 - DNA, 25 bp, Artificial
  Probe
ctccttggtattgtcatcttgtctg

SEQ ID NO: 122682 - DNA, 25 bp, Artificial
  Probe
ctgattgccgcttcttgactatata

SEQ ID NO: 122683 - DNA, 25 bp, Artificial
  Probe
tccttggtattgtcatcttgtctgt

SEQ ID NO: 122684 - DNA, 25 bp, Artificial
  Probe
tgattgccgcttcttgactatatac

SEQ ID NO: 122685 - DNA, 25 bp, Artificial
  Probe
gctccttggtattgtcatcttgtct

SEQ ID NO: 122686 - DNA, 25 bp, Artificial
  Probe
gtggtatatgtcttctccaagttga

SEQ ID NO: 122687 - DNA, 25 bp, Artificial
  Probe
agtggtatatgtcttctccaagttg

SEQ ID NO: 122688 - DNA, 25 bp, Artificial
  Probe
caagtggtatatgtcttctccaagt

SEQ ID NO: 122689 - DNA, 25 bp, Artificial
  Probe
tggtatatgtcttctccaagttgaa

SEQ ID NO: 122690 - DNA, 25 bp, Artificial
  Probe
aagtggtatatgtcttctccaagtt

SEQ ID NO: 122691 - DNA, 25 bp, Artificial
  Probe
ccaagtggtatatgtcttctccaag

SEQ ID NO: 122692 - DNA, 25 bp, Artificial
  Probe
cctgattgccgcttcttgactatat

SEQ ID NO: 122693 - DNA, 25 bp, Artificial
  Probe
tgctccttggtattgtcatcttgtc

SEQ ID NO: 122694 - DNA, 25 bp, Artificial
  Probe
agtgctccttggtattgtcatcttg

SEQ ID NO: 122695 - DNA, 25 bp, Artificial
  Probe
cagtgctccttggtattgtcatctt

SEQ ID NO: 122696 - DNA, 25 bp, Artificial
  Probe
cgatatgaagacagatgaatgggat

SEQ ID NO: 122697 - DNA, 25 bp, Artificial
  Probe
cttggtattgtcatcttgtctgttt

SEQ ID NO: 122698 - DNA, 25 bp, Artificial
  Probe
gtgctccttggtattgtcatcttgt

SEQ ID NO: 122699 - DNA, 25 bp, Artificial
  Probe
atgaagacagatgaatgggatttct

SEQ ID NO: 122700 - DNA, 25 bp, Artificial
  Probe
gaatgggatttctactgtcaatgag

SEQ ID NO: 122701 - DNA, 25 bp, Artificial
  Probe
aagacagatgaatgggatttctact

SEQ ID NO: 122702 - DNA, 25 bp, Artificial
  Probe
tgaagacagatgaatgggatttcta

SEQ ID NO: 122703 - DNA, 25 bp, Artificial
  Probe
aatgggatttctactgtcaatgagc

SEQ ID NO: 122704 - DNA, 25 bp, Artificial
  Probe
agtcgatatgaagacagatgaatgg

SEQ ID NO: 122705 - DNA, 25 bp, Artificial
  Probe
gaagacagatgaatgggatttctac

SEQ ID NO: 122706 - DNA, 25 bp, Artificial
  Probe
ccaattaaagccctgaatgttgtaa

SEQ ID NO: 122707 - DNA, 25 bp, Artificial
  Probe
atatgtcttctccaagttgaaaggc

SEQ ID NO: 122708 - DNA, 25 bp, Artificial
  Probe
tgaatgggatttctactgtcaatga

SEQ ID NO: 122709 - DNA, 25 bp, Artificial
  Probe
agatgaatgggatttctactgtcaa

SEQ ID NO: 122710 - DNA, 25 bp, Artificial
  Probe
gatatgaagacagatgaatgggatt

SEQ ID NO: 122711 - DNA, 25 bp, Artificial
  Probe
tatgaagacagatgaatgggatttc

SEQ ID NO: 122712 - DNA, 25 bp, Artificial
  Probe
atgaatgggatttctactgtcaatg

SEQ ID NO: 122713 - DNA, 25 bp, Artificial
  Probe
aagtcgatatgaagacagatgaatg

SEQ ID NO: 122714 - DNA, 25 bp, Artificial
  Probe
ggtatatgtcttctccaagttgaaa

SEQ ID NO: 122715 - DNA, 25 bp, Artificial
  Probe
gatgaatgggatttctactgtcaat

SEQ ID NO: 122716 - DNA, 25 bp, Artificial
  Probe
ctagccaattaaagccctgaatgtt

SEQ ID NO: 122717 - DNA, 25 bp, Artificial
  Probe
tatatgtcttctccaagttgaaagg

SEQ ID NO: 122718 - DNA, 25 bp, Artificial
  Probe
atatgaagacagatgaatgggattt

SEQ ID NO: 122719 - DNA, 25 bp, Artificial
  Probe
agacagatgaatgggatttctactg

SEQ ID NO: 122720 - DNA, 25 bp, Artificial
  Probe
caattaaagccctgaatgttgtaaa

SEQ ID NO: 122721 - DNA, 25 bp, Artificial
  Probe
cagatgaatgggatttctactgtca

SEQ ID NO: 122722 - DNA, 25 bp, Artificial
  Probe
gccaagtggtatatgtcttctccaa

SEQ ID NO: 122723 - DNA, 25 bp, Artificial
  Probe
tagccaattaaagccctgaatgttg

SEQ ID NO: 122724 - DNA, 25 bp, Artificial
  Probe
gccaattaaagccctgaatgttgta

SEQ ID NO: 122725 - DNA, 25 bp, Artificial
  Probe
gatgaagatgaggatgaagatgact

SEQ ID NO: 122726 - DNA, 25 bp, Artificial
  Probe
ggatgaagatgaggatgaagatgac

SEQ ID NO: 122727 - DNA, 25 bp, Artificial
  Probe
tggatgaagatgaggatgaagatga

SEQ ID NO: 122728 - DNA, 25 bp, Artificial
  Probe
gtggatgaagatgaggatgaagatg

SEQ ID NO: 122729 - DNA, 25 bp, Artificial
  Probe
ctgatgaagcctgagaatgaatcta

SEQ ID NO: 122730 - DNA, 25 bp, Artificial
  Probe
tgaagatgaggatgaagatgactat

SEQ ID NO: 122731 - DNA, 25 bp, Artificial
  Probe
atgaagatgaggatgaagatgacta

SEQ ID NO: 122732 - DNA, 25 bp, Artificial
  Probe
gatgaagcctgagaatgaatctagt

SEQ ID NO: 122733 - DNA, 25 bp, Artificial
  Probe
tgatgaagcctgagaatgaatctag

SEQ ID NO: 122734 - DNA, 25 bp, Artificial
  Probe
tgaagcctgagaatgaatctagttc

SEQ ID NO: 122735 - DNA, 25 bp, Artificial
  Probe
atgaagcctgagaatgaatctagtt

SEQ ID NO: 122736 - DNA, 25 bp, Artificial
  Probe
gaagatgaggatgaagatgactatc

SEQ ID NO: 122737 - DNA, 25 bp, Artificial
  Probe
gaagcctgagaatgaatctagttcc

SEQ ID NO: 122738 - DNA, 25 bp, Artificial
  Probe
tctgatgaagcctgagaatgaatct

SEQ ID NO: 122739 - DNA, 25 bp, Artificial
  Probe
tctatggagtcatgtgaagattacg

SEQ ID NO: 122740 - DNA, 25 bp, Artificial
  Probe
aagcctgagaatgaatctagttcca

SEQ ID NO: 122741 - DNA, 25 bp, Artificial
  Probe
cgtggatgaagatgaggatgaagat

SEQ ID NO: 122742 - DNA, 25 bp, Artificial
  Probe
gatgaagaagaggaggatgtggatg

SEQ ID NO: 122743 - DNA, 25 bp, Artificial
  Probe
gaagatgaagaagaggaggatgtgg

SEQ ID NO: 122744 - DNA, 25 bp, Artificial
  Probe
ggaagatgaagaagaggaggatgtg

SEQ ID NO: 122745 - DNA, 25 bp, Artificial
  Probe
gtggaagatgaagaagaggaggatg

SEQ ID NO: 122746 - DNA, 25 bp, Artificial
  Probe
agatgaagaagaggaggatgtggat

SEQ ID NO: 122747 - DNA, 25 bp, Artificial
  Probe
ttctctatggagtcatgtgaagatt

SEQ ID NO: 122748 - DNA, 25 bp, Artificial
  Probe
aagatgaagaagaggaggatgtgga

SEQ ID NO: 122749 - DNA, 25 bp, Artificial
  Probe
tggaagatgaagaagaggaggatgt

SEQ ID NO: 122750 - DNA, 25 bp, Artificial
  Probe
ctctatggagtcatgtgaagattac

SEQ ID NO: 122751 - DNA, 25 bp, Artificial
  Probe
tctctatggagtcatgtgaagatta

SEQ ID NO: 122752 - DNA, 25 bp, Artificial
  Probe
atcctcatcaaaccacctcaaataa

SEQ ID NO: 122753 - DNA, 25 bp, Artificial
  Probe
agcctgagaatgaatctagttccag

SEQ ID NO: 122754 - DNA, 25 bp, Artificial
  Probe
ctatggagtcatgtgaagattacgt

SEQ ID NO: 122755 - DNA, 25 bp, Artificial
  Probe
tatggagtcatgtgaagattacgtg

SEQ ID NO: 122756 - DNA, 25 bp, Artificial
  Probe
catcctcatcaaaccacctcaaata

SEQ ID NO: 122757 - DNA, 25 bp, Artificial
  Probe
tcctcatcaaaccacctcaaataac

SEQ ID NO: 122758 - DNA, 25 bp, Artificial
  Probe
taagaacgtggatgaagatgaggat

SEQ ID NO: 122759 - DNA, 25 bp, Artificial
  Probe
gagtcatgtgaagattacgtgaatg

SEQ ID NO: 122760 - DNA, 25 bp, Artificial
  Probe
gtcatgtgaagattacgtgaatgtc

SEQ ID NO: 122761 - DNA, 25 bp, Artificial
  Probe
agtcatgtgaagattacgtgaatgt

SEQ ID NO: 122762 - DNA, 25 bp, Artificial
  Probe
ggagtcatgtgaagattacgtgaat

SEQ ID NO: 122763 - DNA, 25 bp, Artificial
  Probe
ggtggaagatgaagaagaggaggat

SEQ ID NO: 122764 - DNA, 25 bp, Artificial
  Probe
ccctaacttattgtgactttggagc

SEQ ID NO: 122765 - DNA, 25 bp, Artificial
  Probe
tcatgtgaagattacgtgaatgtcc

SEQ ID NO: 122766 - DNA, 25 bp, Artificial
  Probe
ttctgatgaagcctgagaatgaatc

SEQ ID NO: 122767 - DNA, 25 bp, Artificial
  Probe
ctacttcctaccctcttgtcacttc

SEQ ID NO: 122768 - DNA, 25 bp, Artificial
  Probe
cctcatcaaaccacctcaaataacc

SEQ ID NO: 122769 - DNA, 25 bp, Artificial
  Probe
cctgagaatgaatctagttccagcc

SEQ ID NO: 122770 - DNA, 25 bp, Artificial
  Probe
aagagtagttgaactgagcaatacc

SEQ ID NO: 122771 - DNA, 25 bp, Artificial
  Probe
gaagagtagttgaactgagcaatac

SEQ ID NO: 122772 - DNA, 25 bp, Artificial
  Probe
agaagagtagttgaactgagcaata

SEQ ID NO: 122773 - DNA, 25 bp, Artificial
  Probe
tagaagagtagttgaactgagcaat

SEQ ID NO: 122774 - DNA, 25 bp, Artificial
  Probe
atagaagagtagttgaactgagcaa

SEQ ID NO: 122775 - DNA, 25 bp, Artificial
  Probe
gagtagttgaactgagcaatacctc

SEQ ID NO: 122776 - DNA, 25 bp, Artificial
  Probe
agagtagttgaactgagcaatacct

SEQ ID NO: 122777 - DNA, 25 bp, Artificial
  Probe
tatagaagagtagttgaactgagca

SEQ ID NO: 122778 - DNA, 25 bp, Artificial
  Probe
atacctcctcctgtgttgtattaca

SEQ ID NO: 122779 - DNA, 25 bp, Artificial
  Probe
gtatagaagagtagttgaactgagc

SEQ ID NO: 122780 - DNA, 25 bp, Artificial
  Probe
tagttgaactgagcaatacctcctc

SEQ ID NO: 122781 - DNA, 25 bp, Artificial
  Probe
gaccagataaacttgaattgacacg

SEQ ID NO: 122782 - DNA, 25 bp, Artificial
  Probe
tgaccagataaacttgaattgacac

SEQ ID NO: 122783 - DNA, 25 bp, Artificial
  Probe
gtgaccagataaacttgaattgaca

SEQ ID NO: 122784 - DNA, 25 bp, Artificial
  Probe
gtagttgaactgagcaatacctcct

SEQ ID NO: 122785 - DNA, 25 bp, Artificial
  Probe
agtagttgaactgagcaatacctcc

SEQ ID NO: 122786 - DNA, 25 bp, Artificial
  Probe
aaataggcagaggaatgtcactttc

SEQ ID NO: 122787 - DNA, 25 bp, Artificial
  Probe
agtgaccagataaacttgaattgac

SEQ ID NO: 122788 - DNA, 25 bp, Artificial
  Probe
cagtgaccagataaacttgaattga

SEQ ID NO: 122789 - DNA, 25 bp, Artificial
  Probe
gcagtgaccagataaacttgaattg

SEQ ID NO: 122790 - DNA, 25 bp, Artificial
  Probe
aataggcagaggaatgtcactttct

SEQ ID NO: 122791 - DNA, 25 bp, Artificial
  Probe
agtatagaagagtagttgaactgag

SEQ ID NO: 122792 - DNA, 25 bp, Artificial
  Probe
ataggcagaggaatgtcactttctc

SEQ ID NO: 122793 - DNA, 25 bp, Artificial
  Probe
aagtatagaagagtagttgaactga

SEQ ID NO: 122794 - DNA, 25 bp, Artificial
  Probe
agcaatacctcctcctgtgttgtat

SEQ ID NO: 122795 - DNA, 25 bp, Artificial
  Probe
accagataaacttgaattgacacgt

SEQ ID NO: 122796 - DNA, 25 bp, Artificial
  Probe
gagcaatacctcctcctgtgttgta

SEQ ID NO: 122797 - DNA, 25 bp, Artificial
  Probe
gaatgtcactttctcaaaggaagac

SEQ ID NO: 122798 - DNA, 25 bp, Artificial
  Probe
aatgtcactttctcaaaggaagact

SEQ ID NO: 122799 - DNA, 25 bp, Artificial
  Probe
atgtcactttctcaaaggaagactc

SEQ ID NO: 122800 - DNA, 25 bp, Artificial
  Probe
ggaatgtcactttctcaaaggaaga

SEQ ID NO: 122801 - DNA, 25 bp, Artificial
  Probe
aggaatgtcactttctcaaaggaag

SEQ ID NO: 122802 - DNA, 25 bp, Artificial
  Probe
gaggaatgtcactttctcaaaggaa

SEQ ID NO: 122803 - DNA, 25 bp, Artificial
  Probe
aaagagaggtgaaagttcggcattt

SEQ ID NO: 122804 - DNA, 25 bp, Artificial
  Probe
tgcagtgaccagataaacttgaatt

SEQ ID NO: 122805 - DNA, 25 bp, Artificial
  Probe
ttgcagtgaccagataaacttgaat

SEQ ID NO: 122806 - DNA, 25 bp, Artificial
  Probe
tttctcaaaggaagactcagcatcg

SEQ ID NO: 122807 - DNA, 25 bp, Artificial
  Probe
tttgcagtgaccagataaacttgaa

SEQ ID NO: 122808 - DNA, 25 bp, Artificial
  Probe
aatacctcctcctgtgttgtattac

SEQ ID NO: 122809 - DNA, 25 bp, Artificial
  Probe
caatacctcctcctgtgttgtatta

SEQ ID NO: 122810 - DNA, 25 bp, Artificial
  Probe
gtcactttctcaaaggaagactcag

SEQ ID NO: 122811 - DNA, 25 bp, Artificial
  Probe
ttgaactgagcaatacctcctcctg

SEQ ID NO: 122812 - DNA, 25 bp, Artificial
  Probe
gttgaactgagcaatacctcctcct

SEQ ID NO: 122813 - DNA, 25 bp, Artificial
  Probe
ccaagggaaagagaggtgaaagttc

SEQ ID NO: 122814 - DNA, 25 bp, Artificial
  Probe
cagaggaatgtcactttctcaaagg

SEQ ID NO: 122815 - DNA, 25 bp, Artificial
  Probe
tacactcgtatgatactctgacact

SEQ ID NO: 122816 - DNA, 25 bp, Artificial
  Probe
cactcgtatgatactctgacactgt

SEQ ID NO: 122817 - DNA, 25 bp, Artificial
  Probe
acactcgtatgatactctgacactg

SEQ ID NO: 122818 - DNA, 25 bp, Artificial
  Probe
atacactcgtatgatactctgacac

SEQ ID NO: 122819 - DNA, 25 bp, Artificial
  Probe
tatgatactctgacactgttcttgg

SEQ ID NO: 122820 - DNA, 25 bp, Artificial
  Probe
cgtatgatactctgacactgttctt

SEQ ID NO: 122821 - DNA, 25 bp, Artificial
  Probe
ctcgtatgatactctgacactgttc

SEQ ID NO: 122822 - DNA, 25 bp, Artificial
  Probe
tcgtatgatactctgacactgttct

SEQ ID NO: 122823 - DNA, 25 bp, Artificial
  Probe
gtatgatactctgacactgttcttg

SEQ ID NO: 122824 - DNA, 25 bp, Artificial
  Probe
actcgtatgatactctgacactgtt

SEQ ID NO: 122825 - DNA, 25 bp, Artificial
  Probe
atgatactctgacactgttcttggc

SEQ ID NO: 122826 - DNA, 25 bp, Artificial
  Probe
gatactctgacactgttcttggctc

SEQ ID NO: 122827 - DNA, 25 bp, Artificial
  Probe
tgatactctgacactgttcttggct

SEQ ID NO: 122828 - DNA, 25 bp, Artificial
  Probe
atactctgacactgttcttggctca

SEQ ID NO: 122829 - DNA, 25 bp, Artificial
  Probe
catcgtagtgctttgagagaggaaa

SEQ ID NO: 122830 - DNA, 25 bp, Artificial
  Probe
aaaggtttaaatgaacaagagaggc

SEQ ID NO: 122831 - DNA, 25 bp, Artificial
  Probe
tactctgacactgttcttggctcaa

SEQ ID NO: 122832 - DNA, 25 bp, Artificial
  Probe
ttgtgcaatgtgtataaacgagaat

SEQ ID NO: 122833 - DNA, 25 bp, Artificial
  Probe
attgtgcaatgtgtataaacgagaa

SEQ ID NO: 122834 - DNA, 25 bp, Artificial
  Probe
tctcatcggaaatttagcatcgtag

SEQ ID NO: 122835 - DNA, 25 bp, Artificial
  Probe
tgtattgtgcaatgtgtataaacga

SEQ ID NO: 122836 - DNA, 25 bp, Artificial
  Probe
ttctcatcggaaatttagcatcgta

SEQ ID NO: 122837 - DNA, 25 bp, Artificial
  Probe
ctcatcggaaatttagcatcgtagt

SEQ ID NO: 122838 - DNA, 25 bp, Artificial
  Probe
tgtgcaatgtgtataaacgagaata

SEQ ID NO: 122839 - DNA, 25 bp, Artificial
  Probe
tattgtgcaatgtgtataaacgaga

SEQ ID NO: 122840 - DNA, 25 bp, Artificial
  Probe
gtattgtgcaatgtgtataaacgag

SEQ ID NO: 122841 - DNA, 25 bp, Artificial
  Probe
tcatcggaaatttagcatcgtagtg

SEQ ID NO: 122842 - DNA, 25 bp, Artificial
  Probe
caaaggtttaaatgaacaagagagg

SEQ ID NO: 122843 - DNA, 25 bp, Artificial
  Probe
gcaatgtgtataaacgagaataaag

SEQ ID NO: 122844 - DNA, 25 bp, Artificial
  Probe
ctctgacactgttcttggctcaatg

SEQ ID NO: 122845 - DNA, 25 bp, Artificial
  Probe
cttctctcggctcatacactcgtat

SEQ ID NO: 122846 - DNA, 25 bp, Artificial
  Probe
atgtattgtgcaatgtgtataaacg

SEQ ID NO: 122847 - DNA, 25 bp, Artificial
  Probe
aaggtttaaatgaacaagagaggcg

SEQ ID NO: 122848 - DNA, 25 bp, Artificial
  Probe
gttctcatcggaaatttagcatcgt

SEQ ID NO: 122849 - DNA, 25 bp, Artificial
  Probe
ggtttaaatgaacaagagaggcgtt

SEQ ID NO: 122850 - DNA, 25 bp, Artificial
  Probe
acaaaggtttaaatgaacaagagag

SEQ ID NO: 122851 - DNA, 25 bp, Artificial
  Probe
tctgacactgttcttggctcaatga

SEQ ID NO: 122852 - DNA, 25 bp, Artificial
  Probe
actctgacactgttcttggctcaat

SEQ ID NO: 122853 - DNA, 25 bp, Artificial
  Probe
gtgcaatgtgtataaacgagaataa

SEQ ID NO: 122854 - DNA, 25 bp, Artificial
  Probe
ctgacactgttcttggctcaatgag

SEQ ID NO: 122855 - DNA, 25 bp, Artificial
  Probe
aggtttaaatgaacaagagaggcgt

SEQ ID NO: 122856 - DNA, 25 bp, Artificial
  Probe
aacgcaaataacatgccaaattaaa

SEQ ID NO: 122857 - DNA, 25 bp, Artificial
  Probe
aaacgcaaataacatgccaaattaa

SEQ ID NO: 122858 - DNA, 25 bp, Artificial
  Probe
atcgtagtgctttgagagaggaaag

SEQ ID NO: 122859 - DNA, 25 bp, Artificial
  Probe
tgcaatgtgtataaacgagaataaa

SEQ ID NO: 122860 - DNA, 25 bp, Artificial
  Probe
aagtttcttccttctagcccttgtt

SEQ ID NO: 122861 - DNA, 25 bp, Artificial
  Probe
agtttcttccttctagcccttgttg

SEQ ID NO: 122862 - DNA, 25 bp, Artificial
  Probe
aaagaaagacaaggtgaagaagggc

SEQ ID NO: 122863 - DNA, 25 bp, Artificial
  Probe
aagaaaggaaaaggaaaggactgag

SEQ ID NO: 122864 - DNA, 25 bp, Artificial
  Probe
caagaaaggaaaaggaaaggactga

SEQ ID NO: 122865 - DNA, 25 bp, Artificial
  Probe
aaaagaaagacaaggtgaagaaggg

SEQ ID NO: 122866 - DNA, 25 bp, Artificial
  Probe
agaaaggaaaaggaaaggactgagt

SEQ ID NO: 122867 - DNA, 25 bp, Artificial
  Probe
ccaagaaaggaaaaggaaaggactg

SEQ ID NO: 122868 - DNA, 25 bp, Artificial
  Probe
aagaaagacaaggtgaagaagggca

SEQ ID NO: 122869 - DNA, 25 bp, Artificial
  Probe
gtttcttccttctagcccttgttgc

SEQ ID NO: 122870 - DNA, 25 bp, Artificial
  Probe
gaagtttcttccttctagcccttgt

SEQ ID NO: 122871 - DNA, 25 bp, Artificial
  Probe
gactgcaaatacaagtttgagagct

SEQ ID NO: 122872 - DNA, 25 bp, Artificial
  Probe
gaaaggaaaaggaaaggactgagtc

SEQ ID NO: 122873 - DNA, 25 bp, Artificial
  Probe
actgcaaatacaagtttgagagctg

SEQ ID NO: 122874 - DNA, 25 bp, Artificial
  Probe
agaaagacaaggtgaagaagggcag

SEQ ID NO: 122875 - DNA, 25 bp, Artificial
  Probe
gccaagaaaggaaaaggaaaggact

SEQ ID NO: 122876 - DNA, 25 bp, Artificial
  Probe
agccaagaaaggaaaaggaaaggac

SEQ ID NO: 122877 - DNA, 25 bp, Artificial
  Probe
aaaggaaaaggaaaggactgagtca

SEQ ID NO: 122878 - DNA, 25 bp, Artificial
  Probe
ccgactgcaaatacaagtttgagag

SEQ ID NO: 122879 - DNA, 25 bp, Artificial
  Probe
aaggaaaaggaaaggactgagtcag

SEQ ID NO: 122880 - DNA, 25 bp, Artificial
  Probe
ctgcaaatacaagtttgagagctgg

SEQ ID NO: 122881 - DNA, 25 bp, Artificial
  Probe
cgaagtttcttccttctagcccttg

SEQ ID NO: 122882 - DNA, 25 bp, Artificial
  Probe
cagcaccgaagtttcttccttctag

SEQ ID NO: 122883 - DNA, 25 bp, Artificial
  Probe
cgactgcaaatacaagtttgagagc

SEQ ID NO: 122884 - DNA, 25 bp, Artificial
  Probe
gaaaaggaaaggactgagtcaggag

SEQ ID NO: 122885 - DNA, 25 bp, Artificial
  Probe
tttcttccttctagcccttgttgcc

SEQ ID NO: 122886 - DNA, 25 bp, Artificial
  Probe
ccgaagtttcttccttctagccctt

SEQ ID NO: 122887 - DNA, 25 bp, Artificial
  Probe
aaaaggaaaggactgagtcaggagg

SEQ ID NO: 122888 - DNA, 25 bp, Artificial
  Probe
ggaaaaggaaaggactgagtcagga

SEQ ID NO: 122889 - DNA, 25 bp, Artificial
  Probe
aggaaaaggaaaggactgagtcagg

SEQ ID NO: 122890 - DNA, 25 bp, Artificial
  Probe
gccgactgcaaatacaagtttgaga

SEQ ID NO: 122891 - DNA, 25 bp, Artificial
  Probe
agccgactgcaaatacaagtttgag

SEQ ID NO: 122892 - DNA, 25 bp, Artificial
  Probe
gagccgactgcaaatacaagtttga

SEQ ID NO: 122893 - DNA, 25 bp, Artificial
  Probe
agcaccgaagtttcttccttctagc

SEQ ID NO: 122894 - DNA, 25 bp, Artificial
  Probe
gcagcaccgaagtttcttccttcta

SEQ ID NO: 122895 - DNA, 25 bp, Artificial
  Probe
caccgaagtttcttccttctagccc

SEQ ID NO: 122896 - DNA, 25 bp, Artificial
  Probe
ggagccgactgcaaatacaagtttg

SEQ ID NO: 122897 - DNA, 25 bp, Artificial
  Probe
gtttggagccgactgcaaatacaag

SEQ ID NO: 122898 - DNA, 25 bp, Artificial
  Probe
catcagcatcaagtcagaaccagtg

SEQ ID NO: 122899 - DNA, 25 bp, Artificial
  Probe
cacatcagcatcaagtcagaaccag

SEQ ID NO: 122900 - DNA, 25 bp, Artificial
  Probe
cactgcctacaacacagattaccag

SEQ ID NO: 122901 - DNA, 25 bp, Artificial
  Probe
atcagcatcaagtcagaaccagtgt

SEQ ID NO: 122902 - DNA, 25 bp, Artificial
  Probe
acatcagcatcaagtcagaaccagt

SEQ ID NO: 122903 - DNA, 25 bp, Artificial
  Probe
atgcggctggatacttggacattaa

SEQ ID NO: 122904 - DNA, 25 bp, Artificial
  Probe
ggatacttggacattaaagtgatgg

SEQ ID NO: 122905 - DNA, 25 bp, Artificial
  Probe
gctggatacttggacattaaagtga

SEQ ID NO: 122906 - DNA, 25 bp, Artificial
  Probe
gatacttggacattaaagtgatggt

SEQ ID NO: 122907 - DNA, 25 bp, Artificial
  Probe
tggatacttggacattaaagtgatg

SEQ ID NO: 122908 - DNA, 25 bp, Artificial
  Probe
tcagcatcaagtcagaaccagtgtc

SEQ ID NO: 122909 - DNA, 25 bp, Artificial
  Probe
ctggatacttggacattaaagtgat

SEQ ID NO: 122910 - DNA, 25 bp, Artificial
  Probe
ggctggatacttggacattaaagtg

SEQ ID NO: 122911 - DNA, 25 bp, Artificial
  Probe
gatgcggctggatacttggacatta

SEQ ID NO: 122912 - DNA, 25 bp, Artificial
  Probe
ccactgcctacaacacagattacca

SEQ ID NO: 122913 - DNA, 25 bp, Artificial
  Probe
gcggctggatacttggacattaaag

SEQ ID NO: 122914 - DNA, 25 bp, Artificial
  Probe
ccacatcagcatcaagtcagaacca

SEQ ID NO: 122915 - DNA, 25 bp, Artificial
  Probe
actgcctacaacacagattaccagc

SEQ ID NO: 122916 - DNA, 25 bp, Artificial
  Probe
cggctggatacttggacattaaagt

SEQ ID NO: 122917 - DNA, 25 bp, Artificial
  Probe
tgcggctggatacttggacattaaa

SEQ ID NO: 122918 - DNA, 25 bp, Artificial
  Probe
ctgcctacaacacagattaccagct

SEQ ID NO: 122919 - DNA, 25 bp, Artificial
  Probe
gtttctctcagcaacctcatccctg

SEQ ID NO: 122920 - DNA, 25 bp, Artificial
  Probe
ctgtttctctcagcaacctcatccc

SEQ ID NO: 122921 - DNA, 25 bp, Artificial
  Probe
cctgtttctctcagcaacctcatcc

SEQ ID NO: 122922 - DNA, 25 bp, Artificial
  Probe
ccctgtttctctcagcaacctcatc

SEQ ID NO: 122923 - DNA, 25 bp, Artificial
  Probe
cccactgcctacaacacagattacc

SEQ ID NO: 122924 - DNA, 25 bp, Artificial
  Probe
aagaagactaccaatgacatgatcc

SEQ ID NO: 122925 - DNA, 25 bp, Artificial
  Probe
caagaagactaccaatgacatgatc

SEQ ID NO: 122926 - DNA, 25 bp, Artificial
  Probe
ccaagaagactaccaatgacatgat

SEQ ID NO: 122927 - DNA, 25 bp, Artificial
  Probe
gaagactaccaatgacatgatccat

SEQ ID NO: 122928 - DNA, 25 bp, Artificial
  Probe
agaagactaccaatgacatgatcca

SEQ ID NO: 122929 - DNA, 25 bp, Artificial
  Probe
tccaagaagactaccaatgacatga

SEQ ID NO: 122930 - DNA, 25 bp, Artificial
  Probe
acactcattcaacatagctctctag

SEQ ID NO: 122931 - DNA, 25 bp, Artificial
  Probe
cacactcattcaacatagctctcta

SEQ ID NO: 122932 - DNA, 25 bp, Artificial
  Probe
gaacatgatgagcaggatgagaatg

SEQ ID NO: 122933 - DNA, 25 bp, Artificial
  Probe
gaatgaacatgatgagcaggatgag

SEQ ID NO: 122934 - DNA, 25 bp, Artificial
  Probe
gagaatgaacatgatgagcaggatg

SEQ ID NO: 122935 - DNA, 25 bp, Artificial
  Probe
tgagaatgaacatgatgagcaggat

SEQ ID NO: 122936 - DNA, 25 bp, Artificial
  Probe
tcacactcattcaacatagctctct

SEQ ID NO: 122937 - DNA, 25 bp, Artificial
  Probe
gtcacactcattcaacatagctctc

SEQ ID NO: 122938 - DNA, 25 bp, Artificial
  Probe
tgaacatgatgagcaggatgagaat

SEQ ID NO: 122939 - DNA, 25 bp, Artificial
  Probe
atgaacatgatgagcaggatgagaa

SEQ ID NO: 122940 - DNA, 25 bp, Artificial
  Probe
aatgaacatgatgagcaggatgaga

SEQ ID NO: 122941 - DNA, 25 bp, Artificial
  Probe
agaatgaacatgatgagcaggatga

SEQ ID NO: 122942 - DNA, 25 bp, Artificial
  Probe
gtccaagaagactaccaatgacatg

SEQ ID NO: 122943 - DNA, 25 bp, Artificial
  Probe
tcttccttctttgtcacactcattc

SEQ ID NO: 122944 - DNA, 25 bp, Artificial
  Probe
ctcttccttctttgtcacactcatt

SEQ ID NO: 122945 - DNA, 25 bp, Artificial
  Probe
attcatatccttgggcaaacaaatg

SEQ ID NO: 122946 - DNA, 25 bp, Artificial
  Probe
ctattcatatccttgggcaaacaaa

SEQ ID NO: 122947 - DNA, 25 bp, Artificial
  Probe
cttccttctttgtcacactcattca

SEQ ID NO: 122948 - DNA, 25 bp, Artificial
  Probe
ttgtcacactcattcaacatagctc

SEQ ID NO: 122949 - DNA, 25 bp, Artificial
  Probe
ttccttctttgtcacactcattcaa

SEQ ID NO: 122950 - DNA, 25 bp, Artificial
  Probe
tattcatatccttgggcaaacaaat

SEQ ID NO: 122951 - DNA, 25 bp, Artificial
  Probe
cctattcatatccttgggcaaacaa

SEQ ID NO: 122952 - DNA, 25 bp, Artificial
  Probe
cttctttgtcacactcattcaacat

SEQ ID NO: 122953 - DNA, 25 bp, Artificial
  Probe
cactcattcaacatagctctctaga

SEQ ID NO: 122954 - DNA, 25 bp, Artificial
  Probe
ctttgtcacactcattcaacatagc

SEQ ID NO: 122955 - DNA, 25 bp, Artificial
  Probe
tctttgtcacactcattcaacatag

SEQ ID NO: 122956 - DNA, 25 bp, Artificial
  Probe
tccttctttgtcacactcattcaac

SEQ ID NO: 122957 - DNA, 25 bp, Artificial
  Probe
gcattgatgaatttgagtccatgta

SEQ ID NO: 122958 - DNA, 25 bp, Artificial
  Probe
tgtcacactcattcaacatagctct

SEQ ID NO: 122959 - DNA, 25 bp, Artificial
  Probe
ttgatgaatttgagtccatgtagtg

SEQ ID NO: 122960 - DNA, 25 bp, Artificial
  Probe
aacatgatgagcaggatgagaatgg

SEQ ID NO: 122961 - DNA, 25 bp, Artificial
  Probe
ttctttgtcacactcattcaacata

SEQ ID NO: 122962 - DNA, 25 bp, Artificial
  Probe
ttagtttccctattcatatccttgg

SEQ ID NO: 122963 - DNA, 25 bp, Artificial
  Probe
catgatgagcaggatgagaatggag

SEQ ID NO: 122964 - DNA, 25 bp, Artificial
  Probe
actcattcaacatagctctctagaa

SEQ ID NO: 122965 - DNA, 25 bp, Artificial
  Probe
ttcatatccttgggcaaacaaatgg

SEQ ID NO: 122966 - DNA, 25 bp, Artificial
  Probe
ctgagaatgaacatgatgagcagga

SEQ ID NO: 122967 - DNA, 25 bp, Artificial
  Probe
ccttctttgtcacactcattcaaca

SEQ ID NO: 122968 - DNA, 25 bp, Artificial
  Probe
attgatgaatttgagtccatgtagt

SEQ ID NO: 122969 - DNA, 25 bp, Artificial
  Probe
ttctgcttctcaagatttgtttgtc

SEQ ID NO: 122970 - DNA, 25 bp, Artificial
  Probe
cttctgcttctcaagatttgtttgt

SEQ ID NO: 122971 - DNA, 25 bp, Artificial
  Probe
cagagaacctggaacttgagagtac

SEQ ID NO: 122972 - DNA, 25 bp, Artificial
  Probe
gcttctgcttctcaagatttgtttg

SEQ ID NO: 122973 - DNA, 25 bp, Artificial
  Probe
tctgcttctcaagatttgtttgtcc

SEQ ID NO: 122974 - DNA, 25 bp, Artificial
  Probe
ctgcttctcaagatttgtttgtcca

SEQ ID NO: 122975 - DNA, 25 bp, Artificial
  Probe
gagaacctggaacttgagagtacct

SEQ ID NO: 122976 - DNA, 25 bp, Artificial
  Probe
agagaacctggaacttgagagtacc

SEQ ID NO: 122977 - DNA, 25 bp, Artificial
  Probe
ggcttctgcttctcaagatttgttt

SEQ ID NO: 122978 - DNA, 25 bp, Artificial
  Probe
tgaaataaagttatcttacacgacg

SEQ ID NO: 122979 - DNA, 25 bp, Artificial
  Probe
agaacctggaacttgagagtacctg

SEQ ID NO: 122980 - DNA, 25 bp, Artificial
  Probe
gagacaaaggatgtggagtgctaat

SEQ ID NO: 122981 - DNA, 25 bp, Artificial
  Probe
cagggaagtctctcagtggaatttg

SEQ ID NO: 122982 - DNA, 25 bp, Artificial
  Probe
gaagtctctcagtggaatttggaca

SEQ ID NO: 122983 - DNA, 25 bp, Artificial
  Probe
agacaaaggatgtggagtgctaatg

SEQ ID NO: 122984 - DNA, 25 bp, Artificial
  Probe
aagtctctcagtggaatttggacac

SEQ ID NO: 122985 - DNA, 25 bp, Artificial
  Probe
gacaaaggatgtggagtgctaatgt

SEQ ID NO: 122986 - DNA, 25 bp, Artificial
  Probe
ggaagtctctcagtggaatttggac

SEQ ID NO: 122987 - DNA, 25 bp, Artificial
  Probe
acaaaggatgtggagtgctaatgtg

SEQ ID NO: 122988 - DNA, 25 bp, Artificial
  Probe
gaaataaagttatcttacacgacgt

SEQ ID NO: 122989 - DNA, 25 bp, Artificial
  Probe
gaacctggaacttgagagtacctgg

SEQ ID NO: 122990 - DNA, 25 bp, Artificial
  Probe
caaaggatgtggagtgctaatgtgg

SEQ ID NO: 122991 - DNA, 25 bp, Artificial
  Probe
gggcttctgcttctcaagatttgtt

SEQ ID NO: 122992 - DNA, 25 bp, Artificial
  Probe
gggaagtctctcagtggaatttgga

SEQ ID NO: 122993 - DNA, 25 bp, Artificial
  Probe
agggaagtctctcagtggaatttgg

SEQ ID NO: 122994 - DNA, 25 bp, Artificial
  Probe
tgtgaaataaagttatcttacacga

SEQ ID NO: 122995 - DNA, 25 bp, Artificial
  Probe
aaataaagttatcttacacgacgtt

SEQ ID NO: 122996 - DNA, 25 bp, Artificial
  Probe
gtgaaataaagttatcttacacgac

SEQ ID NO: 122997 - DNA, 25 bp, Artificial
  Probe
aaagagggagacaaaggatgtggag

SEQ ID NO: 122998 - DNA, 25 bp, Artificial
  Probe
ttctacccaagaggagggagataac

SEQ ID NO: 122999 - DNA, 25 bp, Artificial
  Probe
gttctacccaagaggagggagataa

SEQ ID NO: 123000 - DNA, 25 bp, Artificial
  Probe
taaagttatcttacacgacgttaaa

SEQ ID NO: 123001 - DNA, 25 bp, Artificial
  Probe
caaagagggagacaaaggatgtgga

SEQ ID NO: 123002 - DNA, 25 bp, Artificial
  Probe
ctctcttctgtcagctttcaaaagg

SEQ ID NO: 123003 - DNA, 25 bp, Artificial
  Probe
ggagacaaaggatgtggagtgctaa

SEQ ID NO: 123004 - DNA, 25 bp, Artificial
  Probe
ataaagttatcttacacgacgttaa

SEQ ID NO: 123005 - DNA, 25 bp, Artificial
  Probe
aataaagttatcttacacgacgtta

SEQ ID NO: 123006 - DNA, 25 bp, Artificial
  Probe
ccagggaagtctctcagtggaattt

SEQ ID NO: 123007 - DNA, 25 bp, Artificial
  Probe
agttctacccaagaggagggagata

SEQ ID NO: 123008 - DNA, 25 bp, Artificial
  Probe
aaaggatgtggagtgctaatgtggg

SEQ ID NO: 123009 - DNA, 25 bp, Artificial
  Probe
gagcaaagagggagacaaaggatgt

SEQ ID NO: 123010 - DNA, 25 bp, Artificial
  Probe
cagcaacagttctacccaagaggag

SEQ ID NO: 123011 - DNA, 25 bp, Artificial
  Probe
ttttgccaagctgtatggttactac

SEQ ID NO: 123012 - DNA, 25 bp, Artificial
  Probe
agcaaagagggagacaaaggatgtg

SEQ ID NO: 123013 - DNA, 25 bp, Artificial
  Probe
ggagcaaagagggagacaaaggatg

SEQ ID NO: 123014 - DNA, 25 bp, Artificial
  Probe
agatgaaggcgatgaatatgatgac

SEQ ID NO: 123015 - DNA, 25 bp, Artificial
  Probe
atgaaggcgatgaatatgatgacat

SEQ ID NO: 123016 - DNA, 25 bp, Artificial
  Probe
gatgaaggcgatgaatatgatgaca

SEQ ID NO: 123017 - DNA, 25 bp, Artificial
  Probe
aatatgatgacatcgtggttcacag

SEQ ID NO: 123018 - DNA, 25 bp, Artificial
  Probe
gaatatgatgacatcgtggttcaca

SEQ ID NO: 123019 - DNA, 25 bp, Artificial
  Probe
atatgatgacatcgtggttcacagt

SEQ ID NO: 123020 - DNA, 25 bp, Artificial
  Probe
atgaatatgatgacatcgtggttca

SEQ ID NO: 123021 - DNA, 25 bp, Artificial
  Probe
gatgaatatgatgacatcgtggttc

SEQ ID NO: 123022 - DNA, 25 bp, Artificial
  Probe
atccttggagaggcatctacagtag

SEQ ID NO: 123023 - DNA, 25 bp, Artificial
  Probe
tgaatatgatgacatcgtggttcac

SEQ ID NO: 123024 - DNA, 25 bp, Artificial
  Probe
catccttggagaggcatctacagta

SEQ ID NO: 123025 - DNA, 25 bp, Artificial
  Probe
tgaaggcgatgaatatgatgacatc

SEQ ID NO: 123026 - DNA, 25 bp, Artificial
  Probe
ttggagaggcatctacagtagagaa

SEQ ID NO: 123027 - DNA, 25 bp, Artificial
  Probe
cctgcctgacttaagatctaatatt

SEQ ID NO: 123028 - DNA, 25 bp, Artificial
  Probe
cttggagaggcatctacagtagaga

SEQ ID NO: 123029 - DNA, 25 bp, Artificial
  Probe
agaggcatctacagtagagaaactc

SEQ ID NO: 123030 - DNA, 25 bp, Artificial
  Probe
gagaggcatctacagtagagaaact

SEQ ID NO: 123031 - DNA, 25 bp, Artificial
  Probe
accctgcctgacttaagatctaata

SEQ ID NO: 123032 - DNA, 25 bp, Artificial
  Probe
ccctgcctgacttaagatctaatat

SEQ ID NO: 123033 - DNA, 25 bp, Artificial
  Probe
aaccctgcctgacttaagatctaat

SEQ ID NO: 123034 - DNA, 25 bp, Artificial
  Probe
ggagaggcatctacagtagagaaac

SEQ ID NO: 123035 - DNA, 25 bp, Artificial
  Probe
ccttggagaggcatctacagtagag

SEQ ID NO: 123036 - DNA, 25 bp, Artificial
  Probe
tggagaggcatctacagtagagaaa

SEQ ID NO: 123037 - DNA, 25 bp, Artificial
  Probe
caaccctgcctgacttaagatctaa

SEQ ID NO: 123038 - DNA, 25 bp, Artificial
  Probe
tccttggagaggcatctacagtaga

SEQ ID NO: 123039 - DNA, 25 bp, Artificial
  Probe
cttagtctttggctacgtcactgag

SEQ ID NO: 123040 - DNA, 25 bp, Artificial
  Probe
gaggcatctacagtagagaaactct

SEQ ID NO: 123041 - DNA, 25 bp, Artificial
  Probe
ctgcctgacttaagatctaatatta

SEQ ID NO: 123042 - DNA, 25 bp, Artificial
  Probe
ccaaccctgcctgacttaagatcta

SEQ ID NO: 123043 - DNA, 25 bp, Artificial
  Probe
ttagtctttggctacgtcactgagg

SEQ ID NO: 123044 - DNA, 25 bp, Artificial
  Probe
ccttagtctttggctacgtcactga

SEQ ID NO: 123045 - DNA, 25 bp, Artificial
  Probe
cactgagtacctggacttgcagaac

SEQ ID NO: 123046 - DNA, 25 bp, Artificial
  Probe
aggcatctacagtagagaaactcta

SEQ ID NO: 123047 - DNA, 25 bp, Artificial
  Probe
tgcctgacttaagatctaatattaa

SEQ ID NO: 123048 - DNA, 25 bp, Artificial
  Probe
ggcatctacagtagagaaactctat

SEQ ID NO: 123049 - DNA, 25 bp, Artificial
  Probe
ctacagtagagaaactctatgcagc

SEQ ID NO: 123050 - DNA, 25 bp, Artificial
  Probe
tacagtagagaaactctatgcagct

SEQ ID NO: 123051 - DNA, 25 bp, Artificial
  Probe
tctacagtagagaaactctatgcag

SEQ ID NO: 123052 - DNA, 25 bp, Artificial
  Probe
tagtctttggctacgtcactgagga

SEQ ID NO: 123053 - DNA, 25 bp, Artificial
  Probe
catctacagtagagaaactctatgc

SEQ ID NO: 123054 - DNA, 25 bp, Artificial
  Probe
gcatctacagtagagaaactctatg

SEQ ID NO: 123055 - DNA, 25 bp, Artificial
  Probe
atctacagtagagaaactctatgca

SEQ ID NO: 123056 - DNA, 25 bp, Artificial
  Probe
cccttagtctttggctacgtcactg

SEQ ID NO: 123057 - DNA, 25 bp, Artificial
  Probe
atccatccacctacagttcaagaat

SEQ ID NO: 123058 - DNA, 25 bp, Artificial
  Probe
aatccatccacctacagttcaagaa

SEQ ID NO: 123059 - DNA, 25 bp, Artificial
  Probe
tccatccacctacagttcaagaatt

SEQ ID NO: 123060 - DNA, 25 bp, Artificial
  Probe
ccatccacctacagttcaagaattg

SEQ ID NO: 123061 - DNA, 25 bp, Artificial
  Probe
catccacctacagttcaagaattgc

SEQ ID NO: 123062 - DNA, 25 bp, Artificial
  Probe
tccatctcttaaatcaagtctctgc

SEQ ID NO: 123063 - DNA, 25 bp, Artificial
  Probe
cctccatctcttaaatcaagtctct

SEQ ID NO: 123064 - DNA, 25 bp, Artificial
  Probe
tcctccatctcttaaatcaagtctc

SEQ ID NO: 123065 - DNA, 25 bp, Artificial
  Probe
ctcctccatctcttaaatcaagtct

SEQ ID NO: 123066 - DNA, 25 bp, Artificial
  Probe
gctcctccatctcttaaatcaagtc

SEQ ID NO: 123067 - DNA, 25 bp, Artificial
  Probe
ctgctcctccatctcttaaatcaag

SEQ ID NO: 123068 - DNA, 25 bp, Artificial
  Probe
acctacagttcaagaattgcactag

SEQ ID NO: 123069 - DNA, 25 bp, Artificial
  Probe
cacctacagttcaagaattgcacta

SEQ ID NO: 123070 - DNA, 25 bp, Artificial
  Probe
aaatccatccacctacagttcaaga

SEQ ID NO: 123071 - DNA, 25 bp, Artificial
  Probe
gaaatccatccacctacagttcaag

SEQ ID NO: 123072 - DNA, 25 bp, Artificial
  Probe
ctccatctcttaaatcaagtctctg

SEQ ID NO: 123073 - DNA, 25 bp, Artificial
  Probe
tgctcctccatctcttaaatcaagt

SEQ ID NO: 123074 - DNA, 25 bp, Artificial
  Probe
ttcctgctcctccatctcttaaatc

SEQ ID NO: 123075 - DNA, 25 bp, Artificial
  Probe
cctgctcctccatctcttaaatcaa

SEQ ID NO: 123076 - DNA, 25 bp, Artificial
  Probe
atttaccgcaatggagagaagtttg

SEQ ID NO: 123077 - DNA, 25 bp, Artificial
  Probe
ctacagttcaagaattgcactagcc

SEQ ID NO: 123078 - DNA, 25 bp, Artificial
  Probe
cctacagttcaagaattgcactagc

SEQ ID NO: 123079 - DNA, 25 bp, Artificial
  Probe
gttcaagaattgcactagcctgtac

SEQ ID NO: 123080 - DNA, 25 bp, Artificial
  Probe
agttcaagaattgcactagcctgta

SEQ ID NO: 123081 - DNA, 25 bp, Artificial
  Probe
tacagttcaagaattgcactagcct

SEQ ID NO: 123082 - DNA, 25 bp, Artificial
  Probe
atccacctacagttcaagaattgca

SEQ ID NO: 123083 - DNA, 25 bp, Artificial
  Probe
tcctgctcctccatctcttaaatca

SEQ ID NO: 123084 - DNA, 25 bp, Artificial
  Probe
tttaccgcaatggagagaagtttga

SEQ ID NO: 123085 - DNA, 25 bp, Artificial
  Probe
ccatctcttaaatcaagtctctgca

SEQ ID NO: 123086 - DNA, 25 bp, Artificial
  Probe
atctcttaaatcaagtctctgcaac

SEQ ID NO: 123087 - DNA, 25 bp, Artificial
  Probe
catctcttaaatcaagtctctgcaa

SEQ ID NO: 123088 - DNA, 25 bp, Artificial
  Probe
attgcactagcctgtacacctataa

SEQ ID NO: 123089 - DNA, 25 bp, Artificial
  Probe
aattgcactagcctgtacacctata

SEQ ID NO: 123090 - DNA, 25 bp, Artificial
  Probe
cttaaatcaagtctctgcaactctg

SEQ ID NO: 123091 - DNA, 25 bp, Artificial
  Probe
tcttaaatcaagtctctgcaactct

SEQ ID NO: 123092 - DNA, 25 bp, Artificial
  Probe
tctcttaaatcaagtctctgcaact

SEQ ID NO: 123093 - DNA, 25 bp, Artificial
  Probe
ctcttaaatcaagtctctgcaactc

SEQ ID NO: 123094 - DNA, 25 bp, Artificial
  Probe
caccaacaggaatctccaatgtgag

SEQ ID NO: 123095 - DNA, 25 bp, Artificial
  Probe
ttaccgcaatggagagaagtttgag

SEQ ID NO: 123096 - DNA, 25 bp, Artificial
  Probe
ttgcactagcctgtacacctataag

SEQ ID NO: 123097 - DNA, 25 bp, Artificial
  Probe
caagaagtccctgaaatccatccac

SEQ ID NO: 123098 - DNA, 25 bp, Artificial
  Probe
tccacctacagttcaagaattgcac

SEQ ID NO: 123099 - DNA, 25 bp, Artificial
  Probe
ccacctacagttcaagaattgcact

SEQ ID NO: 123100 - DNA, 25 bp, Artificial
  Probe
gtcaccaacaggaatctccaatgtg

SEQ ID NO: 123101 - DNA, 25 bp, Artificial
  Probe
cagtcatggtcattggaacctgtac

SEQ ID NO: 123102 - DNA, 25 bp, Artificial
  Probe
gatgactatgaaggagattggaaca

SEQ ID NO: 123103 - DNA, 25 bp, Artificial
  Probe
tgatgactatgaaggagattggaac

SEQ ID NO: 123104 - DNA, 25 bp, Artificial
  Probe
tgatgatgactatgaaggagattgg

SEQ ID NO: 123105 - DNA, 25 bp, Artificial
  Probe
gatgatgactatgaaggagattgga

SEQ ID NO: 123106 - DNA, 25 bp, Artificial
  Probe
atgatgactatgaaggagattggaa

SEQ ID NO: 123107 - DNA, 25 bp, Artificial
  Probe
tgagattgatgatgactatgaagga

SEQ ID NO: 123108 - DNA, 25 bp, Artificial
  Probe
agattgatgatgactatgaaggaga

SEQ ID NO: 123109 - DNA, 25 bp, Artificial
  Probe
gactatgaaggagattggaacaact

SEQ ID NO: 123110 - DNA, 25 bp, Artificial
  Probe
atgactatgaaggagattggaacaa

SEQ ID NO: 123111 - DNA, 25 bp, Artificial
  Probe
tgactatgaaggagattggaacaac

SEQ ID NO: 123112 - DNA, 25 bp, Artificial
  Probe
gagattgatgatgactatgaaggag

SEQ ID NO: 123113 - DNA, 25 bp, Artificial
  Probe
ttgatgatgactatgaaggagattg

SEQ ID NO: 123114 - DNA, 25 bp, Artificial
  Probe
ctatgaaggagattggaacaactct

SEQ ID NO: 123115 - DNA, 25 bp, Artificial
  Probe
actatgaaggagattggaacaactc

SEQ ID NO: 123116 - DNA, 25 bp, Artificial
  Probe
tatgaaggagattggaacaactctt

SEQ ID NO: 123117 - DNA, 25 bp, Artificial
  Probe
atgagattgatgatgactatgaagg

SEQ ID NO: 123118 - DNA, 25 bp, Artificial
  Probe
gattgatgatgactatgaaggagat

SEQ ID NO: 123119 - DNA, 25 bp, Artificial
  Probe
aatactgaaggtatggacagaacag

SEQ ID NO: 123120 - DNA, 25 bp, Artificial
  Probe
gaatactgaaggtatggacagaaca

SEQ ID NO: 123121 - DNA, 25 bp, Artificial
  Probe
agaatactgaaggtatggacagaac

SEQ ID NO: 123122 - DNA, 25 bp, Artificial
  Probe
cagaatactgaaggtatggacagaa

SEQ ID NO: 123123 - DNA, 25 bp, Artificial
  Probe
atactgaaggtatggacagaacaga

SEQ ID NO: 123124 - DNA, 25 bp, Artificial
  Probe
attgatgatgactatgaaggagatt

SEQ ID NO: 123125 - DNA, 25 bp, Artificial
  Probe
tactgaaggtatggacagaacagac

SEQ ID NO: 123126 - DNA, 25 bp, Artificial
  Probe
agatgagattgatgatgactatgaa

SEQ ID NO: 123127 - DNA, 25 bp, Artificial
  Probe
aagatgagattgatgatgactatga

SEQ ID NO: 123128 - DNA, 25 bp, Artificial
  Probe
ctcaagcacaaggtcaagatcaatc

SEQ ID NO: 123129 - DNA, 25 bp, Artificial
  Probe
gatgagattgatgatgactatgaag

SEQ ID NO: 123130 - DNA, 25 bp, Artificial
  Probe
gaagatgagattgatgatgactatg

SEQ ID NO: 123131 - DNA, 25 bp, Artificial
  Probe
aactgaatgccataatctggatcaa

SEQ ID NO: 123132 - DNA, 25 bp, Artificial
  Probe
ccagaatactgaaggtatggacaga

SEQ ID NO: 123133 - DNA, 25 bp, Artificial
  Probe
aaccgatccagaatactgaaggtat

SEQ ID NO: 123134 - DNA, 25 bp, Artificial
  Probe
caagcacaaggtcaagatcaatcac

SEQ ID NO: 123135 - DNA, 25 bp, Artificial
  Probe
tcaagcacaaggtcaagatcaatca

SEQ ID NO: 123136 - DNA, 25 bp, Artificial
  Probe
cacactggagaactacaactttgag

SEQ ID NO: 123137 - DNA, 25 bp, Artificial
  Probe
caaggtcaagatcaatcaccagaag

SEQ ID NO: 123138 - DNA, 25 bp, Artificial
  Probe
accgatccagaatactgaaggtatg

SEQ ID NO: 123139 - DNA, 25 bp, Artificial
  Probe
ctgaaggtatggacagaacagacag

SEQ ID NO: 123140 - DNA, 25 bp, Artificial
  Probe
aaggtcaagatcaatcaccagaagt

SEQ ID NO: 123141 - DNA, 25 bp, Artificial
  Probe
acaaggtcaagatcaatcaccagaa

SEQ ID NO: 123142 - DNA, 25 bp, Artificial
  Probe
ccgatccagaatactgaaggtatgg

SEQ ID NO: 123143 - DNA, 25 bp, Artificial
  Probe
tgaaggtatggacagaacagacagg

SEQ ID NO: 123144 - DNA, 25 bp, Artificial
  Probe
actgaaggtatggacagaacagaca

SEQ ID NO: 123145 - DNA, 25 bp, Artificial
  Probe
atcaaaccgatccagaatactgaag

SEQ ID NO: 123146 - DNA, 25 bp, Artificial
  Probe
aggtcaagatcaatcaccagaagtg

SEQ ID NO: 123147 - DNA, 25 bp, Artificial
  Probe
caagttatcattaggattctggctg

SEQ ID NO: 123148 - DNA, 25 bp, Artificial
  Probe
aagttatcattaggattctggctgc

SEQ ID NO: 123149 - DNA, 25 bp, Artificial
  Probe
gcaagttatcattaggattctggct

SEQ ID NO: 123150 - DNA, 25 bp, Artificial
  Probe
gttatcattaggattctggctgctg

SEQ ID NO: 123151 - DNA, 25 bp, Artificial
  Probe
agttatcattaggattctggctgct

SEQ ID NO: 123152 - DNA, 25 bp, Artificial
  Probe
tatcattaggattctggctgctgtt

SEQ ID NO: 123153 - DNA, 25 bp, Artificial
  Probe
ttatcattaggattctggctgctgt

SEQ ID NO: 123154 - DNA, 25 bp, Artificial
  Probe
tccataaggaacaagagcataagtt

SEQ ID NO: 123155 - DNA, 25 bp, Artificial
  Probe
ctccataaggaacaagagcataagt

SEQ ID NO: 123156 - DNA, 25 bp, Artificial
  Probe
cctccataaggaacaagagcataag

SEQ ID NO: 123157 - DNA, 25 bp, Artificial
  Probe
ctgcaagttatcattaggattctgg

SEQ ID NO: 123158 - DNA, 25 bp, Artificial
  Probe
cataggtgtgaacgaactttaagag

SEQ ID NO: 123159 - DNA, 25 bp, Artificial
  Probe
atccataggtgtgaacgaactttaa

SEQ ID NO: 123160 - DNA, 25 bp, Artificial
  Probe
catccataggtgtgaacgaacttta

SEQ ID NO: 123161 - DNA, 25 bp, Artificial
  Probe
acatcattcagcagaacaaggagag

SEQ ID NO: 123162 - DNA, 25 bp, Artificial
  Probe
gacatcattcagcagaacaaggaga

SEQ ID NO: 123163 - DNA, 25 bp, Artificial
  Probe
ccataggtgtgaacgaactttaaga

SEQ ID NO: 123164 - DNA, 25 bp, Artificial
  Probe
tccataggtgtgaacgaactttaag

SEQ ID NO: 123165 - DNA, 25 bp, Artificial
  Probe
tgcaagttatcattaggattctggc

SEQ ID NO: 123166 - DNA, 25 bp, Artificial
  Probe
taaggaacaagagcataagtttcac

SEQ ID NO: 123167 - DNA, 25 bp, Artificial
  Probe
ccataaggaacaagagcataagttt

SEQ ID NO: 123168 - DNA, 25 bp, Artificial
  Probe
ataggtgtgaacgaactttaagagt

SEQ ID NO: 123169 - DNA, 25 bp, Artificial
  Probe
aaggaacaagagcataagtttcact

SEQ ID NO: 123170 - DNA, 25 bp, Artificial
  Probe
gcgaacttgatcttcataagaactc

SEQ ID NO: 123171 - DNA, 25 bp, Artificial
  Probe
aaggcgaacttgatcttcataagaa

SEQ ID NO: 123172 - DNA, 25 bp, Artificial
  Probe
cagtacctgcaagttatcattagga

SEQ ID NO: 123173 - DNA, 25 bp, Artificial
  Probe
aggaacaagagcataagtttcactc

SEQ ID NO: 123174 - DNA, 25 bp, Artificial
  Probe
ataaggaacaagagcataagtttca

SEQ ID NO: 123175 - DNA, 25 bp, Artificial
  Probe
acctgcaagttatcattaggattct

SEQ ID NO: 123176 - DNA, 25 bp, Artificial
  Probe
cgaacttgatcttcataagaactca

SEQ ID NO: 123177 - DNA, 25 bp, Artificial
  Probe
ggcgaacttgatcttcataagaact

SEQ ID NO: 123178 - DNA, 25 bp, Artificial
  Probe
aggcgaacttgatcttcataagaac

SEQ ID NO: 123179 - DNA, 25 bp, Artificial
  Probe
catcattcagcagaacaaggagagg

SEQ ID NO: 123180 - DNA, 25 bp, Artificial
  Probe
cctgcaagttatcattaggattctg

SEQ ID NO: 123181 - DNA, 25 bp, Artificial
  Probe
agtacctgcaagttatcattaggat

SEQ ID NO: 123182 - DNA, 25 bp, Artificial
  Probe
gagcataagtttcactcttcttagc

SEQ ID NO: 123183 - DNA, 25 bp, Artificial
  Probe
cataaggaacaagagcataagtttc

SEQ ID NO: 123184 - DNA, 25 bp, Artificial
  Probe
gtacctgcaagttatcattaggatt

SEQ ID NO: 123185 - DNA, 25 bp, Artificial
  Probe
tcataagaactcagaagacttagaa

SEQ ID NO: 123186 - DNA, 25 bp, Artificial
  Probe
ttcataagaactcagaagacttaga

SEQ ID NO: 123187 - DNA, 25 bp, Artificial
  Probe
ggacatcattcagcagaacaaggag

SEQ ID NO: 123188 - DNA, 25 bp, Artificial
  Probe
tacctgcaagttatcattaggattc

SEQ ID NO: 123189 - DNA, 25 bp, Artificial
  Probe
atcattaggattctggctgctgttt

SEQ ID NO: 123190 - DNA, 25 bp, Artificial
  Probe
aagaactcagaagacttagaagaaa

SEQ ID NO: 123191 - DNA, 25 bp, Artificial
  Probe
taagaactcagaagacttagaagaa

SEQ ID NO: 123192 - DNA, 25 bp, Artificial
  Probe
cgtcagtagtaagaaagatggagag

SEQ ID NO: 123193 - DNA, 25 bp, Artificial
  Probe
tcgtcagtagtaagaaagatggaga

SEQ ID NO: 123194 - DNA, 25 bp, Artificial
  Probe
gtcagtagtaagaaagatggagaga

SEQ ID NO: 123195 - DNA, 25 bp, Artificial
  Probe
ttcgtcagtagtaagaaagatggag

SEQ ID NO: 123196 - DNA, 25 bp, Artificial
  Probe
cttcgtcagtagtaagaaagatgga

SEQ ID NO: 123197 - DNA, 25 bp, Artificial
  Probe
tcagtagtaagaaagatggagagag

SEQ ID NO: 123198 - DNA, 25 bp, Artificial
  Probe
tcttcgtcagtagtaagaaagatgg

SEQ ID NO: 123199 - DNA, 25 bp, Artificial
  Probe
ggctggtttcttcgtcagtagtaag

SEQ ID NO: 123200 - DNA, 25 bp, Artificial
  Probe
gctggtttcttcgtcagtagtaaga

SEQ ID NO: 123201 - DNA, 25 bp, Artificial
  Probe
gggctggtttcttcgtcagtagtaa

SEQ ID NO: 123202 - DNA, 25 bp, Artificial
  Probe
attgggctggtttcttcgtcagtag

SEQ ID NO: 123203 - DNA, 25 bp, Artificial
  Probe
ctggtttcttcgtcagtagtaagaa

SEQ ID NO: 123204 - DNA, 25 bp, Artificial
  Probe
cattgggctggtttcttcgtcagta

SEQ ID NO: 123205 - DNA, 25 bp, Artificial
  Probe
ttcttcgtcagtagtaagaaagatg

SEQ ID NO: 123206 - DNA, 25 bp, Artificial
  Probe
gcttgagctttagaccccagacttc

SEQ ID NO: 123207 - DNA, 25 bp, Artificial
  Probe
taaagttgccactgggaacttgaga

SEQ ID NO: 123208 - DNA, 25 bp, Artificial
  Probe
aagttgccactgggaacttgagaat

SEQ ID NO: 123209 - DNA, 25 bp, Artificial
  Probe
aaagttgccactgggaacttgagaa

SEQ ID NO: 123210 - DNA, 25 bp, Artificial
  Probe
tctacctacctatcaactgtcttca

SEQ ID NO: 123211 - DNA, 25 bp, Artificial
  Probe
ctacctatcaactgtcttcatcacc

SEQ ID NO: 123212 - DNA, 25 bp, Artificial
  Probe
cctacctatcaactgtcttcatcac

SEQ ID NO: 123213 - DNA, 25 bp, Artificial
  Probe
ccatctacctacctatcaactgtct

SEQ ID NO: 123214 - DNA, 25 bp, Artificial
  Probe
acctacctatcaactgtcttcatca

SEQ ID NO: 123215 - DNA, 25 bp, Artificial
  Probe
tacctatcaactgtcttcatcacca

SEQ ID NO: 123216 - DNA, 25 bp, Artificial
  Probe
tacctacctatcaactgtcttcatc

SEQ ID NO: 123217 - DNA, 25 bp, Artificial
  Probe
ctacctacctatcaactgtcttcat

SEQ ID NO: 123218 - DNA, 25 bp, Artificial
  Probe
catctacctacctatcaactgtctt

SEQ ID NO: 123219 - DNA, 25 bp, Artificial
  Probe
atctacctacctatcaactgtcttc

SEQ ID NO: 123220 - DNA, 25 bp, Artificial
  Probe
ttcgtcttagcaattagtggaatac

SEQ ID NO: 123221 - DNA, 25 bp, Artificial
  Probe
acttcgtcttagcaattagtggaat

SEQ ID NO: 123222 - DNA, 25 bp, Artificial
  Probe
cgtcttagcaattagtggaatactg

SEQ ID NO: 123223 - DNA, 25 bp, Artificial
  Probe
tcgtcttagcaattagtggaatact

SEQ ID NO: 123224 - DNA, 25 bp, Artificial
  Probe
cttcgtcttagcaattagtggaata

SEQ ID NO: 123225 - DNA, 25 bp, Artificial
  Probe
gcatcacttcgtcttagcaattagt

SEQ ID NO: 123226 - DNA, 25 bp, Artificial
  Probe
ctgaagaggtctgatgtataagcag

SEQ ID NO: 123227 - DNA, 25 bp, Artificial
  Probe
ggcatcacttcgtcttagcaattag

SEQ ID NO: 123228 - DNA, 25 bp, Artificial
  Probe
acctatcaactgtcttcatcaccac

SEQ ID NO: 123229 - DNA, 25 bp, Artificial
  Probe
gtcttagcaattagtggaatactga

SEQ ID NO: 123230 - DNA, 25 bp, Artificial
  Probe
agcaattagtggaatactgattact

SEQ ID NO: 123231 - DNA, 25 bp, Artificial
  Probe
cctgaagaggtctgatgtataagca

SEQ ID NO: 123232 - DNA, 25 bp, Artificial
  Probe
cctatcaactgtcttcatcaccacc

SEQ ID NO: 123233 - DNA, 25 bp, Artificial
  Probe
ggttatagttatgggaaaggaaggt

SEQ ID NO: 123234 - DNA, 25 bp, Artificial
  Probe
tggttatagttatgggaaaggaagg

SEQ ID NO: 123235 - DNA, 25 bp, Artificial
  Probe
tatagttatgggaaaggaaggtgtc

SEQ ID NO: 123236 - DNA, 25 bp, Artificial
  Probe
gtttgcttccattctctttgtgtag

SEQ ID NO: 123237 - DNA, 25 bp, Artificial
  Probe
tttgcttccattctctttgtgtagt

SEQ ID NO: 123238 - DNA, 25 bp, Artificial
  Probe
ctctcccatctacctacctatcaac

SEQ ID NO: 123239 - DNA, 25 bp, Artificial
  Probe
tgaagaggtctgatgtataagcagc

SEQ ID NO: 123240 - DNA, 25 bp, Artificial
  Probe
ttatagttatgggaaaggaaggtgt

SEQ ID NO: 123241 - DNA, 25 bp, Artificial
  Probe
tcttagcaattagtggaatactgat

SEQ ID NO: 123242 - DNA, 25 bp, Artificial
  Probe
gttatagttatgggaaaggaaggtg

SEQ ID NO: 123243 - DNA, 25 bp, Artificial
  Probe
ccttactacagtaaccataccgatc

SEQ ID NO: 123244 - DNA, 25 bp, Artificial
  Probe
tatgaactcgctttatacctgaaga

SEQ ID NO: 123245 - DNA, 25 bp, Artificial
  Probe
ctcccatctacctacctatcaactg

SEQ ID NO: 123246 - DNA, 25 bp, Artificial
  Probe
tctcccatctacctacctatcaact

SEQ ID NO: 123247 - DNA, 25 bp, Artificial
  Probe
accttactacagtaaccataccgat

SEQ ID NO: 123248 - DNA, 25 bp, Artificial
  Probe
cttactacagtaaccataccgatca

SEQ ID NO: 123249 - DNA, 25 bp, Artificial
  Probe
atgaccttactacagtaaccatacc

SEQ ID NO: 123250 - DNA, 25 bp, Artificial
  Probe
ccatgaccttactacagtaaccata

SEQ ID NO: 123251 - DNA, 25 bp, Artificial
  Probe
tccacacaggcacaattaacaagaa

SEQ ID NO: 123252 - DNA, 25 bp, Artificial
  Probe
cccatctacctacctatcaactgtc

SEQ ID NO: 123253 - DNA, 25 bp, Artificial
  Probe
ttactacagtaaccataccgatcaa

SEQ ID NO: 123254 - DNA, 25 bp, Artificial
  Probe
ttgcttccattctctttgtgtagtg

SEQ ID NO: 123255 - DNA, 25 bp, Artificial
  Probe
atggttaggtaggtagaaggaactt

SEQ ID NO: 123256 - DNA, 25 bp, Artificial
  Probe
gtcatggttaggtaggtagaaggaa

SEQ ID NO: 123257 - DNA, 25 bp, Artificial
  Probe
catggttaggtaggtagaaggaact

SEQ ID NO: 123258 - DNA, 25 bp, Artificial
  Probe
tcatggttaggtaggtagaaggaac

SEQ ID NO: 123259 - DNA, 25 bp, Artificial
  Probe
gtggtcatggttaggtaggtagaag

SEQ ID NO: 123260 - DNA, 25 bp, Artificial
  Probe
ggtcatggttaggtaggtagaagga

SEQ ID NO: 123261 - DNA, 25 bp, Artificial
  Probe
tggtcatggttaggtaggtagaagg

SEQ ID NO: 123262 - DNA, 25 bp, Artificial
  Probe
ggtggtcatggttaggtaggtagaa

SEQ ID NO: 123263 - DNA, 25 bp, Artificial
  Probe
tggttaggtaggtagaaggaacttc

SEQ ID NO: 123264 - DNA, 25 bp, Artificial
  Probe
ggttaggtaggtagaaggaacttcc

SEQ ID NO: 123265 - DNA, 25 bp, Artificial
  Probe
gattcagtcatcgagttcagcatcc

SEQ ID NO: 123266 - DNA, 25 bp, Artificial
  Probe
gatgacaacgagaaagccttgaaga

SEQ ID NO: 123267 - DNA, 25 bp, Artificial
  Probe
agatgacaacgagaaagccttgaag

SEQ ID NO: 123268 - DNA, 25 bp, Artificial
  Probe
cttgtggaatactacaggaaacggg

SEQ ID NO: 123269 - DNA, 25 bp, Artificial
  Probe
atgacaacgagaaagccttgaagac

SEQ ID NO: 123270 - DNA, 25 bp, Artificial
  Probe
cagatgacaacgagaaagccttgaa

SEQ ID NO: 123271 - DNA, 25 bp, Artificial
  Probe
ctccgcttgtggaatactacaggaa

SEQ ID NO: 123272 - DNA, 25 bp, Artificial
  Probe
attcagtcatcgagttcagcatcca

SEQ ID NO: 123273 - DNA, 25 bp, Artificial
  Probe
gcttgtggaatactacaggaaacgg

SEQ ID NO: 123274 - DNA, 25 bp, Artificial
  Probe
ccgcttgtggaatactacaggaaac

SEQ ID NO: 123275 - DNA, 25 bp, Artificial
  Probe
cgcttgtggaatactacaggaaacg

SEQ ID NO: 123276 - DNA, 25 bp, Artificial
  Probe
ttcagtcatcgagttcagcatccag

SEQ ID NO: 123277 - DNA, 25 bp, Artificial
  Probe
gttaggtaggtagaaggaacttcct

SEQ ID NO: 123278 - DNA, 25 bp, Artificial
  Probe
tcagatgacaacgagaaagccttga

SEQ ID NO: 123279 - DNA, 25 bp, Artificial
  Probe
tccgcttgtggaatactacaggaaa

SEQ ID NO: 123280 - DNA, 25 bp, Artificial
  Probe
ctcttttcttcctctctgtgaaagg

SEQ ID NO: 123281 - DNA, 25 bp, Artificial
  Probe
cctcttttcttcctctctgtgaaag

SEQ ID NO: 123282 - DNA, 25 bp, Artificial
  Probe
ggaacttcctttctcagacagcaag

SEQ ID NO: 123283 - DNA, 25 bp, Artificial
  Probe
cactccgcttgtggaatactacagg

SEQ ID NO: 123284 - DNA, 25 bp, Artificial
  Probe
actccgcttgtggaatactacagga

SEQ ID NO: 123285 - DNA, 25 bp, Artificial
  Probe
gggtggtcatggttaggtaggtaga

SEQ ID NO: 123286 - DNA, 25 bp, Artificial
  Probe
gtcagatgacaacgagaaagccttg

SEQ ID NO: 123287 - DNA, 25 bp, Artificial
  Probe
gcctcttttcttcctctctgtgaaa

SEQ ID NO: 123288 - DNA, 25 bp, Artificial
  Probe
aatactacaggaaacggggcattca

SEQ ID NO: 123289 - DNA, 25 bp, Artificial
  Probe
caaagccacatgtaaagacttggtc

SEQ ID NO: 123290 - DNA, 25 bp, Artificial
  Probe
gaatactacaggaaacggggcattc

SEQ ID NO: 123291 - DNA, 25 bp, Artificial
  Probe
aagccacatgtaaagacttggtcat

SEQ ID NO: 123292 - DNA, 25 bp, Artificial
  Probe
aaagccacatgtaaagacttggtca

SEQ ID NO: 123293 - DNA, 25 bp, Artificial
  Probe
ggaatactacaggaaacggggcatt

SEQ ID NO: 123294 - DNA, 25 bp, Artificial
  Probe
ggtcagatgacaacgagaaagcctt

SEQ ID NO: 123295 - DNA, 25 bp, Artificial
  Probe
ttgtggaatactacaggaaacgggg

SEQ ID NO: 123296 - DNA, 25 bp, Artificial
  Probe
gaacttcctttctcagacagcaagg

SEQ ID NO: 123297 - DNA, 25 bp, Artificial
  Probe
tcttttcttcctctctgtgaaagga

SEQ ID NO: 123298 - DNA, 25 bp, Artificial
  Probe
aaaacaaacaagaagtgttgtgcgg

SEQ ID NO: 123299 - DNA, 25 bp, Artificial
  Probe
aggaacttcctttctcagacagcaa

SEQ ID NO: 123300 - DNA, 25 bp, Artificial
  Probe
atgactttagggcttgttatgagag

SEQ ID NO: 123301 - DNA, 25 bp, Artificial
  Probe
tatgactttagggcttgttatgaga

SEQ ID NO: 123302 - DNA, 25 bp, Artificial
  Probe
ttatgactttagggcttgttatgag

SEQ ID NO: 123303 - DNA, 25 bp, Artificial
  Probe
tgttatgagagctgacaagacaatg

SEQ ID NO: 123304 - DNA, 25 bp, Artificial
  Probe
gttatgagagctgacaagacaatgc

SEQ ID NO: 123305 - DNA, 25 bp, Artificial
  Probe
tttatgactttagggcttgttatga

SEQ ID NO: 123306 - DNA, 25 bp, Artificial
  Probe
tatgagagctgacaagacaatgcta

SEQ ID NO: 123307 - DNA, 25 bp, Artificial
  Probe
ttgttatgagagctgacaagacaat

SEQ ID NO: 123308 - DNA, 25 bp, Artificial
  Probe
ttatgagagctgacaagacaatgct

SEQ ID NO: 123309 - DNA, 25 bp, Artificial
  Probe
ctcctttcttgccattttatgactt

SEQ ID NO: 123310 - DNA, 25 bp, Artificial
  Probe
ccattttatgactttagggcttgtt

SEQ ID NO: 123311 - DNA, 25 bp, Artificial
  Probe
ttcttgccattttatgactttaggg

SEQ ID NO: 123312 - DNA, 25 bp, Artificial
  Probe
tcctttcttgccattttatgacttt

SEQ ID NO: 123313 - DNA, 25 bp, Artificial
  Probe
atgagagctgacaagacaatgctag

SEQ ID NO: 123314 - DNA, 25 bp, Artificial
  Probe
cctcctttcttgccattttatgact

SEQ ID NO: 123315 - DNA, 25 bp, Artificial
  Probe
caaagcctgtctgcatttatccatc

SEQ ID NO: 123316 - DNA, 25 bp, Artificial
  Probe
ctgacaagacaatgctagtcccttc

SEQ ID NO: 123317 - DNA, 25 bp, Artificial
  Probe
tttaccttgtagatagtactcggcc

SEQ ID NO: 123318 - DNA, 25 bp, Artificial
  Probe
gagagctgacaagacaatgctagtc

SEQ ID NO: 123319 - DNA, 25 bp, Artificial
  Probe
caagacaatgctagtcccttcactg

SEQ ID NO: 123320 - DNA, 25 bp, Artificial
  Probe
gacaagacaatgctagtcccttcac

SEQ ID NO: 123321 - DNA, 25 bp, Artificial
  Probe
tttcttgccattttatgactttagg

SEQ ID NO: 123322 - DNA, 25 bp, Artificial
  Probe
cctttcttgccattttatgacttta

SEQ ID NO: 123323 - DNA, 25 bp, Artificial
  Probe
tgactttagggcttgttatgagagc

SEQ ID NO: 123324 - DNA, 25 bp, Artificial
  Probe
ccctcctttcttgccattttatgac

SEQ ID NO: 123325 - DNA, 25 bp, Artificial
  Probe
ttttatgactttagggcttgttatg

SEQ ID NO: 123326 - DNA, 25 bp, Artificial
  Probe
cattttatgactttagggcttgtta

SEQ ID NO: 123327 - DNA, 25 bp, Artificial
  Probe
acaagacaatgctagtcccttcact

SEQ ID NO: 123328 - DNA, 25 bp, Artificial
  Probe
tgacaagacaatgctagtcccttca

SEQ ID NO: 123329 - DNA, 25 bp, Artificial
  Probe
aaagcctgtctgcatttatccatcc

SEQ ID NO: 123330 - DNA, 25 bp, Artificial
  Probe
ctttagggcttgttatgagagctga

SEQ ID NO: 123331 - DNA, 25 bp, Artificial
  Probe
gactttagggcttgttatgagagct

SEQ ID NO: 123332 - DNA, 25 bp, Artificial
  Probe
tgagagctgacaagacaatgctagt

SEQ ID NO: 123333 - DNA, 25 bp, Artificial
  Probe
gtcccctcctttcttgccattttat

SEQ ID NO: 123334 - DNA, 25 bp, Artificial
  Probe
tttagggcttgttatgagagctgac

SEQ ID NO: 123335 - DNA, 25 bp, Artificial
  Probe
actttagggcttgttatgagagctg

SEQ ID NO: 123336 - DNA, 25 bp, Artificial
  Probe
ctttcttgccattttatgactttag

SEQ ID NO: 123337 - DNA, 25 bp, Artificial
  Probe
cccctcctttcttgccattttatga

SEQ ID NO: 123338 - DNA, 25 bp, Artificial
  Probe
tcccctcctttcttgccattttatg

SEQ ID NO: 123339 - DNA, 25 bp, Artificial
  Probe
ttaccttgtagatagtactcggccc

SEQ ID NO: 123340 - DNA, 25 bp, Artificial
  Probe
attttatgactttagggcttgttat

SEQ ID NO: 123341 - DNA, 25 bp, Artificial
  Probe
gaaatcctatccggtcagttgttgg

SEQ ID NO: 123342 - DNA, 25 bp, Artificial
  Probe
caataaacttttgttaccacttgaa

SEQ ID NO: 123343 - DNA, 25 bp, Artificial
  Probe
ttttaccttgtagatagtactcggc

SEQ ID NO: 123344 - DNA, 25 bp, Artificial
  Probe
agagctgacaagacaatgctagtcc

SEQ ID NO: 123345 - DNA, 25 bp, Artificial
  Probe
ccaatcaagataaaggaaggtgaaa

SEQ ID NO: 123346 - DNA, 25 bp, Artificial
  Probe
ccagtatataaggtaaactagcagg

SEQ ID NO: 123347 - DNA, 25 bp, Artificial
  Probe
caatcaagataaaggaaggtgaaat

SEQ ID NO: 123348 - DNA, 25 bp, Artificial
  Probe
atgcacatacaaagagagttaatca

SEQ ID NO: 123349 - DNA, 25 bp, Artificial
  Probe
cagtagtgaggagagcttaaaggac

SEQ ID NO: 123350 - DNA, 25 bp, Artificial
  Probe
catgcacatacaaagagagttaatc

SEQ ID NO: 123351 - DNA, 25 bp, Artificial
  Probe
cagtatataaggtaaactagcagga

SEQ ID NO: 123352 - DNA, 25 bp, Artificial
  Probe
agtagtgaggagagcttaaaggacc

SEQ ID NO: 123353 - DNA, 25 bp, Artificial
  Probe
gtatataaggtaaactagcaggatg

SEQ ID NO: 123354 - DNA, 25 bp, Artificial
  Probe
caagataaaggaaggtgaaataatc

SEQ ID NO: 123355 - DNA, 25 bp, Artificial
  Probe
tatataaggtaaactagcaggatgc

SEQ ID NO: 123356 - DNA, 25 bp, Artificial
  Probe
tcaagataaaggaaggtgaaataat

SEQ ID NO: 123357 - DNA, 25 bp, Artificial
  Probe
atcaagataaaggaaggtgaaataa

SEQ ID NO: 123358 - DNA, 25 bp, Artificial
  Probe
aatcaagataaaggaaggtgaaata

SEQ ID NO: 123359 - DNA, 25 bp, Artificial
  Probe
agtatataaggtaaactagcaggat

SEQ ID NO: 123360 - DNA, 25 bp, Artificial
  Probe
tagtgaggagagcttaaaggacctg

SEQ ID NO: 123361 - DNA, 25 bp, Artificial
  Probe
gtagtgaggagagcttaaaggacct

SEQ ID NO: 123362 - DNA, 25 bp, Artificial
  Probe
ggagagcttaaaggacctggaagaa

SEQ ID NO: 123363 - DNA, 25 bp, Artificial
  Probe
ccctgaaaacctcacacgtatatat

SEQ ID NO: 123364 - DNA, 25 bp, Artificial
  Probe
tccctgaaaacctcacacgtatata

SEQ ID NO: 123365 - DNA, 25 bp, Artificial
  Probe
cctgaaaacctcacacgtatatata

SEQ ID NO: 123366 - DNA, 25 bp, Artificial
  Probe
ctccctgaaaacctcacacgtatat

SEQ ID NO: 123367 - DNA, 25 bp, Artificial
  Probe
ccaaagtgcttttgtcatgttgaaa

SEQ ID NO: 123368 - DNA, 25 bp, Artificial
  Probe
aagataaaggaaggtgaaataatct

SEQ ID NO: 123369 - DNA, 25 bp, Artificial
  Probe
gaggagagcttaaaggacctggaag

SEQ ID NO: 123370 - DNA, 25 bp, Artificial
  Probe
aggagagcttaaaggacctggaaga

SEQ ID NO: 123371 - DNA, 25 bp, Artificial
  Probe
actccctgaaaacctcacacgtata

SEQ ID NO: 123372 - DNA, 25 bp, Artificial
  Probe
tgaggagagcttaaaggacctggaa

SEQ ID NO: 123373 - DNA, 25 bp, Artificial
  Probe
cccaaagtgcttttgtcatgttgaa

SEQ ID NO: 123374 - DNA, 25 bp, Artificial
  Probe
agataaaggaaggtgaaataatcta

SEQ ID NO: 123375 - DNA, 25 bp, Artificial
  Probe
tcattccccaaagtgcttttgtcat

SEQ ID NO: 123376 - DNA, 25 bp, Artificial
  Probe
cattccccaaagtgcttttgtcatg

SEQ ID NO: 123377 - DNA, 25 bp, Artificial
  Probe
attccccaaagtgcttttgtcatgt

SEQ ID NO: 123378 - DNA, 25 bp, Artificial
  Probe
ttccccaaagtgcttttgtcatgtt

SEQ ID NO: 123379 - DNA, 25 bp, Artificial
  Probe
gtcattccccaaagtgcttttgtca

SEQ ID NO: 123380 - DNA, 25 bp, Artificial
  Probe
tgtcattccccaaagtgcttttgtc

SEQ ID NO: 123381 - DNA, 25 bp, Artificial
  Probe
ctgtcattccccaaagtgcttttgt

SEQ ID NO: 123382 - DNA, 25 bp, Artificial
  Probe
cactccctgaaaacctcacacgtat

SEQ ID NO: 123383 - DNA, 25 bp, Artificial
  Probe
ccccaaagtgcttttgtcatgttga

SEQ ID NO: 123384 - DNA, 25 bp, Artificial
  Probe
tccccaaagtgcttttgtcatgttg

SEQ ID NO: 123385 - DNA, 25 bp, Artificial
  Probe
ctactgctgctaatgctccttatat

SEQ ID NO: 123386 - DNA, 25 bp, Artificial
  Probe
ctaatgctccttatattggctctgt

SEQ ID NO: 123387 - DNA, 25 bp, Artificial
  Probe
taatgctccttatattggctctgtg

SEQ ID NO: 123388 - DNA, 25 bp, Artificial
  Probe
tactgctgctaatgctccttatatt

SEQ ID NO: 123389 - DNA, 25 bp, Artificial
  Probe
actgctgctaatgctccttatattg

SEQ ID NO: 123390 - DNA, 25 bp, Artificial
  Probe
ccttatattggctctgtggaagatt

SEQ ID NO: 123391 - DNA, 25 bp, Artificial
  Probe
cttatattggctctgtggaagattg

SEQ ID NO: 123392 - DNA, 25 bp, Artificial
  Probe
ttatattggctctgtggaagattgg

SEQ ID NO: 123393 - DNA, 25 bp, Artificial
  Probe
gctaatgctccttatattggctctg

SEQ ID NO: 123394 - DNA, 25 bp, Artificial
  Probe
ctgctaatgctccttatattggctc

SEQ ID NO: 123395 - DNA, 25 bp, Artificial
  Probe
tgctaatgctccttatattggctct

SEQ ID NO: 123396 - DNA, 25 bp, Artificial
  Probe
ctgctgctaatgctccttatattgg

SEQ ID NO: 123397 - DNA, 25 bp, Artificial
  Probe
tatattggctctgtggaagattgga

SEQ ID NO: 123398 - DNA, 25 bp, Artificial
  Probe
atattggctctgtggaagattggat

SEQ ID NO: 123399 - DNA, 25 bp, Artificial
  Probe
tattggctctgtggaagattggatt

SEQ ID NO: 123400 - DNA, 25 bp, Artificial
  Probe
gctactgctgctaatgctccttata

SEQ ID NO: 123401 - DNA, 25 bp, Artificial
  Probe
tccttatattggctctgtggaagat

SEQ ID NO: 123402 - DNA, 25 bp, Artificial
  Probe
aatgctccttatattggctctgtgg

SEQ ID NO: 123403 - DNA, 25 bp, Artificial
  Probe
ctccttatattggctctgtggaaga

SEQ ID NO: 123404 - DNA, 25 bp, Artificial
  Probe
gctgctaatgctccttatattggct

SEQ ID NO: 123405 - DNA, 25 bp, Artificial
  Probe
aatgacaatatcgaagtctgaggtt

SEQ ID NO: 123406 - DNA, 25 bp, Artificial
  Probe
atgacaatatcgaagtctgaggttc

SEQ ID NO: 123407 - DNA, 25 bp, Artificial
  Probe
aaccgactttcataagagcacattt

SEQ ID NO: 123408 - DNA, 25 bp, Artificial
  Probe
aaaccgactttcataagagcacatt

SEQ ID NO: 123409 - DNA, 25 bp, Artificial
  Probe
attggctctgtggaagattggattc

SEQ ID NO: 123410 - DNA, 25 bp, Artificial
  Probe
gacaatatcgaagtctgaggttctc

SEQ ID NO: 123411 - DNA, 25 bp, Artificial
  Probe
tgctgctaatgctccttatattggc

SEQ ID NO: 123412 - DNA, 25 bp, Artificial
  Probe
accttactctaagaggagaacttaa

SEQ ID NO: 123413 - DNA, 25 bp, Artificial
  Probe
aaccttactctaagaggagaactta

SEQ ID NO: 123414 - DNA, 25 bp, Artificial
  Probe
tgacaatatcgaagtctgaggttct

SEQ ID NO: 123415 - DNA, 25 bp, Artificial
  Probe
gctccttatattggctctgtggaag

SEQ ID NO: 123416 - DNA, 25 bp, Artificial
  Probe
gcttaaaccttactctaagaggaga

SEQ ID NO: 123417 - DNA, 25 bp, Artificial
  Probe
tctaagaggagaacttaagagtgaa

SEQ ID NO: 123418 - DNA, 25 bp, Artificial
  Probe
aaaccttactctaagaggagaactt

SEQ ID NO: 123419 - DNA, 25 bp, Artificial
  Probe
ttggctctgtggaagattggattct

SEQ ID NO: 123420 - DNA, 25 bp, Artificial
  Probe
atgctccttatattggctctgtgga

SEQ ID NO: 123421 - DNA, 25 bp, Artificial
  Probe
gagagctggctattcagatatccaa

SEQ ID NO: 123422 - DNA, 25 bp, Artificial
  Probe
tccagcttaaaccttactctaagag

SEQ ID NO: 123423 - DNA, 25 bp, Artificial
  Probe
aaatgacaatatcgaagtctgaggt

SEQ ID NO: 123424 - DNA, 25 bp, Artificial
  Probe
ccagcttaaaccttactctaagagg

SEQ ID NO: 123425 - DNA, 25 bp, Artificial
  Probe
ttccagcttaaaccttactctaaga

SEQ ID NO: 123426 - DNA, 25 bp, Artificial
  Probe
cagcttaaaccttactctaagagga

SEQ ID NO: 123427 - DNA, 25 bp, Artificial
  Probe
tgctccttatattggctctgtggaa

SEQ ID NO: 123428 - DNA, 25 bp, Artificial
  Probe
agcttaaaccttactctaagaggag

SEQ ID NO: 123429 - DNA, 25 bp, Artificial
  Probe
aaattcatcgctgactttaagtagc

SEQ ID NO: 123430 - DNA, 25 bp, Artificial
  Probe
tcagttagcagttatcttggaagac

SEQ ID NO: 123431 - DNA, 25 bp, Artificial
  Probe
ttcagttagcagttatcttggaaga

SEQ ID NO: 123432 - DNA, 25 bp, Artificial
  Probe
tagcagttatcttggaagactcttg

SEQ ID NO: 123433 - DNA, 25 bp, Artificial
  Probe
gttagcagttatcttggaagactct

SEQ ID NO: 123434 - DNA, 25 bp, Artificial
  Probe
agttagcagttatcttggaagactc

SEQ ID NO: 123435 - DNA, 25 bp, Artificial
  Probe
cagttagcagttatcttggaagact

SEQ ID NO: 123436 - DNA, 25 bp, Artificial
  Probe
gcagttatcttggaagactcttgat

SEQ ID NO: 123437 - DNA, 25 bp, Artificial
  Probe
ttagcagttatcttggaagactctt

SEQ ID NO: 123438 - DNA, 25 bp, Artificial
  Probe
agcagttatcttggaagactcttga

SEQ ID NO: 123439 - DNA, 25 bp, Artificial
  Probe
cagttatcttggaagactcttgatt

SEQ ID NO: 123440 - DNA, 25 bp, Artificial
  Probe
acctccactctaacaataaaccaag

SEQ ID NO: 123441 - DNA, 25 bp, Artificial
  Probe
cacctccactctaacaataaaccaa

SEQ ID NO: 123442 - DNA, 25 bp, Artificial
  Probe
ctccgtttcagttagcagttatctt

SEQ ID NO: 123443 - DNA, 25 bp, Artificial
  Probe
cgtttcagttagcagttatcttgga

SEQ ID NO: 123444 - DNA, 25 bp, Artificial
  Probe
tccgtttcagttagcagttatcttg

SEQ ID NO: 123445 - DNA, 25 bp, Artificial
  Probe
atcttggaagactcttgattattca

SEQ ID NO: 123446 - DNA, 25 bp, Artificial
  Probe
gtttcagttagcagttatcttggaa

SEQ ID NO: 123447 - DNA, 25 bp, Artificial
  Probe
tttcagttagcagttatcttggaag

SEQ ID NO: 123448 - DNA, 25 bp, Artificial
  Probe
cctccactctaacaataaaccaagt

SEQ ID NO: 123449 - DNA, 25 bp, Artificial
  Probe
ccactctaacaataaaccaagttca

SEQ ID NO: 123450 - DNA, 25 bp, Artificial
  Probe
tccactctaacaataaaccaagttc

SEQ ID NO: 123451 - DNA, 25 bp, Artificial
  Probe
ctccactctaacaataaaccaagtt

SEQ ID NO: 123452 - DNA, 25 bp, Artificial
  Probe
ccgtttcagttagcagttatcttgg

SEQ ID NO: 123453 - DNA, 25 bp, Artificial
  Probe
ttcctccgtttcagttagcagttat

SEQ ID NO: 123454 - DNA, 25 bp, Artificial
  Probe
attcctccgtttcagttagcagtta

SEQ ID NO: 123455 - DNA, 25 bp, Artificial
  Probe
gattattcaaacccattccaggacc

SEQ ID NO: 123456 - DNA, 25 bp, Artificial
  Probe
agttatcttggaagactcttgatta

SEQ ID NO: 123457 - DNA, 25 bp, Artificial
  Probe
acagccacctccactctaacaataa

SEQ ID NO: 123458 - DNA, 25 bp, Artificial
  Probe
aacagccacctccactctaacaata

SEQ ID NO: 123459 - DNA, 25 bp, Artificial
  Probe
taacagccacctccactctaacaat

SEQ ID NO: 123460 - DNA, 25 bp, Artificial
  Probe
tgattattcaaacccattccaggac

SEQ ID NO: 123461 - DNA, 25 bp, Artificial
  Probe
ccacctccactctaacaataaacca

SEQ ID NO: 123462 - DNA, 25 bp, Artificial
  Probe
cctccgtttcagttagcagttatct

SEQ ID NO: 123463 - DNA, 25 bp, Artificial
  Probe
tcctccgtttcagttagcagttatc

SEQ ID NO: 123464 - DNA, 25 bp, Artificial
  Probe
agccacctccactctaacaataaac

SEQ ID NO: 123465 - DNA, 25 bp, Artificial
  Probe
cagccacctccactctaacaataaa

SEQ ID NO: 123466 - DNA, 25 bp, Artificial
  Probe
gttatcttggaagactcttgattat

SEQ ID NO: 123467 - DNA, 25 bp, Artificial
  Probe
attattcaaacccattccaggaccc

SEQ ID NO: 123468 - DNA, 25 bp, Artificial
  Probe
cactctaacaataaaccaagttcat

SEQ ID NO: 123469 - DNA, 25 bp, Artificial
  Probe
gtaacagccacctccactctaacaa

SEQ ID NO: 123470 - DNA, 25 bp, Artificial
  Probe
tcttggaagactcttgattattcaa

SEQ ID NO: 123471 - DNA, 25 bp, Artificial
  Probe
ctaacaataaaccaagttcattgcg

SEQ ID NO: 123472 - DNA, 25 bp, Artificial
  Probe
cattcctccgtttcagttagcagtt

SEQ ID NO: 123473 - DNA, 25 bp, Artificial
  Probe
tatcttggaagactcttgattattc

SEQ ID NO: 123474 - DNA, 25 bp, Artificial
  Probe
gatcccattcctccgtttcagttag

SEQ ID NO: 123475 - DNA, 25 bp, Artificial
  Probe
atagtctcattgaactgtccaccaa

SEQ ID NO: 123476 - DNA, 25 bp, Artificial
  Probe
gatagtctcattgaactgtccacca

SEQ ID NO: 123477 - DNA, 25 bp, Artificial
  Probe
ttaatcgtgtgaagtgtctgtctcc

SEQ ID NO: 123478 - DNA, 25 bp, Artificial
  Probe
catcttgcccttctgttgtaaatac

SEQ ID NO: 123479 - DNA, 25 bp, Artificial
  Probe
atttaatcgtgtgaagtgtctgtct

SEQ ID NO: 123480 - DNA, 25 bp, Artificial
  Probe
tatttaatcgtgtgaagtgtctgtc

SEQ ID NO: 123481 - DNA, 25 bp, Artificial
  Probe
ctatttaatcgtgtgaagtgtctgt

SEQ ID NO: 123482 - DNA, 25 bp, Artificial
  Probe
atcttgcccttctgttgtaaatacc

SEQ ID NO: 123483 - DNA, 25 bp, Artificial
  Probe
gctgttctatttaatcgtgtgaagt

SEQ ID NO: 123484 - DNA, 25 bp, Artificial
  Probe
tttaatcgtgtgaagtgtctgtctc

SEQ ID NO: 123485 - DNA, 25 bp, Artificial
  Probe
tctatttaatcgtgtgaagtgtctg

SEQ ID NO: 123486 - DNA, 25 bp, Artificial
  Probe
cttctccaaattgctgtgaacttac

SEQ ID NO: 123487 - DNA, 25 bp, Artificial
  Probe
tgttctatttaatcgtgtgaagtgt

SEQ ID NO: 123488 - DNA, 25 bp, Artificial
  Probe
cgatagtctcattgaactgtccacc

SEQ ID NO: 123489 - DNA, 25 bp, Artificial
  Probe
ccttctccaaattgctgtgaactta

SEQ ID NO: 123490 - DNA, 25 bp, Artificial
  Probe
acatcttgcccttctgttgtaaata

SEQ ID NO: 123491 - DNA, 25 bp, Artificial
  Probe
ttctatttaatcgtgtgaagtgtct

SEQ ID NO: 123492 - DNA, 25 bp, Artificial
  Probe
gttctatttaatcgtgtgaagtgtc

SEQ ID NO: 123493 - DNA, 25 bp, Artificial
  Probe
ctgttctatttaatcgtgtgaagtg

SEQ ID NO: 123494 - DNA, 25 bp, Artificial
  Probe
ttctccaaattgctgtgaacttacc

SEQ ID NO: 123495 - DNA, 25 bp, Artificial
  Probe
tcgatagtctcattgaactgtccac

SEQ ID NO: 123496 - DNA, 25 bp, Artificial
  Probe
ggaggagctggagaattacattgag

SEQ ID NO: 123497 - DNA, 25 bp, Artificial
  Probe
tagtctcattgaactgtccaccaaa

SEQ ID NO: 123498 - DNA, 25 bp, Artificial
  Probe
cctggaaagggaatgttctagtaaa

SEQ ID NO: 123499 - DNA, 25 bp, Artificial
  Probe
cacatcttgcccttctgttgtaaat

SEQ ID NO: 123500 - DNA, 25 bp, Artificial
  Probe
aggaggagctggagaattacattga

SEQ ID NO: 123501 - DNA, 25 bp, Artificial
  Probe
acctggaaagggaatgttctagtaa

SEQ ID NO: 123502 - DNA, 25 bp, Artificial
  Probe
aacctggaaagggaatgttctagta

SEQ ID NO: 123503 - DNA, 25 bp, Artificial
  Probe
agctgttctatttaatcgtgtgaag

SEQ ID NO: 123504 - DNA, 25 bp, Artificial
  Probe
aaagctgttctatttaatcgtgtga

SEQ ID NO: 123505 - DNA, 25 bp, Artificial
  Probe
tcttgcccttctgttgtaaataccc

SEQ ID NO: 123506 - DNA, 25 bp, Artificial
  Probe
aagctgttctatttaatcgtgtgaa

SEQ ID NO: 123507 - DNA, 25 bp, Artificial
  Probe
atctagtttctctagcgacttcctg

SEQ ID NO: 123508 - DNA, 25 bp, Artificial
  Probe
catctagtttctctagcgacttcct

SEQ ID NO: 123509 - DNA, 25 bp, Artificial
  Probe
caggaggagctggagaattacattg

SEQ ID NO: 123510 - DNA, 25 bp, Artificial
  Probe
tctcattgaactgtccaccaaactc

SEQ ID NO: 123511 - DNA, 25 bp, Artificial
  Probe
tctccaaattgctgtgaacttaccc

SEQ ID NO: 123512 - DNA, 25 bp, Artificial
  Probe
cggaggaaatagttttgctaagaaa

SEQ ID NO: 123513 - DNA, 25 bp, Artificial
  Probe
acggaggaaatagttttgctaagaa

SEQ ID NO: 123514 - DNA, 25 bp, Artificial
  Probe
gatcgatagtctcattgaactgtcc

SEQ ID NO: 123515 - DNA, 25 bp, Artificial
  Probe
gtctcattgaactgtccaccaaact

SEQ ID NO: 123516 - DNA, 25 bp, Artificial
  Probe
agtctcattgaactgtccaccaaac

SEQ ID NO: 123517 - DNA, 25 bp, Artificial
  Probe
cacggaggaaatagttttgctaaga

SEQ ID NO: 123518 - DNA, 25 bp, Artificial
  Probe
tcacggaggaaatagttttgctaag

SEQ ID NO: 123519 - DNA, 25 bp, Artificial
  Probe
ctccaaattgctgtgaacttaccca

SEQ ID NO: 123520 - DNA, 25 bp, Artificial
  Probe
gatgtcattctgtgtgggtttctaa

SEQ ID NO: 123521 - DNA, 25 bp, Artificial
  Probe
gagttcttgtctcctcagtgttcag

SEQ ID NO: 123522 - DNA, 25 bp, Artificial
  Probe
cagagttcttgtctcctcagtgttc

SEQ ID NO: 123523 - DNA, 25 bp, Artificial
  Probe
tcaggaaagagaataaagcaagatt

SEQ ID NO: 123524 - DNA, 25 bp, Artificial
  Probe
atgtcattctgtgtgggtttctaac

SEQ ID NO: 123525 - DNA, 25 bp, Artificial
  Probe
gctatgctcaggaaagagaataaag

SEQ ID NO: 123526 - DNA, 25 bp, Artificial
  Probe
tgttcaggtgtatgtaaatgagcag

SEQ ID NO: 123527 - DNA, 25 bp, Artificial
  Probe
ctgttcaggtgtatgtaaatgagca

SEQ ID NO: 123528 - DNA, 25 bp, Artificial
  Probe
actgttcaggtgtatgtaaatgagc

SEQ ID NO: 123529 - DNA, 25 bp, Artificial
  Probe
tgatgtcattctgtgtgggtttcta

SEQ ID NO: 123530 - DNA, 25 bp, Artificial
  Probe
agagttcttgtctcctcagtgttca

SEQ ID NO: 123531 - DNA, 25 bp, Artificial
  Probe
ctcaggaaagagaataaagcaagat

SEQ ID NO: 123532 - DNA, 25 bp, Artificial
  Probe
cactgttcaggtgtatgtaaatgag

SEQ ID NO: 123533 - DNA, 25 bp, Artificial
  Probe
ccactgttcaggtgtatgtaaatga

SEQ ID NO: 123534 - DNA, 25 bp, Artificial
  Probe
gttgatgtcattctgtgtgggtttc

SEQ ID NO: 123535 - DNA, 25 bp, Artificial
  Probe
aagagaataaagcaagattcccact

SEQ ID NO: 123536 - DNA, 25 bp, Artificial
  Probe
gaataaagcaagattcccactcaaa

SEQ ID NO: 123537 - DNA, 25 bp, Artificial
  Probe
agaataaagcaagattcccactcaa

SEQ ID NO: 123538 - DNA, 25 bp, Artificial
  Probe
agagaataaagcaagattcccactc

SEQ ID NO: 123539 - DNA, 25 bp, Artificial
  Probe
aaagagaataaagcaagattcccac

SEQ ID NO: 123540 - DNA, 25 bp, Artificial
  Probe
atgcctgttgatgtcattctgtgtg

SEQ ID NO: 123541 - DNA, 25 bp, Artificial
  Probe
gttcaggtgtatgtaaatgagcagc

SEQ ID NO: 123542 - DNA, 25 bp, Artificial
  Probe
ttgatgtcattctgtgtgggtttct

SEQ ID NO: 123543 - DNA, 25 bp, Artificial
  Probe
gaaagagaataaagcaagattccca

SEQ ID NO: 123544 - DNA, 25 bp, Artificial
  Probe
gagaataaagcaagattcccactca

SEQ ID NO: 123545 - DNA, 25 bp, Artificial
  Probe
ctcatgcctgttgatgtcattctgt

SEQ ID NO: 123546 - DNA, 25 bp, Artificial
  Probe
tgttgatgtcattctgtgtgggttt

SEQ ID NO: 123547 - DNA, 25 bp, Artificial
  Probe
gccactgttcaggtgtatgtaaatg

SEQ ID NO: 123548 - DNA, 25 bp, Artificial
  Probe
tcatgcctgttgatgtcattctgtg

SEQ ID NO: 123549 - DNA, 25 bp, Artificial
  Probe
catgcctgttgatgtcattctgtgt

SEQ ID NO: 123550 - DNA, 25 bp, Artificial
  Probe
ttcttgtctcctcagtgttcagcaa

SEQ ID NO: 123551 - DNA, 25 bp, Artificial
  Probe
caggaaagagaataaagcaagattc

SEQ ID NO: 123552 - DNA, 25 bp, Artificial
  Probe
ctatgctcaggaaagagaataaagc

SEQ ID NO: 123553 - DNA, 25 bp, Artificial
  Probe
tgccactgttcaggtgtatgtaaat

SEQ ID NO: 123554 - DNA, 25 bp, Artificial
  Probe
gctcaggaaagagaataaagcaaga

SEQ ID NO: 123555 - DNA, 25 bp, Artificial
  Probe
aataaagcaagattcccactcaaaa

SEQ ID NO: 123556 - DNA, 25 bp, Artificial
  Probe
agttcttgtctcctcagtgttcagc

SEQ ID NO: 123557 - DNA, 25 bp, Artificial
  Probe
ctgttgatgtcattctgtgtgggtt

SEQ ID NO: 123558 - DNA, 25 bp, Artificial
  Probe
ttcaggtgtatgtaaatgagcagct

SEQ ID NO: 123559 - DNA, 25 bp, Artificial
  Probe
cctcatgcctgttgatgtcattctg

SEQ ID NO: 123560 - DNA, 25 bp, Artificial
  Probe
gtaagtgccactgttcaggtgtatg

SEQ ID NO: 123561 - DNA, 25 bp, Artificial
  Probe
gttcttgtctcctcagtgttcagca

SEQ ID NO: 123562 - DNA, 25 bp, Artificial
  Probe
ctctaagtcctgagcctgtaagtgc

SEQ ID NO: 123563 - DNA, 25 bp, Artificial
  Probe
ctcagcagagttcttgtctcctcag

SEQ ID NO: 123564 - DNA, 25 bp, Artificial
  Probe
agctatgctcaggaaagagaataaa

SEQ ID NO: 123565 - DNA, 25 bp, Artificial
  Probe
gtcgtcttcatctacttcaactctt

SEQ ID NO: 123566 - DNA, 25 bp, Artificial
  Probe
ggtcgtcttcatctacttcaactct

SEQ ID NO: 123567 - DNA, 25 bp, Artificial
  Probe
catccactacatctgagaccattca

SEQ ID NO: 123568 - DNA, 25 bp, Artificial
  Probe
tcgtcttcatctacttcaactcttt

SEQ ID NO: 123569 - DNA, 25 bp, Artificial
  Probe
ttatctttctcttcaacattgtccg

SEQ ID NO: 123570 - DNA, 25 bp, Artificial
  Probe
gcatccactacatctgagaccattc

SEQ ID NO: 123571 - DNA, 25 bp, Artificial
  Probe
tatctttctcttcaacattgtccgc

SEQ ID NO: 123572 - DNA, 25 bp, Artificial
  Probe
tatacactgactacatctaccaggg

SEQ ID NO: 123573 - DNA, 25 bp, Artificial
  Probe
gtatacactgactacatctaccagg

SEQ ID NO: 123574 - DNA, 25 bp, Artificial
  Probe
gggtcgtcttcatctacttcaactc

SEQ ID NO: 123575 - DNA, 25 bp, Artificial
  Probe
tttatctttctcttcaacattgtcc

SEQ ID NO: 123576 - DNA, 25 bp, Artificial
  Probe
ctttctcttcaacattgtccgcatc

SEQ ID NO: 123577 - DNA, 25 bp, Artificial
  Probe
agggtcgtcttcatctacttcaact

SEQ ID NO: 123578 - DNA, 25 bp, Artificial
  Probe
cagggtcgtcttcatctacttcaac

SEQ ID NO: 123579 - DNA, 25 bp, Artificial
  Probe
tctttctcttcaacattgtccgcat

SEQ ID NO: 123580 - DNA, 25 bp, Artificial
  Probe
atctttctcttcaacattgtccgca

SEQ ID NO: 123581 - DNA, 25 bp, Artificial
  Probe
ggcatccactacatctgagaccatt

SEQ ID NO: 123582 - DNA, 25 bp, Artificial
  Probe
actttatctttctcttcaacattgt

SEQ ID NO: 123583 - DNA, 25 bp, Artificial
  Probe
tcatctacttcaactcttttctgga

SEQ ID NO: 123584 - DNA, 25 bp, Artificial
  Probe
tcaactttatctttctcttcaacat

SEQ ID NO: 123585 - DNA, 25 bp, Artificial
  Probe
atcaactttatctttctcttcaaca

SEQ ID NO: 123586 - DNA, 25 bp, Artificial
  Probe
cgtcttcatctacttcaactctttt

SEQ ID NO: 123587 - DNA, 25 bp, Artificial
  Probe
ttctcttcaacattgtccgcatcct

SEQ ID NO: 123588 - DNA, 25 bp, Artificial
  Probe
ttcatctacttcaactcttttctgg

SEQ ID NO: 123589 - DNA, 25 bp, Artificial
  Probe
ctttatctttctcttcaacattgtc

SEQ ID NO: 123590 - DNA, 25 bp, Artificial
  Probe
tcttcaacattgtccgcatcctcat

SEQ ID NO: 123591 - DNA, 25 bp, Artificial
  Probe
ggtatacactgactacatctaccag

SEQ ID NO: 123592 - DNA, 25 bp, Artificial
  Probe
ccagggtcgtcttcatctacttcaa

SEQ ID NO: 123593 - DNA, 25 bp, Artificial
  Probe
atacactgactacatctaccagggc

SEQ ID NO: 123594 - DNA, 25 bp, Artificial
  Probe
tttctcttcaacattgtccgcatcc

SEQ ID NO: 123595 - DNA, 25 bp, Artificial
  Probe
catctacttcaactcttttctggag

SEQ ID NO: 123596 - DNA, 25 bp, Artificial
  Probe
ctccagggtcgtcttcatctacttc

SEQ ID NO: 123597 - DNA, 25 bp, Artificial
  Probe
caactttatctttctcttcaacatt

SEQ ID NO: 123598 - DNA, 25 bp, Artificial
  Probe
cttcaacattgtccgcatcctcatg

SEQ ID NO: 123599 - DNA, 25 bp, Artificial
  Probe
aactttatctttctcttcaacattg

SEQ ID NO: 123600 - DNA, 25 bp, Artificial
  Probe
tcctgctgatcaactttatctttct

SEQ ID NO: 123601 - DNA, 25 bp, Artificial
  Probe
gtcctgctgatcaactttatctttc

SEQ ID NO: 123602 - DNA, 25 bp, Artificial
  Probe
cctgctgatcaactttatctttctc

SEQ ID NO: 123603 - DNA, 25 bp, Artificial
  Probe
ctacgacaatgaaaagtgctggttt

SEQ ID NO: 123604 - DNA, 25 bp, Artificial
  Probe
catcacctacatgttgttcttcgtc

SEQ ID NO: 123605 - DNA, 25 bp, Artificial
  Probe
tctcttcaacattgtccgcatcctc

SEQ ID NO: 123606 - DNA, 25 bp, Artificial
  Probe
cttcatctacttcaactcttttctg

SEQ ID NO: 123607 - DNA, 25 bp, Artificial
  Probe
gtcttcatctacttcaactcttttc

SEQ ID NO: 123608 - DNA, 25 bp, Artificial
  Probe
gatcaactttatctttctcttcaac

SEQ ID NO: 123609 - DNA, 25 bp, Artificial
  Probe
ggtcctgctgatcaactttatcttt

SEQ ID NO: 123610 - DNA, 25 bp, Artificial
  Probe
ctctaagacttggctaatcacgtaa

SEQ ID NO: 123611 - DNA, 25 bp, Artificial
  Probe
actctaagacttggctaatcacgta

SEQ ID NO: 123612 - DNA, 25 bp, Artificial
  Probe
aaactctaagacttggctaatcacg

SEQ ID NO: 123613 - DNA, 25 bp, Artificial
  Probe
gctgtaaatgtgcttgtctttagaa

SEQ ID NO: 123614 - DNA, 25 bp, Artificial
  Probe
atgctgtaaatgtgcttgtctttag

SEQ ID NO: 123615 - DNA, 25 bp, Artificial
  Probe
gatgctgtaaatgtgcttgtcttta

SEQ ID NO: 123616 - DNA, 25 bp, Artificial
  Probe
atgatgctgtaaatgtgcttgtctt

SEQ ID NO: 123617 - DNA, 25 bp, Artificial
  Probe
tgctgtaaatgtgcttgtctttaga

SEQ ID NO: 123618 - DNA, 25 bp, Artificial
  Probe
aactctaagacttggctaatcacgt

SEQ ID NO: 123619 - DNA, 25 bp, Artificial
  Probe
tgatgctgtaaatgtgcttgtcttt

SEQ ID NO: 123620 - DNA, 25 bp, Artificial
  Probe
tgtaaatgtgcttgtctttagaatg

SEQ ID NO: 123621 - DNA, 25 bp, Artificial
  Probe
gtaaatgtgcttgtctttagaatga

SEQ ID NO: 123622 - DNA, 25 bp, Artificial
  Probe
ctgtaaatgtgcttgtctttagaat

SEQ ID NO: 123623 - DNA, 25 bp, Artificial
  Probe
tctaagacttggctaatcacgtaaa

SEQ ID NO: 123624 - DNA, 25 bp, Artificial
  Probe
catgatgctgtaaatgtgcttgtct

SEQ ID NO: 123625 - DNA, 25 bp, Artificial
  Probe
aatgtgcttgtctttagaatgataa

SEQ ID NO: 123626 - DNA, 25 bp, Artificial
  Probe
aaatgtgcttgtctttagaatgata

SEQ ID NO: 123627 - DNA, 25 bp, Artificial
  Probe
tgtgcttgtctttagaatgataaat

SEQ ID NO: 123628 - DNA, 25 bp, Artificial
  Probe
atgtgcttgtctttagaatgataaa

SEQ ID NO: 123629 - DNA, 25 bp, Artificial
  Probe
taaatgtgcttgtctttagaatgat

SEQ ID NO: 123630 - DNA, 25 bp, Artificial
  Probe
cttattcaaagccatgatgctgtaa

SEQ ID NO: 123631 - DNA, 25 bp, Artificial
  Probe
ttattcaaagccatgatgctgtaaa

SEQ ID NO: 123632 - DNA, 25 bp, Artificial
  Probe
actgtaaaactctaagacttggcta

SEQ ID NO: 123633 - DNA, 25 bp, Artificial
  Probe
cactgtaaaactctaagacttggct

SEQ ID NO: 123634 - DNA, 25 bp, Artificial
  Probe
tcactgtaaaactctaagacttggc

SEQ ID NO: 123635 - DNA, 25 bp, Artificial
  Probe
attcaaagccatgatgctgtaaatg

SEQ ID NO: 123636 - DNA, 25 bp, Artificial
  Probe
tattcaaagccatgatgctgtaaat

SEQ ID NO: 123637 - DNA, 25 bp, Artificial
  Probe
gtaaaagattgtggcttcagtgttt

SEQ ID NO: 123638 - DNA, 25 bp, Artificial
  Probe
aaaactctaagacttggctaatcac

SEQ ID NO: 123639 - DNA, 25 bp, Artificial
  Probe
ccatgatgctgtaaatgtgcttgtc

SEQ ID NO: 123640 - DNA, 25 bp, Artificial
  Probe
ctgtaaaactctaagacttggctaa

SEQ ID NO: 123641 - DNA, 25 bp, Artificial
  Probe
atcactgtaaaactctaagacttgg

SEQ ID NO: 123642 - DNA, 25 bp, Artificial
  Probe
aattcttgtctcagtttctgtttat

SEQ ID NO: 123643 - DNA, 25 bp, Artificial
  Probe
ttcaaagccatgatgctgtaaatgt

SEQ ID NO: 123644 - DNA, 25 bp, Artificial
  Probe
aaagattgtggcttcagtgttttct

SEQ ID NO: 123645 - DNA, 25 bp, Artificial
  Probe
tgtaaaactctaagacttggctaat

SEQ ID NO: 123646 - DNA, 25 bp, Artificial
  Probe
aagattgtggcttcagtgttttctc

SEQ ID NO: 123647 - DNA, 25 bp, Artificial
  Probe
taaaagattgtggcttcagtgtttt

SEQ ID NO: 123648 - DNA, 25 bp, Artificial
  Probe
taaaactctaagacttggctaatca

SEQ ID NO: 123649 - DNA, 25 bp, Artificial
  Probe
tcaaagccatgatgctgtaaatgtg

SEQ ID NO: 123650 - DNA, 25 bp, Artificial
  Probe
cgtaaaagattgtggcttcagtgtt

SEQ ID NO: 123651 - DNA, 25 bp, Artificial
  Probe
aaaagattgtggcttcagtgttttc

SEQ ID NO: 123652 - DNA, 25 bp, Artificial
  Probe
tgaatcactgtaaaactctaagact

SEQ ID NO: 123653 - DNA, 25 bp, Artificial
  Probe
gtaaaactctaagacttggctaatc

SEQ ID NO: 123654 - DNA, 25 bp, Artificial
  Probe
attcttgtctcagtttctgtttata

SEQ ID NO: 123655 - DNA, 25 bp, Artificial
  Probe
ctggctggagataagaattacatca

SEQ ID NO: 123656 - DNA, 25 bp, Artificial
  Probe
tggctggagataagaattacatcac

SEQ ID NO: 123657 - DNA, 25 bp, Artificial
  Probe
cctggctggagataagaattacatc

SEQ ID NO: 123658 - DNA, 25 bp, Artificial
  Probe
ggctggagataagaattacatcacc

SEQ ID NO: 123659 - DNA, 25 bp, Artificial
  Probe
gctggagataagaattacatcaccg

SEQ ID NO: 123660 - DNA, 25 bp, Artificial
  Probe
tcctggctggagataagaattacat

SEQ ID NO: 123661 - DNA, 25 bp, Artificial
  Probe
atcctggctggagataagaattaca

SEQ ID NO: 123662 - DNA, 25 bp, Artificial
  Probe
gatcctggctggagataagaattac

SEQ ID NO: 123663 - DNA, 25 bp, Artificial
  Probe
ctggagataagaattacatcaccgg

SEQ ID NO: 123664 - DNA, 25 bp, Artificial
  Probe
tggagataagaattacatcaccggg

SEQ ID NO: 123665 - DNA, 25 bp, Artificial
  Probe
cacagatacagcggatcaggtcatg

SEQ ID NO: 123666 - DNA, 25 bp, Artificial
  Probe
agataagaattacatcaccggggat

SEQ ID NO: 123667 - DNA, 25 bp, Artificial
  Probe
gagataagaattacatcaccgggga

SEQ ID NO: 123668 - DNA, 25 bp, Artificial
  Probe
ggagataagaattacatcaccgggg

SEQ ID NO: 123669 - DNA, 25 bp, Artificial
  Probe
gataagaattacatcaccggggatg

SEQ ID NO: 123670 - DNA, 25 bp, Artificial
  Probe
ataagaattacatcaccggggatga

SEQ ID NO: 123671 - DNA, 25 bp, Artificial
  Probe
taagaattacatcaccggggatgag

SEQ ID NO: 123672 - DNA, 25 bp, Artificial
  Probe
aagaattacatcaccggggatgagc

SEQ ID NO: 123673 - DNA, 25 bp, Artificial
  Probe
acttagccaagaactacttcaagaa

SEQ ID NO: 123674 - DNA, 25 bp, Artificial
  Probe
gacttagccaagaactacttcaaga

SEQ ID NO: 123675 - DNA, 25 bp, Artificial
  Probe
ctacgacttagccaagaactacttc

SEQ ID NO: 123676 - DNA, 25 bp, Artificial
  Probe
tacgacttagccaagaactacttca

SEQ ID NO: 123677 - DNA, 25 bp, Artificial
  Probe
actacgacttagccaagaactactt

SEQ ID NO: 123678 - DNA, 25 bp, Artificial
  Probe
cgacttagccaagaactacttcaag

SEQ ID NO: 123679 - DNA, 25 bp, Artificial
  Probe
gtcatagcattcctcatcacattgg

SEQ ID NO: 123680 - DNA, 25 bp, Artificial
  Probe
ggtcatagcattcctcatcacattg

SEQ ID NO: 123681 - DNA, 25 bp, Artificial
  Probe
gactacgacttagccaagaactact

SEQ ID NO: 123682 - DNA, 25 bp, Artificial
  Probe
tgactacgacttagccaagaactac

SEQ ID NO: 123683 - DNA, 25 bp, Artificial
  Probe
gtgactacgacttagccaagaacta

SEQ ID NO: 123684 - DNA, 25 bp, Artificial
  Probe
acgacttagccaagaactacttcaa

SEQ ID NO: 123685 - DNA, 25 bp, Artificial
  Probe
agattaaaggaagaggaagcactac

SEQ ID NO: 123686 - DNA, 25 bp, Artificial
  Probe
gagattaaaggaagaggaagcacta

SEQ ID NO: 123687 - DNA, 25 bp, Artificial
  Probe
gattaaaggaagaggaagcactacc

SEQ ID NO: 123688 - DNA, 25 bp, Artificial
  Probe
cttagccaagaactacttcaagaaa

SEQ ID NO: 123689 - DNA, 25 bp, Artificial
  Probe
taaaggaagaggaagcactaccaaa

SEQ ID NO: 123690 - DNA, 25 bp, Artificial
  Probe
attaaaggaagaggaagcactacca

SEQ ID NO: 123691 - DNA, 25 bp, Artificial
  Probe
ttaaaggaagaggaagcactaccaa

SEQ ID NO: 123692 - DNA, 25 bp, Artificial
  Probe
cgagattaaaggaagaggaagcact

SEQ ID NO: 123693 - DNA, 25 bp, Artificial
  Probe
tcatagcattcctcatcacattggg

SEQ ID NO: 123694 - DNA, 25 bp, Artificial
  Probe
ccgagattaaaggaagaggaagcac

SEQ ID NO: 123695 - DNA, 25 bp, Artificial
  Probe
caagaactacttcaagaaaagcctg

SEQ ID NO: 123696 - DNA, 25 bp, Artificial
  Probe
tagccaagaactacttcaagaaaag

SEQ ID NO: 123697 - DNA, 25 bp, Artificial
  Probe
ccaagaactacttcaagaaaagcct

SEQ ID NO: 123698 - DNA, 25 bp, Artificial
  Probe
aagaactacttcaagaaaagcctga

SEQ ID NO: 123699 - DNA, 25 bp, Artificial
  Probe
agaactacttcaagaaaagcctgag

SEQ ID NO: 123700 - DNA, 25 bp, Artificial
  Probe
ttagccaagaactacttcaagaaaa

SEQ ID NO: 123701 - DNA, 25 bp, Artificial
  Probe
tttatctctgtccagtgcccaatga

SEQ ID NO: 123702 - DNA, 25 bp, Artificial
  Probe
aagaacttttatctctgtccagtgc

SEQ ID NO: 123703 - DNA, 25 bp, Artificial
  Probe
agccaagaactacttcaagaaaagc

SEQ ID NO: 123704 - DNA, 25 bp, Artificial
  Probe
aaagaacttttatctctgtccagtg

SEQ ID NO: 123705 - DNA, 25 bp, Artificial
  Probe
gaactacttcaagaaaagcctgagg

SEQ ID NO: 123706 - DNA, 25 bp, Artificial
  Probe
catagcattcctcatcacattgggc

SEQ ID NO: 123707 - DNA, 25 bp, Artificial
  Probe
aaaggaagaggaagcactaccaaaa

SEQ ID NO: 123708 - DNA, 25 bp, Artificial
  Probe
gcgggtgtctaagaagaatattttc

SEQ ID NO: 123709 - DNA, 25 bp, Artificial
  Probe
cgggtgtctaagaagaatattttcc

SEQ ID NO: 123710 - DNA, 25 bp, Artificial
  Probe
gccaagaactacttcaagaaaagcc

SEQ ID NO: 123711 - DNA, 25 bp, Artificial
  Probe
ttcagtttaagaagctctgctcctt

SEQ ID NO: 123712 - DNA, 25 bp, Artificial
  Probe
ctgatggctatgacctggagatcct

SEQ ID NO: 123713 - DNA, 25 bp, Artificial
  Probe
cttttatctctgtccagtgcccaat

SEQ ID NO: 123714 - DNA, 25 bp, Artificial
  Probe
tttccttcagtttaagaagctctgc

SEQ ID NO: 123715 - DNA, 25 bp, Artificial
  Probe
agaacttttatctctgtccagtgcc

SEQ ID NO: 123716 - DNA, 25 bp, Artificial
  Probe
gggtgtctaagaagaatattttcct

SEQ ID NO: 123717 - DNA, 25 bp, Artificial
  Probe
gaagaggccgagattaaaggaagag

SEQ ID NO: 123718 - DNA, 25 bp, Artificial
  Probe
gaagaagtgatgaagaggtgaagtg

SEQ ID NO: 123719 - DNA, 25 bp, Artificial
  Probe
gaagtgatgaagaggtgaagtgaac

SEQ ID NO: 123720 - DNA, 25 bp, Artificial
  Probe
agaagtgatgaagaggtgaagtgaa

SEQ ID NO: 123721 - DNA, 25 bp, Artificial
  Probe
aagaagtgatgaagaggtgaagtga

SEQ ID NO: 123722 - DNA, 25 bp, Artificial
  Probe
attggaagaagtgatgaagaggtga

SEQ ID NO: 123723 - DNA, 25 bp, Artificial
  Probe
ttggaagaagtgatgaagaggtgaa

SEQ ID NO: 123724 - DNA, 25 bp, Artificial
  Probe
cattggaagaagtgatgaagaggtg

SEQ ID NO: 123725 - DNA, 25 bp, Artificial
  Probe
gagcattggaagaagtgatgaagag

SEQ ID NO: 123726 - DNA, 25 bp, Artificial
  Probe
gagagcattggaagaagtgatgaag

SEQ ID NO: 123727 - DNA, 25 bp, Artificial
  Probe
aagtgatgaagaggtgaagtgaaca

SEQ ID NO: 123728 - DNA, 25 bp, Artificial
  Probe
agagcattggaagaagtgatgaaga

SEQ ID NO: 123729 - DNA, 25 bp, Artificial
  Probe
ggaagaagtgatgaagaggtgaagt

SEQ ID NO: 123730 - DNA, 25 bp, Artificial
  Probe
tggaagaagtgatgaagaggtgaag

SEQ ID NO: 123731 - DNA, 25 bp, Artificial
  Probe
aggtgaagtgaacacacattcttaa

SEQ ID NO: 123732 - DNA, 25 bp, Artificial
  Probe
gaggtgaagtgaacacacattctta

SEQ ID NO: 123733 - DNA, 25 bp, Artificial
  Probe
gaaggagagcattggaagaagtgat

SEQ ID NO: 123734 - DNA, 25 bp, Artificial
  Probe
attatcttctggtgcatgttcttct

SEQ ID NO: 123735 - DNA, 25 bp, Artificial
  Probe
agcattggaagaagtgatgaagagg

SEQ ID NO: 123736 - DNA, 25 bp, Artificial
  Probe
aaggagagcattggaagaagtgatg

SEQ ID NO: 123737 - DNA, 25 bp, Artificial
  Probe
ggagagcattggaagaagtgatgaa

SEQ ID NO: 123738 - DNA, 25 bp, Artificial
  Probe
tattatcttctggtgcatgttcttc

SEQ ID NO: 123739 - DNA, 25 bp, Artificial
  Probe
gaagaggtgaagtgaacacacattc

SEQ ID NO: 123740 - DNA, 25 bp, Artificial
  Probe
gcattggaagaagtgatgaagaggt

SEQ ID NO: 123741 - DNA, 25 bp, Artificial
  Probe
agaggtgaagtgaacacacattctt

SEQ ID NO: 123742 - DNA, 25 bp, Artificial
  Probe
aagaggtgaagtgaacacacattct

SEQ ID NO: 123743 - DNA, 25 bp, Artificial
  Probe
atgaagaggtgaagtgaacacacat

SEQ ID NO: 123744 - DNA, 25 bp, Artificial
  Probe
atattatcttctggtgcatgttctt

SEQ ID NO: 123745 - DNA, 25 bp, Artificial
  Probe
tgaagaggtgaagtgaacacacatt

SEQ ID NO: 123746 - DNA, 25 bp, Artificial
  Probe
tgaacacacattcttaaggcaataa

SEQ ID NO: 123747 - DNA, 25 bp, Artificial
  Probe
agtgatgaagaggtgaagtgaacac

SEQ ID NO: 123748 - DNA, 25 bp, Artificial
  Probe
aggagagcattggaagaagtgatga

SEQ ID NO: 123749 - DNA, 25 bp, Artificial
  Probe
gatgaagaggtgaagtgaacacaca

SEQ ID NO: 123750 - DNA, 25 bp, Artificial
  Probe
tgatgaagaggtgaagtgaacacac

SEQ ID NO: 123751 - DNA, 25 bp, Artificial
  Probe
gtgatgaagaggtgaagtgaacaca

SEQ ID NO: 123752 - DNA, 25 bp, Artificial
  Probe
gtgaacacacattcttaaggcaata

SEQ ID NO: 123753 - DNA, 25 bp, Artificial
  Probe
gtgaagtgaacacacattcttaagg

SEQ ID NO: 123754 - DNA, 25 bp, Artificial
  Probe
ggtgaagtgaacacacattcttaag

SEQ ID NO: 123755 - DNA, 25 bp, Artificial
  Probe
agtgaacacacattcttaaggcaat

SEQ ID NO: 123756 - DNA, 25 bp, Artificial
  Probe
aagtgaacacacattcttaaggcaa

SEQ ID NO: 123757 - DNA, 25 bp, Artificial
  Probe
gaagtgaacacacattcttaaggca

SEQ ID NO: 123758 - DNA, 25 bp, Artificial
  Probe
tgaagtgaacacacattcttaaggc

SEQ ID NO: 123759 - DNA, 25 bp, Artificial
  Probe
ggaaggagagcattggaagaagtga

SEQ ID NO: 123760 - DNA, 25 bp, Artificial
  Probe
ctggaaggagagcattggaagaagt

SEQ ID NO: 123761 - DNA, 25 bp, Artificial
  Probe
tggaaggagagcattggaagaagtg

SEQ ID NO: 123762 - DNA, 25 bp, Artificial
  Probe
gaacacacattcttaaggcaataaa

SEQ ID NO: 123763 - DNA, 25 bp, Artificial
  Probe
ggagaagactaaagccaacatcaag

SEQ ID NO: 123764 - DNA, 25 bp, Artificial
  Probe
gagaagactaaagccaacatcaagt

SEQ ID NO: 123765 - DNA, 25 bp, Artificial
  Probe
agaagactaaagccaacatcaagtg

SEQ ID NO: 123766 - DNA, 25 bp, Artificial
  Probe
caagacccagaaccaaagaatcaac

SEQ ID NO: 123767 - DNA, 25 bp, Artificial
  Probe
aagacccagaaccaaagaatcaaca

SEQ ID NO: 123768 - DNA, 25 bp, Artificial
  Probe
acaagacccagaaccaaagaatcaa

SEQ ID NO: 123769 - DNA, 25 bp, Artificial
  Probe
agacccagaaccaaagaatcaacag

SEQ ID NO: 123770 - DNA, 25 bp, Artificial
  Probe
cacaagacccagaaccaaagaatca

SEQ ID NO: 123771 - DNA, 25 bp, Artificial
  Probe
gaagactaaagccaacatcaagtgg

SEQ ID NO: 123772 - DNA, 25 bp, Artificial
  Probe
tggagaagactaaagccaacatcaa

SEQ ID NO: 123773 - DNA, 25 bp, Artificial
  Probe
ctggagaagactaaagccaacatca

SEQ ID NO: 123774 - DNA, 25 bp, Artificial
  Probe
gacccagaaccaaagaatcaacagg

SEQ ID NO: 123775 - DNA, 25 bp, Artificial
  Probe
ccacaagacccagaaccaaagaatc

SEQ ID NO: 123776 - DNA, 25 bp, Artificial
  Probe
cctggagaagactaaagccaacatc

SEQ ID NO: 123777 - DNA, 25 bp, Artificial
  Probe
aagactaaagccaacatcaagtggg

SEQ ID NO: 123778 - DNA, 25 bp, Artificial
  Probe
taaagccaacatcaagtgggtgaag

SEQ ID NO: 123779 - DNA, 25 bp, Artificial
  Probe
ctaaagccaacatcaagtgggtgaa

SEQ ID NO: 123780 - DNA, 25 bp, Artificial
  Probe
caaagacgtggtactcaagtggttc

SEQ ID NO: 123781 - DNA, 25 bp, Artificial
  Probe
gactaaagccaacatcaagtgggtg

SEQ ID NO: 123782 - DNA, 25 bp, Artificial
  Probe
agactaaagccaacatcaagtgggt

SEQ ID NO: 123783 - DNA, 25 bp, Artificial
  Probe
ccctggagaagactaaagccaacat

SEQ ID NO: 123784 - DNA, 25 bp, Artificial
  Probe
actaaagccaacatcaagtgggtga

SEQ ID NO: 123785 - DNA, 25 bp, Artificial
  Probe
acccagaaccaaagaatcaacaggg

SEQ ID NO: 123786 - DNA, 25 bp, Artificial
  Probe
gatagcagagagagtgacagagtat

SEQ ID NO: 123787 - DNA, 25 bp, Artificial
  Probe
agatagcagagagagtgacagagta

SEQ ID NO: 123788 - DNA, 25 bp, Artificial
  Probe
atagcagagagagtgacagagtatt

SEQ ID NO: 123789 - DNA, 25 bp, Artificial
  Probe
agagagagtgacagagtattggaat

SEQ ID NO: 123790 - DNA, 25 bp, Artificial
  Probe
gagagagtgacagagtattggaata

SEQ ID NO: 123791 - DNA, 25 bp, Artificial
  Probe
tagcagagagagtgacagagtattg

SEQ ID NO: 123792 - DNA, 25 bp, Artificial
  Probe
cagagagagtgacagagtattggaa

SEQ ID NO: 123793 - DNA, 25 bp, Artificial
  Probe
gaagatagcagagagagtgacagag

SEQ ID NO: 123794 - DNA, 25 bp, Artificial
  Probe
aagatagcagagagagtgacagagt

SEQ ID NO: 123795 - DNA, 25 bp, Artificial
  Probe
gtcattgtagagttcactcacagtt

SEQ ID NO: 123796 - DNA, 25 bp, Artificial
  Probe
gagagtgacagagtattggaatacc

SEQ ID NO: 123797 - DNA, 25 bp, Artificial
  Probe
ggaagatagcagagagagtgacaga

SEQ ID NO: 123798 - DNA, 25 bp, Artificial
  Probe
aggaagatagcagagagagtgacag

SEQ ID NO: 123799 - DNA, 25 bp, Artificial
  Probe
gaggaagatagcagagagagtgaca

SEQ ID NO: 123800 - DNA, 25 bp, Artificial
  Probe
agagagtgacagagtattggaatac

SEQ ID NO: 123801 - DNA, 25 bp, Artificial
  Probe
cttctctgattggctacccttaata

SEQ ID NO: 123802 - DNA, 25 bp, Artificial
  Probe
tctctgattggctacccttaataaa

SEQ ID NO: 123803 - DNA, 25 bp, Artificial
  Probe
ttctctgattggctacccttaataa

SEQ ID NO: 123804 - DNA, 25 bp, Artificial
  Probe
gagtgacagagtattggaataccag

SEQ ID NO: 123805 - DNA, 25 bp, Artificial
  Probe
gtgacagagtattggaataccagac

SEQ ID NO: 123806 - DNA, 25 bp, Artificial
  Probe
agtgacagagtattggaataccaga

SEQ ID NO: 123807 - DNA, 25 bp, Artificial
  Probe
agagtgacagagtattggaatacca

SEQ ID NO: 123808 - DNA, 25 bp, Artificial
  Probe
ctctgattggctacccttaataaag

SEQ ID NO: 123809 - DNA, 25 bp, Artificial
  Probe
aggtcattgtagagttcactcacag

SEQ ID NO: 123810 - DNA, 25 bp, Artificial
  Probe
gaggtcattgtagagttcactcaca

SEQ ID NO: 123811 - DNA, 25 bp, Artificial
  Probe
gcagagagagtgacagagtattgga

SEQ ID NO: 123812 - DNA, 25 bp, Artificial
  Probe
agcagagagagtgacagagtattgg

SEQ ID NO: 123813 - DNA, 25 bp, Artificial
  Probe
atatgttgggttcaggagaggattc

SEQ ID NO: 123814 - DNA, 25 bp, Artificial
  Probe
gatatgttgggttcaggagaggatt

SEQ ID NO: 123815 - DNA, 25 bp, Artificial
  Probe
ggtcattgtagagttcactcacagt

SEQ ID NO: 123816 - DNA, 25 bp, Artificial
  Probe
tgacagagtattggaataccagacc

SEQ ID NO: 123817 - DNA, 25 bp, Artificial
  Probe
ggaggaagatagcagagagagtgac

SEQ ID NO: 123818 - DNA, 25 bp, Artificial
  Probe
aaattgtagtggtgaagggtctctt

SEQ ID NO: 123819 - DNA, 25 bp, Artificial
  Probe
catgatgcccaatctaaactccttt

SEQ ID NO: 123820 - DNA, 25 bp, Artificial
  Probe
gcttctctgattggctacccttaat

SEQ ID NO: 123821 - DNA, 25 bp, Artificial
  Probe
tttgaggtcattgtagagttcactc

SEQ ID NO: 123822 - DNA, 25 bp, Artificial
  Probe
tcattgtagagttcactcacagttt

SEQ ID NO: 123823 - DNA, 25 bp, Artificial
  Probe
aattgtagtggtgaagggtctcttg

SEQ ID NO: 123824 - DNA, 25 bp, Artificial
  Probe
tattggaataccagacccagaagaa

SEQ ID NO: 123825 - DNA, 25 bp, Artificial
  Probe
ttctaaagctgtggcaaagagattt

SEQ ID NO: 123826 - DNA, 25 bp, Artificial
  Probe
acatgatgcccaatctaaactcctt

SEQ ID NO: 123827 - DNA, 25 bp, Artificial
  Probe
cagtgatatgttgggttcaggagag

SEQ ID NO: 123828 - DNA, 25 bp, Artificial
  Probe
tttgggaggaagatagcagagagag

SEQ ID NO: 123829 - DNA, 25 bp, Artificial
  Probe
tctaaagctgtggcaaagagatttc

SEQ ID NO: 123830 - DNA, 25 bp, Artificial
  Probe
cttctaaagctgtggcaaagagatt

SEQ ID NO: 123831 - DNA, 25 bp, Artificial
  Probe
aatctctactgtctcctgctctctt

SEQ ID NO: 123832 - DNA, 25 bp, Artificial
  Probe
gcacaagaagaataacctagtctat

SEQ ID NO: 123833 - DNA, 25 bp, Artificial
  Probe
attccatgctaacacagagacctac

SEQ ID NO: 123834 - DNA, 25 bp, Artificial
  Probe
acaacctgcttatttcttctctctt

SEQ ID NO: 123835 - DNA, 25 bp, Artificial
  Probe
aacaacctgcttatttcttctctct

SEQ ID NO: 123836 - DNA, 25 bp, Artificial
  Probe
caacaacctgcttatttcttctctc

SEQ ID NO: 123837 - DNA, 25 bp, Artificial
  Probe
atttcaacacaacaacctgcttatt

SEQ ID NO: 123838 - DNA, 25 bp, Artificial
  Probe
atctctactgtctcctgctctcttg

SEQ ID NO: 123839 - DNA, 25 bp, Artificial
  Probe
tttcaacacaacaacctgcttattt

SEQ ID NO: 123840 - DNA, 25 bp, Artificial
  Probe
aacacaacaacctgcttatttcttc

SEQ ID NO: 123841 - DNA, 25 bp, Artificial
  Probe
gatttcaacacaacaacctgcttat

SEQ ID NO: 123842 - DNA, 25 bp, Artificial
  Probe
acaacaacctgcttatttcttctct

SEQ ID NO: 123843 - DNA, 25 bp, Artificial
  Probe
cacaacaacctgcttatttcttctc

SEQ ID NO: 123844 - DNA, 25 bp, Artificial
  Probe
caacacaacaacctgcttatttctt

SEQ ID NO: 123845 - DNA, 25 bp, Artificial
  Probe
ttcaacacaacaacctgcttatttc

SEQ ID NO: 123846 - DNA, 25 bp, Artificial
  Probe
cattccatgctaacacagagaccta

SEQ ID NO: 123847 - DNA, 25 bp, Artificial
  Probe
tttgttgtttctttctgttgttccc

SEQ ID NO: 123848 - DNA, 25 bp, Artificial
  Probe
atttgttgtttctttctgttgttcc

SEQ ID NO: 123849 - DNA, 25 bp, Artificial
  Probe
tctctgcacaagaagaataacctag

SEQ ID NO: 123850 - DNA, 25 bp, Artificial
  Probe
ctgcacaagaagaataacctagtct

SEQ ID NO: 123851 - DNA, 25 bp, Artificial
  Probe
tctgcacaagaagaataacctagtc

SEQ ID NO: 123852 - DNA, 25 bp, Artificial
  Probe
ctctgcacaagaagaataacctagt

SEQ ID NO: 123853 - DNA, 25 bp, Artificial
  Probe
gtctctgcacaagaagaataaccta

SEQ ID NO: 123854 - DNA, 25 bp, Artificial
  Probe
acacaacaacctgcttatttcttct

SEQ ID NO: 123855 - DNA, 25 bp, Artificial
  Probe
ctctactgtctcctgctctcttgaa

SEQ ID NO: 123856 - DNA, 25 bp, Artificial
  Probe
tctactgtctcctgctctcttgaag

SEQ ID NO: 123857 - DNA, 25 bp, Artificial
  Probe
tgcacaagaagaataacctagtcta

SEQ ID NO: 123858 - DNA, 25 bp, Artificial
  Probe
aacctgcttatttcttctctcttgc

SEQ ID NO: 123859 - DNA, 25 bp, Artificial
  Probe
tcaacacaacaacctgcttatttct

SEQ ID NO: 123860 - DNA, 25 bp, Artificial
  Probe
caacctgcttatttcttctctcttg

SEQ ID NO: 123861 - DNA, 25 bp, Artificial
  Probe
tgtgtttatagtgacctgccatttc

SEQ ID NO: 123862 - DNA, 25 bp, Artificial
  Probe
ctgtgtttatagtgacctgccattt

SEQ ID NO: 123863 - DNA, 25 bp, Artificial
  Probe
tactgtctcctgctctcttgaagaa

SEQ ID NO: 123864 - DNA, 25 bp, Artificial
  Probe
tgccatttcactttacagtcttact

SEQ ID NO: 123865 - DNA, 25 bp, Artificial
  Probe
atgacacattccatgctaacacaga

SEQ ID NO: 123866 - DNA, 25 bp, Artificial
  Probe
catgtctctgcacaagaagaataac

SEQ ID NO: 123867 - DNA, 25 bp, Artificial
  Probe
tcatgtctctgcacaagaagaataa

SEQ ID NO: 123868 - DNA, 25 bp, Artificial
  Probe
ttcatgtctctgcacaagaagaata

SEQ ID NO: 123869 - DNA, 25 bp, Artificial
  Probe
gaaatcaagaaagccaacaacaacc

SEQ ID NO: 123870 - DNA, 25 bp, Artificial
  Probe
ggaaatcaagaaagccaacaacaac

SEQ ID NO: 123871 - DNA, 25 bp, Artificial
  Probe
tttaggagcaccgagaaattgaaag

SEQ ID NO: 123872 - DNA, 25 bp, Artificial
  Probe
atgtctctgcacaagaagaataacc

SEQ ID NO: 123873 - DNA, 25 bp, Artificial
  Probe
acaatgagagagaagaagaaagaaa

SEQ ID NO: 123874 - DNA, 25 bp, Artificial
  Probe
ctaacacagagacctacatggaaag

SEQ ID NO: 123875 - DNA, 25 bp, Artificial
  Probe
agactaccttattaaactctcacct

SEQ ID NO: 123876 - DNA, 25 bp, Artificial
  Probe
agagagaggttcgtctaatgaagaa

SEQ ID NO: 123877 - DNA, 25 bp, Artificial
  Probe
aagagagaggttcgtctaatgaaga

SEQ ID NO: 123878 - DNA, 25 bp, Artificial
  Probe
gcaagagaatgtcgtagaaagaaga

SEQ ID NO: 123879 - DNA, 25 bp, Artificial
  Probe
agcaagagaatgtcgtagaaagaag

SEQ ID NO: 123880 - DNA, 25 bp, Artificial
  Probe
taccattctacaatatgcacagacc

SEQ ID NO: 123881 - DNA, 25 bp, Artificial
  Probe
actaccattctacaatatgcacaga

SEQ ID NO: 123882 - DNA, 25 bp, Artificial
  Probe
caagagaatgtcgtagaaagaagaa

SEQ ID NO: 123883 - DNA, 25 bp, Artificial
  Probe
cagcaagagaatgtcgtagaaagaa

SEQ ID NO: 123884 - DNA, 25 bp, Artificial
  Probe
aaagagagaggttcgtctaatgaag

SEQ ID NO: 123885 - DNA, 25 bp, Artificial
  Probe
gaaagagagaggttcgtctaatgaa

SEQ ID NO: 123886 - DNA, 25 bp, Artificial
  Probe
ctaccattctacaatatgcacagac

SEQ ID NO: 123887 - DNA, 25 bp, Artificial
  Probe
cattctacaatatgcacagaccact

SEQ ID NO: 123888 - DNA, 25 bp, Artificial
  Probe
gaagcagcaagagaatgtcgtagaa

SEQ ID NO: 123889 - DNA, 25 bp, Artificial
  Probe
gagaatgtcgtagaaagaagaaaga

SEQ ID NO: 123890 - DNA, 25 bp, Artificial
  Probe
agagaatgtcgtagaaagaagaaag

SEQ ID NO: 123891 - DNA, 25 bp, Artificial
  Probe
gtactaccattctacaatatgcaca

SEQ ID NO: 123892 - DNA, 25 bp, Artificial
  Probe
agaatgtcgtagaaagaagaaagaa

SEQ ID NO: 123893 - DNA, 25 bp, Artificial
  Probe
aagagaatgtcgtagaaagaagaaa

SEQ ID NO: 123894 - DNA, 25 bp, Artificial
  Probe
ccattctacaatatgcacagaccac

SEQ ID NO: 123895 - DNA, 25 bp, Artificial
  Probe
tactaccattctacaatatgcacag

SEQ ID NO: 123896 - DNA, 25 bp, Artificial
  Probe
attctacaatatgcacagaccactg

SEQ ID NO: 123897 - DNA, 25 bp, Artificial
  Probe
accattctacaatatgcacagacca

SEQ ID NO: 123898 - DNA, 25 bp, Artificial
  Probe
cctttactgccacaagtcagattaa

SEQ ID NO: 123899 - DNA, 25 bp, Artificial
  Probe
ctacaatatgcacagaccactgatg

SEQ ID NO: 123900 - DNA, 25 bp, Artificial
  Probe
tctacaatatgcacagaccactgat

SEQ ID NO: 123901 - DNA, 25 bp, Artificial
  Probe
ttctacaatatgcacagaccactga

SEQ ID NO: 123902 - DNA, 25 bp, Artificial
  Probe
ggtactaccattctacaatatgcac

SEQ ID NO: 123903 - DNA, 25 bp, Artificial
  Probe
caaactagcagtgggcagtatattg

SEQ ID NO: 123904 - DNA, 25 bp, Artificial
  Probe
gaatgtcgtagaaagaagaaagaat

SEQ ID NO: 123905 - DNA, 25 bp, Artificial
  Probe
aagcagcaagagaatgtcgtagaaa

SEQ ID NO: 123906 - DNA, 25 bp, Artificial
  Probe
gtacaaacataccagattcgcacag

SEQ ID NO: 123907 - DNA, 25 bp, Artificial
  Probe
acctttactgccacaagtcagatta

SEQ ID NO: 123908 - DNA, 25 bp, Artificial
  Probe
tactgccacaagtcagattaatttg

SEQ ID NO: 123909 - DNA, 25 bp, Artificial
  Probe
ctttactgccacaagtcagattaat

SEQ ID NO: 123910 - DNA, 25 bp, Artificial
  Probe
cagtatattgccattacccagggag

SEQ ID NO: 123911 - DNA, 25 bp, Artificial
  Probe
cgtagaaagaagaaagaatatgtga

SEQ ID NO: 123912 - DNA, 25 bp, Artificial
  Probe
tcgtagaaagaagaaagaatatgtg

SEQ ID NO: 123913 - DNA, 25 bp, Artificial
  Probe
gtcgtagaaagaagaaagaatatgt

SEQ ID NO: 123914 - DNA, 25 bp, Artificial
  Probe
tgtcgtagaaagaagaaagaatatg

SEQ ID NO: 123915 - DNA, 25 bp, Artificial
  Probe
ttcgtctaatgaagaacagggaagc

SEQ ID NO: 123916 - DNA, 25 bp, Artificial
  Probe
ttactgccacaagtcagattaattt

SEQ ID NO: 123917 - DNA, 25 bp, Artificial
  Probe
tttactgccacaagtcagattaatt

SEQ ID NO: 123918 - DNA, 25 bp, Artificial
  Probe
cgggtactaccattctacaatatgc

SEQ ID NO: 123919 - DNA, 25 bp, Artificial
  Probe
gagagaggttcgtctaatgaagaac

SEQ ID NO: 123920 - DNA, 25 bp, Artificial
  Probe
gcagcaagagaatgtcgtagaaaga

SEQ ID NO: 123921 - DNA, 25 bp, Artificial
  Probe
gaagaagtctggctatcatactgct

SEQ ID NO: 123922 - DNA, 25 bp, Artificial
  Probe
agaagaagtctggctatcatactgc

SEQ ID NO: 123923 - DNA, 25 bp, Artificial
  Probe
aagaagtctggctatcatactgctg

SEQ ID NO: 123924 - DNA, 25 bp, Artificial
  Probe
gaagaagagcagctaatgaagatcc

SEQ ID NO: 123925 - DNA, 25 bp, Artificial
  Probe
aagaagagcagctaatgaagatcct

SEQ ID NO: 123926 - DNA, 25 bp, Artificial
  Probe
cgaagaagagcagctaatgaagatc

SEQ ID NO: 123927 - DNA, 25 bp, Artificial
  Probe
tagagaagaaagcagaagacttgag

SEQ ID NO: 123928 - DNA, 25 bp, Artificial
  Probe
ccttagagaagaaagcagaagactt

SEQ ID NO: 123929 - DNA, 25 bp, Artificial
  Probe
tatgggttcagtccttagagaagaa

SEQ ID NO: 123930 - DNA, 25 bp, Artificial
  Probe
gaaagtatgggttcagtccttagag

SEQ ID NO: 123931 - DNA, 25 bp, Artificial
  Probe
ttagagaagaaagcagaagacttga

SEQ ID NO: 123932 - DNA, 25 bp, Artificial
  Probe
cttagagaagaaagcagaagacttg

SEQ ID NO: 123933 - DNA, 25 bp, Artificial
  Probe
aagtatgggttcagtccttagagaa

SEQ ID NO: 123934 - DNA, 25 bp, Artificial
  Probe
aaagtatgggttcagtccttagaga

SEQ ID NO: 123935 - DNA, 25 bp, Artificial
  Probe
cagctaatgaagatcctgatgagaa

SEQ ID NO: 123936 - DNA, 25 bp, Artificial
  Probe
cagtccttagagaagaaagcagaag

SEQ ID NO: 123937 - DNA, 25 bp, Artificial
  Probe
tccttagagaagaaagcagaagact

SEQ ID NO: 123938 - DNA, 25 bp, Artificial
  Probe
agtccttagagaagaaagcagaaga

SEQ ID NO: 123939 - DNA, 25 bp, Artificial
  Probe
tcgaagaagagcagctaatgaagat

SEQ ID NO: 123940 - DNA, 25 bp, Artificial
  Probe
gtatgggttcagtccttagagaaga

SEQ ID NO: 123941 - DNA, 25 bp, Artificial
  Probe
agtatgggttcagtccttagagaag

SEQ ID NO: 123942 - DNA, 25 bp, Artificial
  Probe
tcagtccttagagaagaaagcagaa

SEQ ID NO: 123943 - DNA, 25 bp, Artificial
  Probe
ttcagtccttagagaagaaagcaga

SEQ ID NO: 123944 - DNA, 25 bp, Artificial
  Probe
gttcagtccttagagaagaaagcag

SEQ ID NO: 123945 - DNA, 25 bp, Artificial
  Probe
atgggttcagtccttagagaagaaa

SEQ ID NO: 123946 - DNA, 25 bp, Artificial
  Probe
agaagtctggctatcatactgctga

SEQ ID NO: 123947 - DNA, 25 bp, Artificial
  Probe
tgggttcagtccttagagaagaaag

SEQ ID NO: 123948 - DNA, 25 bp, Artificial
  Probe
aagagcagctaatgaagatcctgat

SEQ ID NO: 123949 - DNA, 25 bp, Artificial
  Probe
agggtttagatactgattagtgact

SEQ ID NO: 123950 - DNA, 25 bp, Artificial
  Probe
gcaacagggtttagatactgattag

SEQ ID NO: 123951 - DNA, 25 bp, Artificial
  Probe
ccaatggagtcagttcaacatcaaa

SEQ ID NO: 123952 - DNA, 25 bp, Artificial
  Probe
gtccttagagaagaaagcagaagac

SEQ ID NO: 123953 - DNA, 25 bp, Artificial
  Probe
gtcgaagaagagcagctaatgaaga

SEQ ID NO: 123954 - DNA, 25 bp, Artificial
  Probe
ggttcagtccttagagaagaaagca

SEQ ID NO: 123955 - DNA, 25 bp, Artificial
  Probe
gaagagcagctaatgaagatcctga

SEQ ID NO: 123956 - DNA, 25 bp, Artificial
  Probe
agaagagcagctaatgaagatcctg

SEQ ID NO: 123957 - DNA, 25 bp, Artificial
  Probe
acagggtttagatactgattagtga

SEQ ID NO: 123958 - DNA, 25 bp, Artificial
  Probe
agctaatgaagatcctgatgagaaa

SEQ ID NO: 123959 - DNA, 25 bp, Artificial
  Probe
gcagctaatgaagatcctgatgaga

SEQ ID NO: 123960 - DNA, 25 bp, Artificial
  Probe
agcagctaatgaagatcctgatgag

SEQ ID NO: 123961 - DNA, 25 bp, Artificial
  Probe
gagcagctaatgaagatcctgatga

SEQ ID NO: 123962 - DNA, 25 bp, Artificial
  Probe
agagcagctaatgaagatcctgatg

SEQ ID NO: 123963 - DNA, 25 bp, Artificial
  Probe
cagggtttagatactgattagtgac

SEQ ID NO: 123964 - DNA, 25 bp, Artificial
  Probe
gggtttagatactgattagtgactt

SEQ ID NO: 123965 - DNA, 25 bp, Artificial
  Probe
tccaatggagtcagttcaacatcaa

SEQ ID NO: 123966 - DNA, 25 bp, Artificial
  Probe
gagaagactgctgtgtatgtgtatt

SEQ ID NO: 123967 - DNA, 25 bp, Artificial
  Probe
aggcgtggttatattattgaggatg

SEQ ID NO: 123968 - DNA, 25 bp, Artificial
  Probe
caggcgtggttatattattgaggat

SEQ ID NO: 123969 - DNA, 25 bp, Artificial
  Probe
tcaaggtgtctccattctctatcag

SEQ ID NO: 123970 - DNA, 25 bp, Artificial
  Probe
tgagaagactgctgtgtatgtgtat

SEQ ID NO: 123971 - DNA, 25 bp, Artificial
  Probe
atgagaagactgctgtgtatgtgta

SEQ ID NO: 123972 - DNA, 25 bp, Artificial
  Probe
aaggtgtctccattctctatcagtg

SEQ ID NO: 123973 - DNA, 25 bp, Artificial
  Probe
caaggtgtctccattctctatcagt

SEQ ID NO: 123974 - DNA, 25 bp, Artificial
  Probe
gtcaaggtgtctccattctctatca

SEQ ID NO: 123975 - DNA, 25 bp, Artificial
  Probe
gaatgagaagactgctgtgtatgtg

SEQ ID NO: 123976 - DNA, 25 bp, Artificial
  Probe
taggtcaaggtgtctccattctcta

SEQ ID NO: 123977 - DNA, 25 bp, Artificial
  Probe
gcgtggttatattattgaggatgcc

SEQ ID NO: 123978 - DNA, 25 bp, Artificial
  Probe
ggcgtggttatattattgaggatgc

SEQ ID NO: 123979 - DNA, 25 bp, Artificial
  Probe
ggtcaaggtgtctccattctctatc

SEQ ID NO: 123980 - DNA, 25 bp, Artificial
  Probe
aatgagaagactgctgtgtatgtgt

SEQ ID NO: 123981 - DNA, 25 bp, Artificial
  Probe
cgtggttatattattgaggatgcct

SEQ ID NO: 123982 - DNA, 25 bp, Artificial
  Probe
aggtcaaggtgtctccattctctat

SEQ ID NO: 123983 - DNA, 25 bp, Artificial
  Probe
ggaatgagaagactgctgtgtatgt

SEQ ID NO: 123984 - DNA, 25 bp, Artificial
  Probe
gtggttatattattgaggatgcctt

SEQ ID NO: 123985 - DNA, 25 bp, Artificial
  Probe
gtgaacttggttgtgatctggtatg

SEQ ID NO: 123986 - DNA, 25 bp, Artificial
  Probe
ttaggtcaaggtgtctccattctct

SEQ ID NO: 123987 - DNA, 25 bp, Artificial
  Probe
gtatgccataggatgtcagacaata

SEQ ID NO: 123988 - DNA, 25 bp, Artificial
  Probe
ccataggatgtcagacaatatcact

SEQ ID NO: 123989 - DNA, 25 bp, Artificial
  Probe
atgccataggatgtcagacaatatc

SEQ ID NO: 123990 - DNA, 25 bp, Artificial
  Probe
ggatgtcagacaatatcactggtta

SEQ ID NO: 123991 - DNA, 25 bp, Artificial
  Probe
ataggatgtcagacaatatcactgg

SEQ ID NO: 123992 - DNA, 25 bp, Artificial
  Probe
gtgtatgtgtatttgtgaacttggt

SEQ ID NO: 123993 - DNA, 25 bp, Artificial
  Probe
tgtgtatgtgtatttgtgaacttgg

SEQ ID NO: 123994 - DNA, 25 bp, Artificial
  Probe
gctgtgtatgtgtatttgtgaactt

SEQ ID NO: 123995 - DNA, 25 bp, Artificial
  Probe
gaagactgctgtgtatgtgtatttg

SEQ ID NO: 123996 - DNA, 25 bp, Artificial
  Probe
agaagactgctgtgtatgtgtattt

SEQ ID NO: 123997 - DNA, 25 bp, Artificial
  Probe
tatgccataggatgtcagacaatat

SEQ ID NO: 123998 - DNA, 25 bp, Artificial
  Probe
tgtgaacttggttgtgatctggtat

SEQ ID NO: 123999 - DNA, 25 bp, Artificial
  Probe
aaacaggtctcgtatttaggtcaag

SEQ ID NO: 124000 - DNA, 25 bp, Artificial
  Probe
gaaacaggtctcgtatttaggtcaa

SEQ ID NO: 124001 - DNA, 25 bp, Artificial
  Probe
taggatgtcagacaatatcactggt

SEQ ID NO: 124002 - DNA, 25 bp, Artificial
  Probe
gccataggatgtcagacaatatcac

SEQ ID NO: 124003 - DNA, 25 bp, Artificial
  Probe
ctgctgtgtatgtgtatttgtgaac

SEQ ID NO: 124004 - DNA, 25 bp, Artificial
  Probe
aagactgctgtgtatgtgtatttgt

SEQ ID NO: 124005 - DNA, 25 bp, Artificial
  Probe
tgctgtgtatgtgtatttgtgaact

SEQ ID NO: 124006 - DNA, 25 bp, Artificial
  Probe
actgctgtgtatgtgtatttgtgaa

SEQ ID NO: 124007 - DNA, 25 bp, Artificial
  Probe
gcagtaagaaagtgtaaagccaatt

SEQ ID NO: 124008 - DNA, 25 bp, Artificial
  Probe
tgccataggatgtcagacaatatca

SEQ ID NO: 124009 - DNA, 25 bp, Artificial
  Probe
ttgtgaacttggttgtgatctggta

SEQ ID NO: 124010 - DNA, 25 bp, Artificial
  Probe
gtgtatttgtgaacttggttgtgat

SEQ ID NO: 124011 - DNA, 25 bp, Artificial
  Probe
attgtctcttgtctatgatcctcag

SEQ ID NO: 124012 - DNA, 25 bp, Artificial
  Probe
gattgtctcttgtctatgatcctca

SEQ ID NO: 124013 - DNA, 25 bp, Artificial
  Probe
gcatggattgtctcttgtctatgat

SEQ ID NO: 124014 - DNA, 25 bp, Artificial
  Probe
ttgtctcttgtctatgatcctcagt

SEQ ID NO: 124015 - DNA, 25 bp, Artificial
  Probe
catggattgtctcttgtctatgatc

SEQ ID NO: 124016 - DNA, 25 bp, Artificial
  Probe
aactgctcttctaacagatgaacag

SEQ ID NO: 124017 - DNA, 25 bp, Artificial
  Probe
caactgctcttctaacagatgaaca

SEQ ID NO: 124018 - DNA, 25 bp, Artificial
  Probe
ctgttgaataagaggaagtggtggt

SEQ ID NO: 124019 - DNA, 25 bp, Artificial
  Probe
tgtctcttgtctatgatcctcagtg

SEQ ID NO: 124020 - DNA, 25 bp, Artificial
  Probe
tgttgaataagaggaagtggtggtg

SEQ ID NO: 124021 - DNA, 25 bp, Artificial
  Probe
actgttgaataagaggaagtggtgg

SEQ ID NO: 124022 - DNA, 25 bp, Artificial
  Probe
aaagcatttgtgatagataagccct

SEQ ID NO: 124023 - DNA, 25 bp, Artificial
  Probe
gcatttgtgatagataagccctttg

SEQ ID NO: 124024 - DNA, 25 bp, Artificial
  Probe
agcatttgtgatagataagcccttt

SEQ ID NO: 124025 - DNA, 25 bp, Artificial
  Probe
caggcatggattgtctcttgtctat

SEQ ID NO: 124026 - DNA, 25 bp, Artificial
  Probe
aagctcactgttgaataagaggaag

SEQ ID NO: 124027 - DNA, 25 bp, Artificial
  Probe
attaaaggaattgttactgtggtgg

SEQ ID NO: 124028 - DNA, 25 bp, Artificial
  Probe
catttgtgatagataagccctttga

SEQ ID NO: 124029 - DNA, 25 bp, Artificial
  Probe
aagcatttgtgatagataagccctt

SEQ ID NO: 124030 - DNA, 25 bp, Artificial
  Probe
tttgtgatagataagccctttgagc

SEQ ID NO: 124031 - DNA, 25 bp, Artificial
  Probe
atttgtgatagataagccctttgag

SEQ ID NO: 124032 - DNA, 25 bp, Artificial
  Probe
agtgattccatgttatatgcagact

SEQ ID NO: 124033 - DNA, 25 bp, Artificial
  Probe
ggcatggattgtctcttgtctatga

SEQ ID NO: 124034 - DNA, 25 bp, Artificial
  Probe
aggcatggattgtctcttgtctatg

SEQ ID NO: 124035 - DNA, 25 bp, Artificial
  Probe
ttaaaggaattgttactgtggtggg

SEQ ID NO: 124036 - DNA, 25 bp, Artificial
  Probe
gtctcttgtctatgatcctcagtgc

SEQ ID NO: 124037 - DNA, 25 bp, Artificial
  Probe
gcaactgctcttctaacagatgaac

SEQ ID NO: 124038 - DNA, 25 bp, Artificial
  Probe
gtgattccatgttatatgcagacta

SEQ ID NO: 124039 - DNA, 25 bp, Artificial
  Probe
tagtgattccatgttatatgcagac

SEQ ID NO: 124040 - DNA, 25 bp, Artificial
  Probe
agctcactgttgaataagaggaagt

SEQ ID NO: 124041 - DNA, 25 bp, Artificial
  Probe
tgattccatgttatatgcagactag

SEQ ID NO: 124042 - DNA, 25 bp, Artificial
  Probe
aacattcttagagttacatctcgaa

SEQ ID NO: 124043 - DNA, 25 bp, Artificial
  Probe
cctatttaatggtcttgtttgttga

SEQ ID NO: 124044 - DNA, 25 bp, Artificial
  Probe
gttgaataagaggaagtggtggtgc

SEQ ID NO: 124045 - DNA, 25 bp, Artificial
  Probe
gatagataagccctttgagccttgt

SEQ ID NO: 124046 - DNA, 25 bp, Artificial
  Probe
tgatagataagccctttgagccttg

SEQ ID NO: 124047 - DNA, 25 bp, Artificial
  Probe
gtgatagataagccctttgagcctt

SEQ ID NO: 124048 - DNA, 25 bp, Artificial
  Probe
atagtgattccatgttatatgcaga

SEQ ID NO: 124049 - DNA, 25 bp, Artificial
  Probe
catgttatatgcagactagttaggc

SEQ ID NO: 124050 - DNA, 25 bp, Artificial
  Probe
ggttacatccatttgcgtaatcaag

SEQ ID NO: 124051 - DNA, 25 bp, Artificial
  Probe
taatggtcttgtttgttgacatgac

SEQ ID NO: 124052 - DNA, 25 bp, Artificial
  Probe
cttgtctatgatcctcagtgcgttc

SEQ ID NO: 124053 - DNA, 25 bp, Artificial
  Probe
gtgcgttcacttagagtatttctag

SEQ ID NO: 124054 - DNA, 25 bp, Artificial
  Probe
ttgtgatagataagccctttgagcc

SEQ ID NO: 124055 - DNA, 25 bp, Artificial
  Probe
ttaatggtcttgtttgttgacatga

SEQ ID NO: 124056 - DNA, 25 bp, Artificial
  Probe
atcactttgtattctctatccaggg

SEQ ID NO: 124057 - DNA, 25 bp, Artificial
  Probe
ctttgtattctctatccagggcttc

SEQ ID NO: 124058 - DNA, 25 bp, Artificial
  Probe
atacttcagtcagtcacaggaggaa

SEQ ID NO: 124059 - DNA, 25 bp, Artificial
  Probe
aaggatacttcagtcagtcacagga

SEQ ID NO: 124060 - DNA, 25 bp, Artificial
  Probe
tttgtattctctatccagggcttca

SEQ ID NO: 124061 - DNA, 25 bp, Artificial
  Probe
actttgtattctctatccagggctt

SEQ ID NO: 124062 - DNA, 25 bp, Artificial
  Probe
gtattctctatccagggcttcagat

SEQ ID NO: 124063 - DNA, 25 bp, Artificial
  Probe
tcagtcagtcacaggaggaagaatt

SEQ ID NO: 124064 - DNA, 25 bp, Artificial
  Probe
ttgtattctctatccagggcttcag

SEQ ID NO: 124065 - DNA, 25 bp, Artificial
  Probe
ttcagtcagtcacaggaggaagaat

SEQ ID NO: 124066 - DNA, 25 bp, Artificial
  Probe
cactttgtattctctatccagggct

SEQ ID NO: 124067 - DNA, 25 bp, Artificial
  Probe
tcactttgtattctctatccagggc

SEQ ID NO: 124068 - DNA, 25 bp, Artificial
  Probe
gatacttcagtcagtcacaggagga

SEQ ID NO: 124069 - DNA, 25 bp, Artificial
  Probe
aggatacttcagtcagtcacaggag

SEQ ID NO: 124070 - DNA, 25 bp, Artificial
  Probe
attctctatccagggcttcagatat

SEQ ID NO: 124071 - DNA, 25 bp, Artificial
  Probe
tattctctatccagggcttcagata

SEQ ID NO: 124072 - DNA, 25 bp, Artificial
  Probe
agaccagattgtagcttagtccttc

SEQ ID NO: 124073 - DNA, 25 bp, Artificial
  Probe
tctctatccagggcttcagatattt

SEQ ID NO: 124074 - DNA, 25 bp, Artificial
  Probe
ttctctatccagggcttcagatatt

SEQ ID NO: 124075 - DNA, 25 bp, Artificial
  Probe
tccacctcctgtattctacaacaag

SEQ ID NO: 124076 - DNA, 25 bp, Artificial
  Probe
ctccacctcctgtattctacaacaa

SEQ ID NO: 124077 - DNA, 25 bp, Artificial
  Probe
ctagaggaggtagatcaggtgttgg

SEQ ID NO: 124078 - DNA, 25 bp, Artificial
  Probe
cagaccagattgtagcttagtcctt

SEQ ID NO: 124079 - DNA, 25 bp, Artificial
  Probe
accagattgtagcttagtccttcct

SEQ ID NO: 124080 - DNA, 25 bp, Artificial
  Probe
tgtattctacaacaagcctccagaa

SEQ ID NO: 124081 - DNA, 25 bp, Artificial
  Probe
ctgtattctacaacaagcctccaga

SEQ ID NO: 124082 - DNA, 25 bp, Artificial
  Probe
tgtattctctatccagggcttcaga

SEQ ID NO: 124083 - DNA, 25 bp, Artificial
  Probe
tagaggaggtagatcaggtgttgga

SEQ ID NO: 124084 - DNA, 25 bp, Artificial
  Probe
caaccttcttaatttcgatgagctg

SEQ ID NO: 124085 - DNA, 25 bp, Artificial
  Probe
tatcactttgtattctctatccagg

SEQ ID NO: 124086 - DNA, 25 bp, Artificial
  Probe
ccagattgtagcttagtccttcctg

SEQ ID NO: 124087 - DNA, 25 bp, Artificial
  Probe
gaccagattgtagcttagtccttcc

SEQ ID NO: 124088 - DNA, 25 bp, Artificial
  Probe
ctcctgtattctacaacaagcctcc

SEQ ID NO: 124089 - DNA, 25 bp, Artificial
  Probe
cctcctgtattctacaacaagcctc

SEQ ID NO: 124090 - DNA, 25 bp, Artificial
  Probe
ccaaccttcttaatttcgatgagct

SEQ ID NO: 124091 - DNA, 25 bp, Artificial
  Probe
cctagaggaggtagatcaggtgttg

SEQ ID NO: 124092 - DNA, 25 bp, Artificial
  Probe
ggatacttcagtcagtcacaggagg

SEQ ID NO: 124093 - DNA, 25 bp, Artificial
  Probe
tgccaaccttcttaatttcgatgag

SEQ ID NO: 124094 - DNA, 25 bp, Artificial
  Probe
cctgtattctacaacaagcctccag

SEQ ID NO: 124095 - DNA, 25 bp, Artificial
  Probe
tagttgaaacaatgttgcagattcc

SEQ ID NO: 124096 - DNA, 25 bp, Artificial
  Probe
gtagttgaaacaatgttgcagattc

SEQ ID NO: 124097 - DNA, 25 bp, Artificial
  Probe
ggtagttgaaacaatgttgcagatt

SEQ ID NO: 124098 - DNA, 25 bp, Artificial
  Probe
gtgccaaccttcttaatttcgatga

SEQ ID NO: 124099 - DNA, 25 bp, Artificial
  Probe
ctgtgccaaccttcttaatttcgat

SEQ ID NO: 124100 - DNA, 25 bp, Artificial
  Probe
cagattgtagcttagtccttcctgc

SEQ ID NO: 124101 - DNA, 25 bp, Artificial
  Probe
tcagaagaagtcaatatcaccaaca

SEQ ID NO: 124102 - DNA, 25 bp, Artificial
  Probe
gtcaatatcaccaacatcatcaaca

SEQ ID NO: 124103 - DNA, 25 bp, Artificial
  Probe
tcaatatcaccaacatcatcaacag

SEQ ID NO: 124104 - DNA, 25 bp, Artificial
  Probe
agtcaatatcaccaacatcatcaac

SEQ ID NO: 124105 - DNA, 25 bp, Artificial
  Probe
ctcagaagaagtcaatatcaccaac

SEQ ID NO: 124106 - DNA, 25 bp, Artificial
  Probe
caatatcaccaacatcatcaacagc

SEQ ID NO: 124107 - DNA, 25 bp, Artificial
  Probe
gaagtcaatatcaccaacatcatca

SEQ ID NO: 124108 - DNA, 25 bp, Artificial
  Probe
gaagaagtcaatatcaccaacatca

SEQ ID NO: 124109 - DNA, 25 bp, Artificial
  Probe
cagaagaagtcaatatcaccaacat

SEQ ID NO: 124110 - DNA, 25 bp, Artificial
  Probe
agaagtcaatatcaccaacatcatc

SEQ ID NO: 124111 - DNA, 25 bp, Artificial
  Probe
agaagaagtcaatatcaccaacatc

SEQ ID NO: 124112 - DNA, 25 bp, Artificial
  Probe
aagtcaatatcaccaacatcatcaa

SEQ ID NO: 124113 - DNA, 25 bp, Artificial
  Probe
aagaagtcaatatcaccaacatcat

SEQ ID NO: 124114 - DNA, 25 bp, Artificial
  Probe
actcagaagaagtcaatatcaccaa

SEQ ID NO: 124115 - DNA, 25 bp, Artificial
  Probe
aatatcaccaacatcatcaacagct

SEQ ID NO: 124116 - DNA, 25 bp, Artificial
  Probe
atatcaccaacatcatcaacagctc

SEQ ID NO: 124117 - DNA, 25 bp, Artificial
  Probe
caagtttaagtttgtcttccgagaa

SEQ ID NO: 124118 - DNA, 25 bp, Artificial
  Probe
aagtttaagtttgtcttccgagaaa

SEQ ID NO: 124119 - DNA, 25 bp, Artificial
  Probe
ggcagaatcattgattacttcacaa

SEQ ID NO: 124120 - DNA, 25 bp, Artificial
  Probe
gatcggcagaatcattgattacttc

SEQ ID NO: 124121 - DNA, 25 bp, Artificial
  Probe
agatcggcagaatcattgattactt

SEQ ID NO: 124122 - DNA, 25 bp, Artificial
  Probe
aagatcggcagaatcattgattact

SEQ ID NO: 124123 - DNA, 25 bp, Artificial
  Probe
atcggcagaatcattgattacttca

SEQ ID NO: 124124 - DNA, 25 bp, Artificial
  Probe
ttacagcagatggcagtcaaagata

SEQ ID NO: 124125 - DNA, 25 bp, Artificial
  Probe
tcggcagaatcattgattacttcac

SEQ ID NO: 124126 - DNA, 25 bp, Artificial
  Probe
tacagcagatggcagtcaaagatag

SEQ ID NO: 124127 - DNA, 25 bp, Artificial
  Probe
tatcaccaacatcatcaacagctcc

SEQ ID NO: 124128 - DNA, 25 bp, Artificial
  Probe
cggcagaatcattgattacttcaca

SEQ ID NO: 124129 - DNA, 25 bp, Artificial
  Probe
tacccaacaccaactgcttcataaa

SEQ ID NO: 124130 - DNA, 25 bp, Artificial
  Probe
gaaagccagcgacaagtttaagttt

SEQ ID NO: 124131 - DNA, 25 bp, Artificial
  Probe
gcagaatcattgattacttcacaat

SEQ ID NO: 124132 - DNA, 25 bp, Artificial
  Probe
ctacccaacaccaactgcttcataa

SEQ ID NO: 124133 - DNA, 25 bp, Artificial
  Probe
gatgaaagccagcgacaagtttaag

SEQ ID NO: 124134 - DNA, 25 bp, Artificial
  Probe
aaagccagcgacaagtttaagtttg

SEQ ID NO: 124135 - DNA, 25 bp, Artificial
  Probe
cttacagcagatggcagtcaaagat

SEQ ID NO: 124136 - DNA, 25 bp, Artificial
  Probe
gactcagaagaagtcaatatcacca

SEQ ID NO: 124137 - DNA, 25 bp, Artificial
  Probe
aggactcagaagaagtcaatatcac

SEQ ID NO: 124138 - DNA, 25 bp, Artificial
  Probe
cgatattccaaactactgtttcctt

SEQ ID NO: 124139 - DNA, 25 bp, Artificial
  Probe
caacatcatcaacagctccatctcc

SEQ ID NO: 124140 - DNA, 25 bp, Artificial
  Probe
ccaacatcatcaacagctccatctc

SEQ ID NO: 124141 - DNA, 25 bp, Artificial
  Probe
ggactcagaagaagtcaatatcacc

SEQ ID NO: 124142 - DNA, 25 bp, Artificial
  Probe
aaggactcagaagaagtcaatatca

SEQ ID NO: 124143 - DNA, 25 bp, Artificial
  Probe
aaagatcggcagaatcattgattac

SEQ ID NO: 124144 - DNA, 25 bp, Artificial
  Probe
ttacttcacaattcaaaatcccagc

SEQ ID NO: 124145 - DNA, 25 bp, Artificial
  Probe
atgaaagccagcgacaagtttaagt

SEQ ID NO: 124146 - DNA, 25 bp, Artificial
  Probe
tgttgatttatattccttccacagc

SEQ ID NO: 124147 - DNA, 25 bp, Artificial
  Probe
gttgatttatattccttccacagct

SEQ ID NO: 124148 - DNA, 25 bp, Artificial
  Probe
agtgttgatttatattccttccaca

SEQ ID NO: 124149 - DNA, 25 bp, Artificial
  Probe
gtgttgatttatattccttccacag

SEQ ID NO: 124150 - DNA, 25 bp, Artificial
  Probe
tgataagtttgccaatcatctgtac

SEQ ID NO: 124151 - DNA, 25 bp, Artificial
  Probe
aagtgttgatttatattccttccac

SEQ ID NO: 124152 - DNA, 25 bp, Artificial
  Probe
aaagtgttgatttatattccttcca

SEQ ID NO: 124153 - DNA, 25 bp, Artificial
  Probe
gaccatctactcccaatcatccctg

SEQ ID NO: 124154 - DNA, 25 bp, Artificial
  Probe
gataagtttgccaatcatctgtaca

SEQ ID NO: 124155 - DNA, 25 bp, Artificial
  Probe
aagtttgccaatcatctgtacataa

SEQ ID NO: 124156 - DNA, 25 bp, Artificial
  Probe
agtttgccaatcatctgtacataat

SEQ ID NO: 124157 - DNA, 25 bp, Artificial
  Probe
ataagtttgccaatcatctgtacat

SEQ ID NO: 124158 - DNA, 25 bp, Artificial
  Probe
ttgccaatcatctgtacataattaa

SEQ ID NO: 124159 - DNA, 25 bp, Artificial
  Probe
taagtttgccaatcatctgtacata

SEQ ID NO: 124160 - DNA, 25 bp, Artificial
  Probe
atctactcccaatcatccctgcatt

SEQ ID NO: 124161 - DNA, 25 bp, Artificial
  Probe
gtttgccaatcatctgtacataatt

SEQ ID NO: 124162 - DNA, 25 bp, Artificial
  Probe
tactcccaatcatccctgcattcat

SEQ ID NO: 124163 - DNA, 25 bp, Artificial
  Probe
ctgggagagaaagcattcctcagat

SEQ ID NO: 124164 - DNA, 25 bp, Artificial
  Probe
aatgatgcatggtctgagtttgaaa

SEQ ID NO: 124165 - DNA, 25 bp, Artificial
  Probe
tgggagagaaagcattcctcagatc

SEQ ID NO: 124166 - DNA, 25 bp, Artificial
  Probe
tctactcccaatcatccctgcattc

SEQ ID NO: 124167 - DNA, 25 bp, Artificial
  Probe
ctggaccatctactcccaatcatcc

SEQ ID NO: 124168 - DNA, 25 bp, Artificial
  Probe
cctggaccatctactcccaatcatc

SEQ ID NO: 124169 - DNA, 25 bp, Artificial
  Probe
catctactcccaatcatccctgcat

SEQ ID NO: 124170 - DNA, 25 bp, Artificial
  Probe
gaatgatgcatggtctgagtttgaa

SEQ ID NO: 124171 - DNA, 25 bp, Artificial
  Probe
cccaatcatccctgcattcatcatg

SEQ ID NO: 124172 - DNA, 25 bp, Artificial
  Probe
tcccaatcatccctgcattcatcat

SEQ ID NO: 124173 - DNA, 25 bp, Artificial
  Probe
ctactcccaatcatccctgcattca

SEQ ID NO: 124174 - DNA, 25 bp, Artificial
  Probe
ctgaatgatgcatggtctgagtttg

SEQ ID NO: 124175 - DNA, 25 bp, Artificial
  Probe
tttgccaatcatctgtacataatta

SEQ ID NO: 124176 - DNA, 25 bp, Artificial
  Probe
gactgaggcacaaatgggaccataa

SEQ ID NO: 124177 - DNA, 25 bp, Artificial
  Probe
tgaatgatgcatggtctgagtttga

SEQ ID NO: 124178 - DNA, 25 bp, Artificial
  Probe
ctcccaatcatccctgcattcatca

SEQ ID NO: 124179 - DNA, 25 bp, Artificial
  Probe
actcccaatcatccctgcattcatc

SEQ ID NO: 124180 - DNA, 25 bp, Artificial
  Probe
tgaggcacaaatgggaccataacag

SEQ ID NO: 124181 - DNA, 25 bp, Artificial
  Probe
ctgaggcacaaatgggaccataaca

SEQ ID NO: 124182 - DNA, 25 bp, Artificial
  Probe
actgaggcacaaatgggaccataac

SEQ ID NO: 124183 - DNA, 25 bp, Artificial
  Probe
ggaccatctactcccaatcatccct

SEQ ID NO: 124184 - DNA, 25 bp, Artificial
  Probe
ccaatcatccctgcattcatcatgg

SEQ ID NO: 124185 - DNA, 25 bp, Artificial
  Probe
aaaagtgttgatttatattccttcc

SEQ ID NO: 124186 - DNA, 25 bp, Artificial
  Probe
gggagagaaagcattcctcagatct

SEQ ID NO: 124187 - DNA, 25 bp, Artificial
  Probe
tggaccatctactcccaatcatccc

SEQ ID NO: 124188 - DNA, 25 bp, Artificial
  Probe
atgatgcatggtctgagtttgaaaa

SEQ ID NO: 124189 - DNA, 25 bp, Artificial
  Probe
tgatgcatggtctgagtttgaaaac

SEQ ID NO: 124190 - DNA, 25 bp, Artificial
  Probe
gatgcatggtctgagtttgaaaacc

SEQ ID NO: 124191 - DNA, 25 bp, Artificial
  Probe
ttgacctggagaacatcatcttcag

SEQ ID NO: 124192 - DNA, 25 bp, Artificial
  Probe
gacaagatcatctactcgcacttca

SEQ ID NO: 124193 - DNA, 25 bp, Artificial
  Probe
acaagatcatctactcgcacttcac

SEQ ID NO: 124194 - DNA, 25 bp, Artificial
  Probe
gttcttggtggcattaagcgagtat

SEQ ID NO: 124195 - DNA, 25 bp, Artificial
  Probe
catcatgttcttggtggcattaagc

SEQ ID NO: 124196 - DNA, 25 bp, Artificial
  Probe
ttcttggtggcattaagcgagtatg

SEQ ID NO: 124197 - DNA, 25 bp, Artificial
  Probe
gtttgacctggagaacatcatcttc

SEQ ID NO: 124198 - DNA, 25 bp, Artificial
  Probe
gtctgtgatcctcttcctcaacaag

SEQ ID NO: 124199 - DNA, 25 bp, Artificial
  Probe
tttgacctggagaacatcatcttca

SEQ ID NO: 124200 - DNA, 25 bp, Artificial
  Probe
caagatcatctactcgcacttcacc

SEQ ID NO: 124201 - DNA, 25 bp, Artificial
  Probe
gaatgtcacgtccatcatgttcttg

SEQ ID NO: 124202 - DNA, 25 bp, Artificial
  Probe
aagatcatctactcgcacttcacct

SEQ ID NO: 124203 - DNA, 25 bp, Artificial
  Probe
ccatcatgttcttggtggcattaag

SEQ ID NO: 124204 - DNA, 25 bp, Artificial
  Probe
ctgtgatcctcttcctcaacaagaa

SEQ ID NO: 124205 - DNA, 25 bp, Artificial
  Probe
tccatcatgttcttggtggcattaa

SEQ ID NO: 124206 - DNA, 25 bp, Artificial
  Probe
cttggtggcattaagcgagtatgac

SEQ ID NO: 124207 - DNA, 25 bp, Artificial
  Probe
ttgagaatgtcacgtccatcatgtt

SEQ ID NO: 124208 - DNA, 25 bp, Artificial
  Probe
tcttggtggcattaagcgagtatga

SEQ ID NO: 124209 - DNA, 25 bp, Artificial
  Probe
tctgtgatcctcttcctcaacaaga

SEQ ID NO: 124210 - DNA, 25 bp, Artificial
  Probe
agatcatctactcgcacttcacctg

SEQ ID NO: 124211 - DNA, 25 bp, Artificial
  Probe
tgtgatcctcttcctcaacaagaag

SEQ ID NO: 124212 - DNA, 25 bp, Artificial
  Probe
tgagaatgtcacgtccatcatgttc

SEQ ID NO: 124213 - DNA, 25 bp, Artificial
  Probe
cgtttgacctggagaacatcatctt

SEQ ID NO: 124214 - DNA, 25 bp, Artificial
  Probe
gaacatcatcttcaggatggtggat

SEQ ID NO: 124215 - DNA, 25 bp, Artificial
  Probe
gtccatcatgttcttggtggcatta

SEQ ID NO: 124216 - DNA, 25 bp, Artificial
  Probe
tgttcttggtggcattaagcgagta

SEQ ID NO: 124217 - DNA, 25 bp, Artificial
  Probe
ctgaagatgtttgtggatctgaacc

SEQ ID NO: 124218 - DNA, 25 bp, Artificial
  Probe
cctgaagatgtttgtggatctgaac

SEQ ID NO: 124219 - DNA, 25 bp, Artificial
  Probe
aacatcatcttcaggatggtggatg

SEQ ID NO: 124220 - DNA, 25 bp, Artificial
  Probe
ctggagaacatcatcttcaggatgg

SEQ ID NO: 124221 - DNA, 25 bp, Artificial
  Probe
atcatgttcttggtggcattaagcg

SEQ ID NO: 124222 - DNA, 25 bp, Artificial
  Probe
tcctgaagatgtttgtggatctgaa

SEQ ID NO: 124223 - DNA, 25 bp, Artificial
  Probe
cgacaagatcatctactcgcacttc

SEQ ID NO: 124224 - DNA, 25 bp, Artificial
  Probe
gtgatcctcttcctcaacaagaagg

SEQ ID NO: 124225 - DNA, 25 bp, Artificial
  Probe
agaatgtcacgtccatcatgttctt

SEQ ID NO: 124226 - DNA, 25 bp, Artificial
  Probe
ctttgagaatgtcacgtccatcatg

SEQ ID NO: 124227 - DNA, 25 bp, Artificial
  Probe
gagaacatcatcttcaggatggtgg

SEQ ID NO: 124228 - DNA, 25 bp, Artificial
  Probe
ggagaacatcatcttcaggatggtg

SEQ ID NO: 124229 - DNA, 25 bp, Artificial
  Probe
aaggaccttctggaagacaagatcc

SEQ ID NO: 124230 - DNA, 25 bp, Artificial
  Probe
ctcgtctgtgatcctcttcctcaac

SEQ ID NO: 124231 - DNA, 25 bp, Artificial
  Probe
cgtctgtgatcctcttcctcaacaa

SEQ ID NO: 124232 - DNA, 25 bp, Artificial
  Probe
gagaatgtcacgtccatcatgttct

SEQ ID NO: 124233 - DNA, 25 bp, Artificial
  Probe
attaagcgagtatgaccaggtcctg

SEQ ID NO: 124234 - DNA, 25 bp, Artificial
  Probe
cattaagcgagtatgaccaggtcct

SEQ ID NO: 124235 - DNA, 25 bp, Artificial
  Probe
catcatcttcaggatggtggatgtg

SEQ ID NO: 124236 - DNA, 25 bp, Artificial
  Probe
catctaatacctggcactaagaatg

SEQ ID NO: 124237 - DNA, 25 bp, Artificial
  Probe
ccatctaatacctggcactaagaat

SEQ ID NO: 124238 - DNA, 25 bp, Artificial
  Probe
accatctaatacctggcactaagaa

SEQ ID NO: 124239 - DNA, 25 bp, Artificial
  Probe
ctccatcatcctcttcctcaacaag

SEQ ID NO: 124240 - DNA, 25 bp, Artificial
  Probe
tctccatcatcctcttcctcaacaa

SEQ ID NO: 124241 - DNA, 25 bp, Artificial
  Probe
caccatctaatacctggcactaaga

SEQ ID NO: 124242 - DNA, 25 bp, Artificial
  Probe
acaccatctaatacctggcactaag

SEQ ID NO: 124243 - DNA, 25 bp, Artificial
  Probe
atctcgaagccacaccatctaatac

SEQ ID NO: 124244 - DNA, 25 bp, Artificial
  Probe
catctcgaagccacaccatctaata

SEQ ID NO: 124245 - DNA, 25 bp, Artificial
  Probe
cacaccatctaatacctggcactaa

SEQ ID NO: 124246 - DNA, 25 bp, Artificial
  Probe
gtctccatcatcctcttcctcaaca

SEQ ID NO: 124247 - DNA, 25 bp, Artificial
  Probe
atctaatacctggcactaagaatgc

SEQ ID NO: 124248 - DNA, 25 bp, Artificial
  Probe
ggtgaagtcggtgagcattaagaag

SEQ ID NO: 124249 - DNA, 25 bp, Artificial
  Probe
gaaggtgaagtcggtgagcattaag

SEQ ID NO: 124250 - DNA, 25 bp, Artificial
  Probe
catcgtcaacaacaagctcttcttc

SEQ ID NO: 124251 - DNA, 25 bp, Artificial
  Probe
ctaatacctggcactaagaatgctg

SEQ ID NO: 124252 - DNA, 25 bp, Artificial
  Probe
ccatcatcctcttcctcaacaagat

SEQ ID NO: 124253 - DNA, 25 bp, Artificial
  Probe
tctaatacctggcactaagaatgct

SEQ ID NO: 124254 - DNA, 25 bp, Artificial
  Probe
atcgtcaacaacaagctcttcttca

SEQ ID NO: 124255 - DNA, 25 bp, Artificial
  Probe
catcatcctcttcctcaacaagatg

SEQ ID NO: 124256 - DNA, 25 bp, Artificial
  Probe
aggtgaagtcggtgagcattaagaa

SEQ ID NO: 124257 - DNA, 25 bp, Artificial
  Probe
aaggtgaagtcggtgagcattaaga

SEQ ID NO: 124258 - DNA, 25 bp, Artificial
  Probe
agaaggtgaagtcggtgagcattaa

SEQ ID NO: 124259 - DNA, 25 bp, Artificial
  Probe
gtcaacaacaagctcttcttcaacg

SEQ ID NO: 124260 - DNA, 25 bp, Artificial
  Probe
cgtcaacaacaagctcttcttcaac

SEQ ID NO: 124261 - DNA, 25 bp, Artificial
  Probe
cttcaacgtctccatcatcctcttc

SEQ ID NO: 124262 - DNA, 25 bp, Artificial
  Probe
cttcttcaacgtctccatcatcctc

SEQ ID NO: 124263 - DNA, 25 bp, Artificial
  Probe
ctcttcttcaacgtctccatcatcc

SEQ ID NO: 124264 - DNA, 25 bp, Artificial
  Probe
tcgtcaacaacaagctcttcttcaa

SEQ ID NO: 124265 - DNA, 25 bp, Artificial
  Probe
gtgaagtcggtgagcattaagaagc

SEQ ID NO: 124266 - DNA, 25 bp, Artificial
  Probe
aagaggatgggagtgtcagtgatag

SEQ ID NO: 124267 - DNA, 25 bp, Artificial
  Probe
caacaacaagctcttcttcaacgtc

SEQ ID NO: 124268 - DNA, 25 bp, Artificial
  Probe
taatacctggcactaagaatgctgg

SEQ ID NO: 124269 - DNA, 25 bp, Artificial
  Probe
tcttcaacgtctccatcatcctctt

SEQ ID NO: 124270 - DNA, 25 bp, Artificial
  Probe
ttcttcaacgtctccatcatcctct

SEQ ID NO: 124271 - DNA, 25 bp, Artificial
  Probe
tcttcttcaacgtctccatcatcct

SEQ ID NO: 124272 - DNA, 25 bp, Artificial
  Probe
atcatcctcttcctcaacaagatgg

SEQ ID NO: 124273 - DNA, 25 bp, Artificial
  Probe
aacaacaagctcttcttcaacgtct

SEQ ID NO: 124274 - DNA, 25 bp, Artificial
  Probe
tccatcatcctcttcctcaacaaga

SEQ ID NO: 124275 - DNA, 25 bp, Artificial
  Probe
gagaaggtgaagtcggtgagcatta

SEQ ID NO: 124276 - DNA, 25 bp, Artificial
  Probe
caagaggatgggagtgtcagtgata

SEQ ID NO: 124277 - DNA, 25 bp, Artificial
  Probe
ccacaccatctaatacctggcacta

SEQ ID NO: 124278 - DNA, 25 bp, Artificial
  Probe
gctcttcttcaacgtctccatcatc

SEQ ID NO: 124279 - DNA, 25 bp, Artificial
  Probe
tcaacaacaagctcttcttcaacgt

SEQ ID NO: 124280 - DNA, 25 bp, Artificial
  Probe
cgtctccatcatcctcttcctcaac

SEQ ID NO: 124281 - DNA, 25 bp, Artificial
  Probe
ttacagagtgtcatcttcagaatgg

SEQ ID NO: 124282 - DNA, 25 bp, Artificial
  Probe
acttacagagtgtcatcttcagaat

SEQ ID NO: 124283 - DNA, 25 bp, Artificial
  Probe
cttacagagtgtcatcttcagaatg

SEQ ID NO: 124284 - DNA, 25 bp, Artificial
  Probe
gacttacagagtgtcatcttcagaa

SEQ ID NO: 124285 - DNA, 25 bp, Artificial
  Probe
cttagcgaatacgatcaagttcttg

SEQ ID NO: 124286 - DNA, 25 bp, Artificial
  Probe
tacagagtgtcatcttcagaatggt

SEQ ID NO: 124287 - DNA, 25 bp, Artificial
  Probe
ttagcgaatacgatcaagttcttgt

SEQ ID NO: 124288 - DNA, 25 bp, Artificial
  Probe
aatacgatcaagttcttgtggagtc

SEQ ID NO: 124289 - DNA, 25 bp, Artificial
  Probe
gaatacgatcaagttcttgtggagt

SEQ ID NO: 124290 - DNA, 25 bp, Artificial
  Probe
gcttagcgaatacgatcaagttctt

SEQ ID NO: 124291 - DNA, 25 bp, Artificial
  Probe
tagcgaatacgatcaagttcttgtg

SEQ ID NO: 124292 - DNA, 25 bp, Artificial
  Probe
cgacttacagagtgtcatcttcaga

SEQ ID NO: 124293 - DNA, 25 bp, Artificial
  Probe
atacgatcaagttcttgtggagtca

SEQ ID NO: 124294 - DNA, 25 bp, Artificial
  Probe
cgaatacgatcaagttcttgtggag

SEQ ID NO: 124295 - DNA, 25 bp, Artificial
  Probe
acagagtgtcatcttcagaatggtc

SEQ ID NO: 124296 - DNA, 25 bp, Artificial
  Probe
ctgaacctgaaggagtacaatctgg

SEQ ID NO: 124297 - DNA, 25 bp, Artificial
  Probe
atcttcagaatggtcgatgtaggag

SEQ ID NO: 124298 - DNA, 25 bp, Artificial
  Probe
tacgatcaagttcttgtggagtcag

SEQ ID NO: 124299 - DNA, 25 bp, Artificial
  Probe
cttcgacttacagagtgtcatcttc

SEQ ID NO: 124300 - DNA, 25 bp, Artificial
  Probe
cagagtgtcatcttcagaatggtcg

SEQ ID NO: 124301 - DNA, 25 bp, Artificial
  Probe
ttcgacttacagagtgtcatcttca

SEQ ID NO: 124302 - DNA, 25 bp, Artificial
  Probe
gatcaagttcttgtggagtcagaca

SEQ ID NO: 124303 - DNA, 25 bp, Artificial
  Probe
gctgaacctgaaggagtacaatctg

SEQ ID NO: 124304 - DNA, 25 bp, Artificial
  Probe
gagtgtcatcttcagaatggtcgat

SEQ ID NO: 124305 - DNA, 25 bp, Artificial
  Probe
tcgacttacagagtgtcatcttcag

SEQ ID NO: 124306 - DNA, 25 bp, Artificial
  Probe
ccttcgacttacagagtgtcatctt

SEQ ID NO: 124307 - DNA, 25 bp, Artificial
  Probe
gactacttcccagaatatgatggac

SEQ ID NO: 124308 - DNA, 25 bp, Artificial
  Probe
agctgaacctgaaggagtacaatct

SEQ ID NO: 124309 - DNA, 25 bp, Artificial
  Probe
cgatcaagttcttgtggagtcagac

SEQ ID NO: 124310 - DNA, 25 bp, Artificial
  Probe
actacttcccagaatatgatggacc

SEQ ID NO: 124311 - DNA, 25 bp, Artificial
  Probe
gcgaatacgatcaagttcttgtgga

SEQ ID NO: 124312 - DNA, 25 bp, Artificial
  Probe
agcgaatacgatcaagttcttgtgg

SEQ ID NO: 124313 - DNA, 25 bp, Artificial
  Probe
tcttcagaatggtcgatgtaggagg

SEQ ID NO: 124314 - DNA, 25 bp, Artificial
  Probe
tgaacctgaaggagtacaatctggt

SEQ ID NO: 124315 - DNA, 25 bp, Artificial
  Probe
agagtgtcatcttcagaatggtcga

SEQ ID NO: 124316 - DNA, 25 bp, Artificial
  Probe
acgatcaagttcttgtggagtcaga

SEQ ID NO: 124317 - DNA, 25 bp, Artificial
  Probe
ctacttcccagaatatgatggaccc

SEQ ID NO: 124318 - DNA, 25 bp, Artificial
  Probe
ttcttgtggagtcagacaatgagaa

SEQ ID NO: 124319 - DNA, 25 bp, Artificial
  Probe
gtcatcttcagaatggtcgatgtag

SEQ ID NO: 124320 - DNA, 25 bp, Artificial
  Probe
ggtcagagagaagaaaatggataca

SEQ ID NO: 124321 - DNA, 25 bp, Artificial
  Probe
aggtcagagagaagaaaatggatac

SEQ ID NO: 124322 - DNA, 25 bp, Artificial
  Probe
aaaggtcagagagaagaaaatggat

SEQ ID NO: 124323 - DNA, 25 bp, Artificial
  Probe
agaaaatggatacactgctttgaaa

SEQ ID NO: 124324 - DNA, 25 bp, Artificial
  Probe
gagagaagaaaatggatacactgct

SEQ ID NO: 124325 - DNA, 25 bp, Artificial
  Probe
agagagaagaaaatggatacactgc

SEQ ID NO: 124326 - DNA, 25 bp, Artificial
  Probe
ttacaatctccatgaacctaagtgc

SEQ ID NO: 124327 - DNA, 25 bp, Artificial
  Probe
gcttacaatctccatgaacctaagt

SEQ ID NO: 124328 - DNA, 25 bp, Artificial
  Probe
gaggaagaccttcagttattctgtc

SEQ ID NO: 124329 - DNA, 25 bp, Artificial
  Probe
gttatctaacctgttccatgccatg

SEQ ID NO: 124330 - DNA, 25 bp, Artificial
  Probe
gaagaccttcagttattctgtcacc

SEQ ID NO: 124331 - DNA, 25 bp, Artificial
  Probe
ggaagaccttcagttattctgtcac

SEQ ID NO: 124332 - DNA, 25 bp, Artificial
  Probe
cttacaatctccatgaacctaagtg

SEQ ID NO: 124333 - DNA, 25 bp, Artificial
  Probe
acgcttacaatctccatgaacctaa

SEQ ID NO: 124334 - DNA, 25 bp, Artificial
  Probe
tacatacaaactaccacgcttacaa

SEQ ID NO: 124335 - DNA, 25 bp, Artificial
  Probe
ctctacatacaaactaccacgctta

SEQ ID NO: 124336 - DNA, 25 bp, Artificial
  Probe
atacaaactaccacgcttacaatct

SEQ ID NO: 124337 - DNA, 25 bp, Artificial
  Probe
catacaaactaccacgcttacaatc

SEQ ID NO: 124338 - DNA, 25 bp, Artificial
  Probe
aggaagaccttcagttattctgtca

SEQ ID NO: 124339 - DNA, 25 bp, Artificial
  Probe
tctacatacaaactaccacgcttac

SEQ ID NO: 124340 - DNA, 25 bp, Artificial
  Probe
ctacatacaaactaccacgcttaca

SEQ ID NO: 124341 - DNA, 25 bp, Artificial
  Probe
gaggaggaagaccttcagttattct

SEQ ID NO: 124342 - DNA, 25 bp, Artificial
  Probe
agaggaggaagaccttcagttattc

SEQ ID NO: 124343 - DNA, 25 bp, Artificial
  Probe
ctgctttatgagacacctttacttt

SEQ ID NO: 124344 - DNA, 25 bp, Artificial
  Probe
acatacaaactaccacgcttacaat

SEQ ID NO: 124345 - DNA, 25 bp, Artificial
  Probe
tacaaactaccacgcttacaatctc

SEQ ID NO: 124346 - DNA, 25 bp, Artificial
  Probe
aggaggaagaccttcagttattctg

SEQ ID NO: 124347 - DNA, 25 bp, Artificial
  Probe
cagaggaggaagaccttcagttatt

SEQ ID NO: 124348 - DNA, 25 bp, Artificial
  Probe
cgcttacaatctccatgaacctaag

SEQ ID NO: 124349 - DNA, 25 bp, Artificial
  Probe
agacacctttactttatcttggctt

SEQ ID NO: 124350 - DNA, 25 bp, Artificial
  Probe
gacacctttactttatcttggctta

SEQ ID NO: 124351 - DNA, 25 bp, Artificial
  Probe
gagacacctttactttatcttggct

SEQ ID NO: 124352 - DNA, 25 bp, Artificial
  Probe
gctgctttatgagacacctttactt

SEQ ID NO: 124353 - DNA, 25 bp, Artificial
  Probe
ttaagaagtcattggcatcagcact

SEQ ID NO: 124354 - DNA, 25 bp, Artificial
  Probe
tgagacacctttactttatcttggc

SEQ ID NO: 124355 - DNA, 25 bp, Artificial
  Probe
ggaggaagaccttcagttattctgt

SEQ ID NO: 124356 - DNA, 25 bp, Artificial
  Probe
tacaatctccatgaacctaagtgcg

SEQ ID NO: 124357 - DNA, 25 bp, Artificial
  Probe
cacgcttacaatctccatgaaccta

SEQ ID NO: 124358 - DNA, 25 bp, Artificial
  Probe
ctaccacgcttacaatctccatgaa

SEQ ID NO: 124359 - DNA, 25 bp, Artificial
  Probe
gtaattctggactccctaagcaaag

SEQ ID NO: 124360 - DNA, 25 bp, Artificial
  Probe
acacctttactttatcttggcttaa

SEQ ID NO: 124361 - DNA, 25 bp, Artificial
  Probe
catcttggctgtaattctggactcc

SEQ ID NO: 124362 - DNA, 25 bp, Artificial
  Probe
tgctttatgagacacctttacttta

SEQ ID NO: 124363 - DNA, 25 bp, Artificial
  Probe
taccacgcttacaatctccatgaac

SEQ ID NO: 124364 - DNA, 25 bp, Artificial
  Probe
aactaccacgcttacaatctccatg

SEQ ID NO: 124365 - DNA, 25 bp, Artificial
  Probe
atgagacacctttactttatcttgg

SEQ ID NO: 124366 - DNA, 25 bp, Artificial
  Probe
tgtaattctggactccctaagcaaa

SEQ ID NO: 124367 - DNA, 25 bp, Artificial
  Probe
acagaggaggaagaccttcagttat

SEQ ID NO: 124368 - DNA, 25 bp, Artificial
  Probe
aaactaccacgcttacaatctccat

SEQ ID NO: 124369 - DNA, 25 bp, Artificial
  Probe
ctgtaattctggactccctaagcaa

SEQ ID NO: 124370 - DNA, 25 bp, Artificial
  Probe
taagaagtcattggcatcagcactg

SEQ ID NO: 124371 - DNA, 25 bp, Artificial
  Probe
cattggaaggaatagtggttcagag

SEQ ID NO: 124372 - DNA, 25 bp, Artificial
  Probe
gtcattggaaggaatagtggttcag

SEQ ID NO: 124373 - DNA, 25 bp, Artificial
  Probe
ctgtcattggaaggaatagtggttc

SEQ ID NO: 124374 - DNA, 25 bp, Artificial
  Probe
tcattggaaggaatagtggttcaga

SEQ ID NO: 124375 - DNA, 25 bp, Artificial
  Probe
tgtcattggaaggaatagtggttca

SEQ ID NO: 124376 - DNA, 25 bp, Artificial
  Probe
actgtcattggaaggaatagtggtt

SEQ ID NO: 124377 - DNA, 25 bp, Artificial
  Probe
aactgtcattggaaggaatagtggt

SEQ ID NO: 124378 - DNA, 25 bp, Artificial
  Probe
tgggatacctgaaagaaatcttgaa

SEQ ID NO: 124379 - DNA, 25 bp, Artificial
  Probe
gtgggatacctgaaagaaatcttga

SEQ ID NO: 124380 - DNA, 25 bp, Artificial
  Probe
ctgtgggatacctgaaagaaatctt

SEQ ID NO: 124381 - DNA, 25 bp, Artificial
  Probe
agaaatcttgaaagaaatcggcatt

SEQ ID NO: 124382 - DNA, 25 bp, Artificial
  Probe
aagaaatcttgaaagaaatcggcat

SEQ ID NO: 124383 - DNA, 25 bp, Artificial
  Probe
aaagaaatcttgaaagaaatcggca

SEQ ID NO: 124384 - DNA, 25 bp, Artificial
  Probe
aaactgtcattggaaggaatagtgg

SEQ ID NO: 124385 - DNA, 25 bp, Artificial
  Probe
gaaatcttgaaagaaatcggcattc

SEQ ID NO: 124386 - DNA, 25 bp, Artificial
  Probe
tgtgggatacctgaaagaaatcttg

SEQ ID NO: 124387 - DNA, 25 bp, Artificial
  Probe
gaaagaaatcttgaaagaaatcggc

SEQ ID NO: 124388 - DNA, 25 bp, Artificial
  Probe
aacctgtgggatacctgaaagaaat

SEQ ID NO: 124389 - DNA, 25 bp, Artificial
  Probe
gggatacctgaaagaaatcttgaaa

SEQ ID NO: 124390 - DNA, 25 bp, Artificial
  Probe
taaactgtcattggaaggaatagtg

SEQ ID NO: 124391 - DNA, 25 bp, Artificial
  Probe
tcagataaactgtcattggaaggaa

SEQ ID NO: 124392 - DNA, 25 bp, Artificial
  Probe
ctcagataaactgtcattggaagga

SEQ ID NO: 124393 - DNA, 25 bp, Artificial
  Probe
cctgtgggatacctgaaagaaatct

SEQ ID NO: 124394 - DNA, 25 bp, Artificial
  Probe
acctgtgggatacctgaaagaaatc

SEQ ID NO: 124395 - DNA, 25 bp, Artificial
  Probe
cagataaactgtcattggaaggaat

SEQ ID NO: 124396 - DNA, 25 bp, Artificial
  Probe
agataaactgtcattggaaggaata

SEQ ID NO: 124397 - DNA, 25 bp, Artificial
  Probe
tgaaagaaatcttgaaagaaatcgg

SEQ ID NO: 124398 - DNA, 25 bp, Artificial
  Probe
tcctcagataaactgtcattggaag

SEQ ID NO: 124399 - DNA, 25 bp, Artificial
  Probe
ctcctcagataaactgtcattggaa

SEQ ID NO: 124400 - DNA, 25 bp, Artificial
  Probe
gataaactgtcattggaaggaatag

SEQ ID NO: 124401 - DNA, 25 bp, Artificial
  Probe
cctcagataaactgtcattggaagg

SEQ ID NO: 124402 - DNA, 25 bp, Artificial
  Probe
ataaactgtcattggaaggaatagt

SEQ ID NO: 124403 - DNA, 25 bp, Artificial
  Probe
caacctgtgggatacctgaaagaaa

SEQ ID NO: 124404 - DNA, 25 bp, Artificial
  Probe
ggatacctgaaagaaatcttgaaag

SEQ ID NO: 124405 - DNA, 25 bp, Artificial
  Probe
agagtacaggcattaccaaacagag

SEQ ID NO: 124406 - DNA, 25 bp, Artificial
  Probe
ccattcctcagtaaactgttaaagc

SEQ ID NO: 124407 - DNA, 25 bp, Artificial
  Probe
gccattcctcagtaaactgttaaag

SEQ ID NO: 124408 - DNA, 25 bp, Artificial
  Probe
tgccattcctcagtaaactgttaaa

SEQ ID NO: 124409 - DNA, 25 bp, Artificial
  Probe
ctgccattcctcagtaaactgttaa

SEQ ID NO: 124410 - DNA, 25 bp, Artificial
  Probe
cagagtacaggcattaccaaacaga

SEQ ID NO: 124411 - DNA, 25 bp, Artificial
  Probe
aactacatgaaactaaagagattgc

SEQ ID NO: 124412 - DNA, 25 bp, Artificial
  Probe
ggcattaccaaacagaggagaagag

SEQ ID NO: 124413 - DNA, 25 bp, Artificial
  Probe
tacaggcattaccaaacagaggaga

SEQ ID NO: 124414 - DNA, 25 bp, Artificial
  Probe
attcctcagtaaactgttaaagctg

SEQ ID NO: 124415 - DNA, 25 bp, Artificial
  Probe
cattcctcagtaaactgttaaagct

SEQ ID NO: 124416 - DNA, 25 bp, Artificial
  Probe
cagcctctcaatatactcctacctc

SEQ ID NO: 124417 - DNA, 25 bp, Artificial
  Probe
cttgttgtatccttcactagacctg

SEQ ID NO: 124418 - DNA, 25 bp, Artificial
  Probe
ttgcttgttgtatccttcactagac

SEQ ID NO: 124419 - DNA, 25 bp, Artificial
  Probe
acttgacacttacctacagtagaag

SEQ ID NO: 124420 - DNA, 25 bp, Artificial
  Probe
cttgacacttacctacagtagaagc

SEQ ID NO: 124421 - DNA, 25 bp, Artificial
  Probe
agcctctcaatatactcctacctcc

SEQ ID NO: 124422 - DNA, 25 bp, Artificial
  Probe
aacttgacacttacctacagtagaa

SEQ ID NO: 124423 - DNA, 25 bp, Artificial
  Probe
ttgacacttacctacagtagaagca

SEQ ID NO: 124424 - DNA, 25 bp, Artificial
  Probe
gcttgttgtatccttcactagacct

SEQ ID NO: 124425 - DNA, 25 bp, Artificial
  Probe
gacacttacctacagtagaagcact

SEQ ID NO: 124426 - DNA, 25 bp, Artificial
  Probe
gagcagcctctcaatatactcctac

SEQ ID NO: 124427 - DNA, 25 bp, Artificial
  Probe
ttgttgtatccttcactagacctgc

SEQ ID NO: 124428 - DNA, 25 bp, Artificial
  Probe
tgcttgttgtatccttcactagacc

SEQ ID NO: 124429 - DNA, 25 bp, Artificial
  Probe
tgacacttacctacagtagaagcac

SEQ ID NO: 124430 - DNA, 25 bp, Artificial
  Probe
tatccttcactagacctgcaatgta

SEQ ID NO: 124431 - DNA, 25 bp, Artificial
  Probe
ttcactagacctgcaatgtagaatt

SEQ ID NO: 124432 - DNA, 25 bp, Artificial
  Probe
cttcactagacctgcaatgtagaat

SEQ ID NO: 124433 - DNA, 25 bp, Artificial
  Probe
taaattaggctctttcaaatggtgc

SEQ ID NO: 124434 - DNA, 25 bp, Artificial
  Probe
gcagcctctcaatatactcctacct

SEQ ID NO: 124435 - DNA, 25 bp, Artificial
  Probe
agcagcctctcaatatactcctacc

SEQ ID NO: 124436 - DNA, 25 bp, Artificial
  Probe
actcagtattccaaatgtgtgttca

SEQ ID NO: 124437 - DNA, 25 bp, Artificial
  Probe
ctcagtattccaaatgtgtgttcat

SEQ ID NO: 124438 - DNA, 25 bp, Artificial
  Probe
aatgtagaattgttcaaagcctgtc

SEQ ID NO: 124439 - DNA, 25 bp, Artificial
  Probe
gtgagaactgggcaaatgttattaa

SEQ ID NO: 124440 - DNA, 25 bp, Artificial
  Probe
tttgcttgttgtatccttcactaga

SEQ ID NO: 124441 - DNA, 25 bp, Artificial
  Probe
tgagaactgggcaaatgttattaag

SEQ ID NO: 124442 - DNA, 25 bp, Artificial
  Probe
acttgccatttgtgtataacctgag

SEQ ID NO: 124443 - DNA, 25 bp, Artificial
  Probe
atatttgcttgttgtatccttcact

SEQ ID NO: 124444 - DNA, 25 bp, Artificial
  Probe
atttgcttgttgtatccttcactag

SEQ ID NO: 124445 - DNA, 25 bp, Artificial
  Probe
atgtagaattgttcaaagcctgtca

SEQ ID NO: 124446 - DNA, 25 bp, Artificial
  Probe
gagaactgggcaaatgttattaagt

SEQ ID NO: 124447 - DNA, 25 bp, Artificial
  Probe
tttgaaagagaagaattgtcagcag

SEQ ID NO: 124448 - DNA, 25 bp, Artificial
  Probe
tagaattgttcaaagcctgtcagag

SEQ ID NO: 124449 - DNA, 25 bp, Artificial
  Probe
tgctctttctcagttatctacttga

SEQ ID NO: 124450 - DNA, 25 bp, Artificial
  Probe
actaaattaggctctttcaaatggt

SEQ ID NO: 124451 - DNA, 25 bp, Artificial
  Probe
gtcactcactcagtattccaaatgt

SEQ ID NO: 124452 - DNA, 25 bp, Artificial
  Probe
gtagaattgttcaaagcctgtcaga

SEQ ID NO: 124453 - DNA, 25 bp, Artificial
  Probe
ggtgagaactgggcaaatgttatta

SEQ ID NO: 124454 - DNA, 25 bp, Artificial
  Probe
atccttcactagacctgcaatgtag

SEQ ID NO: 124455 - DNA, 25 bp, Artificial
  Probe
aatgtgtgttcatggatgcagatac

SEQ ID NO: 124456 - DNA, 25 bp, Artificial
  Probe
ttgtatccttcactagacctgcaat

SEQ ID NO: 124457 - DNA, 25 bp, Artificial
  Probe
tatttgcttgttgtatccttcacta

SEQ ID NO: 124458 - DNA, 25 bp, Artificial
  Probe
ctaaattaggctctttcaaatggtg

SEQ ID NO: 124459 - DNA, 25 bp, Artificial
  Probe
tgtagaattgttcaaagcctgtcag

SEQ ID NO: 124460 - DNA, 25 bp, Artificial
  Probe
aacaaggtatgagattctccaatat

SEQ ID NO: 124461 - DNA, 25 bp, Artificial
  Probe
acttactggtctaacttcctacact

SEQ ID NO: 124462 - DNA, 25 bp, Artificial
  Probe
ttactggtctaacttcctacactac

SEQ ID NO: 124463 - DNA, 25 bp, Artificial
  Probe
cttactggtctaacttcctacacta

SEQ ID NO: 124464 - DNA, 25 bp, Artificial
  Probe
gacttactggtctaacttcctacac

SEQ ID NO: 124465 - DNA, 25 bp, Artificial
  Probe
gatccagaattgtacttcacaggta

SEQ ID NO: 124466 - DNA, 25 bp, Artificial
  Probe
ctgaagtgctgaagaggtatctgaa

SEQ ID NO: 124467 - DNA, 25 bp, Artificial
  Probe
atccagaattgtacttcacaggtat

SEQ ID NO: 124468 - DNA, 25 bp, Artificial
  Probe
tccagaattgtacttcacaggtata

SEQ ID NO: 124469 - DNA, 25 bp, Artificial
  Probe
tgaagtgctgaagaggtatctgaac

SEQ ID NO: 124470 - DNA, 25 bp, Artificial
  Probe
tactggtctaacttcctacactacc

SEQ ID NO: 124471 - DNA, 25 bp, Artificial
  Probe
gtagtacattaggagctggcttcta

SEQ ID NO: 124472 - DNA, 25 bp, Artificial
  Probe
tgtcagaacttacctggaagaagag

SEQ ID NO: 124473 - DNA, 25 bp, Artificial
  Probe
tagtacattaggagctggcttctac

SEQ ID NO: 124474 - DNA, 25 bp, Artificial
  Probe
tcacaggtatatagacttactggtc

SEQ ID NO: 124475 - DNA, 25 bp, Artificial
  Probe
gtgtcagaacttacctggaagaaga

SEQ ID NO: 124476 - DNA, 25 bp, Artificial
  Probe
tttataggagaggaaggaaacagtg

SEQ ID NO: 124477 - DNA, 25 bp, Artificial
  Probe
ttcacaggtatatagacttactggt

SEQ ID NO: 124478 - DNA, 25 bp, Artificial
  Probe
ccagaattgtacttcacaggtatat

SEQ ID NO: 124479 - DNA, 25 bp, Artificial
  Probe
atttataggagaggaaggaaacagt

SEQ ID NO: 124480 - DNA, 25 bp, Artificial
  Probe
ttataggagaggaaggaaacagtgg

SEQ ID NO: 124481 - DNA, 25 bp, Artificial
  Probe
cttcacaggtatatagacttactgg

SEQ ID NO: 124482 - DNA, 25 bp, Artificial
  Probe
gatgctgaagtgctgaagaggtatc

SEQ ID NO: 124483 - DNA, 25 bp, Artificial
  Probe
cgatccagaattgtacttcacaggt

SEQ ID NO: 124484 - DNA, 25 bp, Artificial
  Probe
gtcagaacttacctggaagaagagc

SEQ ID NO: 124485 - DNA, 25 bp, Artificial
  Probe
acactaatttataggagaggaagga

SEQ ID NO: 124486 - DNA, 25 bp, Artificial
  Probe
ctacttacagttacaggacctgctt

SEQ ID NO: 124487 - DNA, 25 bp, Artificial
  Probe
aagctacttacagttacaggacctg

SEQ ID NO: 124488 - DNA, 25 bp, Artificial
  Probe
agatgctgaagtgctgaagaggtat

SEQ ID NO: 124489 - DNA, 25 bp, Artificial
  Probe
aatttataggagaggaaggaaacag

SEQ ID NO: 124490 - DNA, 25 bp, Artificial
  Probe
gacactaatttataggagaggaagg

SEQ ID NO: 124491 - DNA, 25 bp, Artificial
  Probe
gtacattaggagctggcttctacac

SEQ ID NO: 124492 - DNA, 25 bp, Artificial
  Probe
agtacattaggagctggcttctaca

SEQ ID NO: 124493 - DNA, 25 bp, Artificial
  Probe
tacttacagttacaggacctgcttg

SEQ ID NO: 124494 - DNA, 25 bp, Artificial
  Probe
atgctgaagtgctgaagaggtatct

SEQ ID NO: 124495 - DNA, 25 bp, Artificial
  Probe
gatctctgatttctttagacggcac

SEQ ID NO: 124496 - DNA, 25 bp, Artificial
  Probe
acttcacaggtatatagacttactg

SEQ ID NO: 124497 - DNA, 25 bp, Artificial
  Probe
cccagagctgaatgacactaattta

SEQ ID NO: 124498 - DNA, 25 bp, Artificial
  Probe
cttacagttacaggacctgcttgat

SEQ ID NO: 124499 - DNA, 25 bp, Artificial
  Probe
ggtgtcagaacttacctggaagaag

SEQ ID NO: 124500 - DNA, 25 bp, Artificial
  Probe
gaacttacctggaagaagagctgac

SEQ ID NO: 124501 - DNA, 25 bp, Artificial
  Probe
agaacttacctggaagaagagctga

SEQ ID NO: 124502 - DNA, 25 bp, Artificial
  Probe
gaagtgctgaagaggtatctgaacc

SEQ ID NO: 124503 - DNA, 25 bp, Artificial
  Probe
ccgatccagaattgtacttcacagg

SEQ ID NO: 124504 - DNA, 25 bp, Artificial
  Probe
ccagagctgaatgacactaatttat

SEQ ID NO: 124505 - DNA, 25 bp, Artificial
  Probe
tacattaggagctggcttctacaca

SEQ ID NO: 124506 - DNA, 25 bp, Artificial
  Probe
ttcacctaacgagactctcactatg

SEQ ID NO: 124507 - DNA, 25 bp, Artificial
  Probe
gttatgtatggttactaatgcagcg

SEQ ID NO: 124508 - DNA, 25 bp, Artificial
  Probe
acttgttatgtatggttactaatgc

SEQ ID NO: 124509 - DNA, 25 bp, Artificial
  Probe
tataaacatcaaccaaagcaaaggc

SEQ ID NO: 124510 - DNA, 25 bp, Artificial
  Probe
tgttatgtatggttactaatgcagc

SEQ ID NO: 124511 - DNA, 25 bp, Artificial
  Probe
cctaacgagactctcactatgtcaa

SEQ ID NO: 124512 - DNA, 25 bp, Artificial
  Probe
ttatgtatggttactaatgcagcgg

SEQ ID NO: 124513 - DNA, 25 bp, Artificial
  Probe
cactttctaggacactgacttcata

SEQ ID NO: 124514 - DNA, 25 bp, Artificial
  Probe
tgtcaggtgagagtttatacttgtt

SEQ ID NO: 124515 - DNA, 25 bp, Artificial
  Probe
tttgatgtcaggtgagagtttatac

SEQ ID NO: 124516 - DNA, 25 bp, Artificial
  Probe
actttctaggacactgacttcataa

SEQ ID NO: 124517 - DNA, 25 bp, Artificial
  Probe
atgtcaggtgagagtttatacttgt

SEQ ID NO: 124518 - DNA, 25 bp, Artificial
  Probe
tcacctaacgagactctcactatgt

SEQ ID NO: 124519 - DNA, 25 bp, Artificial
  Probe
tgatgtcaggtgagagtttatactt

SEQ ID NO: 124520 - DNA, 25 bp, Artificial
  Probe
ttgatgtcaggtgagagtttatact

SEQ ID NO: 124521 - DNA, 25 bp, Artificial
  Probe
cacctaacgagactctcactatgtc

SEQ ID NO: 124522 - DNA, 25 bp, Artificial
  Probe
gctgactgaagtttgatatagttgt

SEQ ID NO: 124523 - DNA, 25 bp, Artificial
  Probe
gatgtcaggtgagagtttatacttg

SEQ ID NO: 124524 - DNA, 25 bp, Artificial
  Probe
aatttgatgtcaggtgagagtttat

SEQ ID NO: 124525 - DNA, 25 bp, Artificial
  Probe
tttaattcacagaagggtttgttcc

SEQ ID NO: 124526 - DNA, 25 bp, Artificial
  Probe
aggacactgacttcataaagatgtt

SEQ ID NO: 124527 - DNA, 25 bp, Artificial
  Probe
ttctaggacactgacttcataaaga

SEQ ID NO: 124528 - DNA, 25 bp, Artificial
  Probe
acctaacgagactctcactatgtca

SEQ ID NO: 124529 - DNA, 25 bp, Artificial
  Probe
ctaggacactgacttcataaagatg

SEQ ID NO: 124530 - DNA, 25 bp, Artificial
  Probe
taggacactgacttcataaagatgt

SEQ ID NO: 124531 - DNA, 25 bp, Artificial
  Probe
tctaggacactgacttcataaagat

SEQ ID NO: 124532 - DNA, 25 bp, Artificial
  Probe
ataaacatcaaccaaagcaaaggca

SEQ ID NO: 124533 - DNA, 25 bp, Artificial
  Probe
ctttctaggacactgacttcataaa

SEQ ID NO: 124534 - DNA, 25 bp, Artificial
  Probe
tttctaggacactgacttcataaag

SEQ ID NO: 124535 - DNA, 25 bp, Artificial
  Probe
ggacactgacttcataaagatgtta

SEQ ID NO: 124536 - DNA, 25 bp, Artificial
  Probe
atttgatgtcaggtgagagtttata

SEQ ID NO: 124537 - DNA, 25 bp, Artificial
  Probe
aaagatttcacctaacgagactctc

SEQ ID NO: 124538 - DNA, 25 bp, Artificial
  Probe
tttcacctaacgagactctcactat

SEQ ID NO: 124539 - DNA, 25 bp, Artificial
  Probe
atttcacctaacgagactctcacta

SEQ ID NO: 124540 - DNA, 25 bp, Artificial
  Probe
ggtgtagctgactgaagtttgatat

SEQ ID NO: 124541 - DNA, 25 bp, Artificial
  Probe
gtcaggtgagagtttatacttgtta

SEQ ID NO: 124542 - DNA, 25 bp, Artificial
  Probe
ttataaacatcaaccaaagcaaagg

SEQ ID NO: 124543 - DNA, 25 bp, Artificial
  Probe
ctaacgagactctcactatgtcaaa

SEQ ID NO: 124544 - DNA, 25 bp, Artificial
  Probe
aagatttcacctaacgagactctca

SEQ ID NO: 124545 - DNA, 25 bp, Artificial
  Probe
gaaatttgatgtcaggtgagagttt

SEQ ID NO: 124546 - DNA, 25 bp, Artificial
  Probe
ctgcttcagtctgctgtaacctaac

SEQ ID NO: 124547 - DNA, 25 bp, Artificial
  Probe
ttgttatgtatggttactaatgcag

SEQ ID NO: 124548 - DNA, 25 bp, Artificial
  Probe
cttgttatgtatggttactaatgca

SEQ ID NO: 124549 - DNA, 25 bp, Artificial
  Probe
gcactttctaggacactgacttcat

SEQ ID NO: 124550 - DNA, 25 bp, Artificial
  Probe
gtgtagctgactgaagtttgatata

SEQ ID NO: 124551 - DNA, 25 bp, Artificial
  Probe
gaagacacaacagcagaagatgaag

SEQ ID NO: 124552 - DNA, 25 bp, Artificial
  Probe
ttccagaacaaaccaaatgactaac

SEQ ID NO: 124553 - DNA, 25 bp, Artificial
  Probe
cagaacaaaccaaatgactaaccag

SEQ ID NO: 124554 - DNA, 25 bp, Artificial
  Probe
cttccagaacaaaccaaatgactaa

SEQ ID NO: 124555 - DNA, 25 bp, Artificial
  Probe
tcttccagaacaaaccaaatgacta

SEQ ID NO: 124556 - DNA, 25 bp, Artificial
  Probe
agaacaaaccaaatgactaaccagg

SEQ ID NO: 124557 - DNA, 25 bp, Artificial
  Probe
tccagaacaaaccaaatgactaacc

SEQ ID NO: 124558 - DNA, 25 bp, Artificial
  Probe
atcattgaggaggaaataacaaacc

SEQ ID NO: 124559 - DNA, 25 bp, Artificial
  Probe
ccatcattgaggaggaaataacaaa

SEQ ID NO: 124560 - DNA, 25 bp, Artificial
  Probe
cccatcattgaggaggaaataacaa

SEQ ID NO: 124561 - DNA, 25 bp, Artificial
  Probe
cacccatcattgaggaggaaataac

SEQ ID NO: 124562 - DNA, 25 bp, Artificial
  Probe
ggaagacacaacagcagaagatgaa

SEQ ID NO: 124563 - DNA, 25 bp, Artificial
  Probe
ccagaacaaaccaaatgactaacca

SEQ ID NO: 124564 - DNA, 25 bp, Artificial
  Probe
attgaggaggaaataacaaacccag

SEQ ID NO: 124565 - DNA, 25 bp, Artificial
  Probe
tcattgaggaggaaataacaaaccc

SEQ ID NO: 124566 - DNA, 25 bp, Artificial
  Probe
acccatcattgaggaggaaataaca

SEQ ID NO: 124567 - DNA, 25 bp, Artificial
  Probe
cattgaggaggaaataacaaaccca

SEQ ID NO: 124568 - DNA, 25 bp, Artificial
  Probe
ctaaatctaatggaggagggtggtc

SEQ ID NO: 124569 - DNA, 25 bp, Artificial
  Probe
agtgaagttgtctcatttggaagtc

SEQ ID NO: 124570 - DNA, 25 bp, Artificial
  Probe
cagtgaagttgtctcatttggaagt

SEQ ID NO: 124571 - DNA, 25 bp, Artificial
  Probe
catcattgaggaggaaataacaaac

SEQ ID NO: 124572 - DNA, 25 bp, Artificial
  Probe
aacagtgaagttgtctcatttggaa

SEQ ID NO: 124573 - DNA, 25 bp, Artificial
  Probe
ccacccatcattgaggaggaaataa

SEQ ID NO: 124574 - DNA, 25 bp, Artificial
  Probe
acagtgaagttgtctcatttggaag

SEQ ID NO: 124575 - DNA, 25 bp, Artificial
  Probe
cgtaaatacttggaatttggtctcc

SEQ ID NO: 124576 - DNA, 25 bp, Artificial
  Probe
aagacacaacagcagaagatgaagc

SEQ ID NO: 124577 - DNA, 25 bp, Artificial
  Probe
gtaaatacttggaatttggtctccc

SEQ ID NO: 124578 - DNA, 25 bp, Artificial
  Probe
gtgaagttgtctcatttggaagtcc

SEQ ID NO: 124579 - DNA, 25 bp, Artificial
  Probe
atgaagactctcctaaatctaatgg

SEQ ID NO: 124580 - DNA, 25 bp, Artificial
  Probe
tgaagactctcctaaatctaatgga

SEQ ID NO: 124581 - DNA, 25 bp, Artificial
  Probe
gaaataacaaacccagcagcagatg

SEQ ID NO: 124582 - DNA, 25 bp, Artificial
  Probe
aacaaaccaaatgactaaccaggtc

SEQ ID NO: 124583 - DNA, 25 bp, Artificial
  Probe
gaacaaaccaaatgactaaccaggt

SEQ ID NO: 124584 - DNA, 25 bp, Artificial
  Probe
aaataacaaacccagcagcagatga

SEQ ID NO: 124585 - DNA, 25 bp, Artificial
  Probe
tggtcctttacaaacttcttccaga

SEQ ID NO: 124586 - DNA, 25 bp, Artificial
  Probe
gtggtcctttacaaacttcttccag

SEQ ID NO: 124587 - DNA, 25 bp, Artificial
  Probe
gtcctttacaaacttcttccagaac

SEQ ID NO: 124588 - DNA, 25 bp, Artificial
  Probe
aaacttcttccagaacaaaccaaat

SEQ ID NO: 124589 - DNA, 25 bp, Artificial
  Probe
ttacaaacttcttccagaacaaacc

SEQ ID NO: 124590 - DNA, 25 bp, Artificial
  Probe
tcctttacaaacttcttccagaaca

SEQ ID NO: 124591 - DNA, 25 bp, Artificial
  Probe
aacttcttccagaacaaaccaaatg

SEQ ID NO: 124592 - DNA, 25 bp, Artificial
  Probe
cctttacaaacttcttccagaacaa

SEQ ID NO: 124593 - DNA, 25 bp, Artificial
  Probe
caaacttcttccagaacaaaccaaa

SEQ ID NO: 124594 - DNA, 25 bp, Artificial
  Probe
tacaaacttcttccagaacaaacca

SEQ ID NO: 124595 - DNA, 25 bp, Artificial
  Probe
cttcttccagaacaaaccaaatgac

SEQ ID NO: 124596 - DNA, 25 bp, Artificial
  Probe
tgttattgtcattgttgttgttggt

SEQ ID NO: 124597 - DNA, 25 bp, Artificial
  Probe
ccaacatctcttctaactctctacc

SEQ ID NO: 124598 - DNA, 25 bp, Artificial
  Probe
ccttccaacatctcttctaactctc

SEQ ID NO: 124599 - DNA, 25 bp, Artificial
  Probe
cttccaacatctcttctaactctct

SEQ ID NO: 124600 - DNA, 25 bp, Artificial
  Probe
ttgttattgtcattgttgttgttgg

SEQ ID NO: 124601 - DNA, 25 bp, Artificial
  Probe
tccaacatctcttctaactctctac

SEQ ID NO: 124602 - DNA, 25 bp, Artificial
  Probe
tgtcattgttgttgttggtattact

SEQ ID NO: 124603 - DNA, 25 bp, Artificial
  Probe
caacatctcttctaactctctacct

SEQ ID NO: 124604 - DNA, 25 bp, Artificial
  Probe
cattgaagtatgttccagagcagta

SEQ ID NO: 124605 - DNA, 25 bp, Artificial
  Probe
gttattgtcattgttgttgttggta

SEQ ID NO: 124606 - DNA, 25 bp, Artificial
  Probe
ttgtcattgttgttgttggtattac

SEQ ID NO: 124607 - DNA, 25 bp, Artificial
  Probe
acaacaataagatcaccaacattcc

SEQ ID NO: 124608 - DNA, 25 bp, Artificial
  Probe
ttccaacatctcttctaactctcta

SEQ ID NO: 124609 - DNA, 25 bp, Artificial
  Probe
acctagacaacaataagatcaccaa

SEQ ID NO: 124610 - DNA, 25 bp, Artificial
  Probe
aacaataagatcaccaacattcctg

SEQ ID NO: 124611 - DNA, 25 bp, Artificial
  Probe
caacaataagatcaccaacattcct

SEQ ID NO: 124612 - DNA, 25 bp, Artificial
  Probe
cattgttgttgttggtattacttca

SEQ ID NO: 124613 - DNA, 25 bp, Artificial
  Probe
gtcattgttgttgttggtattactt

SEQ ID NO: 124614 - DNA, 25 bp, Artificial
  Probe
cctagacaacaataagatcaccaac

SEQ ID NO: 124615 - DNA, 25 bp, Artificial
  Probe
tgttgttgttggtattacttcatgg

SEQ ID NO: 124616 - DNA, 25 bp, Artificial
  Probe
attgaagtatgttccagagcagtac

SEQ ID NO: 124617 - DNA, 25 bp, Artificial
  Probe
gttgttgttggtattacttcatgga

SEQ ID NO: 124618 - DNA, 25 bp, Artificial
  Probe
aacctcctctcattctaatacattg

SEQ ID NO: 124619 - DNA, 25 bp, Artificial
  Probe
agacaacaataagatcaccaacatt

SEQ ID NO: 124620 - DNA, 25 bp, Artificial
  Probe
tacctagacaacaataagatcacca

SEQ ID NO: 124621 - DNA, 25 bp, Artificial
  Probe
acctcctctcattctaatacattga

SEQ ID NO: 124622 - DNA, 25 bp, Artificial
  Probe
ctagacaacaataagatcaccaaca

SEQ ID NO: 124623 - DNA, 25 bp, Artificial
  Probe
tcattgttgttgttggtattacttc

SEQ ID NO: 124624 - DNA, 25 bp, Artificial
  Probe
gccttccaacatctcttctaactct

SEQ ID NO: 124625 - DNA, 25 bp, Artificial
  Probe
gacaacaataagatcaccaacattc

SEQ ID NO: 124626 - DNA, 25 bp, Artificial
  Probe
acaataagatcaccaacattcctga

SEQ ID NO: 124627 - DNA, 25 bp, Artificial
  Probe
ctacctagacaacaataagatcacc

SEQ ID NO: 124628 - DNA, 25 bp, Artificial
  Probe
acatctcttctaactctctacctag

SEQ ID NO: 124629 - DNA, 25 bp, Artificial
  Probe
attgtcattgttgttgttggtatta

SEQ ID NO: 124630 - DNA, 25 bp, Artificial
  Probe
tattgtcattgttgttgttggtatt

SEQ ID NO: 124631 - DNA, 25 bp, Artificial
  Probe
ttattgtcattgttgttgttggtat

SEQ ID NO: 124632 - DNA, 25 bp, Artificial
  Probe
aacatctcttctaactctctaccta

SEQ ID NO: 124633 - DNA, 25 bp, Artificial
  Probe
tgttgttggtattacttcatggatt

SEQ ID NO: 124634 - DNA, 25 bp, Artificial
  Probe
ttgttgttggtattacttcatggat

SEQ ID NO: 124635 - DNA, 25 bp, Artificial
  Probe
attgttattgtcattgttgttgttg

SEQ ID NO: 124636 - DNA, 25 bp, Artificial
  Probe
cattgttattgtcattgttgttgtt

SEQ ID NO: 124637 - DNA, 25 bp, Artificial
  Probe
tagacaacaataagatcaccaacat

SEQ ID NO: 124638 - DNA, 25 bp, Artificial
  Probe
actctctacctagacaacaataaga

SEQ ID NO: 124639 - DNA, 25 bp, Artificial
  Probe
acattgttattgtcattgttgttgt

SEQ ID NO: 124640 - DNA, 25 bp, Artificial
  Probe
cgatctctcctacaataagctcaag

SEQ ID NO: 124641 - DNA, 25 bp, Artificial
  Probe
aatcatagccaccatagagagactg

SEQ ID NO: 124642 - DNA, 25 bp, Artificial
  Probe
caatcatagccaccatagagagact

SEQ ID NO: 124643 - DNA, 25 bp, Artificial
  Probe
cattcggaagcaatacatactggag

SEQ ID NO: 124644 - DNA, 25 bp, Artificial
  Probe
gaagcaatacatactggaggagtca

SEQ ID NO: 124645 - DNA, 25 bp, Artificial
  Probe
ttactccattcggaagcaatacata

SEQ ID NO: 124646 - DNA, 25 bp, Artificial
  Probe
gattggattacctctcctgattgat

SEQ ID NO: 124647 - DNA, 25 bp, Artificial
  Probe
attcggaagcaatacatactggagg

SEQ ID NO: 124648 - DNA, 25 bp, Artificial
  Probe
tactccattcggaagcaatacatac

SEQ ID NO: 124649 - DNA, 25 bp, Artificial
  Probe
ttggattacctctcctgattgatag

SEQ ID NO: 124650 - DNA, 25 bp, Artificial
  Probe
ctgattggattacctctcctgattg

SEQ ID NO: 124651 - DNA, 25 bp, Artificial
  Probe
tgattggattacctctcctgattga

SEQ ID NO: 124652 - DNA, 25 bp, Artificial
  Probe
aagcaatacatactggaggagtcag

SEQ ID NO: 124653 - DNA, 25 bp, Artificial
  Probe
attggattacctctcctgattgata

SEQ ID NO: 124654 - DNA, 25 bp, Artificial
  Probe
gcaatcatagccaccatagagagac

SEQ ID NO: 124655 - DNA, 25 bp, Artificial
  Probe
tggattacctctcctgattgatagc

SEQ ID NO: 124656 - DNA, 25 bp, Artificial
  Probe
ggaagcaatacatactggaggagtc

SEQ ID NO: 124657 - DNA, 25 bp, Artificial
  Probe
gaaggacttgcagaatacattgttg

SEQ ID NO: 124658 - DNA, 25 bp, Artificial
  Probe
cctgattggattacctctcctgatt

SEQ ID NO: 124659 - DNA, 25 bp, Artificial
  Probe
aaggacttgcagaatacattgttga

SEQ ID NO: 124660 - DNA, 25 bp, Artificial
  Probe
ctccattcggaagcaatacatactg

SEQ ID NO: 124661 - DNA, 25 bp, Artificial
  Probe
actccattcggaagcaatacatact

SEQ ID NO: 124662 - DNA, 25 bp, Artificial
  Probe
aggacttgcagaatacattgttgag

SEQ ID NO: 124663 - DNA, 25 bp, Artificial
  Probe
gacttgcagaatacattgttgagtt

SEQ ID NO: 124664 - DNA, 25 bp, Artificial
  Probe
gtgctctctgttcttgctctgtatc

SEQ ID NO: 124665 - DNA, 25 bp, Artificial
  Probe
ggaaggacttgcagaatacattgtt

SEQ ID NO: 124666 - DNA, 25 bp, Artificial
  Probe
aaggaaggacttgcagaatacattg

SEQ ID NO: 124667 - DNA, 25 bp, Artificial
  Probe
ttgagtctccaggaagaaattaacg

SEQ ID NO: 124668 - DNA, 25 bp, Artificial
  Probe
gactgcctatcttcattcttcgact

SEQ ID NO: 124669 - DNA, 25 bp, Artificial
  Probe
cgaaagtctcagtaaagaatgtgct

SEQ ID NO: 124670 - DNA, 25 bp, Artificial
  Probe
tcttctaccagatactcatttacga

SEQ ID NO: 124671 - DNA, 25 bp, Artificial
  Probe
ttcggaagcaatacatactggagga

SEQ ID NO: 124672 - DNA, 25 bp, Artificial
  Probe
gaacctgattggattacctctcctg

SEQ ID NO: 124673 - DNA, 25 bp, Artificial
  Probe
tttgagtctccaggaagaaattaac

SEQ ID NO: 124674 - DNA, 25 bp, Artificial
  Probe
ttctctgtggaaattgatgaggaag

SEQ ID NO: 124675 - DNA, 25 bp, Artificial
  Probe
aatgcaatcatagccaccatagaga

SEQ ID NO: 124676 - DNA, 25 bp, Artificial
  Probe
agtgctctctgttcttgctctgtat

SEQ ID NO: 124677 - DNA, 25 bp, Artificial
  Probe
atcatagccaccatagagagactgc

SEQ ID NO: 124678 - DNA, 25 bp, Artificial
  Probe
acctgattggattacctctcctgat

SEQ ID NO: 124679 - DNA, 25 bp, Artificial
  Probe
ggacttgcagaatacattgttgagt

SEQ ID NO: 124680 - DNA, 25 bp, Artificial
  Probe
ctcttctaccagatactcatttacg

SEQ ID NO: 124681 - DNA, 25 bp, Artificial
  Probe
ggattacctctcctgattgatagct

SEQ ID NO: 124682 - DNA, 25 bp, Artificial
  Probe
aggaaggacttgcagaatacattgt

SEQ ID NO: 124683 - DNA, 25 bp, Artificial
  Probe
tgagtctccaggaagaaattaacga

SEQ ID NO: 124684 - DNA, 25 bp, Artificial
  Probe
gaaagtctcagtaaagaatgtgctg

SEQ ID NO: 124685 - DNA, 25 bp, Artificial
  Probe
actgcctatcttcattcttcgactg

SEQ ID NO: 124686 - DNA, 25 bp, Artificial
  Probe
ataaccaagtatcttcctcggacac

SEQ ID NO: 124687 - DNA, 25 bp, Artificial
  Probe
tattggatgttggttcttccttcaa

SEQ ID NO: 124688 - DNA, 25 bp, Artificial
  Probe
ttattggatgttggttcttccttca

SEQ ID NO: 124689 - DNA, 25 bp, Artificial
  Probe
gataaccaagtatcttcctcggaca

SEQ ID NO: 124690 - DNA, 25 bp, Artificial
  Probe
cagtggaaggataaccaagtatctt

SEQ ID NO: 124691 - DNA, 25 bp, Artificial
  Probe
ctcagtggaaggataaccaagtatc

SEQ ID NO: 124692 - DNA, 25 bp, Artificial
  Probe
tcagtggaaggataaccaagtatct

SEQ ID NO: 124693 - DNA, 25 bp, Artificial
  Probe
cctactggaaggtattatgtaacca

SEQ ID NO: 124694 - DNA, 25 bp, Artificial
  Probe
taacctatagaatgcttactgtgcg

SEQ ID NO: 124695 - DNA, 25 bp, Artificial
  Probe
attggatgttggttcttccttcaag

SEQ ID NO: 124696 - DNA, 25 bp, Artificial
  Probe
tcctactggaaggtattatgtaacc

SEQ ID NO: 124697 - DNA, 25 bp, Artificial
  Probe
tagggacagaggaatttattggatg

SEQ ID NO: 124698 - DNA, 25 bp, Artificial
  Probe
gcattagggacagaggaatttattg

SEQ ID NO: 124699 - DNA, 25 bp, Artificial
  Probe
cagaggaatttattggatgttggtt

SEQ ID NO: 124700 - DNA, 25 bp, Artificial
  Probe
ggcattagggacagaggaatttatt

SEQ ID NO: 124701 - DNA, 25 bp, Artificial
  Probe
ttaacctatagaatgcttactgtgc

SEQ ID NO: 124702 - DNA, 25 bp, Artificial
  Probe
cctcagtggaaggataaccaagtat

SEQ ID NO: 124703 - DNA, 25 bp, Artificial
  Probe
cattagggacagaggaatttattgg

SEQ ID NO: 124704 - DNA, 25 bp, Artificial
  Probe
ttagggacagaggaatttattggat

SEQ ID NO: 124705 - DNA, 25 bp, Artificial
  Probe
attagggacagaggaatttattgga

SEQ ID NO: 124706 - DNA, 25 bp, Artificial
  Probe
gctgctccaactgctgtataaatat

SEQ ID NO: 124707 - DNA, 25 bp, Artificial
  Probe
actcctactggaaggtattatgtaa

SEQ ID NO: 124708 - DNA, 25 bp, Artificial
  Probe
ttactcctactggaaggtattatgt

SEQ ID NO: 124709 - DNA, 25 bp, Artificial
  Probe
gaggaatttattggatgttggttct

SEQ ID NO: 124710 - DNA, 25 bp, Artificial
  Probe
agaggaatttattggatgttggttc

SEQ ID NO: 124711 - DNA, 25 bp, Artificial
  Probe
ctcctactggaaggtattatgtaac

SEQ ID NO: 124712 - DNA, 25 bp, Artificial
  Probe
gttactcctactggaaggtattatg

SEQ ID NO: 124713 - DNA, 25 bp, Artificial
  Probe
taaccaagtatcttcctcggacact

SEQ ID NO: 124714 - DNA, 25 bp, Artificial
  Probe
agttactcctactggaaggtattat

SEQ ID NO: 124715 - DNA, 25 bp, Artificial
  Probe
ggataaccaagtatcttcctcggac

SEQ ID NO: 124716 - DNA, 25 bp, Artificial
  Probe
aggaatttattggatgttggttctt

SEQ ID NO: 124717 - DNA, 25 bp, Artificial
  Probe
taaccatttctctcttacatcggag

SEQ ID NO: 124718 - DNA, 25 bp, Artificial
  Probe
ggaatttattggatgttggttcttc

SEQ ID NO: 124719 - DNA, 25 bp, Artificial
  Probe
gacagaggaatttattggatgttgg

SEQ ID NO: 124720 - DNA, 25 bp, Artificial
  Probe
ggacagaggaatttattggatgttg

SEQ ID NO: 124721 - DNA, 25 bp, Artificial
  Probe
atcaaacatttattgtgagcatccc

SEQ ID NO: 124722 - DNA, 25 bp, Artificial
  Probe
acagaggaatttattggatgttggt

SEQ ID NO: 124723 - DNA, 25 bp, Artificial
  Probe
caaacatttattgtgagcatcccta

SEQ ID NO: 124724 - DNA, 25 bp, Artificial
  Probe
aacctatagaatgcttactgtgcgt

SEQ ID NO: 124725 - DNA, 25 bp, Artificial
  Probe
gggacagaggaatttattggatgtt

SEQ ID NO: 124726 - DNA, 25 bp, Artificial
  Probe
catcaaacatttattgtgagcatcc

SEQ ID NO: 124727 - DNA, 25 bp, Artificial
  Probe
tcaaacatttattgtgagcatccct

SEQ ID NO: 124728 - DNA, 25 bp, Artificial
  Probe
ctactggaaggtattatgtaaccat

SEQ ID NO: 124729 - DNA, 25 bp, Artificial
  Probe
aaacatttattgtgagcatccctag

SEQ ID NO: 124730 - DNA, 25 bp, Artificial
  Probe
tactcctactggaaggtattatgta

SEQ ID NO: 124731 - DNA, 25 bp, Artificial
  Probe
aagattgttcagttaccctaaagac

SEQ ID NO: 124732 - DNA, 25 bp, Artificial
  Probe
agattgttcagttaccctaaagact

SEQ ID NO: 124733 - DNA, 25 bp, Artificial
  Probe
gattgttcagttaccctaaagactt

SEQ ID NO: 124734 - DNA, 25 bp, Artificial
  Probe
aaagattgttcagttaccctaaaga

SEQ ID NO: 124735 - DNA, 25 bp, Artificial
  Probe
ttgttcagttaccctaaagactttg

SEQ ID NO: 124736 - DNA, 25 bp, Artificial
  Probe
gaaagattgttcagttaccctaaag

SEQ ID NO: 124737 - DNA, 25 bp, Artificial
  Probe
attgttcagttaccctaaagacttt

SEQ ID NO: 124738 - DNA, 25 bp, Artificial
  Probe
gaatcttcagagtgcatatttggag

SEQ ID NO: 124739 - DNA, 25 bp, Artificial
  Probe
agaatcttcagagtgcatatttgga

SEQ ID NO: 124740 - DNA, 25 bp, Artificial
  Probe
aatcttcagagtgcatatttggagg

SEQ ID NO: 124741 - DNA, 25 bp, Artificial
  Probe
aagaatcttcagagtgcatatttgg

SEQ ID NO: 124742 - DNA, 25 bp, Artificial
  Probe
atcttcagagtgcatatttggaggt

SEQ ID NO: 124743 - DNA, 25 bp, Artificial
  Probe
aaagaatcttcagagtgcatatttg

SEQ ID NO: 124744 - DNA, 25 bp, Artificial
  Probe
caaatggggtcatctgcttctcttc

SEQ ID NO: 124745 - DNA, 25 bp, Artificial
  Probe
aaaagaatcttcagagtgcatattt

SEQ ID NO: 124746 - DNA, 25 bp, Artificial
  Probe
cttctaccacaaggactttgcctcc

SEQ ID NO: 124747 - DNA, 25 bp, Artificial
  Probe
aaatggggtcatctgcttctcttcc

SEQ ID NO: 124748 - DNA, 25 bp, Artificial
  Probe
ccaaatggggtcatctgcttctctt

SEQ ID NO: 124749 - DNA, 25 bp, Artificial
  Probe
gaatgttgtcaaggctctgcacttg

SEQ ID NO: 124750 - DNA, 25 bp, Artificial
  Probe
taagaacaaaggagagtatgaggag

SEQ ID NO: 124751 - DNA, 25 bp, Artificial
  Probe
ctaagaacaaaggagagtatgagga

SEQ ID NO: 124752 - DNA, 25 bp, Artificial
  Probe
gatgccattgttaaagaaatcgtca

SEQ ID NO: 124753 - DNA, 25 bp, Artificial
  Probe
cggcaaccaaagattccttaataat

SEQ ID NO: 124754 - DNA, 25 bp, Artificial
  Probe
aagaattatagtgaaagcctccagg

SEQ ID NO: 124755 - DNA, 25 bp, Artificial
  Probe
ccaggatgccattgttaaagaaatc

SEQ ID NO: 124756 - DNA, 25 bp, Artificial
  Probe
gaagaattatagtgaaagcctccag

SEQ ID NO: 124757 - DNA, 25 bp, Artificial
  Probe
tccttaataatcattgatgagctgg

SEQ ID NO: 124758 - DNA, 25 bp, Artificial
  Probe
tcggcaaccaaagattccttaataa

SEQ ID NO: 124759 - DNA, 25 bp, Artificial
  Probe
ggatgccattgttaaagaaatcgtc

SEQ ID NO: 124760 - DNA, 25 bp, Artificial
  Probe
caggatgccattgttaaagaaatcg

SEQ ID NO: 124761 - DNA, 25 bp, Artificial
  Probe
atgccattgttaaagaaatcgtcaa

SEQ ID NO: 124762 - DNA, 25 bp, Artificial
  Probe
aagaacaaaggagagtatgaggagg

SEQ ID NO: 124763 - DNA, 25 bp, Artificial
  Probe
aggatgccattgttaaagaaatcgt

SEQ ID NO: 124764 - DNA, 25 bp, Artificial
  Probe
aacatgacggtctatagctgagtac

SEQ ID NO: 124765 - DNA, 25 bp, Artificial
  Probe
actaagaacaaaggagagtatgagg

SEQ ID NO: 124766 - DNA, 25 bp, Artificial
  Probe
gtcggcaaccaaagattccttaata

SEQ ID NO: 124767 - DNA, 25 bp, Artificial
  Probe
acactaagaacaaaggagagtatga

SEQ ID NO: 124768 - DNA, 25 bp, Artificial
  Probe
cctgactatgctttaccaagtgaaa

SEQ ID NO: 124769 - DNA, 25 bp, Artificial
  Probe
tgaaatgctggaaactgcttctatc

SEQ ID NO: 124770 - DNA, 25 bp, Artificial
  Probe
ctgaaatgctggaaactgcttctat

SEQ ID NO: 124771 - DNA, 25 bp, Artificial
  Probe
cccaggatgccattgttaaagaaat

SEQ ID NO: 124772 - DNA, 25 bp, Artificial
  Probe
cactaagaacaaaggagagtatgag

SEQ ID NO: 124773 - DNA, 25 bp, Artificial
  Probe
tgtaaatgaaatcatctcacgggta

SEQ ID NO: 124774 - DNA, 25 bp, Artificial
  Probe
tttgtaaatgaaatcatctcacggg

SEQ ID NO: 124775 - DNA, 25 bp, Artificial
  Probe
agaatacactaagaacaaaggagag

SEQ ID NO: 124776 - DNA, 25 bp, Artificial
  Probe
aaatgaaatcatctcacgggtaaag

SEQ ID NO: 124777 - DNA, 25 bp, Artificial
  Probe
gctttgtaaatgaaatcatctcacg

SEQ ID NO: 124778 - DNA, 25 bp, Artificial
  Probe
accaacagtgaattgtcttctttaa

SEQ ID NO: 124779 - DNA, 25 bp, Artificial
  Probe
ttgtaaatgaaatcatctcacgggt

SEQ ID NO: 124780 - DNA, 25 bp, Artificial
  Probe
gtaaatgaaatcatctcacgggtaa

SEQ ID NO: 124781 - DNA, 25 bp, Artificial
  Probe
agtcagataccaaccgttaacaatc

SEQ ID NO: 124782 - DNA, 25 bp, Artificial
  Probe
tgaagaatacactaagaacaaagga

SEQ ID NO: 124783 - DNA, 25 bp, Artificial
  Probe
cagtcagataccaaccgttaacaat

SEQ ID NO: 124784 - DNA, 25 bp, Artificial
  Probe
gaatacactaagaacaaaggagagt

SEQ ID NO: 124785 - DNA, 25 bp, Artificial
  Probe
caccaacagtgaattgtcttcttta

SEQ ID NO: 124786 - DNA, 25 bp, Artificial
  Probe
aatcgtcaatatttcctcaggctac

SEQ ID NO: 124787 - DNA, 25 bp, Artificial
  Probe
aatgaaatcatctcacgggtaaagg

SEQ ID NO: 124788 - DNA, 25 bp, Artificial
  Probe
ctttgtaaatgaaatcatctcacgg

SEQ ID NO: 124789 - DNA, 25 bp, Artificial
  Probe
aagaatacactaagaacaaaggaga

SEQ ID NO: 124790 - DNA, 25 bp, Artificial
  Probe
tatagctgagtaccgtttaaatggg

SEQ ID NO: 124791 - DNA, 25 bp, Artificial
  Probe
cagtgtgctgaagtatttagtgata

SEQ ID NO: 124792 - DNA, 25 bp, Artificial
  Probe
aggaagaattatagtgaaagcctcc

SEQ ID NO: 124793 - DNA, 25 bp, Artificial
  Probe
ggaagaattatagtgaaagcctcca

SEQ ID NO: 124794 - DNA, 25 bp, Artificial
  Probe
catgggaggaaagtcaacatacatc

SEQ ID NO: 124795 - DNA, 25 bp, Artificial
  Probe
gagtctatcttctacaaccgctaca

SEQ ID NO: 124796 - DNA, 25 bp, Artificial
  Probe
agtctatcttctacaaccgctacac

SEQ ID NO: 124797 - DNA, 25 bp, Artificial
  Probe
cgagtctatcttctacaaccgctac

SEQ ID NO: 124798 - DNA, 25 bp, Artificial
  Probe
gaacatctactccgcagactactac

SEQ ID NO: 124799 - DNA, 25 bp, Artificial
  Probe
gtctatcttctacaaccgctacacc

SEQ ID NO: 124800 - DNA, 25 bp, Artificial
  Probe
ctatcttctacaaccgctacaccac

SEQ ID NO: 124801 - DNA, 25 bp, Artificial
  Probe
tctatcttctacaaccgctacacca

SEQ ID NO: 124802 - DNA, 25 bp, Artificial
  Probe
acatctactccgcagactactacaa

SEQ ID NO: 124803 - DNA, 25 bp, Artificial
  Probe
aacatctactccgcagactactaca

SEQ ID NO: 124804 - DNA, 25 bp, Artificial
  Probe
ctgatggaaacgatgctatacctat

SEQ ID NO: 124805 - DNA, 25 bp, Artificial
  Probe
tgatggaaacgatgctatacctatc

SEQ ID NO: 124806 - DNA, 25 bp, Artificial
  Probe
gaggaggtcatttactatgtgagag

SEQ ID NO: 124807 - DNA, 25 bp, Artificial
  Probe
ggtcatttactatgtgagagatggt

SEQ ID NO: 124808 - DNA, 25 bp, Artificial
  Probe
aggaggtcatttactatgtgagaga

SEQ ID NO: 124809 - DNA, 25 bp, Artificial
  Probe
aggtcatttactatgtgagagatgg

SEQ ID NO: 124810 - DNA, 25 bp, Artificial
  Probe
tgaggaggtcatttactatgtgaga

SEQ ID NO: 124811 - DNA, 25 bp, Artificial
  Probe
ccgagtctatcttctacaaccgcta

SEQ ID NO: 124812 - DNA, 25 bp, Artificial
  Probe
ggaggtcatttactatgtgagagat

SEQ ID NO: 124813 - DNA, 25 bp, Artificial
  Probe
atctactccgcagactactacaaag

SEQ ID NO: 124814 - DNA, 25 bp, Artificial
  Probe
gataggaagagtttatctcaggcag

SEQ ID NO: 124815 - DNA, 25 bp, Artificial
  Probe
catctactccgcagactactacaaa

SEQ ID NO: 124816 - DNA, 25 bp, Artificial
  Probe
gaggtcatttactatgtgagagatg

SEQ ID NO: 124817 - DNA, 25 bp, Artificial
  Probe
ctaggaacatctactccgcagacta

SEQ ID NO: 124818 - DNA, 25 bp, Artificial
  Probe
gctgatggaaacgatgctataccta

SEQ ID NO: 124819 - DNA, 25 bp, Artificial
  Probe
tatgtgagagatggtaacatccttg

SEQ ID NO: 124820 - DNA, 25 bp, Artificial
  Probe
agactactacaaagctgatggaaac

SEQ ID NO: 124821 - DNA, 25 bp, Artificial
  Probe
ctatgtgagagatggtaacatcctt

SEQ ID NO: 124822 - DNA, 25 bp, Artificial
  Probe
actatgtgagagatggtaacatcct

SEQ ID NO: 124823 - DNA, 25 bp, Artificial
  Probe
gatggaaacgatgctatacctatcc

SEQ ID NO: 124824 - DNA, 25 bp, Artificial
  Probe
ataggaagagtttatctcaggcagc

SEQ ID NO: 124825 - DNA, 25 bp, Artificial
  Probe
ggaacatctactccgcagactacta

SEQ ID NO: 124826 - DNA, 25 bp, Artificial
  Probe
taggaacatctactccgcagactac

SEQ ID NO: 124827 - DNA, 25 bp, Artificial
  Probe
ctactacaaagctgatggaaacgat

SEQ ID NO: 124828 - DNA, 25 bp, Artificial
  Probe
tactatgtgagagatggtaacatcc

SEQ ID NO: 124829 - DNA, 25 bp, Artificial
  Probe
tactacaaagctgatggaaacgatg

SEQ ID NO: 124830 - DNA, 25 bp, Artificial
  Probe
gtcatttactatgtgagagatggta

SEQ ID NO: 124831 - DNA, 25 bp, Artificial
  Probe
gactactacaaagctgatggaaacg

SEQ ID NO: 124832 - DNA, 25 bp, Artificial
  Probe
tatcttctacaaccgctacaccacg

SEQ ID NO: 124833 - DNA, 25 bp, Artificial
  Probe
cagactactacaaagctgatggaaa

SEQ ID NO: 124834 - DNA, 25 bp, Artificial
  Probe
actactacaaagctgatggaaacga

SEQ ID NO: 124835 - DNA, 25 bp, Artificial
  Probe
atggaaacgatgctatacctatccg

SEQ ID NO: 124836 - DNA, 25 bp, Artificial
  Probe
gaaacgatgctatacctatccgctg

SEQ ID NO: 124837 - DNA, 25 bp, Artificial
  Probe
ctctctaggaacatctactccgcag

SEQ ID NO: 124838 - DNA, 25 bp, Artificial
  Probe
ttactatgtgagagatggtaacatc

SEQ ID NO: 124839 - DNA, 25 bp, Artificial
  Probe
atgaggaggtcatttactatgtgag

SEQ ID NO: 124840 - DNA, 25 bp, Artificial
  Probe
actaacacatttcctgctggtagtg

SEQ ID NO: 124841 - DNA, 25 bp, Artificial
  Probe
cactaacacatttcctgctggtagt

SEQ ID NO: 124842 - DNA, 25 bp, Artificial
  Probe
ccactaacacatttcctgctggtag

SEQ ID NO: 124843 - DNA, 25 bp, Artificial
  Probe
ctaacacatttcctgctggtagtgc

SEQ ID NO: 124844 - DNA, 25 bp, Artificial
  Probe
catttcctgctggtagtgccttgta

SEQ ID NO: 124845 - DNA, 25 bp, Artificial
  Probe
taacacatttcctgctggtagtgcc

SEQ ID NO: 124846 - DNA, 25 bp, Artificial
  Probe
gccactaacacatttcctgctggta

SEQ ID NO: 124847 - DNA, 25 bp, Artificial
  Probe
cataatagagacttggcaccattta

SEQ ID NO: 124848 - DNA, 25 bp, Artificial
  Probe
aatagagacttggcaccatttattt

SEQ ID NO: 124849 - DNA, 25 bp, Artificial
  Probe
tagagacttggcaccatttatttat

SEQ ID NO: 124850 - DNA, 25 bp, Artificial
  Probe
atagagacttggcaccatttattta

SEQ ID NO: 124851 - DNA, 25 bp, Artificial
  Probe
taatagagacttggcaccatttatt

SEQ ID NO: 124852 - DNA, 25 bp, Artificial
  Probe
ataatagagacttggcaccatttat

SEQ ID NO: 124853 - DNA, 25 bp, Artificial
  Probe
tcatccttgctgacctagtctagat

SEQ ID NO: 124854 - DNA, 25 bp, Artificial
  Probe
gctcatccttgctgacctagtctag

SEQ ID NO: 124855 - DNA, 25 bp, Artificial
  Probe
accatgaggtataaacaggcgttaa

SEQ ID NO: 124856 - DNA, 25 bp, Artificial
  Probe
aaccatgaggtataaacaggcgtta

SEQ ID NO: 124857 - DNA, 25 bp, Artificial
  Probe
ctcatccttgctgacctagtctaga

SEQ ID NO: 124858 - DNA, 25 bp, Artificial
  Probe
ccatgaggtataaacaggcgttaac

SEQ ID NO: 124859 - DNA, 25 bp, Artificial
  Probe
aaaccatgaggtataaacaggcgtt

SEQ ID NO: 124860 - DNA, 25 bp, Artificial
  Probe
gaagattttaaatggactcgtcacg

SEQ ID NO: 124861 - DNA, 25 bp, Artificial
  Probe
actgaagattttaaatggactcgtc

SEQ ID NO: 124862 - DNA, 25 bp, Artificial
  Probe
aactgaagattttaaatggactcgt

SEQ ID NO: 124863 - DNA, 25 bp, Artificial
  Probe
tgaagattttaaatggactcgtcac

SEQ ID NO: 124864 - DNA, 25 bp, Artificial
  Probe
atccttgctgacctagtctagatgc

SEQ ID NO: 124865 - DNA, 25 bp, Artificial
  Probe
catccttgctgacctagtctagatg

SEQ ID NO: 124866 - DNA, 25 bp, Artificial
  Probe
ctgaagattttaaatggactcgtca

SEQ ID NO: 124867 - DNA, 25 bp, Artificial
  Probe
aagattttaaatggactcgtcacgt

SEQ ID NO: 124868 - DNA, 25 bp, Artificial
  Probe
caaaccatgaggtataaacaggcgt

SEQ ID NO: 124869 - DNA, 25 bp, Artificial
  Probe
gatcatcccacctgaggaagaagag

SEQ ID NO: 124870 - DNA, 25 bp, Artificial
  Probe
taactgaagattttaaatggactcg

SEQ ID NO: 124871 - DNA, 25 bp, Artificial
  Probe
ccaaaccatgaggtataaacaggcg

SEQ ID NO: 124872 - DNA, 25 bp, Artificial
  Probe
cttgctgacctagtctagatgcctg

SEQ ID NO: 124873 - DNA, 25 bp, Artificial
  Probe
gcaaatgcaagaatgggagagtctg

SEQ ID NO: 124874 - DNA, 25 bp, Artificial
  Probe
atcatcccacctgaggaagaagagg

SEQ ID NO: 124875 - DNA, 25 bp, Artificial
  Probe
ggccaaaccatgaggtataaacagg

SEQ ID NO: 124876 - DNA, 25 bp, Artificial
  Probe
gggccaaaccatgaggtataaacag

SEQ ID NO: 124877 - DNA, 25 bp, Artificial
  Probe
ccttgctgacctagtctagatgcct

SEQ ID NO: 124878 - DNA, 25 bp, Artificial
  Probe
tccttgctgacctagtctagatgcc

SEQ ID NO: 124879 - DNA, 25 bp, Artificial
  Probe
caaatgcaagaatgggagagtctgc

SEQ ID NO: 124880 - DNA, 25 bp, Artificial
  Probe
gccaaaccatgaggtataaacaggc

SEQ ID NO: 124881 - DNA, 25 bp, Artificial
  Probe
aaatgcaagaatgggagagtctgct

SEQ ID NO: 124882 - DNA, 25 bp, Artificial
  Probe
ataactgaagattttaaatggactc

SEQ ID NO: 124883 - DNA, 25 bp, Artificial
  Probe
tgcaaatgcaagaatgggagagtct

SEQ ID NO: 124884 - DNA, 25 bp, Artificial
  Probe
tgatcatcccacctgaggaagaaga

SEQ ID NO: 124885 - DNA, 25 bp, Artificial
  Probe
aatgcaagaatgggagagtctgctg

SEQ ID NO: 124886 - DNA, 25 bp, Artificial
  Probe
ggggccaaaccatgaggtataaaca

SEQ ID NO: 124887 - DNA, 25 bp, Artificial
  Probe
tgaagatattgatgaatgtgggact

SEQ ID NO: 124888 - DNA, 25 bp, Artificial
  Probe
gtgaagatattgatgaatgtgggac

SEQ ID NO: 124889 - DNA, 25 bp, Artificial
  Probe
gaagatattgatgaatgtgggactg

SEQ ID NO: 124890 - DNA, 25 bp, Artificial
  Probe
aagatattgatgaatgtgggactgg

SEQ ID NO: 124891 - DNA, 25 bp, Artificial
  Probe
ggtagagtgtgaatttagtgtcctt

SEQ ID NO: 124892 - DNA, 25 bp, Artificial
  Probe
agaggtagagtgtgaatttagtgtc

SEQ ID NO: 124893 - DNA, 25 bp, Artificial
  Probe
cagaggtagagtgtgaatttagtgt

SEQ ID NO: 124894 - DNA, 25 bp, Artificial
  Probe
tgggagatacctgttaaagaatgat

SEQ ID NO: 124895 - DNA, 25 bp, Artificial
  Probe
atgggagatacctgttaaagaatga

SEQ ID NO: 124896 - DNA, 25 bp, Artificial
  Probe
gaggtagagtgtgaatttagtgtcc

SEQ ID NO: 124897 - DNA, 25 bp, Artificial
  Probe
ccagaggtagagtgtgaatttagtg

SEQ ID NO: 124898 - DNA, 25 bp, Artificial
  Probe
tagagtgtgaatttagtgtccttcc

SEQ ID NO: 124899 - DNA, 25 bp, Artificial
  Probe
tgaatttagtgtccttcctgagaac

SEQ ID NO: 124900 - DNA, 25 bp, Artificial
  Probe
gtgaatttagtgtccttcctgagaa

SEQ ID NO: 124901 - DNA, 25 bp, Artificial
  Probe
gtagagtgtgaatttagtgtccttc

SEQ ID NO: 124902 - DNA, 25 bp, Artificial
  Probe
cccagaggtagagtgtgaatttagt

SEQ ID NO: 124903 - DNA, 25 bp, Artificial
  Probe
tgtgaatttagtgtccttcctgaga

SEQ ID NO: 124904 - DNA, 25 bp, Artificial
  Probe
gtgtgaatttagtgtccttcctgag

SEQ ID NO: 124905 - DNA, 25 bp, Artificial
  Probe
gagtgtgaatttagtgtccttcctg

SEQ ID NO: 124906 - DNA, 25 bp, Artificial
  Probe
agagtgtgaatttagtgtccttcct

SEQ ID NO: 124907 - DNA, 25 bp, Artificial
  Probe
gggagatacctgttaaagaatgatt

SEQ ID NO: 124908 - DNA, 25 bp, Artificial
  Probe
gaatttagtgtccttcctgagaacg

SEQ ID NO: 124909 - DNA, 25 bp, Artificial
  Probe
aatttagtgtccttcctgagaacga

SEQ ID NO: 124910 - DNA, 25 bp, Artificial
  Probe
agtgtgaatttagtgtccttcctga

SEQ ID NO: 124911 - DNA, 25 bp, Artificial
  Probe
tcatgggagatacctgttaaagaat

SEQ ID NO: 124912 - DNA, 25 bp, Artificial
  Probe
aatccaagaagctgacacatctgta

SEQ ID NO: 124913 - DNA, 25 bp, Artificial
  Probe
atattgatgaatgtgggactgggag

SEQ ID NO: 124914 - DNA, 25 bp, Artificial
  Probe
gatattgatgaatgtgggactggga

SEQ ID NO: 124915 - DNA, 25 bp, Artificial
  Probe
agatattgatgaatgtgggactggg

SEQ ID NO: 124916 - DNA, 25 bp, Artificial
  Probe
catgggagatacctgttaaagaatg

SEQ ID NO: 124917 - DNA, 25 bp, Artificial
  Probe
atttagtgtccttcctgagaacgag

SEQ ID NO: 124918 - DNA, 25 bp, Artificial
  Probe
aggtagagtgtgaatttagtgtcct

SEQ ID NO: 124919 - DNA, 25 bp, Artificial
  Probe
ctcatgggagatacctgttaaagaa

SEQ ID NO: 124920 - DNA, 25 bp, Artificial
  Probe
gaaaggcagtgagtgagctatattt

SEQ ID NO: 124921 - DNA, 25 bp, Artificial
  Probe
ttagtgtccttcctgagaacgagtg

SEQ ID NO: 124922 - DNA, 25 bp, Artificial
  Probe
agaatccaagaagctgacacatctg

SEQ ID NO: 124923 - DNA, 25 bp, Artificial
  Probe
atccaagaagctgacacatctgtac

SEQ ID NO: 124924 - DNA, 25 bp, Artificial
  Probe
cctcatgggagatacctgttaaaga

SEQ ID NO: 124925 - DNA, 25 bp, Artificial
  Probe
gcccagaggtagagtgtgaatttag

SEQ ID NO: 124926 - DNA, 25 bp, Artificial
  Probe
atgaaaggcagtgagtgagctatat

SEQ ID NO: 124927 - DNA, 25 bp, Artificial
  Probe
tgaaaggcagtgagtgagctatatt

SEQ ID NO: 124928 - DNA, 25 bp, Artificial
  Probe
aatgaaaggcagtgagtgagctata

SEQ ID NO: 124929 - DNA, 25 bp, Artificial
  Probe
cagaatccaagaagctgacacatct

SEQ ID NO: 124930 - DNA, 25 bp, Artificial
  Probe
gaatccaagaagctgacacatctgt

SEQ ID NO: 124931 - DNA, 25 bp, Artificial
  Probe
tgcccagaggtagagtgtgaattta

SEQ ID NO: 124932 - DNA, 25 bp, Artificial
  Probe
cagtatttggcattcagtattgtca

SEQ ID NO: 124933 - DNA, 25 bp, Artificial
  Probe
aatcggaagaacatgaattggcatc

SEQ ID NO: 124934 - DNA, 25 bp, Artificial
  Probe
ctggatacgaatagacacttcctgt

SEQ ID NO: 124935 - DNA, 25 bp, Artificial
  Probe
tggatacgaatagacacttcctgtg

SEQ ID NO: 124936 - DNA, 25 bp, Artificial
  Probe
ttatgaaacgaggtgtaaagaagcc

SEQ ID NO: 124937 - DNA, 25 bp, Artificial
  Probe
tttatgaaacgaggtgtaaagaagc

SEQ ID NO: 124938 - DNA, 25 bp, Artificial
  Probe
tatttggcattcagtattgtcaagg

SEQ ID NO: 124939 - DNA, 25 bp, Artificial
  Probe
agtatttggcattcagtattgtcaa

SEQ ID NO: 124940 - DNA, 25 bp, Artificial
  Probe
gtatttggcattcagtattgtcaag

SEQ ID NO: 124941 - DNA, 25 bp, Artificial
  Probe
attgatgacaaacactggaactctc

SEQ ID NO: 124942 - DNA, 25 bp, Artificial
  Probe
gattgatgacaaacactggaactct

SEQ ID NO: 124943 - DNA, 25 bp, Artificial
  Probe
gaagaacatgaattggcatctgtcc

SEQ ID NO: 124944 - DNA, 25 bp, Artificial
  Probe
ggaagaacatgaattggcatctgtc

SEQ ID NO: 124945 - DNA, 25 bp, Artificial
  Probe
atcggaagaacatgaattggcatct

SEQ ID NO: 124946 - DNA, 25 bp, Artificial
  Probe
tatgaaacgaggtgtaaagaagcca

SEQ ID NO: 124947 - DNA, 25 bp, Artificial
  Probe
gctggatacgaatagacacttcctg

SEQ ID NO: 124948 - DNA, 25 bp, Artificial
  Probe
tcagcaacccttacagtatataagc

SEQ ID NO: 124949 - DNA, 25 bp, Artificial
  Probe
ggattgatgacaaacactggaactc

SEQ ID NO: 124950 - DNA, 25 bp, Artificial
  Probe
tacaccagtatttggcattcagtat

SEQ ID NO: 124951 - DNA, 25 bp, Artificial
  Probe
ccagtatttggcattcagtattgtc

SEQ ID NO: 124952 - DNA, 25 bp, Artificial
  Probe
atttggcattcagtattgtcaaggc

SEQ ID NO: 124953 - DNA, 25 bp, Artificial
  Probe
caccagtatttggcattcagtattg

SEQ ID NO: 124954 - DNA, 25 bp, Artificial
  Probe
accagtatttggcattcagtattgt

SEQ ID NO: 124955 - DNA, 25 bp, Artificial
  Probe
acaccagtatttggcattcagtatt

SEQ ID NO: 124956 - DNA, 25 bp, Artificial
  Probe
aaatcggaagaacatgaattggcat

SEQ ID NO: 124957 - DNA, 25 bp, Artificial
  Probe
ttgatgacaaacactggaactctca

SEQ ID NO: 124958 - DNA, 25 bp, Artificial
  Probe
gcaactctcctgtgaaacaatattt

SEQ ID NO: 124959 - DNA, 25 bp, Artificial
  Probe
gtacaccagtatttggcattcagta

SEQ ID NO: 124960 - DNA, 25 bp, Artificial
  Probe
ttcagcaacccttacagtatataag

SEQ ID NO: 124961 - DNA, 25 bp, Artificial
  Probe
tcggaagaacatgaattggcatctg

SEQ ID NO: 124962 - DNA, 25 bp, Artificial
  Probe
ggcaactctcctgtgaaacaatatt

SEQ ID NO: 124963 - DNA, 25 bp, Artificial
  Probe
atgaaacgaggtgtaaagaagccag

SEQ ID NO: 124964 - DNA, 25 bp, Artificial
  Probe
acttcagaaaacaacaaactcgtag

SEQ ID NO: 124965 - DNA, 25 bp, Artificial
  Probe
gacttcagaaaacaacaaactcgta

SEQ ID NO: 124966 - DNA, 25 bp, Artificial
  Probe
cttcagaaaacaacaaactcgtagg

SEQ ID NO: 124967 - DNA, 25 bp, Artificial
  Probe
tgatgacaaacactggaactctcag

SEQ ID NO: 124968 - DNA, 25 bp, Artificial
  Probe
gggattgatgacaaacactggaact

SEQ ID NO: 124969 - DNA, 25 bp, Artificial
  Probe
cggaagaacatgaattggcatctgt

SEQ ID NO: 124970 - DNA, 25 bp, Artificial
  Probe
cgctggatacgaatagacacttcct

SEQ ID NO: 124971 - DNA, 25 bp, Artificial
  Probe
tgacttcagaaaacaacaaactcgt

SEQ ID NO: 124972 - DNA, 25 bp, Artificial
  Probe
cagcaacccttacagtatataagct

SEQ ID NO: 124973 - DNA, 25 bp, Artificial
  Probe
cggcaactctcctgtgaaacaatat

SEQ ID NO: 124974 - DNA, 25 bp, Artificial
  Probe
ggcatctgtccccacatataaatta

SEQ ID NO: 124975 - DNA, 25 bp, Artificial
  Probe
ttacagtgttgggagagatcaaaac

SEQ ID NO: 124976 - DNA, 25 bp, Artificial
  Probe
ttcagaaaacaacaaactcgtaggc

SEQ ID NO: 124977 - DNA, 25 bp, Artificial
  Probe
ccaatagagacatcaggaaaggaaa

SEQ ID NO: 124978 - DNA, 25 bp, Artificial
  Probe
atagagacatcaggaaaggaaagag

SEQ ID NO: 124979 - DNA, 25 bp, Artificial
  Probe
caatagagacatcaggaaaggaaag

SEQ ID NO: 124980 - DNA, 25 bp, Artificial
  Probe
aatcatagaaattacaacgaccagc

SEQ ID NO: 124981 - DNA, 25 bp, Artificial
  Probe
aatagagacatcaggaaaggaaaga

SEQ ID NO: 124982 - DNA, 25 bp, Artificial
  Probe
ccttcagtaagtgtgtaaactccat

SEQ ID NO: 124983 - DNA, 25 bp, Artificial
  Probe
tagagacatcaggaaaggaaagagc

SEQ ID NO: 124984 - DNA, 25 bp, Artificial
  Probe
gctaatcatagaaattacaacgacc

SEQ ID NO: 124985 - DNA, 25 bp, Artificial
  Probe
catgctgtactctccttgtctgaac

SEQ ID NO: 124986 - DNA, 25 bp, Artificial
  Probe
cttcagtaagtgtgtaaactccatg

SEQ ID NO: 124987 - DNA, 25 bp, Artificial
  Probe
taagtgtgtaaactccatgctgtac

SEQ ID NO: 124988 - DNA, 25 bp, Artificial
  Probe
gtaagtgtgtaaactccatgctgta

SEQ ID NO: 124989 - DNA, 25 bp, Artificial
  Probe
atcatagaaattacaacgaccagct

SEQ ID NO: 124990 - DNA, 25 bp, Artificial
  Probe
tcatagaaattacaacgaccagctt

SEQ ID NO: 124991 - DNA, 25 bp, Artificial
  Probe
tgtgctagatgtcagctaatcatag

SEQ ID NO: 124992 - DNA, 25 bp, Artificial
  Probe
gtgctagatgtcagctaatcataga

SEQ ID NO: 124993 - DNA, 25 bp, Artificial
  Probe
gatgtgctagatgtcagctaatcat

SEQ ID NO: 124994 - DNA, 25 bp, Artificial
  Probe
atgtgctagatgtcagctaatcata

SEQ ID NO: 124995 - DNA, 25 bp, Artificial
  Probe
ttcagtaagtgtgtaaactccatgc

SEQ ID NO: 124996 - DNA, 25 bp, Artificial
  Probe
tccaatagagacatcaggaaaggaa

SEQ ID NO: 124997 - DNA, 25 bp, Artificial
  Probe
tgctagatgtcagctaatcatagaa

SEQ ID NO: 124998 - DNA, 25 bp, Artificial
  Probe
taaactccatgctgtactctccttg

SEQ ID NO: 124999 - DNA, 25 bp, Artificial
  Probe
caagatgctccctagaagaagatgg

SEQ ID NO: 125000 - DNA, 25 bp, Artificial
  Probe
ccaagatgctccctagaagaagatg

SEQ ID NO: 125001 - DNA, 25 bp, Artificial
  Probe
catagaaattacaacgaccagcttg

SEQ ID NO: 125002 - DNA, 25 bp, Artificial
  Probe
gtaaactccatgctgtactctcctt

SEQ ID NO: 125003 - DNA, 25 bp, Artificial
  Probe
ctccaatagagacatcaggaaagga

SEQ ID NO: 125004 - DNA, 25 bp, Artificial
  Probe
tgtgtaaactccatgctgtactctc

SEQ ID NO: 125005 - DNA, 25 bp, Artificial
  Probe
tcagtaagtgtgtaaactccatgct

SEQ ID NO: 125006 - DNA, 25 bp, Artificial
  Probe
accaagatgctccctagaagaagat

SEQ ID NO: 125007 - DNA, 25 bp, Artificial
  Probe
aagtgtgtaaactccatgctgtact

SEQ ID NO: 125008 - DNA, 25 bp, Artificial
  Probe
agtaagtgtgtaaactccatgctgt

SEQ ID NO: 125009 - DNA, 25 bp, Artificial
  Probe
gccttcagtaagtgtgtaaactcca

SEQ ID NO: 125010 - DNA, 25 bp, Artificial
  Probe
gtgtgtaaactccatgctgtactct

SEQ ID NO: 125011 - DNA, 25 bp, Artificial
  Probe
cagtaagtgtgtaaactccatgctg

SEQ ID NO: 125012 - DNA, 25 bp, Artificial
  Probe
cagtgtcaattcctgggtagtatcc

SEQ ID NO: 125013 - DNA, 25 bp, Artificial
  Probe
ttcgatgtgctagatgtcagctaat

SEQ ID NO: 125014 - DNA, 25 bp, Artificial
  Probe
taatcatagaaattacaacgaccag

SEQ ID NO: 125015 - DNA, 25 bp, Artificial
  Probe
ctaatcatagaaattacaacgacca

SEQ ID NO: 125016 - DNA, 25 bp, Artificial
  Probe
atgctgtactctccttgtctgaacc

SEQ ID NO: 125017 - DNA, 25 bp, Artificial
  Probe
cagcctccaagaaggtagcttatag

SEQ ID NO: 125018 - DNA, 25 bp, Artificial
  Probe
gagacatcaggaaaggaaagagcac

SEQ ID NO: 125019 - DNA, 25 bp, Artificial
  Probe
gtgtaaactccatgctgtactctcc

SEQ ID NO: 125020 - DNA, 25 bp, Artificial
  Probe
agtgtgtaaactccatgctgtactc

SEQ ID NO: 125021 - DNA, 25 bp, Artificial
  Probe
ccatgctgtactctccttgtctgaa

SEQ ID NO: 125022 - DNA, 25 bp, Artificial
  Probe
tagccaagacaggatcattagacag

SEQ ID NO: 125023 - DNA, 25 bp, Artificial
  Probe
ctagccaagacaggatcattagaca

SEQ ID NO: 125024 - DNA, 25 bp, Artificial
  Probe
caactctctaccagtctgtctgatg

SEQ ID NO: 125025 - DNA, 25 bp, Artificial
  Probe
agagagcagagggtataaatcagtc

SEQ ID NO: 125026 - DNA, 25 bp, Artificial
  Probe
gagagagcagagggtataaatcagt

SEQ ID NO: 125027 - DNA, 25 bp, Artificial
  Probe
tttgttctgtatgtattgtgggtgg

SEQ ID NO: 125028 - DNA, 25 bp, Artificial
  Probe
gagagcagagggtataaatcagtca

SEQ ID NO: 125029 - DNA, 25 bp, Artificial
  Probe
acaactctctaccagtctgtctgat

SEQ ID NO: 125030 - DNA, 25 bp, Artificial
  Probe
agagcagagggtataaatcagtcac

SEQ ID NO: 125031 - DNA, 25 bp, Artificial
  Probe
ttcacaactctctaccagtctgtct

SEQ ID NO: 125032 - DNA, 25 bp, Artificial
  Probe
ttgttcttcaagagcacagtagtga

SEQ ID NO: 125033 - DNA, 25 bp, Artificial
  Probe
catctacaagctgttacaagacctg

SEQ ID NO: 125034 - DNA, 25 bp, Artificial
  Probe
ctacaagctgttacaagacctgttc

SEQ ID NO: 125035 - DNA, 25 bp, Artificial
  Probe
atctacaagctgttacaagacctgt

SEQ ID NO: 125036 - DNA, 25 bp, Artificial
  Probe
tttagatcaaagtctccgtcattct

SEQ ID NO: 125037 - DNA, 25 bp, Artificial
  Probe
ttagatcaaagtctccgtcattctg

SEQ ID NO: 125038 - DNA, 25 bp, Artificial
  Probe
taacctcctttcctctgagtgtatc

SEQ ID NO: 125039 - DNA, 25 bp, Artificial
  Probe
ctaacctcctttcctctgagtgtat

SEQ ID NO: 125040 - DNA, 25 bp, Artificial
  Probe
cgagagagcagagggtataaatcag

SEQ ID NO: 125041 - DNA, 25 bp, Artificial
  Probe
tctacaagctgttacaagacctgtt

SEQ ID NO: 125042 - DNA, 25 bp, Artificial
  Probe
tagatcaaagtctccgtcattctgt

SEQ ID NO: 125043 - DNA, 25 bp, Artificial
  Probe
tgttcttcaagagcacagtagtgac

SEQ ID NO: 125044 - DNA, 25 bp, Artificial
  Probe
cttacctactctgagttgcctttag

SEQ ID NO: 125045 - DNA, 25 bp, Artificial
  Probe
ccatctacaagctgttacaagacct

SEQ ID NO: 125046 - DNA, 25 bp, Artificial
  Probe
ttacctactctgagttgcctttaga

SEQ ID NO: 125047 - DNA, 25 bp, Artificial
  Probe
ataaatcagtcaccagctagaagtc

SEQ ID NO: 125048 - DNA, 25 bp, Artificial
  Probe
agaaccttctgtgaacccattagag

SEQ ID NO: 125049 - DNA, 25 bp, Artificial
  Probe
cacaactctctaccagtctgtctga

SEQ ID NO: 125050 - DNA, 25 bp, Artificial
  Probe
tcacaactctctaccagtctgtctg

SEQ ID NO: 125051 - DNA, 25 bp, Artificial
  Probe
gtttgttcttcaagagcacagtagt

SEQ ID NO: 125052 - DNA, 25 bp, Artificial
  Probe
tataaatcagtcaccagctagaagt

SEQ ID NO: 125053 - DNA, 25 bp, Artificial
  Probe
atgaggaatatgaggtccctgattt

SEQ ID NO: 125054 - DNA, 25 bp, Artificial
  Probe
tttcacaactctctaccagtctgtc

SEQ ID NO: 125055 - DNA, 25 bp, Artificial
  Probe
ctttcacaactctctaccagtctgt

SEQ ID NO: 125056 - DNA, 25 bp, Artificial
  Probe
ttgttctgtatgtattgtgggtggg

SEQ ID NO: 125057 - DNA, 25 bp, Artificial
  Probe
gtataaatcagtcaccagctagaag

SEQ ID NO: 125058 - DNA, 25 bp, Artificial
  Probe
ctcctttcacaactctctaccagtc

SEQ ID NO: 125059 - DNA, 25 bp, Artificial
  Probe
ccttacctactctgagttgccttta

SEQ ID NO: 125060 - DNA, 25 bp, Artificial
  Probe
gatgaggaatatgaggtccctgatt

SEQ ID NO: 125061 - DNA, 25 bp, Artificial
  Probe
tttgttcttcaagagcacagtagtg

SEQ ID NO: 125062 - DNA, 25 bp, Artificial
  Probe
tacaagctgttacaagacctgttcc

SEQ ID NO: 125063 - DNA, 25 bp, Artificial
  Probe
tcctttcacaactctctaccagtct

SEQ ID NO: 125064 - DNA, 25 bp, Artificial
  Probe
aactctctaccagtctgtctgatgc

SEQ ID NO: 125065 - DNA, 25 bp, Artificial
  Probe
ttgtgacctgaagtgagttcctttc

SEQ ID NO: 125066 - DNA, 25 bp, Artificial
  Probe
cctttcacaactctctaccagtctg

SEQ ID NO: 125067 - DNA, 25 bp, Artificial
  Probe
gtggataagcgaaagggtttatttg

SEQ ID NO: 125068 - DNA, 25 bp, Artificial
  Probe
agtggataagcgaaagggtttattt

SEQ ID NO: 125069 - DNA, 25 bp, Artificial
  Probe
cagtggataagcgaaagggtttatt

SEQ ID NO: 125070 - DNA, 25 bp, Artificial
  Probe
tggataagcgaaagggtttatttgc

SEQ ID NO: 125071 - DNA, 25 bp, Artificial
  Probe
tatattatgtcgatcctgtcaacaa

SEQ ID NO: 125072 - DNA, 25 bp, Artificial
  Probe
ttatattatgtcgatcctgtcaaca

SEQ ID NO: 125073 - DNA, 25 bp, Artificial
  Probe
caagacgacggcagttattactcac

SEQ ID NO: 125074 - DNA, 25 bp, Artificial
  Probe
ccagtggataagcgaaagggtttat

SEQ ID NO: 125075 - DNA, 25 bp, Artificial
  Probe
acgacggcagttattactcacagaa

SEQ ID NO: 125076 - DNA, 25 bp, Artificial
  Probe
aagacgacggcagttattactcaca

SEQ ID NO: 125077 - DNA, 25 bp, Artificial
  Probe
atttggacactaactcttttgaact

SEQ ID NO: 125078 - DNA, 25 bp, Artificial
  Probe
tgatttggacactaactcttttgaa

SEQ ID NO: 125079 - DNA, 25 bp, Artificial
  Probe
gacgacggcagttattactcacaga

SEQ ID NO: 125080 - DNA, 25 bp, Artificial
  Probe
agacgacggcagttattactcacag

SEQ ID NO: 125081 - DNA, 25 bp, Artificial
  Probe
ggataagcgaaagggtttatttgca

SEQ ID NO: 125082 - DNA, 25 bp, Artificial
  Probe
gatttggacactaactcttttgaac

SEQ ID NO: 125083 - DNA, 25 bp, Artificial
  Probe
atgatttggacactaactcttttga

SEQ ID NO: 125084 - DNA, 25 bp, Artificial
  Probe
aaaaggttgttattggaaaagcaag

SEQ ID NO: 125085 - DNA, 25 bp, Artificial
  Probe
tttggacactaactcttttgaacta

SEQ ID NO: 125086 - DNA, 25 bp, Artificial
  Probe
tggacactaactcttttgaactaga

SEQ ID NO: 125087 - DNA, 25 bp, Artificial
  Probe
aaaggttgttattggaaaagcaagc

SEQ ID NO: 125088 - DNA, 25 bp, Artificial
  Probe
ttggacactaactcttttgaactag

SEQ ID NO: 125089 - DNA, 25 bp, Artificial
  Probe
ggacactaactcttttgaactagac

SEQ ID NO: 125090 - DNA, 25 bp, Artificial
  Probe
catgatttggacactaactcttttg

SEQ ID NO: 125091 - DNA, 25 bp, Artificial
  Probe
tttatattatgtcgatcctgtcaac

SEQ ID NO: 125092 - DNA, 25 bp, Artificial
  Probe
gacactaactcttttgaactagact

SEQ ID NO: 125093 - DNA, 25 bp, Artificial
  Probe
acactaactcttttgaactagactt

SEQ ID NO: 125094 - DNA, 25 bp, Artificial
  Probe
catttatattatgtcgatcctgtca

SEQ ID NO: 125095 - DNA, 25 bp, Artificial
  Probe
aaggttgttattggaaaagcaagcc

SEQ ID NO: 125096 - DNA, 25 bp, Artificial
  Probe
ataagcgaaagggtttatttgcaag

SEQ ID NO: 125097 - DNA, 25 bp, Artificial
  Probe
gataagcgaaagggtttatttgcaa

SEQ ID NO: 125098 - DNA, 25 bp, Artificial
  Probe
ccacatttatattatgtcgatcctg

SEQ ID NO: 125099 - DNA, 25 bp, Artificial
  Probe
taagcgaaagggtttatttgcaaga

SEQ ID NO: 125100 - DNA, 25 bp, Artificial
  Probe
atttatattatgtcgatcctgtcaa

SEQ ID NO: 125101 - DNA, 25 bp, Artificial
  Probe
cacatttatattatgtcgatcctgt

SEQ ID NO: 125102 - DNA, 25 bp, Artificial
  Probe
taactcttttgaactagacttacag

SEQ ID NO: 125103 - DNA, 25 bp, Artificial
  Probe
ctaactcttttgaactagacttaca

SEQ ID NO: 125104 - DNA, 25 bp, Artificial
  Probe
actaactcttttgaactagacttac

SEQ ID NO: 125105 - DNA, 25 bp, Artificial
  Probe
cactaactcttttgaactagactta

SEQ ID NO: 125106 - DNA, 25 bp, Artificial
  Probe
acatttatattatgtcgatcctgtc

SEQ ID NO: 125107 - DNA, 25 bp, Artificial
  Probe
aagcgaaagggtttatttgcaagac

SEQ ID NO: 125108 - DNA, 25 bp, Artificial
  Probe
tgaaattccatggtcacaagaactc

SEQ ID NO: 125109 - DNA, 25 bp, Artificial
  Probe
gaaattccatggtcacaagaactcc

SEQ ID NO: 125110 - DNA, 25 bp, Artificial
  Probe
gaaagggtttatttgcaagacgacg

SEQ ID NO: 125111 - DNA, 25 bp, Artificial
  Probe
cgaaagggtttatttgcaagacgac

SEQ ID NO: 125112 - DNA, 25 bp, Artificial
  Probe
tccagagaacagagatgatgaacat

SEQ ID NO: 125113 - DNA, 25 bp, Artificial
  Probe
agagaacagagatgatgaacatgag

SEQ ID NO: 125114 - DNA, 25 bp, Artificial
  Probe
cagagaacagagatgatgaacatga

SEQ ID NO: 125115 - DNA, 25 bp, Artificial
  Probe
ggttcttggtacttaggacttaatc

SEQ ID NO: 125116 - DNA, 25 bp, Artificial
  Probe
gaacagagatgatgaacatgaggag

SEQ ID NO: 125117 - DNA, 25 bp, Artificial
  Probe
gagaacagagatgatgaacatgagg

SEQ ID NO: 125118 - DNA, 25 bp, Artificial
  Probe
agaacagagatgatgaacatgagga

SEQ ID NO: 125119 - DNA, 25 bp, Artificial
  Probe
ccagagaacagagatgatgaacatg

SEQ ID NO: 125120 - DNA, 25 bp, Artificial
  Probe
ctccagagaacagagatgatgaaca

SEQ ID NO: 125121 - DNA, 25 bp, Artificial
  Probe
aacagagatgatgaacatgaggagg

SEQ ID NO: 125122 - DNA, 25 bp, Artificial
  Probe
cctccagagaacagagatgatgaac

SEQ ID NO: 125123 - DNA, 25 bp, Artificial
  Probe
gttcttggtacttaggacttaatcc

SEQ ID NO: 125124 - DNA, 25 bp, Artificial
  Probe
gagatgatgaacatgaggaggactg

SEQ ID NO: 125125 - DNA, 25 bp, Artificial
  Probe
cagagatgatgaacatgaggaggac

SEQ ID NO: 125126 - DNA, 25 bp, Artificial
  Probe
agagatgatgaacatgaggaggact

SEQ ID NO: 125127 - DNA, 25 bp, Artificial
  Probe
gggttcttggtacttaggacttaat

SEQ ID NO: 125128 - DNA, 25 bp, Artificial
  Probe
tgggttcttggtacttaggacttaa

SEQ ID NO: 125129 - DNA, 25 bp, Artificial
  Probe
acagagatgatgaacatgaggagga

SEQ ID NO: 125130 - DNA, 25 bp, Artificial
  Probe
ttgaaataaagtccttagttagcca

SEQ ID NO: 125131 - DNA, 25 bp, Artificial
  Probe
gtgggttcttggtacttaggactta

SEQ ID NO: 125132 - DNA, 25 bp, Artificial
  Probe
tgaaataaagtccttagttagccat

SEQ ID NO: 125133 - DNA, 25 bp, Artificial
  Probe
gaaataaagtccttagttagccatc

SEQ ID NO: 125134 - DNA, 25 bp, Artificial
  Probe
atgatgaacatgaggaggactggaa

SEQ ID NO: 125135 - DNA, 25 bp, Artificial
  Probe
tttgaaataaagtccttagttagcc

SEQ ID NO: 125136 - DNA, 25 bp, Artificial
  Probe
gatgatgaacatgaggaggactgga

SEQ ID NO: 125137 - DNA, 25 bp, Artificial
  Probe
agatgatgaacatgaggaggactgg

SEQ ID NO: 125138 - DNA, 25 bp, Artificial
  Probe
aatttctcaccctgatcctttcctc

SEQ ID NO: 125139 - DNA, 25 bp, Artificial
  Probe
aaatcccacctacctaaccacctac

SEQ ID NO: 125140 - DNA, 25 bp, Artificial
  Probe
aaatcacaaaatcccacctacctaa

SEQ ID NO: 125141 - DNA, 25 bp, Artificial
  Probe
aacctaaatcacaaaatcccaccta

SEQ ID NO: 125142 - DNA, 25 bp, Artificial
  Probe
aaaacctaaatcacaaaatcccacc

SEQ ID NO: 125143 - DNA, 25 bp, Artificial
  Probe
ctaaatcacaaaatcccacctacct

SEQ ID NO: 125144 - DNA, 25 bp, Artificial
  Probe
aatcacaaaatcccacctacctaac

SEQ ID NO: 125145 - DNA, 25 bp, Artificial
  Probe
taaatcacaaaatcccacctaccta

SEQ ID NO: 125146 - DNA, 25 bp, Artificial
  Probe
acctaaatcacaaaatcccacctac

SEQ ID NO: 125147 - DNA, 25 bp, Artificial
  Probe
tgatgaacatgaggaggactggaac

SEQ ID NO: 125148 - DNA, 25 bp, Artificial
  Probe
aaacctaaatcacaaaatcccacct

SEQ ID NO: 125149 - DNA, 25 bp, Artificial
  Probe
aaatttctcaccctgatcctttcct

SEQ ID NO: 125150 - DNA, 25 bp, Artificial
  Probe
agtgggttcttggtacttaggactt

SEQ ID NO: 125151 - DNA, 25 bp, Artificial
  Probe
gtttgaaataaagtccttagttagc

SEQ ID NO: 125152 - DNA, 25 bp, Artificial
  Probe
cctaaatcacaaaatcccacctacc

SEQ ID NO: 125153 - DNA, 25 bp, Artificial
  Probe
ccctccagagaacagagatgatgaa

SEQ ID NO: 125154 - DNA, 25 bp, Artificial
  Probe
atttctcaccctgatcctttcctca

SEQ ID NO: 125155 - DNA, 25 bp, Artificial
  Probe
gagtgggttcttggtacttaggact

SEQ ID NO: 125156 - DNA, 25 bp, Artificial
  Probe
aatatattgagggtattggcttagc

SEQ ID NO: 125157 - DNA, 25 bp, Artificial
  Probe
cttcggtagttgatactgaggtaag

SEQ ID NO: 125158 - DNA, 25 bp, Artificial
  Probe
cggtagttgatactgaggtaagatg

SEQ ID NO: 125159 - DNA, 25 bp, Artificial
  Probe
tcggtagttgatactgaggtaagat

SEQ ID NO: 125160 - DNA, 25 bp, Artificial
  Probe
ttcggtagttgatactgaggtaaga

SEQ ID NO: 125161 - DNA, 25 bp, Artificial
  Probe
ggtagttgatactgaggtaagatgt

SEQ ID NO: 125162 - DNA, 25 bp, Artificial
  Probe
acttcggtagttgatactgaggtaa

SEQ ID NO: 125163 - DNA, 25 bp, Artificial
  Probe
cacttcggtagttgatactgaggta

SEQ ID NO: 125164 - DNA, 25 bp, Artificial
  Probe
tacacttcggtagttgatactgagg

SEQ ID NO: 125165 - DNA, 25 bp, Artificial
  Probe
gtacacttcggtagttgatactgag

SEQ ID NO: 125166 - DNA, 25 bp, Artificial
  Probe
atggtacacttcggtagttgatact

SEQ ID NO: 125167 - DNA, 25 bp, Artificial
  Probe
catggtacacttcggtagttgatac

SEQ ID NO: 125168 - DNA, 25 bp, Artificial
  Probe
tactgaggtaagatgttacagagac

SEQ ID NO: 125169 - DNA, 25 bp, Artificial
  Probe
ggtacacttcggtagttgatactga

SEQ ID NO: 125170 - DNA, 25 bp, Artificial
  Probe
gtagttgatactgaggtaagatgtt

SEQ ID NO: 125171 - DNA, 25 bp, Artificial
  Probe
tggtacacttcggtagttgatactg

SEQ ID NO: 125172 - DNA, 25 bp, Artificial
  Probe
tgatactgaggtaagatgttacaga

SEQ ID NO: 125173 - DNA, 25 bp, Artificial
  Probe
actgaggtaagatgttacagagacg

SEQ ID NO: 125174 - DNA, 25 bp, Artificial
  Probe
cttatgggaagcaacaaagagaaag

SEQ ID NO: 125175 - DNA, 25 bp, Artificial
  Probe
atactgaggtaagatgttacagaga

SEQ ID NO: 125176 - DNA, 25 bp, Artificial
  Probe
gttgatactgaggtaagatgttaca

SEQ ID NO: 125177 - DNA, 25 bp, Artificial
  Probe
ttatgggaagcaacaaagagaaagg

SEQ ID NO: 125178 - DNA, 25 bp, Artificial
  Probe
gatactgaggtaagatgttacagag

SEQ ID NO: 125179 - DNA, 25 bp, Artificial
  Probe
ttgatactgaggtaagatgttacag

SEQ ID NO: 125180 - DNA, 25 bp, Artificial
  Probe
acacttcggtagttgatactgaggt

SEQ ID NO: 125181 - DNA, 25 bp, Artificial
  Probe
agttgatactgaggtaagatgttac

SEQ ID NO: 125182 - DNA, 25 bp, Artificial
  Probe
ccttatgggaagcaacaaagagaaa

SEQ ID NO: 125183 - DNA, 25 bp, Artificial
  Probe
tgattaaccaggatgagtttagaaa

SEQ ID NO: 125184 - DNA, 25 bp, Artificial
  Probe
atgattaaccaggatgagtttagaa

SEQ ID NO: 125185 - DNA, 25 bp, Artificial
  Probe
tagttgatactgaggtaagatgtta

SEQ ID NO: 125186 - DNA, 25 bp, Artificial
  Probe
ctgaggtaagatgttacagagacgt

SEQ ID NO: 125187 - DNA, 25 bp, Artificial
  Probe
tcttaagctccaactaaccagtgtt

SEQ ID NO: 125188 - DNA, 25 bp, Artificial
  Probe
gacggcattctaagcagactgattc

SEQ ID NO: 125189 - DNA, 25 bp, Artificial
  Probe
tgaggtaagatgttacagagacgtg

SEQ ID NO: 125190 - DNA, 25 bp, Artificial
  Probe
tagccttatgggaagcaacaaagag

SEQ ID NO: 125191 - DNA, 25 bp, Artificial
  Probe
gattaaccaggatgagtttagaaac

SEQ ID NO: 125192 - DNA, 25 bp, Artificial
  Probe
tatgggaagcaacaaagagaaaggg

SEQ ID NO: 125193 - DNA, 25 bp, Artificial
  Probe
gatctttccagagatttcttgtgtg

SEQ ID NO: 125194 - DNA, 25 bp, Artificial
  Probe
gtcttaagctccaactaaccagtgt

SEQ ID NO: 125195 - DNA, 25 bp, Artificial
  Probe
cctatgattaaccaggatgagttta

SEQ ID NO: 125196 - DNA, 25 bp, Artificial
  Probe
atctttccagagatttcttgtgtgg

SEQ ID NO: 125197 - DNA, 25 bp, Artificial
  Probe
gtagccttatgggaagcaacaaaga

SEQ ID NO: 125198 - DNA, 25 bp, Artificial
  Probe
ggatctttccagagatttcttgtgt

SEQ ID NO: 125199 - DNA, 25 bp, Artificial
  Probe
tatgattaaccaggatgagtttaga

SEQ ID NO: 125200 - DNA, 25 bp, Artificial
  Probe
gggatctttccagagatttcttgtg

SEQ ID NO: 125201 - DNA, 25 bp, Artificial
  Probe
aaagaagagatgctgggtaacacag

SEQ ID NO: 125202 - DNA, 25 bp, Artificial
  Probe
tagtatcttagaagctgagtcctgt

SEQ ID NO: 125203 - DNA, 25 bp, Artificial
  Probe
catccaggtctgtaatcaatccttc

SEQ ID NO: 125204 - DNA, 25 bp, Artificial
  Probe
agtatcttagaagctgagtcctgtt

SEQ ID NO: 125205 - DNA, 25 bp, Artificial
  Probe
atccaggtctgtaatcaatccttca

SEQ ID NO: 125206 - DNA, 25 bp, Artificial
  Probe
ttagtatcttagaagctgagtcctg

SEQ ID NO: 125207 - DNA, 25 bp, Artificial
  Probe
gtatcttagaagctgagtcctgttc

SEQ ID NO: 125208 - DNA, 25 bp, Artificial
  Probe
gaagtggcttaatgacaataccaat

SEQ ID NO: 125209 - DNA, 25 bp, Artificial
  Probe
gtggcttaatgacaataccaataca

SEQ ID NO: 125210 - DNA, 25 bp, Artificial
  Probe
agtggcttaatgacaataccaatac

SEQ ID NO: 125211 - DNA, 25 bp, Artificial
  Probe
ctttgtttgtgatgtctgttacctt

SEQ ID NO: 125212 - DNA, 25 bp, Artificial
  Probe
tccaggtctgtaatcaatccttcag

SEQ ID NO: 125213 - DNA, 25 bp, Artificial
  Probe
tttgtttgtgatgtctgttaccttt

SEQ ID NO: 125214 - DNA, 25 bp, Artificial
  Probe
gtttgtgatgtctgttacctttagt

SEQ ID NO: 125215 - DNA, 25 bp, Artificial
  Probe
tgtttgtgatgtctgttacctttag

SEQ ID NO: 125216 - DNA, 25 bp, Artificial
  Probe
ggaagtggcttaatgacaataccaa

SEQ ID NO: 125217 - DNA, 25 bp, Artificial
  Probe
ccatccaggtctgtaatcaatcctt

SEQ ID NO: 125218 - DNA, 25 bp, Artificial
  Probe
tggcttaatgacaataccaatacat

SEQ ID NO: 125219 - DNA, 25 bp, Artificial
  Probe
aagtggcttaatgacaataccaata

SEQ ID NO: 125220 - DNA, 25 bp, Artificial
  Probe
ttgtttgtgatgtctgttaccttta

SEQ ID NO: 125221 - DNA, 25 bp, Artificial
  Probe
gtgctttgtttgtgatgtctgttac

SEQ ID NO: 125222 - DNA, 25 bp, Artificial
  Probe
agtgctttgtttgtgatgtctgtta

SEQ ID NO: 125223 - DNA, 25 bp, Artificial
  Probe
ggcttaatgacaataccaatacata

SEQ ID NO: 125224 - DNA, 25 bp, Artificial
  Probe
ctgggaagtggcttaatgacaatac

SEQ ID NO: 125225 - DNA, 25 bp, Artificial
  Probe
gctttgtttgtgatgtctgttacct

SEQ ID NO: 125226 - DNA, 25 bp, Artificial
  Probe
tgtgatgtctgttacctttagtatc

SEQ ID NO: 125227 - DNA, 25 bp, Artificial
  Probe
ccaggtctgtaatcaatccttcagg

SEQ ID NO: 125228 - DNA, 25 bp, Artificial
  Probe
tttgtgatgtctgttacctttagta

SEQ ID NO: 125229 - DNA, 25 bp, Artificial
  Probe
tgctttgtttgtgatgtctgttacc

SEQ ID NO: 125230 - DNA, 25 bp, Artificial
  Probe
gtgatgtctgttacctttagtatct

SEQ ID NO: 125231 - DNA, 25 bp, Artificial
  Probe
aataccaatacatagatgtccctgc

SEQ ID NO: 125232 - DNA, 25 bp, Artificial
  Probe
ttgtgatgtctgttacctttagtat

SEQ ID NO: 125233 - DNA, 25 bp, Artificial
  Probe
ataccaatacatagatgtccctgct

SEQ ID NO: 125234 - DNA, 25 bp, Artificial
  Probe
cttagaagctgagtcctgttcttat

SEQ ID NO: 125235 - DNA, 25 bp, Artificial
  Probe
tatcttagaagctgagtcctgttct

SEQ ID NO: 125236 - DNA, 25 bp, Artificial
  Probe
acaataccaatacatagatgtccct

SEQ ID NO: 125237 - DNA, 25 bp, Artificial
  Probe
ttagaagctgagtcctgttcttatt

SEQ ID NO: 125238 - DNA, 25 bp, Artificial
  Probe
tcttagaagctgagtcctgttctta

SEQ ID NO: 125239 - DNA, 25 bp, Artificial
  Probe
caataccaatacatagatgtccctg

SEQ ID NO: 125240 - DNA, 25 bp, Artificial
  Probe
gaagctgagtcctgttcttatttct

SEQ ID NO: 125241 - DNA, 25 bp, Artificial
  Probe
aagctgagtcctgttcttatttctg

SEQ ID NO: 125242 - DNA, 25 bp, Artificial
  Probe
atcttagaagctgagtcctgttctt

SEQ ID NO: 125243 - DNA, 25 bp, Artificial
  Probe
taccaatacatagatgtccctgctg

SEQ ID NO: 125244 - DNA, 25 bp, Artificial
  Probe
tgatgtctgttacctttagtatctt

SEQ ID NO: 125245 - DNA, 25 bp, Artificial
  Probe
acctttagtatcttagaagctgagt

SEQ ID NO: 125246 - DNA, 25 bp, Artificial
  Probe
tgggaagtggcttaatgacaatacc

SEQ ID NO: 125247 - DNA, 25 bp, Artificial
  Probe
cagtgaactccataattgatccttg

SEQ ID NO: 125248 - DNA, 25 bp, Artificial
  Probe
tcagtgaactccataattgatcctt

SEQ ID NO: 125249 - DNA, 25 bp, Artificial
  Probe
attatgaccatcaccttcgctgtat

SEQ ID NO: 125250 - DNA, 25 bp, Artificial
  Probe
agtgaactccataattgatccttgg

SEQ ID NO: 125251 - DNA, 25 bp, Artificial
  Probe
ctttgcttatatggatgaaacctct

SEQ ID NO: 125252 - DNA, 25 bp, Artificial
  Probe
tctttgcttatatggatgaaacctc

SEQ ID NO: 125253 - DNA, 25 bp, Artificial
  Probe
ctgcctttcacaatctttgcttata

SEQ ID NO: 125254 - DNA, 25 bp, Artificial
  Probe
ttatgaccatcaccttcgctgtatg

SEQ ID NO: 125255 - DNA, 25 bp, Artificial
  Probe
cattatgaccatcaccttcgctgta

SEQ ID NO: 125256 - DNA, 25 bp, Artificial
  Probe
ttgcttatatggatgaaacctcttc

SEQ ID NO: 125257 - DNA, 25 bp, Artificial
  Probe
tgcctttcacaatctttgcttatat

SEQ ID NO: 125258 - DNA, 25 bp, Artificial
  Probe
tttgcttatatggatgaaacctctt

SEQ ID NO: 125259 - DNA, 25 bp, Artificial
  Probe
gcctttcacaatctttgcttatatg

SEQ ID NO: 125260 - DNA, 25 bp, Artificial
  Probe
atctttgcttatatggatgaaacct

SEQ ID NO: 125261 - DNA, 25 bp, Artificial
  Probe
atcagtgaactccataattgatcct

SEQ ID NO: 125262 - DNA, 25 bp, Artificial
  Probe
cctttcacaatctttgcttatatgg

SEQ ID NO: 125263 - DNA, 25 bp, Artificial
  Probe
tcacaatctttgcttatatggatga

SEQ ID NO: 125264 - DNA, 25 bp, Artificial
  Probe
aatctttgcttatatggatgaaacc

SEQ ID NO: 125265 - DNA, 25 bp, Artificial
  Probe
cctgcctttcacaatctttgcttat

SEQ ID NO: 125266 - DNA, 25 bp, Artificial
  Probe
tgcttatatggatgaaacctcttcc

SEQ ID NO: 125267 - DNA, 25 bp, Artificial
  Probe
cttatatggatgaaacctcttcccg

SEQ ID NO: 125268 - DNA, 25 bp, Artificial
  Probe
tatatggatgaaacctcttcccgaa

SEQ ID NO: 125269 - DNA, 25 bp, Artificial
  Probe
ttatatggatgaaacctcttcccga

SEQ ID NO: 125270 - DNA, 25 bp, Artificial
  Probe
gcttatatggatgaaacctcttccc

SEQ ID NO: 125271 - DNA, 25 bp, Artificial
  Probe
tatcagtgaactccataattgatcc

SEQ ID NO: 125272 - DNA, 25 bp, Artificial
  Probe
cacaatctttgcttatatggatgaa

SEQ ID NO: 125273 - DNA, 25 bp, Artificial
  Probe
ttcacaatctttgcttatatggatg

SEQ ID NO: 125274 - DNA, 25 bp, Artificial
  Probe
ctttcacaatctttgcttatatgga

SEQ ID NO: 125275 - DNA, 25 bp, Artificial
  Probe
gaaaccagatgcagaagactttaac

SEQ ID NO: 125276 - DNA, 25 bp, Artificial
  Probe
agaaaccagatgcagaagactttaa

SEQ ID NO: 125277 - DNA, 25 bp, Artificial
  Probe
aactccataattgatccttgggttt

SEQ ID NO: 125278 - DNA, 25 bp, Artificial
  Probe
gagaaaccagatgcagaagacttta

SEQ ID NO: 125279 - DNA, 25 bp, Artificial
  Probe
gaactccataattgatccttgggtt

SEQ ID NO: 125280 - DNA, 25 bp, Artificial
  Probe
atatggatgaaacctcttcccgaaa

SEQ ID NO: 125281 - DNA, 25 bp, Artificial
  Probe
gtgaactccataattgatccttggg

SEQ ID NO: 125282 - DNA, 25 bp, Artificial
  Probe
tgaactccataattgatccttgggt

SEQ ID NO: 125283 - DNA, 25 bp, Artificial
  Probe
acaatctttgcttatatggatgaaa

SEQ ID NO: 125284 - DNA, 25 bp, Artificial
  Probe
tttcacaatctttgcttatatggat

SEQ ID NO: 125285 - DNA, 25 bp, Artificial
  Probe
aaaccagatgcagaagactttaacg

SEQ ID NO: 125286 - DNA, 25 bp, Artificial
  Probe
tatggatgaaacctcttcccgaaag

SEQ ID NO: 125287 - DNA, 25 bp, Artificial
  Probe
caatctttgcttatatggatgaaac

SEQ ID NO: 125288 - DNA, 25 bp, Artificial
  Probe
ctttgagaaaccagatgcagaagac

SEQ ID NO: 125289 - DNA, 25 bp, Artificial
  Probe
ttgagaaaccagatgcagaagactt

SEQ ID NO: 125290 - DNA, 25 bp, Artificial
  Probe
tgagaaaccagatgcagaagacttt

SEQ ID NO: 125291 - DNA, 25 bp, Artificial
  Probe
tttgagaaaccagatgcagaagact

SEQ ID NO: 125292 - DNA, 25 bp, Artificial
  Probe
ttcttcgtgtctattgtctattgct

SEQ ID NO: 125293 - DNA, 25 bp, Artificial
  Probe
tcgtgtctattgtctattgctactg

SEQ ID NO: 125294 - DNA, 25 bp, Artificial
  Probe
ttcgtgtctattgtctattgctact

SEQ ID NO: 125295 - DNA, 25 bp, Artificial
  Probe
cttcgtgtctattgtctattgctac

SEQ ID NO: 125296 - DNA, 25 bp, Artificial
  Probe
tcttcgtgtctattgtctattgcta

SEQ ID NO: 125297 - DNA, 25 bp, Artificial
  Probe
attcttcgtgtctattgtctattgc

SEQ ID NO: 125298 - DNA, 25 bp, Artificial
  Probe
ggattcttcgtgtctattgtctatt

SEQ ID NO: 125299 - DNA, 25 bp, Artificial
  Probe
cgtgtctattgtctattgctactgc

SEQ ID NO: 125300 - DNA, 25 bp, Artificial
  Probe
gattcttcgtgtctattgtctattg

SEQ ID NO: 125301 - DNA, 25 bp, Artificial
  Probe
ggacctaagttggaagactggaatt

SEQ ID NO: 125302 - DNA, 25 bp, Artificial
  Probe
gggattcttcgtgtctattgtctat

SEQ ID NO: 125303 - DNA, 25 bp, Artificial
  Probe
agggattcttcgtgtctattgtcta

SEQ ID NO: 125304 - DNA, 25 bp, Artificial
  Probe
aggacctaagttggaagactggaat

SEQ ID NO: 125305 - DNA, 25 bp, Artificial
  Probe
cattcaccatagacacggaaggatg

SEQ ID NO: 125306 - DNA, 25 bp, Artificial
  Probe
gtagcattcaccatagacacggaag

SEQ ID NO: 125307 - DNA, 25 bp, Artificial
  Probe
cagggattcttcgtgtctattgtct

SEQ ID NO: 125308 - DNA, 25 bp, Artificial
  Probe
agtagcattcaccatagacacggaa

SEQ ID NO: 125309 - DNA, 25 bp, Artificial
  Probe
cttccagggattcttcgtgtctatt

SEQ ID NO: 125310 - DNA, 25 bp, Artificial
  Probe
taagttggaagactggaattctgaa

SEQ ID NO: 125311 - DNA, 25 bp, Artificial
  Probe
ctaagttggaagactggaattctga

SEQ ID NO: 125312 - DNA, 25 bp, Artificial
  Probe
gagaatcccaccctatctgaatcac

SEQ ID NO: 125313 - DNA, 25 bp, Artificial
  Probe
gaggacctaagttggaagactggaa

SEQ ID NO: 125314 - DNA, 25 bp, Artificial
  Probe
ttccagggattcttcgtgtctattg

SEQ ID NO: 125315 - DNA, 25 bp, Artificial
  Probe
cctaagttggaagactggaattctg

SEQ ID NO: 125316 - DNA, 25 bp, Artificial
  Probe
gacctaagttggaagactggaattc

SEQ ID NO: 125317 - DNA, 25 bp, Artificial
  Probe
catttccagtttctatgagtgggat

SEQ ID NO: 125318 - DNA, 25 bp, Artificial
  Probe
acctaagttggaagactggaattct

SEQ ID NO: 125319 - DNA, 25 bp, Artificial
  Probe
aacatttccagtttctatgagtggg

SEQ ID NO: 125320 - DNA, 25 bp, Artificial
  Probe
gagtagttctgagcaggactgtcaa

SEQ ID NO: 125321 - DNA, 25 bp, Artificial
  Probe
ccagggattcttcgtgtctattgtc

SEQ ID NO: 125322 - DNA, 25 bp, Artificial
  Probe
cagtagcattcaccatagacacgga

SEQ ID NO: 125323 - DNA, 25 bp, Artificial
  Probe
acatttccagtttctatgagtggga

SEQ ID NO: 125324 - DNA, 25 bp, Artificial
  Probe
atcccaccctatctgaatcaccatt

SEQ ID NO: 125325 - DNA, 25 bp, Artificial
  Probe
aatcccaccctatctgaatcaccat

SEQ ID NO: 125326 - DNA, 25 bp, Artificial
  Probe
aaataaggcgtcgcttaaacatttc

SEQ ID NO: 125327 - DNA, 25 bp, Artificial
  Probe
gaaataaggcgtcgcttaaacattt

SEQ ID NO: 125328 - DNA, 25 bp, Artificial
  Probe
aagaagacctggactcgttggaatc

SEQ ID NO: 125329 - DNA, 25 bp, Artificial
  Probe
gaagaagacctggactcgttggaat

SEQ ID NO: 125330 - DNA, 25 bp, Artificial
  Probe
tagcattcaccatagacacggaagg

SEQ ID NO: 125331 - DNA, 25 bp, Artificial
  Probe
agtagttctgagcaggactgtcaac

SEQ ID NO: 125332 - DNA, 25 bp, Artificial
  Probe
gtcgcttaaacatttccagtttcta

SEQ ID NO: 125333 - DNA, 25 bp, Artificial
  Probe
cccaccctatctgaatcaccatttg

SEQ ID NO: 125334 - DNA, 25 bp, Artificial
  Probe
aaacatttccagtttctatgagtgg

SEQ ID NO: 125335 - DNA, 25 bp, Artificial
  Probe
gtgtctattgtctattgctactgca

SEQ ID NO: 125336 - DNA, 25 bp, Artificial
  Probe
tcccaccctatctgaatcaccattt

SEQ ID NO: 125337 - DNA, 25 bp, Artificial
  Probe
agtaactgatggtaacactggaatc

SEQ ID NO: 125338 - DNA, 25 bp, Artificial
  Probe
gatggtaacactggaatcagagatg

SEQ ID NO: 125339 - DNA, 25 bp, Artificial
  Probe
ttcatttaccaagatacaactccca

SEQ ID NO: 125340 - DNA, 25 bp, Artificial
  Probe
tcatttaccaagatacaactcccac

SEQ ID NO: 125341 - DNA, 25 bp, Artificial
  Probe
atttaccaagatacaactcccacac

SEQ ID NO: 125342 - DNA, 25 bp, Artificial
  Probe
catttaccaagatacaactcccaca

SEQ ID NO: 125343 - DNA, 25 bp, Artificial
  Probe
tcccttcatttaccaagatacaact

SEQ ID NO: 125344 - DNA, 25 bp, Artificial
  Probe
cttcatttaccaagatacaactccc

SEQ ID NO: 125345 - DNA, 25 bp, Artificial
  Probe
ccttcatttaccaagatacaactcc

SEQ ID NO: 125346 - DNA, 25 bp, Artificial
  Probe
cccttcatttaccaagatacaactc

SEQ ID NO: 125347 - DNA, 25 bp, Artificial
  Probe
ttcccttcatttaccaagatacaac

SEQ ID NO: 125348 - DNA, 25 bp, Artificial
  Probe
atggtaacactggaatcagagatgc

SEQ ID NO: 125349 - DNA, 25 bp, Artificial
  Probe
gtaactgatggtaacactggaatca

SEQ ID NO: 125350 - DNA, 25 bp, Artificial
  Probe
attcccttcatttaccaagatacaa

SEQ ID NO: 125351 - DNA, 25 bp, Artificial
  Probe
gtaacactggaatcagagatgcctc

SEQ ID NO: 125352 - DNA, 25 bp, Artificial
  Probe
tgatggtaacactggaatcagagat

SEQ ID NO: 125353 - DNA, 25 bp, Artificial
  Probe
aattcccttcatttaccaagataca

SEQ ID NO: 125354 - DNA, 25 bp, Artificial
  Probe
tttaccaagatacaactcccacacg

SEQ ID NO: 125355 - DNA, 25 bp, Artificial
  Probe
aaagtgaagacagtttaccgtcatg

SEQ ID NO: 125356 - DNA, 25 bp, Artificial
  Probe
aaattcccttcatttaccaagatac

SEQ ID NO: 125357 - DNA, 25 bp, Artificial
  Probe
ttctcgtggggaataaatgtgatat

SEQ ID NO: 125358 - DNA, 25 bp, Artificial
  Probe
tgcccttaaaataaaattcccttca

SEQ ID NO: 125359 - DNA, 25 bp, Artificial
  Probe
ggtaacactggaatcagagatgcct

SEQ ID NO: 125360 - DNA, 25 bp, Artificial
  Probe
tctgcccttaaaataaaattccctt

SEQ ID NO: 125361 - DNA, 25 bp, Artificial
  Probe
ttctgcccttaaaataaaattccct

SEQ ID NO: 125362 - DNA, 25 bp, Artificial
  Probe
ctgcccttaaaataaaattcccttc

SEQ ID NO: 125363 - DNA, 25 bp, Artificial
  Probe
tggtaacactggaatcagagatgcc

SEQ ID NO: 125364 - DNA, 25 bp, Artificial
  Probe
cagtaactgatggtaacactggaat

SEQ ID NO: 125365 - DNA, 25 bp, Artificial
  Probe
tttctgcccttaaaataaaattccc

SEQ ID NO: 125366 - DNA, 25 bp, Artificial
  Probe
gcccttaaaataaaattcccttcat

SEQ ID NO: 125367 - DNA, 25 bp, Artificial
  Probe
taacactggaatcagagatgcctct

SEQ ID NO: 125368 - DNA, 25 bp, Artificial
  Probe
attctcgtggggaataaatgtgata

SEQ ID NO: 125369 - DNA, 25 bp, Artificial
  Probe
gaaccttttctgcccttaaaataaa

SEQ ID NO: 125370 - DNA, 25 bp, Artificial
  Probe
gttactgtgtgggtgaagactcctc

SEQ ID NO: 125371 - DNA, 25 bp, Artificial
  Probe
gaagacagtttaccgtcatgagaag

SEQ ID NO: 125372 - DNA, 25 bp, Artificial
  Probe
tcagtaactgatggtaacactggaa

SEQ ID NO: 125373 - DNA, 25 bp, Artificial
  Probe
aaccttttctgcccttaaaataaaa

SEQ ID NO: 125374 - DNA, 25 bp, Artificial
  Probe
gaaagaaccttttctgcccttaaaa

SEQ ID NO: 125375 - DNA, 25 bp, Artificial
  Probe
cattctcgtggggaataaatgtgat

SEQ ID NO: 125376 - DNA, 25 bp, Artificial
  Probe
aaagaaccttttctgcccttaaaat

SEQ ID NO: 125377 - DNA, 25 bp, Artificial
  Probe
cttaggggttgaccagtgtgtaaag

SEQ ID NO: 125378 - DNA, 25 bp, Artificial
  Probe
ttactgtgtgggtgaagactcctct

SEQ ID NO: 125379 - DNA, 25 bp, Artificial
  Probe
accttttctgcccttaaaataaaat

SEQ ID NO: 125380 - DNA, 25 bp, Artificial
  Probe
gggtgaagactcctcttacaacaga

SEQ ID NO: 125381 - DNA, 25 bp, Artificial
  Probe
ctcagtaactgatggtaacactgga

SEQ ID NO: 125382 - DNA, 25 bp, Artificial
  Probe
ctcattcctctctgttctgttagtt

SEQ ID NO: 125383 - DNA, 25 bp, Artificial
  Probe
tactcattcctctctgttctgttag

SEQ ID NO: 125384 - DNA, 25 bp, Artificial
  Probe
acacaactcacttctaacatagtca

SEQ ID NO: 125385 - DNA, 25 bp, Artificial
  Probe
gtactcattcctctctgttctgtta

SEQ ID NO: 125386 - DNA, 25 bp, Artificial
  Probe
cacaactcacttctaacatagtcag

SEQ ID NO: 125387 - DNA, 25 bp, Artificial
  Probe
acaactcacttctaacatagtcaga

SEQ ID NO: 125388 - DNA, 25 bp, Artificial
  Probe
actcattcctctctgttctgttagt

SEQ ID NO: 125389 - DNA, 25 bp, Artificial
  Probe
aacacaactcacttctaacatagtc

SEQ ID NO: 125390 - DNA, 25 bp, Artificial
  Probe
ttcctctctgttctgttagtttacg

SEQ ID NO: 125391 - DNA, 25 bp, Artificial
  Probe
cgtaaacacaactcacttctaacat

SEQ ID NO: 125392 - DNA, 25 bp, Artificial
  Probe
tcattcctctctgttctgttagttt

SEQ ID NO: 125393 - DNA, 25 bp, Artificial
  Probe
attcctctctgttctgttagtttac

SEQ ID NO: 125394 - DNA, 25 bp, Artificial
  Probe
cattcctctctgttctgttagttta

SEQ ID NO: 125395 - DNA, 25 bp, Artificial
  Probe
aaacacaactcacttctaacatagt

SEQ ID NO: 125396 - DNA, 25 bp, Artificial
  Probe
caactcacttctaacatagtcagaa

SEQ ID NO: 125397 - DNA, 25 bp, Artificial
  Probe
agtactcattcctctctgttctgtt

SEQ ID NO: 125398 - DNA, 25 bp, Artificial
  Probe
acgtaaacacaactcacttctaaca

SEQ ID NO: 125399 - DNA, 25 bp, Artificial
  Probe
gtaaacacaactcacttctaacata

SEQ ID NO: 125400 - DNA, 25 bp, Artificial
  Probe
tcctctctgttctgttagtttacgt

SEQ ID NO: 125401 - DNA, 25 bp, Artificial
  Probe
tttgccatcagtcagctttaactag

SEQ ID NO: 125402 - DNA, 25 bp, Artificial
  Probe
ctttgccatcagtcagctttaacta

SEQ ID NO: 125403 - DNA, 25 bp, Artificial
  Probe
actacacagtactcattcctctctg

SEQ ID NO: 125404 - DNA, 25 bp, Artificial
  Probe
taaacacaactcacttctaacatag

SEQ ID NO: 125405 - DNA, 25 bp, Artificial
  Probe
actactacacagtactcattcctct

SEQ ID NO: 125406 - DNA, 25 bp, Artificial
  Probe
agactactacacagtactcattcct

SEQ ID NO: 125407 - DNA, 25 bp, Artificial
  Probe
cagactactacacagtactcattcc

SEQ ID NO: 125408 - DNA, 25 bp, Artificial
  Probe
tactacacagtactcattcctctct

SEQ ID NO: 125409 - DNA, 25 bp, Artificial
  Probe
gactactacacagtactcattcctc

SEQ ID NO: 125410 - DNA, 25 bp, Artificial
  Probe
cagtactcattcctctctgttctgt

SEQ ID NO: 125411 - DNA, 25 bp, Artificial
  Probe
ctactacacagtactcattcctctc

SEQ ID NO: 125412 - DNA, 25 bp, Artificial
  Probe
gcagactactacacagtactcattc

SEQ ID NO: 125413 - DNA, 25 bp, Artificial
  Probe
tgcagactactacacagtactcatt

SEQ ID NO: 125414 - DNA, 25 bp, Artificial
  Probe
ctttaggttgctactgttttctctt

SEQ ID NO: 125415 - DNA, 25 bp, Artificial
  Probe
atcagtcagctttaactaggcagag

SEQ ID NO: 125416 - DNA, 25 bp, Artificial
  Probe
cctttaggttgctactgttttctct

SEQ ID NO: 125417 - DNA, 25 bp, Artificial
  Probe
catcagtcagctttaactaggcaga

SEQ ID NO: 125418 - DNA, 25 bp, Artificial
  Probe
gacctacgcacacacaacactgata

SEQ ID NO: 125419 - DNA, 25 bp, Artificial
  Probe
cctctctgttctgttagtttacgta

SEQ ID NO: 125420 - DNA, 25 bp, Artificial
  Probe
ttgccatcagtcagctttaactagg

SEQ ID NO: 125421 - DNA, 25 bp, Artificial
  Probe
tacgtaaacacaactcacttctaac

SEQ ID NO: 125422 - DNA, 25 bp, Artificial
  Probe
gatttggagtactgaactagctctg

SEQ ID NO: 125423 - DNA, 25 bp, Artificial
  Probe
aactcacttctaacatagtcagaaa

SEQ ID NO: 125424 - DNA, 25 bp, Artificial
  Probe
tgatttggagtactgaactagctct

SEQ ID NO: 125425 - DNA, 25 bp, Artificial
  Probe
gtgatttggagtactgaactagctc

SEQ ID NO: 125426 - DNA, 25 bp, Artificial
  Probe
cagtcagctttaactaggcagagtc

SEQ ID NO: 125427 - DNA, 25 bp, Artificial
  Probe
gtctatgccaagaacattcaggatg

SEQ ID NO: 125428 - DNA, 25 bp, Artificial
  Probe
taggactgtctatgccaagaacatt

SEQ ID NO: 125429 - DNA, 25 bp, Artificial
  Probe
ctctaggactgtctatgccaagaac

SEQ ID NO: 125430 - DNA, 25 bp, Artificial
  Probe
gactgtctatgccaagaacattcag

SEQ ID NO: 125431 - DNA, 25 bp, Artificial
  Probe
tgtctatgccaagaacattcaggat

SEQ ID NO: 125432 - DNA, 25 bp, Artificial
  Probe
ctaggactgtctatgccaagaacat

SEQ ID NO: 125433 - DNA, 25 bp, Artificial
  Probe
tatagagagagggaaggatacagag

SEQ ID NO: 125434 - DNA, 25 bp, Artificial
  Probe
actctaggactgtctatgccaagaa

SEQ ID NO: 125435 - DNA, 25 bp, Artificial
  Probe
aggactgtctatgccaagaacattc

SEQ ID NO: 125436 - DNA, 25 bp, Artificial
  Probe
ctgtctatgccaagaacattcagga

SEQ ID NO: 125437 - DNA, 25 bp, Artificial
  Probe
atgtgtctcatctcctagcctagtg

SEQ ID NO: 125438 - DNA, 25 bp, Artificial
  Probe
ggctgtatagagagagggaaggata

SEQ ID NO: 125439 - DNA, 25 bp, Artificial
  Probe
ggactgtctatgccaagaacattca

SEQ ID NO: 125440 - DNA, 25 bp, Artificial
  Probe
tctaggactgtctatgccaagaaca

SEQ ID NO: 125441 - DNA, 25 bp, Artificial
  Probe
actgtctatgccaagaacattcagg

SEQ ID NO: 125442 - DNA, 25 bp, Artificial
  Probe
atagagagagggaaggatacagagc

SEQ ID NO: 125443 - DNA, 25 bp, Artificial
  Probe
gactctaggactgtctatgccaaga

SEQ ID NO: 125444 - DNA, 25 bp, Artificial
  Probe
gtatagagagagggaaggatacaga

SEQ ID NO: 125445 - DNA, 25 bp, Artificial
  Probe
gctgtatagagagagggaaggatac

SEQ ID NO: 125446 - DNA, 25 bp, Artificial
  Probe
ctatgccaagaacattcaggatgtg

SEQ ID NO: 125447 - DNA, 25 bp, Artificial
  Probe
tctatgccaagaacattcaggatgt

SEQ ID NO: 125448 - DNA, 25 bp, Artificial
  Probe
tgtgtctcatctcctagcctagtgt

SEQ ID NO: 125449 - DNA, 25 bp, Artificial
  Probe
tggctgtatagagagagggaaggat

SEQ ID NO: 125450 - DNA, 25 bp, Artificial
  Probe
gatgtgtctcatctcctagcctagt

SEQ ID NO: 125451 - DNA, 25 bp, Artificial
  Probe
tatgccaagaacattcaggatgtgg

SEQ ID NO: 125452 - DNA, 25 bp, Artificial
  Probe
tagagagagggaaggatacagagct

SEQ ID NO: 125453 - DNA, 25 bp, Artificial
  Probe
ggatgtgtctcatctcctagcctag

SEQ ID NO: 125454 - DNA, 25 bp, Artificial
  Probe
ctggctgtatagagagagggaagga

SEQ ID NO: 125455 - DNA, 25 bp, Artificial
  Probe
agactctaggactgtctatgccaag

SEQ ID NO: 125456 - DNA, 25 bp, Artificial
  Probe
aatcagggatgtgtctcatctccta

SEQ ID NO: 125457 - DNA, 25 bp, Artificial
  Probe
gttcatcccagactctaggactgtc

SEQ ID NO: 125458 - DNA, 25 bp, Artificial
  Probe
cagactctaggactgtctatgccaa

SEQ ID NO: 125459 - DNA, 25 bp, Artificial
  Probe
atcagggatgtgtctcatctcctag

SEQ ID NO: 125460 - DNA, 25 bp, Artificial
  Probe
tacagccaaatcagggatgtgtctc

SEQ ID NO: 125461 - DNA, 25 bp, Artificial
  Probe
ctacagccaaatcagggatgtgtct

SEQ ID NO: 125462 - DNA, 25 bp, Artificial
  Probe
aaatcagggatgtgtctcatctcct

SEQ ID NO: 125463 - DNA, 25 bp, Artificial
  Probe
caaatcagggatgtgtctcatctcc

SEQ ID NO: 125464 - DNA, 25 bp, Artificial
  Probe
ccaaatcagggatgtgtctcatctc

SEQ ID NO: 125465 - DNA, 25 bp, Artificial
  Probe
atcccagactctaggactgtctatg

SEQ ID NO: 125466 - DNA, 25 bp, Artificial
  Probe
catcccagactctaggactgtctat

SEQ ID NO: 125467 - DNA, 25 bp, Artificial
  Probe
ttttgacaaagcagacacagaattc

SEQ ID NO: 125468 - DNA, 25 bp, Artificial
  Probe
tgtatagagagagggaaggatacag

SEQ ID NO: 125469 - DNA, 25 bp, Artificial
  Probe
ctgtatagagagagggaaggataca

SEQ ID NO: 125470 - DNA, 25 bp, Artificial
  Probe
cagccaaatcagggatgtgtctcat

SEQ ID NO: 125471 - DNA, 25 bp, Artificial
  Probe
tcatcccagactctaggactgtcta

SEQ ID NO: 125472 - DNA, 25 bp, Artificial
  Probe
acctactgctgtgttggaatcatat

SEQ ID NO: 125473 - DNA, 25 bp, Artificial
  Probe
ggttaagattgctgttgttctgtct

SEQ ID NO: 125474 - DNA, 25 bp, Artificial
  Probe
gacctactgctgtgttggaatcata

SEQ ID NO: 125475 - DNA, 25 bp, Artificial
  Probe
agattgctgttgttctgtcttgttg

SEQ ID NO: 125476 - DNA, 25 bp, Artificial
  Probe
gattgctgttgttctgtcttgttgg

SEQ ID NO: 125477 - DNA, 25 bp, Artificial
  Probe
atgggtaactcatctggtaaagaag

SEQ ID NO: 125478 - DNA, 25 bp, Artificial
  Probe
gaaatgggtaactcatctggtaaag

SEQ ID NO: 125479 - DNA, 25 bp, Artificial
  Probe
aatgggtaactcatctggtaaagaa

SEQ ID NO: 125480 - DNA, 25 bp, Artificial
  Probe
aaatgggtaactcatctggtaaaga

SEQ ID NO: 125481 - DNA, 25 bp, Artificial
  Probe
agaaatgggtaactcatctggtaaa

SEQ ID NO: 125482 - DNA, 25 bp, Artificial
  Probe
aagaaatgggtaactcatctggtaa

SEQ ID NO: 125483 - DNA, 25 bp, Artificial
  Probe
aaagaaatgggtaactcatctggta

SEQ ID NO: 125484 - DNA, 25 bp, Artificial
  Probe
tagagtgtcgaagatgccatgttaa

SEQ ID NO: 125485 - DNA, 25 bp, Artificial
  Probe
tgggtaactcatctggtaaagaaga

SEQ ID NO: 125486 - DNA, 25 bp, Artificial
  Probe
ggtttgcctacggtagttagattaa

SEQ ID NO: 125487 - DNA, 25 bp, Artificial
  Probe
ttaagattgctgttgttctgtcttg

SEQ ID NO: 125488 - DNA, 25 bp, Artificial
  Probe
gttaagattgctgttgttctgtctt

SEQ ID NO: 125489 - DNA, 25 bp, Artificial
  Probe
aagaagattcctaagaaggcacctt

SEQ ID NO: 125490 - DNA, 25 bp, Artificial
  Probe
ttaggtggctctttggataaggaat

SEQ ID NO: 125491 - DNA, 25 bp, Artificial
  Probe
taagattgctgttgttctgtcttgt

SEQ ID NO: 125492 - DNA, 25 bp, Artificial
  Probe
ctagagtgtcgaagatgccatgtta

SEQ ID NO: 125493 - DNA, 25 bp, Artificial
  Probe
ctgtgttggaatcatatggatgcta

SEQ ID NO: 125494 - DNA, 25 bp, Artificial
  Probe
tttaggtggctctttggataaggaa

SEQ ID NO: 125495 - DNA, 25 bp, Artificial
  Probe
tgtgttggaatcatatggatgctac

SEQ ID NO: 125496 - DNA, 25 bp, Artificial
  Probe
taggtggctctttggataaggaatc

SEQ ID NO: 125497 - DNA, 25 bp, Artificial
  Probe
ttgcctacggtagttagattaatta

SEQ ID NO: 125498 - DNA, 25 bp, Artificial
  Probe
ctactgctgtgttggaatcatatgg

SEQ ID NO: 125499 - DNA, 25 bp, Artificial
  Probe
cctactgctgtgttggaatcatatg

SEQ ID NO: 125500 - DNA, 25 bp, Artificial
  Probe
gttggaatcatatggatgctacctg

SEQ ID NO: 125501 - DNA, 25 bp, Artificial
  Probe
aagattgctgttgttctgtcttgtt

SEQ ID NO: 125502 - DNA, 25 bp, Artificial
  Probe
tactgctgtgttggaatcatatgga

SEQ ID NO: 125503 - DNA, 25 bp, Artificial
  Probe
taaagaagattcctaagaaggcacc

SEQ ID NO: 125504 - DNA, 25 bp, Artificial
  Probe
ggtaaagaagattcctaagaaggca

SEQ ID NO: 125505 - DNA, 25 bp, Artificial
  Probe
tggtaaagaagattcctaagaaggc

SEQ ID NO: 125506 - DNA, 25 bp, Artificial
  Probe
tgttggaatcatatggatgctacct

SEQ ID NO: 125507 - DNA, 25 bp, Artificial
  Probe
gtgttggaatcatatggatgctacc

SEQ ID NO: 125508 - DNA, 25 bp, Artificial
  Probe
tgcctacggtagttagattaattat

SEQ ID NO: 125509 - DNA, 25 bp, Artificial
  Probe
gggtttgcctacggtagttagatta

SEQ ID NO: 125510 - DNA, 25 bp, Artificial
  Probe
gtaaagaagattcctaagaaggcac

SEQ ID NO: 125511 - DNA, 25 bp, Artificial
  Probe
ttggaatcatatggatgctacctga

SEQ ID NO: 125512 - DNA, 25 bp, Artificial
  Probe
tttcagggttaagattgctgttgtt

SEQ ID NO: 125513 - DNA, 25 bp, Artificial
  Probe
agagtgtcgaagatgccatgttaag

SEQ ID NO: 125514 - DNA, 25 bp, Artificial
  Probe
gtttgcctacggtagttagattaat

SEQ ID NO: 125515 - DNA, 25 bp, Artificial
  Probe
tctggtaaagaagattcctaagaag

SEQ ID NO: 125516 - DNA, 25 bp, Artificial
  Probe
gggttaagattgctgttgttctgtc

SEQ ID NO: 125517 - DNA, 25 bp, Artificial
  Probe
ttccttactatctctctccttctcg

SEQ ID NO: 125518 - DNA, 25 bp, Artificial
  Probe
cattccttactatctctctccttct

SEQ ID NO: 125519 - DNA, 25 bp, Artificial
  Probe
tcattccttactatctctctccttc

SEQ ID NO: 125520 - DNA, 25 bp, Artificial
  Probe
cttcattccttactatctctctcct

SEQ ID NO: 125521 - DNA, 25 bp, Artificial
  Probe
tcttcattccttactatctctctcc

SEQ ID NO: 125522 - DNA, 25 bp, Artificial
  Probe
attccttactatctctctccttctc

SEQ ID NO: 125523 - DNA, 25 bp, Artificial
  Probe
cctgagtcttcattccttactatct

SEQ ID NO: 125524 - DNA, 25 bp, Artificial
  Probe
ttcattccttactatctctctcctt

SEQ ID NO: 125525 - DNA, 25 bp, Artificial
  Probe
aatatgaacaactctcttctgaagc

SEQ ID NO: 125526 - DNA, 25 bp, Artificial
  Probe
gtcttcattccttactatctctctc

SEQ ID NO: 125527 - DNA, 25 bp, Artificial
  Probe
tgaatatgaacaactctcttctgaa

SEQ ID NO: 125528 - DNA, 25 bp, Artificial
  Probe
tccttactatctctctccttctcgc

SEQ ID NO: 125529 - DNA, 25 bp, Artificial
  Probe
tgagtcttcattccttactatctct

SEQ ID NO: 125530 - DNA, 25 bp, Artificial
  Probe
agtcttcattccttactatctctct

SEQ ID NO: 125531 - DNA, 25 bp, Artificial
  Probe
ctgagtcttcattccttactatctc

SEQ ID NO: 125532 - DNA, 25 bp, Artificial
  Probe
gagtcttcattccttactatctctc

SEQ ID NO: 125533 - DNA, 25 bp, Artificial
  Probe
tccatgtcatccgtatcaacaagat

SEQ ID NO: 125534 - DNA, 25 bp, Artificial
  Probe
gaatatgaacaactctcttctgaag

SEQ ID NO: 125535 - DNA, 25 bp, Artificial
  Probe
ttctgtgttgtgtgtttgtctcttt

SEQ ID NO: 125536 - DNA, 25 bp, Artificial
  Probe
tttctgtgttgtgtgtttgtctctt

SEQ ID NO: 125537 - DNA, 25 bp, Artificial
  Probe
ccctgagtcttcattccttactatc

SEQ ID NO: 125538 - DNA, 25 bp, Artificial
  Probe
ttccatgtcatccgtatcaacaaga

SEQ ID NO: 125539 - DNA, 25 bp, Artificial
  Probe
gtaagaacaagccatacccaaagtc

SEQ ID NO: 125540 - DNA, 25 bp, Artificial
  Probe
tgttggttgtctccagtctatcttg

SEQ ID NO: 125541 - DNA, 25 bp, Artificial
  Probe
gtgttggttgtctccagtctatctt

SEQ ID NO: 125542 - DNA, 25 bp, Artificial
  Probe
gtttctgtgttgtgtgtttgtctct

SEQ ID NO: 125543 - DNA, 25 bp, Artificial
  Probe
taagaacaagccatacccaaagtct

SEQ ID NO: 125544 - DNA, 25 bp, Artificial
  Probe
gccctgagtcttcattccttactat

SEQ ID NO: 125545 - DNA, 25 bp, Artificial
  Probe
aaagtgggatgataagcatgacaaa

SEQ ID NO: 125546 - DNA, 25 bp, Artificial
  Probe
aagtgggatgataagcatgacaaag

SEQ ID NO: 125547 - DNA, 25 bp, Artificial
  Probe
gatgataagcatgacaaaggtgagg

SEQ ID NO: 125548 - DNA, 25 bp, Artificial
  Probe
ggatgataagcatgacaaaggtgag

SEQ ID NO: 125549 - DNA, 25 bp, Artificial
  Probe
tattgatccactctatagggcattg

SEQ ID NO: 125550 - DNA, 25 bp, Artificial
  Probe
gtattgatccactctatagggcatt

SEQ ID NO: 125551 - DNA, 25 bp, Artificial
  Probe
tgttatcgctattgtaagaacaagc

SEQ ID NO: 125552 - DNA, 25 bp, Artificial
  Probe
gttatcgctattgtaagaacaagcc

SEQ ID NO: 125553 - DNA, 25 bp, Artificial
  Probe
atcgctattgtaagaacaagccata

SEQ ID NO: 125554 - DNA, 25 bp, Artificial
  Probe
tatcgctattgtaagaacaagccat

SEQ ID NO: 125555 - DNA, 25 bp, Artificial
  Probe
atgtcatccgtatcaacaagatgtt

SEQ ID NO: 125556 - DNA, 25 bp, Artificial
  Probe
ttatcgctattgtaagaacaagcca

SEQ ID NO: 125557 - DNA, 25 bp, Artificial
  Probe
ggtgttatcgctattgtaagaacaa

SEQ ID NO: 125558 - DNA, 25 bp, Artificial
  Probe
catgtcatccgtatcaacaagatgt

SEQ ID NO: 125559 - DNA, 25 bp, Artificial
  Probe
tttccatgtcatccgtatcaacaag

SEQ ID NO: 125560 - DNA, 25 bp, Artificial
  Probe
ggtttctgtgttgtgtgtttgtctc

SEQ ID NO: 125561 - DNA, 25 bp, Artificial
  Probe
ccggtgttatcgctattgtaagaac

SEQ ID NO: 125562 - DNA, 25 bp, Artificial
  Probe
tagtatctaagatgctgcatgtgga

SEQ ID NO: 125563 - DNA, 25 bp, Artificial
  Probe
ttagtatctaagatgctgcatgtgg

SEQ ID NO: 125564 - DNA, 25 bp, Artificial
  Probe
ctcaaacccagtaacatcctgtatg

SEQ ID NO: 125565 - DNA, 25 bp, Artificial
  Probe
tacatattctgcactcagtagctcc

SEQ ID NO: 125566 - DNA, 25 bp, Artificial
  Probe
agtatctaagatgctgcatgtggac

SEQ ID NO: 125567 - DNA, 25 bp, Artificial
  Probe
gaatgcctacgaatatgcgactttg

SEQ ID NO: 125568 - DNA, 25 bp, Artificial
  Probe
ctacgaatatgcgactttggctttg

SEQ ID NO: 125569 - DNA, 25 bp, Artificial
  Probe
ctacatattctgcactcagtagctc

SEQ ID NO: 125570 - DNA, 25 bp, Artificial
  Probe
cctcaaacccagtaacatcctgtat

SEQ ID NO: 125571 - DNA, 25 bp, Artificial
  Probe
cagctacatattctgcactcagtag

SEQ ID NO: 125572 - DNA, 25 bp, Artificial
  Probe
catattctgcactcagtagctccaa

SEQ ID NO: 125573 - DNA, 25 bp, Artificial
  Probe
gtatctaagatgctgcatgtggacc

SEQ ID NO: 125574 - DNA, 25 bp, Artificial
  Probe
aatggagtcctaaaggaagcaacta

SEQ ID NO: 125575 - DNA, 25 bp, Artificial
  Probe
atggagtcctaaaggaagcaactag

SEQ ID NO: 125576 - DNA, 25 bp, Artificial
  Probe
ctacgatgaaggctgtgacatatgg

SEQ ID NO: 125577 - DNA, 25 bp, Artificial
  Probe
gtaactcagggttcatctgtccaag

SEQ ID NO: 125578 - DNA, 25 bp, Artificial
  Probe
aagtggaatggagtcctaaaggaag

SEQ ID NO: 125579 - DNA, 25 bp, Artificial
  Probe
cagaccaagtggaatggagtcctaa

SEQ ID NO: 125580 - DNA, 25 bp, Artificial
  Probe
ggctacgatgaaggctgtgacatat

SEQ ID NO: 125581 - DNA, 25 bp, Artificial
  Probe
cctacgaatatgcgactttggcttt

SEQ ID NO: 125582 - DNA, 25 bp, Artificial
  Probe
caagtggaatggagtcctaaaggaa

SEQ ID NO: 125583 - DNA, 25 bp, Artificial
  Probe
atattctgcactcagtagctccaaa

SEQ ID NO: 125584 - DNA, 25 bp, Artificial
  Probe
tacgatgaaggctgtgacatatgga

SEQ ID NO: 125585 - DNA, 25 bp, Artificial
  Probe
aatgcctacgaatatgcgactttgg

SEQ ID NO: 125586 - DNA, 25 bp, Artificial
  Probe
acctcaaacccagtaacatcctgta

SEQ ID NO: 125587 - DNA, 25 bp, Artificial
  Probe
acatattctgcactcagtagctcca

SEQ ID NO: 125588 - DNA, 25 bp, Artificial
  Probe
cgaatgcctacgaatatgcgacttt

SEQ ID NO: 125589 - DNA, 25 bp, Artificial
  Probe
gaccaagtggaatggagtcctaaag

SEQ ID NO: 125590 - DNA, 25 bp, Artificial
  Probe
caaacccagtaacatcctgtatgtg

SEQ ID NO: 125591 - DNA, 25 bp, Artificial
  Probe
tcaaacccagtaacatcctgtatgt

SEQ ID NO: 125592 - DNA, 25 bp, Artificial
  Probe
gctacgatgaaggctgtgacatatg

SEQ ID NO: 125593 - DNA, 25 bp, Artificial
  Probe
gaatggagtcctaaaggaagcaact

SEQ ID NO: 125594 - DNA, 25 bp, Artificial
  Probe
aaggacttagtatctaagatgctgc

SEQ ID NO: 125595 - DNA, 25 bp, Artificial
  Probe
taataaacctacagtccagtcaaaa

SEQ ID NO: 125596 - DNA, 25 bp, Artificial
  Probe
ccaaggacttagtatctaagatgct

SEQ ID NO: 125597 - DNA, 25 bp, Artificial
  Probe
agaccaagtggaatggagtcctaaa

SEQ ID NO: 125598 - DNA, 25 bp, Artificial
  Probe
tattctgcactcagtagctccaaac

SEQ ID NO: 125599 - DNA, 25 bp, Artificial
  Probe
caaggacttagtatctaagatgctg

SEQ ID NO: 125600 - DNA, 25 bp, Artificial
  Probe
taactcagggttcatctgtccaagg

SEQ ID NO: 125601 - DNA, 25 bp, Artificial
  Probe
aaacccagtaacatcctgtatgtgg

SEQ ID NO: 125602 - DNA, 25 bp, Artificial
  Probe
cttctcatgacaccttgctacacag

SEQ ID NO: 125603 - DNA, 25 bp, Artificial
  Probe
ggacttagtatctaagatgctgcat

SEQ ID NO: 125604 - DNA, 25 bp, Artificial
  Probe
ctgtatgtggatgagtctgggaacc

SEQ ID NO: 125605 - DNA, 25 bp, Artificial
  Probe
cctgtatgtggatgagtctgggaac

SEQ ID NO: 125606 - DNA, 25 bp, Artificial
  Probe
acttagtatctaagatgctgcatgt

SEQ ID NO: 125607 - DNA, 25 bp, Artificial
  Probe
tttcatgggtagccactttgacagg

SEQ ID NO: 125608 - DNA, 25 bp, Artificial
  Probe
cagatcaggacccttaggaaatgtg

SEQ ID NO: 125609 - DNA, 25 bp, Artificial
  Probe
atgaggtcgaattacaatttccctt

SEQ ID NO: 125610 - DNA, 25 bp, Artificial
  Probe
catgaggtcgaattacaatttccct

SEQ ID NO: 125611 - DNA, 25 bp, Artificial
  Probe
tgaggtcgaattacaatttcccttg

SEQ ID NO: 125612 - DNA, 25 bp, Artificial
  Probe
ctggctgtggacaaaataatgaaag

SEQ ID NO: 125613 - DNA, 25 bp, Artificial
  Probe
tctggctgtggacaaaataatgaaa

SEQ ID NO: 125614 - DNA, 25 bp, Artificial
  Probe
ccttatcatgaggtcgaattacaat

SEQ ID NO: 125615 - DNA, 25 bp, Artificial
  Probe
gaggtcgaattacaatttcccttgg

SEQ ID NO: 125616 - DNA, 25 bp, Artificial
  Probe
ccgatataaccatgttcgagactgg

SEQ ID NO: 125617 - DNA, 25 bp, Artificial
  Probe
gagcagatcaggacccttaggaaat

SEQ ID NO: 125618 - DNA, 25 bp, Artificial
  Probe
cttatcatgaggtcgaattacaatt

SEQ ID NO: 125619 - DNA, 25 bp, Artificial
  Probe
atcatgaggtcgaattacaatttcc

SEQ ID NO: 125620 - DNA, 25 bp, Artificial
  Probe
agcagatcaggacccttaggaaatg

SEQ ID NO: 125621 - DNA, 25 bp, Artificial
  Probe
tcatgaggtcgaattacaatttccc

SEQ ID NO: 125622 - DNA, 25 bp, Artificial
  Probe
gccgatataaccatgttcgagactg

SEQ ID NO: 125623 - DNA, 25 bp, Artificial
  Probe
agatcaggacccttaggaaatgtgc

SEQ ID NO: 125624 - DNA, 25 bp, Artificial
  Probe
gcagatcaggacccttaggaaatgt

SEQ ID NO: 125625 - DNA, 25 bp, Artificial
  Probe
cccttatcatgaggtcgaattacaa

SEQ ID NO: 125626 - DNA, 25 bp, Artificial
  Probe
aggtcgaattacaatttcccttggc

SEQ ID NO: 125627 - DNA, 25 bp, Artificial
  Probe
tatcatgaggtcgaattacaatttc

SEQ ID NO: 125628 - DNA, 25 bp, Artificial
  Probe
tgagcagatcaggacccttaggaaa

SEQ ID NO: 125629 - DNA, 25 bp, Artificial
  Probe
ttatcatgaggtcgaattacaattt

SEQ ID NO: 125630 - DNA, 25 bp, Artificial
  Probe
cgccgatataaccatgttcgagact

SEQ ID NO: 125631 - DNA, 25 bp, Artificial
  Probe
aaagtgggcttccagagctttctat

SEQ ID NO: 125632 - DNA, 25 bp, Artificial
  Probe
ttccccttatcatgaggtcgaatta

SEQ ID NO: 125633 - DNA, 25 bp, Artificial
  Probe
aagtgggcttccagagctttctatc

SEQ ID NO: 125634 - DNA, 25 bp, Artificial
  Probe
ggtcgaattacaatttcccttggcc

SEQ ID NO: 125635 - DNA, 25 bp, Artificial
  Probe
tccccttatcatgaggtcgaattac

SEQ ID NO: 125636 - DNA, 25 bp, Artificial
  Probe
ccccttatcatgaggtcgaattaca

SEQ ID NO: 125637 - DNA, 25 bp, Artificial
  Probe
attccccttatcatgaggtcgaatt

SEQ ID NO: 125638 - DNA, 25 bp, Artificial
  Probe
aattccccttatcatgaggtcgaat

SEQ ID NO: 125639 - DNA, 25 bp, Artificial
  Probe
gtcgaattacaatttcccttggccg

SEQ ID NO: 125640 - DNA, 25 bp, Artificial
  Probe
caattccccttatcatgaggtcgaa

SEQ ID NO: 125641 - DNA, 25 bp, Artificial
  Probe
aaaagtgggcttccagagctttcta

SEQ ID NO: 125642 - DNA, 25 bp, Artificial
  Probe
ccaattccccttatcatgaggtcga

SEQ ID NO: 125643 - DNA, 25 bp, Artificial
  Probe
ccccaattccccttatcatgaggtc

SEQ ID NO: 125644 - DNA, 25 bp, Artificial
  Probe
gaccccaattccccttatcatgagg

SEQ ID NO: 125645 - DNA, 25 bp, Artificial
  Probe
ggaccccaattccccttatcatgag

SEQ ID NO: 125646 - DNA, 25 bp, Artificial
  Probe
cccaattccccttatcatgaggtcg

SEQ ID NO: 125647 - DNA, 25 bp, Artificial
  Probe
accccaattccccttatcatgaggt

SEQ ID NO: 125648 - DNA, 25 bp, Artificial
  Probe
agatcaagcaagaggagactactag

SEQ ID NO: 125649 - DNA, 25 bp, Artificial
  Probe
gagatcaagcaagaggagactacta

SEQ ID NO: 125650 - DNA, 25 bp, Artificial
  Probe
ttctaagaagagcaattcagcaact

SEQ ID NO: 125651 - DNA, 25 bp, Artificial
  Probe
tctaagaagagcaattcagcaactc

SEQ ID NO: 125652 - DNA, 25 bp, Artificial
  Probe
gatcaagcaagaggagactactagg

SEQ ID NO: 125653 - DNA, 25 bp, Artificial
  Probe
atcaagcaagaggagactactaggt

SEQ ID NO: 125654 - DNA, 25 bp, Artificial
  Probe
ctaagaagagcaattcagcaactcc

SEQ ID NO: 125655 - DNA, 25 bp, Artificial
  Probe
agaaacaagaggaagtgaaacaaac

SEQ ID NO: 125656 - DNA, 25 bp, Artificial
  Probe
caagaaacaagaggaagtgaaacaa

SEQ ID NO: 125657 - DNA, 25 bp, Artificial
  Probe
tagaacacaagaaacaagaggaagt

SEQ ID NO: 125658 - DNA, 25 bp, Artificial
  Probe
caagaggaagtgaaacaaaccatta

SEQ ID NO: 125659 - DNA, 25 bp, Artificial
  Probe
aagaaacaagaggaagtgaaacaaa

SEQ ID NO: 125660 - DNA, 25 bp, Artificial
  Probe
ttagaacacaagaaacaagaggaag

SEQ ID NO: 125661 - DNA, 25 bp, Artificial
  Probe
gaaacaagaggaagtgaaacaaacc

SEQ ID NO: 125662 - DNA, 25 bp, Artificial
  Probe
taagaagagcaattcagcaactcca

SEQ ID NO: 125663 - DNA, 25 bp, Artificial
  Probe
acttagaacacaagaaacaagagga

SEQ ID NO: 125664 - DNA, 25 bp, Artificial
  Probe
tgatgaggaaacttagaacacaaga

SEQ ID NO: 125665 - DNA, 25 bp, Artificial
  Probe
acaagaaacaagaggaagtgaaaca

SEQ ID NO: 125666 - DNA, 25 bp, Artificial
  Probe
ctgatgaggaaacttagaacacaag

SEQ ID NO: 125667 - DNA, 25 bp, Artificial
  Probe
aacttagaacacaagaaacaagagg

SEQ ID NO: 125668 - DNA, 25 bp, Artificial
  Probe
gaggaaacttagaacacaagaaaca

SEQ ID NO: 125669 - DNA, 25 bp, Artificial
  Probe
tgaggaaacttagaacacaagaaac

SEQ ID NO: 125670 - DNA, 25 bp, Artificial
  Probe
aagaggaagtgaaacaaaccattat

SEQ ID NO: 125671 - DNA, 25 bp, Artificial
  Probe
acaagaggaagtgaaacaaaccatt

SEQ ID NO: 125672 - DNA, 25 bp, Artificial
  Probe
aacaagaggaagtgaaacaaaccat

SEQ ID NO: 125673 - DNA, 25 bp, Artificial
  Probe
cttagaacacaagaaacaagaggaa

SEQ ID NO: 125674 - DNA, 25 bp, Artificial
  Probe
aggaaacttagaacacaagaaacaa

SEQ ID NO: 125675 - DNA, 25 bp, Artificial
  Probe
gatgaggaaacttagaacacaagaa

SEQ ID NO: 125676 - DNA, 25 bp, Artificial
  Probe
aagcaagaggagactactaggtcat

SEQ ID NO: 125677 - DNA, 25 bp, Artificial
  Probe
aaacaagaggaagtgaaacaaacca

SEQ ID NO: 125678 - DNA, 25 bp, Artificial
  Probe
gggtcaacataaacaactcctttaa

SEQ ID NO: 125679 - DNA, 25 bp, Artificial
  Probe
ggaaacttagaacacaagaaacaag

SEQ ID NO: 125680 - DNA, 25 bp, Artificial
  Probe
atgaggaaacttagaacacaagaaa

SEQ ID NO: 125681 - DNA, 25 bp, Artificial
  Probe
agaggaagtgaaacaaaccattata

SEQ ID NO: 125682 - DNA, 25 bp, Artificial
  Probe
ggagatcaagcaagaggagactact

SEQ ID NO: 125683 - DNA, 25 bp, Artificial
  Probe
aaacaactcctttaatgagagacgg

SEQ ID NO: 125684 - DNA, 25 bp, Artificial
  Probe
agcaagaggagactactaggtcatc

SEQ ID NO: 125685 - DNA, 25 bp, Artificial
  Probe
taaacaactcctttaatgagagacg

SEQ ID NO: 125686 - DNA, 25 bp, Artificial
  Probe
tcaagcaagaggagactactaggtc

SEQ ID NO: 125687 - DNA, 25 bp, Artificial
  Probe
gaagtgaaacaaaccattataagcg

SEQ ID NO: 125688 - DNA, 25 bp, Artificial
  Probe
ggaagtgaaacaaaccattataagc

SEQ ID NO: 125689 - DNA, 25 bp, Artificial
  Probe
aaacttagaacacaagaaacaagag

SEQ ID NO: 125690 - DNA, 25 bp, Artificial
  Probe
gaaacttagaacacaagaaacaaga

SEQ ID NO: 125691 - DNA, 25 bp, Artificial
  Probe
gatattcggtaggacggacatctgt

SEQ ID NO: 125692 - DNA, 25 bp, Artificial
  Probe
cacaagaaacaagaggaagtgaaac

SEQ ID NO: 125693 - DNA, 25 bp, Artificial
  Probe
gaagtgctaggattacagaagacat

SEQ ID NO: 125694 - DNA, 25 bp, Artificial
  Probe
aagtgctaggattacagaagacatc

SEQ ID NO: 125695 - DNA, 25 bp, Artificial
  Probe
gtgctaggattacagaagacatctc

SEQ ID NO: 125696 - DNA, 25 bp, Artificial
  Probe
tgaagtgctaggattacagaagaca

SEQ ID NO: 125697 - DNA, 25 bp, Artificial
  Probe
agtgctaggattacagaagacatct

SEQ ID NO: 125698 - DNA, 25 bp, Artificial
  Probe
ctgaagtgctaggattacagaagac

SEQ ID NO: 125699 - DNA, 25 bp, Artificial
  Probe
ctaggattacagaagacatctccat

SEQ ID NO: 125700 - DNA, 25 bp, Artificial
  Probe
gctaggattacagaagacatctcca

SEQ ID NO: 125701 - DNA, 25 bp, Artificial
  Probe
tgctaggattacagaagacatctcc

SEQ ID NO: 125702 - DNA, 25 bp, Artificial
  Probe
aatgtgtagtgactttccttgttct

SEQ ID NO: 125703 - DNA, 25 bp, Artificial
  Probe
atgtgtagtgactttccttgttcta

SEQ ID NO: 125704 - DNA, 25 bp, Artificial
  Probe
tctaatgtgtagtgactttccttgt

SEQ ID NO: 125705 - DNA, 25 bp, Artificial
  Probe
taggattacagaagacatctccatg

SEQ ID NO: 125706 - DNA, 25 bp, Artificial
  Probe
taatgtgtagtgactttccttgttc

SEQ ID NO: 125707 - DNA, 25 bp, Artificial
  Probe
ctaatgtgtagtgactttccttgtt

SEQ ID NO: 125708 - DNA, 25 bp, Artificial
  Probe
tgtgtagtgactttccttgttctag

SEQ ID NO: 125709 - DNA, 25 bp, Artificial
  Probe
cgtctgctcagtcattatactttaa

SEQ ID NO: 125710 - DNA, 25 bp, Artificial
  Probe
aattcctttgtctaatgtgtagtga

SEQ ID NO: 125711 - DNA, 25 bp, Artificial
  Probe
tgtctaatgtgtagtgactttcctt

SEQ ID NO: 125712 - DNA, 25 bp, Artificial
  Probe
ttgtctaatgtgtagtgactttcct

SEQ ID NO: 125713 - DNA, 25 bp, Artificial
  Probe
tcctttgtctaatgtgtagtgactt

SEQ ID NO: 125714 - DNA, 25 bp, Artificial
  Probe
ttcctttgtctaatgtgtagtgact

SEQ ID NO: 125715 - DNA, 25 bp, Artificial
  Probe
agaagtatcctttggtacaattcct

SEQ ID NO: 125716 - DNA, 25 bp, Artificial
  Probe
gtctaatgtgtagtgactttccttg

SEQ ID NO: 125717 - DNA, 25 bp, Artificial
  Probe
agtatcctttggtacaattcctttg

SEQ ID NO: 125718 - DNA, 25 bp, Artificial
  Probe
tttgtctaatgtgtagtgactttcc

SEQ ID NO: 125719 - DNA, 25 bp, Artificial
  Probe
cctttgtctaatgtgtagtgacttt

SEQ ID NO: 125720 - DNA, 25 bp, Artificial
  Probe
caattcctttgtctaatgtgtagtg

SEQ ID NO: 125721 - DNA, 25 bp, Artificial
  Probe
attcctttgtctaatgtgtagtgac

SEQ ID NO: 125722 - DNA, 25 bp, Artificial
  Probe
gaagtatcctttggtacaattcctt

SEQ ID NO: 125723 - DNA, 25 bp, Artificial
  Probe
tcttcatgttctttggaatggcttt

SEQ ID NO: 125724 - DNA, 25 bp, Artificial
  Probe
tgctcagtcattatactttaacagt

SEQ ID NO: 125725 - DNA, 25 bp, Artificial
  Probe
aggattacagaagacatctccatgt

SEQ ID NO: 125726 - DNA, 25 bp, Artificial
  Probe
aagtatcctttggtacaattccttt

SEQ ID NO: 125727 - DNA, 25 bp, Artificial
  Probe
ctcttcatgttctttggaatggctt

SEQ ID NO: 125728 - DNA, 25 bp, Artificial
  Probe
tgtcctctgaagaaccctacatttc

SEQ ID NO: 125729 - DNA, 25 bp, Artificial
  Probe
ctgtcctctgaagaaccctacattt

SEQ ID NO: 125730 - DNA, 25 bp, Artificial
  Probe
tctgctcagtcattatactttaaca

SEQ ID NO: 125731 - DNA, 25 bp, Artificial
  Probe
tagaagtatcctttggtacaattcc

SEQ ID NO: 125732 - DNA, 25 bp, Artificial
  Probe
gtctgctcagtcattatactttaac

SEQ ID NO: 125733 - DNA, 25 bp, Artificial
  Probe
ctttgtctaatgtgtagtgactttc

SEQ ID NO: 125734 - DNA, 25 bp, Artificial
  Probe
ctcttcgtgctcttcatgttctttg

SEQ ID NO: 125735 - DNA, 25 bp, Artificial
  Probe
aacgtctgctcagtcattatacttt

SEQ ID NO: 125736 - DNA, 25 bp, Artificial
  Probe
aaacgtctgctcagtcattatactt

SEQ ID NO: 125737 - DNA, 25 bp, Artificial
  Probe
acgtctgctcagtcattatacttta

SEQ ID NO: 125738 - DNA, 25 bp, Artificial
  Probe
atcttatccagtctgctgttctgta

SEQ ID NO: 125739 - DNA, 25 bp, Artificial
  Probe
tttatagtctggagtttgagggttt

SEQ ID NO: 125740 - DNA, 25 bp, Artificial
  Probe
tcttatccagtctgctgttctgtac

SEQ ID NO: 125741 - DNA, 25 bp, Artificial
  Probe
ttatagtctggagtttgagggttta

SEQ ID NO: 125742 - DNA, 25 bp, Artificial
  Probe
tatagtctggagtttgagggtttaa

SEQ ID NO: 125743 - DNA, 25 bp, Artificial
  Probe
tgtaattcagtgtttgtttattggc

SEQ ID NO: 125744 - DNA, 25 bp, Artificial
  Probe
gatcttatccagtctgctgttctgt

SEQ ID NO: 125745 - DNA, 25 bp, Artificial
  Probe
gtaattcagtgtttgtttattggct

SEQ ID NO: 125746 - DNA, 25 bp, Artificial
  Probe
tactggctccaaatagactgtgtag

SEQ ID NO: 125747 - DNA, 25 bp, Artificial
  Probe
ctactggctccaaatagactgtgta

SEQ ID NO: 125748 - DNA, 25 bp, Artificial
  Probe
gaagatgctgtttccaaagaagtga

SEQ ID NO: 125749 - DNA, 25 bp, Artificial
  Probe
aagatgctgtttccaaagaagtgac

SEQ ID NO: 125750 - DNA, 25 bp, Artificial
  Probe
aaagtagcacagaagagggaagatg

SEQ ID NO: 125751 - DNA, 25 bp, Artificial
  Probe
caaagtagcacagaagagggaagat

SEQ ID NO: 125752 - DNA, 25 bp, Artificial
  Probe
ctgtggtatatgagaaagcatcagg

SEQ ID NO: 125753 - DNA, 25 bp, Artificial
  Probe
cctgtggtatatgagaaagcatcag

SEQ ID NO: 125754 - DNA, 25 bp, Artificial
  Probe
tttgtttattggctgcctttctttg

SEQ ID NO: 125755 - DNA, 25 bp, Artificial
  Probe
gtttgtttattggctgcctttcttt

SEQ ID NO: 125756 - DNA, 25 bp, Artificial
  Probe
aattcagtgtttgtttattggctgc

SEQ ID NO: 125757 - DNA, 25 bp, Artificial
  Probe
taattcagtgtttgtttattggctg

SEQ ID NO: 125758 - DNA, 25 bp, Artificial
  Probe
atagtctggagtttgagggtttaaa

SEQ ID NO: 125759 - DNA, 25 bp, Artificial
  Probe
atgcagtagaatgtaattcagtgtt

SEQ ID NO: 125760 - DNA, 25 bp, Artificial
  Probe
aatgcagtagaatgtaattcagtgt

SEQ ID NO: 125761 - DNA, 25 bp, Artificial
  Probe
tggtatatgagaaagcatcagggtg

SEQ ID NO: 125762 - DNA, 25 bp, Artificial
  Probe
gtggtatatgagaaagcatcagggt

SEQ ID NO: 125763 - DNA, 25 bp, Artificial
  Probe
tgtggtatatgagaaagcatcaggg

SEQ ID NO: 125764 - DNA, 25 bp, Artificial
  Probe
ttgtttattggctgcctttctttga

SEQ ID NO: 125765 - DNA, 25 bp, Artificial
  Probe
tataacaacactctgttcctggttc

SEQ ID NO: 125766 - DNA, 25 bp, Artificial
  Probe
tgtttattggctgcctttctttgaa

SEQ ID NO: 125767 - DNA, 25 bp, Artificial
  Probe
gcagtagaatgtaattcagtgtttg

SEQ ID NO: 125768 - DNA, 25 bp, Artificial
  Probe
ctcttgtctactggctccaaataga

SEQ ID NO: 125769 - DNA, 25 bp, Artificial
  Probe
tgtttgtttattggctgcctttctt

SEQ ID NO: 125770 - DNA, 25 bp, Artificial
  Probe
cctcttgtctactggctccaaatag

SEQ ID NO: 125771 - DNA, 25 bp, Artificial
  Probe
gcctgtggtatatgagaaagcatca

SEQ ID NO: 125772 - DNA, 25 bp, Artificial
  Probe
ggtatatgagaaagcatcagggtgg

SEQ ID NO: 125773 - DNA, 25 bp, Artificial
  Probe
cacaaagtagcacagaagagggaag

SEQ ID NO: 125774 - DNA, 25 bp, Artificial
  Probe
tcaagcacaaagtagcacagaagag

SEQ ID NO: 125775 - DNA, 25 bp, Artificial
  Probe
ctcaagcacaaagtagcacagaaga

SEQ ID NO: 125776 - DNA, 25 bp, Artificial
  Probe
cttacttggtagcctttgcatacaa

SEQ ID NO: 125777 - DNA, 25 bp, Artificial
  Probe
ataacaacactctgttcctggttct

SEQ ID NO: 125778 - DNA, 25 bp, Artificial
  Probe
acaaagtagcacagaagagggaaga

SEQ ID NO: 125779 - DNA, 25 bp, Artificial
  Probe
ttttatagtctggagtttgagggtt

SEQ ID NO: 125780 - DNA, 25 bp, Artificial
  Probe
gtgtttgtttattggctgcctttct

SEQ ID NO: 125781 - DNA, 25 bp, Artificial
  Probe
agtgtttgtttattggctgcctttc

SEQ ID NO: 125782 - DNA, 25 bp, Artificial
  Probe
cacttacttggtagcctttgcatac

SEQ ID NO: 125783 - DNA, 25 bp, Artificial
  Probe
cattgtgatagtagttgtgttgctg

SEQ ID NO: 125784 - DNA, 25 bp, Artificial
  Probe
attgtgatagtagttgtgttgctgg

SEQ ID NO: 125785 - DNA, 25 bp, Artificial
  Probe
tcattgtgatagtagttgtgttgct

SEQ ID NO: 125786 - DNA, 25 bp, Artificial
  Probe
cagatgggaacaaagattaaatggc

SEQ ID NO: 125787 - DNA, 25 bp, Artificial
  Probe
ttagcgttgattattggattgtccg

SEQ ID NO: 125788 - DNA, 25 bp, Artificial
  Probe
gagaatcagggtgagatgttagata

SEQ ID NO: 125789 - DNA, 25 bp, Artificial
  Probe
atcattgtgatagtagttgtgttgc

SEQ ID NO: 125790 - DNA, 25 bp, Artificial
  Probe
agaatcagggtgagatgttagataa

SEQ ID NO: 125791 - DNA, 25 bp, Artificial
  Probe
ggagaatcagggtgagatgttagat

SEQ ID NO: 125792 - DNA, 25 bp, Artificial
  Probe
gaatcagggtgagatgttagataac

SEQ ID NO: 125793 - DNA, 25 bp, Artificial
  Probe
gaggtgatgacaaagtacaatgagg

SEQ ID NO: 125794 - DNA, 25 bp, Artificial
  Probe
ggaggtgatgacaaagtacaatgag

SEQ ID NO: 125795 - DNA, 25 bp, Artificial
  Probe
tagcgttgattattggattgtccgt

SEQ ID NO: 125796 - DNA, 25 bp, Artificial
  Probe
cgttgattattggattgtccgttgg

SEQ ID NO: 125797 - DNA, 25 bp, Artificial
  Probe
gtggaggtgatgacaaagtacaatg

SEQ ID NO: 125798 - DNA, 25 bp, Artificial
  Probe
tttagcgttgattattggattgtcc

SEQ ID NO: 125799 - DNA, 25 bp, Artificial
  Probe
gatcattgactcccagatttccaag

SEQ ID NO: 125800 - DNA, 25 bp, Artificial
  Probe
tctccagatgggaacaaagattaaa

SEQ ID NO: 125801 - DNA, 25 bp, Artificial
  Probe
tggaggtgatgacaaagtacaatga

SEQ ID NO: 125802 - DNA, 25 bp, Artificial
  Probe
atcttcacttctgggatcattgact

SEQ ID NO: 125803 - DNA, 25 bp, Artificial
  Probe
catcttcacttctgggatcattgac

SEQ ID NO: 125804 - DNA, 25 bp, Artificial
  Probe
gtctccagatgggaacaaagattaa

SEQ ID NO: 125805 - DNA, 25 bp, Artificial
  Probe
tccagatgggaacaaagattaaatg

SEQ ID NO: 125806 - DNA, 25 bp, Artificial
  Probe
ccagatgggaacaaagattaaatgg

SEQ ID NO: 125807 - DNA, 25 bp, Artificial
  Probe
gatgacaaagtacaatgaggcacag

SEQ ID NO: 125808 - DNA, 25 bp, Artificial
  Probe
ctccagatgggaacaaagattaaat

SEQ ID NO: 125809 - DNA, 25 bp, Artificial
  Probe
tgtctccagatgggaacaaagatta

SEQ ID NO: 125810 - DNA, 25 bp, Artificial
  Probe
tggagaatcagggtgagatgttaga

SEQ ID NO: 125811 - DNA, 25 bp, Artificial
  Probe
gtggagaatcagggtgagatgttag

SEQ ID NO: 125812 - DNA, 25 bp, Artificial
  Probe
gtcaggctcgaaagaaattgataat

SEQ ID NO: 125813 - DNA, 25 bp, Artificial
  Probe
gcgttgattattggattgtccgttg

SEQ ID NO: 125814 - DNA, 25 bp, Artificial
  Probe
tcttcacttctgggatcattgactc

SEQ ID NO: 125815 - DNA, 25 bp, Artificial
  Probe
ttgtgatagtagttgtgttgctggg

SEQ ID NO: 125816 - DNA, 25 bp, Artificial
  Probe
catagagttgaatgtcatgcacacg

SEQ ID NO: 125817 - DNA, 25 bp, Artificial
  Probe
gataacatagagttgaatgtcatgc

SEQ ID NO: 125818 - DNA, 25 bp, Artificial
  Probe
agcgttgattattggattgtccgtt

SEQ ID NO: 125819 - DNA, 25 bp, Artificial
  Probe
tgatgacaaagtacaatgaggcaca

SEQ ID NO: 125820 - DNA, 25 bp, Artificial
  Probe
ggtcaggctcgaaagaaattgataa

SEQ ID NO: 125821 - DNA, 25 bp, Artificial
  Probe
tgtggaggtgatgacaaagtacaat

SEQ ID NO: 125822 - DNA, 25 bp, Artificial
  Probe
tcaggctcgaaagaaattgataatt

SEQ ID NO: 125823 - DNA, 25 bp, Artificial
  Probe
taacatagagttgaatgtcatgcac

SEQ ID NO: 125824 - DNA, 25 bp, Artificial
  Probe
aacatagagttgaatgtcatgcaca

SEQ ID NO: 125825 - DNA, 25 bp, Artificial
  Probe
atcattgactcccagatttccaagc

SEQ ID NO: 125826 - DNA, 25 bp, Artificial
  Probe
attgtccgttgggctgaaataagag

SEQ ID NO: 125827 - DNA, 25 bp, Artificial
  Probe
gattgtccgttgggctgaaataaga

SEQ ID NO: 125828 - DNA, 25 bp, Artificial
  Probe
taaactcttcccttcatctttccat

SEQ ID NO: 125829 - DNA, 25 bp, Artificial
  Probe
ataaactcttcccttcatctttcca

SEQ ID NO: 125830 - DNA, 25 bp, Artificial
  Probe
aaactcttcccttcatctttccatc

SEQ ID NO: 125831 - DNA, 25 bp, Artificial
  Probe
aataaactcttcccttcatctttcc

SEQ ID NO: 125832 - DNA, 25 bp, Artificial
  Probe
aactcttcccttcatctttccatca

SEQ ID NO: 125833 - DNA, 25 bp, Artificial
  Probe
actcttcccttcatctttccatcag

SEQ ID NO: 125834 - DNA, 25 bp, Artificial
  Probe
cctcctgttccagagaaataaactc

SEQ ID NO: 125835 - DNA, 25 bp, Artificial
  Probe
ctcctcctgttccagagaaataaac

SEQ ID NO: 125836 - DNA, 25 bp, Artificial
  Probe
tcctcctgttccagagaaataaact

SEQ ID NO: 125837 - DNA, 25 bp, Artificial
  Probe
gagaaataaactcttcccttcatct

SEQ ID NO: 125838 - DNA, 25 bp, Artificial
  Probe
agaaataaactcttcccttcatctt

SEQ ID NO: 125839 - DNA, 25 bp, Artificial
  Probe
gtacttataggctcttcccacatcc

SEQ ID NO: 125840 - DNA, 25 bp, Artificial
  Probe
ggtacttataggctcttcccacatc

SEQ ID NO: 125841 - DNA, 25 bp, Artificial
  Probe
cccttatgttactgttctgcctgaa

SEQ ID NO: 125842 - DNA, 25 bp, Artificial
  Probe
aggtacttataggctcttcccacat

SEQ ID NO: 125843 - DNA, 25 bp, Artificial
  Probe
aaataaactcttcccttcatctttc

SEQ ID NO: 125844 - DNA, 25 bp, Artificial
  Probe
gaaataaactcttcccttcatcttt

SEQ ID NO: 125845 - DNA, 25 bp, Artificial
  Probe
tacttataggctcttcccacatcct

SEQ ID NO: 125846 - DNA, 25 bp, Artificial
  Probe
atgtctgaaatgagggctgcttatg

SEQ ID NO: 125847 - DNA, 25 bp, Artificial
  Probe
ttcttcccagagagagctgtataaa

SEQ ID NO: 125848 - DNA, 25 bp, Artificial
  Probe
tttcttcccagagagagctgtataa

SEQ ID NO: 125849 - DNA, 25 bp, Artificial
  Probe
aaaccctgatcttagcagacaaact

SEQ ID NO: 125850 - DNA, 25 bp, Artificial
  Probe
caaaccctgatcttagcagacaaac

SEQ ID NO: 125851 - DNA, 25 bp, Artificial
  Probe
ctttcttcccagagagagctgtata

SEQ ID NO: 125852 - DNA, 25 bp, Artificial
  Probe
tcttcccagagagagctgtataaac

SEQ ID NO: 125853 - DNA, 25 bp, Artificial
  Probe
agtgggaggtacttataggctcttc

SEQ ID NO: 125854 - DNA, 25 bp, Artificial
  Probe
cttatgttactgttctgcctgaacc

SEQ ID NO: 125855 - DNA, 25 bp, Artificial
  Probe
ccttatgttactgttctgcctgaac

SEQ ID NO: 125856 - DNA, 25 bp, Artificial
  Probe
gtctgaaatgagggctgcttatgag

SEQ ID NO: 125857 - DNA, 25 bp, Artificial
  Probe
ctcttcccttcatctttccatcagg

SEQ ID NO: 125858 - DNA, 25 bp, Artificial
  Probe
tatgttactgttctgcctgaacctt

SEQ ID NO: 125859 - DNA, 25 bp, Artificial
  Probe
ttatgttactgttctgcctgaacct

SEQ ID NO: 125860 - DNA, 25 bp, Artificial
  Probe
gaggtacttataggctcttcccaca

SEQ ID NO: 125861 - DNA, 25 bp, Artificial
  Probe
aaccctgatcttagcagacaaactg

SEQ ID NO: 125862 - DNA, 25 bp, Artificial
  Probe
cagagagagctgtataaaccagacc

SEQ ID NO: 125863 - DNA, 25 bp, Artificial
  Probe
ccagagagagctgtataaaccagac

SEQ ID NO: 125864 - DNA, 25 bp, Artificial
  Probe
cttcccagagagagctgtataaacc

SEQ ID NO: 125865 - DNA, 25 bp, Artificial
  Probe
catgtctgaaatgagggctgcttat

SEQ ID NO: 125866 - DNA, 25 bp, Artificial
  Probe
ccaaaccctgatcttagcagacaaa

SEQ ID NO: 125867 - DNA, 25 bp, Artificial
  Probe
cttataggctcttcccacatcctca

SEQ ID NO: 125868 - DNA, 25 bp, Artificial
  Probe
acttataggctcttcccacatcctc

SEQ ID NO: 125869 - DNA, 25 bp, Artificial
  Probe
tgtctgaaatgagggctgcttatga

SEQ ID NO: 125870 - DNA, 25 bp, Artificial
  Probe
ctcctgttccagagaaataaactct

SEQ ID NO: 125871 - DNA, 25 bp, Artificial
  Probe
ccagagaaataaactcttcccttca

SEQ ID NO: 125872 - DNA, 25 bp, Artificial
  Probe
tccagagaaataaactcttcccttc

SEQ ID NO: 125873 - DNA, 25 bp, Artificial
  Probe
acacacacactgaacattgttattc

SEQ ID NO: 125874 - DNA, 25 bp, Artificial
  Probe
cacacacacactgaacattgttatt

SEQ ID NO: 125875 - DNA, 25 bp, Artificial
  Probe
acacacacacactgaacattgttat

SEQ ID NO: 125876 - DNA, 25 bp, Artificial
  Probe
attggaagagaggaccatgagaatt

SEQ ID NO: 125877 - DNA, 25 bp, Artificial
  Probe
aattggaagagaggaccatgagaat

SEQ ID NO: 125878 - DNA, 25 bp, Artificial
  Probe
ccaaaccagatttcctgtgattcta

SEQ ID NO: 125879 - DNA, 25 bp, Artificial
  Probe
caaaccagatttcctgtgattctat

SEQ ID NO: 125880 - DNA, 25 bp, Artificial
  Probe
cacacacactgaacattgttattca

SEQ ID NO: 125881 - DNA, 25 bp, Artificial
  Probe
accagatttcctgtgattctatact

SEQ ID NO: 125882 - DNA, 25 bp, Artificial
  Probe
acacacactgaacattgttattcat

SEQ ID NO: 125883 - DNA, 25 bp, Artificial
  Probe
ttccaaaccagatttcctgtgattc

SEQ ID NO: 125884 - DNA, 25 bp, Artificial
  Probe
aaccagatttcctgtgattctatac

SEQ ID NO: 125885 - DNA, 25 bp, Artificial
  Probe
gttccaaaccagatttcctgtgatt

SEQ ID NO: 125886 - DNA, 25 bp, Artificial
  Probe
cacacactgaacattgttattcatt

SEQ ID NO: 125887 - DNA, 25 bp, Artificial
  Probe
gtcgaggctgttcttcaagaattaa

SEQ ID NO: 125888 - DNA, 25 bp, Artificial
  Probe
tccaaaccagatttcctgtgattct

SEQ ID NO: 125889 - DNA, 25 bp, Artificial
  Probe
aaaccagatttcctgtgattctata

SEQ ID NO: 125890 - DNA, 25 bp, Artificial
  Probe
aaacaaattggaagagaggaccatg

SEQ ID NO: 125891 - DNA, 25 bp, Artificial
  Probe
ccagatttcctgtgattctatacta

SEQ ID NO: 125892 - DNA, 25 bp, Artificial
  Probe
tgtcgaggctgttcttcaagaatta

SEQ ID NO: 125893 - DNA, 25 bp, Artificial
  Probe
ttggaagagaggaccatgagaattt

SEQ ID NO: 125894 - DNA, 25 bp, Artificial
  Probe
aaattggaagagaggaccatgagaa

SEQ ID NO: 125895 - DNA, 25 bp, Artificial
  Probe
taaaacagaaggaaactaatggacc

SEQ ID NO: 125896 - DNA, 25 bp, Artificial
  Probe
aacaaattggaagagaggaccatga

SEQ ID NO: 125897 - DNA, 25 bp, Artificial
  Probe
caaattggaagagaggaccatgaga

SEQ ID NO: 125898 - DNA, 25 bp, Artificial
  Probe
ggaagagaggaccatgagaatttta

SEQ ID NO: 125899 - DNA, 25 bp, Artificial
  Probe
acaaattggaagagaggaccatgag

SEQ ID NO: 125900 - DNA, 25 bp, Artificial
  Probe
tcgaggctgttcttcaagaattaaa

SEQ ID NO: 125901 - DNA, 25 bp, Artificial
  Probe
ttgtcgaggctgttcttcaagaatt

SEQ ID NO: 125902 - DNA, 25 bp, Artificial
  Probe
aagaaccttgtgtctgtctggtgaa

SEQ ID NO: 125903 - DNA, 25 bp, Artificial
  Probe
aaaacagaaggaaactaatggacct

SEQ ID NO: 125904 - DNA, 25 bp, Artificial
  Probe
gaagagaggaccatgagaattttaa

SEQ ID NO: 125905 - DNA, 25 bp, Artificial
  Probe
acacactgaacattgttattcattt

SEQ ID NO: 125906 - DNA, 25 bp, Artificial
  Probe
ataaaacagaaggaaactaatggac

SEQ ID NO: 125907 - DNA, 25 bp, Artificial
  Probe
aaaacaaattggaagagaggaccat

SEQ ID NO: 125908 - DNA, 25 bp, Artificial
  Probe
aagagaggaccatgagaattttaat

SEQ ID NO: 125909 - DNA, 25 bp, Artificial
  Probe
aaacagaaggaaactaatggacctt

SEQ ID NO: 125910 - DNA, 25 bp, Artificial
  Probe
cagatttcctgtgattctatactaa

SEQ ID NO: 125911 - DNA, 25 bp, Artificial
  Probe
agagaggaccatgagaattttaata

SEQ ID NO: 125912 - DNA, 25 bp, Artificial
  Probe
tggaagagaggaccatgagaatttt

SEQ ID NO: 125913 - DNA, 25 bp, Artificial
  Probe
aataaaacagaaggaaactaatgga

SEQ ID NO: 125914 - DNA, 25 bp, Artificial
  Probe
agaaccttgtgtctgtctggtgaaa

SEQ ID NO: 125915 - DNA, 25 bp, Artificial
  Probe
aaagaaccttgtgtctgtctggtga

SEQ ID NO: 125916 - DNA, 25 bp, Artificial
  Probe
cgaggctgttcttcaagaattaaaa

SEQ ID NO: 125917 - DNA, 25 bp, Artificial
  Probe
aaactaatggaccttccaggattta

SEQ ID NO: 125918 - DNA, 25 bp, Artificial
  Probe
gttcagtggagttgtatgtattgtt

SEQ ID NO: 125919 - DNA, 25 bp, Artificial
  Probe
tatgacgacaatgacgatgataatg

SEQ ID NO: 125920 - DNA, 25 bp, Artificial
  Probe
gtatgacgacaatgacgatgataat

SEQ ID NO: 125921 - DNA, 25 bp, Artificial
  Probe
cgttcagtggagttgtatgtattgt

SEQ ID NO: 125922 - DNA, 25 bp, Artificial
  Probe
gttatagaactgagcaagtctgaga

SEQ ID NO: 125923 - DNA, 25 bp, Artificial
  Probe
ttatagaactgagcaagtctgagaa

SEQ ID NO: 125924 - DNA, 25 bp, Artificial
  Probe
ccgttcagtggagttgtatgtattg

SEQ ID NO: 125925 - DNA, 25 bp, Artificial
  Probe
catcctctactacattggcaatacg

SEQ ID NO: 125926 - DNA, 25 bp, Artificial
  Probe
cgttatagaactgagcaagtctgag

SEQ ID NO: 125927 - DNA, 25 bp, Artificial
  Probe
gacgacaatgacgatgataatgttc

SEQ ID NO: 125928 - DNA, 25 bp, Artificial
  Probe
atgacgacaatgacgatgataatgt

SEQ ID NO: 125929 - DNA, 25 bp, Artificial
  Probe
tgacgacaatgacgatgataatgtt

SEQ ID NO: 125930 - DNA, 25 bp, Artificial
  Probe
ccactgaccatcctctactacattg

SEQ ID NO: 125931 - DNA, 25 bp, Artificial
  Probe
accactgaccatcctctactacatt

SEQ ID NO: 125932 - DNA, 25 bp, Artificial
  Probe
aaccactgaccatcctctactacat

SEQ ID NO: 125933 - DNA, 25 bp, Artificial
  Probe
gaagtggctgttgatctacaataca

SEQ ID NO: 125934 - DNA, 25 bp, Artificial
  Probe
tgaagtggctgttgatctacaatac

SEQ ID NO: 125935 - DNA, 25 bp, Artificial
  Probe
gtgaagtggctgttgatctacaata

SEQ ID NO: 125936 - DNA, 25 bp, Artificial
  Probe
tgcttggatgtgtattgtcagactt

SEQ ID NO: 125937 - DNA, 25 bp, Artificial
  Probe
ccgttatagaactgagcaagtctga

SEQ ID NO: 125938 - DNA, 25 bp, Artificial
  Probe
ccaacatgatcgtcaagtcttgtaa

SEQ ID NO: 125939 - DNA, 25 bp, Artificial
  Probe
ccatcctctactacattggcaatac

SEQ ID NO: 125940 - DNA, 25 bp, Artificial
  Probe
atcctctactacattggcaatacgc

SEQ ID NO: 125941 - DNA, 25 bp, Artificial
  Probe
atccgttcagtggagttgtatgtat

SEQ ID NO: 125942 - DNA, 25 bp, Artificial
  Probe
accatcctctactacattggcaata

SEQ ID NO: 125943 - DNA, 25 bp, Artificial
  Probe
tccgttcagtggagttgtatgtatt

SEQ ID NO: 125944 - DNA, 25 bp, Artificial
  Probe
aatccgttcagtggagttgtatgta

SEQ ID NO: 125945 - DNA, 25 bp, Artificial
  Probe
tcagtggagttgtatgtattgtttc

SEQ ID NO: 125946 - DNA, 25 bp, Artificial
  Probe
ctctcttgtttcctctgtattgctc

SEQ ID NO: 125947 - DNA, 25 bp, Artificial
  Probe
gaaccactgaccatcctctactaca

SEQ ID NO: 125948 - DNA, 25 bp, Artificial
  Probe
ctcttgtttcctctgtattgctctg

SEQ ID NO: 125949 - DNA, 25 bp, Artificial
  Probe
tctcttgtttcctctgtattgctct

SEQ ID NO: 125950 - DNA, 25 bp, Artificial
  Probe
ttcagtggagttgtatgtattgttt

SEQ ID NO: 125951 - DNA, 25 bp, Artificial
  Probe
tccaacatgatcgtcaagtcttgta

SEQ ID NO: 125952 - DNA, 25 bp, Artificial
  Probe
cagactgtatgtttgcctcctttag

SEQ ID NO: 125953 - DNA, 25 bp, Artificial
  Probe
atcattcagactgtatgtttgcctc

SEQ ID NO: 125954 - DNA, 25 bp, Artificial
  Probe
tatagaactgagcaagtctgagaaa

SEQ ID NO: 125955 - DNA, 25 bp, Artificial
  Probe
gcttggatgtgtattgtcagacttt

SEQ ID NO: 125956 - DNA, 25 bp, Artificial
  Probe
tcagactgtatgtttgcctccttta

SEQ ID NO: 125957 - DNA, 25 bp, Artificial
  Probe
cactgaccatcctctactacattgg

SEQ ID NO: 125958 - DNA, 25 bp, Artificial
  Probe
ttctaattgtaaatggttctttgcc

SEQ ID NO: 125959 - DNA, 25 bp, Artificial
  Probe
gaccatcctctactacattggcaat

SEQ ID NO: 125960 - DNA, 25 bp, Artificial
  Probe
ctgcttggatgtgtattgtcagact

SEQ ID NO: 125961 - DNA, 25 bp, Artificial
  Probe
gatcattcagactgtatgtttgcct

SEQ ID NO: 125962 - DNA, 25 bp, Artificial
  Probe
gagccgttatagaactgagcaagtc

SEQ ID NO: 125963 - DNA, 25 bp, Artificial
  Probe
tccctgaacactaccaaatagcttt

SEQ ID NO: 125964 - DNA, 25 bp, Artificial
  Probe
ctccctgaacactaccaaatagctt

SEQ ID NO: 125965 - DNA, 25 bp, Artificial
  Probe
gattgctttcctgactgatgcttct

SEQ ID NO: 125966 - DNA, 25 bp, Artificial
  Probe
attgctttcctgactgatgcttctg

SEQ ID NO: 125967 - DNA, 25 bp, Artificial
  Probe
gaacgagtgacagaaggcatcctat

SEQ ID NO: 125968 - DNA, 25 bp, Artificial
  Probe
aacgagtgacagaaggcatcctatg

SEQ ID NO: 125969 - DNA, 25 bp, Artificial
  Probe
ccctgaacactaccaaatagctttt

SEQ ID NO: 125970 - DNA, 25 bp, Artificial
  Probe
cctcctcaggaaatgagattgattt

SEQ ID NO: 125971 - DNA, 25 bp, Artificial
  Probe
acctcctcaggaaatgagattgatt

SEQ ID NO: 125972 - DNA, 25 bp, Artificial
  Probe
ggattgctttcctgactgatgcttc

SEQ ID NO: 125973 - DNA, 25 bp, Artificial
  Probe
cacctcctcaggaaatgagattgat

SEQ ID NO: 125974 - DNA, 25 bp, Artificial
  Probe
cggctccctgaacactaccaaatag

SEQ ID NO: 125975 - DNA, 25 bp, Artificial
  Probe
tagtagctgctccatgttcagaagc

SEQ ID NO: 125976 - DNA, 25 bp, Artificial
  Probe
ctcccaggagaagattccagaagac

SEQ ID NO: 125977 - DNA, 25 bp, Artificial
  Probe
tagcacctcctcaggaaatgagatt

SEQ ID NO: 125978 - DNA, 25 bp, Artificial
  Probe
ctagcacctcctcaggaaatgagat

SEQ ID NO: 125979 - DNA, 25 bp, Artificial
  Probe
ctcctcaggaaatgagattgatttt

SEQ ID NO: 125980 - DNA, 25 bp, Artificial
  Probe
gctccctgaacactaccaaatagct

SEQ ID NO: 125981 - DNA, 25 bp, Artificial
  Probe
gcacctcctcaggaaatgagattga

SEQ ID NO: 125982 - DNA, 25 bp, Artificial
  Probe
agcacctcctcaggaaatgagattg

SEQ ID NO: 125983 - DNA, 25 bp, Artificial
  Probe
aggattgctttcctgactgatgctt

SEQ ID NO: 125984 - DNA, 25 bp, Artificial
  Probe
gctttcctgactgatgcttctggaa

SEQ ID NO: 125985 - DNA, 25 bp, Artificial
  Probe
aactggagcacccagatagactctc

SEQ ID NO: 125986 - DNA, 25 bp, Artificial
  Probe
gaactggagcacccagatagactct

SEQ ID NO: 125987 - DNA, 25 bp, Artificial
  Probe
tcaaggattcagagccaagattatt

SEQ ID NO: 125988 - DNA, 25 bp, Artificial
  Probe
ttcaaggattcagagccaagattat

SEQ ID NO: 125989 - DNA, 25 bp, Artificial
  Probe
caaggattcagagccaagattattc

SEQ ID NO: 125990 - DNA, 25 bp, Artificial
  Probe
cttcaaggattcagagccaagatta

SEQ ID NO: 125991 - DNA, 25 bp, Artificial
  Probe
caccaccatacctaactctaccaac

SEQ ID NO: 125992 - DNA, 25 bp, Artificial
  Probe
aaggattcagagccaagattattcc

SEQ ID NO: 125993 - DNA, 25 bp, Artificial
  Probe
acctatcaacaatattcatcagagc

SEQ ID NO: 125994 - DNA, 25 bp, Artificial
  Probe
ggattcagagccaagattattcctg

SEQ ID NO: 125995 - DNA, 25 bp, Artificial
  Probe
gattcagagccaagattattcctgg

SEQ ID NO: 125996 - DNA, 25 bp, Artificial
  Probe
atacctaactctaccaaccctcatc

SEQ ID NO: 125997 - DNA, 25 bp, Artificial
  Probe
catacctaactctaccaaccctcat

SEQ ID NO: 125998 - DNA, 25 bp, Artificial
  Probe
attcagagccaagattattcctggt

SEQ ID NO: 125999 - DNA, 25 bp, Artificial
  Probe
accaccatacctaactctaccaacc

SEQ ID NO: 126000 - DNA, 25 bp, Artificial
  Probe
ccaccaccatacctaactctaccaa

SEQ ID NO: 126001 - DNA, 25 bp, Artificial
  Probe
ctccaccaccatacctaactctacc

SEQ ID NO: 126002 - DNA, 25 bp, Artificial
  Probe
cctccaccaccatacctaactctac

SEQ ID NO: 126003 - DNA, 25 bp, Artificial
  Probe
ttcagagccaagattattcctggtc

SEQ ID NO: 126004 - DNA, 25 bp, Artificial
  Probe
tacctaactctaccaaccctcatcc

SEQ ID NO: 126005 - DNA, 25 bp, Artificial
  Probe
ttattcctggtcagctaaatcaaac

SEQ ID NO: 126006 - DNA, 25 bp, Artificial
  Probe
caagattattcctggtcagctaaat

SEQ ID NO: 126007 - DNA, 25 bp, Artificial
  Probe
ccatacctaactctaccaaccctca

SEQ ID NO: 126008 - DNA, 25 bp, Artificial
  Probe
accatacctaactctaccaaccctc

SEQ ID NO: 126009 - DNA, 25 bp, Artificial
  Probe
tccaccaccatacctaactctacca

SEQ ID NO: 126010 - DNA, 25 bp, Artificial
  Probe
cagagccaagattattcctggtcag

SEQ ID NO: 126011 - DNA, 25 bp, Artificial
  Probe
aacctatcaacaatattcatcagag

SEQ ID NO: 126012 - DNA, 25 bp, Artificial
  Probe
attattcctggtcagctaaatcaaa

SEQ ID NO: 126013 - DNA, 25 bp, Artificial
  Probe
caccatacctaactctaccaaccct

SEQ ID NO: 126014 - DNA, 25 bp, Artificial
  Probe
tcatccaggacttggtctcagtaag

SEQ ID NO: 126015 - DNA, 25 bp, Artificial
  Probe
ctcatccaggacttggtctcagtaa

SEQ ID NO: 126016 - DNA, 25 bp, Artificial
  Probe
tcagagccaagattattcctggtca

SEQ ID NO: 126017 - DNA, 25 bp, Artificial
  Probe
gccaagattattcctggtcagctaa

SEQ ID NO: 126018 - DNA, 25 bp, Artificial
  Probe
agattattcctggtcagctaaatca

SEQ ID NO: 126019 - DNA, 25 bp, Artificial
  Probe
ccaagattattcctggtcagctaaa

SEQ ID NO: 126020 - DNA, 25 bp, Artificial
  Probe
tattcctggtcagctaaatcaaacc

SEQ ID NO: 126021 - DNA, 25 bp, Artificial
  Probe
cctaactctaccaaccctcatccag

SEQ ID NO: 126022 - DNA, 25 bp, Artificial
  Probe
cttgctgctgatggatacacacttt

SEQ ID NO: 126023 - DNA, 25 bp, Artificial
  Probe
gattattcctggtcagctaaatcaa

SEQ ID NO: 126024 - DNA, 25 bp, Artificial
  Probe
gcttcaaggattcagagccaagatt

SEQ ID NO: 126025 - DNA, 25 bp, Artificial
  Probe
cttctgaacaggcttcaaggattca

SEQ ID NO: 126026 - DNA, 25 bp, Artificial
  Probe
acttctgaacaggcttcaaggattc

SEQ ID NO: 126027 - DNA, 25 bp, Artificial
  Probe
gacttctgaacaggcttcaaggatt

SEQ ID NO: 126028 - DNA, 25 bp, Artificial
  Probe
cttagaccaaatccctggatacctg

SEQ ID NO: 126029 - DNA, 25 bp, Artificial
  Probe
gtccttagaccaaatccctggatac

SEQ ID NO: 126030 - DNA, 25 bp, Artificial
  Probe
aagattattcctggtcagctaaatc

SEQ ID NO: 126031 - DNA, 25 bp, Artificial
  Probe
ccaccatacctaactctaccaaccc

SEQ ID NO: 126032 - DNA, 25 bp, Artificial
  Probe
tactagaacattcacttccgacttg

SEQ ID NO: 126033 - DNA, 25 bp, Artificial
  Probe
ttactagaacattcacttccgactt

SEQ ID NO: 126034 - DNA, 25 bp, Artificial
  Probe
tggatagaagacacacttggtagta

SEQ ID NO: 126035 - DNA, 25 bp, Artificial
  Probe
ggatagaagacacacttggtagtaa

SEQ ID NO: 126036 - DNA, 25 bp, Artificial
  Probe
gttactagaacattcacttccgact

SEQ ID NO: 126037 - DNA, 25 bp, Artificial
  Probe
ctagaacattcacttccgacttgac

SEQ ID NO: 126038 - DNA, 25 bp, Artificial
  Probe
tagaacattcacttccgacttgaca

SEQ ID NO: 126039 - DNA, 25 bp, Artificial
  Probe
actagaacattcacttccgacttga

SEQ ID NO: 126040 - DNA, 25 bp, Artificial
  Probe
gacaaggatattcatggtgcagata

SEQ ID NO: 126041 - DNA, 25 bp, Artificial
  Probe
tgtcgtaaagaagagatgtcaagaa

SEQ ID NO: 126042 - DNA, 25 bp, Artificial
  Probe
atgtgtcgtaaagaagagatgtcaa

SEQ ID NO: 126043 - DNA, 25 bp, Artificial
  Probe
gtggatagaagacacacttggtagt

SEQ ID NO: 126044 - DNA, 25 bp, Artificial
  Probe
cgacttgacaaggatattcatggtg

SEQ ID NO: 126045 - DNA, 25 bp, Artificial
  Probe
acaaggatattcatggtgcagatac

SEQ ID NO: 126046 - DNA, 25 bp, Artificial
  Probe
tatgtgtcgtaaagaagagatgtca

SEQ ID NO: 126047 - DNA, 25 bp, Artificial
  Probe
gtgtcgtaaagaagagatgtcaaga

SEQ ID NO: 126048 - DNA, 25 bp, Artificial
  Probe
cttccgacttgacaaggatattcat

SEQ ID NO: 126049 - DNA, 25 bp, Artificial
  Probe
tgtgtcgtaaagaagagatgtcaag

SEQ ID NO: 126050 - DNA, 25 bp, Artificial
  Probe
atattcatggtgcagatacgttctt

SEQ ID NO: 126051 - DNA, 25 bp, Artificial
  Probe
gacttgacaaggatattcatggtgc

SEQ ID NO: 126052 - DNA, 25 bp, Artificial
  Probe
ttccgacttgacaaggatattcatg

SEQ ID NO: 126053 - DNA, 25 bp, Artificial
  Probe
agaacattcacttccgacttgacaa

SEQ ID NO: 126054 - DNA, 25 bp, Artificial
  Probe
gtcgtaaagaagagatgtcaagaat

SEQ ID NO: 126055 - DNA, 25 bp, Artificial
  Probe
agaatatagaggctgaaattacggt

SEQ ID NO: 126056 - DNA, 25 bp, Artificial
  Probe
cgagaatatagaggctgaaattacg

SEQ ID NO: 126057 - DNA, 25 bp, Artificial
  Probe
gatattcatggtgcagatacgttct

SEQ ID NO: 126058 - DNA, 25 bp, Artificial
  Probe
cttaccacgtagagagatgagaaca

SEQ ID NO: 126059 - DNA, 25 bp, Artificial
  Probe
tattcatggtgcagatacgttcttc

SEQ ID NO: 126060 - DNA, 25 bp, Artificial
  Probe
gagaatatagaggctgaaattacgg

SEQ ID NO: 126061 - DNA, 25 bp, Artificial
  Probe
tcttaccacgtagagagatgagaac

SEQ ID NO: 126062 - DNA, 25 bp, Artificial
  Probe
cacttccgacttgacaaggatattc

SEQ ID NO: 126063 - DNA, 25 bp, Artificial
  Probe
ggatattcatggtgcagatacgttc

SEQ ID NO: 126064 - DNA, 25 bp, Artificial
  Probe
caaggatattcatggtgcagatacg

SEQ ID NO: 126065 - DNA, 25 bp, Artificial
  Probe
atatgtgtcgtaaagaagagatgtc

SEQ ID NO: 126066 - DNA, 25 bp, Artificial
  Probe
ttaccacgtagagagatgagaacac

SEQ ID NO: 126067 - DNA, 25 bp, Artificial
  Probe
tttgccatttatacttgagaccagc

SEQ ID NO: 126068 - DNA, 25 bp, Artificial
  Probe
gaacattcacttccgacttgacaag

SEQ ID NO: 126069 - DNA, 25 bp, Artificial
  Probe
ccttgagaaagatggcttatgtcat

SEQ ID NO: 126070 - DNA, 25 bp, Artificial
  Probe
ttgagatgactccttgagaaagatg

SEQ ID NO: 126071 - DNA, 25 bp, Artificial
  Probe
tttgagatgactccttgagaaagat

SEQ ID NO: 126072 - DNA, 25 bp, Artificial
  Probe
atttgagatgactccttgagaaaga

SEQ ID NO: 126073 - DNA, 25 bp, Artificial
  Probe
acttccgacttgacaaggatattca

SEQ ID NO: 126074 - DNA, 25 bp, Artificial
  Probe
tcacttccgacttgacaaggatatt

SEQ ID NO: 126075 - DNA, 25 bp, Artificial
  Probe
ttcacttccgacttgacaaggatat

SEQ ID NO: 126076 - DNA, 25 bp, Artificial
  Probe
attcacttccgacttgacaaggata

SEQ ID NO: 126077 - DNA, 25 bp, Artificial
  Probe
gatccagaacatgaaggaagagatg

SEQ ID NO: 126078 - DNA, 25 bp, Artificial
  Probe
agatccagaacatgaaggaagagat

SEQ ID NO: 126079 - DNA, 25 bp, Artificial
  Probe
gatgagatccagaacatgaaggaag

SEQ ID NO: 126080 - DNA, 25 bp, Artificial
  Probe
atgagatccagaacatgaaggaaga

SEQ ID NO: 126081 - DNA, 25 bp, Artificial
  Probe
gagatccagaacatgaaggaagaga

SEQ ID NO: 126082 - DNA, 25 bp, Artificial
  Probe
attcagacaggatgttgacaatgct

SEQ ID NO: 126083 - DNA, 25 bp, Artificial
  Probe
tgagatccagaacatgaaggaagag

SEQ ID NO: 126084 - DNA, 25 bp, Artificial
  Probe
cgaagaaatcttgtgctagaatact

SEQ ID NO: 126085 - DNA, 25 bp, Artificial
  Probe
ttcagacaggatgttgacaatgctt

SEQ ID NO: 126086 - DNA, 25 bp, Artificial
  Probe
gacaggatgttgacaatgcttctct

SEQ ID NO: 126087 - DNA, 25 bp, Artificial
  Probe
agacaggatgttgacaatgcttctc

SEQ ID NO: 126088 - DNA, 25 bp, Artificial
  Probe
gctgctaactaccaggacactattg

SEQ ID NO: 126089 - DNA, 25 bp, Artificial
  Probe
atccagaacatgaaggaagagatgg

SEQ ID NO: 126090 - DNA, 25 bp, Artificial
  Probe
cagacaggatgttgacaatgcttct

SEQ ID NO: 126091 - DNA, 25 bp, Artificial
  Probe
tcagacaggatgttgacaatgcttc

SEQ ID NO: 126092 - DNA, 25 bp, Artificial
  Probe
acaggatgttgacaatgcttctctg

SEQ ID NO: 126093 - DNA, 25 bp, Artificial
  Probe
cagaacatgaaggaagagatggctc

SEQ ID NO: 126094 - DNA, 25 bp, Artificial
  Probe
taaagatggctcttgacattgagat

SEQ ID NO: 126095 - DNA, 25 bp, Artificial
  Probe
agctgctaactaccaggacactatt

SEQ ID NO: 126096 - DNA, 25 bp, Artificial
  Probe
aagctgctaactaccaggacactat

SEQ ID NO: 126097 - DNA, 25 bp, Artificial
  Probe
gtaaagatggctcttgacattgaga

SEQ ID NO: 126098 - DNA, 25 bp, Artificial
  Probe
caggatgttgacaatgcttctctgg

SEQ ID NO: 126099 - DNA, 25 bp, Artificial
  Probe
tgtaaagatggctcttgacattgag

SEQ ID NO: 126100 - DNA, 25 bp, Artificial
  Probe
aagatggctcttgacattgagatcg

SEQ ID NO: 126101 - DNA, 25 bp, Artificial
  Probe
gaagaaatcttgtgctagaatactt

SEQ ID NO: 126102 - DNA, 25 bp, Artificial
  Probe
aaagatggctcttgacattgagatc

SEQ ID NO: 126103 - DNA, 25 bp, Artificial
  Probe
gattcaggaacagcatgtccagatc

SEQ ID NO: 126104 - DNA, 25 bp, Artificial
  Probe
atgtaaagatggctcttgacattga

SEQ ID NO: 126105 - DNA, 25 bp, Artificial
  Probe
tcaatgtaaagatggctcttgacat

SEQ ID NO: 126106 - DNA, 25 bp, Artificial
  Probe
cttaaaggcactaatgagtccctgg

SEQ ID NO: 126107 - DNA, 25 bp, Artificial
  Probe
ggatgagatccagaacatgaaggaa

SEQ ID NO: 126108 - DNA, 25 bp, Artificial
  Probe
ctcaatgtaaagatggctcttgaca

SEQ ID NO: 126109 - DNA, 25 bp, Artificial
  Probe
gaagctgctaactaccaggacacta

SEQ ID NO: 126110 - DNA, 25 bp, Artificial
  Probe
gaagaagctgcacgatgaagagatc

SEQ ID NO: 126111 - DNA, 25 bp, Artificial
  Probe
aagaaatcttgtgctagaatacttt

SEQ ID NO: 126112 - DNA, 25 bp, Artificial
  Probe
agattcaggaacagcatgtccagat

SEQ ID NO: 126113 - DNA, 25 bp, Artificial
  Probe
ttaaaggcactaatgagtccctgga

SEQ ID NO: 126114 - DNA, 25 bp, Artificial
  Probe
caggatgagatccagaacatgaagg

SEQ ID NO: 126115 - DNA, 25 bp, Artificial
  Probe
ccttaaaggcactaatgagtccctg

SEQ ID NO: 126116 - DNA, 25 bp, Artificial
  Probe
agaacatgaaggaagagatggctcg

SEQ ID NO: 126117 - DNA, 25 bp, Artificial
  Probe
aggatgagatccagaacatgaagga

SEQ ID NO: 126118 - DNA, 25 bp, Artificial
  Probe
gctcaatgtaaagatggctcttgac

SEQ ID NO: 126119 - DNA, 25 bp, Artificial
  Probe
taaaggcactaatgagtccctggag

SEQ ID NO: 126120 - DNA, 25 bp, Artificial
  Probe
tgaagaagctgcacgatgaagagat

SEQ ID NO: 126121 - DNA, 25 bp, Artificial
  Probe
ccagaacatgaaggaagagatggct

SEQ ID NO: 126122 - DNA, 25 bp, Artificial
  Probe
tattattacagctctacaacaaggc

SEQ ID NO: 126123 - DNA, 25 bp, Artificial
  Probe
ctccctgtgtggtcaattaaatgaa

SEQ ID NO: 126124 - DNA, 25 bp, Artificial
  Probe
tccctgtgtggtcaattaaatgaac

SEQ ID NO: 126125 - DNA, 25 bp, Artificial
  Probe
aaatgaaccatgaaagtcaggatga

SEQ ID NO: 126126 - DNA, 25 bp, Artificial
  Probe
taaatgaaccatgaaagtcaggatg

SEQ ID NO: 126127 - DNA, 25 bp, Artificial
  Probe
attattacagctctacaacaaggcc

SEQ ID NO: 126128 - DNA, 25 bp, Artificial
  Probe
caaactgtcctccaagagtcatttc

SEQ ID NO: 126129 - DNA, 25 bp, Artificial
  Probe
actccctgtgtggtcaattaaatga

SEQ ID NO: 126130 - DNA, 25 bp, Artificial
  Probe
ccagagagtcacacaaaggaatctt

SEQ ID NO: 126131 - DNA, 25 bp, Artificial
  Probe
ttaaatgaaccatgaaagtcaggat

SEQ ID NO: 126132 - DNA, 25 bp, Artificial
  Probe
attaaatgaaccatgaaagtcagga

SEQ ID NO: 126133 - DNA, 25 bp, Artificial
  Probe
tattacagctctacaacaaggccaa

SEQ ID NO: 126134 - DNA, 25 bp, Artificial
  Probe
ttattacagctctacaacaaggcca

SEQ ID NO: 126135 - DNA, 25 bp, Artificial
  Probe
ccatattattacagctctacaacaa

SEQ ID NO: 126136 - DNA, 25 bp, Artificial
  Probe
cactccctgtgtggtcaattaaatg

SEQ ID NO: 126137 - DNA, 25 bp, Artificial
  Probe
agagagtcacacaaaggaatcttta

SEQ ID NO: 126138 - DNA, 25 bp, Artificial
  Probe
aattaaatgaaccatgaaagtcagg

SEQ ID NO: 126139 - DNA, 25 bp, Artificial
  Probe
cccatattattacagctctacaaca

SEQ ID NO: 126140 - DNA, 25 bp, Artificial
  Probe
tcactccctgtgtggtcaattaaat

SEQ ID NO: 126141 - DNA, 25 bp, Artificial
  Probe
ggaaccaagaaccatccatttcaaa

SEQ ID NO: 126142 - DNA, 25 bp, Artificial
  Probe
cagagagtcacacaaaggaatcttt

SEQ ID NO: 126143 - DNA, 25 bp, Artificial
  Probe
gagagtcacacaaaggaatctttat

SEQ ID NO: 126144 - DNA, 25 bp, Artificial
  Probe
atattattacagctctacaacaagg

SEQ ID NO: 126145 - DNA, 25 bp, Artificial
  Probe
ctccaagagtcatttcgtgatgtga

SEQ ID NO: 126146 - DNA, 25 bp, Artificial
  Probe
ctgctgagttccccatattattaca

SEQ ID NO: 126147 - DNA, 25 bp, Artificial
  Probe
aaactgtcctccaagagtcatttcg

SEQ ID NO: 126148 - DNA, 25 bp, Artificial
  Probe
ccaaactgtcctccaagagtcattt

SEQ ID NO: 126149 - DNA, 25 bp, Artificial
  Probe
tcatttcgtgatgtgacaggagttc

SEQ ID NO: 126150 - DNA, 25 bp, Artificial
  Probe
agagtcacacaaaggaatctttatt

SEQ ID NO: 126151 - DNA, 25 bp, Artificial
  Probe
cctgctgagttccccatattattac

SEQ ID NO: 126152 - DNA, 25 bp, Artificial
  Probe
gcaggaagtgagtattctggcaatg

SEQ ID NO: 126153 - DNA, 25 bp, Artificial
  Probe
ggtcaattaaatgaaccatgaaagt

SEQ ID NO: 126154 - DNA, 25 bp, Artificial
  Probe
ctcactccctgtgtggtcaattaaa

SEQ ID NO: 126155 - DNA, 25 bp, Artificial
  Probe
tcaattaaatgaaccatgaaagtca

SEQ ID NO: 126156 - DNA, 25 bp, Artificial
  Probe
aaccaagaaccatccatttcaaaag

SEQ ID NO: 126157 - DNA, 25 bp, Artificial
  Probe
gaaccaagaaccatccatttcaaaa

SEQ ID NO: 126158 - DNA, 25 bp, Artificial
  Probe
ccaagaaccatccatttcaaaagag

SEQ ID NO: 126159 - DNA, 25 bp, Artificial
  Probe
aggaaccaagaaccatccatttcaa

SEQ ID NO: 126160 - DNA, 25 bp, Artificial
  Probe
ccctgtgtggtcaattaaatgaacc

SEQ ID NO: 126161 - DNA, 25 bp, Artificial
  Probe
accaagaaccatccatttcaaaaga

SEQ ID NO: 126162 - DNA, 25 bp, Artificial
  Probe
caattaaatgaaccatgaaagtcag

SEQ ID NO: 126163 - DNA, 25 bp, Artificial
  Probe
gtcaattaaatgaaccatgaaagtc

SEQ ID NO: 126164 - DNA, 25 bp, Artificial
  Probe
caagaaccatccatttcaaaagagc

SEQ ID NO: 126165 - DNA, 25 bp, Artificial
  Probe
caggaagtgagtattctggcaatgc

SEQ ID NO: 126166 - DNA, 25 bp, Artificial
  Probe
aagaaccatccatttcaaaagagca

SEQ ID NO: 126167 - DNA, 25 bp, Artificial
  Probe
tatctacagtgaggacctatcagag

SEQ ID NO: 126168 - DNA, 25 bp, Artificial
  Probe
ctatctacagtgaggacctatcaga

SEQ ID NO: 126169 - DNA, 25 bp, Artificial
  Probe
gaagaacaaggacaagaggattgag

SEQ ID NO: 126170 - DNA, 25 bp, Artificial
  Probe
tctgaagaacaaggacaagaggatt

SEQ ID NO: 126171 - DNA, 25 bp, Artificial
  Probe
ctgaagaacaaggacaagaggattg

SEQ ID NO: 126172 - DNA, 25 bp, Artificial
  Probe
gctatctacagtgaggacctatcag

SEQ ID NO: 126173 - DNA, 25 bp, Artificial
  Probe
tgaagaacaaggacaagaggattga

SEQ ID NO: 126174 - DNA, 25 bp, Artificial
  Probe
ggctatctacagtgaggacctatca

SEQ ID NO: 126175 - DNA, 25 bp, Artificial
  Probe
gtctgaagaacaaggacaagaggat

SEQ ID NO: 126176 - DNA, 25 bp, Artificial
  Probe
atctacagtgaggacctatcagagg

SEQ ID NO: 126177 - DNA, 25 bp, Artificial
  Probe
aagaacaaggacaagaggattgagc

SEQ ID NO: 126178 - DNA, 25 bp, Artificial
  Probe
ctgtctgggactatgatattggaaa

SEQ ID NO: 126179 - DNA, 25 bp, Artificial
  Probe
gtcactgtctgggactatgatattg

SEQ ID NO: 126180 - DNA, 25 bp, Artificial
  Probe
actgtctgggactatgatattggaa

SEQ ID NO: 126181 - DNA, 25 bp, Artificial
  Probe
cactgtctgggactatgatattgga

SEQ ID NO: 126182 - DNA, 25 bp, Artificial
  Probe
tcactgtctgggactatgatattgg

SEQ ID NO: 126183 - DNA, 25 bp, Artificial
  Probe
ggtcactgtctgggactatgatatt

SEQ ID NO: 126184 - DNA, 25 bp, Artificial
  Probe
ctggtttgactgtctgaagaacaag

SEQ ID NO: 126185 - DNA, 25 bp, Artificial
  Probe
gtttgactgtctgaagaacaaggac

SEQ ID NO: 126186 - DNA, 25 bp, Artificial
  Probe
aggtcactgtctgggactatgatat

SEQ ID NO: 126187 - DNA, 25 bp, Artificial
  Probe
actggtttgactgtctgaagaacaa

SEQ ID NO: 126188 - DNA, 25 bp, Artificial
  Probe
gggctatctacagtgaggacctatc

SEQ ID NO: 126189 - DNA, 25 bp, Artificial
  Probe
gaggtcactgtctgggactatgata

SEQ ID NO: 126190 - DNA, 25 bp, Artificial
  Probe
ggtttgactgtctgaagaacaagga

SEQ ID NO: 126191 - DNA, 25 bp, Artificial
  Probe
tggtttgactgtctgaagaacaagg

SEQ ID NO: 126192 - DNA, 25 bp, Artificial
  Probe
cactggtttgactgtctgaagaaca

SEQ ID NO: 126193 - DNA, 25 bp, Artificial
  Probe
tctgggactatgatattggaaaatc

SEQ ID NO: 126194 - DNA, 25 bp, Artificial
  Probe
aacaaggacaagaggattgagcgtt

SEQ ID NO: 126195 - DNA, 25 bp, Artificial
  Probe
cagtggaagggctatctacagtgag

SEQ ID NO: 126196 - DNA, 25 bp, Artificial
  Probe
tgtctgggactatgatattggaaaa

SEQ ID NO: 126197 - DNA, 25 bp, Artificial
  Probe
agggctatctacagtgaggacctat

SEQ ID NO: 126198 - DNA, 25 bp, Artificial
  Probe
agaacaaggacaagaggattgagcg

SEQ ID NO: 126199 - DNA, 25 bp, Artificial
  Probe
gaagcactggtttgactgtctgaag

SEQ ID NO: 126200 - DNA, 25 bp, Artificial
  Probe
aagggctatctacagtgaggaccta

SEQ ID NO: 126201 - DNA, 25 bp, Artificial
  Probe
gtctgggactatgatattggaaaat

SEQ ID NO: 126202 - DNA, 25 bp, Artificial
  Probe
ctgggactatgatattggaaaatcc

SEQ ID NO: 126203 - DNA, 25 bp, Artificial
  Probe
gaacaaggacaagaggattgagcgt

SEQ ID NO: 126204 - DNA, 25 bp, Artificial
  Probe
agcactggtttgactgtctgaagaa

SEQ ID NO: 126205 - DNA, 25 bp, Artificial
  Probe
aagcactggtttgactgtctgaaga

SEQ ID NO: 126206 - DNA, 25 bp, Artificial
  Probe
ttgactgtctgaagaacaaggacaa

SEQ ID NO: 126207 - DNA, 25 bp, Artificial
  Probe
gcactggtttgactgtctgaagaac

SEQ ID NO: 126208 - DNA, 25 bp, Artificial
  Probe
actgtctgaagaacaaggacaagag

SEQ ID NO: 126209 - DNA, 25 bp, Artificial
  Probe
gactgtctgaagaacaaggacaaga

SEQ ID NO: 126210 - DNA, 25 bp, Artificial
  Probe
tgactgtctgaagaacaaggacaag

SEQ ID NO: 126211 - DNA, 25 bp, Artificial
  Probe
tgaagcactggtttgactgtctgaa

SEQ ID NO: 126212 - DNA, 25 bp, Artificial
  Probe
gagggacactaccagaggactagag

SEQ ID NO: 126213 - DNA, 25 bp, Artificial
  Probe
ttcagatctagggctggactctaag

SEQ ID NO: 126214 - DNA, 25 bp, Artificial
  Probe
ccacattcctgtcagatggctatgg

SEQ ID NO: 126215 - DNA, 25 bp, Artificial
  Probe
gttcagatctagggctggactctaa

SEQ ID NO: 126216 - DNA, 25 bp, Artificial
  Probe
gctgggtgtgactcagtaaagtgaa

SEQ ID NO: 126217 - DNA, 25 bp, Artificial
  Probe
cacattcctgtcagatggctatggg

SEQ ID NO: 126218 - DNA, 25 bp, Artificial
  Probe
agatctagggctggactctaaggag

SEQ ID NO: 126219 - DNA, 25 bp, Artificial
  Probe
cagatctagggctggactctaagga

SEQ ID NO: 126220 - DNA, 25 bp, Artificial
  Probe
tcagatctagggctggactctaagg

SEQ ID NO: 126221 - DNA, 25 bp, Artificial
  Probe
cgttcagatctagggctggactcta

SEQ ID NO: 126222 - DNA, 25 bp, Artificial
  Probe
ggacactaccagaggactagagctc

SEQ ID NO: 126223 - DNA, 25 bp, Artificial
  Probe
ctttgactttgatgatgatggaacc

SEQ ID NO: 126224 - DNA, 25 bp, Artificial
  Probe
tctttgactttgatgatgatggaac

SEQ ID NO: 126225 - DNA, 25 bp, Artificial
  Probe
atctttgactttgatgatgatggaa

SEQ ID NO: 126226 - DNA, 25 bp, Artificial
  Probe
tttgactttgatgatgatggaaccc

SEQ ID NO: 126227 - DNA, 25 bp, Artificial
  Probe
aatatcctggaagagtcggacattg

SEQ ID NO: 126228 - DNA, 25 bp, Artificial
  Probe
caatatcctggaagagtcggacatt

SEQ ID NO: 126229 - DNA, 25 bp, Artificial
  Probe
ttgactttgatgatgatggaaccct

SEQ ID NO: 126230 - DNA, 25 bp, Artificial
  Probe
atatcctggaagagtcggacattga

SEQ ID NO: 126231 - DNA, 25 bp, Artificial
  Probe
acaatatcctggaagagtcggacat

SEQ ID NO: 126232 - DNA, 25 bp, Artificial
  Probe
tgactttgatgatgatggaaccctg

SEQ ID NO: 126233 - DNA, 25 bp, Artificial
  Probe
ctttgatgatgatggaaccctggac

SEQ ID NO: 126234 - DNA, 25 bp, Artificial
  Probe
gactttgatgatgatggaaccctgg

SEQ ID NO: 126235 - DNA, 25 bp, Artificial
  Probe
tatcctggaagagtcggacattgac

SEQ ID NO: 126236 - DNA, 25 bp, Artificial
  Probe
gacaatatcctggaagagtcggaca

SEQ ID NO: 126237 - DNA, 25 bp, Artificial
  Probe
actttgatgatgatggaaccctgga

SEQ ID NO: 126238 - DNA, 25 bp, Artificial
  Probe
catctttgactttgatgatgatgga

SEQ ID NO: 126239 - DNA, 25 bp, Artificial
  Probe
gcatctttgactttgatgatgatgg

SEQ ID NO: 126240 - DNA, 25 bp, Artificial
  Probe
cgcatctttgactttgatgatgatg

SEQ ID NO: 126241 - DNA, 25 bp, Artificial
  Probe
tttgatgatgatggaaccctggaca

SEQ ID NO: 126242 - DNA, 25 bp, Artificial
  Probe
ccgcatctttgactttgatgatgat

SEQ ID NO: 126243 - DNA, 25 bp, Artificial
  Probe
cttccgcatctttgactttgatgat

SEQ ID NO: 126244 - DNA, 25 bp, Artificial
  Probe
ttccgcatctttgactttgatgatg

SEQ ID NO: 126245 - DNA, 25 bp, Artificial
  Probe
ttgatgatgatggaaccctggacag

SEQ ID NO: 126246 - DNA, 25 bp, Artificial
  Probe
gatgatggaaccctggacagagaag

SEQ ID NO: 126247 - DNA, 25 bp, Artificial
  Probe
gatgatgatggaaccctggacagag

SEQ ID NO: 126248 - DNA, 25 bp, Artificial
  Probe
catacccgagtatcttttgagcaga

SEQ ID NO: 126249 - DNA, 25 bp, Artificial
  Probe
atacccgagtatcttttgagcagat

SEQ ID NO: 126250 - DNA, 25 bp, Artificial
  Probe
tccgcatctttgactttgatgatga

SEQ ID NO: 126251 - DNA, 25 bp, Artificial
  Probe
atgatggaaccctggacagagaaga

SEQ ID NO: 126252 - DNA, 25 bp, Artificial
  Probe
agtcactgcatacccgagtatcttt

SEQ ID NO: 126253 - DNA, 25 bp, Artificial
  Probe
atgatgatggaaccctggacagaga

SEQ ID NO: 126254 - DNA, 25 bp, Artificial
  Probe
tacccgagtatcttttgagcagatc

SEQ ID NO: 126255 - DNA, 25 bp, Artificial
  Probe
gagtcactgcatacccgagtatctt

SEQ ID NO: 126256 - DNA, 25 bp, Artificial
  Probe
aagagtcactgcatacccgagtatc

SEQ ID NO: 126257 - DNA, 25 bp, Artificial
  Probe
gaagagtcactgcatacccgagtat

SEQ ID NO: 126258 - DNA, 25 bp, Artificial
  Probe
tgatgatggaaccctggacagagaa

SEQ ID NO: 126259 - DNA, 25 bp, Artificial
  Probe
tgatgatgatggaaccctggacaga

SEQ ID NO: 126260 - DNA, 25 bp, Artificial
  Probe
ccttccgcatctttgactttgatga

SEQ ID NO: 126261 - DNA, 25 bp, Artificial
  Probe
gaagagtcggacattgacagggatg

SEQ ID NO: 126262 - DNA, 25 bp, Artificial
  Probe
ccgagtatcttttgagcagatcctc

SEQ ID NO: 126263 - DNA, 25 bp, Artificial
  Probe
gcatacccgagtatcttttgagcag

SEQ ID NO: 126264 - DNA, 25 bp, Artificial
  Probe
actgcatacccgagtatcttttgag

SEQ ID NO: 126265 - DNA, 25 bp, Artificial
  Probe
cactgcatacccgagtatcttttga

SEQ ID NO: 126266 - DNA, 25 bp, Artificial
  Probe
tcactgcatacccgagtatcttttg

SEQ ID NO: 126267 - DNA, 25 bp, Artificial
  Probe
gtcactgcatacccgagtatctttt

SEQ ID NO: 126268 - DNA, 25 bp, Artificial
  Probe
agattgaagaactccagttgattgt

SEQ ID NO: 126269 - DNA, 25 bp, Artificial
  Probe
gaagaactccagttgattgtgaatg

SEQ ID NO: 126270 - DNA, 25 bp, Artificial
  Probe
gattgaagaactccagttgattgtg

SEQ ID NO: 126271 - DNA, 25 bp, Artificial
  Probe
aagattgaagaactccagttgattg

SEQ ID NO: 126272 - DNA, 25 bp, Artificial
  Probe
aagaactccagttgattgtgaatga

SEQ ID NO: 126273 - DNA, 25 bp, Artificial
  Probe
tgaagaactccagttgattgtgaat

SEQ ID NO: 126274 - DNA, 25 bp, Artificial
  Probe
attgaagaactccagttgattgtga

SEQ ID NO: 126275 - DNA, 25 bp, Artificial
  Probe
ttgaagaactccagttgattgtgaa

SEQ ID NO: 126276 - DNA, 25 bp, Artificial
  Probe
caagattgaagaactccagttgatt

SEQ ID NO: 126277 - DNA, 25 bp, Artificial
  Probe
actccgtcaatattatctgtccaag

SEQ ID NO: 126278 - DNA, 25 bp, Artificial
  Probe
ccaagattgaagaactccagttgat

SEQ ID NO: 126279 - DNA, 25 bp, Artificial
  Probe
agaactccagttgattgtgaatgac

SEQ ID NO: 126280 - DNA, 25 bp, Artificial
  Probe
ctccgtcaatattatctgtccaaga

SEQ ID NO: 126281 - DNA, 25 bp, Artificial
  Probe
tccaagattgaagaactccagttga

SEQ ID NO: 126282 - DNA, 25 bp, Artificial
  Probe
gtccaagattgaagaactccagttg

SEQ ID NO: 126283 - DNA, 25 bp, Artificial
  Probe
gaactccagttgattgtgaatgaca

SEQ ID NO: 126284 - DNA, 25 bp, Artificial
  Probe
tgtccaagattgaagaactccagtt

SEQ ID NO: 126285 - DNA, 25 bp, Artificial
  Probe
gactccgtcaatattatctgtccaa

SEQ ID NO: 126286 - DNA, 25 bp, Artificial
  Probe
gtggactccgtcaatattatctgtc

SEQ ID NO: 126287 - DNA, 25 bp, Artificial
  Probe
cagtggactccgtcaatattatctg

SEQ ID NO: 126288 - DNA, 25 bp, Artificial
  Probe
tatctgtccaagattgaagaactcc

SEQ ID NO: 126289 - DNA, 25 bp, Artificial
  Probe
tctgtccaagattgaagaactccag

SEQ ID NO: 126290 - DNA, 25 bp, Artificial
  Probe
agtggactccgtcaatattatctgt

SEQ ID NO: 126291 - DNA, 25 bp, Artificial
  Probe
ctgtccaagattgaagaactccagt

SEQ ID NO: 126292 - DNA, 25 bp, Artificial
  Probe
cagactcaacctacgagatgattgg

SEQ ID NO: 126293 - DNA, 25 bp, Artificial
  Probe
ccagactcaacctacgagatgattg

SEQ ID NO: 126294 - DNA, 25 bp, Artificial
  Probe
ttatctgtccaagattgaagaactc

SEQ ID NO: 126295 - DNA, 25 bp, Artificial
  Probe
atctgtccaagattgaagaactcca

SEQ ID NO: 126296 - DNA, 25 bp, Artificial
  Probe
tccgtcaatattatctgtccaagat

SEQ ID NO: 126297 - DNA, 25 bp, Artificial
  Probe
cataagatcctgcctaacaaagtgg

SEQ ID NO: 126298 - DNA, 25 bp, Artificial
  Probe
ttattcgtgtctctggctctgaact

SEQ ID NO: 126299 - DNA, 25 bp, Artificial
  Probe
cttcatggacgagatcgactctatc

SEQ ID NO: 126300 - DNA, 25 bp, Artificial
  Probe
gcagtggactccgtcaatattatct

SEQ ID NO: 126301 - DNA, 25 bp, Artificial
  Probe
attatctgtccaagattgaagaact

SEQ ID NO: 126302 - DNA, 25 bp, Artificial
  Probe
atgacagctacactctgcataagat

SEQ ID NO: 126303 - DNA, 25 bp, Artificial
  Probe
ccgtcaatattatctgtccaagatt

SEQ ID NO: 126304 - DNA, 25 bp, Artificial
  Probe
tagacaagcagatcaaggagatcaa

SEQ ID NO: 126305 - DNA, 25 bp, Artificial
  Probe
aatgacagctacactctgcataaga

SEQ ID NO: 126306 - DNA, 25 bp, Artificial
  Probe
tcttcatggacgagatcgactctat

SEQ ID NO: 126307 - DNA, 25 bp, Artificial
  Probe
ctctaagaaatgacagctacactct

SEQ ID NO: 126308 - DNA, 25 bp, Artificial
  Probe
ctagacaagcagatcaaggagatca

SEQ ID NO: 126309 - DNA, 25 bp, Artificial
  Probe
tgacagctacactctgcataagatc

SEQ ID NO: 126310 - DNA, 25 bp, Artificial
  Probe
ctttattcgtgtctctggctctgaa

SEQ ID NO: 126311 - DNA, 25 bp, Artificial
  Probe
cagttgattgtgaatgacaagagtc

SEQ ID NO: 126312 - DNA, 25 bp, Artificial
  Probe
cgtcaatattatctgtccaagattg

SEQ ID NO: 126313 - DNA, 25 bp, Artificial
  Probe
acaattctaacagagatataccgca

SEQ ID NO: 126314 - DNA, 25 bp, Artificial
  Probe
gacaattctaacagagatataccgc

SEQ ID NO: 126315 - DNA, 25 bp, Artificial
  Probe
attctaacagagatataccgcattg

SEQ ID NO: 126316 - DNA, 25 bp, Artificial
  Probe
caattctaacagagatataccgcat

SEQ ID NO: 126317 - DNA, 25 bp, Artificial
  Probe
aattctaacagagatataccgcatt

SEQ ID NO: 126318 - DNA, 25 bp, Artificial
  Probe
agacaattctaacagagatataccg

SEQ ID NO: 126319 - DNA, 25 bp, Artificial
  Probe
aaacaataaaggcacagatatggga

SEQ ID NO: 126320 - DNA, 25 bp, Artificial
  Probe
aacaataaaggcacagatatgggac

SEQ ID NO: 126321 - DNA, 25 bp, Artificial
  Probe
caataaaggcacagatatgggacac

SEQ ID NO: 126322 - DNA, 25 bp, Artificial
  Probe
aataaaggcacagatatgggacaca

SEQ ID NO: 126323 - DNA, 25 bp, Artificial
  Probe
acaataaaggcacagatatgggaca

SEQ ID NO: 126324 - DNA, 25 bp, Artificial
  Probe
aagaactgagagatcatgctgatag

SEQ ID NO: 126325 - DNA, 25 bp, Artificial
  Probe
ctgagagatcatgctgatagtaaca

SEQ ID NO: 126326 - DNA, 25 bp, Artificial
  Probe
actgagagatcatgctgatagtaac

SEQ ID NO: 126327 - DNA, 25 bp, Artificial
  Probe
gaactgagagatcatgctgatagta

SEQ ID NO: 126328 - DNA, 25 bp, Artificial
  Probe
agaactgagagatcatgctgatagt

SEQ ID NO: 126329 - DNA, 25 bp, Artificial
  Probe
aactgagagatcatgctgatagtaa

SEQ ID NO: 126330 - DNA, 25 bp, Artificial
  Probe
ataaaggcacagatatgggacacag

SEQ ID NO: 126331 - DNA, 25 bp, Artificial
  Probe
cctctagctattggttactcttcaa

SEQ ID NO: 126332 - DNA, 25 bp, Artificial
  Probe
ttggttactcttcaatatgggagcc

SEQ ID NO: 126333 - DNA, 25 bp, Artificial
  Probe
acttccttacacttaagaatcttcc

SEQ ID NO: 126334 - DNA, 25 bp, Artificial
  Probe
aagagtaacctcctgtctcgattta

SEQ ID NO: 126335 - DNA, 25 bp, Artificial
  Probe
attggttactcttcaatatgggagc

SEQ ID NO: 126336 - DNA, 25 bp, Artificial
  Probe
gttactcttcaatatgggagcctgg

SEQ ID NO: 126337 - DNA, 25 bp, Artificial
  Probe
ggttactcttcaatatgggagcctg

SEQ ID NO: 126338 - DNA, 25 bp, Artificial
  Probe
aaaacaataaaggcacagatatggg

SEQ ID NO: 126339 - DNA, 25 bp, Artificial
  Probe
tggttactcttcaatatgggagcct

SEQ ID NO: 126340 - DNA, 25 bp, Artificial
  Probe
gggaaaacaataaaggcacagatat

SEQ ID NO: 126341 - DNA, 25 bp, Artificial
  Probe
tgggaaaacaataaaggcacagata

SEQ ID NO: 126342 - DNA, 25 bp, Artificial
  Probe
gaagagtaacctcctgtctcgattt

SEQ ID NO: 126343 - DNA, 25 bp, Artificial
  Probe
cgacgagtacgactacctctttaaa

SEQ ID NO: 126344 - DNA, 25 bp, Artificial
  Probe
atgggaaaacaataaaggcacagat

SEQ ID NO: 126345 - DNA, 25 bp, Artificial
  Probe
agagtaacctcctgtctcgatttac

SEQ ID NO: 126346 - DNA, 25 bp, Artificial
  Probe
acgacgagtacgactacctctttaa

SEQ ID NO: 126347 - DNA, 25 bp, Artificial
  Probe
gaaaacaataaaggcacagatatgg

SEQ ID NO: 126348 - DNA, 25 bp, Artificial
  Probe
ggaaaacaataaaggcacagatatg

SEQ ID NO: 126349 - DNA, 25 bp, Artificial
  Probe
ttccttacacttaagaatcttccca

SEQ ID NO: 126350 - DNA, 25 bp, Artificial
  Probe
gatgggaaaacaataaaggcacaga

SEQ ID NO: 126351 - DNA, 25 bp, Artificial
  Probe
ccttacacttaagaatcttcccatg

SEQ ID NO: 126352 - DNA, 25 bp, Artificial
  Probe
tccttacacttaagaatcttcccat

SEQ ID NO: 126353 - DNA, 25 bp, Artificial
  Probe
cttccttacacttaagaatcttccc

SEQ ID NO: 126354 - DNA, 25 bp, Artificial
  Probe
tgatgggaaaacaataaaggcacag

SEQ ID NO: 126355 - DNA, 25 bp, Artificial
  Probe
gacgacgagtacgactacctcttta

SEQ ID NO: 126356 - DNA, 25 bp, Artificial
  Probe
agctattggttactcttcaatatgg

SEQ ID NO: 126357 - DNA, 25 bp, Artificial
  Probe
cttacacttaagaatcttcccatgt

SEQ ID NO: 126358 - DNA, 25 bp, Artificial
  Probe
ttggtctgaacatcctgtattgtaa

SEQ ID NO: 126359 - DNA, 25 bp, Artificial
  Probe
gttggtctgaacatcctgtattgta

SEQ ID NO: 126360 - DNA, 25 bp, Artificial
  Probe
ccatatcacagcgattctagtcagt

SEQ ID NO: 126361 - DNA, 25 bp, Artificial
  Probe
catatcacagcgattctagtcagtg

SEQ ID NO: 126362 - DNA, 25 bp, Artificial
  Probe
atatcacagcgattctagtcagtgt

SEQ ID NO: 126363 - DNA, 25 bp, Artificial
  Probe
atctgtgtgtaatggctttatctgt

SEQ ID NO: 126364 - DNA, 25 bp, Artificial
  Probe
tctgtgtgtaatggctttatctgtt

SEQ ID NO: 126365 - DNA, 25 bp, Artificial
  Probe
tatcacagcgattctagtcagtgtt

SEQ ID NO: 126366 - DNA, 25 bp, Artificial
  Probe
ctgtgtgtaatggctttatctgtta

SEQ ID NO: 126367 - DNA, 25 bp, Artificial
  Probe
catctgtgtgtaatggctttatctg

SEQ ID NO: 126368 - DNA, 25 bp, Artificial
  Probe
ggtctcctatatcctcataccatgt

SEQ ID NO: 126369 - DNA, 25 bp, Artificial
  Probe
tgtgtgtaatggctttatctgttaa

SEQ ID NO: 126370 - DNA, 25 bp, Artificial
  Probe
tttattcacaaacagaaggagagcc

SEQ ID NO: 126371 - DNA, 25 bp, Artificial
  Probe
cttactttacttcgtgtcaccgtag

SEQ ID NO: 126372 - DNA, 25 bp, Artificial
  Probe
gcatctgtgtgtaatggctttatct

SEQ ID NO: 126373 - DNA, 25 bp, Artificial
  Probe
tctgaacatcctgtattgtaaacca

SEQ ID NO: 126374 - DNA, 25 bp, Artificial
  Probe
tggtctgaacatcctgtattgtaaa

SEQ ID NO: 126375 - DNA, 25 bp, Artificial
  Probe
aacctcaagttcaaggcatctactc

SEQ ID NO: 126376 - DNA, 25 bp, Artificial
  Probe
gtctgaacatcctgtattgtaaacc

SEQ ID NO: 126377 - DNA, 25 bp, Artificial
  Probe
ggtctgaacatcctgtattgtaaac

SEQ ID NO: 126378 - DNA, 25 bp, Artificial
  Probe
ggtaactttccaactgccttataac

SEQ ID NO: 126379 - DNA, 25 bp, Artificial
  Probe
tgaacatcctgtattgtaaaccaag

SEQ ID NO: 126380 - DNA, 25 bp, Artificial
  Probe
ctgaacatcctgtattgtaaaccaa

SEQ ID NO: 126381 - DNA, 25 bp, Artificial
  Probe
tattcacaaacagaaggagagccat

SEQ ID NO: 126382 - DNA, 25 bp, Artificial
  Probe
acagcgattctagtcagtgtttata

SEQ ID NO: 126383 - DNA, 25 bp, Artificial
  Probe
gggtaactttccaactgccttataa

SEQ ID NO: 126384 - DNA, 25 bp, Artificial
  Probe
caacctcaagttcaaggcatctact

SEQ ID NO: 126385 - DNA, 25 bp, Artificial
  Probe
gaacatcctgtattgtaaaccaagg

SEQ ID NO: 126386 - DNA, 25 bp, Artificial
  Probe
gtaactttccaactgccttataact

SEQ ID NO: 126387 - DNA, 25 bp, Artificial
  Probe
gatttggtctcctatatcctcatac

SEQ ID NO: 126388 - DNA, 25 bp, Artificial
  Probe
ttattcacaaacagaaggagagcca

SEQ ID NO: 126389 - DNA, 25 bp, Artificial
  Probe
gcgattctagtcagtgtttataagt

SEQ ID NO: 126390 - DNA, 25 bp, Artificial
  Probe
cagcgattctagtcagtgtttataa

SEQ ID NO: 126391 - DNA, 25 bp, Artificial
  Probe
ttactgagtgactctgctgtttatt

SEQ ID NO: 126392 - DNA, 25 bp, Artificial
  Probe
caacattactgagtgactctgctgt

SEQ ID NO: 126393 - DNA, 25 bp, Artificial
  Probe
tactgagtgactctgctgtttattc

SEQ ID NO: 126394 - DNA, 25 bp, Artificial
  Probe
attactgagtgactctgctgtttat

SEQ ID NO: 126395 - DNA, 25 bp, Artificial
  Probe
agcgattctagtcagtgtttataag

SEQ ID NO: 126396 - DNA, 25 bp, Artificial
  Probe
cattactgagtgactctgctgttta

SEQ ID NO: 126397 - DNA, 25 bp, Artificial
  Probe
ttactttacttcgtgtcaccgtagg

SEQ ID NO: 126398 - DNA, 25 bp, Artificial
  Probe
ccttactttacttcgtgtcaccgta

SEQ ID NO: 126399 - DNA, 25 bp, Artificial
  Probe
cacagcgattctagtcagtgtttat

SEQ ID NO: 126400 - DNA, 25 bp, Artificial
  Probe
agggtaactttccaactgccttata

SEQ ID NO: 126401 - DNA, 25 bp, Artificial
  Probe
taagtggtgtttccagtgtaagtaa

SEQ ID NO: 126402 - DNA, 25 bp, Artificial
  Probe
ttaagtggtgtttccagtgtaagta

SEQ ID NO: 126403 - DNA, 25 bp, Artificial
  Probe
ttaacaggttgacacattgcttgac

SEQ ID NO: 126404 - DNA, 25 bp, Artificial
  Probe
tgacacattgcttgacctgatttat

SEQ ID NO: 126405 - DNA, 25 bp, Artificial
  Probe
ttgacacattgcttgacctgattta

SEQ ID NO: 126406 - DNA, 25 bp, Artificial
  Probe
gacacattgcttgacctgatttatg

SEQ ID NO: 126407 - DNA, 25 bp, Artificial
  Probe
gttcataaatggacttgggactcag

SEQ ID NO: 126408 - DNA, 25 bp, Artificial
  Probe
tagagttcataaatggacttgggac

SEQ ID NO: 126409 - DNA, 25 bp, Artificial
  Probe
tataacttgggagtgataatgggtc

SEQ ID NO: 126410 - DNA, 25 bp, Artificial
  Probe
ctgttgggatttgcttcattgtttg

SEQ ID NO: 126411 - DNA, 25 bp, Artificial
  Probe
ctagagttcataaatggacttggga

SEQ ID NO: 126412 - DNA, 25 bp, Artificial
  Probe
atataacttgggagtgataatgggt

SEQ ID NO: 126413 - DNA, 25 bp, Artificial
  Probe
atattgccatgttcagttaaagtgc

SEQ ID NO: 126414 - DNA, 25 bp, Artificial
  Probe
ataacttgggagtgataatgggtca

SEQ ID NO: 126415 - DNA, 25 bp, Artificial
  Probe
cctagagttcataaatggacttggg

SEQ ID NO: 126416 - DNA, 25 bp, Artificial
  Probe
ccctagagttcataaatggacttgg

SEQ ID NO: 126417 - DNA, 25 bp, Artificial
  Probe
actgttgggatttgcttcattgttt

SEQ ID NO: 126418 - DNA, 25 bp, Artificial
  Probe
ggatttgcttcattgtttgacatca

SEQ ID NO: 126419 - DNA, 25 bp, Artificial
  Probe
taacttgggagtgataatgggtcaa

SEQ ID NO: 126420 - DNA, 25 bp, Artificial
  Probe
agagttcataaatggacttgggact

SEQ ID NO: 126421 - DNA, 25 bp, Artificial
  Probe
agttcataaatggacttgggactca

SEQ ID NO: 126422 - DNA, 25 bp, Artificial
  Probe
gccctagagttcataaatggacttg

SEQ ID NO: 126423 - DNA, 25 bp, Artificial
  Probe
agccctagagttcataaatggactt

SEQ ID NO: 126424 - DNA, 25 bp, Artificial
  Probe
gggatttgcttcattgtttgacatc

SEQ ID NO: 126425 - DNA, 25 bp, Artificial
  Probe
gttgggatttgcttcattgtttgac

SEQ ID NO: 126426 - DNA, 25 bp, Artificial
  Probe
gttgacacattgcttgacctgattt

SEQ ID NO: 126427 - DNA, 25 bp, Artificial
  Probe
gatttgcttcattgtttgacatcaa

SEQ ID NO: 126428 - DNA, 25 bp, Artificial
  Probe
acacattgcttgacctgatttatgc

SEQ ID NO: 126429 - DNA, 25 bp, Artificial
  Probe
aacttgggagtgataatgggtcaaa

SEQ ID NO: 126430 - DNA, 25 bp, Artificial
  Probe
cagccctagagttcataaatggact

SEQ ID NO: 126431 - DNA, 25 bp, Artificial
  Probe
tgttgggatttgcttcattgtttga

SEQ ID NO: 126432 - DNA, 25 bp, Artificial
  Probe
tgggatttgcttcattgtttgacat

SEQ ID NO: 126433 - DNA, 25 bp, Artificial
  Probe
ttcataaatggacttgggactcagc

SEQ ID NO: 126434 - DNA, 25 bp, Artificial
  Probe
ttgggatttgcttcattgtttgaca

SEQ ID NO: 126435 - DNA, 25 bp, Artificial
  Probe
tatattgccatgttcagttaaagtg

SEQ ID NO: 126436 - DNA, 25 bp, Artificial
  Probe
gttaacaggttgacacattgcttga

SEQ ID NO: 126437 - DNA, 25 bp, Artificial
  Probe
tatataacttgggagtgataatggg

SEQ ID NO: 126438 - DNA, 25 bp, Artificial
  Probe
cataaatggacttgggactcagcag

SEQ ID NO: 126439 - DNA, 25 bp, Artificial
  Probe
gcagccctagagttcataaatggac

SEQ ID NO: 126440 - DNA, 25 bp, Artificial
  Probe
taacaggttgacacattgcttgacc

SEQ ID NO: 126441 - DNA, 25 bp, Artificial
  Probe
atatattgccatgttcagttaaagt

SEQ ID NO: 126442 - DNA, 25 bp, Artificial
  Probe
ttgggagtgataatgggtcaaaatt

SEQ ID NO: 126443 - DNA, 25 bp, Artificial
  Probe
tcataaatggacttgggactcagca

SEQ ID NO: 126444 - DNA, 25 bp, Artificial
  Probe
cttgggagtgataatgggtcaaaat

SEQ ID NO: 126445 - DNA, 25 bp, Artificial
  Probe
ggttgacacattgcttgacctgatt

SEQ ID NO: 126446 - DNA, 25 bp, Artificial
  Probe
ataaatggacttgggactcagcagt

SEQ ID NO: 126447 - DNA, 25 bp, Artificial
  Probe
gagtgaatatattgccatgttcagt

SEQ ID NO: 126448 - DNA, 25 bp, Artificial
  Probe
ttgtcctccttatggtcatgtactt

SEQ ID NO: 126449 - DNA, 25 bp, Artificial
  Probe
ttacttgatgcccttactccaaatc

SEQ ID NO: 126450 - DNA, 25 bp, Artificial
  Probe
cttacttgatgcccttactccaaat

SEQ ID NO: 126451 - DNA, 25 bp, Artificial
  Probe
catgtactttgactttgaactggtg

SEQ ID NO: 126452 - DNA, 25 bp, Artificial
  Probe
atcttgcctcctagacatctcagag

SEQ ID NO: 126453 - DNA, 25 bp, Artificial
  Probe
tgatgcccttactccaaatcctatc

SEQ ID NO: 126454 - DNA, 25 bp, Artificial
  Probe
ttgatgcccttactccaaatcctat

SEQ ID NO: 126455 - DNA, 25 bp, Artificial
  Probe
gtcctccttatggtcatgtactttg

SEQ ID NO: 126456 - DNA, 25 bp, Artificial
  Probe
ctttgtcctccttatggtcatgtac

SEQ ID NO: 126457 - DNA, 25 bp, Artificial
  Probe
catcttgcctcctagacatctcaga

SEQ ID NO: 126458 - DNA, 25 bp, Artificial
  Probe
atgtactttgactttgaactggtgg

SEQ ID NO: 126459 - DNA, 25 bp, Artificial
  Probe
tgtcctccttatggtcatgtacttt

SEQ ID NO: 126460 - DNA, 25 bp, Artificial
  Probe
tttgtcctccttatggtcatgtact

SEQ ID NO: 126461 - DNA, 25 bp, Artificial
  Probe
tcatgtactttgactttgaactggt

SEQ ID NO: 126462 - DNA, 25 bp, Artificial
  Probe
cttgatgcccttactccaaatccta

SEQ ID NO: 126463 - DNA, 25 bp, Artificial
  Probe
tcctccttatggtcatgtactttga

SEQ ID NO: 126464 - DNA, 25 bp, Artificial
  Probe
ccatgtgtgcaattgttaagttctt

SEQ ID NO: 126465 - DNA, 25 bp, Artificial
  Probe
gtactttgactttgaactggtggac

SEQ ID NO: 126466 - DNA, 25 bp, Artificial
  Probe
cctttgtcctccttatggtcatgta

SEQ ID NO: 126467 - DNA, 25 bp, Artificial
  Probe
ctcccatgagtcaaacagtatcttg

SEQ ID NO: 126468 - DNA, 25 bp, Artificial
  Probe
tacttgatgcccttactccaaatcc

SEQ ID NO: 126469 - DNA, 25 bp, Artificial
  Probe
tgtactttgactttgaactggtgga

SEQ ID NO: 126470 - DNA, 25 bp, Artificial
  Probe
ccttacttgatgcccttactccaaa

SEQ ID NO: 126471 - DNA, 25 bp, Artificial
  Probe
catgtgtgcaattgttaagttctta

SEQ ID NO: 126472 - DNA, 25 bp, Artificial
  Probe
gatgcccttactccaaatcctatcg

SEQ ID NO: 126473 - DNA, 25 bp, Artificial
  Probe
tactttgactttgaactggtggacc

SEQ ID NO: 126474 - DNA, 25 bp, Artificial
  Probe
ccatcttgcctcctagacatctcag

SEQ ID NO: 126475 - DNA, 25 bp, Artificial
  Probe
tgtgtgcaattgttaagttcttaat

SEQ ID NO: 126476 - DNA, 25 bp, Artificial
  Probe
atgtgtgcaattgttaagttcttaa

SEQ ID NO: 126477 - DNA, 25 bp, Artificial
  Probe
aagccatgtgtgcaattgttaagtt

SEQ ID NO: 126478 - DNA, 25 bp, Artificial
  Probe
atcaagccatgtgtgcaattgttaa

SEQ ID NO: 126479 - DNA, 25 bp, Artificial
  Probe
aatcaagccatgtgtgcaattgtta

SEQ ID NO: 126480 - DNA, 25 bp, Artificial
  Probe
gctcccatgagtcaaacagtatctt

SEQ ID NO: 126481 - DNA, 25 bp, Artificial
  Probe
tcccatgagtcaaacagtatcttgc

SEQ ID NO: 126482 - DNA, 25 bp, Artificial
  Probe
atgttactcaatggaatcaagccat

SEQ ID NO: 126483 - DNA, 25 bp, Artificial
  Probe
gccatgtgtgcaattgttaagttct

SEQ ID NO: 126484 - DNA, 25 bp, Artificial
  Probe
agccatgtgtgcaattgttaagttc

SEQ ID NO: 126485 - DNA, 25 bp, Artificial
  Probe
tcaagccatgtgtgcaattgttaag

SEQ ID NO: 126486 - DNA, 25 bp, Artificial
  Probe
ctacctgccttacttgatgccctta

SEQ ID NO: 126487 - DNA, 25 bp, Artificial
  Probe
gttacccacccaagtttgactcatc

SEQ ID NO: 126488 - DNA, 25 bp, Artificial
  Probe
acttgatgcccttactccaaatcct

SEQ ID NO: 126489 - DNA, 25 bp, Artificial
  Probe
ttactcaatggaatcaagccatgtg

SEQ ID NO: 126490 - DNA, 25 bp, Artificial
  Probe
gttactcaatggaatcaagccatgt

SEQ ID NO: 126491 - DNA, 25 bp, Artificial
  Probe
tgttactcaatggaatcaagccatg

SEQ ID NO: 126492 - DNA, 25 bp, Artificial
  Probe
atgcccttactccaaatcctatcga

SEQ ID NO: 126493 - DNA, 25 bp, Artificial
  Probe
atatcacaccgtctgagtatatgga

SEQ ID NO: 126494 - DNA, 25 bp, Artificial
  Probe
tatatcacaccgtctgagtatatgg

SEQ ID NO: 126495 - DNA, 25 bp, Artificial
  Probe
acaccgtctgagtatatggactata

SEQ ID NO: 126496 - DNA, 25 bp, Artificial
  Probe
cacaccgtctgagtatatggactat

SEQ ID NO: 126497 - DNA, 25 bp, Artificial
  Probe
tatcacaccgtctgagtatatggac

SEQ ID NO: 126498 - DNA, 25 bp, Artificial
  Probe
tcacaccgtctgagtatatggacta

SEQ ID NO: 126499 - DNA, 25 bp, Artificial
  Probe
tttgtgttgtgtatttgttgtgttt

SEQ ID NO: 126500 - DNA, 25 bp, Artificial
  Probe
atcacaccgtctgagtatatggact

SEQ ID NO: 126501 - DNA, 25 bp, Artificial
  Probe
aatcactgtgagcaagagaatccat

SEQ ID NO: 126502 - DNA, 25 bp, Artificial
  Probe
accgtctgagtatatggactataca

SEQ ID NO: 126503 - DNA, 25 bp, Artificial
  Probe
caccgtctgagtatatggactatac

SEQ ID NO: 126504 - DNA, 25 bp, Artificial
  Probe
ccgtctgagtatatggactatacag

SEQ ID NO: 126505 - DNA, 25 bp, Artificial
  Probe
ggaacctctttgagattcagaatga

SEQ ID NO: 126506 - DNA, 25 bp, Artificial
  Probe
tggaacctctttgagattcagaatg

SEQ ID NO: 126507 - DNA, 25 bp, Artificial
  Probe
gtggaacctctttgagattcagaat

SEQ ID NO: 126508 - DNA, 25 bp, Artificial
  Probe
cgtctgagtatatggactatacagt

SEQ ID NO: 126509 - DNA, 25 bp, Artificial
  Probe
atatatcacaccgtctgagtatatg

SEQ ID NO: 126510 - DNA, 25 bp, Artificial
  Probe
ttgagattcagaatgaaggagagaa

SEQ ID NO: 126511 - DNA, 25 bp, Artificial
  Probe
cactgtgagcaagagaatccatgtt

SEQ ID NO: 126512 - DNA, 25 bp, Artificial
  Probe
atcactgtgagcaagagaatccatg

SEQ ID NO: 126513 - DNA, 25 bp, Artificial
  Probe
caatcactgtgagcaagagaatcca

SEQ ID NO: 126514 - DNA, 25 bp, Artificial
  Probe
tgagtatatggactatacagtgagt

SEQ ID NO: 126515 - DNA, 25 bp, Artificial
  Probe
gagaatccatgtttgggagagatag

SEQ ID NO: 126516 - DNA, 25 bp, Artificial
  Probe
tctgagtatatggactatacagtga

SEQ ID NO: 126517 - DNA, 25 bp, Artificial
  Probe
gtctgagtatatggactatacagtg

SEQ ID NO: 126518 - DNA, 25 bp, Artificial
  Probe
aatatatcacaccgtctgagtatat

SEQ ID NO: 126519 - DNA, 25 bp, Artificial
  Probe
gaatccatgtttgggagagatagtc

SEQ ID NO: 126520 - DNA, 25 bp, Artificial
  Probe
agagaatccatgtttgggagagata

SEQ ID NO: 126521 - DNA, 25 bp, Artificial
  Probe
agaatccatgtttgggagagatagt

SEQ ID NO: 126522 - DNA, 25 bp, Artificial
  Probe
ctgtgagcaagagaatccatgtttg

SEQ ID NO: 126523 - DNA, 25 bp, Artificial
  Probe
cgtggaacctctttgagattcagaa

SEQ ID NO: 126524 - DNA, 25 bp, Artificial
  Probe
actgtgagcaagagaatccatgttt

SEQ ID NO: 126525 - DNA, 25 bp, Artificial
  Probe
ctgagtatatggactatacagtgag

SEQ ID NO: 126526 - DNA, 25 bp, Artificial
  Probe
aagagaatccatgtttgggagagat

SEQ ID NO: 126527 - DNA, 25 bp, Artificial
  Probe
gttttgtgttgtgtatttgttgtgt

SEQ ID NO: 126528 - DNA, 25 bp, Artificial
  Probe
tgttttgtgttgtgtatttgttgtg

SEQ ID NO: 126529 - DNA, 25 bp, Artificial
  Probe
gaccaagaggcaaaagagagaatat

SEQ ID NO: 126530 - DNA, 25 bp, Artificial
  Probe
ttgtgttgtgtatttgttgtgtttt

SEQ ID NO: 126531 - DNA, 25 bp, Artificial
  Probe
ttttgtgttgtgtatttgttgtgtt

SEQ ID NO: 126532 - DNA, 25 bp, Artificial
  Probe
ttgttttgtgttgtgtatttgttgt

SEQ ID NO: 126533 - DNA, 25 bp, Artificial
  Probe
aatccatgtttgggagagatagtcc

SEQ ID NO: 126534 - DNA, 25 bp, Artificial
  Probe
cctctttgagattcagaatgaagga

SEQ ID NO: 126535 - DNA, 25 bp, Artificial
  Probe
accaagttttgttttgtgttgtgta

SEQ ID NO: 126536 - DNA, 25 bp, Artificial
  Probe
taccaagttttgttttgtgttgtgt

SEQ ID NO: 126537 - DNA, 25 bp, Artificial
  Probe
ttaccaagttttgttttgtgttgtg

SEQ ID NO: 126538 - DNA, 25 bp, Artificial
  Probe
gctcatcatcaagtaggattaaggt

SEQ ID NO: 126539 - DNA, 25 bp, Artificial
  Probe
tgctcatcatcaagtaggattaagg

SEQ ID NO: 126540 - DNA, 25 bp, Artificial
  Probe
tcatcatcaagtaggattaaggtgt

SEQ ID NO: 126541 - DNA, 25 bp, Artificial
  Probe
ctcatcatcaagtaggattaaggtg

SEQ ID NO: 126542 - DNA, 25 bp, Artificial
  Probe
agttggagaatacttcgcttcatag

SEQ ID NO: 126543 - DNA, 25 bp, Artificial
  Probe
catcatcaagtaggattaaggtgtt

SEQ ID NO: 126544 - DNA, 25 bp, Artificial
  Probe
gttggagaatacttcgcttcatagt

SEQ ID NO: 126545 - DNA, 25 bp, Artificial
  Probe
cagttggagaatacttcgcttcata

SEQ ID NO: 126546 - DNA, 25 bp, Artificial
  Probe
gtgatgaagacagcattaaggactc

SEQ ID NO: 126547 - DNA, 25 bp, Artificial
  Probe
ttgctcatcatcaagtaggattaag

SEQ ID NO: 126548 - DNA, 25 bp, Artificial
  Probe
tgtgatgaagacagcattaaggact

SEQ ID NO: 126549 - DNA, 25 bp, Artificial
  Probe
tgatgaagacagcattaaggactcc

SEQ ID NO: 126550 - DNA, 25 bp, Artificial
  Probe
ttggagaatacttcgcttcatagta

SEQ ID NO: 126551 - DNA, 25 bp, Artificial
  Probe
tggagaatacttcgcttcatagtac

SEQ ID NO: 126552 - DNA, 25 bp, Artificial
  Probe
acaagaaacaatgagttaatcgcaa

SEQ ID NO: 126553 - DNA, 25 bp, Artificial
  Probe
aacaagaaacaatgagttaatcgca

SEQ ID NO: 126554 - DNA, 25 bp, Artificial
  Probe
catcaagtaggattaaggtgtttca

SEQ ID NO: 126555 - DNA, 25 bp, Artificial
  Probe
tcatcaagtaggattaaggtgtttc

SEQ ID NO: 126556 - DNA, 25 bp, Artificial
  Probe
tcaagtaggattaaggtgtttcaaa

SEQ ID NO: 126557 - DNA, 25 bp, Artificial
  Probe
gatgattcagtcctgcaagtgtaac

SEQ ID NO: 126558 - DNA, 25 bp, Artificial
  Probe
gattcagtcctgcaagtgtaactac

SEQ ID NO: 126559 - DNA, 25 bp, Artificial
  Probe
ctctacagtctgttcaacgatatcc

SEQ ID NO: 126560 - DNA, 25 bp, Artificial
  Probe
cctctacagtctgttcaacgatatc

SEQ ID NO: 126561 - DNA, 25 bp, Artificial
  Probe
gcctctacagtctgttcaacgatat

SEQ ID NO: 126562 - DNA, 25 bp, Artificial
  Probe
tgattcagtcctgcaagtgtaacta

SEQ ID NO: 126563 - DNA, 25 bp, Artificial
  Probe
atcaagtaggattaaggtgtttcaa

SEQ ID NO: 126564 - DNA, 25 bp, Artificial
  Probe
ctacagtctgttcaacgatatccac

SEQ ID NO: 126565 - DNA, 25 bp, Artificial
  Probe
tctacagtctgttcaacgatatcca

SEQ ID NO: 126566 - DNA, 25 bp, Artificial
  Probe
tctgttcaacgatatccacaagttc

SEQ ID NO: 126567 - DNA, 25 bp, Artificial
  Probe
atcatcaagtaggattaaggtgttt

SEQ ID NO: 126568 - DNA, 25 bp, Artificial
  Probe
tgttcaacgatatccacaagttcag

SEQ ID NO: 126569 - DNA, 25 bp, Artificial
  Probe
ctgttcaacgatatccacaagttca

SEQ ID NO: 126570 - DNA, 25 bp, Artificial
  Probe
gtctgttcaacgatatccacaagtt

SEQ ID NO: 126571 - DNA, 25 bp, Artificial
  Probe
gttcaacgatatccacaagttcagg

SEQ ID NO: 126572 - DNA, 25 bp, Artificial
  Probe
atgatgattcagtcctgcaagtgta

SEQ ID NO: 126573 - DNA, 25 bp, Artificial
  Probe
tacagtctgttcaacgatatccaca

SEQ ID NO: 126574 - DNA, 25 bp, Artificial
  Probe
atatccacaagttcagggactaaag

SEQ ID NO: 126575 - DNA, 25 bp, Artificial
  Probe
gcagttggagaatacttcgcttcat

SEQ ID NO: 126576 - DNA, 25 bp, Artificial
  Probe
attcagtcctgcaagtgtaactaca

SEQ ID NO: 126577 - DNA, 25 bp, Artificial
  Probe
cagtctgttcaacgatatccacaag

SEQ ID NO: 126578 - DNA, 25 bp, Artificial
  Probe
atgattcagtcctgcaagtgtaact

SEQ ID NO: 126579 - DNA, 25 bp, Artificial
  Probe
tgatgattcagtcctgcaagtgtaa

SEQ ID NO: 126580 - DNA, 25 bp, Artificial
  Probe
catctccacacgagttaccaatgac

SEQ ID NO: 126581 - DNA, 25 bp, Artificial
  Probe
ttcagtcctgcaagtgtaactacaa

SEQ ID NO: 126582 - DNA, 25 bp, Artificial
  Probe
agtctgttcaacgatatccacaagt

SEQ ID NO: 126583 - DNA, 25 bp, Artificial
  Probe
ctatcacttcagatcaacagagaca

SEQ ID NO: 126584 - DNA, 25 bp, Artificial
  Probe
cctatcacttcagatcaacagagac

SEQ ID NO: 126585 - DNA, 25 bp, Artificial
  Probe
tatccacctatcacttcagatcaac

SEQ ID NO: 126586 - DNA, 25 bp, Artificial
  Probe
tatcacttcagatcaacagagacaa

SEQ ID NO: 126587 - DNA, 25 bp, Artificial
  Probe
acctatcacttcagatcaacagaga

SEQ ID NO: 126588 - DNA, 25 bp, Artificial
  Probe
cacctatcacttcagatcaacagag

SEQ ID NO: 126589 - DNA, 25 bp, Artificial
  Probe
atcacttcagatcaacagagacaac

SEQ ID NO: 126590 - DNA, 25 bp, Artificial
  Probe
atccacctatcacttcagatcaaca

SEQ ID NO: 126591 - DNA, 25 bp, Artificial
  Probe
atatccacctatcacttcagatcaa

SEQ ID NO: 126592 - DNA, 25 bp, Artificial
  Probe
aatatccacctatcacttcagatca

SEQ ID NO: 126593 - DNA, 25 bp, Artificial
  Probe
tgctgctgatgaatataacagacta

SEQ ID NO: 126594 - DNA, 25 bp, Artificial
  Probe
ctgctgctgatgaatataacagact

SEQ ID NO: 126595 - DNA, 25 bp, Artificial
  Probe
tcacttcagatcaacagagacaact

SEQ ID NO: 126596 - DNA, 25 bp, Artificial
  Probe
gctgctgatgaatataacagactaa

SEQ ID NO: 126597 - DNA, 25 bp, Artificial
  Probe
ccacctatcacttcagatcaacaga

SEQ ID NO: 126598 - DNA, 25 bp, Artificial
  Probe
tccacctatcacttcagatcaacag

SEQ ID NO: 126599 - DNA, 25 bp, Artificial
  Probe
gaatatccacctatcacttcagatc

SEQ ID NO: 126600 - DNA, 25 bp, Artificial
  Probe
ggaatatccacctatcacttcagat

SEQ ID NO: 126601 - DNA, 25 bp, Artificial
  Probe
cagagaactggatgactacagagag

SEQ ID NO: 126602 - DNA, 25 bp, Artificial
  Probe
atggctgctgctgatgaatataaca

SEQ ID NO: 126603 - DNA, 25 bp, Artificial
  Probe
tacatggctgctgctgatgaatata

SEQ ID NO: 126604 - DNA, 25 bp, Artificial
  Probe
ttcctgtctccagtattgaagcatt

SEQ ID NO: 126605 - DNA, 25 bp, Artificial
  Probe
gacagagaactggatgactacagag

SEQ ID NO: 126606 - DNA, 25 bp, Artificial
  Probe
gcaggtttacaggagtataagagtt

SEQ ID NO: 126607 - DNA, 25 bp, Artificial
  Probe
cacttcagatcaacagagacaactg

SEQ ID NO: 126608 - DNA, 25 bp, Artificial
  Probe
tttaataccatccgtttcctgtctc

SEQ ID NO: 126609 - DNA, 25 bp, Artificial
  Probe
ctttaataccatccgtttcctgtct

SEQ ID NO: 126610 - DNA, 25 bp, Artificial
  Probe
gagcaaattatcacacatcaagagg

SEQ ID NO: 126611 - DNA, 25 bp, Artificial
  Probe
gctgctgctgatgaatataacagac

SEQ ID NO: 126612 - DNA, 25 bp, Artificial
  Probe
acagagaactggatgactacagaga

SEQ ID NO: 126613 - DNA, 25 bp, Artificial
  Probe
gcaagcagttaaagagcaaattatc

SEQ ID NO: 126614 - DNA, 25 bp, Artificial
  Probe
agcaaattatcacacatcaagagga

SEQ ID NO: 126615 - DNA, 25 bp, Artificial
  Probe
gcaaattatcacacatcaagaggat

SEQ ID NO: 126616 - DNA, 25 bp, Artificial
  Probe
agagcaaattatcacacatcaagag

SEQ ID NO: 126617 - DNA, 25 bp, Artificial
  Probe
gcagttaaagagcaaattatcacac

SEQ ID NO: 126618 - DNA, 25 bp, Artificial
  Probe
agcagttaaagagcaaattatcaca

SEQ ID NO: 126619 - DNA, 25 bp, Artificial
  Probe
catggctgctgctgatgaatataac

SEQ ID NO: 126620 - DNA, 25 bp, Artificial
  Probe
aagagcaaattatcacacatcaaga

SEQ ID NO: 126621 - DNA, 25 bp, Artificial
  Probe
aacagactaaagcaagttaagggat

SEQ ID NO: 126622 - DNA, 25 bp, Artificial
  Probe
aactggatgactacagagaggagag

SEQ ID NO: 126623 - DNA, 25 bp, Artificial
  Probe
gaactggatgactacagagaggaga

SEQ ID NO: 126624 - DNA, 25 bp, Artificial
  Probe
agaactggatgactacagagaggag

SEQ ID NO: 126625 - DNA, 25 bp, Artificial
  Probe
gagaactggatgactacagagagga

SEQ ID NO: 126626 - DNA, 25 bp, Artificial
  Probe
agagaactggatgactacagagagg

SEQ ID NO: 126627 - DNA, 25 bp, Artificial
  Probe
acatggctgctgctgatgaatataa

SEQ ID NO: 126628 - DNA, 25 bp, Artificial
  Probe
aagttcaactcatctatcgcctatg

SEQ ID NO: 126629 - DNA, 25 bp, Artificial
  Probe
caagttcaactcatctatcgcctat

SEQ ID NO: 126630 - DNA, 25 bp, Artificial
  Probe
atggacaagttcaactcatctatcg

SEQ ID NO: 126631 - DNA, 25 bp, Artificial
  Probe
catggacaagttcaactcatctatc

SEQ ID NO: 126632 - DNA, 25 bp, Artificial
  Probe
acaagttcaactcatctatcgccta

SEQ ID NO: 126633 - DNA, 25 bp, Artificial
  Probe
gacacgagatttagagagactgaag

SEQ ID NO: 126634 - DNA, 25 bp, Artificial
  Probe
gagatttagagagactgaaggaggt

SEQ ID NO: 126635 - DNA, 25 bp, Artificial
  Probe
agatttagagagactgaaggaggtg

SEQ ID NO: 126636 - DNA, 25 bp, Artificial
  Probe
tgacacgagatttagagagactgaa

SEQ ID NO: 126637 - DNA, 25 bp, Artificial
  Probe
acgagatttagagagactgaaggag

SEQ ID NO: 126638 - DNA, 25 bp, Artificial
  Probe
cacgagatttagagagactgaagga

SEQ ID NO: 126639 - DNA, 25 bp, Artificial
  Probe
ctgacacgagatttagagagactga

SEQ ID NO: 126640 - DNA, 25 bp, Artificial
  Probe
acacgagatttagagagactgaagg

SEQ ID NO: 126641 - DNA, 25 bp, Artificial
  Probe
cgagatttagagagactgaaggagg

SEQ ID NO: 126642 - DNA, 25 bp, Artificial
  Probe
gacaagttcaactcatctatcgcct

SEQ ID NO: 126643 - DNA, 25 bp, Artificial
  Probe
ggcatcttcaaattgtaccctaatg

SEQ ID NO: 126644 - DNA, 25 bp, Artificial
  Probe
tggacaagttcaactcatctatcgc

SEQ ID NO: 126645 - DNA, 25 bp, Artificial
  Probe
gcatcttcaaattgtaccctaatga

SEQ ID NO: 126646 - DNA, 25 bp, Artificial
  Probe
gttcaactcatctatcgcctatgac

SEQ ID NO: 126647 - DNA, 25 bp, Artificial
  Probe
gtcttgtcttccagattcgtaggac

SEQ ID NO: 126648 - DNA, 25 bp, Artificial
  Probe
agttcaactcatctatcgcctatga

SEQ ID NO: 126649 - DNA, 25 bp, Artificial
  Probe
cagaactgaactttggagccattac

SEQ ID NO: 126650 - DNA, 25 bp, Artificial
  Probe
gatttagagagactgaaggaggtgc

SEQ ID NO: 126651 - DNA, 25 bp, Artificial
  Probe
cagaagacctgattctctacggtac

SEQ ID NO: 126652 - DNA, 25 bp, Artificial
  Probe
caaattgtaccctaatgatgaagac

SEQ ID NO: 126653 - DNA, 25 bp, Artificial
  Probe
aggcatcttcaaattgtaccctaat

SEQ ID NO: 126654 - DNA, 25 bp, Artificial
  Probe
aaggcatcttcaaattgtaccctaa

SEQ ID NO: 126655 - DNA, 25 bp, Artificial
  Probe
ctaatgatgaagacatccaccttcc

SEQ ID NO: 126656 - DNA, 25 bp, Artificial
  Probe
cctaatgatgaagacatccaccttc

SEQ ID NO: 126657 - DNA, 25 bp, Artificial
  Probe
gctgacacgagatttagagagactg

SEQ ID NO: 126658 - DNA, 25 bp, Artificial
  Probe
ttcaactcatctatcgcctatgacc

SEQ ID NO: 126659 - DNA, 25 bp, Artificial
  Probe
gtggtcttgtcttccagattcgtag

SEQ ID NO: 126660 - DNA, 25 bp, Artificial
  Probe
taatgatgaagacatccaccttcct

SEQ ID NO: 126661 - DNA, 25 bp, Artificial
  Probe
caaggcatcttcaaattgtacccta

SEQ ID NO: 126662 - DNA, 25 bp, Artificial
  Probe
gatggcagaagacctgattctctac

SEQ ID NO: 126663 - DNA, 25 bp, Artificial
  Probe
gagtgtggtcttgtcttccagattc

SEQ ID NO: 126664 - DNA, 25 bp, Artificial
  Probe
ggacaagttcaactcatctatcgcc

SEQ ID NO: 126665 - DNA, 25 bp, Artificial
  Probe
aaattgtaccctaatgatgaagaca

SEQ ID NO: 126666 - DNA, 25 bp, Artificial
  Probe
tcaaattgtaccctaatgatgaaga

SEQ ID NO: 126667 - DNA, 25 bp, Artificial
  Probe
tcttcaaattgtaccctaatgatga

SEQ ID NO: 126668 - DNA, 25 bp, Artificial
  Probe
cattacgctcaacagtatggatgcc

SEQ ID NO: 126669 - DNA, 25 bp, Artificial
  Probe
aattgtaccctaatgatgaagacat

SEQ ID NO: 126670 - DNA, 25 bp, Artificial
  Probe
ggtcttgtcttccagattcgtagga

SEQ ID NO: 126671 - DNA, 25 bp, Artificial
  Probe
tgtggtcttgtcttccagattcgta

SEQ ID NO: 126672 - DNA, 25 bp, Artificial
  Probe
tgagtgtggtcttgtcttccagatt

SEQ ID NO: 126673 - DNA, 25 bp, Artificial
  Probe
tgctctcatcagttctcctattcta

SEQ ID NO: 126674 - DNA, 25 bp, Artificial
  Probe
atgctctcatcagttctcctattct

SEQ ID NO: 126675 - DNA, 25 bp, Artificial
  Probe
ctctcatcagttctcctattctagc

SEQ ID NO: 126676 - DNA, 25 bp, Artificial
  Probe
gctctcatcagttctcctattctag

SEQ ID NO: 126677 - DNA, 25 bp, Artificial
  Probe
tctcatcagttctcctattctagct

SEQ ID NO: 126678 - DNA, 25 bp, Artificial
  Probe
ctcatcagttctcctattctagctg

SEQ ID NO: 126679 - DNA, 25 bp, Artificial
  Probe
cagtgactttgagtttggagtagat

SEQ ID NO: 126680 - DNA, 25 bp, Artificial
  Probe
tcatcagttctcctattctagctgg

SEQ ID NO: 126681 - DNA, 25 bp, Artificial
  Probe
agtgactttgagtttggagtagatc

SEQ ID NO: 126682 - DNA, 25 bp, Artificial
  Probe
gatgctctcatcagttctcctattc

SEQ ID NO: 126683 - DNA, 25 bp, Artificial
  Probe
atgctgtcaacattgtatgtcactc

SEQ ID NO: 126684 - DNA, 25 bp, Artificial
  Probe
gatgctgtcaacattgtatgtcact

SEQ ID NO: 126685 - DNA, 25 bp, Artificial
  Probe
aacgagaaggatctggtgaaactag

SEQ ID NO: 126686 - DNA, 25 bp, Artificial
  Probe
aaggacggaactggatcacatctag

SEQ ID NO: 126687 - DNA, 25 bp, Artificial
  Probe
gctgtcaacattgtatgtcactcaa

SEQ ID NO: 126688 - DNA, 25 bp, Artificial
  Probe
gtgactttgagtttggagtagatcc

SEQ ID NO: 126689 - DNA, 25 bp, Artificial
  Probe
caagatggtgttggagagcactatg

SEQ ID NO: 126690 - DNA, 25 bp, Artificial
  Probe
caacgagaaggatctggtgaaacta

SEQ ID NO: 126691 - DNA, 25 bp, Artificial
  Probe
attgtatgtcactcaaagacccgaa

SEQ ID NO: 126692 - DNA, 25 bp, Artificial
  Probe
caaggacggaactggatcacatcta

SEQ ID NO: 126693 - DNA, 25 bp, Artificial
  Probe
gacagcctttgtgaacacattaaac

SEQ ID NO: 126694 - DNA, 25 bp, Artificial
  Probe
caggatgctgtcaacattgtatgtc

SEQ ID NO: 126695 - DNA, 25 bp, Artificial
  Probe
cgatgctctcatcagttctcctatt

SEQ ID NO: 126696 - DNA, 25 bp, Artificial
  Probe
tgacagcctttgtgaacacattaaa

SEQ ID NO: 126697 - DNA, 25 bp, Artificial
  Probe
ggatgctgtcaacattgtatgtcac

SEQ ID NO: 126698 - DNA, 25 bp, Artificial
  Probe
tgactttgagtttggagtagatccc

SEQ ID NO: 126699 - DNA, 25 bp, Artificial
  Probe
ggaagaggaggtgaacacagagaag

SEQ ID NO: 126700 - DNA, 25 bp, Artificial
  Probe
aggatgctgtcaacattgtatgtca

SEQ ID NO: 126701 - DNA, 25 bp, Artificial
  Probe
ctttgtgaacacattaaacggcaag

SEQ ID NO: 126702 - DNA, 25 bp, Artificial
  Probe
ccagtgactttgagtttggagtaga

SEQ ID NO: 126703 - DNA, 25 bp, Artificial
  Probe
ctgacagcctttgtgaacacattaa

SEQ ID NO: 126704 - DNA, 25 bp, Artificial
  Probe
ttgtatgtcactcaaagacccgaag

SEQ ID NO: 126705 - DNA, 25 bp, Artificial
  Probe
tgctgtcaacattgtatgtcactca

SEQ ID NO: 126706 - DNA, 25 bp, Artificial
  Probe
ctttgagtttggagtagatcccagt

SEQ ID NO: 126707 - DNA, 25 bp, Artificial
  Probe
actttgagtttggagtagatcccag

SEQ ID NO: 126708 - DNA, 25 bp, Artificial
  Probe
gactttgagtttggagtagatccca

SEQ ID NO: 126709 - DNA, 25 bp, Artificial
  Probe
cattgtatgtcactcaaagacccga

SEQ ID NO: 126710 - DNA, 25 bp, Artificial
  Probe
tgtcaacattgtatgtcactcaaag

SEQ ID NO: 126711 - DNA, 25 bp, Artificial
  Probe
ctgtcaacattgtatgtcactcaaa

SEQ ID NO: 126712 - DNA, 25 bp, Artificial
  Probe
caacattgtatgtcactcaaagacc

SEQ ID NO: 126713 - DNA, 25 bp, Artificial
  Probe
tttgagtttggagtagatcccagtg

SEQ ID NO: 126714 - DNA, 25 bp, Artificial
  Probe
tcaacattgtatgtcactcaaagac

SEQ ID NO: 126715 - DNA, 25 bp, Artificial
  Probe
gtcaacattgtatgtcactcaaaga

SEQ ID NO: 126716 - DNA, 25 bp, Artificial
  Probe
gaaggatctggtgaaactagctaaa

SEQ ID NO: 126717 - DNA, 25 bp, Artificial
  Probe
gaaactagctaaacgccttaagaaa

SEQ ID NO: 126718 - DNA, 25 bp, Artificial
  Probe
caagttcatcacaatcctctcctta

SEQ ID NO: 126719 - DNA, 25 bp, Artificial
  Probe
aatatggcttatctgacttgttccg

SEQ ID NO: 126720 - DNA, 25 bp, Artificial
  Probe
aagttcatcacaatcctctccttaa

SEQ ID NO: 126721 - DNA, 25 bp, Artificial
  Probe
cttcttcatcttctccttgttgtcc

SEQ ID NO: 126722 - DNA, 25 bp, Artificial
  Probe
ccttcttcatcttctccttgttgtc

SEQ ID NO: 126723 - DNA, 25 bp, Artificial
  Probe
ttcttcatcttctccttgttgtcct

SEQ ID NO: 126724 - DNA, 25 bp, Artificial
  Probe
tcttcatcttctccttgttgtcctg

SEQ ID NO: 126725 - DNA, 25 bp, Artificial
  Probe
ccaagttcatcacaatcctctcctt

SEQ ID NO: 126726 - DNA, 25 bp, Artificial
  Probe
aaatatggcttatctgacttgttcc

SEQ ID NO: 126727 - DNA, 25 bp, Artificial
  Probe
cttcatcttctccttgttgtcctgg

SEQ ID NO: 126728 - DNA, 25 bp, Artificial
  Probe
caaacaggtatgggtatcagtaacg

SEQ ID NO: 126729 - DNA, 25 bp, Artificial
  Probe
gcaaacaggtatgggtatcagtaac

SEQ ID NO: 126730 - DNA, 25 bp, Artificial
  Probe
agtcaacatctacatactccagatt

SEQ ID NO: 126731 - DNA, 25 bp, Artificial
  Probe
agttcatcacaatcctctccttaag

SEQ ID NO: 126732 - DNA, 25 bp, Artificial
  Probe
ggtagaagaatttggagtcaacatc

SEQ ID NO: 126733 - DNA, 25 bp, Artificial
  Probe
gttcatcacaatcctctccttaagt

SEQ ID NO: 126734 - DNA, 25 bp, Artificial
  Probe
ttcatcacaatcctctccttaagtt

SEQ ID NO: 126735 - DNA, 25 bp, Artificial
  Probe
acaatcctctccttaagttatctgg

SEQ ID NO: 126736 - DNA, 25 bp, Artificial
  Probe
gggtagaagaatttggagtcaacat

SEQ ID NO: 126737 - DNA, 25 bp, Artificial
  Probe
gaagaatttggagtcaacatctaca

SEQ ID NO: 126738 - DNA, 25 bp, Artificial
  Probe
tcatcacaatcctctccttaagtta

SEQ ID NO: 126739 - DNA, 25 bp, Artificial
  Probe
agaagaatttggagtcaacatctac

SEQ ID NO: 126740 - DNA, 25 bp, Artificial
  Probe
gtagaagaatttggagtcaacatct

SEQ ID NO: 126741 - DNA, 25 bp, Artificial
  Probe
ctcccttcttcatcttctccttgtt

SEQ ID NO: 126742 - DNA, 25 bp, Artificial
  Probe
cacaatcctctccttaagttatctg

SEQ ID NO: 126743 - DNA, 25 bp, Artificial
  Probe
tcacaatcctctccttaagttatct

SEQ ID NO: 126744 - DNA, 25 bp, Artificial
  Probe
tcaaatatggcttatctgacttgtt

SEQ ID NO: 126745 - DNA, 25 bp, Artificial
  Probe
ttcatcttctccttgttgtcctggt

SEQ ID NO: 126746 - DNA, 25 bp, Artificial
  Probe
caaatatggcttatctgacttgttc

SEQ ID NO: 126747 - DNA, 25 bp, Artificial
  Probe
aagaatttggagtcaacatctacat

SEQ ID NO: 126748 - DNA, 25 bp, Artificial
  Probe
tcccttcttcatcttctccttgttg

SEQ ID NO: 126749 - DNA, 25 bp, Artificial
  Probe
cagccaagttcatcacaatcctctc

SEQ ID NO: 126750 - DNA, 25 bp, Artificial
  Probe
ggcaaacaggtatgggtatcagtaa

SEQ ID NO: 126751 - DNA, 25 bp, Artificial
  Probe
cccttcttcatcttctccttgttgt

SEQ ID NO: 126752 - DNA, 25 bp, Artificial
  Probe
catcacaatcctctccttaagttat

SEQ ID NO: 126753 - DNA, 25 bp, Artificial
  Probe
gtcaacatctacatactccagatta

SEQ ID NO: 126754 - DNA, 25 bp, Artificial
  Probe
cctcatctttgtgccttcagaaatg

SEQ ID NO: 126755 - DNA, 25 bp, Artificial
  Probe
atcacaatcctctccttaagttatc

SEQ ID NO: 126756 - DNA, 25 bp, Artificial
  Probe
aatttggagtcaacatctacatact

SEQ ID NO: 126757 - DNA, 25 bp, Artificial
  Probe
gaatttggagtcaacatctacatac

SEQ ID NO: 126758 - DNA, 25 bp, Artificial
  Probe
ccaaggtcaaatatggcttatctga

SEQ ID NO: 126759 - DNA, 25 bp, Artificial
  Probe
acatactccagattatctttggtgg

SEQ ID NO: 126760 - DNA, 25 bp, Artificial
  Probe
agaatttggagtcaacatctacata

SEQ ID NO: 126761 - DNA, 25 bp, Artificial
  Probe
ttcttctgtcaacccttgccatatt

SEQ ID NO: 126762 - DNA, 25 bp, Artificial
  Probe
catactccagattatctttggtggg

SEQ ID NO: 126763 - DNA, 25 bp, Artificial
  Probe
ttatttggactttggattcaggttt

SEQ ID NO: 126764 - DNA, 25 bp, Artificial
  Probe
attatttggactttggattcaggtt

SEQ ID NO: 126765 - DNA, 25 bp, Artificial
  Probe
tattatttggactttggattcaggt

SEQ ID NO: 126766 - DNA, 25 bp, Artificial
  Probe
gtattatttggactttggattcagg

SEQ ID NO: 126767 - DNA, 25 bp, Artificial
  Probe
taatgtttcatcagcatagactgtg

SEQ ID NO: 126768 - DNA, 25 bp, Artificial
  Probe
aatgtttcatcagcatagactgtgg

SEQ ID NO: 126769 - DNA, 25 bp, Artificial
  Probe
aaagtgacatttgattcaaccgttg

SEQ ID NO: 126770 - DNA, 25 bp, Artificial
  Probe
ataatgtttcatcagcatagactgt

SEQ ID NO: 126771 - DNA, 25 bp, Artificial
  Probe
tgtattatttggactttggattcag

SEQ ID NO: 126772 - DNA, 25 bp, Artificial
  Probe
tgtgtatgtattatttggactttgg

SEQ ID NO: 126773 - DNA, 25 bp, Artificial
  Probe
cataatgtttcatcagcatagactg

SEQ ID NO: 126774 - DNA, 25 bp, Artificial
  Probe
atgtttcatcagcatagactgtgga

SEQ ID NO: 126775 - DNA, 25 bp, Artificial
  Probe
acataatgtttcatcagcatagact

SEQ ID NO: 126776 - DNA, 25 bp, Artificial
  Probe
gtgtatgtattatttggactttgga

SEQ ID NO: 126777 - DNA, 25 bp, Artificial
  Probe
ttcatcagcatagactgtggaggag

SEQ ID NO: 126778 - DNA, 25 bp, Artificial
  Probe
tgtttcatcagcatagactgtggag

SEQ ID NO: 126779 - DNA, 25 bp, Artificial
  Probe
atgtattatttggactttggattca

SEQ ID NO: 126780 - DNA, 25 bp, Artificial
  Probe
agaatacaaacaatacacccctgac

SEQ ID NO: 126781 - DNA, 25 bp, Artificial
  Probe
tatttggactttggattcaggtttt

SEQ ID NO: 126782 - DNA, 25 bp, Artificial
  Probe
aaacaaagtgacatttgattcaacc

SEQ ID NO: 126783 - DNA, 25 bp, Artificial
  Probe
caaagtgacatttgattcaaccgtt

SEQ ID NO: 126784 - DNA, 25 bp, Artificial
  Probe
aacaaagtgacatttgattcaaccg

SEQ ID NO: 126785 - DNA, 25 bp, Artificial
  Probe
gaatacaaacaatacacccctgacc

SEQ ID NO: 126786 - DNA, 25 bp, Artificial
  Probe
gtttcatcagcatagactgtggagg

SEQ ID NO: 126787 - DNA, 25 bp, Artificial
  Probe
accagaatacaaacaatacacccct

SEQ ID NO: 126788 - DNA, 25 bp, Artificial
  Probe
tacataatgtttcatcagcatagac

SEQ ID NO: 126789 - DNA, 25 bp, Artificial
  Probe
gtacataatgtttcatcagcataga

SEQ ID NO: 126790 - DNA, 25 bp, Artificial
  Probe
tgtatgtattatttggactttggat

SEQ ID NO: 126791 - DNA, 25 bp, Artificial
  Probe
tttcatcagcatagactgtggagga

SEQ ID NO: 126792 - DNA, 25 bp, Artificial
  Probe
acaaagtgacatttgattcaaccgt

SEQ ID NO: 126793 - DNA, 25 bp, Artificial
  Probe
cagaatacaaacaatacacccctga

SEQ ID NO: 126794 - DNA, 25 bp, Artificial
  Probe
catcagcatagactgtggaggagtg

SEQ ID NO: 126795 - DNA, 25 bp, Artificial
  Probe
tcatcagcatagactgtggaggagt

SEQ ID NO: 126796 - DNA, 25 bp, Artificial
  Probe
ccagaatacaaacaatacacccctg

SEQ ID NO: 126797 - DNA, 25 bp, Artificial
  Probe
gtgtgtacataatgtttcatcagca

SEQ ID NO: 126798 - DNA, 25 bp, Artificial
  Probe
tgtgtgtacataatgtttcatcagc

SEQ ID NO: 126799 - DNA, 25 bp, Artificial
  Probe
aatacaaacaatacacccctgaccc

SEQ ID NO: 126800 - DNA, 25 bp, Artificial
  Probe
ggtgtgtgtacataatgtttcatca

SEQ ID NO: 126801 - DNA, 25 bp, Artificial
  Probe
tggtgtgtgtacataatgtttcatc

SEQ ID NO: 126802 - DNA, 25 bp, Artificial
  Probe
atgtgtatgtattatttggactttg

SEQ ID NO: 126803 - DNA, 25 bp, Artificial
  Probe
aatggtgtgtgtacataatgtttca

SEQ ID NO: 126804 - DNA, 25 bp, Artificial
  Probe
aagttcttagcacaaatgttttaca

SEQ ID NO: 126805 - DNA, 25 bp, Artificial
  Probe
tgtgtacataatgtttcatcagcat

SEQ ID NO: 126806 - DNA, 25 bp, Artificial
  Probe
atggtgtgtgtacataatgtttcat

SEQ ID NO: 126807 - DNA, 25 bp, Artificial
  Probe
agaactcggaacatgtgtatgtatt

SEQ ID NO: 126808 - DNA, 25 bp, Artificial
  Probe
cagatctctctgagttcaaggtcag

SEQ ID NO: 126809 - DNA, 25 bp, Artificial
  Probe
gcattttctcagaaagcaggaagaa

SEQ ID NO: 126810 - DNA, 25 bp, Artificial
  Probe
agatctctctgagttcaaggtcagc

SEQ ID NO: 126811 - DNA, 25 bp, Artificial
  Probe
gtgcattttctcagaaagcaggaag

SEQ ID NO: 126812 - DNA, 25 bp, Artificial
  Probe
tgcattttctcagaaagcaggaaga

SEQ ID NO: 126813 - DNA, 25 bp, Artificial
  Probe
tgtgcattttctcagaaagcaggaa

SEQ ID NO: 126814 - DNA, 25 bp, Artificial
  Probe
caatgtgaaaggagaatgaggaagg

SEQ ID NO: 126815 - DNA, 25 bp, Artificial
  Probe
ccaatgtgaaaggagaatgaggaag

SEQ ID NO: 126816 - DNA, 25 bp, Artificial
  Probe
caaccaatgtgaaaggagaatgagg

SEQ ID NO: 126817 - DNA, 25 bp, Artificial
  Probe
ccaaccaatgtgaaaggagaatgag

SEQ ID NO: 126818 - DNA, 25 bp, Artificial
  Probe
accaatgtgaaaggagaatgaggaa

SEQ ID NO: 126819 - DNA, 25 bp, Artificial
  Probe
aaccaatgtgaaaggagaatgagga

SEQ ID NO: 126820 - DNA, 25 bp, Artificial
  Probe
aatgtgaaaggagaatgaggaaggg

SEQ ID NO: 126821 - DNA, 25 bp, Artificial
  Probe
caaagcacttggtgttatttaaggc

SEQ ID NO: 126822 - DNA, 25 bp, Artificial
  Probe
gttgtaacttaagacccatcctgaa

SEQ ID NO: 126823 - DNA, 25 bp, Artificial
  Probe
ttgtaacttaagacccatcctgaag

SEQ ID NO: 126824 - DNA, 25 bp, Artificial
  Probe
ctgttgtaacttaagacccatcctg

SEQ ID NO: 126825 - DNA, 25 bp, Artificial
  Probe
gagggaaaagaacagaaagaaagaa

SEQ ID NO: 126826 - DNA, 25 bp, Artificial
  Probe
aaagcacttggtgttatttaaggcg

SEQ ID NO: 126827 - DNA, 25 bp, Artificial
  Probe
ggagggaaaagaacagaaagaaaga

SEQ ID NO: 126828 - DNA, 25 bp, Artificial
  Probe
tgttgtaacttaagacccatcctga

SEQ ID NO: 126829 - DNA, 25 bp, Artificial
  Probe
agggaaaagaacagaaagaaagaaa

SEQ ID NO: 126830 - DNA, 25 bp, Artificial
  Probe
gggaaaagaacagaaagaaagaaag

SEQ ID NO: 126831 - DNA, 25 bp, Artificial
  Probe
taaacaagttcataacccctttctg

SEQ ID NO: 126832 - DNA, 25 bp, Artificial
  Probe
cctgataaacaagttcataacccct

SEQ ID NO: 126833 - DNA, 25 bp, Artificial
  Probe
cctgttgtaacttaagacccatcct

SEQ ID NO: 126834 - DNA, 25 bp, Artificial
  Probe
gggagggaaaagaacagaaagaaag

SEQ ID NO: 126835 - DNA, 25 bp, Artificial
  Probe
ctgataaacaagttcataacccctt

SEQ ID NO: 126836 - DNA, 25 bp, Artificial
  Probe
ataaacaagttcataacccctttct

SEQ ID NO: 126837 - DNA, 25 bp, Artificial
  Probe
tgataaacaagttcataaccccttt

SEQ ID NO: 126838 - DNA, 25 bp, Artificial
  Probe
ctggatgaaggaagggtttactcat

SEQ ID NO: 126839 - DNA, 25 bp, Artificial
  Probe
ggaaaagaacagaaagaaagaaaga

SEQ ID NO: 126840 - DNA, 25 bp, Artificial
  Probe
gataaacaagttcataacccctttc

SEQ ID NO: 126841 - DNA, 25 bp, Artificial
  Probe
aagcacttggtgttatttaaggcgt

SEQ ID NO: 126842 - DNA, 25 bp, Artificial
  Probe
gcctgataaacaagttcataacccc

SEQ ID NO: 126843 - DNA, 25 bp, Artificial
  Probe
ccctgttgtaacttaagacccatcc

SEQ ID NO: 126844 - DNA, 25 bp, Artificial
  Probe
ggcctgataaacaagttcataaccc

SEQ ID NO: 126845 - DNA, 25 bp, Artificial
  Probe
gggcctgataaacaagttcataacc

SEQ ID NO: 126846 - DNA, 25 bp, Artificial
  Probe
ggggagggaaaagaacagaaagaaa

SEQ ID NO: 126847 - DNA, 25 bp, Artificial
  Probe
cctggatgaaggaagggtttactca

SEQ ID NO: 126848 - DNA, 25 bp, Artificial
  Probe
gtaacttaagacccatcctgaagtg

SEQ ID NO: 126849 - DNA, 25 bp, Artificial
  Probe
agcacttggtgttatttaaggcgtg

SEQ ID NO: 126850 - DNA, 25 bp, Artificial
  Probe
gaaggggagggaaaagaacagaaag

SEQ ID NO: 126851 - DNA, 25 bp, Artificial
  Probe
tgtaacttaagacccatcctgaagt

SEQ ID NO: 126852 - DNA, 25 bp, Artificial
  Probe
ccaaagcacttggtgttatttaagg

SEQ ID NO: 126853 - DNA, 25 bp, Artificial
  Probe
cccaaagcacttggtgttatttaag

SEQ ID NO: 126854 - DNA, 25 bp, Artificial
  Probe
tcccaaagcacttggtgttatttaa

SEQ ID NO: 126855 - DNA, 25 bp, Artificial
  Probe
aggggagggaaaagaacagaaagaa

SEQ ID NO: 126856 - DNA, 25 bp, Artificial
  Probe
aaggggagggaaaagaacagaaaga

SEQ ID NO: 126857 - DNA, 25 bp, Artificial
  Probe
ctcccaaagcacttggtgttattta

SEQ ID NO: 126858 - DNA, 25 bp, Artificial
  Probe
gaaaagaacagaaagaaagaaagaa

SEQ ID NO: 126859 - DNA, 25 bp, Artificial
  Probe
gtgatcctagtgaagaccatgattc

SEQ ID NO: 126860 - DNA, 25 bp, Artificial
  Probe
tgtgatcctagtgaagaccatgatt

SEQ ID NO: 126861 - DNA, 25 bp, Artificial
  Probe
ctgtgatcctagtgaagaccatgat

SEQ ID NO: 126862 - DNA, 25 bp, Artificial
  Probe
tgatcctagtgaagaccatgattcg

SEQ ID NO: 126863 - DNA, 25 bp, Artificial
  Probe
cttgactgtcatctctggttatcag

SEQ ID NO: 126864 - DNA, 25 bp, Artificial
  Probe
caactgtgatcctagtgaagaccat

SEQ ID NO: 126865 - DNA, 25 bp, Artificial
  Probe
aactgtgatcctagtgaagaccatg

SEQ ID NO: 126866 - DNA, 25 bp, Artificial
  Probe
ccttgactgtcatctctggttatca

SEQ ID NO: 126867 - DNA, 25 bp, Artificial
  Probe
gatcctagtgaagaccatgattcgg

SEQ ID NO: 126868 - DNA, 25 bp, Artificial
  Probe
actgtgatcctagtgaagaccatga

SEQ ID NO: 126869 - DNA, 25 bp, Artificial
  Probe
ctagtgaagaccatgattcggaaac

SEQ ID NO: 126870 - DNA, 25 bp, Artificial
  Probe
gccttgactgtcatctctggttatc

SEQ ID NO: 126871 - DNA, 25 bp, Artificial
  Probe
atcctagtgaagaccatgattcgga

SEQ ID NO: 126872 - DNA, 25 bp, Artificial
  Probe
agccttgactgtcatctctggttat

SEQ ID NO: 126873 - DNA, 25 bp, Artificial
  Probe
tcctagtgaagaccatgattcggaa

SEQ ID NO: 126874 - DNA, 25 bp, Artificial
  Probe
cctagtgaagaccatgattcggaaa

SEQ ID NO: 126875 - DNA, 25 bp, Artificial
  Probe
tagtgaagaccatgattcggaaacg

SEQ ID NO: 126876 - DNA, 25 bp, Artificial
  Probe
gagccttgactgtcatctctggtta

SEQ ID NO: 126877 - DNA, 25 bp, Artificial
  Probe
tgtgtagagccttgactgtcatctc

SEQ ID NO: 126878 - DNA, 25 bp, Artificial
  Probe
ctggcaactgtgatcctagtgaaga

SEQ ID NO: 126879 - DNA, 25 bp, Artificial
  Probe
gcaactgtgatcctagtgaagacca

SEQ ID NO: 126880 - DNA, 25 bp, Artificial
  Probe
tggcaactgtgatcctagtgaagac

SEQ ID NO: 126881 - DNA, 25 bp, Artificial
  Probe
gtgtgtagagccttgactgtcatct

SEQ ID NO: 126882 - DNA, 25 bp, Artificial
  Probe
tgactgtcatctctggttatcagtt

SEQ ID NO: 126883 - DNA, 25 bp, Artificial
  Probe
ttgactgtcatctctggttatcagt

SEQ ID NO: 126884 - DNA, 25 bp, Artificial
  Probe
ggcaactgtgatcctagtgaagacc

SEQ ID NO: 126885 - DNA, 25 bp, Artificial
  Probe
cctggcaactgtgatcctagtgaag

SEQ ID NO: 126886 - DNA, 25 bp, Artificial
  Probe
tgtagagccttgactgtcatctctg

SEQ ID NO: 126887 - DNA, 25 bp, Artificial
  Probe
gtgtagagccttgactgtcatctct

SEQ ID NO: 126888 - DNA, 25 bp, Artificial
  Probe
gactgtcatctctggttatcagttt

SEQ ID NO: 126889 - DNA, 25 bp, Artificial
  Probe
gtagagccttgactgtcatctctgg

SEQ ID NO: 126890 - DNA, 25 bp, Artificial
  Probe
gaggaggaagtgctcttgtgaaagg

SEQ ID NO: 126891 - DNA, 25 bp, Artificial
  Probe
ggaggaggaagtgctcttgtgaaag

SEQ ID NO: 126892 - DNA, 25 bp, Artificial
  Probe
tagagccttgactgtcatctctggt

SEQ ID NO: 126893 - DNA, 25 bp, Artificial
  Probe
agtgaagaccatgattcggaaacgg

SEQ ID NO: 126894 - DNA, 25 bp, Artificial
  Probe
actgtcatctctggttatcagtttt

SEQ ID NO: 126895 - DNA, 25 bp, Artificial
  Probe
catgattcggaaacggtcttttggg

SEQ ID NO: 126896 - DNA, 25 bp, Artificial
  Probe
accatgattcggaaacggtcttttg

SEQ ID NO: 126897 - DNA, 25 bp, Artificial
  Probe
ccatgattcggaaacggtcttttgg

SEQ ID NO: 126898 - DNA, 25 bp, Artificial
  Probe
tgaagaccatgattcggaaacggtc

SEQ ID NO: 126899 - DNA, 25 bp, Artificial
  Probe
gaccatgattcggaaacggtctttt

SEQ ID NO: 126900 - DNA, 25 bp, Artificial
  Probe
gccttctctactcttcaatggtatc

SEQ ID NO: 126901 - DNA, 25 bp, Artificial
  Probe
ccttctctactcttcaatggtatct

SEQ ID NO: 126902 - DNA, 25 bp, Artificial
  Probe
tgccttctctactcttcaatggtat

SEQ ID NO: 126903 - DNA, 25 bp, Artificial
  Probe
ctctactcttcaatggtatcttggc

SEQ ID NO: 126904 - DNA, 25 bp, Artificial
  Probe
tctctactcttcaatggtatcttgg

SEQ ID NO: 126905 - DNA, 25 bp, Artificial
  Probe
ctactcttcaatggtatcttggcac

SEQ ID NO: 126906 - DNA, 25 bp, Artificial
  Probe
tctactcttcaatggtatcttggca

SEQ ID NO: 126907 - DNA, 25 bp, Artificial
  Probe
gtgccttctctactcttcaatggta

SEQ ID NO: 126908 - DNA, 25 bp, Artificial
  Probe
tactcttcaatggtatcttggcact

SEQ ID NO: 126909 - DNA, 25 bp, Artificial
  Probe
catcatctacctcttgaccaatgtg

SEQ ID NO: 126910 - DNA, 25 bp, Artificial
  Probe
gatgccatctgtatgattcatgttg

SEQ ID NO: 126911 - DNA, 25 bp, Artificial
  Probe
gcctattacagtgtgctagacataa

SEQ ID NO: 126912 - DNA, 25 bp, Artificial
  Probe
atgccatctgtatgattcatgttga

SEQ ID NO: 126913 - DNA, 25 bp, Artificial
  Probe
ggatgccatctgtatgattcatgtt

SEQ ID NO: 126914 - DNA, 25 bp, Artificial
  Probe
ccttaactatgtcactgaagagatc

SEQ ID NO: 126915 - DNA, 25 bp, Artificial
  Probe
gacatcttccagctcattaactact

SEQ ID NO: 126916 - DNA, 25 bp, Artificial
  Probe
cttctctactcttcaatggtatctt

SEQ ID NO: 126917 - DNA, 25 bp, Artificial
  Probe
tcttccagctcattaactactacag

SEQ ID NO: 126918 - DNA, 25 bp, Artificial
  Probe
ccatcatctacctcttgaccaatgt

SEQ ID NO: 126919 - DNA, 25 bp, Artificial
  Probe
accatcatctacctcttgaccaatg

SEQ ID NO: 126920 - DNA, 25 bp, Artificial
  Probe
caccatcatctacctcttgaccaat

SEQ ID NO: 126921 - DNA, 25 bp, Artificial
  Probe
ttctctactcttcaatggtatcttg

SEQ ID NO: 126922 - DNA, 25 bp, Artificial
  Probe
atcttccagctcattaactactaca

SEQ ID NO: 126923 - DNA, 25 bp, Artificial
  Probe
acatcttccagctcattaactacta

SEQ ID NO: 126924 - DNA, 25 bp, Artificial
  Probe
catcttccagctcattaactactac

SEQ ID NO: 126925 - DNA, 25 bp, Artificial
  Probe
catcgtcaccatcatctacctcttg

SEQ ID NO: 126926 - DNA, 25 bp, Artificial
  Probe
aattccattagcagttgcattatcc

SEQ ID NO: 126927 - DNA, 25 bp, Artificial
  Probe
gttctttgtgggactttctattgtg

SEQ ID NO: 126928 - DNA, 25 bp, Artificial
  Probe
attccattagcagttgcattatcct

SEQ ID NO: 126929 - DNA, 25 bp, Artificial
  Probe
caaacaaggtcccaagtctaaatag

SEQ ID NO: 126930 - DNA, 25 bp, Artificial
  Probe
aatggacttggaagatggagagttg

SEQ ID NO: 126931 - DNA, 25 bp, Artificial
  Probe
gatatttacgcagttcaaacagaca

SEQ ID NO: 126932 - DNA, 25 bp, Artificial
  Probe
ccaaacaaggtcccaagtctaaata

SEQ ID NO: 126933 - DNA, 25 bp, Artificial
  Probe
ggatatttacgcagttcaaacagac

SEQ ID NO: 126934 - DNA, 25 bp, Artificial
  Probe
atatttacgcagttcaaacagacat

SEQ ID NO: 126935 - DNA, 25 bp, Artificial
  Probe
ctggttctttgtgggactttctatt

SEQ ID NO: 126936 - DNA, 25 bp, Artificial
  Probe
cttaactatgtcactgaagagatca

SEQ ID NO: 126937 - DNA, 25 bp, Artificial
  Probe
ctttatagcgataccatcaactccc

SEQ ID NO: 126938 - DNA, 25 bp, Artificial
  Probe
gacaattccattagcagttgcatta

SEQ ID NO: 126939 - DNA, 25 bp, Artificial
  Probe
ttctttgtgggactttctattgtgg

SEQ ID NO: 126940 - DNA, 25 bp, Artificial
  Probe
ggttctttgtgggactttctattgt

SEQ ID NO: 126941 - DNA, 25 bp, Artificial
  Probe
tggttctttgtgggactttctattg

SEQ ID NO: 126942 - DNA, 25 bp, Artificial
  Probe
acaattccattagcagttgcattat

SEQ ID NO: 126943 - DNA, 25 bp, Artificial
  Probe
cccttaactatgtcactgaagagat

SEQ ID NO: 126944 - DNA, 25 bp, Artificial
  Probe
tttatagcgataccatcaactccct

SEQ ID NO: 126945 - DNA, 25 bp, Artificial
  Probe
tgtcacagactgttcaagtatcatt

SEQ ID NO: 126946 - DNA, 25 bp, Artificial
  Probe
gtgtcacagactgttcaagtatcat

SEQ ID NO: 126947 - DNA, 25 bp, Artificial
  Probe
attgatttgacacttgggtagcatt

SEQ ID NO: 126948 - DNA, 25 bp, Artificial
  Probe
aatttgaaagttgttctcttcgtgg

SEQ ID NO: 126949 - DNA, 25 bp, Artificial
  Probe
atttgaaagttgttctcttcgtgga

SEQ ID NO: 126950 - DNA, 25 bp, Artificial
  Probe
ttgaaagttgttctcttcgtggaaa

SEQ ID NO: 126951 - DNA, 25 bp, Artificial
  Probe
tttgaaagttgttctcttcgtggaa

SEQ ID NO: 126952 - DNA, 25 bp, Artificial
  Probe
cattgatttgacacttgggtagcat

SEQ ID NO: 126953 - DNA, 25 bp, Artificial
  Probe
tgtgtcacagactgttcaagtatca

SEQ ID NO: 126954 - DNA, 25 bp, Artificial
  Probe
ttgatttgacacttgggtagcattg

SEQ ID NO: 126955 - DNA, 25 bp, Artificial
  Probe
gctttgttattacttcatgtcccat

SEQ ID NO: 126956 - DNA, 25 bp, Artificial
  Probe
taatttgaaagttgttctcttcgtg

SEQ ID NO: 126957 - DNA, 25 bp, Artificial
  Probe
gatttgacacttgggtagcattgag

SEQ ID NO: 126958 - DNA, 25 bp, Artificial
  Probe
tacttcatgtcccatagatcctctt

SEQ ID NO: 126959 - DNA, 25 bp, Artificial
  Probe
ttacttcatgtcccatagatcctct

SEQ ID NO: 126960 - DNA, 25 bp, Artificial
  Probe
attacttcatgtcccatagatcctc

SEQ ID NO: 126961 - DNA, 25 bp, Artificial
  Probe
acttcatgtcccatagatcctcttt

SEQ ID NO: 126962 - DNA, 25 bp, Artificial
  Probe
atttgacacttgggtagcattgaga

SEQ ID NO: 126963 - DNA, 25 bp, Artificial
  Probe
tgtaaataggattgtttcactccca

SEQ ID NO: 126964 - DNA, 25 bp, Artificial
  Probe
gagctttgttattacttcatgtccc

SEQ ID NO: 126965 - DNA, 25 bp, Artificial
  Probe
gccttcagagctttgttattacttc

SEQ ID NO: 126966 - DNA, 25 bp, Artificial
  Probe
agctttgttattacttcatgtccca

SEQ ID NO: 126967 - DNA, 25 bp, Artificial
  Probe
gtgtaaataggattgtttcactccc

SEQ ID NO: 126968 - DNA, 25 bp, Artificial
  Probe
gattgtttcactcccatgttctctg

SEQ ID NO: 126969 - DNA, 25 bp, Artificial
  Probe
ttaatttgaaagttgttctcttcgt

SEQ ID NO: 126970 - DNA, 25 bp, Artificial
  Probe
agagctttgttattacttcatgtcc

SEQ ID NO: 126971 - DNA, 25 bp, Artificial
  Probe
tttgacacttgggtagcattgagaa

SEQ ID NO: 126972 - DNA, 25 bp, Artificial
  Probe
tgatttgacacttgggtagcattga

SEQ ID NO: 126973 - DNA, 25 bp, Artificial
  Probe
tgtgtaaataggattgtttcactcc

SEQ ID NO: 126974 - DNA, 25 bp, Artificial
  Probe
ccttcagagctttgttattacttca

SEQ ID NO: 126975 - DNA, 25 bp, Artificial
  Probe
tattacttcatgtcccatagatcct

SEQ ID NO: 126976 - DNA, 25 bp, Artificial
  Probe
catctgtgtaaataggattgtttca

SEQ ID NO: 126977 - DNA, 25 bp, Artificial
  Probe
gtaaataggattgtttcactcccat

SEQ ID NO: 126978 - DNA, 25 bp, Artificial
  Probe
tcagagctttgttattacttcatgt

SEQ ID NO: 126979 - DNA, 25 bp, Artificial
  Probe
aataggattgtttcactcccatgtt

SEQ ID NO: 126980 - DNA, 25 bp, Artificial
  Probe
aaataggattgtttcactcccatgt

SEQ ID NO: 126981 - DNA, 25 bp, Artificial
  Probe
attgtttcactcccatgttctctgt

SEQ ID NO: 126982 - DNA, 25 bp, Artificial
  Probe
tctgtgtaaataggattgtttcact

SEQ ID NO: 126983 - DNA, 25 bp, Artificial
  Probe
ataggattgtttcactcccatgttc

SEQ ID NO: 126984 - DNA, 25 bp, Artificial
  Probe
cagagctttgttattacttcatgtc

SEQ ID NO: 126985 - DNA, 25 bp, Artificial
  Probe
ctgtgtaaataggattgtttcactc

SEQ ID NO: 126986 - DNA, 25 bp, Artificial
  Probe
ttgacacttgggtagcattgagaag

SEQ ID NO: 126987 - DNA, 25 bp, Artificial
  Probe
taaataggattgtttcactcccatg

SEQ ID NO: 126988 - DNA, 25 bp, Artificial
  Probe
ttattacttcatgtcccatagatcc

SEQ ID NO: 126989 - DNA, 25 bp, Artificial
  Probe
acatctgtgtaaataggattgtttc

SEQ ID NO: 126990 - DNA, 25 bp, Artificial
  Probe
cttattatacacaaccacacggagt

SEQ ID NO: 126991 - DNA, 25 bp, Artificial
  Probe
ttattatacacaaccacacggagtt

SEQ ID NO: 126992 - DNA, 25 bp, Artificial
  Probe
gcttattatacacaaccacacggag

SEQ ID NO: 126993 - DNA, 25 bp, Artificial
  Probe
tcagcctggatctattacaatatca

SEQ ID NO: 126994 - DNA, 25 bp, Artificial
  Probe
agcctggatctattacaatatcagc

SEQ ID NO: 126995 - DNA, 25 bp, Artificial
  Probe
gcctggatctattacaatatcagca

SEQ ID NO: 126996 - DNA, 25 bp, Artificial
  Probe
tagcttattatacacaaccacacgg

SEQ ID NO: 126997 - DNA, 25 bp, Artificial
  Probe
ttcagcctggatctattacaatatc

SEQ ID NO: 126998 - DNA, 25 bp, Artificial
  Probe
atagcttattatacacaaccacacg

SEQ ID NO: 126999 - DNA, 25 bp, Artificial
  Probe
cttattatgtgccttattatgtgct

SEQ ID NO: 127000 - DNA, 25 bp, Artificial
  Probe
tcttattatgtgccttattatgtgc

SEQ ID NO: 127001 - DNA, 25 bp, Artificial
  Probe
cagcctggatctattacaatatcag

SEQ ID NO: 127002 - DNA, 25 bp, Artificial
  Probe
aattcagcctggatctattacaata

SEQ ID NO: 127003 - DNA, 25 bp, Artificial
  Probe
ttattatgtgccttattatgtgctt

SEQ ID NO: 127004 - DNA, 25 bp, Artificial
  Probe
attcagcctggatctattacaatat

SEQ ID NO: 127005 - DNA, 25 bp, Artificial
  Probe
cctggatctattacaatatcagcat

SEQ ID NO: 127006 - DNA, 25 bp, Artificial
  Probe
agcttattatacacaaccacacgga

SEQ ID NO: 127007 - DNA, 25 bp, Artificial
  Probe
attatgtgccttattatgtgcttaa

SEQ ID NO: 127008 - DNA, 25 bp, Artificial
  Probe
tctaggaagataaattgtgggcttg

SEQ ID NO: 127009 - DNA, 25 bp, Artificial
  Probe
tgatagcttattatacacaaccaca

SEQ ID NO: 127010 - DNA, 25 bp, Artificial
  Probe
gtctagtaatgtaatgtgatcttgg

SEQ ID NO: 127011 - DNA, 25 bp, Artificial
  Probe
ggagttgtattggaaacaggtctat

SEQ ID NO: 127012 - DNA, 25 bp, Artificial
  Probe
gaaattcagcctggatctattacaa

SEQ ID NO: 127013 - DNA, 25 bp, Artificial
  Probe
gatagcttattatacacaaccacac

SEQ ID NO: 127014 - DNA, 25 bp, Artificial
  Probe
ctaggaagataaattgtgggcttgg

SEQ ID NO: 127015 - DNA, 25 bp, Artificial
  Probe
aagtgaaattcagcctggatctatt

SEQ ID NO: 127016 - DNA, 25 bp, Artificial
  Probe
aatagaagtgaaattcagcctggat

SEQ ID NO: 127017 - DNA, 25 bp, Artificial
  Probe
gaaatagaagtgaaattcagcctgg

SEQ ID NO: 127018 - DNA, 25 bp, Artificial
  Probe
ggaaatagaagtgaaattcagcctg

SEQ ID NO: 127019 - DNA, 25 bp, Artificial
  Probe
cagggaaatagaagtgaaattcagc

SEQ ID NO: 127020 - DNA, 25 bp, Artificial
  Probe
tgaaattcagcctggatctattaca

SEQ ID NO: 127021 - DNA, 25 bp, Artificial
  Probe
aaatagaagtgaaattcagcctgga

SEQ ID NO: 127022 - DNA, 25 bp, Artificial
  Probe
ccagggaaatagaagtgaaattcag

SEQ ID NO: 127023 - DNA, 25 bp, Artificial
  Probe
gtgaaattcagcctggatctattac

SEQ ID NO: 127024 - DNA, 25 bp, Artificial
  Probe
agtgaaattcagcctggatctatta

SEQ ID NO: 127025 - DNA, 25 bp, Artificial
  Probe
gaagtgaaattcagcctggatctat

SEQ ID NO: 127026 - DNA, 25 bp, Artificial
  Probe
atagaagtgaaattcagcctggatc

SEQ ID NO: 127027 - DNA, 25 bp, Artificial
  Probe
actcagaattactgtgtacttactt

SEQ ID NO: 127028 - DNA, 25 bp, Artificial
  Probe
cccagggaaatagaagtgaaattca

SEQ ID NO: 127029 - DNA, 25 bp, Artificial
  Probe
taggaagataaattgtgggcttggt

SEQ ID NO: 127030 - DNA, 25 bp, Artificial
  Probe
gggaaatagaagtgaaattcagcct

SEQ ID NO: 127031 - DNA, 25 bp, Artificial
  Probe
agggaaatagaagtgaaattcagcc

SEQ ID NO: 127032 - DNA, 25 bp, Artificial
  Probe
aaattcagcctggatctattacaat

SEQ ID NO: 127033 - DNA, 25 bp, Artificial
  Probe
gaagataaattgtgggcttggtgag

SEQ ID NO: 127034 - DNA, 25 bp, Artificial
  Probe
catgcttcctttagtcttctttccc

SEQ ID NO: 127035 - DNA, 25 bp, Artificial
  Probe
gctgctcttgagaatggatatactt

SEQ ID NO: 127036 - DNA, 25 bp, Artificial
  Probe
ttcgctgctcttgagaatggatata

SEQ ID NO: 127037 - DNA, 25 bp, Artificial
  Probe
cgctgctcttgagaatggatatact

SEQ ID NO: 127038 - DNA, 25 bp, Artificial
  Probe
tcgctgctcttgagaatggatatac

SEQ ID NO: 127039 - DNA, 25 bp, Artificial
  Probe
ttcattacctaccgttacacctgtg

SEQ ID NO: 127040 - DNA, 25 bp, Artificial
  Probe
agaatggatatactttacgcaggtc

SEQ ID NO: 127041 - DNA, 25 bp, Artificial
  Probe
gagaatggatatactttacgcaggt

SEQ ID NO: 127042 - DNA, 25 bp, Artificial
  Probe
tgagaatggatatactttacgcagg

SEQ ID NO: 127043 - DNA, 25 bp, Artificial
  Probe
acctagattcaaactcagacgattt

SEQ ID NO: 127044 - DNA, 25 bp, Artificial
  Probe
ttgagaatggatatactttacgcag

SEQ ID NO: 127045 - DNA, 25 bp, Artificial
  Probe
cttgagaatggatatactttacgca

SEQ ID NO: 127046 - DNA, 25 bp, Artificial
  Probe
cattacctaccgttacacctgtgac

SEQ ID NO: 127047 - DNA, 25 bp, Artificial
  Probe
aatttctcctactctacactctctg

SEQ ID NO: 127048 - DNA, 25 bp, Artificial
  Probe
gacctagattcaaactcagacgatt

SEQ ID NO: 127049 - DNA, 25 bp, Artificial
  Probe
ttctcctactctacactctctgtac

SEQ ID NO: 127050 - DNA, 25 bp, Artificial
  Probe
gtttcattacctaccgttacacctg

SEQ ID NO: 127051 - DNA, 25 bp, Artificial
  Probe
gaatggatatactttacgcaggtcg

SEQ ID NO: 127052 - DNA, 25 bp, Artificial
  Probe
gaatttctcctactctacactctct

SEQ ID NO: 127053 - DNA, 25 bp, Artificial
  Probe
agacctagattcaaactcagacgat

SEQ ID NO: 127054 - DNA, 25 bp, Artificial
  Probe
tcttgagaatggatatactttacgc

SEQ ID NO: 127055 - DNA, 25 bp, Artificial
  Probe
ctgctcttgagaatggatatacttt

SEQ ID NO: 127056 - DNA, 25 bp, Artificial
  Probe
tttcattacctaccgttacacctgt

SEQ ID NO: 127057 - DNA, 25 bp, Artificial
  Probe
tcattacctaccgttacacctgtga

SEQ ID NO: 127058 - DNA, 25 bp, Artificial
  Probe
atttctcctactctacactctctgt

SEQ ID NO: 127059 - DNA, 25 bp, Artificial
  Probe
gacagagagatggtcaatacctcac

SEQ ID NO: 127060 - DNA, 25 bp, Artificial
  Probe
cttccaccaagagcaagtatgactc

SEQ ID NO: 127061 - DNA, 25 bp, Artificial
  Probe
cagacctagattcaaactcagacga

SEQ ID NO: 127062 - DNA, 25 bp, Artificial
  Probe
tctaactatgcagacctagattcaa

SEQ ID NO: 127063 - DNA, 25 bp, Artificial
  Probe
ggaatttctcctactctacactctc

SEQ ID NO: 127064 - DNA, 25 bp, Artificial
  Probe
atatactttacgcaggtcgaatgaa

SEQ ID NO: 127065 - DNA, 25 bp, Artificial
  Probe
tatactttacgcaggtcgaatgaaa

SEQ ID NO: 127066 - DNA, 25 bp, Artificial
  Probe
gatatactttacgcaggtcgaatga

SEQ ID NO: 127067 - DNA, 25 bp, Artificial
  Probe
tttcgctgctcttgagaatggatat

SEQ ID NO: 127068 - DNA, 25 bp, Artificial
  Probe
gatggagacagctatggtttcatta

SEQ ID NO: 127069 - DNA, 25 bp, Artificial
  Probe
atggagacagctatggtttcattac

SEQ ID NO: 127070 - DNA, 25 bp, Artificial
  Probe
gctatggtttcattacctaccgtta

SEQ ID NO: 127071 - DNA, 25 bp, Artificial
  Probe
tatggtttcattacctaccgttaca

SEQ ID NO: 127072 - DNA, 25 bp, Artificial
  Probe
tttgatagtttactgaaggaagctc

SEQ ID NO: 127073 - DNA, 25 bp, Artificial
  Probe
atggtttcattacctaccgttacac

SEQ ID NO: 127074 - DNA, 25 bp, Artificial
  Probe
tatgcagacctagattcaaactcag

SEQ ID NO: 127075 - DNA, 25 bp, Artificial
  Probe
ctatgcagacctagattcaaactca

SEQ ID NO: 127076 - DNA, 25 bp, Artificial
  Probe
actatgcagacctagattcaaactc

SEQ ID NO: 127077 - DNA, 25 bp, Artificial
  Probe
ttgatagtttactgaaggaagctca

SEQ ID NO: 127078 - DNA, 25 bp, Artificial
  Probe
aactatgcagacctagattcaaact

SEQ ID NO: 127079 - DNA, 25 bp, Artificial
  Probe
ctatggtttcattacctaccgttac

SEQ ID NO: 127080 - DNA, 25 bp, Artificial
  Probe
atgctgacctgttacttcttcattg

SEQ ID NO: 127081 - DNA, 25 bp, Artificial
  Probe
catgctgacctgttacttcttcatt

SEQ ID NO: 127082 - DNA, 25 bp, Artificial
  Probe
catcatgctgacctgttacttcttc

SEQ ID NO: 127083 - DNA, 25 bp, Artificial
  Probe
atcatcatgctgacctgttacttct

SEQ ID NO: 127084 - DNA, 25 bp, Artificial
  Probe
catcatcatgctgacctgttacttc

SEQ ID NO: 127085 - DNA, 25 bp, Artificial
  Probe
tcatgctgacctgttacttcttcat

SEQ ID NO: 127086 - DNA, 25 bp, Artificial
  Probe
atcatgctgacctgttacttcttca

SEQ ID NO: 127087 - DNA, 25 bp, Artificial
  Probe
tcatcatgctgacctgttacttctt

SEQ ID NO: 127088 - DNA, 25 bp, Artificial
  Probe
ttacttcttcattgcccaaaccatc

SEQ ID NO: 127089 - DNA, 25 bp, Artificial
  Probe
gttacttcttcattgcccaaaccat

SEQ ID NO: 127090 - DNA, 25 bp, Artificial
  Probe
tgctgacctgttacttcttcattgc

SEQ ID NO: 127091 - DNA, 25 bp, Artificial
  Probe
ctgttacttcttcattgcccaaacc

SEQ ID NO: 127092 - DNA, 25 bp, Artificial
  Probe
cctgttacttcttcattgcccaaac

SEQ ID NO: 127093 - DNA, 25 bp, Artificial
  Probe
acctgttacttcttcattgcccaaa

SEQ ID NO: 127094 - DNA, 25 bp, Artificial
  Probe
gagaaatctgccagttattcttctg

SEQ ID NO: 127095 - DNA, 25 bp, Artificial
  Probe
agagaaatctgccagttattcttct

SEQ ID NO: 127096 - DNA, 25 bp, Artificial
  Probe
tgttacttcttcattgcccaaacca

SEQ ID NO: 127097 - DNA, 25 bp, Artificial
  Probe
gctgacctgttacttcttcattgcc

SEQ ID NO: 127098 - DNA, 25 bp, Artificial
  Probe
gacctgttacttcttcattgcccaa

SEQ ID NO: 127099 - DNA, 25 bp, Artificial
  Probe
cttaccacctggtgaagactctcta

SEQ ID NO: 127100 - DNA, 25 bp, Artificial
  Probe
catgaatgtctttccctattgcacc

SEQ ID NO: 127101 - DNA, 25 bp, Artificial
  Probe
tacttcttcattgcccaaaccatcg

SEQ ID NO: 127102 - DNA, 25 bp, Artificial
  Probe
ttaccacctggtgaagactctctac

SEQ ID NO: 127103 - DNA, 25 bp, Artificial
  Probe
atgaatgtctttccctattgcacct

SEQ ID NO: 127104 - DNA, 25 bp, Artificial
  Probe
ctgacctgttacttcttcattgccc

SEQ ID NO: 127105 - DNA, 25 bp, Artificial
  Probe
ctggtgaagactctctacatgctgg

SEQ ID NO: 127106 - DNA, 25 bp, Artificial
  Probe
cctggtgaagactctctacatgctg

SEQ ID NO: 127107 - DNA, 25 bp, Artificial
  Probe
cttcctcatgaatgtctttccctat

SEQ ID NO: 127108 - DNA, 25 bp, Artificial
  Probe
tcctcatgaatgtctttccctattg

SEQ ID NO: 127109 - DNA, 25 bp, Artificial
  Probe
ttcctcatgaatgtctttccctatt

SEQ ID NO: 127110 - DNA, 25 bp, Artificial
  Probe
tgaatgtctttccctattgcacctg

SEQ ID NO: 127111 - DNA, 25 bp, Artificial
  Probe
ctcatgaatgtctttccctattgca

SEQ ID NO: 127112 - DNA, 25 bp, Artificial
  Probe
tcatgaatgtctttccctattgcac

SEQ ID NO: 127113 - DNA, 25 bp, Artificial
  Probe
acctggtgaagactctctacatgct

SEQ ID NO: 127114 - DNA, 25 bp, Artificial
  Probe
cagagaaatctgccagttattcttc

SEQ ID NO: 127115 - DNA, 25 bp, Artificial
  Probe
taccacctggtgaagactctctaca

SEQ ID NO: 127116 - DNA, 25 bp, Artificial
  Probe
ccacctggtgaagactctctacatg

SEQ ID NO: 127117 - DNA, 25 bp, Artificial
  Probe
cctcatgaatgtctttccctattgc

SEQ ID NO: 127118 - DNA, 25 bp, Artificial
  Probe
tgacctgttacttcttcattgccca

SEQ ID NO: 127119 - DNA, 25 bp, Artificial
  Probe
ccttcctctatgccttctttgaccc

SEQ ID NO: 127120 - DNA, 25 bp, Artificial
  Probe
cccttcctctatgccttctttgacc

SEQ ID NO: 127121 - DNA, 25 bp, Artificial
  Probe
agaaccgatgcatgagaaatctatc

SEQ ID NO: 127122 - DNA, 25 bp, Artificial
  Probe
gagaaccgatgcatgagaaatctat

SEQ ID NO: 127123 - DNA, 25 bp, Artificial
  Probe
agaaatctatcccctatagccaaga

SEQ ID NO: 127124 - DNA, 25 bp, Artificial
  Probe
gagaaatctatcccctatagccaag

SEQ ID NO: 127125 - DNA, 25 bp, Artificial
  Probe
gacttaattcttccttgtgttgtgg

SEQ ID NO: 127126 - DNA, 25 bp, Artificial
  Probe
cttaattcttccttgtgttgtggtg

SEQ ID NO: 127127 - DNA, 25 bp, Artificial
  Probe
acttaattcttccttgtgttgtggt

SEQ ID NO: 127128 - DNA, 25 bp, Artificial
  Probe
ttaattcttccttgtgttgtggtgt

SEQ ID NO: 127129 - DNA, 25 bp, Artificial
  Probe
taattcttccttgtgttgtggtgtg

SEQ ID NO: 127130 - DNA, 25 bp, Artificial
  Probe
ggacttaattcttccttgtgttgtg

SEQ ID NO: 127131 - DNA, 25 bp, Artificial
  Probe
cagagtatgaaatagcttccaggtt

SEQ ID NO: 127132 - DNA, 25 bp, Artificial
  Probe
gggtacattatagagtcttccattt

SEQ ID NO: 127133 - DNA, 25 bp, Artificial
  Probe
caccagagtatgaaatagcttccag

SEQ ID NO: 127134 - DNA, 25 bp, Artificial
  Probe
aattcttccttgtgttgtggtgtgg

SEQ ID NO: 127135 - DNA, 25 bp, Artificial
  Probe
attgcaccagagtatgaaatagctt

SEQ ID NO: 127136 - DNA, 25 bp, Artificial
  Probe
ttgcaccagagtatgaaatagcttc

SEQ ID NO: 127137 - DNA, 25 bp, Artificial
  Probe
tgggtacattatagagtcttccatt

SEQ ID NO: 127138 - DNA, 25 bp, Artificial
  Probe
cattgcaccagagtatgaaatagct

SEQ ID NO: 127139 - DNA, 25 bp, Artificial
  Probe
ccagagtatgaaatagcttccaggt

SEQ ID NO: 127140 - DNA, 25 bp, Artificial
  Probe
accagagtatgaaatagcttccagg

SEQ ID NO: 127141 - DNA, 25 bp, Artificial
  Probe
cagtcattcaggacttaattcttcc

SEQ ID NO: 127142 - DNA, 25 bp, Artificial
  Probe
ccagtcattcaggacttaattcttc

SEQ ID NO: 127143 - DNA, 25 bp, Artificial
  Probe
gtggttttcttcctttcttctgttt

SEQ ID NO: 127144 - DNA, 25 bp, Artificial
  Probe
aatgggtacattatagagtcttcca

SEQ ID NO: 127145 - DNA, 25 bp, Artificial
  Probe
tggttttcttcctttcttctgtttt

SEQ ID NO: 127146 - DNA, 25 bp, Artificial
  Probe
atttcttttgtgccattttagggtg

SEQ ID NO: 127147 - DNA, 25 bp, Artificial
  Probe
gccagtcattcaggacttaattctt

SEQ ID NO: 127148 - DNA, 25 bp, Artificial
  Probe
aagccagtcattcaggacttaattc

SEQ ID NO: 127149 - DNA, 25 bp, Artificial
  Probe
gaagccagtcattcaggacttaatt

SEQ ID NO: 127150 - DNA, 25 bp, Artificial
  Probe
aatttcttttgtgccattttagggt

SEQ ID NO: 127151 - DNA, 25 bp, Artificial
  Probe
tgtggttttcttcctttcttctgtt

SEQ ID NO: 127152 - DNA, 25 bp, Artificial
  Probe
ccattgcaccagagtatgaaatagc

SEQ ID NO: 127153 - DNA, 25 bp, Artificial
  Probe
gccattgcaccagagtatgaaatag

SEQ ID NO: 127154 - DNA, 25 bp, Artificial
  Probe
caatttcttttgtgccattttaggg

SEQ ID NO: 127155 - DNA, 25 bp, Artificial
  Probe
gcaccagagtatgaaatagcttcca

SEQ ID NO: 127156 - DNA, 25 bp, Artificial
  Probe
gtgtggttttcttcctttcttctgt

SEQ ID NO: 127157 - DNA, 25 bp, Artificial
  Probe
agccagtcattcaggacttaattct

SEQ ID NO: 127158 - DNA, 25 bp, Artificial
  Probe
caggacttaattcttccttgtgttg

SEQ ID NO: 127159 - DNA, 25 bp, Artificial
  Probe
tcaggacttaattcttccttgtgtt

SEQ ID NO: 127160 - DNA, 25 bp, Artificial
  Probe
ttcaggacttaattcttccttgtgt

SEQ ID NO: 127161 - DNA, 25 bp, Artificial
  Probe
aggacttaattcttccttgtgttgt

SEQ ID NO: 127162 - DNA, 25 bp, Artificial
  Probe
tgaagccagtcattcaggacttaat

SEQ ID NO: 127163 - DNA, 25 bp, Artificial
  Probe
atgaagccagtcattcaggacttaa

SEQ ID NO: 127164 - DNA, 25 bp, Artificial
  Probe
attcttccttgtgttgtggtgtggt

SEQ ID NO: 127165 - DNA, 25 bp, Artificial
  Probe
agtcattcaggacttaattcttcct

SEQ ID NO: 127166 - DNA, 25 bp, Artificial
  Probe
attcaggacttaattcttccttgtg

SEQ ID NO: 127167 - DNA, 25 bp, Artificial
  Probe
cattcaggacttaattcttccttgt

SEQ ID NO: 127168 - DNA, 25 bp, Artificial
  Probe
tgcaccagagtatgaaatagcttcc

SEQ ID NO: 127169 - DNA, 25 bp, Artificial
  Probe
tcattcaggacttaattcttccttg

SEQ ID NO: 127170 - DNA, 25 bp, Artificial
  Probe
gctaagtataggctggattgtagaa

SEQ ID NO: 127171 - DNA, 25 bp, Artificial
  Probe
ctgctaagtataggctggattgtag

SEQ ID NO: 127172 - DNA, 25 bp, Artificial
  Probe
tgctaagtataggctggattgtaga

SEQ ID NO: 127173 - DNA, 25 bp, Artificial
  Probe
tccatctaccagagagttaatgaga

SEQ ID NO: 127174 - DNA, 25 bp, Artificial
  Probe
ccatctaccagagagttaatgagaa

SEQ ID NO: 127175 - DNA, 25 bp, Artificial
  Probe
agtggaatacagacaatactcttgg

SEQ ID NO: 127176 - DNA, 25 bp, Artificial
  Probe
agtataggctggattgtagaacttc

SEQ ID NO: 127177 - DNA, 25 bp, Artificial
  Probe
ctaagtataggctggattgtagaac

SEQ ID NO: 127178 - DNA, 25 bp, Artificial
  Probe
taccagagagttaatgagaagatcg

SEQ ID NO: 127179 - DNA, 25 bp, Artificial
  Probe
ctccatctaccagagagttaatgag

SEQ ID NO: 127180 - DNA, 25 bp, Artificial
  Probe
gtataggctggattgtagaacttct

SEQ ID NO: 127181 - DNA, 25 bp, Artificial
  Probe
ctggattgtagaacttctctgtctg

SEQ ID NO: 127182 - DNA, 25 bp, Artificial
  Probe
tataggctggattgtagaacttctc

SEQ ID NO: 127183 - DNA, 25 bp, Artificial
  Probe
ataggctggattgtagaacttctct

SEQ ID NO: 127184 - DNA, 25 bp, Artificial
  Probe
tctacttctggtcatgcttatactg

SEQ ID NO: 127185 - DNA, 25 bp, Artificial
  Probe
gctgctaagtataggctggattgta

SEQ ID NO: 127186 - DNA, 25 bp, Artificial
  Probe
catctaccagagagttaatgagaag

SEQ ID NO: 127187 - DNA, 25 bp, Artificial
  Probe
aagtggaatacagacaatactcttg

SEQ ID NO: 127188 - DNA, 25 bp, Artificial
  Probe
ttctacttctggtcatgcttatact

SEQ ID NO: 127189 - DNA, 25 bp, Artificial
  Probe
taagtataggctggattgtagaact

SEQ ID NO: 127190 - DNA, 25 bp, Artificial
  Probe
tctaccagagagttaatgagaagat

SEQ ID NO: 127191 - DNA, 25 bp, Artificial
  Probe
atctaccagagagttaatgagaaga

SEQ ID NO: 127192 - DNA, 25 bp, Artificial
  Probe
gctccatctaccagagagttaatga

SEQ ID NO: 127193 - DNA, 25 bp, Artificial
  Probe
taggctggattgtagaacttctctg

SEQ ID NO: 127194 - DNA, 25 bp, Artificial
  Probe
ctacttctggtcatgcttatactga

SEQ ID NO: 127195 - DNA, 25 bp, Artificial
  Probe
ttctggtcatgcttatactgataca

SEQ ID NO: 127196 - DNA, 25 bp, Artificial
  Probe
acttctggtcatgcttatactgata

SEQ ID NO: 127197 - DNA, 25 bp, Artificial
  Probe
tacttctggtcatgcttatactgat

SEQ ID NO: 127198 - DNA, 25 bp, Artificial
  Probe
ccagagagttaatgagaagatcgaa

SEQ ID NO: 127199 - DNA, 25 bp, Artificial
  Probe
cttctggtcatgcttatactgatac

SEQ ID NO: 127200 - DNA, 25 bp, Artificial
  Probe
ctaccagagagttaatgagaagatc

SEQ ID NO: 127201 - DNA, 25 bp, Artificial
  Probe
tctggtcatgcttatactgatacag

SEQ ID NO: 127202 - DNA, 25 bp, Artificial
  Probe
accagagagttaatgagaagatcga

SEQ ID NO: 127203 - DNA, 25 bp, Artificial
  Probe
ctggtcatgcttatactgatacagg

SEQ ID NO: 127204 - DNA, 25 bp, Artificial
  Probe
gctggattgtagaacttctctgtct

SEQ ID NO: 127205 - DNA, 25 bp, Artificial
  Probe
ggctccatctaccagagagttaatg

SEQ ID NO: 127206 - DNA, 25 bp, Artificial
  Probe
aggctccatctaccagagagttaat

SEQ ID NO: 127207 - DNA, 25 bp, Artificial
  Probe
aaatataaggtctgtaactacgggc

SEQ ID NO: 127208 - DNA, 25 bp, Artificial
  Probe
tggattgtagaacttctctgtctgc

SEQ ID NO: 127209 - DNA, 25 bp, Artificial
  Probe
aatataaggtctgtaactacgggct

SEQ ID NO: 127210 - DNA, 25 bp, Artificial
  Probe
gacttccaactgcatactcatgtaa

SEQ ID NO: 127211 - DNA, 25 bp, Artificial
  Probe
aatactcttgggacagaaatctctt

SEQ ID NO: 127212 - DNA, 25 bp, Artificial
  Probe
caaatataaggtctgtaactacggg

SEQ ID NO: 127213 - DNA, 25 bp, Artificial
  Probe
ccaaatataaggtctgtaactacgg

SEQ ID NO: 127214 - DNA, 25 bp, Artificial
  Probe
caatactcttgggacagaaatctct

SEQ ID NO: 127215 - DNA, 25 bp, Artificial
  Probe
aattaacttgaactgctggaggact

SEQ ID NO: 127216 - DNA, 25 bp, Artificial
  Probe
caattaacttgaactgctggaggac

SEQ ID NO: 127217 - DNA, 25 bp, Artificial
  Probe
attaacttgaactgctggaggactc

SEQ ID NO: 127218 - DNA, 25 bp, Artificial
  Probe
ttaacttgaactgctggaggactct

SEQ ID NO: 127219 - DNA, 25 bp, Artificial
  Probe
aataaagatgacctctgtctctcac

SEQ ID NO: 127220 - DNA, 25 bp, Artificial
  Probe
caataaagatgacctctgtctctca

SEQ ID NO: 127221 - DNA, 25 bp, Artificial
  Probe
acaataaagatgacctctgtctctc

SEQ ID NO: 127222 - DNA, 25 bp, Artificial
  Probe
cacaataaagatgacctctgtctct

SEQ ID NO: 127223 - DNA, 25 bp, Artificial
  Probe
cttggagcacaataaagatgacctc

SEQ ID NO: 127224 - DNA, 25 bp, Artificial
  Probe
tatcaattaacttgaactgctggag

SEQ ID NO: 127225 - DNA, 25 bp, Artificial
  Probe
ataaagatgacctctgtctctcacc

SEQ ID NO: 127226 - DNA, 25 bp, Artificial
  Probe
gcacaataaagatgacctctgtctc

SEQ ID NO: 127227 - DNA, 25 bp, Artificial
  Probe
gagcacaataaagatgacctctgtc

SEQ ID NO: 127228 - DNA, 25 bp, Artificial
  Probe
ttggagcacaataaagatgacctct

SEQ ID NO: 127229 - DNA, 25 bp, Artificial
  Probe
atcaattaacttgaactgctggagg

SEQ ID NO: 127230 - DNA, 25 bp, Artificial
  Probe
ttatcaattaacttgaactgctgga

SEQ ID NO: 127231 - DNA, 25 bp, Artificial
  Probe
agcacaataaagatgacctctgtct

SEQ ID NO: 127232 - DNA, 25 bp, Artificial
  Probe
taacttgaactgctggaggactctg

SEQ ID NO: 127233 - DNA, 25 bp, Artificial
  Probe
tggagcacaataaagatgacctctg

SEQ ID NO: 127234 - DNA, 25 bp, Artificial
  Probe
tcaattaacttgaactgctggagga

SEQ ID NO: 127235 - DNA, 25 bp, Artificial
  Probe
ggagcacaataaagatgacctctgt

SEQ ID NO: 127236 - DNA, 25 bp, Artificial
  Probe
gaatgacatcttccatctcccagtc

SEQ ID NO: 127237 - DNA, 25 bp, Artificial
  Probe
aggactctgctgaaaatatgaagaa

SEQ ID NO: 127238 - DNA, 25 bp, Artificial
  Probe
gaggactctgctgaaaatatgaaga

SEQ ID NO: 127239 - DNA, 25 bp, Artificial
  Probe
ggaggactctgctgaaaatatgaag

SEQ ID NO: 127240 - DNA, 25 bp, Artificial
  Probe
ggactctgctgaaaatatgaagaat

SEQ ID NO: 127241 - DNA, 25 bp, Artificial
  Probe
taaagatgacctctgtctctcaccc

SEQ ID NO: 127242 - DNA, 25 bp, Artificial
  Probe
tggaggactctgctgaaaatatgaa

SEQ ID NO: 127243 - DNA, 25 bp, Artificial
  Probe
ctggaggactctgctgaaaatatga

SEQ ID NO: 127244 - DNA, 25 bp, Artificial
  Probe
tttatcaattaacttgaactgctgg

SEQ ID NO: 127245 - DNA, 25 bp, Artificial
  Probe
caggagaaagaattttacaatgaca

SEQ ID NO: 127246 - DNA, 25 bp, Artificial
  Probe
gactctgctgaaaatatgaagaatt

SEQ ID NO: 127247 - DNA, 25 bp, Artificial
  Probe
agaattttacaatgacaatctgctt

SEQ ID NO: 127248 - DNA, 25 bp, Artificial
  Probe
aagaattttacaatgacaatctgct

SEQ ID NO: 127249 - DNA, 25 bp, Artificial
  Probe
aatgacatcttccatctcccagtcc

SEQ ID NO: 127250 - DNA, 25 bp, Artificial
  Probe
gggcagatgtttgacttttccaatt

SEQ ID NO: 127251 - DNA, 25 bp, Artificial
  Probe
gatccttaagcttggagcacaataa

SEQ ID NO: 127252 - DNA, 25 bp, Artificial
  Probe
tcaggagaaagaattttacaatgac

SEQ ID NO: 127253 - DNA, 25 bp, Artificial
  Probe
gaattttacaatgacaatctgcttt

SEQ ID NO: 127254 - DNA, 25 bp, Artificial
  Probe
ccactgtctagaactttccaacctg

SEQ ID NO: 127255 - DNA, 25 bp, Artificial
  Probe
aggagaaagaattttacaatgacaa

SEQ ID NO: 127256 - DNA, 25 bp, Artificial
  Probe
ctcaggagaaagaattttacaatga

SEQ ID NO: 127257 - DNA, 25 bp, Artificial
  Probe
gcttggagcacaataaagatgacct

SEQ ID NO: 127258 - DNA, 25 bp, Artificial
  Probe
aaagaattttacaatgacaatctgc

SEQ ID NO: 127259 - DNA, 25 bp, Artificial
  Probe
aattttacaatgacaatctgctttt

SEQ ID NO: 127260 - DNA, 25 bp, Artificial
  Probe
gaatctatacctgtcctgtgtgatg

SEQ ID NO: 127261 - DNA, 25 bp, Artificial
  Probe
atctatacctgtcctgtgtgatgaa

SEQ ID NO: 127262 - DNA, 25 bp, Artificial
  Probe
aatctatacctgtcctgtgtgatga

SEQ ID NO: 127263 - DNA, 25 bp, Artificial
  Probe
tgaatctatacctgtcctgtgtgat

SEQ ID NO: 127264 - DNA, 25 bp, Artificial
  Probe
ttgaatctatacctgtcctgtgtga

SEQ ID NO: 127265 - DNA, 25 bp, Artificial
  Probe
gttgaatctatacctgtcctgtgtg

SEQ ID NO: 127266 - DNA, 25 bp, Artificial
  Probe
ttatgaatgaagcacaagcacatca

SEQ ID NO: 127267 - DNA, 25 bp, Artificial
  Probe
gaacataagccaacaagtggtattc

SEQ ID NO: 127268 - DNA, 25 bp, Artificial
  Probe
aacataagccaacaagtggtattct

SEQ ID NO: 127269 - DNA, 25 bp, Artificial
  Probe
agaacataagccaacaagtggtatt

SEQ ID NO: 127270 - DNA, 25 bp, Artificial
  Probe
ggatgagagtgtttatgaatgaagc

SEQ ID NO: 127271 - DNA, 25 bp, Artificial
  Probe
tgtggatgagagtgtttatgaatga

SEQ ID NO: 127272 - DNA, 25 bp, Artificial
  Probe
gtgtggatgagagtgtttatgaatg

SEQ ID NO: 127273 - DNA, 25 bp, Artificial
  Probe
tgtgtggatgagagtgtttatgaat

SEQ ID NO: 127274 - DNA, 25 bp, Artificial
  Probe
attgtgtggatgagagtgtttatga

SEQ ID NO: 127275 - DNA, 25 bp, Artificial
  Probe
acataagccaacaagtggtattctc

SEQ ID NO: 127276 - DNA, 25 bp, Artificial
  Probe
ttgtgtggatgagagtgtttatgaa

SEQ ID NO: 127277 - DNA, 25 bp, Artificial
  Probe
gatgagagtgtttatgaatgaagca

SEQ ID NO: 127278 - DNA, 25 bp, Artificial
  Probe
ctatacctgtcctgtgtgatgaaag

SEQ ID NO: 127279 - DNA, 25 bp, Artificial
  Probe
tgtgtatgggatgaattgaatttgg

SEQ ID NO: 127280 - DNA, 25 bp, Artificial
  Probe
cgtgtgtatgggatgaattgaattt

SEQ ID NO: 127281 - DNA, 25 bp, Artificial
  Probe
cagaacataagccaacaagtggtat

SEQ ID NO: 127282 - DNA, 25 bp, Artificial
  Probe
gtggatgagagtgtttatgaatgaa

SEQ ID NO: 127283 - DNA, 25 bp, Artificial
  Probe
tatacctgtcctgtgtgatgaaaga

SEQ ID NO: 127284 - DNA, 25 bp, Artificial
  Probe
tctatacctgtcctgtgtgatgaaa

SEQ ID NO: 127285 - DNA, 25 bp, Artificial
  Probe
tattgtgtggatgagagtgtttatg

SEQ ID NO: 127286 - DNA, 25 bp, Artificial
  Probe
tttatgaatgaagcacaagcacatc

SEQ ID NO: 127287 - DNA, 25 bp, Artificial
  Probe
tggatgagagtgtttatgaatgaag

SEQ ID NO: 127288 - DNA, 25 bp, Artificial
  Probe
cataagccaacaagtggtattctcc

SEQ ID NO: 127289 - DNA, 25 bp, Artificial
  Probe
gtttatgaatgaagcacaagcacat

SEQ ID NO: 127290 - DNA, 25 bp, Artificial
  Probe
gtgtgtatgggatgaattgaatttg

SEQ ID NO: 127291 - DNA, 25 bp, Artificial
  Probe
aatggacagaacataagccaacaag

SEQ ID NO: 127292 - DNA, 25 bp, Artificial
  Probe
catattgtgtggatgagagtgttta

SEQ ID NO: 127293 - DNA, 25 bp, Artificial
  Probe
ggttgaatctatacctgtcctgtgt

SEQ ID NO: 127294 - DNA, 25 bp, Artificial
  Probe
taagccaacaagtggtattctccat

SEQ ID NO: 127295 - DNA, 25 bp, Artificial
  Probe
ataagccaacaagtggtattctcca

SEQ ID NO: 127296 - DNA, 25 bp, Artificial
  Probe
caatggacagaacataagccaacaa

SEQ ID NO: 127297 - DNA, 25 bp, Artificial
  Probe
ctagtgtgtgatgttcccattagac

SEQ ID NO: 127298 - DNA, 25 bp, Artificial
  Probe
ccgtgtgtatgggatgaattgaatt

SEQ ID NO: 127299 - DNA, 25 bp, Artificial
  Probe
ttcatattgtgtggatgagagtgtt

SEQ ID NO: 127300 - DNA, 25 bp, Artificial
  Probe
ctcaatggacagaacataagccaac

SEQ ID NO: 127301 - DNA, 25 bp, Artificial
  Probe
gtccctgaactcaactgtgaaatag

SEQ ID NO: 127302 - DNA, 25 bp, Artificial
  Probe
atattgtgtggatgagagtgtttat

SEQ ID NO: 127303 - DNA, 25 bp, Artificial
  Probe
acagaacataagccaacaagtggta

SEQ ID NO: 127304 - DNA, 25 bp, Artificial
  Probe
cactgagttctttcattgatgctga

SEQ ID NO: 127305 - DNA, 25 bp, Artificial
  Probe
atctggactcaataatagtgacgac

SEQ ID NO: 127306 - DNA, 25 bp, Artificial
  Probe
ctggactcaataatagtgacgacaa

SEQ ID NO: 127307 - DNA, 25 bp, Artificial
  Probe
tctggactcaataatagtgacgaca

SEQ ID NO: 127308 - DNA, 25 bp, Artificial
  Probe
gtatctggactcaataatagtgacg

SEQ ID NO: 127309 - DNA, 25 bp, Artificial
  Probe
tatctggactcaataatagtgacga

SEQ ID NO: 127310 - DNA, 25 bp, Artificial
  Probe
ggtatctggactcaataatagtgac

SEQ ID NO: 127311 - DNA, 25 bp, Artificial
  Probe
aggtatctggactcaataatagtga

SEQ ID NO: 127312 - DNA, 25 bp, Artificial
  Probe
cctcaggtatctggactcaataata

SEQ ID NO: 127313 - DNA, 25 bp, Artificial
  Probe
tcctcaggtatctggactcaataat

SEQ ID NO: 127314 - DNA, 25 bp, Artificial
  Probe
atcctcaggtatctggactcaataa

SEQ ID NO: 127315 - DNA, 25 bp, Artificial
  Probe
atatcctcaggtatctggactcaat

SEQ ID NO: 127316 - DNA, 25 bp, Artificial
  Probe
tatcctcaggtatctggactcaata

SEQ ID NO: 127317 - DNA, 25 bp, Artificial
  Probe
catatcctcaggtatctggactcaa

SEQ ID NO: 127318 - DNA, 25 bp, Artificial
  Probe
caggtatctggactcaataatagtg

SEQ ID NO: 127319 - DNA, 25 bp, Artificial
  Probe
tcaggtatctggactcaataatagt

SEQ ID NO: 127320 - DNA, 25 bp, Artificial
  Probe
caataatagtgacgacaaagccaat

SEQ ID NO: 127321 - DNA, 25 bp, Artificial
  Probe
aagccaatctgaggaatagtacctt

SEQ ID NO: 127322 - DNA, 25 bp, Artificial
  Probe
gacaaagccaatctgaggaatagta

SEQ ID NO: 127323 - DNA, 25 bp, Artificial
  Probe
ataatagtgacgacaaagccaatct

SEQ ID NO: 127324 - DNA, 25 bp, Artificial
  Probe
aataatagtgacgacaaagccaatc

SEQ ID NO: 127325 - DNA, 25 bp, Artificial
  Probe
taatagtgacgacaaagccaatctg

SEQ ID NO: 127326 - DNA, 25 bp, Artificial
  Probe
ctcaggtatctggactcaataatag

SEQ ID NO: 127327 - DNA, 25 bp, Artificial
  Probe
agccaatctgaggaatagtaccttg

SEQ ID NO: 127328 - DNA, 25 bp, Artificial
  Probe
gactcaataatagtgacgacaaagc

SEQ ID NO: 127329 - DNA, 25 bp, Artificial
  Probe
tggactcaataatagtgacgacaaa

SEQ ID NO: 127330 - DNA, 25 bp, Artificial
  Probe
ggactcaataatagtgacgacaaag

SEQ ID NO: 127331 - DNA, 25 bp, Artificial
  Probe
tggatgactttaagaagaaactgag

SEQ ID NO: 127332 - DNA, 25 bp, Artificial
  Probe
ctggatgactttaagaagaaactga

SEQ ID NO: 127333 - DNA, 25 bp, Artificial
  Probe
acaaagccaatctgaggaatagtac

SEQ ID NO: 127334 - DNA, 25 bp, Artificial
  Probe
tcaataatagtgacgacaaagccaa

SEQ ID NO: 127335 - DNA, 25 bp, Artificial
  Probe
tctggatgactttaagaagaaactg

SEQ ID NO: 127336 - DNA, 25 bp, Artificial
  Probe
gttgccaggtgtctacaataaagat

SEQ ID NO: 127337 - DNA, 25 bp, Artificial
  Probe
ggatgactttaagaagaaactgaga

SEQ ID NO: 127338 - DNA, 25 bp, Artificial
  Probe
ctcaataatagtgacgacaaagcca

SEQ ID NO: 127339 - DNA, 25 bp, Artificial
  Probe
actcaataatagtgacgacaaagcc

SEQ ID NO: 127340 - DNA, 25 bp, Artificial
  Probe
gaatagtaccttgcggagagtaaac

SEQ ID NO: 127341 - DNA, 25 bp, Artificial
  Probe
caaagccaatctgaggaatagtacc

SEQ ID NO: 127342 - DNA, 25 bp, Artificial
  Probe
ttgccaggtgtctacaataaagatc

SEQ ID NO: 127343 - DNA, 25 bp, Artificial
  Probe
ccatatcctcaggtatctggactca

SEQ ID NO: 127344 - DNA, 25 bp, Artificial
  Probe
ctgtgttgccaggtgtctacaataa

SEQ ID NO: 127345 - DNA, 25 bp, Artificial
  Probe
aggaatagtaccttgcggagagtaa

SEQ ID NO: 127346 - DNA, 25 bp, Artificial
  Probe
atctggatgactttaagaagaaact

SEQ ID NO: 127347 - DNA, 25 bp, Artificial
  Probe
ggaatagtaccttgcggagagtaaa

SEQ ID NO: 127348 - DNA, 25 bp, Artificial
  Probe
aatagtgacgacaaagccaatctga

SEQ ID NO: 127349 - DNA, 25 bp, Artificial
  Probe
attctacgtgatccatcttaaggac

SEQ ID NO: 127350 - DNA, 25 bp, Artificial
  Probe
cagagaccaagtagacttccagaac

SEQ ID NO: 127351 - DNA, 25 bp, Artificial
  Probe
tcagagaccaagtagacttccagaa

SEQ ID NO: 127352 - DNA, 25 bp, Artificial
  Probe
ttactcagagaccaagtagacttcc

SEQ ID NO: 127353 - DNA, 25 bp, Artificial
  Probe
agaatgctggaacaacaatgtcaac

SEQ ID NO: 127354 - DNA, 25 bp, Artificial
  Probe
cagaatgctggaacaacaatgtcaa

SEQ ID NO: 127355 - DNA, 25 bp, Artificial
  Probe
ctcagagaccaagtagacttccaga

SEQ ID NO: 127356 - DNA, 25 bp, Artificial
  Probe
atactttggcatccgtgtgatttac

SEQ ID NO: 127357 - DNA, 25 bp, Artificial
  Probe
catactttggcatccgtgtgattta

SEQ ID NO: 127358 - DNA, 25 bp, Artificial
  Probe
tactcagagaccaagtagacttcca

SEQ ID NO: 127359 - DNA, 25 bp, Artificial
  Probe
gtggtgtgtatcatactttggcatc

SEQ ID NO: 127360 - DNA, 25 bp, Artificial
  Probe
actcagagaccaagtagacttccag

SEQ ID NO: 127361 - DNA, 25 bp, Artificial
  Probe
agagaccaagtagacttccagaacc

SEQ ID NO: 127362 - DNA, 25 bp, Artificial
  Probe
aagtagacttccagaaccagagcaa

SEQ ID NO: 127363 - DNA, 25 bp, Artificial
  Probe
gaatgctggaacaacaatgtcaacc

SEQ ID NO: 127364 - DNA, 25 bp, Artificial
  Probe
accaagtagacttccagaaccagag

SEQ ID NO: 127365 - DNA, 25 bp, Artificial
  Probe
gaccaagtagacttccagaaccaga

SEQ ID NO: 127366 - DNA, 25 bp, Artificial
  Probe
agaccaagtagacttccagaaccag

SEQ ID NO: 127367 - DNA, 25 bp, Artificial
  Probe
gagaccaagtagacttccagaacca

SEQ ID NO: 127368 - DNA, 25 bp, Artificial
  Probe
acagaatgctggaacaacaatgtca

SEQ ID NO: 127369 - DNA, 25 bp, Artificial
  Probe
tgacagaatgctggaacaacaatgt

SEQ ID NO: 127370 - DNA, 25 bp, Artificial
  Probe
cctttactcagagaccaagtagact

SEQ ID NO: 127371 - DNA, 25 bp, Artificial
  Probe
gacctttactcagagaccaagtaga

SEQ ID NO: 127372 - DNA, 25 bp, Artificial
  Probe
tttactcagagaccaagtagacttc

SEQ ID NO: 127373 - DNA, 25 bp, Artificial
  Probe
ctttactcagagaccaagtagactt

SEQ ID NO: 127374 - DNA, 25 bp, Artificial
  Probe
acctttactcagagaccaagtagac

SEQ ID NO: 127375 - DNA, 25 bp, Artificial
  Probe
tgacctttactcagagaccaagtag

SEQ ID NO: 127376 - DNA, 25 bp, Artificial
  Probe
tttatgtaccatctgtaacccaccg

SEQ ID NO: 127377 - DNA, 25 bp, Artificial
  Probe
gtgacctttactcagagaccaagta

SEQ ID NO: 127378 - DNA, 25 bp, Artificial
  Probe
tggtgtgtatcatactttggcatcc

SEQ ID NO: 127379 - DNA, 25 bp, Artificial
  Probe
gtagacttccagaaccagagcaaag

SEQ ID NO: 127380 - DNA, 25 bp, Artificial
  Probe
caagtagacttccagaaccagagca

SEQ ID NO: 127381 - DNA, 25 bp, Artificial
  Probe
tgtatcatactttggcatccgtgtg

SEQ ID NO: 127382 - DNA, 25 bp, Artificial
  Probe
gtgtatcatactttggcatccgtgt

SEQ ID NO: 127383 - DNA, 25 bp, Artificial
  Probe
tgtgtatcatactttggcatccgtg

SEQ ID NO: 127384 - DNA, 25 bp, Artificial
  Probe
gtgtgtatcatactttggcatccgt

SEQ ID NO: 127385 - DNA, 25 bp, Artificial
  Probe
tactttggcatccgtgtgatttaca

SEQ ID NO: 127386 - DNA, 25 bp, Artificial
  Probe
tcatactttggcatccgtgtgattt

SEQ ID NO: 127387 - DNA, 25 bp, Artificial
  Probe
gtatcatactttggcatccgtgtga

SEQ ID NO: 127388 - DNA, 25 bp, Artificial
  Probe
agtagacttccagaaccagagcaaa

SEQ ID NO: 127389 - DNA, 25 bp, Artificial
  Probe
cgtggtgtgtatcatactttggcat

SEQ ID NO: 127390 - DNA, 25 bp, Artificial
  Probe
atgaaagaggtgacctttactcaga

SEQ ID NO: 127391 - DNA, 25 bp, Artificial
  Probe
catgaaagaggtgacctttactcag

SEQ ID NO: 127392 - DNA, 25 bp, Artificial
  Probe
atgctggaacaacaatgtcaaccaa

SEQ ID NO: 127393 - DNA, 25 bp, Artificial
  Probe
aatgctggaacaacaatgtcaacca

SEQ ID NO: 127394 - DNA, 25 bp, Artificial
  Probe
actttggcatccgtgtgatttacat

SEQ ID NO: 127395 - DNA, 25 bp, Artificial
  Probe
agttgattccttgctagttctctac

SEQ ID NO: 127396 - DNA, 25 bp, Artificial
  Probe
cagttgattccttgctagttctcta

SEQ ID NO: 127397 - DNA, 25 bp, Artificial
  Probe
gttgattccttgctagttctctacc

SEQ ID NO: 127398 - DNA, 25 bp, Artificial
  Probe
ttgattccttgctagttctctacca

SEQ ID NO: 127399 - DNA, 25 bp, Artificial
  Probe
gattccttgctagttctctaccaac

SEQ ID NO: 127400 - DNA, 25 bp, Artificial
  Probe
tgattccttgctagttctctaccaa

SEQ ID NO: 127401 - DNA, 25 bp, Artificial
  Probe
taattacagcttcacttgagacctt

SEQ ID NO: 127402 - DNA, 25 bp, Artificial
  Probe
aattacagcttcacttgagaccttg

SEQ ID NO: 127403 - DNA, 25 bp, Artificial
  Probe
gattcacttccagcatgtcctagaa

SEQ ID NO: 127404 - DNA, 25 bp, Artificial
  Probe
ttgattcacttccagcatgtcctag

SEQ ID NO: 127405 - DNA, 25 bp, Artificial
  Probe
attacagcttcacttgagaccttgt

SEQ ID NO: 127406 - DNA, 25 bp, Artificial
  Probe
ggaagagactaaagacctgagactc

SEQ ID NO: 127407 - DNA, 25 bp, Artificial
  Probe
tgattcacttccagcatgtcctaga

SEQ ID NO: 127408 - DNA, 25 bp, Artificial
  Probe
attccttgctagttctctaccaact

SEQ ID NO: 127409 - DNA, 25 bp, Artificial
  Probe
gagactaaagacctgagactctgtc

SEQ ID NO: 127410 - DNA, 25 bp, Artificial
  Probe
ttgctagttctctaccaactgtgaa

SEQ ID NO: 127411 - DNA, 25 bp, Artificial
  Probe
tttgattcacttccagcatgtccta

SEQ ID NO: 127412 - DNA, 25 bp, Artificial
  Probe
tttctctaagtgccagtattccctg

SEQ ID NO: 127413 - DNA, 25 bp, Artificial
  Probe
ttccttgctagttctctaccaactg

SEQ ID NO: 127414 - DNA, 25 bp, Artificial
  Probe
cttgctagttctctaccaactgtga

SEQ ID NO: 127415 - DNA, 25 bp, Artificial
  Probe
ctagttctctaccaactgtgaacat

SEQ ID NO: 127416 - DNA, 25 bp, Artificial
  Probe
tagttctctaccaactgtgaacatt

SEQ ID NO: 127417 - DNA, 25 bp, Artificial
  Probe
agttctctaccaactgtgaacattg

SEQ ID NO: 127418 - DNA, 25 bp, Artificial
  Probe
ttacagcttcacttgagaccttgtg

SEQ ID NO: 127419 - DNA, 25 bp, Artificial
  Probe
cttccctttgattcacttccagcat

SEQ ID NO: 127420 - DNA, 25 bp, Artificial
  Probe
tcttttctctaagtgccagtattcc

SEQ ID NO: 127421 - DNA, 25 bp, Artificial
  Probe
ccttcttttctctaagtgccagtat

SEQ ID NO: 127422 - DNA, 25 bp, Artificial
  Probe
ccttgctagttctctaccaactgtg

SEQ ID NO: 127423 - DNA, 25 bp, Artificial
  Probe
tccttgctagttctctaccaactgt

SEQ ID NO: 127424 - DNA, 25 bp, Artificial
  Probe
gcagttgattccttgctagttctct

SEQ ID NO: 127425 - DNA, 25 bp, Artificial
  Probe
ttttctctaagtgccagtattccct

SEQ ID NO: 127426 - DNA, 25 bp, Artificial
  Probe
cttttctctaagtgccagtattccc

SEQ ID NO: 127427 - DNA, 25 bp, Artificial
  Probe
aaaccttcttttctctaagtgccag

SEQ ID NO: 127428 - DNA, 25 bp, Artificial
  Probe
ttcttttctctaagtgccagtattc

SEQ ID NO: 127429 - DNA, 25 bp, Artificial
  Probe
cttcttttctctaagtgccagtatt

SEQ ID NO: 127430 - DNA, 25 bp, Artificial
  Probe
cgtagtcatcaaatggattcattag

SEQ ID NO: 127431 - DNA, 25 bp, Artificial
  Probe
accttcttttctctaagtgccagta

SEQ ID NO: 127432 - DNA, 25 bp, Artificial
  Probe
ctttgattcacttccagcatgtcct

SEQ ID NO: 127433 - DNA, 25 bp, Artificial
  Probe
gctagttctctaccaactgtgaaca

SEQ ID NO: 127434 - DNA, 25 bp, Artificial
  Probe
tgctagttctctaccaactgtgaac

SEQ ID NO: 127435 - DNA, 25 bp, Artificial
  Probe
ccacgtagtcatcaaatggattcat

SEQ ID NO: 127436 - DNA, 25 bp, Artificial
  Probe
cacgtagtcatcaaatggattcatt

SEQ ID NO: 127437 - DNA, 25 bp, Artificial
  Probe
ttccctttgattcacttccagcatg

SEQ ID NO: 127438 - DNA, 25 bp, Artificial
  Probe
gtaattacagcttcacttgagacct

SEQ ID NO: 127439 - DNA, 25 bp, Artificial
  Probe
atgcagttgattccttgctagttct

SEQ ID NO: 127440 - DNA, 25 bp, Artificial
  Probe
gacgccttgtatgaagtgatgctaa

SEQ ID NO: 127441 - DNA, 25 bp, Artificial
  Probe
agacgccttgtatgaagtgatgcta

SEQ ID NO: 127442 - DNA, 25 bp, Artificial
  Probe
acgccttgtatgaagtgatgctaaa

SEQ ID NO: 127443 - DNA, 25 bp, Artificial
  Probe
tactgtccagacgccttgtatgaag

SEQ ID NO: 127444 - DNA, 25 bp, Artificial
  Probe
tgtatgaagtgatgctaaaatgctg

SEQ ID NO: 127445 - DNA, 25 bp, Artificial
  Probe
ttgtatgaagtgatgctaaaatgct

SEQ ID NO: 127446 - DNA, 25 bp, Artificial
  Probe
gccttgtatgaagtgatgctaaaat

SEQ ID NO: 127447 - DNA, 25 bp, Artificial
  Probe
cttgtatgaagtgatgctaaaatgc

SEQ ID NO: 127448 - DNA, 25 bp, Artificial
  Probe
tccagacgccttgtatgaagtgatg

SEQ ID NO: 127449 - DNA, 25 bp, Artificial
  Probe
gtactgtccagacgccttgtatgaa

SEQ ID NO: 127450 - DNA, 25 bp, Artificial
  Probe
gtccagacgccttgtatgaagtgat

SEQ ID NO: 127451 - DNA, 25 bp, Artificial
  Probe
ccttgtatgaagtgatgctaaaatg

SEQ ID NO: 127452 - DNA, 25 bp, Artificial
  Probe
cgccttgtatgaagtgatgctaaaa

SEQ ID NO: 127453 - DNA, 25 bp, Artificial
  Probe
caagaaactgcatgttggatgaaaa

SEQ ID NO: 127454 - DNA, 25 bp, Artificial
  Probe
gagtactgtccagacgccttgtatg

SEQ ID NO: 127455 - DNA, 25 bp, Artificial
  Probe
gcaagaaactgcatgttggatgaaa

SEQ ID NO: 127456 - DNA, 25 bp, Artificial
  Probe
agagtactgtccagacgccttgtat

SEQ ID NO: 127457 - DNA, 25 bp, Artificial
  Probe
agtactgtccagacgccttgtatga

SEQ ID NO: 127458 - DNA, 25 bp, Artificial
  Probe
ttaacatctgtgaggaagaattggt

SEQ ID NO: 127459 - DNA, 25 bp, Artificial
  Probe
taacatctgtgaggaagaattggtc

SEQ ID NO: 127460 - DNA, 25 bp, Artificial
  Probe
atatatacacctccacaagacatgc

SEQ ID NO: 127461 - DNA, 25 bp, Artificial
  Probe
gtaccttagttctgtgttcatgtgg

SEQ ID NO: 127462 - DNA, 25 bp, Artificial
  Probe
aacatctgtgaggaagaattggtca

SEQ ID NO: 127463 - DNA, 25 bp, Artificial
  Probe
atcctgcttcagactaggtacaatt

SEQ ID NO: 127464 - DNA, 25 bp, Artificial
  Probe
aatcctgcttcagactaggtacaat

SEQ ID NO: 127465 - DNA, 25 bp, Artificial
  Probe
tatatacacctccacaagacatgcg

SEQ ID NO: 127466 - DNA, 25 bp, Artificial
  Probe
gctttaacatctgtgaggaagaatt

SEQ ID NO: 127467 - DNA, 25 bp, Artificial
  Probe
gaatcctgcttcagactaggtacaa

SEQ ID NO: 127468 - DNA, 25 bp, Artificial
  Probe
tgtctctcatttcctctgaatagtg

SEQ ID NO: 127469 - DNA, 25 bp, Artificial
  Probe
tttaacatctgtgaggaagaattgg

SEQ ID NO: 127470 - DNA, 25 bp, Artificial
  Probe
gtctctcatttcctctgaatagtga

SEQ ID NO: 127471 - DNA, 25 bp, Artificial
  Probe
cacttgtctctcatttcctctgaat

SEQ ID NO: 127472 - DNA, 25 bp, Artificial
  Probe
ttgtctctcatttcctctgaatagt

SEQ ID NO: 127473 - DNA, 25 bp, Artificial
  Probe
acttgtctctcatttcctctgaata

SEQ ID NO: 127474 - DNA, 25 bp, Artificial
  Probe
taccttagttctgtgttcatgtggc

SEQ ID NO: 127475 - DNA, 25 bp, Artificial
  Probe
cacaagacatgcgtattaaacagat

SEQ ID NO: 127476 - DNA, 25 bp, Artificial
  Probe
acaagacatgcgtattaaacagatt

SEQ ID NO: 127477 - DNA, 25 bp, Artificial
  Probe
tctctcatttcctctgaatagtgat

SEQ ID NO: 127478 - DNA, 25 bp, Artificial
  Probe
cttgtctctcatttcctctgaatag

SEQ ID NO: 127479 - DNA, 25 bp, Artificial
  Probe
tctcatttcctctgaatagtgatcg

SEQ ID NO: 127480 - DNA, 25 bp, Artificial
  Probe
tgcgtattaaacagattgtctcatt

SEQ ID NO: 127481 - DNA, 25 bp, Artificial
  Probe
ttcctctgaatagtgatcgctgtct

SEQ ID NO: 127482 - DNA, 25 bp, Artificial
  Probe
atgcgtattaaacagattgtctcat

SEQ ID NO: 127483 - DNA, 25 bp, Artificial
  Probe
ctttaacatctgtgaggaagaattg

SEQ ID NO: 127484 - DNA, 25 bp, Artificial
  Probe
gcgtattaaacagattgtctcattc

SEQ ID NO: 127485 - DNA, 25 bp, Artificial
  Probe
cacctccacaagacatgcgtattaa

SEQ ID NO: 127486 - DNA, 25 bp, Artificial
  Probe
caagacatgcgtattaaacagattg

SEQ ID NO: 127487 - DNA, 25 bp, Artificial
  Probe
catttcctctgaatagtgatcgctg

SEQ ID NO: 127488 - DNA, 25 bp, Artificial
  Probe
ctcatttcctctgaatagtgatcgc

SEQ ID NO: 127489 - DNA, 25 bp, Artificial
  Probe
ccacaagacatgcgtattaaacaga

SEQ ID NO: 127490 - DNA, 25 bp, Artificial
  Probe
tccacaagacatgcgtattaaacag

SEQ ID NO: 127491 - DNA, 25 bp, Artificial
  Probe
ctccacaagacatgcgtattaaaca

SEQ ID NO: 127492 - DNA, 25 bp, Artificial
  Probe
tcctctgaatagtgatcgctgtctc

SEQ ID NO: 127493 - DNA, 25 bp, Artificial
  Probe
catgcgtattaaacagattgtctca

SEQ ID NO: 127494 - DNA, 25 bp, Artificial
  Probe
acatgcgtattaaacagattgtctc

SEQ ID NO: 127495 - DNA, 25 bp, Artificial
  Probe
atttcctctgaatagtgatcgctgt

SEQ ID NO: 127496 - DNA, 25 bp, Artificial
  Probe
ctctcatttcctctgaatagtgatc

SEQ ID NO: 127497 - DNA, 25 bp, Artificial
  Probe
tatatatacacctccacaagacatg

SEQ ID NO: 127498 - DNA, 25 bp, Artificial
  Probe
aagacatgcgtattaaacagattgt

SEQ ID NO: 127499 - DNA, 25 bp, Artificial
  Probe
tatacacctccacaagacatgcgta

SEQ ID NO: 127500 - DNA, 25 bp, Artificial
  Probe
agctttaacatctgtgaggaagaat

SEQ ID NO: 127501 - DNA, 25 bp, Artificial
  Probe
tcatttcctctgaatagtgatcgct

SEQ ID NO: 127502 - DNA, 25 bp, Artificial
  Probe
cctccacaagacatgcgtattaaac

SEQ ID NO: 127503 - DNA, 25 bp, Artificial
  Probe
ttaagaatctaggaagctcagactg

SEQ ID NO: 127504 - DNA, 25 bp, Artificial
  Probe
taagaatctaggaagctcagactga

SEQ ID NO: 127505 - DNA, 25 bp, Artificial
  Probe
aagaatctaggaagctcagactgaa

SEQ ID NO: 127506 - DNA, 25 bp, Artificial
  Probe
attaagaatctaggaagctcagact

SEQ ID NO: 127507 - DNA, 25 bp, Artificial
  Probe
caaacgaaagagaatgagagcaaag

SEQ ID NO: 127508 - DNA, 25 bp, Artificial
  Probe
gaatctaggaagctcagactgaaga

SEQ ID NO: 127509 - DNA, 25 bp, Artificial
  Probe
agaatctaggaagctcagactgaag

SEQ ID NO: 127510 - DNA, 25 bp, Artificial
  Probe
aatctaggaagctcagactgaagag

SEQ ID NO: 127511 - DNA, 25 bp, Artificial
  Probe
acaaacgaaagagaatgagagcaaa

SEQ ID NO: 127512 - DNA, 25 bp, Artificial
  Probe
aattaagaatctaggaagctcagac

SEQ ID NO: 127513 - DNA, 25 bp, Artificial
  Probe
cacaaacgaaagagaatgagagcaa

SEQ ID NO: 127514 - DNA, 25 bp, Artificial
  Probe
atctaggaagctcagactgaagaga

SEQ ID NO: 127515 - DNA, 25 bp, Artificial
  Probe
ccacacaaacgaaagagaatgagag

SEQ ID NO: 127516 - DNA, 25 bp, Artificial
  Probe
aaacagataaacatgggattgcctt

SEQ ID NO: 127517 - DNA, 25 bp, Artificial
  Probe
aacagataaacatgggattgccttt

SEQ ID NO: 127518 - DNA, 25 bp, Artificial
  Probe
tctaggaagctcagactgaagagaa

SEQ ID NO: 127519 - DNA, 25 bp, Artificial
  Probe
aaagagaatgagagcaaagcatgat

SEQ ID NO: 127520 - DNA, 25 bp, Artificial
  Probe
aaacgaaagagaatgagagcaaagc

SEQ ID NO: 127521 - DNA, 25 bp, Artificial
  Probe
cccaaattaagaatctaggaagctc

SEQ ID NO: 127522 - DNA, 25 bp, Artificial
  Probe
aagagaatgagagcaaagcatgatg

SEQ ID NO: 127523 - DNA, 25 bp, Artificial
  Probe
gaaagagaatgagagcaaagcatga

SEQ ID NO: 127524 - DNA, 25 bp, Artificial
  Probe
cacacaaacgaaagagaatgagagc

SEQ ID NO: 127525 - DNA, 25 bp, Artificial
  Probe
ccaaattaagaatctaggaagctca

SEQ ID NO: 127526 - DNA, 25 bp, Artificial
  Probe
aaataacaaattgacacagcggctt

SEQ ID NO: 127527 - DNA, 25 bp, Artificial
  Probe
agaagggtcctgtagaaacaaagtc

SEQ ID NO: 127528 - DNA, 25 bp, Artificial
  Probe
gagaagggtcctgtagaaacaaagt

SEQ ID NO: 127529 - DNA, 25 bp, Artificial
  Probe
acacaaacgaaagagaatgagagca

SEQ ID NO: 127530 - DNA, 25 bp, Artificial
  Probe
gaagccacacaaacgaaagagaatg

SEQ ID NO: 127531 - DNA, 25 bp, Artificial
  Probe
aataacaaattgacacagcggcttc

SEQ ID NO: 127532 - DNA, 25 bp, Artificial
  Probe
acgaaagagaatgagagcaaagcat

SEQ ID NO: 127533 - DNA, 25 bp, Artificial
  Probe
aacgaaagagaatgagagcaaagca

SEQ ID NO: 127534 - DNA, 25 bp, Artificial
  Probe
ctaggaagctcagactgaagagaaa

SEQ ID NO: 127535 - DNA, 25 bp, Artificial
  Probe
aagccacacaaacgaaagagaatga

SEQ ID NO: 127536 - DNA, 25 bp, Artificial
  Probe
tgaagccacacaaacgaaagagaat

SEQ ID NO: 127537 - DNA, 25 bp, Artificial
  Probe
atgaagccacacaaacgaaagagaa

SEQ ID NO: 127538 - DNA, 25 bp, Artificial
  Probe
aatgaagccacacaaacgaaagaga

SEQ ID NO: 127539 - DNA, 25 bp, Artificial
  Probe
caatgaagccacacaaacgaaagag

SEQ ID NO: 127540 - DNA, 25 bp, Artificial
  Probe
cgaaagagaatgagagcaaagcatg

SEQ ID NO: 127541 - DNA, 25 bp, Artificial
  Probe
cactccgttccctgaaaccatttaa

SEQ ID NO: 127542 - DNA, 25 bp, Artificial
  Probe
caaattaagaatctaggaagctcag

SEQ ID NO: 127543 - DNA, 25 bp, Artificial
  Probe
gaagggtcctgtagaaacaaagtcc

SEQ ID NO: 127544 - DNA, 25 bp, Artificial
  Probe
tcctctagtgtcttttgccttttaa

SEQ ID NO: 127545 - DNA, 25 bp, Artificial
  Probe
ctcctctagtgtcttttgcctttta

SEQ ID NO: 127546 - DNA, 25 bp, Artificial
  Probe
cgagaagggtcctgtagaaacaaag

SEQ ID NO: 127547 - DNA, 25 bp, Artificial
  Probe
aaattaagaatctaggaagctcaga

SEQ ID NO: 127548 - DNA, 25 bp, Artificial
  Probe
cccagatattaattctcgatggttt

SEQ ID NO: 127549 - DNA, 25 bp, Artificial
  Probe
ccccagatattaattctcgatggtt

SEQ ID NO: 127550 - DNA, 25 bp, Artificial
  Probe
catgtcttcatcaccagcaaacacc

SEQ ID NO: 127551 - DNA, 25 bp, Artificial
  Probe
ccatgtcttcatcaccagcaaacac

SEQ ID NO: 127552 - DNA, 25 bp, Artificial
  Probe
atgtcttcatcaccagcaaacacca

SEQ ID NO: 127553 - DNA, 25 bp, Artificial
  Probe
agatattaattctcgatggttttgt

SEQ ID NO: 127554 - DNA, 25 bp, Artificial
  Probe
cagatattaattctcgatggttttg

SEQ ID NO: 127555 - DNA, 25 bp, Artificial
  Probe
ccagatattaattctcgatggtttt

SEQ ID NO: 127556 - DNA, 25 bp, Artificial
  Probe
gatattaattctcgatggttttgtt

SEQ ID NO: 127557 - DNA, 25 bp, Artificial
  Probe
tattaattctcgatggttttgtttt

SEQ ID NO: 127558 - DNA, 25 bp, Artificial
  Probe
atattaattctcgatggttttgttt

SEQ ID NO: 127559 - DNA, 25 bp, Artificial
  Probe
ataaggaatgggtccagaagtacat

SEQ ID NO: 127560 - DNA, 25 bp, Artificial
  Probe
caataaggaatgggtccagaagtac

SEQ ID NO: 127561 - DNA, 25 bp, Artificial
  Probe
aataaggaatgggtccagaagtaca

SEQ ID NO: 127562 - DNA, 25 bp, Artificial
  Probe
ccaataaggaatgggtccagaagta

SEQ ID NO: 127563 - DNA, 25 bp, Artificial
  Probe
aaggaatgggtccagaagtacatta

SEQ ID NO: 127564 - DNA, 25 bp, Artificial
  Probe
taaggaatgggtccagaagtacatt

SEQ ID NO: 127565 - DNA, 25 bp, Artificial
  Probe
atctgtgctgaccccaataaggaat

SEQ ID NO: 127566 - DNA, 25 bp, Artificial
  Probe
gatctgtgctgaccccaataaggaa

SEQ ID NO: 127567 - DNA, 25 bp, Artificial
  Probe
agagatctgtgctgaccccaataag

SEQ ID NO: 127568 - DNA, 25 bp, Artificial
  Probe
gagagatctgtgctgaccccaataa

SEQ ID NO: 127569 - DNA, 25 bp, Artificial
  Probe
gagatctgtgctgaccccaataagg

SEQ ID NO: 127570 - DNA, 25 bp, Artificial
  Probe
agagagatctgtgctgaccccaata

SEQ ID NO: 127571 - DNA, 25 bp, Artificial
  Probe
agatctgtgctgaccccaataagga

SEQ ID NO: 127572 - DNA, 25 bp, Artificial
  Probe
tagttatatcttccttcagcgttgc

SEQ ID NO: 127573 - DNA, 25 bp, Artificial
  Probe
tggtactggtgaattacatctactt

SEQ ID NO: 127574 - DNA, 25 bp, Artificial
  Probe
ttcctgatgattatctctgacacag

SEQ ID NO: 127575 - DNA, 25 bp, Artificial
  Probe
atggtactggtgaattacatctact

SEQ ID NO: 127576 - DNA, 25 bp, Artificial
  Probe
catggtactggtgaattacatctac

SEQ ID NO: 127577 - DNA, 25 bp, Artificial
  Probe
gacacattccagtctgagttctact

SEQ ID NO: 127578 - DNA, 25 bp, Artificial
  Probe
cctttcctgatgattatctctgaca

SEQ ID NO: 127579 - DNA, 25 bp, Artificial
  Probe
tttcctgatgattatctctgacaca

SEQ ID NO: 127580 - DNA, 25 bp, Artificial
  Probe
atgcctggatgagacagtaactaac

SEQ ID NO: 127581 - DNA, 25 bp, Artificial
  Probe
caagttctccatctctgctgactac

SEQ ID NO: 127582 - DNA, 25 bp, Artificial
  Probe
ctttcctgatgattatctctgacac

SEQ ID NO: 127583 - DNA, 25 bp, Artificial
  Probe
gcctttcctgatgattatctctgac

SEQ ID NO: 127584 - DNA, 25 bp, Artificial
  Probe
gttctccatctctgctgactacaac

SEQ ID NO: 127585 - DNA, 25 bp, Artificial
  Probe
aaaggatcaataaacacatcactgc

SEQ ID NO: 127586 - DNA, 25 bp, Artificial
  Probe
gcaaaggatcaataaacacatcact

SEQ ID NO: 127587 - DNA, 25 bp, Artificial
  Probe
agttctccatctctgctgactacaa

SEQ ID NO: 127588 - DNA, 25 bp, Artificial
  Probe
aagttctccatctctgctgactaca

SEQ ID NO: 127589 - DNA, 25 bp, Artificial
  Probe
catgcctggatgagacagtaactaa

SEQ ID NO: 127590 - DNA, 25 bp, Artificial
  Probe
caaaggatcaataaacacatcactg

SEQ ID NO: 127591 - DNA, 25 bp, Artificial
  Probe
tgcctggatgagacagtaactaact

SEQ ID NO: 127592 - DNA, 25 bp, Artificial
  Probe
ggacacattccagtctgagttctac

SEQ ID NO: 127593 - DNA, 25 bp, Artificial
  Probe
ggtactggtgaattacatctacttt

SEQ ID NO: 127594 - DNA, 25 bp, Artificial
  Probe
ttctccatctctgctgactacaacc

SEQ ID NO: 127595 - DNA, 25 bp, Artificial
  Probe
agttatatcttccttcagcgttgct

SEQ ID NO: 127596 - DNA, 25 bp, Artificial
  Probe
ccaagttctccatctctgctgacta

SEQ ID NO: 127597 - DNA, 25 bp, Artificial
  Probe
aactggaccctctgattatagcttt

SEQ ID NO: 127598 - DNA, 25 bp, Artificial
  Probe
aaactggaccctctgattatagctt

SEQ ID NO: 127599 - DNA, 25 bp, Artificial
  Probe
ggatcaataaacacatcactgcatt

SEQ ID NO: 127600 - DNA, 25 bp, Artificial
  Probe
actggaccctctgattatagctttc

SEQ ID NO: 127601 - DNA, 25 bp, Artificial
  Probe
aggatcaataaacacatcactgcat

SEQ ID NO: 127602 - DNA, 25 bp, Artificial
  Probe
aaggatcaataaacacatcactgca

SEQ ID NO: 127603 - DNA, 25 bp, Artificial
  Probe
cctgatgattatctctgacacagaa

SEQ ID NO: 127604 - DNA, 25 bp, Artificial
  Probe
ctccatctctgctgactacaacctg

SEQ ID NO: 127605 - DNA, 25 bp, Artificial
  Probe
tcctgatgattatctctgacacaga

SEQ ID NO: 127606 - DNA, 25 bp, Artificial
  Probe
tctccatctctgctgactacaacct

SEQ ID NO: 127607 - DNA, 25 bp, Artificial
  Probe
ctggaccctctgattatagctttcg

SEQ ID NO: 127608 - DNA, 25 bp, Artificial
  Probe
caaaactggaccctctgattatagc

SEQ ID NO: 127609 - DNA, 25 bp, Artificial
  Probe
gcaaaactggaccctctgattatag

SEQ ID NO: 127610 - DNA, 25 bp, Artificial
  Probe
gaccctctgattatagctttcgacc

SEQ ID NO: 127611 - DNA, 25 bp, Artificial
  Probe
ggaccctctgattatagctttcgac

SEQ ID NO: 127612 - DNA, 25 bp, Artificial
  Probe
acattccagtctgagttctactctg

SEQ ID NO: 127613 - DNA, 25 bp, Artificial
  Probe
cacattccagtctgagttctactct

SEQ ID NO: 127614 - DNA, 25 bp, Artificial
  Probe
catctctgctgactacaacctggag

SEQ ID NO: 127615 - DNA, 25 bp, Artificial
  Probe
acacattccagtctgagttctactc

SEQ ID NO: 127616 - DNA, 25 bp, Artificial
  Probe
tggaccctctgattatagctttcga

SEQ ID NO: 127617 - DNA, 25 bp, Artificial
  Probe
gcttaaactgcttccaaatctgatt

SEQ ID NO: 127618 - DNA, 25 bp, Artificial
  Probe
tgcttaaactgcttccaaatctgat

SEQ ID NO: 127619 - DNA, 25 bp, Artificial
  Probe
gaaattcctccctctcacctacaaa

SEQ ID NO: 127620 - DNA, 25 bp, Artificial
  Probe
gtgcttaaactgcttccaaatctga

SEQ ID NO: 127621 - DNA, 25 bp, Artificial
  Probe
tgtgcttaaactgcttccaaatctg

SEQ ID NO: 127622 - DNA, 25 bp, Artificial
  Probe
gtgtgcttaaactgcttccaaatct

SEQ ID NO: 127623 - DNA, 25 bp, Artificial
  Probe
cacacctgtttactgagtcctatca

SEQ ID NO: 127624 - DNA, 25 bp, Artificial
  Probe
aagaaagtgtgtgcttaaactgctt

SEQ ID NO: 127625 - DNA, 25 bp, Artificial
  Probe
gaaaccataccagtgtgacttcaag

SEQ ID NO: 127626 - DNA, 25 bp, Artificial
  Probe
tttgaaattcctccctctcacctac

SEQ ID NO: 127627 - DNA, 25 bp, Artificial
  Probe
tgtgtgcttaaactgcttccaaatc

SEQ ID NO: 127628 - DNA, 25 bp, Artificial
  Probe
agaaaccataccagtgtgacttcaa

SEQ ID NO: 127629 - DNA, 25 bp, Artificial
  Probe
aaccataccagtgtgacttcaagga

SEQ ID NO: 127630 - DNA, 25 bp, Artificial
  Probe
agaaagtgtgtgcttaaactgcttc

SEQ ID NO: 127631 - DNA, 25 bp, Artificial
  Probe
gtgtgtgcttaaactgcttccaaat

SEQ ID NO: 127632 - DNA, 25 bp, Artificial
  Probe
caagaaagtgtgtgcttaaactgct

SEQ ID NO: 127633 - DNA, 25 bp, Artificial
  Probe
gagaaaccataccagtgtgacttca

SEQ ID NO: 127634 - DNA, 25 bp, Artificial
  Probe
tgagaaaccataccagtgtgacttc

SEQ ID NO: 127635 - DNA, 25 bp, Artificial
  Probe
gtctctgcccactcttgattaactc

SEQ ID NO: 127636 - DNA, 25 bp, Artificial
  Probe
gcacacctgtttactgagtcctatc

SEQ ID NO: 127637 - DNA, 25 bp, Artificial
  Probe
gtgagaaaccataccagtgtgactt

SEQ ID NO: 127638 - DNA, 25 bp, Artificial
  Probe
ccataccagtgtgacttcaaggact

SEQ ID NO: 127639 - DNA, 25 bp, Artificial
  Probe
agcacacctgtttactgagtcctat

SEQ ID NO: 127640 - DNA, 25 bp, Artificial
  Probe
tgaaattcctccctctcacctacaa

SEQ ID NO: 127641 - DNA, 25 bp, Artificial
  Probe
ttgaaattcctccctctcacctaca

SEQ ID NO: 127642 - DNA, 25 bp, Artificial
  Probe
tacccaggctgcaataagagatatt

SEQ ID NO: 127643 - DNA, 25 bp, Artificial
  Probe
cttaaactgcttccaaatctgattt

SEQ ID NO: 127644 - DNA, 25 bp, Artificial
  Probe
aaaccataccagtgtgacttcaagg

SEQ ID NO: 127645 - DNA, 25 bp, Artificial
  Probe
atacaggtaaaacaagtgaaaagcc

SEQ ID NO: 127646 - DNA, 25 bp, Artificial
  Probe
gatcttcatccgacttccaagacag

SEQ ID NO: 127647 - DNA, 25 bp, Artificial
  Probe
gaaagtgtgtgcttaaactgcttcc

SEQ ID NO: 127648 - DNA, 25 bp, Artificial
  Probe
accataccagtgtgacttcaaggac

SEQ ID NO: 127649 - DNA, 25 bp, Artificial
  Probe
gtacccaggctgcaataagagatat

SEQ ID NO: 127650 - DNA, 25 bp, Artificial
  Probe
atctgattttgaaattcctccctct

SEQ ID NO: 127651 - DNA, 25 bp, Artificial
  Probe
catacaggtaaaacaagtgaaaagc

SEQ ID NO: 127652 - DNA, 25 bp, Artificial
  Probe
tctgattttgaaattcctccctctc

SEQ ID NO: 127653 - DNA, 25 bp, Artificial
  Probe
aaggacatgatggtggatcttcatc

SEQ ID NO: 127654 - DNA, 25 bp, Artificial
  Probe
ccaggactcatacaggtaaaacaag

SEQ ID NO: 127655 - DNA, 25 bp, Artificial
  Probe
acccaggctgcaataagagatattt

SEQ ID NO: 127656 - DNA, 25 bp, Artificial
  Probe
gtgtgaaaccattccagtgtaaaac

SEQ ID NO: 127657 - DNA, 25 bp, Artificial
  Probe
aatctgattttgaaattcctccctc

SEQ ID NO: 127658 - DNA, 25 bp, Artificial
  Probe
aggtgtgaaaccattccagtgtaaa

SEQ ID NO: 127659 - DNA, 25 bp, Artificial
  Probe
aaaccattccagtgtaaaacttgtc

SEQ ID NO: 127660 - DNA, 25 bp, Artificial
  Probe
gaaaccattccagtgtaaaacttgt

SEQ ID NO: 127661 - DNA, 25 bp, Artificial
  Probe
tgaaaccattccagtgtaaaacttg

SEQ ID NO: 127662 - DNA, 25 bp, Artificial
  Probe
ataagaatagcaagaaccagaaccg

SEQ ID NO: 127663 - DNA, 25 bp, Artificial
  Probe
aataagaatagcaagaaccagaacc

SEQ ID NO: 127664 - DNA, 25 bp, Artificial
  Probe
gatgtcctcttctggtatgtctgaa

SEQ ID NO: 127665 - DNA, 25 bp, Artificial
  Probe
caataagaatagcaagaaccagaac

SEQ ID NO: 127666 - DNA, 25 bp, Artificial
  Probe
tcaataagaatagcaagaaccagaa

SEQ ID NO: 127667 - DNA, 25 bp, Artificial
  Probe
atataatcttgtcttgccaacttga

SEQ ID NO: 127668 - DNA, 25 bp, Artificial
  Probe
aattgtactgaactagcattctcgg

SEQ ID NO: 127669 - DNA, 25 bp, Artificial
  Probe
ttcaataagaatagcaagaaccaga

SEQ ID NO: 127670 - DNA, 25 bp, Artificial
  Probe
aggacttcattaagatacacgccat

SEQ ID NO: 127671 - DNA, 25 bp, Artificial
  Probe
tataatcttgtcttgccaacttgac

SEQ ID NO: 127672 - DNA, 25 bp, Artificial
  Probe
tataaccatcaatgctgctacagtg

SEQ ID NO: 127673 - DNA, 25 bp, Artificial
  Probe
atggagtcattctctgaactgtgaa

SEQ ID NO: 127674 - DNA, 25 bp, Artificial
  Probe
agatgtcctcttctggtatgtctga

SEQ ID NO: 127675 - DNA, 25 bp, Artificial
  Probe
gaggacttcattaagatacacgcca

SEQ ID NO: 127676 - DNA, 25 bp, Artificial
  Probe
ccacatatataatcttgtcttgcca

SEQ ID NO: 127677 - DNA, 25 bp, Artificial
  Probe
ggacttcattaagatacacgccatg

SEQ ID NO: 127678 - DNA, 25 bp, Artificial
  Probe
ttataaccatcaatgctgctacagt

SEQ ID NO: 127679 - DNA, 25 bp, Artificial
  Probe
tttccttgattgatgtttgatgtgg

SEQ ID NO: 127680 - DNA, 25 bp, Artificial
  Probe
gaaagaaaggaggacaaacataagc

SEQ ID NO: 127681 - DNA, 25 bp, Artificial
  Probe
tggagtcattctctgaactgtgaac

SEQ ID NO: 127682 - DNA, 25 bp, Artificial
  Probe
gcatttccttgattgatgtttgatg

SEQ ID NO: 127683 - DNA, 25 bp, Artificial
  Probe
agcatttccttgattgatgtttgat

SEQ ID NO: 127684 - DNA, 25 bp, Artificial
  Probe
gagcatttccttgattgatgtttga

SEQ ID NO: 127685 - DNA, 25 bp, Artificial
  Probe
gtcccactacttctattaaaccgaa

SEQ ID NO: 127686 - DNA, 25 bp, Artificial
  Probe
agaaagaaaggaggacaaacataag

SEQ ID NO: 127687 - DNA, 25 bp, Artificial
  Probe
ttctattaaaccgaagagttgagca

SEQ ID NO: 127688 - DNA, 25 bp, Artificial
  Probe
caaggaattagggaggacttcatta

SEQ ID NO: 127689 - DNA, 25 bp, Artificial
  Probe
ggaattagggaggacttcattaaga

SEQ ID NO: 127690 - DNA, 25 bp, Artificial
  Probe
aggaattagggaggacttcattaag

SEQ ID NO: 127691 - DNA, 25 bp, Artificial
  Probe
ataaccatcaatgctgctacagtga

SEQ ID NO: 127692 - DNA, 25 bp, Artificial
  Probe
tattaaaccgaagagttgagcagag

SEQ ID NO: 127693 - DNA, 25 bp, Artificial
  Probe
ctattaaaccgaagagttgagcaga

SEQ ID NO: 127694 - DNA, 25 bp, Artificial
  Probe
tctattaaaccgaagagttgagcag

SEQ ID NO: 127695 - DNA, 25 bp, Artificial
  Probe
tagggaggacttcattaagatacac

SEQ ID NO: 127696 - DNA, 25 bp, Artificial
  Probe
aaagaaaggaggacaaacataagcc

SEQ ID NO: 127697 - DNA, 25 bp, Artificial
  Probe
atttccttgattgatgtttgatgtg

SEQ ID NO: 127698 - DNA, 25 bp, Artificial
  Probe
ctccacggtgtaacctgtaagataa

SEQ ID NO: 127699 - DNA, 25 bp, Artificial
  Probe
aagaaagaaaggaggacaaacataa

SEQ ID NO: 127700 - DNA, 25 bp, Artificial
  Probe
aaagaaagaaaggaggacaaacata

SEQ ID NO: 127701 - DNA, 25 bp, Artificial
  Probe
atcatggtcatggagtcattctctg

SEQ ID NO: 127702 - DNA, 25 bp, Artificial
  Probe
catcatggtcatggagtcattctct

SEQ ID NO: 127703 - DNA, 25 bp, Artificial
  Probe
ggaggacttcattaagatacacgcc

SEQ ID NO: 127704 - DNA, 25 bp, Artificial
  Probe
aaggaattagggaggacttcattaa

SEQ ID NO: 127705 - DNA, 25 bp, Artificial
  Probe
catggagtcattctctgaactgtga

SEQ ID NO: 127706 - DNA, 25 bp, Artificial
  Probe
tcatggagtcattctctgaactgtg

SEQ ID NO: 127707 - DNA, 25 bp, Artificial
  Probe
gctggcttatatattgtcctctgta

SEQ ID NO: 127708 - DNA, 25 bp, Artificial
  Probe
cacaactactacatgacttcagaga

SEQ ID NO: 127709 - DNA, 25 bp, Artificial
  Probe
ctgctggcttatatattgtcctctg

SEQ ID NO: 127710 - DNA, 25 bp, Artificial
  Probe
ccacaactactacatgacttcagag

SEQ ID NO: 127711 - DNA, 25 bp, Artificial
  Probe
atcagactgtaacaccagagatagt

SEQ ID NO: 127712 - DNA, 25 bp, Artificial
  Probe
acaactactacatgacttcagagat

SEQ ID NO: 127713 - DNA, 25 bp, Artificial
  Probe
tgctggcttatatattgtcctctgt

SEQ ID NO: 127714 - DNA, 25 bp, Artificial
  Probe
ttcctgctggcttatatattgtcct

SEQ ID NO: 127715 - DNA, 25 bp, Artificial
  Probe
cactaggaagccacaactactacat

SEQ ID NO: 127716 - DNA, 25 bp, Artificial
  Probe
ctaggaagccacaactactacatga

SEQ ID NO: 127717 - DNA, 25 bp, Artificial
  Probe
cctgctggcttatatattgtcctct

SEQ ID NO: 127718 - DNA, 25 bp, Artificial
  Probe
tcctgctggcttatatattgtcctc

SEQ ID NO: 127719 - DNA, 25 bp, Artificial
  Probe
gatcagactgtaacaccagagatag

SEQ ID NO: 127720 - DNA, 25 bp, Artificial
  Probe
agatcagactgtaacaccagagata

SEQ ID NO: 127721 - DNA, 25 bp, Artificial
  Probe
taggaagccacaactactacatgac

SEQ ID NO: 127722 - DNA, 25 bp, Artificial
  Probe
actaggaagccacaactactacatg

SEQ ID NO: 127723 - DNA, 25 bp, Artificial
  Probe
aagatcagactgtaacaccagagat

SEQ ID NO: 127724 - DNA, 25 bp, Artificial
  Probe
caactactacatgacttcagagatt

SEQ ID NO: 127725 - DNA, 25 bp, Artificial
  Probe
aagccacaactactacatgacttca

SEQ ID NO: 127726 - DNA, 25 bp, Artificial
  Probe
gccacaactactacatgacttcaga

SEQ ID NO: 127727 - DNA, 25 bp, Artificial
  Probe
agccacaactactacatgacttcag

SEQ ID NO: 127728 - DNA, 25 bp, Artificial
  Probe
ctggcttatatattgtcctctgtat

SEQ ID NO: 127729 - DNA, 25 bp, Artificial
  Probe
agaccttcagagaaattcgtgtaaa

SEQ ID NO: 127730 - DNA, 25 bp, Artificial
  Probe
cagaccttcagagaaattcgtgtaa

SEQ ID NO: 127731 - DNA, 25 bp, Artificial
  Probe
ggaagccacaactactacatgactt

SEQ ID NO: 127732 - DNA, 25 bp, Artificial
  Probe
gtttcctgctggcttatatattgtc

SEQ ID NO: 127733 - DNA, 25 bp, Artificial
  Probe
agtttcctgctggcttatatattgt

SEQ ID NO: 127734 - DNA, 25 bp, Artificial
  Probe
gagtttcctgctggcttatatattg

SEQ ID NO: 127735 - DNA, 25 bp, Artificial
  Probe
agagtttcctgctggcttatatatt

SEQ ID NO: 127736 - DNA, 25 bp, Artificial
  Probe
tttcctgctggcttatatattgtcc

SEQ ID NO: 127737 - DNA, 25 bp, Artificial
  Probe
tggcttatatattgtcctctgtatt

SEQ ID NO: 127738 - DNA, 25 bp, Artificial
  Probe
taacaccagagatagtcccagtttc

SEQ ID NO: 127739 - DNA, 25 bp, Artificial
  Probe
gtaacaccagagatagtcccagttt

SEQ ID NO: 127740 - DNA, 25 bp, Artificial
  Probe
ggcttatatattgtcctctgtattg

SEQ ID NO: 127741 - DNA, 25 bp, Artificial
  Probe
aggaagccacaactactacatgact

SEQ ID NO: 127742 - DNA, 25 bp, Artificial
  Probe
ccactaggaagccacaactactaca

SEQ ID NO: 127743 - DNA, 25 bp, Artificial
  Probe
acatgacttcagagatttctcacaa

SEQ ID NO: 127744 - DNA, 25 bp, Artificial
  Probe
tgacttcagagatttctcacaagag

SEQ ID NO: 127745 - DNA, 25 bp, Artificial
  Probe
atgacttcagagatttctcacaaga

SEQ ID NO: 127746 - DNA, 25 bp, Artificial
  Probe
catgacttcagagatttctcacaag

SEQ ID NO: 127747 - DNA, 25 bp, Artificial
  Probe
taaagatcagactgtaacaccagag

SEQ ID NO: 127748 - DNA, 25 bp, Artificial
  Probe
gtaaagatcagactgtaacaccaga

SEQ ID NO: 127749 - DNA, 25 bp, Artificial
  Probe
tacatgacttcagagatttctcaca

SEQ ID NO: 127750 - DNA, 25 bp, Artificial
  Probe
cagagtttcctgctggcttatatat

SEQ ID NO: 127751 - DNA, 25 bp, Artificial
  Probe
actacatgacttcagagatttctca

SEQ ID NO: 127752 - DNA, 25 bp, Artificial
  Probe
agacagacttctacttcatctccta

SEQ ID NO: 127753 - DNA, 25 bp, Artificial
  Probe
aagacagacttctacttcatctcct

SEQ ID NO: 127754 - DNA, 25 bp, Artificial
  Probe
gacagacttctacttcatctcctag

SEQ ID NO: 127755 - DNA, 25 bp, Artificial
  Probe
acagacttctacttcatctcctagt

SEQ ID NO: 127756 - DNA, 25 bp, Artificial
  Probe
gactcaatataaagcaagacctgga

SEQ ID NO: 127757 - DNA, 25 bp, Artificial
  Probe
actcaatataaagcaagacctggac

SEQ ID NO: 127758 - DNA, 25 bp, Artificial
  Probe
tatatttcttccctcactctctgtc

SEQ ID NO: 127759 - DNA, 25 bp, Artificial
  Probe
aaaggactcaatataaagcaagacc

SEQ ID NO: 127760 - DNA, 25 bp, Artificial
  Probe
ctcaatataaagcaagacctggacc

SEQ ID NO: 127761 - DNA, 25 bp, Artificial
  Probe
ggactcaatataaagcaagacctgg

SEQ ID NO: 127762 - DNA, 25 bp, Artificial
  Probe
atatttcttccctcactctctgtcc

SEQ ID NO: 127763 - DNA, 25 bp, Artificial
  Probe
cagacttctacttcatctcctagta

SEQ ID NO: 127764 - DNA, 25 bp, Artificial
  Probe
aatataaagcaagacctggaccaac

SEQ ID NO: 127765 - DNA, 25 bp, Artificial
  Probe
caatataaagcaagacctggaccaa

SEQ ID NO: 127766 - DNA, 25 bp, Artificial
  Probe
acaaaggactcaatataaagcaaga

SEQ ID NO: 127767 - DNA, 25 bp, Artificial
  Probe
cgtggcttatatatttcttccctca

SEQ ID NO: 127768 - DNA, 25 bp, Artificial
  Probe
tcgtggcttatatatttcttccctc

SEQ ID NO: 127769 - DNA, 25 bp, Artificial
  Probe
ctcgtggcttatatatttcttccct

SEQ ID NO: 127770 - DNA, 25 bp, Artificial
  Probe
tccctcgtggcttatatatttcttc

SEQ ID NO: 127771 - DNA, 25 bp, Artificial
  Probe
ctccctcgtggcttatatatttctt

SEQ ID NO: 127772 - DNA, 25 bp, Artificial
  Probe
ttctccctcgtggcttatatatttc

SEQ ID NO: 127773 - DNA, 25 bp, Artificial
  Probe
cttctccctcgtggcttatatattt

SEQ ID NO: 127774 - DNA, 25 bp, Artificial
  Probe
tctccctcgtggcttatatatttct

SEQ ID NO: 127775 - DNA, 25 bp, Artificial
  Probe
tcttctccctcgtggcttatatatt

SEQ ID NO: 127776 - DNA, 25 bp, Artificial
  Probe
ttcttctccctcgtggcttatatat

SEQ ID NO: 127777 - DNA, 25 bp, Artificial
  Probe
caaaggactcaatataaagcaagac

SEQ ID NO: 127778 - DNA, 25 bp, Artificial
  Probe
cctcgtggcttatatatttcttccc

SEQ ID NO: 127779 - DNA, 25 bp, Artificial
  Probe
ccctcgtggcttatatatttcttcc

SEQ ID NO: 127780 - DNA, 25 bp, Artificial
  Probe
cttcttctccctcgtggcttatata

SEQ ID NO: 127781 - DNA, 25 bp, Artificial
  Probe
tggcttatatatttcttccctcact

SEQ ID NO: 127782 - DNA, 25 bp, Artificial
  Probe
catctttgtaagttgcttggtaggg

SEQ ID NO: 127783 - DNA, 25 bp, Artificial
  Probe
tcaatataaagcaagacctggacca

SEQ ID NO: 127784 - DNA, 25 bp, Artificial
  Probe
tatttcttccctcactctctgtcct

SEQ ID NO: 127785 - DNA, 25 bp, Artificial
  Probe
atatatttcttccctcactctctgt

SEQ ID NO: 127786 - DNA, 25 bp, Artificial
  Probe
ggcttatatatttcttccctcactc

SEQ ID NO: 127787 - DNA, 25 bp, Artificial
  Probe
aggactcaatataaagcaagacctg

SEQ ID NO: 127788 - DNA, 25 bp, Artificial
  Probe
aaggactcaatataaagcaagacct

SEQ ID NO: 127789 - DNA, 25 bp, Artificial
  Probe
gcctgctacaaaggactcaatataa

SEQ ID NO: 127790 - DNA, 25 bp, Artificial
  Probe
gaagacagacttctacttcatctcc

SEQ ID NO: 127791 - DNA, 25 bp, Artificial
  Probe
ctgctacaaaggactcaatataaag

SEQ ID NO: 127792 - DNA, 25 bp, Artificial
  Probe
cctgctacaaaggactcaatataaa

SEQ ID NO: 127793 - DNA, 25 bp, Artificial
  Probe
agcctgctacaaaggactcaatata

SEQ ID NO: 127794 - DNA, 25 bp, Artificial
  Probe
gtggcttatatatttcttccctcac

SEQ ID NO: 127795 - DNA, 25 bp, Artificial
  Probe
atttcttccctcactctctgtcctt

SEQ ID NO: 127796 - DNA, 25 bp, Artificial
  Probe
gcttatatatttcttccctcactct

SEQ ID NO: 127797 - DNA, 25 bp, Artificial
  Probe
ctactctgagtctctgatgtcacca

SEQ ID NO: 127798 - DNA, 25 bp, Artificial
  Probe
tactctgagtctctgatgtcaccag

SEQ ID NO: 127799 - DNA, 25 bp, Artificial
  Probe
cctactctgagtctctgatgtcacc

SEQ ID NO: 127800 - DNA, 25 bp, Artificial
  Probe
gcctactctgagtctctgatgtcac

SEQ ID NO: 127801 - DNA, 25 bp, Artificial
  Probe
ctgctgtcacctgaacactgaattg

SEQ ID NO: 127802 - DNA, 25 bp, Artificial
  Probe
tctgctgtcacctgaacactgaatt

SEQ ID NO: 127803 - DNA, 25 bp, Artificial
  Probe
catgactgaagcaataaaccttttc

SEQ ID NO: 127804 - DNA, 25 bp, Artificial
  Probe
tctacccacctaatgaaggcttctg

SEQ ID NO: 127805 - DNA, 25 bp, Artificial
  Probe
gtctacccacctaatgaaggcttct

SEQ ID NO: 127806 - DNA, 25 bp, Artificial
  Probe
catgaactgttccgtgaagatgcag

SEQ ID NO: 127807 - DNA, 25 bp, Artificial
  Probe
ctgaaagccttagttcccacagagg

SEQ ID NO: 127808 - DNA, 25 bp, Artificial
  Probe
cgtctacccacctaatgaaggcttc

SEQ ID NO: 127809 - DNA, 25 bp, Artificial
  Probe
gaaagccttagttcccacagaggac

SEQ ID NO: 127810 - DNA, 25 bp, Artificial
  Probe
tcatgactgaagcaataaacctttt

SEQ ID NO: 127811 - DNA, 25 bp, Artificial
  Probe
tatcgtcttttgaaagaaagtcatg

SEQ ID NO: 127812 - DNA, 25 bp, Artificial
  Probe
caaacagggaagatcgagccagtag

SEQ ID NO: 127813 - DNA, 25 bp, Artificial
  Probe
ggcctactctgagtctctgatgtca

SEQ ID NO: 127814 - DNA, 25 bp, Artificial
  Probe
ctacccacctaatgaaggcttctgc

SEQ ID NO: 127815 - DNA, 25 bp, Artificial
  Probe
tgaaagccttagttcccacagagga

SEQ ID NO: 127816 - DNA, 25 bp, Artificial
  Probe
tttatcgtcttttgaaagaaagtca

SEQ ID NO: 127817 - DNA, 25 bp, Artificial
  Probe
ttatcgtcttttgaaagaaagtcat

SEQ ID NO: 127818 - DNA, 25 bp, Artificial
  Probe
atcgtcttttgaaagaaagtcatga

SEQ ID NO: 127819 - DNA, 25 bp, Artificial
  Probe
ttttatcgtcttttgaaagaaagtc

SEQ ID NO: 127820 - DNA, 25 bp, Artificial
  Probe
attttatcgtcttttgaaagaaagt

SEQ ID NO: 127821 - DNA, 25 bp, Artificial
  Probe
agaaattttatcgtcttttgaaaga

SEQ ID NO: 127822 - DNA, 25 bp, Artificial
  Probe
aattttatcgtcttttgaaagaaag

SEQ ID NO: 127823 - DNA, 25 bp, Artificial
  Probe
cccaaacctgatagcttggtcagac

SEQ ID NO: 127824 - DNA, 25 bp, Artificial
  Probe
ccaaacctgatagcttggtcagacc

SEQ ID NO: 127825 - DNA, 25 bp, Artificial
  Probe
gaaattttatcgtcttttgaaagaa

SEQ ID NO: 127826 - DNA, 25 bp, Artificial
  Probe
aaacctgatagcttggtcagaccag

SEQ ID NO: 127827 - DNA, 25 bp, Artificial
  Probe
caaacctgatagcttggtcagacca

SEQ ID NO: 127828 - DNA, 25 bp, Artificial
  Probe
gaagtggatgtagtaggagttgtag

SEQ ID NO: 127829 - DNA, 25 bp, Artificial
  Probe
agtggatgtagtaggagttgtagtt

SEQ ID NO: 127830 - DNA, 25 bp, Artificial
  Probe
aagtggatgtagtaggagttgtagt

SEQ ID NO: 127831 - DNA, 25 bp, Artificial
  Probe
tgaagtggatgtagtaggagttgta

SEQ ID NO: 127832 - DNA, 25 bp, Artificial
  Probe
ttctgaagtggatgtagtaggagtt

SEQ ID NO: 127833 - DNA, 25 bp, Artificial
  Probe
ttgttctgaagtggatgtagtagga

SEQ ID NO: 127834 - DNA, 25 bp, Artificial
  Probe
cttgttctgaagtggatgtagtagg

SEQ ID NO: 127835 - DNA, 25 bp, Artificial
  Probe
ccttgttctgaagtggatgtagtag

SEQ ID NO: 127836 - DNA, 25 bp, Artificial
  Probe
tctgaagtggatgtagtaggagttg

SEQ ID NO: 127837 - DNA, 25 bp, Artificial
  Probe
gttctgaagtggatgtagtaggagt

SEQ ID NO: 127838 - DNA, 25 bp, Artificial
  Probe
tgttctgaagtggatgtagtaggag

SEQ ID NO: 127839 - DNA, 25 bp, Artificial
  Probe
acaggaatacacttattgacgcatt

SEQ ID NO: 127840 - DNA, 25 bp, Artificial
  Probe
accttgttctgaagtggatgtagta

SEQ ID NO: 127841 - DNA, 25 bp, Artificial
  Probe
ctgaagtggatgtagtaggagttgt

SEQ ID NO: 127842 - DNA, 25 bp, Artificial
  Probe
gacagttccagactactcataagtg

SEQ ID NO: 127843 - DNA, 25 bp, Artificial
  Probe
agacagttccagactactcataagt

SEQ ID NO: 127844 - DNA, 25 bp, Artificial
  Probe
gacaggaatacacttattgacgcat

SEQ ID NO: 127845 - DNA, 25 bp, Artificial
  Probe
ccagacaggaatacacttattgacg

SEQ ID NO: 127846 - DNA, 25 bp, Artificial
  Probe
gagacagttccagactactcataag

SEQ ID NO: 127847 - DNA, 25 bp, Artificial
  Probe
cagacaggaatacacttattgacgc

SEQ ID NO: 127848 - DNA, 25 bp, Artificial
  Probe
acagttccagactactcataagtgt

SEQ ID NO: 127849 - DNA, 25 bp, Artificial
  Probe
cagttccagactactcataagtgtc

SEQ ID NO: 127850 - DNA, 25 bp, Artificial
  Probe
agacaggaatacacttattgacgca

SEQ ID NO: 127851 - DNA, 25 bp, Artificial
  Probe
agttccagactactcataagtgtcc

SEQ ID NO: 127852 - DNA, 25 bp, Artificial
  Probe
tccagacaggaatacacttattgac

SEQ ID NO: 127853 - DNA, 25 bp, Artificial
  Probe
gtccagacaggaatacacttattga

SEQ ID NO: 127854 - DNA, 25 bp, Artificial
  Probe
ttggaatagaccttaatgaagacat

SEQ ID NO: 127855 - DNA, 25 bp, Artificial
  Probe
atgctattgagaacatcgacacatt

SEQ ID NO: 127856 - DNA, 25 bp, Artificial
  Probe
gtggatgtagtaggagttgtagttt

SEQ ID NO: 127857 - DNA, 25 bp, Artificial
  Probe
tggatgtagtaggagttgtagtttc

SEQ ID NO: 127858 - DNA, 25 bp, Artificial
  Probe
acttattgacgcatttgtttactct

SEQ ID NO: 127859 - DNA, 25 bp, Artificial
  Probe
cacttattgacgcatttgtttactc

SEQ ID NO: 127860 - DNA, 25 bp, Artificial
  Probe
tcagacgagtgccttcatttattag

SEQ ID NO: 127861 - DNA, 25 bp, Artificial
  Probe
ggatgtagtaggagttgtagtttct

SEQ ID NO: 127862 - DNA, 25 bp, Artificial
  Probe
cacaaagagaactcagtatcaacag

SEQ ID NO: 127863 - DNA, 25 bp, Artificial
  Probe
agacgagtgccttcatttattagtg

SEQ ID NO: 127864 - DNA, 25 bp, Artificial
  Probe
cagacgagtgccttcatttattagt

SEQ ID NO: 127865 - DNA, 25 bp, Artificial
  Probe
agtaggagttgtagtttctgttgta

SEQ ID NO: 127866 - DNA, 25 bp, Artificial
  Probe
tagtaggagttgtagtttctgttgt

SEQ ID NO: 127867 - DNA, 25 bp, Artificial
  Probe
tgtagtaggagttgtagtttctgtt

SEQ ID NO: 127868 - DNA, 25 bp, Artificial
  Probe
gaccttaatgaagacataaagccac

SEQ ID NO: 127869 - DNA, 25 bp, Artificial
  Probe
agaccttaatgaagacataaagcca

SEQ ID NO: 127870 - DNA, 25 bp, Artificial
  Probe
ccacaaagagaactcagtatcaaca

SEQ ID NO: 127871 - DNA, 25 bp, Artificial
  Probe
gtagtaggagttgtagtttctgttg

SEQ ID NO: 127872 - DNA, 25 bp, Artificial
  Probe
atgtagtaggagttgtagtttctgt

SEQ ID NO: 127873 - DNA, 25 bp, Artificial
  Probe
gatactgtgttccaaggatatgtca

SEQ ID NO: 127874 - DNA, 25 bp, Artificial
  Probe
agatactgtgttccaaggatatgtc

SEQ ID NO: 127875 - DNA, 25 bp, Artificial
  Probe
gagatactgtgttccaaggatatgt

SEQ ID NO: 127876 - DNA, 25 bp, Artificial
  Probe
agagatactgtgttccaaggatatg

SEQ ID NO: 127877 - DNA, 25 bp, Artificial
  Probe
tactgtgttccaaggatatgtcatc

SEQ ID NO: 127878 - DNA, 25 bp, Artificial
  Probe
atactgtgttccaaggatatgtcat

SEQ ID NO: 127879 - DNA, 25 bp, Artificial
  Probe
cagagatactgtgttccaaggatat

SEQ ID NO: 127880 - DNA, 25 bp, Artificial
  Probe
ccagagatactgtgttccaaggata

SEQ ID NO: 127881 - DNA, 25 bp, Artificial
  Probe
atgaagcaaccagagatactgtgtt

SEQ ID NO: 127882 - DNA, 25 bp, Artificial
  Probe
ccaagcatatagagttcctatcata

SEQ ID NO: 127883 - DNA, 25 bp, Artificial
  Probe
aacccaagcatatagagttcctatc

SEQ ID NO: 127884 - DNA, 25 bp, Artificial
  Probe
cccaagcatatagagttcctatcat

SEQ ID NO: 127885 - DNA, 25 bp, Artificial
  Probe
acccaagcatatagagttcctatca

SEQ ID NO: 127886 - DNA, 25 bp, Artificial
  Probe
tgaagcaaccagagatactgtgttc

SEQ ID NO: 127887 - DNA, 25 bp, Artificial
  Probe
aaacccaagcatatagagttcctat

SEQ ID NO: 127888 - DNA, 25 bp, Artificial
  Probe
accagagatactgtgttccaaggat

SEQ ID NO: 127889 - DNA, 25 bp, Artificial
  Probe
caaccagagatactgtgttccaagg

SEQ ID NO: 127890 - DNA, 25 bp, Artificial
  Probe
attgtttctgctcctgtctgctatt

SEQ ID NO: 127891 - DNA, 25 bp, Artificial
  Probe
ccaatttaaactctgtgtcattccc

SEQ ID NO: 127892 - DNA, 25 bp, Artificial
  Probe
cccaatttaaactctgtgtcattcc

SEQ ID NO: 127893 - DNA, 25 bp, Artificial
  Probe
aaccagagatactgtgttccaagga

SEQ ID NO: 127894 - DNA, 25 bp, Artificial
  Probe
aattgtttctgctcctgtctgctat

SEQ ID NO: 127895 - DNA, 25 bp, Artificial
  Probe
catgaagcaaccagagatactgtgt

SEQ ID NO: 127896 - DNA, 25 bp, Artificial
  Probe
tgttatcccttaaactatgactgtt

SEQ ID NO: 127897 - DNA, 25 bp, Artificial
  Probe
ttgttatcccttaaactatgactgt

SEQ ID NO: 127898 - DNA, 25 bp, Artificial
  Probe
gaagcaaccagagatactgtgttcc

SEQ ID NO: 127899 - DNA, 25 bp, Artificial
  Probe
ccattgttatcccttaaactatgac

SEQ ID NO: 127900 - DNA, 25 bp, Artificial
  Probe
agtctctggttgaccctaaggatat

SEQ ID NO: 127901 - DNA, 25 bp, Artificial
  Probe
gcaaccagagatactgtgttccaag

SEQ ID NO: 127902 - DNA, 25 bp, Artificial
  Probe
ttgtttctgctcctgtctgctattc

SEQ ID NO: 127903 - DNA, 25 bp, Artificial
  Probe
aagtctctggttgaccctaaggata

SEQ ID NO: 127904 - DNA, 25 bp, Artificial
  Probe
gaattgtttctgctcctgtctgcta

SEQ ID NO: 127905 - DNA, 25 bp, Artificial
  Probe
ccatgaagcaaccagagatactgtg

SEQ ID NO: 127906 - DNA, 25 bp, Artificial
  Probe
agcaaccagagatactgtgttccaa

SEQ ID NO: 127907 - DNA, 25 bp, Artificial
  Probe
aagcaaccagagatactgtgttcca

SEQ ID NO: 127908 - DNA, 25 bp, Artificial
  Probe
gtttctgctcctgtctgctattctg

SEQ ID NO: 127909 - DNA, 25 bp, Artificial
  Probe
atgagacctgaaaacttcctgatat

SEQ ID NO: 127910 - DNA, 25 bp, Artificial
  Probe
aaaacccaagcatatagagttccta

SEQ ID NO: 127911 - DNA, 25 bp, Artificial
  Probe
attgttatcccttaaactatgactg

SEQ ID NO: 127912 - DNA, 25 bp, Artificial
  Probe
cattgttatcccttaaactatgact

SEQ ID NO: 127913 - DNA, 25 bp, Artificial
  Probe
caagcatatagagttcctatcataa

SEQ ID NO: 127914 - DNA, 25 bp, Artificial
  Probe
tgtttctgctcctgtctgctattct

SEQ ID NO: 127915 - DNA, 25 bp, Artificial
  Probe
actgtgttccaaggatatgtcatcc

SEQ ID NO: 127916 - DNA, 25 bp, Artificial
  Probe
gtctctggttgaccctaaggatatc

SEQ ID NO: 127917 - DNA, 25 bp, Artificial
  Probe
gaagtctctggttgaccctaaggat

SEQ ID NO: 127918 - DNA, 25 bp, Artificial
  Probe
tcctgtaccatacttagatgaacct

SEQ ID NO: 127919 - DNA, 25 bp, Artificial
  Probe
gtcctgtaccatacttagatgaacc

SEQ ID NO: 127920 - DNA, 25 bp, Artificial
  Probe
cctggaagatgctcatgtaactaat

SEQ ID NO: 127921 - DNA, 25 bp, Artificial
  Probe
ctggaagatgctcatgtaactaatt

SEQ ID NO: 127922 - DNA, 25 bp, Artificial
  Probe
cctgtaccatacttagatgaaccta

SEQ ID NO: 127923 - DNA, 25 bp, Artificial
  Probe
agtcctgtaccatacttagatgaac

SEQ ID NO: 127924 - DNA, 25 bp, Artificial
  Probe
acctggaagatgctcatgtaactaa

SEQ ID NO: 127925 - DNA, 25 bp, Artificial
  Probe
cgagtctcctgtgattaccaatgtt

SEQ ID NO: 127926 - DNA, 25 bp, Artificial
  Probe
ctagaacatagtaggtgctcaataa

SEQ ID NO: 127927 - DNA, 25 bp, Artificial
  Probe
attatgaaaccgaatgaaacctgtc

SEQ ID NO: 127928 - DNA, 25 bp, Artificial
  Probe
gattatgaaaccgaatgaaacctgt

SEQ ID NO: 127929 - DNA, 25 bp, Artificial
  Probe
tgattatgaaaccgaatgaaacctg

SEQ ID NO: 127930 - DNA, 25 bp, Artificial
  Probe
ctgattatgaaaccgaatgaaacct

SEQ ID NO: 127931 - DNA, 25 bp, Artificial
  Probe
agtctcctgtgattaccaatgttta

SEQ ID NO: 127932 - DNA, 25 bp, Artificial
  Probe
gctgattatgaaaccgaatgaaacc

SEQ ID NO: 127933 - DNA, 25 bp, Artificial
  Probe
tggaagatgctcatgtaactaatta

SEQ ID NO: 127934 - DNA, 25 bp, Artificial
  Probe
gagtctcctgtgattaccaatgttt

SEQ ID NO: 127935 - DNA, 25 bp, Artificial
  Probe
gcaaataaacataccaccctacata

SEQ ID NO: 127936 - DNA, 25 bp, Artificial
  Probe
ggcaaataaacataccaccctacat

SEQ ID NO: 127937 - DNA, 25 bp, Artificial
  Probe
gacatacaggactagagccaagttc

SEQ ID NO: 127938 - DNA, 25 bp, Artificial
  Probe
gggaccaggtagagttaagtttaat

SEQ ID NO: 127939 - DNA, 25 bp, Artificial
  Probe
gtctcctgtgattaccaatgtttat

SEQ ID NO: 127940 - DNA, 25 bp, Artificial
  Probe
tactaggcaaataaacataccaccc

SEQ ID NO: 127941 - DNA, 25 bp, Artificial
  Probe
agggaccaggtagagttaagtttaa

SEQ ID NO: 127942 - DNA, 25 bp, Artificial
  Probe
aaataaacataccaccctacatagc

SEQ ID NO: 127943 - DNA, 25 bp, Artificial
  Probe
ggaccaggtagagttaagtttaatg

SEQ ID NO: 127944 - DNA, 25 bp, Artificial
  Probe
cagggaccaggtagagttaagttta

SEQ ID NO: 127945 - DNA, 25 bp, Artificial
  Probe
ttactaggcaaataaacataccacc

SEQ ID NO: 127946 - DNA, 25 bp, Artificial
  Probe
gctttatcagactactcatctttgt

SEQ ID NO: 127947 - DNA, 25 bp, Artificial
  Probe
aggtagagttaagtttaatgtggac

SEQ ID NO: 127948 - DNA, 25 bp, Artificial
  Probe
caggtagagttaagtttaatgtgga

SEQ ID NO: 127949 - DNA, 25 bp, Artificial
  Probe
accaggtagagttaagtttaatgtg

SEQ ID NO: 127950 - DNA, 25 bp, Artificial
  Probe
atcttcctaactgttcacaaggcag

SEQ ID NO: 127951 - DNA, 25 bp, Artificial
  Probe
gaccaggtagagttaagtttaatgt

SEQ ID NO: 127952 - DNA, 25 bp, Artificial
  Probe
ggaagtcctgtaccatacttagatg

SEQ ID NO: 127953 - DNA, 25 bp, Artificial
  Probe
agaacatagtaggtgctcaataaat

SEQ ID NO: 127954 - DNA, 25 bp, Artificial
  Probe
aacctgtcgttatgagggattattt

SEQ ID NO: 127955 - DNA, 25 bp, Artificial
  Probe
aaacctgtcgttatgagggattatt

SEQ ID NO: 127956 - DNA, 25 bp, Artificial
  Probe
gaaacctgtcgttatgagggattat

SEQ ID NO: 127957 - DNA, 25 bp, Artificial
  Probe
ctgtaccatacttagatgaacctaa

SEQ ID NO: 127958 - DNA, 25 bp, Artificial
  Probe
agttaagtttaatgtggactctagc

SEQ ID NO: 127959 - DNA, 25 bp, Artificial
  Probe
ggtagagttaagtttaatgtggact

SEQ ID NO: 127960 - DNA, 25 bp, Artificial
  Probe
gaagtcctgtaccatacttagatga

SEQ ID NO: 127961 - DNA, 25 bp, Artificial
  Probe
cctagaacatagtaggtgctcaata

SEQ ID NO: 127962 - DNA, 25 bp, Artificial
  Probe
tgtttcaggacatacaggactagag

SEQ ID NO: 127963 - DNA, 25 bp, Artificial
  Probe
ggttcttccctgtcatttccaatac

SEQ ID NO: 127964 - DNA, 25 bp, Artificial
  Probe
atattggagagtgagcatctttgga

SEQ ID NO: 127965 - DNA, 25 bp, Artificial
  Probe
gttcttccctgtcatttccaatacg

SEQ ID NO: 127966 - DNA, 25 bp, Artificial
  Probe
ctaactggaagtgtttgtggatgag

SEQ ID NO: 127967 - DNA, 25 bp, Artificial
  Probe
atgatagaagggagcaggaaacaag

SEQ ID NO: 127968 - DNA, 25 bp, Artificial
  Probe
tattggagagtgagcatctttggag

SEQ ID NO: 127969 - DNA, 25 bp, Artificial
  Probe
taactggaagtgtttgtggatgagt

SEQ ID NO: 127970 - DNA, 25 bp, Artificial
  Probe
aatattggagagtgagcatctttgg

SEQ ID NO: 127971 - DNA, 25 bp, Artificial
  Probe
ttcttccctgtcatttccaatacgg

SEQ ID NO: 127972 - DNA, 25 bp, Artificial
  Probe
catgatagaagggagcaggaaacaa

SEQ ID NO: 127973 - DNA, 25 bp, Artificial
  Probe
aactggaagtgtttgtggatgagtc

SEQ ID NO: 127974 - DNA, 25 bp, Artificial
  Probe
gctaactggaagtgtttgtggatga

SEQ ID NO: 127975 - DNA, 25 bp, Artificial
  Probe
gatagaagggagcaggaaacaagga

SEQ ID NO: 127976 - DNA, 25 bp, Artificial
  Probe
tgctaactggaagtgtttgtggatg

SEQ ID NO: 127977 - DNA, 25 bp, Artificial
  Probe
gtgctaactggaagtgtttgtggat

SEQ ID NO: 127978 - DNA, 25 bp, Artificial
  Probe
atagaagggagcaggaaacaaggac

SEQ ID NO: 127979 - DNA, 25 bp, Artificial
  Probe
tgatagaagggagcaggaaacaagg

SEQ ID NO: 127980 - DNA, 25 bp, Artificial
  Probe
atctttggagctgaaatcttcacag

SEQ ID NO: 127981 - DNA, 25 bp, Artificial
  Probe
catctttggagctgaaatcttcaca

SEQ ID NO: 127982 - DNA, 25 bp, Artificial
  Probe
gggttcttccctgtcatttccaata

SEQ ID NO: 127983 - DNA, 25 bp, Artificial
  Probe
actggaagtgtttgtggatgagtca

SEQ ID NO: 127984 - DNA, 25 bp, Artificial
  Probe
ctggaagtgtttgtggatgagtcac

SEQ ID NO: 127985 - DNA, 25 bp, Artificial
  Probe
gagcatctttggagctgaaatcttc

SEQ ID NO: 127986 - DNA, 25 bp, Artificial
  Probe
tgagcatctttggagctgaaatctt

SEQ ID NO: 127987 - DNA, 25 bp, Artificial
  Probe
gcatctttggagctgaaatcttcac

SEQ ID NO: 127988 - DNA, 25 bp, Artificial
  Probe
agcatctttggagctgaaatcttca

SEQ ID NO: 127989 - DNA, 25 bp, Artificial
  Probe
gcatgatagaagggagcaggaaaca

SEQ ID NO: 127990 - DNA, 25 bp, Artificial
  Probe
tctttggagctgaaatcttcacagg

SEQ ID NO: 127991 - DNA, 25 bp, Artificial
  Probe
attggagagtgagcatctttggagc

SEQ ID NO: 127992 - DNA, 25 bp, Artificial
  Probe
gtgagcatctttggagctgaaatct

SEQ ID NO: 127993 - DNA, 25 bp, Artificial
  Probe
agtgagcatctttggagctgaaatc

SEQ ID NO: 127994 - DNA, 25 bp, Artificial
  Probe
gagtgagcatctttggagctgaaat

SEQ ID NO: 127995 - DNA, 25 bp, Artificial
  Probe
gaaatcttcacagggttttggaggg

SEQ ID NO: 127996 - DNA, 25 bp, Artificial
  Probe
ctgaaatcttcacagggttttggag

SEQ ID NO: 127997 - DNA, 25 bp, Artificial
  Probe
tggaagtgtttgtggatgagtcacc

SEQ ID NO: 127998 - DNA, 25 bp, Artificial
  Probe
gtttgtggatgagtcaccccataag

SEQ ID NO: 127999 - DNA, 25 bp, Artificial
  Probe
ctttggagctgaaatcttcacaggg

SEQ ID NO: 128000 - DNA, 25 bp, Artificial
  Probe
tcttccctgtcatttccaatacggg

SEQ ID NO: 128001 - DNA, 25 bp, Artificial
  Probe
agagtgagcatctttggagctgaaa

SEQ ID NO: 128002 - DNA, 25 bp, Artificial
  Probe
tgtttgtggatgagtcaccccataa

SEQ ID NO: 128003 - DNA, 25 bp, Artificial
  Probe
ttgcatgatagaagggagcaggaaa

SEQ ID NO: 128004 - DNA, 25 bp, Artificial
  Probe
tttgcatgatagaagggagcaggaa

SEQ ID NO: 128005 - DNA, 25 bp, Artificial
  Probe
cttccctgtcatttccaatacgggt

SEQ ID NO: 128006 - DNA, 25 bp, Artificial
  Probe
tgaaatcttcacagggttttggagg

SEQ ID NO: 128007 - DNA, 25 bp, Artificial
  Probe
caggttttgcatgatagaagggagc

SEQ ID NO: 128008 - DNA, 25 bp, Artificial
  Probe
gtatttgcggtatctactctcctcc

SEQ ID NO: 128009 - DNA, 25 bp, Artificial
  Probe
ggtatttgcggtatctactctcctc

SEQ ID NO: 128010 - DNA, 25 bp, Artificial
  Probe
ggcttcctagacactctggtagtac

SEQ ID NO: 128011 - DNA, 25 bp, Artificial
  Probe
cttcctagacactctggtagtactg

SEQ ID NO: 128012 - DNA, 25 bp, Artificial
  Probe
gggagggacagagtggactattaaa

SEQ ID NO: 128013 - DNA, 25 bp, Artificial
  Probe
gatacaggtgatgatgatgggcaac

SEQ ID NO: 128014 - DNA, 25 bp, Artificial
  Probe
cggtatttgcggtatctactctcct

SEQ ID NO: 128015 - DNA, 25 bp, Artificial
  Probe
gcttcctagacactctggtagtact

SEQ ID NO: 128016 - DNA, 25 bp, Artificial
  Probe
ggagggacagagtggactattaaaa

SEQ ID NO: 128017 - DNA, 25 bp, Artificial
  Probe
agggagggacagagtggactattaa

SEQ ID NO: 128018 - DNA, 25 bp, Artificial
  Probe
ttcctagacactctggtagtactgc

SEQ ID NO: 128019 - DNA, 25 bp, Artificial
  Probe
gagggagggacagagtggactatta

SEQ ID NO: 128020 - DNA, 25 bp, Artificial
  Probe
tgcggtatttgcggtatctactctc

SEQ ID NO: 128021 - DNA, 25 bp, Artificial
  Probe
gtgcggtatttgcggtatctactct

SEQ ID NO: 128022 - DNA, 25 bp, Artificial
  Probe
cctagacactctggtagtactgcac

SEQ ID NO: 128023 - DNA, 25 bp, Artificial
  Probe
tcctagacactctggtagtactgca

SEQ ID NO: 128024 - DNA, 25 bp, Artificial
  Probe
gggcttcctagacactctggtagta

SEQ ID NO: 128025 - DNA, 25 bp, Artificial
  Probe
cgatacaggtgatgatgatgggcaa

SEQ ID NO: 128026 - DNA, 25 bp, Artificial
  Probe
gcggtatttgcggtatctactctcc

SEQ ID NO: 128027 - DNA, 25 bp, Artificial
  Probe
ctagacactctggtagtactgcacc

SEQ ID NO: 128028 - DNA, 25 bp, Artificial
  Probe
atacaggtgatgatgatgggcaacg

SEQ ID NO: 128029 - DNA, 25 bp, Artificial
  Probe
ctctcctatggtgcagattcgaact

SEQ ID NO: 128030 - DNA, 25 bp, Artificial
  Probe
tatttgcggtatctactctcctccg

SEQ ID NO: 128031 - DNA, 25 bp, Artificial
  Probe
taccccgatacaggtgatgatgatg

SEQ ID NO: 128032 - DNA, 25 bp, Artificial
  Probe
gatgatgatgggcaacgtcaaagtg

SEQ ID NO: 128033 - DNA, 25 bp, Artificial
  Probe
gtgatgatgatgggcaacgtcaaag

SEQ ID NO: 128034 - DNA, 25 bp, Artificial
  Probe
gtaccccgatacaggtgatgatgat

SEQ ID NO: 128035 - DNA, 25 bp, Artificial
  Probe
gcgagactagcatatggctttaaaa

SEQ ID NO: 128036 - DNA, 25 bp, Artificial
  Probe
tctcctatggtgcagattcgaactg

SEQ ID NO: 128037 - DNA, 25 bp, Artificial
  Probe
tgatgatgatgggcaacgtcaaagt

SEQ ID NO: 128038 - DNA, 25 bp, Artificial
  Probe
cgcgagactagcatatggctttaaa

SEQ ID NO: 128039 - DNA, 25 bp, Artificial
  Probe
acgcgagactagcatatggctttaa

SEQ ID NO: 128040 - DNA, 25 bp, Artificial
  Probe
aacgcgagactagcatatggcttta

SEQ ID NO: 128041 - DNA, 25 bp, Artificial
  Probe
tagacactctggtagtactgcacca

SEQ ID NO: 128042 - DNA, 25 bp, Artificial
  Probe
ggaaggagaacttgaagaatatacg

SEQ ID NO: 128043 - DNA, 25 bp, Artificial
  Probe
ggagaacttgaagaatatacgaaga

SEQ ID NO: 128044 - DNA, 25 bp, Artificial
  Probe
aggagaacttgaagaatatacgaag

SEQ ID NO: 128045 - DNA, 25 bp, Artificial
  Probe
gaaggagaacttgaagaatatacga

SEQ ID NO: 128046 - DNA, 25 bp, Artificial
  Probe
ttgacataatgaatgagccgtgaac

SEQ ID NO: 128047 - DNA, 25 bp, Artificial
  Probe
tgatattgctcttagatgttatgct

SEQ ID NO: 128048 - DNA, 25 bp, Artificial
  Probe
tggaaggagaacttgaagaatatac

SEQ ID NO: 128049 - DNA, 25 bp, Artificial
  Probe
tcatggaaggagaacttgaagaata

SEQ ID NO: 128050 - DNA, 25 bp, Artificial
  Probe
ctgatattgctcttagatgttatgc

SEQ ID NO: 128051 - DNA, 25 bp, Artificial
  Probe
agaacttgaagaatatacgaagaca

SEQ ID NO: 128052 - DNA, 25 bp, Artificial
  Probe
aaggagaacttgaagaatatacgaa

SEQ ID NO: 128053 - DNA, 25 bp, Artificial
  Probe
ctcatggaaggagaacttgaagaat

SEQ ID NO: 128054 - DNA, 25 bp, Artificial
  Probe
catggaaggagaacttgaagaatat

SEQ ID NO: 128055 - DNA, 25 bp, Artificial
  Probe
gacataatgaatgagccgtgaactc

SEQ ID NO: 128056 - DNA, 25 bp, Artificial
  Probe
catagagaacatcgagatcaccatc

SEQ ID NO: 128057 - DNA, 25 bp, Artificial
  Probe
tgacataatgaatgagccgtgaact

SEQ ID NO: 128058 - DNA, 25 bp, Artificial
  Probe
atagagaacatcgagatcaccatca

SEQ ID NO: 128059 - DNA, 25 bp, Artificial
  Probe
gagaacttgaagaatatacgaagac

SEQ ID NO: 128060 - DNA, 25 bp, Artificial
  Probe
tagagaacatcgagatcaccatcaa

SEQ ID NO: 128061 - DNA, 25 bp, Artificial
  Probe
gctaatgcttctctttacttgcttt

SEQ ID NO: 128062 - DNA, 25 bp, Artificial
  Probe
aatgcttctctttacttgctttgac

SEQ ID NO: 128063 - DNA, 25 bp, Artificial
  Probe
tttgctaatgcttctctttacttgc

SEQ ID NO: 128064 - DNA, 25 bp, Artificial
  Probe
gcttctctttacttgctttgacata

SEQ ID NO: 128065 - DNA, 25 bp, Artificial
  Probe
ggtgctggagaagagaaataagatt

SEQ ID NO: 128066 - DNA, 25 bp, Artificial
  Probe
atggaaggagaacttgaagaatata

SEQ ID NO: 128067 - DNA, 25 bp, Artificial
  Probe
ggagaagagaaataagattcgggaa

SEQ ID NO: 128068 - DNA, 25 bp, Artificial
  Probe
agagaaataagattcgggaacagaa

SEQ ID NO: 128069 - DNA, 25 bp, Artificial
  Probe
aagagaaataagattcgggaacaga

SEQ ID NO: 128070 - DNA, 25 bp, Artificial
  Probe
agaagagaaataagattcgggaaca

SEQ ID NO: 128071 - DNA, 25 bp, Artificial
  Probe
tgctaatgcttctctttacttgctt

SEQ ID NO: 128072 - DNA, 25 bp, Artificial
  Probe
ttgctaatgcttctctttacttgct

SEQ ID NO: 128073 - DNA, 25 bp, Artificial
  Probe
gaagagaaataagattcgggaacag

SEQ ID NO: 128074 - DNA, 25 bp, Artificial
  Probe
gtgctggagaagagaaataagattc

SEQ ID NO: 128075 - DNA, 25 bp, Artificial
  Probe
tgcttctctttacttgctttgacat

SEQ ID NO: 128076 - DNA, 25 bp, Artificial
  Probe
atgcttctctttacttgctttgaca

SEQ ID NO: 128077 - DNA, 25 bp, Artificial
  Probe
taatgcttctctttacttgctttga

SEQ ID NO: 128078 - DNA, 25 bp, Artificial
  Probe
gcattctcctttgaagatgatagtg

SEQ ID NO: 128079 - DNA, 25 bp, Artificial
  Probe
ccatagagaacatcgagatcaccat

SEQ ID NO: 128080 - DNA, 25 bp, Artificial
  Probe
gagaagagaaataagattcgggaac

SEQ ID NO: 128081 - DNA, 25 bp, Artificial
  Probe
ctggagaagagaaataagattcggg

SEQ ID NO: 128082 - DNA, 25 bp, Artificial
  Probe
tgctggagaagagaaataagattcg

SEQ ID NO: 128083 - DNA, 25 bp, Artificial
  Probe
aggtgctggagaagagaaataagat

SEQ ID NO: 128084 - DNA, 25 bp, Artificial
  Probe
ctaatgcttctctttacttgctttg

SEQ ID NO: 128085 - DNA, 25 bp, Artificial
  Probe
gaacttgaagaatatacgaagacaa

SEQ ID NO: 128086 - DNA, 25 bp, Artificial
  Probe
atcccaatcagtttgttcctctaaa

SEQ ID NO: 128087 - DNA, 25 bp, Artificial
  Probe
cttaatatgttctgttcctcgccat

SEQ ID NO: 128088 - DNA, 25 bp, Artificial
  Probe
cacaactaatgtaacttcagagagc

SEQ ID NO: 128089 - DNA, 25 bp, Artificial
  Probe
gccacaactaatgtaacttcagaga

SEQ ID NO: 128090 - DNA, 25 bp, Artificial
  Probe
agccacaactaatgtaacttcagag

SEQ ID NO: 128091 - DNA, 25 bp, Artificial
  Probe
ccacaactaatgtaacttcagagag

SEQ ID NO: 128092 - DNA, 25 bp, Artificial
  Probe
cagccacaactaatgtaacttcaga

SEQ ID NO: 128093 - DNA, 25 bp, Artificial
  Probe
tcagccacaactaatgtaacttcag

SEQ ID NO: 128094 - DNA, 25 bp, Artificial
  Probe
ctcagccacaactaatgtaacttca

SEQ ID NO: 128095 - DNA, 25 bp, Artificial
  Probe
ttaatatgttctgttcctcgccatg

SEQ ID NO: 128096 - DNA, 25 bp, Artificial
  Probe
taatatgttctgttcctcgccatga

SEQ ID NO: 128097 - DNA, 25 bp, Artificial
  Probe
agagcttaatatgttctgttcctcg

SEQ ID NO: 128098 - DNA, 25 bp, Artificial
  Probe
gctcagccacaactaatgtaacttc

SEQ ID NO: 128099 - DNA, 25 bp, Artificial
  Probe
gcttaatatgttctgttcctcgcca

SEQ ID NO: 128100 - DNA, 25 bp, Artificial
  Probe
aatatgttctgttcctcgccatgaa

SEQ ID NO: 128101 - DNA, 25 bp, Artificial
  Probe
gagcttaatatgttctgttcctcgc

SEQ ID NO: 128102 - DNA, 25 bp, Artificial
  Probe
agcttaatatgttctgttcctcgcc

SEQ ID NO: 128103 - DNA, 25 bp, Artificial
  Probe
tcctcatcgaagtaaactgttatca

SEQ ID NO: 128104 - DNA, 25 bp, Artificial
  Probe
tgttcctcatcgaagtaaactgtta

SEQ ID NO: 128105 - DNA, 25 bp, Artificial
  Probe
ctttgttcctcatcgaagtaaactg

SEQ ID NO: 128106 - DNA, 25 bp, Artificial
  Probe
ttgttcctcatcgaagtaaactgtt

SEQ ID NO: 128107 - DNA, 25 bp, Artificial
  Probe
tttgttcctcatcgaagtaaactgt

SEQ ID NO: 128108 - DNA, 25 bp, Artificial
  Probe
cctcatcgaagtaaactgttatcat

SEQ ID NO: 128109 - DNA, 25 bp, Artificial
  Probe
gttcctcatcgaagtaaactgttat

SEQ ID NO: 128110 - DNA, 25 bp, Artificial
  Probe
ttcctcatcgaagtaaactgttatc

SEQ ID NO: 128111 - DNA, 25 bp, Artificial
  Probe
gctttgttcctcatcgaagtaaact

SEQ ID NO: 128112 - DNA, 25 bp, Artificial
  Probe
tcatcgaagtaaactgttatcatgt

SEQ ID NO: 128113 - DNA, 25 bp, Artificial
  Probe
tatgttctgttcctcgccatgaaat

SEQ ID NO: 128114 - DNA, 25 bp, Artificial
  Probe
atatgttctgttcctcgccatgaaa

SEQ ID NO: 128115 - DNA, 25 bp, Artificial
  Probe
ctcatcgaagtaaactgttatcatg

SEQ ID NO: 128116 - DNA, 25 bp, Artificial
  Probe
cagagcttaatatgttctgttcctc

SEQ ID NO: 128117 - DNA, 25 bp, Artificial
  Probe
tgactgtcagcacatgatatgtcat

SEQ ID NO: 128118 - DNA, 25 bp, Artificial
  Probe
cgctttgttcctcatcgaagtaaac

SEQ ID NO: 128119 - DNA, 25 bp, Artificial
  Probe
acgctttgttcctcatcgaagtaaa

SEQ ID NO: 128120 - DNA, 25 bp, Artificial
  Probe
aacgctttgttcctcatcgaagtaa

SEQ ID NO: 128121 - DNA, 25 bp, Artificial
  Probe
aaacgctttgttcctcatcgaagta

SEQ ID NO: 128122 - DNA, 25 bp, Artificial
  Probe
gtgactgtcagcacatgatatgtca

SEQ ID NO: 128123 - DNA, 25 bp, Artificial
  Probe
atgttctgttcctcgccatgaaatg

SEQ ID NO: 128124 - DNA, 25 bp, Artificial
  Probe
aagaaacgctttgttcctcatcgaa

SEQ ID NO: 128125 - DNA, 25 bp, Artificial
  Probe
agaaacgctttgttcctcatcgaag

SEQ ID NO: 128126 - DNA, 25 bp, Artificial
  Probe
aactggtttctaacattaaagatgt

SEQ ID NO: 128127 - DNA, 25 bp, Artificial
  Probe
gaaacgctttgttcctcatcgaagt

SEQ ID NO: 128128 - DNA, 25 bp, Artificial
  Probe
taactggtttctaacattaaagatg

SEQ ID NO: 128129 - DNA, 25 bp, Artificial
  Probe
tgtatttgtggtaatatattctgct

SEQ ID NO: 128130 - DNA, 25 bp, Artificial
  Probe
atgtatttgtggtaatatattctgc

SEQ ID NO: 128131 - DNA, 25 bp, Artificial
  Probe
gtatttgtggtaatatattctgctt

SEQ ID NO: 128132 - DNA, 25 bp, Artificial
  Probe
aacacaatctaagaatggtccagtt

SEQ ID NO: 128133 - DNA, 25 bp, Artificial
  Probe
acacaatctaagaatggtccagttc

SEQ ID NO: 128134 - DNA, 25 bp, Artificial
  Probe
acagaagaagatcatcagttccatt

SEQ ID NO: 128135 - DNA, 25 bp, Artificial
  Probe
cacagaagaagatcatcagttccat

SEQ ID NO: 128136 - DNA, 25 bp, Artificial
  Probe
cacaatctaagaatggtccagttcc

SEQ ID NO: 128137 - DNA, 25 bp, Artificial
  Probe
cagaagaagatcatcagttccatta

SEQ ID NO: 128138 - DNA, 25 bp, Artificial
  Probe
ggagatgtccaatcaggatgttatt

SEQ ID NO: 128139 - DNA, 25 bp, Artificial
  Probe
tgtccaatcaggatgttattaaggc

SEQ ID NO: 128140 - DNA, 25 bp, Artificial
  Probe
atgtccaatcaggatgttattaagg

SEQ ID NO: 128141 - DNA, 25 bp, Artificial
  Probe
caaacagatagaaatggtggagatg

SEQ ID NO: 128142 - DNA, 25 bp, Artificial
  Probe
ccacagaagaagatcatcagttcca

SEQ ID NO: 128143 - DNA, 25 bp, Artificial
  Probe
agaagaagatcatcagttccattaa

SEQ ID NO: 128144 - DNA, 25 bp, Artificial
  Probe
gtcatccagcaaacagatagaaatg

SEQ ID NO: 128145 - DNA, 25 bp, Artificial
  Probe
aaacagatagaaatggtggagatgc

SEQ ID NO: 128146 - DNA, 25 bp, Artificial
  Probe
gcaaacagatagaaatggtggagat

SEQ ID NO: 128147 - DNA, 25 bp, Artificial
  Probe
gaaacacaatctaagaatggtccag

SEQ ID NO: 128148 - DNA, 25 bp, Artificial
  Probe
gagatgtccaatcaggatgttatta

SEQ ID NO: 128149 - DNA, 25 bp, Artificial
  Probe
aaacacaatctaagaatggtccagt

SEQ ID NO: 128150 - DNA, 25 bp, Artificial
  Probe
cgtcatccagcaaacagatagaaat

SEQ ID NO: 128151 - DNA, 25 bp, Artificial
  Probe
agaaacacaatctaagaatggtcca

SEQ ID NO: 128152 - DNA, 25 bp, Artificial
  Probe
gattggcttaacggtatgaggacag

SEQ ID NO: 128153 - DNA, 25 bp, Artificial
  Probe
aacagatagaaatggtggagatgct

SEQ ID NO: 128154 - DNA, 25 bp, Artificial
  Probe
agatgtccaatcaggatgttattaa

SEQ ID NO: 128155 - DNA, 25 bp, Artificial
  Probe
aacaggtgattggcttaacggtatg

SEQ ID NO: 128156 - DNA, 25 bp, Artificial
  Probe
agcaaacagatagaaatggtggaga

SEQ ID NO: 128157 - DNA, 25 bp, Artificial
  Probe
cagcaaacagatagaaatggtggag

SEQ ID NO: 128158 - DNA, 25 bp, Artificial
  Probe
gatgtccaatcaggatgttattaag

SEQ ID NO: 128159 - DNA, 25 bp, Artificial
  Probe
agaagatcatcagttccattaaagc

SEQ ID NO: 128160 - DNA, 25 bp, Artificial
  Probe
gtgattggcttaacggtatgaggac

SEQ ID NO: 128161 - DNA, 25 bp, Artificial
  Probe
caggtgattggcttaacggtatgag

SEQ ID NO: 128162 - DNA, 25 bp, Artificial
  Probe
caacaggtgattggcttaacggtat

SEQ ID NO: 128163 - DNA, 25 bp, Artificial
  Probe
gatattgctacgttccacacaacag

SEQ ID NO: 128164 - DNA, 25 bp, Artificial
  Probe
catcaaaccttcttctggaccaaag

SEQ ID NO: 128165 - DNA, 25 bp, Artificial
  Probe
tgattggcttaacggtatgaggaca

SEQ ID NO: 128166 - DNA, 25 bp, Artificial
  Probe
gaatccaggcagtctgaagatcatc

SEQ ID NO: 128167 - DNA, 25 bp, Artificial
  Probe
aagatcatcagttccattaaagctc

SEQ ID NO: 128168 - DNA, 25 bp, Artificial
  Probe
acaatctaagaatggtccagttccc

SEQ ID NO: 128169 - DNA, 25 bp, Artificial
  Probe
agatcatcagttccattaaagctct

SEQ ID NO: 128170 - DNA, 25 bp, Artificial
  Probe
gccacagaagaagatcatcagttcc

SEQ ID NO: 128171 - DNA, 25 bp, Artificial
  Probe
gaagatcatcagttccattaaagct

SEQ ID NO: 128172 - DNA, 25 bp, Artificial
  Probe
gaaggatgtgaggaaagggaagatg

SEQ ID NO: 128173 - DNA, 25 bp, Artificial
  Probe
tcatccagcaaacagatagaaatgg

SEQ ID NO: 128174 - DNA, 25 bp, Artificial
  Probe
tagaaacacaatctaagaatggtcc

SEQ ID NO: 128175 - DNA, 25 bp, Artificial
  Probe
atcatcagttccattaaagctctag

SEQ ID NO: 128176 - DNA, 25 bp, Artificial
  Probe
gatcatcagttccattaaagctcta

SEQ ID NO: 128177 - DNA, 25 bp, Artificial
  Probe
aaggttatcttcagattggagccac

SEQ ID NO: 128178 - DNA, 25 bp, Artificial
  Probe
gatgatgaaattctgggcaaacttt

SEQ ID NO: 128179 - DNA, 25 bp, Artificial
  Probe
tcaatctcagcaagatgatgatgaa

SEQ ID NO: 128180 - DNA, 25 bp, Artificial
  Probe
gatgatgatgaaattctgggcaaac

SEQ ID NO: 128181 - DNA, 25 bp, Artificial
  Probe
gaaatctactctgtctttggtgctc

SEQ ID NO: 128182 - DNA, 25 bp, Artificial
  Probe
atgatgatgaaattctgggcaaact

SEQ ID NO: 128183 - DNA, 25 bp, Artificial
  Probe
tgatgatgaaattctgggcaaactt

SEQ ID NO: 128184 - DNA, 25 bp, Artificial
  Probe
agatgatgatgaaattctgggcaaa

SEQ ID NO: 128185 - DNA, 25 bp, Artificial
  Probe
aagatgatgatgaaattctgggcaa

SEQ ID NO: 128186 - DNA, 25 bp, Artificial
  Probe
tctcagcaagatgatgatgaaattc

SEQ ID NO: 128187 - DNA, 25 bp, Artificial
  Probe
ctcagcaagatgatgatgaaattct

SEQ ID NO: 128188 - DNA, 25 bp, Artificial
  Probe
atcaatctcagcaagatgatgatga

SEQ ID NO: 128189 - DNA, 25 bp, Artificial
  Probe
agcaagatgatgatgaaattctggg

SEQ ID NO: 128190 - DNA, 25 bp, Artificial
  Probe
gatcaatctcagcaagatgatgatg

SEQ ID NO: 128191 - DNA, 25 bp, Artificial
  Probe
agatcaatctcagcaagatgatgat

SEQ ID NO: 128192 - DNA, 25 bp, Artificial
  Probe
atgatgaaattctgggcaaactttg

SEQ ID NO: 128193 - DNA, 25 bp, Artificial
  Probe
caagatgatgatgaaattctgggca

SEQ ID NO: 128194 - DNA, 25 bp, Artificial
  Probe
tcagcaagatgatgatgaaattctg

SEQ ID NO: 128195 - DNA, 25 bp, Artificial
  Probe
cagcaagatgatgatgaaattctgg

SEQ ID NO: 128196 - DNA, 25 bp, Artificial
  Probe
gatcatggagacgaaatctactctg

SEQ ID NO: 128197 - DNA, 25 bp, Artificial
  Probe
aaggaaggttatcttcagattggag

SEQ ID NO: 128198 - DNA, 25 bp, Artificial
  Probe
gacgaaatctactctgtctttggtg

SEQ ID NO: 128199 - DNA, 25 bp, Artificial
  Probe
aaatctactctgtctttggtgctcc

SEQ ID NO: 128200 - DNA, 25 bp, Artificial
  Probe
atcatggagacgaaatctactctgt

SEQ ID NO: 128201 - DNA, 25 bp, Artificial
  Probe
cgaaatctactctgtctttggtgct

SEQ ID NO: 128202 - DNA, 25 bp, Artificial
  Probe
ctttgaggagacttcagaactgtgt

SEQ ID NO: 128203 - DNA, 25 bp, Artificial
  Probe
ggtaggagatcatggagacgaaatc

SEQ ID NO: 128204 - DNA, 25 bp, Artificial
  Probe
gcaagatgatgatgaaattctgggc

SEQ ID NO: 128205 - DNA, 25 bp, Artificial
  Probe
caatctcagcaagatgatgatgaaa

SEQ ID NO: 128206 - DNA, 25 bp, Artificial
  Probe
acgaaatctactctgtctttggtgc

SEQ ID NO: 128207 - DNA, 25 bp, Artificial
  Probe
tcatggagacgaaatctactctgtc

SEQ ID NO: 128208 - DNA, 25 bp, Artificial
  Probe
tttgaggagacttcagaactgtgtg

SEQ ID NO: 128209 - DNA, 25 bp, Artificial
  Probe
aggaaggttatcttcagattggagc

SEQ ID NO: 128210 - DNA, 25 bp, Artificial
  Probe
gttatcttcagattggagccaccac

SEQ ID NO: 128211 - DNA, 25 bp, Artificial
  Probe
atctcagcaagatgatgatgaaatt

SEQ ID NO: 128212 - DNA, 25 bp, Artificial
  Probe
aatctcagcaagatgatgatgaaat

SEQ ID NO: 128213 - DNA, 25 bp, Artificial
  Probe
taggagatcatggagacgaaatcta

SEQ ID NO: 128214 - DNA, 25 bp, Artificial
  Probe
gagatcatggagacgaaatctactc

SEQ ID NO: 128215 - DNA, 25 bp, Artificial
  Probe
agatcatggagacgaaatctactct

SEQ ID NO: 128216 - DNA, 25 bp, Artificial
  Probe
ttatcttcagattggagccaccact

SEQ ID NO: 128217 - DNA, 25 bp, Artificial
  Probe
tggtaggagatcatggagacgaaat

SEQ ID NO: 128218 - DNA, 25 bp, Artificial
  Probe
gaaggttatcttcagattggagcca

SEQ ID NO: 128219 - DNA, 25 bp, Artificial
  Probe
caaactttgctaggaatgggaatcc

SEQ ID NO: 128220 - DNA, 25 bp, Artificial
  Probe
ttgaggagacttcagaactgtgtgg

SEQ ID NO: 128221 - DNA, 25 bp, Artificial
  Probe
ggagatcatggagacgaaatctact

SEQ ID NO: 128222 - DNA, 25 bp, Artificial
  Probe
atagagactcgtgtatgtgagagag

SEQ ID NO: 128223 - DNA, 25 bp, Artificial
  Probe
tagagactcgtgtatgtgagagaga

SEQ ID NO: 128224 - DNA, 25 bp, Artificial
  Probe
tatgtgagagagacagacagacaga

SEQ ID NO: 128225 - DNA, 25 bp, Artificial
  Probe
gtatgtgagagagacagacagacag

SEQ ID NO: 128226 - DNA, 25 bp, Artificial
  Probe
aatagagactcgtgtatgtgagaga

SEQ ID NO: 128227 - DNA, 25 bp, Artificial
  Probe
caatagagactcgtgtatgtgagag

SEQ ID NO: 128228 - DNA, 25 bp, Artificial
  Probe
gtgtatgtgagagagacagacagac

SEQ ID NO: 128229 - DNA, 25 bp, Artificial
  Probe
tgtatgtgagagagacagacagaca

SEQ ID NO: 128230 - DNA, 25 bp, Artificial
  Probe
ccaatagagactcgtgtatgtgaga

SEQ ID NO: 128231 - DNA, 25 bp, Artificial
  Probe
gaagatcacatgaagactgaattgg

SEQ ID NO: 128232 - DNA, 25 bp, Artificial
  Probe
agatcacatgaagactgaattggaa

SEQ ID NO: 128233 - DNA, 25 bp, Artificial
  Probe
aagatcacatgaagactgaattgga

SEQ ID NO: 128234 - DNA, 25 bp, Artificial
  Probe
tctgaagatcacatgaagactgaat

SEQ ID NO: 128235 - DNA, 25 bp, Artificial
  Probe
atctgaagatcacatgaagactgaa

SEQ ID NO: 128236 - DNA, 25 bp, Artificial
  Probe
gatcacatgaagactgaattggaat

SEQ ID NO: 128237 - DNA, 25 bp, Artificial
  Probe
tgaagatcacatgaagactgaattg

SEQ ID NO: 128238 - DNA, 25 bp, Artificial
  Probe
ctgaagatcacatgaagactgaatt

SEQ ID NO: 128239 - DNA, 25 bp, Artificial
  Probe
agagactcgtgtatgtgagagagac

SEQ ID NO: 128240 - DNA, 25 bp, Artificial
  Probe
atcacatgaagactgaattggaatt

SEQ ID NO: 128241 - DNA, 25 bp, Artificial
  Probe
cacttctgagagccaatagagactc

SEQ ID NO: 128242 - DNA, 25 bp, Artificial
  Probe
tcacttctgagagccaatagagact

SEQ ID NO: 128243 - DNA, 25 bp, Artificial
  Probe
tacatcatcagcatttccctattcc

SEQ ID NO: 128244 - DNA, 25 bp, Artificial
  Probe
gagagccaatagagactcgtgtatg

SEQ ID NO: 128245 - DNA, 25 bp, Artificial
  Probe
gactcgtgtatgtgagagagacaga

SEQ ID NO: 128246 - DNA, 25 bp, Artificial
  Probe
agactcgtgtatgtgagagagacag

SEQ ID NO: 128247 - DNA, 25 bp, Artificial
  Probe
gagactcgtgtatgtgagagagaca

SEQ ID NO: 128248 - DNA, 25 bp, Artificial
  Probe
gtttacatcatcagcatttccctat

SEQ ID NO: 128249 - DNA, 25 bp, Artificial
  Probe
ggtttacatcatcagcatttcccta

SEQ ID NO: 128250 - DNA, 25 bp, Artificial
  Probe
atgtgagagagacagacagacagac

SEQ ID NO: 128251 - DNA, 25 bp, Artificial
  Probe
ttacatcatcagcatttccctattc

SEQ ID NO: 128252 - DNA, 25 bp, Artificial
  Probe
agccaatagagactcgtgtatgtga

SEQ ID NO: 128253 - DNA, 25 bp, Artificial
  Probe
tgagagccaatagagactcgtgtat

SEQ ID NO: 128254 - DNA, 25 bp, Artificial
  Probe
cgtgtatgtgagagagacagacaga

SEQ ID NO: 128255 - DNA, 25 bp, Artificial
  Probe
tcgtgtatgtgagagagacagacag

SEQ ID NO: 128256 - DNA, 25 bp, Artificial
  Probe
ctcgtgtatgtgagagagacagaca

SEQ ID NO: 128257 - DNA, 25 bp, Artificial
  Probe
actcgtgtatgtgagagagacagac

SEQ ID NO: 128258 - DNA, 25 bp, Artificial
  Probe
gtgagagagacagacagacagacag

SEQ ID NO: 128259 - DNA, 25 bp, Artificial
  Probe
tttacatcatcagcatttccctatt

SEQ ID NO: 128260 - DNA, 25 bp, Artificial
  Probe
gccaatagagactcgtgtatgtgag

SEQ ID NO: 128261 - DNA, 25 bp, Artificial
  Probe
gagccaatagagactcgtgtatgtg

SEQ ID NO: 128262 - DNA, 25 bp, Artificial
  Probe
agagccaatagagactcgtgtatgt

SEQ ID NO: 128263 - DNA, 25 bp, Artificial
  Probe
ctgagagccaatagagactcgtgta

SEQ ID NO: 128264 - DNA, 25 bp, Artificial
  Probe
ttctcccaggatgtaaagtgtgttt

SEQ ID NO: 128265 - DNA, 25 bp, Artificial
  Probe
catcatcagcatttccctattccct

SEQ ID NO: 128266 - DNA, 25 bp, Artificial
  Probe
tggtttacatcatcagcatttccct

SEQ ID NO: 128267 - DNA, 25 bp, Artificial
  Probe
ggaagaagagtctataccttggaga

SEQ ID NO: 128268 - DNA, 25 bp, Artificial
  Probe
gaagaagagtctataccttggagat

SEQ ID NO: 128269 - DNA, 25 bp, Artificial
  Probe
atgggaagaagagtctataccttgg

SEQ ID NO: 128270 - DNA, 25 bp, Artificial
  Probe
gggaagaagagtctataccttggag

SEQ ID NO: 128271 - DNA, 25 bp, Artificial
  Probe
catgggaagaagagtctataccttg

SEQ ID NO: 128272 - DNA, 25 bp, Artificial
  Probe
tgggaagaagagtctataccttgga

SEQ ID NO: 128273 - DNA, 25 bp, Artificial
  Probe
gcatgggaagaagagtctatacctt

SEQ ID NO: 128274 - DNA, 25 bp, Artificial
  Probe
ggcatgggaagaagagtctatacct

SEQ ID NO: 128275 - DNA, 25 bp, Artificial
  Probe
ccctttctatgggtcagatatcaaa

SEQ ID NO: 128276 - DNA, 25 bp, Artificial
  Probe
gggcatgggaagaagagtctatacc

SEQ ID NO: 128277 - DNA, 25 bp, Artificial
  Probe
gccctttctatgggtcagatatcaa

SEQ ID NO: 128278 - DNA, 25 bp, Artificial
  Probe
cctttctatgggtcagatatcaaaa

SEQ ID NO: 128279 - DNA, 25 bp, Artificial
  Probe
ggggcatgggaagaagagtctatac

SEQ ID NO: 128280 - DNA, 25 bp, Artificial
  Probe
ctttctatgggtcagatatcaaaat

SEQ ID NO: 128281 - DNA, 25 bp, Artificial
  Probe
cgccctttctatgggtcagatatca

SEQ ID NO: 128282 - DNA, 25 bp, Artificial
  Probe
acgccctttctatgggtcagatatc

SEQ ID NO: 128283 - DNA, 25 bp, Artificial
  Probe
tttctatgggtcagatatcaaaata

SEQ ID NO: 128284 - DNA, 25 bp, Artificial
  Probe
ggaagttcaaggtcatctgtctaac

SEQ ID NO: 128285 - DNA, 25 bp, Artificial
  Probe
gttcaaggtcatctgtctaactgtg

SEQ ID NO: 128286 - DNA, 25 bp, Artificial
  Probe
ttcaaggtcatctgtctaactgtgc

SEQ ID NO: 128287 - DNA, 25 bp, Artificial
  Probe
gtaaggatctactaccagtaccgtc

SEQ ID NO: 128288 - DNA, 25 bp, Artificial
  Probe
gatgactactcagataccgtgaaag

SEQ ID NO: 128289 - DNA, 25 bp, Artificial
  Probe
ctactcagataccgtgaaagacttg

SEQ ID NO: 128290 - DNA, 25 bp, Artificial
  Probe
atgactactcagataccgtgaaaga

SEQ ID NO: 128291 - DNA, 25 bp, Artificial
  Probe
caaggtcatctgtctaactgtgctg

SEQ ID NO: 128292 - DNA, 25 bp, Artificial
  Probe
actactcagataccgtgaaagactt

SEQ ID NO: 128293 - DNA, 25 bp, Artificial
  Probe
tcaaggtcatctgtctaactgtgct

SEQ ID NO: 128294 - DNA, 25 bp, Artificial
  Probe
gggaagttcaaggtcatctgtctaa

SEQ ID NO: 128295 - DNA, 25 bp, Artificial
  Probe
gactactcagataccgtgaaagact

SEQ ID NO: 128296 - DNA, 25 bp, Artificial
  Probe
gaagttcaaggtcatctgtctaact

SEQ ID NO: 128297 - DNA, 25 bp, Artificial
  Probe
tgactactcagataccgtgaaagac

SEQ ID NO: 128298 - DNA, 25 bp, Artificial
  Probe
ggatgactactcagataccgtgaaa

SEQ ID NO: 128299 - DNA, 25 bp, Artificial
  Probe
aagttcaaggtcatctgtctaactg

SEQ ID NO: 128300 - DNA, 25 bp, Artificial
  Probe
tactcagataccgtgaaagacttgg

SEQ ID NO: 128301 - DNA, 25 bp, Artificial
  Probe
taaggatctactaccagtaccgtcg

SEQ ID NO: 128302 - DNA, 25 bp, Artificial
  Probe
agttcaaggtcatctgtctaactgt

SEQ ID NO: 128303 - DNA, 25 bp, Artificial
  Probe
agggaagttcaaggtcatctgtcta

SEQ ID NO: 128304 - DNA, 25 bp, Artificial
  Probe
gtgaaagacttggtatctcgcttct

SEQ ID NO: 128305 - DNA, 25 bp, Artificial
  Probe
ctcggtaaggatctactaccagtac

SEQ ID NO: 128306 - DNA, 25 bp, Artificial
  Probe
aaggtcatctgtctaactgtgctgg

SEQ ID NO: 128307 - DNA, 25 bp, Artificial
  Probe
cctcggtaaggatctactaccagta

SEQ ID NO: 128308 - DNA, 25 bp, Artificial
  Probe
gggatgactactcagataccgtgaa

SEQ ID NO: 128309 - DNA, 25 bp, Artificial
  Probe
tcggtaaggatctactaccagtacc

SEQ ID NO: 128310 - DNA, 25 bp, Artificial
  Probe
agacttggtatctcgcttcttggtg

SEQ ID NO: 128311 - DNA, 25 bp, Artificial
  Probe
ggtaaggatctactaccagtaccgt

SEQ ID NO: 128312 - DNA, 25 bp, Artificial
  Probe
gaaagacttggtatctcgcttcttg

SEQ ID NO: 128313 - DNA, 25 bp, Artificial
  Probe
tgaaagacttggtatctcgcttctt

SEQ ID NO: 128314 - DNA, 25 bp, Artificial
  Probe
gagggaagttcaaggtcatctgtct

SEQ ID NO: 128315 - DNA, 25 bp, Artificial
  Probe
cgtgaaagacttggtatctcgcttc

SEQ ID NO: 128316 - DNA, 25 bp, Artificial
  Probe
aagacttggtatctcgcttcttggt

SEQ ID NO: 128317 - DNA, 25 bp, Artificial
  Probe
gtgggatgactactcagataccgtg

SEQ ID NO: 128318 - DNA, 25 bp, Artificial
  Probe
aaagacttggtatctcgcttcttgg

SEQ ID NO: 128319 - DNA, 25 bp, Artificial
  Probe
tgggatgactactcagataccgtga

SEQ ID NO: 128320 - DNA, 25 bp, Artificial
  Probe
agtgggatgactactcagataccgt

SEQ ID NO: 128321 - DNA, 25 bp, Artificial
  Probe
actcagataccgtgaaagacttggt

SEQ ID NO: 128322 - DNA, 25 bp, Artificial
  Probe
ctcagataccgtgaaagacttggta

SEQ ID NO: 128323 - DNA, 25 bp, Artificial
  Probe
aaggatctactaccagtaccgtcgg

SEQ ID NO: 128324 - DNA, 25 bp, Artificial
  Probe
cccattaaacagcagtattaatagc

SEQ ID NO: 128325 - DNA, 25 bp, Artificial
  Probe
cgagggaagttcaaggtcatctgtc

SEQ ID NO: 128326 - DNA, 25 bp, Artificial
  Probe
ccgtgaaagacttggtatctcgctt

SEQ ID NO: 128327 - DNA, 25 bp, Artificial
  Probe
ccattaaacagcagtattaatagct

SEQ ID NO: 128328 - DNA, 25 bp, Artificial
  Probe
gcctcggtaaggatctactaccagt

SEQ ID NO: 128329 - DNA, 25 bp, Artificial
  Probe
gctcagactattacaataacaccac

SEQ ID NO: 128330 - DNA, 25 bp, Artificial
  Probe
agactattacaataacaccacctga

SEQ ID NO: 128331 - DNA, 25 bp, Artificial
  Probe
tcagactattacaataacaccacct

SEQ ID NO: 128332 - DNA, 25 bp, Artificial
  Probe
ctcagactattacaataacaccacc

SEQ ID NO: 128333 - DNA, 25 bp, Artificial
  Probe
gactattacaataacaccacctgaa

SEQ ID NO: 128334 - DNA, 25 bp, Artificial
  Probe
cagactattacaataacaccacctg

SEQ ID NO: 128335 - DNA, 25 bp, Artificial
  Probe
agtgttcttcataaggacattccaa

SEQ ID NO: 128336 - DNA, 25 bp, Artificial
  Probe
agctcagactattacaataacacca

SEQ ID NO: 128337 - DNA, 25 bp, Artificial
  Probe
tagtgttcttcataaggacattcca

SEQ ID NO: 128338 - DNA, 25 bp, Artificial
  Probe
cagctcagactattacaataacacc

SEQ ID NO: 128339 - DNA, 25 bp, Artificial
  Probe
gtgttcttcataaggacattccaat

SEQ ID NO: 128340 - DNA, 25 bp, Artificial
  Probe
ggcaccagaggtattagaagataat

SEQ ID NO: 128341 - DNA, 25 bp, Artificial
  Probe
tggcaccagaggtattagaagataa

SEQ ID NO: 128342 - DNA, 25 bp, Artificial
  Probe
acagctcagactattacaataacac

SEQ ID NO: 128343 - DNA, 25 bp, Artificial
  Probe
gaactaatactcatggaagacatca

SEQ ID NO: 128344 - DNA, 25 bp, Artificial
  Probe
ttagtgttcttcataaggacattcc

SEQ ID NO: 128345 - DNA, 25 bp, Artificial
  Probe
gcaccagaggtattagaagataatg

SEQ ID NO: 128346 - DNA, 25 bp, Artificial
  Probe
tgaactaatactcatggaagacatc

SEQ ID NO: 128347 - DNA, 25 bp, Artificial
  Probe
agagataatgaggcacagtttcttt

SEQ ID NO: 128348 - DNA, 25 bp, Artificial
  Probe
aaagagataatgaggcacagtttct

SEQ ID NO: 128349 - DNA, 25 bp, Artificial
  Probe
aactaatactcatggaagacatcaa

SEQ ID NO: 128350 - DNA, 25 bp, Artificial
  Probe
ccagaggtattagaagataatgact

SEQ ID NO: 128351 - DNA, 25 bp, Artificial
  Probe
tcttagtgttcttcataaggacatt

SEQ ID NO: 128352 - DNA, 25 bp, Artificial
  Probe
tgttcttcataaggacattccaata

SEQ ID NO: 128353 - DNA, 25 bp, Artificial
  Probe
cttagtgttcttcataaggacattc

SEQ ID NO: 128354 - DNA, 25 bp, Artificial
  Probe
atcttagtgttcttcataaggacat

SEQ ID NO: 128355 - DNA, 25 bp, Artificial
  Probe
ttgaactaatactcatggaagacat

SEQ ID NO: 128356 - DNA, 25 bp, Artificial
  Probe
gtatgaaatgatgtgtgggaggttg

SEQ ID NO: 128357 - DNA, 25 bp, Artificial
  Probe
atgtatgaaatgatgtgtgggaggt

SEQ ID NO: 128358 - DNA, 25 bp, Artificial
  Probe
acttgcattatcttagtgttcttca

SEQ ID NO: 128359 - DNA, 25 bp, Artificial
  Probe
actattacaataacaccacctgaaa

SEQ ID NO: 128360 - DNA, 25 bp, Artificial
  Probe
atctggttcaatttcaggaagactt

SEQ ID NO: 128361 - DNA, 25 bp, Artificial
  Probe
aatctggttcaatttcaggaagact

SEQ ID NO: 128362 - DNA, 25 bp, Artificial
  Probe
caatctggttcaatttcaggaagac

SEQ ID NO: 128363 - DNA, 25 bp, Artificial
  Probe
ggtattagaagataatgactatggc

SEQ ID NO: 128364 - DNA, 25 bp, Artificial
  Probe
tgtatgaaatgatgtgtgggaggtt

SEQ ID NO: 128365 - DNA, 25 bp, Artificial
  Probe
ctggcaccagaggtattagaagata

SEQ ID NO: 128366 - DNA, 25 bp, Artificial
  Probe
agacttgcattatcttagtgttctt

SEQ ID NO: 128367 - DNA, 25 bp, Artificial
  Probe
ttagaagataatgactatggccgag

SEQ ID NO: 128368 - DNA, 25 bp, Artificial
  Probe
gacttgcattatcttagtgttcttc

SEQ ID NO: 128369 - DNA, 25 bp, Artificial
  Probe
tacagctcagactattacaataaca

SEQ ID NO: 128370 - DNA, 25 bp, Artificial
  Probe
tctggttcaatttcaggaagacttg

SEQ ID NO: 128371 - DNA, 25 bp, Artificial
  Probe
cattgctttcagggctcttgataaa

SEQ ID NO: 128372 - DNA, 25 bp, Artificial
  Probe
accagaggtattagaagataatgac

SEQ ID NO: 128373 - DNA, 25 bp, Artificial
  Probe
caccagaggtattagaagataatga

SEQ ID NO: 128374 - DNA, 25 bp, Artificial
  Probe
aagtcagaataaggtagtcacatcg

SEQ ID NO: 128375 - DNA, 25 bp, Artificial
  Probe
aagatgtgtatagtaatgtggtccg

SEQ ID NO: 128376 - DNA, 25 bp, Artificial
  Probe
ggaagtcagaataaggtagtcacat

SEQ ID NO: 128377 - DNA, 25 bp, Artificial
  Probe
gatgtgtatagtaatgtggtccgta

SEQ ID NO: 128378 - DNA, 25 bp, Artificial
  Probe
tggaagatgtgtatagtaatgtggt

SEQ ID NO: 128379 - DNA, 25 bp, Artificial
  Probe
agatgtgtatagtaatgtggtccgt

SEQ ID NO: 128380 - DNA, 25 bp, Artificial
  Probe
gaagatgtgtatagtaatgtggtcc

SEQ ID NO: 128381 - DNA, 25 bp, Artificial
  Probe
ggaagatgtgtatagtaatgtggtc

SEQ ID NO: 128382 - DNA, 25 bp, Artificial
  Probe
gaagtcagaataaggtagtcacatc

SEQ ID NO: 128383 - DNA, 25 bp, Artificial
  Probe
atgtgtatagtaatgtggtccgtac

SEQ ID NO: 128384 - DNA, 25 bp, Artificial
  Probe
ttggaagatgtgtatagtaatgtgg

SEQ ID NO: 128385 - DNA, 25 bp, Artificial
  Probe
ccgtcttggaagatgtgtatagtaa

SEQ ID NO: 128386 - DNA, 25 bp, Artificial
  Probe
gctgtgtcagatatgattatggaac

SEQ ID NO: 128387 - DNA, 25 bp, Artificial
  Probe
cgtcttggaagatgtgtatagtaat

SEQ ID NO: 128388 - DNA, 25 bp, Artificial
  Probe
gccgtcttggaagatgtgtatagta

SEQ ID NO: 128389 - DNA, 25 bp, Artificial
  Probe
agtcagaataaggtagtcacatcga

SEQ ID NO: 128390 - DNA, 25 bp, Artificial
  Probe
tgtcagatatgattatggaactagc

SEQ ID NO: 128391 - DNA, 25 bp, Artificial
  Probe
cttggaagatgtgtatagtaatgtg

SEQ ID NO: 128392 - DNA, 25 bp, Artificial
  Probe
ctgtgtcagatatgattatggaact

SEQ ID NO: 128393 - DNA, 25 bp, Artificial
  Probe
atcagggtatcatttacaggaaagc

SEQ ID NO: 128394 - DNA, 25 bp, Artificial
  Probe
gatgccataaatcacgacactaaag

SEQ ID NO: 128395 - DNA, 25 bp, Artificial
  Probe
atgccataaatcacgacactaaaga

SEQ ID NO: 128396 - DNA, 25 bp, Artificial
  Probe
agggtatcatttacaggaaagcaag

SEQ ID NO: 128397 - DNA, 25 bp, Artificial
  Probe
cagggtatcatttacaggaaagcaa

SEQ ID NO: 128398 - DNA, 25 bp, Artificial
  Probe
gttgatgaatgtactcgaacttaga

SEQ ID NO: 128399 - DNA, 25 bp, Artificial
  Probe
tgccataaatcacgacactaaagag

SEQ ID NO: 128400 - DNA, 25 bp, Artificial
  Probe
agctgtgtcagatatgattatggaa

SEQ ID NO: 128401 - DNA, 25 bp, Artificial
  Probe
aagctgtgtcagatatgattatgga

SEQ ID NO: 128402 - DNA, 25 bp, Artificial
  Probe
cacagagttgaagaagtacagccat

SEQ ID NO: 128403 - DNA, 25 bp, Artificial
  Probe
tgtatagtaatgtggtccgtacctg

SEQ ID NO: 128404 - DNA, 25 bp, Artificial
  Probe
gtgtatagtaatgtggtccgtacct

SEQ ID NO: 128405 - DNA, 25 bp, Artificial
  Probe
gggaagtcagaataaggtagtcaca

SEQ ID NO: 128406 - DNA, 25 bp, Artificial
  Probe
ctgaactgcttgagtctgctgataa

SEQ ID NO: 128407 - DNA, 25 bp, Artificial
  Probe
ggatgccataaatcacgacactaaa

SEQ ID NO: 128408 - DNA, 25 bp, Artificial
  Probe
gtcagaataaggtagtcacatcgac

SEQ ID NO: 128409 - DNA, 25 bp, Artificial
  Probe
ttgatgaatgtactcgaacttagaa

SEQ ID NO: 128410 - DNA, 25 bp, Artificial
  Probe
tgtgtatagtaatgtggtccgtacc

SEQ ID NO: 128411 - DNA, 25 bp, Artificial
  Probe
gggtatcatttacaggaaagcaagg

SEQ ID NO: 128412 - DNA, 25 bp, Artificial
  Probe
gaagtacagccatgtcaacaagaag

SEQ ID NO: 128413 - DNA, 25 bp, Artificial
  Probe
gaagaagtacagccatgtcaacaag

SEQ ID NO: 128414 - DNA, 25 bp, Artificial
  Probe
tgtgtcagatatgattatggaacta

SEQ ID NO: 128415 - DNA, 25 bp, Artificial
  Probe
ggatcagggtatcatttacaggaaa

SEQ ID NO: 128416 - DNA, 25 bp, Artificial
  Probe
acagagttgaagaagtacagccatg

SEQ ID NO: 128417 - DNA, 25 bp, Artificial
  Probe
tcttggaagatgtgtatagtaatgt

SEQ ID NO: 128418 - DNA, 25 bp, Artificial
  Probe
tcagggtatcatttacaggaaagca

SEQ ID NO: 128419 - DNA, 25 bp, Artificial
  Probe
cacatacatcaggaatcttggtgtc

SEQ ID NO: 128420 - DNA, 25 bp, Artificial
  Probe
tatttagtttccttctccaccacaa

SEQ ID NO: 128421 - DNA, 25 bp, Artificial
  Probe
ttatttagtttccttctccaccaca

SEQ ID NO: 128422 - DNA, 25 bp, Artificial
  Probe
ctttactggattcgttatggttgtt

SEQ ID NO: 128423 - DNA, 25 bp, Artificial
  Probe
gacaacatctacctggatttcttct

SEQ ID NO: 128424 - DNA, 25 bp, Artificial
  Probe
ccaggacaaccaactattaaagaag

SEQ ID NO: 128425 - DNA, 25 bp, Artificial
  Probe
tttactggattcgttatggttgttt

SEQ ID NO: 128426 - DNA, 25 bp, Artificial
  Probe
attgctttactggattcgttatggt

SEQ ID NO: 128427 - DNA, 25 bp, Artificial
  Probe
acatctacctggatttcttctactc

SEQ ID NO: 128428 - DNA, 25 bp, Artificial
  Probe
ttgctttactggattcgttatggtt

SEQ ID NO: 128429 - DNA, 25 bp, Artificial
  Probe
cattgctttactggattcgttatgg

SEQ ID NO: 128430 - DNA, 25 bp, Artificial
  Probe
acaacatctacctggatttcttcta

SEQ ID NO: 128431 - DNA, 25 bp, Artificial
  Probe
tttatttagtttccttctccaccac

SEQ ID NO: 128432 - DNA, 25 bp, Artificial
  Probe
aacatctacctggatttcttctact

SEQ ID NO: 128433 - DNA, 25 bp, Artificial
  Probe
caacatctacctggatttcttctac

SEQ ID NO: 128434 - DNA, 25 bp, Artificial
  Probe
ggacaacatctacctggatttcttc

SEQ ID NO: 128435 - DNA, 25 bp, Artificial
  Probe
ctttatttagtttccttctccacca

SEQ ID NO: 128436 - DNA, 25 bp, Artificial
  Probe
gccaggacaaccaactattaaagaa

SEQ ID NO: 128437 - DNA, 25 bp, Artificial
  Probe
agaatttacctccaagtcaagcaag

SEQ ID NO: 128438 - DNA, 25 bp, Artificial
  Probe
atttagtttccttctccaccacaac

SEQ ID NO: 128439 - DNA, 25 bp, Artificial
  Probe
tctttatttagtttccttctccacc

SEQ ID NO: 128440 - DNA, 25 bp, Artificial
  Probe
gctttactggattcgttatggttgt

SEQ ID NO: 128441 - DNA, 25 bp, Artificial
  Probe
tgctttactggattcgttatggttg

SEQ ID NO: 128442 - DNA, 25 bp, Artificial
  Probe
acatacatcaggaatcttggtgtcc

SEQ ID NO: 128443 - DNA, 25 bp, Artificial
  Probe
caggacaaccaactattaaagaagt

SEQ ID NO: 128444 - DNA, 25 bp, Artificial
  Probe
aacttctgcttcctgctctatttct

SEQ ID NO: 128445 - DNA, 25 bp, Artificial
  Probe
caacttctgcttcctgctctatttc

SEQ ID NO: 128446 - DNA, 25 bp, Artificial
  Probe
aagagaatttacctccaagtcaagc

SEQ ID NO: 128447 - DNA, 25 bp, Artificial
  Probe
aaagagaatttacctccaagtcaag

SEQ ID NO: 128448 - DNA, 25 bp, Artificial
  Probe
gagaatttacctccaagtcaagcaa

SEQ ID NO: 128449 - DNA, 25 bp, Artificial
  Probe
gggacaacatctacctggatttctt

SEQ ID NO: 128450 - DNA, 25 bp, Artificial
  Probe
ttagtttccttctccaccacaacat

SEQ ID NO: 128451 - DNA, 25 bp, Artificial
  Probe
ccacatacatcaggaatcttggtgt

SEQ ID NO: 128452 - DNA, 25 bp, Artificial
  Probe
catctacctggatttcttctactcc

SEQ ID NO: 128453 - DNA, 25 bp, Artificial
  Probe
tttagtttccttctccaccacaaca

SEQ ID NO: 128454 - DNA, 25 bp, Artificial
  Probe
acttctgcttcctgctctatttctg

SEQ ID NO: 128455 - DNA, 25 bp, Artificial
  Probe
agagaatttacctccaagtcaagca

SEQ ID NO: 128456 - DNA, 25 bp, Artificial
  Probe
tagtttccttctccaccacaacatc

SEQ ID NO: 128457 - DNA, 25 bp, Artificial
  Probe
ccattgctttactggattcgttatg

SEQ ID NO: 128458 - DNA, 25 bp, Artificial
  Probe
atctacctggatttcttctactccg

SEQ ID NO: 128459 - DNA, 25 bp, Artificial
  Probe
aaatgaccattgctttactggattc

SEQ ID NO: 128460 - DNA, 25 bp, Artificial
  Probe
gaaatgaccattgctttactggatt

SEQ ID NO: 128461 - DNA, 25 bp, Artificial
  Probe
tttccttctccaccacaacatcaaa

SEQ ID NO: 128462 - DNA, 25 bp, Artificial
  Probe
accattgctttactggattcgttat

SEQ ID NO: 128463 - DNA, 25 bp, Artificial
  Probe
gaatttacctccaagtcaagcaagc

SEQ ID NO: 128464 - DNA, 25 bp, Artificial
  Probe
aggaatacaaagaccttgacaccaa

SEQ ID NO: 128465 - DNA, 25 bp, Artificial
  Probe
tacaacaactacggctgctactgtg

SEQ ID NO: 128466 - DNA, 25 bp, Artificial
  Probe
gagtacaacaactacggctgctact

SEQ ID NO: 128467 - DNA, 25 bp, Artificial
  Probe
gtacaacaactacggctgctactgt

SEQ ID NO: 128468 - DNA, 25 bp, Artificial
  Probe
agtacaacaactacggctgctactg

SEQ ID NO: 128469 - DNA, 25 bp, Artificial
  Probe
aaggaatacaaagaccttgacacca

SEQ ID NO: 128470 - DNA, 25 bp, Artificial
  Probe
taataaagtaccagcagaaagaaaa

SEQ ID NO: 128471 - DNA, 25 bp, Artificial
  Probe
ctgtctctctctctctctctctctc

SEQ ID NO: 128472 - DNA, 25 bp, Artificial
  Probe
ctctctctgtctctctctctctctc

SEQ ID NO: 128473 - DNA, 25 bp, Artificial
  Probe
ctctctctctgtctctctctctctc

SEQ ID NO: 128474 - DNA, 25 bp, Artificial
  Probe
gcaccaagtaatgtccaataatagg

SEQ ID NO: 128475 - DNA, 25 bp, Artificial
  Probe
tctgtctctctctctctctctctct

SEQ ID NO: 128476 - DNA, 25 bp, Artificial
  Probe
tctctctgtctctctctctctctct

SEQ ID NO: 128477 - DNA, 25 bp, Artificial
  Probe
tctctctctgtctctctctctctct

SEQ ID NO: 128478 - DNA, 25 bp, Artificial
  Probe
ctgtctctctctctgtctctctctc

SEQ ID NO: 128479 - DNA, 25 bp, Artificial
  Probe
ctctgtctctctctctgtctctctc

SEQ ID NO: 128480 - DNA, 25 bp, Artificial
  Probe
gcttcactggactctgagataatag

SEQ ID NO: 128481 - DNA, 25 bp, Artificial
  Probe
tgtctctctctctgtctctctctct

SEQ ID NO: 128482 - DNA, 25 bp, Artificial
  Probe
tctgtctctctctctgtctctctct

SEQ ID NO: 128483 - DNA, 25 bp, Artificial
  Probe
tgcttcactggactctgagataata

SEQ ID NO: 128484 - DNA, 25 bp, Artificial
  Probe
cttcactggactctgagataatagt

SEQ ID NO: 128485 - DNA, 25 bp, Artificial
  Probe
ctggactctgagataatagtagacc

SEQ ID NO: 128486 - DNA, 25 bp, Artificial
  Probe
ttgcttcactggactctgagataat

SEQ ID NO: 128487 - DNA, 25 bp, Artificial
  Probe
actggactctgagataatagtagac

SEQ ID NO: 128488 - DNA, 25 bp, Artificial
  Probe
cactggactctgagataatagtaga

SEQ ID NO: 128489 - DNA, 25 bp, Artificial
  Probe
tcactggactctgagataatagtag

SEQ ID NO: 128490 - DNA, 25 bp, Artificial
  Probe
ttcactggactctgagataatagta

SEQ ID NO: 128491 - DNA, 25 bp, Artificial
  Probe
tattaatcagaagacagcttgctct

SEQ ID NO: 128492 - DNA, 25 bp, Artificial
  Probe
ttattaatcagaagacagcttgctc

SEQ ID NO: 128493 - DNA, 25 bp, Artificial
  Probe
atcgacgtagatagattcaactcag

SEQ ID NO: 128494 - DNA, 25 bp, Artificial
  Probe
acatccatccaaatacctttctact

SEQ ID NO: 128495 - DNA, 25 bp, Artificial
  Probe
cacatccatccaaatacctttctac

SEQ ID NO: 128496 - DNA, 25 bp, Artificial
  Probe
tcgacgtagatagattcaactcagt

SEQ ID NO: 128497 - DNA, 25 bp, Artificial
  Probe
tgcaccaagtaatgtccaataatag

SEQ ID NO: 128498 - DNA, 25 bp, Artificial
  Probe
ctgcaccaagtaatgtccaataata

SEQ ID NO: 128499 - DNA, 25 bp, Artificial
  Probe
attattaatcagaagacagcttgct

SEQ ID NO: 128500 - DNA, 25 bp, Artificial
  Probe
gcacatccatccaaatacctttcta

SEQ ID NO: 128501 - DNA, 25 bp, Artificial
  Probe
cgacgtagatagattcaactcagtt

SEQ ID NO: 128502 - DNA, 25 bp, Artificial
  Probe
caccaagtaatgtccaataatagga

SEQ ID NO: 128503 - DNA, 25 bp, Artificial
  Probe
actgcaccaagtaatgtccaataat

SEQ ID NO: 128504 - DNA, 25 bp, Artificial
  Probe
gagataatagtagacccagcagcat

SEQ ID NO: 128505 - DNA, 25 bp, Artificial
  Probe
catccatccaaatacctttctactt

SEQ ID NO: 128506 - DNA, 25 bp, Artificial
  Probe
aactgcaccaagtaatgtccaataa

SEQ ID NO: 128507 - DNA, 25 bp, Artificial
  Probe
ggactctgagataatagtagaccca

SEQ ID NO: 128508 - DNA, 25 bp, Artificial
  Probe
tggactctgagataatagtagaccc

SEQ ID NO: 128509 - DNA, 25 bp, Artificial
  Probe
tcccaatatgaaatgagttctctct

SEQ ID NO: 128510 - DNA, 25 bp, Artificial
  Probe
accaagtaatgtccaataataggaa

SEQ ID NO: 128511 - DNA, 25 bp, Artificial
  Probe
tatcgacgtagatagattcaactca

SEQ ID NO: 128512 - DNA, 25 bp, Artificial
  Probe
atccatccaaatacctttctacttt

SEQ ID NO: 128513 - DNA, 25 bp, Artificial
  Probe
tctgagataatagtagacccagcag

SEQ ID NO: 128514 - DNA, 25 bp, Artificial
  Probe
ctctgagataatagtagacccagca

SEQ ID NO: 128515 - DNA, 25 bp, Artificial
  Probe
actctgagataatagtagacccagc

SEQ ID NO: 128516 - DNA, 25 bp, Artificial
  Probe
ggctaatgaggtcctatgctctatt

SEQ ID NO: 128517 - DNA, 25 bp, Artificial
  Probe
tatagccagcacagttgtcttcttc

SEQ ID NO: 128518 - DNA, 25 bp, Artificial
  Probe
atttggtttctcttcttatggtccc

SEQ ID NO: 128519 - DNA, 25 bp, Artificial
  Probe
tggctaatgaggtcctatgctctat

SEQ ID NO: 128520 - DNA, 25 bp, Artificial
  Probe
gtatagccagcacagttgtcttctt

SEQ ID NO: 128521 - DNA, 25 bp, Artificial
  Probe
aatgtagagagcaaactgtcttgta

SEQ ID NO: 128522 - DNA, 25 bp, Artificial
  Probe
atgtagagagcaaactgtcttgtat

SEQ ID NO: 128523 - DNA, 25 bp, Artificial
  Probe
tatttggtttctcttcttatggtcc

SEQ ID NO: 128524 - DNA, 25 bp, Artificial
  Probe
gaatgtagagagcaaactgtcttgt

SEQ ID NO: 128525 - DNA, 25 bp, Artificial
  Probe
tcctagtgaggtggttctatctctg

SEQ ID NO: 128526 - DNA, 25 bp, Artificial
  Probe
gctaatgaggtcctatgctctattt

SEQ ID NO: 128527 - DNA, 25 bp, Artificial
  Probe
gctgtatttggtttctcttcttatg

SEQ ID NO: 128528 - DNA, 25 bp, Artificial
  Probe
tgtatttggtttctcttcttatggt

SEQ ID NO: 128529 - DNA, 25 bp, Artificial
  Probe
aggaatgtagagagcaaactgtctt

SEQ ID NO: 128530 - DNA, 25 bp, Artificial
  Probe
ggaatgtagagagcaaactgtcttg

SEQ ID NO: 128531 - DNA, 25 bp, Artificial
  Probe
gagtatccaagaaggcagagtgaaa

SEQ ID NO: 128532 - DNA, 25 bp, Artificial
  Probe
cctaaattcagggtgtctcctatac

SEQ ID NO: 128533 - DNA, 25 bp, Artificial
  Probe
tcctaaattcagggtgtctcctata

SEQ ID NO: 128534 - DNA, 25 bp, Artificial
  Probe
gtggctaatgaggtcctatgctcta

SEQ ID NO: 128535 - DNA, 25 bp, Artificial
  Probe
gaggaatgtagagagcaaactgtct

SEQ ID NO: 128536 - DNA, 25 bp, Artificial
  Probe
ttaccagtggctaatgaggtcctat

SEQ ID NO: 128537 - DNA, 25 bp, Artificial
  Probe
gtatttggtttctcttcttatggtc

SEQ ID NO: 128538 - DNA, 25 bp, Artificial
  Probe
ctgtatttggtttctcttcttatgg

SEQ ID NO: 128539 - DNA, 25 bp, Artificial
  Probe
ctcctaaattcagggtgtctcctat

SEQ ID NO: 128540 - DNA, 25 bp, Artificial
  Probe
aaagggaggaatgtagagagcaaac

SEQ ID NO: 128541 - DNA, 25 bp, Artificial
  Probe
ggtttctcttcttatggtcccattg

SEQ ID NO: 128542 - DNA, 25 bp, Artificial
  Probe
ctaaattcagggtgtctcctatacc

SEQ ID NO: 128543 - DNA, 25 bp, Artificial
  Probe
gtattgggagctgtatttggtttct

SEQ ID NO: 128544 - DNA, 25 bp, Artificial
  Probe
ggaggaatgtagagagcaaactgtc

SEQ ID NO: 128545 - DNA, 25 bp, Artificial
  Probe
atagccagcacagttgtcttcttct

SEQ ID NO: 128546 - DNA, 25 bp, Artificial
  Probe
cgagtatccaagaaggcagagtgaa

SEQ ID NO: 128547 - DNA, 25 bp, Artificial
  Probe
gtttctcttcttatggtcccattgc

SEQ ID NO: 128548 - DNA, 25 bp, Artificial
  Probe
tagttcctacatcagtgccctagag

SEQ ID NO: 128549 - DNA, 25 bp, Artificial
  Probe
taccagtggctaatgaggtcctatg

SEQ ID NO: 128550 - DNA, 25 bp, Artificial
  Probe
tattgggagctgtatttggtttctc

SEQ ID NO: 128551 - DNA, 25 bp, Artificial
  Probe
gtgtggttgtctccttcttctgtct

SEQ ID NO: 128552 - DNA, 25 bp, Artificial
  Probe
agctgtatttggtttctcttcttat

SEQ ID NO: 128553 - DNA, 25 bp, Artificial
  Probe
ggagctgtatttggtttctcttctt

SEQ ID NO: 128554 - DNA, 25 bp, Artificial
  Probe
tgtatagccagcacagttgtcttct

SEQ ID NO: 128555 - DNA, 25 bp, Artificial
  Probe
actcctaaattcagggtgtctccta

SEQ ID NO: 128556 - DNA, 25 bp, Artificial
  Probe
ttcagtaccatcgccaagcactata

SEQ ID NO: 128557 - DNA, 25 bp, Artificial
  Probe
ggtattgggagctgtatttggtttc

SEQ ID NO: 128558 - DNA, 25 bp, Artificial
  Probe
gagctgtatttggtttctcttctta

SEQ ID NO: 128559 - DNA, 25 bp, Artificial
  Probe
aagggaggaatgtagagagcaaact

SEQ ID NO: 128560 - DNA, 25 bp, Artificial
  Probe
agaagtgatctgtatagccagcaca

SEQ ID NO: 128561 - DNA, 25 bp, Artificial
  Probe
ttcttggacttctgtatgcttgtaa

SEQ ID NO: 128562 - DNA, 25 bp, Artificial
  Probe
cttcttggacttctgtatgcttgta

SEQ ID NO: 128563 - DNA, 25 bp, Artificial
  Probe
tcttggacttctgtatgcttgtaac

SEQ ID NO: 128564 - DNA, 25 bp, Artificial
  Probe
gaagagatgaatcacactgtcctta

SEQ ID NO: 128565 - DNA, 25 bp, Artificial
  Probe
aagagatgaatcacactgtccttaa

SEQ ID NO: 128566 - DNA, 25 bp, Artificial
  Probe
agatgatgaatgaactcgtaagtgt

SEQ ID NO: 128567 - DNA, 25 bp, Artificial
  Probe
cttggacttctgtatgcttgtaacc

SEQ ID NO: 128568 - DNA, 25 bp, Artificial
  Probe
aagatgatgaatgaactcgtaagtg

SEQ ID NO: 128569 - DNA, 25 bp, Artificial
  Probe
gatgatgaatgaactcgtaagtgta

SEQ ID NO: 128570 - DNA, 25 bp, Artificial
  Probe
atgaatgaactcgtaagtgtacctt

SEQ ID NO: 128571 - DNA, 25 bp, Artificial
  Probe
atgaagagatgaatcacactgtcct

SEQ ID NO: 128572 - DNA, 25 bp, Artificial
  Probe
gatgaatgaactcgtaagtgtacct

SEQ ID NO: 128573 - DNA, 25 bp, Artificial
  Probe
tgaatgaactcgtaagtgtaccttc

SEQ ID NO: 128574 - DNA, 25 bp, Artificial
  Probe
tgatgaatgaactcgtaagtgtacc

SEQ ID NO: 128575 - DNA, 25 bp, Artificial
  Probe
tgaagagatgaatcacactgtcctt

SEQ ID NO: 128576 - DNA, 25 bp, Artificial
  Probe
gaacatgaagagatgaatcacactg

SEQ ID NO: 128577 - DNA, 25 bp, Artificial
  Probe
tctgtgaacatgaagagatgaatca

SEQ ID NO: 128578 - DNA, 25 bp, Artificial
  Probe
tgaacatgaagagatgaatcacact

SEQ ID NO: 128579 - DNA, 25 bp, Artificial
  Probe
atgatgaatgaactcgtaagtgtac

SEQ ID NO: 128580 - DNA, 25 bp, Artificial
  Probe
gaatgaactcgtaagtgtaccttcc

SEQ ID NO: 128581 - DNA, 25 bp, Artificial
  Probe
aacatgaagagatgaatcacactgt

SEQ ID NO: 128582 - DNA, 25 bp, Artificial
  Probe
acatgaagagatgaatcacactgtc

SEQ ID NO: 128583 - DNA, 25 bp, Artificial
  Probe
catgaagagatgaatcacactgtcc

SEQ ID NO: 128584 - DNA, 25 bp, Artificial
  Probe
ccttcttggacttctgtatgcttgt

SEQ ID NO: 128585 - DNA, 25 bp, Artificial
  Probe
accaaagatgatgaatgaactcgta

SEQ ID NO: 128586 - DNA, 25 bp, Artificial
  Probe
ccaaagatgatgaatgaactcgtaa

SEQ ID NO: 128587 - DNA, 25 bp, Artificial
  Probe
taaccaaagatgatgaatgaactcg

SEQ ID NO: 128588 - DNA, 25 bp, Artificial
  Probe
tagaataaacacccaaatcaagcgt

SEQ ID NO: 128589 - DNA, 25 bp, Artificial
  Probe
aaccaaagatgatgaatgaactcgt

SEQ ID NO: 128590 - DNA, 25 bp, Artificial
  Probe
cctagaataaacacccaaatcaagc

SEQ ID NO: 128591 - DNA, 25 bp, Artificial
  Probe
gcctagaataaacacccaaatcaag

SEQ ID NO: 128592 - DNA, 25 bp, Artificial
  Probe
tagcctagaataaacacccaaatca

SEQ ID NO: 128593 - DNA, 25 bp, Artificial
  Probe
tgtaaccaaagatgatgaatgaact

SEQ ID NO: 128594 - DNA, 25 bp, Artificial
  Probe
agcctagaataaacacccaaatcaa

SEQ ID NO: 128595 - DNA, 25 bp, Artificial
  Probe
gcttgtaaccaaagatgatgaatga

SEQ ID NO: 128596 - DNA, 25 bp, Artificial
  Probe
tgcttgtaaccaaagatgatgaatg

SEQ ID NO: 128597 - DNA, 25 bp, Artificial
  Probe
tctgtatgcttgtaaccaaagatga

SEQ ID NO: 128598 - DNA, 25 bp, Artificial
  Probe
gacttctgtatgcttgtaaccaaag

SEQ ID NO: 128599 - DNA, 25 bp, Artificial
  Probe
ctagaataaacacccaaatcaagcg

SEQ ID NO: 128600 - DNA, 25 bp, Artificial
  Probe
tgtatgcttgtaaccaaagatgatg

SEQ ID NO: 128601 - DNA, 25 bp, Artificial
  Probe
ttctgtatgcttgtaaccaaagatg

SEQ ID NO: 128602 - DNA, 25 bp, Artificial
  Probe
acttctgtatgcttgtaaccaaaga

SEQ ID NO: 128603 - DNA, 25 bp, Artificial
  Probe
gtatgcttgtaaccaaagatgatga

SEQ ID NO: 128604 - DNA, 25 bp, Artificial
  Probe
ctgtatgcttgtaaccaaagatgat

SEQ ID NO: 128605 - DNA, 25 bp, Artificial
  Probe
ctagcctagaataaacacccaaatc

SEQ ID NO: 128606 - DNA, 25 bp, Artificial
  Probe
ttcctaattgtgatgttcctgcttc

SEQ ID NO: 128607 - DNA, 25 bp, Artificial
  Probe
ttgatgtagtcacggtggaactata

SEQ ID NO: 128608 - DNA, 25 bp, Artificial
  Probe
tcctaattgtgatgttcctgcttcc

SEQ ID NO: 128609 - DNA, 25 bp, Artificial
  Probe
aacttaatattcggctccttggtca

SEQ ID NO: 128610 - DNA, 25 bp, Artificial
  Probe
tttcctaattgtgatgttcctgctt

SEQ ID NO: 128611 - DNA, 25 bp, Artificial
  Probe
tgatgtagtcacggtggaactatac

SEQ ID NO: 128612 - DNA, 25 bp, Artificial
  Probe
acttaatattcggctccttggtcag

SEQ ID NO: 128613 - DNA, 25 bp, Artificial
  Probe
gaactctcttgatgtagtcacggtg

SEQ ID NO: 128614 - DNA, 25 bp, Artificial
  Probe
cttgatgtagtcacggtggaactat

SEQ ID NO: 128615 - DNA, 25 bp, Artificial
  Probe
gatgtagtcacggtggaactatacc

SEQ ID NO: 128616 - DNA, 25 bp, Artificial
  Probe
gtggaactctcttgatgtagtcacg

SEQ ID NO: 128617 - DNA, 25 bp, Artificial
  Probe
cgtggaactctcttgatgtagtcac

SEQ ID NO: 128618 - DNA, 25 bp, Artificial
  Probe
aaacttaatattcggctccttggtc

SEQ ID NO: 128619 - DNA, 25 bp, Artificial
  Probe
gaaacttaatattcggctccttggt

SEQ ID NO: 128620 - DNA, 25 bp, Artificial
  Probe
tcttgatgtagtcacggtggaacta

SEQ ID NO: 128621 - DNA, 25 bp, Artificial
  Probe
gtgacgtaaatgtagctgtgtattg

SEQ ID NO: 128622 - DNA, 25 bp, Artificial
  Probe
tgacgtaaatgtagctgtgtattgt

SEQ ID NO: 128623 - DNA, 25 bp, Artificial
  Probe
tgtgacgtaaatgtagctgtgtatt

SEQ ID NO: 128624 - DNA, 25 bp, Artificial
  Probe
cctaattgtgatgttcctgcttccg

SEQ ID NO: 128625 - DNA, 25 bp, Artificial
  Probe
ggaactctcttgatgtagtcacggt

SEQ ID NO: 128626 - DNA, 25 bp, Artificial
  Probe
tggaactctcttgatgtagtcacgg

SEQ ID NO: 128627 - DNA, 25 bp, Artificial
  Probe
ctgtgacgtaaatgtagctgtgtat

SEQ ID NO: 128628 - DNA, 25 bp, Artificial
  Probe
ctctcttgatgtagtcacggtggaa

SEQ ID NO: 128629 - DNA, 25 bp, Artificial
  Probe
cgtaaatgtagctgtgtattgtccc

SEQ ID NO: 128630 - DNA, 25 bp, Artificial
  Probe
acgtaaatgtagctgtgtattgtcc

SEQ ID NO: 128631 - DNA, 25 bp, Artificial
  Probe
agcgtggaactctcttgatgtagtc

SEQ ID NO: 128632 - DNA, 25 bp, Artificial
  Probe
tcagcgtggaactctcttgatgtag

SEQ ID NO: 128633 - DNA, 25 bp, Artificial
  Probe
ctcagcgtggaactctcttgatgta

SEQ ID NO: 128634 - DNA, 25 bp, Artificial
  Probe
tcctgggaaacttaatattcggctc

SEQ ID NO: 128635 - DNA, 25 bp, Artificial
  Probe
gacgtaaatgtagctgtgtattgtc

SEQ ID NO: 128636 - DNA, 25 bp, Artificial
  Probe
ctcttgatgtagtcacggtggaact

SEQ ID NO: 128637 - DNA, 25 bp, Artificial
  Probe
tctcttgatgtagtcacggtggaac

SEQ ID NO: 128638 - DNA, 25 bp, Artificial
  Probe
aactctcttgatgtagtcacggtgg

SEQ ID NO: 128639 - DNA, 25 bp, Artificial
  Probe
aaagccattctcttctctcaccatg

SEQ ID NO: 128640 - DNA, 25 bp, Artificial
  Probe
cgccttgttatcttttcctaattgt

SEQ ID NO: 128641 - DNA, 25 bp, Artificial
  Probe
catcaccaaagcaatccctatcctg

SEQ ID NO: 128642 - DNA, 25 bp, Artificial
  Probe
cttttcctaattgtgatgttcctgc

SEQ ID NO: 128643 - DNA, 25 bp, Artificial
  Probe
gtcctgggaaacttaatattcggct

SEQ ID NO: 128644 - DNA, 25 bp, Artificial
  Probe
tcttttcctaattgtgatgttcctg

SEQ ID NO: 128645 - DNA, 25 bp, Artificial
  Probe
ggaaacttaatattcggctccttgg

SEQ ID NO: 128646 - DNA, 25 bp, Artificial
  Probe
gggaaacttaatattcggctccttg

SEQ ID NO: 128647 - DNA, 25 bp, Artificial
  Probe
ttttcctaattgtgatgttcctgct

SEQ ID NO: 128648 - DNA, 25 bp, Artificial
  Probe
gcgtggaactctcttgatgtagtca

SEQ ID NO: 128649 - DNA, 25 bp, Artificial
  Probe
cagcgtggaactctcttgatgtagt

SEQ ID NO: 128650 - DNA, 25 bp, Artificial
  Probe
atctcagcgtggaactctcttgatg

SEQ ID NO: 128651 - DNA, 25 bp, Artificial
  Probe
aagaaggagaaggaggtaataatgc

SEQ ID NO: 128652 - DNA, 25 bp, Artificial
  Probe
aagattgaatatgtggatgagacgg

SEQ ID NO: 128653 - DNA, 25 bp, Artificial
  Probe
ccgatgttaagattgaatatgtgga

SEQ ID NO: 128654 - DNA, 25 bp, Artificial
  Probe
taagattgaatatgtggatgagacg

SEQ ID NO: 128655 - DNA, 25 bp, Artificial
  Probe
agaaggagaaggaggtaataatgcg

SEQ ID NO: 128656 - DNA, 25 bp, Artificial
  Probe
gaatcagatggcgaagagaacattg

SEQ ID NO: 128657 - DNA, 25 bp, Artificial
  Probe
gaaggagaaggaggtaataatgcgg

SEQ ID NO: 128658 - DNA, 25 bp, Artificial
  Probe
tgaatcagatggcgaagagaacatt

SEQ ID NO: 128659 - DNA, 25 bp, Artificial
  Probe
cgatgttaagattgaatatgtggat

SEQ ID NO: 128660 - DNA, 25 bp, Artificial
  Probe
cgaaagaaggagaaggaggtaataa

SEQ ID NO: 128661 - DNA, 25 bp, Artificial
  Probe
cgtagagaacatggacatcagtgat

SEQ ID NO: 128662 - DNA, 25 bp, Artificial
  Probe
tgtaatgttaaataaagttcccgcc

SEQ ID NO: 128663 - DNA, 25 bp, Artificial
  Probe
cccgatgttaagattgaatatgtgg

SEQ ID NO: 128664 - DNA, 25 bp, Artificial
  Probe
gtaatgttaaataaagttcccgcct

SEQ ID NO: 128665 - DNA, 25 bp, Artificial
  Probe
gcccgatgttaagattgaatatgtg

SEQ ID NO: 128666 - DNA, 25 bp, Artificial
  Probe
agcccgatgttaagattgaatatgt

SEQ ID NO: 128667 - DNA, 25 bp, Artificial
  Probe
aagcccgatgttaagattgaatatg

SEQ ID NO: 128668 - DNA, 25 bp, Artificial
  Probe
ccgaaagaaggagaaggaggtaata

SEQ ID NO: 128669 - DNA, 25 bp, Artificial
  Probe
caagcccgatgttaagattgaatat

SEQ ID NO: 128670 - DNA, 25 bp, Artificial
  Probe
aatgttaaataaagttcccgcctta

SEQ ID NO: 128671 - DNA, 25 bp, Artificial
  Probe
taatgttaaataaagttcccgcctt

SEQ ID NO: 128672 - DNA, 25 bp, Artificial
  Probe
tgttaagattgaatatgtggatgag

SEQ ID NO: 128673 - DNA, 25 bp, Artificial
  Probe
ttaagattgaatatgtggatgagac

SEQ ID NO: 128674 - DNA, 25 bp, Artificial
  Probe
gttaagattgaatatgtggatgaga

SEQ ID NO: 128675 - DNA, 25 bp, Artificial
  Probe
atgtaatgttaaataaagttcccgc

SEQ ID NO: 128676 - DNA, 25 bp, Artificial
  Probe
acaagcccgatgttaagattgaata

SEQ ID NO: 128677 - DNA, 25 bp, Artificial
  Probe
tacaagcccgatgttaagattgaat

SEQ ID NO: 128678 - DNA, 25 bp, Artificial
  Probe
aatcagatggcgaagagaacattgg

SEQ ID NO: 128679 - DNA, 25 bp, Artificial
  Probe
aaagaaggagaaggaggtaataatg

SEQ ID NO: 128680 - DNA, 25 bp, Artificial
  Probe
ccctgtcccagatgtaatgttaaat

SEQ ID NO: 128681 - DNA, 25 bp, Artificial
  Probe
ttcaatgccacttctgagttctgtc

SEQ ID NO: 128682 - DNA, 25 bp, Artificial
  Probe
ctacaagcccgatgttaagattgaa

SEQ ID NO: 128683 - DNA, 25 bp, Artificial
  Probe
gaaagaaggagaaggaggtaataat

SEQ ID NO: 128684 - DNA, 25 bp, Artificial
  Probe
agattgaatatgtggatgagacggg

SEQ ID NO: 128685 - DNA, 25 bp, Artificial
  Probe
gttcaatgccacttctgagttctgt

SEQ ID NO: 128686 - DNA, 25 bp, Artificial
  Probe
tgttcaatgccacttctgagttctg

SEQ ID NO: 128687 - DNA, 25 bp, Artificial
  Probe
tccctgtcccagatgtaatgttaaa

SEQ ID NO: 128688 - DNA, 25 bp, Artificial
  Probe
atgttaagattgaatatgtggatga

SEQ ID NO: 128689 - DNA, 25 bp, Artificial
  Probe
tggagattgtgaagaaactggagtc

SEQ ID NO: 128690 - DNA, 25 bp, Artificial
  Probe
ctggagattgtgaagaaactggagt

SEQ ID NO: 128691 - DNA, 25 bp, Artificial
  Probe
aaagaccaaacggagagtgaagaaa

SEQ ID NO: 128692 - DNA, 25 bp, Artificial
  Probe
ggagattgtgaagaaactggagtct

SEQ ID NO: 128693 - DNA, 25 bp, Artificial
  Probe
catggactttgaaagggatgaagag

SEQ ID NO: 128694 - DNA, 25 bp, Artificial
  Probe
agaaggtgctggagattgtgaagaa

SEQ ID NO: 128695 - DNA, 25 bp, Artificial
  Probe
gatgttaagattgaatatgtggatg

SEQ ID NO: 128696 - DNA, 25 bp, Artificial
  Probe
ataaggcaggtgacagaatatcatc

SEQ ID NO: 128697 - DNA, 25 bp, Artificial
  Probe
cataaggcaggtgacagaatatcat

SEQ ID NO: 128698 - DNA, 25 bp, Artificial
  Probe
ctgaagagaagatacctcaatggag

SEQ ID NO: 128699 - DNA, 25 bp, Artificial
  Probe
tgaagagaagatacctcaatggaga

SEQ ID NO: 128700 - DNA, 25 bp, Artificial
  Probe
tctgaagagaagatacctcaatgga

SEQ ID NO: 128701 - DNA, 25 bp, Artificial
  Probe
caggtgacagaatatcatcaagcat

SEQ ID NO: 128702 - DNA, 25 bp, Artificial
  Probe
gaagagaagatacctcaatggagat

SEQ ID NO: 128703 - DNA, 25 bp, Artificial
  Probe
taaggcaggtgacagaatatcatca

SEQ ID NO: 128704 - DNA, 25 bp, Artificial
  Probe
acataaggcaggtgacagaatatca

SEQ ID NO: 128705 - DNA, 25 bp, Artificial
  Probe
gacagaatatcatcaagcatggtta

SEQ ID NO: 128706 - DNA, 25 bp, Artificial
  Probe
agatacctcaatggagataatgtct

SEQ ID NO: 128707 - DNA, 25 bp, Artificial
  Probe
tgacagaatatcatcaagcatggtt

SEQ ID NO: 128708 - DNA, 25 bp, Artificial
  Probe
atgtctccattagatcaggctgtag

SEQ ID NO: 128709 - DNA, 25 bp, Artificial
  Probe
aggtgacagaatatcatcaagcatg

SEQ ID NO: 128710 - DNA, 25 bp, Artificial
  Probe
agagaagatacctcaatggagataa

SEQ ID NO: 128711 - DNA, 25 bp, Artificial
  Probe
aagagaagatacctcaatggagata

SEQ ID NO: 128712 - DNA, 25 bp, Artificial
  Probe
aaggcaggtgacagaatatcatcaa

SEQ ID NO: 128713 - DNA, 25 bp, Artificial
  Probe
acagaatatcatcaagcatggttaa

SEQ ID NO: 128714 - DNA, 25 bp, Artificial
  Probe
cacataaggcaggtgacagaatatc

SEQ ID NO: 128715 - DNA, 25 bp, Artificial
  Probe
gtgacagaatatcatcaagcatggt

SEQ ID NO: 128716 - DNA, 25 bp, Artificial
  Probe
aagatacctcaatggagataatgtc

SEQ ID NO: 128717 - DNA, 25 bp, Artificial
  Probe
gaagatacctcaatggagataatgt

SEQ ID NO: 128718 - DNA, 25 bp, Artificial
  Probe
aggcaggtgacagaatatcatcaag

SEQ ID NO: 128719 - DNA, 25 bp, Artificial
  Probe
cgtggtatttcattatagccgtaga

SEQ ID NO: 128720 - DNA, 25 bp, Artificial
  Probe
tcgtggtatttcattatagccgtag

SEQ ID NO: 128721 - DNA, 25 bp, Artificial
  Probe
tttggtcgtggtatttcattatagc

SEQ ID NO: 128722 - DNA, 25 bp, Artificial
  Probe
agaagatacctcaatggagataatg

SEQ ID NO: 128723 - DNA, 25 bp, Artificial
  Probe
gtcgtggtatttcattatagccgta

SEQ ID NO: 128724 - DNA, 25 bp, Artificial
  Probe
tgtgccaaataaatcctttcttctt

SEQ ID NO: 128725 - DNA, 25 bp, Artificial
  Probe
ggtgacagaatatcatcaagcatgg

SEQ ID NO: 128726 - DNA, 25 bp, Artificial
  Probe
atgtgccaaataaatcctttcttct

SEQ ID NO: 128727 - DNA, 25 bp, Artificial
  Probe
gtagggcatttgtttaattggtgat

SEQ ID NO: 128728 - DNA, 25 bp, Artificial
  Probe
cttgtagggcatttgtttaattggt

SEQ ID NO: 128729 - DNA, 25 bp, Artificial
  Probe
ttggtcgtggtatttcattatagcc

SEQ ID NO: 128730 - DNA, 25 bp, Artificial
  Probe
tgccaaataaatcctttcttcttca

SEQ ID NO: 128731 - DNA, 25 bp, Artificial
  Probe
ttgtagggcatttgtttaattggtg

SEQ ID NO: 128732 - DNA, 25 bp, Artificial
  Probe
taaatcctttcttcttcaagttgcc

SEQ ID NO: 128733 - DNA, 25 bp, Artificial
  Probe
cctttggtcgtggtatttcattata

SEQ ID NO: 128734 - DNA, 25 bp, Artificial
  Probe
gtgccaaataaatcctttcttcttc

SEQ ID NO: 128735 - DNA, 25 bp, Artificial
  Probe
atctgaagagaagatacctcaatgg

SEQ ID NO: 128736 - DNA, 25 bp, Artificial
  Probe
ccatctgaagagaagatacctcaat

SEQ ID NO: 128737 - DNA, 25 bp, Artificial
  Probe
tagggcatttgtttaattggtgatg

SEQ ID NO: 128738 - DNA, 25 bp, Artificial
  Probe
ttagagccatctgaagagaagatac

SEQ ID NO: 128739 - DNA, 25 bp, Artificial
  Probe
aattagagccatctgaagagaagat

SEQ ID NO: 128740 - DNA, 25 bp, Artificial
  Probe
tgtttaattggtgatggattaggga

SEQ ID NO: 128741 - DNA, 25 bp, Artificial
  Probe
aacatccagacatcctctaacacct

SEQ ID NO: 128742 - DNA, 25 bp, Artificial
  Probe
gaaacatccagacatcctctaacac

SEQ ID NO: 128743 - DNA, 25 bp, Artificial
  Probe
ctcgcaagtaaagcaattcatcaac

SEQ ID NO: 128744 - DNA, 25 bp, Artificial
  Probe
tctcgcaagtaaagcaattcatcaa

SEQ ID NO: 128745 - DNA, 25 bp, Artificial
  Probe
ctctcgcaagtaaagcaattcatca

SEQ ID NO: 128746 - DNA, 25 bp, Artificial
  Probe
aaacatccagacatcctctaacacc

SEQ ID NO: 128747 - DNA, 25 bp, Artificial
  Probe
agctacagtttaaagtaccagttct

SEQ ID NO: 128748 - DNA, 25 bp, Artificial
  Probe
aagctacagtttaaagtaccagttc

SEQ ID NO: 128749 - DNA, 25 bp, Artificial
  Probe
aaagctacagtttaaagtaccagtt

SEQ ID NO: 128750 - DNA, 25 bp, Artificial
  Probe
gctacagtttaaagtaccagttcta

SEQ ID NO: 128751 - DNA, 25 bp, Artificial
  Probe
tacagtttaaagtaccagttctacc

SEQ ID NO: 128752 - DNA, 25 bp, Artificial
  Probe
ctgtgtgactcatgactgttgttac

SEQ ID NO: 128753 - DNA, 25 bp, Artificial
  Probe
gtgtgactcatgactgttgttacaa

SEQ ID NO: 128754 - DNA, 25 bp, Artificial
  Probe
aacttcctgctgcgtagtacctaag

SEQ ID NO: 128755 - DNA, 25 bp, Artificial
  Probe
cttcctgctgcgtagtacctaagag

SEQ ID NO: 128756 - DNA, 25 bp, Artificial
  Probe
caacttcctgctgcgtagtacctaa

SEQ ID NO: 128757 - DNA, 25 bp, Artificial
  Probe
ctacagtttaaagtaccagttctac

SEQ ID NO: 128758 - DNA, 25 bp, Artificial
  Probe
tgtgtgactcatgactgttgttaca

SEQ ID NO: 128759 - DNA, 25 bp, Artificial
  Probe
cggaacaagaaaagctacagtttaa

SEQ ID NO: 128760 - DNA, 25 bp, Artificial
  Probe
gctgtgtgactcatgactgttgtta

SEQ ID NO: 128761 - DNA, 25 bp, Artificial
  Probe
acttcctgctgcgtagtacctaaga

SEQ ID NO: 128762 - DNA, 25 bp, Artificial
  Probe
aaaagctacagtttaaagtaccagt

SEQ ID NO: 128763 - DNA, 25 bp, Artificial
  Probe
gctctcgcaagtaaagcaattcatc

SEQ ID NO: 128764 - DNA, 25 bp, Artificial
  Probe
agaaaagctacagtttaaagtacca

SEQ ID NO: 128765 - DNA, 25 bp, Artificial
  Probe
taatatgcaactggtccgtgtttta

SEQ ID NO: 128766 - DNA, 25 bp, Artificial
  Probe
gaaaagctacagtttaaagtaccag

SEQ ID NO: 128767 - DNA, 25 bp, Artificial
  Probe
ggaacaagaaaagctacagtttaaa

SEQ ID NO: 128768 - DNA, 25 bp, Artificial
  Probe
atatgcaactggtccgtgttttaaa

SEQ ID NO: 128769 - DNA, 25 bp, Artificial
  Probe
aatatgcaactggtccgtgttttaa

SEQ ID NO: 128770 - DNA, 25 bp, Artificial
  Probe
ttaatatgcaactggtccgtgtttt

SEQ ID NO: 128771 - DNA, 25 bp, Artificial
  Probe
aagaaaagctacagtttaaagtacc

SEQ ID NO: 128772 - DNA, 25 bp, Artificial
  Probe
aacaagaaaagctacagtttaaagt

SEQ ID NO: 128773 - DNA, 25 bp, Artificial
  Probe
tgtgactcatgactgttgttacaac

SEQ ID NO: 128774 - DNA, 25 bp, Artificial
  Probe
gaacaagaaaagctacagtttaaag

SEQ ID NO: 128775 - DNA, 25 bp, Artificial
  Probe
gtgactcatgactgttgttacaacc

SEQ ID NO: 128776 - DNA, 25 bp, Artificial
  Probe
acaagaaaagctacagtttaaagta

SEQ ID NO: 128777 - DNA, 25 bp, Artificial
  Probe
ccggaacaagaaaagctacagttta

SEQ ID NO: 128778 - DNA, 25 bp, Artificial
  Probe
ggctctcgcaagtaaagcaattcat

SEQ ID NO: 128779 - DNA, 25 bp, Artificial
  Probe
caagaaaagctacagtttaaagtac

SEQ ID NO: 128780 - DNA, 25 bp, Artificial
  Probe
gaggctctcgcaagtaaagcaattc

SEQ ID NO: 128781 - DNA, 25 bp, Artificial
  Probe
tgctgtgtgactcatgactgttgtt

SEQ ID NO: 128782 - DNA, 25 bp, Artificial
  Probe
ctcatgactgttgttacaaccgtct

SEQ ID NO: 128783 - DNA, 25 bp, Artificial
  Probe
gattggtgctgtgtgactcatgact

SEQ ID NO: 128784 - DNA, 25 bp, Artificial
  Probe
agattggtgctgtgtgactcatgac

SEQ ID NO: 128785 - DNA, 25 bp, Artificial
  Probe
caagttccccagtgatcaagaaaac

SEQ ID NO: 128786 - DNA, 25 bp, Artificial
  Probe
tcatcatacacacacacacacacac

SEQ ID NO: 128787 - DNA, 25 bp, Artificial
  Probe
ttcatcatacacacacacacacaca

SEQ ID NO: 128788 - DNA, 25 bp, Artificial
  Probe
cttctacatcactgggatttcacta

SEQ ID NO: 128789 - DNA, 25 bp, Artificial
  Probe
atcatacacacacacacacacacac

SEQ ID NO: 128790 - DNA, 25 bp, Artificial
  Probe
catcatacacacacacacacacaca

SEQ ID NO: 128791 - DNA, 25 bp, Artificial
  Probe
cacacacacacaaataaaccatctc

SEQ ID NO: 128792 - DNA, 25 bp, Artificial
  Probe
gaatttcatcatacacacacacaca

SEQ ID NO: 128793 - DNA, 25 bp, Artificial
  Probe
aatttcatcatacacacacacacac

SEQ ID NO: 128794 - DNA, 25 bp, Artificial
  Probe
tctacatcactgggatttcactatt

SEQ ID NO: 128795 - DNA, 25 bp, Artificial
  Probe
ttctacatcactgggatttcactat

SEQ ID NO: 128796 - DNA, 25 bp, Artificial
  Probe
atttcatcatacacacacacacaca

SEQ ID NO: 128797 - DNA, 25 bp, Artificial
  Probe
tttcccaaagatgtaaatccaagca

SEQ ID NO: 128798 - DNA, 25 bp, Artificial
  Probe
acacacacacacaaataaaccatct

SEQ ID NO: 128799 - DNA, 25 bp, Artificial
  Probe
cacacacacacacaaataaaccatc

SEQ ID NO: 128800 - DNA, 25 bp, Artificial
  Probe
cttcctgggttctttctttcctaag

SEQ ID NO: 128801 - DNA, 25 bp, Artificial
  Probe
ctacatcactgggatttcactattt

SEQ ID NO: 128802 - DNA, 25 bp, Artificial
  Probe
cacacacacacacacacaaataaac

SEQ ID NO: 128803 - DNA, 25 bp, Artificial
  Probe
ttcccaaagatgtaaatccaagcac

SEQ ID NO: 128804 - DNA, 25 bp, Artificial
  Probe
acacacacacacacaaataaaccat

SEQ ID NO: 128805 - DNA, 25 bp, Artificial
  Probe
atttcccaaagatgtaaatccaagc

SEQ ID NO: 128806 - DNA, 25 bp, Artificial
  Probe
acatcactgggatttcactatttaa

SEQ ID NO: 128807 - DNA, 25 bp, Artificial
  Probe
cacacacacaaataaaccatctcgt

SEQ ID NO: 128808 - DNA, 25 bp, Artificial
  Probe
acacacacacaaataaaccatctcg

SEQ ID NO: 128809 - DNA, 25 bp, Artificial
  Probe
acacacacacacacacacaaataaa

SEQ ID NO: 128810 - DNA, 25 bp, Artificial
  Probe
tttcatcatacacacacacacacac

SEQ ID NO: 128811 - DNA, 25 bp, Artificial
  Probe
tgaatttcatcatacacacacacac

SEQ ID NO: 128812 - DNA, 25 bp, Artificial
  Probe
gcttctacatcactgggatttcact

SEQ ID NO: 128813 - DNA, 25 bp, Artificial
  Probe
cacacacacacacacaaataaacca

SEQ ID NO: 128814 - DNA, 25 bp, Artificial
  Probe
acacacacacacacacaaataaacc

SEQ ID NO: 128815 - DNA, 25 bp, Artificial
  Probe
cacacacacacacacacacaaataa

SEQ ID NO: 128816 - DNA, 25 bp, Artificial
  Probe
gcttcctgggttctttctttcctaa

SEQ ID NO: 128817 - DNA, 25 bp, Artificial
  Probe
tacatcactgggatttcactattta

SEQ ID NO: 128818 - DNA, 25 bp, Artificial
  Probe
cattgtctatgtcagcctctcatgc

SEQ ID NO: 128819 - DNA, 25 bp, Artificial
  Probe
cccaaagatgtaaatccaagcacag

SEQ ID NO: 128820 - DNA, 25 bp, Artificial
  Probe
acacacacaaataaaccatctcgtg

SEQ ID NO: 128821 - DNA, 25 bp, Artificial
  Probe
ctggtgacaggaacggatgtaattg

SEQ ID NO: 128822 - DNA, 25 bp, Artificial
  Probe
tctggtgacaggaacggatgtaatt

SEQ ID NO: 128823 - DNA, 25 bp, Artificial
  Probe
tcccaaagatgtaaatccaagcaca

SEQ ID NO: 128824 - DNA, 25 bp, Artificial
  Probe
cacattgtctatgtcagcctctcat

SEQ ID NO: 128825 - DNA, 25 bp, Artificial
  Probe
tatttcccaaagatgtaaatccaag

SEQ ID NO: 128826 - DNA, 25 bp, Artificial
  Probe
ggcttctacatcactgggatttcac

SEQ ID NO: 128827 - DNA, 25 bp, Artificial
  Probe
acattgtctatgtcagcctctcatg

SEQ ID NO: 128828 - DNA, 25 bp, Artificial
  Probe
ttcctgggttctttctttcctaaga

SEQ ID NO: 128829 - DNA, 25 bp, Artificial
  Probe
caaagatgtaaatccaagcacagcc

SEQ ID NO: 128830 - DNA, 25 bp, Artificial
  Probe
ccaaagatgtaaatccaagcacagc

SEQ ID NO: 128831 - DNA, 25 bp, Artificial
  Probe
caagttggaggagtcattaagagag

SEQ ID NO: 128832 - DNA, 25 bp, Artificial
  Probe
tcaagttggaggagtcattaagaga

SEQ ID NO: 128833 - DNA, 25 bp, Artificial
  Probe
ctcaagttggaggagtcattaagag

SEQ ID NO: 128834 - DNA, 25 bp, Artificial
  Probe
aagttggaggagtcattaagagagc

SEQ ID NO: 128835 - DNA, 25 bp, Artificial
  Probe
ttggaggagtcattaagagagcaag

SEQ ID NO: 128836 - DNA, 25 bp, Artificial
  Probe
gttggaggagtcattaagagagcaa

SEQ ID NO: 128837 - DNA, 25 bp, Artificial
  Probe
gctcaagttggaggagtcattaaga

SEQ ID NO: 128838 - DNA, 25 bp, Artificial
  Probe
agttggaggagtcattaagagagca

SEQ ID NO: 128839 - DNA, 25 bp, Artificial
  Probe
cccatcctctactttaccttaaacc

SEQ ID NO: 128840 - DNA, 25 bp, Artificial
  Probe
acccatcctctactttaccttaaac

SEQ ID NO: 128841 - DNA, 25 bp, Artificial
  Probe
ccatcctctactttaccttaaaccg

SEQ ID NO: 128842 - DNA, 25 bp, Artificial
  Probe
attagtaacgtctgacatcctgttc

SEQ ID NO: 128843 - DNA, 25 bp, Artificial
  Probe
cattagtaacgtctgacatcctgtt

SEQ ID NO: 128844 - DNA, 25 bp, Artificial
  Probe
gtacccatcctctactttaccttaa

SEQ ID NO: 128845 - DNA, 25 bp, Artificial
  Probe
ttccaagtagacacagcctctgata

SEQ ID NO: 128846 - DNA, 25 bp, Artificial
  Probe
aagctcaagttggaggagtcattaa

SEQ ID NO: 128847 - DNA, 25 bp, Artificial
  Probe
ttagtaacgtctgacatcctgttct

SEQ ID NO: 128848 - DNA, 25 bp, Artificial
  Probe
tacccatcctctactttaccttaaa

SEQ ID NO: 128849 - DNA, 25 bp, Artificial
  Probe
tagtaacgtctgacatcctgttctc

SEQ ID NO: 128850 - DNA, 25 bp, Artificial
  Probe
agctcaagttggaggagtcattaag

SEQ ID NO: 128851 - DNA, 25 bp, Artificial
  Probe
tccaagtagacacagcctctgatag

SEQ ID NO: 128852 - DNA, 25 bp, Artificial
  Probe
ggagtcattaagagagcaagctgaa

SEQ ID NO: 128853 - DNA, 25 bp, Artificial
  Probe
gaggagtcattaagagagcaagctg

SEQ ID NO: 128854 - DNA, 25 bp, Artificial
  Probe
ctacgagttcacacctgctatctca

SEQ ID NO: 128855 - DNA, 25 bp, Artificial
  Probe
agtacccatcctctactttacctta

SEQ ID NO: 128856 - DNA, 25 bp, Artificial
  Probe
tggaggagtcattaagagagcaagc

SEQ ID NO: 128857 - DNA, 25 bp, Artificial
  Probe
gagtcattaagagagcaagctgaaa

SEQ ID NO: 128858 - DNA, 25 bp, Artificial
  Probe
ctgtcaagttcgcacttcctatcta

SEQ ID NO: 128859 - DNA, 25 bp, Artificial
  Probe
gtaacgtctgacatcctgttctctc

SEQ ID NO: 128860 - DNA, 25 bp, Artificial
  Probe
gcattagtaacgtctgacatcctgt

SEQ ID NO: 128861 - DNA, 25 bp, Artificial
  Probe
tacgagttcacacctgctatctcac

SEQ ID NO: 128862 - DNA, 25 bp, Artificial
  Probe
tgtcaagttcgcacttcctatctac

SEQ ID NO: 128863 - DNA, 25 bp, Artificial
  Probe
aggagtcattaagagagcaagctga

SEQ ID NO: 128864 - DNA, 25 bp, Artificial
  Probe
agtaacgtctgacatcctgttctct

SEQ ID NO: 128865 - DNA, 25 bp, Artificial
  Probe
aaagctcaagttggaggagtcatta

SEQ ID NO: 128866 - DNA, 25 bp, Artificial
  Probe
agttcacacctgctatctcactgtc

SEQ ID NO: 128867 - DNA, 25 bp, Artificial
  Probe
gagttcacacctgctatctcactgt

SEQ ID NO: 128868 - DNA, 25 bp, Artificial
  Probe
cgcattagtaacgtctgacatcctg

SEQ ID NO: 128869 - DNA, 25 bp, Artificial
  Probe
ttcacacctgctatctcactgtcag

SEQ ID NO: 128870 - DNA, 25 bp, Artificial
  Probe
ggaggagtcattaagagagcaagct

SEQ ID NO: 128871 - DNA, 25 bp, Artificial
  Probe
gtcaagttcgcacttcctatctacc

SEQ ID NO: 128872 - DNA, 25 bp, Artificial
  Probe
cattctacccctgactttctaccat

SEQ ID NO: 128873 - DNA, 25 bp, Artificial
  Probe
ttctcattctacccctgactttcta

SEQ ID NO: 128874 - DNA, 25 bp, Artificial
  Probe
gttcacacctgctatctcactgtca

SEQ ID NO: 128875 - DNA, 25 bp, Artificial
  Probe
ctttctcattctacccctgactttc

SEQ ID NO: 128876 - DNA, 25 bp, Artificial
  Probe
ccttctgttcagacattcttatccg

SEQ ID NO: 128877 - DNA, 25 bp, Artificial
  Probe
gccttctgttcagacattcttatcc

SEQ ID NO: 128878 - DNA, 25 bp, Artificial
  Probe
tacctcatgtactgtggatctcaga

SEQ ID NO: 128879 - DNA, 25 bp, Artificial
  Probe
gaagggaagtttgatgagtgagtct

SEQ ID NO: 128880 - DNA, 25 bp, Artificial
  Probe
gatattgcttatggaacatacccga

SEQ ID NO: 128881 - DNA, 25 bp, Artificial
  Probe
atattgcttatggaacatacccgac

SEQ ID NO: 128882 - DNA, 25 bp, Artificial
  Probe
ggatattgcttatggaacatacccg

SEQ ID NO: 128883 - DNA, 25 bp, Artificial
  Probe
tattgcttatggaacatacccgact

SEQ ID NO: 128884 - DNA, 25 bp, Artificial
  Probe
aagggaagtttgatgagtgagtctc

SEQ ID NO: 128885 - DNA, 25 bp, Artificial
  Probe
ctctccagtgagtattcaggaaact

SEQ ID NO: 128886 - DNA, 25 bp, Artificial
  Probe
cttctgttcagacattcttatccgg

SEQ ID NO: 128887 - DNA, 25 bp, Artificial
  Probe
ggaagggaagtttgatgagtgagtc

SEQ ID NO: 128888 - DNA, 25 bp, Artificial
  Probe
ctccagacagatagccctattccat

SEQ ID NO: 128889 - DNA, 25 bp, Artificial
  Probe
cttgatctgcccacttattactccc

SEQ ID NO: 128890 - DNA, 25 bp, Artificial
  Probe
ccttgatctgcccacttattactcc

SEQ ID NO: 128891 - DNA, 25 bp, Artificial
  Probe
tccagacagatagccctattccatc

SEQ ID NO: 128892 - DNA, 25 bp, Artificial
  Probe
ggccttctgttcagacattcttatc

SEQ ID NO: 128893 - DNA, 25 bp, Artificial
  Probe
acctcatgtactgtggatctcagac

SEQ ID NO: 128894 - DNA, 25 bp, Artificial
  Probe
ttgatctgcccacttattactccct

SEQ ID NO: 128895 - DNA, 25 bp, Artificial
  Probe
cctctccagtgagtattcaggaaac

SEQ ID NO: 128896 - DNA, 25 bp, Artificial
  Probe
attgcttatggaacatacccgactc

SEQ ID NO: 128897 - DNA, 25 bp, Artificial
  Probe
tagaaggggatattgcttatggaac

SEQ ID NO: 128898 - DNA, 25 bp, Artificial
  Probe
gaaggggatattgcttatggaacat

SEQ ID NO: 128899 - DNA, 25 bp, Artificial
  Probe
gccttgatctgcccacttattactc

SEQ ID NO: 128900 - DNA, 25 bp, Artificial
  Probe
gccatctcaaaggttccaggataac

SEQ ID NO: 128901 - DNA, 25 bp, Artificial
  Probe
ctagaaggggatattgcttatggaa

SEQ ID NO: 128902 - DNA, 25 bp, Artificial
  Probe
gggatattgcttatggaacataccc

SEQ ID NO: 128903 - DNA, 25 bp, Artificial
  Probe
cattcgggaagggaagtttgatgag

SEQ ID NO: 128904 - DNA, 25 bp, Artificial
  Probe
cctcatgtactgtggatctcagacc

SEQ ID NO: 128905 - DNA, 25 bp, Artificial
  Probe
ctgccttgatctgcccacttattac

SEQ ID NO: 128906 - DNA, 25 bp, Artificial
  Probe
agaaggggatattgcttatggaaca

SEQ ID NO: 128907 - DNA, 25 bp, Artificial
  Probe
cagacagatagccctattccatccc

SEQ ID NO: 128908 - DNA, 25 bp, Artificial
  Probe
ccagacagatagccctattccatcc

SEQ ID NO: 128909 - DNA, 25 bp, Artificial
  Probe
ctgtgactcatttaggttgtgctgg

SEQ ID NO: 128910 - DNA, 25 bp, Artificial
  Probe
agatagccctattccatcccctaat

SEQ ID NO: 128911 - DNA, 25 bp, Artificial
  Probe
gatagccctattccatcccctaatg

SEQ ID NO: 128912 - DNA, 25 bp, Artificial
  Probe
gaagatggcaatgggttctctccta

SEQ ID NO: 128913 - DNA, 25 bp, Artificial
  Probe
aggggatattgcttatggaacatac

SEQ ID NO: 128914 - DNA, 25 bp, Artificial
  Probe
attcgggaagggaagtttgatgagt

SEQ ID NO: 128915 - DNA, 25 bp, Artificial
  Probe
aaggggatattgcttatggaacata

SEQ ID NO: 128916 - DNA, 25 bp, Artificial
  Probe
tgccttgatctgcccacttattact

SEQ ID NO: 128917 - DNA, 25 bp, Artificial
  Probe
tacaccccaaggcagaagttaaaat

SEQ ID NO: 128918 - DNA, 25 bp, Artificial
  Probe
gggaagggaagtttgatgagtgagt

SEQ ID NO: 128919 - DNA, 25 bp, Artificial
  Probe
ggggatattgcttatggaacatacc

SEQ ID NO: 128920 - DNA, 25 bp, Artificial
  Probe
cacattcgggaagggaagtttgatg

SEQ ID NO: 128921 - DNA, 25 bp, Artificial
  Probe
aattctcttctcctgaccaatcttg

SEQ ID NO: 128922 - DNA, 25 bp, Artificial
  Probe
caattctcttctcctgaccaatctt

SEQ ID NO: 128923 - DNA, 25 bp, Artificial
  Probe
atattctgacaccactgactctgat

SEQ ID NO: 128924 - DNA, 25 bp, Artificial
  Probe
aacaattctcttctcctgaccaatc

SEQ ID NO: 128925 - DNA, 25 bp, Artificial
  Probe
tagatattctgacaccactgactct

SEQ ID NO: 128926 - DNA, 25 bp, Artificial
  Probe
atagatattctgacaccactgactc

SEQ ID NO: 128927 - DNA, 25 bp, Artificial
  Probe
gaacaattctcttctcctgaccaat

SEQ ID NO: 128928 - DNA, 25 bp, Artificial
  Probe
ttgtagtatagagcgtgcggataat

SEQ ID NO: 128929 - DNA, 25 bp, Artificial
  Probe
attctcttctcctgaccaatcttgt

SEQ ID NO: 128930 - DNA, 25 bp, Artificial
  Probe
acaattctcttctcctgaccaatct

SEQ ID NO: 128931 - DNA, 25 bp, Artificial
  Probe
gatattctgacaccactgactctga

SEQ ID NO: 128932 - DNA, 25 bp, Artificial
  Probe
ttctcttctcctgaccaatcttgtt

SEQ ID NO: 128933 - DNA, 25 bp, Artificial
  Probe
agatattctgacaccactgactctg

SEQ ID NO: 128934 - DNA, 25 bp, Artificial
  Probe
gcagttataggaacaattctcttct

SEQ ID NO: 128935 - DNA, 25 bp, Artificial
  Probe
tagtatagagcgtgcggataatgac

SEQ ID NO: 128936 - DNA, 25 bp, Artificial
  Probe
gtagtatagagcgtgcggataatga

SEQ ID NO: 128937 - DNA, 25 bp, Artificial
  Probe
tatagatattctgacaccactgact

SEQ ID NO: 128938 - DNA, 25 bp, Artificial
  Probe
tgtagtatagagcgtgcggataatg

SEQ ID NO: 128939 - DNA, 25 bp, Artificial
  Probe
caatggctaagtgaagacgacaatc

SEQ ID NO: 128940 - DNA, 25 bp, Artificial
  Probe
tatacaatctatgtgctgagagaca

SEQ ID NO: 128941 - DNA, 25 bp, Artificial
  Probe
tattctgacaccactgactctgatc

SEQ ID NO: 128942 - DNA, 25 bp, Artificial
  Probe
gatcttgaccaatggctaagtgaag

SEQ ID NO: 128943 - DNA, 25 bp, Artificial
  Probe
tgcggataatgacaaggagtatctt

SEQ ID NO: 128944 - DNA, 25 bp, Artificial
  Probe
ctaagtgaagacgacaatcatgttg

SEQ ID NO: 128945 - DNA, 25 bp, Artificial
  Probe
ttatagatattctgacaccactgac

SEQ ID NO: 128946 - DNA, 25 bp, Artificial
  Probe
tatagagcgtgcggataatgacaag

SEQ ID NO: 128947 - DNA, 25 bp, Artificial
  Probe
attgtgtcagattgcagttatagga

SEQ ID NO: 128948 - DNA, 25 bp, Artificial
  Probe
cattgtgtcagattgcagttatagg

SEQ ID NO: 128949 - DNA, 25 bp, Artificial
  Probe
atggctaagtgaagacgacaatcat

SEQ ID NO: 128950 - DNA, 25 bp, Artificial
  Probe
ttgtgtcagattgcagttataggaa

SEQ ID NO: 128951 - DNA, 25 bp, Artificial
  Probe
gtatagagcgtgcggataatgacaa

SEQ ID NO: 128952 - DNA, 25 bp, Artificial
  Probe
cgatagcatttgtagtatagagcgt

SEQ ID NO: 128953 - DNA, 25 bp, Artificial
  Probe
gtgcggataatgacaaggagtatct

SEQ ID NO: 128954 - DNA, 25 bp, Artificial
  Probe
gatagcatttgtagtatagagcgtg

SEQ ID NO: 128955 - DNA, 25 bp, Artificial
  Probe
atatacaatctatgtgctgagagac

SEQ ID NO: 128956 - DNA, 25 bp, Artificial
  Probe
ctacctgttaaagaatcacctggat

SEQ ID NO: 128957 - DNA, 25 bp, Artificial
  Probe
aatggctaagtgaagacgacaatca

SEQ ID NO: 128958 - DNA, 25 bp, Artificial
  Probe
gctaagtgaagacgacaatcatgtt

SEQ ID NO: 128959 - DNA, 25 bp, Artificial
  Probe
acatcaaagtagagttcttccacaa

SEQ ID NO: 128960 - DNA, 25 bp, Artificial
  Probe
gacatcaaagtagagttcttccaca

SEQ ID NO: 128961 - DNA, 25 bp, Artificial
  Probe
aaagtagagttcttccacaaacaga

SEQ ID NO: 128962 - DNA, 25 bp, Artificial
  Probe
caaagtagagttcttccacaaacag

SEQ ID NO: 128963 - DNA, 25 bp, Artificial
  Probe
tcaaagtagagttcttccacaaaca

SEQ ID NO: 128964 - DNA, 25 bp, Artificial
  Probe
tgtgtcagattgcagttataggaac

SEQ ID NO: 128965 - DNA, 25 bp, Artificial
  Probe
acttgaataaactgaaatggacctt

SEQ ID NO: 128966 - DNA, 25 bp, Artificial
  Probe
cctaacatatctgacaggcattcat

SEQ ID NO: 128967 - DNA, 25 bp, Artificial
  Probe
ctaacatatctgacaggcattcatg

SEQ ID NO: 128968 - DNA, 25 bp, Artificial
  Probe
ctagcagtgataggaggagttgatg

SEQ ID NO: 128969 - DNA, 25 bp, Artificial
  Probe
gcgtagtgatactccattgtataac

SEQ ID NO: 128970 - DNA, 25 bp, Artificial
  Probe
gacctaacatatctgacaggcattc

SEQ ID NO: 128971 - DNA, 25 bp, Artificial
  Probe
ataggaggagttgatgctggtctta

SEQ ID NO: 128972 - DNA, 25 bp, Artificial
  Probe
agtgatactccattgtataacctgg

SEQ ID NO: 128973 - DNA, 25 bp, Artificial
  Probe
cgtagtgatactccattgtataacc

SEQ ID NO: 128974 - DNA, 25 bp, Artificial
  Probe
acctaacatatctgacaggcattca

SEQ ID NO: 128975 - DNA, 25 bp, Artificial
  Probe
gagaggagaaagagaacaaagaaga

SEQ ID NO: 128976 - DNA, 25 bp, Artificial
  Probe
agagaggagaaagagaacaaagaag

SEQ ID NO: 128977 - DNA, 25 bp, Artificial
  Probe
gagagaggagaaagagaacaaagaa

SEQ ID NO: 128978 - DNA, 25 bp, Artificial
  Probe
atgagagaggagaaagagaacaaag

SEQ ID NO: 128979 - DNA, 25 bp, Artificial
  Probe
gaaatgagagaggagaaagagaaca

SEQ ID NO: 128980 - DNA, 25 bp, Artificial
  Probe
tgaaatgagagaggagaaagagaac

SEQ ID NO: 128981 - DNA, 25 bp, Artificial
  Probe
aatgagagaggagaaagagaacaaa

SEQ ID NO: 128982 - DNA, 25 bp, Artificial
  Probe
aaatgagagaggagaaagagaacaa

SEQ ID NO: 128983 - DNA, 25 bp, Artificial
  Probe
aggagaaagagaacaaagaagaaga

SEQ ID NO: 128984 - DNA, 25 bp, Artificial
  Probe
agaggagaaagagaacaaagaagaa

SEQ ID NO: 128985 - DNA, 25 bp, Artificial
  Probe
gaggagaaagagaacaaagaagaag

SEQ ID NO: 128986 - DNA, 25 bp, Artificial
  Probe
tgagagaggagaaagagaacaaaga

SEQ ID NO: 128987 - DNA, 25 bp, Artificial
  Probe
atgaaatgagagaggagaaagagaa

SEQ ID NO: 128988 - DNA, 25 bp, Artificial
  Probe
atgaagatattgggaaacagagcat

SEQ ID NO: 128989 - DNA, 25 bp, Artificial
  Probe
gaagatattgggaaacagagcatca

SEQ ID NO: 128990 - DNA, 25 bp, Artificial
  Probe
tgaagatattgggaaacagagcatc

SEQ ID NO: 128991 - DNA, 25 bp, Artificial
  Probe
taggaggagttgatgctggtcttag

SEQ ID NO: 128992 - DNA, 25 bp, Artificial
  Probe
ggagaaagagaacaaagaagaagaa

SEQ ID NO: 128993 - DNA, 25 bp, Artificial
  Probe
ggacctaacatatctgacaggcatt

SEQ ID NO: 128994 - DNA, 25 bp, Artificial
  Probe
aagatattgggaaacagagcatcaa

SEQ ID NO: 128995 - DNA, 25 bp, Artificial
  Probe
gttgatgctggtcttagagttggag

SEQ ID NO: 128996 - DNA, 25 bp, Artificial
  Probe
gagttgatgctggtcttagagttgg

SEQ ID NO: 128997 - DNA, 25 bp, Artificial
  Probe
ggagttgatgctggtcttagagttg

SEQ ID NO: 128998 - DNA, 25 bp, Artificial
  Probe
aggagttgatgctggtcttagagtt

SEQ ID NO: 128999 - DNA, 25 bp, Artificial
  Probe
ctgctggacctaacatatctgacag

SEQ ID NO: 129000 - DNA, 25 bp, Artificial
  Probe
agatattgggaaacagagcatcaag

SEQ ID NO: 129001 - DNA, 25 bp, Artificial
  Probe
attgtataacctggaaccctgtgaa

SEQ ID NO: 129002 - DNA, 25 bp, Artificial
  Probe
ttagatgtgcgaacagggttaatat

SEQ ID NO: 129003 - DNA, 25 bp, Artificial
  Probe
tttagatgtgcgaacagggttaata

SEQ ID NO: 129004 - DNA, 25 bp, Artificial
  Probe
tagatgtgcgaacagggttaatatc

SEQ ID NO: 129005 - DNA, 25 bp, Artificial
  Probe
tagtgatactccattgtataacctg

SEQ ID NO: 129006 - DNA, 25 bp, Artificial
  Probe
gtagtgatactccattgtataacct

SEQ ID NO: 129007 - DNA, 25 bp, Artificial
  Probe
agttgatgctggtcttagagttgga

SEQ ID NO: 129008 - DNA, 25 bp, Artificial
  Probe
ggtaaacataataggcatggtcttg

SEQ ID NO: 129009 - DNA, 25 bp, Artificial
  Probe
aggtaaacataataggcatggtctt

SEQ ID NO: 129010 - DNA, 25 bp, Artificial
  Probe
aaggtaaacataataggcatggtct

SEQ ID NO: 129011 - DNA, 25 bp, Artificial
  Probe
ctgacatggttctatactcttctgg

SEQ ID NO: 129012 - DNA, 25 bp, Artificial
  Probe
cctgacatggttctatactcttctg

SEQ ID NO: 129013 - DNA, 25 bp, Artificial
  Probe
tcctgacatggttctatactcttct

SEQ ID NO: 129014 - DNA, 25 bp, Artificial
  Probe
tgatcctgacatggttctatactct

SEQ ID NO: 129015 - DNA, 25 bp, Artificial
  Probe
ctgatcctgacatggttctatactc

SEQ ID NO: 129016 - DNA, 25 bp, Artificial
  Probe
atcctgacatggttctatactcttc

SEQ ID NO: 129017 - DNA, 25 bp, Artificial
  Probe
gatcctgacatggttctatactctt

SEQ ID NO: 129018 - DNA, 25 bp, Artificial
  Probe
gctgatcctgacatggttctatact

SEQ ID NO: 129019 - DNA, 25 bp, Artificial
  Probe
tgctgatcctgacatggttctatac

SEQ ID NO: 129020 - DNA, 25 bp, Artificial
  Probe
gtgctgatcctgacatggttctata

SEQ ID NO: 129021 - DNA, 25 bp, Artificial
  Probe
gacatggttctatactcttctggga

SEQ ID NO: 129022 - DNA, 25 bp, Artificial
  Probe
ctatgtcactgtgtctcctaacatc

SEQ ID NO: 129023 - DNA, 25 bp, Artificial
  Probe
tgacatggttctatactcttctggg

SEQ ID NO: 129024 - DNA, 25 bp, Artificial
  Probe
tatgtcactgtgtctcctaacatct

SEQ ID NO: 129025 - DNA, 25 bp, Artificial
  Probe
tgctatgtcactgtgtctcctaaca

SEQ ID NO: 129026 - DNA, 25 bp, Artificial
  Probe
gtgctatgtcactgtgtctcctaac

SEQ ID NO: 129027 - DNA, 25 bp, Artificial
  Probe
agtgctgatcctgacatggttctat

SEQ ID NO: 129028 - DNA, 25 bp, Artificial
  Probe
acatggttctatactcttctgggag

SEQ ID NO: 129029 - DNA, 25 bp, Artificial
  Probe
aagtgctgatcctgacatggttcta

SEQ ID NO: 129030 - DNA, 25 bp, Artificial
  Probe
gctatgtcactgtgtctcctaacat

SEQ ID NO: 129031 - DNA, 25 bp, Artificial
  Probe
gctagttcctatcttttggctttag

SEQ ID NO: 129032 - DNA, 25 bp, Artificial
  Probe
ctagttcctatcttttggctttagc

SEQ ID NO: 129033 - DNA, 25 bp, Artificial
  Probe
cgctagttcctatcttttggcttta

SEQ ID NO: 129034 - DNA, 25 bp, Artificial
  Probe
gaaagtgctgatcctgacatggttc

SEQ ID NO: 129035 - DNA, 25 bp, Artificial
  Probe
catggttctatactcttctgggagt

SEQ ID NO: 129036 - DNA, 25 bp, Artificial
  Probe
aaagtgctgatcctgacatggttct

SEQ ID NO: 129037 - DNA, 25 bp, Artificial
  Probe
ctcttctgggagtaattttgccaaa

SEQ ID NO: 129038 - DNA, 25 bp, Artificial
  Probe
atgaagtgctatgtcactgtgtctc

SEQ ID NO: 129039 - DNA, 25 bp, Artificial
  Probe
catgaagtgctatgtcactgtgtct

SEQ ID NO: 129040 - DNA, 25 bp, Artificial
  Probe
agtgctatgtcactgtgtctcctaa

SEQ ID NO: 129041 - DNA, 25 bp, Artificial
  Probe
aagtgctatgtcactgtgtctccta

SEQ ID NO: 129042 - DNA, 25 bp, Artificial
  Probe
cttggtccctcccttttctcatttg

SEQ ID NO: 129043 - DNA, 25 bp, Artificial
  Probe
gaggaacccatgaagtgctatgtca

SEQ ID NO: 129044 - DNA, 25 bp, Artificial
  Probe
tcttctgggagtaattttgccaaaa

SEQ ID NO: 129045 - DNA, 25 bp, Artificial
  Probe
tcttggtccctcccttttctcattt

SEQ ID NO: 129046 - DNA, 25 bp, Artificial
  Probe
atttggatgattccatttctcttgc

SEQ ID NO: 129047 - DNA, 25 bp, Artificial
  Probe
cctcatttggatgattccatttctc

SEQ ID NO: 129048 - DNA, 25 bp, Artificial
  Probe
ctcttggtccctcccttttctcatt

SEQ ID NO: 129049 - DNA, 25 bp, Artificial
  Probe
ctcatttggatgattccatttctct

SEQ ID NO: 129050 - DNA, 25 bp, Artificial
  Probe
ccctcatttggatgattccatttct

SEQ ID NO: 129051 - DNA, 25 bp, Artificial
  Probe
ttagctctctctggccctgttaaag

SEQ ID NO: 129052 - DNA, 25 bp, Artificial
  Probe
cttagctctctctggccctgttaaa

SEQ ID NO: 129053 - DNA, 25 bp, Artificial
  Probe
ccatgaagtgctatgtcactgtgtc

SEQ ID NO: 129054 - DNA, 25 bp, Artificial
  Probe
catttggatgattccatttctcttg

SEQ ID NO: 129055 - DNA, 25 bp, Artificial
  Probe
tcatttggatgattccatttctctt

SEQ ID NO: 129056 - DNA, 25 bp, Artificial
  Probe
ttggctaatctactcagactcattg

SEQ ID NO: 129057 - DNA, 25 bp, Artificial
  Probe
cttggctaatctactcagactcatt

SEQ ID NO: 129058 - DNA, 25 bp, Artificial
  Probe
acttggctaatctactcagactcat

SEQ ID NO: 129059 - DNA, 25 bp, Artificial
  Probe
gacttggctaatctactcagactca

SEQ ID NO: 129060 - DNA, 25 bp, Artificial
  Probe
tgacttggctaatctactcagactc

SEQ ID NO: 129061 - DNA, 25 bp, Artificial
  Probe
cataagaactccattcacaggcaag

SEQ ID NO: 129062 - DNA, 25 bp, Artificial
  Probe
gtgacttggctaatctactcagact

SEQ ID NO: 129063 - DNA, 25 bp, Artificial
  Probe
tggctaatctactcagactcattgc

SEQ ID NO: 129064 - DNA, 25 bp, Artificial
  Probe
attattattgaacacaggtggatgt

SEQ ID NO: 129065 - DNA, 25 bp, Artificial
  Probe
ggtgacttggctaatctactcagac

SEQ ID NO: 129066 - DNA, 25 bp, Artificial
  Probe
tagaggtagggaatgttagcaatca

SEQ ID NO: 129067 - DNA, 25 bp, Artificial
  Probe
ttatcctgagaaagacgaattaccc

SEQ ID NO: 129068 - DNA, 25 bp, Artificial
  Probe
taatctactcagactcattgcatgg

SEQ ID NO: 129069 - DNA, 25 bp, Artificial
  Probe
gtgattctattggtgggatgaaatg

SEQ ID NO: 129070 - DNA, 25 bp, Artificial
  Probe
tgattctattggtgggatgaaatgt

SEQ ID NO: 129071 - DNA, 25 bp, Artificial
  Probe
tgtgattctattggtgggatgaaat

SEQ ID NO: 129072 - DNA, 25 bp, Artificial
  Probe
cgccttcaagctatgtaatgtcaat

SEQ ID NO: 129073 - DNA, 25 bp, Artificial
  Probe
ttgtgattctattggtgggatgaaa

SEQ ID NO: 129074 - DNA, 25 bp, Artificial
  Probe
gctaatctactcagactcattgcat

SEQ ID NO: 129075 - DNA, 25 bp, Artificial
  Probe
ggtagggaatgttagcaatcagttt

SEQ ID NO: 129076 - DNA, 25 bp, Artificial
  Probe
atgttgtgattctattggtgggatg

SEQ ID NO: 129077 - DNA, 25 bp, Artificial
  Probe
tatcctgagaaagacgaattaccct

SEQ ID NO: 129078 - DNA, 25 bp, Artificial
  Probe
attctattggtgggatgaaatgttc

SEQ ID NO: 129079 - DNA, 25 bp, Artificial
  Probe
gattctattggtgggatgaaatgtt

SEQ ID NO: 129080 - DNA, 25 bp, Artificial
  Probe
ctaatctactcagactcattgcatg

SEQ ID NO: 129081 - DNA, 25 bp, Artificial
  Probe
ctagaggtagggaatgttagcaatc

SEQ ID NO: 129082 - DNA, 25 bp, Artificial
  Probe
gcatcttctgaggtaatggctttat

SEQ ID NO: 129083 - DNA, 25 bp, Artificial
  Probe
atactagaggtagggaatgttagca

SEQ ID NO: 129084 - DNA, 25 bp, Artificial
  Probe
gggttaatgatactagaggtaggga

SEQ ID NO: 129085 - DNA, 25 bp, Artificial
  Probe
tactagaggtagggaatgttagcaa

SEQ ID NO: 129086 - DNA, 25 bp, Artificial
  Probe
gttgtgattctattggtgggatgaa

SEQ ID NO: 129087 - DNA, 25 bp, Artificial
  Probe
gatactagaggtagggaatgttagc

SEQ ID NO: 129088 - DNA, 25 bp, Artificial
  Probe
ccataagaactccattcacaggcaa

SEQ ID NO: 129089 - DNA, 25 bp, Artificial
  Probe
actagaggtagggaatgttagcaat

SEQ ID NO: 129090 - DNA, 25 bp, Artificial
  Probe
tcaatggagaatgcttaatttgctt

SEQ ID NO: 129091 - DNA, 25 bp, Artificial
  Probe
aatgtctctcctggtacagttactg

SEQ ID NO: 129092 - DNA, 25 bp, Artificial
  Probe
cttatgagagccaaaccagtttatc

SEQ ID NO: 129093 - DNA, 25 bp, Artificial
  Probe
tttatcctgagaaagacgaattacc

SEQ ID NO: 129094 - DNA, 25 bp, Artificial
  Probe
ttatgagagccaaaccagtttatcc

SEQ ID NO: 129095 - DNA, 25 bp, Artificial
  Probe
tattattattgaacacaggtggatg

SEQ ID NO: 129096 - DNA, 25 bp, Artificial
  Probe
caatggagaatgcttaatttgcttt

SEQ ID NO: 129097 - DNA, 25 bp, Artificial
  Probe
aggtagggaatgttagcaatcagtt

SEQ ID NO: 129098 - DNA, 25 bp, Artificial
  Probe
ctcaatggagaatgcttaatttgct

SEQ ID NO: 129099 - DNA, 25 bp, Artificial
  Probe
tttaggtcttctgtccaaactgaga

SEQ ID NO: 129100 - DNA, 25 bp, Artificial
  Probe
agaggtagggaatgttagcaatcag

SEQ ID NO: 129101 - DNA, 25 bp, Artificial
  Probe
tccactaagaacaactccagataag

SEQ ID NO: 129102 - DNA, 25 bp, Artificial
  Probe
ctccactaagaacaactccagataa

SEQ ID NO: 129103 - DNA, 25 bp, Artificial
  Probe
actgaatgtggagattaagagcaat

SEQ ID NO: 129104 - DNA, 25 bp, Artificial
  Probe
tctccactaagaacaactccagata

SEQ ID NO: 129105 - DNA, 25 bp, Artificial
  Probe
gcatatcaatcaattcttccgatgt

SEQ ID NO: 129106 - DNA, 25 bp, Artificial
  Probe
agcatatcaatcaattcttccgatg

SEQ ID NO: 129107 - DNA, 25 bp, Artificial
  Probe
cattctcttccatagacaagcaagt

SEQ ID NO: 129108 - DNA, 25 bp, Artificial
  Probe
ccactaagaacaactccagataagt

SEQ ID NO: 129109 - DNA, 25 bp, Artificial
  Probe
actaagaacaactccagataagtcc

SEQ ID NO: 129110 - DNA, 25 bp, Artificial
  Probe
ctagcatatcaatcaattcttccga

SEQ ID NO: 129111 - DNA, 25 bp, Artificial
  Probe
tctagcatatcaatcaattcttccg

SEQ ID NO: 129112 - DNA, 25 bp, Artificial
  Probe
cactaagaacaactccagataagtc

SEQ ID NO: 129113 - DNA, 25 bp, Artificial
  Probe
cttgtggataagcaggcattactag

SEQ ID NO: 129114 - DNA, 25 bp, Artificial
  Probe
ttgtggataagcaggcattactaga

SEQ ID NO: 129115 - DNA, 25 bp, Artificial
  Probe
tagcatatcaatcaattcttccgat

SEQ ID NO: 129116 - DNA, 25 bp, Artificial
  Probe
tatcaatcaattcttccgatgtacc

SEQ ID NO: 129117 - DNA, 25 bp, Artificial
  Probe
tggataagcaggcattactagactc

SEQ ID NO: 129118 - DNA, 25 bp, Artificial
  Probe
attctcttccatagacaagcaagtc

SEQ ID NO: 129119 - DNA, 25 bp, Artificial
  Probe
aacaccacagcatccatactagatt

SEQ ID NO: 129120 - DNA, 25 bp, Artificial
  Probe
gcattctcttccatagacaagcaag

SEQ ID NO: 129121 - DNA, 25 bp, Artificial
  Probe
gtggataagcaggcattactagact

SEQ ID NO: 129122 - DNA, 25 bp, Artificial
  Probe
tgtggataagcaggcattactagac

SEQ ID NO: 129123 - DNA, 25 bp, Artificial
  Probe
cactgaatgtggagattaagagcaa

SEQ ID NO: 129124 - DNA, 25 bp, Artificial
  Probe
acaccacagcatccatactagattc

SEQ ID NO: 129125 - DNA, 25 bp, Artificial
  Probe
gatctaagagcagtgcgttcataac

SEQ ID NO: 129126 - DNA, 25 bp, Artificial
  Probe
tgaatgtggagattaagagcaatca

SEQ ID NO: 129127 - DNA, 25 bp, Artificial
  Probe
ctgaatgtggagattaagagcaatc

SEQ ID NO: 129128 - DNA, 25 bp, Artificial
  Probe
gaatgtggagattaagagcaatcat

SEQ ID NO: 129129 - DNA, 25 bp, Artificial
  Probe
gcgttcataacaagctgataagaat

SEQ ID NO: 129130 - DNA, 25 bp, Artificial
  Probe
agaatagcaagataatccagtaact

SEQ ID NO: 129131 - DNA, 25 bp, Artificial
  Probe
agtgacttctagcatatcaatcaat

SEQ ID NO: 129132 - DNA, 25 bp, Artificial
  Probe
aagtgacttctagcatatcaatcaa

SEQ ID NO: 129133 - DNA, 25 bp, Artificial
  Probe
gataagcaggcattactagactcgg

SEQ ID NO: 129134 - DNA, 25 bp, Artificial
  Probe
ggataagcaggcattactagactcg

SEQ ID NO: 129135 - DNA, 25 bp, Artificial
  Probe
ctaagagcagtgcgttcataacaag

SEQ ID NO: 129136 - DNA, 25 bp, Artificial
  Probe
ggaatagcaactcaatttagcactg

SEQ ID NO: 129137 - DNA, 25 bp, Artificial
  Probe
ctggaatagcaactcaatttagcac

SEQ ID NO: 129138 - DNA, 25 bp, Artificial
  Probe
tgcgttcataacaagctgataagaa

SEQ ID NO: 129139 - DNA, 25 bp, Artificial
  Probe
atctaagagcagtgcgttcataaca

SEQ ID NO: 129140 - DNA, 25 bp, Artificial
  Probe
tggaatagcaactcaatttagcact

SEQ ID NO: 129141 - DNA, 25 bp, Artificial
  Probe
caccacagcatccatactagattcc

SEQ ID NO: 129142 - DNA, 25 bp, Artificial
  Probe
aatgtggagattaagagcaatcatg

SEQ ID NO: 129143 - DNA, 25 bp, Artificial
  Probe
gttcctgaagaagaagcggtatctc

SEQ ID NO: 129144 - DNA, 25 bp, Artificial
  Probe
tctaagagcagtgcgttcataacaa

SEQ ID NO: 129145 - DNA, 25 bp, Artificial
  Probe
catatcaatcaattcttccgatgta

SEQ ID NO: 129146 - DNA, 25 bp, Artificial
  Probe
ctttgtattggactttcccacaatc

SEQ ID NO: 129147 - DNA, 25 bp, Artificial
  Probe
tttgtattggactttcccacaatcc

SEQ ID NO: 129148 - DNA, 25 bp, Artificial
  Probe
aatacttctcccagagcgatctcac

SEQ ID NO: 129149 - DNA, 25 bp, Artificial
  Probe
caatacttctcccagagcgatctca

SEQ ID NO: 129150 - DNA, 25 bp, Artificial
  Probe
gctttgtattggactttcccacaat

SEQ ID NO: 129151 - DNA, 25 bp, Artificial
  Probe
taggagatttcatcgagccttggat

SEQ ID NO: 129152 - DNA, 25 bp, Artificial
  Probe
gagagaggaaggtgagcatgagact

SEQ ID NO: 129153 - DNA, 25 bp, Artificial
  Probe
cagctttgtattggactttcccaca

SEQ ID NO: 129154 - DNA, 25 bp, Artificial
  Probe
aatgtctcatcctcagacctcactg

SEQ ID NO: 129155 - DNA, 25 bp, Artificial
  Probe
caatgtctcatcctcagacctcact

SEQ ID NO: 129156 - DNA, 25 bp, Artificial
  Probe
agagaggaaggtgagcatgagactc

SEQ ID NO: 129157 - DNA, 25 bp, Artificial
  Probe
ctaggagatttcatcgagccttgga

SEQ ID NO: 129158 - DNA, 25 bp, Artificial
  Probe
ttgtattggactttcccacaatccc

SEQ ID NO: 129159 - DNA, 25 bp, Artificial
  Probe
agctttgtattggactttcccacaa

SEQ ID NO: 129160 - DNA, 25 bp, Artificial
  Probe
gcaatacttctcccagagcgatctc

SEQ ID NO: 129161 - DNA, 25 bp, Artificial
  Probe
ccagctttgtattggactttcccac

SEQ ID NO: 129162 - DNA, 25 bp, Artificial
  Probe
ccaatgtctcatcctcagacctcac

SEQ ID NO: 129163 - DNA, 25 bp, Artificial
  Probe
tattggactttcccacaatcccctc

SEQ ID NO: 129164 - DNA, 25 bp, Artificial
  Probe
atgtctcatcctcagacctcactgg

SEQ ID NO: 129165 - DNA, 25 bp, Artificial
  Probe
aggagatttcatcgagccttggatg

SEQ ID NO: 129166 - DNA, 25 bp, Artificial
  Probe
gtattggactttcccacaatcccct

SEQ ID NO: 129167 - DNA, 25 bp, Artificial
  Probe
tgtattggactttcccacaatcccc

SEQ ID NO: 129168 - DNA, 25 bp, Artificial
  Probe
cctaggagatttcatcgagccttgg

SEQ ID NO: 129169 - DNA, 25 bp, Artificial
  Probe
aggaatagtgaccattacagtcttg

SEQ ID NO: 129170 - DNA, 25 bp, Artificial
  Probe
gtactcaactcagactaacaagcac

SEQ ID NO: 129171 - DNA, 25 bp, Artificial
  Probe
aaggaatagtgaccattacagtctt

SEQ ID NO: 129172 - DNA, 25 bp, Artificial
  Probe
tactcaactcagactaacaagcacc

SEQ ID NO: 129173 - DNA, 25 bp, Artificial
  Probe
ggaatagtgaccattacagtcttgg

SEQ ID NO: 129174 - DNA, 25 bp, Artificial
  Probe
ggacttcatcttctatcattagagc

SEQ ID NO: 129175 - DNA, 25 bp, Artificial
  Probe
atcattagagcagaaggtatttggc

SEQ ID NO: 129176 - DNA, 25 bp, Artificial
  Probe
actgtacgagtaacttattcttgaa

SEQ ID NO: 129177 - DNA, 25 bp, Artificial
  Probe
cattagagcagaaggtatttggcaa

SEQ ID NO: 129178 - DNA, 25 bp, Artificial
  Probe
acttcatcttctatcattagagcag

SEQ ID NO: 129179 - DNA, 25 bp, Artificial
  Probe
gacttcatcttctatcattagagca

SEQ ID NO: 129180 - DNA, 25 bp, Artificial
  Probe
ctcaactcagactaacaagcaccag

SEQ ID NO: 129181 - DNA, 25 bp, Artificial
  Probe
attagagcagaaggtatttggcaaa

SEQ ID NO: 129182 - DNA, 25 bp, Artificial
  Probe
tatcattagagcagaaggtatttgg

SEQ ID NO: 129183 - DNA, 25 bp, Artificial
  Probe
cttcatcttctatcattagagcaga

SEQ ID NO: 129184 - DNA, 25 bp, Artificial
  Probe
tcattagagcagaaggtatttggca

SEQ ID NO: 129185 - DNA, 25 bp, Artificial
  Probe
atctgtataaatcttctgcctttga

SEQ ID NO: 129186 - DNA, 25 bp, Artificial
  Probe
tctgtataaatcttctgcctttgat

SEQ ID NO: 129187 - DNA, 25 bp, Artificial
  Probe
aaaggaatagtgaccattacagtct

SEQ ID NO: 129188 - DNA, 25 bp, Artificial
  Probe
gtcaactaacctgccttgtctttac

SEQ ID NO: 129189 - DNA, 25 bp, Artificial
  Probe
ctgtacgagtaacttattcttgaat

SEQ ID NO: 129190 - DNA, 25 bp, Artificial
  Probe
tcttgtttaaatgttaccttggtgc

SEQ ID NO: 129191 - DNA, 25 bp, Artificial
  Probe
aggctcagtctcttgtttaaatgtt

SEQ ID NO: 129192 - DNA, 25 bp, Artificial
  Probe
ggctcagtctcttgtttaaatgtta

SEQ ID NO: 129193 - DNA, 25 bp, Artificial
  Probe
gcatccacatggctttatctgtata

SEQ ID NO: 129194 - DNA, 25 bp, Artificial
  Probe
actcaactcagactaacaagcacca

SEQ ID NO: 129195 - DNA, 25 bp, Artificial
  Probe
tgtactgtacgagtaacttattctt

SEQ ID NO: 129196 - DNA, 25 bp, Artificial
  Probe
gaatagtgaccattacagtcttggg

SEQ ID NO: 129197 - DNA, 25 bp, Artificial
  Probe
ctgtataaatcttctgcctttgatc

SEQ ID NO: 129198 - DNA, 25 bp, Artificial
  Probe
cttgtttaaatgttaccttggtgca

SEQ ID NO: 129199 - DNA, 25 bp, Artificial
  Probe
ctcttgtttaaatgttaccttggtg

SEQ ID NO: 129200 - DNA, 25 bp, Artificial
  Probe
catccacatggctttatctgtataa

SEQ ID NO: 129201 - DNA, 25 bp, Artificial
  Probe
cagaaggtatttggcaaatctttgt

SEQ ID NO: 129202 - DNA, 25 bp, Artificial
  Probe
agaaggtatttggcaaatctttgtt

SEQ ID NO: 129203 - DNA, 25 bp, Artificial
  Probe
tctcttgtttaaatgttaccttggt

SEQ ID NO: 129204 - DNA, 25 bp, Artificial
  Probe
gctcagtctcttgtttaaatgttac

SEQ ID NO: 129205 - DNA, 25 bp, Artificial
  Probe
agtctcttaacctaaattacgtcgc

SEQ ID NO: 129206 - DNA, 25 bp, Artificial
  Probe
ttagagcagaaggtatttggcaaat

SEQ ID NO: 129207 - DNA, 25 bp, Artificial
  Probe
ttaacctaaattacgtcgcctcttc

SEQ ID NO: 129208 - DNA, 25 bp, Artificial
  Probe
cttaacctaaattacgtcgcctctt

SEQ ID NO: 129209 - DNA, 25 bp, Artificial
  Probe
ctatcattagagcagaaggtatttg

SEQ ID NO: 129210 - DNA, 25 bp, Artificial
  Probe
tcaactaacctgccttgtctttacc

SEQ ID NO: 129211 - DNA, 25 bp, Artificial
  Probe
tactgtacgagtaacttattcttga

SEQ ID NO: 129212 - DNA, 25 bp, Artificial
  Probe
gtactgtacgagtaacttattcttg

SEQ ID NO: 129213 - DNA, 25 bp, Artificial
  Probe
atgtactgtacgagtaacttattct

SEQ ID NO: 129214 - DNA, 25 bp, Artificial
  Probe
aatgctcctagaagtcttaatggtg

SEQ ID NO: 129215 - DNA, 25 bp, Artificial
  Probe
atgctcctagaagtcttaatggtgt

SEQ ID NO: 129216 - DNA, 25 bp, Artificial
  Probe
tgctcctagaagtcttaatggtgtt

SEQ ID NO: 129217 - DNA, 25 bp, Artificial
  Probe
ttggaggtgcttgatctatctacaa

SEQ ID NO: 129218 - DNA, 25 bp, Artificial
  Probe
atcctgtctgtatctttggttatcc

SEQ ID NO: 129219 - DNA, 25 bp, Artificial
  Probe
cctgtctgtatctttggttatcctc

SEQ ID NO: 129220 - DNA, 25 bp, Artificial
  Probe
tttgctgaatcctgtctgtatcttt

SEQ ID NO: 129221 - DNA, 25 bp, Artificial
  Probe
ctgtctgtatctttggttatcctct

SEQ ID NO: 129222 - DNA, 25 bp, Artificial
  Probe
ctgaatcctgtctgtatctttggtt

SEQ ID NO: 129223 - DNA, 25 bp, Artificial
  Probe
tcctgtctgtatctttggttatcct

SEQ ID NO: 129224 - DNA, 25 bp, Artificial
  Probe
tgaatcctgtctgtatctttggtta

SEQ ID NO: 129225 - DNA, 25 bp, Artificial
  Probe
tgtctgtatctttggttatcctctt

SEQ ID NO: 129226 - DNA, 25 bp, Artificial
  Probe
ttgctgaatcctgtctgtatctttg

SEQ ID NO: 129227 - DNA, 25 bp, Artificial
  Probe
tgcatggaagtgattaaggtacatc

SEQ ID NO: 129228 - DNA, 25 bp, Artificial
  Probe
aaatgctcctagaagtcttaatggt

SEQ ID NO: 129229 - DNA, 25 bp, Artificial
  Probe
gctcctagaagtcttaatggtgttt

SEQ ID NO: 129230 - DNA, 25 bp, Artificial
  Probe
ctgtatctttggttatcctctttga

SEQ ID NO: 129231 - DNA, 25 bp, Artificial
  Probe
tctgtatctttggttatcctctttg

SEQ ID NO: 129232 - DNA, 25 bp, Artificial
  Probe
gtctgtatctttggttatcctcttt

SEQ ID NO: 129233 - DNA, 25 bp, Artificial
  Probe
aatcctgtctgtatctttggttatc

SEQ ID NO: 129234 - DNA, 25 bp, Artificial
  Probe
gaatcctgtctgtatctttggttat

SEQ ID NO: 129235 - DNA, 25 bp, Artificial
  Probe
gaggtgcttgatctatctacaaaga

SEQ ID NO: 129236 - DNA, 25 bp, Artificial
  Probe
tttggaggtgcttgatctatctaca

SEQ ID NO: 129237 - DNA, 25 bp, Artificial
  Probe
aggtgcttgatctatctacaaagaa

SEQ ID NO: 129238 - DNA, 25 bp, Artificial
  Probe
tgtatctttggttatcctctttgaa

SEQ ID NO: 129239 - DNA, 25 bp, Artificial
  Probe
ggaggtgcttgatctatctacaaag

SEQ ID NO: 129240 - DNA, 25 bp, Artificial
  Probe
gaggctgtccatgtacgttaagtaa

SEQ ID NO: 129241 - DNA, 25 bp, Artificial
  Probe
gcatggaagtgattaaggtacatca

SEQ ID NO: 129242 - DNA, 25 bp, Artificial
  Probe
tggaggtgcttgatctatctacaaa

SEQ ID NO: 129243 - DNA, 25 bp, Artificial
  Probe
gctgaatcctgtctgtatctttggt

SEQ ID NO: 129244 - DNA, 25 bp, Artificial
  Probe
tgctgaatcctgtctgtatctttgg

SEQ ID NO: 129245 - DNA, 25 bp, Artificial
  Probe
ctcctagaagtcttaatggtgttta

SEQ ID NO: 129246 - DNA, 25 bp, Artificial
  Probe
catggaagtgattaaggtacatcat

SEQ ID NO: 129247 - DNA, 25 bp, Artificial
  Probe
gttaagtaaagtgctcactgtgtat

SEQ ID NO: 129248 - DNA, 25 bp, Artificial
  Probe
cgttaagtaaagtgctcactgtgta

SEQ ID NO: 129249 - DNA, 25 bp, Artificial
  Probe
gtatctttggttatcctctttgaag

SEQ ID NO: 129250 - DNA, 25 bp, Artificial
  Probe
atggaagtgattaaggtacatcatt

SEQ ID NO: 129251 - DNA, 25 bp, Artificial
  Probe
catgtacgttaagtaaagtgctcac

SEQ ID NO: 129252 - DNA, 25 bp, Artificial
  Probe
ctgtccatgtacgttaagtaaagtg

SEQ ID NO: 129253 - DNA, 25 bp, Artificial
  Probe
tatctttggttatcctctttgaagg

SEQ ID NO: 129254 - DNA, 25 bp, Artificial
  Probe
tccatgtacgttaagtaaagtgctc

SEQ ID NO: 129255 - DNA, 25 bp, Artificial
  Probe
ccatgtacgttaagtaaagtgctca

SEQ ID NO: 129256 - DNA, 25 bp, Artificial
  Probe
gtccatgtacgttaagtaaagtgct

SEQ ID NO: 129257 - DNA, 25 bp, Artificial
  Probe
gctgtccatgtacgttaagtaaagt

SEQ ID NO: 129258 - DNA, 25 bp, Artificial
  Probe
atgtacgttaagtaaagtgctcact

SEQ ID NO: 129259 - DNA, 25 bp, Artificial
  Probe
ttagagagagagagagagagagaga

SEQ ID NO: 129260 - DNA, 25 bp, Artificial
  Probe
gacttggattcgtattactctcgtt

SEQ ID NO: 129261 - DNA, 25 bp, Artificial
  Probe
acttggattcgtattactctcgtta

SEQ ID NO: 129262 - DNA, 25 bp, Artificial
  Probe
tgattagagagagagagagagagag

SEQ ID NO: 129263 - DNA, 25 bp, Artificial
  Probe
tggattcgtattactctcgttactt

SEQ ID NO: 129264 - DNA, 25 bp, Artificial
  Probe
ttggattcgtattactctcgttact

SEQ ID NO: 129265 - DNA, 25 bp, Artificial
  Probe
cttggattcgtattactctcgttac

SEQ ID NO: 129266 - DNA, 25 bp, Artificial
  Probe
attagagagagagagagagagagag

SEQ ID NO: 129267 - DNA, 25 bp, Artificial
  Probe
gattagagagagagagagagagaga

SEQ ID NO: 129268 - DNA, 25 bp, Artificial
  Probe
aagacttggattcgtattactctcg

SEQ ID NO: 129269 - DNA, 25 bp, Artificial
  Probe
gtgaagacttggattcgtattactc

SEQ ID NO: 129270 - DNA, 25 bp, Artificial
  Probe
atgattagagagagagagagagaga

SEQ ID NO: 129271 - DNA, 25 bp, Artificial
  Probe
tgaagacttggattcgtattactct

SEQ ID NO: 129272 - DNA, 25 bp, Artificial
  Probe
agacttggattcgtattactctcgt

SEQ ID NO: 129273 - DNA, 25 bp, Artificial
  Probe
agtgaagacttggattcgtattact

SEQ ID NO: 129274 - DNA, 25 bp, Artificial
  Probe
gaagacttggattcgtattactctc

SEQ ID NO: 129275 - DNA, 25 bp, Artificial
  Probe
gaatgattagagagagagagagaga

SEQ ID NO: 129276 - DNA, 25 bp, Artificial
  Probe
aatgattagagagagagagagagag

SEQ ID NO: 129277 - DNA, 25 bp, Artificial
  Probe
agaatgattagagagagagagagag

SEQ ID NO: 129278 - DNA, 25 bp, Artificial
  Probe
agagagagagagagagagaggagat

SEQ ID NO: 129279 - DNA, 25 bp, Artificial
  Probe
aagaatgattagagagagagagaga

SEQ ID NO: 129280 - DNA, 25 bp, Artificial
  Probe
agaagaatgattagagagagagaga

SEQ ID NO: 129281 - DNA, 25 bp, Artificial
  Probe
gagagagagagagagagaggagatc

SEQ ID NO: 129282 - DNA, 25 bp, Artificial
  Probe
tagtgaagacttggattcgtattac

SEQ ID NO: 129283 - DNA, 25 bp, Artificial
  Probe
gaagaatgattagagagagagagag

SEQ ID NO: 129284 - DNA, 25 bp, Artificial
  Probe
attagtgaagacttggattcgtatt

SEQ ID NO: 129285 - DNA, 25 bp, Artificial
  Probe
agagagagagagagagagagaggag

SEQ ID NO: 129286 - DNA, 25 bp, Artificial
  Probe
aattagtgaagacttggattcgtat

SEQ ID NO: 129287 - DNA, 25 bp, Artificial
  Probe
agagagagagagaggagatcacaag

SEQ ID NO: 129288 - DNA, 25 bp, Artificial
  Probe
gagagagagagagaggagatcacaa

SEQ ID NO: 129289 - DNA, 25 bp, Artificial
  Probe
gagagagagagagagagagaggaga

SEQ ID NO: 129290 - DNA, 25 bp, Artificial
  Probe
gagagagagagagagagagagagga

SEQ ID NO: 129291 - DNA, 25 bp, Artificial
  Probe
gagagagagagagagaggagatcac

SEQ ID NO: 129292 - DNA, 25 bp, Artificial
  Probe
agagagagagagagagaggagatca

SEQ ID NO: 129293 - DNA, 25 bp, Artificial
  Probe
cgttaaactatggaagatggaggat

SEQ ID NO: 129294 - DNA, 25 bp, Artificial
  Probe
gactcgttaaactatggaagatgga

SEQ ID NO: 129295 - DNA, 25 bp, Artificial
  Probe
tgtgactcgttaaactatggaagat

SEQ ID NO: 129296 - DNA, 25 bp, Artificial
  Probe
ctgtgactcgttaaactatggaaga

SEQ ID NO: 129297 - DNA, 25 bp, Artificial
  Probe
tctgtgactcgttaaactatggaag

SEQ ID NO: 129298 - DNA, 25 bp, Artificial
  Probe
tgactcgttaaactatggaagatgg

SEQ ID NO: 129299 - DNA, 25 bp, Artificial
  Probe
gtgactcgttaaactatggaagatg

SEQ ID NO: 129300 - DNA, 25 bp, Artificial
  Probe
ttagtgaagacttggattcgtatta

SEQ ID NO: 129301 - DNA, 25 bp, Artificial
  Probe
aagaagaatgattagagagagagag

SEQ ID NO: 129302 - DNA, 25 bp, Artificial
  Probe
caaattatacccgtggaagatgatg

SEQ ID NO: 129303 - DNA, 25 bp, Artificial
  Probe
aaattatacccgtggaagatgatgg

SEQ ID NO: 129304 - DNA, 25 bp, Artificial
  Probe
aaggatgaagagaatgaggagaaag

SEQ ID NO: 129305 - DNA, 25 bp, Artificial
  Probe
aaaggatgaagagaatgaggagaaa

SEQ ID NO: 129306 - DNA, 25 bp, Artificial
  Probe
aggatgaagagaatgaggagaaagc

SEQ ID NO: 129307 - DNA, 25 bp, Artificial
  Probe
aaagtatttggaactggttatccca

SEQ ID NO: 129308 - DNA, 25 bp, Artificial
  Probe
caacgatagtatgaagtaattctct

SEQ ID NO: 129309 - DNA, 25 bp, Artificial
  Probe
atgaagagaatgaggagaaagcctt

SEQ ID NO: 129310 - DNA, 25 bp, Artificial
  Probe
tcaacgatagtatgaagtaattctc

SEQ ID NO: 129311 - DNA, 25 bp, Artificial
  Probe
ggatgaagagaatgaggagaaagcc

SEQ ID NO: 129312 - DNA, 25 bp, Artificial
  Probe
gatgaagagaatgaggagaaagcct

SEQ ID NO: 129313 - DNA, 25 bp, Artificial
  Probe
caaaaggatgaagagaatgaggaga

SEQ ID NO: 129314 - DNA, 25 bp, Artificial
  Probe
aaaaggatgaagagaatgaggagaa

SEQ ID NO: 129315 - DNA, 25 bp, Artificial
  Probe
aagagcaaaaggatgaagagaatga

SEQ ID NO: 129316 - DNA, 25 bp, Artificial
  Probe
caagagcaaaaggatgaagagaatg

SEQ ID NO: 129317 - DNA, 25 bp, Artificial
  Probe
tgaagagaatgaggagaaagccttg

SEQ ID NO: 129318 - DNA, 25 bp, Artificial
  Probe
caaagtatttggaactggttatccc

SEQ ID NO: 129319 - DNA, 25 bp, Artificial
  Probe
agagcaaaaggatgaagagaatgag

SEQ ID NO: 129320 - DNA, 25 bp, Artificial
  Probe
cagaagtacggagccttaccagatc

SEQ ID NO: 129321 - DNA, 25 bp, Artificial
  Probe
aacgatagtatgaagtaattctctt

SEQ ID NO: 129322 - DNA, 25 bp, Artificial
  Probe
atcaacgatagtatgaagtaattct

SEQ ID NO: 129323 - DNA, 25 bp, Artificial
  Probe
ttcacaccaaggacaacttcaggag

SEQ ID NO: 129324 - DNA, 25 bp, Artificial
  Probe
cttcacaccaaggacaacttcagga

SEQ ID NO: 129325 - DNA, 25 bp, Artificial
  Probe
tcaagagcaaaaggatgaagagaat

SEQ ID NO: 129326 - DNA, 25 bp, Artificial
  Probe
atcaagagcaaaaggatgaagagaa

SEQ ID NO: 129327 - DNA, 25 bp, Artificial
  Probe
gcaaaaggatgaagagaatgaggag

SEQ ID NO: 129328 - DNA, 25 bp, Artificial
  Probe
gagcaaaaggatgaagagaatgagg

SEQ ID NO: 129329 - DNA, 25 bp, Artificial
  Probe
agcaaaaggatgaagagaatgagga

SEQ ID NO: 129330 - DNA, 25 bp, Artificial
  Probe
catcagaagtacggagccttaccag

SEQ ID NO: 129331 - DNA, 25 bp, Artificial
  Probe
gaagatcaagagcaaaaggatgaag

SEQ ID NO: 129332 - DNA, 25 bp, Artificial
  Probe
aagatcaagagcaaaaggatgaaga

SEQ ID NO: 129333 - DNA, 25 bp, Artificial
  Probe
tcagaagtacggagccttaccagat

SEQ ID NO: 129334 - DNA, 25 bp, Artificial
  Probe
atcagaagtacggagccttaccaga

SEQ ID NO: 129335 - DNA, 25 bp, Artificial
  Probe
gatcaagagcaaaaggatgaagaga

SEQ ID NO: 129336 - DNA, 25 bp, Artificial
  Probe
agatcaagagcaaaaggatgaagag

SEQ ID NO: 129337 - DNA, 25 bp, Artificial
  Probe
ggaagatcaagagcaaaaggatgaa

SEQ ID NO: 129338 - DNA, 25 bp, Artificial
  Probe
caggaagatcaagagcaaaaggatg

SEQ ID NO: 129339 - DNA, 25 bp, Artificial
  Probe
gaagagaatgaggagaaagccttgc

SEQ ID NO: 129340 - DNA, 25 bp, Artificial
  Probe
aatcaacgatagtatgaagtaattc

SEQ ID NO: 129341 - DNA, 25 bp, Artificial
  Probe
aggaagatcaagagcaaaaggatga

SEQ ID NO: 129342 - DNA, 25 bp, Artificial
  Probe
cagcatcagaagtacggagccttac

SEQ ID NO: 129343 - DNA, 25 bp, Artificial
  Probe
gcaggaagatcaagagcaaaaggat

SEQ ID NO: 129344 - DNA, 25 bp, Artificial
  Probe
cagaacatgggctagtcattccaga

SEQ ID NO: 129345 - DNA, 25 bp, Artificial
  Probe
gaacaaggcacaagccaaagtattt

SEQ ID NO: 129346 - DNA, 25 bp, Artificial
  Probe
aagagaatgaggagaaagccttgca

SEQ ID NO: 129347 - DNA, 25 bp, Artificial
  Probe
aacaaggcacaagccaaagtatttg

SEQ ID NO: 129348 - DNA, 25 bp, Artificial
  Probe
cagcaggaagatcaagagcaaaagg

SEQ ID NO: 129349 - DNA, 25 bp, Artificial
  Probe
tcttctgccccttttatttaataaa

SEQ ID NO: 129350 - DNA, 25 bp, Artificial
  Probe
ctacttgcagatggacgcttccttt

SEQ ID NO: 129351 - DNA, 25 bp, Artificial
  Probe
atgcaccttgagtggagagaggtta

SEQ ID NO: 129352 - DNA, 25 bp, Artificial
  Probe
cttctgccccttttatttaataaaa

SEQ ID NO: 129353 - DNA, 25 bp, Artificial
  Probe
ggaggctgagttacagaataatcaa

SEQ ID NO: 129354 - DNA, 25 bp, Artificial
  Probe
ctggaggctgagttacagaataatc

SEQ ID NO: 129355 - DNA, 25 bp, Artificial
  Probe
tggaggctgagttacagaataatca

SEQ ID NO: 129356 - DNA, 25 bp, Artificial
  Probe
cctggaggctgagttacagaataat

SEQ ID NO: 129357 - DNA, 25 bp, Artificial
  Probe
ttgtatgcacgttctattgtaatcg

SEQ ID NO: 129358 - DNA, 25 bp, Artificial
  Probe
ctattgtaatcgctttgcctgtatt

SEQ ID NO: 129359 - DNA, 25 bp, Artificial
  Probe
gcactgtttagcactttgatatgaa

SEQ ID NO: 129360 - DNA, 25 bp, Artificial
  Probe
tgattcgttgcatagtgtccttatt

SEQ ID NO: 129361 - DNA, 25 bp, Artificial
  Probe
tctattgtaatcgctttgcctgtat

SEQ ID NO: 129362 - DNA, 25 bp, Artificial
  Probe
taatcgctttgcctgtatttattgc

SEQ ID NO: 129363 - DNA, 25 bp, Artificial
  Probe
tgtaatcgctttgcctgtatttatt

SEQ ID NO: 129364 - DNA, 25 bp, Artificial
  Probe
ttgtaatcgctttgcctgtatttat

SEQ ID NO: 129365 - DNA, 25 bp, Artificial
  Probe
attgtaatcgctttgcctgtattta

SEQ ID NO: 129366 - DNA, 25 bp, Artificial
  Probe
tattgtaatcgctttgcctgtattt

SEQ ID NO: 129367 - DNA, 25 bp, Artificial
  Probe
ttctattgtaatcgctttgcctgta

SEQ ID NO: 129368 - DNA, 25 bp, Artificial
  Probe
agcactgtttagcactttgatatga

SEQ ID NO: 129369 - DNA, 25 bp, Artificial
  Probe
gtaatcgctttgcctgtatttattg

SEQ ID NO: 129370 - DNA, 25 bp, Artificial
  Probe
atgattcgttgcatagtgtccttat

SEQ ID NO: 129371 - DNA, 25 bp, Artificial
  Probe
tatgcacgttctattgtaatcgctt

SEQ ID NO: 129372 - DNA, 25 bp, Artificial
  Probe
aatgattcgttgcatagtgtcctta

SEQ ID NO: 129373 - DNA, 25 bp, Artificial
  Probe
cagcactgtttagcactttgatatg

SEQ ID NO: 129374 - DNA, 25 bp, Artificial
  Probe
gtatgcacgttctattgtaatcgct

SEQ ID NO: 129375 - DNA, 25 bp, Artificial
  Probe
tgtatgcacgttctattgtaatcgc

SEQ ID NO: 129376 - DNA, 25 bp, Artificial
  Probe
gttctattgtaatcgctttgcctgt

SEQ ID NO: 129377 - DNA, 25 bp, Artificial
  Probe
cactgtttagcactttgatatgaaa

SEQ ID NO: 129378 - DNA, 25 bp, Artificial
  Probe
tcctggaggctgagttacagaataa

SEQ ID NO: 129379 - DNA, 25 bp, Artificial
  Probe
gcagcactgtttagcactttgatat

SEQ ID NO: 129380 - DNA, 25 bp, Artificial
  Probe
gaggctgagttacagaataatcaaa

SEQ ID NO: 129381 - DNA, 25 bp, Artificial
  Probe
gctgagttacagaataatcaaatgg

SEQ ID NO: 129382 - DNA, 25 bp, Artificial
  Probe
ggctgagttacagaataatcaaatg

SEQ ID NO: 129383 - DNA, 25 bp, Artificial
  Probe
aggctgagttacagaataatcaaat

SEQ ID NO: 129384 - DNA, 25 bp, Artificial
  Probe
attcgttgcatagtgtccttatttg

SEQ ID NO: 129385 - DNA, 25 bp, Artificial
  Probe
tcgttgcatagtgtccttatttgta

SEQ ID NO: 129386 - DNA, 25 bp, Artificial
  Probe
gattcgttgcatagtgtccttattt

SEQ ID NO: 129387 - DNA, 25 bp, Artificial
  Probe
cgttgcatagtgtccttatttgtat

SEQ ID NO: 129388 - DNA, 25 bp, Artificial
  Probe
tatcctttgtttgcagtgaccttta

SEQ ID NO: 129389 - DNA, 25 bp, Artificial
  Probe
cgttctattgtaatcgctttgcctg

SEQ ID NO: 129390 - DNA, 25 bp, Artificial
  Probe
actgtttagcactttgatatgaaat

SEQ ID NO: 129391 - DNA, 25 bp, Artificial
  Probe
atgaaatgattcgttgcatagtgtc

SEQ ID NO: 129392 - DNA, 25 bp, Artificial
  Probe
taaatgtcacttcccacgcagttat

SEQ ID NO: 129393 - DNA, 25 bp, Artificial
  Probe
ataaatgtcacttcccacgcagtta

SEQ ID NO: 129394 - DNA, 25 bp, Artificial
  Probe
ttcgttgcatagtgtccttatttgt

SEQ ID NO: 129395 - DNA, 25 bp, Artificial
  Probe
gcatagtgtccttatttgtatgaac

SEQ ID NO: 129396 - DNA, 25 bp, Artificial
  Probe
atcctttgtttgcagtgacctttaa

SEQ ID NO: 129397 - DNA, 25 bp, Artificial
  Probe
ttatcctttgtttgcagtgaccttt

SEQ ID NO: 129398 - DNA, 25 bp, Artificial
  Probe
ggttaattcttccttgagcacagta

SEQ ID NO: 129399 - DNA, 25 bp, Artificial
  Probe
gttaattcttccttgagcacagtat

SEQ ID NO: 129400 - DNA, 25 bp, Artificial
  Probe
ttaattcttccttgagcacagtatt

SEQ ID NO: 129401 - DNA, 25 bp, Artificial
  Probe
atcaagtctcctgtctgttggttac

SEQ ID NO: 129402 - DNA, 25 bp, Artificial
  Probe
gatcaagtctcctgtctgttggtta

SEQ ID NO: 129403 - DNA, 25 bp, Artificial
  Probe
ttccttgagcacagtatttatcctt

SEQ ID NO: 129404 - DNA, 25 bp, Artificial
  Probe
cttccttgagcacagtatttatcct

SEQ ID NO: 129405 - DNA, 25 bp, Artificial
  Probe
tcttccttgagcacagtatttatcc

SEQ ID NO: 129406 - DNA, 25 bp, Artificial
  Probe
tcatcaaagtttccagaagggttaa

SEQ ID NO: 129407 - DNA, 25 bp, Artificial
  Probe
tccttgagcacagtatttatcctta

SEQ ID NO: 129408 - DNA, 25 bp, Artificial
  Probe
ctcatcaaagtttccagaagggtta

SEQ ID NO: 129409 - DNA, 25 bp, Artificial
  Probe
catcaaagtttccagaagggttaat

SEQ ID NO: 129410 - DNA, 25 bp, Artificial
  Probe
gtatttctctgtgttccaaggtctc

SEQ ID NO: 129411 - DNA, 25 bp, Artificial
  Probe
ttcttccttgagcacagtatttatc

SEQ ID NO: 129412 - DNA, 25 bp, Artificial
  Probe
agtatttctctgtgttccaaggtct

SEQ ID NO: 129413 - DNA, 25 bp, Artificial
  Probe
tcaaagtttccagaagggttaattc

SEQ ID NO: 129414 - DNA, 25 bp, Artificial
  Probe
atcaaagtttccagaagggttaatt

SEQ ID NO: 129415 - DNA, 25 bp, Artificial
  Probe
ccttgagcacagtatttatccttaa

SEQ ID NO: 129416 - DNA, 25 bp, Artificial
  Probe
tttcctgagtatttctctgtgttcc

SEQ ID NO: 129417 - DNA, 25 bp, Artificial
  Probe
attcttccttgagcacagtatttat

SEQ ID NO: 129418 - DNA, 25 bp, Artificial
  Probe
aattcttccttgagcacagtattta

SEQ ID NO: 129419 - DNA, 25 bp, Artificial
  Probe
taattcttccttgagcacagtattt

SEQ ID NO: 129420 - DNA, 25 bp, Artificial
  Probe
gagtatttctctgtgttccaaggtc

SEQ ID NO: 129421 - DNA, 25 bp, Artificial
  Probe
ctgagtatttctctgtgttccaagg

SEQ ID NO: 129422 - DNA, 25 bp, Artificial
  Probe
cctgagtatttctctgtgttccaag

SEQ ID NO: 129423 - DNA, 25 bp, Artificial
  Probe
ctcttcctacaatggagactagctt

SEQ ID NO: 129424 - DNA, 25 bp, Artificial
  Probe
tcctgagtatttctctgtgttccaa

SEQ ID NO: 129425 - DNA, 25 bp, Artificial
  Probe
ttcctgagtatttctctgtgttcca

SEQ ID NO: 129426 - DNA, 25 bp, Artificial
  Probe
tgagcacagtatttatccttaaaca

SEQ ID NO: 129427 - DNA, 25 bp, Artificial
  Probe
tatttctctgtgttccaaggtctcg

SEQ ID NO: 129428 - DNA, 25 bp, Artificial
  Probe
tctcatcaaagtttccagaagggtt

SEQ ID NO: 129429 - DNA, 25 bp, Artificial
  Probe
tgagtatttctctgtgttccaaggt

SEQ ID NO: 129430 - DNA, 25 bp, Artificial
  Probe
gtctcatcaaagtttccagaagggt

SEQ ID NO: 129431 - DNA, 25 bp, Artificial
  Probe
gagcacagtatttatccttaaacaa

SEQ ID NO: 129432 - DNA, 25 bp, Artificial
  Probe
ttgagcacagtatttatccttaaac

SEQ ID NO: 129433 - DNA, 25 bp, Artificial
  Probe
agtgtgaatacctggatctggactg

SEQ ID NO: 129434 - DNA, 25 bp, Artificial
  Probe
gggttaattcttccttgagcacagt

SEQ ID NO: 129435 - DNA, 25 bp, Artificial
  Probe
tcaagtctcctgtctgttggttacc

SEQ ID NO: 129436 - DNA, 25 bp, Artificial
  Probe
atgtcttcaggcattgtcatgtgtg

SEQ ID NO: 129437 - DNA, 25 bp, Artificial
  Probe
cttgagcacagtatttatccttaaa

SEQ ID NO: 129438 - DNA, 25 bp, Artificial
  Probe
cagtgtgaatacctggatctggact

SEQ ID NO: 129439 - DNA, 25 bp, Artificial
  Probe
caaagtttccagaagggttaattct

SEQ ID NO: 129440 - DNA, 25 bp, Artificial
  Probe
tcttcctacaatggagactagcttt

SEQ ID NO: 129441 - DNA, 25 bp, Artificial
  Probe
aaagtttccagaagggttaattctt

SEQ ID NO: 129442 - DNA, 25 bp, Artificial
  Probe
agggttaattcttccttgagcacag

SEQ ID NO: 129443 - DNA, 25 bp, Artificial
  Probe
cacaagaacactactgtaactacct

SEQ ID NO: 129444 - DNA, 25 bp, Artificial
  Probe
agcacaagaacactactgtaactac

SEQ ID NO: 129445 - DNA, 25 bp, Artificial
  Probe
caatgaatgatagcctcagcaagat

SEQ ID NO: 129446 - DNA, 25 bp, Artificial
  Probe
tagcacaagaacactactgtaacta

SEQ ID NO: 129447 - DNA, 25 bp, Artificial
  Probe
ctagcacaagaacactactgtaact

SEQ ID NO: 129448 - DNA, 25 bp, Artificial
  Probe
gaacactactgtaactacctactga

SEQ ID NO: 129449 - DNA, 25 bp, Artificial
  Probe
agaacactactgtaactacctactg

SEQ ID NO: 129450 - DNA, 25 bp, Artificial
  Probe
gcacaagaacactactgtaactacc

SEQ ID NO: 129451 - DNA, 25 bp, Artificial
  Probe
aatgaatgatagcctcagcaagatc

SEQ ID NO: 129452 - DNA, 25 bp, Artificial
  Probe
aacactactgtaactacctactgaa

SEQ ID NO: 129453 - DNA, 25 bp, Artificial
  Probe
acaagaacactactgtaactaccta

SEQ ID NO: 129454 - DNA, 25 bp, Artificial
  Probe
acactactgtaactacctactgaat

SEQ ID NO: 129455 - DNA, 25 bp, Artificial
  Probe
caagaacactactgtaactacctac

SEQ ID NO: 129456 - DNA, 25 bp, Artificial
  Probe
aagaacactactgtaactacctact

SEQ ID NO: 129457 - DNA, 25 bp, Artificial
  Probe
cacaatgaatgatagcctcagcaag

SEQ ID NO: 129458 - DNA, 25 bp, Artificial
  Probe
gatagcctcagcaagatccttctag

SEQ ID NO: 129459 - DNA, 25 bp, Artificial
  Probe
acaatgaatgatagcctcagcaaga

SEQ ID NO: 129460 - DNA, 25 bp, Artificial
  Probe
gtaactacctactgaataaagccca

SEQ ID NO: 129461 - DNA, 25 bp, Artificial
  Probe
tgtaactacctactgaataaagccc

SEQ ID NO: 129462 - DNA, 25 bp, Artificial
  Probe
tggacacaatgaatgatagcctcag

SEQ ID NO: 129463 - DNA, 25 bp, Artificial
  Probe
ctggacacaatgaatgatagcctca

SEQ ID NO: 129464 - DNA, 25 bp, Artificial
  Probe
acacaatgaatgatagcctcagcaa

SEQ ID NO: 129465 - DNA, 25 bp, Artificial
  Probe
ctgtaactacctactgaataaagcc

SEQ ID NO: 129466 - DNA, 25 bp, Artificial
  Probe
cactactgtaactacctactgaata

SEQ ID NO: 129467 - DNA, 25 bp, Artificial
  Probe
aatgatagcctcagcaagatccttc

SEQ ID NO: 129468 - DNA, 25 bp, Artificial
  Probe
gaatgatagcctcagcaagatcctt

SEQ ID NO: 129469 - DNA, 25 bp, Artificial
  Probe
cctggacacaatgaatgatagcctc

SEQ ID NO: 129470 - DNA, 25 bp, Artificial
  Probe
tgatagcctcagcaagatccttcta

SEQ ID NO: 129471 - DNA, 25 bp, Artificial
  Probe
atgaatgatagcctcagcaagatcc

SEQ ID NO: 129472 - DNA, 25 bp, Artificial
  Probe
ataaatgtagccatattcccttagc

SEQ ID NO: 129473 - DNA, 25 bp, Artificial
  Probe
tttaggtgtttctctgatcgtgttc

SEQ ID NO: 129474 - DNA, 25 bp, Artificial
  Probe
ctttaggtgtttctctgatcgtgtt

SEQ ID NO: 129475 - DNA, 25 bp, Artificial
  Probe
actgtaactacctactgaataaagc

SEQ ID NO: 129476 - DNA, 25 bp, Artificial
  Probe
gacacaatgaatgatagcctcagca

SEQ ID NO: 129477 - DNA, 25 bp, Artificial
  Probe
tccacatccttctttgactctgaaa

SEQ ID NO: 129478 - DNA, 25 bp, Artificial
  Probe
taactacctactgaataaagcccag

SEQ ID NO: 129479 - DNA, 25 bp, Artificial
  Probe
tgagtcctttaggtgtttctctgat

SEQ ID NO: 129480 - DNA, 25 bp, Artificial
  Probe
gagtcctttaggtgtttctctgatc

SEQ ID NO: 129481 - DNA, 25 bp, Artificial
  Probe
cttaactcagaagcctttgaccttg

SEQ ID NO: 129482 - DNA, 25 bp, Artificial
  Probe
tcctggacacaatgaatgatagcct

SEQ ID NO: 129483 - DNA, 25 bp, Artificial
  Probe
ctccacatccttctttgactctgaa

SEQ ID NO: 129484 - DNA, 25 bp, Artificial
  Probe
gccatattcccttagctctcattat

SEQ ID NO: 129485 - DNA, 25 bp, Artificial
  Probe
atgatagcctcagcaagatccttct

SEQ ID NO: 129486 - DNA, 25 bp, Artificial
  Probe
ctctccacatccttctttgactctg

SEQ ID NO: 129487 - DNA, 25 bp, Artificial
  Probe
agcaagatccttctagacatcagtt

SEQ ID NO: 129488 - DNA, 25 bp, Artificial
  Probe
gacaacagtagtaagtgctatacca

SEQ ID NO: 129489 - DNA, 25 bp, Artificial
  Probe
tgacaacagtagtaagtgctatacc

SEQ ID NO: 129490 - DNA, 25 bp, Artificial
  Probe
acaacagtagtaagtgctataccaa

SEQ ID NO: 129491 - DNA, 25 bp, Artificial
  Probe
ttgacaacagtagtaagtgctatac

SEQ ID NO: 129492 - DNA, 25 bp, Artificial
  Probe
ggttgacaacagtagtaagtgctat

SEQ ID NO: 129493 - DNA, 25 bp, Artificial
  Probe
gttgacaacagtagtaagtgctata

SEQ ID NO: 129494 - DNA, 25 bp, Artificial
  Probe
gacttggatttggtattctcttcag

SEQ ID NO: 129495 - DNA, 25 bp, Artificial
  Probe
tggtattctcttcagagctaaggtt

SEQ ID NO: 129496 - DNA, 25 bp, Artificial
  Probe
ttggtattctcttcagagctaaggt

SEQ ID NO: 129497 - DNA, 25 bp, Artificial
  Probe
gctaacggctacagaaagtatctta

SEQ ID NO: 129498 - DNA, 25 bp, Artificial
  Probe
acagtagtaagtgctataccaaaga

SEQ ID NO: 129499 - DNA, 25 bp, Artificial
  Probe
acttggatttggtattctcttcaga

SEQ ID NO: 129500 - DNA, 25 bp, Artificial
  Probe
agacttggatttggtattctcttca

SEQ ID NO: 129501 - DNA, 25 bp, Artificial
  Probe
cagtagtaagtgctataccaaagac

SEQ ID NO: 129502 - DNA, 25 bp, Artificial
  Probe
caacagtagtaagtgctataccaaa

SEQ ID NO: 129503 - DNA, 25 bp, Artificial
  Probe
aacagtagtaagtgctataccaaag

SEQ ID NO: 129504 - DNA, 25 bp, Artificial
  Probe
attcccaatcagatgacatcctatg

SEQ ID NO: 129505 - DNA, 25 bp, Artificial
  Probe
catattcccaatcagatgacatcct

SEQ ID NO: 129506 - DNA, 25 bp, Artificial
  Probe
agtagtaagtgctataccaaagact

SEQ ID NO: 129507 - DNA, 25 bp, Artificial
  Probe
tattcccaatcagatgacatcctat

SEQ ID NO: 129508 - DNA, 25 bp, Artificial
  Probe
atattcccaatcagatgacatccta

SEQ ID NO: 129509 - DNA, 25 bp, Artificial
  Probe
ctaacggctacagaaagtatcttat

SEQ ID NO: 129510 - DNA, 25 bp, Artificial
  Probe
ttggatttggtattctcttcagagc

SEQ ID NO: 129511 - DNA, 25 bp, Artificial
  Probe
cttggatttggtattctcttcagag

SEQ ID NO: 129512 - DNA, 25 bp, Artificial
  Probe
ggtattctcttcagagctaaggttt

SEQ ID NO: 129513 - DNA, 25 bp, Artificial
  Probe
tttggtattctcttcagagctaagg

SEQ ID NO: 129514 - DNA, 25 bp, Artificial
  Probe
ggatttggtattctcttcagagcta

SEQ ID NO: 129515 - DNA, 25 bp, Artificial
  Probe
tattctcttcagagctaaggtttgc

SEQ ID NO: 129516 - DNA, 25 bp, Artificial
  Probe
gtattctcttcagagctaaggtttg

SEQ ID NO: 129517 - DNA, 25 bp, Artificial
  Probe
gggttgacaacagtagtaagtgcta

SEQ ID NO: 129518 - DNA, 25 bp, Artificial
  Probe
tggatttggtattctcttcagagct

SEQ ID NO: 129519 - DNA, 25 bp, Artificial
  Probe
atttggtattctcttcagagctaag

SEQ ID NO: 129520 - DNA, 25 bp, Artificial
  Probe
gatttggtattctcttcagagctaa

SEQ ID NO: 129521 - DNA, 25 bp, Artificial
  Probe
aagacttggatttggtattctcttc

SEQ ID NO: 129522 - DNA, 25 bp, Artificial
  Probe
tcatattcccaatcagatgacatcc

SEQ ID NO: 129523 - DNA, 25 bp, Artificial
  Probe
caaagacttggatttggtattctct

SEQ ID NO: 129524 - DNA, 25 bp, Artificial
  Probe
aaagacttggatttggtattctctt

SEQ ID NO: 129525 - DNA, 25 bp, Artificial
  Probe
ttcatattcccaatcagatgacatc

SEQ ID NO: 129526 - DNA, 25 bp, Artificial
  Probe
cccaatcagatgacatcctatgttc

SEQ ID NO: 129527 - DNA, 25 bp, Artificial
  Probe
tttcatattcccaatcagatgacat

SEQ ID NO: 129528 - DNA, 25 bp, Artificial
  Probe
tcccaatcagatgacatcctatgtt

SEQ ID NO: 129529 - DNA, 25 bp, Artificial
  Probe
ttcccaatcagatgacatcctatgt

SEQ ID NO: 129530 - DNA, 25 bp, Artificial
  Probe
tagtaagtgctataccaaagacttg

SEQ ID NO: 129531 - DNA, 25 bp, Artificial
  Probe
gtagtaagtgctataccaaagactt

SEQ ID NO: 129532 - DNA, 25 bp, Artificial
  Probe
agctaacggctacagaaagtatctt

SEQ ID NO: 129533 - DNA, 25 bp, Artificial
  Probe
ttatagtcttctctctaggcacagc

SEQ ID NO: 129534 - DNA, 25 bp, Artificial
  Probe
aaagtcctgtttgcgttcatttatt

SEQ ID NO: 129535 - DNA, 25 bp, Artificial
  Probe
aagtcctgtttgcgttcatttattc

SEQ ID NO: 129536 - DNA, 25 bp, Artificial
  Probe
tataataccagaatccgcaaacttg

SEQ ID NO: 129537 - DNA, 25 bp, Artificial
  Probe
cctgtttgcgttcatttattccttg

SEQ ID NO: 129538 - DNA, 25 bp, Artificial
  Probe
tcctgtttgcgttcatttattcctt

SEQ ID NO: 129539 - DNA, 25 bp, Artificial
  Probe
tttatagtcttctctctaggcacag

SEQ ID NO: 129540 - DNA, 25 bp, Artificial
  Probe
gtttgcgttcatttattccttgctg

SEQ ID NO: 129541 - DNA, 25 bp, Artificial
  Probe
ctgtttgcgttcatttattccttgc

SEQ ID NO: 129542 - DNA, 25 bp, Artificial
  Probe
gtcctgtttgcgttcatttattcct

SEQ ID NO: 129543 - DNA, 25 bp, Artificial
  Probe
agtcctgtttgcgttcatttattcc

SEQ ID NO: 129544 - DNA, 25 bp, Artificial
  Probe
gaggagtgagatgatgctgtctaca

SEQ ID NO: 129545 - DNA, 25 bp, Artificial
  Probe
tgtttgcgttcatttattccttgct

SEQ ID NO: 129546 - DNA, 25 bp, Artificial
  Probe
ttataataccagaatccgcaaactt

SEQ ID NO: 129547 - DNA, 25 bp, Artificial
  Probe
tttataataccagaatccgcaaact

SEQ ID NO: 129548 - DNA, 25 bp, Artificial
  Probe
ttagtactgtacggatgttctggaa

SEQ ID NO: 129549 - DNA, 25 bp, Artificial
  Probe
ttcatttattccttgctggacactc

SEQ ID NO: 129550 - DNA, 25 bp, Artificial
  Probe
tttgcgttcatttattccttgctgg

SEQ ID NO: 129551 - DNA, 25 bp, Artificial
  Probe
gttcatttattccttgctggacact

SEQ ID NO: 129552 - DNA, 25 bp, Artificial
  Probe
tagtactgtacggatgttctggaac

SEQ ID NO: 129553 - DNA, 25 bp, Artificial
  Probe
atttataataccagaatccgcaaac

SEQ ID NO: 129554 - DNA, 25 bp, Artificial
  Probe
aggagtgagatgatgctgtctacag

SEQ ID NO: 129555 - DNA, 25 bp, Artificial
  Probe
aaaagtcctgtttgcgttcatttat

SEQ ID NO: 129556 - DNA, 25 bp, Artificial
  Probe
cgaggagtgagatgatgctgtctac

SEQ ID NO: 129557 - DNA, 25 bp, Artificial
  Probe
atctctgaagcaggtttggttgtag

SEQ ID NO: 129558 - DNA, 25 bp, Artificial
  Probe
ttgtagcagcgttacctctgtctag

SEQ ID NO: 129559 - DNA, 25 bp, Artificial
  Probe
ctaaaagtcctgtttgcgttcattt

SEQ ID NO: 129560 - DNA, 25 bp, Artificial
  Probe
gttgtagcagcgttacctctgtcta

SEQ ID NO: 129561 - DNA, 25 bp, Artificial
  Probe
tactgtacggatgttctggaaccac

SEQ ID NO: 129562 - DNA, 25 bp, Artificial
  Probe
gtactgtacggatgttctggaacca

SEQ ID NO: 129563 - DNA, 25 bp, Artificial
  Probe
catctctgaagcaggtttggttgta

SEQ ID NO: 129564 - DNA, 25 bp, Artificial
  Probe
cgttcatttattccttgctggacac

SEQ ID NO: 129565 - DNA, 25 bp, Artificial
  Probe
taaaagtcctgtttgcgttcattta

SEQ ID NO: 129566 - DNA, 25 bp, Artificial
  Probe
tcatttattccttgctggacactcc

SEQ ID NO: 129567 - DNA, 25 bp, Artificial
  Probe
tttagtactgtacggatgttctgga

SEQ ID NO: 129568 - DNA, 25 bp, Artificial
  Probe
ttttatagtcttctctctaggcaca

SEQ ID NO: 129569 - DNA, 25 bp, Artificial
  Probe
ttgcgttcatttattccttgctgga

SEQ ID NO: 129570 - DNA, 25 bp, Artificial
  Probe
tgtgcttgcttgcatctttaataaa

SEQ ID NO: 129571 - DNA, 25 bp, Artificial
  Probe
ctgtgcttgcttgcatctttaataa

SEQ ID NO: 129572 - DNA, 25 bp, Artificial
  Probe
accccatgttattcactgtatttta

SEQ ID NO: 129573 - DNA, 25 bp, Artificial
  Probe
tatttataataccagaatccgcaaa

SEQ ID NO: 129574 - DNA, 25 bp, Artificial
  Probe
ttatttataataccagaatccgcaa

SEQ ID NO: 129575 - DNA, 25 bp, Artificial
  Probe
tttatttataataccagaatccgca

SEQ ID NO: 129576 - DNA, 25 bp, Artificial
  Probe
gctaaaagtcctgtttgcgttcatt

SEQ ID NO: 129577 - DNA, 25 bp, Artificial
  Probe
tatagtcttctctctaggcacagcc

SEQ ID NO: 129578 - DNA, 25 bp, Artificial
  Probe
gaatgactgactgtatgttgaggat

SEQ ID NO: 129579 - DNA, 25 bp, Artificial
  Probe
atctattactgactgtatggcgagg

SEQ ID NO: 129580 - DNA, 25 bp, Artificial
  Probe
aatgactgactgtatgttgaggatc

SEQ ID NO: 129581 - DNA, 25 bp, Artificial
  Probe
gaggatctattactgactgtatggc

SEQ ID NO: 129582 - DNA, 25 bp, Artificial
  Probe
gatctattactgactgtatggcgag

SEQ ID NO: 129583 - DNA, 25 bp, Artificial
  Probe
tgactgactgtatgttgaggatcta

SEQ ID NO: 129584 - DNA, 25 bp, Artificial
  Probe
gactgactgtatgttgaggatctat

SEQ ID NO: 129585 - DNA, 25 bp, Artificial
  Probe
atgttgaggatctattactgactgt

SEQ ID NO: 129586 - DNA, 25 bp, Artificial
  Probe
actgactgtatgttgaggatctatt

SEQ ID NO: 129587 - DNA, 25 bp, Artificial
  Probe
atgactgactgtatgttgaggatct

SEQ ID NO: 129588 - DNA, 25 bp, Artificial
  Probe
tgaggatctattactgactgtatgg

SEQ ID NO: 129589 - DNA, 25 bp, Artificial
  Probe
ggaatgactgactgtatgttgagga

SEQ ID NO: 129590 - DNA, 25 bp, Artificial
  Probe
ggatctattactgactgtatggcga

SEQ ID NO: 129591 - DNA, 25 bp, Artificial
  Probe
aggatctattactgactgtatggcg

SEQ ID NO: 129592 - DNA, 25 bp, Artificial
  Probe
tgttgaggatctattactgactgta

SEQ ID NO: 129593 - DNA, 25 bp, Artificial
  Probe
tgtatgttgaggatctattactgac

SEQ ID NO: 129594 - DNA, 25 bp, Artificial
  Probe
actgtatgttgaggatctattactg

SEQ ID NO: 129595 - DNA, 25 bp, Artificial
  Probe
tgactgtatgttgaggatctattac

SEQ ID NO: 129596 - DNA, 25 bp, Artificial
  Probe
ttctaaccttctgagaggctctaag

SEQ ID NO: 129597 - DNA, 25 bp, Artificial
  Probe
tatgttgaggatctattactgactg

SEQ ID NO: 129598 - DNA, 25 bp, Artificial
  Probe
ctgactgtatgttgaggatctatta

SEQ ID NO: 129599 - DNA, 25 bp, Artificial
  Probe
ttgaggatctattactgactgtatg

SEQ ID NO: 129600 - DNA, 25 bp, Artificial
  Probe
gttgaggatctattactgactgtat

SEQ ID NO: 129601 - DNA, 25 bp, Artificial
  Probe
gtatgttgaggatctattactgact

SEQ ID NO: 129602 - DNA, 25 bp, Artificial
  Probe
ctgtatgttgaggatctattactga

SEQ ID NO: 129603 - DNA, 25 bp, Artificial
  Probe
gactgtatgttgaggatctattact

SEQ ID NO: 129604 - DNA, 25 bp, Artificial
  Probe
gagaatgttaatgggtgggaatgac

SEQ ID NO: 129605 - DNA, 25 bp, Artificial
  Probe
ctgagaatgttaatgggtgggaatg

SEQ ID NO: 129606 - DNA, 25 bp, Artificial
  Probe
gaatgttaatgggtgggaatgactg

SEQ ID NO: 129607 - DNA, 25 bp, Artificial
  Probe
agaatgttaatgggtgggaatgact

SEQ ID NO: 129608 - DNA, 25 bp, Artificial
  Probe
tgagaatgttaatgggtgggaatga

SEQ ID NO: 129609 - DNA, 25 bp, Artificial
  Probe
actgagaatgttaatgggtgggaat

SEQ ID NO: 129610 - DNA, 25 bp, Artificial
  Probe
aatgttaatgggtgggaatgactga

SEQ ID NO: 129611 - DNA, 25 bp, Artificial
  Probe
tgggaatgactgactgtatgttgag

SEQ ID NO: 129612 - DNA, 25 bp, Artificial
  Probe
tctattactgactgtatggcgaggc

SEQ ID NO: 129613 - DNA, 25 bp, Artificial
  Probe
gtgggaatgactgactgtatgttga

SEQ ID NO: 129614 - DNA, 25 bp, Artificial
  Probe
tttctaaccttctgagaggctctaa

SEQ ID NO: 129615 - DNA, 25 bp, Artificial
  Probe
ctattactgactgtatggcgaggca

SEQ ID NO: 129616 - DNA, 25 bp, Artificial
  Probe
atgttaatgggtgggaatgactgac

SEQ ID NO: 129617 - DNA, 25 bp, Artificial
  Probe
gggaatgactgactgtatgttgagg

SEQ ID NO: 129618 - DNA, 25 bp, Artificial
  Probe
taatgggtgggaatgactgactgta

SEQ ID NO: 129619 - DNA, 25 bp, Artificial
  Probe
gtttctaaccttctgagaggctcta

SEQ ID NO: 129620 - DNA, 25 bp, Artificial
  Probe
ggtgggaatgactgactgtatgttg

SEQ ID NO: 129621 - DNA, 25 bp, Artificial
  Probe
gaggagtattccaagggatgagttg

SEQ ID NO: 129622 - DNA, 25 bp, Artificial
  Probe
gttaatgggtgggaatgactgactg

SEQ ID NO: 129623 - DNA, 25 bp, Artificial
  Probe
ttccagtctaagtaccaatgctatt

SEQ ID NO: 129624 - DNA, 25 bp, Artificial
  Probe
cttccagtctaagtaccaatgctat

SEQ ID NO: 129625 - DNA, 25 bp, Artificial
  Probe
tcttccagtctaagtaccaatgcta

SEQ ID NO: 129626 - DNA, 25 bp, Artificial
  Probe
acttagtggtatatgtctctgagtt

SEQ ID NO: 129627 - DNA, 25 bp, Artificial
  Probe
ttcttccagtctaagtaccaatgct

SEQ ID NO: 129628 - DNA, 25 bp, Artificial
  Probe
tacttagtggtatatgtctctgagt

SEQ ID NO: 129629 - DNA, 25 bp, Artificial
  Probe
tgtctctgagtttggattagtgttt

SEQ ID NO: 129630 - DNA, 25 bp, Artificial
  Probe
atgtctctgagtttggattagtgtt

SEQ ID NO: 129631 - DNA, 25 bp, Artificial
  Probe
gtggtatatgtctctgagtttggat

SEQ ID NO: 129632 - DNA, 25 bp, Artificial
  Probe
tctctgagtttggattagtgtttct

SEQ ID NO: 129633 - DNA, 25 bp, Artificial
  Probe
gtctctgagtttggattagtgtttc

SEQ ID NO: 129634 - DNA, 25 bp, Artificial
  Probe
agtggtatatgtctctgagtttgga

SEQ ID NO: 129635 - DNA, 25 bp, Artificial
  Probe
tagtggtatatgtctctgagtttgg

SEQ ID NO: 129636 - DNA, 25 bp, Artificial
  Probe
tatgtctctgagtttggattagtgt

SEQ ID NO: 129637 - DNA, 25 bp, Artificial
  Probe
tggtatatgtctctgagtttggatt

SEQ ID NO: 129638 - DNA, 25 bp, Artificial
  Probe
tccagtctaagtaccaatgctattg

SEQ ID NO: 129639 - DNA, 25 bp, Artificial
  Probe
ccagtctaagtaccaatgctattgt

SEQ ID NO: 129640 - DNA, 25 bp, Artificial
  Probe
atactgtgtgggatacttagtggta

SEQ ID NO: 129641 - DNA, 25 bp, Artificial
  Probe
tatactgtgtgggatacttagtggt

SEQ ID NO: 129642 - DNA, 25 bp, Artificial
  Probe
ggatacttagtggtatatgtctctg

SEQ ID NO: 129643 - DNA, 25 bp, Artificial
  Probe
atatactgtgtgggatacttagtgg

SEQ ID NO: 129644 - DNA, 25 bp, Artificial
  Probe
ctctgagtttggattagtgtttcta

SEQ ID NO: 129645 - DNA, 25 bp, Artificial
  Probe
tttcttccagtctaagtaccaatgc

SEQ ID NO: 129646 - DNA, 25 bp, Artificial
  Probe
tgaatgtcacaaatggattaaggaa

SEQ ID NO: 129647 - DNA, 25 bp, Artificial
  Probe
ttgaatgtcacaaatggattaagga

SEQ ID NO: 129648 - DNA, 25 bp, Artificial
  Probe
ctttcttccagtctaagtaccaatg

SEQ ID NO: 129649 - DNA, 25 bp, Artificial
  Probe
tctttcttccagtctaagtaccaat

SEQ ID NO: 129650 - DNA, 25 bp, Artificial
  Probe
atctttcttccagtctaagtaccaa

SEQ ID NO: 129651 - DNA, 25 bp, Artificial
  Probe
atatgtctctgagtttggattagtg

SEQ ID NO: 129652 - DNA, 25 bp, Artificial
  Probe
accactttactcaagatgtttatca

SEQ ID NO: 129653 - DNA, 25 bp, Artificial
  Probe
agagttctatctttcttccagtcta

SEQ ID NO: 129654 - DNA, 25 bp, Artificial
  Probe
ttagtggtatatgtctctgagtttg

SEQ ID NO: 129655 - DNA, 25 bp, Artificial
  Probe
cagtctaagtaccaatgctattgta

SEQ ID NO: 129656 - DNA, 25 bp, Artificial
  Probe
actgtgtgggatacttagtggtata

SEQ ID NO: 129657 - DNA, 25 bp, Artificial
  Probe
tactgtgtgggatacttagtggtat

SEQ ID NO: 129658 - DNA, 25 bp, Artificial
  Probe
gtgtgggatacttagtggtatatgt

SEQ ID NO: 129659 - DNA, 25 bp, Artificial
  Probe
tgtgtgggatacttagtggtatatg

SEQ ID NO: 129660 - DNA, 25 bp, Artificial
  Probe
gaatgtcacaaatggattaaggaat

SEQ ID NO: 129661 - DNA, 25 bp, Artificial
  Probe
gttctatctttcttccagtctaagt

SEQ ID NO: 129662 - DNA, 25 bp, Artificial
  Probe
tatctttcttccagtctaagtacca

SEQ ID NO: 129663 - DNA, 25 bp, Artificial
  Probe
tgtgggatacttagtggtatatgtc

SEQ ID NO: 129664 - DNA, 25 bp, Artificial
  Probe
ctgtgtgggatacttagtggtatat

SEQ ID NO: 129665 - DNA, 25 bp, Artificial
  Probe
gagttctatctttcttccagtctaa

SEQ ID NO: 129666 - DNA, 25 bp, Artificial
  Probe
gtgggatacttagtggtatatgtct

SEQ ID NO: 129667 - DNA, 25 bp, Artificial
  Probe
ggtatatgtctctgagtttggatta

SEQ ID NO: 129668 - DNA, 25 bp, Artificial
  Probe
ttgtagtattgtgcttgctgtgtag

SEQ ID NO: 129669 - DNA, 25 bp, Artificial
  Probe
tagtattgtgcttgctgtgtaggat

SEQ ID NO: 129670 - DNA, 25 bp, Artificial
  Probe
gtattgtgcttgctgtgtaggattc

SEQ ID NO: 129671 - DNA, 25 bp, Artificial
  Probe
agtattgtgcttgctgtgtaggatt

SEQ ID NO: 129672 - DNA, 25 bp, Artificial
  Probe
gtagtattgtgcttgctgtgtagga

SEQ ID NO: 129673 - DNA, 25 bp, Artificial
  Probe
tgtagtattgtgcttgctgtgtagg

SEQ ID NO: 129674 - DNA, 25 bp, Artificial
  Probe
gatttggacacatacttaggagaca

SEQ ID NO: 129675 - DNA, 25 bp, Artificial
  Probe
agatttggacacatacttaggagac

SEQ ID NO: 129676 - DNA, 25 bp, Artificial
  Probe
cttgggcagatttctattgggatat

SEQ ID NO: 129677 - DNA, 25 bp, Artificial
  Probe
atgtaacttgggcagatttctattg

SEQ ID NO: 129678 - DNA, 25 bp, Artificial
  Probe
tttgtagtattgtgcttgctgtgta

SEQ ID NO: 129679 - DNA, 25 bp, Artificial
  Probe
ggacacatacttaggagacaaagag

SEQ ID NO: 129680 - DNA, 25 bp, Artificial
  Probe
tgtaacttgggcagatttctattgg

SEQ ID NO: 129681 - DNA, 25 bp, Artificial
  Probe
tggacacatacttaggagacaaaga

SEQ ID NO: 129682 - DNA, 25 bp, Artificial
  Probe
aagatttggacacatacttaggaga

SEQ ID NO: 129683 - DNA, 25 bp, Artificial
  Probe
taggagacaaagagtggtttattgg

SEQ ID NO: 129684 - DNA, 25 bp, Artificial
  Probe
ttggacacatacttaggagacaaag

SEQ ID NO: 129685 - DNA, 25 bp, Artificial
  Probe
atttggacacatacttaggagacaa

SEQ ID NO: 129686 - DNA, 25 bp, Artificial
  Probe
aaactctaaatgattctggacccat

SEQ ID NO: 129687 - DNA, 25 bp, Artificial
  Probe
aactctaaatgattctggacccatc

SEQ ID NO: 129688 - DNA, 25 bp, Artificial
  Probe
ccttcctctcactttgtagtattgt

SEQ ID NO: 129689 - DNA, 25 bp, Artificial
  Probe
gcaattatgtaacttgggcagattt

SEQ ID NO: 129690 - DNA, 25 bp, Artificial
  Probe
catacttaggagacaaagagtggtt

SEQ ID NO: 129691 - DNA, 25 bp, Artificial
  Probe
cttctgaaagatttggacacatact

SEQ ID NO: 129692 - DNA, 25 bp, Artificial
  Probe
gacacatacttaggagacaaagagt

SEQ ID NO: 129693 - DNA, 25 bp, Artificial
  Probe
tgaaagatttggacacatacttagg

SEQ ID NO: 129694 - DNA, 25 bp, Artificial
  Probe
aattatgtaacttgggcagatttct

SEQ ID NO: 129695 - DNA, 25 bp, Artificial
  Probe
aagagtggtttattggcaattatgt

SEQ ID NO: 129696 - DNA, 25 bp, Artificial
  Probe
acttgggcagatttctattgggata

SEQ ID NO: 129697 - DNA, 25 bp, Artificial
  Probe
acttaggagacaaagagtggtttat

SEQ ID NO: 129698 - DNA, 25 bp, Artificial
  Probe
atacttaggagacaaagagtggttt

SEQ ID NO: 129699 - DNA, 25 bp, Artificial
  Probe
taacttgggcagatttctattggga

SEQ ID NO: 129700 - DNA, 25 bp, Artificial
  Probe
gtaacttgggcagatttctattggg

SEQ ID NO: 129701 - DNA, 25 bp, Artificial
  Probe
acatacttaggagacaaagagtggt

SEQ ID NO: 129702 - DNA, 25 bp, Artificial
  Probe
tattgtgcttgctgtgtaggattcc

SEQ ID NO: 129703 - DNA, 25 bp, Artificial
  Probe
ttattggcaattatgtaacttgggc

SEQ ID NO: 129704 - DNA, 25 bp, Artificial
  Probe
cttaggagacaaagagtggtttatt

SEQ ID NO: 129705 - DNA, 25 bp, Artificial
  Probe
aaagatttggacacatacttaggag

SEQ ID NO: 129706 - DNA, 25 bp, Artificial
  Probe
gaaagatttggacacatacttagga

SEQ ID NO: 129707 - DNA, 25 bp, Artificial
  Probe
ttctgaaagatttggacacatactt

SEQ ID NO: 129708 - DNA, 25 bp, Artificial
  Probe
gacaaagagtggtttattggcaatt

SEQ ID NO: 129709 - DNA, 25 bp, Artificial
  Probe
ttaggagacaaagagtggtttattg

SEQ ID NO: 129710 - DNA, 25 bp, Artificial
  Probe
gccttcctctcactttgtagtattg

SEQ ID NO: 129711 - DNA, 25 bp, Artificial
  Probe
acaaagagtggtttattggcaatta

SEQ ID NO: 129712 - DNA, 25 bp, Artificial
  Probe
tacttaggagacaaagagtggttta

SEQ ID NO: 129713 - DNA, 25 bp, Artificial
  Probe
aagtggacaagttcttcattgctgt

SEQ ID NO: 129714 - DNA, 25 bp, Artificial
  Probe
gaagtggacaagttcttcattgctg

SEQ ID NO: 129715 - DNA, 25 bp, Artificial
  Probe
cctgcctctgtttacctctgaaaga

SEQ ID NO: 129716 - DNA, 25 bp, Artificial
  Probe
acctgcctctgtttacctctgaaag

SEQ ID NO: 129717 - DNA, 25 bp, Artificial
  Probe
gacctgcctctgtttacctctgaaa

SEQ ID NO: 129718 - DNA, 25 bp, Artificial
  Probe
ggaagtggacaagttcttcattgct

SEQ ID NO: 129719 - DNA, 25 bp, Artificial
  Probe
ctgcctctgtttacctctgaaagag

SEQ ID NO: 129720 - DNA, 25 bp, Artificial
  Probe
agtggacaagttcttcattgctgtc

SEQ ID NO: 129721 - DNA, 25 bp, Artificial
  Probe
cggaagtggacaagttcttcattgc

SEQ ID NO: 129722 - DNA, 25 bp, Artificial
  Probe
accaaactcgtggcaaacaagattg

SEQ ID NO: 129723 - DNA, 25 bp, Artificial
  Probe
caccaaactcgtggcaaacaagatt

SEQ ID NO: 129724 - DNA, 25 bp, Artificial
  Probe
ccggaagtggacaagttcttcattg

SEQ ID NO: 129725 - DNA, 25 bp, Artificial
  Probe
tgcctctgtttacctctgaaagagc

SEQ ID NO: 129726 - DNA, 25 bp, Artificial
  Probe
ctctgaggaagactgcacagatgtg

SEQ ID NO: 129727 - DNA, 25 bp, Artificial
  Probe
ttgctggtattattacaagacttcc

SEQ ID NO: 129728 - DNA, 25 bp, Artificial
  Probe
tgctggtattattacaagacttcca

SEQ ID NO: 129729 - DNA, 25 bp, Artificial
  Probe
actttgattagcaggtattacagca

SEQ ID NO: 129730 - DNA, 25 bp, Artificial
  Probe
gactttgattagcaggtattacagc

SEQ ID NO: 129731 - DNA, 25 bp, Artificial
  Probe
tggactttgattagcaggtattaca

SEQ ID NO: 129732 - DNA, 25 bp, Artificial
  Probe
ttgattagcaggtattacagcaacc

SEQ ID NO: 129733 - DNA, 25 bp, Artificial
  Probe
ggactttgattagcaggtattacag

SEQ ID NO: 129734 - DNA, 25 bp, Artificial
  Probe
gaagatggaggactacgaaacaaat

SEQ ID NO: 129735 - DNA, 25 bp, Artificial
  Probe
gctggtattattacaagacttccat

SEQ ID NO: 129736 - DNA, 25 bp, Artificial
  Probe
aagatggaggactacgaaacaaatg

SEQ ID NO: 129737 - DNA, 25 bp, Artificial
  Probe
tttgattagcaggtattacagcaac

SEQ ID NO: 129738 - DNA, 25 bp, Artificial
  Probe
aaatcccttggcagaaagtatcatc

SEQ ID NO: 129739 - DNA, 25 bp, Artificial
  Probe
ctttgattagcaggtattacagcaa

SEQ ID NO: 129740 - DNA, 25 bp, Artificial
  Probe
actacgaaacaaatgtcctaccttg

SEQ ID NO: 129741 - DNA, 25 bp, Artificial
  Probe
caaatcccttggcagaaagtatcat

SEQ ID NO: 129742 - DNA, 25 bp, Artificial
  Probe
cttggcagaaagtatcatccttgag

SEQ ID NO: 129743 - DNA, 25 bp, Artificial
  Probe
aactggactttgattagcaggtatt

SEQ ID NO: 129744 - DNA, 25 bp, Artificial
  Probe
agatggaggactacgaaacaaatgt

SEQ ID NO: 129745 - DNA, 25 bp, Artificial
  Probe
actggactttgattagcaggtatta

SEQ ID NO: 129746 - DNA, 25 bp, Artificial
  Probe
ctggactttgattagcaggtattac

SEQ ID NO: 129747 - DNA, 25 bp, Artificial
  Probe
caactggactttgattagcaggtat

SEQ ID NO: 129748 - DNA, 25 bp, Artificial
  Probe
gactacgaaacaaatgtcctacctt

SEQ ID NO: 129749 - DNA, 25 bp, Artificial
  Probe
ggaagatggaggactacgaaacaaa

SEQ ID NO: 129750 - DNA, 25 bp, Artificial
  Probe
ctacgaaacaaatgtcctaccttgc

SEQ ID NO: 129751 - DNA, 25 bp, Artificial
  Probe
gatggaggactacgaaacaaatgtc

SEQ ID NO: 129752 - DNA, 25 bp, Artificial
  Probe
gtcctaccttgctggtattattaca

SEQ ID NO: 129753 - DNA, 25 bp, Artificial
  Probe
tgtcctaccttgctggtattattac

SEQ ID NO: 129754 - DNA, 25 bp, Artificial
  Probe
aatcccttggcagaaagtatcatcc

SEQ ID NO: 129755 - DNA, 25 bp, Artificial
  Probe
aatgtcctaccttgctggtattatt

SEQ ID NO: 129756 - DNA, 25 bp, Artificial
  Probe
tacgaaacaaatgtcctaccttgct

SEQ ID NO: 129757 - DNA, 25 bp, Artificial
  Probe
tcctaccttgctggtattattacaa

SEQ ID NO: 129758 - DNA, 25 bp, Artificial
  Probe
ctggtattattacaagacttccatg

SEQ ID NO: 129759 - DNA, 25 bp, Artificial
  Probe
ccttggcagaaagtatcatccttga

SEQ ID NO: 129760 - DNA, 25 bp, Artificial
  Probe
atgtcctaccttgctggtattatta

SEQ ID NO: 129761 - DNA, 25 bp, Artificial
  Probe
ttggcagaaagtatcatccttgagg

SEQ ID NO: 129762 - DNA, 25 bp, Artificial
  Probe
accttgctggtattattacaagact

SEQ ID NO: 129763 - DNA, 25 bp, Artificial
  Probe
aaagggaagatggaggactacgaaa

SEQ ID NO: 129764 - DNA, 25 bp, Artificial
  Probe
agaaagtatcatccttgaggctcac

SEQ ID NO: 129765 - DNA, 25 bp, Artificial
  Probe
cagaaagtatcatccttgaggctca

SEQ ID NO: 129766 - DNA, 25 bp, Artificial
  Probe
cctaccttgctggtattattacaag

SEQ ID NO: 129767 - DNA, 25 bp, Artificial
  Probe
ccttgctggtattattacaagactt

SEQ ID NO: 129768 - DNA, 25 bp, Artificial
  Probe
atcccttggcagaaagtatcatcct

SEQ ID NO: 129769 - DNA, 25 bp, Artificial
  Probe
taccttgctggtattattacaagac

SEQ ID NO: 129770 - DNA, 25 bp, Artificial
  Probe
cccttggcagaaagtatcatccttg

SEQ ID NO: 129771 - DNA, 25 bp, Artificial
  Probe
tcccttggcagaaagtatcatcctt

SEQ ID NO: 129772 - DNA, 25 bp, Artificial
  Probe
gccatcacatagagagaatcaagtt

SEQ ID NO: 129773 - DNA, 25 bp, Artificial
  Probe
ctgccatcacatagagagaatcaag

SEQ ID NO: 129774 - DNA, 25 bp, Artificial
  Probe
tgccatcacatagagagaatcaagt

SEQ ID NO: 129775 - DNA, 25 bp, Artificial
  Probe
tctgccatcacatagagagaatcaa

SEQ ID NO: 129776 - DNA, 25 bp, Artificial
  Probe
ttaacgggacctgaaatcaaagaat

SEQ ID NO: 129777 - DNA, 25 bp, Artificial
  Probe
attaacgggacctgaaatcaaagaa

SEQ ID NO: 129778 - DNA, 25 bp, Artificial
  Probe
acatagagagaatcaagtttgcgtt

SEQ ID NO: 129779 - DNA, 25 bp, Artificial
  Probe
atcacatagagagaatcaagtttgc

SEQ ID NO: 129780 - DNA, 25 bp, Artificial
  Probe
catagagagaatcaagtttgcgttc

SEQ ID NO: 129781 - DNA, 25 bp, Artificial
  Probe
ctctgttctctgctttctctttgtt

SEQ ID NO: 129782 - DNA, 25 bp, Artificial
  Probe
tttcattctgttccttccctctgta

SEQ ID NO: 129783 - DNA, 25 bp, Artificial
  Probe
aatggaattgtggacttctgtttag

SEQ ID NO: 129784 - DNA, 25 bp, Artificial
  Probe
atggaattgtggacttctgtttaga

SEQ ID NO: 129785 - DNA, 25 bp, Artificial
  Probe
tcacatagagagaatcaagtttgcg

SEQ ID NO: 129786 - DNA, 25 bp, Artificial
  Probe
ccatcacatagagagaatcaagttt

SEQ ID NO: 129787 - DNA, 25 bp, Artificial
  Probe
attctgttccttccctctgtagatt

SEQ ID NO: 129788 - DNA, 25 bp, Artificial
  Probe
taacgggacctgaaatcaaagaatg

SEQ ID NO: 129789 - DNA, 25 bp, Artificial
  Probe
cattaacgggacctgaaatcaaaga

SEQ ID NO: 129790 - DNA, 25 bp, Artificial
  Probe
cacatagagagaatcaagtttgcgt

SEQ ID NO: 129791 - DNA, 25 bp, Artificial
  Probe
cctgaaatcaaagaatgactgtgac

SEQ ID NO: 129792 - DNA, 25 bp, Artificial
  Probe
gacctgaaatcaaagaatgactgtg

SEQ ID NO: 129793 - DNA, 25 bp, Artificial
  Probe
ttccctctgtagattgaactctgtt

SEQ ID NO: 129794 - DNA, 25 bp, Artificial
  Probe
ctgaaatcaaagaatgactgtgaca

SEQ ID NO: 129795 - DNA, 25 bp, Artificial
  Probe
acctgaaatcaaagaatgactgtga

SEQ ID NO: 129796 - DNA, 25 bp, Artificial
  Probe
aactctgttctctgctttctctttg

SEQ ID NO: 129797 - DNA, 25 bp, Artificial
  Probe
ttcattctgttccttccctctgtag

SEQ ID NO: 129798 - DNA, 25 bp, Artificial
  Probe
ttccttccctctgtagattgaactc

SEQ ID NO: 129799 - DNA, 25 bp, Artificial
  Probe
cttccctctgtagattgaactctgt

SEQ ID NO: 129800 - DNA, 25 bp, Artificial
  Probe
cattctgttccttccctctgtagat

SEQ ID NO: 129801 - DNA, 25 bp, Artificial
  Probe
ggacctgaaatcaaagaatgactgt

SEQ ID NO: 129802 - DNA, 25 bp, Artificial
  Probe
ctgttccttccctctgtagattgaa

SEQ ID NO: 129803 - DNA, 25 bp, Artificial
  Probe
ttctgttccttccctctgtagattg

SEQ ID NO: 129804 - DNA, 25 bp, Artificial
  Probe
actctgttctctgctttctctttgt

SEQ ID NO: 129805 - DNA, 25 bp, Artificial
  Probe
ccattaacgggacctgaaatcaaag

SEQ ID NO: 129806 - DNA, 25 bp, Artificial
  Probe
catcacatagagagaatcaagtttg

SEQ ID NO: 129807 - DNA, 25 bp, Artificial
  Probe
gggacctgaaatcaaagaatgactg

SEQ ID NO: 129808 - DNA, 25 bp, Artificial
  Probe
ccttccctctgtagattgaactctg

SEQ ID NO: 129809 - DNA, 25 bp, Artificial
  Probe
tccttccctctgtagattgaactct

SEQ ID NO: 129810 - DNA, 25 bp, Artificial
  Probe
tctgttccttccctctgtagattga

SEQ ID NO: 129811 - DNA, 25 bp, Artificial
  Probe
tcattctgttccttccctctgtaga

SEQ ID NO: 129812 - DNA, 25 bp, Artificial
  Probe
accattaacgggacctgaaatcaaa

SEQ ID NO: 129813 - DNA, 25 bp, Artificial
  Probe
tgaaatcaaagaatgactgtgacag

SEQ ID NO: 129814 - DNA, 25 bp, Artificial
  Probe
gaaatcaaagaatgactgtgacagc

SEQ ID NO: 129815 - DNA, 25 bp, Artificial
  Probe
tctgtagattgaactctgttctctg

SEQ ID NO: 129816 - DNA, 25 bp, Artificial
  Probe
aacgggacctgaaatcaaagaatga

SEQ ID NO: 129817 - DNA, 25 bp, Artificial
  Probe
gagattgtaagagccatgacctatg

SEQ ID NO: 129818 - DNA, 25 bp, Artificial
  Probe
agattgtaagagccatgacctatgt

SEQ ID NO: 129819 - DNA, 25 bp, Artificial
  Probe
ggagattgtaagagccatgacctat

SEQ ID NO: 129820 - DNA, 25 bp, Artificial
  Probe
aagctatgttatcaccaccaagatt

SEQ ID NO: 129821 - DNA, 25 bp, Artificial
  Probe
gaggagatcaagctatgttatcacc

SEQ ID NO: 129822 - DNA, 25 bp, Artificial
  Probe
ggaggagatcaagctatgttatcac

SEQ ID NO: 129823 - DNA, 25 bp, Artificial
  Probe
atcaagctatgttatcaccaccaag

SEQ ID NO: 129824 - DNA, 25 bp, Artificial
  Probe
caagctatgttatcaccaccaagat

SEQ ID NO: 129825 - DNA, 25 bp, Artificial
  Probe
tggaggagatcaagctatgttatca

SEQ ID NO: 129826 - DNA, 25 bp, Artificial
  Probe
gatcaagctatgttatcaccaccaa

SEQ ID NO: 129827 - DNA, 25 bp, Artificial
  Probe
gagatcaagctatgttatcaccacc

SEQ ID NO: 129828 - DNA, 25 bp, Artificial
  Probe
ggagatcaagctatgttatcaccac

SEQ ID NO: 129829 - DNA, 25 bp, Artificial
  Probe
aggagatcaagctatgttatcacca

SEQ ID NO: 129830 - DNA, 25 bp, Artificial
  Probe
ttggaggagatcaagctatgttatc

SEQ ID NO: 129831 - DNA, 25 bp, Artificial
  Probe
gttggaggagatcaagctatgttat

SEQ ID NO: 129832 - DNA, 25 bp, Artificial
  Probe
gattgtaagagccatgacctatgtc

SEQ ID NO: 129833 - DNA, 25 bp, Artificial
  Probe
catagtatttgccaatcgttcagac

SEQ ID NO: 129834 - DNA, 25 bp, Artificial
  Probe
gacatagtatttgccaatcgttcag

SEQ ID NO: 129835 - DNA, 25 bp, Artificial
  Probe
agatcaagctatgttatcaccacca

SEQ ID NO: 129836 - DNA, 25 bp, Artificial
  Probe
acatagtatttgccaatcgttcaga

SEQ ID NO: 129837 - DNA, 25 bp, Artificial
  Probe
acaaatcgcattccaagaaatagtc

SEQ ID NO: 129838 - DNA, 25 bp, Artificial
  Probe
aacaaatcgcattccaagaaatagt

SEQ ID NO: 129839 - DNA, 25 bp, Artificial
  Probe
tcaagctatgttatcaccaccaaga

SEQ ID NO: 129840 - DNA, 25 bp, Artificial
  Probe
tagtatttgtccaatagaagccagg

SEQ ID NO: 129841 - DNA, 25 bp, Artificial
  Probe
gaacaaatcgcattccaagaaatag

SEQ ID NO: 129842 - DNA, 25 bp, Artificial
  Probe
tgtagtatttgtccaatagaagcca

SEQ ID NO: 129843 - DNA, 25 bp, Artificial
  Probe
caaatcgcattccaagaaatagtcc

SEQ ID NO: 129844 - DNA, 25 bp, Artificial
  Probe
ttgacatagtatttgccaatcgttc

SEQ ID NO: 129845 - DNA, 25 bp, Artificial
  Probe
gttgacatagtatttgccaatcgtt

SEQ ID NO: 129846 - DNA, 25 bp, Artificial
  Probe
gggctttgtagtatttgtccaatag

SEQ ID NO: 129847 - DNA, 25 bp, Artificial
  Probe
atagtatttgccaatcgttcagacc

SEQ ID NO: 129848 - DNA, 25 bp, Artificial
  Probe
gtagtatttgtccaatagaagccag

SEQ ID NO: 129849 - DNA, 25 bp, Artificial
  Probe
ggttggaggagatcaagctatgtta

SEQ ID NO: 129850 - DNA, 25 bp, Artificial
  Probe
tgacatagtatttgccaatcgttca

SEQ ID NO: 129851 - DNA, 25 bp, Artificial
  Probe
ttgtagtatttgtccaatagaagcc

SEQ ID NO: 129852 - DNA, 25 bp, Artificial
  Probe
ggctttgtagtatttgtccaataga

SEQ ID NO: 129853 - DNA, 25 bp, Artificial
  Probe
aaatcgcattccaagaaatagtccg

SEQ ID NO: 129854 - DNA, 25 bp, Artificial
  Probe
agcctcattactagcaagtacgatg

SEQ ID NO: 129855 - DNA, 25 bp, Artificial
  Probe
cagcctcattactagcaagtacgat

SEQ ID NO: 129856 - DNA, 25 bp, Artificial
  Probe
aagtgaagatggcaagaagcaacaa

SEQ ID NO: 129857 - DNA, 25 bp, Artificial
  Probe
cgttgacatagtatttgccaatcgt

SEQ ID NO: 129858 - DNA, 25 bp, Artificial
  Probe
aggagattgtaagagccatgaccta

SEQ ID NO: 129859 - DNA, 25 bp, Artificial
  Probe
agctatgttatcaccaccaagattt

SEQ ID NO: 129860 - DNA, 25 bp, Artificial
  Probe
agtgaagatggcaagaagcaacaag

SEQ ID NO: 129861 - DNA, 25 bp, Artificial
  Probe
gaagatctcctgacagtagcctatg

SEQ ID NO: 129862 - DNA, 25 bp, Artificial
  Probe
gaacttgctatgtagaccaggctag

SEQ ID NO: 129863 - DNA, 25 bp, Artificial
  Probe
ctgcctctgcctctctagttactat

SEQ ID NO: 129864 - DNA, 25 bp, Artificial
  Probe
tgcctctgcctctctagttactatg

SEQ ID NO: 129865 - DNA, 25 bp, Artificial
  Probe
tagagtgtactggatgctgctgtat

SEQ ID NO: 129866 - DNA, 25 bp, Artificial
  Probe
tgagacagcagagtagagtgtactg

SEQ ID NO: 129867 - DNA, 25 bp, Artificial
  Probe
gtgagacagcagagtagagtgtact

SEQ ID NO: 129868 - DNA, 25 bp, Artificial
  Probe
atcagatcctttctcaaccacctaa

SEQ ID NO: 129869 - DNA, 25 bp, Artificial
  Probe
ggaacttgctatgtagaccaggcta

SEQ ID NO: 129870 - DNA, 25 bp, Artificial
  Probe
cctctgcctctctagttactatgcc

SEQ ID NO: 129871 - DNA, 25 bp, Artificial
  Probe
taacccagagcctgtctttactaaa

SEQ ID NO: 129872 - DNA, 25 bp, Artificial
  Probe
ctagttactatgcccagccttcttt

SEQ ID NO: 129873 - DNA, 25 bp, Artificial
  Probe
gatcagatcctttctcaaccaccta

SEQ ID NO: 129874 - DNA, 25 bp, Artificial
  Probe
tctgcctctgcctctctagttacta

SEQ ID NO: 129875 - DNA, 25 bp, Artificial
  Probe
ctctcagcagacctcagtaaatctc

SEQ ID NO: 129876 - DNA, 25 bp, Artificial
  Probe
ctaacccagagcctgtctttactaa

SEQ ID NO: 129877 - DNA, 25 bp, Artificial
  Probe
cagatcctttctcaaccacctaaga

SEQ ID NO: 129878 - DNA, 25 bp, Artificial
  Probe
tcagatcctttctcaaccacctaag

SEQ ID NO: 129879 - DNA, 25 bp, Artificial
  Probe
agatcctttctcaaccacctaagag

SEQ ID NO: 129880 - DNA, 25 bp, Artificial
  Probe
gtagagtgtactggatgctgctgta

SEQ ID NO: 129881 - DNA, 25 bp, Artificial
  Probe
tctaacccagagcctgtctttacta

SEQ ID NO: 129882 - DNA, 25 bp, Artificial
  Probe
tctagttactatgcccagccttctt

SEQ ID NO: 129883 - DNA, 25 bp, Artificial
  Probe
tttctaacccagagcctgtctttac

SEQ ID NO: 129884 - DNA, 25 bp, Artificial
  Probe
gacagcagagtagagtgtactggat

SEQ ID NO: 129885 - DNA, 25 bp, Artificial
  Probe
cgtgagacagcagagtagagtgtac

SEQ ID NO: 129886 - DNA, 25 bp, Artificial
  Probe
gcctctgcctctctagttactatgc

SEQ ID NO: 129887 - DNA, 25 bp, Artificial
  Probe
agagtgtactggatgctgctgtatc

SEQ ID NO: 129888 - DNA, 25 bp, Artificial
  Probe
acagcagagtagagtgtactggatg

SEQ ID NO: 129889 - DNA, 25 bp, Artificial
  Probe
agccttcttttgttttactgaccta

SEQ ID NO: 129890 - DNA, 25 bp, Artificial
  Probe
ctctagttactatgcccagccttct

SEQ ID NO: 129891 - DNA, 25 bp, Artificial
  Probe
tctctagttactatgcccagccttc

SEQ ID NO: 129892 - DNA, 25 bp, Artificial
  Probe
ctctctagttactatgcccagcctt

SEQ ID NO: 129893 - DNA, 25 bp, Artificial
  Probe
ttactgacctaggatctctatagcc

SEQ ID NO: 129894 - DNA, 25 bp, Artificial
  Probe
ttctaacccagagcctgtctttact

SEQ ID NO: 129895 - DNA, 25 bp, Artificial
  Probe
ctcagcagacctcagtaaatctcct

SEQ ID NO: 129896 - DNA, 25 bp, Artificial
  Probe
tctcagcagacctcagtaaatctcc

SEQ ID NO: 129897 - DNA, 25 bp, Artificial
  Probe
cctctcagcagacctcagtaaatct

SEQ ID NO: 129898 - DNA, 25 bp, Artificial
  Probe
gtctttactaaaaccctctcagcag

SEQ ID NO: 129899 - DNA, 25 bp, Artificial
  Probe
gccttcttttgttttactgacctag

SEQ ID NO: 129900 - DNA, 25 bp, Artificial
  Probe
gatcctttctcaaccacctaagagc

SEQ ID NO: 129901 - DNA, 25 bp, Artificial
  Probe
tggtggttctattttgggttgtttt

SEQ ID NO: 129902 - DNA, 25 bp, Artificial
  Probe
gagacagcagagtagagtgtactgg

SEQ ID NO: 129903 - DNA, 25 bp, Artificial
  Probe
ctctgcctctctagttactatgccc

SEQ ID NO: 129904 - DNA, 25 bp, Artificial
  Probe
ctttactaaaaccctctcagcagac

SEQ ID NO: 129905 - DNA, 25 bp, Artificial
  Probe
tctttactaaaaccctctcagcaga

SEQ ID NO: 129906 - DNA, 25 bp, Artificial
  Probe
tgtctttactaaaaccctctcagca

SEQ ID NO: 129907 - DNA, 25 bp, Artificial
  Probe
tagtgtggcaagaatcaaattggta

SEQ ID NO: 129908 - DNA, 25 bp, Artificial
  Probe
aatcaaattggtatgggatctgtca

SEQ ID NO: 129909 - DNA, 25 bp, Artificial
  Probe
gaatcaaattggtatgggatctgtc

SEQ ID NO: 129910 - DNA, 25 bp, Artificial
  Probe
atcaaattggtatgggatctgtcac

SEQ ID NO: 129911 - DNA, 25 bp, Artificial
  Probe
agaatcaaattggtatgggatctgt

SEQ ID NO: 129912 - DNA, 25 bp, Artificial
  Probe
gtgtggcaagaatcaaattggtatg

SEQ ID NO: 129913 - DNA, 25 bp, Artificial
  Probe
agtgtggcaagaatcaaattggtat

SEQ ID NO: 129914 - DNA, 25 bp, Artificial
  Probe
gcaagaatcaaattggtatgggatc

SEQ ID NO: 129915 - DNA, 25 bp, Artificial
  Probe
aagaatcaaattggtatgggatctg

SEQ ID NO: 129916 - DNA, 25 bp, Artificial
  Probe
caagaatcaaattggtatgggatct

SEQ ID NO: 129917 - DNA, 25 bp, Artificial
  Probe
ggcaagaatcaaattggtatgggat

SEQ ID NO: 129918 - DNA, 25 bp, Artificial
  Probe
ctagtgtggcaagaatcaaattggt

SEQ ID NO: 129919 - DNA, 25 bp, Artificial
  Probe
acctagtgtggcaagaatcaaattg

SEQ ID NO: 129920 - DNA, 25 bp, Artificial
  Probe
tgtggcaagaatcaaattggtatgg

SEQ ID NO: 129921 - DNA, 25 bp, Artificial
  Probe
cctagtgtggcaagaatcaaattgg

SEQ ID NO: 129922 - DNA, 25 bp, Artificial
  Probe
cacctagtgtggcaagaatcaaatt

SEQ ID NO: 129923 - DNA, 25 bp, Artificial
  Probe
gtggcaagaatcaaattggtatggg

SEQ ID NO: 129924 - DNA, 25 bp, Artificial
  Probe
tggcaagaatcaaattggtatggga

SEQ ID NO: 129925 - DNA, 25 bp, Artificial
  Probe
acaggagggatgaagcaactatctt

SEQ ID NO: 129926 - DNA, 25 bp, Artificial
  Probe
cagcatgacctcagttcctagaaag

SEQ ID NO: 129927 - DNA, 25 bp, Artificial
  Probe
gacaggagggatgaagcaactatct

SEQ ID NO: 129928 - DNA, 25 bp, Artificial
  Probe
ttgacaggagggatgaagcaactat

SEQ ID NO: 129929 - DNA, 25 bp, Artificial
  Probe
tcaaattggtatgggatctgtcacc

SEQ ID NO: 129930 - DNA, 25 bp, Artificial
  Probe
ttctcttttgctctctgaacaccta

SEQ ID NO: 129931 - DNA, 25 bp, Artificial
  Probe
tgacaggagggatgaagcaactatc

SEQ ID NO: 129932 - DNA, 25 bp, Artificial
  Probe
tctcttttgctctctgaacacctag

SEQ ID NO: 129933 - DNA, 25 bp, Artificial
  Probe
ctcttttgctctctgaacacctagt

SEQ ID NO: 129934 - DNA, 25 bp, Artificial
  Probe
cttgacaggagggatgaagcaacta

SEQ ID NO: 129935 - DNA, 25 bp, Artificial
  Probe
atcccttctcttttgctctctgaac

SEQ ID NO: 129936 - DNA, 25 bp, Artificial
  Probe
cttctcttttgctctctgaacacct

SEQ ID NO: 129937 - DNA, 25 bp, Artificial
  Probe
gatcccttctcttttgctctctgaa

SEQ ID NO: 129938 - DNA, 25 bp, Artificial
  Probe
ccagcatgacctcagttcctagaaa

SEQ ID NO: 129939 - DNA, 25 bp, Artificial
  Probe
caggagggatgaagcaactatcttc

SEQ ID NO: 129940 - DNA, 25 bp, Artificial
  Probe
tatgggatctgtcaccaaacacctt

SEQ ID NO: 129941 - DNA, 25 bp, Artificial
  Probe
agcatgacctcagttcctagaaagg

SEQ ID NO: 129942 - DNA, 25 bp, Artificial
  Probe
atctgtcaccaaacaccttcccttt

SEQ ID NO: 129943 - DNA, 25 bp, Artificial
  Probe
tcttttgctctctgaacacctagtg

SEQ ID NO: 129944 - DNA, 25 bp, Artificial
  Probe
agatcccttctcttttgctctctga

SEQ ID NO: 129945 - DNA, 25 bp, Artificial
  Probe
tagaaaggagaaggtgggtggagtc

SEQ ID NO: 129946 - DNA, 25 bp, Artificial
  Probe
tgacagaactttgactgggaccatc

SEQ ID NO: 129947 - DNA, 25 bp, Artificial
  Probe
ctgacagaactttgactgggaccat

SEQ ID NO: 129948 - DNA, 25 bp, Artificial
  Probe
ccttctcttttgctctctgaacacc

SEQ ID NO: 129949 - DNA, 25 bp, Artificial
  Probe
cccttctcttttgctctctgaacac

SEQ ID NO: 129950 - DNA, 25 bp, Artificial
  Probe
tcccttctcttttgctctctgaaca

SEQ ID NO: 129951 - DNA, 25 bp, Artificial
  Probe
gacctcagttcctagaaaggagaag

SEQ ID NO: 129952 - DNA, 25 bp, Artificial
  Probe
ggatgataatggtgatcttattgct

SEQ ID NO: 129953 - DNA, 25 bp, Artificial
  Probe
gtacgattctacttgtcagattgcc

SEQ ID NO: 129954 - DNA, 25 bp, Artificial
  Probe
gatgataatggtgatcttattgctg

SEQ ID NO: 129955 - DNA, 25 bp, Artificial
  Probe
aattattcaagaacaggacgcaggt

SEQ ID NO: 129956 - DNA, 25 bp, Artificial
  Probe
agaaccttctggatgatcttgtcac

SEQ ID NO: 129957 - DNA, 25 bp, Artificial
  Probe
gaactttgttgaagaatctgaaggt

SEQ ID NO: 129958 - DNA, 25 bp, Artificial
  Probe
agaactttgttgaagaatctgaagg

SEQ ID NO: 129959 - DNA, 25 bp, Artificial
  Probe
aagaacgaaatcagtgtgaaagaag

SEQ ID NO: 129960 - DNA, 25 bp, Artificial
  Probe
caagaacgaaatcagtgtgaaagaa

SEQ ID NO: 129961 - DNA, 25 bp, Artificial
  Probe
gaacgaaatcagtgtgaaagaagag

SEQ ID NO: 129962 - DNA, 25 bp, Artificial
  Probe
aaggacttacttctaagagctgtgt

SEQ ID NO: 129963 - DNA, 25 bp, Artificial
  Probe
agaacgaaatcagtgtgaaagaaga

SEQ ID NO: 129964 - DNA, 25 bp, Artificial
  Probe
ctgtgggatgataatggtgatctta

SEQ ID NO: 129965 - DNA, 25 bp, Artificial
  Probe
actttgttgaagaatctgaaggtaa

SEQ ID NO: 129966 - DNA, 25 bp, Artificial
  Probe
aaatcagtgtgaaagaagaggtgag

SEQ ID NO: 129967 - DNA, 25 bp, Artificial
  Probe
gaaatcagtgtgaaagaagaggtga

SEQ ID NO: 129968 - DNA, 25 bp, Artificial
  Probe
tcaagaacgaaatcagtgtgaaaga

SEQ ID NO: 129969 - DNA, 25 bp, Artificial
  Probe
aactttgttgaagaatctgaaggta

SEQ ID NO: 129970 - DNA, 25 bp, Artificial
  Probe
aggacttacttctaagagctgtgtc

SEQ ID NO: 129971 - DNA, 25 bp, Artificial
  Probe
gggatgataatggtgatcttattgc

SEQ ID NO: 129972 - DNA, 25 bp, Artificial
  Probe
aaattattcaagaacaggacgcagg

SEQ ID NO: 129973 - DNA, 25 bp, Artificial
  Probe
tgtgggatgataatggtgatcttat

SEQ ID NO: 129974 - DNA, 25 bp, Artificial
  Probe
ttgttgaagaatctgaaggtaaaga

SEQ ID NO: 129975 - DNA, 25 bp, Artificial
  Probe
agtgtgaaagaagaggtgagaagac

SEQ ID NO: 129976 - DNA, 25 bp, Artificial
  Probe
cagtgtgaaagaagaggtgagaaga

SEQ ID NO: 129977 - DNA, 25 bp, Artificial
  Probe
aacgaaatcagtgtgaaagaagagg

SEQ ID NO: 129978 - DNA, 25 bp, Artificial
  Probe
atcagtgtgaaagaagaggtgagaa

SEQ ID NO: 129979 - DNA, 25 bp, Artificial
  Probe
aatcagtgtgaaagaagaggtgaga

SEQ ID NO: 129980 - DNA, 25 bp, Artificial
  Probe
gacttacttctaagagctgtgtcga

SEQ ID NO: 129981 - DNA, 25 bp, Artificial
  Probe
tttgttgaagaatctgaaggtaaag

SEQ ID NO: 129982 - DNA, 25 bp, Artificial
  Probe
gatcgacctcttgaaggacttactt

SEQ ID NO: 129983 - DNA, 25 bp, Artificial
  Probe
cgctgagaagattcaagaacgaaat

SEQ ID NO: 129984 - DNA, 25 bp, Artificial
  Probe
tgggatgataatggtgatcttattg

SEQ ID NO: 129985 - DNA, 25 bp, Artificial
  Probe
gtgggatgataatggtgatcttatt

SEQ ID NO: 129986 - DNA, 25 bp, Artificial
  Probe
gaaccttctggatgatcttgtcacc

SEQ ID NO: 129987 - DNA, 25 bp, Artificial
  Probe
tcttgaaggacttacttctaagagc

SEQ ID NO: 129988 - DNA, 25 bp, Artificial
  Probe
ctttgttgaagaatctgaaggtaaa

SEQ ID NO: 129989 - DNA, 25 bp, Artificial
  Probe
caatcagaactttgttgaagaatct

SEQ ID NO: 129990 - DNA, 25 bp, Artificial
  Probe
acctcttgaaggacttacttctaag

SEQ ID NO: 129991 - DNA, 25 bp, Artificial
  Probe
gacctcttgaaggacttacttctaa

SEQ ID NO: 129992 - DNA, 25 bp, Artificial
  Probe
tcagtgtgaaagaagaggtgagaag

SEQ ID NO: 129993 - DNA, 25 bp, Artificial
  Probe
cgaaatcagtgtgaaagaagaggtg

SEQ ID NO: 129994 - DNA, 25 bp, Artificial
  Probe
cctcttgaaggacttacttctaaga

SEQ ID NO: 129995 - DNA, 25 bp, Artificial
  Probe
aagattcaagaacgaaatcagtgtg

SEQ ID NO: 129996 - DNA, 25 bp, Artificial
  Probe
gaagattcaagaacgaaatcagtgt

SEQ ID NO: 129997 - DNA, 25 bp, Artificial
  Probe
attggtccttattctgggtcatatc

SEQ ID NO: 129998 - DNA, 25 bp, Artificial
  Probe
cattggtccttattctgggtcatat

SEQ ID NO: 129999 - DNA, 25 bp, Artificial
  Probe
acattggtccttattctgggtcata

SEQ ID NO: 130000 - DNA, 25 bp, Artificial
  Probe
ccaacattccagaatccctcataaa

SEQ ID NO: 130001 - DNA, 25 bp, Artificial
  Probe
ttggtccttattctgggtcatatcc

SEQ ID NO: 130002 - DNA, 25 bp, Artificial
  Probe
tccaacattccagaatccctcataa

SEQ ID NO: 130003 - DNA, 25 bp, Artificial
  Probe
ctccaacattccagaatccctcata

SEQ ID NO: 130004 - DNA, 25 bp, Artificial
  Probe
aattagccctccaacattccagaat

SEQ ID NO: 130005 - DNA, 25 bp, Artificial
  Probe
cacattggtccttattctgggtcat

SEQ ID NO: 130006 - DNA, 25 bp, Artificial
  Probe
tctatgaccaatgtaagctgccatg

SEQ ID NO: 130007 - DNA, 25 bp, Artificial
  Probe
attagccctccaacattccagaatc

SEQ ID NO: 130008 - DNA, 25 bp, Artificial
  Probe
ctatgaccaatgtaagctgccatgt

SEQ ID NO: 130009 - DNA, 25 bp, Artificial
  Probe
gttagaattagccctccaacattcc

SEQ ID NO: 130010 - DNA, 25 bp, Artificial
  Probe
ggttagaattagccctccaacattc

SEQ ID NO: 130011 - DNA, 25 bp, Artificial
  Probe
ttagaattagccctccaacattcca

SEQ ID NO: 130012 - DNA, 25 bp, Artificial
  Probe
tatgaccaatgtaagctgccatgtg

SEQ ID NO: 130013 - DNA, 25 bp, Artificial
  Probe
tagaattagccctccaacattccag

SEQ ID NO: 130014 - DNA, 25 bp, Artificial
  Probe
acattccagaatccctcataaaagt

SEQ ID NO: 130015 - DNA, 25 bp, Artificial
  Probe
tggtccttattctgggtcatatcca

SEQ ID NO: 130016 - DNA, 25 bp, Artificial
  Probe
caacattccagaatccctcataaaa

SEQ ID NO: 130017 - DNA, 25 bp, Artificial
  Probe
aacattccagaatccctcataaaag

SEQ ID NO: 130018 - DNA, 25 bp, Artificial
  Probe
gaattagccctccaacattccagaa

SEQ ID NO: 130019 - DNA, 25 bp, Artificial
  Probe
cctccaacattccagaatccctcat

SEQ ID NO: 130020 - DNA, 25 bp, Artificial
  Probe
agaattagccctccaacattccaga

SEQ ID NO: 130021 - DNA, 25 bp, Artificial
  Probe
agagcacattggtccttattctggg

SEQ ID NO: 130022 - DNA, 25 bp, Artificial
  Probe
ttagccctccaacattccagaatcc

SEQ ID NO: 130023 - DNA, 25 bp, Artificial
  Probe
agcacattggtccttattctgggtc

SEQ ID NO: 130024 - DNA, 25 bp, Artificial
  Probe
gagcacattggtccttattctgggt

SEQ ID NO: 130025 - DNA, 25 bp, Artificial
  Probe
cagagcacattggtccttattctgg

SEQ ID NO: 130026 - DNA, 25 bp, Artificial
  Probe
ccagagcacattggtccttattctg

SEQ ID NO: 130027 - DNA, 25 bp, Artificial
  Probe
gcacattggtccttattctgggtca

SEQ ID NO: 130028 - DNA, 25 bp, Artificial
  Probe
atgaccaatgtaagctgccatgtgt

SEQ ID NO: 130029 - DNA, 25 bp, Artificial
  Probe
cccagagcacattggtccttattct

SEQ ID NO: 130030 - DNA, 25 bp, Artificial
  Probe
tcccagagcacattggtccttattc

SEQ ID NO: 130031 - DNA, 25 bp, Artificial
  Probe
ctcccagagcacattggtccttatt

SEQ ID NO: 130032 - DNA, 25 bp, Artificial
  Probe
gtccttattctgggtcatatccagg

SEQ ID NO: 130033 - DNA, 25 bp, Artificial
  Probe
ggtccttattctgggtcatatccag

SEQ ID NO: 130034 - DNA, 25 bp, Artificial
  Probe
tccttattctgggtcatatccaggc

SEQ ID NO: 130035 - DNA, 25 bp, Artificial
  Probe
ttattctgggtcatatccaggccat

SEQ ID NO: 130036 - DNA, 25 bp, Artificial
  Probe
cttattctgggtcatatccaggcca

SEQ ID NO: 130037 - DNA, 25 bp, Artificial
  Probe
ccttattctgggtcatatccaggcc

SEQ ID NO: 130038 - DNA, 25 bp, Artificial
  Probe
ctaaggatgttatcactgaatggct

SEQ ID NO: 130039 - DNA, 25 bp, Artificial
  Probe
taaggatgttatcactgaatggctg

SEQ ID NO: 130040 - DNA, 25 bp, Artificial
  Probe
cctaaggatgttatcactgaatggc

SEQ ID NO: 130041 - DNA, 25 bp, Artificial
  Probe
ctacctgatcctagacttcaatgtc

SEQ ID NO: 130042 - DNA, 25 bp, Artificial
  Probe
tacctgatcctagacttcaatgtcc

SEQ ID NO: 130043 - DNA, 25 bp, Artificial
  Probe
gctacctgatcctagacttcaatgt

SEQ ID NO: 130044 - DNA, 25 bp, Artificial
  Probe
caatggctacctgatcctagacttc

SEQ ID NO: 130045 - DNA, 25 bp, Artificial
  Probe
ggctacctgatcctagacttcaatg

SEQ ID NO: 130046 - DNA, 25 bp, Artificial
  Probe
ccctaaggatgttatcactgaatgg

SEQ ID NO: 130047 - DNA, 25 bp, Artificial
  Probe
aatgaaattccctttacctacgagc

SEQ ID NO: 130048 - DNA, 25 bp, Artificial
  Probe
gatcctagacttcaatgtccgagag

SEQ ID NO: 130049 - DNA, 25 bp, Artificial
  Probe
tggctacctgatcctagacttcaat

SEQ ID NO: 130050 - DNA, 25 bp, Artificial
  Probe
atggctacctgatcctagacttcaa

SEQ ID NO: 130051 - DNA, 25 bp, Artificial
  Probe
aatggctacctgatcctagacttca

SEQ ID NO: 130052 - DNA, 25 bp, Artificial
  Probe
ctgatcctagacttcaatgtccgag

SEQ ID NO: 130053 - DNA, 25 bp, Artificial
  Probe
ccagatggaccttgtgaatgaaatt

SEQ ID NO: 130054 - DNA, 25 bp, Artificial
  Probe
aaggatgttatcactgaatggctgc

SEQ ID NO: 130055 - DNA, 25 bp, Artificial
  Probe
acagtgaatactctgcttaaagtca

SEQ ID NO: 130056 - DNA, 25 bp, Artificial
  Probe
tgatcctagacttcaatgtccgaga

SEQ ID NO: 130057 - DNA, 25 bp, Artificial
  Probe
acacagtgaatactctgcttaaagt

SEQ ID NO: 130058 - DNA, 25 bp, Artificial
  Probe
agacacagtgaatactctgcttaaa

SEQ ID NO: 130059 - DNA, 25 bp, Artificial
  Probe
cagtgaatactctgcttaaagtcag

SEQ ID NO: 130060 - DNA, 25 bp, Artificial
  Probe
cacagtgaatactctgcttaaagtc

SEQ ID NO: 130061 - DNA, 25 bp, Artificial
  Probe
gacacagtgaatactctgcttaaag

SEQ ID NO: 130062 - DNA, 25 bp, Artificial
  Probe
atgaaattccctttacctacgagca

SEQ ID NO: 130063 - DNA, 25 bp, Artificial
  Probe
ttaagttacctatgtgacttcagcc

SEQ ID NO: 130064 - DNA, 25 bp, Artificial
  Probe
ccaatggctacctgatcctagactt

SEQ ID NO: 130065 - DNA, 25 bp, Artificial
  Probe
tccctaaggatgttatcactgaatg

SEQ ID NO: 130066 - DNA, 25 bp, Artificial
  Probe
gatgttatcactgaatggctgcaag

SEQ ID NO: 130067 - DNA, 25 bp, Artificial
  Probe
tgaatgaaattccctttacctacga

SEQ ID NO: 130068 - DNA, 25 bp, Artificial
  Probe
gtgaatgaaattccctttacctacg

SEQ ID NO: 130069 - DNA, 25 bp, Artificial
  Probe
ccttgtgaatgaaattccctttacc

SEQ ID NO: 130070 - DNA, 25 bp, Artificial
  Probe
accttgtgaatgaaattccctttac

SEQ ID NO: 130071 - DNA, 25 bp, Artificial
  Probe
tgaaattccctttacctacgagcag

SEQ ID NO: 130072 - DNA, 25 bp, Artificial
  Probe
cagatggaccttgtgaatgaaattc

SEQ ID NO: 130073 - DNA, 25 bp, Artificial
  Probe
gaatgaaattccctttacctacgag

SEQ ID NO: 130074 - DNA, 25 bp, Artificial
  Probe
gaccttgtgaatgaaattcccttta

SEQ ID NO: 130075 - DNA, 25 bp, Artificial
  Probe
tatggacatagccactttcaagaag

SEQ ID NO: 130076 - DNA, 25 bp, Artificial
  Probe
cttgtgaatgaaattccctttacct

SEQ ID NO: 130077 - DNA, 25 bp, Artificial
  Probe
atcctagacttcaatgtccgagagg

SEQ ID NO: 130078 - DNA, 25 bp, Artificial
  Probe
gtatggacatagccactttcaagaa

SEQ ID NO: 130079 - DNA, 25 bp, Artificial
  Probe
aatgtgagtatggacatagccactt

SEQ ID NO: 130080 - DNA, 25 bp, Artificial
  Probe
tgtgaatgaaattccctttacctac

SEQ ID NO: 130081 - DNA, 25 bp, Artificial
  Probe
catcttcaagcacaaactggacaag

SEQ ID NO: 130082 - DNA, 25 bp, Artificial
  Probe
gagtatggacatagccactttcaag

SEQ ID NO: 130083 - DNA, 25 bp, Artificial
  Probe
aagaatggcttagtctacatgaagt

SEQ ID NO: 130084 - DNA, 25 bp, Artificial
  Probe
caagaatggcttagtctacatgaag

SEQ ID NO: 130085 - DNA, 25 bp, Artificial
  Probe
catcaagaatggcttagtctacatg

SEQ ID NO: 130086 - DNA, 25 bp, Artificial
  Probe
tcaagatcgtgtatgtggaagagaa

SEQ ID NO: 130087 - DNA, 25 bp, Artificial
  Probe
atggcttagtctacatgaagtatga

SEQ ID NO: 130088 - DNA, 25 bp, Artificial
  Probe
tcaagaatggcttagtctacatgaa

SEQ ID NO: 130089 - DNA, 25 bp, Artificial
  Probe
agaatggcttagtctacatgaagta

SEQ ID NO: 130090 - DNA, 25 bp, Artificial
  Probe
atcaagaatggcttagtctacatga

SEQ ID NO: 130091 - DNA, 25 bp, Artificial
  Probe
ttcaagatcgtgtatgtggaagaga

SEQ ID NO: 130092 - DNA, 25 bp, Artificial
  Probe
aatggcttagtctacatgaagtatg

SEQ ID NO: 130093 - DNA, 25 bp, Artificial
  Probe
ggcttagtctacatgaagtatgaca

SEQ ID NO: 130094 - DNA, 25 bp, Artificial
  Probe
tggcttagtctacatgaagtatgac

SEQ ID NO: 130095 - DNA, 25 bp, Artificial
  Probe
gtctacatgaagtatgacacacctt

SEQ ID NO: 130096 - DNA, 25 bp, Artificial
  Probe
tagtctacatgaagtatgacacacc

SEQ ID NO: 130097 - DNA, 25 bp, Artificial
  Probe
gaatggcttagtctacatgaagtat

SEQ ID NO: 130098 - DNA, 25 bp, Artificial
  Probe
agtctacatgaagtatgacacacct

SEQ ID NO: 130099 - DNA, 25 bp, Artificial
  Probe
gcttagtctacatgaagtatgacac

SEQ ID NO: 130100 - DNA, 25 bp, Artificial
  Probe
ctgttactctttacctgtgctgata

SEQ ID NO: 130101 - DNA, 25 bp, Artificial
  Probe
tgttactctttacctgtgctgataa

SEQ ID NO: 130102 - DNA, 25 bp, Artificial
  Probe
ccgaggtaaacagtgataaggtata

SEQ ID NO: 130103 - DNA, 25 bp, Artificial
  Probe
ttacctgtgctgataataaaccgtt

SEQ ID NO: 130104 - DNA, 25 bp, Artificial
  Probe
ctttacctgtgctgataataaaccg

SEQ ID NO: 130105 - DNA, 25 bp, Artificial
  Probe
tgaaatcagatgaacaaggacattg

SEQ ID NO: 130106 - DNA, 25 bp, Artificial
  Probe
tttacctgtgctgataataaaccgt

SEQ ID NO: 130107 - DNA, 25 bp, Artificial
  Probe
gttactctttacctgtgctgataat

SEQ ID NO: 130108 - DNA, 25 bp, Artificial
  Probe
tacctgtgctgataataaaccgttt

SEQ ID NO: 130109 - DNA, 25 bp, Artificial
  Probe
agaggacatcacccacatctataag

SEQ ID NO: 130110 - DNA, 25 bp, Artificial
  Probe
gagaggacatcacccacatctataa

SEQ ID NO: 130111 - DNA, 25 bp, Artificial
  Probe
ttagtctacatgaagtatgacacac

SEQ ID NO: 130112 - DNA, 25 bp, Artificial
  Probe
gaaatcagatgaacaaggacattgc

SEQ ID NO: 130113 - DNA, 25 bp, Artificial
  Probe
aagatcgtgtatgtggaagagaaag

SEQ ID NO: 130114 - DNA, 25 bp, Artificial
  Probe
tctttacctgtgctgataataaacc

SEQ ID NO: 130115 - DNA, 25 bp, Artificial
  Probe
caagatcgtgtatgtggaagagaaa

SEQ ID NO: 130116 - DNA, 25 bp, Artificial
  Probe
cttagtctacatgaagtatgacaca

SEQ ID NO: 130117 - DNA, 25 bp, Artificial
  Probe
tctacatgaagtatgacacaccttt

SEQ ID NO: 130118 - DNA, 25 bp, Artificial
  Probe
cctctacctttgtgtcacctactac

SEQ ID NO: 130119 - DNA, 25 bp, Artificial
  Probe
gccgaggtaaacagtgataaggtat

SEQ ID NO: 130120 - DNA, 25 bp, Artificial
  Probe
ctacatgaagtatgacacacctttc

SEQ ID NO: 130121 - DNA, 25 bp, Artificial
  Probe
ctctacctttgtgtcacctactaca

SEQ ID NO: 130122 - DNA, 25 bp, Artificial
  Probe
acctctacctttgtgtcacctacta

SEQ ID NO: 130123 - DNA, 25 bp, Artificial
  Probe
actctttacctgtgctgataataaa

SEQ ID NO: 130124 - DNA, 25 bp, Artificial
  Probe
aaatcagatgaacaaggacattgcc

SEQ ID NO: 130125 - DNA, 25 bp, Artificial
  Probe
gaggacatcacccacatctataagc

SEQ ID NO: 130126 - DNA, 25 bp, Artificial
  Probe
ctctttacctgtgctgataataaac

SEQ ID NO: 130127 - DNA, 25 bp, Artificial
  Probe
actgaaatcagatgaacaaggacat

SEQ ID NO: 130128 - DNA, 25 bp, Artificial
  Probe
gtatccgtctatggcagtgtctatg

SEQ ID NO: 130129 - DNA, 25 bp, Artificial
  Probe
gtgcgaggacgactacaactattac

SEQ ID NO: 130130 - DNA, 25 bp, Artificial
  Probe
gcgaggacgactacaactattactc

SEQ ID NO: 130131 - DNA, 25 bp, Artificial
  Probe
catttaggtcaagatggtcattctg

SEQ ID NO: 130132 - DNA, 25 bp, Artificial
  Probe
tatgccatagctgacatctcctatt

SEQ ID NO: 130133 - DNA, 25 bp, Artificial
  Probe
tgcgaggacgactacaactattact

SEQ ID NO: 130134 - DNA, 25 bp, Artificial
  Probe
cgaggacgactacaactattactcc

SEQ ID NO: 130135 - DNA, 25 bp, Artificial
  Probe
atttaggtcaagatggtcattctgc

SEQ ID NO: 130136 - DNA, 25 bp, Artificial
  Probe
ctatgccatagctgacatctcctat

SEQ ID NO: 130137 - DNA, 25 bp, Artificial
  Probe
ccacctcctctaatgaataccctag

SEQ ID NO: 130138 - DNA, 25 bp, Artificial
  Probe
cacctcctctaatgaataccctagc

SEQ ID NO: 130139 - DNA, 25 bp, Artificial
  Probe
cgtatccgtctatggcagtgtctat

SEQ ID NO: 130140 - DNA, 25 bp, Artificial
  Probe
atgccatagctgacatctcctattc

SEQ ID NO: 130141 - DNA, 25 bp, Artificial
  Probe
cccacctcctctaatgaatacccta

SEQ ID NO: 130142 - DNA, 25 bp, Artificial
  Probe
tctatgccatagctgacatctccta

SEQ ID NO: 130143 - DNA, 25 bp, Artificial
  Probe
ttaggtcaagatggtcattctgcaa

SEQ ID NO: 130144 - DNA, 25 bp, Artificial
  Probe
taggtcaagatggtcattctgcaag

SEQ ID NO: 130145 - DNA, 25 bp, Artificial
  Probe
ggtgcgaggacgactacaactatta

SEQ ID NO: 130146 - DNA, 25 bp, Artificial
  Probe
acctcctctaatgaataccctagcc

SEQ ID NO: 130147 - DNA, 25 bp, Artificial
  Probe
tgccatagctgacatctcctattct

SEQ ID NO: 130148 - DNA, 25 bp, Artificial
  Probe
gaggacgactacaactattactccc

SEQ ID NO: 130149 - DNA, 25 bp, Artificial
  Probe
ctacaactattactcccgcagctag

SEQ ID NO: 130150 - DNA, 25 bp, Artificial
  Probe
cctcctctaatgaataccctagccc

SEQ ID NO: 130151 - DNA, 25 bp, Artificial
  Probe
ccggcctgaattaataaaccatatc

SEQ ID NO: 130152 - DNA, 25 bp, Artificial
  Probe
tccggcctgaattaataaaccatat

SEQ ID NO: 130153 - DNA, 25 bp, Artificial
  Probe
gtctatgccatagctgacatctcct

SEQ ID NO: 130154 - DNA, 25 bp, Artificial
  Probe
ctccggcctgaattaataaaccata

SEQ ID NO: 130155 - DNA, 25 bp, Artificial
  Probe
tttaggtcaagatggtcattctgca

SEQ ID NO: 130156 - DNA, 25 bp, Artificial
  Probe
ggtcaagatggtcattctgcaagag

SEQ ID NO: 130157 - DNA, 25 bp, Artificial
  Probe
actacaactattactcccgcagcta

SEQ ID NO: 130158 - DNA, 25 bp, Artificial
  Probe
cggcctgaattaataaaccatatct

SEQ ID NO: 130159 - DNA, 25 bp, Artificial
  Probe
acgactacaactattactcccgcag

SEQ ID NO: 130160 - DNA, 25 bp, Artificial
  Probe
gacgactacaactattactcccgca

SEQ ID NO: 130161 - DNA, 25 bp, Artificial
  Probe
aggacgactacaactattactcccg

SEQ ID NO: 130162 - DNA, 25 bp, Artificial
  Probe
aggtcaagatggtcattctgcaaga

SEQ ID NO: 130163 - DNA, 25 bp, Artificial
  Probe
catcgttcactctcttggctttgag

SEQ ID NO: 130164 - DNA, 25 bp, Artificial
  Probe
acacactcgtattcattggggaaat

SEQ ID NO: 130165 - DNA, 25 bp, Artificial
  Probe
gtcaagatggtcattctgcaagagc

SEQ ID NO: 130166 - DNA, 25 bp, Artificial
  Probe
tatccgtctatggcagtgtctatgc

SEQ ID NO: 130167 - DNA, 25 bp, Artificial
  Probe
cacatcgttcactctcttggctttg

SEQ ID NO: 130168 - DNA, 25 bp, Artificial
  Probe
aacacactcgtattcattggggaaa

SEQ ID NO: 130169 - DNA, 25 bp, Artificial
  Probe
aaacacactcgtattcattggggaa

SEQ ID NO: 130170 - DNA, 25 bp, Artificial
  Probe
aaatagagtcatgcatctgtttgtc

SEQ ID NO: 130171 - DNA, 25 bp, Artificial
  Probe
ctccccaaacacactcgtattcatt

SEQ ID NO: 130172 - DNA, 25 bp, Artificial
  Probe
ccatttaggtcaagatggtcattct

SEQ ID NO: 130173 - DNA, 25 bp, Artificial
  Probe
ctaggagatagcagcagccagaatt

SEQ ID NO: 130174 - DNA, 25 bp, Artificial
  Probe
taggagatagcagcagccagaattg

SEQ ID NO: 130175 - DNA, 25 bp, Artificial
  Probe
ggatgatttctctcacgagttggag

SEQ ID NO: 130176 - DNA, 25 bp, Artificial
  Probe
gttgattgtggaacagcaggatgag

SEQ ID NO: 130177 - DNA, 25 bp, Artificial
  Probe
cataagaaaagccttcatcacaagt

SEQ ID NO: 130178 - DNA, 25 bp, Artificial
  Probe
tactaggagatagcagcagccagaa

SEQ ID NO: 130179 - DNA, 25 bp, Artificial
  Probe
tgaattgagcataagaaaagccttc

SEQ ID NO: 130180 - DNA, 25 bp, Artificial
  Probe
ctgaattgagcataagaaaagcctt

SEQ ID NO: 130181 - DNA, 25 bp, Artificial
  Probe
ctggatgatttctctcacgagttgg

SEQ ID NO: 130182 - DNA, 25 bp, Artificial
  Probe
actgaattgagcataagaaaagcct

SEQ ID NO: 130183 - DNA, 25 bp, Artificial
  Probe
gcataagaaaagccttcatcacaag

SEQ ID NO: 130184 - DNA, 25 bp, Artificial
  Probe
attgagcataagaaaagccttcatc

SEQ ID NO: 130185 - DNA, 25 bp, Artificial
  Probe
agcataagaaaagccttcatcacaa

SEQ ID NO: 130186 - DNA, 25 bp, Artificial
  Probe
gaattgagcataagaaaagccttca

SEQ ID NO: 130187 - DNA, 25 bp, Artificial
  Probe
aattgagcataagaaaagccttcat

SEQ ID NO: 130188 - DNA, 25 bp, Artificial
  Probe
cagttgattgtggaacagcaggatg

SEQ ID NO: 130189 - DNA, 25 bp, Artificial
  Probe
ttgagcataagaaaagccttcatca

SEQ ID NO: 130190 - DNA, 25 bp, Artificial
  Probe
tggatgatttctctcacgagttgga

SEQ ID NO: 130191 - DNA, 25 bp, Artificial
  Probe
ataagaaaagccttcatcacaagta

SEQ ID NO: 130192 - DNA, 25 bp, Artificial
  Probe
gagcataagaaaagccttcatcaca

SEQ ID NO: 130193 - DNA, 25 bp, Artificial
  Probe
taagaaaagccttcatcacaagtac

SEQ ID NO: 130194 - DNA, 25 bp, Artificial
  Probe
ctactaggagatagcagcagccaga

SEQ ID NO: 130195 - DNA, 25 bp, Artificial
  Probe
agttgattgtggaacagcaggatga

SEQ ID NO: 130196 - DNA, 25 bp, Artificial
  Probe
ctggacaacgtgatgaagaaacttg

SEQ ID NO: 130197 - DNA, 25 bp, Artificial
  Probe
tgagcataagaaaagccttcatcac

SEQ ID NO: 130198 - DNA, 25 bp, Artificial
  Probe
acatgaaggatcagatgtcagcttc

SEQ ID NO: 130199 - DNA, 25 bp, Artificial
  Probe
actggacaacgtgatgaagaaactt

SEQ ID NO: 130200 - DNA, 25 bp, Artificial
  Probe
gctggatgatttctctcacgagttg

SEQ ID NO: 130201 - DNA, 25 bp, Artificial
  Probe
actaggagatagcagcagccagaat

SEQ ID NO: 130202 - DNA, 25 bp, Artificial
  Probe
cttcatcacaagtactcggcaaatt

SEQ ID NO: 130203 - DNA, 25 bp, Artificial
  Probe
atgctggatgatttctctcacgagt

SEQ ID NO: 130204 - DNA, 25 bp, Artificial
  Probe
gactggacaacgtgatgaagaaact

SEQ ID NO: 130205 - DNA, 25 bp, Artificial
  Probe
catgctggatgatttctctcacgag

SEQ ID NO: 130206 - DNA, 25 bp, Artificial
  Probe
ttcatcacaagtactcggcaaattg

SEQ ID NO: 130207 - DNA, 25 bp, Artificial
  Probe
tgctggatgatttctctcacgagtt

SEQ ID NO: 130208 - DNA, 25 bp, Artificial
  Probe
agtcatgctggatgatttctctcac

SEQ ID NO: 130209 - DNA, 25 bp, Artificial
  Probe
cagtcatgctggatgatttctctca

SEQ ID NO: 130210 - DNA, 25 bp, Artificial
  Probe
gatgatttctctcacgagttggaga

SEQ ID NO: 130211 - DNA, 25 bp, Artificial
  Probe
ctcgactggacaacgtgatgaagaa

SEQ ID NO: 130212 - DNA, 25 bp, Artificial
  Probe
ccttcatcacaagtactcggcaaat

SEQ ID NO: 130213 - DNA, 25 bp, Artificial
  Probe
aagaaaagccttcatcacaagtact

SEQ ID NO: 130214 - DNA, 25 bp, Artificial
  Probe
caaattgtcagggacatgaaggatc

SEQ ID NO: 130215 - DNA, 25 bp, Artificial
  Probe
agaaaagccttcatcacaagtactc

SEQ ID NO: 130216 - DNA, 25 bp, Artificial
  Probe
cgactggacaacgtgatgaagaaac

SEQ ID NO: 130217 - DNA, 25 bp, Artificial
  Probe
gtcatgctggatgatttctctcacg

SEQ ID NO: 130218 - DNA, 25 bp, Artificial
  Probe
aatcctgaggtctgtagtaagtgag

SEQ ID NO: 130219 - DNA, 25 bp, Artificial
  Probe
ctcaggcatctcttcattatgtagc

SEQ ID NO: 130220 - DNA, 25 bp, Artificial
  Probe
gctcaggcatctcttcattatgtag

SEQ ID NO: 130221 - DNA, 25 bp, Artificial
  Probe
cgctcaggcatctcttcattatgta

SEQ ID NO: 130222 - DNA, 25 bp, Artificial
  Probe
tctgtagtaagtgaggaaatgagtg

SEQ ID NO: 130223 - DNA, 25 bp, Artificial
  Probe
gtctgtagtaagtgaggaaatgagt

SEQ ID NO: 130224 - DNA, 25 bp, Artificial
  Probe
ggtctgtagtaagtgaggaaatgag

SEQ ID NO: 130225 - DNA, 25 bp, Artificial
  Probe
gaggtctgtagtaagtgaggaaatg

SEQ ID NO: 130226 - DNA, 25 bp, Artificial
  Probe
ctgtagtaagtgaggaaatgagtgg

SEQ ID NO: 130227 - DNA, 25 bp, Artificial
  Probe
aggtctgtagtaagtgaggaaatga

SEQ ID NO: 130228 - DNA, 25 bp, Artificial
  Probe
tgaggtctgtagtaagtgaggaaat

SEQ ID NO: 130229 - DNA, 25 bp, Artificial
  Probe
aaatcctgaggtctgtagtaagtga

SEQ ID NO: 130230 - DNA, 25 bp, Artificial
  Probe
caaatcctgaggtctgtagtaagtg

SEQ ID NO: 130231 - DNA, 25 bp, Artificial
  Probe
ctgaggtctgtagtaagtgaggaaa

SEQ ID NO: 130232 - DNA, 25 bp, Artificial
  Probe
tgtagtaagtgaggaaatgagtggg

SEQ ID NO: 130233 - DNA, 25 bp, Artificial
  Probe
atcctgaggtctgtagtaagtgagg

SEQ ID NO: 130234 - DNA, 25 bp, Artificial
  Probe
tttatcaggcttctctgggttattc

SEQ ID NO: 130235 - DNA, 25 bp, Artificial
  Probe
ctttatcaggcttctctgggttatt

SEQ ID NO: 130236 - DNA, 25 bp, Artificial
  Probe
acaaatcctgaggtctgtagtaagt

SEQ ID NO: 130237 - DNA, 25 bp, Artificial
  Probe
cctgaggtctgtagtaagtgaggaa

SEQ ID NO: 130238 - DNA, 25 bp, Artificial
  Probe
gagaaagagtggttgagaatgggat

SEQ ID NO: 130239 - DNA, 25 bp, Artificial
  Probe
tctttatcaggcttctctgggttat

SEQ ID NO: 130240 - DNA, 25 bp, Artificial
  Probe
gctggacttaggactctgatttctc

SEQ ID NO: 130241 - DNA, 25 bp, Artificial
  Probe
agaaagagtggttgagaatgggatg

SEQ ID NO: 130242 - DNA, 25 bp, Artificial
  Probe
ctctttatcaggcttctctgggtta

SEQ ID NO: 130243 - DNA, 25 bp, Artificial
  Probe
gaaagagtggttgagaatgggatgt

SEQ ID NO: 130244 - DNA, 25 bp, Artificial
  Probe
ctgagttacaaatcctgaggtctgt

SEQ ID NO: 130245 - DNA, 25 bp, Artificial
  Probe
ttatcaggcttctctgggttattcc

SEQ ID NO: 130246 - DNA, 25 bp, Artificial
  Probe
ttgagaatgggatgtgtgggtagta

SEQ ID NO: 130247 - DNA, 25 bp, Artificial
  Probe
aaagagtggttgagaatgggatgtg

SEQ ID NO: 130248 - DNA, 25 bp, Artificial
  Probe
caggagaaagagtggttgagaatgg

SEQ ID NO: 130249 - DNA, 25 bp, Artificial
  Probe
gagttacaaatcctgaggtctgtag

SEQ ID NO: 130250 - DNA, 25 bp, Artificial
  Probe
ggacttaggactctgatttctccag

SEQ ID NO: 130251 - DNA, 25 bp, Artificial
  Probe
ctggacttaggactctgatttctcc

SEQ ID NO: 130252 - DNA, 25 bp, Artificial
  Probe
gttacaaatcctgaggtctgtagta

SEQ ID NO: 130253 - DNA, 25 bp, Artificial
  Probe
tacaaatcctgaggtctgtagtaag

SEQ ID NO: 130254 - DNA, 25 bp, Artificial
  Probe
agttacaaatcctgaggtctgtagt

SEQ ID NO: 130255 - DNA, 25 bp, Artificial
  Probe
tgagttacaaatcctgaggtctgta

SEQ ID NO: 130256 - DNA, 25 bp, Artificial
  Probe
gggatgaaataagatgtccatgtgg

SEQ ID NO: 130257 - DNA, 25 bp, Artificial
  Probe
ttacaaatcctgaggtctgtagtaa

SEQ ID NO: 130258 - DNA, 25 bp, Artificial
  Probe
gctgagttacaaatcctgaggtctg

SEQ ID NO: 130259 - DNA, 25 bp, Artificial
  Probe
tgagaatgggatgtgtgggtagtag

SEQ ID NO: 130260 - DNA, 25 bp, Artificial
  Probe
aaggttacactggcttttacttttc

SEQ ID NO: 130261 - DNA, 25 bp, Artificial
  Probe
ggatgaaataagatgtccatgtggc

SEQ ID NO: 130262 - DNA, 25 bp, Artificial
  Probe
ggctggacttaggactctgatttct

SEQ ID NO: 130263 - DNA, 25 bp, Artificial
  Probe
tcagtcgtataacttcgctattcat

SEQ ID NO: 130264 - DNA, 25 bp, Artificial
  Probe
atcagtcgtataacttcgctattca

SEQ ID NO: 130265 - DNA, 25 bp, Artificial
  Probe
tcagatgacttaatgagaacctgtc

SEQ ID NO: 130266 - DNA, 25 bp, Artificial
  Probe
attaaggacagtagtcagaatcgtg

SEQ ID NO: 130267 - DNA, 25 bp, Artificial
  Probe
ccacaattaaggacagtagtcagaa

SEQ ID NO: 130268 - DNA, 25 bp, Artificial
  Probe
atgtgttggttacagaatactggtt

SEQ ID NO: 130269 - DNA, 25 bp, Artificial
  Probe
aaccacaattaaggacagtagtcag

SEQ ID NO: 130270 - DNA, 25 bp, Artificial
  Probe
aattaaggacagtagtcagaatcgt

SEQ ID NO: 130271 - DNA, 25 bp, Artificial
  Probe
caattaaggacagtagtcagaatcg

SEQ ID NO: 130272 - DNA, 25 bp, Artificial
  Probe
gatgtgttggttacagaatactggt

SEQ ID NO: 130273 - DNA, 25 bp, Artificial
  Probe
gatgacttaatgagaacctgtccag

SEQ ID NO: 130274 - DNA, 25 bp, Artificial
  Probe
cagatgacttaatgagaacctgtcc

SEQ ID NO: 130275 - DNA, 25 bp, Artificial
  Probe
cagtcgtataacttcgctattcatg

SEQ ID NO: 130276 - DNA, 25 bp, Artificial
  Probe
atgacttaatgagaacctgtccaga

SEQ ID NO: 130277 - DNA, 25 bp, Artificial
  Probe
agatgacttaatgagaacctgtcca

SEQ ID NO: 130278 - DNA, 25 bp, Artificial
  Probe
accacaattaaggacagtagtcaga

SEQ ID NO: 130279 - DNA, 25 bp, Artificial
  Probe
tatcagtcgtataacttcgctattc

SEQ ID NO: 130280 - DNA, 25 bp, Artificial
  Probe
acttaatgagaacctgtccagactc

SEQ ID NO: 130281 - DNA, 25 bp, Artificial
  Probe
cacaattaaggacagtagtcagaat

SEQ ID NO: 130282 - DNA, 25 bp, Artificial
  Probe
tatagctctacttgtcgatgtgttg

SEQ ID NO: 130283 - DNA, 25 bp, Artificial
  Probe
atagaatggcgttgtatctacacat

SEQ ID NO: 130284 - DNA, 25 bp, Artificial
  Probe
tatagaatggcgttgtatctacaca

SEQ ID NO: 130285 - DNA, 25 bp, Artificial
  Probe
ttatcagtcgtataacttcgctatt

SEQ ID NO: 130286 - DNA, 25 bp, Artificial
  Probe
gacttaatgagaacctgtccagact

SEQ ID NO: 130287 - DNA, 25 bp, Artificial
  Probe
acaattaaggacagtagtcagaatc

SEQ ID NO: 130288 - DNA, 25 bp, Artificial
  Probe
cgatgtgttggttacagaatactgg

SEQ ID NO: 130289 - DNA, 25 bp, Artificial
  Probe
ttaaggacagtagtcagaatcgtgg

SEQ ID NO: 130290 - DNA, 25 bp, Artificial
  Probe
gtcagctaggaagtctaacatgatt

SEQ ID NO: 130291 - DNA, 25 bp, Artificial
  Probe
tgacttaatgagaacctgtccagac

SEQ ID NO: 130292 - DNA, 25 bp, Artificial
  Probe
tcacaataccatctactttcctcag

SEQ ID NO: 130293 - DNA, 25 bp, Artificial
  Probe
gtcacaataccatctactttcctca

SEQ ID NO: 130294 - DNA, 25 bp, Artificial
  Probe
gatgtcaggactgtgtcatgtattc

SEQ ID NO: 130295 - DNA, 25 bp, Artificial
  Probe
cagactatagaatggcgttgtatct

SEQ ID NO: 130296 - DNA, 25 bp, Artificial
  Probe
ctctacttgtcgatgtgttggttac

SEQ ID NO: 130297 - DNA, 25 bp, Artificial
  Probe
cttaatgagaacctgtccagactcc

SEQ ID NO: 130298 - DNA, 25 bp, Artificial
  Probe
tagaatggcgttgtatctacacatg

SEQ ID NO: 130299 - DNA, 25 bp, Artificial
  Probe
cacaataccatctactttcctcaga

SEQ ID NO: 130300 - DNA, 25 bp, Artificial
  Probe
gcagactatagaatggcgttgtatc

SEQ ID NO: 130301 - DNA, 25 bp, Artificial
  Probe
ttgtcgatgtgttggttacagaata

SEQ ID NO: 130302 - DNA, 25 bp, Artificial
  Probe
cttgtcagctaggaagtctaacatg

SEQ ID NO: 130303 - DNA, 25 bp, Artificial
  Probe
tttagaaggtgttcactttccagaa

SEQ ID NO: 130304 - DNA, 25 bp, Artificial
  Probe
tgtcagctaggaagtctaacatgat

SEQ ID NO: 130305 - DNA, 25 bp, Artificial
  Probe
ttagaaggtgttcactttccagaag

SEQ ID NO: 130306 - DNA, 25 bp, Artificial
  Probe
ctttagaaggtgttcactttccaga

SEQ ID NO: 130307 - DNA, 25 bp, Artificial
  Probe
taatgagaacctgtccagactcctt

SEQ ID NO: 130308 - DNA, 25 bp, Artificial
  Probe
atcttcacacaacactgatgaggtc

SEQ ID NO: 130309 - DNA, 25 bp, Artificial
  Probe
tttaatgaaagcagagtgaacctca

SEQ ID NO: 130310 - DNA, 25 bp, Artificial
  Probe
catttgtgaagaagagggagcattc

SEQ ID NO: 130311 - DNA, 25 bp, Artificial
  Probe
gagggagcattcttcagtctctaaa

SEQ ID NO: 130312 - DNA, 25 bp, Artificial
  Probe
ctttaatgaaagcagagtgaacctc

SEQ ID NO: 130313 - DNA, 25 bp, Artificial
  Probe
tacctttaatgaaagcagagtgaac

SEQ ID NO: 130314 - DNA, 25 bp, Artificial
  Probe
cagattcagacttcctcctttggat

SEQ ID NO: 130315 - DNA, 25 bp, Artificial
  Probe
agattcagacttcctcctttggatc

SEQ ID NO: 130316 - DNA, 25 bp, Artificial
  Probe
gtacctttaatgaaagcagagtgaa

SEQ ID NO: 130317 - DNA, 25 bp, Artificial
  Probe
ccatttgtgaagaagagggagcatt

SEQ ID NO: 130318 - DNA, 25 bp, Artificial
  Probe
cctttaatgaaagcagagtgaacct

SEQ ID NO: 130319 - DNA, 25 bp, Artificial
  Probe
acctttaatgaaagcagagtgaacc

SEQ ID NO: 130320 - DNA, 25 bp, Artificial
  Probe
gaatatgcatcttcacacaacactg

SEQ ID NO: 130321 - DNA, 25 bp, Artificial
  Probe
cagacaaatgaccaagtgacagagg

SEQ ID NO: 130322 - DNA, 25 bp, Artificial
  Probe
cttctgcaaggtggaactcatgtac

SEQ ID NO: 130323 - DNA, 25 bp, Artificial
  Probe
gtacttctgcaaggtggaactcatg

SEQ ID NO: 130324 - DNA, 25 bp, Artificial
  Probe
atatgcatcttcacacaacactgat

SEQ ID NO: 130325 - DNA, 25 bp, Artificial
  Probe
tcttcacacaacactgatgaggtcc

SEQ ID NO: 130326 - DNA, 25 bp, Artificial
  Probe
aatatgcatcttcacacaacactga

SEQ ID NO: 130327 - DNA, 25 bp, Artificial
  Probe
attttattccaatcaactgaaaggc

SEQ ID NO: 130328 - DNA, 25 bp, Artificial
  Probe
tattccaatcaactgaaaggccatt

SEQ ID NO: 130329 - DNA, 25 bp, Artificial
  Probe
ttattccaatcaactgaaaggccat

SEQ ID NO: 130330 - DNA, 25 bp, Artificial
  Probe
atttgtgaagaagagggagcattct

SEQ ID NO: 130331 - DNA, 25 bp, Artificial
  Probe
ttacaacaggggtctatgtgaaaat

SEQ ID NO: 130332 - DNA, 25 bp, Artificial
  Probe
catcttcacacaacactgatgaggt

SEQ ID NO: 130333 - DNA, 25 bp, Artificial
  Probe
tttattccaatcaactgaaaggcca

SEQ ID NO: 130334 - DNA, 25 bp, Artificial
  Probe
acttctgcaaggtggaactcatgta

SEQ ID NO: 130335 - DNA, 25 bp, Artificial
  Probe
tacttctgcaaggtggaactcatgt

SEQ ID NO: 130336 - DNA, 25 bp, Artificial
  Probe
tgtacttctgcaaggtggaactcat

SEQ ID NO: 130337 - DNA, 25 bp, Artificial
  Probe
gggagcattcttcagtctctaaaag

SEQ ID NO: 130338 - DNA, 25 bp, Artificial
  Probe
tacaacaggggtctatgtgaaaatg

SEQ ID NO: 130339 - DNA, 25 bp, Artificial
  Probe
cttacaacaggggtctatgtgaaaa

SEQ ID NO: 130340 - DNA, 25 bp, Artificial
  Probe
agagccagaatgtgaaaagcaattt

SEQ ID NO: 130341 - DNA, 25 bp, Artificial
  Probe
agggagcattcttcagtctctaaaa

SEQ ID NO: 130342 - DNA, 25 bp, Artificial
  Probe
gcagacaaatgaccaagtgacagag

SEQ ID NO: 130343 - DNA, 25 bp, Artificial
  Probe
attccaatcaactgaaaggccattt

SEQ ID NO: 130344 - DNA, 25 bp, Artificial
  Probe
tcttacaacaggggtctatgtgaaa

SEQ ID NO: 130345 - DNA, 25 bp, Artificial
  Probe
ggagcattcttcagtctctaaaagc

SEQ ID NO: 130346 - DNA, 25 bp, Artificial
  Probe
aactgaaaggccatttgtgaagaag

SEQ ID NO: 130347 - DNA, 25 bp, Artificial
  Probe
ctcttacaacaggggtctatgtgaa

SEQ ID NO: 130348 - DNA, 25 bp, Artificial
  Probe
aatcaactgaaaggccatttgtgaa

SEQ ID NO: 130349 - DNA, 25 bp, Artificial
  Probe
cagagccagaatgtgaaaagcaatt

SEQ ID NO: 130350 - DNA, 25 bp, Artificial
  Probe
ctgaaaggccatttgtgaagaagag

SEQ ID NO: 130351 - DNA, 25 bp, Artificial
  Probe
gacattcacagtgaagaacacgttg

SEQ ID NO: 130352 - DNA, 25 bp, Artificial
  Probe
atcaactgaaaggccatttgtgaag

SEQ ID NO: 130353 - DNA, 25 bp, Artificial
  Probe
gcttcatacctaaggagaatcagaa

SEQ ID NO: 130354 - DNA, 25 bp, Artificial
  Probe
atgagtctctctatggcaagaagta

SEQ ID NO: 130355 - DNA, 25 bp, Artificial
  Probe
tctctctatggcaagaagtacattc

SEQ ID NO: 130356 - DNA, 25 bp, Artificial
  Probe
gtctctctatggcaagaagtacatt

SEQ ID NO: 130357 - DNA, 25 bp, Artificial
  Probe
tcatacctaaggagaatcagaactt

SEQ ID NO: 130358 - DNA, 25 bp, Artificial
  Probe
ttcatacctaaggagaatcagaact

SEQ ID NO: 130359 - DNA, 25 bp, Artificial
  Probe
caatgagtctctctatggcaagaag

SEQ ID NO: 130360 - DNA, 25 bp, Artificial
  Probe
catacctaaggagaatcagaacttc

SEQ ID NO: 130361 - DNA, 25 bp, Artificial
  Probe
cttcatacctaaggagaatcagaac

SEQ ID NO: 130362 - DNA, 25 bp, Artificial
  Probe
agtctctctatggcaagaagtacat

SEQ ID NO: 130363 - DNA, 25 bp, Artificial
  Probe
aatgagtctctctatggcaagaagt

SEQ ID NO: 130364 - DNA, 25 bp, Artificial
  Probe
gagtctctctatggcaagaagtaca

SEQ ID NO: 130365 - DNA, 25 bp, Artificial
  Probe
tgagtctctctatggcaagaagtac

SEQ ID NO: 130366 - DNA, 25 bp, Artificial
  Probe
gagcttcatacctaaggagaatcag

SEQ ID NO: 130367 - DNA, 25 bp, Artificial
  Probe
caagagcttcatacctaaggagaat

SEQ ID NO: 130368 - DNA, 25 bp, Artificial
  Probe
aagagcttcatacctaaggagaatc

SEQ ID NO: 130369 - DNA, 25 bp, Artificial
  Probe
agcttcatacctaaggagaatcaga

SEQ ID NO: 130370 - DNA, 25 bp, Artificial
  Probe
agagcttcatacctaaggagaatca

SEQ ID NO: 130371 - DNA, 25 bp, Artificial
  Probe
aattaccacaggaggtgttacttac

SEQ ID NO: 130372 - DNA, 25 bp, Artificial
  Probe
caattaccacaggaggtgttactta

SEQ ID NO: 130373 - DNA, 25 bp, Artificial
  Probe
ccaagagcttcatacctaaggagaa

SEQ ID NO: 130374 - DNA, 25 bp, Artificial
  Probe
gcatcctttcttcacatcctattta

SEQ ID NO: 130375 - DNA, 25 bp, Artificial
  Probe
caacgactgctttaactgtaagaag

SEQ ID NO: 130376 - DNA, 25 bp, Artificial
  Probe
aaccaagagcttcatacctaaggag

SEQ ID NO: 130377 - DNA, 25 bp, Artificial
  Probe
gcaatgagtctctctatggcaagaa

SEQ ID NO: 130378 - DNA, 25 bp, Artificial
  Probe
attaccacaggaggtgttacttacc

SEQ ID NO: 130379 - DNA, 25 bp, Artificial
  Probe
gaaccaagagcttcatacctaagga

SEQ ID NO: 130380 - DNA, 25 bp, Artificial
  Probe
cctttagttcttcagtttcagtggg

SEQ ID NO: 130381 - DNA, 25 bp, Artificial
  Probe
ccctttagttcttcagtttcagtgg

SEQ ID NO: 130382 - DNA, 25 bp, Artificial
  Probe
ccaggagtgtaagaagaccatcatg

SEQ ID NO: 130383 - DNA, 25 bp, Artificial
  Probe
aacgactgctttaactgtaagaagt

SEQ ID NO: 130384 - DNA, 25 bp, Artificial
  Probe
ctctctatggcaagaagtacattct

SEQ ID NO: 130385 - DNA, 25 bp, Artificial
  Probe
actgctttaactgtaagaagtgctc

SEQ ID NO: 130386 - DNA, 25 bp, Artificial
  Probe
gactgctttaactgtaagaagtgct

SEQ ID NO: 130387 - DNA, 25 bp, Artificial
  Probe
ctttaactgtaagaagtgctccctg

SEQ ID NO: 130388 - DNA, 25 bp, Artificial
  Probe
acgactgctttaactgtaagaagtg

SEQ ID NO: 130389 - DNA, 25 bp, Artificial
  Probe
tctctatggcaagaagtacattcta

SEQ ID NO: 130390 - DNA, 25 bp, Artificial
  Probe
acaacgactgctttaactgtaagaa

SEQ ID NO: 130391 - DNA, 25 bp, Artificial
  Probe
accaagagcttcatacctaaggaga

SEQ ID NO: 130392 - DNA, 25 bp, Artificial
  Probe
ccaattaccacaggaggtgttactt

SEQ ID NO: 130393 - DNA, 25 bp, Artificial
  Probe
atacctaaggagaatcagaacttct

SEQ ID NO: 130394 - DNA, 25 bp, Artificial
  Probe
gagtgtaagaagaccatcatgccag

SEQ ID NO: 130395 - DNA, 25 bp, Artificial
  Probe
caggagtgtaagaagaccatcatgc

SEQ ID NO: 130396 - DNA, 25 bp, Artificial
  Probe
tttaactgtaagaagtgctccctgt

SEQ ID NO: 130397 - DNA, 25 bp, Artificial
  Probe
ctgctttaactgtaagaagtgctcc

SEQ ID NO: 130398 - DNA, 25 bp, Artificial
  Probe
ggttatcaatgtgaatctcataggc

SEQ ID NO: 130399 - DNA, 25 bp, Artificial
  Probe
gttatcaatgtgaatctcataggca

SEQ ID NO: 130400 - DNA, 25 bp, Artificial
  Probe
cgggttatcaatgtgaatctcatag

SEQ ID NO: 130401 - DNA, 25 bp, Artificial
  Probe
gggttatcaatgtgaatctcatagg

SEQ ID NO: 130402 - DNA, 25 bp, Artificial
  Probe
gcgggttatcaatgtgaatctcata

SEQ ID NO: 130403 - DNA, 25 bp, Artificial
  Probe
cgtatagatgtggctgtcaactgtg

SEQ ID NO: 130404 - DNA, 25 bp, Artificial
  Probe
gtatagatgtggctgtcaactgtgc

SEQ ID NO: 130405 - DNA, 25 bp, Artificial
  Probe
agcgggttatcaatgtgaatctcat

SEQ ID NO: 130406 - DNA, 25 bp, Artificial
  Probe
ccgtatagatgtggctgtcaactgt

SEQ ID NO: 130407 - DNA, 25 bp, Artificial
  Probe
cagcgggttatcaatgtgaatctca

SEQ ID NO: 130408 - DNA, 25 bp, Artificial
  Probe
ccattaagacataccacgaaaagaa

SEQ ID NO: 130409 - DNA, 25 bp, Artificial
  Probe
gagaccgaagccaagaagttaggag

SEQ ID NO: 130410 - DNA, 25 bp, Artificial
  Probe
ttccagcgggttatcaatgtgaatc

SEQ ID NO: 130411 - DNA, 25 bp, Artificial
  Probe
cttccagcgggttatcaatgtgaat

SEQ ID NO: 130412 - DNA, 25 bp, Artificial
  Probe
gccattaagacataccacgaaaaga

SEQ ID NO: 130413 - DNA, 25 bp, Artificial
  Probe
cgaagccaagaagttaggaggaaac

SEQ ID NO: 130414 - DNA, 25 bp, Artificial
  Probe
cattaagacataccacgaaaagaag

SEQ ID NO: 130415 - DNA, 25 bp, Artificial
  Probe
tatagatgtggctgtcaactgtgca

SEQ ID NO: 130416 - DNA, 25 bp, Artificial
  Probe
ccagcgggttatcaatgtgaatctc

SEQ ID NO: 130417 - DNA, 25 bp, Artificial
  Probe
gaggtacaagcagctttgactctag

SEQ ID NO: 130418 - DNA, 25 bp, Artificial
  Probe
gtgagaccgaagccaagaagttagg

SEQ ID NO: 130419 - DNA, 25 bp, Artificial
  Probe
agaagttaggaggaaactgcatatt

SEQ ID NO: 130420 - DNA, 25 bp, Artificial
  Probe
aagaagttaggaggaaactgcatat

SEQ ID NO: 130421 - DNA, 25 bp, Artificial
  Probe
caagaagttaggaggaaactgcata

SEQ ID NO: 130422 - DNA, 25 bp, Artificial
  Probe
aagttaggaggaaactgcatatttg

SEQ ID NO: 130423 - DNA, 25 bp, Artificial
  Probe
tccagcgggttatcaatgtgaatct

SEQ ID NO: 130424 - DNA, 25 bp, Artificial
  Probe
gaagccaagaagttaggaggaaact

SEQ ID NO: 130425 - DNA, 25 bp, Artificial
  Probe
gaagttaggaggaaactgcatattt

SEQ ID NO: 130426 - DNA, 25 bp, Artificial
  Probe
agttaggaggaaactgcatatttgc

SEQ ID NO: 130427 - DNA, 25 bp, Artificial
  Probe
aagccaagaagttaggaggaaactg

SEQ ID NO: 130428 - DNA, 25 bp, Artificial
  Probe
ccgaagccaagaagttaggaggaaa

SEQ ID NO: 130429 - DNA, 25 bp, Artificial
  Probe
acttccagcgggttatcaatgtgaa

SEQ ID NO: 130430 - DNA, 25 bp, Artificial
  Probe
tacaagcagctttgactctagcaaa

SEQ ID NO: 130431 - DNA, 25 bp, Artificial
  Probe
tgactctagcaaaagaaaagtttgg

SEQ ID NO: 130432 - DNA, 25 bp, Artificial
  Probe
gctttgactctagcaaaagaaaagt

SEQ ID NO: 130433 - DNA, 25 bp, Artificial
  Probe
gttaggaggaaactgcatatttgcc

SEQ ID NO: 130434 - DNA, 25 bp, Artificial
  Probe
gactctagcaaaagaaaagtttggc

SEQ ID NO: 130435 - DNA, 25 bp, Artificial
  Probe
aaagaaaagtttggccgtatagatg

SEQ ID NO: 130436 - DNA, 25 bp, Artificial
  Probe
ggtgagaccgaagccaagaagttag

SEQ ID NO: 130437 - DNA, 25 bp, Artificial
  Probe
gtacaagcagctttgactctagcaa

SEQ ID NO: 130438 - DNA, 25 bp, Artificial
  Probe
aagaaaagtttggccgtatagatgt

SEQ ID NO: 130439 - DNA, 25 bp, Artificial
  Probe
aaaagaaaagtttggccgtatagat

SEQ ID NO: 130440 - DNA, 25 bp, Artificial
  Probe
ttgactctagcaaaagaaaagtttg

SEQ ID NO: 130441 - DNA, 25 bp, Artificial
  Probe
ccaagaagttaggaggaaactgcat

SEQ ID NO: 130442 - DNA, 25 bp, Artificial
  Probe
gacttccagcgggttatcaatgtga

SEQ ID NO: 130443 - DNA, 25 bp, Artificial
  Probe
tcaagattgtgctcattaactcatt

SEQ ID NO: 130444 - DNA, 25 bp, Artificial
  Probe
atcaagattgtgctcattaactcat

SEQ ID NO: 130445 - DNA, 25 bp, Artificial
  Probe
gatcaagattgtgctcattaactca

SEQ ID NO: 130446 - DNA, 25 bp, Artificial
  Probe
gattgtgctcattaactcatttggt

SEQ ID NO: 130447 - DNA, 25 bp, Artificial
  Probe
attgtgctcattaactcatttggtg

SEQ ID NO: 130448 - DNA, 25 bp, Artificial
  Probe
agattgtgctcattaactcatttgg

SEQ ID NO: 130449 - DNA, 25 bp, Artificial
  Probe
aagttggatctcatcagtgaaggag

SEQ ID NO: 130450 - DNA, 25 bp, Artificial
  Probe
caagttggatctcatcagtgaagga

SEQ ID NO: 130451 - DNA, 25 bp, Artificial
  Probe
ctcattaactcatttggtgccattt

SEQ ID NO: 130452 - DNA, 25 bp, Artificial
  Probe
ctctgtctgtctgtttcatcttcac

SEQ ID NO: 130453 - DNA, 25 bp, Artificial
  Probe
aagattgtgctcattaactcatttg

SEQ ID NO: 130454 - DNA, 25 bp, Artificial
  Probe
caagattgtgctcattaactcattt

SEQ ID NO: 130455 - DNA, 25 bp, Artificial
  Probe
ctgcttcctgaatttcaatgtcttt

SEQ ID NO: 130456 - DNA, 25 bp, Artificial
  Probe
tgcttcctgaatttcaatgtctttg

SEQ ID NO: 130457 - DNA, 25 bp, Artificial
  Probe
cttggatggaattctaccgacatta

SEQ ID NO: 130458 - DNA, 25 bp, Artificial
  Probe
ttggatggaattctaccgacattac

SEQ ID NO: 130459 - DNA, 25 bp, Artificial
  Probe
gatggaattctaccgacattacctg

SEQ ID NO: 130460 - DNA, 25 bp, Artificial
  Probe
cctctttaagcatgatgtctggttc

SEQ ID NO: 130461 - DNA, 25 bp, Artificial
  Probe
ctctttaagcatgatgtctggttca

SEQ ID NO: 130462 - DNA, 25 bp, Artificial
  Probe
tgtttcatcttcacagtcaccattg

SEQ ID NO: 130463 - DNA, 25 bp, Artificial
  Probe
caagaggaggaagagaggaatctgg

SEQ ID NO: 130464 - DNA, 25 bp, Artificial
  Probe
ccaagaggaggaagagaggaatctg

SEQ ID NO: 130465 - DNA, 25 bp, Artificial
  Probe
ttgtgctcattaactcatttggtgc

SEQ ID NO: 130466 - DNA, 25 bp, Artificial
  Probe
gtttcatcttcacagtcaccattgg

SEQ ID NO: 130467 - DNA, 25 bp, Artificial
  Probe
tctgtctgtctgtttcatcttcaca

SEQ ID NO: 130468 - DNA, 25 bp, Artificial
  Probe
gctcattaactcatttggtgccatt

SEQ ID NO: 130469 - DNA, 25 bp, Artificial
  Probe
cctgcttcctgaatttcaatgtctt

SEQ ID NO: 130470 - DNA, 25 bp, Artificial
  Probe
gctctgtctgtctgtttcatcttca

SEQ ID NO: 130471 - DNA, 25 bp, Artificial
  Probe
ggatggaattctaccgacattacct

SEQ ID NO: 130472 - DNA, 25 bp, Artificial
  Probe
accaagttggatctcatcagtgaag

SEQ ID NO: 130473 - DNA, 25 bp, Artificial
  Probe
gaccaagttggatctcatcagtgaa

SEQ ID NO: 130474 - DNA, 25 bp, Artificial
  Probe
tggatggaattctaccgacattacc

SEQ ID NO: 130475 - DNA, 25 bp, Artificial
  Probe
tgatcaagattgtgctcattaactc

SEQ ID NO: 130476 - DNA, 25 bp, Artificial
  Probe
cttcttcacctctgttgccatgatc

SEQ ID NO: 130477 - DNA, 25 bp, Artificial
  Probe
ccctctttaagcatgatgtctggtt

SEQ ID NO: 130478 - DNA, 25 bp, Artificial
  Probe
ggctctgtctgtctgtttcatcttc

SEQ ID NO: 130479 - DNA, 25 bp, Artificial
  Probe
atggaattctaccgacattacctgc

SEQ ID NO: 130480 - DNA, 25 bp, Artificial
  Probe
ccttggatggaattctaccgacatt

SEQ ID NO: 130481 - DNA, 25 bp, Artificial
  Probe
tttcatcttcacagtcaccattggg

SEQ ID NO: 130482 - DNA, 25 bp, Artificial
  Probe
ccaagttggatctcatcagtgaagg

SEQ ID NO: 130483 - DNA, 25 bp, Artificial
  Probe
agaccaagttggatctcatcagtga

SEQ ID NO: 130484 - DNA, 25 bp, Artificial
  Probe
tgctcattaactcatttggtgccat

SEQ ID NO: 130485 - DNA, 25 bp, Artificial
  Probe
ctccctctttaagcatgatgtctgg

SEQ ID NO: 130486 - DNA, 25 bp, Artificial
  Probe
cctccctctttaagcatgatgtctg

SEQ ID NO: 130487 - DNA, 25 bp, Artificial
  Probe
cattaactcatttggtgccattttg

SEQ ID NO: 130488 - DNA, 25 bp, Artificial
  Probe
cagtatccaatgtgttgcttgtatg

SEQ ID NO: 130489 - DNA, 25 bp, Artificial
  Probe
tcagtatccaatgtgttgcttgtat

SEQ ID NO: 130490 - DNA, 25 bp, Artificial
  Probe
gtatccaatgtgttgcttgtatgta

SEQ ID NO: 130491 - DNA, 25 bp, Artificial
  Probe
atccaatgtgttgcttgtatgtatt

SEQ ID NO: 130492 - DNA, 25 bp, Artificial
  Probe
agtatccaatgtgttgcttgtatgt

SEQ ID NO: 130493 - DNA, 25 bp, Artificial
  Probe
agtatgctcagtatccaatgtgttg

SEQ ID NO: 130494 - DNA, 25 bp, Artificial
  Probe
ccaatatagactgacaggagtatgc

SEQ ID NO: 130495 - DNA, 25 bp, Artificial
  Probe
ctcagtatccaatgtgttgcttgta

SEQ ID NO: 130496 - DNA, 25 bp, Artificial
  Probe
caatatagactgacaggagtatgct

SEQ ID NO: 130497 - DNA, 25 bp, Artificial
  Probe
atatagactgacaggagtatgctca

SEQ ID NO: 130498 - DNA, 25 bp, Artificial
  Probe
gagtatgctcagtatccaatgtgtt

SEQ ID NO: 130499 - DNA, 25 bp, Artificial
  Probe
tatccaatgtgttgcttgtatgtat

SEQ ID NO: 130500 - DNA, 25 bp, Artificial
  Probe
aatatagactgacaggagtatgctc

SEQ ID NO: 130501 - DNA, 25 bp, Artificial
  Probe
aatgaagattggtcctgcctatgag

SEQ ID NO: 130502 - DNA, 25 bp, Artificial
  Probe
gtatgctcagtatccaatgtgttgc

SEQ ID NO: 130503 - DNA, 25 bp, Artificial
  Probe
tatgctcagtatccaatgtgttgct

SEQ ID NO: 130504 - DNA, 25 bp, Artificial
  Probe
aagattggtcctgcctatgagtcta

SEQ ID NO: 130505 - DNA, 25 bp, Artificial
  Probe
gacaggagtatgctcagtatccaat

SEQ ID NO: 130506 - DNA, 25 bp, Artificial
  Probe
aggagtatgctcagtatccaatgtg

SEQ ID NO: 130507 - DNA, 25 bp, Artificial
  Probe
caggagtatgctcagtatccaatgt

SEQ ID NO: 130508 - DNA, 25 bp, Artificial
  Probe
acaggagtatgctcagtatccaatg

SEQ ID NO: 130509 - DNA, 25 bp, Artificial
  Probe
tccaatgtgttgcttgtatgtattt

SEQ ID NO: 130510 - DNA, 25 bp, Artificial
  Probe
gattggtcctgcctatgagtctact

SEQ ID NO: 130511 - DNA, 25 bp, Artificial
  Probe
ggagtatgctcagtatccaatgtgt

SEQ ID NO: 130512 - DNA, 25 bp, Artificial
  Probe
atgaagattggtcctgcctatgagt

SEQ ID NO: 130513 - DNA, 25 bp, Artificial
  Probe
atgctcagtatccaatgtgttgctt

SEQ ID NO: 130514 - DNA, 25 bp, Artificial
  Probe
agattggtcctgcctatgagtctac

SEQ ID NO: 130515 - DNA, 25 bp, Artificial
  Probe
attggtcctgcctatgagtctactg

SEQ ID NO: 130516 - DNA, 25 bp, Artificial
  Probe
ttagaagaatacgtggtctatgagc

SEQ ID NO: 130517 - DNA, 25 bp, Artificial
  Probe
tgacaggagtatgctcagtatccaa

SEQ ID NO: 130518 - DNA, 25 bp, Artificial
  Probe
gaagattggtcctgcctatgagtct

SEQ ID NO: 130519 - DNA, 25 bp, Artificial
  Probe
gaatccactctcctgcctatctctg

SEQ ID NO: 130520 - DNA, 25 bp, Artificial
  Probe
ctccatatctcgtgagctaggaatc

SEQ ID NO: 130521 - DNA, 25 bp, Artificial
  Probe
tagaagaatacgtggtctatgagcc

SEQ ID NO: 130522 - DNA, 25 bp, Artificial
  Probe
gttagaagaatacgtggtctatgag

SEQ ID NO: 130523 - DNA, 25 bp, Artificial
  Probe
tgaagattggtcctgcctatgagtc

SEQ ID NO: 130524 - DNA, 25 bp, Artificial
  Probe
catatctcgtgagctaggaatccac

SEQ ID NO: 130525 - DNA, 25 bp, Artificial
  Probe
gctcagtatccaatgtgttgcttgt

SEQ ID NO: 130526 - DNA, 25 bp, Artificial
  Probe
tgctcagtatccaatgtgttgcttg

SEQ ID NO: 130527 - DNA, 25 bp, Artificial
  Probe
caatgaagattggtcctgcctatga

SEQ ID NO: 130528 - DNA, 25 bp, Artificial
  Probe
atatctcgtgagctaggaatccact

SEQ ID NO: 130529 - DNA, 25 bp, Artificial
  Probe
ctatctctgcaatgaagattggtcc

SEQ ID NO: 130530 - DNA, 25 bp, Artificial
  Probe
cctatctctgcaatgaagattggtc

SEQ ID NO: 130531 - DNA, 25 bp, Artificial
  Probe
ccatatctcgtgagctaggaatcca

SEQ ID NO: 130532 - DNA, 25 bp, Artificial
  Probe
ttcaaacgtcagtacaaagaaatgc

SEQ ID NO: 130533 - DNA, 25 bp, Artificial
  Probe
aaccaagcctgttatgagcattcta

SEQ ID NO: 130534 - DNA, 25 bp, Artificial
  Probe
attctagcttaacctcaagtcacag

SEQ ID NO: 130535 - DNA, 25 bp, Artificial
  Probe
cattctagcttaacctcaagtcaca

SEQ ID NO: 130536 - DNA, 25 bp, Artificial
  Probe
ctagcttaacctcaagtcacagatg

SEQ ID NO: 130537 - DNA, 25 bp, Artificial
  Probe
tctagcttaacctcaagtcacagat

SEQ ID NO: 130538 - DNA, 25 bp, Artificial
  Probe
ttctagcttaacctcaagtcacaga

SEQ ID NO: 130539 - DNA, 25 bp, Artificial
  Probe
accaagcctgttatgagcattctag

SEQ ID NO: 130540 - DNA, 25 bp, Artificial
  Probe
ctgtttccctctgtgtgtattaagt

SEQ ID NO: 130541 - DNA, 25 bp, Artificial
  Probe
actgtttccctctgtgtgtattaag

SEQ ID NO: 130542 - DNA, 25 bp, Artificial
  Probe
tagcttaacctcaagtcacagatgt

SEQ ID NO: 130543 - DNA, 25 bp, Artificial
  Probe
tgtttccctctgtgtgtattaagtg

SEQ ID NO: 130544 - DNA, 25 bp, Artificial
  Probe
tactgtttccctctgtgtgtattaa

SEQ ID NO: 130545 - DNA, 25 bp, Artificial
  Probe
ataagatactgtttccctctgtgtg

SEQ ID NO: 130546 - DNA, 25 bp, Artificial
  Probe
cataagatactgtttccctctgtgt

SEQ ID NO: 130547 - DNA, 25 bp, Artificial
  Probe
tcataagatactgtttccctctgtg

SEQ ID NO: 130548 - DNA, 25 bp, Artificial
  Probe
gcattctagcttaacctcaagtcac

SEQ ID NO: 130549 - DNA, 25 bp, Artificial
  Probe
gtttccctctgtgtgtattaagtgg

SEQ ID NO: 130550 - DNA, 25 bp, Artificial
  Probe
ttcataagatactgtttccctctgt

SEQ ID NO: 130551 - DNA, 25 bp, Artificial
  Probe
aagatactgtttccctctgtgtgta

SEQ ID NO: 130552 - DNA, 25 bp, Artificial
  Probe
taagatactgtttccctctgtgtgt

SEQ ID NO: 130553 - DNA, 25 bp, Artificial
  Probe
aattagtagaccagaagatagctgt

SEQ ID NO: 130554 - DNA, 25 bp, Artificial
  Probe
tttcataagatactgtttccctctg

SEQ ID NO: 130555 - DNA, 25 bp, Artificial
  Probe
atgtgtgttgtgggtgatttcattt

SEQ ID NO: 130556 - DNA, 25 bp, Artificial
  Probe
ttagtagaccagaagatagctgtaa

SEQ ID NO: 130557 - DNA, 25 bp, Artificial
  Probe
gatactgtttccctctgtgtgtatt

SEQ ID NO: 130558 - DNA, 25 bp, Artificial
  Probe
attagtagaccagaagatagctgta

SEQ ID NO: 130559 - DNA, 25 bp, Artificial
  Probe
atactgtttccctctgtgtgtatta

SEQ ID NO: 130560 - DNA, 25 bp, Artificial
  Probe
caaccaagcctgttatgagcattct

SEQ ID NO: 130561 - DNA, 25 bp, Artificial
  Probe
agatactgtttccctctgtgtgtat

SEQ ID NO: 130562 - DNA, 25 bp, Artificial
  Probe
gatgtgtgttgtgggtgatttcatt

SEQ ID NO: 130563 - DNA, 25 bp, Artificial
  Probe
tgttatgagcattctagcttaacct

SEQ ID NO: 130564 - DNA, 25 bp, Artificial
  Probe
ctgttatgagcattctagcttaacc

SEQ ID NO: 130565 - DNA, 25 bp, Artificial
  Probe
cctgttatgagcattctagcttaac

SEQ ID NO: 130566 - DNA, 25 bp, Artificial
  Probe
gttatgagcattctagcttaacctc

SEQ ID NO: 130567 - DNA, 25 bp, Artificial
  Probe
gcctgttatgagcattctagcttaa

SEQ ID NO: 130568 - DNA, 25 bp, Artificial
  Probe
gcccagcaagctactttactattta

SEQ ID NO: 130569 - DNA, 25 bp, Artificial
  Probe
ccaagcctgttatgagcattctagc

SEQ ID NO: 130570 - DNA, 25 bp, Artificial
  Probe
gagcattctagcttaacctcaagtc

SEQ ID NO: 130571 - DNA, 25 bp, Artificial
  Probe
aacaaacctaagctagaatttcagt

SEQ ID NO: 130572 - DNA, 25 bp, Artificial
  Probe
cccagcaagctactttactatttat

SEQ ID NO: 130573 - DNA, 25 bp, Artificial
  Probe
gaatttcagttaggaatacagttgt

SEQ ID NO: 130574 - DNA, 25 bp, Artificial
  Probe
agcctgttatgagcattctagctta

SEQ ID NO: 130575 - DNA, 25 bp, Artificial
  Probe
acaaacctaagctagaatttcagtt

SEQ ID NO: 130576 - DNA, 25 bp, Artificial
  Probe
agcattctagcttaacctcaagtca

SEQ ID NO: 130577 - DNA, 25 bp, Artificial
  Probe
agatgtgtgttgtgggtgatttcat

SEQ ID NO: 130578 - DNA, 25 bp, Artificial
  Probe
cataggtgattctgaggaggtaaag

SEQ ID NO: 130579 - DNA, 25 bp, Artificial
  Probe
taggtgattctgaggaggtaaagat

SEQ ID NO: 130580 - DNA, 25 bp, Artificial
  Probe
ataggtgattctgaggaggtaaaga

SEQ ID NO: 130581 - DNA, 25 bp, Artificial
  Probe
gtgattctgaggaggtaaagatgtt

SEQ ID NO: 130582 - DNA, 25 bp, Artificial
  Probe
tgattctgaggaggtaaagatgttt

SEQ ID NO: 130583 - DNA, 25 bp, Artificial
  Probe
attctgaggaggtaaagatgtttgg

SEQ ID NO: 130584 - DNA, 25 bp, Artificial
  Probe
gattctgaggaggtaaagatgtttg

SEQ ID NO: 130585 - DNA, 25 bp, Artificial
  Probe
aagagtaatgccttgggaagaattt

SEQ ID NO: 130586 - DNA, 25 bp, Artificial
  Probe
aaagagtaatgccttgggaagaatt

SEQ ID NO: 130587 - DNA, 25 bp, Artificial
  Probe
agagtaatgccttgggaagaatttc

SEQ ID NO: 130588 - DNA, 25 bp, Artificial
  Probe
tcataggtgattctgaggaggtaaa

SEQ ID NO: 130589 - DNA, 25 bp, Artificial
  Probe
atggtggtatgtgcctttaatccta

SEQ ID NO: 130590 - DNA, 25 bp, Artificial
  Probe
aggtgattctgaggaggtaaagatg

SEQ ID NO: 130591 - DNA, 25 bp, Artificial
  Probe
gagtaatgccttgggaagaatttct

SEQ ID NO: 130592 - DNA, 25 bp, Artificial
  Probe
ggtgattctgaggaggtaaagatgt

SEQ ID NO: 130593 - DNA, 25 bp, Artificial
  Probe
agtaatgccttgggaagaatttctg

SEQ ID NO: 130594 - DNA, 25 bp, Artificial
  Probe
tggtggtatgtgcctttaatcctag

SEQ ID NO: 130595 - DNA, 25 bp, Artificial
  Probe
ttctgaggaggtaaagatgtttggg

SEQ ID NO: 130596 - DNA, 25 bp, Artificial
  Probe
gtaatgccttgggaagaatttctgg

SEQ ID NO: 130597 - DNA, 25 bp, Artificial
  Probe
atggtaactttcaaactaacctggg

SEQ ID NO: 130598 - DNA, 25 bp, Artificial
  Probe
ggaacaaggcaactctgataacctc

SEQ ID NO: 130599 - DNA, 25 bp, Artificial
  Probe
tatggtaactttcaaactaacctgg

SEQ ID NO: 130600 - DNA, 25 bp, Artificial
  Probe
taatgccttgggaagaatttctggt

SEQ ID NO: 130601 - DNA, 25 bp, Artificial
  Probe
cttgggaagaatttctggttcacct

SEQ ID NO: 130602 - DNA, 25 bp, Artificial
  Probe
ggaagaatttctggttcacctgaaa

SEQ ID NO: 130603 - DNA, 25 bp, Artificial
  Probe
taaaagagtaatgccttgggaagaa

SEQ ID NO: 130604 - DNA, 25 bp, Artificial
  Probe
ggtggtatgtgcctttaatcctagc

SEQ ID NO: 130605 - DNA, 25 bp, Artificial
  Probe
gggaagaatttctggttcacctgaa

SEQ ID NO: 130606 - DNA, 25 bp, Artificial
  Probe
catggtggtatgtgcctttaatcct

SEQ ID NO: 130607 - DNA, 25 bp, Artificial
  Probe
ctaaaagagtaatgccttgggaaga

SEQ ID NO: 130608 - DNA, 25 bp, Artificial
  Probe
aaaagagtaatgccttgggaagaat

SEQ ID NO: 130609 - DNA, 25 bp, Artificial
  Probe
tctaaaagagtaatgccttgggaag

SEQ ID NO: 130610 - DNA, 25 bp, Artificial
  Probe
ttgggaagaatttctggttcacctg

SEQ ID NO: 130611 - DNA, 25 bp, Artificial
  Probe
aatgccttgggaagaatttctggtt

SEQ ID NO: 130612 - DNA, 25 bp, Artificial
  Probe
tatgtgcctttaatcctagcagtta

SEQ ID NO: 130613 - DNA, 25 bp, Artificial
  Probe
atgtgcctttaatcctagcagttag

SEQ ID NO: 130614 - DNA, 25 bp, Artificial
  Probe
gtatgtgcctttaatcctagcagtt

SEQ ID NO: 130615 - DNA, 25 bp, Artificial
  Probe
tcccctcttcagattcctctaaaag

SEQ ID NO: 130616 - DNA, 25 bp, Artificial
  Probe
gtcccctcttcagattcctctaaaa

SEQ ID NO: 130617 - DNA, 25 bp, Artificial
  Probe
atgccttgggaagaatttctggttc

SEQ ID NO: 130618 - DNA, 25 bp, Artificial
  Probe
gctatatggtaactttcaaactaac

SEQ ID NO: 130619 - DNA, 25 bp, Artificial
  Probe
atatggtaactttcaaactaacctg

SEQ ID NO: 130620 - DNA, 25 bp, Artificial
  Probe
ataaagcggtcctcttcctgtgaaa

SEQ ID NO: 130621 - DNA, 25 bp, Artificial
  Probe
ccttgggaagaatttctggttcacc

SEQ ID NO: 130622 - DNA, 25 bp, Artificial
  Probe
attgtcccctcttcagattcctcta

SEQ ID NO: 130623 - DNA, 25 bp, Artificial
  Probe
tataaagagacagagaggtggtgat

SEQ ID NO: 130624 - DNA, 25 bp, Artificial
  Probe
tttgtgaatgggaatctgatacctt

SEQ ID NO: 130625 - DNA, 25 bp, Artificial
  Probe
ctttgtgaatgggaatctgatacct

SEQ ID NO: 130626 - DNA, 25 bp, Artificial
  Probe
ttgtgaatgggaatctgataccttg

SEQ ID NO: 130627 - DNA, 25 bp, Artificial
  Probe
ataaagagacagagaggtggtgatt

SEQ ID NO: 130628 - DNA, 25 bp, Artificial
  Probe
taaagagacagagaggtggtgattt

SEQ ID NO: 130629 - DNA, 25 bp, Artificial
  Probe
tagataagcgttgttcttgtttctc

SEQ ID NO: 130630 - DNA, 25 bp, Artificial
  Probe
cacgactgatacagagtgacttctt

SEQ ID NO: 130631 - DNA, 25 bp, Artificial
  Probe
ataagcgttgttcttgtttctcaaa

SEQ ID NO: 130632 - DNA, 25 bp, Artificial
  Probe
gataagcgttgttcttgtttctcaa

SEQ ID NO: 130633 - DNA, 25 bp, Artificial
  Probe
tctttctgtaaacactgaggaatgg

SEQ ID NO: 130634 - DNA, 25 bp, Artificial
  Probe
taagcgttgttcttgtttctcaaag

SEQ ID NO: 130635 - DNA, 25 bp, Artificial
  Probe
ctgtaaacactgaggaatgggttat

SEQ ID NO: 130636 - DNA, 25 bp, Artificial
  Probe
agataagcgttgttcttgtttctca

SEQ ID NO: 130637 - DNA, 25 bp, Artificial
  Probe
tgtaaacactgaggaatgggttata

SEQ ID NO: 130638 - DNA, 25 bp, Artificial
  Probe
ttctttctgtaaacactgaggaatg

SEQ ID NO: 130639 - DNA, 25 bp, Artificial
  Probe
aacacgactgatacagagtgacttc

SEQ ID NO: 130640 - DNA, 25 bp, Artificial
  Probe
ctagataagcgttgttcttgtttct

SEQ ID NO: 130641 - DNA, 25 bp, Artificial
  Probe
tggagttactgctttgacaaattaa

SEQ ID NO: 130642 - DNA, 25 bp, Artificial
  Probe
tctgtaaacactgaggaatgggtta

SEQ ID NO: 130643 - DNA, 25 bp, Artificial
  Probe
tttctttctgtaaacactgaggaat

SEQ ID NO: 130644 - DNA, 25 bp, Artificial
  Probe
ctttctgtaaacactgaggaatggg

SEQ ID NO: 130645 - DNA, 25 bp, Artificial
  Probe
gctttgtgaatgggaatctgatacc

SEQ ID NO: 130646 - DNA, 25 bp, Artificial
  Probe
gttggagttactgctttgacaaatt

SEQ ID NO: 130647 - DNA, 25 bp, Artificial
  Probe
tgaggaatgggttataaagagacag

SEQ ID NO: 130648 - DNA, 25 bp, Artificial
  Probe
ctgaggaatgggttataaagagaca

SEQ ID NO: 130649 - DNA, 25 bp, Artificial
  Probe
actgaggaatgggttataaagagac

SEQ ID NO: 130650 - DNA, 25 bp, Artificial
  Probe
cactgaggaatgggttataaagaga

SEQ ID NO: 130651 - DNA, 25 bp, Artificial
  Probe
acactgaggaatgggttataaagag

SEQ ID NO: 130652 - DNA, 25 bp, Artificial
  Probe
ttataaagagacagagaggtggtga

SEQ ID NO: 130653 - DNA, 25 bp, Artificial
  Probe
gttataaagagacagagaggtggtg

SEQ ID NO: 130654 - DNA, 25 bp, Artificial
  Probe
atgggttataaagagacagagaggt

SEQ ID NO: 130655 - DNA, 25 bp, Artificial
  Probe
aatgggttataaagagacagagagg

SEQ ID NO: 130656 - DNA, 25 bp, Artificial
  Probe
ggaatgggttataaagagacagaga

SEQ ID NO: 130657 - DNA, 25 bp, Artificial
  Probe
aggaatgggttataaagagacagag

SEQ ID NO: 130658 - DNA, 25 bp, Artificial
  Probe
gaggaatgggttataaagagacaga

SEQ ID NO: 130659 - DNA, 25 bp, Artificial
  Probe
ttggagttactgctttgacaaatta

SEQ ID NO: 130660 - DNA, 25 bp, Artificial
  Probe
actctagataagcgttgttcttgtt

SEQ ID NO: 130661 - DNA, 25 bp, Artificial
  Probe
aatctgataccttgccatgtttctg

SEQ ID NO: 130662 - DNA, 25 bp, Artificial
  Probe
ggagttactgctttgacaaattaaa

SEQ ID NO: 130663 - DNA, 25 bp, Artificial
  Probe
gtttcctctctgtccttacaatgtg

SEQ ID NO: 130664 - DNA, 25 bp, Artificial
  Probe
agtttcctctctgtccttacaatgt

SEQ ID NO: 130665 - DNA, 25 bp, Artificial
  Probe
aacactgaggaatgggttataaaga

SEQ ID NO: 130666 - DNA, 25 bp, Artificial
  Probe
gaatctgataccttgccatgtttct

SEQ ID NO: 130667 - DNA, 25 bp, Artificial
  Probe
cagtttcctctctgtccttacaatg

SEQ ID NO: 130668 - DNA, 25 bp, Artificial
  Probe
gaattgacgactatgacattgtgat

SEQ ID NO: 130669 - DNA, 25 bp, Artificial
  Probe
aattgacgactatgacattgtgatc

SEQ ID NO: 130670 - DNA, 25 bp, Artificial
  Probe
cgaattgacgactatgacattgtga

SEQ ID NO: 130671 - DNA, 25 bp, Artificial
  Probe
aagtacatcgtctacaaggagagag

SEQ ID NO: 130672 - DNA, 25 bp, Artificial
  Probe
gaagtacatcgtctacaaggagaga

SEQ ID NO: 130673 - DNA, 25 bp, Artificial
  Probe
tgaagtacatcgtctacaaggagag

SEQ ID NO: 130674 - DNA, 25 bp, Artificial
  Probe
ctgaagtacatcgtctacaaggaga

SEQ ID NO: 130675 - DNA, 25 bp, Artificial
  Probe
tacatcgtctacaaggagagagtga

SEQ ID NO: 130676 - DNA, 25 bp, Artificial
  Probe
gtacatcgtctacaaggagagagtg

SEQ ID NO: 130677 - DNA, 25 bp, Artificial
  Probe
agtacatcgtctacaaggagagagt

SEQ ID NO: 130678 - DNA, 25 bp, Artificial
  Probe
ctgagcaatatgaacgagactctct

SEQ ID NO: 130679 - DNA, 25 bp, Artificial
  Probe
gctgaagtacatcgtctacaaggag

SEQ ID NO: 130680 - DNA, 25 bp, Artificial
  Probe
acatcgtctacaaggagagagtgag

SEQ ID NO: 130681 - DNA, 25 bp, Artificial
  Probe
gtggctgaagtacatcgtctacaag

SEQ ID NO: 130682 - DNA, 25 bp, Artificial
  Probe
caagtggctgaagtacatcgtctac

SEQ ID NO: 130683 - DNA, 25 bp, Artificial
  Probe
cctgagcaatatgaacgagactctc

SEQ ID NO: 130684 - DNA, 25 bp, Artificial
  Probe
agtggctgaagtacatcgtctacaa

SEQ ID NO: 130685 - DNA, 25 bp, Artificial
  Probe
aagtggctgaagtacatcgtctaca

SEQ ID NO: 130686 - DNA, 25 bp, Artificial
  Probe
tcaagtggctgaagtacatcgtcta

SEQ ID NO: 130687 - DNA, 25 bp, Artificial
  Probe
ggctgaagtacatcgtctacaagga

SEQ ID NO: 130688 - DNA, 25 bp, Artificial
  Probe
gacattgtgatcagattgaactcag

SEQ ID NO: 130689 - DNA, 25 bp, Artificial
  Probe
cgactatgacattgtgatcagattg

SEQ ID NO: 130690 - DNA, 25 bp, Artificial
  Probe
acgactatgacattgtgatcagatt

SEQ ID NO: 130691 - DNA, 25 bp, Artificial
  Probe
tgacattgtgatcagattgaactca

SEQ ID NO: 130692 - DNA, 25 bp, Artificial
  Probe
gacgactatgacattgtgatcagat

SEQ ID NO: 130693 - DNA, 25 bp, Artificial
  Probe
attgacgactatgacattgtgatca

SEQ ID NO: 130694 - DNA, 25 bp, Artificial
  Probe
atgacattgtgatcagattgaactc

SEQ ID NO: 130695 - DNA, 25 bp, Artificial
  Probe
ttgacgactatgacattgtgatcag

SEQ ID NO: 130696 - DNA, 25 bp, Artificial
  Probe
agcaatatgaacgagactctctctt

SEQ ID NO: 130697 - DNA, 25 bp, Artificial
  Probe
tggctgaagtacatcgtctacaagg

SEQ ID NO: 130698 - DNA, 25 bp, Artificial
  Probe
cagattgaactcagcacctgtgaag

SEQ ID NO: 130699 - DNA, 25 bp, Artificial
  Probe
gatcagattgaactcagcacctgtg

SEQ ID NO: 130700 - DNA, 25 bp, Artificial
  Probe
gactatgacattgtgatcagattga

SEQ ID NO: 130701 - DNA, 25 bp, Artificial
  Probe
catcgtctacaaggagagagtgagc

SEQ ID NO: 130702 - DNA, 25 bp, Artificial
  Probe
caacatccagcgagagaaagagttt

SEQ ID NO: 130703 - DNA, 25 bp, Artificial
  Probe
ctctctctttgtactagctggcttc

SEQ ID NO: 130704 - DNA, 25 bp, Artificial
  Probe
atcagattgaactcagcacctgtga

SEQ ID NO: 130705 - DNA, 25 bp, Artificial
  Probe
gagcaatatgaacgagactctctct

SEQ ID NO: 130706 - DNA, 25 bp, Artificial
  Probe
cattgtgatcagattgaactcagca

SEQ ID NO: 130707 - DNA, 25 bp, Artificial
  Probe
acattgtgatcagattgaactcagc

SEQ ID NO: 130708 - DNA, 25 bp, Artificial
  Probe
tgacgactatgacattgtgatcaga

SEQ ID NO: 130709 - DNA, 25 bp, Artificial
  Probe
tatgacattgtgatcagattgaact

SEQ ID NO: 130710 - DNA, 25 bp, Artificial
  Probe
actatgacattgtgatcagattgaa

SEQ ID NO: 130711 - DNA, 25 bp, Artificial
  Probe
tctctttgtactagctggcttcaag

SEQ ID NO: 130712 - DNA, 25 bp, Artificial
  Probe
ctctctttgtactagctggcttcaa

SEQ ID NO: 130713 - DNA, 25 bp, Artificial
  Probe
gcacttacacactctacctaatcat

SEQ ID NO: 130714 - DNA, 25 bp, Artificial
  Probe
cttacacactctacctaatcatcgg

SEQ ID NO: 130715 - DNA, 25 bp, Artificial
  Probe
acttacacactctacctaatcatcg

SEQ ID NO: 130716 - DNA, 25 bp, Artificial
  Probe
cacttacacactctacctaatcatc

SEQ ID NO: 130717 - DNA, 25 bp, Artificial
  Probe
ggcacttacacactctacctaatca

SEQ ID NO: 130718 - DNA, 25 bp, Artificial
  Probe
tggcacttacacactctacctaatc

SEQ ID NO: 130719 - DNA, 25 bp, Artificial
  Probe
ctggcacttacacactctacctaat

SEQ ID NO: 130720 - DNA, 25 bp, Artificial
  Probe
tctggcacttacacactctacctaa

SEQ ID NO: 130721 - DNA, 25 bp, Artificial
  Probe
ttggtgtatagagaagggttgaaat

SEQ ID NO: 130722 - DNA, 25 bp, Artificial
  Probe
agggttgaaattgtctcggtaaata

SEQ ID NO: 130723 - DNA, 25 bp, Artificial
  Probe
gggttgaaattgtctcggtaaataa

SEQ ID NO: 130724 - DNA, 25 bp, Artificial
  Probe
tggtgtatagagaagggttgaaatt

SEQ ID NO: 130725 - DNA, 25 bp, Artificial
  Probe
cttggtgtatagagaagggttgaaa

SEQ ID NO: 130726 - DNA, 25 bp, Artificial
  Probe
ggtgtatagagaagggttgaaattg

SEQ ID NO: 130727 - DNA, 25 bp, Artificial
  Probe
tagttccagaagaagtttgaagacc

SEQ ID NO: 130728 - DNA, 25 bp, Artificial
  Probe
ctctggcacttacacactctaccta

SEQ ID NO: 130729 - DNA, 25 bp, Artificial
  Probe
tctttggagagtcttctgtgtttag

SEQ ID NO: 130730 - DNA, 25 bp, Artificial
  Probe
gtctttggagagtcttctgtgttta

SEQ ID NO: 130731 - DNA, 25 bp, Artificial
  Probe
aagggttgaaattgtctcggtaaat

SEQ ID NO: 130732 - DNA, 25 bp, Artificial
  Probe
ttacacactctacctaatcatcggg

SEQ ID NO: 130733 - DNA, 25 bp, Artificial
  Probe
ttagttccagaagaagtttgaagac

SEQ ID NO: 130734 - DNA, 25 bp, Artificial
  Probe
gtgtatagagaagggttgaaattgt

SEQ ID NO: 130735 - DNA, 25 bp, Artificial
  Probe
gaagggttgaaattgtctcggtaaa

SEQ ID NO: 130736 - DNA, 25 bp, Artificial
  Probe
tgtatagagaagggttgaaattgtc

SEQ ID NO: 130737 - DNA, 25 bp, Artificial
  Probe
ttgaaattgtctcggtaaataaagc

SEQ ID NO: 130738 - DNA, 25 bp, Artificial
  Probe
ctttggagagtcttctgtgtttagc

SEQ ID NO: 130739 - DNA, 25 bp, Artificial
  Probe
ggttgaaattgtctcggtaaataaa

SEQ ID NO: 130740 - DNA, 25 bp, Artificial
  Probe
gtatagagaagggttgaaattgtct

SEQ ID NO: 130741 - DNA, 25 bp, Artificial
  Probe
tgtctttggagagtcttctgtgttt

SEQ ID NO: 130742 - DNA, 25 bp, Artificial
  Probe
ttgtctttggagagtcttctgtgtt

SEQ ID NO: 130743 - DNA, 25 bp, Artificial
  Probe
gcttggtgtatagagaagggttgaa

SEQ ID NO: 130744 - DNA, 25 bp, Artificial
  Probe
agaagggttgaaattgtctcggtaa

SEQ ID NO: 130745 - DNA, 25 bp, Artificial
  Probe
agatatgtttggacccagattgtct

SEQ ID NO: 130746 - DNA, 25 bp, Artificial
  Probe
cagatatgtttggacccagattgtc

SEQ ID NO: 130747 - DNA, 25 bp, Artificial
  Probe
cacctctgaaaggaagattgagttc

SEQ ID NO: 130748 - DNA, 25 bp, Artificial
  Probe
accagacatttgttcgacttcataa

SEQ ID NO: 130749 - DNA, 25 bp, Artificial
  Probe
aaattgtctcggtaaataaagctga

SEQ ID NO: 130750 - DNA, 25 bp, Artificial
  Probe
tgaaattgtctcggtaaataaagct

SEQ ID NO: 130751 - DNA, 25 bp, Artificial
  Probe
ataagtttgaactggacacctctga

SEQ ID NO: 130752 - DNA, 25 bp, Artificial
  Probe
cttgtctttggagagtcttctgtgt

SEQ ID NO: 130753 - DNA, 25 bp, Artificial
  Probe
taagtttgaactggacacctctgaa

SEQ ID NO: 130754 - DNA, 25 bp, Artificial
  Probe
gaaattgtctcggtaaataaagctg

SEQ ID NO: 130755 - DNA, 25 bp, Artificial
  Probe
cagacatttgttcgacttcataacc

SEQ ID NO: 130756 - DNA, 25 bp, Artificial
  Probe
ccagacatttgttcgacttcataac

SEQ ID NO: 130757 - DNA, 25 bp, Artificial
  Probe
gttccagaagaagtttgaagaccct

SEQ ID NO: 130758 - DNA, 25 bp, Artificial
  Probe
atgaaacacactggttctggatttg

SEQ ID NO: 130759 - DNA, 25 bp, Artificial
  Probe
tctggagagtgaggtgaggaagtaa

SEQ ID NO: 130760 - DNA, 25 bp, Artificial
  Probe
ttctggagagtgaggtgaggaagta

SEQ ID NO: 130761 - DNA, 25 bp, Artificial
  Probe
catgaaacacactggttctggattt

SEQ ID NO: 130762 - DNA, 25 bp, Artificial
  Probe
gtttcctcccaattacagcaagact

SEQ ID NO: 130763 - DNA, 25 bp, Artificial
  Probe
ctggagagtgaggtgaggaagtaaa

SEQ ID NO: 130764 - DNA, 25 bp, Artificial
  Probe
ttggctactggtgactctcaatctg

SEQ ID NO: 130765 - DNA, 25 bp, Artificial
  Probe
ccatttccttggaactgctaagaat

SEQ ID NO: 130766 - DNA, 25 bp, Artificial
  Probe
catttccttggaactgctaagaatg

SEQ ID NO: 130767 - DNA, 25 bp, Artificial
  Probe
ctttggctactggtgactctcaatc

SEQ ID NO: 130768 - DNA, 25 bp, Artificial
  Probe
tttcctcccaattacagcaagactg

SEQ ID NO: 130769 - DNA, 25 bp, Artificial
  Probe
agtgaggtgaggaagtaaaactatc

SEQ ID NO: 130770 - DNA, 25 bp, Artificial
  Probe
gagtgaggtgaggaagtaaaactat

SEQ ID NO: 130771 - DNA, 25 bp, Artificial
  Probe
aaactatcccagggaccaacttaat

SEQ ID NO: 130772 - DNA, 25 bp, Artificial
  Probe
agagtgaggtgaggaagtaaaacta

SEQ ID NO: 130773 - DNA, 25 bp, Artificial
  Probe
tgtttcctcccaattacagcaagac

SEQ ID NO: 130774 - DNA, 25 bp, Artificial
  Probe
tttggctactggtgactctcaatct

SEQ ID NO: 130775 - DNA, 25 bp, Artificial
  Probe
ctatcccagggaccaacttaatcat

SEQ ID NO: 130776 - DNA, 25 bp, Artificial
  Probe
catctagaacttgactgccaccttc

SEQ ID NO: 130777 - DNA, 25 bp, Artificial
  Probe
tgaaacacactggttctggatttgg

SEQ ID NO: 130778 - DNA, 25 bp, Artificial
  Probe
taactggcagcaagaggaaacaatg

SEQ ID NO: 130779 - DNA, 25 bp, Artificial
  Probe
gtaactggcagcaagaggaaacaat

SEQ ID NO: 130780 - DNA, 25 bp, Artificial
  Probe
aactatcccagggaccaacttaatc

SEQ ID NO: 130781 - DNA, 25 bp, Artificial
  Probe
ctactggtgactctcaatctgccaa

SEQ ID NO: 130782 - DNA, 25 bp, Artificial
  Probe
actttggctactggtgactctcaat

SEQ ID NO: 130783 - DNA, 25 bp, Artificial
  Probe
taaaggtaactggcagcaagaggaa

SEQ ID NO: 130784 - DNA, 25 bp, Artificial
  Probe
gagagtgaggtgaggaagtaaaact

SEQ ID NO: 130785 - DNA, 25 bp, Artificial
  Probe
gtgaggtgaggaagtaaaactatcc

SEQ ID NO: 130786 - DNA, 25 bp, Artificial
  Probe
ggagagtgaggtgaggaagtaaaac

SEQ ID NO: 130787 - DNA, 25 bp, Artificial
  Probe
tcatctagaacttgactgccacctt

SEQ ID NO: 130788 - DNA, 25 bp, Artificial
  Probe
ctaaaggtaactggcagcaagagga

SEQ ID NO: 130789 - DNA, 25 bp, Artificial
  Probe
actatcccagggaccaacttaatca

SEQ ID NO: 130790 - DNA, 25 bp, Artificial
  Probe
aggtgaggaagtaaaactatcccag

SEQ ID NO: 130791 - DNA, 25 bp, Artificial
  Probe
gaggtgaggaagtaaaactatccca

SEQ ID NO: 130792 - DNA, 25 bp, Artificial
  Probe
tgaggtgaggaagtaaaactatccc

SEQ ID NO: 130793 - DNA, 25 bp, Artificial
  Probe
tggagagtgaggtgaggaagtaaaa

SEQ ID NO: 130794 - DNA, 25 bp, Artificial
  Probe
gactttggctactggtgactctcaa

SEQ ID NO: 130795 - DNA, 25 bp, Artificial
  Probe
ggaggttgtctctaccatgagattt

SEQ ID NO: 130796 - DNA, 25 bp, Artificial
  Probe
tactggtgactctcaatctgccaaa

SEQ ID NO: 130797 - DNA, 25 bp, Artificial
  Probe
ctgactttggctactggtgactctc

SEQ ID NO: 130798 - DNA, 25 bp, Artificial
  Probe
ccatgaaacacactggttctggatt

SEQ ID NO: 130799 - DNA, 25 bp, Artificial
  Probe
aaaggtaactggcagcaagaggaaa

SEQ ID NO: 130800 - DNA, 25 bp, Artificial
  Probe
ggtgactctcaatctgccaaacatg

SEQ ID NO: 130801 - DNA, 25 bp, Artificial
  Probe
atctagaacttgactgccaccttct

SEQ ID NO: 130802 - DNA, 25 bp, Artificial
  Probe
gactctcaatctgccaaacatgctg

SEQ ID NO: 130803 - DNA, 25 bp, Artificial
  Probe
ctgaagaagatgaagcagaaagagc

SEQ ID NO: 130804 - DNA, 25 bp, Artificial
  Probe
cagcagtgagaataaagtcctcctc

SEQ ID NO: 130805 - DNA, 25 bp, Artificial
  Probe
aagaagatgaagcagaaagagcgag

SEQ ID NO: 130806 - DNA, 25 bp, Artificial
  Probe
gaagaagatgaagcagaaagagcga

SEQ ID NO: 130807 - DNA, 25 bp, Artificial
  Probe
gtccagcagtgagaataaagtcctc

SEQ ID NO: 130808 - DNA, 25 bp, Artificial
  Probe
tgaagaagatgaagcagaaagagcg

SEQ ID NO: 130809 - DNA, 25 bp, Artificial
  Probe
tgtccagcagtgagaataaagtcct

SEQ ID NO: 130810 - DNA, 25 bp, Artificial
  Probe
gaagatgaagcagaaagagcgagac

SEQ ID NO: 130811 - DNA, 25 bp, Artificial
  Probe
agaagatgaagcagaaagagcgaga

SEQ ID NO: 130812 - DNA, 25 bp, Artificial
  Probe
ctgtccagcagtgagaataaagtcc

SEQ ID NO: 130813 - DNA, 25 bp, Artificial
  Probe
cctgtccagcagtgagaataaagtc

SEQ ID NO: 130814 - DNA, 25 bp, Artificial
  Probe
cacctgtccagcagtgagaataaag

SEQ ID NO: 130815 - DNA, 25 bp, Artificial
  Probe
ccagcagtgagaataaagtcctcct

SEQ ID NO: 130816 - DNA, 25 bp, Artificial
  Probe
tccagcagtgagaataaagtcctcc

SEQ ID NO: 130817 - DNA, 25 bp, Artificial
  Probe
acctgtccagcagtgagaataaagt

SEQ ID NO: 130818 - DNA, 25 bp, Artificial
  Probe
tctgaagaagatgaagcagaaagag

SEQ ID NO: 130819 - DNA, 25 bp, Artificial
  Probe
taatgctattcaggaggccctagag

SEQ ID NO: 130820 - DNA, 25 bp, Artificial
  Probe
gtaatgctattcaggaggccctaga

SEQ ID NO: 130821 - DNA, 25 bp, Artificial
  Probe
agcagtgagaataaagtcctcctca

SEQ ID NO: 130822 - DNA, 25 bp, Artificial
  Probe
tgtaatgctattcaggaggccctag

SEQ ID NO: 130823 - DNA, 25 bp, Artificial
  Probe
ctgtaatgctattcaggaggcccta

SEQ ID NO: 130824 - DNA, 25 bp, Artificial
  Probe
gcactgtcctgtaatgctattcagg

SEQ ID NO: 130825 - DNA, 25 bp, Artificial
  Probe
tcacctgtccagcagtgagaataaa

SEQ ID NO: 130826 - DNA, 25 bp, Artificial
  Probe
ttctacctaagtccttgatgtcctt

SEQ ID NO: 130827 - DNA, 25 bp, Artificial
  Probe
tctacctaagtccttgatgtccttc

SEQ ID NO: 130828 - DNA, 25 bp, Artificial
  Probe
ggtcaaggtcatcttcagatacata

SEQ ID NO: 130829 - DNA, 25 bp, Artificial
  Probe
catcttcagatacataggagcctac

SEQ ID NO: 130830 - DNA, 25 bp, Artificial
  Probe
tcatcttcagatacataggagccta

SEQ ID NO: 130831 - DNA, 25 bp, Artificial
  Probe
caaggtcatcttcagatacatagga

SEQ ID NO: 130832 - DNA, 25 bp, Artificial
  Probe
tcaaggtcatcttcagatacatagg

SEQ ID NO: 130833 - DNA, 25 bp, Artificial
  Probe
atacataggagcctacgagtaagag

SEQ ID NO: 130834 - DNA, 25 bp, Artificial
  Probe
gatacataggagcctacgagtaaga

SEQ ID NO: 130835 - DNA, 25 bp, Artificial
  Probe
agatacataggagcctacgagtaag

SEQ ID NO: 130836 - DNA, 25 bp, Artificial
  Probe
cagatacataggagcctacgagtaa

SEQ ID NO: 130837 - DNA, 25 bp, Artificial
  Probe
aaggtcatcttcagatacataggag

SEQ ID NO: 130838 - DNA, 25 bp, Artificial
  Probe
ttgtgagttcaagaccagataatct

SEQ ID NO: 130839 - DNA, 25 bp, Artificial
  Probe
gtcatcttcagatacataggagcct

SEQ ID NO: 130840 - DNA, 25 bp, Artificial
  Probe
aggtcatcttcagatacataggagc

SEQ ID NO: 130841 - DNA, 25 bp, Artificial
  Probe
aagtggtcaaggtcatcttcagata

SEQ ID NO: 130842 - DNA, 25 bp, Artificial
  Probe
atcttcagatacataggagcctacg

SEQ ID NO: 130843 - DNA, 25 bp, Artificial
  Probe
tggtcaaggtcatcttcagatacat

SEQ ID NO: 130844 - DNA, 25 bp, Artificial
  Probe
tgagttcaagaccagataatctaca

SEQ ID NO: 130845 - DNA, 25 bp, Artificial
  Probe
tgtgagttcaagaccagataatcta

SEQ ID NO: 130846 - DNA, 25 bp, Artificial
  Probe
ctacctaagtccttgatgtccttcc

SEQ ID NO: 130847 - DNA, 25 bp, Artificial
  Probe
gtgagttcaagaccagataatctac

SEQ ID NO: 130848 - DNA, 25 bp, Artificial
  Probe
gtcaaggtcatcttcagatacatag

SEQ ID NO: 130849 - DNA, 25 bp, Artificial
  Probe
tcagatacataggagcctacgagta

SEQ ID NO: 130850 - DNA, 25 bp, Artificial
  Probe
cttcagatacataggagcctacgag

SEQ ID NO: 130851 - DNA, 25 bp, Artificial
  Probe
agtggtcaaggtcatcttcagatac

SEQ ID NO: 130852 - DNA, 25 bp, Artificial
  Probe
ggtcatcttcagatacataggagcc

SEQ ID NO: 130853 - DNA, 25 bp, Artificial
  Probe
tcttcagatacataggagcctacga

SEQ ID NO: 130854 - DNA, 25 bp, Artificial
  Probe
gtggtcaaggtcatcttcagataca

SEQ ID NO: 130855 - DNA, 25 bp, Artificial
  Probe
ttcagatacataggagcctacgagt

SEQ ID NO: 130856 - DNA, 25 bp, Artificial
  Probe
gagttcaagaccagataatctacat

SEQ ID NO: 130857 - DNA, 25 bp, Artificial
  Probe
ctaagaaagtagagacaggcagatt

SEQ ID NO: 130858 - DNA, 25 bp, Artificial
  Probe
atttctacctaagtccttgatgtcc

SEQ ID NO: 130859 - DNA, 25 bp, Artificial
  Probe
taagaaagtagagacaggcagattt

SEQ ID NO: 130860 - DNA, 25 bp, Artificial
  Probe
tttctacctaagtccttgatgtcct

SEQ ID NO: 130861 - DNA, 25 bp, Artificial
  Probe
aagaaagtagagacaggcagatttg

SEQ ID NO: 130862 - DNA, 25 bp, Artificial
  Probe
caagtggtcaaggtcatcttcagat

SEQ ID NO: 130863 - DNA, 25 bp, Artificial
  Probe
gaaagtagagacaggcagatttgag

SEQ ID NO: 130864 - DNA, 25 bp, Artificial
  Probe
agaaagtagagacaggcagatttga

SEQ ID NO: 130865 - DNA, 25 bp, Artificial
  Probe
catttctacctaagtccttgatgtc

SEQ ID NO: 130866 - DNA, 25 bp, Artificial
  Probe
cagtaggatgactcagaagtaaagg

SEQ ID NO: 130867 - DNA, 25 bp, Artificial
  Probe
ccagtaggatgactcagaagtaaag

SEQ ID NO: 130868 - DNA, 25 bp, Artificial
  Probe
tacagccagggacatacacataaat

SEQ ID NO: 130869 - DNA, 25 bp, Artificial
  Probe
atacagccagggacatacacataaa

SEQ ID NO: 130870 - DNA, 25 bp, Artificial
  Probe
aatacagccagggacatacacataa

SEQ ID NO: 130871 - DNA, 25 bp, Artificial
  Probe
ttcatctacttcctcctcaattctg

SEQ ID NO: 130872 - DNA, 25 bp, Artificial
  Probe
tcatctacttcctcctcaattctgc

SEQ ID NO: 130873 - DNA, 25 bp, Artificial
  Probe
gccttatttcatctacttcctcctc

SEQ ID NO: 130874 - DNA, 25 bp, Artificial
  Probe
ccttatttcatctacttcctcctca

SEQ ID NO: 130875 - DNA, 25 bp, Artificial
  Probe
agccttatttcatctacttcctcct

SEQ ID NO: 130876 - DNA, 25 bp, Artificial
  Probe
ctacttcctcctcaattctgcattc

SEQ ID NO: 130877 - DNA, 25 bp, Artificial
  Probe
atctacttcctcctcaattctgcat

SEQ ID NO: 130878 - DNA, 25 bp, Artificial
  Probe
tttcatctacttcctcctcaattct

SEQ ID NO: 130879 - DNA, 25 bp, Artificial
  Probe
tctacttcctcctcaattctgcatt

SEQ ID NO: 130880 - DNA, 25 bp, Artificial
  Probe
ttgagccttatttcatctacttcct

SEQ ID NO: 130881 - DNA, 25 bp, Artificial
  Probe
tgagccttatttcatctacttcctc

SEQ ID NO: 130882 - DNA, 25 bp, Artificial
  Probe
gagccttatttcatctacttcctcc

SEQ ID NO: 130883 - DNA, 25 bp, Artificial
  Probe
atttcatctacttcctcctcaattc

SEQ ID NO: 130884 - DNA, 25 bp, Artificial
  Probe
catctacttcctcctcaattctgca

SEQ ID NO: 130885 - DNA, 25 bp, Artificial
  Probe
attgagccttatttcatctacttcc

SEQ ID NO: 130886 - DNA, 25 bp, Artificial
  Probe
gcaagttgtcagaaatcctaatggg

SEQ ID NO: 130887 - DNA, 25 bp, Artificial
  Probe
cttatttcatctacttcctcctcaa

SEQ ID NO: 130888 - DNA, 25 bp, Artificial
  Probe
tacttcctcctcaattctgcattcc

SEQ ID NO: 130889 - DNA, 25 bp, Artificial
  Probe
gaatttctgcccacaacataccaaa

SEQ ID NO: 130890 - DNA, 25 bp, Artificial
  Probe
aagttgtcagaaatcctaatgggac

SEQ ID NO: 130891 - DNA, 25 bp, Artificial
  Probe
caagttgtcagaaatcctaatggga

SEQ ID NO: 130892 - DNA, 25 bp, Artificial
  Probe
tgaccctcagtttctgttcctattt

SEQ ID NO: 130893 - DNA, 25 bp, Artificial
  Probe
ttatttcatctacttcctcctcaat

SEQ ID NO: 130894 - DNA, 25 bp, Artificial
  Probe
gtgcaagttgtcagaaatcctaatg

SEQ ID NO: 130895 - DNA, 25 bp, Artificial
  Probe
tgtgcaagttgtcagaaatcctaat

SEQ ID NO: 130896 - DNA, 25 bp, Artificial
  Probe
tatttcatctacttcctcctcaatt

SEQ ID NO: 130897 - DNA, 25 bp, Artificial
  Probe
tgcaagttgtcagaaatcctaatgg

SEQ ID NO: 130898 - DNA, 25 bp, Artificial
  Probe
aattgagccttatttcatctacttc

SEQ ID NO: 130899 - DNA, 25 bp, Artificial
  Probe
gtttctgttcctattttgaccgttc

SEQ ID NO: 130900 - DNA, 25 bp, Artificial
  Probe
caggacttcacaattgagccttatt

SEQ ID NO: 130901 - DNA, 25 bp, Artificial
  Probe
agtttctgttcctattttgaccgtt

SEQ ID NO: 130902 - DNA, 25 bp, Artificial
  Probe
acataccaaaagtgctcttattcca

SEQ ID NO: 130903 - DNA, 25 bp, Artificial
  Probe
taccaaaagtgctcttattccaaag

SEQ ID NO: 130904 - DNA, 25 bp, Artificial
  Probe
cataccaaaagtgctcttattccaa

SEQ ID NO: 130905 - DNA, 25 bp, Artificial
  Probe
aacataccaaaagtgctcttattcc

SEQ ID NO: 130906 - DNA, 25 bp, Artificial
  Probe
acaacataccaaaagtgctcttatt

SEQ ID NO: 130907 - DNA, 25 bp, Artificial
  Probe
ataccaaaagtgctcttattccaaa

SEQ ID NO: 130908 - DNA, 25 bp, Artificial
  Probe
ctgtgcaagttgtcagaaatcctaa

SEQ ID NO: 130909 - DNA, 25 bp, Artificial
  Probe
tttctgttcctattttgaccgttcc

SEQ ID NO: 130910 - DNA, 25 bp, Artificial
  Probe
caacataccaaaagtgctcttattc

SEQ ID NO: 130911 - DNA, 25 bp, Artificial
  Probe
aatttctgcccacaacataccaaaa

SEQ ID NO: 130912 - DNA, 25 bp, Artificial
  Probe
ctgttcctattttgaccgttccaat

SEQ ID NO: 130913 - DNA, 25 bp, Artificial
  Probe
ctcagtttctgttcctattttgacc

SEQ ID NO: 130914 - DNA, 25 bp, Artificial
  Probe
cctcagtttctgttcctattttgac

SEQ ID NO: 130915 - DNA, 25 bp, Artificial
  Probe
gacttcacaattgagccttatttca

SEQ ID NO: 130916 - DNA, 25 bp, Artificial
  Probe
ttgaacatggaagagaatctgaacc

SEQ ID NO: 130917 - DNA, 25 bp, Artificial
  Probe
tgataggaatgaacccaaactcaat

SEQ ID NO: 130918 - DNA, 25 bp, Artificial
  Probe
ctctgagttctttctgtgtgatcta

SEQ ID NO: 130919 - DNA, 25 bp, Artificial
  Probe
catctcttcactctgcttcagttga

SEQ ID NO: 130920 - DNA, 25 bp, Artificial
  Probe
tctgagttctttctgtgtgatctat

SEQ ID NO: 130921 - DNA, 25 bp, Artificial
  Probe
gtgataggaatgaacccaaactcaa

SEQ ID NO: 130922 - DNA, 25 bp, Artificial
  Probe
gataggaatgaacccaaactcaata

SEQ ID NO: 130923 - DNA, 25 bp, Artificial
  Probe
actttgaacatggaagagaatctga

SEQ ID NO: 130924 - DNA, 25 bp, Artificial
  Probe
cactttgaacatggaagagaatctg

SEQ ID NO: 130925 - DNA, 25 bp, Artificial
  Probe
ctgagttctttctgtgtgatctatt

SEQ ID NO: 130926 - DNA, 25 bp, Artificial
  Probe
tttgaacatggaagagaatctgaac

SEQ ID NO: 130927 - DNA, 25 bp, Artificial
  Probe
ctttgaacatggaagagaatctgaa

SEQ ID NO: 130928 - DNA, 25 bp, Artificial
  Probe
taggaatgaacccaaactcaataaa

SEQ ID NO: 130929 - DNA, 25 bp, Artificial
  Probe
tgagttctttctgtgtgatctattt

SEQ ID NO: 130930 - DNA, 25 bp, Artificial
  Probe
ataggaatgaacccaaactcaataa

SEQ ID NO: 130931 - DNA, 25 bp, Artificial
  Probe
cctctgagttctttctgtgtgatct

SEQ ID NO: 130932 - DNA, 25 bp, Artificial
  Probe
gcactttgaacatggaagagaatct

SEQ ID NO: 130933 - DNA, 25 bp, Artificial
  Probe
ccatctcttcactctgcttcagttg

SEQ ID NO: 130934 - DNA, 25 bp, Artificial
  Probe
cactctgcttcagttgaacacctag

SEQ ID NO: 130935 - DNA, 25 bp, Artificial
  Probe
atctcttcactctgcttcagttgaa

SEQ ID NO: 130936 - DNA, 25 bp, Artificial
  Probe
cttcgtgtccatctcatttcctgat

SEQ ID NO: 130937 - DNA, 25 bp, Artificial
  Probe
cgtgataggaatgaacccaaactca

SEQ ID NO: 130938 - DNA, 25 bp, Artificial
  Probe
ccctctgagttctttctgtgtgatc

SEQ ID NO: 130939 - DNA, 25 bp, Artificial
  Probe
tgaacatggaagagaatctgaaccc

SEQ ID NO: 130940 - DNA, 25 bp, Artificial
  Probe
ccgtgataggaatgaacccaaactc

SEQ ID NO: 130941 - DNA, 25 bp, Artificial
  Probe
tcttgcttcgtgtccatctcatttc

SEQ ID NO: 130942 - DNA, 25 bp, Artificial
  Probe
ctcttgcttcgtgtccatctcattt

SEQ ID NO: 130943 - DNA, 25 bp, Artificial
  Probe
tcactctgcttcagttgaacaccta

SEQ ID NO: 130944 - DNA, 25 bp, Artificial
  Probe
gttttgttgttttgttttaggtggg

SEQ ID NO: 130945 - DNA, 25 bp, Artificial
  Probe
ttttgttgttttgttttaggtgggt

SEQ ID NO: 130946 - DNA, 25 bp, Artificial
  Probe
ttcgtgtccatctcatttcctgatc

SEQ ID NO: 130947 - DNA, 25 bp, Artificial
  Probe
tgcactttgaacatggaagagaatc

SEQ ID NO: 130948 - DNA, 25 bp, Artificial
  Probe
tgttttgttgttttgttttaggtgg

SEQ ID NO: 130949 - DNA, 25 bp, Artificial
  Probe
tcaataaaatcaattctgtgctccc

SEQ ID NO: 130950 - DNA, 25 bp, Artificial
  Probe
tttgttgttttgttttaggtgggtg

SEQ ID NO: 130951 - DNA, 25 bp, Artificial
  Probe
tctcttcactctgcttcagttgaac

SEQ ID NO: 130952 - DNA, 25 bp, Artificial
  Probe
caataaaatcaattctgtgctcccc

SEQ ID NO: 130953 - DNA, 25 bp, Artificial
  Probe
agaagagtttgttttgttgttttgt

SEQ ID NO: 130954 - DNA, 25 bp, Artificial
  Probe
aaagccactttagtaagaagtaggt

SEQ ID NO: 130955 - DNA, 25 bp, Artificial
  Probe
agccactttagtaagaagtaggtac

SEQ ID NO: 130956 - DNA, 25 bp, Artificial
  Probe
gaccgtgataggaatgaacccaaac

SEQ ID NO: 130957 - DNA, 25 bp, Artificial
  Probe
caaagccactttagtaagaagtagg

SEQ ID NO: 130958 - DNA, 25 bp, Artificial
  Probe
ctcaataaaatcaattctgtgctcc

SEQ ID NO: 130959 - DNA, 25 bp, Artificial
  Probe
ctcttcactctgcttcagttgaaca

SEQ ID NO: 130960 - DNA, 25 bp, Artificial
  Probe
gatcaaagccactttagtaagaagt

SEQ ID NO: 130961 - DNA, 25 bp, Artificial
  Probe
ggagaatcaactggactacatcatc

SEQ ID NO: 130962 - DNA, 25 bp, Artificial
  Probe
aggagaatcaactggactacatcat

SEQ ID NO: 130963 - DNA, 25 bp, Artificial
  Probe
gaggagaatcaactggactacatca

SEQ ID NO: 130964 - DNA, 25 bp, Artificial
  Probe
aagagacagagaagattacagtgtg

SEQ ID NO: 130965 - DNA, 25 bp, Artificial
  Probe
gagacagagaagattacagtgtgtg

SEQ ID NO: 130966 - DNA, 25 bp, Artificial
  Probe
agagacagagaagattacagtgtgt

SEQ ID NO: 130967 - DNA, 25 bp, Artificial
  Probe
ggaggagaatcaactggactacatc

SEQ ID NO: 130968 - DNA, 25 bp, Artificial
  Probe
ctaggaatgatgtgaggcagtctac

SEQ ID NO: 130969 - DNA, 25 bp, Artificial
  Probe
gagaatcaactggactacatcatcc

SEQ ID NO: 130970 - DNA, 25 bp, Artificial
  Probe
tggaggagaatcaactggactacat

SEQ ID NO: 130971 - DNA, 25 bp, Artificial
  Probe
agacagagaagattacagtgtgtgg

SEQ ID NO: 130972 - DNA, 25 bp, Artificial
  Probe
tgaaagagacagagaagattacagt

SEQ ID NO: 130973 - DNA, 25 bp, Artificial
  Probe
gaaagagacagagaagattacagtg

SEQ ID NO: 130974 - DNA, 25 bp, Artificial
  Probe
tatatttaacggcgactttgtggac

SEQ ID NO: 130975 - DNA, 25 bp, Artificial
  Probe
agaatcaactggactacatcatccg

SEQ ID NO: 130976 - DNA, 25 bp, Artificial
  Probe
ctggaggagaatcaactggactaca

SEQ ID NO: 130977 - DNA, 25 bp, Artificial
  Probe
ccctatatatttaacggcgactttg

SEQ ID NO: 130978 - DNA, 25 bp, Artificial
  Probe
taggaatgatgtgaggcagtctaca

SEQ ID NO: 130979 - DNA, 25 bp, Artificial
  Probe
atatatttaacggcgactttgtgga

SEQ ID NO: 130980 - DNA, 25 bp, Artificial
  Probe
caattattgtgaccagatgggaaac

SEQ ID NO: 130981 - DNA, 25 bp, Artificial
  Probe
tatatatttaacggcgactttgtgg

SEQ ID NO: 130982 - DNA, 25 bp, Artificial
  Probe
ttcaagctcctgtatccagatcatt

SEQ ID NO: 130983 - DNA, 25 bp, Artificial
  Probe
cctatatatttaacggcgactttgt

SEQ ID NO: 130984 - DNA, 25 bp, Artificial
  Probe
aaagagacagagaagattacagtgt

SEQ ID NO: 130985 - DNA, 25 bp, Artificial
  Probe
ctattcagcgaagatggtgtcactc

SEQ ID NO: 130986 - DNA, 25 bp, Artificial
  Probe
gctgaaagagacagagaagattaca

SEQ ID NO: 130987 - DNA, 25 bp, Artificial
  Probe
aattattgtgaccagatgggaaaca

SEQ ID NO: 130988 - DNA, 25 bp, Artificial
  Probe
cttcaagctcctgtatccagatcat

SEQ ID NO: 130989 - DNA, 25 bp, Artificial
  Probe
cgctgaaagagacagagaagattac

SEQ ID NO: 130990 - DNA, 25 bp, Artificial
  Probe
ctatatatttaacggcgactttgtg

SEQ ID NO: 130991 - DNA, 25 bp, Artificial
  Probe
ctgaaagagacagagaagattacag

SEQ ID NO: 130992 - DNA, 25 bp, Artificial
  Probe
tattcagcgaagatggtgtcactct

SEQ ID NO: 130993 - DNA, 25 bp, Artificial
  Probe
acgctgaaagagacagagaagatta

SEQ ID NO: 130994 - DNA, 25 bp, Artificial
  Probe
gctaggaatgatgtgaggcagtcta

SEQ ID NO: 130995 - DNA, 25 bp, Artificial
  Probe
cctggaggagaatcaactggactac

SEQ ID NO: 130996 - DNA, 25 bp, Artificial
  Probe
ccaattattgtgaccagatgggaaa

SEQ ID NO: 130997 - DNA, 25 bp, Artificial
  Probe
aacgctgaaagagacagagaagatt

SEQ ID NO: 130998 - DNA, 25 bp, Artificial
  Probe
aggaatgatgtgaggcagtctacag

SEQ ID NO: 130999 - DNA, 25 bp, Artificial
  Probe
gaatcaactggactacatcatccgc

SEQ ID NO: 131000 - DNA, 25 bp, Artificial
  Probe
gacggacaacatgaaccagatctat

SEQ ID NO: 131001 - DNA, 25 bp, Artificial
  Probe
gacagagaagattacagtgtgtggg

SEQ ID NO: 131002 - DNA, 25 bp, Artificial
  Probe
tcaagctcctgtatccagatcattt

SEQ ID NO: 131003 - DNA, 25 bp, Artificial
  Probe
gatgtgaggcagtctacagcagtaa

SEQ ID NO: 131004 - DNA, 25 bp, Artificial
  Probe
caacgctgaaagagacagagaagat

SEQ ID NO: 131005 - DNA, 25 bp, Artificial
  Probe
cctattcagcgaagatggtgtcact

SEQ ID NO: 131006 - DNA, 25 bp, Artificial
  Probe
aagaagaaggagtgtgatgaagttg

SEQ ID NO: 131007 - DNA, 25 bp, Artificial
  Probe
caagaagaaggagtgtgatgaagtt

SEQ ID NO: 131008 - DNA, 25 bp, Artificial
  Probe
ccaaggaagcaacaatgtatcttag

SEQ ID NO: 131009 - DNA, 25 bp, Artificial
  Probe
tccaaggaagcaacaatgtatctta

SEQ ID NO: 131010 - DNA, 25 bp, Artificial
  Probe
caaggaagcaacaatgtatcttaga

SEQ ID NO: 131011 - DNA, 25 bp, Artificial
  Probe
atccaaggaagcaacaatgtatctt

SEQ ID NO: 131012 - DNA, 25 bp, Artificial
  Probe
gaagaaggagtgtgatgaagttgac

SEQ ID NO: 131013 - DNA, 25 bp, Artificial
  Probe
agaagaaggagtgtgatgaagttga

SEQ ID NO: 131014 - DNA, 25 bp, Artificial
  Probe
aggaagcaacaatgtatcttagaag

SEQ ID NO: 131015 - DNA, 25 bp, Artificial
  Probe
catccaaggaagcaacaatgtatct

SEQ ID NO: 131016 - DNA, 25 bp, Artificial
  Probe
aaggaagcaacaatgtatcttagaa

SEQ ID NO: 131017 - DNA, 25 bp, Artificial
  Probe
ggaagcaacaatgtatcttagaaga

SEQ ID NO: 131018 - DNA, 25 bp, Artificial
  Probe
tcaagaagaaggagtgtgatgaagt

SEQ ID NO: 131019 - DNA, 25 bp, Artificial
  Probe
gcaacaatgtatcttagaagagtct

SEQ ID NO: 131020 - DNA, 25 bp, Artificial
  Probe
agcaacaatgtatcttagaagagtc

SEQ ID NO: 131021 - DNA, 25 bp, Artificial
  Probe
gtgtgatgaagttgaccactatgta

SEQ ID NO: 131022 - DNA, 25 bp, Artificial
  Probe
agaagagtctagtgtaatcacaagg

SEQ ID NO: 131023 - DNA, 25 bp, Artificial
  Probe
aagcaacaatgtatcttagaagagt

SEQ ID NO: 131024 - DNA, 25 bp, Artificial
  Probe
gaagagtctagtgtaatcacaaggc

SEQ ID NO: 131025 - DNA, 25 bp, Artificial
  Probe
tgtgatgaagttgaccactatgtac

SEQ ID NO: 131026 - DNA, 25 bp, Artificial
  Probe
aagaaggagtgtgatgaagttgacc

SEQ ID NO: 131027 - DNA, 25 bp, Artificial
  Probe
aagagtctagtgtaatcacaaggca

SEQ ID NO: 131028 - DNA, 25 bp, Artificial
  Probe
gaagcaacaatgtatcttagaagag

SEQ ID NO: 131029 - DNA, 25 bp, Artificial
  Probe
ctagtgtaatcacaaggcacaagtc

SEQ ID NO: 131030 - DNA, 25 bp, Artificial
  Probe
gtctagtgtaatcacaaggcacaag

SEQ ID NO: 131031 - DNA, 25 bp, Artificial
  Probe
tagtgtaatcacaaggcacaagtct

SEQ ID NO: 131032 - DNA, 25 bp, Artificial
  Probe
tctagtgtaatcacaaggcacaagt

SEQ ID NO: 131033 - DNA, 25 bp, Artificial
  Probe
agtctagtgtaatcacaaggcacaa

SEQ ID NO: 131034 - DNA, 25 bp, Artificial
  Probe
gcatccaaggaagcaacaatgtatc

SEQ ID NO: 131035 - DNA, 25 bp, Artificial
  Probe
agagtctagtgtaatcacaaggcac

SEQ ID NO: 131036 - DNA, 25 bp, Artificial
  Probe
gaggtaaactgaagtgctttgtgta

SEQ ID NO: 131037 - DNA, 25 bp, Artificial
  Probe
gagtctagtgtaatcacaaggcaca

SEQ ID NO: 131038 - DNA, 25 bp, Artificial
  Probe
aatcaagaagaaggagtgtgatgaa

SEQ ID NO: 131039 - DNA, 25 bp, Artificial
  Probe
atcaagaagaaggagtgtgatgaag

SEQ ID NO: 131040 - DNA, 25 bp, Artificial
  Probe
tgtaatcacaaggcacaagtctctg

SEQ ID NO: 131041 - DNA, 25 bp, Artificial
  Probe
actgaagtgctttgtgtaccaatat

SEQ ID NO: 131042 - DNA, 25 bp, Artificial
  Probe
tgggaaggagttagatggtacttta

SEQ ID NO: 131043 - DNA, 25 bp, Artificial
  Probe
agaaggagtgtgatgaagttgacca

SEQ ID NO: 131044 - DNA, 25 bp, Artificial
  Probe
aactgaagtgctttgtgtaccaata

SEQ ID NO: 131045 - DNA, 25 bp, Artificial
  Probe
aggtaaactgaagtgctttgtgtac

SEQ ID NO: 131046 - DNA, 25 bp, Artificial
  Probe
gggaaggagttagatggtactttaa

SEQ ID NO: 131047 - DNA, 25 bp, Artificial
  Probe
taaactgaagtgctttgtgtaccaa

SEQ ID NO: 131048 - DNA, 25 bp, Artificial
  Probe
gtaaactgaagtgctttgtgtacca

SEQ ID NO: 131049 - DNA, 25 bp, Artificial
  Probe
ttgggaaggagttagatggtacttt

SEQ ID NO: 131050 - DNA, 25 bp, Artificial
  Probe
tttgggaaggagttagatggtactt

SEQ ID NO: 131051 - DNA, 25 bp, Artificial
  Probe
ctgtctgaagtgtattgtatgaggt

SEQ ID NO: 131052 - DNA, 25 bp, Artificial
  Probe
tgtctgaagtgtattgtatgaggta

SEQ ID NO: 131053 - DNA, 25 bp, Artificial
  Probe
gctgtctgaagtgtattgtatgagg

SEQ ID NO: 131054 - DNA, 25 bp, Artificial
  Probe
ggctgtctgaagtgtattgtatgag

SEQ ID NO: 131055 - DNA, 25 bp, Artificial
  Probe
gaggctgtctgaagtgtattgtatg

SEQ ID NO: 131056 - DNA, 25 bp, Artificial
  Probe
ttgtatgaggtatcaagaacgagtc

SEQ ID NO: 131057 - DNA, 25 bp, Artificial
  Probe
aggctgtctgaagtgtattgtatga

SEQ ID NO: 131058 - DNA, 25 bp, Artificial
  Probe
tgaggctgtctgaagtgtattgtat

SEQ ID NO: 131059 - DNA, 25 bp, Artificial
  Probe
attgtatgaggtatcaagaacgagt

SEQ ID NO: 131060 - DNA, 25 bp, Artificial
  Probe
ttgaggctgtctgaagtgtattgta

SEQ ID NO: 131061 - DNA, 25 bp, Artificial
  Probe
aatgagaatgtcacttgcgtatgta

SEQ ID NO: 131062 - DNA, 25 bp, Artificial
  Probe
tgtatgaggtatcaagaacgagtca

SEQ ID NO: 131063 - DNA, 25 bp, Artificial
  Probe
gtctgaagtgtattgtatgaggtat

SEQ ID NO: 131064 - DNA, 25 bp, Artificial
  Probe
tgtattgtatgaggtatcaagaacg

SEQ ID NO: 131065 - DNA, 25 bp, Artificial
  Probe
gtattgtatgaggtatcaagaacga

SEQ ID NO: 131066 - DNA, 25 bp, Artificial
  Probe
tcaatgagaatgtcacttgcgtatg

SEQ ID NO: 131067 - DNA, 25 bp, Artificial
  Probe
tctgaagtgtattgtatgaggtatc

SEQ ID NO: 131068 - DNA, 25 bp, Artificial
  Probe
atgagaatgtcacttgcgtatgtac

SEQ ID NO: 131069 - DNA, 25 bp, Artificial
  Probe
caatgagaatgtcacttgcgtatgt

SEQ ID NO: 131070 - DNA, 25 bp, Artificial
  Probe
tattgtatgaggtatcaagaacgag

SEQ ID NO: 131071 - DNA, 25 bp, Artificial
  Probe
ctgaagtgtattgtatgaggtatca

SEQ ID NO: 131072 - DNA, 25 bp, Artificial
  Probe
tgaggtatcaagaacgagtcattgg

SEQ ID NO: 131073 - DNA, 25 bp, Artificial
  Probe
ctcaatgagaatgtcacttgcgtat

SEQ ID NO: 131074 - DNA, 25 bp, Artificial
  Probe
atcctttctcattcatagtgtgtca

SEQ ID NO: 131075 - DNA, 25 bp, Artificial
  Probe
ctctcagtctaaacatcctttctca

SEQ ID NO: 131076 - DNA, 25 bp, Artificial
  Probe
catcctttctcattcatagtgtgtc

SEQ ID NO: 131077 - DNA, 25 bp, Artificial
  Probe
gaccctctcattattattcctccat

SEQ ID NO: 131078 - DNA, 25 bp, Artificial
  Probe
tgatgacttaaactacactgaggag

SEQ ID NO: 131079 - DNA, 25 bp, Artificial
  Probe
tgaagtgtattgtatgaggtatcaa

SEQ ID NO: 131080 - DNA, 25 bp, Artificial
  Probe
gttgaggctgtctgaagtgtattgt

SEQ ID NO: 131081 - DNA, 25 bp, Artificial
  Probe
tctcagtctaaacatcctttctcat

SEQ ID NO: 131082 - DNA, 25 bp, Artificial
  Probe
gctctcagtctaaacatcctttctc

SEQ ID NO: 131083 - DNA, 25 bp, Artificial
  Probe
gatgacttaaactacactgaggagc

SEQ ID NO: 131084 - DNA, 25 bp, Artificial
  Probe
cagtctaaacatcctttctcattca

SEQ ID NO: 131085 - DNA, 25 bp, Artificial
  Probe
gtgtattgtatgaggtatcaagaac

SEQ ID NO: 131086 - DNA, 25 bp, Artificial
  Probe
tcagtctaaacatcctttctcattc

SEQ ID NO: 131087 - DNA, 25 bp, Artificial
  Probe
agtgtattgtatgaggtatcaagaa

SEQ ID NO: 131088 - DNA, 25 bp, Artificial
  Probe
aagtgtattgtatgaggtatcaaga

SEQ ID NO: 131089 - DNA, 25 bp, Artificial
  Probe
ctcagtctaaacatcctttctcatt

SEQ ID NO: 131090 - DNA, 25 bp, Artificial
  Probe
gaagtgtattgtatgaggtatcaag

SEQ ID NO: 131091 - DNA, 25 bp, Artificial
  Probe
caaattaagactgcccactcaatga

SEQ ID NO: 131092 - DNA, 25 bp, Artificial
  Probe
accctctcattattattcctccata

SEQ ID NO: 131093 - DNA, 25 bp, Artificial
  Probe
ctctgattgctgaggttcctgttag

SEQ ID NO: 131094 - DNA, 25 bp, Artificial
  Probe
gtatgaggtatcaagaacgagtcat

SEQ ID NO: 131095 - DNA, 25 bp, Artificial
  Probe
acatcctttctcattcatagtgtgt

SEQ ID NO: 131096 - DNA, 25 bp, Artificial
  Probe
ataccttcactagcctgtaattgtc

SEQ ID NO: 131097 - DNA, 25 bp, Artificial
  Probe
gataccttcactagcctgtaattgt

SEQ ID NO: 131098 - DNA, 25 bp, Artificial
  Probe
ttcactagcctgtaattgtcttgtt

SEQ ID NO: 131099 - DNA, 25 bp, Artificial
  Probe
agataccttcactagcctgtaattg

SEQ ID NO: 131100 - DNA, 25 bp, Artificial
  Probe
cttcactagcctgtaattgtcttgt

SEQ ID NO: 131101 - DNA, 25 bp, Artificial
  Probe
taccttcactagcctgtaattgtct

SEQ ID NO: 131102 - DNA, 25 bp, Artificial
  Probe
ccttcactagcctgtaattgtcttg

SEQ ID NO: 131103 - DNA, 25 bp, Artificial
  Probe
accttcactagcctgtaattgtctt

SEQ ID NO: 131104 - DNA, 25 bp, Artificial
  Probe
aatgtaatcagaccttccacactag

SEQ ID NO: 131105 - DNA, 25 bp, Artificial
  Probe
cagataccttcactagcctgtaatt

SEQ ID NO: 131106 - DNA, 25 bp, Artificial
  Probe
aataacagataccttcactagcctg

SEQ ID NO: 131107 - DNA, 25 bp, Artificial
  Probe
cttccacactaggtgattatcctta

SEQ ID NO: 131108 - DNA, 25 bp, Artificial
  Probe
caatattaccttccgcacagagatc

SEQ ID NO: 131109 - DNA, 25 bp, Artificial
  Probe
cagtatcatggaccactctatatct

SEQ ID NO: 131110 - DNA, 25 bp, Artificial
  Probe
ccacactaggtgattatccttattg

SEQ ID NO: 131111 - DNA, 25 bp, Artificial
  Probe
tccacactaggtgattatccttatt

SEQ ID NO: 131112 - DNA, 25 bp, Artificial
  Probe
ttccacactaggtgattatccttat

SEQ ID NO: 131113 - DNA, 25 bp, Artificial
  Probe
agtatcatggaccactctatatctc

SEQ ID NO: 131114 - DNA, 25 bp, Artificial
  Probe
tgatacctactatacaaccatgcac

SEQ ID NO: 131115 - DNA, 25 bp, Artificial
  Probe
gatacctactatacaaccatgcact

SEQ ID NO: 131116 - DNA, 25 bp, Artificial
  Probe
acgcaaataacagataccttcacta

SEQ ID NO: 131117 - DNA, 25 bp, Artificial
  Probe
tacgcaaataacagataccttcact

SEQ ID NO: 131118 - DNA, 25 bp, Artificial
  Probe
ccttccacactaggtgattatcctt

SEQ ID NO: 131119 - DNA, 25 bp, Artificial
  Probe
atgtaatcagaccttccacactagg

SEQ ID NO: 131120 - DNA, 25 bp, Artificial
  Probe
attgatacctactatacaaccatgc

SEQ ID NO: 131121 - DNA, 25 bp, Artificial
  Probe
atacctactatacaaccatgcactt

SEQ ID NO: 131122 - DNA, 25 bp, Artificial
  Probe
atcatggaccactctatatctcctt

SEQ ID NO: 131123 - DNA, 25 bp, Artificial
  Probe
ttacgcaaataacagataccttcac

SEQ ID NO: 131124 - DNA, 25 bp, Artificial
  Probe
cacttacgcaaataacagatacctt

SEQ ID NO: 131125 - DNA, 25 bp, Artificial
  Probe
cttacgcaaataacagataccttca

SEQ ID NO: 131126 - DNA, 25 bp, Artificial
  Probe
acttacgcaaataacagataccttc

SEQ ID NO: 131127 - DNA, 25 bp, Artificial
  Probe
tatcatggaccactctatatctcct

SEQ ID NO: 131128 - DNA, 25 bp, Artificial
  Probe
gtatcatggaccactctatatctcc

SEQ ID NO: 131129 - DNA, 25 bp, Artificial
  Probe
agactggaagaactactttactgtg

SEQ ID NO: 131130 - DNA, 25 bp, Artificial
  Probe
gagactggaagaactactttactgt

SEQ ID NO: 131131 - DNA, 25 bp, Artificial
  Probe
ggagactggaagaactactttactg

SEQ ID NO: 131132 - DNA, 25 bp, Artificial
  Probe
ctggagactggaagaactactttac

SEQ ID NO: 131133 - DNA, 25 bp, Artificial
  Probe
ccagtatcatggaccactctatatc

SEQ ID NO: 131134 - DNA, 25 bp, Artificial
  Probe
tggagactggaagaactactttact

SEQ ID NO: 131135 - DNA, 25 bp, Artificial
  Probe
tgtcttcatctgttctctttaacga

SEQ ID NO: 131136 - DNA, 25 bp, Artificial
  Probe
gactggaagaactactttactgtgg

SEQ ID NO: 131137 - DNA, 25 bp, Artificial
  Probe
ctagcctgtaattgtcttgtttcac

SEQ ID NO: 131138 - DNA, 25 bp, Artificial
  Probe
cactagcctgtaattgtcttgtttc

SEQ ID NO: 131139 - DNA, 25 bp, Artificial
  Probe
gcaaataacagataccttcactagc

SEQ ID NO: 131140 - DNA, 25 bp, Artificial
  Probe
ttgatacctactatacaaccatgca

SEQ ID NO: 131141 - DNA, 25 bp, Artificial
  Probe
ataagcaggacttcaagaacaagag

SEQ ID NO: 131142 - DNA, 25 bp, Artificial
  Probe
gataagcaggacttcaagaacaaga

SEQ ID NO: 131143 - DNA, 25 bp, Artificial
  Probe
tgataagcaggacttcaagaacaag

SEQ ID NO: 131144 - DNA, 25 bp, Artificial
  Probe
ggaattggtaagcatcatgtatctg

SEQ ID NO: 131145 - DNA, 25 bp, Artificial
  Probe
cacatcacagattgtaacactcaac

SEQ ID NO: 131146 - DNA, 25 bp, Artificial
  Probe
atcacagattgtaacactcaaccaa

SEQ ID NO: 131147 - DNA, 25 bp, Artificial
  Probe
acacatcacagattgtaacactcaa

SEQ ID NO: 131148 - DNA, 25 bp, Artificial
  Probe
agacacatcacagattgtaacactc

SEQ ID NO: 131149 - DNA, 25 bp, Artificial
  Probe
gacacatcacagattgtaacactca

SEQ ID NO: 131150 - DNA, 25 bp, Artificial
  Probe
cagacacatcacagattgtaacact

SEQ ID NO: 131151 - DNA, 25 bp, Artificial
  Probe
catcacagattgtaacactcaacca

SEQ ID NO: 131152 - DNA, 25 bp, Artificial
  Probe
acatcacagattgtaacactcaacc

SEQ ID NO: 131153 - DNA, 25 bp, Artificial
  Probe
taagcaggacttcaagaacaagagt

SEQ ID NO: 131154 - DNA, 25 bp, Artificial
  Probe
aattggtaagcatcatgtatctgac

SEQ ID NO: 131155 - DNA, 25 bp, Artificial
  Probe
tggtaagcatcatgtatctgacaat

SEQ ID NO: 131156 - DNA, 25 bp, Artificial
  Probe
ttggtaagcatcatgtatctgacaa

SEQ ID NO: 131157 - DNA, 25 bp, Artificial
  Probe
attggtaagcatcatgtatctgaca

SEQ ID NO: 131158 - DNA, 25 bp, Artificial
  Probe
gaattggtaagcatcatgtatctga

SEQ ID NO: 131159 - DNA, 25 bp, Artificial
  Probe
gtccagacacatcacagattgtaac

SEQ ID NO: 131160 - DNA, 25 bp, Artificial
  Probe
ttagaagaactacagatgcggctaa

SEQ ID NO: 131161 - DNA, 25 bp, Artificial
  Probe
ccagacacatcacagattgtaacac

SEQ ID NO: 131162 - DNA, 25 bp, Artificial
  Probe
tccagacacatcacagattgtaaca

SEQ ID NO: 131163 - DNA, 25 bp, Artificial
  Probe
tgatggaacgagaaatagaagaact

SEQ ID NO: 131164 - DNA, 25 bp, Artificial
  Probe
gggtgtattcctttatctccagtaa

SEQ ID NO: 131165 - DNA, 25 bp, Artificial
  Probe
gctatgggtgtattcctttatctcc

SEQ ID NO: 131166 - DNA, 25 bp, Artificial
  Probe
gatggaacgagaaatagaagaactg

SEQ ID NO: 131167 - DNA, 25 bp, Artificial
  Probe
ggtaagcatcatgtatctgacaata

SEQ ID NO: 131168 - DNA, 25 bp, Artificial
  Probe
atggaacgagaaatagaagaactgc

SEQ ID NO: 131169 - DNA, 25 bp, Artificial
  Probe
atgatggaacgagaaatagaagaac

SEQ ID NO: 131170 - DNA, 25 bp, Artificial
  Probe
ctgtggagaagcctatttattgacc

SEQ ID NO: 131171 - DNA, 25 bp, Artificial
  Probe
cctgtggagaagcctatttattgac

SEQ ID NO: 131172 - DNA, 25 bp, Artificial
  Probe
ggactactttgataagcaggacttc

SEQ ID NO: 131173 - DNA, 25 bp, Artificial
  Probe
attagcatttgtgtaattgacctgg

SEQ ID NO: 131174 - DNA, 25 bp, Artificial
  Probe
ctgagaagcaattagcatttgtgta

SEQ ID NO: 131175 - DNA, 25 bp, Artificial
  Probe
ttattggtctgtagtaacttcaagt

SEQ ID NO: 131176 - DNA, 25 bp, Artificial
  Probe
tagaagaactacagatgcggctaaa

SEQ ID NO: 131177 - DNA, 25 bp, Artificial
  Probe
tttagaagaactacagatgcggcta

SEQ ID NO: 131178 - DNA, 25 bp, Artificial
  Probe
tgagaagcaattagcatttgtgtaa

SEQ ID NO: 131179 - DNA, 25 bp, Artificial
  Probe
gactactttgataagcaggacttca

SEQ ID NO: 131180 - DNA, 25 bp, Artificial
  Probe
atggactactttgataagcaggact

SEQ ID NO: 131181 - DNA, 25 bp, Artificial
  Probe
ttaaacggatgagaacaatacacat

SEQ ID NO: 131182 - DNA, 25 bp, Artificial
  Probe
cctttctgagaagcaattagcattt

SEQ ID NO: 131183 - DNA, 25 bp, Artificial
  Probe
aatgtttcctttattggtctgtagt

SEQ ID NO: 131184 - DNA, 25 bp, Artificial
  Probe
cagattgtaacactcaaccaaattg

SEQ ID NO: 131185 - DNA, 25 bp, Artificial
  Probe
tggactactttgataagcaggactt

SEQ ID NO: 131186 - DNA, 25 bp, Artificial
  Probe
gccataattgataagactctgaagc

SEQ ID NO: 131187 - DNA, 25 bp, Artificial
  Probe
tgtggagagagttcatcaagagatt

SEQ ID NO: 131188 - DNA, 25 bp, Artificial
  Probe
tgccataattgataagactctgaag

SEQ ID NO: 131189 - DNA, 25 bp, Artificial
  Probe
tcctgagaatacaagataccattga

SEQ ID NO: 131190 - DNA, 25 bp, Artificial
  Probe
ctcggttcctgagaatacaagatac

SEQ ID NO: 131191 - DNA, 25 bp, Artificial
  Probe
cctgagaatacaagataccattgag

SEQ ID NO: 131192 - DNA, 25 bp, Artificial
  Probe
gtgtggagagagttcatcaagagat

SEQ ID NO: 131193 - DNA, 25 bp, Artificial
  Probe
gttcctgagaatacaagataccatt

SEQ ID NO: 131194 - DNA, 25 bp, Artificial
  Probe
atacaagataccattgagatcaccg

SEQ ID NO: 131195 - DNA, 25 bp, Artificial
  Probe
atgccataattgataagactctgaa

SEQ ID NO: 131196 - DNA, 25 bp, Artificial
  Probe
aatgccataattgataagactctga

SEQ ID NO: 131197 - DNA, 25 bp, Artificial
  Probe
ttcctgagaatacaagataccattg

SEQ ID NO: 131198 - DNA, 25 bp, Artificial
  Probe
cctcggttcctgagaatacaagata

SEQ ID NO: 131199 - DNA, 25 bp, Artificial
  Probe
atgtgtggagagagttcatcaagag

SEQ ID NO: 131200 - DNA, 25 bp, Artificial
  Probe
ttatgagttctacgcttccactgaa

SEQ ID NO: 131201 - DNA, 25 bp, Artificial
  Probe
ctgagaatacaagataccattgaga

SEQ ID NO: 131202 - DNA, 25 bp, Artificial
  Probe
aatacaagataccattgagatcacc

SEQ ID NO: 131203 - DNA, 25 bp, Artificial
  Probe
gataagactctgaagctctgaatgt

SEQ ID NO: 131204 - DNA, 25 bp, Artificial
  Probe
tgataagactctgaagctctgaatg

SEQ ID NO: 131205 - DNA, 25 bp, Artificial
  Probe
ggttcctgagaatacaagataccat

SEQ ID NO: 131206 - DNA, 25 bp, Artificial
  Probe
ataagactctgaagctctgaatgtt

SEQ ID NO: 131207 - DNA, 25 bp, Artificial
  Probe
taagactctgaagctctgaatgttg

SEQ ID NO: 131208 - DNA, 25 bp, Artificial
  Probe
ttgataagactctgaagctctgaat

SEQ ID NO: 131209 - DNA, 25 bp, Artificial
  Probe
attgataagactctgaagctctgaa

SEQ ID NO: 131210 - DNA, 25 bp, Artificial
  Probe
aattgataagactctgaagctctga

SEQ ID NO: 131211 - DNA, 25 bp, Artificial
  Probe
ttgttgaagaagtgaatgtttacgg

SEQ ID NO: 131212 - DNA, 25 bp, Artificial
  Probe
tgtgtggagagagttcatcaagaga

SEQ ID NO: 131213 - DNA, 25 bp, Artificial
  Probe
gtggagagagttcatcaagagattt

SEQ ID NO: 131214 - DNA, 25 bp, Artificial
  Probe
ccataattgataagactctgaagct

SEQ ID NO: 131215 - DNA, 25 bp, Artificial
  Probe
gttgaagaagtgaatgtttacggtg

SEQ ID NO: 131216 - DNA, 25 bp, Artificial
  Probe
gaaggcaacattggatttatgaact

SEQ ID NO: 131217 - DNA, 25 bp, Artificial
  Probe
ctgaaggcaacattggatttatgaa

SEQ ID NO: 131218 - DNA, 25 bp, Artificial
  Probe
tgaaggcaacattggatttatgaac

SEQ ID NO: 131219 - DNA, 25 bp, Artificial
  Probe
tgagaatacaagataccattgagat

SEQ ID NO: 131220 - DNA, 25 bp, Artificial
  Probe
ttgaagaagtgaatgtttacggtgt

SEQ ID NO: 131221 - DNA, 25 bp, Artificial
  Probe
tgttgaagaagtgaatgtttacggt

SEQ ID NO: 131222 - DNA, 25 bp, Artificial
  Probe
tttgttgaagaagtgaatgtttacg

SEQ ID NO: 131223 - DNA, 25 bp, Artificial
  Probe
acatttatgagttctacgcttccac

SEQ ID NO: 131224 - DNA, 25 bp, Artificial
  Probe
cacatttatgagttctacgcttcca

SEQ ID NO: 131225 - DNA, 25 bp, Artificial
  Probe
tcggttcctgagaatacaagatacc

SEQ ID NO: 131226 - DNA, 25 bp, Artificial
  Probe
actgaaggcaacattggatttatga

SEQ ID NO: 131227 - DNA, 25 bp, Artificial
  Probe
cactgaaggcaacattggatttatg

SEQ ID NO: 131228 - DNA, 25 bp, Artificial
  Probe
tggagagagttcatcaagagatttg

SEQ ID NO: 131229 - DNA, 25 bp, Artificial
  Probe
cggttcctgagaatacaagatacca

SEQ ID NO: 131230 - DNA, 25 bp, Artificial
  Probe
aaggcaacattggatttatgaacta

SEQ ID NO: 131231 - DNA, 25 bp, Artificial
  Probe
taacctgttgacggctctctatgta

SEQ ID NO: 131232 - DNA, 25 bp, Artificial
  Probe
tgttgacggctctctatgtaaataa

SEQ ID NO: 131233 - DNA, 25 bp, Artificial
  Probe
ctgttgacggctctctatgtaaata

SEQ ID NO: 131234 - DNA, 25 bp, Artificial
  Probe
cggctctctatgtaaataaatcgtg

SEQ ID NO: 131235 - DNA, 25 bp, Artificial
  Probe
gacggctctctatgtaaataaatcg

SEQ ID NO: 131236 - DNA, 25 bp, Artificial
  Probe
aaagtagatggtgggaattgttaca

SEQ ID NO: 131237 - DNA, 25 bp, Artificial
  Probe
gttgacggctctctatgtaaataaa

SEQ ID NO: 131238 - DNA, 25 bp, Artificial
  Probe
ggctctctatgtaaataaatcgtga

SEQ ID NO: 131239 - DNA, 25 bp, Artificial
  Probe
tgacggctctctatgtaaataaatc

SEQ ID NO: 131240 - DNA, 25 bp, Artificial
  Probe
aagtaacctgttgacggctctctat

SEQ ID NO: 131241 - DNA, 25 bp, Artificial
  Probe
tctcgttgatttaaggtattcacac

SEQ ID NO: 131242 - DNA, 25 bp, Artificial
  Probe
actgtactctcgttgatttaaggta

SEQ ID NO: 131243 - DNA, 25 bp, Artificial
  Probe
ctctcgttgatttaaggtattcaca

SEQ ID NO: 131244 - DNA, 25 bp, Artificial
  Probe
actctcgttgatttaaggtattcac

SEQ ID NO: 131245 - DNA, 25 bp, Artificial
  Probe
aactgtactctcgttgatttaaggt

SEQ ID NO: 131246 - DNA, 25 bp, Artificial
  Probe
agatgaactgtactctcgttgattt

SEQ ID NO: 131247 - DNA, 25 bp, Artificial
  Probe
ttgacggctctctatgtaaataaat

SEQ ID NO: 131248 - DNA, 25 bp, Artificial
  Probe
gaactgtactctcgttgatttaagg

SEQ ID NO: 131249 - DNA, 25 bp, Artificial
  Probe
tctcaaataaagtcaagagcacatt

SEQ ID NO: 131250 - DNA, 25 bp, Artificial
  Probe
gtcgtttgttgctatttattagtga

SEQ ID NO: 131251 - DNA, 25 bp, Artificial
  Probe
agtcgtttgttgctatttattagtg

SEQ ID NO: 131252 - DNA, 25 bp, Artificial
  Probe
cagtcgtttgttgctatttattagt

SEQ ID NO: 131253 - DNA, 25 bp, Artificial
  Probe
aacctgttgacggctctctatgtaa

SEQ ID NO: 131254 - DNA, 25 bp, Artificial
  Probe
ctttgcgagaaccatgaaatgtaat

SEQ ID NO: 131255 - DNA, 25 bp, Artificial
  Probe
tttgcgagaaccatgaaatgtaatg

SEQ ID NO: 131256 - DNA, 25 bp, Artificial
  Probe
atctcaaataaagtcaagagcacat

SEQ ID NO: 131257 - DNA, 25 bp, Artificial
  Probe
aagtagatggtgggaattgttacaa

SEQ ID NO: 131258 - DNA, 25 bp, Artificial
  Probe
agtagatggtgggaattgttacaag

SEQ ID NO: 131259 - DNA, 25 bp, Artificial
  Probe
tgaactgtactctcgttgatttaag

SEQ ID NO: 131260 - DNA, 25 bp, Artificial
  Probe
gatctcaaataaagtcaagagcaca

SEQ ID NO: 131261 - DNA, 25 bp, Artificial
  Probe
cgttccatttaattgctgtaattga

SEQ ID NO: 131262 - DNA, 25 bp, Artificial
  Probe
gatgaactgtactctcgttgattta

SEQ ID NO: 131263 - DNA, 25 bp, Artificial
  Probe
cctgttgacggctctctatgtaaat

SEQ ID NO: 131264 - DNA, 25 bp, Artificial
  Probe
ctgtactctcgttgatttaaggtat

SEQ ID NO: 131265 - DNA, 25 bp, Artificial
  Probe
ctcaaataaagtcaagagcacattt

SEQ ID NO: 131266 - DNA, 25 bp, Artificial
  Probe
atgaactgtactctcgttgatttaa

SEQ ID NO: 131267 - DNA, 25 bp, Artificial
  Probe
cacagtcgtttgttgctatttatta

SEQ ID NO: 131268 - DNA, 25 bp, Artificial
  Probe
gatttaaggtattcacaccacttgg

SEQ ID NO: 131269 - DNA, 25 bp, Artificial
  Probe
ctcgttgatttaaggtattcacacc

SEQ ID NO: 131270 - DNA, 25 bp, Artificial
  Probe
agtaacctgttgacggctctctatg

SEQ ID NO: 131271 - DNA, 25 bp, Artificial
  Probe
cgttgatttaaggtattcacaccac

SEQ ID NO: 131272 - DNA, 25 bp, Artificial
  Probe
tcgttgatttaaggtattcacacca

SEQ ID NO: 131273 - DNA, 25 bp, Artificial
  Probe
tgatttaaggtattcacaccacttg

SEQ ID NO: 131274 - DNA, 25 bp, Artificial
  Probe
gttgatttaaggtattcacaccact

SEQ ID NO: 131275 - DNA, 25 bp, Artificial
  Probe
tgtactctcgttgatttaaggtatt

SEQ ID NO: 131276 - DNA, 25 bp, Artificial
  Probe
ctacttcatcacattcatgctgctc

SEQ ID NO: 131277 - DNA, 25 bp, Artificial
  Probe
tacttcatcacattcatgctgctct

SEQ ID NO: 131278 - DNA, 25 bp, Artificial
  Probe
ctatctgttgcttcctgctcttcaa

SEQ ID NO: 131279 - DNA, 25 bp, Artificial
  Probe
cttcatcacattcatgctgctcttc

SEQ ID NO: 131280 - DNA, 25 bp, Artificial
  Probe
atgcctacttcatcacattcatgct

SEQ ID NO: 131281 - DNA, 25 bp, Artificial
  Probe
ctctttaaggctttactctgaggac

SEQ ID NO: 131282 - DNA, 25 bp, Artificial
  Probe
tctttaaggctttactctgaggacc

SEQ ID NO: 131283 - DNA, 25 bp, Artificial
  Probe
ctttaaggctttactctgaggacca

SEQ ID NO: 131284 - DNA, 25 bp, Artificial
  Probe
ttcctctttaaggctttactctgag

SEQ ID NO: 131285 - DNA, 25 bp, Artificial
  Probe
cttcctctttaaggctttactctga

SEQ ID NO: 131286 - DNA, 25 bp, Artificial
  Probe
acttcatcacattcatgctgctctt

SEQ ID NO: 131287 - DNA, 25 bp, Artificial
  Probe
tttaaggctttactctgaggaccac

SEQ ID NO: 131288 - DNA, 25 bp, Artificial
  Probe
cctacttcatcacattcatgctgct

SEQ ID NO: 131289 - DNA, 25 bp, Artificial
  Probe
agtcagttcttcaaccctatctgtt

SEQ ID NO: 131290 - DNA, 25 bp, Artificial
  Probe
gagtcagttcttcaaccctatctgt

SEQ ID NO: 131291 - DNA, 25 bp, Artificial
  Probe
tgcctacttcatcacattcatgctg

SEQ ID NO: 131292 - DNA, 25 bp, Artificial
  Probe
gtggagtcagttcttcaaccctatc

SEQ ID NO: 131293 - DNA, 25 bp, Artificial
  Probe
tggagtcagttcttcaaccctatct

SEQ ID NO: 131294 - DNA, 25 bp, Artificial
  Probe
agcctctctctccttcctctttaag

SEQ ID NO: 131295 - DNA, 25 bp, Artificial
  Probe
agtggagtcagttcttcaaccctat

SEQ ID NO: 131296 - DNA, 25 bp, Artificial
  Probe
aggatgcctacttcatcacattcat

SEQ ID NO: 131297 - DNA, 25 bp, Artificial
  Probe
ggagtcagttcttcaaccctatctg

SEQ ID NO: 131298 - DNA, 25 bp, Artificial
  Probe
cctatctgttgcttcctgctcttca

SEQ ID NO: 131299 - DNA, 25 bp, Artificial
  Probe
ggatgcctacttcatcacattcatg

SEQ ID NO: 131300 - DNA, 25 bp, Artificial
  Probe
gagcctctctctccttcctctttaa

SEQ ID NO: 131301 - DNA, 25 bp, Artificial
  Probe
aagtggagtcagttcttcaacccta

SEQ ID NO: 131302 - DNA, 25 bp, Artificial
  Probe
ttcatcacattcatgctgctcttcg

SEQ ID NO: 131303 - DNA, 25 bp, Artificial
  Probe
gatgcctacttcatcacattcatgc

SEQ ID NO: 131304 - DNA, 25 bp, Artificial
  Probe
caggatgcctacttcatcacattca

SEQ ID NO: 131305 - DNA, 25 bp, Artificial
  Probe
ttaaggctttactctgaggaccacc

SEQ ID NO: 131306 - DNA, 25 bp, Artificial
  Probe
tacttcgtgtctctcaccatgtgtc

SEQ ID NO: 131307 - DNA, 25 bp, Artificial
  Probe
ctacttcgtgtctctcaccatgtgt

SEQ ID NO: 131308 - DNA, 25 bp, Artificial
  Probe
gcctacttcatcacattcatgctgc

SEQ ID NO: 131309 - DNA, 25 bp, Artificial
  Probe
tatctgttgcttcctgctcttcaac

SEQ ID NO: 131310 - DNA, 25 bp, Artificial
  Probe
gcaggatgcctacttcatcacattc

SEQ ID NO: 131311 - DNA, 25 bp, Artificial
  Probe
gtcagttcttcaaccctatctgttg

SEQ ID NO: 131312 - DNA, 25 bp, Artificial
  Probe
ctccttcctctttaaggctttactc

SEQ ID NO: 131313 - DNA, 25 bp, Artificial
  Probe
ctctccttcctctttaaggctttac

SEQ ID NO: 131314 - DNA, 25 bp, Artificial
  Probe
tctctccttcctctttaaggcttta

SEQ ID NO: 131315 - DNA, 25 bp, Artificial
  Probe
ccttcctctttaaggctttactctg

SEQ ID NO: 131316 - DNA, 25 bp, Artificial
  Probe
tccttcctctttaaggctttactct

SEQ ID NO: 131317 - DNA, 25 bp, Artificial
  Probe
tctccttcctctttaaggctttact

SEQ ID NO: 131318 - DNA, 25 bp, Artificial
  Probe
gttcttcaaccctatctgttgcttc

SEQ ID NO: 131319 - DNA, 25 bp, Artificial
  Probe
agttcttcaaccctatctgttgctt

SEQ ID NO: 131320 - DNA, 25 bp, Artificial
  Probe
ctctctccttcctctttaaggcttt

SEQ ID NO: 131321 - DNA, 25 bp, Artificial
  Probe
taattccattgcctgtgagttgaag

SEQ ID NO: 131322 - DNA, 25 bp, Artificial
  Probe
gtaattccattgcctgtgagttgaa

SEQ ID NO: 131323 - DNA, 25 bp, Artificial
  Probe
ctgtaattccattgcctgtgagttg

SEQ ID NO: 131324 - DNA, 25 bp, Artificial
  Probe
attccattgcctgtgagttgaagta

SEQ ID NO: 131325 - DNA, 25 bp, Artificial
  Probe
tgtaattccattgcctgtgagttga

SEQ ID NO: 131326 - DNA, 25 bp, Artificial
  Probe
ttccattgcctgtgagttgaagtaa

SEQ ID NO: 131327 - DNA, 25 bp, Artificial
  Probe
gagaccaagagctatatgatgcaat

SEQ ID NO: 131328 - DNA, 25 bp, Artificial
  Probe
ccaagagctatatgatgcaatgact

SEQ ID NO: 131329 - DNA, 25 bp, Artificial
  Probe
agaccaagagctatatgatgcaatg

SEQ ID NO: 131330 - DNA, 25 bp, Artificial
  Probe
gaccaagagctatatgatgcaatga

SEQ ID NO: 131331 - DNA, 25 bp, Artificial
  Probe
accaagagctatatgatgcaatgac

SEQ ID NO: 131332 - DNA, 25 bp, Artificial
  Probe
atatgatgcaatgactcacagtgta

SEQ ID NO: 131333 - DNA, 25 bp, Artificial
  Probe
tatatgatgcaatgactcacagtgt

SEQ ID NO: 131334 - DNA, 25 bp, Artificial
  Probe
ctatatgatgcaatgactcacagtg

SEQ ID NO: 131335 - DNA, 25 bp, Artificial
  Probe
aagagctatatgatgcaatgactca

SEQ ID NO: 131336 - DNA, 25 bp, Artificial
  Probe
caagagctatatgatgcaatgactc

SEQ ID NO: 131337 - DNA, 25 bp, Artificial
  Probe
agctatatgatgcaatgactcacag

SEQ ID NO: 131338 - DNA, 25 bp, Artificial
  Probe
agagctatatgatgcaatgactcac

SEQ ID NO: 131339 - DNA, 25 bp, Artificial
  Probe
tatgatgcaatgactcacagtgtac

SEQ ID NO: 131340 - DNA, 25 bp, Artificial
  Probe
gctatatgatgcaatgactcacagt

SEQ ID NO: 131341 - DNA, 25 bp, Artificial
  Probe
gagctatatgatgcaatgactcaca

SEQ ID NO: 131342 - DNA, 25 bp, Artificial
  Probe
aattccattgcctgtgagttgaagt

SEQ ID NO: 131343 - DNA, 25 bp, Artificial
  Probe
ttctggagaccaagagctatatgat

SEQ ID NO: 131344 - DNA, 25 bp, Artificial
  Probe
ggagaccaagagctatatgatgcaa

SEQ ID NO: 131345 - DNA, 25 bp, Artificial
  Probe
cttctggagaccaagagctatatga

SEQ ID NO: 131346 - DNA, 25 bp, Artificial
  Probe
tctggagaccaagagctatatgatg

SEQ ID NO: 131347 - DNA, 25 bp, Artificial
  Probe
caatcctttataccctgctgctaca

SEQ ID NO: 131348 - DNA, 25 bp, Artificial
  Probe
ttcttctggagaccaagagctatat

SEQ ID NO: 131349 - DNA, 25 bp, Artificial
  Probe
gctgtaattccattgcctgtgagtt

SEQ ID NO: 131350 - DNA, 25 bp, Artificial
  Probe
tccattgcctgtgagttgaagtaaa

SEQ ID NO: 131351 - DNA, 25 bp, Artificial
  Probe
tcttctggagaccaagagctatatg

SEQ ID NO: 131352 - DNA, 25 bp, Artificial
  Probe
gttcttctggagaccaagagctata

SEQ ID NO: 131353 - DNA, 25 bp, Artificial
  Probe
aatcctttataccctgctgctacag

SEQ ID NO: 131354 - DNA, 25 bp, Artificial
  Probe
ctggagaccaagagctatatgatgc

SEQ ID NO: 131355 - DNA, 25 bp, Artificial
  Probe
ccattgcctgtgagttgaagtaaaa

SEQ ID NO: 131356 - DNA, 25 bp, Artificial
  Probe
tggagaccaagagctatatgatgca

SEQ ID NO: 131357 - DNA, 25 bp, Artificial
  Probe
atgatgcaatgactcacagtgtaca

SEQ ID NO: 131358 - DNA, 25 bp, Artificial
  Probe
tgatgcaatgactcacagtgtacaa

SEQ ID NO: 131359 - DNA, 25 bp, Artificial
  Probe
agctgtaattccattgcctgtgagt

SEQ ID NO: 131360 - DNA, 25 bp, Artificial
  Probe
actcacagtgtacaaaccatgttag

SEQ ID NO: 131361 - DNA, 25 bp, Artificial
  Probe
gactcacagtgtacaaaccatgtta

SEQ ID NO: 131362 - DNA, 25 bp, Artificial
  Probe
aatgactcacagtgtacaaaccatg

SEQ ID NO: 131363 - DNA, 25 bp, Artificial
  Probe
caatgactcacagtgtacaaaccat

SEQ ID NO: 131364 - DNA, 25 bp, Artificial
  Probe
ctcacagtgtacaaaccatgttagg

SEQ ID NO: 131365 - DNA, 25 bp, Artificial
  Probe
gatgcaatgactcacagtgtacaaa

SEQ ID NO: 131366 - DNA, 25 bp, Artificial
  Probe
tattattcagatgctgtatttcggc

SEQ ID NO: 131367 - DNA, 25 bp, Artificial
  Probe
ttattattcagatgctgtatttcgg

SEQ ID NO: 131368 - DNA, 25 bp, Artificial
  Probe
cattcaagttgcaaggacattcata

SEQ ID NO: 131369 - DNA, 25 bp, Artificial
  Probe
attattcagatgctgtatttcggca

SEQ ID NO: 131370 - DNA, 25 bp, Artificial
  Probe
aagttcacagctctcctttcagaag

SEQ ID NO: 131371 - DNA, 25 bp, Artificial
  Probe
gaagttcacagctctcctttcagaa

SEQ ID NO: 131372 - DNA, 25 bp, Artificial
  Probe
cactgactctacacctgtgacttcc

SEQ ID NO: 131373 - DNA, 25 bp, Artificial
  Probe
ccactgactctacacctgtgacttc

SEQ ID NO: 131374 - DNA, 25 bp, Artificial
  Probe
ttgaccttccttagagccactgact

SEQ ID NO: 131375 - DNA, 25 bp, Artificial
  Probe
acattcaagttgcaaggacattcat

SEQ ID NO: 131376 - DNA, 25 bp, Artificial
  Probe
gttcacagctctcctttcagaagac

SEQ ID NO: 131377 - DNA, 25 bp, Artificial
  Probe
ctgtatttcggcatcagttggagac

SEQ ID NO: 131378 - DNA, 25 bp, Artificial
  Probe
agttcacagctctcctttcagaaga

SEQ ID NO: 131379 - DNA, 25 bp, Artificial
  Probe
cttattattcagatgctgtatttcg

SEQ ID NO: 131380 - DNA, 25 bp, Artificial
  Probe
tgtatttcggcatcagttggagact

SEQ ID NO: 131381 - DNA, 25 bp, Artificial
  Probe
cacattcaagttgcaaggacattca

SEQ ID NO: 131382 - DNA, 25 bp, Artificial
  Probe
ttcacagctctcctttcagaagaca

SEQ ID NO: 131383 - DNA, 25 bp, Artificial
  Probe
acagctctcctttcagaagacagac

SEQ ID NO: 131384 - DNA, 25 bp, Artificial
  Probe
cacagctctcctttcagaagacaga

SEQ ID NO: 131385 - DNA, 25 bp, Artificial
  Probe
tcacagctctcctttcagaagacag

SEQ ID NO: 131386 - DNA, 25 bp, Artificial
  Probe
ccacattcaagttgcaaggacattc

SEQ ID NO: 131387 - DNA, 25 bp, Artificial
  Probe
ttggagactgtccacattcaagttg

SEQ ID NO: 131388 - DNA, 25 bp, Artificial
  Probe
gttggagactgtccacattcaagtt

SEQ ID NO: 131389 - DNA, 25 bp, Artificial
  Probe
cagctctcctttcagaagacagacc

SEQ ID NO: 131390 - DNA, 25 bp, Artificial
  Probe
agactgtccacattcaagttgcaag

SEQ ID NO: 131391 - DNA, 25 bp, Artificial
  Probe
gagactgtccacattcaagttgcaa

SEQ ID NO: 131392 - DNA, 25 bp, Artificial
  Probe
ttattcagatgctgtatttcggcat

SEQ ID NO: 131393 - DNA, 25 bp, Artificial
  Probe
catcagttggagactgtccacattc

SEQ ID NO: 131394 - DNA, 25 bp, Artificial
  Probe
cttccttagagccactgactctaca

SEQ ID NO: 131395 - DNA, 25 bp, Artificial
  Probe
tccacattcaagttgcaaggacatt

SEQ ID NO: 131396 - DNA, 25 bp, Artificial
  Probe
ttccttagagccactgactctacac

SEQ ID NO: 131397 - DNA, 25 bp, Artificial
  Probe
cagttggagactgtccacattcaag

SEQ ID NO: 131398 - DNA, 25 bp, Artificial
  Probe
atcagttggagactgtccacattca

SEQ ID NO: 131399 - DNA, 25 bp, Artificial
  Probe
gaccttccttagagccactgactct

SEQ ID NO: 131400 - DNA, 25 bp, Artificial
  Probe
agttggagactgtccacattcaagt

SEQ ID NO: 131401 - DNA, 25 bp, Artificial
  Probe
tcagttggagactgtccacattcaa

SEQ ID NO: 131402 - DNA, 25 bp, Artificial
  Probe
ccttccttagagccactgactctac

SEQ ID NO: 131403 - DNA, 25 bp, Artificial
  Probe
cttagagccactgactctacacctg

SEQ ID NO: 131404 - DNA, 25 bp, Artificial
  Probe
gactgtccacattcaagttgcaagg

SEQ ID NO: 131405 - DNA, 25 bp, Artificial
  Probe
gtatttcggcatcagttggagactg

SEQ ID NO: 131406 - DNA, 25 bp, Artificial
  Probe
accttccttagagccactgactcta

SEQ ID NO: 131407 - DNA, 25 bp, Artificial
  Probe
tatttcggcatcagttggagactgt

SEQ ID NO: 131408 - DNA, 25 bp, Artificial
  Probe
ttagagccactgactctacacctgt

SEQ ID NO: 131409 - DNA, 25 bp, Artificial
  Probe
actgtccacattcaagttgcaagga

SEQ ID NO: 131410 - DNA, 25 bp, Artificial
  Probe
gcatcagttggagactgtccacatt

SEQ ID NO: 131411 - DNA, 25 bp, Artificial
  Probe
tgctctaagaacatctcatcaggtc

SEQ ID NO: 131412 - DNA, 25 bp, Artificial
  Probe
ggtggatgctctgaagaactatgaa

SEQ ID NO: 131413 - DNA, 25 bp, Artificial
  Probe
ctgctctaagaacatctcatcaggt

SEQ ID NO: 131414 - DNA, 25 bp, Artificial
  Probe
ctaagaacatctcatcaggtcgatc

SEQ ID NO: 131415 - DNA, 25 bp, Artificial
  Probe
taagaacatctcatcaggtcgatct

SEQ ID NO: 131416 - DNA, 25 bp, Artificial
  Probe
tctaagaacatctcatcaggtcgat

SEQ ID NO: 131417 - DNA, 25 bp, Artificial
  Probe
tggatgctctgaagaactatgaaat

SEQ ID NO: 131418 - DNA, 25 bp, Artificial
  Probe
gctctaagaacatctcatcaggtcg

SEQ ID NO: 131419 - DNA, 25 bp, Artificial
  Probe
ggatgctctgaagaactatgaaatc

SEQ ID NO: 131420 - DNA, 25 bp, Artificial
  Probe
gtggatgctctgaagaactatgaaa

SEQ ID NO: 131421 - DNA, 25 bp, Artificial
  Probe
ctggtggatgctctgaagaactatg

SEQ ID NO: 131422 - DNA, 25 bp, Artificial
  Probe
ctctaagaacatctcatcaggtcga

SEQ ID NO: 131423 - DNA, 25 bp, Artificial
  Probe
tggtggatgctctgaagaactatga

SEQ ID NO: 131424 - DNA, 25 bp, Artificial
  Probe
atacatggttaccaagttcctgatg

SEQ ID NO: 131425 - DNA, 25 bp, Artificial
  Probe
gatgctctgaagaactatgaaatca

SEQ ID NO: 131426 - DNA, 25 bp, Artificial
  Probe
atgaaatcatcttctaccttgctgg

SEQ ID NO: 131427 - DNA, 25 bp, Artificial
  Probe
tatacatggttaccaagttcctgat

SEQ ID NO: 131428 - DNA, 25 bp, Artificial
  Probe
aacccaatatgttagaccctgttca

SEQ ID NO: 131429 - DNA, 25 bp, Artificial
  Probe
aatcatcttctaccttgctggctct

SEQ ID NO: 131430 - DNA, 25 bp, Artificial
  Probe
tatgaaatcatcttctaccttgctg

SEQ ID NO: 131431 - DNA, 25 bp, Artificial
  Probe
actatgaaatcatcttctaccttgc

SEQ ID NO: 131432 - DNA, 25 bp, Artificial
  Probe
acccaatatgttagaccctgttcac

SEQ ID NO: 131433 - DNA, 25 bp, Artificial
  Probe
tgctctgaagaactatgaaatcatc

SEQ ID NO: 131434 - DNA, 25 bp, Artificial
  Probe
gctgctctaagaacatctcatcagg

SEQ ID NO: 131435 - DNA, 25 bp, Artificial
  Probe
ctatgaaatcatcttctaccttgct

SEQ ID NO: 131436 - DNA, 25 bp, Artificial
  Probe
gctctgaagaactatgaaatcatct

SEQ ID NO: 131437 - DNA, 25 bp, Artificial
  Probe
ggaacccaatatgttagaccctgtt

SEQ ID NO: 131438 - DNA, 25 bp, Artificial
  Probe
gtatacatggttaccaagttcctga

SEQ ID NO: 131439 - DNA, 25 bp, Artificial
  Probe
aagaacatctcatcaggtcgatctg

SEQ ID NO: 131440 - DNA, 25 bp, Artificial
  Probe
cctggtggatgctctgaagaactat

SEQ ID NO: 131441 - DNA, 25 bp, Artificial
  Probe
atgctctgaagaactatgaaatcat

SEQ ID NO: 131442 - DNA, 25 bp, Artificial
  Probe
tcttcatggcagttaccacctattg

SEQ ID NO: 131443 - DNA, 25 bp, Artificial
  Probe
gtcttcatggcagttaccacctatt

SEQ ID NO: 131444 - DNA, 25 bp, Artificial
  Probe
cgctgctctaagaacatctcatcag

SEQ ID NO: 131445 - DNA, 25 bp, Artificial
  Probe
aaatcatcttctaccttgctggctc

SEQ ID NO: 131446 - DNA, 25 bp, Artificial
  Probe
tacatggttaccaagttcctgatgg

SEQ ID NO: 131447 - DNA, 25 bp, Artificial
  Probe
aatatgttagaccctgttcacagtg

SEQ ID NO: 131448 - DNA, 25 bp, Artificial
  Probe
caatatgttagaccctgttcacagt

SEQ ID NO: 131449 - DNA, 25 bp, Artificial
  Probe
cccaatatgttagaccctgttcaca

SEQ ID NO: 131450 - DNA, 25 bp, Artificial
  Probe
gaaatcatcttctaccttgctggct

SEQ ID NO: 131451 - DNA, 25 bp, Artificial
  Probe
atatgttagaccctgttcacagtga

SEQ ID NO: 131452 - DNA, 25 bp, Artificial
  Probe
ccaatatgttagaccctgttcacag

SEQ ID NO: 131453 - DNA, 25 bp, Artificial
  Probe
atcatcttctaccttgctggctctg

SEQ ID NO: 131454 - DNA, 25 bp, Artificial
  Probe
tgaaatcatcttctaccttgctggc

SEQ ID NO: 131455 - DNA, 25 bp, Artificial
  Probe
catcttctaccttgctggctctgaa

SEQ ID NO: 131456 - DNA, 25 bp, Artificial
  Probe
agcactccctggacatttacataaa

SEQ ID NO: 131457 - DNA, 25 bp, Artificial
  Probe
gagcactccctggacatttacataa

SEQ ID NO: 131458 - DNA, 25 bp, Artificial
  Probe
agagcactccctggacatttacata

SEQ ID NO: 131459 - DNA, 25 bp, Artificial
  Probe
ctggacatttacataaaaccctctg

SEQ ID NO: 131460 - DNA, 25 bp, Artificial
  Probe
cctggacatttacataaaaccctct

SEQ ID NO: 131461 - DNA, 25 bp, Artificial
  Probe
cactccctggacatttacataaaac

SEQ ID NO: 131462 - DNA, 25 bp, Artificial
  Probe
actccctggacatttacataaaacc

SEQ ID NO: 131463 - DNA, 25 bp, Artificial
  Probe
tggacatttacataaaaccctctgc

SEQ ID NO: 131464 - DNA, 25 bp, Artificial
  Probe
ccctggacatttacataaaaccctc

SEQ ID NO: 131465 - DNA, 25 bp, Artificial
  Probe
ctccctggacatttacataaaaccc

SEQ ID NO: 131466 - DNA, 25 bp, Artificial
  Probe
gcactccctggacatttacataaaa

SEQ ID NO: 131467 - DNA, 25 bp, Artificial
  Probe
tcagtagttgtatgcatggtaacag

SEQ ID NO: 131468 - DNA, 25 bp, Artificial
  Probe
tccctggacatttacataaaaccct

SEQ ID NO: 131469 - DNA, 25 bp, Artificial
  Probe
gacatttacataaaaccctctgccc

SEQ ID NO: 131470 - DNA, 25 bp, Artificial
  Probe
ggacatttacataaaaccctctgcc

SEQ ID NO: 131471 - DNA, 25 bp, Artificial
  Probe
gtgtactcgtgtgtctgcctagatc

SEQ ID NO: 131472 - DNA, 25 bp, Artificial
  Probe
aaggctgttcattttcagtagaatc

SEQ ID NO: 131473 - DNA, 25 bp, Artificial
  Probe
aaaggctgttcattttcagtagaat

SEQ ID NO: 131474 - DNA, 25 bp, Artificial
  Probe
aggctgttcattttcagtagaatcc

SEQ ID NO: 131475 - DNA, 25 bp, Artificial
  Probe
tccagatctctttgcactgtattta

SEQ ID NO: 131476 - DNA, 25 bp, Artificial
  Probe
ctccagatctctttgcactgtattt

SEQ ID NO: 131477 - DNA, 25 bp, Artificial
  Probe
ccagatctctttgcactgtatttat

SEQ ID NO: 131478 - DNA, 25 bp, Artificial
  Probe
cagtagttgtatgcatggtaacagc

SEQ ID NO: 131479 - DNA, 25 bp, Artificial
  Probe
atttacataaaaccctctgcccctg

SEQ ID NO: 131480 - DNA, 25 bp, Artificial
  Probe
catttacataaaaccctctgcccct

SEQ ID NO: 131481 - DNA, 25 bp, Artificial
  Probe
ggctgttcattttcagtagaatccg

SEQ ID NO: 131482 - DNA, 25 bp, Artificial
  Probe
acatttacataaaaccctctgcccc

SEQ ID NO: 131483 - DNA, 25 bp, Artificial
  Probe
cctccagatctctttgcactgtatt

SEQ ID NO: 131484 - DNA, 25 bp, Artificial
  Probe
cagagcactccctggacatttacat

SEQ ID NO: 131485 - DNA, 25 bp, Artificial
  Probe
cagatctctttgcactgtatttatt

SEQ ID NO: 131486 - DNA, 25 bp, Artificial
  Probe
attttcagtagaatccgggtgtttc

SEQ ID NO: 131487 - DNA, 25 bp, Artificial
  Probe
gtagttgtatgcatggtaacagcac

SEQ ID NO: 131488 - DNA, 25 bp, Artificial
  Probe
agtagttgtatgcatggtaacagca

SEQ ID NO: 131489 - DNA, 25 bp, Artificial
  Probe
cattttcagtagaatccgggtgttt

SEQ ID NO: 131490 - DNA, 25 bp, Artificial
  Probe
gttcattttcagtagaatccgggtg

SEQ ID NO: 131491 - DNA, 25 bp, Artificial
  Probe
gatctctttgcactgtatttattaa

SEQ ID NO: 131492 - DNA, 25 bp, Artificial
  Probe
tcattttcagtagaatccgggtgtt

SEQ ID NO: 131493 - DNA, 25 bp, Artificial
  Probe
ttcattttcagtagaatccgggtgt

SEQ ID NO: 131494 - DNA, 25 bp, Artificial
  Probe
tgttcattttcagtagaatccgggt

SEQ ID NO: 131495 - DNA, 25 bp, Artificial
  Probe
agatctctttgcactgtatttatta

SEQ ID NO: 131496 - DNA, 25 bp, Artificial
  Probe
ctgttcattttcagtagaatccggg

SEQ ID NO: 131497 - DNA, 25 bp, Artificial
  Probe
tagttgtatgcatggtaacagcacc

SEQ ID NO: 131498 - DNA, 25 bp, Artificial
  Probe
gctgttcattttcagtagaatccgg

SEQ ID NO: 131499 - DNA, 25 bp, Artificial
  Probe
ttttcagtagaatccgggtgtttcc

SEQ ID NO: 131500 - DNA, 25 bp, Artificial
  Probe
atctctttgcactgtatttattaaa

SEQ ID NO: 131501 - DNA, 25 bp, Artificial
  Probe
accaatcatacacaagttcagtcta

SEQ ID NO: 131502 - DNA, 25 bp, Artificial
  Probe
ccaatcatacacaagttcagtctac

SEQ ID NO: 131503 - DNA, 25 bp, Artificial
  Probe
caccaatcatacacaagttcagtct

SEQ ID NO: 131504 - DNA, 25 bp, Artificial
  Probe
acaccaatcatacacaagttcagtc

SEQ ID NO: 131505 - DNA, 25 bp, Artificial
  Probe
aacaccaatcatacacaagttcagt

SEQ ID NO: 131506 - DNA, 25 bp, Artificial
  Probe
tcatacacaagttcagtctactctc

SEQ ID NO: 131507 - DNA, 25 bp, Artificial
  Probe
catacacaagttcagtctactctct

SEQ ID NO: 131508 - DNA, 25 bp, Artificial
  Probe
atcaggcaactatcagtctacagat

SEQ ID NO: 131509 - DNA, 25 bp, Artificial
  Probe
atcatacacaagttcagtctactct

SEQ ID NO: 131510 - DNA, 25 bp, Artificial
  Probe
atacacaagttcagtctactctctt

SEQ ID NO: 131511 - DNA, 25 bp, Artificial
  Probe
caatcatacacaagttcagtctact

SEQ ID NO: 131512 - DNA, 25 bp, Artificial
  Probe
tcaggcaactatcagtctacagatg

SEQ ID NO: 131513 - DNA, 25 bp, Artificial
  Probe
aatcatacacaagttcagtctactc

SEQ ID NO: 131514 - DNA, 25 bp, Artificial
  Probe
atctgtgaagaaggtcaatgagtca

SEQ ID NO: 131515 - DNA, 25 bp, Artificial
  Probe
ctgtgaagaaggtcaatgagtcaac

SEQ ID NO: 131516 - DNA, 25 bp, Artificial
  Probe
tctgtgaagaaggtcaatgagtcaa

SEQ ID NO: 131517 - DNA, 25 bp, Artificial
  Probe
gatctgtgaagaaggtcaatgagtc

SEQ ID NO: 131518 - DNA, 25 bp, Artificial
  Probe
gatcaggcaactatcagtctacaga

SEQ ID NO: 131519 - DNA, 25 bp, Artificial
  Probe
caggcaactatcagtctacagatgg

SEQ ID NO: 131520 - DNA, 25 bp, Artificial
  Probe
aagttcagtctactctcttggctct

SEQ ID NO: 131521 - DNA, 25 bp, Artificial
  Probe
aaacaccaatcatacacaagttcag

SEQ ID NO: 131522 - DNA, 25 bp, Artificial
  Probe
ggatcaggcaactatcagtctacag

SEQ ID NO: 131523 - DNA, 25 bp, Artificial
  Probe
ggatctgtgaagaaggtcaatgagt

SEQ ID NO: 131524 - DNA, 25 bp, Artificial
  Probe
ctggatcaggcaactatcagtctac

SEQ ID NO: 131525 - DNA, 25 bp, Artificial
  Probe
tggatcaggcaactatcagtctaca

SEQ ID NO: 131526 - DNA, 25 bp, Artificial
  Probe
gcaactatcagtctacagatgggta

SEQ ID NO: 131527 - DNA, 25 bp, Artificial
  Probe
caactatcagtctacagatgggtac

SEQ ID NO: 131528 - DNA, 25 bp, Artificial
  Probe
agttcagtctactctcttggctctg

SEQ ID NO: 131529 - DNA, 25 bp, Artificial
  Probe
attctttgcgaatttatcaacaagc

SEQ ID NO: 131530 - DNA, 25 bp, Artificial
  Probe
ctgagagaaggcaggaacatcattg

SEQ ID NO: 131531 - DNA, 25 bp, Artificial
  Probe
ttctttgcgaatttatcaacaagct

SEQ ID NO: 131532 - DNA, 25 bp, Artificial
  Probe
tgtgaagaaggtcaatgagtcaacc

SEQ ID NO: 131533 - DNA, 25 bp, Artificial
  Probe
ggtcaaatatgcagagaaacaagag

SEQ ID NO: 131534 - DNA, 25 bp, Artificial
  Probe
tctttgcgaatttatcaacaagctc

SEQ ID NO: 131535 - DNA, 25 bp, Artificial
  Probe
gggatcattctttgcgaatttatca

SEQ ID NO: 131536 - DNA, 25 bp, Artificial
  Probe
gtcaaatatgcagagaaacaagagc

SEQ ID NO: 131537 - DNA, 25 bp, Artificial
  Probe
cgggatcattctttgcgaatttatc

SEQ ID NO: 131538 - DNA, 25 bp, Artificial
  Probe
tacacaagttcagtctactctcttg

SEQ ID NO: 131539 - DNA, 25 bp, Artificial
  Probe
gggtcaaatatgcagagaaacaaga

SEQ ID NO: 131540 - DNA, 25 bp, Artificial
  Probe
ctttgcgaatttatcaacaagctcc

SEQ ID NO: 131541 - DNA, 25 bp, Artificial
  Probe
agagaaacaagagcggagatttgag

SEQ ID NO: 131542 - DNA, 25 bp, Artificial
  Probe
tcattctttgcgaatttatcaacaa

SEQ ID NO: 131543 - DNA, 25 bp, Artificial
  Probe
acgggatcattctttgcgaatttat

SEQ ID NO: 131544 - DNA, 25 bp, Artificial
  Probe
ggatcattctttgcgaatttatcaa

SEQ ID NO: 131545 - DNA, 25 bp, Artificial
  Probe
ctacagatgggcaccaataagtttg

SEQ ID NO: 131546 - DNA, 25 bp, Artificial
  Probe
actgctgtaacttgtatgaggatta

SEQ ID NO: 131547 - DNA, 25 bp, Artificial
  Probe
gactgctgtaacttgtatgaggatt

SEQ ID NO: 131548 - DNA, 25 bp, Artificial
  Probe
gagagactgctgtaacttgtatgag

SEQ ID NO: 131549 - DNA, 25 bp, Artificial
  Probe
gagagagactgctgtaacttgtatg

SEQ ID NO: 131550 - DNA, 25 bp, Artificial
  Probe
agagagactgctgtaacttgtatga

SEQ ID NO: 131551 - DNA, 25 bp, Artificial
  Probe
tgagagagactgctgtaacttgtat

SEQ ID NO: 131552 - DNA, 25 bp, Artificial
  Probe
ttgagagagactgctgtaacttgta

SEQ ID NO: 131553 - DNA, 25 bp, Artificial
  Probe
agactgctgtaacttgtatgaggat

SEQ ID NO: 131554 - DNA, 25 bp, Artificial
  Probe
ctgctgtaacttgtatgaggattaa

SEQ ID NO: 131555 - DNA, 25 bp, Artificial
  Probe
gagactgctgtaacttgtatgagga

SEQ ID NO: 131556 - DNA, 25 bp, Artificial
  Probe
agagactgctgtaacttgtatgagg

SEQ ID NO: 131557 - DNA, 25 bp, Artificial
  Probe
cttgagagagactgctgtaacttgt

SEQ ID NO: 131558 - DNA, 25 bp, Artificial
  Probe
tcttgagagagactgctgtaacttg

SEQ ID NO: 131559 - DNA, 25 bp, Artificial
  Probe
gatggaatcttggtggtggaagtaa

SEQ ID NO: 131560 - DNA, 25 bp, Artificial
  Probe
tttatatcacggagtttcaccagac

SEQ ID NO: 131561 - DNA, 25 bp, Artificial
  Probe
gtttatatcacggagtttcaccaga

SEQ ID NO: 131562 - DNA, 25 bp, Artificial
  Probe
ttatatcacggagtttcaccagaca

SEQ ID NO: 131563 - DNA, 25 bp, Artificial
  Probe
tgctgtaacttgtatgaggattaaa

SEQ ID NO: 131564 - DNA, 25 bp, Artificial
  Probe
tcatgccataggagaaagaagaaag

SEQ ID NO: 131565 - DNA, 25 bp, Artificial
  Probe
tatatcacggagtttcaccagacag

SEQ ID NO: 131566 - DNA, 25 bp, Artificial
  Probe
ttcatgccataggagaaagaagaaa

SEQ ID NO: 131567 - DNA, 25 bp, Artificial
  Probe
aatcttggtggtggaagtaaaggat

SEQ ID NO: 131568 - DNA, 25 bp, Artificial
  Probe
gaatggacgaacacgggtttatatc

SEQ ID NO: 131569 - DNA, 25 bp, Artificial
  Probe
tgatggaatcttggtggtggaagta

SEQ ID NO: 131570 - DNA, 25 bp, Artificial
  Probe
gttcatgccataggagaaagaagaa

SEQ ID NO: 131571 - DNA, 25 bp, Artificial
  Probe
atggaatcttggtggtggaagtaaa

SEQ ID NO: 131572 - DNA, 25 bp, Artificial
  Probe
agaatggacgaacacgggtttatat

SEQ ID NO: 131573 - DNA, 25 bp, Artificial
  Probe
ctgttcatgccataggagaaagaag

SEQ ID NO: 131574 - DNA, 25 bp, Artificial
  Probe
aatggacgaacacgggtttatatca

SEQ ID NO: 131575 - DNA, 25 bp, Artificial
  Probe
gaatcttggtggtggaagtaaagga

SEQ ID NO: 131576 - DNA, 25 bp, Artificial
  Probe
gtgcgttatcaggaagagtttgaag

SEQ ID NO: 131577 - DNA, 25 bp, Artificial
  Probe
catgccataggagaaagaagaaagc

SEQ ID NO: 131578 - DNA, 25 bp, Artificial
  Probe
tgttcatgccataggagaaagaaga

SEQ ID NO: 131579 - DNA, 25 bp, Artificial
  Probe
aacacgggtttatatcacggagttt

SEQ ID NO: 131580 - DNA, 25 bp, Artificial
  Probe
tggaatcttggtggtggaagtaaag

SEQ ID NO: 131581 - DNA, 25 bp, Artificial
  Probe
atgccataggagaaagaagaaagcc

SEQ ID NO: 131582 - DNA, 25 bp, Artificial
  Probe
acgggtttatatcacggagtttcac

SEQ ID NO: 131583 - DNA, 25 bp, Artificial
  Probe
cacgggtttatatcacggagtttca

SEQ ID NO: 131584 - DNA, 25 bp, Artificial
  Probe
acacgggtttatatcacggagtttc

SEQ ID NO: 131585 - DNA, 25 bp, Artificial
  Probe
agtgcgttatcaggaagagtttgaa

SEQ ID NO: 131586 - DNA, 25 bp, Artificial
  Probe
atcttggtggtggaagtaaaggatc

SEQ ID NO: 131587 - DNA, 25 bp, Artificial
  Probe
atgatggaatcttggtggtggaagt

SEQ ID NO: 131588 - DNA, 25 bp, Artificial
  Probe
tatcacggagtttcaccagacagta

SEQ ID NO: 131589 - DNA, 25 bp, Artificial
  Probe
ggtttatatcacggagtttcaccag

SEQ ID NO: 131590 - DNA, 25 bp, Artificial
  Probe
gaacacgggtttatatcacggagtt

SEQ ID NO: 131591 - DNA, 25 bp, Artificial
  Probe
aagaacactgattgtaatgtgagaa

SEQ ID NO: 131592 - DNA, 25 bp, Artificial
  Probe
cataccgttactctccttctcatgg

SEQ ID NO: 131593 - DNA, 25 bp, Artificial
  Probe
ccataccgttactctccttctcatg

SEQ ID NO: 131594 - DNA, 25 bp, Artificial
  Probe
gaactctcttccaaatgtttcactc

SEQ ID NO: 131595 - DNA, 25 bp, Artificial
  Probe
ccctgaactctcttccaaatgtttc

SEQ ID NO: 131596 - DNA, 25 bp, Artificial
  Probe
tctggtccatttaatgatgtaactt

SEQ ID NO: 131597 - DNA, 25 bp, Artificial
  Probe
ttctggtccatttaatgatgtaact

SEQ ID NO: 131598 - DNA, 25 bp, Artificial
  Probe
tctgttattctggtccatttaatga

SEQ ID NO: 131599 - DNA, 25 bp, Artificial
  Probe
agaacactgattgtaatgtgagaaa

SEQ ID NO: 131600 - DNA, 25 bp, Artificial
  Probe
aaagaacactgattgtaatgtgaga

SEQ ID NO: 131601 - DNA, 25 bp, Artificial
  Probe
gcaagatctgttattctggtccatt

SEQ ID NO: 131602 - DNA, 25 bp, Artificial
  Probe
ataccgttactctccttctcatggt

SEQ ID NO: 131603 - DNA, 25 bp, Artificial
  Probe
gtattgcaccctttatttctctagc

SEQ ID NO: 131604 - DNA, 25 bp, Artificial
  Probe
tattgcaccctttatttctctagct

SEQ ID NO: 131605 - DNA, 25 bp, Artificial
  Probe
tggtccatttaatgatgtaactttc

SEQ ID NO: 131606 - DNA, 25 bp, Artificial
  Probe
ctggtccatttaatgatgtaacttt

SEQ ID NO: 131607 - DNA, 25 bp, Artificial
  Probe
attctggtccatttaatgatgtaac

SEQ ID NO: 131608 - DNA, 25 bp, Artificial
  Probe
gttattctggtccatttaatgatgt

SEQ ID NO: 131609 - DNA, 25 bp, Artificial
  Probe
tgttattctggtccatttaatgatg

SEQ ID NO: 131610 - DNA, 25 bp, Artificial
  Probe
ggtccatttaatgatgtaactttca

SEQ ID NO: 131611 - DNA, 25 bp, Artificial
  Probe
cccataccgttactctccttctcat

SEQ ID NO: 131612 - DNA, 25 bp, Artificial
  Probe
ctgttattctggtccatttaatgat

SEQ ID NO: 131613 - DNA, 25 bp, Artificial
  Probe
atctgttattctggtccatttaatg

SEQ ID NO: 131614 - DNA, 25 bp, Artificial
  Probe
ctattttctctgacacttagcacac

SEQ ID NO: 131615 - DNA, 25 bp, Artificial
  Probe
tctattttctctgacacttagcaca

SEQ ID NO: 131616 - DNA, 25 bp, Artificial
  Probe
gccttctctattttctctgacactt

SEQ ID NO: 131617 - DNA, 25 bp, Artificial
  Probe
tattttctctgacacttagcacacc

SEQ ID NO: 131618 - DNA, 25 bp, Artificial
  Probe
ctctattttctctgacacttagcac

SEQ ID NO: 131619 - DNA, 25 bp, Artificial
  Probe
tctctattttctctgacacttagca

SEQ ID NO: 131620 - DNA, 25 bp, Artificial
  Probe
taccgttactctccttctcatggtg

SEQ ID NO: 131621 - DNA, 25 bp, Artificial
  Probe
gatctgttattctggtccatttaat

SEQ ID NO: 131622 - DNA, 25 bp, Artificial
  Probe
ctgccttctctattttctctgacac

SEQ ID NO: 131623 - DNA, 25 bp, Artificial
  Probe
ctgaactctcttccaaatgtttcac

SEQ ID NO: 131624 - DNA, 25 bp, Artificial
  Probe
ggcaagatctgttattctggtccat

SEQ ID NO: 131625 - DNA, 25 bp, Artificial
  Probe
tgaactctcttccaaatgtttcact

SEQ ID NO: 131626 - DNA, 25 bp, Artificial
  Probe
gccctgaactctcttccaaatgttt

SEQ ID NO: 131627 - DNA, 25 bp, Artificial
  Probe
tgccttctctattttctctgacact

SEQ ID NO: 131628 - DNA, 25 bp, Artificial
  Probe
ctttatttctctagctaccctggac

SEQ ID NO: 131629 - DNA, 25 bp, Artificial
  Probe
attgcaccctttatttctctagcta

SEQ ID NO: 131630 - DNA, 25 bp, Artificial
  Probe
ttgcaccctttatttctctagctac

SEQ ID NO: 131631 - DNA, 25 bp, Artificial
  Probe
ttctctattttctctgacacttagc

SEQ ID NO: 131632 - DNA, 25 bp, Artificial
  Probe
ggtattgcaccctttatttctctag

SEQ ID NO: 131633 - DNA, 25 bp, Artificial
  Probe
cctgaactctcttccaaatgtttca

SEQ ID NO: 131634 - DNA, 25 bp, Artificial
  Probe
cctttatttctctagctaccctgga

SEQ ID NO: 131635 - DNA, 25 bp, Artificial
  Probe
actgattgtaatgtgagaaaagtgt

SEQ ID NO: 131636 - DNA, 25 bp, Artificial
  Probe
aatgtctcttctagtcctctcttct

SEQ ID NO: 131637 - DNA, 25 bp, Artificial
  Probe
caatgtctcttctagtcctctcttc

SEQ ID NO: 131638 - DNA, 25 bp, Artificial
  Probe
tcaatgtctcttctagtcctctctt

SEQ ID NO: 131639 - DNA, 25 bp, Artificial
  Probe
atcaatgtctcttctagtcctctct

SEQ ID NO: 131640 - DNA, 25 bp, Artificial
  Probe
atgtctcttctagtcctctcttctg

SEQ ID NO: 131641 - DNA, 25 bp, Artificial
  Probe
gatcaatgtctcttctagtcctctc

SEQ ID NO: 131642 - DNA, 25 bp, Artificial
  Probe
agatcaatgtctcttctagtcctct

SEQ ID NO: 131643 - DNA, 25 bp, Artificial
  Probe
gatgaagcacaaggaggtcttatct

SEQ ID NO: 131644 - DNA, 25 bp, Artificial
  Probe
agatgaagcacaaggaggtcttatc

SEQ ID NO: 131645 - DNA, 25 bp, Artificial
  Probe
atgaagcacaaggaggtcttatctg

SEQ ID NO: 131646 - DNA, 25 bp, Artificial
  Probe
tgtctcttctagtcctctcttctgg

SEQ ID NO: 131647 - DNA, 25 bp, Artificial
  Probe
cagatgaagcacaaggaggtcttat

SEQ ID NO: 131648 - DNA, 25 bp, Artificial
  Probe
taattctcctcttaccctcagatga

SEQ ID NO: 131649 - DNA, 25 bp, Artificial
  Probe
aattctcctcttaccctcagatgaa

SEQ ID NO: 131650 - DNA, 25 bp, Artificial
  Probe
attctcctcttaccctcagatgaag

SEQ ID NO: 131651 - DNA, 25 bp, Artificial
  Probe
tcagatgaagcacaaggaggtctta

SEQ ID NO: 131652 - DNA, 25 bp, Artificial
  Probe
tgagatcaatgtctcttctagtcct

SEQ ID NO: 131653 - DNA, 25 bp, Artificial
  Probe
ctgagatcaatgtctcttctagtcc

SEQ ID NO: 131654 - DNA, 25 bp, Artificial
  Probe
cctgagatcaatgtctcttctagtc

SEQ ID NO: 131655 - DNA, 25 bp, Artificial
  Probe
gagatcaatgtctcttctagtcctc

SEQ ID NO: 131656 - DNA, 25 bp, Artificial
  Probe
ctcttaccctcagatgaagcacaag

SEQ ID NO: 131657 - DNA, 25 bp, Artificial
  Probe
gtctcttctagtcctctcttctggg

SEQ ID NO: 131658 - DNA, 25 bp, Artificial
  Probe
gcctgagatcaatgtctcttctagt

SEQ ID NO: 131659 - DNA, 25 bp, Artificial
  Probe
ttctcctcttaccctcagatgaagc

SEQ ID NO: 131660 - DNA, 25 bp, Artificial
  Probe
attcttctgcctgtggtcatctgtc

SEQ ID NO: 131661 - DNA, 25 bp, Artificial
  Probe
ctcagatgaagcacaaggaggtctt

SEQ ID NO: 131662 - DNA, 25 bp, Artificial
  Probe
gattcttctgcctgtggtcatctgt

SEQ ID NO: 131663 - DNA, 25 bp, Artificial
  Probe
atcttggattcttctgcctgtggtc

SEQ ID NO: 131664 - DNA, 25 bp, Artificial
  Probe
caatcttggattcttctgcctgtgg

SEQ ID NO: 131665 - DNA, 25 bp, Artificial
  Probe
cttggattcttctgcctgtggtcat

SEQ ID NO: 131666 - DNA, 25 bp, Artificial
  Probe
ttggattcttctgcctgtggtcatc

SEQ ID NO: 131667 - DNA, 25 bp, Artificial
  Probe
ctctcacttcttgaaagctctaggc

SEQ ID NO: 131668 - DNA, 25 bp, Artificial
  Probe
aatcttggattcttctgcctgtggt

SEQ ID NO: 131669 - DNA, 25 bp, Artificial
  Probe
catttcagtgtcggtcacattttaa

SEQ ID NO: 131670 - DNA, 25 bp, Artificial
  Probe
ccaatcttggattcttctgcctgtg

SEQ ID NO: 131671 - DNA, 25 bp, Artificial
  Probe
cctcttaccctcagatgaagcacaa

SEQ ID NO: 131672 - DNA, 25 bp, Artificial
  Probe
ctcctcttaccctcagatgaagcac

SEQ ID NO: 131673 - DNA, 25 bp, Artificial
  Probe
tctcctcttaccctcagatgaagca

SEQ ID NO: 131674 - DNA, 25 bp, Artificial
  Probe
tgctctcacttcttgaaagctctag

SEQ ID NO: 131675 - DNA, 25 bp, Artificial
  Probe
tctcttctagtcctctcttctgggc

SEQ ID NO: 131676 - DNA, 25 bp, Artificial
  Probe
ctgtggtcatctgtctgtccatcag

SEQ ID NO: 131677 - DNA, 25 bp, Artificial
  Probe
gtgctctcacttcttgaaagctcta

SEQ ID NO: 131678 - DNA, 25 bp, Artificial
  Probe
atttcagtgtcggtcacattttaaa

SEQ ID NO: 131679 - DNA, 25 bp, Artificial
  Probe
tttcagtgtcggtcacattttaaac

SEQ ID NO: 131680 - DNA, 25 bp, Artificial
  Probe
ttaccctcagatgaagcacaaggag

SEQ ID NO: 131681 - DNA, 25 bp, Artificial
  Probe
atactgagattaaacccaaggctac

SEQ ID NO: 131682 - DNA, 25 bp, Artificial
  Probe
gatactgagattaaacccaaggcta

SEQ ID NO: 131683 - DNA, 25 bp, Artificial
  Probe
agagatactgagattaaacccaagg

SEQ ID NO: 131684 - DNA, 25 bp, Artificial
  Probe
ggagagatactgagattaaacccaa

SEQ ID NO: 131685 - DNA, 25 bp, Artificial
  Probe
gagatactgagattaaacccaaggc

SEQ ID NO: 131686 - DNA, 25 bp, Artificial
  Probe
agatactgagattaaacccaaggct

SEQ ID NO: 131687 - DNA, 25 bp, Artificial
  Probe
gagagatactgagattaaacccaag

SEQ ID NO: 131688 - DNA, 25 bp, Artificial
  Probe
tactgagattaaacccaaggctacc

SEQ ID NO: 131689 - DNA, 25 bp, Artificial
  Probe
ctgacctctactggttcactctgta

SEQ ID NO: 131690 - DNA, 25 bp, Artificial
  Probe
tacatagtgctctgtgagacctttc

SEQ ID NO: 131691 - DNA, 25 bp, Artificial
  Probe
tgacctctactggttcactctgtac

SEQ ID NO: 131692 - DNA, 25 bp, Artificial
  Probe
gtacatagtgctctgtgagaccttt

SEQ ID NO: 131693 - DNA, 25 bp, Artificial
  Probe
gatgaggagaggacagaaagcaaag

SEQ ID NO: 131694 - DNA, 25 bp, Artificial
  Probe
gtggggagagatactgagattaaac

SEQ ID NO: 131695 - DNA, 25 bp, Artificial
  Probe
tggggagagatactgagattaaacc

SEQ ID NO: 131696 - DNA, 25 bp, Artificial
  Probe
gacctctactggttcactctgtacc

SEQ ID NO: 131697 - DNA, 25 bp, Artificial
  Probe
tgatgaggagaggacagaaagcaaa

SEQ ID NO: 131698 - DNA, 25 bp, Artificial
  Probe
cgtggggagagatactgagattaaa

SEQ ID NO: 131699 - DNA, 25 bp, Artificial
  Probe
gggagagatactgagattaaaccca

SEQ ID NO: 131700 - DNA, 25 bp, Artificial
  Probe
cactgacctctactggttcactctg

SEQ ID NO: 131701 - DNA, 25 bp, Artificial
  Probe
gacactgacctctactggttcactc

SEQ ID NO: 131702 - DNA, 25 bp, Artificial
  Probe
actgagattaaacccaaggctaccc

SEQ ID NO: 131703 - DNA, 25 bp, Artificial
  Probe
ttgtgtacatagtgctctgtgagac

SEQ ID NO: 131704 - DNA, 25 bp, Artificial
  Probe
catctgtctggtcttctttgtgtgc

SEQ ID NO: 131705 - DNA, 25 bp, Artificial
  Probe
atctgtctggtcttctttgtgtgct

SEQ ID NO: 131706 - DNA, 25 bp, Artificial
  Probe
attgccatctgtctggtcttctttg

SEQ ID NO: 131707 - DNA, 25 bp, Artificial
  Probe
cattgccatctgtctggtcttcttt

SEQ ID NO: 131708 - DNA, 25 bp, Artificial
  Probe
actgacctctactggttcactctgt

SEQ ID NO: 131709 - DNA, 25 bp, Artificial
  Probe
acactgacctctactggttcactct

SEQ ID NO: 131710 - DNA, 25 bp, Artificial
  Probe
atgaggagaggacagaaagcaaagg

SEQ ID NO: 131711 - DNA, 25 bp, Artificial
  Probe
agaaagcaaaggcacctgacaattc

SEQ ID NO: 131712 - DNA, 25 bp, Artificial
  Probe
ctgagattaaacccaaggctaccct

SEQ ID NO: 131713 - DNA, 25 bp, Artificial
  Probe
tgtacatagtgctctgtgagacctt

SEQ ID NO: 131714 - DNA, 25 bp, Artificial
  Probe
ccatctgtctggtcttctttgtgtg

SEQ ID NO: 131715 - DNA, 25 bp, Artificial
  Probe
ccgtggggagagatactgagattaa

SEQ ID NO: 131716 - DNA, 25 bp, Artificial
  Probe
gaccctcacgtttgtctacttgtac

SEQ ID NO: 131717 - DNA, 25 bp, Artificial
  Probe
ctttgtgtacatagtgctctgtgag

SEQ ID NO: 131718 - DNA, 25 bp, Artificial
  Probe
tgagattaaacccaaggctaccctg

SEQ ID NO: 131719 - DNA, 25 bp, Artificial
  Probe
ctgatgaggagaggacagaaagcaa

SEQ ID NO: 131720 - DNA, 25 bp, Artificial
  Probe
tttgtgtacatagtgctctgtgaga

SEQ ID NO: 131721 - DNA, 25 bp, Artificial
  Probe
ccattgccatctgtctggtcttctt

SEQ ID NO: 131722 - DNA, 25 bp, Artificial
  Probe
acatagtgctctgtgagacctttcg

SEQ ID NO: 131723 - DNA, 25 bp, Artificial
  Probe
gtgtacatagtgctctgtgagacct

SEQ ID NO: 131724 - DNA, 25 bp, Artificial
  Probe
tctgtctggtcttctttgtgtgctg

SEQ ID NO: 131725 - DNA, 25 bp, Artificial
  Probe
cagaaagcaaaggcacctgacaatt

SEQ ID NO: 131726 - DNA, 25 bp, Artificial
  Probe
gcatccgaatcttaagttgttacat

SEQ ID NO: 131727 - DNA, 25 bp, Artificial
  Probe
tgcatccgaatcttaagttgttaca

SEQ ID NO: 131728 - DNA, 25 bp, Artificial
  Probe
gtcacctgatgtcccttactcttag

SEQ ID NO: 131729 - DNA, 25 bp, Artificial
  Probe
caaggctactggtatttcttaacta

SEQ ID NO: 131730 - DNA, 25 bp, Artificial
  Probe
ctgatgtcccttactcttaggaaat

SEQ ID NO: 131731 - DNA, 25 bp, Artificial
  Probe
tgtcacctgatgtcccttactctta

SEQ ID NO: 131732 - DNA, 25 bp, Artificial
  Probe
ggctactggtatttcttaactaagt

SEQ ID NO: 131733 - DNA, 25 bp, Artificial
  Probe
aggctactggtatttcttaactaag

SEQ ID NO: 131734 - DNA, 25 bp, Artificial
  Probe
cccttactcttaggaaattctatgc

SEQ ID NO: 131735 - DNA, 25 bp, Artificial
  Probe
tgatgtcccttactcttaggaaatt

SEQ ID NO: 131736 - DNA, 25 bp, Artificial
  Probe
ccaaggctactggtatttcttaact

SEQ ID NO: 131737 - DNA, 25 bp, Artificial
  Probe
atgtcccttactcttaggaaattct

SEQ ID NO: 131738 - DNA, 25 bp, Artificial
  Probe
cctgatgtcccttactcttaggaaa

SEQ ID NO: 131739 - DNA, 25 bp, Artificial
  Probe
gatgtcccttactcttaggaaattc

SEQ ID NO: 131740 - DNA, 25 bp, Artificial
  Probe
aaggctactggtatttcttaactaa

SEQ ID NO: 131741 - DNA, 25 bp, Artificial
  Probe
cccaaggctactggtatttcttaac

SEQ ID NO: 131742 - DNA, 25 bp, Artificial
  Probe
ccaaggtcaagtagctgcttatctg

SEQ ID NO: 131743 - DNA, 25 bp, Artificial
  Probe
gtccaaggtcaagtagctgcttatc

SEQ ID NO: 131744 - DNA, 25 bp, Artificial
  Probe
acccaaggctactggtatttcttaa

SEQ ID NO: 131745 - DNA, 25 bp, Artificial
  Probe
tgtcccttactcttaggaaattcta

SEQ ID NO: 131746 - DNA, 25 bp, Artificial
  Probe
atgtcacctgatgtcccttactctt

SEQ ID NO: 131747 - DNA, 25 bp, Artificial
  Probe
tccaaggtcaagtagctgcttatct

SEQ ID NO: 131748 - DNA, 25 bp, Artificial
  Probe
ctctgtaatctgcactcaactgttt

SEQ ID NO: 131749 - DNA, 25 bp, Artificial
  Probe
gacccaaggctactggtatttctta

SEQ ID NO: 131750 - DNA, 25 bp, Artificial
  Probe
gctctgtaatctgcactcaactgtt

SEQ ID NO: 131751 - DNA, 25 bp, Artificial
  Probe
acctgatgtcccttactcttaggaa

SEQ ID NO: 131752 - DNA, 25 bp, Artificial
  Probe
atgcatccgaatcttaagttgttac

SEQ ID NO: 131753 - DNA, 25 bp, Artificial
  Probe
catccgaatcttaagttgttacata

SEQ ID NO: 131754 - DNA, 25 bp, Artificial
  Probe
tctgtaatctgcactcaactgtttg

SEQ ID NO: 131755 - DNA, 25 bp, Artificial
  Probe
caaggtcaagtagctgcttatctgc

SEQ ID NO: 131756 - DNA, 25 bp, Artificial
  Probe
aatgcatccgaatcttaagttgtta

SEQ ID NO: 131757 - DNA, 25 bp, Artificial
  Probe
caaggtgacaaaaggagaagtagag

SEQ ID NO: 131758 - DNA, 25 bp, Artificial
  Probe
tcacctgatgtcccttactcttagg

SEQ ID NO: 131759 - DNA, 25 bp, Artificial
  Probe
tcccttactcttaggaaattctatg

SEQ ID NO: 131760 - DNA, 25 bp, Artificial
  Probe
gtcccttactcttaggaaattctat

SEQ ID NO: 131761 - DNA, 25 bp, Artificial
  Probe
cacctgatgtcccttactcttagga

SEQ ID NO: 131762 - DNA, 25 bp, Artificial
  Probe
gtagaaactggtcactgtctccatc

SEQ ID NO: 131763 - DNA, 25 bp, Artificial
  Probe
tttatttacctttaactcctgtgag

SEQ ID NO: 131764 - DNA, 25 bp, Artificial
  Probe
aaggtgacaaaaggagaagtagagg

SEQ ID NO: 131765 - DNA, 25 bp, Artificial
  Probe
gtcaggtgtgttgattgtaccgaag

SEQ ID NO: 131766 - DNA, 25 bp, Artificial
  Probe
ttatctcttgcatctgggaaagctc

SEQ ID NO: 131767 - DNA, 25 bp, Artificial
  Probe
ccttactcttaggaaattctatgca

SEQ ID NO: 131768 - DNA, 25 bp, Artificial
  Probe
taaggacccaaggctactggtattt

SEQ ID NO: 131769 - DNA, 25 bp, Artificial
  Probe
ccaaggtgacaaaaggagaagtaga

SEQ ID NO: 131770 - DNA, 25 bp, Artificial
  Probe
atttatttacctttaactcctgtga

SEQ ID NO: 131771 - DNA, 25 bp, Artificial
  Probe
ttacaagatgagaatccactgcctg

SEQ ID NO: 131772 - DNA, 25 bp, Artificial
  Probe
ccttaatttggtttactggtgacat

SEQ ID NO: 131773 - DNA, 25 bp, Artificial
  Probe
ggacatactaacctgatttattggg

SEQ ID NO: 131774 - DNA, 25 bp, Artificial
  Probe
aagatcaatgtcctcattccaagaa

SEQ ID NO: 131775 - DNA, 25 bp, Artificial
  Probe
aagaagatcaatgtcctcattccaa

SEQ ID NO: 131776 - DNA, 25 bp, Artificial
  Probe
cccttaatttggtttactggtgaca

SEQ ID NO: 131777 - DNA, 25 bp, Artificial
  Probe
agaagaagatcaatgtcctcattcc

SEQ ID NO: 131778 - DNA, 25 bp, Artificial
  Probe
agaagatcaatgtcctcattccaag

SEQ ID NO: 131779 - DNA, 25 bp, Artificial
  Probe
cagaagaagatcaatgtcctcattc

SEQ ID NO: 131780 - DNA, 25 bp, Artificial
  Probe
ccagaagaagatcaatgtcctcatt

SEQ ID NO: 131781 - DNA, 25 bp, Artificial
  Probe
gaagatcaatgtcctcattccaaga

SEQ ID NO: 131782 - DNA, 25 bp, Artificial
  Probe
gaagaagatcaatgtcctcattcca

SEQ ID NO: 131783 - DNA, 25 bp, Artificial
  Probe
tttacaagatgagaatccactgcct

SEQ ID NO: 131784 - DNA, 25 bp, Artificial
  Probe
atccattcagatcccagaagaagat

SEQ ID NO: 131785 - DNA, 25 bp, Artificial
  Probe
atgtcctcattccaagaaactctgt

SEQ ID NO: 131786 - DNA, 25 bp, Artificial
  Probe
cttaatttggtttactggtgacatt

SEQ ID NO: 131787 - DNA, 25 bp, Artificial
  Probe
tcattccaagaaactctgtcctgtt

SEQ ID NO: 131788 - DNA, 25 bp, Artificial
  Probe
attccaagaaactctgtcctgttga

SEQ ID NO: 131789 - DNA, 25 bp, Artificial
  Probe
cattccaagaaactctgtcctgttg

SEQ ID NO: 131790 - DNA, 25 bp, Artificial
  Probe
caagcacactcttaaaggaacacag

SEQ ID NO: 131791 - DNA, 25 bp, Artificial
  Probe
actggtgacatttaaaggacatact

SEQ ID NO: 131792 - DNA, 25 bp, Artificial
  Probe
atcccagaagaagatcaatgtcctc

SEQ ID NO: 131793 - DNA, 25 bp, Artificial
  Probe
ccacacatgatgtttgatgaagatc

SEQ ID NO: 131794 - DNA, 25 bp, Artificial
  Probe
acatggaagtattatagagtgatga

SEQ ID NO: 131795 - DNA, 25 bp, Artificial
  Probe
aatttggtttactggtgacatttaa

SEQ ID NO: 131796 - DNA, 25 bp, Artificial
  Probe
ttaatttggtttactggtgacattt

SEQ ID NO: 131797 - DNA, 25 bp, Artificial
  Probe
aagcacactcttaaaggaacacaga

SEQ ID NO: 131798 - DNA, 25 bp, Artificial
  Probe
cacacatgatgtttgatgaagatcg

SEQ ID NO: 131799 - DNA, 25 bp, Artificial
  Probe
tgggataacaccaaatgtaaatgtg

SEQ ID NO: 131800 - DNA, 25 bp, Artificial
  Probe
gtgggataacaccaaatgtaaatgt

SEQ ID NO: 131801 - DNA, 25 bp, Artificial
  Probe
tgtgggataacaccaaatgtaaatg

SEQ ID NO: 131802 - DNA, 25 bp, Artificial
  Probe
accacacatgatgtttgatgaagat

SEQ ID NO: 131803 - DNA, 25 bp, Artificial
  Probe
ctgtgggataacaccaaatgtaaat

SEQ ID NO: 131804 - DNA, 25 bp, Artificial
  Probe
ctcattccaagaaactctgtcctgt

SEQ ID NO: 131805 - DNA, 25 bp, Artificial
  Probe
tgtcctcattccaagaaactctgtc

SEQ ID NO: 131806 - DNA, 25 bp, Artificial
  Probe
ggtttactggtgacatttaaaggac

SEQ ID NO: 131807 - DNA, 25 bp, Artificial
  Probe
cccagaagaagatcaatgtcctcat

SEQ ID NO: 131808 - DNA, 25 bp, Artificial
  Probe
tggtttactggtgacatttaaagga

SEQ ID NO: 131809 - DNA, 25 bp, Artificial
  Probe
ttggtttactggtgacatttaaagg

SEQ ID NO: 131810 - DNA, 25 bp, Artificial
  Probe
gtttactggtgacatttaaaggaca

SEQ ID NO: 131811 - DNA, 25 bp, Artificial
  Probe
tactggtgacatttaaaggacatac

SEQ ID NO: 131812 - DNA, 25 bp, Artificial
  Probe
gaccacacatgatgtttgatgaaga

SEQ ID NO: 131813 - DNA, 25 bp, Artificial
  Probe
aggacatactaacctgatttattgg

SEQ ID NO: 131814 - DNA, 25 bp, Artificial
  Probe
ctggtgacatttaaaggacatacta

SEQ ID NO: 131815 - DNA, 25 bp, Artificial
  Probe
atcaatgtcctcattccaagaaact

SEQ ID NO: 131816 - DNA, 25 bp, Artificial
  Probe
atgaagcaaggaagacatacatgaa

SEQ ID NO: 131817 - DNA, 25 bp, Artificial
  Probe
tatgaagcaaggaagacatacatga

SEQ ID NO: 131818 - DNA, 25 bp, Artificial
  Probe
ttatgaagcaaggaagacatacatg

SEQ ID NO: 131819 - DNA, 25 bp, Artificial
  Probe
tgaagcaaggaagacatacatgaaa

SEQ ID NO: 131820 - DNA, 25 bp, Artificial
  Probe
ctttatgaagcaaggaagacataca

SEQ ID NO: 131821 - DNA, 25 bp, Artificial
  Probe
cgtaaacagctccgaattaagaata

SEQ ID NO: 131822 - DNA, 25 bp, Artificial
  Probe
gtggaatttcgactttcagaatcat

SEQ ID NO: 131823 - DNA, 25 bp, Artificial
  Probe
atttcgactttcagaatcataagcc

SEQ ID NO: 131824 - DNA, 25 bp, Artificial
  Probe
tttatgaagcaaggaagacatacat

SEQ ID NO: 131825 - DNA, 25 bp, Artificial
  Probe
acgtaaacagctccgaattaagaat

SEQ ID NO: 131826 - DNA, 25 bp, Artificial
  Probe
ccttgtttattagatacatcactgc

SEQ ID NO: 131827 - DNA, 25 bp, Artificial
  Probe
agtggaatttcgactttcagaatca

SEQ ID NO: 131828 - DNA, 25 bp, Artificial
  Probe
tttcgactttcagaatcataagccc

SEQ ID NO: 131829 - DNA, 25 bp, Artificial
  Probe
tggaatttcgactttcagaatcata

SEQ ID NO: 131830 - DNA, 25 bp, Artificial
  Probe
gacgtaaacagctccgaattaagaa

SEQ ID NO: 131831 - DNA, 25 bp, Artificial
  Probe
aatttcgactttcagaatcataagc

SEQ ID NO: 131832 - DNA, 25 bp, Artificial
  Probe
agacgtaaacagctccgaattaaga

SEQ ID NO: 131833 - DNA, 25 bp, Artificial
  Probe
cagacgtaaacagctccgaattaag

SEQ ID NO: 131834 - DNA, 25 bp, Artificial
  Probe
gtaaacagctccgaattaagaataa

SEQ ID NO: 131835 - DNA, 25 bp, Artificial
  Probe
ggaatttcgactttcagaatcataa

SEQ ID NO: 131836 - DNA, 25 bp, Artificial
  Probe
cttgtttattagatacatcactgct

SEQ ID NO: 131837 - DNA, 25 bp, Artificial
  Probe
ttagatacatcactgctttatgaag

SEQ ID NO: 131838 - DNA, 25 bp, Artificial
  Probe
gaagcaaggaagacatacatgaaaa

SEQ ID NO: 131839 - DNA, 25 bp, Artificial
  Probe
tgtttattagatacatcactgcttt

SEQ ID NO: 131840 - DNA, 25 bp, Artificial
  Probe
ttgtttattagatacatcactgctt

SEQ ID NO: 131841 - DNA, 25 bp, Artificial
  Probe
caagtggaatttcgactttcagaat

SEQ ID NO: 131842 - DNA, 25 bp, Artificial
  Probe
aagtggaatttcgactttcagaatc

SEQ ID NO: 131843 - DNA, 25 bp, Artificial
  Probe
tccttgtttattagatacatcactg

SEQ ID NO: 131844 - DNA, 25 bp, Artificial
  Probe
ccagacgtaaacagctccgaattaa

SEQ ID NO: 131845 - DNA, 25 bp, Artificial
  Probe
attagatacatcactgctttatgaa

SEQ ID NO: 131846 - DNA, 25 bp, Artificial
  Probe
gaatttcgactttcagaatcataag

SEQ ID NO: 131847 - DNA, 25 bp, Artificial
  Probe
taaacagctccgaattaagaataat

SEQ ID NO: 131848 - DNA, 25 bp, Artificial
  Probe
aaacagctccgaattaagaataatt

SEQ ID NO: 131849 - DNA, 25 bp, Artificial
  Probe
gcaagtggaatttcgactttcagaa

SEQ ID NO: 131850 - DNA, 25 bp, Artificial
  Probe
ttccttgtttattagatacatcact

SEQ ID NO: 131851 - DNA, 25 bp, Artificial
  Probe
tattagatacatcactgctttatga

SEQ ID NO: 131852 - DNA, 25 bp, Artificial
  Probe
gtttattagatacatcactgcttta

SEQ ID NO: 131853 - DNA, 25 bp, Artificial
  Probe
gctttatgaagcaaggaagacatac

SEQ ID NO: 131854 - DNA, 25 bp, Artificial
  Probe
tagatacatcactgctttatgaagc

SEQ ID NO: 131855 - DNA, 25 bp, Artificial
  Probe
cttcaattgggtctcaggcaaactc

SEQ ID NO: 131856 - DNA, 25 bp, Artificial
  Probe
cgcaagtggaatttcgactttcaga

SEQ ID NO: 131857 - DNA, 25 bp, Artificial
  Probe
ttcaattgggtctcaggcaaactct

SEQ ID NO: 131858 - DNA, 25 bp, Artificial
  Probe
tcaattgggtctcaggcaaactctg

SEQ ID NO: 131859 - DNA, 25 bp, Artificial
  Probe
caattgggtctcaggcaaactctga

SEQ ID NO: 131860 - DNA, 25 bp, Artificial
  Probe
tcacagaatttaaactcaaggaagt

SEQ ID NO: 131861 - DNA, 25 bp, Artificial
  Probe
atcacagaatttaaactcaaggaag

SEQ ID NO: 131862 - DNA, 25 bp, Artificial
  Probe
gatttcaggtaaccagagcaaaaga

SEQ ID NO: 131863 - DNA, 25 bp, Artificial
  Probe
cttgaccctatggactggagatgac

SEQ ID NO: 131864 - DNA, 25 bp, Artificial
  Probe
ggatttcaggtaaccagagcaaaag

SEQ ID NO: 131865 - DNA, 25 bp, Artificial
  Probe
aatttaatcggggatttcaggtaac

SEQ ID NO: 131866 - DNA, 25 bp, Artificial
  Probe
caatttaatcggggatttcaggtaa

SEQ ID NO: 131867 - DNA, 25 bp, Artificial
  Probe
atttaatcggggatttcaggtaacc

SEQ ID NO: 131868 - DNA, 25 bp, Artificial
  Probe
tatcacagaatttaaactcaaggaa

SEQ ID NO: 131869 - DNA, 25 bp, Artificial
  Probe
aaccttgaccctatggactggagat

SEQ ID NO: 131870 - DNA, 25 bp, Artificial
  Probe
gcaatttaatcggggatttcaggta

SEQ ID NO: 131871 - DNA, 25 bp, Artificial
  Probe
aaaccttgaccctatggactggaga

SEQ ID NO: 131872 - DNA, 25 bp, Artificial
  Probe
tttaatcggggatttcaggtaacca

SEQ ID NO: 131873 - DNA, 25 bp, Artificial
  Probe
gggatttcaggtaaccagagcaaaa

SEQ ID NO: 131874 - DNA, 25 bp, Artificial
  Probe
caaaccttgaccctatggactggag

SEQ ID NO: 131875 - DNA, 25 bp, Artificial
  Probe
ttaatcggggatttcaggtaaccag

SEQ ID NO: 131876 - DNA, 25 bp, Artificial
  Probe
tggagatgacccagatatttatttt

SEQ ID NO: 131877 - DNA, 25 bp, Artificial
  Probe
ccttgaccctatggactggagatga

SEQ ID NO: 131878 - DNA, 25 bp, Artificial
  Probe
ttgaccctatggactggagatgacc

SEQ ID NO: 131879 - DNA, 25 bp, Artificial
  Probe
accttgaccctatggactggagatg

SEQ ID NO: 131880 - DNA, 25 bp, Artificial
  Probe
taatcggggatttcaggtaaccaga

SEQ ID NO: 131881 - DNA, 25 bp, Artificial
  Probe
gactggagatgacccagatatttat

SEQ ID NO: 131882 - DNA, 25 bp, Artificial
  Probe
actggagatgacccagatatttatt

SEQ ID NO: 131883 - DNA, 25 bp, Artificial
  Probe
ggactggagatgacccagatattta

SEQ ID NO: 131884 - DNA, 25 bp, Artificial
  Probe
ggcaatttaatcggggatttcaggt

SEQ ID NO: 131885 - DNA, 25 bp, Artificial
  Probe
tatggactggagatgacccagatat

SEQ ID NO: 131886 - DNA, 25 bp, Artificial
  Probe
ctggagatgacccagatatttattt

SEQ ID NO: 131887 - DNA, 25 bp, Artificial
  Probe
ggggatttcaggtaaccagagcaaa

SEQ ID NO: 131888 - DNA, 25 bp, Artificial
  Probe
aatcggggatttcaggtaaccagag

SEQ ID NO: 131889 - DNA, 25 bp, Artificial
  Probe
ctatggactggagatgacccagata

SEQ ID NO: 131890 - DNA, 25 bp, Artificial
  Probe
atggactggagatgacccagatatt

SEQ ID NO: 131891 - DNA, 25 bp, Artificial
  Probe
tggactggagatgacccagatattt

SEQ ID NO: 131892 - DNA, 25 bp, Artificial
  Probe
cctatggactggagatgacccagat

SEQ ID NO: 131893 - DNA, 25 bp, Artificial
  Probe
agaagaactactgctcaagattcac

SEQ ID NO: 131894 - DNA, 25 bp, Artificial
  Probe
ctaatcttcaatcacgagaggttct

SEQ ID NO: 131895 - DNA, 25 bp, Artificial
  Probe
taatcttcaatcacgagaggttctt

SEQ ID NO: 131896 - DNA, 25 bp, Artificial
  Probe
aatcttcaatcacgagaggttcttc

SEQ ID NO: 131897 - DNA, 25 bp, Artificial
  Probe
ggcaagattactaagaataccaact

SEQ ID NO: 131898 - DNA, 25 bp, Artificial
  Probe
atcttcaatcacgagaggttcttct

SEQ ID NO: 131899 - DNA, 25 bp, Artificial
  Probe
gaagaactactgctcaagattcacg

SEQ ID NO: 131900 - DNA, 25 bp, Artificial
  Probe
cagaagaactactgctcaagattca

SEQ ID NO: 131901 - DNA, 25 bp, Artificial
  Probe
aagaactactgctcaagattcacga

SEQ ID NO: 131902 - DNA, 25 bp, Artificial
  Probe
gacttcctcatgtgttactctgttg

SEQ ID NO: 131903 - DNA, 25 bp, Artificial
  Probe
cctaatcttcaatcacgagaggttc

SEQ ID NO: 131904 - DNA, 25 bp, Artificial
  Probe
tcttcaatcacgagaggttcttctg

SEQ ID NO: 131905 - DNA, 25 bp, Artificial
  Probe
tggcaagattactaagaataccaac

SEQ ID NO: 131906 - DNA, 25 bp, Artificial
  Probe
ggacttcctcatgtgttactctgtt

SEQ ID NO: 131907 - DNA, 25 bp, Artificial
  Probe
aaacccaagatattcatcatccagg

SEQ ID NO: 131908 - DNA, 25 bp, Artificial
  Probe
gggaaggctaaagaaatctaggaaa

SEQ ID NO: 131909 - DNA, 25 bp, Artificial
  Probe
tttctgtcccaaacctagtaagtag

SEQ ID NO: 131910 - DNA, 25 bp, Artificial
  Probe
tttgaagtgaaatgctttaacgacc

SEQ ID NO: 131911 - DNA, 25 bp, Artificial
  Probe
ataccaactactttgccttaccttt

SEQ ID NO: 131912 - DNA, 25 bp, Artificial
  Probe
aataccaactactttgccttacctt

SEQ ID NO: 131913 - DNA, 25 bp, Artificial
  Probe
catttctgtcccaaacctagtaagt

SEQ ID NO: 131914 - DNA, 25 bp, Artificial
  Probe
actaagaataccaactactttgcct

SEQ ID NO: 131915 - DNA, 25 bp, Artificial
  Probe
aagaaatctaggaaattactgtgcg

SEQ ID NO: 131916 - DNA, 25 bp, Artificial
  Probe
gaataccaactactttgccttacct

SEQ ID NO: 131917 - DNA, 25 bp, Artificial
  Probe
agaataccaactactttgccttacc

SEQ ID NO: 131918 - DNA, 25 bp, Artificial
  Probe
tttcacacacatttcccttctacac

SEQ ID NO: 131919 - DNA, 25 bp, Artificial
  Probe
gtttcacacacatttcccttctaca

SEQ ID NO: 131920 - DNA, 25 bp, Artificial
  Probe
atttctgtcccaaacctagtaagta

SEQ ID NO: 131921 - DNA, 25 bp, Artificial
  Probe
atgtttctggtaaatggcaagatta

SEQ ID NO: 131922 - DNA, 25 bp, Artificial
  Probe
tatgtttctggtaaatggcaagatt

SEQ ID NO: 131923 - DNA, 25 bp, Artificial
  Probe
ttatgtttctggtaaatggcaagat

SEQ ID NO: 131924 - DNA, 25 bp, Artificial
  Probe
attatgtttctggtaaatggcaaga

SEQ ID NO: 131925 - DNA, 25 bp, Artificial
  Probe
aagaataccaactactttgccttac

SEQ ID NO: 131926 - DNA, 25 bp, Artificial
  Probe
atggcaagattactaagaataccaa

SEQ ID NO: 131927 - DNA, 25 bp, Artificial
  Probe
aatggcaagattactaagaatacca

SEQ ID NO: 131928 - DNA, 25 bp, Artificial
  Probe
ttgaagtgaaatgctttaacgacct

SEQ ID NO: 131929 - DNA, 25 bp, Artificial
  Probe
cttcaatcacgagaggttcttctgg

SEQ ID NO: 131930 - DNA, 25 bp, Artificial
  Probe
ctaagaataccaactactttgcctt

SEQ ID NO: 131931 - DNA, 25 bp, Artificial
  Probe
ggatttgaagtgaaatgctttaacg

SEQ ID NO: 131932 - DNA, 25 bp, Artificial
  Probe
ggaaggctaaagaaatctaggaaat

SEQ ID NO: 131933 - DNA, 25 bp, Artificial
  Probe
tacaagatggaccacaagaggagag

SEQ ID NO: 131934 - DNA, 25 bp, Artificial
  Probe
acttcctcatgtgttactctgttgc

SEQ ID NO: 131935 - DNA, 25 bp, Artificial
  Probe
gcatttctgtcccaaacctagtaag

SEQ ID NO: 131936 - DNA, 25 bp, Artificial
  Probe
tgaagtgaaatgctttaacgacctc

SEQ ID NO: 131937 - DNA, 25 bp, Artificial
  Probe
atttgaagtgaaatgctttaacgac

SEQ ID NO: 131938 - DNA, 25 bp, Artificial
  Probe
attatctgtggcatcttagtggtag

SEQ ID NO: 131939 - DNA, 25 bp, Artificial
  Probe
cattatctgtggcatcttagtggta

SEQ ID NO: 131940 - DNA, 25 bp, Artificial
  Probe
atcattctgtatctgccattcactc

SEQ ID NO: 131941 - DNA, 25 bp, Artificial
  Probe
catcattctgtatctgccattcact

SEQ ID NO: 131942 - DNA, 25 bp, Artificial
  Probe
aagaagagagtgaggacattgagaa

SEQ ID NO: 131943 - DNA, 25 bp, Artificial
  Probe
aagagagtgaggacattgagaacat

SEQ ID NO: 131944 - DNA, 25 bp, Artificial
  Probe
gaagaagagagtgaggacattgaga

SEQ ID NO: 131945 - DNA, 25 bp, Artificial
  Probe
cattctgtatctgccattcactcac

SEQ ID NO: 131946 - DNA, 25 bp, Artificial
  Probe
agaagagagtgaggacattgagaac

SEQ ID NO: 131947 - DNA, 25 bp, Artificial
  Probe
ccatcaccatcatcttcaacaagtt

SEQ ID NO: 131948 - DNA, 25 bp, Artificial
  Probe
tcattctgtatctgccattcactca

SEQ ID NO: 131949 - DNA, 25 bp, Artificial
  Probe
aaggaagaagagagtgaggacattg

SEQ ID NO: 131950 - DNA, 25 bp, Artificial
  Probe
caaggaagaagagagtgaggacatt

SEQ ID NO: 131951 - DNA, 25 bp, Artificial
  Probe
gaagagagtgaggacattgagaaca

SEQ ID NO: 131952 - DNA, 25 bp, Artificial
  Probe
ttatctgtggcatcttagtggtagc

SEQ ID NO: 131953 - DNA, 25 bp, Artificial
  Probe
ggaagaagagagtgaggacattgag

SEQ ID NO: 131954 - DNA, 25 bp, Artificial
  Probe
aggaagaagagagtgaggacattga

SEQ ID NO: 131955 - DNA, 25 bp, Artificial
  Probe
ctgtatctgccattcactcacattg

SEQ ID NO: 131956 - DNA, 25 bp, Artificial
  Probe
cttcatcaccagtctgtcttccatt

SEQ ID NO: 131957 - DNA, 25 bp, Artificial
  Probe
tctgtatctgccattcactcacatt

SEQ ID NO: 131958 - DNA, 25 bp, Artificial
  Probe
ttctgtatctgccattcactcacat

SEQ ID NO: 131959 - DNA, 25 bp, Artificial
  Probe
attctgtatctgccattcactcaca

SEQ ID NO: 131960 - DNA, 25 bp, Artificial
  Probe
ctttgtctccatcattcccttctat

SEQ ID NO: 131961 - DNA, 25 bp, Artificial
  Probe
tacggcttacgcatcattctgtatc

SEQ ID NO: 131962 - DNA, 25 bp, Artificial
  Probe
ctacggcttacgcatcattctgtat

SEQ ID NO: 131963 - DNA, 25 bp, Artificial
  Probe
ttctctgtgcttatttactctgtgg

SEQ ID NO: 131964 - DNA, 25 bp, Artificial
  Probe
agagagtgaggacattgagaacatg

SEQ ID NO: 131965 - DNA, 25 bp, Artificial
  Probe
ttcatcaccagtctgtcttccattg

SEQ ID NO: 131966 - DNA, 25 bp, Artificial
  Probe
tgtatctgccattcactcacattga

SEQ ID NO: 131967 - DNA, 25 bp, Artificial
  Probe
tattgggaaggatttattgctacgg

SEQ ID NO: 131968 - DNA, 25 bp, Artificial
  Probe
gcattatctgtggcatcttagtggt

SEQ ID NO: 131969 - DNA, 25 bp, Artificial
  Probe
atagttggacattcattgccgaatt

SEQ ID NO: 131970 - DNA, 25 bp, Artificial
  Probe
tttctctgtgcttatttactctgtg

SEQ ID NO: 131971 - DNA, 25 bp, Artificial
  Probe
catcaccatcatcttcaacaagttt

SEQ ID NO: 131972 - DNA, 25 bp, Artificial
  Probe
tttgtctccatcattcccttctatg

SEQ ID NO: 131973 - DNA, 25 bp, Artificial
  Probe
atattgggaaggatttattgctacg

SEQ ID NO: 131974 - DNA, 25 bp, Artificial
  Probe
actttgtctccatcattcccttcta

SEQ ID NO: 131975 - DNA, 25 bp, Artificial
  Probe
tctctgtgcttatttactctgtgga

SEQ ID NO: 131976 - DNA, 25 bp, Artificial
  Probe
ttagccatagttggacattcattgc

SEQ ID NO: 131977 - DNA, 25 bp, Artificial
  Probe
gtactaccagaagcagaaggacatg

SEQ ID NO: 131978 - DNA, 25 bp, Artificial
  Probe
catagttggacattcattgccgaat

SEQ ID NO: 131979 - DNA, 25 bp, Artificial
  Probe
ttactctgtggagaaagatgaactc

SEQ ID NO: 131980 - DNA, 25 bp, Artificial
  Probe
tgcttatttactctgtggagaaaga

SEQ ID NO: 131981 - DNA, 25 bp, Artificial
  Probe
gtgcttatttactctgtggagaaag

SEQ ID NO: 131982 - DNA, 25 bp, Artificial
  Probe
tgtgcttatttactctgtggagaaa

SEQ ID NO: 131983 - DNA, 25 bp, Artificial
  Probe
ctaactcagttggagagattcacat

SEQ ID NO: 131984 - DNA, 25 bp, Artificial
  Probe
gtctaactcagttggagagattcac

SEQ ID NO: 131985 - DNA, 25 bp, Artificial
  Probe
tctaactcagttggagagattcaca

SEQ ID NO: 131986 - DNA, 25 bp, Artificial
  Probe
tgtctaactcagttggagagattca

SEQ ID NO: 131987 - DNA, 25 bp, Artificial
  Probe
taactcagttggagagattcacatg

SEQ ID NO: 131988 - DNA, 25 bp, Artificial
  Probe
cagttggagagattcacatgaagac

SEQ ID NO: 131989 - DNA, 25 bp, Artificial
  Probe
ctgtctaactcagttggagagattc

SEQ ID NO: 131990 - DNA, 25 bp, Artificial
  Probe
tctgtctaactcagttggagagatt

SEQ ID NO: 131991 - DNA, 25 bp, Artificial
  Probe
ctcagttggagagattcacatgaag

SEQ ID NO: 131992 - DNA, 25 bp, Artificial
  Probe
tcagttggagagattcacatgaaga

SEQ ID NO: 131993 - DNA, 25 bp, Artificial
  Probe
actcagttggagagattcacatgaa

SEQ ID NO: 131994 - DNA, 25 bp, Artificial
  Probe
aactcagttggagagattcacatga

SEQ ID NO: 131995 - DNA, 25 bp, Artificial
  Probe
agttggagagattcacatgaagacc

SEQ ID NO: 131996 - DNA, 25 bp, Artificial
  Probe
ttggagagattcacatgaagaccat

SEQ ID NO: 131997 - DNA, 25 bp, Artificial
  Probe
aacttaccagtcttctgccatattt

SEQ ID NO: 131998 - DNA, 25 bp, Artificial
  Probe
aaacttaccagtcttctgccatatt

SEQ ID NO: 131999 - DNA, 25 bp, Artificial
  Probe
atagtccaggctctgtctaactcag

SEQ ID NO: 132000 - DNA, 25 bp, Artificial
  Probe
gatagtccaggctctgtctaactca

SEQ ID NO: 132001 - DNA, 25 bp, Artificial
  Probe
gtagttctatgtgtggtgtgctgtg

SEQ ID NO: 132002 - DNA, 25 bp, Artificial
  Probe
tagttctatgtgtggtgtgctgtgt

SEQ ID NO: 132003 - DNA, 25 bp, Artificial
  Probe
gttggagagattcacatgaagacca

SEQ ID NO: 132004 - DNA, 25 bp, Artificial
  Probe
ctatgtgtggtgtgctgtgtctcta

SEQ ID NO: 132005 - DNA, 25 bp, Artificial
  Probe
ctctgtctaactcagttggagagat

SEQ ID NO: 132006 - DNA, 25 bp, Artificial
  Probe
ctactccctgaggctaatgtgaatg

SEQ ID NO: 132007 - DNA, 25 bp, Artificial
  Probe
tctactccctgaggctaatgtgaat

SEQ ID NO: 132008 - DNA, 25 bp, Artificial
  Probe
tatgtgtggtgtgctgtgtctctac

SEQ ID NO: 132009 - DNA, 25 bp, Artificial
  Probe
aggtagttctatgtgtggtgtgctg

SEQ ID NO: 132010 - DNA, 25 bp, Artificial
  Probe
caggtagttctatgtgtggtgtgct

SEQ ID NO: 132011 - DNA, 25 bp, Artificial
  Probe
ggtagttctatgtgtggtgtgctgt

SEQ ID NO: 132012 - DNA, 25 bp, Artificial
  Probe
tagtccaggctctgtctaactcagt

SEQ ID NO: 132013 - DNA, 25 bp, Artificial
  Probe
tactccctgaggctaatgtgaatgt

SEQ ID NO: 132014 - DNA, 25 bp, Artificial
  Probe
ctctactccctgaggctaatgtgaa

SEQ ID NO: 132015 - DNA, 25 bp, Artificial
  Probe
tgttttattttgttttgggttttgc

SEQ ID NO: 132016 - DNA, 25 bp, Artificial
  Probe
gaagggtgctcacaggtagttctat

SEQ ID NO: 132017 - DNA, 25 bp, Artificial
  Probe
ttctatgtgtggtgtgctgtgtctc

SEQ ID NO: 132018 - DNA, 25 bp, Artificial
  Probe
tggagagattcacatgaagaccatg

SEQ ID NO: 132019 - DNA, 25 bp, Artificial
  Probe
aagggtgctcacaggtagttctatg

SEQ ID NO: 132020 - DNA, 25 bp, Artificial
  Probe
acaggtagttctatgtgtggtgtgc

SEQ ID NO: 132021 - DNA, 25 bp, Artificial
  Probe
taccagtcttctgccatattttcat

SEQ ID NO: 132022 - DNA, 25 bp, Artificial
  Probe
ttaccagtcttctgccatattttca

SEQ ID NO: 132023 - DNA, 25 bp, Artificial
  Probe
acttaccagtcttctgccatatttt

SEQ ID NO: 132024 - DNA, 25 bp, Artificial
  Probe
aaaacttaccagtcttctgccatat

SEQ ID NO: 132025 - DNA, 25 bp, Artificial
  Probe
ccagtcttctgccatattttcattg

SEQ ID NO: 132026 - DNA, 25 bp, Artificial
  Probe
cttaccagtcttctgccatattttc

SEQ ID NO: 132027 - DNA, 25 bp, Artificial
  Probe
taaaacttaccagtcttctgccata

SEQ ID NO: 132028 - DNA, 25 bp, Artificial
  Probe
gagacaagagaaatccacatcaaga

SEQ ID NO: 132029 - DNA, 25 bp, Artificial
  Probe
agagacaagagaaatccacatcaag

SEQ ID NO: 132030 - DNA, 25 bp, Artificial
  Probe
agacaagagaaatccacatcaagac

SEQ ID NO: 132031 - DNA, 25 bp, Artificial
  Probe
cagagacaagagaaatccacatcaa

SEQ ID NO: 132032 - DNA, 25 bp, Artificial
  Probe
caagagaaatccacatcaagaccat

SEQ ID NO: 132033 - DNA, 25 bp, Artificial
  Probe
cacagagacaagagaaatccacatc

SEQ ID NO: 132034 - DNA, 25 bp, Artificial
  Probe
gacaagagaaatccacatcaagacc

SEQ ID NO: 132035 - DNA, 25 bp, Artificial
  Probe
acagagacaagagaaatccacatca

SEQ ID NO: 132036 - DNA, 25 bp, Artificial
  Probe
tcacagagacaagagaaatccacat

SEQ ID NO: 132037 - DNA, 25 bp, Artificial
  Probe
acaagagaaatccacatcaagacca

SEQ ID NO: 132038 - DNA, 25 bp, Artificial
  Probe
aagagaaatccacatcaagaccatg

SEQ ID NO: 132039 - DNA, 25 bp, Artificial
  Probe
ctcacagagacaagagaaatccaca

SEQ ID NO: 132040 - DNA, 25 bp, Artificial
  Probe
aagaatcctcagtcttgtgctattt

SEQ ID NO: 132041 - DNA, 25 bp, Artificial
  Probe
aaagaatcctcagtcttgtgctatt

SEQ ID NO: 132042 - DNA, 25 bp, Artificial
  Probe
caaagaatcctcagtcttgtgctat

SEQ ID NO: 132043 - DNA, 25 bp, Artificial
  Probe
tcctcagtcttgtgctattttctaa

SEQ ID NO: 132044 - DNA, 25 bp, Artificial
  Probe
aatcctcagtcttgtgctattttct

SEQ ID NO: 132045 - DNA, 25 bp, Artificial
  Probe
atcctcagtcttgtgctattttcta

SEQ ID NO: 132046 - DNA, 25 bp, Artificial
  Probe
gaatcctcagtcttgtgctattttc

SEQ ID NO: 132047 - DNA, 25 bp, Artificial
  Probe
agaatcctcagtcttgtgctatttt

SEQ ID NO: 132048 - DNA, 25 bp, Artificial
  Probe
cctcagtcttgtgctattttctaat

SEQ ID NO: 132049 - DNA, 25 bp, Artificial
  Probe
agagaaatccacatcaagaccatgc

SEQ ID NO: 132050 - DNA, 25 bp, Artificial
  Probe
tcagtcttgtgctattttctaatgt

SEQ ID NO: 132051 - DNA, 25 bp, Artificial
  Probe
cttctgtgtggagaacggcattatt

SEQ ID NO: 132052 - DNA, 25 bp, Artificial
  Probe
gctcacagagacaagagaaatccac

SEQ ID NO: 132053 - DNA, 25 bp, Artificial
  Probe
ctgctcacagagacaagagaaatcc

SEQ ID NO: 132054 - DNA, 25 bp, Artificial
  Probe
ctcagtcttgtgctattttctaatg

SEQ ID NO: 132055 - DNA, 25 bp, Artificial
  Probe
tgctcacagagacaagagaaatcca

SEQ ID NO: 132056 - DNA, 25 bp, Artificial
  Probe
ccaaagaatcctcagtcttgtgcta

SEQ ID NO: 132057 - DNA, 25 bp, Artificial
  Probe
gctgctcacagagacaagagaaatc

SEQ ID NO: 132058 - DNA, 25 bp, Artificial
  Probe
ttctgtgtggagaacggcattattt

SEQ ID NO: 132059 - DNA, 25 bp, Artificial
  Probe
cagtcttgtgctattttctaatgta

SEQ ID NO: 132060 - DNA, 25 bp, Artificial
  Probe
gagaaatccacatcaagaccatgcc

SEQ ID NO: 132061 - DNA, 25 bp, Artificial
  Probe
ggaccaaagaatcctcagtcttgtg

SEQ ID NO: 132062 - DNA, 25 bp, Artificial
  Probe
gaaatccacatcaagaccatgccag

SEQ ID NO: 132063 - DNA, 25 bp, Artificial
  Probe
agtcttgtgctattttctaatgtaa

SEQ ID NO: 132064 - DNA, 25 bp, Artificial
  Probe
agaaatccacatcaagaccatgcca

SEQ ID NO: 132065 - DNA, 25 bp, Artificial
  Probe
gaccaaagaatcctcagtcttgtgc

SEQ ID NO: 132066 - DNA, 25 bp, Artificial
  Probe
agctgctcacagagacaagagaaat

SEQ ID NO: 132067 - DNA, 25 bp, Artificial
  Probe
accaaagaatcctcagtcttgtgct

SEQ ID NO: 132068 - DNA, 25 bp, Artificial
  Probe
gggaccaaagaatcctcagtcttgt

SEQ ID NO: 132069 - DNA, 25 bp, Artificial
  Probe
gtcttgtgctattttctaatgtaaa

SEQ ID NO: 132070 - DNA, 25 bp, Artificial
  Probe
aggaacagccagtatacctgtgatc

SEQ ID NO: 132071 - DNA, 25 bp, Artificial
  Probe
ctcatccgtgacgctgagtatcatc

SEQ ID NO: 132072 - DNA, 25 bp, Artificial
  Probe
caggaacagccagtatacctgtgat

SEQ ID NO: 132073 - DNA, 25 bp, Artificial
  Probe
agttatcacttcactagatgagcag

SEQ ID NO: 132074 - DNA, 25 bp, Artificial
  Probe
cagttatcacttcactagatgagca

SEQ ID NO: 132075 - DNA, 25 bp, Artificial
  Probe
tcagttatcacttcactagatgagc

SEQ ID NO: 132076 - DNA, 25 bp, Artificial
  Probe
ttatcacttcactagatgagcagga

SEQ ID NO: 132077 - DNA, 25 bp, Artificial
  Probe
gttatcacttcactagatgagcagg

SEQ ID NO: 132078 - DNA, 25 bp, Artificial
  Probe
ccttcagttatcacttcactagatg

SEQ ID NO: 132079 - DNA, 25 bp, Artificial
  Probe
tatcacttcactagatgagcaggac

SEQ ID NO: 132080 - DNA, 25 bp, Artificial
  Probe
ttcagttatcacttcactagatgag

SEQ ID NO: 132081 - DNA, 25 bp, Artificial
  Probe
cttcagttatcacttcactagatga

SEQ ID NO: 132082 - DNA, 25 bp, Artificial
  Probe
ggctgacatccaaggtttagattta

SEQ ID NO: 132083 - DNA, 25 bp, Artificial
  Probe
gctgacatccaaggtttagatttat

SEQ ID NO: 132084 - DNA, 25 bp, Artificial
  Probe
tttggaagtgttctttgatgtagca

SEQ ID NO: 132085 - DNA, 25 bp, Artificial
  Probe
ggtccatgttctatcctttcactta

SEQ ID NO: 132086 - DNA, 25 bp, Artificial
  Probe
cccttcagttatcacttcactagat

SEQ ID NO: 132087 - DNA, 25 bp, Artificial
  Probe
gtccatgttctatcctttcacttag

SEQ ID NO: 132088 - DNA, 25 bp, Artificial
  Probe
atcacttcactagatgagcaggaca

SEQ ID NO: 132089 - DNA, 25 bp, Artificial
  Probe
cagcccttcagttatcacttcacta

SEQ ID NO: 132090 - DNA, 25 bp, Artificial
  Probe
ctacagcccttcagttatcacttca

SEQ ID NO: 132091 - DNA, 25 bp, Artificial
  Probe
actacagcccttcagttatcacttc

SEQ ID NO: 132092 - DNA, 25 bp, Artificial
  Probe
gcccttcagttatcacttcactaga

SEQ ID NO: 132093 - DNA, 25 bp, Artificial
  Probe
agcccttcagttatcacttcactag

SEQ ID NO: 132094 - DNA, 25 bp, Artificial
  Probe
tacagcccttcagttatcacttcac

SEQ ID NO: 132095 - DNA, 25 bp, Artificial
  Probe
cactacagcccttcagttatcactt

SEQ ID NO: 132096 - DNA, 25 bp, Artificial
  Probe
ttggaagtgttctttgatgtagcac

SEQ ID NO: 132097 - DNA, 25 bp, Artificial
  Probe
ctagcactgagcagatacattgtgg

SEQ ID NO: 132098 - DNA, 25 bp, Artificial
  Probe
cctagcactgagcagatacattgtg

SEQ ID NO: 132099 - DNA, 25 bp, Artificial
  Probe
gggtccatgttctatcctttcactt

SEQ ID NO: 132100 - DNA, 25 bp, Artificial
  Probe
ctgacatccaaggtttagatttatt

SEQ ID NO: 132101 - DNA, 25 bp, Artificial
  Probe
tcacttcactagatgagcaggacac

SEQ ID NO: 132102 - DNA, 25 bp, Artificial
  Probe
tccatgttctatcctttcacttaga

SEQ ID NO: 132103 - DNA, 25 bp, Artificial
  Probe
gggctgacatccaaggtttagattt

SEQ ID NO: 132104 - DNA, 25 bp, Artificial
  Probe
gatttcctgtctagtctcccactac

SEQ ID NO: 132105 - DNA, 25 bp, Artificial
  Probe
tacccaaacccaaacatctgttctt

SEQ ID NO: 132106 - DNA, 25 bp, Artificial
  Probe
gtctagtctcccactacatgagtac

SEQ ID NO: 132107 - DNA, 25 bp, Artificial
  Probe
tgatttcctgtctagtctcccacta

SEQ ID NO: 132108 - DNA, 25 bp, Artificial
  Probe
tgtctagtctcccactacatgagta

SEQ ID NO: 132109 - DNA, 25 bp, Artificial
  Probe
tttcctgtctagtctcccactacat

SEQ ID NO: 132110 - DNA, 25 bp, Artificial
  Probe
atttcctgtctagtctcccactaca

SEQ ID NO: 132111 - DNA, 25 bp, Artificial
  Probe
tggaagtgttctttgatgtagcaca

SEQ ID NO: 132112 - DNA, 25 bp, Artificial
  Probe
ttttggaagtgttctttgatgtagc

SEQ ID NO: 132113 - DNA, 25 bp, Artificial
  Probe
tgacatccaaggtttagatttattt

SEQ ID NO: 132114 - DNA, 25 bp, Artificial
  Probe
ttctttgatgtagcacattcctttg

SEQ ID NO: 132115 - DNA, 25 bp, Artificial
  Probe
gttctttgatgtagcacattccttt

SEQ ID NO: 132116 - DNA, 25 bp, Artificial
  Probe
aagtgttctttgatgtagcacattc

SEQ ID NO: 132117 - DNA, 25 bp, Artificial
  Probe
gaagtgttctttgatgtagcacatt

SEQ ID NO: 132118 - DNA, 25 bp, Artificial
  Probe
ctggttccttcctgtcctatatcaa

SEQ ID NO: 132119 - DNA, 25 bp, Artificial
  Probe
ctctggttccttcctgtcctatatc

SEQ ID NO: 132120 - DNA, 25 bp, Artificial
  Probe
caagaatgagattgtagtaacggat

SEQ ID NO: 132121 - DNA, 25 bp, Artificial
  Probe
tggttccttcctgtcctatatcaac

SEQ ID NO: 132122 - DNA, 25 bp, Artificial
  Probe
gagacattattgtggcagactatga

SEQ ID NO: 132123 - DNA, 25 bp, Artificial
  Probe
tctggttccttcctgtcctatatca

SEQ ID NO: 132124 - DNA, 25 bp, Artificial
  Probe
gttccttcctgtcctatatcaacac

SEQ ID NO: 132125 - DNA, 25 bp, Artificial
  Probe
agacattattgtggcagactatgac

SEQ ID NO: 132126 - DNA, 25 bp, Artificial
  Probe
aagaatgagattgtagtaacggatt

SEQ ID NO: 132127 - DNA, 25 bp, Artificial
  Probe
gacattattgtggcagactatgaca

SEQ ID NO: 132128 - DNA, 25 bp, Artificial
  Probe
gctgtgaacaacaagaatgagattg

SEQ ID NO: 132129 - DNA, 25 bp, Artificial
  Probe
ggagacattattgtggcagactatg

SEQ ID NO: 132130 - DNA, 25 bp, Artificial
  Probe
ggttccttcctgtcctatatcaaca

SEQ ID NO: 132131 - DNA, 25 bp, Artificial
  Probe
tggagacattattgtggcagactat

SEQ ID NO: 132132 - DNA, 25 bp, Artificial
  Probe
atggagacattattgtggcagacta

SEQ ID NO: 132133 - DNA, 25 bp, Artificial
  Probe
agacagcaacaaccaatgtattcag

SEQ ID NO: 132134 - DNA, 25 bp, Artificial
  Probe
ttccttcctgtcctatatcaacacg

SEQ ID NO: 132135 - DNA, 25 bp, Artificial
  Probe
ggctgtgaacaacaagaatgagatt

SEQ ID NO: 132136 - DNA, 25 bp, Artificial
  Probe
cagacagcaacaaccaatgtattca

SEQ ID NO: 132137 - DNA, 25 bp, Artificial
  Probe
gataacaagtcttgctgtgtcttca

SEQ ID NO: 132138 - DNA, 25 bp, Artificial
  Probe
atgagattgtagtaacggatttcca

SEQ ID NO: 132139 - DNA, 25 bp, Artificial
  Probe
gaatagtggtagcagacagcaacaa

SEQ ID NO: 132140 - DNA, 25 bp, Artificial
  Probe
tgagattgtagtaacggatttccac

SEQ ID NO: 132141 - DNA, 25 bp, Artificial
  Probe
ggataacaagtcttgctgtgtcttc

SEQ ID NO: 132142 - DNA, 25 bp, Artificial
  Probe
ataacaagtcttgctgtgtcttcac

SEQ ID NO: 132143 - DNA, 25 bp, Artificial
  Probe
gctctggttccttcctgtcctatat

SEQ ID NO: 132144 - DNA, 25 bp, Artificial
  Probe
aatgagattgtagtaacggatttcc

SEQ ID NO: 132145 - DNA, 25 bp, Artificial
  Probe
gacagcaacaaccaatgtattcagg

SEQ ID NO: 132146 - DNA, 25 bp, Artificial
  Probe
aatagtggtagcagacagcaacaac

SEQ ID NO: 132147 - DNA, 25 bp, Artificial
  Probe
tagcagacagcaacaaccaatgtat

SEQ ID NO: 132148 - DNA, 25 bp, Artificial
  Probe
tggataacaagtcttgctgtgtctt

SEQ ID NO: 132149 - DNA, 25 bp, Artificial
  Probe
agaatgagattgtagtaacggattt

SEQ ID NO: 132150 - DNA, 25 bp, Artificial
  Probe
tggctgtgaacaacaagaatgagat

SEQ ID NO: 132151 - DNA, 25 bp, Artificial
  Probe
gagattgtagtaacggatttccaca

SEQ ID NO: 132152 - DNA, 25 bp, Artificial
  Probe
gacaccaatggagacattattgtgg

SEQ ID NO: 132153 - DNA, 25 bp, Artificial
  Probe
ggacaccaatggagacattattgtg

SEQ ID NO: 132154 - DNA, 25 bp, Artificial
  Probe
gtggacaccaatggagacattattg

SEQ ID NO: 132155 - DNA, 25 bp, Artificial
  Probe
agtggacaccaatggagacattatt

SEQ ID NO: 132156 - DNA, 25 bp, Artificial
  Probe
cttcctgtcctatatcaacacgtct

SEQ ID NO: 132157 - DNA, 25 bp, Artificial
  Probe
gaatgagattgtagtaacggatttc

SEQ ID NO: 132158 - DNA, 25 bp, Artificial
  Probe
gcagacagcaacaaccaatgtattc

SEQ ID NO: 132159 - DNA, 25 bp, Artificial
  Probe
tggacaccaatggagacattattgt

SEQ ID NO: 132160 - DNA, 25 bp, Artificial
  Probe
aatggagacattattgtggcagact

SEQ ID NO: 132161 - DNA, 25 bp, Artificial
  Probe
caatggagacattattgtggcagac

SEQ ID NO: 132162 - DNA, 25 bp, Artificial
  Probe
ttcctgtcctatatcaacacgtctg

SEQ ID NO: 132163 - DNA, 25 bp, Artificial
  Probe
acctatgttacagcatccaacttat

SEQ ID NO: 132164 - DNA, 25 bp, Artificial
  Probe
gacctatgttacagcatccaactta

SEQ ID NO: 132165 - DNA, 25 bp, Artificial
  Probe
tacctcaagacctatgttacagcat

SEQ ID NO: 132166 - DNA, 25 bp, Artificial
  Probe
aagacagcaagcatatattcctact

SEQ ID NO: 132167 - DNA, 25 bp, Artificial
  Probe
tgttaccagtaatccattcactctt

SEQ ID NO: 132168 - DNA, 25 bp, Artificial
  Probe
gaagacagcaagcatatattcctac

SEQ ID NO: 132169 - DNA, 25 bp, Artificial
  Probe
cgaagacagcaagcatatattccta

SEQ ID NO: 132170 - DNA, 25 bp, Artificial
  Probe
agacagcaagcatatattcctacta

SEQ ID NO: 132171 - DNA, 25 bp, Artificial
  Probe
tcaagacctatgttacagcatccaa

SEQ ID NO: 132172 - DNA, 25 bp, Artificial
  Probe
gacagcaagcatatattcctactag

SEQ ID NO: 132173 - DNA, 25 bp, Artificial
  Probe
agacctatgttacagcatccaactt

SEQ ID NO: 132174 - DNA, 25 bp, Artificial
  Probe
aagacctatgttacagcatccaact

SEQ ID NO: 132175 - DNA, 25 bp, Artificial
  Probe
caagacctatgttacagcatccaac

SEQ ID NO: 132176 - DNA, 25 bp, Artificial
  Probe
cctatgttacagcatccaacttata

SEQ ID NO: 132177 - DNA, 25 bp, Artificial
  Probe
gtgttaccagtaatccattcactct

SEQ ID NO: 132178 - DNA, 25 bp, Artificial
  Probe
ctcaagacctatgttacagcatcca

SEQ ID NO: 132179 - DNA, 25 bp, Artificial
  Probe
acctcaagacctatgttacagcatc

SEQ ID NO: 132180 - DNA, 25 bp, Artificial
  Probe
gtacctcaagacctatgttacagca

SEQ ID NO: 132181 - DNA, 25 bp, Artificial
  Probe
ctagtgttaccagtaatccattcac

SEQ ID NO: 132182 - DNA, 25 bp, Artificial
  Probe
catcgaagacagcaagcatatattc

SEQ ID NO: 132183 - DNA, 25 bp, Artificial
  Probe
acagcatccaacttataatatctcc

SEQ ID NO: 132184 - DNA, 25 bp, Artificial
  Probe
cgaccattcatcagactcagtacaa

SEQ ID NO: 132185 - DNA, 25 bp, Artificial
  Probe
aatcttccctccacattcttacatt

SEQ ID NO: 132186 - DNA, 25 bp, Artificial
  Probe
atcttccctccacattcttacattg

SEQ ID NO: 132187 - DNA, 25 bp, Artificial
  Probe
caatcttccctccacattcttacat

SEQ ID NO: 132188 - DNA, 25 bp, Artificial
  Probe
atcgaagacagcaagcatatattcc

SEQ ID NO: 132189 - DNA, 25 bp, Artificial
  Probe
tccgtgtacctcaagacctatgtta

SEQ ID NO: 132190 - DNA, 25 bp, Artificial
  Probe
ccgtgtacctcaagacctatgttac

SEQ ID NO: 132191 - DNA, 25 bp, Artificial
  Probe
cctcaagacctatgttacagcatcc

SEQ ID NO: 132192 - DNA, 25 bp, Artificial
  Probe
gcatcaagaatggaatggaaacttt

SEQ ID NO: 132193 - DNA, 25 bp, Artificial
  Probe
gcatcgaagacagcaagcatatatt

SEQ ID NO: 132194 - DNA, 25 bp, Artificial
  Probe
atcaagaatggaatggaaactttgg

SEQ ID NO: 132195 - DNA, 25 bp, Artificial
  Probe
gtgtacctcaagacctatgttacag

SEQ ID NO: 132196 - DNA, 25 bp, Artificial
  Probe
gtaatccattcactctttctcacgg

SEQ ID NO: 132197 - DNA, 25 bp, Artificial
  Probe
ccagtaatccattcactctttctca

SEQ ID NO: 132198 - DNA, 25 bp, Artificial
  Probe
accagtaatccattcactctttctc

SEQ ID NO: 132199 - DNA, 25 bp, Artificial
  Probe
aaccaatcttccctccacattctta

SEQ ID NO: 132200 - DNA, 25 bp, Artificial
  Probe
ttcatcagactcagtacaaaccaat

SEQ ID NO: 132201 - DNA, 25 bp, Artificial
  Probe
attcatcagactcagtacaaaccaa

SEQ ID NO: 132202 - DNA, 25 bp, Artificial
  Probe
catcaagaatggaatggaaactttg

SEQ ID NO: 132203 - DNA, 25 bp, Artificial
  Probe
agtaatccattcactctttctcacg

SEQ ID NO: 132204 - DNA, 25 bp, Artificial
  Probe
cagtaatccattcactctttctcac

SEQ ID NO: 132205 - DNA, 25 bp, Artificial
  Probe
tcatcagactcagtacaaaccaatc

SEQ ID NO: 132206 - DNA, 25 bp, Artificial
  Probe
gaccattcatcagactcagtacaaa

SEQ ID NO: 132207 - DNA, 25 bp, Artificial
  Probe
tcgaagacagcaagcatatattcct

SEQ ID NO: 132208 - DNA, 25 bp, Artificial
  Probe
agtagaaccagtgtcacctcttaac

SEQ ID NO: 132209 - DNA, 25 bp, Artificial
  Probe
cagtagaaccagtgtcacctcttaa

SEQ ID NO: 132210 - DNA, 25 bp, Artificial
  Probe
gtagaaccagtgtcacctcttaacc

SEQ ID NO: 132211 - DNA, 25 bp, Artificial
  Probe
gaaattgatgaggatgaaggcattc

SEQ ID NO: 132212 - DNA, 25 bp, Artificial
  Probe
actgagggagagtttgtttgtattt

SEQ ID NO: 132213 - DNA, 25 bp, Artificial
  Probe
ggaaattgatgaggatgaaggcatt

SEQ ID NO: 132214 - DNA, 25 bp, Artificial
  Probe
atttggttaatgtgtacttccttga

SEQ ID NO: 132215 - DNA, 25 bp, Artificial
  Probe
tttggttaatgtgtacttccttgaa

SEQ ID NO: 132216 - DNA, 25 bp, Artificial
  Probe
gaatctaccagtgctttatcctctg

SEQ ID NO: 132217 - DNA, 25 bp, Artificial
  Probe
atctaccagtgctttatcctctgaa

SEQ ID NO: 132218 - DNA, 25 bp, Artificial
  Probe
aatctaccagtgctttatcctctga

SEQ ID NO: 132219 - DNA, 25 bp, Artificial
  Probe
taatgtgtacttccttgaagaagca

SEQ ID NO: 132220 - DNA, 25 bp, Artificial
  Probe
tggttaatgtgtacttccttgaaga

SEQ ID NO: 132221 - DNA, 25 bp, Artificial
  Probe
aggaaattgatgaggatgaaggcat

SEQ ID NO: 132222 - DNA, 25 bp, Artificial
  Probe
ttaatgtgtacttccttgaagaagc

SEQ ID NO: 132223 - DNA, 25 bp, Artificial
  Probe
ttggttaatgtgtacttccttgaag

SEQ ID NO: 132224 - DNA, 25 bp, Artificial
  Probe
taccagtgctttatcctctgaacaa

SEQ ID NO: 132225 - DNA, 25 bp, Artificial
  Probe
ggttaatgtgtacttccttgaagaa

SEQ ID NO: 132226 - DNA, 25 bp, Artificial
  Probe
aattgatgaggatgaaggcattcac

SEQ ID NO: 132227 - DNA, 25 bp, Artificial
  Probe
tctaccagtgctttatcctctgaac

SEQ ID NO: 132228 - DNA, 25 bp, Artificial
  Probe
aatgtgtacttccttgaagaagcag

SEQ ID NO: 132229 - DNA, 25 bp, Artificial
  Probe
ttatcctctgaacaaagctcaaatg

SEQ ID NO: 132230 - DNA, 25 bp, Artificial
  Probe
tatagcaaacacctcaatcgccatt

SEQ ID NO: 132231 - DNA, 25 bp, Artificial
  Probe
aagactatagcaaacacctcaatcg

SEQ ID NO: 132232 - DNA, 25 bp, Artificial
  Probe
aaagactatagcaaacacctcaatc

SEQ ID NO: 132233 - DNA, 25 bp, Artificial
  Probe
gcagtagaaccagtgtcacctctta

SEQ ID NO: 132234 - DNA, 25 bp, Artificial
  Probe
ctaccagtgctttatcctctgaaca

SEQ ID NO: 132235 - DNA, 25 bp, Artificial
  Probe
atggaatctaccagtgctttatcct

SEQ ID NO: 132236 - DNA, 25 bp, Artificial
  Probe
ggaatctaccagtgctttatcctct

SEQ ID NO: 132237 - DNA, 25 bp, Artificial
  Probe
tttatcctctgaacaaagctcaaat

SEQ ID NO: 132238 - DNA, 25 bp, Artificial
  Probe
accagtgctttatcctctgaacaaa

SEQ ID NO: 132239 - DNA, 25 bp, Artificial
  Probe
caggaaattgatgaggatgaaggca

SEQ ID NO: 132240 - DNA, 25 bp, Artificial
  Probe
ccatttggttaatgtgtacttcctt

SEQ ID NO: 132241 - DNA, 25 bp, Artificial
  Probe
tggaatctaccagtgctttatcctc

SEQ ID NO: 132242 - DNA, 25 bp, Artificial
  Probe
tatcctctgaacaaagctcaaatgc

SEQ ID NO: 132243 - DNA, 25 bp, Artificial
  Probe
tcaggaaattgatgaggatgaaggc

SEQ ID NO: 132244 - DNA, 25 bp, Artificial
  Probe
catggaatctaccagtgctttatcc

SEQ ID NO: 132245 - DNA, 25 bp, Artificial
  Probe
gttaatgtgtacttccttgaagaag

SEQ ID NO: 132246 - DNA, 25 bp, Artificial
  Probe
tcaatcgccatttggttaatgtgta

SEQ ID NO: 132247 - DNA, 25 bp, Artificial
  Probe
attgatgaggatgaaggcattcaca

SEQ ID NO: 132248 - DNA, 25 bp, Artificial
  Probe
caatcgccatttggttaatgtgtac

SEQ ID NO: 132249 - DNA, 25 bp, Artificial
  Probe
gaaagactcagcagtagaaccagtg

SEQ ID NO: 132250 - DNA, 25 bp, Artificial
  Probe
atcgccatttggttaatgtgtactt

SEQ ID NO: 132251 - DNA, 25 bp, Artificial
  Probe
aatcgccatttggttaatgtgtact

SEQ ID NO: 132252 - DNA, 25 bp, Artificial
  Probe
ctgagggagagtttgtttgtatttt

SEQ ID NO: 132253 - DNA, 25 bp, Artificial
  Probe
ttaattcgagatatacgcaggagag

SEQ ID NO: 132254 - DNA, 25 bp, Artificial
  Probe
attaattcgagatatacgcaggaga

SEQ ID NO: 132255 - DNA, 25 bp, Artificial
  Probe
cattaattcgagatatacgcaggag

SEQ ID NO: 132256 - DNA, 25 bp, Artificial
  Probe
tatctggaagtcttcagcatgttac

SEQ ID NO: 132257 - DNA, 25 bp, Artificial
  Probe
gtatctggaagtcttcagcatgtta

SEQ ID NO: 132258 - DNA, 25 bp, Artificial
  Probe
aatgatgtccaaggagcaattcaac

SEQ ID NO: 132259 - DNA, 25 bp, Artificial
  Probe
gcattaattcgagatatacgcagga

SEQ ID NO: 132260 - DNA, 25 bp, Artificial
  Probe
agcttgcattaattcgagatatacg

SEQ ID NO: 132261 - DNA, 25 bp, Artificial
  Probe
taattcgagatatacgcaggagagg

SEQ ID NO: 132262 - DNA, 25 bp, Artificial
  Probe
aaagacaaacattcaagccgattag

SEQ ID NO: 132263 - DNA, 25 bp, Artificial
  Probe
gcttgcattaattcgagatatacgc

SEQ ID NO: 132264 - DNA, 25 bp, Artificial
  Probe
atatacgcaggagagggaagaataa

SEQ ID NO: 132265 - DNA, 25 bp, Artificial
  Probe
tatacgcaggagagggaagaataaa

SEQ ID NO: 132266 - DNA, 25 bp, Artificial
  Probe
aagacaaacattcaagccgattaga

SEQ ID NO: 132267 - DNA, 25 bp, Artificial
  Probe
aaacttcctactgtgatgtgaaatg

SEQ ID NO: 132268 - DNA, 25 bp, Artificial
  Probe
gatatacgcaggagagggaagaata

SEQ ID NO: 132269 - DNA, 25 bp, Artificial
  Probe
cgattagaggctcatctcacaagag

SEQ ID NO: 132270 - DNA, 25 bp, Artificial
  Probe
agacaaacattcaagccgattagag

SEQ ID NO: 132271 - DNA, 25 bp, Artificial
  Probe
gggctagtttctgtgtaagtgtaaa

SEQ ID NO: 132272 - DNA, 25 bp, Artificial
  Probe
ctcagcttgcattaattcgagatat

SEQ ID NO: 132273 - DNA, 25 bp, Artificial
  Probe
tgtatctggaagtcttcagcatgtt

SEQ ID NO: 132274 - DNA, 25 bp, Artificial
  Probe
ttgtatctggaagtcttcagcatgt

SEQ ID NO: 132275 - DNA, 25 bp, Artificial
  Probe
ggctagtttctgtgtaagtgtaaat

SEQ ID NO: 132276 - DNA, 25 bp, Artificial
  Probe
cagcttgcattaattcgagatatac

SEQ ID NO: 132277 - DNA, 25 bp, Artificial
  Probe
tcagcttgcattaattcgagatata

SEQ ID NO: 132278 - DNA, 25 bp, Artificial
  Probe
atgaaatgatgtccaaggagcaatt

SEQ ID NO: 132279 - DNA, 25 bp, Artificial
  Probe
aatgaaatgatgtccaaggagcaat

SEQ ID NO: 132280 - DNA, 25 bp, Artificial
  Probe
atttgggctagtttctgtgtaagtg

SEQ ID NO: 132281 - DNA, 25 bp, Artificial
  Probe
catttgggctagtttctgtgtaagt

SEQ ID NO: 132282 - DNA, 25 bp, Artificial
  Probe
aacttcctactgtgatgtgaaatgc

SEQ ID NO: 132283 - DNA, 25 bp, Artificial
  Probe
atacgcaggagagggaagaataaag

SEQ ID NO: 132284 - DNA, 25 bp, Artificial
  Probe
tgggctagtttctgtgtaagtgtaa

SEQ ID NO: 132285 - DNA, 25 bp, Artificial
  Probe
ttgggctagtttctgtgtaagtgta

SEQ ID NO: 132286 - DNA, 25 bp, Artificial
  Probe
cttcaatgaaatgatgtccaaggag

SEQ ID NO: 132287 - DNA, 25 bp, Artificial
  Probe
catagacttatatgacatctggcta

SEQ ID NO: 132288 - DNA, 25 bp, Artificial
  Probe
aagtgtcaaacagaatggacctaaa

SEQ ID NO: 132289 - DNA, 25 bp, Artificial
  Probe
gctcagcttgcattaattcgagata

SEQ ID NO: 132290 - DNA, 25 bp, Artificial
  Probe
acttcaatgaaatgatgtccaagga

SEQ ID NO: 132291 - DNA, 25 bp, Artificial
  Probe
ccatttgggctagtttctgtgtaag

SEQ ID NO: 132292 - DNA, 25 bp, Artificial
  Probe
gacaaacattcaagccgattagagg

SEQ ID NO: 132293 - DNA, 25 bp, Artificial
  Probe
aaatgatgtccaaggagcaattcaa

SEQ ID NO: 132294 - DNA, 25 bp, Artificial
  Probe
atagacttatatgacatctggctaa

SEQ ID NO: 132295 - DNA, 25 bp, Artificial
  Probe
agtgtcaaacagaatggacctaaag

SEQ ID NO: 132296 - DNA, 25 bp, Artificial
  Probe
gaagtgtcaaacagaatggacctaa

SEQ ID NO: 132297 - DNA, 25 bp, Artificial
  Probe
tgaaatgatgtccaaggagcaattc

SEQ ID NO: 132298 - DNA, 25 bp, Artificial
  Probe
cagtcttcagtataagtctcagcct

SEQ ID NO: 132299 - DNA, 25 bp, Artificial
  Probe
accagtcttcagtataagtctcagc

SEQ ID NO: 132300 - DNA, 25 bp, Artificial
  Probe
atcatctcctcctcttcttcttcct

SEQ ID NO: 132301 - DNA, 25 bp, Artificial
  Probe
gtcgctaccaagtctactaggaatt

SEQ ID NO: 132302 - DNA, 25 bp, Artificial
  Probe
gaccagtcttcagtataagtctcag

SEQ ID NO: 132303 - DNA, 25 bp, Artificial
  Probe
ggaccagtcttcagtataagtctca

SEQ ID NO: 132304 - DNA, 25 bp, Artificial
  Probe
ccagtcttcagtataagtctcagcc

SEQ ID NO: 132305 - DNA, 25 bp, Artificial
  Probe
gatcatctcctcctcttcttcttcc

SEQ ID NO: 132306 - DNA, 25 bp, Artificial
  Probe
gtataagtctcagcctgaagaactc

SEQ ID NO: 132307 - DNA, 25 bp, Artificial
  Probe
agtcttcagtataagtctcagcctg

SEQ ID NO: 132308 - DNA, 25 bp, Artificial
  Probe
agtataagtctcagcctgaagaact

SEQ ID NO: 132309 - DNA, 25 bp, Artificial
  Probe
tcatctcctcctcttcttcttcctc

SEQ ID NO: 132310 - DNA, 25 bp, Artificial
  Probe
ttactctctcacagcattcacagac

SEQ ID NO: 132311 - DNA, 25 bp, Artificial
  Probe
gttactctctcacagcattcacaga

SEQ ID NO: 132312 - DNA, 25 bp, Artificial
  Probe
tataagtctcagcctgaagaactcc

SEQ ID NO: 132313 - DNA, 25 bp, Artificial
  Probe
cagtataagtctcagcctgaagaac

SEQ ID NO: 132314 - DNA, 25 bp, Artificial
  Probe
gaagaactcctcctcatctcagtct

SEQ ID NO: 132315 - DNA, 25 bp, Artificial
  Probe
tactctctcacagcattcacagact

SEQ ID NO: 132316 - DNA, 25 bp, Artificial
  Probe
tgttactctctcacagcattcacag

SEQ ID NO: 132317 - DNA, 25 bp, Artificial
  Probe
catctcctcctcttcttcttcctcc

SEQ ID NO: 132318 - DNA, 25 bp, Artificial
  Probe
tgaagaactcctcctcatctcagtc

SEQ ID NO: 132319 - DNA, 25 bp, Artificial
  Probe
aagaactcctcctcatctcagtctg

SEQ ID NO: 132320 - DNA, 25 bp, Artificial
  Probe
gctaccaagtctactaggaattctg

SEQ ID NO: 132321 - DNA, 25 bp, Artificial
  Probe
ctcttcttcttcctccctcttgttc

SEQ ID NO: 132322 - DNA, 25 bp, Artificial
  Probe
ctaccaagtctactaggaattctgt

SEQ ID NO: 132323 - DNA, 25 bp, Artificial
  Probe
ataagtctcagcctgaagaactcct

SEQ ID NO: 132324 - DNA, 25 bp, Artificial
  Probe
agtctactaggaattctgttgtctt

SEQ ID NO: 132325 - DNA, 25 bp, Artificial
  Probe
aagtctactaggaattctgttgtct

SEQ ID NO: 132326 - DNA, 25 bp, Artificial
  Probe
ccaagtctactaggaattctgttgt

SEQ ID NO: 132327 - DNA, 25 bp, Artificial
  Probe
accaagtctactaggaattctgttg

SEQ ID NO: 132328 - DNA, 25 bp, Artificial
  Probe
cgtcgctaccaagtctactaggaat

SEQ ID NO: 132329 - DNA, 25 bp, Artificial
  Probe
gtcatctctgcactgttactctctc

SEQ ID NO: 132330 - DNA, 25 bp, Artificial
  Probe
taccaagtctactaggaattctgtt

SEQ ID NO: 132331 - DNA, 25 bp, Artificial
  Probe
cgctaccaagtctactaggaattct

SEQ ID NO: 132332 - DNA, 25 bp, Artificial
  Probe
tcgctaccaagtctactaggaattc

SEQ ID NO: 132333 - DNA, 25 bp, Artificial
  Probe
caagtctactaggaattctgttgtc

SEQ ID NO: 132334 - DNA, 25 bp, Artificial
  Probe
actctctcacagcattcacagactt

SEQ ID NO: 132335 - DNA, 25 bp, Artificial
  Probe
catctctgcactgttactctctcac

SEQ ID NO: 132336 - DNA, 25 bp, Artificial
  Probe
gggaccagtcttcagtataagtctc

SEQ ID NO: 132337 - DNA, 25 bp, Artificial
  Probe
tcatctctgcactgttactctctca

SEQ ID NO: 132338 - DNA, 25 bp, Artificial
  Probe
ttgatcatctcctcctcttcttctt

SEQ ID NO: 132339 - DNA, 25 bp, Artificial
  Probe
taagtctcagcctgaagaactcctc

SEQ ID NO: 132340 - DNA, 25 bp, Artificial
  Probe
tgatcatctcctcctcttcttcttc

SEQ ID NO: 132341 - DNA, 25 bp, Artificial
  Probe
ctctctcacagcattcacagacttt

SEQ ID NO: 132342 - DNA, 25 bp, Artificial
  Probe
tgggaccagtcttcagtataagtct

SEQ ID NO: 132343 - DNA, 25 bp, Artificial
  Probe
actgtgacactttctttatgggttt

SEQ ID NO: 132344 - DNA, 25 bp, Artificial
  Probe
cactgtgacactttctttatgggtt

SEQ ID NO: 132345 - DNA, 25 bp, Artificial
  Probe
gagaaggaggatctggactggtatt

SEQ ID NO: 132346 - DNA, 25 bp, Artificial
  Probe
atgctcatctctgaaatcaactatt

SEQ ID NO: 132347 - DNA, 25 bp, Artificial
  Probe
tgctcatctctgaaatcaactatta

SEQ ID NO: 132348 - DNA, 25 bp, Artificial
  Probe
tctgaaatcaactattaaaggagga

SEQ ID NO: 132349 - DNA, 25 bp, Artificial
  Probe
agagaaggaggatctggactggtat

SEQ ID NO: 132350 - DNA, 25 bp, Artificial
  Probe
gaaggaggatctggactggtatttc

SEQ ID NO: 132351 - DNA, 25 bp, Artificial
  Probe
gaggatctggactggtatttcttgg

SEQ ID NO: 132352 - DNA, 25 bp, Artificial
  Probe
ggaggatctggactggtatttcttg

SEQ ID NO: 132353 - DNA, 25 bp, Artificial
  Probe
tatgctcatctctgaaatcaactat

SEQ ID NO: 132354 - DNA, 25 bp, Artificial
  Probe
atatgctcatctctgaaatcaacta

SEQ ID NO: 132355 - DNA, 25 bp, Artificial
  Probe
aggaggatctggactggtatttctt

SEQ ID NO: 132356 - DNA, 25 bp, Artificial
  Probe
aaggaggatctggactggtatttct

SEQ ID NO: 132357 - DNA, 25 bp, Artificial
  Probe
gttcttgtacacacttggaatactc

SEQ ID NO: 132358 - DNA, 25 bp, Artificial
  Probe
tactgtcctgtagctcttcctccta

SEQ ID NO: 132359 - DNA, 25 bp, Artificial
  Probe
aagagaaggaggatctggactggta

SEQ ID NO: 132360 - DNA, 25 bp, Artificial
  Probe
agaaggaggatctggactggtattt

SEQ ID NO: 132361 - DNA, 25 bp, Artificial
  Probe
agttcttgtacacacttggaatact

SEQ ID NO: 132362 - DNA, 25 bp, Artificial
  Probe
cagttcttgtacacacttggaatac

SEQ ID NO: 132363 - DNA, 25 bp, Artificial
  Probe
gacaagagaaggaggatctggactg

SEQ ID NO: 132364 - DNA, 25 bp, Artificial
  Probe
gtctggacaagagaaggaggatctg

SEQ ID NO: 132365 - DNA, 25 bp, Artificial
  Probe
ctctgaaatcaactattaaaggagg

SEQ ID NO: 132366 - DNA, 25 bp, Artificial
  Probe
gcagttcttgtacacacttggaata

SEQ ID NO: 132367 - DNA, 25 bp, Artificial
  Probe
ttatgggttttcaatgtttctgtgg

SEQ ID NO: 132368 - DNA, 25 bp, Artificial
  Probe
gtattactgtacacaggatagctgg

SEQ ID NO: 132369 - DNA, 25 bp, Artificial
  Probe
gctcatctctgaaatcaactattaa

SEQ ID NO: 132370 - DNA, 25 bp, Artificial
  Probe
agtattactgtacacaggatagctg

SEQ ID NO: 132371 - DNA, 25 bp, Artificial
  Probe
ccatatgctcatctctgaaatcaac

SEQ ID NO: 132372 - DNA, 25 bp, Artificial
  Probe
tccatatgctcatctctgaaatcaa

SEQ ID NO: 132373 - DNA, 25 bp, Artificial
  Probe
ttccatatgctcatctctgaaatca

SEQ ID NO: 132374 - DNA, 25 bp, Artificial
  Probe
tgtgacactttctttatgggttttc

SEQ ID NO: 132375 - DNA, 25 bp, Artificial
  Probe
ctgtgacactttctttatgggtttt

SEQ ID NO: 132376 - DNA, 25 bp, Artificial
  Probe
ctgaaatcaactattaaaggaggat

SEQ ID NO: 132377 - DNA, 25 bp, Artificial
  Probe
ttcttgtacacacttggaatactcc

SEQ ID NO: 132378 - DNA, 25 bp, Artificial
  Probe
tttatgggttttcaatgtttctgtg

SEQ ID NO: 132379 - DNA, 25 bp, Artificial
  Probe
catatgctcatctctgaaatcaact

SEQ ID NO: 132380 - DNA, 25 bp, Artificial
  Probe
tatgggttttcaatgtttctgtggg

SEQ ID NO: 132381 - DNA, 25 bp, Artificial
  Probe
ctttatgggttttcaatgtttctgt

SEQ ID NO: 132382 - DNA, 25 bp, Artificial
  Probe
cactttctttatgggttttcaatgt

SEQ ID NO: 132383 - DNA, 25 bp, Artificial
  Probe
acactttctttatgggttttcaatg

SEQ ID NO: 132384 - DNA, 25 bp, Artificial
  Probe
tgacactttctttatgggttttcaa

SEQ ID NO: 132385 - DNA, 25 bp, Artificial
  Probe
gtgacactttctttatgggttttca

SEQ ID NO: 132386 - DNA, 25 bp, Artificial
  Probe
tctttatgggttttcaatgtttctg

SEQ ID NO: 132387 - DNA, 25 bp, Artificial
  Probe
gacactttctttatgggttttcaat

SEQ ID NO: 132388 - DNA, 25 bp, Artificial
  Probe
aagtaagcattcaagtcagatcaag

SEQ ID NO: 132389 - DNA, 25 bp, Artificial
  Probe
tgataatactgtactgtacctgtcc

SEQ ID NO: 132390 - DNA, 25 bp, Artificial
  Probe
taagtaagcattcaagtcagatcaa

SEQ ID NO: 132391 - DNA, 25 bp, Artificial
  Probe
ttaagtaagcattcaagtcagatca

SEQ ID NO: 132392 - DNA, 25 bp, Artificial
  Probe
tttatgttgccagtgtttcagattt

SEQ ID NO: 132393 - DNA, 25 bp, Artificial
  Probe
atttatgttgccagtgtttcagatt

SEQ ID NO: 132394 - DNA, 25 bp, Artificial
  Probe
cagagtttagggcagtatagaagaa

SEQ ID NO: 132395 - DNA, 25 bp, Artificial
  Probe
ctgaatgctgctatcttgaaatgta

SEQ ID NO: 132396 - DNA, 25 bp, Artificial
  Probe
ttgataatactgtactgtacctgtc

SEQ ID NO: 132397 - DNA, 25 bp, Artificial
  Probe
aatttatgttgccagtgtttcagat

SEQ ID NO: 132398 - DNA, 25 bp, Artificial
  Probe
agtttagggcagtatagaagaatca

SEQ ID NO: 132399 - DNA, 25 bp, Artificial
  Probe
ggcagtatagaagaatcatattagc

SEQ ID NO: 132400 - DNA, 25 bp, Artificial
  Probe
agagtttagggcagtatagaagaat

SEQ ID NO: 132401 - DNA, 25 bp, Artificial
  Probe
gagtttagggcagtatagaagaatc

SEQ ID NO: 132402 - DNA, 25 bp, Artificial
  Probe
gcagagtttagggcagtatagaaga

SEQ ID NO: 132403 - DNA, 25 bp, Artificial
  Probe
ataatactgtactgtacctgtccca

SEQ ID NO: 132404 - DNA, 25 bp, Artificial
  Probe
tgaatgctgctatcttgaaatgtac

SEQ ID NO: 132405 - DNA, 25 bp, Artificial
  Probe
gataatactgtactgtacctgtccc

SEQ ID NO: 132406 - DNA, 25 bp, Artificial
  Probe
taatactgtactgtacctgtcccaa

SEQ ID NO: 132407 - DNA, 25 bp, Artificial
  Probe
gtttagggcagtatagaagaatcat

SEQ ID NO: 132408 - DNA, 25 bp, Artificial
  Probe
atactgtactgtacctgtcccaaat

SEQ ID NO: 132409 - DNA, 25 bp, Artificial
  Probe
aatactgtactgtacctgtcccaaa

SEQ ID NO: 132410 - DNA, 25 bp, Artificial
  Probe
gtaagtttcagtggagaacatagcg

SEQ ID NO: 132411 - DNA, 25 bp, Artificial
  Probe
tgtaagtttcagtggagaacatagc

SEQ ID NO: 132412 - DNA, 25 bp, Artificial
  Probe
atctgtaagtttcagtggagaacat

SEQ ID NO: 132413 - DNA, 25 bp, Artificial
  Probe
tctgtaagtttcagtggagaacata

SEQ ID NO: 132414 - DNA, 25 bp, Artificial
  Probe
gctgaatgctgctatcttgaaatgt

SEQ ID NO: 132415 - DNA, 25 bp, Artificial
  Probe
ctgtaagtttcagtggagaacatag

SEQ ID NO: 132416 - DNA, 25 bp, Artificial
  Probe
gcagtatagaagaatcatattagca

SEQ ID NO: 132417 - DNA, 25 bp, Artificial
  Probe
ttccttcactcttctcatatggctc

SEQ ID NO: 132418 - DNA, 25 bp, Artificial
  Probe
tactgtactgtacctgtcccaaatg

SEQ ID NO: 132419 - DNA, 25 bp, Artificial
  Probe
atgatctgtaagtttcagtggagaa

SEQ ID NO: 132420 - DNA, 25 bp, Artificial
  Probe
gatctgtaagtttcagtggagaaca

SEQ ID NO: 132421 - DNA, 25 bp, Artificial
  Probe
tgatctgtaagtttcagtggagaac

SEQ ID NO: 132422 - DNA, 25 bp, Artificial
  Probe
cttcactcttctcatatggctctcc

SEQ ID NO: 132423 - DNA, 25 bp, Artificial
  Probe
ccttcactcttctcatatggctctc

SEQ ID NO: 132424 - DNA, 25 bp, Artificial
  Probe
aaatttatgttgccagtgtttcaga

SEQ ID NO: 132425 - DNA, 25 bp, Artificial
  Probe
ggctgaatgctgctatcttgaaatg

SEQ ID NO: 132426 - DNA, 25 bp, Artificial
  Probe
ttcactcttctcatatggctctcct

SEQ ID NO: 132427 - DNA, 25 bp, Artificial
  Probe
tccttcactcttctcatatggctct

SEQ ID NO: 132428 - DNA, 25 bp, Artificial
  Probe
ttagcaaaccatatcatgtgtggat

SEQ ID NO: 132429 - DNA, 25 bp, Artificial
  Probe
attagcaaaccatatcatgtgtgga

SEQ ID NO: 132430 - DNA, 25 bp, Artificial
  Probe
gtaatgaaatttatgttgccagtgt

SEQ ID NO: 132431 - DNA, 25 bp, Artificial
  Probe
tgtaatgaaatttatgttgccagtg

SEQ ID NO: 132432 - DNA, 25 bp, Artificial
  Probe
aatgaaatttatgttgccagtgttt

SEQ ID NO: 132433 - DNA, 25 bp, Artificial
  Probe
cgccatcaacctattacttacactg

SEQ ID NO: 132434 - DNA, 25 bp, Artificial
  Probe
ccatcaacctattacttacactggc

SEQ ID NO: 132435 - DNA, 25 bp, Artificial
  Probe
gccatcaacctattacttacactgg

SEQ ID NO: 132436 - DNA, 25 bp, Artificial
  Probe
gaagttgaaatgggaaacacagatg

SEQ ID NO: 132437 - DNA, 25 bp, Artificial
  Probe
agaagttgaaatgggaaacacagat

SEQ ID NO: 132438 - DNA, 25 bp, Artificial
  Probe
cagtatccagattcagttgtccgtg

SEQ ID NO: 132439 - DNA, 25 bp, Artificial
  Probe
gacaagagaagttgaaatgggaaac

SEQ ID NO: 132440 - DNA, 25 bp, Artificial
  Probe
agacaagagaagttgaaatgggaaa

SEQ ID NO: 132441 - DNA, 25 bp, Artificial
  Probe
aagagaagttgaaatgggaaacaca

SEQ ID NO: 132442 - DNA, 25 bp, Artificial
  Probe
caagagaagttgaaatgggaaacac

SEQ ID NO: 132443 - DNA, 25 bp, Artificial
  Probe
acaagagaagttgaaatgggaaaca

SEQ ID NO: 132444 - DNA, 25 bp, Artificial
  Probe
cagacaagagaagttgaaatgggaa

SEQ ID NO: 132445 - DNA, 25 bp, Artificial
  Probe
gagaagttgaaatgggaaacacaga

SEQ ID NO: 132446 - DNA, 25 bp, Artificial
  Probe
agagaagttgaaatgggaaacacag

SEQ ID NO: 132447 - DNA, 25 bp, Artificial
  Probe
aattgaatccttccttctgtcagct

SEQ ID NO: 132448 - DNA, 25 bp, Artificial
  Probe
catcaacctattacttacactggcc

SEQ ID NO: 132449 - DNA, 25 bp, Artificial
  Probe
aagttgaaatgggaaacacagatgc

SEQ ID NO: 132450 - DNA, 25 bp, Artificial
  Probe
ttcctgtggcttcttcctcatacat

SEQ ID NO: 132451 - DNA, 25 bp, Artificial
  Probe
agtaccagacagatgttccagtgac

SEQ ID NO: 132452 - DNA, 25 bp, Artificial
  Probe
cagtaccagacagatgttccagtga

SEQ ID NO: 132453 - DNA, 25 bp, Artificial
  Probe
gaacaattgaatccttccttctgtc

SEQ ID NO: 132454 - DNA, 25 bp, Artificial
  Probe
aacaattgaatccttccttctgtca

SEQ ID NO: 132455 - DNA, 25 bp, Artificial
  Probe
acaattgaatccttccttctgtcag

SEQ ID NO: 132456 - DNA, 25 bp, Artificial
  Probe
taccagacagatgttccagtgacac

SEQ ID NO: 132457 - DNA, 25 bp, Artificial
  Probe
cttcctgtggcttcttcctcataca

SEQ ID NO: 132458 - DNA, 25 bp, Artificial
  Probe
caattgaatccttccttctgtcagc

SEQ ID NO: 132459 - DNA, 25 bp, Artificial
  Probe
gcagacaagagaagttgaaatggga

SEQ ID NO: 132460 - DNA, 25 bp, Artificial
  Probe
aaagattctccagggatcatctctg

SEQ ID NO: 132461 - DNA, 25 bp, Artificial
  Probe
ccttcctgtggcttcttcctcatac

SEQ ID NO: 132462 - DNA, 25 bp, Artificial
  Probe
gccacaggaatcggactatcttctc

SEQ ID NO: 132463 - DNA, 25 bp, Artificial
  Probe
gcagtatccagattcagttgtccgt

SEQ ID NO: 132464 - DNA, 25 bp, Artificial
  Probe
gtaccagacagatgttccagtgaca

SEQ ID NO: 132465 - DNA, 25 bp, Artificial
  Probe
ccacaggaatcggactatcttctcc

SEQ ID NO: 132466 - DNA, 25 bp, Artificial
  Probe
tccttcctgtggcttcttcctcata

SEQ ID NO: 132467 - DNA, 25 bp, Artificial
  Probe
tcctgtggcttcttcctcatacatg

SEQ ID NO: 132468 - DNA, 25 bp, Artificial
  Probe
caagcgccatcaacctattacttac

SEQ ID NO: 132469 - DNA, 25 bp, Artificial
  Probe
agtatccagattcagttgtccgtgg

SEQ ID NO: 132470 - DNA, 25 bp, Artificial
  Probe
taccaaaagattctccagggatcat

SEQ ID NO: 132471 - DNA, 25 bp, Artificial
  Probe
cagccacaggaatcggactatcttc

SEQ ID NO: 132472 - DNA, 25 bp, Artificial
  Probe
tggcttcttcctcatacatggaatt

SEQ ID NO: 132473 - DNA, 25 bp, Artificial
  Probe
agccacaggaatcggactatcttct

SEQ ID NO: 132474 - DNA, 25 bp, Artificial
  Probe
aagcgccatcaacctattacttaca

SEQ ID NO: 132475 - DNA, 25 bp, Artificial
  Probe
acaagcgccatcaacctattactta

SEQ ID NO: 132476 - DNA, 25 bp, Artificial
  Probe
ctgtggcttcttcctcatacatgga

SEQ ID NO: 132477 - DNA, 25 bp, Artificial
  Probe
agttgaaatgggaaacacagatgcc

SEQ ID NO: 132478 - DNA, 25 bp, Artificial
  Probe
aaggcaatgtcttctctaataagca

SEQ ID NO: 132479 - DNA, 25 bp, Artificial
  Probe
caaggcaatgtcttctctaataagc

SEQ ID NO: 132480 - DNA, 25 bp, Artificial
  Probe
gcaaggcaatgtcttctctaataag

SEQ ID NO: 132481 - DNA, 25 bp, Artificial
  Probe
gcaatgtcttctctaataagcagga

SEQ ID NO: 132482 - DNA, 25 bp, Artificial
  Probe
aggcaatgtcttctctaataagcag

SEQ ID NO: 132483 - DNA, 25 bp, Artificial
  Probe
atcatctgtgacatcaagttctctg

SEQ ID NO: 132484 - DNA, 25 bp, Artificial
  Probe
catcatctgtgacatcaagttctct

SEQ ID NO: 132485 - DNA, 25 bp, Artificial
  Probe
ggcaatgtcttctctaataagcagg

SEQ ID NO: 132486 - DNA, 25 bp, Artificial
  Probe
catctgtgacatcaagttctctgag

SEQ ID NO: 132487 - DNA, 25 bp, Artificial
  Probe
aatgtcttctctaataagcaggacc

SEQ ID NO: 132488 - DNA, 25 bp, Artificial
  Probe
tcatctgtgacatcaagttctctga

SEQ ID NO: 132489 - DNA, 25 bp, Artificial
  Probe
ccatcatctgtgacatcaagttctc

SEQ ID NO: 132490 - DNA, 25 bp, Artificial
  Probe
ctccatcatctgtgacatcaagttc

SEQ ID NO: 132491 - DNA, 25 bp, Artificial
  Probe
caatgtcttctctaataagcaggac

SEQ ID NO: 132492 - DNA, 25 bp, Artificial
  Probe
tccatcatctgtgacatcaagttct

SEQ ID NO: 132493 - DNA, 25 bp, Artificial
  Probe
ttcatcacagactctctcaagcaag

SEQ ID NO: 132494 - DNA, 25 bp, Artificial
  Probe
atctgtgacatcaagttctctgagc

SEQ ID NO: 132495 - DNA, 25 bp, Artificial
  Probe
cttctctaataagcaggacccactt

SEQ ID NO: 132496 - DNA, 25 bp, Artificial
  Probe
gctccatcatctgtgacatcaagtt

SEQ ID NO: 132497 - DNA, 25 bp, Artificial
  Probe
ttctctaataagcaggacccacttg

SEQ ID NO: 132498 - DNA, 25 bp, Artificial
  Probe
tttcatcacagactctctcaagcaa

SEQ ID NO: 132499 - DNA, 25 bp, Artificial
  Probe
tcttctctaataagcaggacccact

SEQ ID NO: 132500 - DNA, 25 bp, Artificial
  Probe
atgtcttctctaataagcaggaccc

SEQ ID NO: 132501 - DNA, 25 bp, Artificial
  Probe
tctctaataagcaggacccacttga

SEQ ID NO: 132502 - DNA, 25 bp, Artificial
  Probe
ctctaataagcaggacccacttgag

SEQ ID NO: 132503 - DNA, 25 bp, Artificial
  Probe
gtcttctctaataagcaggacccac

SEQ ID NO: 132504 - DNA, 25 bp, Artificial
  Probe
tgcaaggcaatgtcttctctaataa

SEQ ID NO: 132505 - DNA, 25 bp, Artificial
  Probe
ctgcaaggcaatgtcttctctaata

SEQ ID NO: 132506 - DNA, 25 bp, Artificial
  Probe
tctgtgacatcaagttctctgagct

SEQ ID NO: 132507 - DNA, 25 bp, Artificial
  Probe
tgtcttctctaataagcaggaccca

SEQ ID NO: 132508 - DNA, 25 bp, Artificial
  Probe
tcatcacagactctctcaagcaagc

SEQ ID NO: 132509 - DNA, 25 bp, Artificial
  Probe
gacagaaactcctgaggaacttgat

SEQ ID NO: 132510 - DNA, 25 bp, Artificial
  Probe
tctgcaaggcaatgtcttctctaat

SEQ ID NO: 132511 - DNA, 25 bp, Artificial
  Probe
cgttttcatcacagactctctcaag

SEQ ID NO: 132512 - DNA, 25 bp, Artificial
  Probe
acagaaactcctgaggaacttgatg

SEQ ID NO: 132513 - DNA, 25 bp, Artificial
  Probe
ggctccatcatctgtgacatcaagt

SEQ ID NO: 132514 - DNA, 25 bp, Artificial
  Probe
gttttcatcacagactctctcaagc

SEQ ID NO: 132515 - DNA, 25 bp, Artificial
  Probe
ttttcatcacagactctctcaagca

SEQ ID NO: 132516 - DNA, 25 bp, Artificial
  Probe
tctaataagcaggacccacttgagc

SEQ ID NO: 132517 - DNA, 25 bp, Artificial
  Probe
ctctgcaaggcaatgtcttctctaa

SEQ ID NO: 132518 - DNA, 25 bp, Artificial
  Probe
catcacagactctctcaagcaagct

SEQ ID NO: 132519 - DNA, 25 bp, Artificial
  Probe
acatactgttctggggtttgttctc

SEQ ID NO: 132520 - DNA, 25 bp, Artificial
  Probe
gacatactgttctggggtttgttct

SEQ ID NO: 132521 - DNA, 25 bp, Artificial
  Probe
gaaactcctgaggaacttgatgctg

SEQ ID NO: 132522 - DNA, 25 bp, Artificial
  Probe
cagaaactcctgaggaacttgatgc

SEQ ID NO: 132523 - DNA, 25 bp, Artificial
  Probe
gtgaagacattccaatactgcttaa

SEQ ID NO: 132524 - DNA, 25 bp, Artificial
  Probe
ttggaatctgaattgtgagtgtgtt

SEQ ID NO: 132525 - DNA, 25 bp, Artificial
  Probe
agtgaagacattccaatactgctta

SEQ ID NO: 132526 - DNA, 25 bp, Artificial
  Probe
aagtgaagacattccaatactgctt

SEQ ID NO: 132527 - DNA, 25 bp, Artificial
  Probe
tgaagacattccaatactgcttaat

SEQ ID NO: 132528 - DNA, 25 bp, Artificial
  Probe
aacaattcaagtcacataggcacag

SEQ ID NO: 132529 - DNA, 25 bp, Artificial
  Probe
caagtgaagacattccaatactgct

SEQ ID NO: 132530 - DNA, 25 bp, Artificial
  Probe
tcaagtgaagacattccaatactgc

SEQ ID NO: 132531 - DNA, 25 bp, Artificial
  Probe
atgagtcatggaggaagtaacattc

SEQ ID NO: 132532 - DNA, 25 bp, Artificial
  Probe
gtcaagtgaagacattccaatactg

SEQ ID NO: 132533 - DNA, 25 bp, Artificial
  Probe
gagtcatggaggaagtaacattcac

SEQ ID NO: 132534 - DNA, 25 bp, Artificial
  Probe
ttctcaacatggcttattcagactg

SEQ ID NO: 132535 - DNA, 25 bp, Artificial
  Probe
agtctactgcacatctatctatcat

SEQ ID NO: 132536 - DNA, 25 bp, Artificial
  Probe
actgcacatctatctatcatctgtc

SEQ ID NO: 132537 - DNA, 25 bp, Artificial
  Probe
ctactgcacatctatctatcatctg

SEQ ID NO: 132538 - DNA, 25 bp, Artificial
  Probe
tctactgcacatctatctatcatct

SEQ ID NO: 132539 - DNA, 25 bp, Artificial
  Probe
gtctactgcacatctatctatcatc

SEQ ID NO: 132540 - DNA, 25 bp, Artificial
  Probe
gtcatggaggaagtaacattcacac

SEQ ID NO: 132541 - DNA, 25 bp, Artificial
  Probe
agtcatggaggaagtaacattcaca

SEQ ID NO: 132542 - DNA, 25 bp, Artificial
  Probe
tgagtcatggaggaagtaacattca

SEQ ID NO: 132543 - DNA, 25 bp, Artificial
  Probe
tactgcacatctatctatcatctgt

SEQ ID NO: 132544 - DNA, 25 bp, Artificial
  Probe
catggcttattcagactgttgctac

SEQ ID NO: 132545 - DNA, 25 bp, Artificial
  Probe
ccacaacttaccagcataactttac

SEQ ID NO: 132546 - DNA, 25 bp, Artificial
  Probe
gagaaagggagtcagagatgtattt

SEQ ID NO: 132547 - DNA, 25 bp, Artificial
  Probe
cacaacttaccagcataactttaca

SEQ ID NO: 132548 - DNA, 25 bp, Artificial
  Probe
tatttgtatcttctggaggtgttca

SEQ ID NO: 132549 - DNA, 25 bp, Artificial
  Probe
ttgtttggaatctgaattgtgagtg

SEQ ID NO: 132550 - DNA, 25 bp, Artificial
  Probe
taaattgtggcattgtttggaatct

SEQ ID NO: 132551 - DNA, 25 bp, Artificial
  Probe
tgataaattgtggcattgtttggaa

SEQ ID NO: 132552 - DNA, 25 bp, Artificial
  Probe
atggcttattcagactgttgctacc

SEQ ID NO: 132553 - DNA, 25 bp, Artificial
  Probe
ggaatctgaattgtgagtgtgttta

SEQ ID NO: 132554 - DNA, 25 bp, Artificial
  Probe
attgtttggaatctgaattgtgagt

SEQ ID NO: 132555 - DNA, 25 bp, Artificial
  Probe
acttaccagcataactttacaaaca

SEQ ID NO: 132556 - DNA, 25 bp, Artificial
  Probe
acaacttaccagcataactttacaa

SEQ ID NO: 132557 - DNA, 25 bp, Artificial
  Probe
gtttggaatctgaattgtgagtgtg

SEQ ID NO: 132558 - DNA, 25 bp, Artificial
  Probe
cattgtttggaatctgaattgtgag

SEQ ID NO: 132559 - DNA, 25 bp, Artificial
  Probe
gcattgtttggaatctgaattgtga

SEQ ID NO: 132560 - DNA, 25 bp, Artificial
  Probe
gtgataaattgtggcattgtttgga

SEQ ID NO: 132561 - DNA, 25 bp, Artificial
  Probe
ggtatgtgataaattgtggcattgt

SEQ ID NO: 132562 - DNA, 25 bp, Artificial
  Probe
aagccacaacttaccagcataactt

SEQ ID NO: 132563 - DNA, 25 bp, Artificial
  Probe
ataaattgtggcattgtttggaatc

SEQ ID NO: 132564 - DNA, 25 bp, Artificial
  Probe
gataaattgtggcattgtttggaat

SEQ ID NO: 132565 - DNA, 25 bp, Artificial
  Probe
ggagaaagggagtcagagatgtatt

SEQ ID NO: 132566 - DNA, 25 bp, Artificial
  Probe
aagtctactgcacatctatctatca

SEQ ID NO: 132567 - DNA, 25 bp, Artificial
  Probe
tgtgataaattgtggcattgtttgg

SEQ ID NO: 132568 - DNA, 25 bp, Artificial
  Probe
ttctaatagttgtgatctgtgtagc

SEQ ID NO: 132569 - DNA, 25 bp, Artificial
  Probe
tctaatagttgtgatctgtgtagct

SEQ ID NO: 132570 - DNA, 25 bp, Artificial
  Probe
ggcttccttctatcaaaccatctaa

SEQ ID NO: 132571 - DNA, 25 bp, Artificial
  Probe
ttatgtgaggcaagaaagaagtagg

SEQ ID NO: 132572 - DNA, 25 bp, Artificial
  Probe
gcttccttctatcaaaccatctaac

SEQ ID NO: 132573 - DNA, 25 bp, Artificial
  Probe
ctaatagttgtgatctgtgtagctt

SEQ ID NO: 132574 - DNA, 25 bp, Artificial
  Probe
gtttacctcacagttagtttccatt

SEQ ID NO: 132575 - DNA, 25 bp, Artificial
  Probe
ggttcctcacacaaatctatttcag

SEQ ID NO: 132576 - DNA, 25 bp, Artificial
  Probe
aggttcctcacacaaatctatttca

SEQ ID NO: 132577 - DNA, 25 bp, Artificial
  Probe
tttatgtgaggcaagaaagaagtag

SEQ ID NO: 132578 - DNA, 25 bp, Artificial
  Probe
gttcctcacacaaatctatttcagt

SEQ ID NO: 132579 - DNA, 25 bp, Artificial
  Probe
tatagatttccagtgatgatgccct

SEQ ID NO: 132580 - DNA, 25 bp, Artificial
  Probe
ggctctagttctgtcaaatacctta

SEQ ID NO: 132581 - DNA, 25 bp, Artificial
  Probe
tgtcattggaaataggctttggttt

SEQ ID NO: 132582 - DNA, 25 bp, Artificial
  Probe
ggtttacctcacagttagtttccat

SEQ ID NO: 132583 - DNA, 25 bp, Artificial
  Probe
tatgtgaggcaagaaagaagtaggt

SEQ ID NO: 132584 - DNA, 25 bp, Artificial
  Probe
aatagttgtgatctgtgtagcttaa

SEQ ID NO: 132585 - DNA, 25 bp, Artificial
  Probe
cttccttctatcaaaccatctaaca

SEQ ID NO: 132586 - DNA, 25 bp, Artificial
  Probe
gaggcaagaaagaagtaggttgtag

SEQ ID NO: 132587 - DNA, 25 bp, Artificial
  Probe
taggttcctcacacaaatctatttc

SEQ ID NO: 132588 - DNA, 25 bp, Artificial
  Probe
gtgtcattggaaataggctttggtt

SEQ ID NO: 132589 - DNA, 25 bp, Artificial
  Probe
tgaggcaagaaagaagtaggttgta

SEQ ID NO: 132590 - DNA, 25 bp, Artificial
  Probe
atgtgaggcaagaaagaagtaggtt

SEQ ID NO: 132591 - DNA, 25 bp, Artificial
  Probe
tttacctcacagttagtttccatta

SEQ ID NO: 132592 - DNA, 25 bp, Artificial
  Probe
gctctagttctgtcaaataccttat

SEQ ID NO: 132593 - DNA, 25 bp, Artificial
  Probe
tccttctatcaaaccatctaacatt

SEQ ID NO: 132594 - DNA, 25 bp, Artificial
  Probe
ttccttctatcaaaccatctaacat

SEQ ID NO: 132595 - DNA, 25 bp, Artificial
  Probe
taatagttgtgatctgtgtagctta

SEQ ID NO: 132596 - DNA, 25 bp, Artificial
  Probe
ttcctcacacaaatctatttcagtg

SEQ ID NO: 132597 - DNA, 25 bp, Artificial
  Probe
ttacctcacagttagtttccattat

SEQ ID NO: 132598 - DNA, 25 bp, Artificial
  Probe
aggcttccttctatcaaaccatcta

SEQ ID NO: 132599 - DNA, 25 bp, Artificial
  Probe
tcacacaaatctatttcagtgccat

SEQ ID NO: 132600 - DNA, 25 bp, Artificial
  Probe
aggcaagaaagaagtaggttgtagg

SEQ ID NO: 132601 - DNA, 25 bp, Artificial
  Probe
tcctcacacaaatctatttcagtgc

SEQ ID NO: 132602 - DNA, 25 bp, Artificial
  Probe
aggctctagttctgtcaaatacctt

SEQ ID NO: 132603 - DNA, 25 bp, Artificial
  Probe
tgatctgtgtagcttaaagaaacct

SEQ ID NO: 132604 - DNA, 25 bp, Artificial
  Probe
gtgatctgtgtagcttaaagaaacc

SEQ ID NO: 132605 - DNA, 25 bp, Artificial
  Probe
agttgtgatctgtgtagcttaaaga

SEQ ID NO: 132606 - DNA, 25 bp, Artificial
  Probe
ctcacacaaatctatttcagtgcca

SEQ ID NO: 132607 - DNA, 25 bp, Artificial
  Probe
ggaggctctagttctgtcaaatacc

SEQ ID NO: 132608 - DNA, 25 bp, Artificial
  Probe
tgtgatctgtgtagcttaaagaaac

SEQ ID NO: 132609 - DNA, 25 bp, Artificial
  Probe
gttgtgatctgtgtagcttaaagaa

SEQ ID NO: 132610 - DNA, 25 bp, Artificial
  Probe
gaggctctagttctgtcaaatacct

SEQ ID NO: 132611 - DNA, 25 bp, Artificial
  Probe
ctatagatttccagtgatgatgccc

SEQ ID NO: 132612 - DNA, 25 bp, Artificial
  Probe
tgctatagatttccagtgatgatgc

SEQ ID NO: 132613 - DNA, 25 bp, Artificial
  Probe
caagaccaagataccacaagaacag

SEQ ID NO: 132614 - DNA, 25 bp, Artificial
  Probe
caagataccacaagaacagctaatg

SEQ ID NO: 132615 - DNA, 25 bp, Artificial
  Probe
ccaagataccacaagaacagctaat

SEQ ID NO: 132616 - DNA, 25 bp, Artificial
  Probe
ccaagaccaagataccacaagaaca

SEQ ID NO: 132617 - DNA, 25 bp, Artificial
  Probe
aagaccaagataccacaagaacagc

SEQ ID NO: 132618 - DNA, 25 bp, Artificial
  Probe
accaagataccacaagaacagctaa

SEQ ID NO: 132619 - DNA, 25 bp, Artificial
  Probe
ctcatcattggcaactcgtactctt

SEQ ID NO: 132620 - DNA, 25 bp, Artificial
  Probe
gaccaagataccacaagaacagcta

SEQ ID NO: 132621 - DNA, 25 bp, Artificial
  Probe
aagataccacaagaacagctaatgg

SEQ ID NO: 132622 - DNA, 25 bp, Artificial
  Probe
tagagagtttactgagcgagacttc

SEQ ID NO: 132623 - DNA, 25 bp, Artificial
  Probe
ctagagagtttactgagcgagactt

SEQ ID NO: 132624 - DNA, 25 bp, Artificial
  Probe
ctatcactgccaaacctagagagtt

SEQ ID NO: 132625 - DNA, 25 bp, Artificial
  Probe
tcatcattggcaactcgtactcttt

SEQ ID NO: 132626 - DNA, 25 bp, Artificial
  Probe
aacctagagagtttactgagcgaga

SEQ ID NO: 132627 - DNA, 25 bp, Artificial
  Probe
cattgacatcctggtgatcgagaag

SEQ ID NO: 132628 - DNA, 25 bp, Artificial
  Probe
agagagtttactgagcgagacttct

SEQ ID NO: 132629 - DNA, 25 bp, Artificial
  Probe
tctcagacctcatcattggcaactc

SEQ ID NO: 132630 - DNA, 25 bp, Artificial
  Probe
agaccaagataccacaagaacagct

SEQ ID NO: 132631 - DNA, 25 bp, Artificial
  Probe
cctagagagtttactgagcgagact

SEQ ID NO: 132632 - DNA, 25 bp, Artificial
  Probe
acctagagagtttactgagcgagac

SEQ ID NO: 132633 - DNA, 25 bp, Artificial
  Probe
atcactgccaaacctagagagttta

SEQ ID NO: 132634 - DNA, 25 bp, Artificial
  Probe
tatcactgccaaacctagagagttt

SEQ ID NO: 132635 - DNA, 25 bp, Artificial
  Probe
gacaccttcgtcagacctatatccg

SEQ ID NO: 132636 - DNA, 25 bp, Artificial
  Probe
aatggttcacagtgttggagcgata

SEQ ID NO: 132637 - DNA, 25 bp, Artificial
  Probe
cagacctcatcattggcaactcgta

SEQ ID NO: 132638 - DNA, 25 bp, Artificial
  Probe
cttttgattctggggtctacacttg

SEQ ID NO: 132639 - DNA, 25 bp, Artificial
  Probe
cctcatcattggcaactcgtactct

SEQ ID NO: 132640 - DNA, 25 bp, Artificial
  Probe
aaacctagagagtttactgagcgag

SEQ ID NO: 132641 - DNA, 25 bp, Artificial
  Probe
tgccaaacctagagagtttactgag

SEQ ID NO: 132642 - DNA, 25 bp, Artificial
  Probe
ctgccaaacctagagagtttactga

SEQ ID NO: 132643 - DNA, 25 bp, Artificial
  Probe
caaacctagagagtttactgagcga

SEQ ID NO: 132644 - DNA, 25 bp, Artificial
  Probe
tagtagcatcaagctattggatgtc

SEQ ID NO: 132645 - DNA, 25 bp, Artificial
  Probe
ctagtagcatcaagctattggatgt

SEQ ID NO: 132646 - DNA, 25 bp, Artificial
  Probe
gactccatcctcttcattcgctcag

SEQ ID NO: 132647 - DNA, 25 bp, Artificial
  Probe
cctagtagcatcaagctattggatg

SEQ ID NO: 132648 - DNA, 25 bp, Artificial
  Probe
gtggattgtcggttggaggttaaag

SEQ ID NO: 132649 - DNA, 25 bp, Artificial
  Probe
actgccaaacctagagagtttactg

SEQ ID NO: 132650 - DNA, 25 bp, Artificial
  Probe
cactgccaaacctagagagtttact

SEQ ID NO: 132651 - DNA, 25 bp, Artificial
  Probe
tcactgccaaacctagagagtttac

SEQ ID NO: 132652 - DNA, 25 bp, Artificial
  Probe
acctcatcattggcaactcgtactc

SEQ ID NO: 132653 - DNA, 25 bp, Artificial
  Probe
gacctcatcattggcaactcgtact

SEQ ID NO: 132654 - DNA, 25 bp, Artificial
  Probe
agacctcatcattggcaactcgtac

SEQ ID NO: 132655 - DNA, 25 bp, Artificial
  Probe
atcattggcaactcgtactcttttc

SEQ ID NO: 132656 - DNA, 25 bp, Artificial
  Probe
gtagcatcaagctattggatgtctg

SEQ ID NO: 132657 - DNA, 25 bp, Artificial
  Probe
agataccacaagaacagctaatggg

SEQ ID NO: 132658 - DNA, 25 bp, Artificial
  Probe
ccctacttgtatccctatcctataa

SEQ ID NO: 132659 - DNA, 25 bp, Artificial
  Probe
tagctgtcagaaggtgtgtcatgta

SEQ ID NO: 132660 - DNA, 25 bp, Artificial
  Probe
tacccctacttgtatccctatccta

SEQ ID NO: 132661 - DNA, 25 bp, Artificial
  Probe
cccctacttgtatccctatcctata

SEQ ID NO: 132662 - DNA, 25 bp, Artificial
  Probe
acccctacttgtatccctatcctat

SEQ ID NO: 132663 - DNA, 25 bp, Artificial
  Probe
ctacccctacttgtatccctatcct

SEQ ID NO: 132664 - DNA, 25 bp, Artificial
  Probe
ttgctacccctacttgtatccctat

SEQ ID NO: 132665 - DNA, 25 bp, Artificial
  Probe
tgctacccctacttgtatccctatc

SEQ ID NO: 132666 - DNA, 25 bp, Artificial
  Probe
agctgtcagaaggtgtgtcatgtac

SEQ ID NO: 132667 - DNA, 25 bp, Artificial
  Probe
gtagctgtcagaaggtgtgtcatgt

SEQ ID NO: 132668 - DNA, 25 bp, Artificial
  Probe
gttgctacccctacttgtatcccta

SEQ ID NO: 132669 - DNA, 25 bp, Artificial
  Probe
gctacccctacttgtatccctatcc

SEQ ID NO: 132670 - DNA, 25 bp, Artificial
  Probe
ggtagctgtcagaaggtgtgtcatg

SEQ ID NO: 132671 - DNA, 25 bp, Artificial
  Probe
tccagttgctacccctacttgtatc

SEQ ID NO: 132672 - DNA, 25 bp, Artificial
  Probe
gtccagttgctacccctacttgtat

SEQ ID NO: 132673 - DNA, 25 bp, Artificial
  Probe
cagttgctacccctacttgtatccc

SEQ ID NO: 132674 - DNA, 25 bp, Artificial
  Probe
ccagttgctacccctacttgtatcc

SEQ ID NO: 132675 - DNA, 25 bp, Artificial
  Probe
agttgctacccctacttgtatccct

SEQ ID NO: 132676 - DNA, 25 bp, Artificial
  Probe
gctgtcagaaggtgtgtcatgtaca

SEQ ID NO: 132677 - DNA, 25 bp, Artificial
  Probe
tgtatgtgtatgatgagtcttaggc

SEQ ID NO: 132678 - DNA, 25 bp, Artificial
  Probe
ttatatgatacagccgatgacattg

SEQ ID NO: 132679 - DNA, 25 bp, Artificial
  Probe
ccgatgacattgtggcttatatatt

SEQ ID NO: 132680 - DNA, 25 bp, Artificial
  Probe
tatatgatacagccgatgacattgt

SEQ ID NO: 132681 - DNA, 25 bp, Artificial
  Probe
ttaacagaactcaggtccacagtaa

SEQ ID NO: 132682 - DNA, 25 bp, Artificial
  Probe
ttgtatgtgtatgatgagtcttagg

SEQ ID NO: 132683 - DNA, 25 bp, Artificial
  Probe
atatgatacagccgatgacattgtg

SEQ ID NO: 132684 - DNA, 25 bp, Artificial
  Probe
attatatgatacagccgatgacatt

SEQ ID NO: 132685 - DNA, 25 bp, Artificial
  Probe
tgacattgtggcttatatattctcc

SEQ ID NO: 132686 - DNA, 25 bp, Artificial
  Probe
taacagaactcaggtccacagtaag

SEQ ID NO: 132687 - DNA, 25 bp, Artificial
  Probe
gacattgtggcttatatattctcct

SEQ ID NO: 132688 - DNA, 25 bp, Artificial
  Probe
cgatgacattgtggcttatatattc

SEQ ID NO: 132689 - DNA, 25 bp, Artificial
  Probe
ctatcttggaactctcaatcctcct

SEQ ID NO: 132690 - DNA, 25 bp, Artificial
  Probe
tatcttggaactctcaatcctcctg

SEQ ID NO: 132691 - DNA, 25 bp, Artificial
  Probe
acattgtggcttatatattctcctt

SEQ ID NO: 132692 - DNA, 25 bp, Artificial
  Probe
gtccacagtaagagaaacaaacaat

SEQ ID NO: 132693 - DNA, 25 bp, Artificial
  Probe
tattatatgatacagccgatgacat

SEQ ID NO: 132694 - DNA, 25 bp, Artificial
  Probe
gtattatatgatacagccgatgaca

SEQ ID NO: 132695 - DNA, 25 bp, Artificial
  Probe
ggaattaaaggcataaaccaccaaa

SEQ ID NO: 132696 - DNA, 25 bp, Artificial
  Probe
agagaaacaaacaattaaaggctga

SEQ ID NO: 132697 - DNA, 25 bp, Artificial
  Probe
agaactcaggtccacagtaagagaa

SEQ ID NO: 132698 - DNA, 25 bp, Artificial
  Probe
gtagtgagtctttccagagtgtatt

SEQ ID NO: 132699 - DNA, 25 bp, Artificial
  Probe
ctaagtagtgagtctttccagagtg

SEQ ID NO: 132700 - DNA, 25 bp, Artificial
  Probe
agtagtgagtctttccagagtgtat

SEQ ID NO: 132701 - DNA, 25 bp, Artificial
  Probe
gagaaacaaacaattaaaggctgag

SEQ ID NO: 132702 - DNA, 25 bp, Artificial
  Probe
aagtagtgagtctttccagagtgta

SEQ ID NO: 132703 - DNA, 25 bp, Artificial
  Probe
taagtagtgagtctttccagagtgt

SEQ ID NO: 132704 - DNA, 25 bp, Artificial
  Probe
ggtccacagtaagagaaacaaacaa

SEQ ID NO: 132705 - DNA, 25 bp, Artificial
  Probe
tccacagtaagagaaacaaacaatt

SEQ ID NO: 132706 - DNA, 25 bp, Artificial
  Probe
aagagaaacaaacaattaaaggctg

SEQ ID NO: 132707 - DNA, 25 bp, Artificial
  Probe
agtgagtctttccagagtgtattat

SEQ ID NO: 132708 - DNA, 25 bp, Artificial
  Probe
agaaacaaacaattaaaggctgagc

SEQ ID NO: 132709 - DNA, 25 bp, Artificial
  Probe
gagttcaagaccagccttcatagtg

SEQ ID NO: 132710 - DNA, 25 bp, Artificial
  Probe
caggtccacagtaagagaaacaaac

SEQ ID NO: 132711 - DNA, 25 bp, Artificial
  Probe
tcaggtccacagtaagagaaacaaa

SEQ ID NO: 132712 - DNA, 25 bp, Artificial
  Probe
tatgatacagccgatgacattgtgg

SEQ ID NO: 132713 - DNA, 25 bp, Artificial
  Probe
actaagtagtgagtctttccagagt

SEQ ID NO: 132714 - DNA, 25 bp, Artificial
  Probe
aacagaactcaggtccacagtaaga

SEQ ID NO: 132715 - DNA, 25 bp, Artificial
  Probe
atccttggaactaaagttagagcag

SEQ ID NO: 132716 - DNA, 25 bp, Artificial
  Probe
gatccttggaactaaagttagagca

SEQ ID NO: 132717 - DNA, 25 bp, Artificial
  Probe
gctatcttggaactctcaatcctcc

SEQ ID NO: 132718 - DNA, 25 bp, Artificial
  Probe
tagtgagtctttccagagtgtatta

SEQ ID NO: 132719 - DNA, 25 bp, Artificial
  Probe
aggtccacagtaagagaaacaaaca

SEQ ID NO: 132720 - DNA, 25 bp, Artificial
  Probe
gtgagttcaagaccagccttcatag

SEQ ID NO: 132721 - DNA, 25 bp, Artificial
  Probe
ttacacttataactacagccctcag

SEQ ID NO: 132722 - DNA, 25 bp, Artificial
  Probe
ccagatccaatactacttctaagcc

SEQ ID NO: 132723 - DNA, 25 bp, Artificial
  Probe
accagatccaatactacttctaagc

SEQ ID NO: 132724 - DNA, 25 bp, Artificial
  Probe
gacaccagatccaatactacttcta

SEQ ID NO: 132725 - DNA, 25 bp, Artificial
  Probe
acaccagatccaatactacttctaa

SEQ ID NO: 132726 - DNA, 25 bp, Artificial
  Probe
caccagatccaatactacttctaag

SEQ ID NO: 132727 - DNA, 25 bp, Artificial
  Probe
gtggagagtgtaatcctgatcttag

SEQ ID NO: 132728 - DNA, 25 bp, Artificial
  Probe
tggagagtgtaatcctgatcttaga

SEQ ID NO: 132729 - DNA, 25 bp, Artificial
  Probe
agtggagagtgtaatcctgatctta

SEQ ID NO: 132730 - DNA, 25 bp, Artificial
  Probe
attcaatccctacagcgagtttatt

SEQ ID NO: 132731 - DNA, 25 bp, Artificial
  Probe
aagtggagagtgtaatcctgatctt

SEQ ID NO: 132732 - DNA, 25 bp, Artificial
  Probe
tactgtctgcctctgggatataaat

SEQ ID NO: 132733 - DNA, 25 bp, Artificial
  Probe
atactgtctgcctctgggatataaa

SEQ ID NO: 132734 - DNA, 25 bp, Artificial
  Probe
ggagagtgtaatcctgatcttagat

SEQ ID NO: 132735 - DNA, 25 bp, Artificial
  Probe
ttcaatccctacagcgagtttattc

SEQ ID NO: 132736 - DNA, 25 bp, Artificial
  Probe
cattcaatccctacagcgagtttat

SEQ ID NO: 132737 - DNA, 25 bp, Artificial
  Probe
ggacaccagatccaatactacttct

SEQ ID NO: 132738 - DNA, 25 bp, Artificial
  Probe
catactgtctgcctctgggatataa

SEQ ID NO: 132739 - DNA, 25 bp, Artificial
  Probe
caagtggagagtgtaatcctgatct

SEQ ID NO: 132740 - DNA, 25 bp, Artificial
  Probe
tcaatccctacagcgagtttattct

SEQ ID NO: 132741 - DNA, 25 bp, Artificial
  Probe
tcagaaacttatgatatgggacacc

SEQ ID NO: 132742 - DNA, 25 bp, Artificial
  Probe
atactacttctaagcccagccattt

SEQ ID NO: 132743 - DNA, 25 bp, Artificial
  Probe
aatactacttctaagcccagccatt

SEQ ID NO: 132744 - DNA, 25 bp, Artificial
  Probe
gatccaatactacttctaagcccag

SEQ ID NO: 132745 - DNA, 25 bp, Artificial
  Probe
tcattcaatccctacagcgagttta

SEQ ID NO: 132746 - DNA, 25 bp, Artificial
  Probe
cagatccaatactacttctaagccc

SEQ ID NO: 132747 - DNA, 25 bp, Artificial
  Probe
ttctggcattctttaccctctgatt

SEQ ID NO: 132748 - DNA, 25 bp, Artificial
  Probe
aggatcttaaacccaaagtatgagt

SEQ ID NO: 132749 - DNA, 25 bp, Artificial
  Probe
actgtctgcctctgggatataaatg

SEQ ID NO: 132750 - DNA, 25 bp, Artificial
  Probe
atccaatactacttctaagcccagc

SEQ ID NO: 132751 - DNA, 25 bp, Artificial
  Probe
agatccaatactacttctaagccca

SEQ ID NO: 132752 - DNA, 25 bp, Artificial
  Probe
attgcctttgattcaactgtcattt

SEQ ID NO: 132753 - DNA, 25 bp, Artificial
  Probe
gtattgcctttgattcaactgtcat

SEQ ID NO: 132754 - DNA, 25 bp, Artificial
  Probe
atcttaaacccaaagtatgagttgt

SEQ ID NO: 132755 - DNA, 25 bp, Artificial
  Probe
caatactacttctaagcccagccat

SEQ ID NO: 132756 - DNA, 25 bp, Artificial
  Probe
tattgcctttgattcaactgtcatt

SEQ ID NO: 132757 - DNA, 25 bp, Artificial
  Probe
ctatggtctctcctggaattctaat

SEQ ID NO: 132758 - DNA, 25 bp, Artificial
  Probe
caaggatcttaaacccaaagtatga

SEQ ID NO: 132759 - DNA, 25 bp, Artificial
  Probe
ggatcttaaacccaaagtatgagtt

SEQ ID NO: 132760 - DNA, 25 bp, Artificial
  Probe
ccaagtggagagtgtaatcctgatc

SEQ ID NO: 132761 - DNA, 25 bp, Artificial
  Probe
cttctggcattctttaccctctgat

SEQ ID NO: 132762 - DNA, 25 bp, Artificial
  Probe
aaggatcttaaacccaaagtatgag

SEQ ID NO: 132763 - DNA, 25 bp, Artificial
  Probe
tactacttctaagcccagccatttg

SEQ ID NO: 132764 - DNA, 25 bp, Artificial
  Probe
tatggtctctcctggaattctaatt

SEQ ID NO: 132765 - DNA, 25 bp, Artificial
  Probe
gctatggtctctcctggaattctaa

SEQ ID NO: 132766 - DNA, 25 bp, Artificial
  Probe
gaatttggtggctttggttctgtaa

SEQ ID NO: 132767 - DNA, 25 bp, Artificial
  Probe
ggttgccgttatcacttatgtatct

SEQ ID NO: 132768 - DNA, 25 bp, Artificial
  Probe
tctgctataaccatctctctgactc

SEQ ID NO: 132769 - DNA, 25 bp, Artificial
  Probe
ctctgctataaccatctctctgact

SEQ ID NO: 132770 - DNA, 25 bp, Artificial
  Probe
cactatgcttgacctctgctataac

SEQ ID NO: 132771 - DNA, 25 bp, Artificial
  Probe
cttgacctctgctataaccatctct

SEQ ID NO: 132772 - DNA, 25 bp, Artificial
  Probe
gttgccgttatcacttatgtatcta

SEQ ID NO: 132773 - DNA, 25 bp, Artificial
  Probe
ttgacctctgctataaccatctctc

SEQ ID NO: 132774 - DNA, 25 bp, Artificial
  Probe
ctatcaagatgaggaagaggaagag

SEQ ID NO: 132775 - DNA, 25 bp, Artificial
  Probe
atgctctaagaatatcacacaacaa

SEQ ID NO: 132776 - DNA, 25 bp, Artificial
  Probe
tatgcttgacctctgctataaccat

SEQ ID NO: 132777 - DNA, 25 bp, Artificial
  Probe
tatcaagatgaggaagaggaagagg

SEQ ID NO: 132778 - DNA, 25 bp, Artificial
  Probe
ctgctataaccatctctctgactcc

SEQ ID NO: 132779 - DNA, 25 bp, Artificial
  Probe
cctctgctataaccatctctctgac

SEQ ID NO: 132780 - DNA, 25 bp, Artificial
  Probe
gacctctgctataaccatctctctg

SEQ ID NO: 132781 - DNA, 25 bp, Artificial
  Probe
tcactatgcttgacctctgctataa

SEQ ID NO: 132782 - DNA, 25 bp, Artificial
  Probe
ctataaccatctctctgactccacg

SEQ ID NO: 132783 - DNA, 25 bp, Artificial
  Probe
tgccgttatcacttatgtatctatc

SEQ ID NO: 132784 - DNA, 25 bp, Artificial
  Probe
ctatgcttgacctctgctataacca

SEQ ID NO: 132785 - DNA, 25 bp, Artificial
  Probe
actatgcttgacctctgctataacc

SEQ ID NO: 132786 - DNA, 25 bp, Artificial
  Probe
ttacttcataggcgtagtgcttact

SEQ ID NO: 132787 - DNA, 25 bp, Artificial
  Probe
gctatcaagatgaggaagaggaaga

SEQ ID NO: 132788 - DNA, 25 bp, Artificial
  Probe
catgctctaagaatatcacacaaca

SEQ ID NO: 132789 - DNA, 25 bp, Artificial
  Probe
gctataaccatctctctgactccac

SEQ ID NO: 132790 - DNA, 25 bp, Artificial
  Probe
acctctgctataaccatctctctga

SEQ ID NO: 132791 - DNA, 25 bp, Artificial
  Probe
tgacctctgctataaccatctctct

SEQ ID NO: 132792 - DNA, 25 bp, Artificial
  Probe
tgaagcaagcattctacattccaag

SEQ ID NO: 132793 - DNA, 25 bp, Artificial
  Probe
ctgaagcaagcattctacattccaa

SEQ ID NO: 132794 - DNA, 25 bp, Artificial
  Probe
aactgaagcaagcattctacattcc

SEQ ID NO: 132795 - DNA, 25 bp, Artificial
  Probe
aagatgaggaagaggaagaggaaga

SEQ ID NO: 132796 - DNA, 25 bp, Artificial
  Probe
caagatgaggaagaggaagaggaag

SEQ ID NO: 132797 - DNA, 25 bp, Artificial
  Probe
gccgttatcacttatgtatctatct

SEQ ID NO: 132798 - DNA, 25 bp, Artificial
  Probe
tcatgctctaagaatatcacacaac

SEQ ID NO: 132799 - DNA, 25 bp, Artificial
  Probe
actcaaccttcagttcaatgatatt

SEQ ID NO: 132800 - DNA, 25 bp, Artificial
  Probe
tgctataaccatctctctgactcca

SEQ ID NO: 132801 - DNA, 25 bp, Artificial
  Probe
ttgccgttatcacttatgtatctat

SEQ ID NO: 132802 - DNA, 25 bp, Artificial
  Probe
cttcatgctctaagaatatcacaca
